United States Patent Application Publication US 2012/0157512 A1 - sequence listing, part 3

SEQ ID NO: 64513 - DNA, 27 bp, Artificial sequence
  SiRNA target sequence
taatatttcggatagaagttacagaag

SEQ ID NO: 64514 - DNA, 27 bp, Artificial sequence
  SiRNA target sequence
aatatttcggatagaagttacagaagt

SEQ ID NO: 64515 - DNA, 27 bp, Artificial sequence
  SiRNA target sequence
atatttcggatagaagttacagaagtt

SEQ ID NO: 64516 - DNA, 27 bp, Artificial sequence
  SiRNA target sequence
tatttcggatagaagttacagaagttt

SEQ ID NO: 64517 - DNA, 27 bp, Artificial sequence
  SiRNA target sequence
atttcggatagaagttacagaagttta

SEQ ID NO: 64518 - DNA, 27 bp, Artificial sequence
  SiRNA target sequence
tttcggatagaagttacagaagtttaa

SEQ ID NO: 64519 - DNA, 27 bp, Artificial sequence
  SiRNA target sequence
ttcggatagaagttacagaagtttaat

SEQ ID NO: 64520 - DNA, 27 bp, Artificial sequence
  SiRNA target sequence
tcggatagaagttacagaagtttaata

SEQ ID NO: 64521 - DNA, 27 bp, Artificial sequence
  SiRNA target sequence
cggatagaagttacagaagtttaatat

SEQ ID NO: 64522 - DNA, 27 bp, Artificial sequence
  SiRNA target sequence
ggatagaagttacagaagtttaatatc

SEQ ID NO: 64523 - DNA, 27 bp, Artificial sequence
  SiRNA target sequence
gatagaagttacagaagtttaatatca

SEQ ID NO: 64524 - DNA, 27 bp, Artificial sequence
  SiRNA target sequence
atagaagttacagaagtttaatatcat

SEQ ID NO: 64525 - DNA, 27 bp, Artificial sequence
  SiRNA target sequence
tagaagttacagaagtttaatatcata

SEQ ID NO: 64526 - DNA, 27 bp, Artificial sequence
  SiRNA target sequence
agaagttacagaagtttaatatcatat

SEQ ID NO: 64527 - DNA, 27 bp, Artificial sequence
  SiRNA target sequence
gaagttacagaagtttaatatcatatg

SEQ ID NO: 64528 - DNA, 27 bp, Artificial sequence
  SiRNA target sequence
aagttacagaagtttaatatcatatgc

SEQ ID NO: 64529 - DNA, 27 bp, Artificial sequence
  SiRNA target sequence
agttacagaagtttaatatcatatgca

SEQ ID NO: 64530 - DNA, 27 bp, Artificial sequence
  SiRNA target sequence
gttacagaagtttaatatcatatgcaa

SEQ ID NO: 64531 - DNA, 27 bp, Artificial sequence
  SiRNA target sequence
ttacagaagtttaatatcatatgcaac

SEQ ID NO: 64532 - DNA, 27 bp, Artificial sequence
  SiRNA target sequence
tacagaagtttaatatcatatgcaaca

SEQ ID NO: 64533 - DNA, 27 bp, Artificial sequence
  SiRNA target sequence
acagaagtttaatatcatatgcaacac

SEQ ID NO: 64534 - DNA, 27 bp, Artificial sequence
  SiRNA target sequence
cagaagtttaatatcatatgcaacaca

SEQ ID NO: 64535 - DNA, 27 bp, Artificial sequence
  SiRNA target sequence
agaagtttaatatcatatgcaacacaa

SEQ ID NO: 64536 - DNA, 27 bp, Artificial sequence
  SiRNA target sequence
gaagtttaatatcatatgcaacacaaa

SEQ ID NO: 64537 - DNA, 27 bp, Artificial sequence
  SiRNA target sequence
aagtttaatatcatatgcaacacaaaa

SEQ ID NO: 64538 - DNA, 27 bp, Artificial sequence
  SiRNA target sequence
agtttaatatcatatgcaacacaaaac

SEQ ID NO: 64539 - DNA, 27 bp, Artificial sequence
  SiRNA target sequence
gtttaatatcatatgcaacacaaaaca

SEQ ID NO: 64540 - DNA, 27 bp, Artificial sequence
  SiRNA target sequence
tttaatatcatatgcaacacaaaacac

SEQ ID NO: 64541 - DNA, 27 bp, Artificial sequence
  SiRNA target sequence
ttaatatcatatgcaacacaaaacacg

SEQ ID NO: 64542 - DNA, 27 bp, Artificial sequence
  SiRNA target sequence
taatatcatatgcaacacaaaacacgt

SEQ ID NO: 64543 - DNA, 27 bp, Artificial sequence
  SiRNA target sequence
aatatcatatgcaacacaaaacacgtt

SEQ ID NO: 64544 - DNA, 27 bp, Artificial sequence
  SiRNA target sequence
atatcatatgcaacacaaaacacgttc

SEQ ID NO: 64545 - DNA, 27 bp, Artificial sequence
  SiRNA target sequence
tatcatatgcaacacaaaacacgttct

SEQ ID NO: 64546 - DNA, 27 bp, Artificial sequence
  SiRNA target sequence
atcatatgcaacacaaaacacgttctt

SEQ ID NO: 64547 - DNA, 27 bp, Artificial sequence
  SiRNA target sequence
tcatatgcaacacaaaacacgttctta

SEQ ID NO: 64548 - DNA, 27 bp, Artificial sequence
  SiRNA target sequence
catatgcaacacaaaacacgttcttat

SEQ ID NO: 64549 - DNA, 27 bp, Artificial sequence
  SiRNA target sequence
atatgcaacacaaaacacgttcttatt

SEQ ID NO: 64550 - DNA, 27 bp, Artificial sequence
  SiRNA target sequence
tatgcaacacaaaacacgttcttattc

SEQ ID NO: 64551 - DNA, 27 bp, Artificial sequence
  SiRNA target sequence
atgcaacacaaaacacgttcttattcg

SEQ ID NO: 64552 - DNA, 27 bp, Artificial sequence
  SiRNA target sequence
tgcaacacaaaacacgttcttattcga

SEQ ID NO: 64553 - DNA, 27 bp, Artificial sequence
  SiRNA target sequence
gcaacacaaaacacgttcttattcgat

SEQ ID NO: 64554 - DNA, 27 bp, Artificial sequence
  SiRNA target sequence
caacacaaaacacgttcttattcgata

SEQ ID NO: 64555 - DNA, 27 bp, Artificial sequence
  SiRNA target sequence
aacacaaaacacgttcttattcgataa

SEQ ID NO: 64556 - DNA, 27 bp, Artificial sequence
  SiRNA target sequence
acacaaaacacgttcttattcgataat

SEQ ID NO: 64557 - DNA, 27 bp, Artificial sequence
  SiRNA target sequence
cacaaaacacgttcttattcgataata

SEQ ID NO: 64558 - DNA, 27 bp, Artificial sequence
  SiRNA target sequence
acaaaacacgttcttattcgataatac

SEQ ID NO: 64559 - DNA, 27 bp, Artificial sequence
  SiRNA target sequence
caaaacacgttcttattcgataatact

SEQ ID NO: 64560 - DNA, 27 bp, Artificial sequence
  SiRNA target sequence
aaaacacgttcttattcgataatactg

SEQ ID NO: 64561 - DNA, 27 bp, Artificial sequence
  SiRNA target sequence
aaacacgttcttattcgataatactgt

SEQ ID NO: 64562 - DNA, 27 bp, Artificial sequence
  SiRNA target sequence
aacacgttcttattcgataatactgtg

SEQ ID NO: 64563 - DNA, 27 bp, Artificial sequence
  SiRNA target sequence
acacgttcttattcgataatactgtga

SEQ ID NO: 64564 - DNA, 27 bp, Artificial sequence
  SiRNA target sequence
cacgttcttattcgataatactgtgac

SEQ ID NO: 64565 - DNA, 27 bp, Artificial sequence
  SiRNA target sequence
acgttcttattcgataatactgtgaca

SEQ ID NO: 64566 - DNA, 27 bp, Artificial sequence
  SiRNA target sequence
cgttcttattcgataatactgtgacat

SEQ ID NO: 64567 - DNA, 27 bp, Artificial sequence
  SiRNA target sequence
gttcttattcgataatactgtgacata

SEQ ID NO: 64568 - DNA, 27 bp, Artificial sequence
  SiRNA target sequence
ttcttattcgataatactgtgacatac

SEQ ID NO: 64569 - DNA, 27 bp, Artificial sequence
  SiRNA target sequence
tcttattcgataatactgtgacataca

SEQ ID NO: 64570 - DNA, 27 bp, Artificial sequence
  SiRNA target sequence
cttattcgataatactgtgacatacaa

SEQ ID NO: 64571 - DNA, 27 bp, Artificial sequence
  SiRNA target sequence
ttattcgataatactgtgacatacaat

SEQ ID NO: 64572 - DNA, 27 bp, Artificial sequence
  SiRNA target sequence
tattcgataatactgtgacatacaata

SEQ ID NO: 64573 - DNA, 27 bp, Artificial sequence
  SiRNA target sequence
attcgataatactgtgacatacaatat

SEQ ID NO: 64574 - DNA, 27 bp, Artificial sequence
  SiRNA target sequence
ttcgataatactgtgacatacaatata

SEQ ID NO: 64575 - DNA, 27 bp, Artificial sequence
  SiRNA target sequence
tcgataatactgtgacatacaatatat

SEQ ID NO: 64576 - DNA, 27 bp, Artificial sequence
  SiRNA target sequence
cgataatactgtgacatacaatatatt

SEQ ID NO: 64577 - DNA, 27 bp, Artificial sequence
  SiRNA target sequence
gataatactgtgacatacaatatattt

SEQ ID NO: 64578 - DNA, 27 bp, Artificial sequence
  SiRNA target sequence
ataatactgtgacatacaatatatttt

SEQ ID NO: 64579 - DNA, 27 bp, Artificial sequence
  SiRNA target sequence
taatactgtgacatacaatatatttta

SEQ ID NO: 64580 - DNA, 27 bp, Artificial sequence
  SiRNA target sequence
aatactgtgacatacaatatattttac

SEQ ID NO: 64581 - DNA, 27 bp, Artificial sequence
  SiRNA target sequence
atactgtgacatacaatatattttacg

SEQ ID NO: 64582 - DNA, 27 bp, Artificial sequence
  SiRNA target sequence
tactgtgacatacaatatattttacgg

SEQ ID NO: 64583 - DNA, 27 bp, Artificial sequence
  SiRNA target sequence
actgtgacatacaatatattttacggg

SEQ ID NO: 64584 - DNA, 27 bp, Artificial sequence
  SiRNA target sequence
ctgtgacatacaatatattttacggga

SEQ ID NO: 64585 - DNA, 27 bp, Artificial sequence
  SiRNA target sequence
tgtgacatacaatatattttacgggac

SEQ ID NO: 64586 - DNA, 27 bp, Artificial sequence
  SiRNA target sequence
gtgacatacaatatattttacgggact

SEQ ID NO: 64587 - DNA, 27 bp, Artificial sequence
  SiRNA target sequence
tgacatacaatatattttacgggacta

SEQ ID NO: 64588 - DNA, 27 bp, Artificial sequence
  SiRNA target sequence
gacatacaatatattttacgggactaa

SEQ ID NO: 64589 - DNA, 27 bp, Artificial sequence
  SiRNA target sequence
acatacaatatattttacgggactaaa

SEQ ID NO: 64590 - DNA, 27 bp, Artificial sequence
  SiRNA target sequence
catacaatatattttacgggactaaaa

SEQ ID NO: 64591 - DNA, 27 bp, Artificial sequence
  SiRNA target sequence
atacaatatattttacgggactaaaaa

SEQ ID NO: 64592 - DNA, 27 bp, Artificial sequence
  SiRNA target sequence
tacaatatattttacgggactaaaaac

SEQ ID NO: 64593 - DNA, 27 bp, Artificial sequence
  SiRNA target sequence
acaatatattttacgggactaaaaacg

SEQ ID NO: 64594 - DNA, 27 bp, Artificial sequence
  SiRNA target sequence
caatatattttacgggactaaaaacgt

SEQ ID NO: 64595 - DNA, 27 bp, Artificial sequence
  SiRNA target sequence
aatatattttacgggactaaaaacgta

SEQ ID NO: 64596 - DNA, 27 bp, Artificial sequence
  SiRNA target sequence
atatattttacgggactaaaaacgtaa

SEQ ID NO: 64597 - DNA, 27 bp, Artificial sequence
  SiRNA target sequence
tatattttacgggactaaaaacgtaac

SEQ ID NO: 64598 - DNA, 27 bp, Artificial sequence
  SiRNA target sequence
atattttacgggactaaaaacgtaaca

SEQ ID NO: 64599 - DNA, 27 bp, Artificial sequence
  SiRNA target sequence
tattttacgggactaaaaacgtaacag

SEQ ID NO: 64600 - DNA, 27 bp, Artificial sequence
  SiRNA target sequence
attttacgggactaaaaacgtaacaga

SEQ ID NO: 64601 - DNA, 27 bp, Artificial sequence
  SiRNA target sequence
ttttacgggactaaaaacgtaacagaa

SEQ ID NO: 64602 - DNA, 27 bp, Artificial sequence
  SiRNA target sequence
tttacgggactaaaaacgtaacagaaa

SEQ ID NO: 64603 - DNA, 27 bp, Artificial sequence
  SiRNA target sequence
ttacgggactaaaaacgtaacagaaaa

SEQ ID NO: 64604 - DNA, 27 bp, Artificial sequence
  SiRNA target sequence
tacgggactaaaaacgtaacagaaaaa

SEQ ID NO: 64605 - DNA, 27 bp, Artificial sequence
  SiRNA target sequence
acgggactaaaaacgtaacagaaaaag

SEQ ID NO: 64606 - DNA, 27 bp, Artificial sequence
  SiRNA target sequence
cgggactaaaaacgtaacagaaaaaga

SEQ ID NO: 64607 - DNA, 27 bp, Artificial sequence
  SiRNA target sequence
gggactaaaaacgtaacagaaaaagaa

SEQ ID NO: 64608 - DNA, 27 bp, Artificial sequence
  SiRNA target sequence
ggactaaaaacgtaacagaaaaagaag

SEQ ID NO: 64609 - DNA, 27 bp, Artificial sequence
  SiRNA target sequence
gactaaaaacgtaacagaaaaagaagt

SEQ ID NO: 64610 - DNA, 27 bp, Artificial sequence
  SiRNA target sequence
actaaaaacgtaacagaaaaagaagtt

SEQ ID NO: 64611 - DNA, 27 bp, Artificial sequence
  SiRNA target sequence
ctaaaaacgtaacagaaaaagaagttt

SEQ ID NO: 64612 - DNA, 27 bp, Artificial sequence
  SiRNA target sequence
taaaaacgtaacagaaaaagaagtttt

SEQ ID NO: 64613 - DNA, 27 bp, Artificial sequence
  SiRNA target sequence
aaaaacgtaacagaaaaagaagtttta

SEQ ID NO: 64614 - DNA, 27 bp, Artificial sequence
  SiRNA target sequence
aaaacgtaacagaaaaagaagttttag

SEQ ID NO: 64615 - DNA, 27 bp, Artificial sequence
  SiRNA target sequence
aaacgtaacagaaaaagaagttttaga

SEQ ID NO: 64616 - DNA, 27 bp, Artificial sequence
  SiRNA target sequence
aacgtaacagaaaaagaagttttagaa

SEQ ID NO: 64617 - DNA, 27 bp, Artificial sequence
  SiRNA target sequence
acgtaacagaaaaagaagttttagaat

SEQ ID NO: 64618 - DNA, 27 bp, Artificial sequence
  SiRNA target sequence
cgtaacagaaaaagaagttttagaatt

SEQ ID NO: 64619 - DNA, 27 bp, Artificial sequence
  SiRNA target sequence
gtaacagaaaaagaagttttagaatta

SEQ ID NO: 64620 - DNA, 27 bp, Artificial sequence
  SiRNA target sequence
taacagaaaaagaagttttagaattag

SEQ ID NO: 64621 - DNA, 27 bp, Artificial sequence
  SiRNA target sequence
aacagaaaaagaagttttagaattagc

SEQ ID NO: 64622 - DNA, 27 bp, Artificial sequence
  SiRNA target sequence
acagaaaaagaagttttagaattagcc

SEQ ID NO: 64623 - DNA, 27 bp, Artificial sequence
  SiRNA target sequence
cagaaaaagaagttttagaattagcca

SEQ ID NO: 64624 - DNA, 27 bp, Artificial sequence
  SiRNA target sequence
agaaaaagaagttttagaattagccaa

SEQ ID NO: 64625 - DNA, 27 bp, Artificial sequence
  SiRNA target sequence
gaaaaagaagttttagaattagccaaa

SEQ ID NO: 64626 - DNA, 27 bp, Artificial sequence
  SiRNA target sequence
aaaaagaagttttagaattagccaaaa

SEQ ID NO: 64627 - DNA, 27 bp, Artificial sequence
  SiRNA target sequence
aaaagaagttttagaattagccaaaaa

SEQ ID NO: 64628 - DNA, 27 bp, Artificial sequence
  SiRNA target sequence
aaagaagttttagaattagccaaaaaa

SEQ ID NO: 64629 - DNA, 27 bp, Artificial sequence
  SiRNA target sequence
aagaagttttagaattagccaaaaaaa

SEQ ID NO: 64630 - DNA, 27 bp, Artificial sequence
  SiRNA target sequence
agaagttttagaattagccaaaaaaat

SEQ ID NO: 64631 - DNA, 27 bp, Artificial sequence
  SiRNA target sequence
gaagttttagaattagccaaaaaaata

SEQ ID NO: 64632 - DNA, 27 bp, Artificial sequence
  SiRNA target sequence
aagttttagaattagccaaaaaaatag

SEQ ID NO: 64633 - DNA, 27 bp, Artificial sequence
  SiRNA target sequence
agttttagaattagccaaaaaaatagg

SEQ ID NO: 64634 - DNA, 27 bp, Artificial sequence
  SiRNA target sequence
gttttagaattagccaaaaaaataggt

SEQ ID NO: 64635 - DNA, 27 bp, Artificial sequence
  SiRNA target sequence
ttttagaattagccaaaaaaataggtg

SEQ ID NO: 64636 - DNA, 27 bp, Artificial sequence
  SiRNA target sequence
tttagaattagccaaaaaaataggtgt

SEQ ID NO: 64637 - DNA, 27 bp, Artificial sequence
  SiRNA target sequence
ttagaattagccaaaaaaataggtgta

SEQ ID NO: 64638 - DNA, 27 bp, Artificial sequence
  SiRNA target sequence
tagaattagccaaaaaaataggtgtat

SEQ ID NO: 64639 - DNA, 27 bp, Artificial sequence
  SiRNA target sequence
agaattagccaaaaaaataggtgtatt

SEQ ID NO: 64640 - DNA, 27 bp, Artificial sequence
  SiRNA target sequence
gaattagccaaaaaaataggtgtatta

SEQ ID NO: 64641 - DNA, 27 bp, Artificial sequence
  SiRNA target sequence
aattagccaaaaaaataggtgtattag

SEQ ID NO: 64642 - DNA, 27 bp, Artificial sequence
  SiRNA target sequence
attagccaaaaaaataggtgtattaga

SEQ ID NO: 64643 - DNA, 27 bp, Artificial sequence
  SiRNA target sequence
ttagccaaaaaaataggtgtattagag

SEQ ID NO: 64644 - DNA, 27 bp, Artificial sequence
  SiRNA target sequence
tagccaaaaaaataggtgtattagagt

SEQ ID NO: 64645 - DNA, 27 bp, Artificial sequence
  SiRNA target sequence
agccaaaaaaataggtgtattagagtc

SEQ ID NO: 64646 - DNA, 27 bp, Artificial sequence
  SiRNA target sequence
gccaaaaaaataggtgtattagagtct

SEQ ID NO: 64647 - DNA, 27 bp, Artificial sequence
  SiRNA target sequence
ccaaaaaaataggtgtattagagtcta

SEQ ID NO: 64648 - DNA, 27 bp, Artificial sequence
  SiRNA target sequence
caaaaaaataggtgtattagagtctat

SEQ ID NO: 64649 - DNA, 27 bp, Artificial sequence
  SiRNA target sequence
aaaaaaataggtgtattagagtctata

SEQ ID NO: 64650 - DNA, 27 bp, Artificial sequence
  SiRNA target sequence
aaaaaataggtgtattagagtctatac

SEQ ID NO: 64651 - DNA, 27 bp, Artificial sequence
  SiRNA target sequence
aaaaataggtgtattagagtctataca

SEQ ID NO: 64652 - DNA, 27 bp, Artificial sequence
  SiRNA target sequence
aaaataggtgtattagagtctatacag

SEQ ID NO: 64653 - DNA, 27 bp, Artificial sequence
  SiRNA target sequence
aaataggtgtattagagtctatacagg

SEQ ID NO: 64654 - DNA, 27 bp, Artificial sequence
  SiRNA target sequence
aataggtgtattagagtctatacagga

SEQ ID NO: 64655 - DNA, 27 bp, Artificial sequence
  SiRNA target sequence
ataggtgtattagagtctatacaggaa

SEQ ID NO: 64656 - DNA, 27 bp, Artificial sequence
  SiRNA target sequence
taggtgtattagagtctatacaggaat

SEQ ID NO: 64657 - DNA, 27 bp, Artificial sequence
  SiRNA target sequence
aggtgtattagagtctatacaggaatt

SEQ ID NO: 64658 - DNA, 27 bp, Artificial sequence
  SiRNA target sequence
ggtgtattagagtctatacaggaattt

SEQ ID NO: 64659 - DNA, 27 bp, Artificial sequence
  SiRNA target sequence
gtgtattagagtctatacaggaattta

SEQ ID NO: 64660 - DNA, 27 bp, Artificial sequence
  SiRNA target sequence
tgtattagagtctatacaggaatttaa

SEQ ID NO: 64661 - DNA, 27 bp, Artificial sequence
  SiRNA target sequence
gtattagagtctatacaggaatttaaa

SEQ ID NO: 64662 - DNA, 27 bp, Artificial sequence
  SiRNA target sequence
tattagagtctatacaggaatttaaag

SEQ ID NO: 64663 - DNA, 27 bp, Artificial sequence
  SiRNA target sequence
attagagtctatacaggaatttaaaga

SEQ ID NO: 64664 - DNA, 27 bp, Artificial sequence
  SiRNA target sequence
ttagagtctatacaggaatttaaagat

SEQ ID NO: 64665 - DNA, 27 bp, Artificial sequence
  SiRNA target sequence
tagagtctatacaggaatttaaagatg

SEQ ID NO: 64666 - DNA, 27 bp, Artificial sequence
  SiRNA target sequence
agagtctatacaggaatttaaagatgg

SEQ ID NO: 64667 - DNA, 27 bp, Artificial sequence
  SiRNA target sequence
gagtctatacaggaatttaaagatggg

SEQ ID NO: 64668 - DNA, 27 bp, Artificial sequence
  SiRNA target sequence
agtctatacaggaatttaaagatgggt

SEQ ID NO: 64669 - DNA, 27 bp, Artificial sequence
  SiRNA target sequence
gtctatacaggaatttaaagatgggtt

SEQ ID NO: 64670 - DNA, 27 bp, Artificial sequence
  SiRNA target sequence
tctatacaggaatttaaagatgggttt

SEQ ID NO: 64671 - DNA, 27 bp, Artificial sequence
  SiRNA target sequence
ctatacaggaatttaaagatgggttta

SEQ ID NO: 64672 - DNA, 27 bp, Artificial sequence
  SiRNA target sequence
tatacaggaatttaaagatgggtttag

SEQ ID NO: 64673 - DNA, 27 bp, Artificial sequence
  SiRNA target sequence
atacaggaatttaaagatgggtttagc

SEQ ID NO: 64674 - DNA, 27 bp, Artificial sequence
  SiRNA target sequence
tacaggaatttaaagatgggtttagca

SEQ ID NO: 64675 - DNA, 27 bp, Artificial sequence
  SiRNA target sequence
acaggaatttaaagatgggtttagcac

SEQ ID NO: 64676 - DNA, 27 bp, Artificial sequence
  SiRNA target sequence
caggaatttaaagatgggtttagcaca

SEQ ID NO: 64677 - DNA, 27 bp, Artificial sequence
  SiRNA target sequence
aggaatttaaagatgggtttagcacat

SEQ ID NO: 64678 - DNA, 27 bp, Artificial sequence
  SiRNA target sequence
ggaatttaaagatgggtttagcacatc

SEQ ID NO: 64679 - DNA, 27 bp, Artificial sequence
  SiRNA target sequence
gaatttaaagatgggtttagcacatcg

SEQ ID NO: 64680 - DNA, 27 bp, Artificial sequence
  SiRNA target sequence
aatttaaagatgggtttagcacatcgg

SEQ ID NO: 64681 - DNA, 27 bp, Artificial sequence
  SiRNA target sequence
atttaaagatgggtttagcacatcggt

SEQ ID NO: 64682 - DNA, 27 bp, Artificial sequence
  SiRNA target sequence
tttaaagatgggtttagcacatcggtc

SEQ ID NO: 64683 - DNA, 27 bp, Artificial sequence
  SiRNA target sequence
ttaaagatgggtttagcacatcggtcg

SEQ ID NO: 64684 - DNA, 27 bp, Artificial sequence
  SiRNA target sequence
taaagatgggtttagcacatcggtcgg

SEQ ID NO: 64685 - DNA, 27 bp, Artificial sequence
  SiRNA target sequence
aaagatgggtttagcacatcggtcggt

SEQ ID NO: 64686 - DNA, 27 bp, Artificial sequence
  SiRNA target sequence
aagatgggtttagcacatcggtcggtg

SEQ ID NO: 64687 - DNA, 27 bp, Artificial sequence
  SiRNA target sequence
agatgggtttagcacatcggtcggtga

SEQ ID NO: 64688 - DNA, 27 bp, Artificial sequence
  SiRNA target sequence
gatgggtttagcacatcggtcggtgaa

SEQ ID NO: 64689 - DNA, 27 bp, Artificial sequence
  SiRNA target sequence
atgggtttagcacatcggtcggtgaac

SEQ ID NO: 64690 - DNA, 27 bp, Artificial sequence
  SiRNA target sequence
tgggtttagcacatcggtcggtgaacg

SEQ ID NO: 64691 - DNA, 27 bp, Artificial sequence
  SiRNA target sequence
gggtttagcacatcggtcggtgaacgc

SEQ ID NO: 64692 - DNA, 27 bp, Artificial sequence
  SiRNA target sequence
ggtttagcacatcggtcggtgaacgcg

SEQ ID NO: 64693 - DNA, 27 bp, Artificial sequence
  SiRNA target sequence
gtttagcacatcggtcggtgaacgcgg

SEQ ID NO: 64694 - DNA, 27 bp, Artificial sequence
  SiRNA target sequence
tttagcacatcggtcggtgaacgcgga

SEQ ID NO: 64695 - DNA, 27 bp, Artificial sequence
  SiRNA target sequence
ttagcacatcggtcggtgaacgcggaa

SEQ ID NO: 64696 - DNA, 27 bp, Artificial sequence
  SiRNA target sequence
tagcacatcggtcggtgaacgcggaag

SEQ ID NO: 64697 - DNA, 27 bp, Artificial sequence
  SiRNA target sequence
agcacatcggtcggtgaacgcggaaga

SEQ ID NO: 64698 - DNA, 27 bp, Artificial sequence
  SiRNA target sequence
gcacatcggtcggtgaacgcggaagat

SEQ ID NO: 64699 - DNA, 27 bp, Artificial sequence
  SiRNA target sequence
cacatcggtcggtgaacgcggaagatt

SEQ ID NO: 64700 - DNA, 27 bp, Artificial sequence
  SiRNA target sequence
acatcggtcggtgaacgcggaagattt

SEQ ID NO: 64701 - DNA, 27 bp, Artificial sequence
  SiRNA target sequence
catcggtcggtgaacgcggaagatttt

SEQ ID NO: 64702 - DNA, 27 bp, Artificial sequence
  SiRNA target sequence
atcggtcggtgaacgcggaagattttt

SEQ ID NO: 64703 - DNA, 27 bp, Artificial sequence
  SiRNA target sequence
tcggtcggtgaacgcggaagattttta

SEQ ID NO: 64704 - DNA, 27 bp, Artificial sequence
  SiRNA target sequence
cggtcggtgaacgcggaagatttttat

SEQ ID NO: 64705 - DNA, 27 bp, Artificial sequence
  SiRNA target sequence
ggtcggtgaacgcggaagatttttatc

SEQ ID NO: 64706 - DNA, 27 bp, Artificial sequence
  SiRNA target sequence
gtcggtgaacgcggaagatttttatct

SEQ ID NO: 64707 - DNA, 27 bp, Artificial sequence
  SiRNA target sequence
tcggtgaacgcggaagatttttatctg

SEQ ID NO: 64708 - DNA, 27 bp, Artificial sequence
  SiRNA target sequence
cggtgaacgcggaagatttttatctgg

SEQ ID NO: 64709 - DNA, 27 bp, Artificial sequence
  SiRNA target sequence
ggtgaacgcggaagatttttatctggt

SEQ ID NO: 64710 - DNA, 27 bp, Artificial sequence
  SiRNA target sequence
gtgaacgcggaagatttttatctggtg

SEQ ID NO: 64711 - DNA, 27 bp, Artificial sequence
  SiRNA target sequence
tgaacgcggaagatttttatctggtgg

SEQ ID NO: 64712 - DNA, 27 bp, Artificial sequence
  SiRNA target sequence
gaacgcggaagatttttatctggtggt

SEQ ID NO: 64713 - DNA, 27 bp, Artificial sequence
  SiRNA target sequence
aacgcggaagatttttatctggtggtg

SEQ ID NO: 64714 - DNA, 27 bp, Artificial sequence
  SiRNA target sequence
acgcggaagatttttatctggtggtga

SEQ ID NO: 64715 - DNA, 27 bp, Artificial sequence
  SiRNA target sequence
cgcggaagatttttatctggtggtgaa

SEQ ID NO: 64716 - DNA, 27 bp, Artificial sequence
  SiRNA target sequence
gcggaagatttttatctggtggtgaaa

SEQ ID NO: 64717 - DNA, 27 bp, Artificial sequence
  SiRNA target sequence
cggaagatttttatctggtggtgaaag

SEQ ID NO: 64718 - DNA, 27 bp, Artificial sequence
  SiRNA target sequence
ggaagatttttatctggtggtgaaagg

SEQ ID NO: 64719 - DNA, 27 bp, Artificial sequence
  SiRNA target sequence
gaagatttttatctggtggtgaaaggc

SEQ ID NO: 64720 - DNA, 27 bp, Artificial sequence
  SiRNA target sequence
aagatttttatctggtggtgaaaggca

SEQ ID NO: 64721 - DNA, 27 bp, Artificial sequence
  SiRNA target sequence
agatttttatctggtggtgaaaggcaa

SEQ ID NO: 64722 - DNA, 27 bp, Artificial sequence
  SiRNA target sequence
gatttttatctggtggtgaaaggcaaa

SEQ ID NO: 64723 - DNA, 27 bp, Artificial sequence
  SiRNA target sequence
atttttatctggtggtgaaaggcaaaa

SEQ ID NO: 64724 - DNA, 27 bp, Artificial sequence
  SiRNA target sequence
tttttatctggtggtgaaaggcaaaaa

SEQ ID NO: 64725 - DNA, 27 bp, Artificial sequence
  SiRNA target sequence
ttttatctggtggtgaaaggcaaaaaa

SEQ ID NO: 64726 - DNA, 27 bp, Artificial sequence
  SiRNA target sequence
tttatctggtggtgaaaggcaaaaaat

SEQ ID NO: 64727 - DNA, 27 bp, Artificial sequence
  SiRNA target sequence
ttatctggtggtgaaaggcaaaaaatt

SEQ ID NO: 64728 - DNA, 27 bp, Artificial sequence
  SiRNA target sequence
tatctggtggtgaaaggcaaaaaatta

SEQ ID NO: 64729 - DNA, 27 bp, Artificial sequence
  SiRNA target sequence
atctggtggtgaaaggcaaaaaattat

SEQ ID NO: 64730 - DNA, 27 bp, Artificial sequence
  SiRNA target sequence
tctggtggtgaaaggcaaaaaattatg

SEQ ID NO: 64731 - DNA, 27 bp, Artificial sequence
  SiRNA target sequence
ctggtggtgaaaggcaaaaaattatgc

SEQ ID NO: 64732 - DNA, 27 bp, Artificial sequence
  SiRNA target sequence
tggtggtgaaaggcaaaaaattatgct

SEQ ID NO: 64733 - DNA, 27 bp, Artificial sequence
  SiRNA target sequence
ggtggtgaaaggcaaaaaattatgctg

SEQ ID NO: 64734 - DNA, 27 bp, Artificial sequence
  SiRNA target sequence
gtggtgaaaggcaaaaaattatgctga

SEQ ID NO: 64735 - DNA, 27 bp, Artificial sequence
  SiRNA target sequence
tggtgaaaggcaaaaaattatgctgat

SEQ ID NO: 64736 - DNA, 27 bp, Artificial sequence
  SiRNA target sequence
ggtgaaaggcaaaaaattatgctgatg

SEQ ID NO: 64737 - DNA, 27 bp, Artificial sequence
  SiRNA target sequence
gtgaaaggcaaaaaattatgctgatgc

SEQ ID NO: 64738 - DNA, 27 bp, Artificial sequence
  SiRNA target sequence
tgaaaggcaaaaaattatgctgatgcg

SEQ ID NO: 64739 - DNA, 27 bp, Artificial sequence
  SiRNA target sequence
gaaaggcaaaaaattatgctgatgcgt

SEQ ID NO: 64740 - DNA, 27 bp, Artificial sequence
  SiRNA target sequence
aaaggcaaaaaattatgctgatgcgtg

SEQ ID NO: 64741 - DNA, 27 bp, Artificial sequence
  SiRNA target sequence
aaggcaaaaaattatgctgatgcgtgc

SEQ ID NO: 64742 - DNA, 27 bp, Artificial sequence
  SiRNA target sequence
aggcaaaaaattatgctgatgcgtgca

SEQ ID NO: 64743 - DNA, 27 bp, Artificial sequence
  SiRNA target sequence
ggcaaaaaattatgctgatgcgtgcat

SEQ ID NO: 64744 - DNA, 27 bp, Artificial sequence
  SiRNA target sequence
gcaaaaaattatgctgatgcgtgcatt

SEQ ID NO: 64745 - DNA, 27 bp, Artificial sequence
  SiRNA target sequence
caaaaaattatgctgatgcgtgcattg

SEQ ID NO: 64746 - DNA, 27 bp, Artificial sequence
  SiRNA target sequence
aaaaaattatgctgatgcgtgcattgc

SEQ ID NO: 64747 - DNA, 27 bp, Artificial sequence
  SiRNA target sequence
aaaaattatgctgatgcgtgcattgct

SEQ ID NO: 64748 - DNA, 27 bp, Artificial sequence
  SiRNA target sequence
aaaattatgctgatgcgtgcattgctt

SEQ ID NO: 64749 - DNA, 27 bp, Artificial sequence
  SiRNA target sequence
aaattatgctgatgcgtgcattgctta

SEQ ID NO: 64750 - DNA, 27 bp, Artificial sequence
  SiRNA target sequence
aattatgctgatgcgtgcattgcttaa

SEQ ID NO: 64751 - DNA, 27 bp, Artificial sequence
  SiRNA target sequence
attatgctgatgcgtgcattgcttaaa

SEQ ID NO: 64752 - DNA, 27 bp, Artificial sequence
  SiRNA target sequence
ttatgctgatgcgtgcattgcttaaaa

SEQ ID NO: 64753 - DNA, 27 bp, Artificial sequence
  SiRNA target sequence
tatgctgatgcgtgcattgcttaaaaa

SEQ ID NO: 64754 - DNA, 27 bp, Artificial sequence
  SiRNA target sequence
atgctgatgcgtgcattgcttaaaaat

SEQ ID NO: 64755 - DNA, 27 bp, Artificial sequence
  SiRNA target sequence
tgctgatgcgtgcattgcttaaaaatt

SEQ ID NO: 64756 - DNA, 27 bp, Artificial sequence
  SiRNA target sequence
gctgatgcgtgcattgcttaaaaattc

SEQ ID NO: 64757 - DNA, 27 bp, Artificial sequence
  SiRNA target sequence
ctgatgcgtgcattgcttaaaaattca

SEQ ID NO: 64758 - DNA, 27 bp, Artificial sequence
  SiRNA target sequence
tgatgcgtgcattgcttaaaaattcag

SEQ ID NO: 64759 - DNA, 27 bp, Artificial sequence
  SiRNA target sequence
gatgcgtgcattgcttaaaaattcaga

SEQ ID NO: 64760 - DNA, 27 bp, Artificial sequence
  SiRNA target sequence
atgcgtgcattgcttaaaaattcagag

SEQ ID NO: 64761 - DNA, 27 bp, Artificial sequence
  SiRNA target sequence
tgcgtgcattgcttaaaaattcagaga

SEQ ID NO: 64762 - DNA, 27 bp, Artificial sequence
  SiRNA target sequence
gcgtgcattgcttaaaaattcagagat

SEQ ID NO: 64763 - DNA, 27 bp, Artificial sequence
  SiRNA target sequence
cgtgcattgcttaaaaattcagagatc

SEQ ID NO: 64764 - DNA, 27 bp, Artificial sequence
  SiRNA target sequence
gtgcattgcttaaaaattcagagatcg

SEQ ID NO: 64765 - DNA, 27 bp, Artificial sequence
  SiRNA target sequence
tgcattgcttaaaaattcagagatcgt

SEQ ID NO: 64766 - DNA, 27 bp, Artificial sequence
  SiRNA target sequence
gcattgcttaaaaattcagagatcgtt

SEQ ID NO: 64767 - DNA, 27 bp, Artificial sequence
  SiRNA target sequence
cattgcttaaaaattcagagatcgttt

SEQ ID NO: 64768 - DNA, 27 bp, Artificial sequence
  SiRNA target sequence
attgcttaaaaattcagagatcgtttt

SEQ ID NO: 64769 - DNA, 27 bp, Artificial sequence
  SiRNA target sequence
ttgcttaaaaattcagagatcgtttta

SEQ ID NO: 64770 - DNA, 27 bp, Artificial sequence
  SiRNA target sequence
tgcttaaaaattcagagatcgttttat

SEQ ID NO: 64771 - DNA, 27 bp, Artificial sequence
  SiRNA target sequence
gcttaaaaattcagagatcgttttatt

SEQ ID NO: 64772 - DNA, 27 bp, Artificial sequence
  SiRNA target sequence
cttaaaaattcagagatcgttttatta

SEQ ID NO: 64773 - DNA, 27 bp, Artificial sequence
  SiRNA target sequence
ttaaaaattcagagatcgttttattag

SEQ ID NO: 64774 - DNA, 27 bp, Artificial sequence
  SiRNA target sequence
taaaaattcagagatcgttttattaga

SEQ ID NO: 64775 - DNA, 27 bp, Artificial sequence
  SiRNA target sequence
aaaaattcagagatcgttttattagac

SEQ ID NO: 64776 - DNA, 27 bp, Artificial sequence
  SiRNA target sequence
aaaattcagagatcgttttattagacg

SEQ ID NO: 64777 - DNA, 27 bp, Artificial sequence
  SiRNA target sequence
aaattcagagatcgttttattagacga

SEQ ID NO: 64778 - DNA, 27 bp, Artificial sequence
  SiRNA target sequence
aattcagagatcgttttattagacgag

SEQ ID NO: 64779 - DNA, 27 bp, Artificial sequence
  SiRNA target sequence
attcagagatcgttttattagacgagc

SEQ ID NO: 64780 - DNA, 27 bp, Artificial sequence
  SiRNA target sequence
ttcagagatcgttttattagacgagcc

SEQ ID NO: 64781 - DNA, 27 bp, Artificial sequence
  SiRNA target sequence
tcagagatcgttttattagacgagcca

SEQ ID NO: 64782 - DNA, 27 bp, Artificial sequence
  SiRNA target sequence
cagagatcgttttattagacgagccaa

SEQ ID NO: 64783 - DNA, 27 bp, Artificial sequence
  SiRNA target sequence
agagatcgttttattagacgagccaac

SEQ ID NO: 64784 - DNA, 27 bp, Artificial sequence
  SiRNA target sequence
gagatcgttttattagacgagccaacc

SEQ ID NO: 64785 - DNA, 27 bp, Artificial sequence
  SiRNA target sequence
agatcgttttattagacgagccaacct

SEQ ID NO: 64786 - DNA, 27 bp, Artificial sequence
  SiRNA target sequence
gatcgttttattagacgagccaacctc

SEQ ID NO: 64787 - DNA, 27 bp, Artificial sequence
  SiRNA target sequence
atcgttttattagacgagccaacctca

SEQ ID NO: 64788 - DNA, 27 bp, Artificial sequence
  SiRNA target sequence
tcgttttattagacgagccaacctcag

SEQ ID NO: 64789 - DNA, 27 bp, Artificial sequence
  SiRNA target sequence
cgttttattagacgagccaacctcagc

SEQ ID NO: 64790 - DNA, 27 bp, Artificial sequence
  SiRNA target sequence
gttttattagacgagccaacctcagca

SEQ ID NO: 64791 - DNA, 27 bp, Artificial sequence
  SiRNA target sequence
ttttattagacgagccaacctcagcac

SEQ ID NO: 64792 - DNA, 27 bp, Artificial sequence
  SiRNA target sequence
tttattagacgagccaacctcagcact

SEQ ID NO: 64793 - DNA, 27 bp, Artificial sequence
  SiRNA target sequence
ttattagacgagccaacctcagcacta

SEQ ID NO: 64794 - DNA, 27 bp, Artificial sequence
  SiRNA target sequence
tattagacgagccaacctcagcactag

SEQ ID NO: 64795 - DNA, 27 bp, Artificial sequence
  SiRNA target sequence
attagacgagccaacctcagcactaga

SEQ ID NO: 64796 - DNA, 27 bp, Artificial sequence
  SiRNA target sequence
ttagacgagccaacctcagcactagat

SEQ ID NO: 64797 - DNA, 27 bp, Artificial sequence
  SiRNA target sequence
tagacgagccaacctcagcactagata

SEQ ID NO: 64798 - DNA, 27 bp, Artificial sequence
  SiRNA target sequence
agacgagccaacctcagcactagataa

SEQ ID NO: 64799 - DNA, 27 bp, Artificial sequence
  SiRNA target sequence
gacgagccaacctcagcactagataaa

SEQ ID NO: 64800 - DNA, 27 bp, Artificial sequence
  SiRNA target sequence
acgagccaacctcagcactagataaaa

SEQ ID NO: 64801 - DNA, 27 bp, Artificial sequence
  SiRNA target sequence
cgagccaacctcagcactagataaaaa

SEQ ID NO: 64802 - DNA, 27 bp, Artificial sequence
  SiRNA target sequence
gagccaacctcagcactagataaaaag

SEQ ID NO: 64803 - DNA, 27 bp, Artificial sequence
  SiRNA target sequence
agccaacctcagcactagataaaaaga

SEQ ID NO: 64804 - DNA, 27 bp, Artificial sequence
  SiRNA target sequence
gccaacctcagcactagataaaaagag

SEQ ID NO: 64805 - DNA, 27 bp, Artificial sequence
  SiRNA target sequence
ccaacctcagcactagataaaaagagt

SEQ ID NO: 64806 - DNA, 27 bp, Artificial sequence
  SiRNA target sequence
caacctcagcactagataaaaagagtg

SEQ ID NO: 64807 - DNA, 27 bp, Artificial sequence
  SiRNA target sequence
aacctcagcactagataaaaagagtga

SEQ ID NO: 64808 - DNA, 27 bp, Artificial sequence
  SiRNA target sequence
acctcagcactagataaaaagagtgaa

SEQ ID NO: 64809 - DNA, 27 bp, Artificial sequence
  SiRNA target sequence
cctcagcactagataaaaagagtgaac

SEQ ID NO: 64810 - DNA, 27 bp, Artificial sequence
  SiRNA target sequence
ctcagcactagataaaaagagtgaact

SEQ ID NO: 64811 - DNA, 27 bp, Artificial sequence
  SiRNA target sequence
tcagcactagataaaaagagtgaacta

SEQ ID NO: 64812 - DNA, 27 bp, Artificial sequence
  SiRNA target sequence
cagcactagataaaaagagtgaactag

SEQ ID NO: 64813 - DNA, 27 bp, Artificial sequence
  SiRNA target sequence
agcactagataaaaagagtgaactaga

SEQ ID NO: 64814 - DNA, 27 bp, Artificial sequence
  SiRNA target sequence
gcactagataaaaagagtgaactagaa

SEQ ID NO: 64815 - DNA, 27 bp, Artificial sequence
  SiRNA target sequence
cactagataaaaagagtgaactagaaa

SEQ ID NO: 64816 - DNA, 27 bp, Artificial sequence
  SiRNA target sequence
actagataaaaagagtgaactagaaac

SEQ ID NO: 64817 - DNA, 27 bp, Artificial sequence
  SiRNA target sequence
ctagataaaaagagtgaactagaaact

SEQ ID NO: 64818 - DNA, 27 bp, Artificial sequence
  SiRNA target sequence
tagataaaaagagtgaactagaaacta

SEQ ID NO: 64819 - DNA, 27 bp, Artificial sequence
  SiRNA target sequence
agataaaaagagtgaactagaaactat

SEQ ID NO: 64820 - DNA, 27 bp, Artificial sequence
  SiRNA target sequence
gataaaaagagtgaactagaaactatg

SEQ ID NO: 64821 - DNA, 27 bp, Artificial sequence
  SiRNA target sequence
ataaaaagagtgaactagaaactatga

SEQ ID NO: 64822 - DNA, 27 bp, Artificial sequence
  SiRNA target sequence
taaaaagagtgaactagaaactatgac

SEQ ID NO: 64823 - DNA, 27 bp, Artificial sequence
  SiRNA target sequence
aaaaagagtgaactagaaactatgaca

SEQ ID NO: 64824 - DNA, 27 bp, Artificial sequence
  SiRNA target sequence
aaaagagtgaactagaaactatgacat

SEQ ID NO: 64825 - DNA, 27 bp, Artificial sequence
  SiRNA target sequence
aaagagtgaactagaaactatgacata

SEQ ID NO: 64826 - DNA, 27 bp, Artificial sequence
  SiRNA target sequence
aagagtgaactagaaactatgacatat

SEQ ID NO: 64827 - DNA, 27 bp, Artificial sequence
  SiRNA target sequence
agagtgaactagaaactatgacatata

SEQ ID NO: 64828 - DNA, 27 bp, Artificial sequence
  SiRNA target sequence
gagtgaactagaaactatgacatatat

SEQ ID NO: 64829 - DNA, 27 bp, Artificial sequence
  SiRNA target sequence
agtgaactagaaactatgacatatatt

SEQ ID NO: 64830 - DNA, 27 bp, Artificial sequence
  SiRNA target sequence
gtgaactagaaactatgacatatattt

SEQ ID NO: 64831 - DNA, 27 bp, Artificial sequence
  SiRNA target sequence
tgaactagaaactatgacatatatttt

SEQ ID NO: 64832 - DNA, 27 bp, Artificial sequence
  SiRNA target sequence
gaactagaaactatgacatatattttt

SEQ ID NO: 64833 - DNA, 27 bp, Artificial sequence
  SiRNA target sequence
aactagaaactatgacatatattttta

SEQ ID NO: 64834 - DNA, 27 bp, Artificial sequence
  SiRNA target sequence
actagaaactatgacatatatttttaa

SEQ ID NO: 64835 - DNA, 27 bp, Artificial sequence
  SiRNA target sequence
ctagaaactatgacatatatttttaat

SEQ ID NO: 64836 - DNA, 27 bp, Artificial sequence
  SiRNA target sequence
tagaaactatgacatatatttttaatg

SEQ ID NO: 64837 - DNA, 27 bp, Artificial sequence
  SiRNA target sequence
agaaactatgacatatatttttaatga

SEQ ID NO: 64838 - DNA, 27 bp, Artificial sequence
  SiRNA target sequence
gaaactatgacatatatttttaatgaa

SEQ ID NO: 64839 - DNA, 27 bp, Artificial sequence
  SiRNA target sequence
aaactatgacatatatttttaatgaat

SEQ ID NO: 64840 - DNA, 27 bp, Artificial sequence
  SiRNA target sequence
aactatgacatatatttttaatgaatt

SEQ ID NO: 64841 - DNA, 27 bp, Artificial sequence
  SiRNA target sequence
actatgacatatatttttaatgaattt

SEQ ID NO: 64842 - DNA, 27 bp, Artificial sequence
  SiRNA target sequence
ctatgacatatatttttaatgaattta

SEQ ID NO: 64843 - DNA, 27 bp, Artificial sequence
  SiRNA target sequence
tatgacatatatttttaatgaatttaa

SEQ ID NO: 64844 - DNA, 27 bp, Artificial sequence
  SiRNA target sequence
atgacatatatttttaatgaatttaag

SEQ ID NO: 64845 - DNA, 27 bp, Artificial sequence
  SiRNA target sequence
tgacatatatttttaatgaatttaagt

SEQ ID NO: 64846 - DNA, 27 bp, Artificial sequence
  SiRNA target sequence
gacatatatttttaatgaatttaagta

SEQ ID NO: 64847 - DNA, 27 bp, Artificial sequence
  SiRNA target sequence
acatatatttttaatgaatttaagtac

SEQ ID NO: 64848 - DNA, 27 bp, Artificial sequence
  SiRNA target sequence
catatatttttaatgaatttaagtacc

SEQ ID NO: 64849 - DNA, 27 bp, Artificial sequence
  SiRNA target sequence
atatatttttaatgaatttaagtacca

SEQ ID NO: 64850 - DNA, 27 bp, Artificial sequence
  SiRNA target sequence
tatatttttaatgaatttaagtaccat

SEQ ID NO: 64851 - DNA, 27 bp, Artificial sequence
  SiRNA target sequence
atatttttaatgaatttaagtaccata

SEQ ID NO: 64852 - DNA, 27 bp, Artificial sequence
  SiRNA target sequence
tatttttaatgaatttaagtaccatac

SEQ ID NO: 64853 - DNA, 27 bp, Artificial sequence
  SiRNA target sequence
atttttaatgaatttaagtaccatact

SEQ ID NO: 64854 - DNA, 27 bp, Artificial sequence
  SiRNA target sequence
tttttaatgaatttaagtaccatactt

SEQ ID NO: 64855 - DNA, 27 bp, Artificial sequence
  SiRNA target sequence
ttttaatgaatttaagtaccatacttt

SEQ ID NO: 64856 - DNA, 27 bp, Artificial sequence
  SiRNA target sequence
tttaatgaatttaagtaccatactttt

SEQ ID NO: 64857 - DNA, 27 bp, Artificial sequence
  SiRNA target sequence
ttaatgaatttaagtaccatacttttg

SEQ ID NO: 64858 - DNA, 27 bp, Artificial sequence
  SiRNA target sequence
taatgaatttaagtaccatacttttgt

SEQ ID NO: 64859 - DNA, 27 bp, Artificial sequence
  SiRNA target sequence
aatgaatttaagtaccatacttttgta

SEQ ID NO: 64860 - DNA, 27 bp, Artificial sequence
  SiRNA target sequence
atgaatttaagtaccatacttttgtaa

SEQ ID NO: 64861 - DNA, 27 bp, Artificial sequence
  SiRNA target sequence
tgaatttaagtaccatacttttgtaat

SEQ ID NO: 64862 - DNA, 27 bp, Artificial sequence
  SiRNA target sequence
gaatttaagtaccatacttttgtaata

SEQ ID NO: 64863 - DNA, 27 bp, Artificial sequence
  SiRNA target sequence
aatttaagtaccatacttttgtaataa

SEQ ID NO: 64864 - DNA, 27 bp, Artificial sequence
  SiRNA target sequence
atttaagtaccatacttttgtaataat

SEQ ID NO: 64865 - DNA, 27 bp, Artificial sequence
  SiRNA target sequence
tttaagtaccatacttttgtaataatt

SEQ ID NO: 64866 - DNA, 27 bp, Artificial sequence
  SiRNA target sequence
ttaagtaccatacttttgtaataattg

SEQ ID NO: 64867 - DNA, 27 bp, Artificial sequence
  SiRNA target sequence
taagtaccatacttttgtaataattgt

SEQ ID NO: 64868 - DNA, 27 bp, Artificial sequence
  SiRNA target sequence
aagtaccatacttttgtaataattgta

SEQ ID NO: 64869 - DNA, 27 bp, Artificial sequence
  SiRNA target sequence
agtaccatacttttgtaataattgtac

SEQ ID NO: 64870 - DNA, 27 bp, Artificial sequence
  SiRNA target sequence
gtaccatacttttgtaataattgtaca

SEQ ID NO: 64871 - DNA, 27 bp, Artificial sequence
  SiRNA target sequence
taccatacttttgtaataattgtacac

SEQ ID NO: 64872 - DNA, 27 bp, Artificial sequence
  SiRNA target sequence
accatacttttgtaataattgtacaca

SEQ ID NO: 64873 - DNA, 27 bp, Artificial sequence
  SiRNA target sequence
ccatacttttgtaataattgtacacaa

SEQ ID NO: 64874 - DNA, 27 bp, Artificial sequence
  SiRNA target sequence
catacttttgtaataattgtacacaat

SEQ ID NO: 64875 - DNA, 27 bp, Artificial sequence
  SiRNA target sequence
atacttttgtaataattgtacacaatc

SEQ ID NO: 64876 - DNA, 27 bp, Artificial sequence
  SiRNA target sequence
tacttttgtaataattgtacacaatct

SEQ ID NO: 64877 - DNA, 27 bp, Artificial sequence
  SiRNA target sequence
acttttgtaataattgtacacaatcta

SEQ ID NO: 64878 - DNA, 27 bp, Artificial sequence
  SiRNA target sequence
cttttgtaataattgtacacaatctag

SEQ ID NO: 64879 - DNA, 27 bp, Artificial sequence
  SiRNA target sequence
ttttgtaataattgtacacaatctaga

SEQ ID NO: 64880 - DNA, 27 bp, Artificial sequence
  SiRNA target sequence
tttgtaataattgtacacaatctagaa

SEQ ID NO: 64881 - DNA, 27 bp, Artificial sequence
  SiRNA target sequence
ttgtaataattgtacacaatctagaat

SEQ ID NO: 64882 - DNA, 27 bp, Artificial sequence
  SiRNA target sequence
tgtaataattgtacacaatctagaatt

SEQ ID NO: 64883 - DNA, 27 bp, Artificial sequence
  SiRNA target sequence
gtaataattgtacacaatctagaatta

SEQ ID NO: 64884 - DNA, 27 bp, Artificial sequence
  SiRNA target sequence
taataattgtacacaatctagaattat

SEQ ID NO: 64885 - DNA, 27 bp, Artificial sequence
  SiRNA target sequence
aataattgtacacaatctagaattatt

SEQ ID NO: 64886 - DNA, 27 bp, Artificial sequence
  SiRNA target sequence
ataattgtacacaatctagaattattg

SEQ ID NO: 64887 - DNA, 27 bp, Artificial sequence
  SiRNA target sequence
taattgtacacaatctagaattattgg

SEQ ID NO: 64888 - DNA, 27 bp, Artificial sequence
  SiRNA target sequence
aattgtacacaatctagaattattggc

SEQ ID NO: 64889 - DNA, 27 bp, Artificial sequence
  SiRNA target sequence
attgtacacaatctagaattattggct

SEQ ID NO: 64890 - DNA, 27 bp, Artificial sequence
  SiRNA target sequence
ttgtacacaatctagaattattggctt

SEQ ID NO: 64891 - DNA, 27 bp, Artificial sequence
  SiRNA target sequence
tgtacacaatctagaattattggcttt

SEQ ID NO: 64892 - DNA, 27 bp, Artificial sequence
  SiRNA target sequence
gtacacaatctagaattattggctttg

SEQ ID NO: 64893 - DNA, 27 bp, Artificial sequence
  SiRNA target sequence
tacacaatctagaattattggctttgt

SEQ ID NO: 64894 - DNA, 27 bp, Artificial sequence
  SiRNA target sequence
acacaatctagaattattggctttgtt

SEQ ID NO: 64895 - DNA, 27 bp, Artificial sequence
  SiRNA target sequence
cacaatctagaattattggctttgttt

SEQ ID NO: 64896 - DNA, 27 bp, Artificial sequence
  SiRNA target sequence
acaatctagaattattggctttgtttg

SEQ ID NO: 64897 - DNA, 27 bp, Artificial sequence
  SiRNA target sequence
caatctagaattattggctttgtttga

SEQ ID NO: 64898 - DNA, 27 bp, Artificial sequence
  SiRNA target sequence
aatctagaattattggctttgtttgat

SEQ ID NO: 64899 - DNA, 27 bp, Artificial sequence
  SiRNA target sequence
atctagaattattggctttgtttgata

SEQ ID NO: 64900 - DNA, 27 bp, Artificial sequence
  SiRNA target sequence
tctagaattattggctttgtttgataa

SEQ ID NO: 64901 - DNA, 27 bp, Artificial sequence
  SiRNA target sequence
ctagaattattggctttgtttgataaa

SEQ ID NO: 64902 - DNA, 27 bp, Artificial sequence
  SiRNA target sequence
tagaattattggctttgtttgataaaa

SEQ ID NO: 64903 - DNA, 27 bp, Artificial sequence
  SiRNA target sequence
agaattattggctttgtttgataaaat

SEQ ID NO: 64904 - DNA, 27 bp, Artificial sequence
  SiRNA target sequence
gaattattggctttgtttgataaaatt

SEQ ID NO: 64905 - DNA, 27 bp, Artificial sequence
  SiRNA target sequence
aattattggctttgtttgataaaattt

SEQ ID NO: 64906 - DNA, 27 bp, Artificial sequence
  SiRNA target sequence
attattggctttgtttgataaaatttt

SEQ ID NO: 64907 - DNA, 27 bp, Artificial sequence
  SiRNA target sequence
ttattggctttgtttgataaaatttta

SEQ ID NO: 64908 - DNA, 27 bp, Artificial sequence
  SiRNA target sequence
tattggctttgtttgataaaattttat

SEQ ID NO: 64909 - DNA, 27 bp, Artificial sequence
  SiRNA target sequence
attggctttgtttgataaaattttatt

SEQ ID NO: 64910 - DNA, 27 bp, Artificial sequence
  SiRNA target sequence
ttggctttgtttgataaaattttattt

SEQ ID NO: 64911 - DNA, 27 bp, Artificial sequence
  SiRNA target sequence
tggctttgtttgataaaattttatttg

SEQ ID NO: 64912 - DNA, 27 bp, Artificial sequence
  SiRNA target sequence
ggctttgtttgataaaattttatttgt

SEQ ID NO: 64913 - DNA, 27 bp, Artificial sequence
  SiRNA target sequence
gctttgtttgataaaattttatttgta

SEQ ID NO: 64914 - DNA, 27 bp, Artificial sequence
  SiRNA target sequence
ctttgtttgataaaattttatttgtaa

SEQ ID NO: 64915 - DNA, 27 bp, Artificial sequence
  SiRNA target sequence
tttgtttgataaaattttatttgtaaa

SEQ ID NO: 64916 - DNA, 27 bp, Artificial sequence
  SiRNA target sequence
ttgtttgataaaattttatttgtaaat

SEQ ID NO: 64917 - DNA, 27 bp, Artificial sequence
  SiRNA target sequence
tgtttgataaaattttatttgtaaatg

SEQ ID NO: 64918 - DNA, 27 bp, Artificial sequence
  SiRNA target sequence
gtttgataaaattttatttgtaaatgg

SEQ ID NO: 64919 - DNA, 27 bp, Artificial sequence
  SiRNA target sequence
tttgataaaattttatttgtaaatggt

SEQ ID NO: 64920 - DNA, 27 bp, Artificial sequence
  SiRNA target sequence
ttgataaaattttatttgtaaatggta

SEQ ID NO: 64921 - DNA, 27 bp, Artificial sequence
  SiRNA target sequence
tgataaaattttatttgtaaatggtaa

SEQ ID NO: 64922 - DNA, 27 bp, Artificial sequence
  SiRNA target sequence
gataaaattttatttgtaaatggtaat

SEQ ID NO: 64923 - DNA, 27 bp, Artificial sequence
  SiRNA target sequence
ataaaattttatttgtaaatggtaatg

SEQ ID NO: 64924 - DNA, 27 bp, Artificial sequence
  SiRNA target sequence
taaaattttatttgtaaatggtaatga

SEQ ID NO: 64925 - DNA, 27 bp, Artificial sequence
  SiRNA target sequence
aaaattttatttgtaaatggtaatgag

SEQ ID NO: 64926 - DNA, 27 bp, Artificial sequence
  SiRNA target sequence
aaattttatttgtaaatggtaatgagg

SEQ ID NO: 64927 - DNA, 27 bp, Artificial sequence
  SiRNA target sequence
aattttatttgtaaatggtaatgaggt

SEQ ID NO: 64928 - DNA, 27 bp, Artificial sequence
  SiRNA target sequence
attttatttgtaaatggtaatgaggta

SEQ ID NO: 64929 - DNA, 27 bp, Artificial sequence
  SiRNA target sequence
ttttatttgtaaatggtaatgaggtaa

SEQ ID NO: 64930 - DNA, 27 bp, Artificial sequence
  SiRNA target sequence
tttatttgtaaatggtaatgaggtaac

SEQ ID NO: 64931 - DNA, 27 bp, Artificial sequence
  SiRNA target sequence
ttatttgtaaatggtaatgaggtaaca

SEQ ID NO: 64932 - DNA, 27 bp, Artificial sequence
  SiRNA target sequence
tatttgtaaatggtaatgaggtaacaa

SEQ ID NO: 64933 - DNA, 27 bp, Artificial sequence
  SiRNA target sequence
atttgtaaatggtaatgaggtaacaat

SEQ ID NO: 64934 - DNA, 27 bp, Artificial sequence
  SiRNA target sequence
tttgtaaatggtaatgaggtaacaatg

SEQ ID NO: 64935 - DNA, 27 bp, Artificial sequence
  SiRNA target sequence
ttgtaaatggtaatgaggtaacaatga

SEQ ID NO: 64936 - DNA, 27 bp, Artificial sequence
  SiRNA target sequence
tgtaaatggtaatgaggtaacaatgat

SEQ ID NO: 64937 - DNA, 27 bp, Artificial sequence
  SiRNA target sequence
gtaaatggtaatgaggtaacaatgata

SEQ ID NO: 64938 - DNA, 27 bp, Artificial sequence
  SiRNA target sequence
taaatggtaatgaggtaacaatgatag

SEQ ID NO: 64939 - DNA, 27 bp, Artificial sequence
  SiRNA target sequence
aaatggtaatgaggtaacaatgataga

SEQ ID NO: 64940 - DNA, 27 bp, Artificial sequence
  SiRNA target sequence
aatggtaatgaggtaacaatgatagaa

SEQ ID NO: 64941 - DNA, 27 bp, Artificial sequence
  SiRNA target sequence
atggtaatgaggtaacaatgatagaag

SEQ ID NO: 64942 - DNA, 27 bp, Artificial sequence
  SiRNA target sequence
tggtaatgaggtaacaatgatagaaga

SEQ ID NO: 64943 - DNA, 27 bp, Artificial sequence
  SiRNA target sequence
ggtaatgaggtaacaatgatagaagac

SEQ ID NO: 64944 - DNA, 27 bp, Artificial sequence
  SiRNA target sequence
gtaatgaggtaacaatgatagaagaca

SEQ ID NO: 64945 - DNA, 27 bp, Artificial sequence
  SiRNA target sequence
taatgaggtaacaatgatagaagacat

SEQ ID NO: 64946 - DNA, 27 bp, Artificial sequence
  SiRNA target sequence
aatgaggtaacaatgatagaagacatt

SEQ ID NO: 64947 - DNA, 27 bp, Artificial sequence
  SiRNA target sequence
atgaggtaacaatgatagaagacatta

SEQ ID NO: 64948 - DNA, 27 bp, Artificial sequence
  SiRNA target sequence
tgaggtaacaatgatagaagacattaa

SEQ ID NO: 64949 - DNA, 27 bp, Artificial sequence
  SiRNA target sequence
gaggtaacaatgatagaagacattaac

SEQ ID NO: 64950 - DNA, 27 bp, Artificial sequence
  SiRNA target sequence
aggtaacaatgatagaagacattaaca

SEQ ID NO: 64951 - DNA, 27 bp, Artificial sequence
  SiRNA target sequence
ggtaacaatgatagaagacattaacaa

SEQ ID NO: 64952 - DNA, 27 bp, Artificial sequence
  SiRNA target sequence
gtaacaatgatagaagacattaacaaa

SEQ ID NO: 64953 - DNA, 27 bp, Artificial sequence
  SiRNA target sequence
taacaatgatagaagacattaacaaaa

SEQ ID NO: 64954 - DNA, 27 bp, Artificial sequence
  SiRNA target sequence
aacaatgatagaagacattaacaaaaa

SEQ ID NO: 64955 - DNA, 27 bp, Artificial sequence
  SiRNA target sequence
acaatgatagaagacattaacaaaaaa

SEQ ID NO: 64956 - DNA, 27 bp, Artificial sequence
  SiRNA target sequence
caatgatagaagacattaacaaaaaac

SEQ ID NO: 64957 - DNA, 27 bp, Artificial sequence
  SiRNA target sequence
aatgatagaagacattaacaaaaaact

SEQ ID NO: 64958 - DNA, 27 bp, Artificial sequence
  SiRNA target sequence
atgatagaagacattaacaaaaaactt

SEQ ID NO: 64959 - DNA, 27 bp, Artificial sequence
  SiRNA target sequence
tgatagaagacattaacaaaaaacttg

SEQ ID NO: 64960 - DNA, 27 bp, Artificial sequence
  SiRNA target sequence
gatagaagacattaacaaaaaacttga

SEQ ID NO: 64961 - DNA, 27 bp, Artificial sequence
  SiRNA target sequence
atagaagacattaacaaaaaacttgaa

SEQ ID NO: 64962 - DNA, 27 bp, Artificial sequence
  SiRNA target sequence
tagaagacattaacaaaaaacttgaag

SEQ ID NO: 64963 - DNA, 27 bp, Artificial sequence
  SiRNA target sequence
agaagacattaacaaaaaacttgaaga

SEQ ID NO: 64964 - DNA, 27 bp, Artificial sequence
  SiRNA target sequence
gaagacattaacaaaaaacttgaagaa

SEQ ID NO: 64965 - DNA, 27 bp, Artificial sequence
  SiRNA target sequence
aagacattaacaaaaaacttgaagaaa

SEQ ID NO: 64966 - DNA, 27 bp, Artificial sequence
  SiRNA target sequence
agacattaacaaaaaacttgaagaaaa

SEQ ID NO: 64967 - DNA, 27 bp, Artificial sequence
  SiRNA target sequence
gacattaacaaaaaacttgaagaaaat

SEQ ID NO: 64968 - DNA, 27 bp, Artificial sequence
  SiRNA target sequence
acattaacaaaaaacttgaagaaaatt

SEQ ID NO: 64969 - DNA, 27 bp, Artificial sequence
  SiRNA target sequence
cattaacaaaaaacttgaagaaaattc

SEQ ID NO: 64970 - DNA, 27 bp, Artificial sequence
  SiRNA target sequence
attaacaaaaaacttgaagaaaattca

SEQ ID NO: 64971 - DNA, 27 bp, Artificial sequence
  SiRNA target sequence
ttaacaaaaaacttgaagaaaattcaa

SEQ ID NO: 64972 - DNA, 27 bp, Artificial sequence
  SiRNA target sequence
taacaaaaaacttgaagaaaattcaaa

SEQ ID NO: 64973 - DNA, 27 bp, Artificial sequence
  SiRNA target sequence
aacaaaaaacttgaagaaaattcaaag

SEQ ID NO: 64974 - DNA, 27 bp, Artificial sequence
  SiRNA target sequence
acaaaaaacttgaagaaaattcaaagt

SEQ ID NO: 64975 - DNA, 27 bp, Artificial sequence
  SiRNA target sequence
caaaaaacttgaagaaaattcaaagta

SEQ ID NO: 64976 - DNA, 27 bp, Artificial sequence
  SiRNA target sequence
aaaaaacttgaagaaaattcaaagtat

SEQ ID NO: 64977 - DNA, 27 bp, Artificial sequence
  SiRNA target sequence
aaaaacttgaagaaaattcaaagtatt

SEQ ID NO: 64978 - DNA, 27 bp, Artificial sequence
  SiRNA target sequence
aaaacttgaagaaaattcaaagtattt

SEQ ID NO: 64979 - DNA, 27 bp, Artificial sequence
  SiRNA target sequence
aaacttgaagaaaattcaaagtatttt

SEQ ID NO: 64980 - DNA, 27 bp, Artificial sequence
  SiRNA target sequence
aacttgaagaaaattcaaagtattttg

SEQ ID NO: 64981 - DNA, 27 bp, Artificial sequence
  SiRNA target sequence
acttgaagaaaattcaaagtattttgc

SEQ ID NO: 64982 - DNA, 27 bp, Artificial sequence
  SiRNA target sequence
cttgaagaaaattcaaagtattttgca

SEQ ID NO: 64983 - DNA, 27 bp, Artificial sequence
  SiRNA target sequence
ttgaagaaaattcaaagtattttgcag

SEQ ID NO: 64984 - DNA, 27 bp, Artificial sequence
  SiRNA target sequence
tgaagaaaattcaaagtattttgcaga

SEQ ID NO: 64985 - DNA, 27 bp, Artificial sequence
  SiRNA target sequence
gaagaaaattcaaagtattttgcagat

SEQ ID NO: 64986 - DNA, 27 bp, Artificial sequence
  SiRNA target sequence
aagaaaattcaaagtattttgcagata

SEQ ID NO: 64987 - DNA, 27 bp, Artificial sequence
  SiRNA target sequence
agaaaattcaaagtattttgcagatat

SEQ ID NO: 64988 - DNA, 27 bp, Artificial sequence
  SiRNA target sequence
gaaaattcaaagtattttgcagatatt

SEQ ID NO: 64989 - DNA, 27 bp, Artificial sequence
  SiRNA target sequence
aaaattcaaagtattttgcagatattt

SEQ ID NO: 64990 - DNA, 27 bp, Artificial sequence
  SiRNA target sequence
aaattcaaagtattttgcagatatttt

SEQ ID NO: 64991 - DNA, 27 bp, Artificial sequence
  SiRNA target sequence
aattcaaagtattttgcagatatttta

SEQ ID NO: 64992 - DNA, 27 bp, Artificial sequence
  SiRNA target sequence
attcaaagtattttgcagatattttaa

SEQ ID NO: 64993 - DNA, 27 bp, Artificial sequence
  SiRNA target sequence
ttcaaagtattttgcagatattttaaa

SEQ ID NO: 64994 - DNA, 27 bp, Artificial sequence
  SiRNA target sequence
tcaaagtattttgcagatattttaaac

SEQ ID NO: 64995 - DNA, 27 bp, Artificial sequence
  SiRNA target sequence
caaagtattttgcagatattttaaaca

SEQ ID NO: 64996 - DNA, 27 bp, Artificial sequence
  SiRNA target sequence
aaagtattttgcagatattttaaacaa

SEQ ID NO: 64997 - DNA, 27 bp, Artificial sequence
  SiRNA target sequence
aagtattttgcagatattttaaacaac

SEQ ID NO: 64998 - DNA, 27 bp, Artificial sequence
  SiRNA target sequence
agtattttgcagatattttaaacaacg

SEQ ID NO: 64999 - DNA, 27 bp, Artificial sequence
  SiRNA target sequence
gtattttgcagatattttaaacaacga

SEQ ID NO: 65000 - DNA, 27 bp, Artificial sequence
  SiRNA target sequence
tattttgcagatattttaaacaacgaa

SEQ ID NO: 65001 - DNA, 27 bp, Artificial sequence
  SiRNA target sequence
attttgcagatattttaaacaacgaat

SEQ ID NO: 65002 - DNA, 27 bp, Artificial sequence
  SiRNA target sequence
ttttgcagatattttaaacaacgaata

SEQ ID NO: 65003 - DNA, 27 bp, Artificial sequence
  SiRNA target sequence
tttgcagatattttaaacaacgaataa

SEQ ID NO: 65004 - DNA, 19 bp, Artificial sequence
  SiRNA target sequence
atgaaaaaaatttcgaata

SEQ ID NO: 65005 - DNA, 19 bp, Artificial sequence
  SiRNA target sequence
tgaaaaaaatttcgaatag

SEQ ID NO: 65006 - DNA, 19 bp, Artificial sequence
  SiRNA target sequence
gaaaaaaatttcgaataga

SEQ ID NO: 65007 - DNA, 19 bp, Artificial sequence
  SiRNA target sequence
aaaaaaatttcgaatagaa

SEQ ID NO: 65008 - DNA, 19 bp, Artificial sequence
  SiRNA target sequence
aaaaaatttcgaatagaaa

SEQ ID NO: 65009 - DNA, 19 bp, Artificial sequence
  SiRNA target sequence
aaaaatttcgaatagaaaa

SEQ ID NO: 65010 - DNA, 19 bp, Artificial sequence
  SiRNA target sequence
aaaatttcgaatagaaaaa

SEQ ID NO: 65011 - DNA, 19 bp, Artificial sequence
  SiRNA target sequence
aaatttcgaatagaaaaat

SEQ ID NO: 65012 - DNA, 19 bp, Artificial sequence
  SiRNA target sequence
aatttcgaatagaaaaatt

SEQ ID NO: 65013 - DNA, 19 bp, Artificial sequence
  SiRNA target sequence
atttcgaatagaaaaatta

SEQ ID NO: 65014 - DNA, 19 bp, Artificial sequence
  SiRNA target sequence
tttcgaatagaaaaattat

SEQ ID NO: 65015 - DNA, 19 bp, Artificial sequence
  SiRNA target sequence
ttcgaatagaaaaattatc

SEQ ID NO: 65016 - DNA, 19 bp, Artificial sequence
  SiRNA target sequence
tcgaatagaaaaattatca

SEQ ID NO: 65017 - DNA, 19 bp, Artificial sequence
  SiRNA target sequence
cgaatagaaaaattatcaa

SEQ ID NO: 65018 - DNA, 19 bp, Artificial sequence
  SiRNA target sequence
gaatagaaaaattatcaaa

SEQ ID NO: 65019 - DNA, 19 bp, Artificial sequence
  SiRNA target sequence
aatagaaaaattatcaaag

SEQ ID NO: 65020 - DNA, 19 bp, Artificial sequence
  SiRNA target sequence
atagaaaaattatcaaaga

SEQ ID NO: 65021 - DNA, 19 bp, Artificial sequence
  SiRNA target sequence
tagaaaaattatcaaagaa

SEQ ID NO: 65022 - DNA, 19 bp, Artificial sequence
  SiRNA target sequence
agaaaaattatcaaagaaa

SEQ ID NO: 65023 - DNA, 19 bp, Artificial sequence
  SiRNA target sequence
gaaaaattatcaaagaaat

SEQ ID NO: 65024 - DNA, 19 bp, Artificial sequence
  SiRNA target sequence
aaaaattatcaaagaaatt

SEQ ID NO: 65025 - DNA, 19 bp, Artificial sequence
  SiRNA target sequence
aaaattatcaaagaaatta

SEQ ID NO: 65026 - DNA, 19 bp, Artificial sequence
  SiRNA target sequence
aaattatcaaagaaattat

SEQ ID NO: 65027 - DNA, 19 bp, Artificial sequence
  SiRNA target sequence
aattatcaaagaaattatt

SEQ ID NO: 65028 - DNA, 19 bp, Artificial sequence
  SiRNA target sequence
attatcaaagaaattattt

SEQ ID NO: 65029 - DNA, 19 bp, Artificial sequence
  SiRNA target sequence
ttatcaaagaaattattta

SEQ ID NO: 65030 - DNA, 19 bp, Artificial sequence
  SiRNA target sequence
tatcaaagaaattatttac

SEQ ID NO: 65031 - DNA, 19 bp, Artificial sequence
  SiRNA target sequence
atcaaagaaattatttaca

SEQ ID NO: 65032 - DNA, 19 bp, Artificial sequence
  SiRNA target sequence
tcaaagaaattatttacaa

SEQ ID NO: 65033 - DNA, 19 bp, Artificial sequence
  SiRNA target sequence
caaagaaattatttacaat

SEQ ID NO: 65034 - DNA, 19 bp, Artificial sequence
  SiRNA target sequence
aaagaaattatttacaatg

SEQ ID NO: 65035 - DNA, 19 bp, Artificial sequence
  SiRNA target sequence
aagaaattatttacaatga

SEQ ID NO: 65036 - DNA, 19 bp, Artificial sequence
  SiRNA target sequence
agaaattatttacaatgat

SEQ ID NO: 65037 - DNA, 19 bp, Artificial sequence
  SiRNA target sequence
gaaattatttacaatgatt

SEQ ID NO: 65038 - DNA, 19 bp, Artificial sequence
  SiRNA target sequence
aaattatttacaatgattt

SEQ ID NO: 65039 - DNA, 19 bp, Artificial sequence
  SiRNA target sequence
aattatttacaatgattta

SEQ ID NO: 65040 - DNA, 19 bp, Artificial sequence
  SiRNA target sequence
attatttacaatgatttat

SEQ ID NO: 65041 - DNA, 19 bp, Artificial sequence
  SiRNA target sequence
ttatttacaatgatttatt

SEQ ID NO: 65042 - DNA, 19 bp, Artificial sequence
  SiRNA target sequence
tatttacaatgatttatta

SEQ ID NO: 65043 - DNA, 19 bp, Artificial sequence
  SiRNA target sequence
atttacaatgatttattaa

SEQ ID NO: 65044 - DNA, 19 bp, Artificial sequence
  SiRNA target sequence
tttacaatgatttattaaa

SEQ ID NO: 65045 - DNA, 19 bp, Artificial sequence
  SiRNA target sequence
ttacaatgatttattaaaa

SEQ ID NO: 65046 - DNA, 19 bp, Artificial sequence
  SiRNA target sequence
tacaatgatttattaaaaa

SEQ ID NO: 65047 - DNA, 19 bp, Artificial sequence
  SiRNA target sequence
acaatgatttattaaaaat

SEQ ID NO: 65048 - DNA, 19 bp, Artificial sequence
  SiRNA target sequence
caatgatttattaaaaata

SEQ ID NO: 65049 - DNA, 19 bp, Artificial sequence
  SiRNA target sequence
aatgatttattaaaaataa

SEQ ID NO: 65050 - DNA, 19 bp, Artificial sequence
  SiRNA target sequence
atgatttattaaaaataag

SEQ ID NO: 65051 - DNA, 19 bp, Artificial sequence
  SiRNA target sequence
tgatttattaaaaataaga

SEQ ID NO: 65052 - DNA, 19 bp, Artificial sequence
  SiRNA target sequence
gatttattaaaaataagaa

SEQ ID NO: 65053 - DNA, 19 bp, Artificial sequence
  SiRNA target sequence
atttattaaaaataagaat

SEQ ID NO: 65054 - DNA, 19 bp, Artificial sequence
  SiRNA target sequence
tttattaaaaataagaatg

SEQ ID NO: 65055 - DNA, 19 bp, Artificial sequence
  SiRNA target sequence
ttattaaaaataagaatgt

SEQ ID NO: 65056 - DNA, 19 bp, Artificial sequence
  SiRNA target sequence
tattaaaaataagaatgtt

SEQ ID NO: 65057 - DNA, 19 bp, Artificial sequence
  SiRNA target sequence
attaaaaataagaatgttg

SEQ ID NO: 65058 - DNA, 19 bp, Artificial sequence
  SiRNA target sequence
ttaaaaataagaatgttgc

SEQ ID NO: 65059 - DNA, 19 bp, Artificial sequence
  SiRNA target sequence
taaaaataagaatgttgcg

SEQ ID NO: 65060 - DNA, 19 bp, Artificial sequence
  SiRNA target sequence
aaaaataagaatgttgcga

SEQ ID NO: 65061 - DNA, 19 bp, Artificial sequence
  SiRNA target sequence
aaaataagaatgttgcgat

SEQ ID NO: 65062 - DNA, 19 bp, Artificial sequence
  SiRNA target sequence
aaataagaatgttgcgata

SEQ ID NO: 65063 - DNA, 19 bp, Artificial sequence
  SiRNA target sequence
aataagaatgttgcgatat

SEQ ID NO: 65064 - DNA, 19 bp, Artificial sequence
  SiRNA target sequence
ataagaatgttgcgatatg

SEQ ID NO: 65065 - DNA, 19 bp, Artificial sequence
  SiRNA target sequence
taagaatgttgcgatatgt

SEQ ID NO: 65066 - DNA, 19 bp, Artificial sequence
  SiRNA target sequence
aagaatgttgcgatatgtt

SEQ ID NO: 65067 - DNA, 19 bp, Artificial sequence
  SiRNA target sequence
agaatgttgcgatatgtta

SEQ ID NO: 65068 - DNA, 19 bp, Artificial sequence
  SiRNA target sequence
gaatgttgcgatatgttat

SEQ ID NO: 65069 - DNA, 19 bp, Artificial sequence
  SiRNA target sequence
aatgttgcgatatgttatt

SEQ ID NO: 65070 - DNA, 19 bp, Artificial sequence
  SiRNA target sequence
atgttgcgatatgttattg

SEQ ID NO: 65071 - DNA, 19 bp, Artificial sequence
  SiRNA target sequence
tgttgcgatatgttattgt

SEQ ID NO: 65072 - DNA, 19 bp, Artificial sequence
  SiRNA target sequence
gttgcgatatgttattgta

SEQ ID NO: 65073 - DNA, 19 bp, Artificial sequence
  SiRNA target sequence
ttgcgatatgttattgtac

SEQ ID NO: 65074 - DNA, 19 bp, Artificial sequence
  SiRNA target sequence
tgcgatatgttattgtacc

SEQ ID NO: 65075 - DNA, 19 bp, Artificial sequence
  SiRNA target sequence
gcgatatgttattgtacca

SEQ ID NO: 65076 - DNA, 19 bp, Artificial sequence
  SiRNA target sequence
cgatatgttattgtaccaa

SEQ ID NO: 65077 - DNA, 19 bp, Artificial sequence
  SiRNA target sequence
gatatgttattgtaccaat

SEQ ID NO: 65078 - DNA, 19 bp, Artificial sequence
  SiRNA target sequence
atatgttattgtaccaata

SEQ ID NO: 65079 - DNA, 19 bp, Artificial sequence
  SiRNA target sequence
tatgttattgtaccaataa

SEQ ID NO: 65080 - DNA, 19 bp, Artificial sequence
  SiRNA target sequence
atgttattgtaccaataat

SEQ ID NO: 65081 - DNA, 19 bp, Artificial sequence
  SiRNA target sequence
tgttattgtaccaataata

SEQ ID NO: 65082 - DNA, 19 bp, Artificial sequence
  SiRNA target sequence
gttattgtaccaataatat

SEQ ID NO: 65083 - DNA, 19 bp, Artificial sequence
  SiRNA target sequence
ttattgtaccaataatatt

SEQ ID NO: 65084 - DNA, 19 bp, Artificial sequence
  SiRNA target sequence
tattgtaccaataatattt

SEQ ID NO: 65085 - DNA, 19 bp, Artificial sequence
  SiRNA target sequence
attgtaccaataatatttt

SEQ ID NO: 65086 - DNA, 19 bp, Artificial sequence
  SiRNA target sequence
ttgtaccaataatattttt

SEQ ID NO: 65087 - DNA, 19 bp, Artificial sequence
  SiRNA target sequence
tgtaccaataatattttta

SEQ ID NO: 65088 - DNA, 19 bp, Artificial sequence
  SiRNA target sequence
gtaccaataatatttttaa

SEQ ID NO: 65089 - DNA, 19 bp, Artificial sequence
  SiRNA target sequence
taccaataatatttttaac

SEQ ID NO: 65090 - DNA, 19 bp, Artificial sequence
  SiRNA target sequence
accaataatatttttaact

SEQ ID NO: 65091 - DNA, 19 bp, Artificial sequence
  SiRNA target sequence
ccaataatatttttaacta

SEQ ID NO: 65092 - DNA, 19 bp, Artificial sequence
  SiRNA target sequence
caataatatttttaactat

SEQ ID NO: 65093 - DNA, 19 bp, Artificial sequence
  SiRNA target sequence
aataatatttttaactata

SEQ ID NO: 65094 - DNA, 19 bp, Artificial sequence
  SiRNA target sequence
ataatatttttaactatat

SEQ ID NO: 65095 - DNA, 19 bp, Artificial sequence
  SiRNA target sequence
taatatttttaactatatt

SEQ ID NO: 65096 - DNA, 19 bp, Artificial sequence
  SiRNA target sequence
aatatttttaactatattt

SEQ ID NO: 65097 - DNA, 19 bp, Artificial sequence
  SiRNA target sequence
atatttttaactatatttt

SEQ ID NO: 65098 - DNA, 19 bp, Artificial sequence
  SiRNA target sequence
tatttttaactatatttta

SEQ ID NO: 65099 - DNA, 19 bp, Artificial sequence
  SiRNA target sequence
atttttaactatattttac

SEQ ID NO: 65100 - DNA, 19 bp, Artificial sequence
  SiRNA target sequence
tttttaactatattttaca

SEQ ID NO: 65101 - DNA, 19 bp, Artificial sequence
  SiRNA target sequence
ttttaactatattttacac

SEQ ID NO: 65102 - DNA, 19 bp, Artificial sequence
  SiRNA target sequence
tttaactatattttacact

SEQ ID NO: 65103 - DNA, 19 bp, Artificial sequence
  SiRNA target sequence
ttaactatattttacactg

SEQ ID NO: 65104 - DNA, 19 bp, Artificial sequence
  SiRNA target sequence
taactatattttacactgt

SEQ ID NO: 65105 - DNA, 19 bp, Artificial sequence
  SiRNA target sequence
aactatattttacactgtt

SEQ ID NO: 65106 - DNA, 19 bp, Artificial sequence
  SiRNA target sequence
actatattttacactgttt

SEQ ID NO: 65107 - DNA, 19 bp, Artificial sequence
  SiRNA target sequence
ctatattttacactgtttt

SEQ ID NO: 65108 - DNA, 19 bp, Artificial sequence
  SiRNA target sequence
tatattttacactgtttta

SEQ ID NO: 65109 - DNA, 19 bp, Artificial sequence
  SiRNA target sequence
atattttacactgttttag

SEQ ID NO: 65110 - DNA, 19 bp, Artificial sequence
  SiRNA target sequence
tattttacactgttttaga

SEQ ID NO: 65111 - DNA, 19 bp, Artificial sequence
  SiRNA target sequence
attttacactgttttagag

SEQ ID NO: 65112 - DNA, 19 bp, Artificial sequence
  SiRNA target sequence
ttttacactgttttagaga

SEQ ID NO: 65113 - DNA, 19 bp, Artificial sequence
  SiRNA target sequence
tttacactgttttagagat

SEQ ID NO: 65114 - DNA, 19 bp, Artificial sequence
  SiRNA target sequence
ttacactgttttagagata

SEQ ID NO: 65115 - DNA, 19 bp, Artificial sequence
  SiRNA target sequence
tacactgttttagagataa

SEQ ID NO: 65116 - DNA, 19 bp, Artificial sequence
  SiRNA target sequence
acactgttttagagataaa

SEQ ID NO: 65117 - DNA, 19 bp, Artificial sequence
  SiRNA target sequence
cactgttttagagataaaa

SEQ ID NO: 65118 - DNA, 19 bp, Artificial sequence
  SiRNA target sequence
actgttttagagataaaaa

SEQ ID NO: 65119 - DNA, 19 bp, Artificial sequence
  SiRNA target sequence
ctgttttagagataaaaat

SEQ ID NO: 65120 - DNA, 19 bp, Artificial sequence
  SiRNA target sequence
tgttttagagataaaaata

SEQ ID NO: 65121 - DNA, 19 bp, Artificial sequence
  SiRNA target sequence
gttttagagataaaaataa

SEQ ID NO: 65122 - DNA, 19 bp, Artificial sequence
  SiRNA target sequence
ttttagagataaaaataag

SEQ ID NO: 65123 - DNA, 19 bp, Artificial sequence
  SiRNA target sequence
tttagagataaaaataagt

SEQ ID NO: 65124 - DNA, 19 bp, Artificial sequence
  SiRNA target sequence
ttagagataaaaataagta

SEQ ID NO: 65125 - DNA, 19 bp, Artificial sequence
  SiRNA target sequence
tagagataaaaataagtac

SEQ ID NO: 65126 - DNA, 19 bp, Artificial sequence
  SiRNA target sequence
agagataaaaataagtaca

SEQ ID NO: 65127 - DNA, 19 bp, Artificial sequence
  SiRNA target sequence
gagataaaaataagtacat

SEQ ID NO: 65128 - DNA, 19 bp, Artificial sequence
  SiRNA target sequence
agataaaaataagtacatt

SEQ ID NO: 65129 - DNA, 19 bp, Artificial sequence
  SiRNA target sequence
gataaaaataagtacatta

SEQ ID NO: 65130 - DNA, 19 bp, Artificial sequence
  SiRNA target sequence
ataaaaataagtacattag

SEQ ID NO: 65131 - DNA, 19 bp, Artificial sequence
  SiRNA target sequence
taaaaataagtacattagt

SEQ ID NO: 65132 - DNA, 19 bp, Artificial sequence
  SiRNA target sequence
aaaaataagtacattagta

SEQ ID NO: 65133 - DNA, 19 bp, Artificial sequence
  SiRNA target sequence
aaaataagtacattagtaa

SEQ ID NO: 65134 - DNA, 19 bp, Artificial sequence
  SiRNA target sequence
aaataagtacattagtaaa

SEQ ID NO: 65135 - DNA, 19 bp, Artificial sequence
  SiRNA target sequence
aataagtacattagtaaag

SEQ ID NO: 65136 - DNA, 19 bp, Artificial sequence
  SiRNA target sequence
ataagtacattagtaaaga

SEQ ID NO: 65137 - DNA, 19 bp, Artificial sequence
  SiRNA target sequence
taagtacattagtaaagaa

SEQ ID NO: 65138 - DNA, 19 bp, Artificial sequence
  SiRNA target sequence
aagtacattagtaaagaat

SEQ ID NO: 65139 - DNA, 19 bp, Artificial sequence
  SiRNA target sequence
agtacattagtaaagaatc

SEQ ID NO: 65140 - DNA, 19 bp, Artificial sequence
  SiRNA target sequence
gtacattagtaaagaatct

SEQ ID NO: 65141 - DNA, 19 bp, Artificial sequence
  SiRNA target sequence
tacattagtaaagaatctt

SEQ ID NO: 65142 - DNA, 19 bp, Artificial sequence
  SiRNA target sequence
acattagtaaagaatctta

SEQ ID NO: 65143 - DNA, 19 bp, Artificial sequence
  SiRNA target sequence
cattagtaaagaatcttaa

SEQ ID NO: 65144 - DNA, 19 bp, Artificial sequence
  SiRNA target sequence
attagtaaagaatcttaat

SEQ ID NO: 65145 - DNA, 19 bp, Artificial sequence
  SiRNA target sequence
ttagtaaagaatcttaatc

SEQ ID NO: 65146 - DNA, 19 bp, Artificial sequence
  SiRNA target sequence
tagtaaagaatcttaatca

SEQ ID NO: 65147 - DNA, 19 bp, Artificial sequence
  SiRNA target sequence
agtaaagaatcttaatcaa

SEQ ID NO: 65148 - DNA, 19 bp, Artificial sequence
  SiRNA target sequence
gtaaagaatcttaatcaat

SEQ ID NO: 65149 - DNA, 19 bp, Artificial sequence
  SiRNA target sequence
taaagaatcttaatcaatc

SEQ ID NO: 65150 - DNA, 19 bp, Artificial sequence
  SiRNA target sequence
aaagaatcttaatcaatct

SEQ ID NO: 65151 - DNA, 19 bp, Artificial sequence
  SiRNA target sequence
aagaatcttaatcaatcta

SEQ ID NO: 65152 - DNA, 19 bp, Artificial sequence
  SiRNA target sequence
agaatcttaatcaatctat

SEQ ID NO: 65153 - DNA, 19 bp, Artificial sequence
  SiRNA target sequence
gaatcttaatcaatctatc

SEQ ID NO: 65154 - DNA, 19 bp, Artificial sequence
  SiRNA target sequence
aatcttaatcaatctatcg

SEQ ID NO: 65155 - DNA, 19 bp, Artificial sequence
  SiRNA target sequence
atcttaatcaatctatcgc

SEQ ID NO: 65156 - DNA, 19 bp, Artificial sequence
  SiRNA target sequence
tcttaatcaatctatcgca

SEQ ID NO: 65157 - DNA, 19 bp, Artificial sequence
  SiRNA target sequence
cttaatcaatctatcgcaa

SEQ ID NO: 65158 - DNA, 19 bp, Artificial sequence
  SiRNA target sequence
ttaatcaatctatcgcaaa

SEQ ID NO: 65159 - DNA, 19 bp, Artificial sequence
  SiRNA target sequence
taatcaatctatcgcaaat

SEQ ID NO: 65160 - DNA, 19 bp, Artificial sequence
  SiRNA target sequence
aatcaatctatcgcaaatc

SEQ ID NO: 65161 - DNA, 19 bp, Artificial sequence
  SiRNA target sequence
atcaatctatcgcaaatcg

SEQ ID NO: 65162 - DNA, 19 bp, Artificial sequence
  SiRNA target sequence
tcaatctatcgcaaatcga

SEQ ID NO: 65163 - DNA, 19 bp, Artificial sequence
  SiRNA target sequence
caatctatcgcaaatcgaa

SEQ ID NO: 65164 - DNA, 19 bp, Artificial sequence
  SiRNA target sequence
aatctatcgcaaatcgaaa

SEQ ID NO: 65165 - DNA, 19 bp, Artificial sequence
  SiRNA target sequence
atctatcgcaaatcgaaaa

SEQ ID NO: 65166 - DNA, 19 bp, Artificial sequence
  SiRNA target sequence
tctatcgcaaatcgaaaag

SEQ ID NO: 65167 - DNA, 19 bp, Artificial sequence
  SiRNA target sequence
ctatcgcaaatcgaaaagg

SEQ ID NO: 65168 - DNA, 19 bp, Artificial sequence
  SiRNA target sequence
tatcgcaaatcgaaaaggt

SEQ ID NO: 65169 - DNA, 19 bp, Artificial sequence
  SiRNA target sequence
atcgcaaatcgaaaaggtg

SEQ ID NO: 65170 - DNA, 19 bp, Artificial sequence
  SiRNA target sequence
tcgcaaatcgaaaaggtga

SEQ ID NO: 65171 - DNA, 19 bp, Artificial sequence
  SiRNA target sequence
cgcaaatcgaaaaggtgaa

SEQ ID NO: 65172 - DNA, 19 bp, Artificial sequence
  SiRNA target sequence
gcaaatcgaaaaggtgaac

SEQ ID NO: 65173 - DNA, 19 bp, Artificial sequence
  SiRNA target sequence
caaatcgaaaaggtgaaca

SEQ ID NO: 65174 - DNA, 19 bp, Artificial sequence
  SiRNA target sequence
aaatcgaaaaggtgaacac

SEQ ID NO: 65175 - DNA, 19 bp, Artificial sequence
  SiRNA target sequence
aatcgaaaaggtgaacaca

SEQ ID NO: 65176 - DNA, 19 bp, Artificial sequence
  SiRNA target sequence
atcgaaaaggtgaacacac

SEQ ID NO: 65177 - DNA, 19 bp, Artificial sequence
  SiRNA target sequence
tcgaaaaggtgaacacaca

SEQ ID NO: 65178 - DNA, 19 bp, Artificial sequence
  SiRNA target sequence
cgaaaaggtgaacacacag

SEQ ID NO: 65179 - DNA, 19 bp, Artificial sequence
  SiRNA target sequence
gaaaaggtgaacacacagc

SEQ ID NO: 65180 - DNA, 19 bp, Artificial sequence
  SiRNA target sequence
aaaaggtgaacacacagca

SEQ ID NO: 65181 - DNA, 19 bp, Artificial sequence
  SiRNA target sequence
aaaggtgaacacacagcac

SEQ ID NO: 65182 - DNA, 19 bp, Artificial sequence
  SiRNA target sequence
aaggtgaacacacagcact

SEQ ID NO: 65183 - DNA, 19 bp, Artificial sequence
  SiRNA target sequence
aggtgaacacacagcactt

SEQ ID NO: 65184 - DNA, 19 bp, Artificial sequence
  SiRNA target sequence
ggtgaacacacagcacttg

SEQ ID NO: 65185 - DNA, 19 bp, Artificial sequence
  SiRNA target sequence
gtgaacacacagcacttga

SEQ ID NO: 65186 - DNA, 19 bp, Artificial sequence
  SiRNA target sequence
tgaacacacagcacttgaa

SEQ ID NO: 65187 - DNA, 19 bp, Artificial sequence
  SiRNA target sequence
gaacacacagcacttgaaa

SEQ ID NO: 65188 - DNA, 19 bp, Artificial sequence
  SiRNA target sequence
aacacacagcacttgaaag

SEQ ID NO: 65189 - DNA, 19 bp, Artificial sequence
  SiRNA target sequence
acacacagcacttgaaaga

SEQ ID NO: 65190 - DNA, 19 bp, Artificial sequence
  SiRNA target sequence
cacacagcacttgaaagat

SEQ ID NO: 65191 - DNA, 19 bp, Artificial sequence
  SiRNA target sequence
acacagcacttgaaagatt

SEQ ID NO: 65192 - DNA, 19 bp, Artificial sequence
  SiRNA target sequence
cacagcacttgaaagattt

SEQ ID NO: 65193 - DNA, 19 bp, Artificial sequence
  SiRNA target sequence
acagcacttgaaagatttg

SEQ ID NO: 65194 - DNA, 19 bp, Artificial sequence
  SiRNA target sequence
cagcacttgaaagatttgt

SEQ ID NO: 65195 - DNA, 19 bp, Artificial sequence
  SiRNA target sequence
agcacttgaaagatttgtg

SEQ ID NO: 65196 - DNA, 19 bp, Artificial sequence
  SiRNA target sequence
gcacttgaaagatttgtgt

SEQ ID NO: 65197 - DNA, 19 bp, Artificial sequence
  SiRNA target sequence
cacttgaaagatttgtgtt

SEQ ID NO: 65198 - DNA, 19 bp, Artificial sequence
  SiRNA target sequence
acttgaaagatttgtgtta

SEQ ID NO: 65199 - DNA, 19 bp, Artificial sequence
  SiRNA target sequence
cttgaaagatttgtgttac

SEQ ID NO: 65200 - DNA, 19 bp, Artificial sequence
  SiRNA target sequence
ttgaaagatttgtgttaca

SEQ ID NO: 65201 - DNA, 19 bp, Artificial sequence
  SiRNA target sequence
tgaaagatttgtgttacag

SEQ ID NO: 65202 - DNA, 19 bp, Artificial sequence
  SiRNA target sequence
gaaagatttgtgttacagt

SEQ ID NO: 65203 - DNA, 19 bp, Artificial sequence
  SiRNA target sequence
aaagatttgtgttacagtc

SEQ ID NO: 65204 - DNA, 19 bp, Artificial sequence
  SiRNA target sequence
aagatttgtgttacagtca

SEQ ID NO: 65205 - DNA, 19 bp, Artificial sequence
  SiRNA target sequence
agatttgtgttacagtcac

SEQ ID NO: 65206 - DNA, 19 bp, Artificial sequence
  SiRNA target sequence
gatttgtgttacagtcact

SEQ ID NO: 65207 - DNA, 19 bp, Artificial sequence
  SiRNA target sequence
atttgtgttacagtcactc

SEQ ID NO: 65208 - DNA, 19 bp, Artificial sequence
  SiRNA target sequence
tttgtgttacagtcactct

SEQ ID NO: 65209 - DNA, 19 bp, Artificial sequence
  SiRNA target sequence
ttgtgttacagtcactctt

SEQ ID NO: 65210 - DNA, 19 bp, Artificial sequence
  SiRNA target sequence
tgtgttacagtcactctta

SEQ ID NO: 65211 - DNA, 19 bp, Artificial sequence
  SiRNA target sequence
gtgttacagtcactcttag

SEQ ID NO: 65212 - DNA, 19 bp, Artificial sequence
  SiRNA target sequence
tgttacagtcactcttagt

SEQ ID NO: 65213 - DNA, 19 bp, Artificial sequence
  SiRNA target sequence
gttacagtcactcttagtg

SEQ ID NO: 65214 - DNA, 19 bp, Artificial sequence
  SiRNA target sequence
ttacagtcactcttagtgg

SEQ ID NO: 65215 - DNA, 19 bp, Artificial sequence
  SiRNA target sequence
tacagtcactcttagtggc

SEQ ID NO: 65216 - DNA, 19 bp, Artificial sequence
  SiRNA target sequence
acagtcactcttagtggct

SEQ ID NO: 65217 - DNA, 19 bp, Artificial sequence
  SiRNA target sequence
cagtcactcttagtggctg

SEQ ID NO: 65218 - DNA, 19 bp, Artificial sequence
  SiRNA target sequence
agtcactcttagtggctgt

SEQ ID NO: 65219 - DNA, 19 bp, Artificial sequence
  SiRNA target sequence
gtcactcttagtggctgta

SEQ ID NO: 65220 - DNA, 19 bp, Artificial sequence
  SiRNA target sequence
tcactcttagtggctgtat

SEQ ID NO: 65221 - DNA, 19 bp, Artificial sequence
  SiRNA target sequence
cactcttagtggctgtatt

SEQ ID NO: 65222 - DNA, 19 bp, Artificial sequence
  SiRNA target sequence
actcttagtggctgtattg

SEQ ID NO: 65223 - DNA, 19 bp, Artificial sequence
  SiRNA target sequence
ctcttagtggctgtattga

SEQ ID NO: 65224 - DNA, 19 bp, Artificial sequence
  SiRNA target sequence
tcttagtggctgtattgac

SEQ ID NO: 65225 - DNA, 19 bp, Artificial sequence
  SiRNA target sequence
cttagtggctgtattgacc

SEQ ID NO: 65226 - DNA, 19 bp, Artificial sequence
  SiRNA target sequence
ttagtggctgtattgaccg

SEQ ID NO: 65227 - DNA, 19 bp, Artificial sequence
  SiRNA target sequence
tagtggctgtattgaccga

SEQ ID NO: 65228 - DNA, 19 bp, Artificial sequence
  SiRNA target sequence
agtggctgtattgaccgaa

SEQ ID NO: 65229 - DNA, 19 bp, Artificial sequence
  SiRNA target sequence
gtggctgtattgaccgaac

SEQ ID NO: 65230 - DNA, 19 bp, Artificial sequence
  SiRNA target sequence
tggctgtattgaccgaact

SEQ ID NO: 65231 - DNA, 19 bp, Artificial sequence
  SiRNA target sequence
ggctgtattgaccgaactt

SEQ ID NO: 65232 - DNA, 19 bp, Artificial sequence
  SiRNA target sequence
gctgtattgaccgaactta

SEQ ID NO: 65233 - DNA, 19 bp, Artificial sequence
  SiRNA target sequence
ctgtattgaccgaacttaa

SEQ ID NO: 65234 - DNA, 19 bp, Artificial sequence
  SiRNA target sequence
tgtattgaccgaacttaat

SEQ ID NO: 65235 - DNA, 19 bp, Artificial sequence
  SiRNA target sequence
gtattgaccgaacttaatg

SEQ ID NO: 65236 - DNA, 19 bp, Artificial sequence
  SiRNA target sequence
tattgaccgaacttaatgg

SEQ ID NO: 65237 - DNA, 19 bp, Artificial sequence
  SiRNA target sequence
attgaccgaacttaatgga

SEQ ID NO: 65238 - DNA, 19 bp, Artificial sequence
  SiRNA target sequence
ttgaccgaacttaatggat

SEQ ID NO: 65239 - DNA, 19 bp, Artificial sequence
  SiRNA target sequence
tgaccgaacttaatggatt

SEQ ID NO: 65240 - DNA, 19 bp, Artificial sequence
  SiRNA target sequence
gaccgaacttaatggattt

SEQ ID NO: 65241 - DNA, 19 bp, Artificial sequence
  SiRNA target sequence
accgaacttaatggattta

SEQ ID NO: 65242 - DNA, 19 bp, Artificial sequence
  SiRNA target sequence
ccgaacttaatggatttat

SEQ ID NO: 65243 - DNA, 19 bp, Artificial sequence
  SiRNA target sequence
cgaacttaatggatttatt

SEQ ID NO: 65244 - DNA, 19 bp, Artificial sequence
  SiRNA target sequence
gaacttaatggatttattt

SEQ ID NO: 65245 - DNA, 19 bp, Artificial sequence
  SiRNA target sequence
aacttaatggatttatttt

SEQ ID NO: 65246 - DNA, 19 bp, Artificial sequence
  SiRNA target sequence
acttaatggatttattttt

SEQ ID NO: 65247 - DNA, 19 bp, Artificial sequence
  SiRNA target sequence
cttaatggatttattttta

SEQ ID NO: 65248 - DNA, 19 bp, Artificial sequence
  SiRNA target sequence
ttaatggatttatttttac

SEQ ID NO: 65249 - DNA, 19 bp, Artificial sequence
  SiRNA target sequence
taatggatttatttttaca

SEQ ID NO: 65250 - DNA, 19 bp, Artificial sequence
  SiRNA target sequence
aatggatttatttttacag

SEQ ID NO: 65251 - DNA, 19 bp, Artificial sequence
  SiRNA target sequence
atggatttatttttacagg

SEQ ID NO: 65252 - DNA, 19 bp, Artificial sequence
  SiRNA target sequence
tggatttatttttacaggt

SEQ ID NO: 65253 - DNA, 19 bp, Artificial sequence
  SiRNA target sequence
ggatttatttttacaggtg

SEQ ID NO: 65254 - DNA, 19 bp, Artificial sequence
  SiRNA target sequence
gatttatttttacaggtgt

SEQ ID NO: 65255 - DNA, 19 bp, Artificial sequence
  SiRNA target sequence
atttatttttacaggtgta

SEQ ID NO: 65256 - DNA, 19 bp, Artificial sequence
  SiRNA target sequence
tttatttttacaggtgtag

SEQ ID NO: 65257 - DNA, 19 bp, Artificial sequence
  SiRNA target sequence
ttatttttacaggtgtagt

SEQ ID NO: 65258 - DNA, 19 bp, Artificial sequence
  SiRNA target sequence
tatttttacaggtgtagtg

SEQ ID NO: 65259 - DNA, 19 bp, Artificial sequence
  SiRNA target sequence
atttttacaggtgtagtgc

SEQ ID NO: 65260 - DNA, 19 bp, Artificial sequence
  SiRNA target sequence
tttttacaggtgtagtgca

SEQ ID NO: 65261 - DNA, 19 bp, Artificial sequence
  SiRNA target sequence
ttttacaggtgtagtgcaa

SEQ ID NO: 65262 - DNA, 19 bp, Artificial sequence
  SiRNA target sequence
tttacaggtgtagtgcaat

SEQ ID NO: 65263 - DNA, 19 bp, Artificial sequence
  SiRNA target sequence
ttacaggtgtagtgcaata

SEQ ID NO: 65264 - DNA, 19 bp, Artificial sequence
  SiRNA target sequence
tacaggtgtagtgcaatat

SEQ ID NO: 65265 - DNA, 19 bp, Artificial sequence
  SiRNA target sequence
acaggtgtagtgcaatata

SEQ ID NO: 65266 - DNA, 19 bp, Artificial sequence
  SiRNA target sequence
caggtgtagtgcaatatat

SEQ ID NO: 65267 - DNA, 19 bp, Artificial sequence
  SiRNA target sequence
aggtgtagtgcaatatatt

SEQ ID NO: 65268 - DNA, 19 bp, Artificial sequence
  SiRNA target sequence
ggtgtagtgcaatatattt

SEQ ID NO: 65269 - DNA, 19 bp, Artificial sequence
  SiRNA target sequence
gtgtagtgcaatatattta

SEQ ID NO: 65270 - DNA, 19 bp, Artificial sequence
  SiRNA target sequence
tgtagtgcaatatatttat

SEQ ID NO: 65271 - DNA, 19 bp, Artificial sequence
  SiRNA target sequence
gtagtgcaatatatttata

SEQ ID NO: 65272 - DNA, 19 bp, Artificial sequence
  SiRNA target sequence
tagtgcaatatatttatag

SEQ ID NO: 65273 - DNA, 19 bp, Artificial sequence
  SiRNA target sequence
agtgcaatatatttataga

SEQ ID NO: 65274 - DNA, 19 bp, Artificial sequence
  SiRNA target sequence
gtgcaatatatttatagaa

SEQ ID NO: 65275 - DNA, 19 bp, Artificial sequence
  SiRNA target sequence
tgcaatatatttatagaaa

SEQ ID NO: 65276 - DNA, 19 bp, Artificial sequence
  SiRNA target sequence
gcaatatatttatagaaat

SEQ ID NO: 65277 - DNA, 19 bp, Artificial sequence
  SiRNA target sequence
caatatatttatagaaata

SEQ ID NO: 65278 - DNA, 19 bp, Artificial sequence
  SiRNA target sequence
aatatatttatagaaatac

SEQ ID NO: 65279 - DNA, 19 bp, Artificial sequence
  SiRNA target sequence
atatatttatagaaatacg

SEQ ID NO: 65280 - DNA, 19 bp, Artificial sequence
  SiRNA target sequence
tatatttatagaaatacgg

SEQ ID NO: 65281 - DNA, 19 bp, Artificial sequence
  SiRNA target sequence
atatttatagaaatacggc

SEQ ID NO: 65282 - DNA, 19 bp, Artificial sequence
  SiRNA target sequence
tatttatagaaatacggca

SEQ ID NO: 65283 - DNA, 19 bp, Artificial sequence
  SiRNA target sequence
atttatagaaatacggcaa

SEQ ID NO: 65284 - DNA, 19 bp, Artificial sequence
  SiRNA target sequence
tttatagaaatacggcaaa

SEQ ID NO: 65285 - DNA, 19 bp, Artificial sequence
  SiRNA target sequence
ttatagaaatacggcaaaa

SEQ ID NO: 65286 - DNA, 19 bp, Artificial sequence
  SiRNA target sequence
tatagaaatacggcaaaat

SEQ ID NO: 65287 - DNA, 19 bp, Artificial sequence
  SiRNA target sequence
atagaaatacggcaaaatc

SEQ ID NO: 65288 - DNA, 19 bp, Artificial sequence
  SiRNA target sequence
tagaaatacggcaaaatct

SEQ ID NO: 65289 - DNA, 19 bp, Artificial sequence
  SiRNA target sequence
agaaatacggcaaaatcta

SEQ ID NO: 65290 - DNA, 19 bp, Artificial sequence
  SiRNA target sequence
gaaatacggcaaaatctac

SEQ ID NO: 65291 - DNA, 19 bp, Artificial sequence
  SiRNA target sequence
aaatacggcaaaatctaca

SEQ ID NO: 65292 - DNA, 19 bp, Artificial sequence
  SiRNA target sequence
aatacggcaaaatctacat

SEQ ID NO: 65293 - DNA, 19 bp, Artificial sequence
  SiRNA target sequence
atacggcaaaatctacatt

SEQ ID NO: 65294 - DNA, 19 bp, Artificial sequence
  SiRNA target sequence
tacggcaaaatctacattc

SEQ ID NO: 65295 - DNA, 19 bp, Artificial sequence
  SiRNA target sequence
acggcaaaatctacattca

SEQ ID NO: 65296 - DNA, 19 bp, Artificial sequence
  SiRNA target sequence
cggcaaaatctacattcaa

SEQ ID NO: 65297 - DNA, 19 bp, Artificial sequence
  SiRNA target sequence
ggcaaaatctacattcaaa

SEQ ID NO: 65298 - DNA, 19 bp, Artificial sequence
  SiRNA target sequence
gcaaaatctacattcaaag

SEQ ID NO: 65299 - DNA, 19 bp, Artificial sequence
  SiRNA target sequence
caaaatctacattcaaagg

SEQ ID NO: 65300 - DNA, 19 bp, Artificial sequence
  SiRNA target sequence
aaaatctacattcaaaggc

SEQ ID NO: 65301 - DNA, 19 bp, Artificial sequence
  SiRNA target sequence
aaatctacattcaaaggct

SEQ ID NO: 65302 - DNA, 19 bp, Artificial sequence
  SiRNA target sequence
aatctacattcaaaggctt

SEQ ID NO: 65303 - DNA, 19 bp, Artificial sequence
  SiRNA target sequence
atctacattcaaaggcttc

SEQ ID NO: 65304 - DNA, 19 bp, Artificial sequence
  SiRNA target sequence
tctacattcaaaggcttca

SEQ ID NO: 65305 - DNA, 19 bp, Artificial sequence
  SiRNA target sequence
ctacattcaaaggcttcat

SEQ ID NO: 65306 - DNA, 19 bp, Artificial sequence
  SiRNA target sequence
tacattcaaaggcttcatt

SEQ ID NO: 65307 - DNA, 19 bp, Artificial sequence
  SiRNA target sequence
acattcaaaggcttcattt

SEQ ID NO: 65308 - DNA, 19 bp, Artificial sequence
  SiRNA target sequence
cattcaaaggcttcatttc

SEQ ID NO: 65309 - DNA, 19 bp, Artificial sequence
  SiRNA target sequence
attcaaaggcttcatttct

SEQ ID NO: 65310 - DNA, 19 bp, Artificial sequence
  SiRNA target sequence
ttcaaaggcttcatttctc

SEQ ID NO: 65311 - DNA, 19 bp, Artificial sequence
  SiRNA target sequence
tcaaaggcttcatttctct

SEQ ID NO: 65312 - DNA, 19 bp, Artificial sequence
  SiRNA target sequence
caaaggcttcatttctctt

SEQ ID NO: 65313 - DNA, 19 bp, Artificial sequence
  SiRNA target sequence
aaaggcttcatttctcttt

SEQ ID NO: 65314 - DNA, 19 bp, Artificial sequence
  SiRNA target sequence
aaggcttcatttctctttc

SEQ ID NO: 65315 - DNA, 19 bp, Artificial sequence
  SiRNA target sequence
aggcttcatttctctttca

SEQ ID NO: 65316 - DNA, 19 bp, Artificial sequence
  SiRNA target sequence
ggcttcatttctctttcac

SEQ ID NO: 65317 - DNA, 19 bp, Artificial sequence
  SiRNA target sequence
gcttcatttctctttcacc

SEQ ID NO: 65318 - DNA, 19 bp, Artificial sequence
  SiRNA target sequence
cttcatttctctttcacct

SEQ ID NO: 65319 - DNA, 19 bp, Artificial sequence
  SiRNA target sequence
ttcatttctctttcaccta

SEQ ID NO: 65320 - DNA, 19 bp, Artificial sequence
  SiRNA target sequence
tcatttctctttcacctaa

SEQ ID NO: 65321 - DNA, 19 bp, Artificial sequence
  SiRNA target sequence
catttctctttcacctaaa

SEQ ID NO: 65322 - DNA, 19 bp, Artificial sequence
  SiRNA target sequence
atttctctttcacctaaaa

SEQ ID NO: 65323 - DNA, 19 bp, Artificial sequence
  SiRNA target sequence
tttctctttcacctaaaaa

SEQ ID NO: 65324 - DNA, 19 bp, Artificial sequence
  SiRNA target sequence
ttctctttcacctaaaaat

SEQ ID NO: 65325 - DNA, 19 bp, Artificial sequence
  SiRNA target sequence
tctctttcacctaaaaatt

SEQ ID NO: 65326 - DNA, 19 bp, Artificial sequence
  SiRNA target sequence
ctctttcacctaaaaattt

SEQ ID NO: 65327 - DNA, 19 bp, Artificial sequence
  SiRNA target sequence
tctttcacctaaaaatttt

SEQ ID NO: 65328 - DNA, 19 bp, Artificial sequence
  SiRNA target sequence
ctttcacctaaaaatttta

SEQ ID NO: 65329 - DNA, 19 bp, Artificial sequence
  SiRNA target sequence
tttcacctaaaaattttag

SEQ ID NO: 65330 - DNA, 19 bp, Artificial sequence
  SiRNA target sequence
ttcacctaaaaattttagt

SEQ ID NO: 65331 - DNA, 19 bp, Artificial sequence
  SiRNA target sequence
tcacctaaaaattttagta

SEQ ID NO: 65332 - DNA, 19 bp, Artificial sequence
  SiRNA target sequence
cacctaaaaattttagtac

SEQ ID NO: 65333 - DNA, 19 bp, Artificial sequence
  SiRNA target sequence
acctaaaaattttagtacc

SEQ ID NO: 65334 - DNA, 19 bp, Artificial sequence
  SiRNA target sequence
cctaaaaattttagtacca

SEQ ID NO: 65335 - DNA, 19 bp, Artificial sequence
  SiRNA target sequence
ctaaaaattttagtaccat

SEQ ID NO: 65336 - DNA, 19 bp, Artificial sequence
  SiRNA target sequence
taaaaattttagtaccata

SEQ ID NO: 65337 - DNA, 19 bp, Artificial sequence
  SiRNA target sequence
aaaaattttagtaccatag

SEQ ID NO: 65338 - DNA, 19 bp, Artificial sequence
  SiRNA target sequence
aaaattttagtaccatagg

SEQ ID NO: 65339 - DNA, 19 bp, Artificial sequence
  SiRNA target sequence
aaattttagtaccataggt

SEQ ID NO: 65340 - DNA, 19 bp, Artificial sequence
  SiRNA target sequence
aattttagtaccataggtg

SEQ ID NO: 65341 - DNA, 19 bp, Artificial sequence
  SiRNA target sequence
attttagtaccataggtgg

SEQ ID NO: 65342 - DNA, 19 bp, Artificial sequence
  SiRNA target sequence
ttttagtaccataggtggc

SEQ ID NO: 65343 - DNA, 19 bp, Artificial sequence
  SiRNA target sequence
tttagtaccataggtggcg

SEQ ID NO: 65344 - DNA, 19 bp, Artificial sequence
  SiRNA target sequence
ttagtaccataggtggcgg

SEQ ID NO: 65345 - DNA, 19 bp, Artificial sequence
  SiRNA target sequence
tagtaccataggtggcgga

SEQ ID NO: 65346 - DNA, 19 bp, Artificial sequence
  SiRNA target sequence
agtaccataggtggcggag

SEQ ID NO: 65347 - DNA, 19 bp, Artificial sequence
  SiRNA target sequence
gtaccataggtggcggaga

SEQ ID NO: 65348 - DNA, 19 bp, Artificial sequence
  SiRNA target sequence
taccataggtggcggagaa

SEQ ID NO: 65349 - DNA, 19 bp, Artificial sequence
  SiRNA target sequence
accataggtggcggagaaa

SEQ ID NO: 65350 - DNA, 19 bp, Artificial sequence
  SiRNA target sequence
ccataggtggcggagaaat

SEQ ID NO: 65351 - DNA, 19 bp, Artificial sequence
  SiRNA target sequence
cataggtggcggagaaatt

SEQ ID NO: 65352 - DNA, 19 bp, Artificial sequence
  SiRNA target sequence
ataggtggcggagaaattc

SEQ ID NO: 65353 - DNA, 19 bp, Artificial sequence
  SiRNA target sequence
taggtggcggagaaattca

SEQ ID NO: 65354 - DNA, 19 bp, Artificial sequence
  SiRNA target sequence
aggtggcggagaaattcaa

SEQ ID NO: 65355 - DNA, 19 bp, Artificial sequence
  SiRNA target sequence
ggtggcggagaaattcaaa

SEQ ID NO: 65356 - DNA, 19 bp, Artificial sequence
  SiRNA target sequence
gtggcggagaaattcaaac

SEQ ID NO: 65357 - DNA, 19 bp, Artificial sequence
  SiRNA target sequence
tggcggagaaattcaaaca

SEQ ID NO: 65358 - DNA, 19 bp, Artificial sequence
  SiRNA target sequence
ggcggagaaattcaaacaa

SEQ ID NO: 65359 - DNA, 19 bp, Artificial sequence
  SiRNA target sequence
gcggagaaattcaaacaat

SEQ ID NO: 65360 - DNA, 19 bp, Artificial sequence
  SiRNA target sequence
cggagaaattcaaacaata

SEQ ID NO: 65361 - DNA, 19 bp, Artificial sequence
  SiRNA target sequence
ggagaaattcaaacaataa

SEQ ID NO: 65362 - DNA, 19 bp, Artificial sequence
  SiRNA target sequence
gagaaattcaaacaataat

SEQ ID NO: 65363 - DNA, 19 bp, Artificial sequence
  SiRNA target sequence
agaaattcaaacaataata

SEQ ID NO: 65364 - DNA, 19 bp, Artificial sequence
  SiRNA target sequence
gaaattcaaacaataatag

SEQ ID NO: 65365 - DNA, 19 bp, Artificial sequence
  SiRNA target sequence
aaattcaaacaataataga

SEQ ID NO: 65366 - DNA, 19 bp, Artificial sequence
  SiRNA target sequence
aattcaaacaataatagat

SEQ ID NO: 65367 - DNA, 19 bp, Artificial sequence
  SiRNA target sequence
attcaaacaataatagata

SEQ ID NO: 65368 - DNA, 19 bp, Artificial sequence
  SiRNA target sequence
ttcaaacaataatagatag

SEQ ID NO: 65369 - DNA, 19 bp, Artificial sequence
  SiRNA target sequence
tcaaacaataatagataga

SEQ ID NO: 65370 - DNA, 19 bp, Artificial sequence
  SiRNA target sequence
caaacaataatagatagaa

SEQ ID NO: 65371 - DNA, 19 bp, Artificial sequence
  SiRNA target sequence
aaacaataatagatagaaa

SEQ ID NO: 65372 - DNA, 19 bp, Artificial sequence
  SiRNA target sequence
aacaataatagatagaaaa

SEQ ID NO: 65373 - DNA, 19 bp, Artificial sequence
  SiRNA target sequence
acaataatagatagaaaat

SEQ ID NO: 65374 - DNA, 19 bp, Artificial sequence
  SiRNA target sequence
caataatagatagaaaatc

SEQ ID NO: 65375 - DNA, 19 bp, Artificial sequence
  SiRNA target sequence
aataatagatagaaaatca

SEQ ID NO: 65376 - DNA, 19 bp, Artificial sequence
  SiRNA target sequence
ataatagatagaaaatcaa

SEQ ID NO: 65377 - DNA, 19 bp, Artificial sequence
  SiRNA target sequence
taatagatagaaaatcaaa

SEQ ID NO: 65378 - DNA, 19 bp, Artificial sequence
  SiRNA target sequence
aatagatagaaaatcaaaa

SEQ ID NO: 65379 - DNA, 19 bp, Artificial sequence
  SiRNA target sequence
atagatagaaaatcaaaat

SEQ ID NO: 65380 - DNA, 19 bp, Artificial sequence
  SiRNA target sequence
tagatagaaaatcaaaatc

SEQ ID NO: 65381 - DNA, 19 bp, Artificial sequence
  SiRNA target sequence
agatagaaaatcaaaatct

SEQ ID NO: 65382 - DNA, 19 bp, Artificial sequence
  SiRNA target sequence
gatagaaaatcaaaatctg

SEQ ID NO: 65383 - DNA, 19 bp, Artificial sequence
  SiRNA target sequence
atagaaaatcaaaatctgc

SEQ ID NO: 65384 - DNA, 19 bp, Artificial sequence
  SiRNA target sequence
tagaaaatcaaaatctgca

SEQ ID NO: 65385 - DNA, 19 bp, Artificial sequence
  SiRNA target sequence
agaaaatcaaaatctgcaa

SEQ ID NO: 65386 - DNA, 19 bp, Artificial sequence
  SiRNA target sequence
gaaaatcaaaatctgcaag

SEQ ID NO: 65387 - DNA, 19 bp, Artificial sequence
  SiRNA target sequence
aaaatcaaaatctgcaagt

SEQ ID NO: 65388 - DNA, 19 bp, Artificial sequence
  SiRNA target sequence
aaatcaaaatctgcaagtg

SEQ ID NO: 65389 - DNA, 19 bp, Artificial sequence
  SiRNA target sequence
aatcaaaatctgcaagtga

SEQ ID NO: 65390 - DNA, 19 bp, Artificial sequence
  SiRNA target sequence
atcaaaatctgcaagtgaa

SEQ ID NO: 65391 - DNA, 19 bp, Artificial sequence
  SiRNA target sequence
tcaaaatctgcaagtgaac

SEQ ID NO: 65392 - DNA, 19 bp, Artificial sequence
  SiRNA target sequence
caaaatctgcaagtgaact

SEQ ID NO: 65393 - DNA, 19 bp, Artificial sequence
  SiRNA target sequence
aaaatctgcaagtgaactt

SEQ ID NO: 65394 - DNA, 19 bp, Artificial sequence
  SiRNA target sequence
aaatctgcaagtgaactta

SEQ ID NO: 65395 - DNA, 19 bp, Artificial sequence
  SiRNA target sequence
aatctgcaagtgaacttat

SEQ ID NO: 65396 - DNA, 19 bp, Artificial sequence
  SiRNA target sequence
atctgcaagtgaacttatt

SEQ ID NO: 65397 - DNA, 19 bp, Artificial sequence
  SiRNA target sequence
tctgcaagtgaacttattg

SEQ ID NO: 65398 - DNA, 19 bp, Artificial sequence
  SiRNA target sequence
ctgcaagtgaacttattga

SEQ ID NO: 65399 - DNA, 19 bp, Artificial sequence
  SiRNA target sequence
tgcaagtgaacttattgaa

SEQ ID NO: 65400 - DNA, 19 bp, Artificial sequence
  SiRNA target sequence
gcaagtgaacttattgaag

SEQ ID NO: 65401 - DNA, 19 bp, Artificial sequence
  SiRNA target sequence
caagtgaacttattgaagt

SEQ ID NO: 65402 - DNA, 19 bp, Artificial sequence
  SiRNA target sequence
aagtgaacttattgaagtg

SEQ ID NO: 65403 - DNA, 19 bp, Artificial sequence
  SiRNA target sequence
agtgaacttattgaagtgt

SEQ ID NO: 65404 - DNA, 19 bp, Artificial sequence
  SiRNA target sequence
gtgaacttattgaagtgtt

SEQ ID NO: 65405 - DNA, 19 bp, Artificial sequence
  SiRNA target sequence
tgaacttattgaagtgttt

SEQ ID NO: 65406 - DNA, 19 bp, Artificial sequence
  SiRNA target sequence
gaacttattgaagtgtttc

SEQ ID NO: 65407 - DNA, 19 bp, Artificial sequence
  SiRNA target sequence
aacttattgaagtgtttct

SEQ ID NO: 65408 - DNA, 19 bp, Artificial sequence
  SiRNA target sequence
acttattgaagtgtttctt

SEQ ID NO: 65409 - DNA, 19 bp, Artificial sequence
  SiRNA target sequence
cttattgaagtgtttctta

SEQ ID NO: 65410 - DNA, 19 bp, Artificial sequence
  SiRNA target sequence
ttattgaagtgtttcttac

SEQ ID NO: 65411 - DNA, 19 bp, Artificial sequence
  SiRNA target sequence
tattgaagtgtttcttaca

SEQ ID NO: 65412 - DNA, 19 bp, Artificial sequence
  SiRNA target sequence
attgaagtgtttcttacaa

SEQ ID NO: 65413 - DNA, 19 bp, Artificial sequence
  SiRNA target sequence
ttgaagtgtttcttacaag

SEQ ID NO: 65414 - DNA, 19 bp, Artificial sequence
  SiRNA target sequence
tgaagtgtttcttacaagc

SEQ ID NO: 65415 - DNA, 19 bp, Artificial sequence
  SiRNA target sequence
gaagtgtttcttacaagct

SEQ ID NO: 65416 - DNA, 19 bp, Artificial sequence
  SiRNA target sequence
aagtgtttcttacaagctt

SEQ ID NO: 65417 - DNA, 19 bp, Artificial sequence
  SiRNA target sequence
agtgtttcttacaagcttg

SEQ ID NO: 65418 - DNA, 19 bp, Artificial sequence
  SiRNA target sequence
gtgtttcttacaagcttgc

SEQ ID NO: 65419 - DNA, 19 bp, Artificial sequence
  SiRNA target sequence
tgtttcttacaagcttgct

SEQ ID NO: 65420 - DNA, 19 bp, Artificial sequence
  SiRNA target sequence
gtttcttacaagcttgctt

SEQ ID NO: 65421 - DNA, 19 bp, Artificial sequence
  SiRNA target sequence
tttcttacaagcttgcttc

SEQ ID NO: 65422 - DNA, 19 bp, Artificial sequence
  SiRNA target sequence
ttcttacaagcttgcttcc

SEQ ID NO: 65423 - DNA, 19 bp, Artificial sequence
  SiRNA target sequence
tcttacaagcttgcttcca

SEQ ID NO: 65424 - DNA, 19 bp, Artificial sequence
  SiRNA target sequence
cttacaagcttgcttccaa

SEQ ID NO: 65425 - DNA, 19 bp, Artificial sequence
  SiRNA target sequence
ttacaagcttgcttccaat

SEQ ID NO: 65426 - DNA, 19 bp, Artificial sequence
  SiRNA target sequence
tacaagcttgcttccaata

SEQ ID NO: 65427 - DNA, 19 bp, Artificial sequence
  SiRNA target sequence
acaagcttgcttccaatat

SEQ ID NO: 65428 - DNA, 19 bp, Artificial sequence
  SiRNA target sequence
caagcttgcttccaatatg

SEQ ID NO: 65429 - DNA, 19 bp, Artificial sequence
  SiRNA target sequence
aagcttgcttccaatatgc

SEQ ID NO: 65430 - DNA, 19 bp, Artificial sequence
  SiRNA target sequence
agcttgcttccaatatgcc

SEQ ID NO: 65431 - DNA, 19 bp, Artificial sequence
  SiRNA target sequence
gcttgcttccaatatgcct

SEQ ID NO: 65432 - DNA, 19 bp, Artificial sequence
  SiRNA target sequence
cttgcttccaatatgcctt

SEQ ID NO: 65433 - DNA, 19 bp, Artificial sequence
  SiRNA target sequence
ttgcttccaatatgcctta

SEQ ID NO: 65434 - DNA, 19 bp, Artificial sequence
  SiRNA target sequence
tgcttccaatatgccttaa

SEQ ID NO: 65435 - DNA, 19 bp, Artificial sequence
  SiRNA target sequence
gcttccaatatgccttaaa

SEQ ID NO: 65436 - DNA, 19 bp, Artificial sequence
  SiRNA target sequence
cttccaatatgccttaaac

SEQ ID NO: 65437 - DNA, 19 bp, Artificial sequence
  SiRNA target sequence
ttccaatatgccttaaact

SEQ ID NO: 65438 - DNA, 19 bp, Artificial sequence
  SiRNA target sequence
tccaatatgccttaaactt

SEQ ID NO: 65439 - DNA, 19 bp, Artificial sequence
  SiRNA target sequence
ccaatatgccttaaacttt

SEQ ID NO: 65440 - DNA, 19 bp, Artificial sequence
  SiRNA target sequence
caatatgccttaaactttt

SEQ ID NO: 65441 - DNA, 19 bp, Artificial sequence
  SiRNA target sequence
aatatgccttaaactttta

SEQ ID NO: 65442 - DNA, 19 bp, Artificial sequence
  SiRNA target sequence
atatgccttaaacttttat

SEQ ID NO: 65443 - DNA, 19 bp, Artificial sequence
  SiRNA target sequence
tatgccttaaacttttatt

SEQ ID NO: 65444 - DNA, 19 bp, Artificial sequence
  SiRNA target sequence
atgccttaaacttttattt

SEQ ID NO: 65445 - DNA, 19 bp, Artificial sequence
  SiRNA target sequence
tgccttaaacttttatttg

SEQ ID NO: 65446 - DNA, 19 bp, Artificial sequence
  SiRNA target sequence
gccttaaacttttatttgc

SEQ ID NO: 65447 - DNA, 19 bp, Artificial sequence
  SiRNA target sequence
ccttaaacttttatttgcc

SEQ ID NO: 65448 - DNA, 19 bp, Artificial sequence
  SiRNA target sequence
cttaaacttttatttgccc

SEQ ID NO: 65449 - DNA, 19 bp, Artificial sequence
  SiRNA target sequence
ttaaacttttatttgccct

SEQ ID NO: 65450 - DNA, 19 bp, Artificial sequence
  SiRNA target sequence
taaacttttatttgccctt

SEQ ID NO: 65451 - DNA, 19 bp, Artificial sequence
  SiRNA target sequence
aaacttttatttgccctta

SEQ ID NO: 65452 - DNA, 19 bp, Artificial sequence
  SiRNA target sequence
aacttttatttgcccttat

SEQ ID NO: 65453 - DNA, 19 bp, Artificial sequence
  SiRNA target sequence
acttttatttgcccttatt

SEQ ID NO: 65454 - DNA, 19 bp, Artificial sequence
  SiRNA target sequence
cttttatttgcccttattg

SEQ ID NO: 65455 - DNA, 19 bp, Artificial sequence
  SiRNA target sequence
ttttatttgcccttattgc

SEQ ID NO: 65456 - DNA, 19 bp, Artificial sequence
  SiRNA target sequence
tttatttgcccttattgca

SEQ ID NO: 65457 - DNA, 19 bp, Artificial sequence
  SiRNA target sequence
ttatttgcccttattgcag

SEQ ID NO: 65458 - DNA, 19 bp, Artificial sequence
  SiRNA target sequence
tatttgcccttattgcagt

SEQ ID NO: 65459 - DNA, 19 bp, Artificial sequence
  SiRNA target sequence
atttgcccttattgcagtt

SEQ ID NO: 65460 - DNA, 19 bp, Artificial sequence
  SiRNA target sequence
tttgcccttattgcagtta

SEQ ID NO: 65461 - DNA, 19 bp, Artificial sequence
  SiRNA target sequence
ttgcccttattgcagttat

SEQ ID NO: 65462 - DNA, 19 bp, Artificial sequence
  SiRNA target sequence
tgcccttattgcagttata

SEQ ID NO: 65463 - DNA, 19 bp, Artificial sequence
  SiRNA target sequence
gcccttattgcagttataa

SEQ ID NO: 65464 - DNA, 19 bp, Artificial sequence
  SiRNA target sequence
cccttattgcagttataaa

SEQ ID NO: 65465 - DNA, 19 bp, Artificial sequence
  SiRNA target sequence
ccttattgcagttataaaa

SEQ ID NO: 65466 - DNA, 19 bp, Artificial sequence
  SiRNA target sequence
cttattgcagttataaaaa

SEQ ID NO: 65467 - DNA, 19 bp, Artificial sequence
  SiRNA target sequence
ttattgcagttataaaaaa

SEQ ID NO: 65468 - DNA, 19 bp, Artificial sequence
  SiRNA target sequence
tattgcagttataaaaaat

SEQ ID NO: 65469 - DNA, 19 bp, Artificial sequence
  SiRNA target sequence
attgcagttataaaaaata

SEQ ID NO: 65470 - DNA, 19 bp, Artificial sequence
  SiRNA target sequence
ttgcagttataaaaaatat

SEQ ID NO: 65471 - DNA, 19 bp, Artificial sequence
  SiRNA target sequence
tgcagttataaaaaatatg

SEQ ID NO: 65472 - DNA, 19 bp, Artificial sequence
  SiRNA target sequence
gcagttataaaaaatatgg

SEQ ID NO: 65473 - DNA, 19 bp, Artificial sequence
  SiRNA target sequence
cagttataaaaaatatggg

SEQ ID NO: 65474 - DNA, 19 bp, Artificial sequence
  SiRNA target sequence
agttataaaaaatatggga

SEQ ID NO: 65475 - DNA, 19 bp, Artificial sequence
  SiRNA target sequence
gttataaaaaatatgggag

SEQ ID NO: 65476 - DNA, 19 bp, Artificial sequence
  SiRNA target sequence
ttataaaaaatatgggagg

SEQ ID NO: 65477 - DNA, 19 bp, Artificial sequence
  SiRNA target sequence
tataaaaaatatgggaggt

SEQ ID NO: 65478 - DNA, 19 bp, Artificial sequence
  SiRNA target sequence
ataaaaaatatgggaggtc

SEQ ID NO: 65479 - DNA, 19 bp, Artificial sequence
  SiRNA target sequence
taaaaaatatgggaggtct

SEQ ID NO: 65480 - DNA, 19 bp, Artificial sequence
  SiRNA target sequence
aaaaaatatgggaggtctt

SEQ ID NO: 65481 - DNA, 19 bp, Artificial sequence
  SiRNA target sequence
aaaaatatgggaggtcttg

SEQ ID NO: 65482 - DNA, 19 bp, Artificial sequence
  SiRNA target sequence
aaaatatgggaggtcttgc

SEQ ID NO: 65483 - DNA, 19 bp, Artificial sequence
  SiRNA target sequence
aaatatgggaggtcttgcg

SEQ ID NO: 65484 - DNA, 19 bp, Artificial sequence
  SiRNA target sequence
aatatgggaggtcttgcgg

SEQ ID NO: 65485 - DNA, 19 bp, Artificial sequence
  SiRNA target sequence
atatgggaggtcttgcggg

SEQ ID NO: 65486 - DNA, 19 bp, Artificial sequence
  SiRNA target sequence
tatgggaggtcttgcgggc

SEQ ID NO: 65487 - DNA, 19 bp, Artificial sequence
  SiRNA target sequence
atgggaggtcttgcgggct

SEQ ID NO: 65488 - DNA, 19 bp, Artificial sequence
  SiRNA target sequence
tgggaggtcttgcgggctt

SEQ ID NO: 65489 - DNA, 19 bp, Artificial sequence
  SiRNA target sequence
gggaggtcttgcgggcttc

SEQ ID NO: 65490 - DNA, 19 bp, Artificial sequence
  SiRNA target sequence
ggaggtcttgcgggcttca

SEQ ID NO: 65491 - DNA, 19 bp, Artificial sequence
  SiRNA target sequence
gaggtcttgcgggcttcat

SEQ ID NO: 65492 - DNA, 19 bp, Artificial sequence
  SiRNA target sequence
aggtcttgcgggcttcata

SEQ ID NO: 65493 - DNA, 19 bp, Artificial sequence
  SiRNA target sequence
ggtcttgcgggcttcataa

SEQ ID NO: 65494 - DNA, 19 bp, Artificial sequence
  SiRNA target sequence
gtcttgcgggcttcataat

SEQ ID NO: 65495 - DNA, 19 bp, Artificial sequence
  SiRNA target sequence
tcttgcgggcttcataatg

SEQ ID NO: 65496 - DNA, 19 bp, Artificial sequence
  SiRNA target sequence
cttgcgggcttcataatgt

SEQ ID NO: 65497 - DNA, 19 bp, Artificial sequence
  SiRNA target sequence
ttgcgggcttcataatgtt

SEQ ID NO: 65498 - DNA, 19 bp, Artificial sequence
  SiRNA target sequence
tgcgggcttcataatgttt

SEQ ID NO: 65499 - DNA, 19 bp, Artificial sequence
  SiRNA target sequence
gcgggcttcataatgtttg

SEQ ID NO: 65500 - DNA, 19 bp, Artificial sequence
  SiRNA target sequence
cgggcttcataatgtttgt

SEQ ID NO: 65501 - DNA, 19 bp, Artificial sequence
  SiRNA target sequence
gggcttcataatgtttgtt

SEQ ID NO: 65502 - DNA, 19 bp, Artificial sequence
  SiRNA target sequence
ggcttcataatgtttgttt

SEQ ID NO: 65503 - DNA, 19 bp, Artificial sequence
  SiRNA target sequence
gcttcataatgtttgtttg

SEQ ID NO: 65504 - DNA, 19 bp, Artificial sequence
  SiRNA target sequence
cttcataatgtttgtttgt

SEQ ID NO: 65505 - DNA, 19 bp, Artificial sequence
  SiRNA target sequence
ttcataatgtttgtttgtg

SEQ ID NO: 65506 - DNA, 19 bp, Artificial sequence
  SiRNA target sequence
tcataatgtttgtttgtgt

SEQ ID NO: 65507 - DNA, 19 bp, Artificial sequence
  SiRNA target sequence
cataatgtttgtttgtgtt

SEQ ID NO: 65508 - DNA, 19 bp, Artificial sequence
  SiRNA target sequence
ataatgtttgtttgtgttt

SEQ ID NO: 65509 - DNA, 19 bp, Artificial sequence
  SiRNA target sequence
taatgtttgtttgtgtttc

SEQ ID NO: 65510 - DNA, 19 bp, Artificial sequence
  SiRNA target sequence
aatgtttgtttgtgtttct

SEQ ID NO: 65511 - DNA, 19 bp, Artificial sequence
  SiRNA target sequence
atgtttgtttgtgtttctt

SEQ ID NO: 65512 - DNA, 19 bp, Artificial sequence
  SiRNA target sequence
tgtttgtttgtgtttcttg

SEQ ID NO: 65513 - DNA, 19 bp, Artificial sequence
  SiRNA target sequence
gtttgtttgtgtttcttgc

SEQ ID NO: 65514 - DNA, 19 bp, Artificial sequence
  SiRNA target sequence
tttgtttgtgtttcttgct

SEQ ID NO: 65515 - DNA, 19 bp, Artificial sequence
  SiRNA target sequence
ttgtttgtgtttcttgcta

SEQ ID NO: 65516 - DNA, 19 bp, Artificial sequence
  SiRNA target sequence
tgtttgtgtttcttgctat

SEQ ID NO: 65517 - DNA, 19 bp, Artificial sequence
  SiRNA target sequence
gtttgtgtttcttgctatg

SEQ ID NO: 65518 - DNA, 19 bp, Artificial sequence
  SiRNA target sequence
tttgtgtttcttgctatgc

SEQ ID NO: 65519 - DNA, 19 bp, Artificial sequence
  SiRNA target sequence
ttgtgtttcttgctatgcg

SEQ ID NO: 65520 - DNA, 19 bp, Artificial sequence
  SiRNA target sequence
tgtgtttcttgctatgcga

SEQ ID NO: 65521 - DNA, 19 bp, Artificial sequence
  SiRNA target sequence
gtgtttcttgctatgcgac

SEQ ID NO: 65522 - DNA, 19 bp, Artificial sequence
  SiRNA target sequence
tgtttcttgctatgcgact

SEQ ID NO: 65523 - DNA, 19 bp, Artificial sequence
  SiRNA target sequence
gtttcttgctatgcgactg

SEQ ID NO: 65524 - DNA, 19 bp, Artificial sequence
  SiRNA target sequence
tttcttgctatgcgactgt

SEQ ID NO: 65525 - DNA, 19 bp, Artificial sequence
  SiRNA target sequence
ttcttgctatgcgactgtg

SEQ ID NO: 65526 - DNA, 19 bp, Artificial sequence
  SiRNA target sequence
tcttgctatgcgactgtga

SEQ ID NO: 65527 - DNA, 19 bp, Artificial sequence
  SiRNA target sequence
cttgctatgcgactgtgac

SEQ ID NO: 65528 - DNA, 19 bp, Artificial sequence
  SiRNA target sequence
ttgctatgcgactgtgact

SEQ ID NO: 65529 - DNA, 19 bp, Artificial sequence
  SiRNA target sequence
tgctatgcgactgtgacta

SEQ ID NO: 65530 - DNA, 19 bp, Artificial sequence
  SiRNA target sequence
gctatgcgactgtgactat

SEQ ID NO: 65531 - DNA, 19 bp, Artificial sequence
  SiRNA target sequence
ctatgcgactgtgactata

SEQ ID NO: 65532 - DNA, 19 bp, Artificial sequence
  SiRNA target sequence
tatgcgactgtgactatat

SEQ ID NO: 65533 - DNA, 19 bp, Artificial sequence
  SiRNA target sequence
atgcgactgtgactatatt

SEQ ID NO: 65534 - DNA, 19 bp, Artificial sequence
  SiRNA target sequence
tgcgactgtgactatattg

SEQ ID NO: 65535 - DNA, 19 bp, Artificial sequence
  SiRNA target sequence
gcgactgtgactatattga

SEQ ID NO: 65536 - DNA, 19 bp, Artificial sequence
  SiRNA target sequence
cgactgtgactatattgat

SEQ ID NO: 65537 - DNA, 19 bp, Artificial sequence
  SiRNA target sequence
gactgtgactatattgata

SEQ ID NO: 65538 - DNA, 19 bp, Artificial sequence
  SiRNA target sequence
actgtgactatattgatag

SEQ ID NO: 65539 - DNA, 19 bp, Artificial sequence
  SiRNA target sequence
ctgtgactatattgatagc

SEQ ID NO: 65540 - DNA, 19 bp, Artificial sequence
  SiRNA target sequence
tgtgactatattgatagca

SEQ ID NO: 65541 - DNA, 19 bp, Artificial sequence
  SiRNA target sequence
gtgactatattgatagcac

SEQ ID NO: 65542 - DNA, 19 bp, Artificial sequence
  SiRNA target sequence
tgactatattgatagcaca

SEQ ID NO: 65543 - DNA, 19 bp, Artificial sequence
  SiRNA target sequence
gactatattgatagcacaa

SEQ ID NO: 65544 - DNA, 19 bp, Artificial sequence
  SiRNA target sequence
actatattgatagcacaat

SEQ ID NO: 65545 - DNA, 19 bp, Artificial sequence
  SiRNA target sequence
ctatattgatagcacaatg

SEQ ID NO: 65546 - DNA, 19 bp, Artificial sequence
  SiRNA target sequence
tatattgatagcacaatgg

SEQ ID NO: 65547 - DNA, 19 bp, Artificial sequence
  SiRNA target sequence
atattgatagcacaatgga

SEQ ID NO: 65548 - DNA, 19 bp, Artificial sequence
  SiRNA target sequence
tattgatagcacaatggag

SEQ ID NO: 65549 - DNA, 19 bp, Artificial sequence
  SiRNA target sequence
attgatagcacaatggaga

SEQ ID NO: 65550 - DNA, 19 bp, Artificial sequence
  SiRNA target sequence
ttgatagcacaatggagat

SEQ ID NO: 65551 - DNA, 19 bp, Artificial sequence
  SiRNA target sequence
tgatagcacaatggagatc

SEQ ID NO: 65552 - DNA, 19 bp, Artificial sequence
  SiRNA target sequence
gatagcacaatggagatct

SEQ ID NO: 65553 - DNA, 19 bp, Artificial sequence
  SiRNA target sequence
atagcacaatggagatcta

SEQ ID NO: 65554 - DNA, 19 bp, Artificial sequence
  SiRNA target sequence
tagcacaatggagatctaa

SEQ ID NO: 65555 - DNA, 19 bp, Artificial sequence
  SiRNA target sequence
agcacaatggagatctaat

SEQ ID NO: 65556 - DNA, 19 bp, Artificial sequence
  SiRNA target sequence
gcacaatggagatctaata

SEQ ID NO: 65557 - DNA, 19 bp, Artificial sequence
  SiRNA target sequence
cacaatggagatctaatat

SEQ ID NO: 65558 - DNA, 19 bp, Artificial sequence
  SiRNA target sequence
acaatggagatctaatatt

SEQ ID NO: 65559 - DNA, 19 bp, Artificial sequence
  SiRNA target sequence
caatggagatctaatatta

SEQ ID NO: 65560 - DNA, 19 bp, Artificial sequence
  SiRNA target sequence
aatggagatctaatattag

SEQ ID NO: 65561 - DNA, 19 bp, Artificial sequence
  SiRNA target sequence
atggagatctaatattaga

SEQ ID NO: 65562 - DNA, 19 bp, Artificial sequence
  SiRNA target sequence
tggagatctaatattagaa

SEQ ID NO: 65563 - DNA, 19 bp, Artificial sequence
  SiRNA target sequence
ggagatctaatattagaag

SEQ ID NO: 65564 - DNA, 19 bp, Artificial sequence
  SiRNA target sequence
gagatctaatattagaaga

SEQ ID NO: 65565 - DNA, 19 bp, Artificial sequence
  SiRNA target sequence
agatctaatattagaagag

SEQ ID NO: 65566 - DNA, 19 bp, Artificial sequence
  SiRNA target sequence
gatctaatattagaagaga

SEQ ID NO: 65567 - DNA, 19 bp, Artificial sequence
  SiRNA target sequence
atctaatattagaagagaa

SEQ ID NO: 65568 - DNA, 19 bp, Artificial sequence
  SiRNA target sequence
tctaatattagaagagaac

SEQ ID NO: 65569 - DNA, 19 bp, Artificial sequence
  SiRNA target sequence
ctaatattagaagagaact

SEQ ID NO: 65570 - DNA, 19 bp, Artificial sequence
  SiRNA target sequence
taatattagaagagaactt

SEQ ID NO: 65571 - DNA, 19 bp, Artificial sequence
  SiRNA target sequence
aatattagaagagaactta

SEQ ID NO: 65572 - DNA, 19 bp, Artificial sequence
  SiRNA target sequence
atattagaagagaacttaa

SEQ ID NO: 65573 - DNA, 19 bp, Artificial sequence
  SiRNA target sequence
tattagaagagaacttaat

SEQ ID NO: 65574 - DNA, 19 bp, Artificial sequence
  SiRNA target sequence
attagaagagaacttaata

SEQ ID NO: 65575 - DNA, 19 bp, Artificial sequence
  SiRNA target sequence
ttagaagagaacttaataa

SEQ ID NO: 65576 - DNA, 19 bp, Artificial sequence
  SiRNA target sequence
tagaagagaacttaataac

SEQ ID NO: 65577 - DNA, 19 bp, Artificial sequence
  SiRNA target sequence
agaagagaacttaataact

SEQ ID NO: 65578 - DNA, 19 bp, Artificial sequence
  SiRNA target sequence
gaagagaacttaataactc

SEQ ID NO: 65579 - DNA, 19 bp, Artificial sequence
  SiRNA target sequence
aagagaacttaataactct

SEQ ID NO: 65580 - DNA, 19 bp, Artificial sequence
  SiRNA target sequence
agagaacttaataactctg

SEQ ID NO: 65581 - DNA, 19 bp, Artificial sequence
  SiRNA target sequence
gagaacttaataactctga

SEQ ID NO: 65582 - DNA, 19 bp, Artificial sequence
  SiRNA target sequence
agaacttaataactctgaa

SEQ ID NO: 65583 - DNA, 19 bp, Artificial sequence
  SiRNA target sequence
gaacttaataactctgaaa

SEQ ID NO: 65584 - DNA, 19 bp, Artificial sequence
  SiRNA target sequence
aacttaataactctgaaaa

SEQ ID NO: 65585 - DNA, 19 bp, Artificial sequence
  SiRNA target sequence
acttaataactctgaaaat

SEQ ID NO: 65586 - DNA, 19 bp, Artificial sequence
  SiRNA target sequence
cttaataactctgaaaata

SEQ ID NO: 65587 - DNA, 19 bp, Artificial sequence
  SiRNA target sequence
ttaataactctgaaaatag

SEQ ID NO: 65588 - DNA, 19 bp, Artificial sequence
  SiRNA target sequence
taataactctgaaaataga

SEQ ID NO: 65589 - DNA, 19 bp, Artificial sequence
  SiRNA target sequence
aataactctgaaaatagat

SEQ ID NO: 65590 - DNA, 19 bp, Artificial sequence
  SiRNA target sequence
ataactctgaaaatagatc

SEQ ID NO: 65591 - DNA, 19 bp, Artificial sequence
  SiRNA target sequence
taactctgaaaatagatct

SEQ ID NO: 65592 - DNA, 19 bp, Artificial sequence
  SiRNA target sequence
aactctgaaaatagatcta

SEQ ID NO: 65593 - DNA, 19 bp, Artificial sequence
  SiRNA target sequence
actctgaaaatagatctag

SEQ ID NO: 65594 - DNA, 19 bp, Artificial sequence
  SiRNA target sequence
ctctgaaaatagatctagt

SEQ ID NO: 65595 - DNA, 19 bp, Artificial sequence
  SiRNA target sequence
tctgaaaatagatctagta

SEQ ID NO: 65596 - DNA, 19 bp, Artificial sequence
  SiRNA target sequence
ctgaaaatagatctagtaa

SEQ ID NO: 65597 - DNA, 19 bp, Artificial sequence
  SiRNA target sequence
tgaaaatagatctagtaat

SEQ ID NO: 65598 - DNA, 19 bp, Artificial sequence
  SiRNA target sequence
gaaaatagatctagtaata

SEQ ID NO: 65599 - DNA, 19 bp, Artificial sequence
  SiRNA target sequence
aaaatagatctagtaataa

SEQ ID NO: 65600 - DNA, 19 bp, Artificial sequence
  SiRNA target sequence
aaatagatctagtaataaa

SEQ ID NO: 65601 - DNA, 19 bp, Artificial sequence
  SiRNA target sequence
aatagatctagtaataaac

SEQ ID NO: 65602 - DNA, 19 bp, Artificial sequence
  SiRNA target sequence
atagatctagtaataaact

SEQ ID NO: 65603 - DNA, 19 bp, Artificial sequence
  SiRNA target sequence
tagatctagtaataaacta

SEQ ID NO: 65604 - DNA, 19 bp, Artificial sequence
  SiRNA target sequence
agatctagtaataaactac

SEQ ID NO: 65605 - DNA, 19 bp, Artificial sequence
  SiRNA target sequence
gatctagtaataaactaca

SEQ ID NO: 65606 - DNA, 19 bp, Artificial sequence
  SiRNA target sequence
atctagtaataaactacaa

SEQ ID NO: 65607 - DNA, 19 bp, Artificial sequence
  SiRNA target sequence
tctagtaataaactacaag

SEQ ID NO: 65608 - DNA, 19 bp, Artificial sequence
  SiRNA target sequence
ctagtaataaactacaaga

SEQ ID NO: 65609 - DNA, 19 bp, Artificial sequence
  SiRNA target sequence
tagtaataaactacaagat

SEQ ID NO: 65610 - DNA, 19 bp, Artificial sequence
  SiRNA target sequence
agtaataaactacaagatg

SEQ ID NO: 65611 - DNA, 19 bp, Artificial sequence
  SiRNA target sequence
gtaataaactacaagatgg

SEQ ID NO: 65612 - DNA, 19 bp, Artificial sequence
  SiRNA target sequence
taataaactacaagatgga

SEQ ID NO: 65613 - DNA, 19 bp, Artificial sequence
  SiRNA target sequence
aataaactacaagatggat

SEQ ID NO: 65614 - DNA, 19 bp, Artificial sequence
  SiRNA target sequence
ataaactacaagatggatt

SEQ ID NO: 65615 - DNA, 19 bp, Artificial sequence
  SiRNA target sequence
taaactacaagatggatta

SEQ ID NO: 65616 - DNA, 19 bp, Artificial sequence
  SiRNA target sequence
aaactacaagatggattaa

SEQ ID NO: 65617 - DNA, 19 bp, Artificial sequence
  SiRNA target sequence
aactacaagatggattaaa

SEQ ID NO: 65618 - DNA, 19 bp, Artificial sequence
  SiRNA target sequence
actacaagatggattaaat

SEQ ID NO: 65619 - DNA, 19 bp, Artificial sequence
  SiRNA target sequence
ctacaagatggattaaata

SEQ ID NO: 65620 - DNA, 19 bp, Artificial sequence
  SiRNA target sequence
tacaagatggattaaataa

SEQ ID NO: 65621 - DNA, 19 bp, Artificial sequence
  SiRNA target sequence
acaagatggattaaataat

SEQ ID NO: 65622 - DNA, 19 bp, Artificial sequence
  SiRNA target sequence
caagatggattaaataatc

SEQ ID NO: 65623 - DNA, 19 bp, Artificial sequence
  SiRNA target sequence
aagatggattaaataatca

SEQ ID NO: 65624 - DNA, 19 bp, Artificial sequence
  SiRNA target sequence
agatggattaaataatcat

SEQ ID NO: 65625 - DNA, 19 bp, Artificial sequence
  SiRNA target sequence
gatggattaaataatcatg

SEQ ID NO: 65626 - DNA, 19 bp, Artificial sequence
  SiRNA target sequence
atggattaaataatcatga

SEQ ID NO: 65627 - DNA, 19 bp, Artificial sequence
  SiRNA target sequence
tggattaaataatcatgaa

SEQ ID NO: 65628 - DNA, 19 bp, Artificial sequence
  SiRNA target sequence
ggattaaataatcatgaaa

SEQ ID NO: 65629 - DNA, 19 bp, Artificial sequence
  SiRNA target sequence
gattaaataatcatgaaac

SEQ ID NO: 65630 - DNA, 19 bp, Artificial sequence
  SiRNA target sequence
attaaataatcatgaaaca

SEQ ID NO: 65631 - DNA, 19 bp, Artificial sequence
  SiRNA target sequence
ttaaataatcatgaaacaa

SEQ ID NO: 65632 - DNA, 19 bp, Artificial sequence
  SiRNA target sequence
taaataatcatgaaacaat

SEQ ID NO: 65633 - DNA, 19 bp, Artificial sequence
  SiRNA target sequence
aaataatcatgaaacaatc

SEQ ID NO: 65634 - DNA, 19 bp, Artificial sequence
  SiRNA target sequence
aataatcatgaaacaatcg

SEQ ID NO: 65635 - DNA, 19 bp, Artificial sequence
  SiRNA target sequence
ataatcatgaaacaatcgt

SEQ ID NO: 65636 - DNA, 19 bp, Artificial sequence
  SiRNA target sequence
taatcatgaaacaatcgtc

SEQ ID NO: 65637 - DNA, 19 bp, Artificial sequence
  SiRNA target sequence
aatcatgaaacaatcgtct

SEQ ID NO: 65638 - DNA, 19 bp, Artificial sequence
  SiRNA target sequence
atcatgaaacaatcgtctc

SEQ ID NO: 65639 - DNA, 19 bp, Artificial sequence
  SiRNA target sequence
tcatgaaacaatcgtctcc

SEQ ID NO: 65640 - DNA, 19 bp, Artificial sequence
  SiRNA target sequence
catgaaacaatcgtctcct

SEQ ID NO: 65641 - DNA, 19 bp, Artificial sequence
  SiRNA target sequence
atgaaacaatcgtctcctt

SEQ ID NO: 65642 - DNA, 19 bp, Artificial sequence
  SiRNA target sequence
tgaaacaatcgtctccttt

SEQ ID NO: 65643 - DNA, 19 bp, Artificial sequence
  SiRNA target sequence
gaaacaatcgtctcctttg

SEQ ID NO: 65644 - DNA, 19 bp, Artificial sequence
  SiRNA target sequence
aaacaatcgtctcctttgg

SEQ ID NO: 65645 - DNA, 19 bp, Artificial sequence
  SiRNA target sequence
aacaatcgtctcctttggg

SEQ ID NO: 65646 - DNA, 19 bp, Artificial sequence
  SiRNA target sequence
acaatcgtctcctttggga

SEQ ID NO: 65647 - DNA, 19 bp, Artificial sequence
  SiRNA target sequence
caatcgtctcctttgggac

SEQ ID NO: 65648 - DNA, 19 bp, Artificial sequence
  SiRNA target sequence
aatcgtctcctttgggact

SEQ ID NO: 65649 - DNA, 19 bp, Artificial sequence
  SiRNA target sequence
atcgtctcctttgggacta

SEQ ID NO: 65650 - DNA, 19 bp, Artificial sequence
  SiRNA target sequence
tcgtctcctttgggactac

SEQ ID NO: 65651 - DNA, 19 bp, Artificial sequence
  SiRNA target sequence
cgtctcctttgggactaca

SEQ ID NO: 65652 - DNA, 19 bp, Artificial sequence
  SiRNA target sequence
gtctcctttgggactacag

SEQ ID NO: 65653 - DNA, 19 bp, Artificial sequence
  SiRNA target sequence
tctcctttgggactacaga

SEQ ID NO: 65654 - DNA, 19 bp, Artificial sequence
  SiRNA target sequence
ctcctttgggactacagat

SEQ ID NO: 65655 - DNA, 19 bp, Artificial sequence
  SiRNA target sequence
tcctttgggactacagatc

SEQ ID NO: 65656 - DNA, 19 bp, Artificial sequence
  SiRNA target sequence
cctttgggactacagatct

SEQ ID NO: 65657 - DNA, 19 bp, Artificial sequence
  SiRNA target sequence
ctttgggactacagatctt

SEQ ID NO: 65658 - DNA, 19 bp, Artificial sequence
  SiRNA target sequence
tttgggactacagatcttg

SEQ ID NO: 65659 - DNA, 19 bp, Artificial sequence
  SiRNA target sequence
ttgggactacagatcttga

SEQ ID NO: 65660 - DNA, 19 bp, Artificial sequence
  SiRNA target sequence
tgggactacagatcttgaa

SEQ ID NO: 65661 - DNA, 19 bp, Artificial sequence
  SiRNA target sequence
gggactacagatcttgaag

SEQ ID NO: 65662 - DNA, 19 bp, Artificial sequence
  SiRNA target sequence
ggactacagatcttgaagt

SEQ ID NO: 65663 - DNA, 19 bp, Artificial sequence
  SiRNA target sequence
gactacagatcttgaagta

SEQ ID NO: 65664 - DNA, 19 bp, Artificial sequence
  SiRNA target sequence
actacagatcttgaagtag

SEQ ID NO: 65665 - DNA, 19 bp, Artificial sequence
  SiRNA target sequence
ctacagatcttgaagtaga

SEQ ID NO: 65666 - DNA, 19 bp, Artificial sequence
  SiRNA target sequence
tacagatcttgaagtagat

SEQ ID NO: 65667 - DNA, 19 bp, Artificial sequence
  SiRNA target sequence
acagatcttgaagtagatg

SEQ ID NO: 65668 - DNA, 19 bp, Artificial sequence
  SiRNA target sequence
cagatcttgaagtagatga

SEQ ID NO: 65669 - DNA, 19 bp, Artificial sequence
  SiRNA target sequence
agatcttgaagtagatgaa

SEQ ID NO: 65670 - DNA, 19 bp, Artificial sequence
  SiRNA target sequence
gatcttgaagtagatgaat

SEQ ID NO: 65671 - DNA, 19 bp, Artificial sequence
  SiRNA target sequence
atcttgaagtagatgaata

SEQ ID NO: 65672 - DNA, 19 bp, Artificial sequence
  SiRNA target sequence
tcttgaagtagatgaatat

SEQ ID NO: 65673 - DNA, 19 bp, Artificial sequence
  SiRNA target sequence
cttgaagtagatgaatatg

SEQ ID NO: 65674 - DNA, 19 bp, Artificial sequence
  SiRNA target sequence
ttgaagtagatgaatatga

SEQ ID NO: 65675 - DNA, 19 bp, Artificial sequence
  SiRNA target sequence
tgaagtagatgaatatgat

SEQ ID NO: 65676 - DNA, 19 bp, Artificial sequence
  SiRNA target sequence
gaagtagatgaatatgatc

SEQ ID NO: 65677 - DNA, 19 bp, Artificial sequence
  SiRNA target sequence
aagtagatgaatatgatca

SEQ ID NO: 65678 - DNA, 19 bp, Artificial sequence
  SiRNA target sequence
agtagatgaatatgatcag

SEQ ID NO: 65679 - DNA, 19 bp, Artificial sequence
  SiRNA target sequence
gtagatgaatatgatcagt

SEQ ID NO: 65680 - DNA, 19 bp, Artificial sequence
  SiRNA target sequence
tagatgaatatgatcagtt

SEQ ID NO: 65681 - DNA, 19 bp, Artificial sequence
  SiRNA target sequence
agatgaatatgatcagttt

SEQ ID NO: 65682 - DNA, 19 bp, Artificial sequence
  SiRNA target sequence
gatgaatatgatcagtttc

SEQ ID NO: 65683 - DNA, 19 bp, Artificial sequence
  SiRNA target sequence
atgaatatgatcagtttct

SEQ ID NO: 65684 - DNA, 19 bp, Artificial sequence
  SiRNA target sequence
tgaatatgatcagtttctt

SEQ ID NO: 65685 - DNA, 19 bp, Artificial sequence
  SiRNA target sequence
gaatatgatcagtttctta

SEQ ID NO: 65686 - DNA, 19 bp, Artificial sequence
  SiRNA target sequence
aatatgatcagtttcttaa

SEQ ID NO: 65687 - DNA, 19 bp, Artificial sequence
  SiRNA target sequence
atatgatcagtttcttaaa

SEQ ID NO: 65688 - DNA, 19 bp, Artificial sequence
  SiRNA target sequence
tatgatcagtttcttaaaa

SEQ ID NO: 65689 - DNA, 19 bp, Artificial sequence
  SiRNA target sequence
atgatcagtttcttaaaat

SEQ ID NO: 65690 - DNA, 19 bp, Artificial sequence
  SiRNA target sequence
tgatcagtttcttaaaatt

SEQ ID NO: 65691 - DNA, 19 bp, Artificial sequence
  SiRNA target sequence
gatcagtttcttaaaatta

SEQ ID NO: 65692 - DNA, 19 bp, Artificial sequence
  SiRNA target sequence
atcagtttcttaaaattaa

SEQ ID NO: 65693 - DNA, 19 bp, Artificial sequence
  SiRNA target sequence
tcagtttcttaaaattaat

SEQ ID NO: 65694 - DNA, 19 bp, Artificial sequence
  SiRNA target sequence
cagtttcttaaaattaatg

SEQ ID NO: 65695 - DNA, 19 bp, Artificial sequence
  SiRNA target sequence
agtttcttaaaattaatgc

SEQ ID NO: 65696 - DNA, 19 bp, Artificial sequence
  SiRNA target sequence
gtttcttaaaattaatgca

SEQ ID NO: 65697 - DNA, 19 bp, Artificial sequence
  SiRNA target sequence
tttcttaaaattaatgcat

SEQ ID NO: 65698 - DNA, 19 bp, Artificial sequence
  SiRNA target sequence
ttcttaaaattaatgcatc

SEQ ID NO: 65699 - DNA, 19 bp, Artificial sequence
  SiRNA target sequence
tcttaaaattaatgcatct

SEQ ID NO: 65700 - DNA, 19 bp, Artificial sequence
  SiRNA target sequence
cttaaaattaatgcatcta

SEQ ID NO: 65701 - DNA, 19 bp, Artificial sequence
  SiRNA target sequence
ttaaaattaatgcatctaa

SEQ ID NO: 65702 - DNA, 19 bp, Artificial sequence
  SiRNA target sequence
taaaattaatgcatctaat

SEQ ID NO: 65703 - DNA, 19 bp, Artificial sequence
  SiRNA target sequence
aaaattaatgcatctaata

SEQ ID NO: 65704 - DNA, 19 bp, Artificial sequence
  SiRNA target sequence
aaattaatgcatctaatag

SEQ ID NO: 65705 - DNA, 19 bp, Artificial sequence
  SiRNA target sequence
aattaatgcatctaatagt

SEQ ID NO: 65706 - DNA, 19 bp, Artificial sequence
  SiRNA target sequence
attaatgcatctaatagta

SEQ ID NO: 65707 - DNA, 19 bp, Artificial sequence
  SiRNA target sequence
ttaatgcatctaatagtaa

SEQ ID NO: 65708 - DNA, 19 bp, Artificial sequence
  SiRNA target sequence
taatgcatctaatagtaac

SEQ ID NO: 65709 - DNA, 19 bp, Artificial sequence
  SiRNA target sequence
aatgcatctaatagtaaca

SEQ ID NO: 65710 - DNA, 19 bp, Artificial sequence
  SiRNA target sequence
atgcatctaatagtaacag

SEQ ID NO: 65711 - DNA, 19 bp, Artificial sequence
  SiRNA target sequence
tgcatctaatagtaacaga

SEQ ID NO: 65712 - DNA, 19 bp, Artificial sequence
  SiRNA target sequence
gcatctaatagtaacagat

SEQ ID NO: 65713 - DNA, 19 bp, Artificial sequence
  SiRNA target sequence
catctaatagtaacagatt

SEQ ID NO: 65714 - DNA, 19 bp, Artificial sequence
  SiRNA target sequence
atctaatagtaacagatta

SEQ ID NO: 65715 - DNA, 19 bp, Artificial sequence
  SiRNA target sequence
tctaatagtaacagattat

SEQ ID NO: 65716 - DNA, 19 bp, Artificial sequence
  SiRNA target sequence
ctaatagtaacagattatg

SEQ ID NO: 65717 - DNA, 19 bp, Artificial sequence
  SiRNA target sequence
taatagtaacagattatgg

SEQ ID NO: 65718 - DNA, 19 bp, Artificial sequence
  SiRNA target sequence
aatagtaacagattatgga

SEQ ID NO: 65719 - DNA, 19 bp, Artificial sequence
  SiRNA target sequence
atagtaacagattatggag

SEQ ID NO: 65720 - DNA, 19 bp, Artificial sequence
  SiRNA target sequence
tagtaacagattatggaga

SEQ ID NO: 65721 - DNA, 19 bp, Artificial sequence
  SiRNA target sequence
agtaacagattatggagag

SEQ ID NO: 65722 - DNA, 19 bp, Artificial sequence
  SiRNA target sequence
gtaacagattatggagagc

SEQ ID NO: 65723 - DNA, 19 bp, Artificial sequence
  SiRNA target sequence
taacagattatggagagca

SEQ ID NO: 65724 - DNA, 19 bp, Artificial sequence
  SiRNA target sequence
aacagattatggagagcac

SEQ ID NO: 65725 - DNA, 19 bp, Artificial sequence
  SiRNA target sequence
acagattatggagagcact

SEQ ID NO: 65726 - DNA, 19 bp, Artificial sequence
  SiRNA target sequence
cagattatggagagcactg

SEQ ID NO: 65727 - DNA, 19 bp, Artificial sequence
  SiRNA target sequence
agattatggagagcactgt

SEQ ID NO: 65728 - DNA, 19 bp, Artificial sequence
  SiRNA target sequence
gattatggagagcactgta

SEQ ID NO: 65729 - DNA, 19 bp, Artificial sequence
  SiRNA target sequence
attatggagagcactgtac

SEQ ID NO: 65730 - DNA, 19 bp, Artificial sequence
  SiRNA target sequence
ttatggagagcactgtaca

SEQ ID NO: 65731 - DNA, 19 bp, Artificial sequence
  SiRNA target sequence
tatggagagcactgtacat

SEQ ID NO: 65732 - DNA, 19 bp, Artificial sequence
  SiRNA target sequence
atggagagcactgtacatt

SEQ ID NO: 65733 - DNA, 19 bp, Artificial sequence
  SiRNA target sequence
tggagagcactgtacattt

SEQ ID NO: 65734 - DNA, 19 bp, Artificial sequence
  SiRNA target sequence
ggagagcactgtacatttt

SEQ ID NO: 65735 - DNA, 19 bp, Artificial sequence
  SiRNA target sequence
gagagcactgtacatttta

SEQ ID NO: 65736 - DNA, 19 bp, Artificial sequence
  SiRNA target sequence
agagcactgtacattttaa

SEQ ID NO: 65737 - DNA, 19 bp, Artificial sequence
  SiRNA target sequence
gagcactgtacattttaaa

SEQ ID NO: 65738 - DNA, 19 bp, Artificial sequence
  SiRNA target sequence
agcactgtacattttaaat

SEQ ID NO: 65739 - DNA, 19 bp, Artificial sequence
  SiRNA target sequence
gcactgtacattttaaatt

SEQ ID NO: 65740 - DNA, 19 bp, Artificial sequence
  SiRNA target sequence
cactgtacattttaaattt

SEQ ID NO: 65741 - DNA, 19 bp, Artificial sequence
  SiRNA target sequence
actgtacattttaaattta

SEQ ID NO: 65742 - DNA, 19 bp, Artificial sequence
  SiRNA target sequence
ctgtacattttaaatttat

SEQ ID NO: 65743 - DNA, 19 bp, Artificial sequence
  SiRNA target sequence
tgtacattttaaatttatc

SEQ ID NO: 65744 - DNA, 19 bp, Artificial sequence
  SiRNA target sequence
gtacattttaaatttatct

SEQ ID NO: 65745 - DNA, 19 bp, Artificial sequence
  SiRNA target sequence
tacattttaaatttatctc

SEQ ID NO: 65746 - DNA, 19 bp, Artificial sequence
  SiRNA target sequence
acattttaaatttatctca

SEQ ID NO: 65747 - DNA, 19 bp, Artificial sequence
  SiRNA target sequence
cattttaaatttatctcag

SEQ ID NO: 65748 - DNA, 19 bp, Artificial sequence
  SiRNA target sequence
attttaaatttatctcaga

SEQ ID NO: 65749 - DNA, 19 bp, Artificial sequence
  SiRNA target sequence
ttttaaatttatctcagag

SEQ ID NO: 65750 - DNA, 19 bp, Artificial sequence
  SiRNA target sequence
tttaaatttatctcagaga

SEQ ID NO: 65751 - DNA, 19 bp, Artificial sequence
  SiRNA target sequence
ttaaatttatctcagagag

SEQ ID NO: 65752 - DNA, 19 bp, Artificial sequence
  SiRNA target sequence
taaatttatctcagagagc

SEQ ID NO: 65753 - DNA, 19 bp, Artificial sequence
  SiRNA target sequence
aaatttatctcagagagca

SEQ ID NO: 65754 - DNA, 19 bp, Artificial sequence
  SiRNA target sequence
aatttatctcagagagcaa

SEQ ID NO: 65755 - DNA, 19 bp, Artificial sequence
  SiRNA target sequence
atttatctcagagagcaat

SEQ ID NO: 65756 - DNA, 19 bp, Artificial sequence
  SiRNA target sequence
tttatctcagagagcaatt

SEQ ID NO: 65757 - DNA, 19 bp, Artificial sequence
  SiRNA target sequence
ttatctcagagagcaattt

SEQ ID NO: 65758 - DNA, 19 bp, Artificial sequence
  SiRNA target sequence
tatctcagagagcaatttt

SEQ ID NO: 65759 - DNA, 19 bp, Artificial sequence
  SiRNA target sequence
atctcagagagcaattttt

SEQ ID NO: 65760 - DNA, 19 bp, Artificial sequence
  SiRNA target sequence
tctcagagagcaatttttc

SEQ ID NO: 65761 - DNA, 19 bp, Artificial sequence
  SiRNA target sequence
ctcagagagcaatttttct

SEQ ID NO: 65762 - DNA, 19 bp, Artificial sequence
  SiRNA target sequence
tcagagagcaatttttctc

SEQ ID NO: 65763 - DNA, 19 bp, Artificial sequence
  SiRNA target sequence
cagagagcaatttttctct

SEQ ID NO: 65764 - DNA, 19 bp, Artificial sequence
  SiRNA target sequence
agagagcaatttttctctt

SEQ ID NO: 65765 - DNA, 19 bp, Artificial sequence
  SiRNA target sequence
gagagcaatttttctctta

SEQ ID NO: 65766 - DNA, 19 bp, Artificial sequence
  SiRNA target sequence
agagcaatttttctcttac

SEQ ID NO: 65767 - DNA, 19 bp, Artificial sequence
  SiRNA target sequence
gagcaatttttctcttaca

SEQ ID NO: 65768 - DNA, 19 bp, Artificial sequence
  SiRNA target sequence
agcaatttttctcttacaa

SEQ ID NO: 65769 - DNA, 19 bp, Artificial sequence
  SiRNA target sequence
gcaatttttctcttacaaa

SEQ ID NO: 65770 - DNA, 19 bp, Artificial sequence
  SiRNA target sequence
caatttttctcttacaaag

SEQ ID NO: 65771 - DNA, 19 bp, Artificial sequence
  SiRNA target sequence
aatttttctcttacaaagt

SEQ ID NO: 65772 - DNA, 19 bp, Artificial sequence
  SiRNA target sequence
atttttctcttacaaagtt

SEQ ID NO: 65773 - DNA, 19 bp, Artificial sequence
  SiRNA target sequence
tttttctcttacaaagttt

SEQ ID NO: 65774 - DNA, 19 bp, Artificial sequence
  SiRNA target sequence
ttttctcttacaaagtttt

SEQ ID NO: 65775 - DNA, 19 bp, Artificial sequence
  SiRNA target sequence
tttctcttacaaagttttt

SEQ ID NO: 65776 - DNA, 19 bp, Artificial sequence
  SiRNA target sequence
ttctcttacaaagtttttt

SEQ ID NO: 65777 - DNA, 19 bp, Artificial sequence
  SiRNA target sequence
tctcttacaaagttttttt

SEQ ID NO: 65778 - DNA, 19 bp, Artificial sequence
  SiRNA target sequence
ctcttacaaagttttttta

SEQ ID NO: 65779 - DNA, 19 bp, Artificial sequence
  SiRNA target sequence
tcttacaaagtttttttat

SEQ ID NO: 65780 - DNA, 19 bp, Artificial sequence
  SiRNA target sequence
cttacaaagtttttttatt

SEQ ID NO: 65781 - DNA, 19 bp, Artificial sequence
  SiRNA target sequence
ttacaaagtttttttatta

SEQ ID NO: 65782 - DNA, 19 bp, Artificial sequence
  SiRNA target sequence
tacaaagtttttttattat

SEQ ID NO: 65783 - DNA, 19 bp, Artificial sequence
  SiRNA target sequence
acaaagtttttttattatt

SEQ ID NO: 65784 - DNA, 19 bp, Artificial sequence
  SiRNA target sequence
caaagtttttttattattt

SEQ ID NO: 65785 - DNA, 19 bp, Artificial sequence
  SiRNA target sequence
aaagtttttttattattta

SEQ ID NO: 65786 - DNA, 19 bp, Artificial sequence
  SiRNA target sequence
aagtttttttattatttat

SEQ ID NO: 65787 - DNA, 19 bp, Artificial sequence
  SiRNA target sequence
agtttttttattatttatg

SEQ ID NO: 65788 - DNA, 19 bp, Artificial sequence
  SiRNA target sequence
gtttttttattatttatgc

SEQ ID NO: 65789 - DNA, 19 bp, Artificial sequence
  SiRNA target sequence
tttttttattatttatgca

SEQ ID NO: 65790 - DNA, 19 bp, Artificial sequence
  SiRNA target sequence
ttttttattatttatgcag

SEQ ID NO: 65791 - DNA, 19 bp, Artificial sequence
  SiRNA target sequence
tttttattatttatgcagg

SEQ ID NO: 65792 - DNA, 19 bp, Artificial sequence
  SiRNA target sequence
ttttattatttatgcagga

SEQ ID NO: 65793 - DNA, 19 bp, Artificial sequence
  SiRNA target sequence
tttattatttatgcaggaa

SEQ ID NO: 65794 - DNA, 19 bp, Artificial sequence
  SiRNA target sequence
ttattatttatgcaggaat

SEQ ID NO: 65795 - DNA, 19 bp, Artificial sequence
  SiRNA target sequence
tattatttatgcaggaata

SEQ ID NO: 65796 - DNA, 19 bp, Artificial sequence
  SiRNA target sequence
attatttatgcaggaatat

SEQ ID NO: 65797 - DNA, 19 bp, Artificial sequence
  SiRNA target sequence
ttatttatgcaggaatatc

SEQ ID NO: 65798 - DNA, 19 bp, Artificial sequence
  SiRNA target sequence
tatttatgcaggaatatca

SEQ ID NO: 65799 - DNA, 19 bp, Artificial sequence
  SiRNA target sequence
atttatgcaggaatatcag

SEQ ID NO: 65800 - DNA, 19 bp, Artificial sequence
  SiRNA target sequence
tttatgcaggaatatcagg

SEQ ID NO: 65801 - DNA, 19 bp, Artificial sequence
  SiRNA target sequence
ttatgcaggaatatcagga

SEQ ID NO: 65802 - DNA, 19 bp, Artificial sequence
  SiRNA target sequence
tatgcaggaatatcaggaa

SEQ ID NO: 65803 - DNA, 19 bp, Artificial sequence
  SiRNA target sequence
atgcaggaatatcaggaat

SEQ ID NO: 65804 - DNA, 19 bp, Artificial sequence
  SiRNA target sequence
tgcaggaatatcaggaata

SEQ ID NO: 65805 - DNA, 19 bp, Artificial sequence
  SiRNA target sequence
gcaggaatatcaggaatat

SEQ ID NO: 65806 - DNA, 19 bp, Artificial sequence
  SiRNA target sequence
caggaatatcaggaatatt

SEQ ID NO: 65807 - DNA, 19 bp, Artificial sequence
  SiRNA target sequence
aggaatatcaggaatatta

SEQ ID NO: 65808 - DNA, 19 bp, Artificial sequence
  SiRNA target sequence
ggaatatcaggaatattat

SEQ ID NO: 65809 - DNA, 19 bp, Artificial sequence
  SiRNA target sequence
gaatatcaggaatattatc

SEQ ID NO: 65810 - DNA, 19 bp, Artificial sequence
  SiRNA target sequence
aatatcaggaatattatct

SEQ ID NO: 65811 - DNA, 19 bp, Artificial sequence
  SiRNA target sequence
atatcaggaatattatctc

SEQ ID NO: 65812 - DNA, 19 bp, Artificial sequence
  SiRNA target sequence
tatcaggaatattatctca

SEQ ID NO: 65813 - DNA, 19 bp, Artificial sequence
  SiRNA target sequence
atcaggaatattatctcaa

SEQ ID NO: 65814 - DNA, 19 bp, Artificial sequence
  SiRNA target sequence
tcaggaatattatctcaaa

SEQ ID NO: 65815 - DNA, 19 bp, Artificial sequence
  SiRNA target sequence
caggaatattatctcaaaa

SEQ ID NO: 65816 - DNA, 19 bp, Artificial sequence
  SiRNA target sequence
aggaatattatctcaaaat

SEQ ID NO: 65817 - DNA, 19 bp, Artificial sequence
  SiRNA target sequence
ggaatattatctcaaaata

SEQ ID NO: 65818 - DNA, 19 bp, Artificial sequence
  SiRNA target sequence
gaatattatctcaaaatat

SEQ ID NO: 65819 - DNA, 19 bp, Artificial sequence
  SiRNA target sequence
aatattatctcaaaatatg

SEQ ID NO: 65820 - DNA, 19 bp, Artificial sequence
  SiRNA target sequence
atattatctcaaaatatgt

SEQ ID NO: 65821 - DNA, 19 bp, Artificial sequence
  SiRNA target sequence
tattatctcaaaatatgtc

SEQ ID NO: 65822 - DNA, 19 bp, Artificial sequence
  SiRNA target sequence
attatctcaaaatatgtca

SEQ ID NO: 65823 - DNA, 19 bp, Artificial sequence
  SiRNA target sequence
ttatctcaaaatatgtcat

SEQ ID NO: 65824 - DNA, 19 bp, Artificial sequence
  SiRNA target sequence
tatctcaaaatatgtcatc

SEQ ID NO: 65825 - DNA, 19 bp, Artificial sequence
  SiRNA target sequence
atctcaaaatatgtcatct

SEQ ID NO: 65826 - DNA, 19 bp, Artificial sequence
  SiRNA target sequence
tctcaaaatatgtcatcta

SEQ ID NO: 65827 - DNA, 19 bp, Artificial sequence
  SiRNA target sequence
ctcaaaatatgtcatctaa

SEQ ID NO: 65828 - DNA, 19 bp, Artificial sequence
  SiRNA target sequence
tcaaaatatgtcatctaac

SEQ ID NO: 65829 - DNA, 19 bp, Artificial sequence
  SiRNA target sequence
caaaatatgtcatctaacc

SEQ ID NO: 65830 - DNA, 19 bp, Artificial sequence
  SiRNA target sequence
aaaatatgtcatctaacca

SEQ ID NO: 65831 - DNA, 19 bp, Artificial sequence
  SiRNA target sequence
aaatatgtcatctaaccaa

SEQ ID NO: 65832 - DNA, 19 bp, Artificial sequence
  SiRNA target sequence
aatatgtcatctaaccaac

SEQ ID NO: 65833 - DNA, 19 bp, Artificial sequence
  SiRNA target sequence
atatgtcatctaaccaact

SEQ ID NO: 65834 - DNA, 19 bp, Artificial sequence
  SiRNA target sequence
tatgtcatctaaccaactc

SEQ ID NO: 65835 - DNA, 19 bp, Artificial sequence
  SiRNA target sequence
atgtcatctaaccaactca

SEQ ID NO: 65836 - DNA, 19 bp, Artificial sequence
  SiRNA target sequence
tgtcatctaaccaactcat

SEQ ID NO: 65837 - DNA, 19 bp, Artificial sequence
  SiRNA target sequence
gtcatctaaccaactcatt

SEQ ID NO: 65838 - DNA, 19 bp, Artificial sequence
  SiRNA target sequence
tcatctaaccaactcattt

SEQ ID NO: 65839 - DNA, 19 bp, Artificial sequence
  SiRNA target sequence
catctaaccaactcattta

SEQ ID NO: 65840 - DNA, 19 bp, Artificial sequence
  SiRNA target sequence
atctaaccaactcatttat

SEQ ID NO: 65841 - DNA, 19 bp, Artificial sequence
  SiRNA target sequence
tctaaccaactcatttatt

SEQ ID NO: 65842 - DNA, 19 bp, Artificial sequence
  SiRNA target sequence
ctaaccaactcatttattt

SEQ ID NO: 65843 - DNA, 19 bp, Artificial sequence
  SiRNA target sequence
taaccaactcatttattta

SEQ ID NO: 65844 - DNA, 19 bp, Artificial sequence
  SiRNA target sequence
aaccaactcatttatttaa

SEQ ID NO: 65845 - DNA, 19 bp, Artificial sequence
  SiRNA target sequence
accaactcatttatttaat

SEQ ID NO: 65846 - DNA, 19 bp, Artificial sequence
  SiRNA target sequence
ccaactcatttatttaatg

SEQ ID NO: 65847 - DNA, 19 bp, Artificial sequence
  SiRNA target sequence
caactcatttatttaatgt

SEQ ID NO: 65848 - DNA, 19 bp, Artificial sequence
  SiRNA target sequence
aactcatttatttaatgtc

SEQ ID NO: 65849 - DNA, 19 bp, Artificial sequence
  SiRNA target sequence
actcatttatttaatgtcc

SEQ ID NO: 65850 - DNA, 19 bp, Artificial sequence
  SiRNA target sequence
ctcatttatttaatgtcca

SEQ ID NO: 65851 - DNA, 19 bp, Artificial sequence
  SiRNA target sequence
tcatttatttaatgtccat

SEQ ID NO: 65852 - DNA, 19 bp, Artificial sequence
  SiRNA target sequence
catttatttaatgtccatt

SEQ ID NO: 65853 - DNA, 19 bp, Artificial sequence
  SiRNA target sequence
atttatttaatgtccatta

SEQ ID NO: 65854 - DNA, 19 bp, Artificial sequence
  SiRNA target sequence
tttatttaatgtccattac

SEQ ID NO: 65855 - DNA, 19 bp, Artificial sequence
  SiRNA target sequence
ttatttaatgtccattaca

SEQ ID NO: 65856 - DNA, 19 bp, Artificial sequence
  SiRNA target sequence
tatttaatgtccattacat

SEQ ID NO: 65857 - DNA, 19 bp, Artificial sequence
  SiRNA target sequence
atttaatgtccattacatc

SEQ ID NO: 65858 - DNA, 19 bp, Artificial sequence
  SiRNA target sequence
tttaatgtccattacatct

SEQ ID NO: 65859 - DNA, 19 bp, Artificial sequence
  SiRNA target sequence
ttaatgtccattacatcta

SEQ ID NO: 65860 - DNA, 19 bp, Artificial sequence
  SiRNA target sequence
taatgtccattacatctac

SEQ ID NO: 65861 - DNA, 19 bp, Artificial sequence
  SiRNA target sequence
aatgtccattacatctacg

SEQ ID NO: 65862 - DNA, 19 bp, Artificial sequence
  SiRNA target sequence
atgtccattacatctacgg

SEQ ID NO: 65863 - DNA, 19 bp, Artificial sequence
  SiRNA target sequence
tgtccattacatctacggt

SEQ ID NO: 65864 - DNA, 19 bp, Artificial sequence
  SiRNA target sequence
gtccattacatctacggtt

SEQ ID NO: 65865 - DNA, 19 bp, Artificial sequence
  SiRNA target sequence
tccattacatctacggtta

SEQ ID NO: 65866 - DNA, 19 bp, Artificial sequence
  SiRNA target sequence
ccattacatctacggttac

SEQ ID NO: 65867 - DNA, 19 bp, Artificial sequence
  SiRNA target sequence
cattacatctacggttact

SEQ ID NO: 65868 - DNA, 19 bp, Artificial sequence
  SiRNA target sequence
attacatctacggttacta

SEQ ID NO: 65869 - DNA, 19 bp, Artificial sequence
  SiRNA target sequence
ttacatctacggttactat

SEQ ID NO: 65870 - DNA, 19 bp, Artificial sequence
  SiRNA target sequence
tacatctacggttactatt

SEQ ID NO: 65871 - DNA, 19 bp, Artificial sequence
  SiRNA target sequence
acatctacggttactatta

SEQ ID NO: 65872 - DNA, 19 bp, Artificial sequence
  SiRNA target sequence
catctacggttactattaa

SEQ ID NO: 65873 - DNA, 19 bp, Artificial sequence
  SiRNA target sequence
atctacggttactattaat

SEQ ID NO: 65874 - DNA, 19 bp, Artificial sequence
  SiRNA target sequence
tctacggttactattaatt

SEQ ID NO: 65875 - DNA, 19 bp, Artificial sequence
  SiRNA target sequence
ctacggttactattaattt

SEQ ID NO: 65876 - DNA, 19 bp, Artificial sequence
  SiRNA target sequence
tacggttactattaattta

SEQ ID NO: 65877 - DNA, 19 bp, Artificial sequence
  SiRNA target sequence
acggttactattaatttaa

SEQ ID NO: 65878 - DNA, 19 bp, Artificial sequence
  SiRNA target sequence
cggttactattaatttaag

SEQ ID NO: 65879 - DNA, 19 bp, Artificial sequence
  SiRNA target sequence
ggttactattaatttaagt

SEQ ID NO: 65880 - DNA, 19 bp, Artificial sequence
  SiRNA target sequence
gttactattaatttaagta

SEQ ID NO: 65881 - DNA, 19 bp, Artificial sequence
  SiRNA target sequence
ttactattaatttaagtaa

SEQ ID NO: 65882 - DNA, 19 bp, Artificial sequence
  SiRNA target sequence
tactattaatttaagtaac

SEQ ID NO: 65883 - DNA, 19 bp, Artificial sequence
  SiRNA target sequence
actattaatttaagtaact

SEQ ID NO: 65884 - DNA, 19 bp, Artificial sequence
  SiRNA target sequence
ctattaatttaagtaactt

SEQ ID NO: 65885 - DNA, 19 bp, Artificial sequence
  SiRNA target sequence
tattaatttaagtaacttg

SEQ ID NO: 65886 - DNA, 19 bp, Artificial sequence
  SiRNA target sequence
attaatttaagtaacttgg

SEQ ID NO: 65887 - DNA, 19 bp, Artificial sequence
  SiRNA target sequence
ttaatttaagtaacttggg

SEQ ID NO: 65888 - DNA, 19 bp, Artificial sequence
  SiRNA target sequence
taatttaagtaacttgggt

SEQ ID NO: 65889 - DNA, 19 bp, Artificial sequence
  SiRNA target sequence
aatttaagtaacttgggtt

SEQ ID NO: 65890 - DNA, 19 bp, Artificial sequence
  SiRNA target sequence
atttaagtaacttgggtta

SEQ ID NO: 65891 - DNA, 19 bp, Artificial sequence
  SiRNA target sequence
tttaagtaacttgggttac

SEQ ID NO: 65892 - DNA, 19 bp, Artificial sequence
  SiRNA target sequence
ttaagtaacttgggttact

SEQ ID NO: 65893 - DNA, 19 bp, Artificial sequence
  SiRNA target sequence
taagtaacttgggttactt

SEQ ID NO: 65894 - DNA, 19 bp, Artificial sequence
  SiRNA target sequence
aagtaacttgggttactta

SEQ ID NO: 65895 - DNA, 19 bp, Artificial sequence
  SiRNA target sequence
agtaacttgggttacttat

SEQ ID NO: 65896 - DNA, 19 bp, Artificial sequence
  SiRNA target sequence
gtaacttgggttacttata

SEQ ID NO: 65897 - DNA, 19 bp, Artificial sequence
  SiRNA target sequence
taacttgggttacttatac

SEQ ID NO: 65898 - DNA, 19 bp, Artificial sequence
  SiRNA target sequence
aacttgggttacttataca

SEQ ID NO: 65899 - DNA, 19 bp, Artificial sequence
  SiRNA target sequence
acttgggttacttatacac

SEQ ID NO: 65900 - DNA, 19 bp, Artificial sequence
  SiRNA target sequence
cttgggttacttatacact

SEQ ID NO: 65901 - DNA, 19 bp, Artificial sequence
  SiRNA target sequence
ttgggttacttatacacta

SEQ ID NO: 65902 - DNA, 19 bp, Artificial sequence
  SiRNA target sequence
tgggttacttatacactag

SEQ ID NO: 65903 - DNA, 19 bp, Artificial sequence
  SiRNA target sequence
gggttacttatacactaga

SEQ ID NO: 65904 - DNA, 19 bp, Artificial sequence
  SiRNA target sequence
ggttacttatacactagat

SEQ ID NO: 65905 - DNA, 19 bp, Artificial sequence
  SiRNA target sequence
gttacttatacactagata

SEQ ID NO: 65906 - DNA, 19 bp, Artificial sequence
  SiRNA target sequence
ttacttatacactagatat

SEQ ID NO: 65907 - DNA, 19 bp, Artificial sequence
  SiRNA target sequence
tacttatacactagatata

SEQ ID NO: 65908 - DNA, 19 bp, Artificial sequence
  SiRNA target sequence
acttatacactagatatac

SEQ ID NO: 65909 - DNA, 19 bp, Artificial sequence
  SiRNA target sequence
cttatacactagatataca

SEQ ID NO: 65910 - DNA, 19 bp, Artificial sequence
  SiRNA target sequence
ttatacactagatatacac

SEQ ID NO: 65911 - DNA, 19 bp, Artificial sequence
  SiRNA target sequence
tatacactagatatacaca

SEQ ID NO: 65912 - DNA, 19 bp, Artificial sequence
  SiRNA target sequence
atacactagatatacacaa

SEQ ID NO: 65913 - DNA, 19 bp, Artificial sequence
  SiRNA target sequence
tacactagatatacacaag

SEQ ID NO: 65914 - DNA, 19 bp, Artificial sequence
  SiRNA target sequence
acactagatatacacaagc

SEQ ID NO: 65915 - DNA, 19 bp, Artificial sequence
  SiRNA target sequence
cactagatatacacaagca

SEQ ID NO: 65916 - DNA, 19 bp, Artificial sequence
  SiRNA target sequence
actagatatacacaagcaa

SEQ ID NO: 65917 - DNA, 19 bp, Artificial sequence
  SiRNA target sequence
ctagatatacacaagcaat

SEQ ID NO: 65918 - DNA, 19 bp, Artificial sequence
  SiRNA target sequence
tagatatacacaagcaata

SEQ ID NO: 65919 - DNA, 19 bp, Artificial sequence
  SiRNA target sequence
agatatacacaagcaataa

SEQ ID NO: 65920 - DNA, 19 bp, Artificial sequence
  SiRNA target sequence
gatatacacaagcaataat

SEQ ID NO: 65921 - DNA, 19 bp, Artificial sequence
  SiRNA target sequence
atatacacaagcaataatt

SEQ ID NO: 65922 - DNA, 19 bp, Artificial sequence
  SiRNA target sequence
tatacacaagcaataatta

SEQ ID NO: 65923 - DNA, 19 bp, Artificial sequence
  SiRNA target sequence
atacacaagcaataattaa

SEQ ID NO: 65924 - DNA, 19 bp, Artificial sequence
  SiRNA target sequence
tacacaagcaataattaat

SEQ ID NO: 65925 - DNA, 19 bp, Artificial sequence
  SiRNA target sequence
acacaagcaataattaatg

SEQ ID NO: 65926 - DNA, 19 bp, Artificial sequence
  SiRNA target sequence
cacaagcaataattaatgc

SEQ ID NO: 65927 - DNA, 19 bp, Artificial sequence
  SiRNA target sequence
acaagcaataattaatgca

SEQ ID NO: 65928 - DNA, 19 bp, Artificial sequence
  SiRNA target sequence
caagcaataattaatgcaa

SEQ ID NO: 65929 - DNA, 19 bp, Artificial sequence
  SiRNA target sequence
aagcaataattaatgcaag

SEQ ID NO: 65930 - DNA, 19 bp, Artificial sequence
  SiRNA target sequence
agcaataattaatgcaaga

SEQ ID NO: 65931 - DNA, 19 bp, Artificial sequence
  SiRNA target sequence
gcaataattaatgcaagat

SEQ ID NO: 65932 - DNA, 19 bp, Artificial sequence
  SiRNA target sequence
caataattaatgcaagatc

SEQ ID NO: 65933 - DNA, 19 bp, Artificial sequence
  SiRNA target sequence
aataattaatgcaagatct

SEQ ID NO: 65934 - DNA, 19 bp, Artificial sequence
  SiRNA target sequence
ataattaatgcaagatcta

SEQ ID NO: 65935 - DNA, 19 bp, Artificial sequence
  SiRNA target sequence
taattaatgcaagatctac

SEQ ID NO: 65936 - DNA, 19 bp, Artificial sequence
  SiRNA target sequence
aattaatgcaagatctact

SEQ ID NO: 65937 - DNA, 19 bp, Artificial sequence
  SiRNA target sequence
attaatgcaagatctactt

SEQ ID NO: 65938 - DNA, 19 bp, Artificial sequence
  SiRNA target sequence
ttaatgcaagatctactta

SEQ ID NO: 65939 - DNA, 19 bp, Artificial sequence
  SiRNA target sequence
taatgcaagatctacttat

SEQ ID NO: 65940 - DNA, 19 bp, Artificial sequence
  SiRNA target sequence
aatgcaagatctacttatg

SEQ ID NO: 65941 - DNA, 19 bp, Artificial sequence
  SiRNA target sequence
atgcaagatctacttatga

SEQ ID NO: 65942 - DNA, 19 bp, Artificial sequence
  SiRNA target sequence
tgcaagatctacttatgat

SEQ ID NO: 65943 - DNA, 19 bp, Artificial sequence
  SiRNA target sequence
gcaagatctacttatgata

SEQ ID NO: 65944 - DNA, 19 bp, Artificial sequence
  SiRNA target sequence
caagatctacttatgatac

SEQ ID NO: 65945 - DNA, 19 bp, Artificial sequence
  SiRNA target sequence
aagatctacttatgataca

SEQ ID NO: 65946 - DNA, 19 bp, Artificial sequence
  SiRNA target sequence
agatctacttatgatacaa

SEQ ID NO: 65947 - DNA, 19 bp, Artificial sequence
  SiRNA target sequence
gatctacttatgatacaat

SEQ ID NO: 65948 - DNA, 19 bp, Artificial sequence
  SiRNA target sequence
atctacttatgatacaatg

SEQ ID NO: 65949 - DNA, 19 bp, Artificial sequence
  SiRNA target sequence
tctacttatgatacaatgt

SEQ ID NO: 65950 - DNA, 19 bp, Artificial sequence
  SiRNA target sequence
ctacttatgatacaatgtt

SEQ ID NO: 65951 - DNA, 19 bp, Artificial sequence
  SiRNA target sequence
tacttatgatacaatgtta

SEQ ID NO: 65952 - DNA, 19 bp, Artificial sequence
  SiRNA target sequence
acttatgatacaatgttag

SEQ ID NO: 65953 - DNA, 19 bp, Artificial sequence
  SiRNA target sequence
cttatgatacaatgttaga

SEQ ID NO: 65954 - DNA, 19 bp, Artificial sequence
  SiRNA target sequence
ttatgatacaatgttagat

SEQ ID NO: 65955 - DNA, 19 bp, Artificial sequence
  SiRNA target sequence
tatgatacaatgttagata

SEQ ID NO: 65956 - DNA, 19 bp, Artificial sequence
  SiRNA target sequence
atgatacaatgttagatat

SEQ ID NO: 65957 - DNA, 19 bp, Artificial sequence
  SiRNA target sequence
tgatacaatgttagatata

SEQ ID NO: 65958 - DNA, 19 bp, Artificial sequence
  SiRNA target sequence
gatacaatgttagatataa

SEQ ID NO: 65959 - DNA, 19 bp, Artificial sequence
  SiRNA target sequence
atacaatgttagatataaa

SEQ ID NO: 65960 - DNA, 19 bp, Artificial sequence
  SiRNA target sequence
tacaatgttagatataaaa

SEQ ID NO: 65961 - DNA, 19 bp, Artificial sequence
  SiRNA target sequence
acaatgttagatataaaaa

SEQ ID NO: 65962 - DNA, 19 bp, Artificial sequence
  SiRNA target sequence
caatgttagatataaaaaa

SEQ ID NO: 65963 - DNA, 19 bp, Artificial sequence
  SiRNA target sequence
aatgttagatataaaaaaa

SEQ ID NO: 65964 - DNA, 19 bp, Artificial sequence
  SiRNA target sequence
atgttagatataaaaaaag

SEQ ID NO: 65965 - DNA, 19 bp, Artificial sequence
  SiRNA target sequence
tgttagatataaaaaaaga

SEQ ID NO: 65966 - DNA, 19 bp, Artificial sequence
  SiRNA target sequence
gttagatataaaaaaagag

SEQ ID NO: 65967 - DNA, 19 bp, Artificial sequence
  SiRNA target sequence
ttagatataaaaaaagaga

SEQ ID NO: 65968 - DNA, 19 bp, Artificial sequence
  SiRNA target sequence
tagatataaaaaaagagaa

SEQ ID NO: 65969 - DNA, 19 bp, Artificial sequence
  SiRNA target sequence
agatataaaaaaagagaat

SEQ ID NO: 65970 - DNA, 19 bp, Artificial sequence
  SiRNA target sequence
gatataaaaaaagagaata

SEQ ID NO: 65971 - DNA, 19 bp, Artificial sequence
  SiRNA target sequence
atataaaaaaagagaataa

SEQ ID NO: 65972 - DNA, 19 bp, Artificial sequence
  SiRNA target sequence
tataaaaaaagagaataat

SEQ ID NO: 65973 - DNA, 19 bp, Artificial sequence
  SiRNA target sequence
ataaaaaaagagaataata

SEQ ID NO: 65974 - DNA, 19 bp, Artificial sequence
  SiRNA target sequence
taaaaaaagagaataataa

SEQ ID NO: 65975 - DNA, 19 bp, Artificial sequence
  SiRNA target sequence
aaaaaaagagaataataag

SEQ ID NO: 65976 - DNA, 19 bp, Artificial sequence
  SiRNA target sequence
aaaaaagagaataataagt

SEQ ID NO: 65977 - DNA, 19 bp, Artificial sequence
  SiRNA target sequence
aaaaagagaataataagtt

SEQ ID NO: 65978 - DNA, 19 bp, Artificial sequence
  SiRNA target sequence
aaaagagaataataagttt

SEQ ID NO: 65979 - DNA, 19 bp, Artificial sequence
  SiRNA target sequence
aaagagaataataagttta

SEQ ID NO: 65980 - DNA, 19 bp, Artificial sequence
  SiRNA target sequence
aagagaataataagtttaa

SEQ ID NO: 65981 - DNA, 19 bp, Artificial sequence
  SiRNA target sequence
agagaataataagtttaag

SEQ ID NO: 65982 - DNA, 19 bp, Artificial sequence
  SiRNA target sequence
gagaataataagtttaaga

SEQ ID NO: 65983 - DNA, 19 bp, Artificial sequence
  SiRNA target sequence
agaataataagtttaagat

SEQ ID NO: 65984 - DNA, 19 bp, Artificial sequence
  SiRNA target sequence
gaataataagtttaagatt

SEQ ID NO: 65985 - DNA, 19 bp, Artificial sequence
  SiRNA target sequence
aataataagtttaagatta

SEQ ID NO: 65986 - DNA, 19 bp, Artificial sequence
  SiRNA target sequence
ataataagtttaagattac

SEQ ID NO: 65987 - DNA, 19 bp, Artificial sequence
  SiRNA target sequence
taataagtttaagattaca

SEQ ID NO: 65988 - DNA, 19 bp, Artificial sequence
  SiRNA target sequence
aataagtttaagattacag

SEQ ID NO: 65989 - DNA, 19 bp, Artificial sequence
  SiRNA target sequence
ataagtttaagattacaga

SEQ ID NO: 65990 - DNA, 19 bp, Artificial sequence
  SiRNA target sequence
taagtttaagattacagaa

SEQ ID NO: 65991 - DNA, 19 bp, Artificial sequence
  SiRNA target sequence
aagtttaagattacagaat

SEQ ID NO: 65992 - DNA, 19 bp, Artificial sequence
  SiRNA target sequence
agtttaagattacagaatt

SEQ ID NO: 65993 - DNA, 19 bp, Artificial sequence
  SiRNA target sequence
gtttaagattacagaattt

SEQ ID NO: 65994 - DNA, 19 bp, Artificial sequence
  SiRNA target sequence
tttaagattacagaattta

SEQ ID NO: 65995 - DNA, 19 bp, Artificial sequence
  SiRNA target sequence
ttaagattacagaatttaa

SEQ ID NO: 65996 - DNA, 19 bp, Artificial sequence
  SiRNA target sequence
taagattacagaatttaaa

SEQ ID NO: 65997 - DNA, 19 bp, Artificial sequence
  SiRNA target sequence
aagattacagaatttaaag

SEQ ID NO: 65998 - DNA, 19 bp, Artificial sequence
  SiRNA target sequence
agattacagaatttaaaga

SEQ ID NO: 65999 - DNA, 19 bp, Artificial sequence
  SiRNA target sequence
gattacagaatttaaagaa

SEQ ID NO: 66000 - DNA, 19 bp, Artificial sequence
  SiRNA target sequence
attacagaatttaaagaaa

SEQ ID NO: 66001 - DNA, 19 bp, Artificial sequence
  SiRNA target sequence
ttacagaatttaaagaaag

SEQ ID NO: 66002 - DNA, 19 bp, Artificial sequence
  SiRNA target sequence
tacagaatttaaagaaagt

SEQ ID NO: 66003 - DNA, 19 bp, Artificial sequence
  SiRNA target sequence
acagaatttaaagaaagta

SEQ ID NO: 66004 - DNA, 19 bp, Artificial sequence
  SiRNA target sequence
cagaatttaaagaaagtat

SEQ ID NO: 66005 - DNA, 19 bp, Artificial sequence
  SiRNA target sequence
agaatttaaagaaagtatt

SEQ ID NO: 66006 - DNA, 19 bp, Artificial sequence
  SiRNA target sequence
gaatttaaagaaagtatta

SEQ ID NO: 66007 - DNA, 19 bp, Artificial sequence
  SiRNA target sequence
aatttaaagaaagtattaa

SEQ ID NO: 66008 - DNA, 19 bp, Artificial sequence
  SiRNA target sequence
atttaaagaaagtattaag

SEQ ID NO: 66009 - DNA, 19 bp, Artificial sequence
  SiRNA target sequence
tttaaagaaagtattaagt

SEQ ID NO: 66010 - DNA, 19 bp, Artificial sequence
  SiRNA target sequence
ttaaagaaagtattaagtt

SEQ ID NO: 66011 - DNA, 19 bp, Artificial sequence
  SiRNA target sequence
taaagaaagtattaagttt

SEQ ID NO: 66012 - DNA, 19 bp, Artificial sequence
  SiRNA target sequence
aaagaaagtattaagttta

SEQ ID NO: 66013 - DNA, 19 bp, Artificial sequence
  SiRNA target sequence
aagaaagtattaagtttaa

SEQ ID NO: 66014 - DNA, 19 bp, Artificial sequence
  SiRNA target sequence
agaaagtattaagtttaat

SEQ ID NO: 66015 - DNA, 19 bp, Artificial sequence
  SiRNA target sequence
gaaagtattaagtttaata

SEQ ID NO: 66016 - DNA, 19 bp, Artificial sequence
  SiRNA target sequence
aaagtattaagtttaataa

SEQ ID NO: 66017 - DNA, 19 bp, Artificial sequence
  SiRNA target sequence
aagtattaagtttaataat

SEQ ID NO: 66018 - DNA, 19 bp, Artificial sequence
  SiRNA target sequence
agtattaagtttaataatt

SEQ ID NO: 66019 - DNA, 19 bp, Artificial sequence
  SiRNA target sequence
gtattaagtttaataattt

SEQ ID NO: 66020 - DNA, 19 bp, Artificial sequence
  SiRNA target sequence
tattaagtttaataatttg

SEQ ID NO: 66021 - DNA, 19 bp, Artificial sequence
  SiRNA target sequence
attaagtttaataatttgt

SEQ ID NO: 66022 - DNA, 19 bp, Artificial sequence
  SiRNA target sequence
ttaagtttaataatttgtc

SEQ ID NO: 66023 - DNA, 19 bp, Artificial sequence
  SiRNA target sequence
taagtttaataatttgtca

SEQ ID NO: 66024 - DNA, 19 bp, Artificial sequence
  SiRNA target sequence
aagtttaataatttgtcat

SEQ ID NO: 66025 - DNA, 19 bp, Artificial sequence
  SiRNA target sequence
agtttaataatttgtcatt

SEQ ID NO: 66026 - DNA, 19 bp, Artificial sequence
  SiRNA target sequence
gtttaataatttgtcattt

SEQ ID NO: 66027 - DNA, 19 bp, Artificial sequence
  SiRNA target sequence
tttaataatttgtcatttg

SEQ ID NO: 66028 - DNA, 19 bp, Artificial sequence
  SiRNA target sequence
ttaataatttgtcatttgg

SEQ ID NO: 66029 - DNA, 19 bp, Artificial sequence
  SiRNA target sequence
taataatttgtcatttggt

SEQ ID NO: 66030 - DNA, 19 bp, Artificial sequence
  SiRNA target sequence
aataatttgtcatttggtt

SEQ ID NO: 66031 - DNA, 19 bp, Artificial sequence
  SiRNA target sequence
ataatttgtcatttggtta

SEQ ID NO: 66032 - DNA, 19 bp, Artificial sequence
  SiRNA target sequence
taatttgtcatttggttat

SEQ ID NO: 66033 - DNA, 19 bp, Artificial sequence
  SiRNA target sequence
aatttgtcatttggttatg

SEQ ID NO: 66034 - DNA, 19 bp, Artificial sequence
  SiRNA target sequence
atttgtcatttggttatga

SEQ ID NO: 66035 - DNA, 19 bp, Artificial sequence
  SiRNA target sequence
tttgtcatttggttatgaa

SEQ ID NO: 66036 - DNA, 19 bp, Artificial sequence
  SiRNA target sequence
ttgtcatttggttatgaaa

SEQ ID NO: 66037 - DNA, 19 bp, Artificial sequence
  SiRNA target sequence
tgtcatttggttatgaaag

SEQ ID NO: 66038 - DNA, 19 bp, Artificial sequence
  SiRNA target sequence
gtcatttggttatgaaagt

SEQ ID NO: 66039 - DNA, 19 bp, Artificial sequence
  SiRNA target sequence
tcatttggttatgaaagta

SEQ ID NO: 66040 - DNA, 19 bp, Artificial sequence
  SiRNA target sequence
catttggttatgaaagtag

SEQ ID NO: 66041 - DNA, 19 bp, Artificial sequence
  SiRNA target sequence
atttggttatgaaagtaga

SEQ ID NO: 66042 - DNA, 19 bp, Artificial sequence
  SiRNA target sequence
tttggttatgaaagtagac

SEQ ID NO: 66043 - DNA, 19 bp, Artificial sequence
  SiRNA target sequence
ttggttatgaaagtagaca

SEQ ID NO: 66044 - DNA, 19 bp, Artificial sequence
  SiRNA target sequence
tggttatgaaagtagacaa

SEQ ID NO: 66045 - DNA, 19 bp, Artificial sequence
  SiRNA target sequence
ggttatgaaagtagacaaa

SEQ ID NO: 66046 - DNA, 19 bp, Artificial sequence
  SiRNA target sequence
gttatgaaagtagacaaat

SEQ ID NO: 66047 - DNA, 19 bp, Artificial sequence
  SiRNA target sequence
ttatgaaagtagacaaatt

SEQ ID NO: 66048 - DNA, 19 bp, Artificial sequence
  SiRNA target sequence
tatgaaagtagacaaattt

SEQ ID NO: 66049 - DNA, 19 bp, Artificial sequence
  SiRNA target sequence
atgaaagtagacaaatttt

SEQ ID NO: 66050 - DNA, 19 bp, Artificial sequence
  SiRNA target sequence
tgaaagtagacaaattttt

SEQ ID NO: 66051 - DNA, 19 bp, Artificial sequence
  SiRNA target sequence
gaaagtagacaaattttta

SEQ ID NO: 66052 - DNA, 19 bp, Artificial sequence
  SiRNA target sequence
aaagtagacaaatttttaa

SEQ ID NO: 66053 - DNA, 19 bp, Artificial sequence
  SiRNA target sequence
aagtagacaaatttttaat

SEQ ID NO: 66054 - DNA, 19 bp, Artificial sequence
  SiRNA target sequence
agtagacaaatttttaata

SEQ ID NO: 66055 - DNA, 19 bp, Artificial sequence
  SiRNA target sequence
gtagacaaatttttaataa

SEQ ID NO: 66056 - DNA, 19 bp, Artificial sequence
  SiRNA target sequence
tagacaaatttttaataaa

SEQ ID NO: 66057 - DNA, 19 bp, Artificial sequence
  SiRNA target sequence
agacaaatttttaataaaa

SEQ ID NO: 66058 - DNA, 19 bp, Artificial sequence
  SiRNA target sequence
gacaaatttttaataaaat

SEQ ID NO: 66059 - DNA, 19 bp, Artificial sequence
  SiRNA target sequence
acaaatttttaataaaata

SEQ ID NO: 66060 - DNA, 19 bp, Artificial sequence
  SiRNA target sequence
caaatttttaataaaataa

SEQ ID NO: 66061 - DNA, 19 bp, Artificial sequence
  SiRNA target sequence
aaatttttaataaaataaa

SEQ ID NO: 66062 - DNA, 19 bp, Artificial sequence
  SiRNA target sequence
aatttttaataaaataaat

SEQ ID NO: 66063 - DNA, 19 bp, Artificial sequence
  SiRNA target sequence
atttttaataaaataaatc

SEQ ID NO: 66064 - DNA, 19 bp, Artificial sequence
  SiRNA target sequence
tttttaataaaataaatct

SEQ ID NO: 66065 - DNA, 19 bp, Artificial sequence
  SiRNA target sequence
ttttaataaaataaatcta

SEQ ID NO: 66066 - DNA, 19 bp, Artificial sequence
  SiRNA target sequence
tttaataaaataaatctag

SEQ ID NO: 66067 - DNA, 19 bp, Artificial sequence
  SiRNA target sequence
ttaataaaataaatctaga

SEQ ID NO: 66068 - DNA, 19 bp, Artificial sequence
  SiRNA target sequence
taataaaataaatctagaa

SEQ ID NO: 66069 - DNA, 19 bp, Artificial sequence
  SiRNA target sequence
aataaaataaatctagaaa

SEQ ID NO: 66070 - DNA, 19 bp, Artificial sequence
  SiRNA target sequence
ataaaataaatctagaaat

SEQ ID NO: 66071 - DNA, 19 bp, Artificial sequence
  SiRNA target sequence
taaaataaatctagaaata

SEQ ID NO: 66072 - DNA, 19 bp, Artificial sequence
  SiRNA target sequence
aaaataaatctagaaatat

SEQ ID NO: 66073 - DNA, 19 bp, Artificial sequence
  SiRNA target sequence
aaataaatctagaaatata

SEQ ID NO: 66074 - DNA, 19 bp, Artificial sequence
  SiRNA target sequence
aataaatctagaaatatac

SEQ ID NO: 66075 - DNA, 19 bp, Artificial sequence
  SiRNA target sequence
ataaatctagaaatataca

SEQ ID NO: 66076 - DNA, 19 bp, Artificial sequence
  SiRNA target sequence
taaatctagaaatatacaa

SEQ ID NO: 66077 - DNA, 19 bp, Artificial sequence
  SiRNA target sequence
aaatctagaaatatacaaa

SEQ ID NO: 66078 - DNA, 19 bp, Artificial sequence
  SiRNA target sequence
aatctagaaatatacaaag

SEQ ID NO: 66079 - DNA, 19 bp, Artificial sequence
  SiRNA target sequence
atctagaaatatacaaagg

SEQ ID NO: 66080 - DNA, 19 bp, Artificial sequence
  SiRNA target sequence
tctagaaatatacaaagga

SEQ ID NO: 66081 - DNA, 19 bp, Artificial sequence
  SiRNA target sequence
ctagaaatatacaaaggag

SEQ ID NO: 66082 - DNA, 19 bp, Artificial sequence
  SiRNA target sequence
tagaaatatacaaaggaga

SEQ ID NO: 66083 - DNA, 19 bp, Artificial sequence
  SiRNA target sequence
agaaatatacaaaggagaa

SEQ ID NO: 66084 - DNA, 19 bp, Artificial sequence
  SiRNA target sequence
gaaatatacaaaggagaaa

SEQ ID NO: 66085 - DNA, 19 bp, Artificial sequence
  SiRNA target sequence
aaatatacaaaggagaaaa

SEQ ID NO: 66086 - DNA, 19 bp, Artificial sequence
  SiRNA target sequence
aatatacaaaggagaaaaa

SEQ ID NO: 66087 - DNA, 19 bp, Artificial sequence
  SiRNA target sequence
atatacaaaggagaaaaag

SEQ ID NO: 66088 - DNA, 19 bp, Artificial sequence
  SiRNA target sequence
tatacaaaggagaaaaagt

SEQ ID NO: 66089 - DNA, 19 bp, Artificial sequence
  SiRNA target sequence
atacaaaggagaaaaagta

SEQ ID NO: 66090 - DNA, 19 bp, Artificial sequence
  SiRNA target sequence
tacaaaggagaaaaagtag

SEQ ID NO: 66091 - DNA, 19 bp, Artificial sequence
  SiRNA target sequence
acaaaggagaaaaagtagc

SEQ ID NO: 66092 - DNA, 19 bp, Artificial sequence
  SiRNA target sequence
caaaggagaaaaagtagca

SEQ ID NO: 66093 - DNA, 19 bp, Artificial sequence
  SiRNA target sequence
aaaggagaaaaagtagcaa

SEQ ID NO: 66094 - DNA, 19 bp, Artificial sequence
  SiRNA target sequence
aaggagaaaaagtagcaat

SEQ ID NO: 66095 - DNA, 19 bp, Artificial sequence
  SiRNA target sequence
aggagaaaaagtagcaatt

SEQ ID NO: 66096 - DNA, 19 bp, Artificial sequence
  SiRNA target sequence
ggagaaaaagtagcaatta

SEQ ID NO: 66097 - DNA, 19 bp, Artificial sequence
  SiRNA target sequence
gagaaaaagtagcaattat

SEQ ID NO: 66098 - DNA, 19 bp, Artificial sequence
  SiRNA target sequence
agaaaaagtagcaattata

SEQ ID NO: 66099 - DNA, 19 bp, Artificial sequence
  SiRNA target sequence
gaaaaagtagcaattatag

SEQ ID NO: 66100 - DNA, 19 bp, Artificial sequence
  SiRNA target sequence
aaaaagtagcaattatagg

SEQ ID NO: 66101 - DNA, 19 bp, Artificial sequence
  SiRNA target sequence
aaaagtagcaattataggt

SEQ ID NO: 66102 - DNA, 19 bp, Artificial sequence
  SiRNA target sequence
aaagtagcaattataggta

SEQ ID NO: 66103 - DNA, 19 bp, Artificial sequence
  SiRNA target sequence
aagtagcaattataggtaa

SEQ ID NO: 66104 - DNA, 19 bp, Artificial sequence
  SiRNA target sequence
agtagcaattataggtaaa

SEQ ID NO: 66105 - DNA, 19 bp, Artificial sequence
  SiRNA target sequence
gtagcaattataggtaaaa

SEQ ID NO: 66106 - DNA, 19 bp, Artificial sequence
  SiRNA target sequence
tagcaattataggtaaaaa

SEQ ID NO: 66107 - DNA, 19 bp, Artificial sequence
  SiRNA target sequence
agcaattataggtaaaaat

SEQ ID NO: 66108 - DNA, 19 bp, Artificial sequence
  SiRNA target sequence
gcaattataggtaaaaatg

SEQ ID NO: 66109 - DNA, 19 bp, Artificial sequence
  SiRNA target sequence
caattataggtaaaaatgg

SEQ ID NO: 66110 - DNA, 19 bp, Artificial sequence
  SiRNA target sequence
aattataggtaaaaatggt

SEQ ID NO: 66111 - DNA, 19 bp, Artificial sequence
  SiRNA target sequence
attataggtaaaaatggta

SEQ ID NO: 66112 - DNA, 19 bp, Artificial sequence
  SiRNA target sequence
ttataggtaaaaatggtag

SEQ ID NO: 66113 - DNA, 19 bp, Artificial sequence
  SiRNA target sequence
tataggtaaaaatggtagt

SEQ ID NO: 66114 - DNA, 19 bp, Artificial sequence
  SiRNA target sequence
ataggtaaaaatggtagtg

SEQ ID NO: 66115 - DNA, 19 bp, Artificial sequence
  SiRNA target sequence
taggtaaaaatggtagtgg

SEQ ID NO: 66116 - DNA, 19 bp, Artificial sequence
  SiRNA target sequence
aggtaaaaatggtagtggt

SEQ ID NO: 66117 - DNA, 19 bp, Artificial sequence
  SiRNA target sequence
ggtaaaaatggtagtggta

SEQ ID NO: 66118 - DNA, 19 bp, Artificial sequence
  SiRNA target sequence
gtaaaaatggtagtggtaa

SEQ ID NO: 66119 - DNA, 19 bp, Artificial sequence
  SiRNA target sequence
taaaaatggtagtggtaaa

SEQ ID NO: 66120 - DNA, 19 bp, Artificial sequence
  SiRNA target sequence
aaaaatggtagtggtaaat

SEQ ID NO: 66121 - DNA, 19 bp, Artificial sequence
  SiRNA target sequence
aaaatggtagtggtaaatc

SEQ ID NO: 66122 - DNA, 19 bp, Artificial sequence
  SiRNA target sequence
aaatggtagtggtaaatca

SEQ ID NO: 66123 - DNA, 19 bp, Artificial sequence
  SiRNA target sequence
aatggtagtggtaaatcaa

SEQ ID NO: 66124 - DNA, 19 bp, Artificial sequence
  SiRNA target sequence
atggtagtggtaaatcaac

SEQ ID NO: 66125 - DNA, 19 bp, Artificial sequence
  SiRNA target sequence
tggtagtggtaaatcaaca

SEQ ID NO: 66126 - DNA, 19 bp, Artificial sequence
  SiRNA target sequence
ggtagtggtaaatcaacat

SEQ ID NO: 66127 - DNA, 19 bp, Artificial sequence
  SiRNA target sequence
gtagtggtaaatcaacatt

SEQ ID NO: 66128 - DNA, 19 bp, Artificial sequence
  SiRNA target sequence
tagtggtaaatcaacatta

SEQ ID NO: 66129 - DNA, 19 bp, Artificial sequence
  SiRNA target sequence
agtggtaaatcaacattac

SEQ ID NO: 66130 - DNA, 19 bp, Artificial sequence
  SiRNA target sequence
gtggtaaatcaacattact

SEQ ID NO: 66131 - DNA, 19 bp, Artificial sequence
  SiRNA target sequence
tggtaaatcaacattacta

SEQ ID NO: 66132 - DNA, 19 bp, Artificial sequence
  SiRNA target sequence
ggtaaatcaacattactaa

SEQ ID NO: 66133 - DNA, 19 bp, Artificial sequence
  SiRNA target sequence
gtaaatcaacattactaaa

SEQ ID NO: 66134 - DNA, 19 bp, Artificial sequence
  SiRNA target sequence
taaatcaacattactaaaa

SEQ ID NO: 66135 - DNA, 19 bp, Artificial sequence
  SiRNA target sequence
aaatcaacattactaaaac

SEQ ID NO: 66136 - DNA, 19 bp, Artificial sequence
  SiRNA target sequence
aatcaacattactaaaact

SEQ ID NO: 66137 - DNA, 19 bp, Artificial sequence
  SiRNA target sequence
atcaacattactaaaacta

SEQ ID NO: 66138 - DNA, 19 bp, Artificial sequence
  SiRNA target sequence
tcaacattactaaaactac

SEQ ID NO: 66139 - DNA, 19 bp, Artificial sequence
  SiRNA target sequence
caacattactaaaactact

SEQ ID NO: 66140 - DNA, 19 bp, Artificial sequence
  SiRNA target sequence
aacattactaaaactactg

SEQ ID NO: 66141 - DNA, 19 bp, Artificial sequence
  SiRNA target sequence
acattactaaaactactgc

SEQ ID NO: 66142 - DNA, 19 bp, Artificial sequence
  SiRNA target sequence
cattactaaaactactgct

SEQ ID NO: 66143 - DNA, 19 bp, Artificial sequence
  SiRNA target sequence
attactaaaactactgctt

SEQ ID NO: 66144 - DNA, 19 bp, Artificial sequence
  SiRNA target sequence
ttactaaaactactgctta

SEQ ID NO: 66145 - DNA, 19 bp, Artificial sequence
  SiRNA target sequence
tactaaaactactgcttaa

SEQ ID NO: 66146 - DNA, 19 bp, Artificial sequence
  SiRNA target sequence
actaaaactactgcttaaa

SEQ ID NO: 66147 - DNA, 19 bp, Artificial sequence
  SiRNA target sequence
ctaaaactactgcttaaat

SEQ ID NO: 66148 - DNA, 19 bp, Artificial sequence
  SiRNA target sequence
taaaactactgcttaaatt

SEQ ID NO: 66149 - DNA, 19 bp, Artificial sequence
  SiRNA target sequence
aaaactactgcttaaattt

SEQ ID NO: 66150 - DNA, 19 bp, Artificial sequence
  SiRNA target sequence
aaactactgcttaaatttg

SEQ ID NO: 66151 - DNA, 19 bp, Artificial sequence
  SiRNA target sequence
aactactgcttaaatttga

SEQ ID NO: 66152 - DNA, 19 bp, Artificial sequence
  SiRNA target sequence
actactgcttaaatttgat

SEQ ID NO: 66153 - DNA, 19 bp, Artificial sequence
  SiRNA target sequence
ctactgcttaaatttgatg

SEQ ID NO: 66154 - DNA, 19 bp, Artificial sequence
  SiRNA target sequence
tactgcttaaatttgatga

SEQ ID NO: 66155 - DNA, 19 bp, Artificial sequence
  SiRNA target sequence
actgcttaaatttgatgaa

SEQ ID NO: 66156 - DNA, 19 bp, Artificial sequence
  SiRNA target sequence
ctgcttaaatttgatgaag

SEQ ID NO: 66157 - DNA, 19 bp, Artificial sequence
  SiRNA target sequence
tgcttaaatttgatgaaga

SEQ ID NO: 66158 - DNA, 19 bp, Artificial sequence
  SiRNA target sequence
gcttaaatttgatgaagat

SEQ ID NO: 66159 - DNA, 19 bp, Artificial sequence
  SiRNA target sequence
cttaaatttgatgaagatt

SEQ ID NO: 66160 - DNA, 19 bp, Artificial sequence
  SiRNA target sequence
ttaaatttgatgaagatta

SEQ ID NO: 66161 - DNA, 19 bp, Artificial sequence
  SiRNA target sequence
taaatttgatgaagattac

SEQ ID NO: 66162 - DNA, 19 bp, Artificial sequence
  SiRNA target sequence
aaatttgatgaagattaca

SEQ ID NO: 66163 - DNA, 19 bp, Artificial sequence
  SiRNA target sequence
aatttgatgaagattacaa

SEQ ID NO: 66164 - DNA, 19 bp, Artificial sequence
  SiRNA target sequence
atttgatgaagattacaaa

SEQ ID NO: 66165 - DNA, 19 bp, Artificial sequence
  SiRNA target sequence
tttgatgaagattacaaag

SEQ ID NO: 66166 - DNA, 19 bp, Artificial sequence
  SiRNA target sequence
ttgatgaagattacaaagg

SEQ ID NO: 66167 - DNA, 19 bp, Artificial sequence
  SiRNA target sequence
tgatgaagattacaaaggt

SEQ ID NO: 66168 - DNA, 19 bp, Artificial sequence
  SiRNA target sequence
gatgaagattacaaaggta

SEQ ID NO: 66169 - DNA, 19 bp, Artificial sequence
  SiRNA target sequence
atgaagattacaaaggtag

SEQ ID NO: 66170 - DNA, 19 bp, Artificial sequence
  SiRNA target sequence
tgaagattacaaaggtagc

SEQ ID NO: 66171 - DNA, 19 bp, Artificial sequence
  SiRNA target sequence
gaagattacaaaggtagca

SEQ ID NO: 66172 - DNA, 19 bp, Artificial sequence
  SiRNA target sequence
aagattacaaaggtagcat

SEQ ID NO: 66173 - DNA, 19 bp, Artificial sequence
  SiRNA target sequence
agattacaaaggtagcatt

SEQ ID NO: 66174 - DNA, 19 bp, Artificial sequence
  SiRNA target sequence
gattacaaaggtagcattt

SEQ ID NO: 66175 - DNA, 19 bp, Artificial sequence
  SiRNA target sequence
attacaaaggtagcatttt

SEQ ID NO: 66176 - DNA, 19 bp, Artificial sequence
  SiRNA target sequence
ttacaaaggtagcatttta

SEQ ID NO: 66177 - DNA, 19 bp, Artificial sequence
  SiRNA target sequence
tacaaaggtagcattttaa

SEQ ID NO: 66178 - DNA, 19 bp, Artificial sequence
  SiRNA target sequence
acaaaggtagcattttaat

SEQ ID NO: 66179 - DNA, 19 bp, Artificial sequence
  SiRNA target sequence
caaaggtagcattttaata

SEQ ID NO: 66180 - DNA, 19 bp, Artificial sequence
  SiRNA target sequence
aaaggtagcattttaatag

SEQ ID NO: 66181 - DNA, 19 bp, Artificial sequence
  SiRNA target sequence
aaggtagcattttaataga

SEQ ID NO: 66182 - DNA, 19 bp, Artificial sequence
  SiRNA target sequence
aggtagcattttaatagat

SEQ ID NO: 66183 - DNA, 19 bp, Artificial sequence
  SiRNA target sequence
ggtagcattttaatagatg

SEQ ID NO: 66184 - DNA, 19 bp, Artificial sequence
  SiRNA target sequence
gtagcattttaatagatga

SEQ ID NO: 66185 - DNA, 19 bp, Artificial sequence
  SiRNA target sequence
tagcattttaatagatgac

SEQ ID NO: 66186 - DNA, 19 bp, Artificial sequence
  SiRNA target sequence
agcattttaatagatgaca

SEQ ID NO: 66187 - DNA, 19 bp, Artificial sequence
  SiRNA target sequence
gcattttaatagatgacat

SEQ ID NO: 66188 - DNA, 19 bp, Artificial sequence
  SiRNA target sequence
cattttaatagatgacatt

SEQ ID NO: 66189 - DNA, 19 bp, Artificial sequence
  SiRNA target sequence
attttaatagatgacattg

SEQ ID NO: 66190 - DNA, 19 bp, Artificial sequence
  SiRNA target sequence
ttttaatagatgacattga

SEQ ID NO: 66191 - DNA, 19 bp, Artificial sequence
  SiRNA target sequence
tttaatagatgacattgat

SEQ ID NO: 66192 - DNA, 19 bp, Artificial sequence
  SiRNA target sequence
ttaatagatgacattgata

SEQ ID NO: 66193 - DNA, 19 bp, Artificial sequence
  SiRNA target sequence
taatagatgacattgatat

SEQ ID NO: 66194 - DNA, 19 bp, Artificial sequence
  SiRNA target sequence
aatagatgacattgatatt

SEQ ID NO: 66195 - DNA, 19 bp, Artificial sequence
  SiRNA target sequence
atagatgacattgatatta

SEQ ID NO: 66196 - DNA, 19 bp, Artificial sequence
  SiRNA target sequence
tagatgacattgatattaa

SEQ ID NO: 66197 - DNA, 19 bp, Artificial sequence
  SiRNA target sequence
agatgacattgatattaaa

SEQ ID NO: 66198 - DNA, 19 bp, Artificial sequence
  SiRNA target sequence
gatgacattgatattaaaa

SEQ ID NO: 66199 - DNA, 19 bp, Artificial sequence
  SiRNA target sequence
atgacattgatattaaaaa

SEQ ID NO: 66200 - DNA, 19 bp, Artificial sequence
  SiRNA target sequence
tgacattgatattaaaaaa

SEQ ID NO: 66201 - DNA, 19 bp, Artificial sequence
  SiRNA target sequence
gacattgatattaaaaaaa

SEQ ID NO: 66202 - DNA, 19 bp, Artificial sequence
  SiRNA target sequence
acattgatattaaaaaaat

SEQ ID NO: 66203 - DNA, 19 bp, Artificial sequence
  SiRNA target sequence
cattgatattaaaaaaatc

SEQ ID NO: 66204 - DNA, 19 bp, Artificial sequence
  SiRNA target sequence
attgatattaaaaaaatca

SEQ ID NO: 66205 - DNA, 19 bp, Artificial sequence
  SiRNA target sequence
ttgatattaaaaaaatcaa

SEQ ID NO: 66206 - DNA, 19 bp, Artificial sequence
  SiRNA target sequence
tgatattaaaaaaatcaaa

SEQ ID NO: 66207 - DNA, 19 bp, Artificial sequence
  SiRNA target sequence
gatattaaaaaaatcaaag

SEQ ID NO: 66208 - DNA, 19 bp, Artificial sequence
  SiRNA target sequence
atattaaaaaaatcaaaga

SEQ ID NO: 66209 - DNA, 19 bp, Artificial sequence
  SiRNA target sequence
tattaaaaaaatcaaagac

SEQ ID NO: 66210 - DNA, 19 bp, Artificial sequence
  SiRNA target sequence
attaaaaaaatcaaagacg

SEQ ID NO: 66211 - DNA, 19 bp, Artificial sequence
  SiRNA target sequence
ttaaaaaaatcaaagacga

SEQ ID NO: 66212 - DNA, 19 bp, Artificial sequence
  SiRNA target sequence
taaaaaaatcaaagacgaa

SEQ ID NO: 66213 - DNA, 19 bp, Artificial sequence
  SiRNA target sequence
aaaaaaatcaaagacgaat

SEQ ID NO: 66214 - DNA, 19 bp, Artificial sequence
  SiRNA target sequence
aaaaaatcaaagacgaatt

SEQ ID NO: 66215 - DNA, 19 bp, Artificial sequence
  SiRNA target sequence
aaaaatcaaagacgaattt

SEQ ID NO: 66216 - DNA, 19 bp, Artificial sequence
  SiRNA target sequence
aaaatcaaagacgaatttt

SEQ ID NO: 66217 - DNA, 19 bp, Artificial sequence
  SiRNA target sequence
aaatcaaagacgaatttta

SEQ ID NO: 66218 - DNA, 19 bp, Artificial sequence
  SiRNA target sequence
aatcaaagacgaattttat

SEQ ID NO: 66219 - DNA, 19 bp, Artificial sequence
  SiRNA target sequence
atcaaagacgaattttata

SEQ ID NO: 66220 - DNA, 19 bp, Artificial sequence
  SiRNA target sequence
tcaaagacgaattttatag

SEQ ID NO: 66221 - DNA, 19 bp, Artificial sequence
  SiRNA target sequence
caaagacgaattttatagg

SEQ ID NO: 66222 - DNA, 19 bp, Artificial sequence
  SiRNA target sequence
aaagacgaattttatagga

SEQ ID NO: 66223 - DNA, 19 bp, Artificial sequence
  SiRNA target sequence
aagacgaattttataggaa

SEQ ID NO: 66224 - DNA, 19 bp, Artificial sequence
  SiRNA target sequence
agacgaattttataggaat

SEQ ID NO: 66225 - DNA, 19 bp, Artificial sequence
  SiRNA target sequence
gacgaattttataggaatt

SEQ ID NO: 66226 - DNA, 19 bp, Artificial sequence
  SiRNA target sequence
acgaattttataggaattt

SEQ ID NO: 66227 - DNA, 19 bp, Artificial sequence
  SiRNA target sequence
cgaattttataggaattta

SEQ ID NO: 66228 - DNA, 19 bp, Artificial sequence
  SiRNA target sequence
gaattttataggaatttat

SEQ ID NO: 66229 - DNA, 19 bp, Artificial sequence
  SiRNA target sequence
aattttataggaatttatt

SEQ ID NO: 66230 - DNA, 19 bp, Artificial sequence
  SiRNA target sequence
attttataggaatttatta

SEQ ID NO: 66231 - DNA, 19 bp, Artificial sequence
  SiRNA target sequence
ttttataggaatttattag

SEQ ID NO: 66232 - DNA, 19 bp, Artificial sequence
  SiRNA target sequence
tttataggaatttattagg

SEQ ID NO: 66233 - DNA, 19 bp, Artificial sequence
  SiRNA target sequence
ttataggaatttattaggt

SEQ ID NO: 66234 - DNA, 19 bp, Artificial sequence
  SiRNA target sequence
tataggaatttattaggtt

SEQ ID NO: 66235 - DNA, 19 bp, Artificial sequence
  SiRNA target sequence
ataggaatttattaggtta

SEQ ID NO: 66236 - DNA, 19 bp, Artificial sequence
  SiRNA target sequence
taggaatttattaggttac

SEQ ID NO: 66237 - DNA, 19 bp, Artificial sequence
  SiRNA target sequence
aggaatttattaggttaca

SEQ ID NO: 66238 - DNA, 19 bp, Artificial sequence
  SiRNA target sequence
ggaatttattaggttacat

SEQ ID NO: 66239 - DNA, 19 bp, Artificial sequence
  SiRNA target sequence
gaatttattaggttacata

SEQ ID NO: 66240 - DNA, 19 bp, Artificial sequence
  SiRNA target sequence
aatttattaggttacatac

SEQ ID NO: 66241 - DNA, 19 bp, Artificial sequence
  SiRNA target sequence
atttattaggttacatacc

SEQ ID NO: 66242 - DNA, 19 bp, Artificial sequence
  SiRNA target sequence
tttattaggttacatacca

SEQ ID NO: 66243 - DNA, 19 bp, Artificial sequence
  SiRNA target sequence
ttattaggttacataccac

SEQ ID NO: 66244 - DNA, 19 bp, Artificial sequence
  SiRNA target sequence
tattaggttacataccaca

SEQ ID NO: 66245 - DNA, 19 bp, Artificial sequence
  SiRNA target sequence
attaggttacataccacag

SEQ ID NO: 66246 - DNA, 19 bp, Artificial sequence
  SiRNA target sequence
ttaggttacataccacaga

SEQ ID NO: 66247 - DNA, 19 bp, Artificial sequence
  SiRNA target sequence
taggttacataccacagaa

SEQ ID NO: 66248 - DNA, 19 bp, Artificial sequence
  SiRNA target sequence
aggttacataccacagaat

SEQ ID NO: 66249 - DNA, 19 bp, Artificial sequence
  SiRNA target sequence
ggttacataccacagaata

SEQ ID NO: 66250 - DNA, 19 bp, Artificial sequence
  SiRNA target sequence
gttacataccacagaatac

SEQ ID NO: 66251 - DNA, 19 bp, Artificial sequence
  SiRNA target sequence
ttacataccacagaataca

SEQ ID NO: 66252 - DNA, 19 bp, Artificial sequence
  SiRNA target sequence
tacataccacagaatacat

SEQ ID NO: 66253 - DNA, 19 bp, Artificial sequence
  SiRNA target sequence
acataccacagaatacatt

SEQ ID NO: 66254 - DNA, 19 bp, Artificial sequence
  SiRNA target sequence
cataccacagaatacattt

SEQ ID NO: 66255 - DNA, 19 bp, Artificial sequence
  SiRNA target sequence
ataccacagaatacatttt

SEQ ID NO: 66256 - DNA, 19 bp, Artificial sequence
  SiRNA target sequence
taccacagaatacattttt

SEQ ID NO: 66257 - DNA, 19 bp, Artificial sequence
  SiRNA target sequence
accacagaatacatttttg

SEQ ID NO: 66258 - DNA, 19 bp, Artificial sequence
  SiRNA target sequence
ccacagaatacatttttgt

SEQ ID NO: 66259 - DNA, 19 bp, Artificial sequence
  SiRNA target sequence
cacagaatacatttttgtt

SEQ ID NO: 66260 - DNA, 19 bp, Artificial sequence
  SiRNA target sequence
acagaatacatttttgttt

SEQ ID NO: 66261 - DNA, 19 bp, Artificial sequence
  SiRNA target sequence
cagaatacatttttgttta

SEQ ID NO: 66262 - DNA, 19 bp, Artificial sequence
  SiRNA target sequence
agaatacatttttgtttaa

SEQ ID NO: 66263 - DNA, 19 bp, Artificial sequence
  SiRNA target sequence
gaatacatttttgtttaat

SEQ ID NO: 66264 - DNA, 19 bp, Artificial sequence
  SiRNA target sequence
aatacatttttgtttaatg

SEQ ID NO: 66265 - DNA, 19 bp, Artificial sequence
  SiRNA target sequence
atacatttttgtttaatga

SEQ ID NO: 66266 - DNA, 19 bp, Artificial sequence
  SiRNA target sequence
tacatttttgtttaatgaa

SEQ ID NO: 66267 - DNA, 19 bp, Artificial sequence
  SiRNA target sequence
acatttttgtttaatgaat

SEQ ID NO: 66268 - DNA, 19 bp, Artificial sequence
  SiRNA target sequence
catttttgtttaatgaatc

SEQ ID NO: 66269 - DNA, 19 bp, Artificial sequence
  SiRNA target sequence
atttttgtttaatgaatct

SEQ ID NO: 66270 - DNA, 19 bp, Artificial sequence
  SiRNA target sequence
tttttgtttaatgaatctg

SEQ ID NO: 66271 - DNA, 19 bp, Artificial sequence
  SiRNA target sequence
ttttgtttaatgaatctgt

SEQ ID NO: 66272 - DNA, 19 bp, Artificial sequence
  SiRNA target sequence
tttgtttaatgaatctgta

SEQ ID NO: 66273 - DNA, 19 bp, Artificial sequence
  SiRNA target sequence
ttgtttaatgaatctgtaa

SEQ ID NO: 66274 - DNA, 19 bp, Artificial sequence
  SiRNA target sequence
tgtttaatgaatctgtaaa

SEQ ID NO: 66275 - DNA, 19 bp, Artificial sequence
  SiRNA target sequence
gtttaatgaatctgtaaaa

SEQ ID NO: 66276 - DNA, 19 bp, Artificial sequence
  SiRNA target sequence
tttaatgaatctgtaaaat

SEQ ID NO: 66277 - DNA, 19 bp, Artificial sequence
  SiRNA target sequence
ttaatgaatctgtaaaata

SEQ ID NO: 66278 - DNA, 19 bp, Artificial sequence
  SiRNA target sequence
taatgaatctgtaaaatat

SEQ ID NO: 66279 - DNA, 19 bp, Artificial sequence
  SiRNA target sequence
aatgaatctgtaaaatata

SEQ ID NO: 66280 - DNA, 19 bp, Artificial sequence
  SiRNA target sequence
atgaatctgtaaaatataa

SEQ ID NO: 66281 - DNA, 19 bp, Artificial sequence
  SiRNA target sequence
tgaatctgtaaaatataat

SEQ ID NO: 66282 - DNA, 19 bp, Artificial sequence
  SiRNA target sequence
gaatctgtaaaatataata

SEQ ID NO: 66283 - DNA, 19 bp, Artificial sequence
  SiRNA target sequence
aatctgtaaaatataatat

SEQ ID NO: 66284 - DNA, 19 bp, Artificial sequence
  SiRNA target sequence
atctgtaaaatataatatt

SEQ ID NO: 66285 - DNA, 19 bp, Artificial sequence
  SiRNA target sequence
tctgtaaaatataatatta

SEQ ID NO: 66286 - DNA, 19 bp, Artificial sequence
  SiRNA target sequence
ctgtaaaatataatattaa

SEQ ID NO: 66287 - DNA, 19 bp, Artificial sequence
  SiRNA target sequence
tgtaaaatataatattaaa

SEQ ID NO: 66288 - DNA, 19 bp, Artificial sequence
  SiRNA target sequence
gtaaaatataatattaaat

SEQ ID NO: 66289 - DNA, 19 bp, Artificial sequence
  SiRNA target sequence
taaaatataatattaaata

SEQ ID NO: 66290 - DNA, 19 bp, Artificial sequence
  SiRNA target sequence
aaaatataatattaaatac

SEQ ID NO: 66291 - DNA, 19 bp, Artificial sequence
  SiRNA target sequence
aaatataatattaaatacg

SEQ ID NO: 66292 - DNA, 19 bp, Artificial sequence
  SiRNA target sequence
aatataatattaaatacgg

SEQ ID NO: 66293 - DNA, 19 bp, Artificial sequence
  SiRNA target sequence
atataatattaaatacgga

SEQ ID NO: 66294 - DNA, 19 bp, Artificial sequence
  SiRNA target sequence
tataatattaaatacggat

SEQ ID NO: 66295 - DNA, 19 bp, Artificial sequence
  SiRNA target sequence
ataatattaaatacggatc

SEQ ID NO: 66296 - DNA, 19 bp, Artificial sequence
  SiRNA target sequence
taatattaaatacggatct

SEQ ID NO: 66297 - DNA, 19 bp, Artificial sequence
  SiRNA target sequence
aatattaaatacggatctt

SEQ ID NO: 66298 - DNA, 19 bp, Artificial sequence
  SiRNA target sequence
atattaaatacggatcttt

SEQ ID NO: 66299 - DNA, 19 bp, Artificial sequence
  SiRNA target sequence
tattaaatacggatctttt

SEQ ID NO: 66300 - DNA, 19 bp, Artificial sequence
  SiRNA target sequence
attaaatacggatcttttg

SEQ ID NO: 66301 - DNA, 19 bp, Artificial sequence
  SiRNA target sequence
ttaaatacggatcttttgg

SEQ ID NO: 66302 - DNA, 19 bp, Artificial sequence
  SiRNA target sequence
taaatacggatcttttggt

SEQ ID NO: 66303 - DNA, 19 bp, Artificial sequence
  SiRNA target sequence
aaatacggatcttttggta

SEQ ID NO: 66304 - DNA, 19 bp, Artificial sequence
  SiRNA target sequence
aatacggatcttttggtat

SEQ ID NO: 66305 - DNA, 19 bp, Artificial sequence
  SiRNA target sequence
atacggatcttttggtatt

SEQ ID NO: 66306 - DNA, 19 bp, Artificial sequence
  SiRNA target sequence
tacggatcttttggtattt

SEQ ID NO: 66307 - DNA, 19 bp, Artificial sequence
  SiRNA target sequence
acggatcttttggtatttc

SEQ ID NO: 66308 - DNA, 19 bp, Artificial sequence
  SiRNA target sequence
cggatcttttggtatttca

SEQ ID NO: 66309 - DNA, 19 bp, Artificial sequence
  SiRNA target sequence
ggatcttttggtatttcag

SEQ ID NO: 66310 - DNA, 19 bp, Artificial sequence
  SiRNA target sequence
gatcttttggtatttcaga

SEQ ID NO: 66311 - DNA, 19 bp, Artificial sequence
  SiRNA target sequence
atcttttggtatttcagac

SEQ ID NO: 66312 - DNA, 19 bp, Artificial sequence
  SiRNA target sequence
tcttttggtatttcagacg

SEQ ID NO: 66313 - DNA, 19 bp, Artificial sequence
  SiRNA target sequence
cttttggtatttcagacga

SEQ ID NO: 66314 - DNA, 19 bp, Artificial sequence
  SiRNA target sequence
ttttggtatttcagacgag

SEQ ID NO: 66315 - DNA, 19 bp, Artificial sequence
  SiRNA target sequence
tttggtatttcagacgagg

SEQ ID NO: 66316 - DNA, 19 bp, Artificial sequence
  SiRNA target sequence
ttggtatttcagacgagga

SEQ ID NO: 66317 - DNA, 19 bp, Artificial sequence
  SiRNA target sequence
tggtatttcagacgaggat

SEQ ID NO: 66318 - DNA, 19 bp, Artificial sequence
  SiRNA target sequence
ggtatttcagacgaggata

SEQ ID NO: 66319 - DNA, 19 bp, Artificial sequence
  SiRNA target sequence
gtatttcagacgaggatat

SEQ ID NO: 66320 - DNA, 19 bp, Artificial sequence
  SiRNA target sequence
tatttcagacgaggatatt

SEQ ID NO: 66321 - DNA, 19 bp, Artificial sequence
  SiRNA target sequence
atttcagacgaggatattt

SEQ ID NO: 66322 - DNA, 19 bp, Artificial sequence
  SiRNA target sequence
tttcagacgaggatatttt

SEQ ID NO: 66323 - DNA, 19 bp, Artificial sequence
  SiRNA target sequence
ttcagacgaggatattttt

SEQ ID NO: 66324 - DNA, 19 bp, Artificial sequence
  SiRNA target sequence
tcagacgaggatatttttg

SEQ ID NO: 66325 - DNA, 19 bp, Artificial sequence
  SiRNA target sequence
cagacgaggatatttttgc

SEQ ID NO: 66326 - DNA, 19 bp, Artificial sequence
  SiRNA target sequence
agacgaggatatttttgca

SEQ ID NO: 66327 - DNA, 19 bp, Artificial sequence
  SiRNA target sequence
gacgaggatatttttgcat

SEQ ID NO: 66328 - DNA, 19 bp, Artificial sequence
  SiRNA target sequence
acgaggatatttttgcatt

SEQ ID NO: 66329 - DNA, 19 bp, Artificial sequence
  SiRNA target sequence
cgaggatatttttgcattg

SEQ ID NO: 66330 - DNA, 19 bp, Artificial sequence
  SiRNA target sequence
gaggatatttttgcattgt

SEQ ID NO: 66331 - DNA, 19 bp, Artificial sequence
  SiRNA target sequence
aggatatttttgcattgtg

SEQ ID NO: 66332 - DNA, 19 bp, Artificial sequence
  SiRNA target sequence
ggatatttttgcattgtgt

SEQ ID NO: 66333 - DNA, 19 bp, Artificial sequence
  SiRNA target sequence
gatatttttgcattgtgta

SEQ ID NO: 66334 - DNA, 19 bp, Artificial sequence
  SiRNA target sequence
atatttttgcattgtgtaa

SEQ ID NO: 66335 - DNA, 19 bp, Artificial sequence
  SiRNA target sequence
tatttttgcattgtgtaaa

SEQ ID NO: 66336 - DNA, 19 bp, Artificial sequence
  SiRNA target sequence
atttttgcattgtgtaaag

SEQ ID NO: 66337 - DNA, 19 bp, Artificial sequence
  SiRNA target sequence
tttttgcattgtgtaaaga

SEQ ID NO: 66338 - DNA, 19 bp, Artificial sequence
  SiRNA target sequence
ttttgcattgtgtaaagag

SEQ ID NO: 66339 - DNA, 19 bp, Artificial sequence
  SiRNA target sequence
tttgcattgtgtaaagagt

SEQ ID NO: 66340 - DNA, 19 bp, Artificial sequence
  SiRNA target sequence
ttgcattgtgtaaagagtt

SEQ ID NO: 66341 - DNA, 19 bp, Artificial sequence
  SiRNA target sequence
tgcattgtgtaaagagttt

SEQ ID NO: 66342 - DNA, 19 bp, Artificial sequence
  SiRNA target sequence
gcattgtgtaaagagtttg

SEQ ID NO: 66343 - DNA, 19 bp, Artificial sequence
  SiRNA target sequence
cattgtgtaaagagtttgg

SEQ ID NO: 66344 - DNA, 19 bp, Artificial sequence
  SiRNA target sequence
attgtgtaaagagtttgga

SEQ ID NO: 66345 - DNA, 19 bp, Artificial sequence
  SiRNA target sequence
ttgtgtaaagagtttggat

SEQ ID NO: 66346 - DNA, 19 bp, Artificial sequence
  SiRNA target sequence
tgtgtaaagagtttggatt

SEQ ID NO: 66347 - DNA, 19 bp, Artificial sequence
  SiRNA target sequence
gtgtaaagagtttggatta

SEQ ID NO: 66348 - DNA, 19 bp, Artificial sequence
  SiRNA target sequence
tgtaaagagtttggattat

SEQ ID NO: 66349 - DNA, 19 bp, Artificial sequence
  SiRNA target sequence
gtaaagagtttggattata

SEQ ID NO: 66350 - DNA, 19 bp, Artificial sequence
  SiRNA target sequence
taaagagtttggattatat

SEQ ID NO: 66351 - DNA, 19 bp, Artificial sequence
  SiRNA target sequence
aaagagtttggattatatg

SEQ ID NO: 66352 - DNA, 19 bp, Artificial sequence
  SiRNA target sequence
aagagtttggattatatga

SEQ ID NO: 66353 - DNA, 19 bp, Artificial sequence
  SiRNA target sequence
agagtttggattatatgac

SEQ ID NO: 66354 - DNA, 19 bp, Artificial sequence
  SiRNA target sequence
gagtttggattatatgacg

SEQ ID NO: 66355 - DNA, 19 bp, Artificial sequence
  SiRNA target sequence
agtttggattatatgacgt

SEQ ID NO: 66356 - DNA, 19 bp, Artificial sequence
  SiRNA target sequence
gtttggattatatgacgtt

SEQ ID NO: 66357 - DNA, 19 bp, Artificial sequence
  SiRNA target sequence
tttggattatatgacgttt

SEQ ID NO: 66358 - DNA, 19 bp, Artificial sequence
  SiRNA target sequence
ttggattatatgacgtttt

SEQ ID NO: 66359 - DNA, 19 bp, Artificial sequence
  SiRNA target sequence
tggattatatgacgttttc

SEQ ID NO: 66360 - DNA, 19 bp, Artificial sequence
  SiRNA target sequence
ggattatatgacgttttca

SEQ ID NO: 66361 - DNA, 19 bp, Artificial sequence
  SiRNA target sequence
gattatatgacgttttcat

SEQ ID NO: 66362 - DNA, 19 bp, Artificial sequence
  SiRNA target sequence
attatatgacgttttcatg

SEQ ID NO: 66363 - DNA, 19 bp, Artificial sequence
  SiRNA target sequence
ttatatgacgttttcatga

SEQ ID NO: 66364 - DNA, 19 bp, Artificial sequence
  SiRNA target sequence
tatatgacgttttcatgaa

SEQ ID NO: 66365 - DNA, 19 bp, Artificial sequence
  SiRNA target sequence
atatgacgttttcatgaac

SEQ ID NO: 66366 - DNA, 19 bp, Artificial sequence
  SiRNA target sequence
tatgacgttttcatgaacc

SEQ ID NO: 66367 - DNA, 19 bp, Artificial sequence
  SiRNA target sequence
atgacgttttcatgaacct

SEQ ID NO: 66368 - DNA, 19 bp, Artificial sequence
  SiRNA target sequence
tgacgttttcatgaacctc

SEQ ID NO: 66369 - DNA, 19 bp, Artificial sequence
  SiRNA target sequence
gacgttttcatgaacctcg

SEQ ID NO: 66370 - DNA, 19 bp, Artificial sequence
  SiRNA target sequence
acgttttcatgaacctcga

SEQ ID NO: 66371 - DNA, 19 bp, Artificial sequence
  SiRNA target sequence
cgttttcatgaacctcgaa

SEQ ID NO: 66372 - DNA, 19 bp, Artificial sequence
  SiRNA target sequence
gttttcatgaacctcgaaa

SEQ ID NO: 66373 - DNA, 19 bp, Artificial sequence
  SiRNA target sequence
ttttcatgaacctcgaaaa

SEQ ID NO: 66374 - DNA, 19 bp, Artificial sequence
  SiRNA target sequence
tttcatgaacctcgaaaat

SEQ ID NO: 66375 - DNA, 19 bp, Artificial sequence
  SiRNA target sequence
ttcatgaacctcgaaaatg

SEQ ID NO: 66376 - DNA, 19 bp, Artificial sequence
  SiRNA target sequence
tcatgaacctcgaaaatgg

SEQ ID NO: 66377 - DNA, 19 bp, Artificial sequence
  SiRNA target sequence
catgaacctcgaaaatggt

SEQ ID NO: 66378 - DNA, 19 bp, Artificial sequence
  SiRNA target sequence
atgaacctcgaaaatggtt

SEQ ID NO: 66379 - DNA, 19 bp, Artificial sequence
  SiRNA target sequence
tgaacctcgaaaatggttt

SEQ ID NO: 66380 - DNA, 19 bp, Artificial sequence
  SiRNA target sequence
gaacctcgaaaatggtttt

SEQ ID NO: 66381 - DNA, 19 bp, Artificial sequence
  SiRNA target sequence
aacctcgaaaatggttttg

SEQ ID NO: 66382 - DNA, 19 bp, Artificial sequence
  SiRNA target sequence
acctcgaaaatggttttga

SEQ ID NO: 66383 - DNA, 19 bp, Artificial sequence
  SiRNA target sequence
cctcgaaaatggttttgat

SEQ ID NO: 66384 - DNA, 19 bp, Artificial sequence
  SiRNA target sequence
ctcgaaaatggttttgata

SEQ ID NO: 66385 - DNA, 19 bp, Artificial sequence
  SiRNA target sequence
tcgaaaatggttttgatac

SEQ ID NO: 66386 - DNA, 19 bp, Artificial sequence
  SiRNA target sequence
cgaaaatggttttgatacg

SEQ ID NO: 66387 - DNA, 19 bp, Artificial sequence
  SiRNA target sequence
gaaaatggttttgatacga

SEQ ID NO: 66388 - DNA, 19 bp, Artificial sequence
  SiRNA target sequence
aaaatggttttgatacgaa

SEQ ID NO: 66389 - DNA, 19 bp, Artificial sequence
  SiRNA target sequence
aaatggttttgatacgaat

SEQ ID NO: 66390 - DNA, 19 bp, Artificial sequence
  SiRNA target sequence
aatggttttgatacgaatg

SEQ ID NO: 66391 - DNA, 19 bp, Artificial sequence
  SiRNA target sequence
atggttttgatacgaatgt

SEQ ID NO: 66392 - DNA, 19 bp, Artificial sequence
  SiRNA target sequence
tggttttgatacgaatgta

SEQ ID NO: 66393 - DNA, 19 bp, Artificial sequence
  SiRNA target sequence
ggttttgatacgaatgtag

SEQ ID NO: 66394 - DNA, 19 bp, Artificial sequence
  SiRNA target sequence
gttttgatacgaatgtagg

SEQ ID NO: 66395 - DNA, 19 bp, Artificial sequence
  SiRNA target sequence
ttttgatacgaatgtagga

SEQ ID NO: 66396 - DNA, 19 bp, Artificial sequence
  SiRNA target sequence
tttgatacgaatgtaggag

SEQ ID NO: 66397 - DNA, 19 bp, Artificial sequence
  SiRNA target sequence
ttgatacgaatgtaggaga

SEQ ID NO: 66398 - DNA, 19 bp, Artificial sequence
  SiRNA target sequence
tgatacgaatgtaggagaa

SEQ ID NO: 66399 - DNA, 19 bp, Artificial sequence
  SiRNA target sequence
gatacgaatgtaggagaaa

SEQ ID NO: 66400 - DNA, 19 bp, Artificial sequence
  SiRNA target sequence
atacgaatgtaggagaaag

SEQ ID NO: 66401 - DNA, 19 bp, Artificial sequence
  SiRNA target sequence
tacgaatgtaggagaaaga

SEQ ID NO: 66402 - DNA, 19 bp, Artificial sequence
  SiRNA target sequence
acgaatgtaggagaaagag

SEQ ID NO: 66403 - DNA, 19 bp, Artificial sequence
  SiRNA target sequence
cgaatgtaggagaaagagg

SEQ ID NO: 66404 - DNA, 19 bp, Artificial sequence
  SiRNA target sequence
gaatgtaggagaaagagga

SEQ ID NO: 66405 - DNA, 19 bp, Artificial sequence
  SiRNA target sequence
aatgtaggagaaagaggaa

SEQ ID NO: 66406 - DNA, 19 bp, Artificial sequence
  SiRNA target sequence
atgtaggagaaagaggaag

SEQ ID NO: 66407 - DNA, 19 bp, Artificial sequence
  SiRNA target sequence
tgtaggagaaagaggaagg

SEQ ID NO: 66408 - DNA, 19 bp, Artificial sequence
  SiRNA target sequence
gtaggagaaagaggaaggt

SEQ ID NO: 66409 - DNA, 19 bp, Artificial sequence
  SiRNA target sequence
taggagaaagaggaaggtt

SEQ ID NO: 66410 - DNA, 19 bp, Artificial sequence
  SiRNA target sequence
aggagaaagaggaaggtta

SEQ ID NO: 66411 - DNA, 19 bp, Artificial sequence
  SiRNA target sequence
ggagaaagaggaaggttat

SEQ ID NO: 66412 - DNA, 19 bp, Artificial sequence
  SiRNA target sequence
gagaaagaggaaggttatt

SEQ ID NO: 66413 - DNA, 19 bp, Artificial sequence
  SiRNA target sequence
agaaagaggaaggttatta

SEQ ID NO: 66414 - DNA, 19 bp, Artificial sequence
  SiRNA target sequence
gaaagaggaaggttattaa

SEQ ID NO: 66415 - DNA, 19 bp, Artificial sequence
  SiRNA target sequence
aaagaggaaggttattaag

SEQ ID NO: 66416 - DNA, 19 bp, Artificial sequence
  SiRNA target sequence
aagaggaaggttattaagt

SEQ ID NO: 66417 - DNA, 19 bp, Artificial sequence
  SiRNA target sequence
agaggaaggttattaagtg

SEQ ID NO: 66418 - DNA, 19 bp, Artificial sequence
  SiRNA target sequence
gaggaaggttattaagtgg

SEQ ID NO: 66419 - DNA, 19 bp, Artificial sequence
  SiRNA target sequence
aggaaggttattaagtggt

SEQ ID NO: 66420 - DNA, 19 bp, Artificial sequence
  SiRNA target sequence
ggaaggttattaagtggtg

SEQ ID NO: 66421 - DNA, 19 bp, Artificial sequence
  SiRNA target sequence
gaaggttattaagtggtgg

SEQ ID NO: 66422 - DNA, 19 bp, Artificial sequence
  SiRNA target sequence
aaggttattaagtggtgga

SEQ ID NO: 66423 - DNA, 19 bp, Artificial sequence
  SiRNA target sequence
aggttattaagtggtggag

SEQ ID NO: 66424 - DNA, 19 bp, Artificial sequence
  SiRNA target sequence
ggttattaagtggtggaga

SEQ ID NO: 66425 - DNA, 19 bp, Artificial sequence
  SiRNA target sequence
gttattaagtggtggagaa

SEQ ID NO: 66426 - DNA, 19 bp, Artificial sequence
  SiRNA target sequence
ttattaagtggtggagaaa

SEQ ID NO: 66427 - DNA, 19 bp, Artificial sequence
  SiRNA target sequence
tattaagtggtggagaaaa

SEQ ID NO: 66428 - DNA, 19 bp, Artificial sequence
  SiRNA target sequence
attaagtggtggagaaaag

SEQ ID NO: 66429 - DNA, 19 bp, Artificial sequence
  SiRNA target sequence
ttaagtggtggagaaaagc

SEQ ID NO: 66430 - DNA, 19 bp, Artificial sequence
  SiRNA target sequence
taagtggtggagaaaagca

SEQ ID NO: 66431 - DNA, 19 bp, Artificial sequence
  SiRNA target sequence
aagtggtggagaaaagcaa

SEQ ID NO: 66432 - DNA, 19 bp, Artificial sequence
  SiRNA target sequence
agtggtggagaaaagcaaa

SEQ ID NO: 66433 - DNA, 19 bp, Artificial sequence
  SiRNA target sequence
gtggtggagaaaagcaaaa

SEQ ID NO: 66434 - DNA, 19 bp, Artificial sequence
  SiRNA target sequence
tggtggagaaaagcaaaag

SEQ ID NO: 66435 - DNA, 19 bp, Artificial sequence
  SiRNA target sequence
ggtggagaaaagcaaaaga

SEQ ID NO: 66436 - DNA, 19 bp, Artificial sequence
  SiRNA target sequence
gtggagaaaagcaaaagat

SEQ ID NO: 66437 - DNA, 19 bp, Artificial sequence
  SiRNA target sequence
tggagaaaagcaaaagatt

SEQ ID NO: 66438 - DNA, 19 bp, Artificial sequence
  SiRNA target sequence
ggagaaaagcaaaagattt

SEQ ID NO: 66439 - DNA, 19 bp, Artificial sequence
  SiRNA target sequence
gagaaaagcaaaagatttt

SEQ ID NO: 66440 - DNA, 19 bp, Artificial sequence
  SiRNA target sequence
agaaaagcaaaagatttta

SEQ ID NO: 66441 - DNA, 19 bp, Artificial sequence
  SiRNA target sequence
gaaaagcaaaagattttat

SEQ ID NO: 66442 - DNA, 19 bp, Artificial sequence
  SiRNA target sequence
aaaagcaaaagattttatt

SEQ ID NO: 66443 - DNA, 19 bp, Artificial sequence
  SiRNA target sequence
aaagcaaaagattttatta

SEQ ID NO: 66444 - DNA, 19 bp, Artificial sequence
  SiRNA target sequence
aagcaaaagattttattaa

SEQ ID NO: 66445 - DNA, 19 bp, Artificial sequence
  SiRNA target sequence
agcaaaagattttattaat

SEQ ID NO: 66446 - DNA, 19 bp, Artificial sequence
  SiRNA target sequence
gcaaaagattttattaatg

SEQ ID NO: 66447 - DNA, 19 bp, Artificial sequence
  SiRNA target sequence
caaaagattttattaatgc

SEQ ID NO: 66448 - DNA, 19 bp, Artificial sequence
  SiRNA target sequence
aaaagattttattaatgcg

SEQ ID NO: 66449 - DNA, 19 bp, Artificial sequence
  SiRNA target sequence
aaagattttattaatgcgt

SEQ ID NO: 66450 - DNA, 19 bp, Artificial sequence
  SiRNA target sequence
aagattttattaatgcgta

SEQ ID NO: 66451 - DNA, 19 bp, Artificial sequence
  SiRNA target sequence
agattttattaatgcgtac

SEQ ID NO: 66452 - DNA, 19 bp, Artificial sequence
  SiRNA target sequence
gattttattaatgcgtact

SEQ ID NO: 66453 - DNA, 19 bp, Artificial sequence
  SiRNA target sequence
attttattaatgcgtacta

SEQ ID NO: 66454 - DNA, 19 bp, Artificial sequence
  SiRNA target sequence
ttttattaatgcgtactat

SEQ ID NO: 66455 - DNA, 19 bp, Artificial sequence
  SiRNA target sequence
tttattaatgcgtactatg

SEQ ID NO: 66456 - DNA, 19 bp, Artificial sequence
  SiRNA target sequence
ttattaatgcgtactatgt

SEQ ID NO: 66457 - DNA, 19 bp, Artificial sequence
  SiRNA target sequence
tattaatgcgtactatgtt

SEQ ID NO: 66458 - DNA, 19 bp, Artificial sequence
  SiRNA target sequence
attaatgcgtactatgtta

SEQ ID NO: 66459 - DNA, 19 bp, Artificial sequence
  SiRNA target sequence
ttaatgcgtactatgttaa

SEQ ID NO: 66460 - DNA, 19 bp, Artificial sequence
  SiRNA target sequence
taatgcgtactatgttaag

SEQ ID NO: 66461 - DNA, 19 bp, Artificial sequence
  SiRNA target sequence
aatgcgtactatgttaaga

SEQ ID NO: 66462 - DNA, 19 bp, Artificial sequence
  SiRNA target sequence
atgcgtactatgttaagaa

SEQ ID NO: 66463 - DNA, 19 bp, Artificial sequence
  SiRNA target sequence
tgcgtactatgttaagaaa

SEQ ID NO: 66464 - DNA, 19 bp, Artificial sequence
  SiRNA target sequence
gcgtactatgttaagaaac

SEQ ID NO: 66465 - DNA, 19 bp, Artificial sequence
  SiRNA target sequence
cgtactatgttaagaaaca

SEQ ID NO: 66466 - DNA, 19 bp, Artificial sequence
  SiRNA target sequence
gtactatgttaagaaacaa

SEQ ID NO: 66467 - DNA, 19 bp, Artificial sequence
  SiRNA target sequence
tactatgttaagaaacaag

SEQ ID NO: 66468 - DNA, 19 bp, Artificial sequence
  SiRNA target sequence
actatgttaagaaacaagg

SEQ ID NO: 66469 - DNA, 19 bp, Artificial sequence
  SiRNA target sequence
ctatgttaagaaacaagga

SEQ ID NO: 66470 - DNA, 19 bp, Artificial sequence
  SiRNA target sequence
tatgttaagaaacaaggag

SEQ ID NO: 66471 - DNA, 19 bp, Artificial sequence
  SiRNA target sequence
atgttaagaaacaaggaga

SEQ ID NO: 66472 - DNA, 19 bp, Artificial sequence
  SiRNA target sequence
tgttaagaaacaaggagat

SEQ ID NO: 66473 - DNA, 19 bp, Artificial sequence
  SiRNA target sequence
gttaagaaacaaggagata

SEQ ID NO: 66474 - DNA, 19 bp, Artificial sequence
  SiRNA target sequence
ttaagaaacaaggagataa

SEQ ID NO: 66475 - DNA, 19 bp, Artificial sequence
  SiRNA target sequence
taagaaacaaggagataat

SEQ ID NO: 66476 - DNA, 19 bp, Artificial sequence
  SiRNA target sequence
aagaaacaaggagataatg

SEQ ID NO: 66477 - DNA, 19 bp, Artificial sequence
  SiRNA target sequence
agaaacaaggagataatgg

SEQ ID NO: 66478 - DNA, 19 bp, Artificial sequence
  SiRNA target sequence
gaaacaaggagataatggc

SEQ ID NO: 66479 - DNA, 19 bp, Artificial sequence
  SiRNA target sequence
aaacaaggagataatggca

SEQ ID NO: 66480 - DNA, 19 bp, Artificial sequence
  SiRNA target sequence
aacaaggagataatggcat

SEQ ID NO: 66481 - DNA, 19 bp, Artificial sequence
  SiRNA target sequence
acaaggagataatggcatt

SEQ ID NO: 66482 - DNA, 19 bp, Artificial sequence
  SiRNA target sequence
caaggagataatggcatta

SEQ ID NO: 66483 - DNA, 19 bp, Artificial sequence
  SiRNA target sequence
aaggagataatggcattag

SEQ ID NO: 66484 - DNA, 19 bp, Artificial sequence
  SiRNA target sequence
aggagataatggcattaga

SEQ ID NO: 66485 - DNA, 19 bp, Artificial sequence
  SiRNA target sequence
ggagataatggcattagat

SEQ ID NO: 66486 - DNA, 19 bp, Artificial sequence
  SiRNA target sequence
gagataatggcattagatg

SEQ ID NO: 66487 - DNA, 19 bp, Artificial sequence
  SiRNA target sequence
agataatggcattagatga

SEQ ID NO: 66488 - DNA, 19 bp, Artificial sequence
  SiRNA target sequence
gataatggcattagatgaa

SEQ ID NO: 66489 - DNA, 19 bp, Artificial sequence
  SiRNA target sequence
ataatggcattagatgaac

SEQ ID NO: 66490 - DNA, 19 bp, Artificial sequence
  SiRNA target sequence
taatggcattagatgaacc

SEQ ID NO: 66491 - DNA, 19 bp, Artificial sequence
  SiRNA target sequence
aatggcattagatgaaccc

SEQ ID NO: 66492 - DNA, 19 bp, Artificial sequence
  SiRNA target sequence
atggcattagatgaaccca

SEQ ID NO: 66493 - DNA, 19 bp, Artificial sequence
  SiRNA target sequence
tggcattagatgaacccac

SEQ ID NO: 66494 - DNA, 19 bp, Artificial sequence
  SiRNA target sequence
ggcattagatgaacccact

SEQ ID NO: 66495 - DNA, 19 bp, Artificial sequence
  SiRNA target sequence
gcattagatgaacccactg

SEQ ID NO: 66496 - DNA, 19 bp, Artificial sequence
  SiRNA target sequence
cattagatgaacccactgc

SEQ ID NO: 66497 - DNA, 19 bp, Artificial sequence
  SiRNA target sequence
attagatgaacccactgca

SEQ ID NO: 66498 - DNA, 19 bp, Artificial sequence
  SiRNA target sequence
ttagatgaacccactgcag

SEQ ID NO: 66499 - DNA, 19 bp, Artificial sequence
  SiRNA target sequence
tagatgaacccactgcagc

SEQ ID NO: 66500 - DNA, 19 bp, Artificial sequence
  SiRNA target sequence
agatgaacccactgcagca

SEQ ID NO: 66501 - DNA, 19 bp, Artificial sequence
  SiRNA target sequence
gatgaacccactgcagcac

SEQ ID NO: 66502 - DNA, 19 bp, Artificial sequence
  SiRNA target sequence
atgaacccactgcagcact

SEQ ID NO: 66503 - DNA, 19 bp, Artificial sequence
  SiRNA target sequence
tgaacccactgcagcactt

SEQ ID NO: 66504 - DNA, 19 bp, Artificial sequence
  SiRNA target sequence
gaacccactgcagcacttg

SEQ ID NO: 66505 - DNA, 19 bp, Artificial sequence
  SiRNA target sequence
aacccactgcagcacttga

SEQ ID NO: 66506 - DNA, 19 bp, Artificial sequence
  SiRNA target sequence
acccactgcagcacttgat

SEQ ID NO: 66507 - DNA, 19 bp, Artificial sequence
  SiRNA target sequence
cccactgcagcacttgata

SEQ ID NO: 66508 - DNA, 19 bp, Artificial sequence
  SiRNA target sequence
ccactgcagcacttgataa

SEQ ID NO: 66509 - DNA, 19 bp, Artificial sequence
  SiRNA target sequence
cactgcagcacttgataag

SEQ ID NO: 66510 - DNA, 19 bp, Artificial sequence
  SiRNA target sequence
actgcagcacttgataagg

SEQ ID NO: 66511 - DNA, 19 bp, Artificial sequence
  SiRNA target sequence
ctgcagcacttgataagga

SEQ ID NO: 66512 - DNA, 19 bp, Artificial sequence
  SiRNA target sequence
tgcagcacttgataaggag

SEQ ID NO: 66513 - DNA, 19 bp, Artificial sequence
  SiRNA target sequence
gcagcacttgataaggagt

SEQ ID NO: 66514 - DNA, 19 bp, Artificial sequence
  SiRNA target sequence
cagcacttgataaggagtc

SEQ ID NO: 66515 - DNA, 19 bp, Artificial sequence
  SiRNA target sequence
agcacttgataaggagtct

SEQ ID NO: 66516 - DNA, 19 bp, Artificial sequence
  SiRNA target sequence
gcacttgataaggagtctg

SEQ ID NO: 66517 - DNA, 19 bp, Artificial sequence
  SiRNA target sequence
cacttgataaggagtctga

SEQ ID NO: 66518 - DNA, 19 bp, Artificial sequence
  SiRNA target sequence
acttgataaggagtctgaa

SEQ ID NO: 66519 - DNA, 19 bp, Artificial sequence
  SiRNA target sequence
cttgataaggagtctgaaa

SEQ ID NO: 66520 - DNA, 19 bp, Artificial sequence
  SiRNA target sequence
ttgataaggagtctgaaaa

SEQ ID NO: 66521 - DNA, 19 bp, Artificial sequence
  SiRNA target sequence
tgataaggagtctgaaaaa

SEQ ID NO: 66522 - DNA, 19 bp, Artificial sequence
  SiRNA target sequence
gataaggagtctgaaaaaa

SEQ ID NO: 66523 - DNA, 19 bp, Artificial sequence
  SiRNA target sequence
ataaggagtctgaaaaaaa

SEQ ID NO: 66524 - DNA, 19 bp, Artificial sequence
  SiRNA target sequence
taaggagtctgaaaaaaag

SEQ ID NO: 66525 - DNA, 19 bp, Artificial sequence
  SiRNA target sequence
aaggagtctgaaaaaaaga

SEQ ID NO: 66526 - DNA, 19 bp, Artificial sequence
  SiRNA target sequence
aggagtctgaaaaaaagat

SEQ ID NO: 66527 - DNA, 19 bp, Artificial sequence
  SiRNA target sequence
ggagtctgaaaaaaagatt

SEQ ID NO: 66528 - DNA, 19 bp, Artificial sequence
  SiRNA target sequence
gagtctgaaaaaaagattt

SEQ ID NO: 66529 - DNA, 19 bp, Artificial sequence
  SiRNA target sequence
agtctgaaaaaaagatttt

SEQ ID NO: 66530 - DNA, 19 bp, Artificial sequence
  SiRNA target sequence
gtctgaaaaaaagatttta

SEQ ID NO: 66531 - DNA, 19 bp, Artificial sequence
  SiRNA target sequence
tctgaaaaaaagattttag

SEQ ID NO: 66532 - DNA, 19 bp, Artificial sequence
  SiRNA target sequence
ctgaaaaaaagattttaga

SEQ ID NO: 66533 - DNA, 19 bp, Artificial sequence
  SiRNA target sequence
tgaaaaaaagattttagag

SEQ ID NO: 66534 - DNA, 19 bp, Artificial sequence
  SiRNA target sequence
gaaaaaaagattttagaga

SEQ ID NO: 66535 - DNA, 19 bp, Artificial sequence
  SiRNA target sequence
aaaaaaagattttagagat

SEQ ID NO: 66536 - DNA, 19 bp, Artificial sequence
  SiRNA target sequence
aaaaaagattttagagata

SEQ ID NO: 66537 - DNA, 19 bp, Artificial sequence
  SiRNA target sequence
aaaaagattttagagataa

SEQ ID NO: 66538 - DNA, 19 bp, Artificial sequence
  SiRNA target sequence
aaaagattttagagataat

SEQ ID NO: 66539 - DNA, 19 bp, Artificial sequence
  SiRNA target sequence
aaagattttagagataatt

SEQ ID NO: 66540 - DNA, 19 bp, Artificial sequence
  SiRNA target sequence
aagattttagagataattt

SEQ ID NO: 66541 - DNA, 19 bp, Artificial sequence
  SiRNA target sequence
agattttagagataatttt

SEQ ID NO: 66542 - DNA, 19 bp, Artificial sequence
  SiRNA target sequence
gattttagagataatttta

SEQ ID NO: 66543 - DNA, 19 bp, Artificial sequence
  SiRNA target sequence
attttagagataattttac

SEQ ID NO: 66544 - DNA, 19 bp, Artificial sequence
  SiRNA target sequence
ttttagagataattttaca

SEQ ID NO: 66545 - DNA, 19 bp, Artificial sequence
  SiRNA target sequence
tttagagataattttacaa

SEQ ID NO: 66546 - DNA, 19 bp, Artificial sequence
  SiRNA target sequence
ttagagataattttacaac

SEQ ID NO: 66547 - DNA, 19 bp, Artificial sequence
  SiRNA target sequence
tagagataattttacaaca

SEQ ID NO: 66548 - DNA, 19 bp, Artificial sequence
  SiRNA target sequence
agagataattttacaacag

SEQ ID NO: 66549 - DNA, 19 bp, Artificial sequence
  SiRNA target sequence
gagataattttacaacagg

SEQ ID NO: 66550 - DNA, 19 bp, Artificial sequence
  SiRNA target sequence
agataattttacaacagga

SEQ ID NO: 66551 - DNA, 19 bp, Artificial sequence
  SiRNA target sequence
gataattttacaacaggaa

SEQ ID NO: 66552 - DNA, 19 bp, Artificial sequence
  SiRNA target sequence
ataattttacaacaggaag

SEQ ID NO: 66553 - DNA, 19 bp, Artificial sequence
  SiRNA target sequence
taattttacaacaggaaga

SEQ ID NO: 66554 - DNA, 19 bp, Artificial sequence
  SiRNA target sequence
aattttacaacaggaagat

SEQ ID NO: 66555 - DNA, 19 bp, Artificial sequence
  SiRNA target sequence
attttacaacaggaagatc

SEQ ID NO: 66556 - DNA, 19 bp, Artificial sequence
  SiRNA target sequence
ttttacaacaggaagatcg

SEQ ID NO: 66557 - DNA, 19 bp, Artificial sequence
  SiRNA target sequence
tttacaacaggaagatcga

SEQ ID NO: 66558 - DNA, 19 bp, Artificial sequence
  SiRNA target sequence
ttacaacaggaagatcgaa

SEQ ID NO: 66559 - DNA, 19 bp, Artificial sequence
  SiRNA target sequence
tacaacaggaagatcgaac

SEQ ID NO: 66560 - DNA, 19 bp, Artificial sequence
  SiRNA target sequence
acaacaggaagatcgaaca

SEQ ID NO: 66561 - DNA, 19 bp, Artificial sequence
  SiRNA target sequence
caacaggaagatcgaacag

SEQ ID NO: 66562 - DNA, 19 bp, Artificial sequence
  SiRNA target sequence
aacaggaagatcgaacagt

SEQ ID NO: 66563 - DNA, 19 bp, Artificial sequence
  SiRNA target sequence
acaggaagatcgaacagtt

SEQ ID NO: 66564 - DNA, 19 bp, Artificial sequence
  SiRNA target sequence
caggaagatcgaacagttt

SEQ ID NO: 66565 - DNA, 19 bp, Artificial sequence
  SiRNA target sequence
aggaagatcgaacagtttt

SEQ ID NO: 66566 - DNA, 19 bp, Artificial sequence
  SiRNA target sequence
ggaagatcgaacagttttg

SEQ ID NO: 66567 - DNA, 19 bp, Artificial sequence
  SiRNA target sequence
gaagatcgaacagttttga

SEQ ID NO: 66568 - DNA, 19 bp, Artificial sequence
  SiRNA target sequence
aagatcgaacagttttgat

SEQ ID NO: 66569 - DNA, 19 bp, Artificial sequence
  SiRNA target sequence
agatcgaacagttttgatg

SEQ ID NO: 66570 - DNA, 19 bp, Artificial sequence
  SiRNA target sequence
gatcgaacagttttgatga

SEQ ID NO: 66571 - DNA, 19 bp, Artificial sequence
  SiRNA target sequence
atcgaacagttttgatgat

SEQ ID NO: 66572 - DNA, 19 bp, Artificial sequence
  SiRNA target sequence
tcgaacagttttgatgata

SEQ ID NO: 66573 - DNA, 19 bp, Artificial sequence
  SiRNA target sequence
cgaacagttttgatgataa

SEQ ID NO: 66574 - DNA, 19 bp, Artificial sequence
  SiRNA target sequence
gaacagttttgatgataat

SEQ ID NO: 66575 - DNA, 19 bp, Artificial sequence
  SiRNA target sequence
aacagttttgatgataatt

SEQ ID NO: 66576 - DNA, 19 bp, Artificial sequence
  SiRNA target sequence
acagttttgatgataattc

SEQ ID NO: 66577 - DNA, 19 bp, Artificial sequence
  SiRNA target sequence
cagttttgatgataattca

SEQ ID NO: 66578 - DNA, 19 bp, Artificial sequence
  SiRNA target sequence
agttttgatgataattcat

SEQ ID NO: 66579 - DNA, 19 bp, Artificial sequence
  SiRNA target sequence
gttttgatgataattcata

SEQ ID NO: 66580 - DNA, 19 bp, Artificial sequence
  SiRNA target sequence
ttttgatgataattcataa

SEQ ID NO: 66581 - DNA, 19 bp, Artificial sequence
  SiRNA target sequence
tttgatgataattcataat

SEQ ID NO: 66582 - DNA, 19 bp, Artificial sequence
  SiRNA target sequence
ttgatgataattcataatc

SEQ ID NO: 66583 - DNA, 19 bp, Artificial sequence
  SiRNA target sequence
tgatgataattcataatct

SEQ ID NO: 66584 - DNA, 19 bp, Artificial sequence
  SiRNA target sequence
gatgataattcataatcta

SEQ ID NO: 66585 - DNA, 19 bp, Artificial sequence
  SiRNA target sequence
atgataattcataatctag

SEQ ID NO: 66586 - DNA, 19 bp, Artificial sequence
  SiRNA target sequence
tgataattcataatctaga

SEQ ID NO: 66587 - DNA, 19 bp, Artificial sequence
  SiRNA target sequence
gataattcataatctagaa

SEQ ID NO: 66588 - DNA, 19 bp, Artificial sequence
  SiRNA target sequence
ataattcataatctagaac

SEQ ID NO: 66589 - DNA, 19 bp, Artificial sequence
  SiRNA target sequence
taattcataatctagaact

SEQ ID NO: 66590 - DNA, 19 bp, Artificial sequence
  SiRNA target sequence
aattcataatctagaactt

SEQ ID NO: 66591 - DNA, 19 bp, Artificial sequence
  SiRNA target sequence
attcataatctagaactta

SEQ ID NO: 66592 - DNA, 19 bp, Artificial sequence
  SiRNA target sequence
ttcataatctagaacttat

SEQ ID NO: 66593 - DNA, 19 bp, Artificial sequence
  SiRNA target sequence
tcataatctagaacttatt

SEQ ID NO: 66594 - DNA, 19 bp, Artificial sequence
  SiRNA target sequence
cataatctagaacttatta

SEQ ID NO: 66595 - DNA, 19 bp, Artificial sequence
  SiRNA target sequence
ataatctagaacttattaa

SEQ ID NO: 66596 - DNA, 19 bp, Artificial sequence
  SiRNA target sequence
taatctagaacttattaat

SEQ ID NO: 66597 - DNA, 19 bp, Artificial sequence
  SiRNA target sequence
aatctagaacttattaata

SEQ ID NO: 66598 - DNA, 19 bp, Artificial sequence
  SiRNA target sequence
atctagaacttattaataa

SEQ ID NO: 66599 - DNA, 19 bp, Artificial sequence
  SiRNA target sequence
tctagaacttattaataaa

SEQ ID NO: 66600 - DNA, 19 bp, Artificial sequence
  SiRNA target sequence
ctagaacttattaataaat

SEQ ID NO: 66601 - DNA, 19 bp, Artificial sequence
  SiRNA target sequence
tagaacttattaataaatt

SEQ ID NO: 66602 - DNA, 19 bp, Artificial sequence
  SiRNA target sequence
agaacttattaataaattt

SEQ ID NO: 66603 - DNA, 19 bp, Artificial sequence
  SiRNA target sequence
gaacttattaataaatttg

SEQ ID NO: 66604 - DNA, 19 bp, Artificial sequence
  SiRNA target sequence
aacttattaataaatttga

SEQ ID NO: 66605 - DNA, 19 bp, Artificial sequence
  SiRNA target sequence
acttattaataaatttgat

SEQ ID NO: 66606 - DNA, 19 bp, Artificial sequence
  SiRNA target sequence
cttattaataaatttgata

SEQ ID NO: 66607 - DNA, 19 bp, Artificial sequence
  SiRNA target sequence
ttattaataaatttgataa

SEQ ID NO: 66608 - DNA, 19 bp, Artificial sequence
  SiRNA target sequence
tattaataaatttgataaa

SEQ ID NO: 66609 - DNA, 19 bp, Artificial sequence
  SiRNA target sequence
attaataaatttgataaaa

SEQ ID NO: 66610 - DNA, 19 bp, Artificial sequence
  SiRNA target sequence
ttaataaatttgataaaat

SEQ ID NO: 66611 - DNA, 19 bp, Artificial sequence
  SiRNA target sequence
taataaatttgataaaata

SEQ ID NO: 66612 - DNA, 19 bp, Artificial sequence
  SiRNA target sequence
aataaatttgataaaataa

SEQ ID NO: 66613 - DNA, 19 bp, Artificial sequence
  SiRNA target sequence
ataaatttgataaaataat

SEQ ID NO: 66614 - DNA, 19 bp, Artificial sequence
  SiRNA target sequence
taaatttgataaaataatt

SEQ ID NO: 66615 - DNA, 19 bp, Artificial sequence
  SiRNA target sequence
aaatttgataaaataattt

SEQ ID NO: 66616 - DNA, 19 bp, Artificial sequence
  SiRNA target sequence
aatttgataaaataattta

SEQ ID NO: 66617 - DNA, 19 bp, Artificial sequence
  SiRNA target sequence
atttgataaaataatttac

SEQ ID NO: 66618 - DNA, 19 bp, Artificial sequence
  SiRNA target sequence
tttgataaaataatttaca

SEQ ID NO: 66619 - DNA, 19 bp, Artificial sequence
  SiRNA target sequence
ttgataaaataatttacat

SEQ ID NO: 66620 - DNA, 19 bp, Artificial sequence
  SiRNA target sequence
tgataaaataatttacatt

SEQ ID NO: 66621 - DNA, 19 bp, Artificial sequence
  SiRNA target sequence
gataaaataatttacattg

SEQ ID NO: 66622 - DNA, 19 bp, Artificial sequence
  SiRNA target sequence
ataaaataatttacattga

SEQ ID NO: 66623 - DNA, 19 bp, Artificial sequence
  SiRNA target sequence
taaaataatttacattgat

SEQ ID NO: 66624 - DNA, 19 bp, Artificial sequence
  SiRNA target sequence
aaaataatttacattgatg

SEQ ID NO: 66625 - DNA, 19 bp, Artificial sequence
  SiRNA target sequence
aaataatttacattgatga

SEQ ID NO: 66626 - DNA, 19 bp, Artificial sequence
  SiRNA target sequence
aataatttacattgatgaa

SEQ ID NO: 66627 - DNA, 19 bp, Artificial sequence
  SiRNA target sequence
ataatttacattgatgaaa

SEQ ID NO: 66628 - DNA, 19 bp, Artificial sequence
  SiRNA target sequence
taatttacattgatgaaaa

SEQ ID NO: 66629 - DNA, 19 bp, Artificial sequence
  SiRNA target sequence
aatttacattgatgaaaat

SEQ ID NO: 66630 - DNA, 19 bp, Artificial sequence
  SiRNA target sequence
atttacattgatgaaaata

SEQ ID NO: 66631 - DNA, 19 bp, Artificial sequence
  SiRNA target sequence
tttacattgatgaaaataa

SEQ ID NO: 66632 - DNA, 19 bp, Artificial sequence
  SiRNA target sequence
ttacattgatgaaaataat

SEQ ID NO: 66633 - DNA, 19 bp, Artificial sequence
  SiRNA target sequence
tacattgatgaaaataata

SEQ ID NO: 66634 - DNA, 19 bp, Artificial sequence
  SiRNA target sequence
acattgatgaaaataatat

SEQ ID NO: 66635 - DNA, 19 bp, Artificial sequence
  SiRNA target sequence
cattgatgaaaataatata

SEQ ID NO: 66636 - DNA, 19 bp, Artificial sequence
  SiRNA target sequence
attgatgaaaataatatag

SEQ ID NO: 66637 - DNA, 19 bp, Artificial sequence
  SiRNA target sequence
ttgatgaaaataatataga

SEQ ID NO: 66638 - DNA, 19 bp, Artificial sequence
  SiRNA target sequence
tgatgaaaataatatagaa

SEQ ID NO: 66639 - DNA, 19 bp, Artificial sequence
  SiRNA target sequence
gatgaaaataatatagaag

SEQ ID NO: 66640 - DNA, 19 bp, Artificial sequence
  SiRNA target sequence
atgaaaataatatagaagt

SEQ ID NO: 66641 - DNA, 19 bp, Artificial sequence
  SiRNA target sequence
tgaaaataatatagaagtc

SEQ ID NO: 66642 - DNA, 19 bp, Artificial sequence
  SiRNA target sequence
gaaaataatatagaagtct

SEQ ID NO: 66643 - DNA, 19 bp, Artificial sequence
  SiRNA target sequence
aaaataatatagaagtcta

SEQ ID NO: 66644 - DNA, 19 bp, Artificial sequence
  SiRNA target sequence
aaataatatagaagtctat

SEQ ID NO: 66645 - DNA, 19 bp, Artificial sequence
  SiRNA target sequence
aataatatagaagtctata

SEQ ID NO: 66646 - DNA, 19 bp, Artificial sequence
  SiRNA target sequence
ataatatagaagtctataa

SEQ ID NO: 66647 - DNA, 19 bp, Artificial sequence
  SiRNA target sequence
taatatagaagtctataaa

SEQ ID NO: 66648 - DNA, 19 bp, Artificial sequence
  SiRNA target sequence
aatatagaagtctataaaa

SEQ ID NO: 66649 - DNA, 19 bp, Artificial sequence
  SiRNA target sequence
atatagaagtctataaaaa

SEQ ID NO: 66650 - DNA, 19 bp, Artificial sequence
  SiRNA target sequence
tatagaagtctataaaaat

SEQ ID NO: 66651 - DNA, 19 bp, Artificial sequence
  SiRNA target sequence
atagaagtctataaaaatg

SEQ ID NO: 66652 - DNA, 19 bp, Artificial sequence
  SiRNA target sequence
tagaagtctataaaaatga

SEQ ID NO: 66653 - DNA, 19 bp, Artificial sequence
  SiRNA target sequence
agaagtctataaaaatgat

SEQ ID NO: 66654 - DNA, 19 bp, Artificial sequence
  SiRNA target sequence
gaagtctataaaaatgata

SEQ ID NO: 66655 - DNA, 19 bp, Artificial sequence
  SiRNA target sequence
aagtctataaaaatgatat

SEQ ID NO: 66656 - DNA, 19 bp, Artificial sequence
  SiRNA target sequence
agtctataaaaatgatatt

SEQ ID NO: 66657 - DNA, 19 bp, Artificial sequence
  SiRNA target sequence
gtctataaaaatgatattg

SEQ ID NO: 66658 - DNA, 19 bp, Artificial sequence
  SiRNA target sequence
tctataaaaatgatattga

SEQ ID NO: 66659 - DNA, 19 bp, Artificial sequence
  SiRNA target sequence
ctataaaaatgatattgaa

SEQ ID NO: 66660 - DNA, 19 bp, Artificial sequence
  SiRNA target sequence
tataaaaatgatattgaag

SEQ ID NO: 66661 - DNA, 19 bp, Artificial sequence
  SiRNA target sequence
ataaaaatgatattgaagg

SEQ ID NO: 66662 - DNA, 19 bp, Artificial sequence
  SiRNA target sequence
taaaaatgatattgaagga

SEQ ID NO: 66663 - DNA, 19 bp, Artificial sequence
  SiRNA target sequence
aaaaatgatattgaaggac

SEQ ID NO: 66664 - DNA, 19 bp, Artificial sequence
  SiRNA target sequence
aaaatgatattgaaggaca

SEQ ID NO: 66665 - DNA, 19 bp, Artificial sequence
  SiRNA target sequence
aaatgatattgaaggacaa

SEQ ID NO: 66666 - DNA, 19 bp, Artificial sequence
  SiRNA target sequence
aatgatattgaaggacaaa

SEQ ID NO: 66667 - DNA, 19 bp, Artificial sequence
  SiRNA target sequence
atgatattgaaggacaaaa

SEQ ID NO: 66668 - DNA, 19 bp, Artificial sequence
  SiRNA target sequence
tgatattgaaggacaaaaa

SEQ ID NO: 66669 - DNA, 19 bp, Artificial sequence
  SiRNA target sequence
gatattgaaggacaaaaaa

SEQ ID NO: 66670 - DNA, 19 bp, Artificial sequence
  SiRNA target sequence
atattgaaggacaaaaaaa

SEQ ID NO: 66671 - DNA, 19 bp, Artificial sequence
  SiRNA target sequence
tattgaaggacaaaaaaag

SEQ ID NO: 66672 - DNA, 19 bp, Artificial sequence
  SiRNA target sequence
attgaaggacaaaaaaagt

SEQ ID NO: 66673 - DNA, 19 bp, Artificial sequence
  SiRNA target sequence
ttgaaggacaaaaaaagtt

SEQ ID NO: 66674 - DNA, 19 bp, Artificial sequence
  SiRNA target sequence
tgaaggacaaaaaaagttt

SEQ ID NO: 66675 - DNA, 19 bp, Artificial sequence
  SiRNA target sequence
gaaggacaaaaaaagtttt

SEQ ID NO: 66676 - DNA, 19 bp, Artificial sequence
  SiRNA target sequence
aaggacaaaaaaagttttc

SEQ ID NO: 66677 - DNA, 19 bp, Artificial sequence
  SiRNA target sequence
aggacaaaaaaagttttct

SEQ ID NO: 66678 - DNA, 19 bp, Artificial sequence
  SiRNA target sequence
ggacaaaaaaagttttcta

SEQ ID NO: 66679 - DNA, 19 bp, Artificial sequence
  SiRNA target sequence
gacaaaaaaagttttctac

SEQ ID NO: 66680 - DNA, 19 bp, Artificial sequence
  SiRNA target sequence
acaaaaaaagttttctaca

SEQ ID NO: 66681 - DNA, 19 bp, Artificial sequence
  SiRNA target sequence
caaaaaaagttttctacaa

SEQ ID NO: 66682 - DNA, 19 bp, Artificial sequence
  SiRNA target sequence
aaaaaaagttttctacaaa

SEQ ID NO: 66683 - DNA, 19 bp, Artificial sequence
  SiRNA target sequence
aaaaaagttttctacaaat

SEQ ID NO: 66684 - DNA, 19 bp, Artificial sequence
  SiRNA target sequence
aaaaagttttctacaaatt

SEQ ID NO: 66685 - DNA, 19 bp, Artificial sequence
  SiRNA target sequence
aaaagttttctacaaattt

SEQ ID NO: 66686 - DNA, 19 bp, Artificial sequence
  SiRNA target sequence
aaagttttctacaaattta

SEQ ID NO: 66687 - DNA, 19 bp, Artificial sequence
  SiRNA target sequence
aagttttctacaaatttac

SEQ ID NO: 66688 - DNA, 19 bp, Artificial sequence
  SiRNA target sequence
agttttctacaaatttaca

SEQ ID NO: 66689 - DNA, 19 bp, Artificial sequence
  SiRNA target sequence
gttttctacaaatttacaa

SEQ ID NO: 66690 - DNA, 19 bp, Artificial sequence
  SiRNA target sequence
ttttctacaaatttacaat

SEQ ID NO: 66691 - DNA, 19 bp, Artificial sequence
  SiRNA target sequence
tttctacaaatttacaata

SEQ ID NO: 66692 - DNA, 19 bp, Artificial sequence
  SiRNA target sequence
ttctacaaatttacaatat

SEQ ID NO: 66693 - DNA, 19 bp, Artificial sequence
  SiRNA target sequence
tctacaaatttacaatatt

SEQ ID NO: 66694 - DNA, 19 bp, Artificial sequence
  SiRNA target sequence
ctacaaatttacaatattt

SEQ ID NO: 66695 - DNA, 19 bp, Artificial sequence
  SiRNA target sequence
tacaaatttacaatatttt

SEQ ID NO: 66696 - DNA, 19 bp, Artificial sequence
  SiRNA target sequence
acaaatttacaatattttt

SEQ ID NO: 66697 - DNA, 19 bp, Artificial sequence
  SiRNA target sequence
caaatttacaatatttttt

SEQ ID NO: 66698 - DNA, 19 bp, Artificial sequence
  SiRNA target sequence
aaatttacaatatttttta

SEQ ID NO: 66699 - DNA, 19 bp, Artificial sequence
  SiRNA target sequence
aatttacaatattttttat

SEQ ID NO: 66700 - DNA, 19 bp, Artificial sequence
  SiRNA target sequence
atttacaatattttttatc

SEQ ID NO: 66701 - DNA, 19 bp, Artificial sequence
  SiRNA target sequence
tttacaatattttttatca

SEQ ID NO: 66702 - DNA, 19 bp, Artificial sequence
  SiRNA target sequence
ttacaatattttttatcat

SEQ ID NO: 66703 - DNA, 19 bp, Artificial sequence
  SiRNA target sequence
tacaatattttttatcata

SEQ ID NO: 66704 - DNA, 19 bp, Artificial sequence
  SiRNA target sequence
acaatattttttatcatac

SEQ ID NO: 66705 - DNA, 19 bp, Artificial sequence
  SiRNA target sequence
caatattttttatcataca

SEQ ID NO: 66706 - DNA, 19 bp, Artificial sequence
  SiRNA target sequence
aatattttttatcatacaa

SEQ ID NO: 66707 - DNA, 19 bp, Artificial sequence
  SiRNA target sequence
atattttttatcatacaaa

SEQ ID NO: 66708 - DNA, 19 bp, Artificial sequence
  SiRNA target sequence
tattttttatcatacaaat

SEQ ID NO: 66709 - DNA, 19 bp, Artificial sequence
  SiRNA target sequence
attttttatcatacaaatt

SEQ ID NO: 66710 - DNA, 19 bp, Artificial sequence
  SiRNA target sequence
ttttttatcatacaaatta

SEQ ID NO: 66711 - DNA, 19 bp, Artificial sequence
  SiRNA target sequence
tttttatcatacaaattag

SEQ ID NO: 66712 - DNA, 19 bp, Artificial sequence
  SiRNA target sequence
ttttatcatacaaattagg

SEQ ID NO: 66713 - DNA, 19 bp, Artificial sequence
  SiRNA target sequence
tttatcatacaaattaggt

SEQ ID NO: 66714 - DNA, 19 bp, Artificial sequence
  SiRNA target sequence
ttatcatacaaattaggta

SEQ ID NO: 66715 - DNA, 19 bp, Artificial sequence
  SiRNA target sequence
tatcatacaaattaggtaa

SEQ ID NO: 66716 - DNA, 19 bp, Artificial sequence
  SiRNA target sequence
atcatacaaattaggtaaa

SEQ ID NO: 66717 - DNA, 19 bp, Artificial sequence
  SiRNA target sequence
tcatacaaattaggtaaat

SEQ ID NO: 66718 - DNA, 19 bp, Artificial sequence
  SiRNA target sequence
catacaaattaggtaaata

SEQ ID NO: 66719 - DNA, 19 bp, Artificial sequence
  SiRNA target sequence
atacaaattaggtaaataa

SEQ ID NO: 66720 - DNA, 20 bp, Artificial sequence
  SiRNA target sequence
atgaaaaaaatttcgaatag

SEQ ID NO: 66721 - DNA, 20 bp, Artificial sequence
  SiRNA target sequence
tgaaaaaaatttcgaataga

SEQ ID NO: 66722 - DNA, 20 bp, Artificial sequence
  SiRNA target sequence
gaaaaaaatttcgaatagaa

SEQ ID NO: 66723 - DNA, 20 bp, Artificial sequence
  SiRNA target sequence
aaaaaaatttcgaatagaaa

SEQ ID NO: 66724 - DNA, 20 bp, Artificial sequence
  SiRNA target sequence
aaaaaatttcgaatagaaaa

SEQ ID NO: 66725 - DNA, 20 bp, Artificial sequence
  SiRNA target sequence
aaaaatttcgaatagaaaaa

SEQ ID NO: 66726 - DNA, 20 bp, Artificial sequence
  SiRNA target sequence
aaaatttcgaatagaaaaat

SEQ ID NO: 66727 - DNA, 20 bp, Artificial sequence
  SiRNA target sequence
aaatttcgaatagaaaaatt

SEQ ID NO: 66728 - DNA, 20 bp, Artificial sequence
  SiRNA target sequence
aatttcgaatagaaaaatta

SEQ ID NO: 66729 - DNA, 20 bp, Artificial sequence
  SiRNA target sequence
atttcgaatagaaaaattat

SEQ ID NO: 66730 - DNA, 20 bp, Artificial sequence
  SiRNA target sequence
tttcgaatagaaaaattatc

SEQ ID NO: 66731 - DNA, 20 bp, Artificial sequence
  SiRNA target sequence
ttcgaatagaaaaattatca

SEQ ID NO: 66732 - DNA, 20 bp, Artificial sequence
  SiRNA target sequence
tcgaatagaaaaattatcaa

SEQ ID NO: 66733 - DNA, 20 bp, Artificial sequence
  SiRNA target sequence
cgaatagaaaaattatcaaa

SEQ ID NO: 66734 - DNA, 20 bp, Artificial sequence
  SiRNA target sequence
gaatagaaaaattatcaaag

SEQ ID NO: 66735 - DNA, 20 bp, Artificial sequence
  SiRNA target sequence
aatagaaaaattatcaaaga

SEQ ID NO: 66736 - DNA, 20 bp, Artificial sequence
  SiRNA target sequence
atagaaaaattatcaaagaa

SEQ ID NO: 66737 - DNA, 20 bp, Artificial sequence
  SiRNA target sequence
tagaaaaattatcaaagaaa

SEQ ID NO: 66738 - DNA, 20 bp, Artificial sequence
  SiRNA target sequence
agaaaaattatcaaagaaat

SEQ ID NO: 66739 - DNA, 20 bp, Artificial sequence
  SiRNA target sequence
gaaaaattatcaaagaaatt

SEQ ID NO: 66740 - DNA, 20 bp, Artificial sequence
  SiRNA target sequence
aaaaattatcaaagaaatta

SEQ ID NO: 66741 - DNA, 20 bp, Artificial sequence
  SiRNA target sequence
aaaattatcaaagaaattat

SEQ ID NO: 66742 - DNA, 20 bp, Artificial sequence
  SiRNA target sequence
aaattatcaaagaaattatt

SEQ ID NO: 66743 - DNA, 20 bp, Artificial sequence
  SiRNA target sequence
aattatcaaagaaattattt

SEQ ID NO: 66744 - DNA, 20 bp, Artificial sequence
  SiRNA target sequence
attatcaaagaaattattta

SEQ ID NO: 66745 - DNA, 20 bp, Artificial sequence
  SiRNA target sequence
ttatcaaagaaattatttac

SEQ ID NO: 66746 - DNA, 20 bp, Artificial sequence
  SiRNA target sequence
tatcaaagaaattatttaca

SEQ ID NO: 66747 - DNA, 20 bp, Artificial sequence
  SiRNA target sequence
atcaaagaaattatttacaa

SEQ ID NO: 66748 - DNA, 20 bp, Artificial sequence
  SiRNA target sequence
tcaaagaaattatttacaat

SEQ ID NO: 66749 - DNA, 20 bp, Artificial sequence
  SiRNA target sequence
caaagaaattatttacaatg

SEQ ID NO: 66750 - DNA, 20 bp, Artificial sequence
  SiRNA target sequence
aaagaaattatttacaatga

SEQ ID NO: 66751 - DNA, 20 bp, Artificial sequence
  SiRNA target sequence
aagaaattatttacaatgat

SEQ ID NO: 66752 - DNA, 20 bp, Artificial sequence
  SiRNA target sequence
agaaattatttacaatgatt

SEQ ID NO: 66753 - DNA, 20 bp, Artificial sequence
  SiRNA target sequence
gaaattatttacaatgattt

SEQ ID NO: 66754 - DNA, 20 bp, Artificial sequence
  SiRNA target sequence
aaattatttacaatgattta

SEQ ID NO: 66755 - DNA, 20 bp, Artificial sequence
  SiRNA target sequence
aattatttacaatgatttat

SEQ ID NO: 66756 - DNA, 20 bp, Artificial sequence
  SiRNA target sequence
attatttacaatgatttatt

SEQ ID NO: 66757 - DNA, 20 bp, Artificial sequence
  SiRNA target sequence
ttatttacaatgatttatta

SEQ ID NO: 66758 - DNA, 20 bp, Artificial sequence
  SiRNA target sequence
tatttacaatgatttattaa

SEQ ID NO: 66759 - DNA, 20 bp, Artificial sequence
  SiRNA target sequence
atttacaatgatttattaaa

SEQ ID NO: 66760 - DNA, 20 bp, Artificial sequence
  SiRNA target sequence
tttacaatgatttattaaaa

SEQ ID NO: 66761 - DNA, 20 bp, Artificial sequence
  SiRNA target sequence
ttacaatgatttattaaaaa

SEQ ID NO: 66762 - DNA, 20 bp, Artificial sequence
  SiRNA target sequence
tacaatgatttattaaaaat

SEQ ID NO: 66763 - DNA, 20 bp, Artificial sequence
  SiRNA target sequence
acaatgatttattaaaaata

SEQ ID NO: 66764 - DNA, 20 bp, Artificial sequence
  SiRNA target sequence
caatgatttattaaaaataa

SEQ ID NO: 66765 - DNA, 20 bp, Artificial sequence
  SiRNA target sequence
aatgatttattaaaaataag

SEQ ID NO: 66766 - DNA, 20 bp, Artificial sequence
  SiRNA target sequence
atgatttattaaaaataaga

SEQ ID NO: 66767 - DNA, 20 bp, Artificial sequence
  SiRNA target sequence
tgatttattaaaaataagaa

SEQ ID NO: 66768 - DNA, 20 bp, Artificial sequence
  SiRNA target sequence
gatttattaaaaataagaat

SEQ ID NO: 66769 - DNA, 20 bp, Artificial sequence
  SiRNA target sequence
atttattaaaaataagaatg

SEQ ID NO: 66770 - DNA, 20 bp, Artificial sequence
  SiRNA target sequence
tttattaaaaataagaatgt

SEQ ID NO: 66771 - DNA, 20 bp, Artificial sequence
  SiRNA target sequence
ttattaaaaataagaatgtt

SEQ ID NO: 66772 - DNA, 20 bp, Artificial sequence
  SiRNA target sequence
tattaaaaataagaatgttg

SEQ ID NO: 66773 - DNA, 20 bp, Artificial sequence
  SiRNA target sequence
attaaaaataagaatgttgc

SEQ ID NO: 66774 - DNA, 20 bp, Artificial sequence
  SiRNA target sequence
ttaaaaataagaatgttgcg

SEQ ID NO: 66775 - DNA, 20 bp, Artificial sequence
  SiRNA target sequence
taaaaataagaatgttgcga

SEQ ID NO: 66776 - DNA, 20 bp, Artificial sequence
  SiRNA target sequence
aaaaataagaatgttgcgat

SEQ ID NO: 66777 - DNA, 20 bp, Artificial sequence
  SiRNA target sequence
aaaataagaatgttgcgata

SEQ ID NO: 66778 - DNA, 20 bp, Artificial sequence
  SiRNA target sequence
aaataagaatgttgcgatat

SEQ ID NO: 66779 - DNA, 20 bp, Artificial sequence
  SiRNA target sequence
aataagaatgttgcgatatg

SEQ ID NO: 66780 - DNA, 20 bp, Artificial sequence
  SiRNA target sequence
ataagaatgttgcgatatgt

SEQ ID NO: 66781 - DNA, 20 bp, Artificial sequence
  SiRNA target sequence
taagaatgttgcgatatgtt

SEQ ID NO: 66782 - DNA, 20 bp, Artificial sequence
  SiRNA target sequence
aagaatgttgcgatatgtta

SEQ ID NO: 66783 - DNA, 20 bp, Artificial sequence
  SiRNA target sequence
agaatgttgcgatatgttat

SEQ ID NO: 66784 - DNA, 20 bp, Artificial sequence
  SiRNA target sequence
gaatgttgcgatatgttatt

SEQ ID NO: 66785 - DNA, 20 bp, Artificial sequence
  SiRNA target sequence
aatgttgcgatatgttattg

SEQ ID NO: 66786 - DNA, 20 bp, Artificial sequence
  SiRNA target sequence
atgttgcgatatgttattgt

SEQ ID NO: 66787 - DNA, 20 bp, Artificial sequence
  SiRNA target sequence
tgttgcgatatgttattgta

SEQ ID NO: 66788 - DNA, 20 bp, Artificial sequence
  SiRNA target sequence
gttgcgatatgttattgtac

SEQ ID NO: 66789 - DNA, 20 bp, Artificial sequence
  SiRNA target sequence
ttgcgatatgttattgtacc

SEQ ID NO: 66790 - DNA, 20 bp, Artificial sequence
  SiRNA target sequence
tgcgatatgttattgtacca

SEQ ID NO: 66791 - DNA, 20 bp, Artificial sequence
  SiRNA target sequence
gcgatatgttattgtaccaa

SEQ ID NO: 66792 - DNA, 20 bp, Artificial sequence
  SiRNA target sequence
cgatatgttattgtaccaat

SEQ ID NO: 66793 - DNA, 20 bp, Artificial sequence
  SiRNA target sequence
gatatgttattgtaccaata

SEQ ID NO: 66794 - DNA, 20 bp, Artificial sequence
  SiRNA target sequence
atatgttattgtaccaataa

SEQ ID NO: 66795 - DNA, 20 bp, Artificial sequence
  SiRNA target sequence
tatgttattgtaccaataat

SEQ ID NO: 66796 - DNA, 20 bp, Artificial sequence
  SiRNA target sequence
atgttattgtaccaataata

SEQ ID NO: 66797 - DNA, 20 bp, Artificial sequence
  SiRNA target sequence
tgttattgtaccaataatat

SEQ ID NO: 66798 - DNA, 20 bp, Artificial sequence
  SiRNA target sequence
gttattgtaccaataatatt

SEQ ID NO: 66799 - DNA, 20 bp, Artificial sequence
  SiRNA target sequence
ttattgtaccaataatattt

SEQ ID NO: 66800 - DNA, 20 bp, Artificial sequence
  SiRNA target sequence
tattgtaccaataatatttt

SEQ ID NO: 66801 - DNA, 20 bp, Artificial sequence
  SiRNA target sequence
attgtaccaataatattttt

SEQ ID NO: 66802 - DNA, 20 bp, Artificial sequence
  SiRNA target sequence
ttgtaccaataatattttta

SEQ ID NO: 66803 - DNA, 20 bp, Artificial sequence
  SiRNA target sequence
tgtaccaataatatttttaa

SEQ ID NO: 66804 - DNA, 20 bp, Artificial sequence
  SiRNA target sequence
gtaccaataatatttttaac

SEQ ID NO: 66805 - DNA, 20 bp, Artificial sequence
  SiRNA target sequence
taccaataatatttttaact

SEQ ID NO: 66806 - DNA, 20 bp, Artificial sequence
  SiRNA target sequence
accaataatatttttaacta

SEQ ID NO: 66807 - DNA, 20 bp, Artificial sequence
  SiRNA target sequence
ccaataatatttttaactat

SEQ ID NO: 66808 - DNA, 20 bp, Artificial sequence
  SiRNA target sequence
caataatatttttaactata

SEQ ID NO: 66809 - DNA, 20 bp, Artificial sequence
  SiRNA target sequence
aataatatttttaactatat

SEQ ID NO: 66810 - DNA, 20 bp, Artificial sequence
  SiRNA target sequence
ataatatttttaactatatt

SEQ ID NO: 66811 - DNA, 20 bp, Artificial sequence
  SiRNA target sequence
taatatttttaactatattt

SEQ ID NO: 66812 - DNA, 20 bp, Artificial sequence
  SiRNA target sequence
aatatttttaactatatttt

SEQ ID NO: 66813 - DNA, 20 bp, Artificial sequence
  SiRNA target sequence
atatttttaactatatttta

SEQ ID NO: 66814 - DNA, 20 bp, Artificial sequence
  SiRNA target sequence
tatttttaactatattttac

SEQ ID NO: 66815 - DNA, 20 bp, Artificial sequence
  SiRNA target sequence
atttttaactatattttaca

SEQ ID NO: 66816 - DNA, 20 bp, Artificial sequence
  SiRNA target sequence
tttttaactatattttacac

SEQ ID NO: 66817 - DNA, 20 bp, Artificial sequence
  SiRNA target sequence
ttttaactatattttacact

SEQ ID NO: 66818 - DNA, 20 bp, Artificial sequence
  SiRNA target sequence
tttaactatattttacactg

SEQ ID NO: 66819 - DNA, 20 bp, Artificial sequence
  SiRNA target sequence
ttaactatattttacactgt

SEQ ID NO: 66820 - DNA, 20 bp, Artificial sequence
  SiRNA target sequence
taactatattttacactgtt

SEQ ID NO: 66821 - DNA, 20 bp, Artificial sequence
  SiRNA target sequence
aactatattttacactgttt

SEQ ID NO: 66822 - DNA, 20 bp, Artificial sequence
  SiRNA target sequence
actatattttacactgtttt

SEQ ID NO: 66823 - DNA, 20 bp, Artificial sequence
  SiRNA target sequence
ctatattttacactgtttta

SEQ ID NO: 66824 - DNA, 20 bp, Artificial sequence
  SiRNA target sequence
tatattttacactgttttag

SEQ ID NO: 66825 - DNA, 20 bp, Artificial sequence
  SiRNA target sequence
atattttacactgttttaga

SEQ ID NO: 66826 - DNA, 20 bp, Artificial sequence
  SiRNA target sequence
tattttacactgttttagag

SEQ ID NO: 66827 - DNA, 20 bp, Artificial sequence
  SiRNA target sequence
attttacactgttttagaga

SEQ ID NO: 66828 - DNA, 20 bp, Artificial sequence
  SiRNA target sequence
ttttacactgttttagagat

SEQ ID NO: 66829 - DNA, 20 bp, Artificial sequence
  SiRNA target sequence
tttacactgttttagagata

SEQ ID NO: 66830 - DNA, 20 bp, Artificial sequence
  SiRNA target sequence
ttacactgttttagagataa

SEQ ID NO: 66831 - DNA, 20 bp, Artificial sequence
  SiRNA target sequence
tacactgttttagagataaa

SEQ ID NO: 66832 - DNA, 20 bp, Artificial sequence
  SiRNA target sequence
acactgttttagagataaaa

SEQ ID NO: 66833 - DNA, 20 bp, Artificial sequence
  SiRNA target sequence
cactgttttagagataaaaa

SEQ ID NO: 66834 - DNA, 20 bp, Artificial sequence
  SiRNA target sequence
actgttttagagataaaaat

SEQ ID NO: 66835 - DNA, 20 bp, Artificial sequence
  SiRNA target sequence
ctgttttagagataaaaata

SEQ ID NO: 66836 - DNA, 20 bp, Artificial sequence
  SiRNA target sequence
tgttttagagataaaaataa

SEQ ID NO: 66837 - DNA, 20 bp, Artificial sequence
  SiRNA target sequence
gttttagagataaaaataag

SEQ ID NO: 66838 - DNA, 20 bp, Artificial sequence
  SiRNA target sequence
ttttagagataaaaataagt

SEQ ID NO: 66839 - DNA, 20 bp, Artificial sequence
  SiRNA target sequence
tttagagataaaaataagta

SEQ ID NO: 66840 - DNA, 20 bp, Artificial sequence
  SiRNA target sequence
ttagagataaaaataagtac

SEQ ID NO: 66841 - DNA, 20 bp, Artificial sequence
  SiRNA target sequence
tagagataaaaataagtaca

SEQ ID NO: 66842 - DNA, 20 bp, Artificial sequence
  SiRNA target sequence
agagataaaaataagtacat

SEQ ID NO: 66843 - DNA, 20 bp, Artificial sequence
  SiRNA target sequence
gagataaaaataagtacatt

SEQ ID NO: 66844 - DNA, 20 bp, Artificial sequence
  SiRNA target sequence
agataaaaataagtacatta

SEQ ID NO: 66845 - DNA, 20 bp, Artificial sequence
  SiRNA target sequence
gataaaaataagtacattag

SEQ ID NO: 66846 - DNA, 20 bp, Artificial sequence
  SiRNA target sequence
ataaaaataagtacattagt

SEQ ID NO: 66847 - DNA, 20 bp, Artificial sequence
  SiRNA target sequence
taaaaataagtacattagta

SEQ ID NO: 66848 - DNA, 20 bp, Artificial sequence
  SiRNA target sequence
aaaaataagtacattagtaa

SEQ ID NO: 66849 - DNA, 20 bp, Artificial sequence
  SiRNA target sequence
aaaataagtacattagtaaa

SEQ ID NO: 66850 - DNA, 20 bp, Artificial sequence
  SiRNA target sequence
aaataagtacattagtaaag

SEQ ID NO: 66851 - DNA, 20 bp, Artificial sequence
  SiRNA target sequence
aataagtacattagtaaaga

SEQ ID NO: 66852 - DNA, 20 bp, Artificial sequence
  SiRNA target sequence
ataagtacattagtaaagaa

SEQ ID NO: 66853 - DNA, 20 bp, Artificial sequence
  SiRNA target sequence
taagtacattagtaaagaat

SEQ ID NO: 66854 - DNA, 20 bp, Artificial sequence
  SiRNA target sequence
aagtacattagtaaagaatc

SEQ ID NO: 66855 - DNA, 20 bp, Artificial sequence
  SiRNA target sequence
agtacattagtaaagaatct

SEQ ID NO: 66856 - DNA, 20 bp, Artificial sequence
  SiRNA target sequence
gtacattagtaaagaatctt

SEQ ID NO: 66857 - DNA, 20 bp, Artificial sequence
  SiRNA target sequence
tacattagtaaagaatctta

SEQ ID NO: 66858 - DNA, 20 bp, Artificial sequence
  SiRNA target sequence
acattagtaaagaatcttaa

SEQ ID NO: 66859 - DNA, 20 bp, Artificial sequence
  SiRNA target sequence
cattagtaaagaatcttaat

SEQ ID NO: 66860 - DNA, 20 bp, Artificial sequence
  SiRNA target sequence
attagtaaagaatcttaatc

SEQ ID NO: 66861 - DNA, 20 bp, Artificial sequence
  SiRNA target sequence
ttagtaaagaatcttaatca

SEQ ID NO: 66862 - DNA, 20 bp, Artificial sequence
  SiRNA target sequence
tagtaaagaatcttaatcaa

SEQ ID NO: 66863 - DNA, 20 bp, Artificial sequence
  SiRNA target sequence
agtaaagaatcttaatcaat

SEQ ID NO: 66864 - DNA, 20 bp, Artificial sequence
  SiRNA target sequence
gtaaagaatcttaatcaatc

SEQ ID NO: 66865 - DNA, 20 bp, Artificial sequence
  SiRNA target sequence
taaagaatcttaatcaatct

SEQ ID NO: 66866 - DNA, 20 bp, Artificial sequence
  SiRNA target sequence
aaagaatcttaatcaatcta

SEQ ID NO: 66867 - DNA, 20 bp, Artificial sequence
  SiRNA target sequence
aagaatcttaatcaatctat

SEQ ID NO: 66868 - DNA, 20 bp, Artificial sequence
  SiRNA target sequence
agaatcttaatcaatctatc

SEQ ID NO: 66869 - DNA, 20 bp, Artificial sequence
  SiRNA target sequence
gaatcttaatcaatctatcg

SEQ ID NO: 66870 - DNA, 20 bp, Artificial sequence
  SiRNA target sequence
aatcttaatcaatctatcgc

SEQ ID NO: 66871 - DNA, 20 bp, Artificial sequence
  SiRNA target sequence
atcttaatcaatctatcgca

SEQ ID NO: 66872 - DNA, 20 bp, Artificial sequence
  SiRNA target sequence
tcttaatcaatctatcgcaa

SEQ ID NO: 66873 - DNA, 20 bp, Artificial sequence
  SiRNA target sequence
cttaatcaatctatcgcaaa

SEQ ID NO: 66874 - DNA, 20 bp, Artificial sequence
  SiRNA target sequence
ttaatcaatctatcgcaaat

SEQ ID NO: 66875 - DNA, 20 bp, Artificial sequence
  SiRNA target sequence
taatcaatctatcgcaaatc

SEQ ID NO: 66876 - DNA, 20 bp, Artificial sequence
  SiRNA target sequence
aatcaatctatcgcaaatcg

SEQ ID NO: 66877 - DNA, 20 bp, Artificial sequence
  SiRNA target sequence
atcaatctatcgcaaatcga

SEQ ID NO: 66878 - DNA, 20 bp, Artificial sequence
  SiRNA target sequence
tcaatctatcgcaaatcgaa

SEQ ID NO: 66879 - DNA, 20 bp, Artificial sequence
  SiRNA target sequence
caatctatcgcaaatcgaaa

SEQ ID NO: 66880 - DNA, 20 bp, Artificial sequence
  SiRNA target sequence
aatctatcgcaaatcgaaaa

SEQ ID NO: 66881 - DNA, 20 bp, Artificial sequence
  SiRNA target sequence
atctatcgcaaatcgaaaag

SEQ ID NO: 66882 - DNA, 20 bp, Artificial sequence
  SiRNA target sequence
tctatcgcaaatcgaaaagg

SEQ ID NO: 66883 - DNA, 20 bp, Artificial sequence
  SiRNA target sequence
ctatcgcaaatcgaaaaggt

SEQ ID NO: 66884 - DNA, 20 bp, Artificial sequence
  SiRNA target sequence
tatcgcaaatcgaaaaggtg

SEQ ID NO: 66885 - DNA, 20 bp, Artificial sequence
  SiRNA target sequence
atcgcaaatcgaaaaggtga

SEQ ID NO: 66886 - DNA, 20 bp, Artificial sequence
  SiRNA target sequence
tcgcaaatcgaaaaggtgaa

SEQ ID NO: 66887 - DNA, 20 bp, Artificial sequence
  SiRNA target sequence
cgcaaatcgaaaaggtgaac

SEQ ID NO: 66888 - DNA, 20 bp, Artificial sequence
  SiRNA target sequence
gcaaatcgaaaaggtgaaca

SEQ ID NO: 66889 - DNA, 20 bp, Artificial sequence
  SiRNA target sequence
caaatcgaaaaggtgaacac

SEQ ID NO: 66890 - DNA, 20 bp, Artificial sequence
  SiRNA target sequence
aaatcgaaaaggtgaacaca

SEQ ID NO: 66891 - DNA, 20 bp, Artificial sequence
  SiRNA target sequence
aatcgaaaaggtgaacacac

SEQ ID NO: 66892 - DNA, 20 bp, Artificial sequence
  SiRNA target sequence
atcgaaaaggtgaacacaca

SEQ ID NO: 66893 - DNA, 20 bp, Artificial sequence
  SiRNA target sequence
tcgaaaaggtgaacacacag

SEQ ID NO: 66894 - DNA, 20 bp, Artificial sequence
  SiRNA target sequence
cgaaaaggtgaacacacagc

SEQ ID NO: 66895 - DNA, 20 bp, Artificial sequence
  SiRNA target sequence
gaaaaggtgaacacacagca

SEQ ID NO: 66896 - DNA, 20 bp, Artificial sequence
  SiRNA target sequence
aaaaggtgaacacacagcac

SEQ ID NO: 66897 - DNA, 20 bp, Artificial sequence
  SiRNA target sequence
aaaggtgaacacacagcact

SEQ ID NO: 66898 - DNA, 20 bp, Artificial sequence
  SiRNA target sequence
aaggtgaacacacagcactt

SEQ ID NO: 66899 - DNA, 20 bp, Artificial sequence
  SiRNA target sequence
aggtgaacacacagcacttg

SEQ ID NO: 66900 - DNA, 20 bp, Artificial sequence
  SiRNA target sequence
ggtgaacacacagcacttga

SEQ ID NO: 66901 - DNA, 20 bp, Artificial sequence
  SiRNA target sequence
gtgaacacacagcacttgaa

SEQ ID NO: 66902 - DNA, 20 bp, Artificial sequence
  SiRNA target sequence
tgaacacacagcacttgaaa

SEQ ID NO: 66903 - DNA, 20 bp, Artificial sequence
  SiRNA target sequence
gaacacacagcacttgaaag

SEQ ID NO: 66904 - DNA, 20 bp, Artificial sequence
  SiRNA target sequence
aacacacagcacttgaaaga

SEQ ID NO: 66905 - DNA, 20 bp, Artificial sequence
  SiRNA target sequence
acacacagcacttgaaagat

SEQ ID NO: 66906 - DNA, 20 bp, Artificial sequence
  SiRNA target sequence
cacacagcacttgaaagatt

SEQ ID NO: 66907 - DNA, 20 bp, Artificial sequence
  SiRNA target sequence
acacagcacttgaaagattt

SEQ ID NO: 66908 - DNA, 20 bp, Artificial sequence
  SiRNA target sequence
cacagcacttgaaagatttg

SEQ ID NO: 66909 - DNA, 20 bp, Artificial sequence
  SiRNA target sequence
acagcacttgaaagatttgt

SEQ ID NO: 66910 - DNA, 20 bp, Artificial sequence
  SiRNA target sequence
cagcacttgaaagatttgtg

SEQ ID NO: 66911 - DNA, 20 bp, Artificial sequence
  SiRNA target sequence
agcacttgaaagatttgtgt

SEQ ID NO: 66912 - DNA, 20 bp, Artificial sequence
  SiRNA target sequence
gcacttgaaagatttgtgtt

SEQ ID NO: 66913 - DNA, 20 bp, Artificial sequence
  SiRNA target sequence
cacttgaaagatttgtgtta

SEQ ID NO: 66914 - DNA, 20 bp, Artificial sequence
  SiRNA target sequence
acttgaaagatttgtgttac

SEQ ID NO: 66915 - DNA, 20 bp, Artificial sequence
  SiRNA target sequence
cttgaaagatttgtgttaca

SEQ ID NO: 66916 - DNA, 20 bp, Artificial sequence
  SiRNA target sequence
ttgaaagatttgtgttacag

SEQ ID NO: 66917 - DNA, 20 bp, Artificial sequence
  SiRNA target sequence
tgaaagatttgtgttacagt

SEQ ID NO: 66918 - DNA, 20 bp, Artificial sequence
  SiRNA target sequence
gaaagatttgtgttacagtc

SEQ ID NO: 66919 - DNA, 20 bp, Artificial sequence
  SiRNA target sequence
aaagatttgtgttacagtca

SEQ ID NO: 66920 - DNA, 20 bp, Artificial sequence
  SiRNA target sequence
aagatttgtgttacagtcac

SEQ ID NO: 66921 - DNA, 20 bp, Artificial sequence
  SiRNA target sequence
agatttgtgttacagtcact

SEQ ID NO: 66922 - DNA, 20 bp, Artificial sequence
  SiRNA target sequence
gatttgtgttacagtcactc

SEQ ID NO: 66923 - DNA, 20 bp, Artificial sequence
  SiRNA target sequence
atttgtgttacagtcactct

SEQ ID NO: 66924 - DNA, 20 bp, Artificial sequence
  SiRNA target sequence
tttgtgttacagtcactctt

SEQ ID NO: 66925 - DNA, 20 bp, Artificial sequence
  SiRNA target sequence
ttgtgttacagtcactctta

SEQ ID NO: 66926 - DNA, 20 bp, Artificial sequence
  SiRNA target sequence
tgtgttacagtcactcttag

SEQ ID NO: 66927 - DNA, 20 bp, Artificial sequence
  SiRNA target sequence
gtgttacagtcactcttagt

SEQ ID NO: 66928 - DNA, 20 bp, Artificial sequence
  SiRNA target sequence
tgttacagtcactcttagtg

SEQ ID NO: 66929 - DNA, 20 bp, Artificial sequence
  SiRNA target sequence
gttacagtcactcttagtgg

SEQ ID NO: 66930 - DNA, 20 bp, Artificial sequence
  SiRNA target sequence
ttacagtcactcttagtggc

SEQ ID NO: 66931 - DNA, 20 bp, Artificial sequence
  SiRNA target sequence
tacagtcactcttagtggct

SEQ ID NO: 66932 - DNA, 20 bp, Artificial sequence
  SiRNA target sequence
acagtcactcttagtggctg

SEQ ID NO: 66933 - DNA, 20 bp, Artificial sequence
  SiRNA target sequence
cagtcactcttagtggctgt

SEQ ID NO: 66934 - DNA, 20 bp, Artificial sequence
  SiRNA target sequence
agtcactcttagtggctgta

SEQ ID NO: 66935 - DNA, 20 bp, Artificial sequence
  SiRNA target sequence
gtcactcttagtggctgtat

SEQ ID NO: 66936 - DNA, 20 bp, Artificial sequence
  SiRNA target sequence
tcactcttagtggctgtatt

SEQ ID NO: 66937 - DNA, 20 bp, Artificial sequence
  SiRNA target sequence
cactcttagtggctgtattg

SEQ ID NO: 66938 - DNA, 20 bp, Artificial sequence
  SiRNA target sequence
actcttagtggctgtattga

SEQ ID NO: 66939 - DNA, 20 bp, Artificial sequence
  SiRNA target sequence
ctcttagtggctgtattgac

SEQ ID NO: 66940 - DNA, 20 bp, Artificial sequence
  SiRNA target sequence
tcttagtggctgtattgacc

SEQ ID NO: 66941 - DNA, 20 bp, Artificial sequence
  SiRNA target sequence
cttagtggctgtattgaccg

SEQ ID NO: 66942 - DNA, 20 bp, Artificial sequence
  SiRNA target sequence
ttagtggctgtattgaccga

SEQ ID NO: 66943 - DNA, 20 bp, Artificial sequence
  SiRNA target sequence
tagtggctgtattgaccgaa

SEQ ID NO: 66944 - DNA, 20 bp, Artificial sequence
  SiRNA target sequence
agtggctgtattgaccgaac

SEQ ID NO: 66945 - DNA, 20 bp, Artificial sequence
  SiRNA target sequence
gtggctgtattgaccgaact

SEQ ID NO: 66946 - DNA, 20 bp, Artificial sequence
  SiRNA target sequence
tggctgtattgaccgaactt

SEQ ID NO: 66947 - DNA, 20 bp, Artificial sequence
  SiRNA target sequence
ggctgtattgaccgaactta

SEQ ID NO: 66948 - DNA, 20 bp, Artificial sequence
  SiRNA target sequence
gctgtattgaccgaacttaa

SEQ ID NO: 66949 - DNA, 20 bp, Artificial sequence
  SiRNA target sequence
ctgtattgaccgaacttaat

SEQ ID NO: 66950 - DNA, 20 bp, Artificial sequence
  SiRNA target sequence
tgtattgaccgaacttaatg

SEQ ID NO: 66951 - DNA, 20 bp, Artificial sequence
  SiRNA target sequence
gtattgaccgaacttaatgg

SEQ ID NO: 66952 - DNA, 20 bp, Artificial sequence
  SiRNA target sequence
tattgaccgaacttaatgga

SEQ ID NO: 66953 - DNA, 20 bp, Artificial sequence
  SiRNA target sequence
attgaccgaacttaatggat

SEQ ID NO: 66954 - DNA, 20 bp, Artificial sequence
  SiRNA target sequence
ttgaccgaacttaatggatt

SEQ ID NO: 66955 - DNA, 20 bp, Artificial sequence
  SiRNA target sequence
tgaccgaacttaatggattt

SEQ ID NO: 66956 - DNA, 20 bp, Artificial sequence
  SiRNA target sequence
gaccgaacttaatggattta

SEQ ID NO: 66957 - DNA, 20 bp, Artificial sequence
  SiRNA target sequence
accgaacttaatggatttat

SEQ ID NO: 66958 - DNA, 20 bp, Artificial sequence
  SiRNA target sequence
ccgaacttaatggatttatt

SEQ ID NO: 66959 - DNA, 20 bp, Artificial sequence
  SiRNA target sequence
cgaacttaatggatttattt

SEQ ID NO: 66960 - DNA, 20 bp, Artificial sequence
  SiRNA target sequence
gaacttaatggatttatttt

SEQ ID NO: 66961 - DNA, 20 bp, Artificial sequence
  SiRNA target sequence
aacttaatggatttattttt

SEQ ID NO: 66962 - DNA, 20 bp, Artificial sequence
  SiRNA target sequence
acttaatggatttattttta

SEQ ID NO: 66963 - DNA, 20 bp, Artificial sequence
  SiRNA target sequence
cttaatggatttatttttac

SEQ ID NO: 66964 - DNA, 20 bp, Artificial sequence
  SiRNA target sequence
ttaatggatttatttttaca

SEQ ID NO: 66965 - DNA, 20 bp, Artificial sequence
  SiRNA target sequence
taatggatttatttttacag

SEQ ID NO: 66966 - DNA, 20 bp, Artificial sequence
  SiRNA target sequence
aatggatttatttttacagg

SEQ ID NO: 66967 - DNA, 20 bp, Artificial sequence
  SiRNA target sequence
atggatttatttttacaggt

SEQ ID NO: 66968 - DNA, 20 bp, Artificial sequence
  SiRNA target sequence
tggatttatttttacaggtg

SEQ ID NO: 66969 - DNA, 20 bp, Artificial sequence
  SiRNA target sequence
ggatttatttttacaggtgt

SEQ ID NO: 66970 - DNA, 20 bp, Artificial sequence
  SiRNA target sequence
gatttatttttacaggtgta

SEQ ID NO: 66971 - DNA, 20 bp, Artificial sequence
  SiRNA target sequence
atttatttttacaggtgtag

SEQ ID NO: 66972 - DNA, 20 bp, Artificial sequence
  SiRNA target sequence
tttatttttacaggtgtagt

SEQ ID NO: 66973 - DNA, 20 bp, Artificial sequence
  SiRNA target sequence
ttatttttacaggtgtagtg

SEQ ID NO: 66974 - DNA, 20 bp, Artificial sequence
  SiRNA target sequence
tatttttacaggtgtagtgc

SEQ ID NO: 66975 - DNA, 20 bp, Artificial sequence
  SiRNA target sequence
atttttacaggtgtagtgca

SEQ ID NO: 66976 - DNA, 20 bp, Artificial sequence
  SiRNA target sequence
tttttacaggtgtagtgcaa

SEQ ID NO: 66977 - DNA, 20 bp, Artificial sequence
  SiRNA target sequence
ttttacaggtgtagtgcaat

SEQ ID NO: 66978 - DNA, 20 bp, Artificial sequence
  SiRNA target sequence
tttacaggtgtagtgcaata

SEQ ID NO: 66979 - DNA, 20 bp, Artificial sequence
  SiRNA target sequence
ttacaggtgtagtgcaatat

SEQ ID NO: 66980 - DNA, 20 bp, Artificial sequence
  SiRNA target sequence
tacaggtgtagtgcaatata

SEQ ID NO: 66981 - DNA, 20 bp, Artificial sequence
  SiRNA target sequence
acaggtgtagtgcaatatat

SEQ ID NO: 66982 - DNA, 20 bp, Artificial sequence
  SiRNA target sequence
caggtgtagtgcaatatatt

SEQ ID NO: 66983 - DNA, 20 bp, Artificial sequence
  SiRNA target sequence
aggtgtagtgcaatatattt

SEQ ID NO: 66984 - DNA, 20 bp, Artificial sequence
  SiRNA target sequence
ggtgtagtgcaatatattta

SEQ ID NO: 66985 - DNA, 20 bp, Artificial sequence
  SiRNA target sequence
gtgtagtgcaatatatttat

SEQ ID NO: 66986 - DNA, 20 bp, Artificial sequence
  SiRNA target sequence
tgtagtgcaatatatttata

SEQ ID NO: 66987 - DNA, 20 bp, Artificial sequence
  SiRNA target sequence
gtagtgcaatatatttatag

SEQ ID NO: 66988 - DNA, 20 bp, Artificial sequence
  SiRNA target sequence
tagtgcaatatatttataga

SEQ ID NO: 66989 - DNA, 20 bp, Artificial sequence
  SiRNA target sequence
agtgcaatatatttatagaa

SEQ ID NO: 66990 - DNA, 20 bp, Artificial sequence
  SiRNA target sequence
gtgcaatatatttatagaaa

SEQ ID NO: 66991 - DNA, 20 bp, Artificial sequence
  SiRNA target sequence
tgcaatatatttatagaaat

SEQ ID NO: 66992 - DNA, 20 bp, Artificial sequence
  SiRNA target sequence
gcaatatatttatagaaata

SEQ ID NO: 66993 - DNA, 20 bp, Artificial sequence
  SiRNA target sequence
caatatatttatagaaatac

SEQ ID NO: 66994 - DNA, 20 bp, Artificial sequence
  SiRNA target sequence
aatatatttatagaaatacg

SEQ ID NO: 66995 - DNA, 20 bp, Artificial sequence
  SiRNA target sequence
atatatttatagaaatacgg

SEQ ID NO: 66996 - DNA, 20 bp, Artificial sequence
  SiRNA target sequence
tatatttatagaaatacggc

SEQ ID NO: 66997 - DNA, 20 bp, Artificial sequence
  SiRNA target sequence
atatttatagaaatacggca

SEQ ID NO: 66998 - DNA, 20 bp, Artificial sequence
  SiRNA target sequence
tatttatagaaatacggcaa

SEQ ID NO: 66999 - DNA, 20 bp, Artificial sequence
  SiRNA target sequence
atttatagaaatacggcaaa

SEQ ID NO: 67000 - DNA, 20 bp, Artificial sequence
  SiRNA target sequence
tttatagaaatacggcaaaa

SEQ ID NO: 67001 - DNA, 20 bp, Artificial sequence
  SiRNA target sequence
ttatagaaatacggcaaaat

SEQ ID NO: 67002 - DNA, 20 bp, Artificial sequence
  SiRNA target sequence
tatagaaatacggcaaaatc

SEQ ID NO: 67003 - DNA, 20 bp, Artificial sequence
  SiRNA target sequence
atagaaatacggcaaaatct

SEQ ID NO: 67004 - DNA, 20 bp, Artificial sequence
  SiRNA target sequence
tagaaatacggcaaaatcta

SEQ ID NO: 67005 - DNA, 20 bp, Artificial sequence
  SiRNA target sequence
agaaatacggcaaaatctac

SEQ ID NO: 67006 - DNA, 20 bp, Artificial sequence
  SiRNA target sequence
gaaatacggcaaaatctaca

SEQ ID NO: 67007 - DNA, 20 bp, Artificial sequence
  SiRNA target sequence
aaatacggcaaaatctacat

SEQ ID NO: 67008 - DNA, 20 bp, Artificial sequence
  SiRNA target sequence
aatacggcaaaatctacatt

SEQ ID NO: 67009 - DNA, 20 bp, Artificial sequence
  SiRNA target sequence
atacggcaaaatctacattc

SEQ ID NO: 67010 - DNA, 20 bp, Artificial sequence
  SiRNA target sequence
tacggcaaaatctacattca

SEQ ID NO: 67011 - DNA, 20 bp, Artificial sequence
  SiRNA target sequence
acggcaaaatctacattcaa

SEQ ID NO: 67012 - DNA, 20 bp, Artificial sequence
  SiRNA target sequence
cggcaaaatctacattcaaa

SEQ ID NO: 67013 - DNA, 20 bp, Artificial sequence
  SiRNA target sequence
ggcaaaatctacattcaaag

SEQ ID NO: 67014 - DNA, 20 bp, Artificial sequence
  SiRNA target sequence
gcaaaatctacattcaaagg

SEQ ID NO: 67015 - DNA, 20 bp, Artificial sequence
  SiRNA target sequence
caaaatctacattcaaaggc

SEQ ID NO: 67016 - DNA, 20 bp, Artificial sequence
  SiRNA target sequence
aaaatctacattcaaaggct

SEQ ID NO: 67017 - DNA, 20 bp, Artificial sequence
  SiRNA target sequence
aaatctacattcaaaggctt

SEQ ID NO: 67018 - DNA, 20 bp, Artificial sequence
  SiRNA target sequence
aatctacattcaaaggcttc

SEQ ID NO: 67019 - DNA, 20 bp, Artificial sequence
  SiRNA target sequence
atctacattcaaaggcttca

SEQ ID NO: 67020 - DNA, 20 bp, Artificial sequence
  SiRNA target sequence
tctacattcaaaggcttcat

SEQ ID NO: 67021 - DNA, 20 bp, Artificial sequence
  SiRNA target sequence
ctacattcaaaggcttcatt

SEQ ID NO: 67022 - DNA, 20 bp, Artificial sequence
  SiRNA target sequence
tacattcaaaggcttcattt

SEQ ID NO: 67023 - DNA, 20 bp, Artificial sequence
  SiRNA target sequence
acattcaaaggcttcatttc

SEQ ID NO: 67024 - DNA, 20 bp, Artificial sequence
  SiRNA target sequence
cattcaaaggcttcatttct

SEQ ID NO: 67025 - DNA, 20 bp, Artificial sequence
  SiRNA target sequence
attcaaaggcttcatttctc

SEQ ID NO: 67026 - DNA, 20 bp, Artificial sequence
  SiRNA target sequence
ttcaaaggcttcatttctct

SEQ ID NO: 67027 - DNA, 20 bp, Artificial sequence
  SiRNA target sequence
tcaaaggcttcatttctctt

SEQ ID NO: 67028 - DNA, 20 bp, Artificial sequence
  SiRNA target sequence
caaaggcttcatttctcttt

SEQ ID NO: 67029 - DNA, 20 bp, Artificial sequence
  SiRNA target sequence
aaaggcttcatttctctttc

SEQ ID NO: 67030 - DNA, 20 bp, Artificial sequence
  SiRNA target sequence
aaggcttcatttctctttca

SEQ ID NO: 67031 - DNA, 20 bp, Artificial sequence
  SiRNA target sequence
aggcttcatttctctttcac

SEQ ID NO: 67032 - DNA, 20 bp, Artificial sequence
  SiRNA target sequence
ggcttcatttctctttcacc

SEQ ID NO: 67033 - DNA, 20 bp, Artificial sequence
  SiRNA target sequence
gcttcatttctctttcacct

SEQ ID NO: 67034 - DNA, 20 bp, Artificial sequence
  SiRNA target sequence
cttcatttctctttcaccta

SEQ ID NO: 67035 - DNA, 20 bp, Artificial sequence
  SiRNA target sequence
ttcatttctctttcacctaa

SEQ ID NO: 67036 - DNA, 20 bp, Artificial sequence
  SiRNA target sequence
tcatttctctttcacctaaa

SEQ ID NO: 67037 - DNA, 20 bp, Artificial sequence
  SiRNA target sequence
catttctctttcacctaaaa

SEQ ID NO: 67038 - DNA, 20 bp, Artificial sequence
  SiRNA target sequence
atttctctttcacctaaaaa

SEQ ID NO: 67039 - DNA, 20 bp, Artificial sequence
  SiRNA target sequence
tttctctttcacctaaaaat

SEQ ID NO: 67040 - DNA, 20 bp, Artificial sequence
  SiRNA target sequence
ttctctttcacctaaaaatt

SEQ ID NO: 67041 - DNA, 20 bp, Artificial sequence
  SiRNA target sequence
tctctttcacctaaaaattt

SEQ ID NO: 67042 - DNA, 20 bp, Artificial sequence
  SiRNA target sequence
ctctttcacctaaaaatttt

SEQ ID NO: 67043 - DNA, 20 bp, Artificial sequence
  SiRNA target sequence
tctttcacctaaaaatttta

SEQ ID NO: 67044 - DNA, 20 bp, Artificial sequence
  SiRNA target sequence
ctttcacctaaaaattttag

SEQ ID NO: 67045 - DNA, 20 bp, Artificial sequence
  SiRNA target sequence
tttcacctaaaaattttagt

SEQ ID NO: 67046 - DNA, 20 bp, Artificial sequence
  SiRNA target sequence
ttcacctaaaaattttagta

SEQ ID NO: 67047 - DNA, 20 bp, Artificial sequence
  SiRNA target sequence
tcacctaaaaattttagtac

SEQ ID NO: 67048 - DNA, 20 bp, Artificial sequence
  SiRNA target sequence
cacctaaaaattttagtacc

SEQ ID NO: 67049 - DNA, 20 bp, Artificial sequence
  SiRNA target sequence
acctaaaaattttagtacca

SEQ ID NO: 67050 - DNA, 20 bp, Artificial sequence
  SiRNA target sequence
cctaaaaattttagtaccat

SEQ ID NO: 67051 - DNA, 20 bp, Artificial sequence
  SiRNA target sequence
ctaaaaattttagtaccata

SEQ ID NO: 67052 - DNA, 20 bp, Artificial sequence
  SiRNA target sequence
taaaaattttagtaccatag

SEQ ID NO: 67053 - DNA, 20 bp, Artificial sequence
  SiRNA target sequence
aaaaattttagtaccatagg

SEQ ID NO: 67054 - DNA, 20 bp, Artificial sequence
  SiRNA target sequence
aaaattttagtaccataggt

SEQ ID NO: 67055 - DNA, 20 bp, Artificial sequence
  SiRNA target sequence
aaattttagtaccataggtg

SEQ ID NO: 67056 - DNA, 20 bp, Artificial sequence
  SiRNA target sequence
aattttagtaccataggtgg

SEQ ID NO: 67057 - DNA, 20 bp, Artificial sequence
  SiRNA target sequence
attttagtaccataggtggc

SEQ ID NO: 67058 - DNA, 20 bp, Artificial sequence
  SiRNA target sequence
ttttagtaccataggtggcg

SEQ ID NO: 67059 - DNA, 20 bp, Artificial sequence
  SiRNA target sequence
tttagtaccataggtggcgg

SEQ ID NO: 67060 - DNA, 20 bp, Artificial sequence
  SiRNA target sequence
ttagtaccataggtggcgga

SEQ ID NO: 67061 - DNA, 20 bp, Artificial sequence
  SiRNA target sequence
tagtaccataggtggcggag

SEQ ID NO: 67062 - DNA, 20 bp, Artificial sequence
  SiRNA target sequence
agtaccataggtggcggaga

SEQ ID NO: 67063 - DNA, 20 bp, Artificial sequence
  SiRNA target sequence
gtaccataggtggcggagaa

SEQ ID NO: 67064 - DNA, 20 bp, Artificial sequence
  SiRNA target sequence
taccataggtggcggagaaa

SEQ ID NO: 67065 - DNA, 20 bp, Artificial sequence
  SiRNA target sequence
accataggtggcggagaaat

SEQ ID NO: 67066 - DNA, 20 bp, Artificial sequence
  SiRNA target sequence
ccataggtggcggagaaatt

SEQ ID NO: 67067 - DNA, 20 bp, Artificial sequence
  SiRNA target sequence
cataggtggcggagaaattc

SEQ ID NO: 67068 - DNA, 20 bp, Artificial sequence
  SiRNA target sequence
ataggtggcggagaaattca

SEQ ID NO: 67069 - DNA, 20 bp, Artificial sequence
  SiRNA target sequence
taggtggcggagaaattcaa

SEQ ID NO: 67070 - DNA, 20 bp, Artificial sequence
  SiRNA target sequence
aggtggcggagaaattcaaa

SEQ ID NO: 67071 - DNA, 20 bp, Artificial sequence
  SiRNA target sequence
ggtggcggagaaattcaaac

SEQ ID NO: 67072 - DNA, 20 bp, Artificial sequence
  SiRNA target sequence
gtggcggagaaattcaaaca

SEQ ID NO: 67073 - DNA, 20 bp, Artificial sequence
  SiRNA target sequence
tggcggagaaattcaaacaa

SEQ ID NO: 67074 - DNA, 20 bp, Artificial sequence
  SiRNA target sequence
ggcggagaaattcaaacaat

SEQ ID NO: 67075 - DNA, 20 bp, Artificial sequence
  SiRNA target sequence
gcggagaaattcaaacaata

SEQ ID NO: 67076 - DNA, 20 bp, Artificial sequence
  SiRNA target sequence
cggagaaattcaaacaataa

SEQ ID NO: 67077 - DNA, 20 bp, Artificial sequence
  SiRNA target sequence
ggagaaattcaaacaataat

SEQ ID NO: 67078 - DNA, 20 bp, Artificial sequence
  SiRNA target sequence
gagaaattcaaacaataata

SEQ ID NO: 67079 - DNA, 20 bp, Artificial sequence
  SiRNA target sequence
agaaattcaaacaataatag

SEQ ID NO: 67080 - DNA, 20 bp, Artificial sequence
  SiRNA target sequence
gaaattcaaacaataataga

SEQ ID NO: 67081 - DNA, 20 bp, Artificial sequence
  SiRNA target sequence
aaattcaaacaataatagat

SEQ ID NO: 67082 - DNA, 20 bp, Artificial sequence
  SiRNA target sequence
aattcaaacaataatagata

SEQ ID NO: 67083 - DNA, 20 bp, Artificial sequence
  SiRNA target sequence
attcaaacaataatagatag

SEQ ID NO: 67084 - DNA, 20 bp, Artificial sequence
  SiRNA target sequence
ttcaaacaataatagataga

SEQ ID NO: 67085 - DNA, 20 bp, Artificial sequence
  SiRNA target sequence
tcaaacaataatagatagaa

SEQ ID NO: 67086 - DNA, 20 bp, Artificial sequence
  SiRNA target sequence
caaacaataatagatagaaa

SEQ ID NO: 67087 - DNA, 20 bp, Artificial sequence
  SiRNA target sequence
aaacaataatagatagaaaa

SEQ ID NO: 67088 - DNA, 20 bp, Artificial sequence
  SiRNA target sequence
aacaataatagatagaaaat

SEQ ID NO: 67089 - DNA, 20 bp, Artificial sequence
  SiRNA target sequence
acaataatagatagaaaatc

SEQ ID NO: 67090 - DNA, 20 bp, Artificial sequence
  SiRNA target sequence
caataatagatagaaaatca

SEQ ID NO: 67091 - DNA, 20 bp, Artificial sequence
  SiRNA target sequence
aataatagatagaaaatcaa

SEQ ID NO: 67092 - DNA, 20 bp, Artificial sequence
  SiRNA target sequence
ataatagatagaaaatcaaa

SEQ ID NO: 67093 - DNA, 20 bp, Artificial sequence
  SiRNA target sequence
taatagatagaaaatcaaaa

SEQ ID NO: 67094 - DNA, 20 bp, Artificial sequence
  SiRNA target sequence
aatagatagaaaatcaaaat

SEQ ID NO: 67095 - DNA, 20 bp, Artificial sequence
  SiRNA target sequence
atagatagaaaatcaaaatc

SEQ ID NO: 67096 - DNA, 20 bp, Artificial sequence
  SiRNA target sequence
tagatagaaaatcaaaatct

SEQ ID NO: 67097 - DNA, 20 bp, Artificial sequence
  SiRNA target sequence
agatagaaaatcaaaatctg

SEQ ID NO: 67098 - DNA, 20 bp, Artificial sequence
  SiRNA target sequence
gatagaaaatcaaaatctgc

SEQ ID NO: 67099 - DNA, 20 bp, Artificial sequence
  SiRNA target sequence
atagaaaatcaaaatctgca

SEQ ID NO: 67100 - DNA, 20 bp, Artificial sequence
  SiRNA target sequence
tagaaaatcaaaatctgcaa

SEQ ID NO: 67101 - DNA, 20 bp, Artificial sequence
  SiRNA target sequence
agaaaatcaaaatctgcaag

SEQ ID NO: 67102 - DNA, 20 bp, Artificial sequence
  SiRNA target sequence
gaaaatcaaaatctgcaagt

SEQ ID NO: 67103 - DNA, 20 bp, Artificial sequence
  SiRNA target sequence
aaaatcaaaatctgcaagtg

SEQ ID NO: 67104 - DNA, 20 bp, Artificial sequence
  SiRNA target sequence
aaatcaaaatctgcaagtga

SEQ ID NO: 67105 - DNA, 20 bp, Artificial sequence
  SiRNA target sequence
aatcaaaatctgcaagtgaa

SEQ ID NO: 67106 - DNA, 20 bp, Artificial sequence
  SiRNA target sequence
atcaaaatctgcaagtgaac

SEQ ID NO: 67107 - DNA, 20 bp, Artificial sequence
  SiRNA target sequence
tcaaaatctgcaagtgaact

SEQ ID NO: 67108 - DNA, 20 bp, Artificial sequence
  SiRNA target sequence
caaaatctgcaagtgaactt

SEQ ID NO: 67109 - DNA, 20 bp, Artificial sequence
  SiRNA target sequence
aaaatctgcaagtgaactta

SEQ ID NO: 67110 - DNA, 20 bp, Artificial sequence
  SiRNA target sequence
aaatctgcaagtgaacttat

SEQ ID NO: 67111 - DNA, 20 bp, Artificial sequence
  SiRNA target sequence
aatctgcaagtgaacttatt

SEQ ID NO: 67112 - DNA, 20 bp, Artificial sequence
  SiRNA target sequence
atctgcaagtgaacttattg

SEQ ID NO: 67113 - DNA, 20 bp, Artificial sequence
  SiRNA target sequence
tctgcaagtgaacttattga

SEQ ID NO: 67114 - DNA, 20 bp, Artificial sequence
  SiRNA target sequence
ctgcaagtgaacttattgaa

SEQ ID NO: 67115 - DNA, 20 bp, Artificial sequence
  SiRNA target sequence
tgcaagtgaacttattgaag

SEQ ID NO: 67116 - DNA, 20 bp, Artificial sequence
  SiRNA target sequence
gcaagtgaacttattgaagt

SEQ ID NO: 67117 - DNA, 20 bp, Artificial sequence
  SiRNA target sequence
caagtgaacttattgaagtg

SEQ ID NO: 67118 - DNA, 20 bp, Artificial sequence
  SiRNA target sequence
aagtgaacttattgaagtgt

SEQ ID NO: 67119 - DNA, 20 bp, Artificial sequence
  SiRNA target sequence
agtgaacttattgaagtgtt

SEQ ID NO: 67120 - DNA, 20 bp, Artificial sequence
  SiRNA target sequence
gtgaacttattgaagtgttt

SEQ ID NO: 67121 - DNA, 20 bp, Artificial sequence
  SiRNA target sequence
tgaacttattgaagtgtttc

SEQ ID NO: 67122 - DNA, 20 bp, Artificial sequence
  SiRNA target sequence
gaacttattgaagtgtttct

SEQ ID NO: 67123 - DNA, 20 bp, Artificial sequence
  SiRNA target sequence
aacttattgaagtgtttctt

SEQ ID NO: 67124 - DNA, 20 bp, Artificial sequence
  SiRNA target sequence
acttattgaagtgtttctta

SEQ ID NO: 67125 - DNA, 20 bp, Artificial sequence
  SiRNA target sequence
cttattgaagtgtttcttac

SEQ ID NO: 67126 - DNA, 20 bp, Artificial sequence
  SiRNA target sequence
ttattgaagtgtttcttaca

SEQ ID NO: 67127 - DNA, 20 bp, Artificial sequence
  SiRNA target sequence
tattgaagtgtttcttacaa

SEQ ID NO: 67128 - DNA, 20 bp, Artificial sequence
  SiRNA target sequence
attgaagtgtttcttacaag

SEQ ID NO: 67129 - DNA, 20 bp, Artificial sequence
  SiRNA target sequence
ttgaagtgtttcttacaagc

SEQ ID NO: 67130 - DNA, 20 bp, Artificial sequence
  SiRNA target sequence
tgaagtgtttcttacaagct

SEQ ID NO: 67131 - DNA, 20 bp, Artificial sequence
  SiRNA target sequence
gaagtgtttcttacaagctt

SEQ ID NO: 67132 - DNA, 20 bp, Artificial sequence
  SiRNA target sequence
aagtgtttcttacaagcttg

SEQ ID NO: 67133 - DNA, 20 bp, Artificial sequence
  SiRNA target sequence
agtgtttcttacaagcttgc

SEQ ID NO: 67134 - DNA, 20 bp, Artificial sequence
  SiRNA target sequence
gtgtttcttacaagcttgct

SEQ ID NO: 67135 - DNA, 20 bp, Artificial sequence
  SiRNA target sequence
tgtttcttacaagcttgctt

SEQ ID NO: 67136 - DNA, 20 bp, Artificial sequence
  SiRNA target sequence
gtttcttacaagcttgcttc

SEQ ID NO: 67137 - DNA, 20 bp, Artificial sequence
  SiRNA target sequence
tttcttacaagcttgcttcc

SEQ ID NO: 67138 - DNA, 20 bp, Artificial sequence
  SiRNA target sequence
ttcttacaagcttgcttcca

SEQ ID NO: 67139 - DNA, 20 bp, Artificial sequence
  SiRNA target sequence
tcttacaagcttgcttccaa

SEQ ID NO: 67140 - DNA, 20 bp, Artificial sequence
  SiRNA target sequence
cttacaagcttgcttccaat

SEQ ID NO: 67141 - DNA, 20 bp, Artificial sequence
  SiRNA target sequence
ttacaagcttgcttccaata

SEQ ID NO: 67142 - DNA, 20 bp, Artificial sequence
  SiRNA target sequence
tacaagcttgcttccaatat

SEQ ID NO: 67143 - DNA, 20 bp, Artificial sequence
  SiRNA target sequence
acaagcttgcttccaatatg

SEQ ID NO: 67144 - DNA, 20 bp, Artificial sequence
  SiRNA target sequence
caagcttgcttccaatatgc

SEQ ID NO: 67145 - DNA, 20 bp, Artificial sequence
  SiRNA target sequence
aagcttgcttccaatatgcc

SEQ ID NO: 67146 - DNA, 20 bp, Artificial sequence
  SiRNA target sequence
agcttgcttccaatatgcct

SEQ ID NO: 67147 - DNA, 20 bp, Artificial sequence
  SiRNA target sequence
gcttgcttccaatatgcctt

SEQ ID NO: 67148 - DNA, 20 bp, Artificial sequence
  SiRNA target sequence
cttgcttccaatatgcctta

SEQ ID NO: 67149 - DNA, 20 bp, Artificial sequence
  SiRNA target sequence
ttgcttccaatatgccttaa

SEQ ID NO: 67150 - DNA, 20 bp, Artificial sequence
  SiRNA target sequence
tgcttccaatatgccttaaa

SEQ ID NO: 67151 - DNA, 20 bp, Artificial sequence
  SiRNA target sequence
gcttccaatatgccttaaac

SEQ ID NO: 67152 - DNA, 20 bp, Artificial sequence
  SiRNA target sequence
cttccaatatgccttaaact

SEQ ID NO: 67153 - DNA, 20 bp, Artificial sequence
  SiRNA target sequence
ttccaatatgccttaaactt

SEQ ID NO: 67154 - DNA, 20 bp, Artificial sequence
  SiRNA target sequence
tccaatatgccttaaacttt

SEQ ID NO: 67155 - DNA, 20 bp, Artificial sequence
  SiRNA target sequence
ccaatatgccttaaactttt

SEQ ID NO: 67156 - DNA, 20 bp, Artificial sequence
  SiRNA target sequence
caatatgccttaaactttta

SEQ ID NO: 67157 - DNA, 20 bp, Artificial sequence
  SiRNA target sequence
aatatgccttaaacttttat

SEQ ID NO: 67158 - DNA, 20 bp, Artificial sequence
  SiRNA target sequence
atatgccttaaacttttatt

SEQ ID NO: 67159 - DNA, 20 bp, Artificial sequence
  SiRNA target sequence
tatgccttaaacttttattt

SEQ ID NO: 67160 - DNA, 20 bp, Artificial sequence
  SiRNA target sequence
atgccttaaacttttatttg

SEQ ID NO: 67161 - DNA, 20 bp, Artificial sequence
  SiRNA target sequence
tgccttaaacttttatttgc

SEQ ID NO: 67162 - DNA, 20 bp, Artificial sequence
  SiRNA target sequence
gccttaaacttttatttgcc

SEQ ID NO: 67163 - DNA, 20 bp, Artificial sequence
  SiRNA target sequence
ccttaaacttttatttgccc

SEQ ID NO: 67164 - DNA, 20 bp, Artificial sequence
  SiRNA target sequence
cttaaacttttatttgccct

SEQ ID NO: 67165 - DNA, 20 bp, Artificial sequence
  SiRNA target sequence
ttaaacttttatttgccctt

SEQ ID NO: 67166 - DNA, 20 bp, Artificial sequence
  SiRNA target sequence
taaacttttatttgccctta

SEQ ID NO: 67167 - DNA, 20 bp, Artificial sequence
  SiRNA target sequence
aaacttttatttgcccttat

SEQ ID NO: 67168 - DNA, 20 bp, Artificial sequence
  SiRNA target sequence
aacttttatttgcccttatt

SEQ ID NO: 67169 - DNA, 20 bp, Artificial sequence
  SiRNA target sequence
acttttatttgcccttattg

SEQ ID NO: 67170 - DNA, 20 bp, Artificial sequence
  SiRNA target sequence
cttttatttgcccttattgc

SEQ ID NO: 67171 - DNA, 20 bp, Artificial sequence
  SiRNA target sequence
ttttatttgcccttattgca

SEQ ID NO: 67172 - DNA, 20 bp, Artificial sequence
  SiRNA target sequence
tttatttgcccttattgcag

SEQ ID NO: 67173 - DNA, 20 bp, Artificial sequence
  SiRNA target sequence
ttatttgcccttattgcagt

SEQ ID NO: 67174 - DNA, 20 bp, Artificial sequence
  SiRNA target sequence
tatttgcccttattgcagtt

SEQ ID NO: 67175 - DNA, 20 bp, Artificial sequence
  SiRNA target sequence
atttgcccttattgcagtta

SEQ ID NO: 67176 - DNA, 20 bp, Artificial sequence
  SiRNA target sequence
tttgcccttattgcagttat

SEQ ID NO: 67177 - DNA, 20 bp, Artificial sequence
  SiRNA target sequence
ttgcccttattgcagttata

SEQ ID NO: 67178 - DNA, 20 bp, Artificial sequence
  SiRNA target sequence
tgcccttattgcagttataa

SEQ ID NO: 67179 - DNA, 20 bp, Artificial sequence
  SiRNA target sequence
gcccttattgcagttataaa

SEQ ID NO: 67180 - DNA, 20 bp, Artificial sequence
  SiRNA target sequence
cccttattgcagttataaaa

SEQ ID NO: 67181 - DNA, 20 bp, Artificial sequence
  SiRNA target sequence
ccttattgcagttataaaaa

SEQ ID NO: 67182 - DNA, 20 bp, Artificial sequence
  SiRNA target sequence
cttattgcagttataaaaaa

SEQ ID NO: 67183 - DNA, 20 bp, Artificial sequence
  SiRNA target sequence
ttattgcagttataaaaaat

SEQ ID NO: 67184 - DNA, 20 bp, Artificial sequence
  SiRNA target sequence
tattgcagttataaaaaata

SEQ ID NO: 67185 - DNA, 20 bp, Artificial sequence
  SiRNA target sequence
attgcagttataaaaaatat

SEQ ID NO: 67186 - DNA, 20 bp, Artificial sequence
  SiRNA target sequence
ttgcagttataaaaaatatg

SEQ ID NO: 67187 - DNA, 20 bp, Artificial sequence
  SiRNA target sequence
tgcagttataaaaaatatgg

SEQ ID NO: 67188 - DNA, 20 bp, Artificial sequence
  SiRNA target sequence
gcagttataaaaaatatggg

SEQ ID NO: 67189 - DNA, 20 bp, Artificial sequence
  SiRNA target sequence
cagttataaaaaatatggga

SEQ ID NO: 67190 - DNA, 20 bp, Artificial sequence
  SiRNA target sequence
agttataaaaaatatgggag

SEQ ID NO: 67191 - DNA, 20 bp, Artificial sequence
  SiRNA target sequence
gttataaaaaatatgggagg

SEQ ID NO: 67192 - DNA, 20 bp, Artificial sequence
  SiRNA target sequence
ttataaaaaatatgggaggt

SEQ ID NO: 67193 - DNA, 20 bp, Artificial sequence
  SiRNA target sequence
tataaaaaatatgggaggtc

SEQ ID NO: 67194 - DNA, 20 bp, Artificial sequence
  SiRNA target sequence
ataaaaaatatgggaggtct

SEQ ID NO: 67195 - DNA, 20 bp, Artificial sequence
  SiRNA target sequence
taaaaaatatgggaggtctt

SEQ ID NO: 67196 - DNA, 20 bp, Artificial sequence
  SiRNA target sequence
aaaaaatatgggaggtcttg

SEQ ID NO: 67197 - DNA, 20 bp, Artificial sequence
  SiRNA target sequence
aaaaatatgggaggtcttgc

SEQ ID NO: 67198 - DNA, 20 bp, Artificial sequence
  SiRNA target sequence
aaaatatgggaggtcttgcg

SEQ ID NO: 67199 - DNA, 20 bp, Artificial sequence
  SiRNA target sequence
aaatatgggaggtcttgcgg

SEQ ID NO: 67200 - DNA, 20 bp, Artificial sequence
  SiRNA target sequence
aatatgggaggtcttgcggg

SEQ ID NO: 67201 - DNA, 20 bp, Artificial sequence
  SiRNA target sequence
atatgggaggtcttgcgggc

SEQ ID NO: 67202 - DNA, 20 bp, Artificial sequence
  SiRNA target sequence
tatgggaggtcttgcgggct

SEQ ID NO: 67203 - DNA, 20 bp, Artificial sequence
  SiRNA target sequence
atgggaggtcttgcgggctt

SEQ ID NO: 67204 - DNA, 20 bp, Artificial sequence
  SiRNA target sequence
tgggaggtcttgcgggcttc

SEQ ID NO: 67205 - DNA, 20 bp, Artificial sequence
  SiRNA target sequence
gggaggtcttgcgggcttca

SEQ ID NO: 67206 - DNA, 20 bp, Artificial sequence
  SiRNA target sequence
ggaggtcttgcgggcttcat

SEQ ID NO: 67207 - DNA, 20 bp, Artificial sequence
  SiRNA target sequence
gaggtcttgcgggcttcata

SEQ ID NO: 67208 - DNA, 20 bp, Artificial sequence
  SiRNA target sequence
aggtcttgcgggcttcataa

SEQ ID NO: 67209 - DNA, 20 bp, Artificial sequence
  SiRNA target sequence
ggtcttgcgggcttcataat

SEQ ID NO: 67210 - DNA, 20 bp, Artificial sequence
  SiRNA target sequence
gtcttgcgggcttcataatg

SEQ ID NO: 67211 - DNA, 20 bp, Artificial sequence
  SiRNA target sequence
tcttgcgggcttcataatgt

SEQ ID NO: 67212 - DNA, 20 bp, Artificial sequence
  SiRNA target sequence
cttgcgggcttcataatgtt

SEQ ID NO: 67213 - DNA, 20 bp, Artificial sequence
  SiRNA target sequence
ttgcgggcttcataatgttt

SEQ ID NO: 67214 - DNA, 20 bp, Artificial sequence
  SiRNA target sequence
tgcgggcttcataatgtttg

SEQ ID NO: 67215 - DNA, 20 bp, Artificial sequence
  SiRNA target sequence
gcgggcttcataatgtttgt

SEQ ID NO: 67216 - DNA, 20 bp, Artificial sequence
  SiRNA target sequence
cgggcttcataatgtttgtt

SEQ ID NO: 67217 - DNA, 20 bp, Artificial sequence
  SiRNA target sequence
gggcttcataatgtttgttt

SEQ ID NO: 67218 - DNA, 20 bp, Artificial sequence
  SiRNA target sequence
ggcttcataatgtttgtttg

SEQ ID NO: 67219 - DNA, 20 bp, Artificial sequence
  SiRNA target sequence
gcttcataatgtttgtttgt

SEQ ID NO: 67220 - DNA, 20 bp, Artificial sequence
  SiRNA target sequence
cttcataatgtttgtttgtg

SEQ ID NO: 67221 - DNA, 20 bp, Artificial sequence
  SiRNA target sequence
ttcataatgtttgtttgtgt

SEQ ID NO: 67222 - DNA, 20 bp, Artificial sequence
  SiRNA target sequence
tcataatgtttgtttgtgtt

SEQ ID NO: 67223 - DNA, 20 bp, Artificial sequence
  SiRNA target sequence
cataatgtttgtttgtgttt

SEQ ID NO: 67224 - DNA, 20 bp, Artificial sequence
  SiRNA target sequence
ataatgtttgtttgtgtttc

SEQ ID NO: 67225 - DNA, 20 bp, Artificial sequence
  SiRNA target sequence
taatgtttgtttgtgtttct

SEQ ID NO: 67226 - DNA, 20 bp, Artificial sequence
  SiRNA target sequence
aatgtttgtttgtgtttctt

SEQ ID NO: 67227 - DNA, 20 bp, Artificial sequence
  SiRNA target sequence
atgtttgtttgtgtttcttg

SEQ ID NO: 67228 - DNA, 20 bp, Artificial sequence
  SiRNA target sequence
tgtttgtttgtgtttcttgc

SEQ ID NO: 67229 - DNA, 20 bp, Artificial sequence
  SiRNA target sequence
gtttgtttgtgtttcttgct

SEQ ID NO: 67230 - DNA, 20 bp, Artificial sequence
  SiRNA target sequence
tttgtttgtgtttcttgcta

SEQ ID NO: 67231 - DNA, 20 bp, Artificial sequence
  SiRNA target sequence
ttgtttgtgtttcttgctat

SEQ ID NO: 67232 - DNA, 20 bp, Artificial sequence
  SiRNA target sequence
tgtttgtgtttcttgctatg

SEQ ID NO: 67233 - DNA, 20 bp, Artificial sequence
  SiRNA target sequence
gtttgtgtttcttgctatgc

SEQ ID NO: 67234 - DNA, 20 bp, Artificial sequence
  SiRNA target sequence
tttgtgtttcttgctatgcg

SEQ ID NO: 67235 - DNA, 20 bp, Artificial sequence
  SiRNA target sequence
ttgtgtttcttgctatgcga

SEQ ID NO: 67236 - DNA, 20 bp, Artificial sequence
  SiRNA target sequence
tgtgtttcttgctatgcgac

SEQ ID NO: 67237 - DNA, 20 bp, Artificial sequence
  SiRNA target sequence
gtgtttcttgctatgcgact

SEQ ID NO: 67238 - DNA, 20 bp, Artificial sequence
  SiRNA target sequence
tgtttcttgctatgcgactg

SEQ ID NO: 67239 - DNA, 20 bp, Artificial sequence
  SiRNA target sequence
gtttcttgctatgcgactgt

SEQ ID NO: 67240 - DNA, 20 bp, Artificial sequence
  SiRNA target sequence
tttcttgctatgcgactgtg

SEQ ID NO: 67241 - DNA, 20 bp, Artificial sequence
  SiRNA target sequence
ttcttgctatgcgactgtga

SEQ ID NO: 67242 - DNA, 20 bp, Artificial sequence
  SiRNA target sequence
tcttgctatgcgactgtgac

SEQ ID NO: 67243 - DNA, 20 bp, Artificial sequence
  SiRNA target sequence
cttgctatgcgactgtgact

SEQ ID NO: 67244 - DNA, 20 bp, Artificial sequence
  SiRNA target sequence
ttgctatgcgactgtgacta

SEQ ID NO: 67245 - DNA, 20 bp, Artificial sequence
  SiRNA target sequence
tgctatgcgactgtgactat

SEQ ID NO: 67246 - DNA, 20 bp, Artificial sequence
  SiRNA target sequence
gctatgcgactgtgactata

SEQ ID NO: 67247 - DNA, 20 bp, Artificial sequence
  SiRNA target sequence
ctatgcgactgtgactatat

SEQ ID NO: 67248 - DNA, 20 bp, Artificial sequence
  SiRNA target sequence
tatgcgactgtgactatatt

SEQ ID NO: 67249 - DNA, 20 bp, Artificial sequence
  SiRNA target sequence
atgcgactgtgactatattg

SEQ ID NO: 67250 - DNA, 20 bp, Artificial sequence
  SiRNA target sequence
tgcgactgtgactatattga

SEQ ID NO: 67251 - DNA, 20 bp, Artificial sequence
  SiRNA target sequence
gcgactgtgactatattgat

SEQ ID NO: 67252 - DNA, 20 bp, Artificial sequence
  SiRNA target sequence
cgactgtgactatattgata

SEQ ID NO: 67253 - DNA, 20 bp, Artificial sequence
  SiRNA target sequence
gactgtgactatattgatag

SEQ ID NO: 67254 - DNA, 20 bp, Artificial sequence
  SiRNA target sequence
actgtgactatattgatagc

SEQ ID NO: 67255 - DNA, 20 bp, Artificial sequence
  SiRNA target sequence
ctgtgactatattgatagca

SEQ ID NO: 67256 - DNA, 20 bp, Artificial sequence
  SiRNA target sequence
tgtgactatattgatagcac

SEQ ID NO: 67257 - DNA, 20 bp, Artificial sequence
  SiRNA target sequence
gtgactatattgatagcaca

SEQ ID NO: 67258 - DNA, 20 bp, Artificial sequence
  SiRNA target sequence
tgactatattgatagcacaa

SEQ ID NO: 67259 - DNA, 20 bp, Artificial sequence
  SiRNA target sequence
gactatattgatagcacaat

SEQ ID NO: 67260 - DNA, 20 bp, Artificial sequence
  SiRNA target sequence
actatattgatagcacaatg

SEQ ID NO: 67261 - DNA, 20 bp, Artificial sequence
  SiRNA target sequence
ctatattgatagcacaatgg

SEQ ID NO: 67262 - DNA, 20 bp, Artificial sequence
  SiRNA target sequence
tatattgatagcacaatgga

SEQ ID NO: 67263 - DNA, 20 bp, Artificial sequence
  SiRNA target sequence
atattgatagcacaatggag

SEQ ID NO: 67264 - DNA, 20 bp, Artificial sequence
  SiRNA target sequence
tattgatagcacaatggaga

SEQ ID NO: 67265 - DNA, 20 bp, Artificial sequence
  SiRNA target sequence
attgatagcacaatggagat

SEQ ID NO: 67266 - DNA, 20 bp, Artificial sequence
  SiRNA target sequence
ttgatagcacaatggagatc

SEQ ID NO: 67267 - DNA, 20 bp, Artificial sequence
  SiRNA target sequence
tgatagcacaatggagatct

SEQ ID NO: 67268 - DNA, 20 bp, Artificial sequence
  SiRNA target sequence
gatagcacaatggagatcta

SEQ ID NO: 67269 - DNA, 20 bp, Artificial sequence
  SiRNA target sequence
atagcacaatggagatctaa

SEQ ID NO: 67270 - DNA, 20 bp, Artificial sequence
  SiRNA target sequence
tagcacaatggagatctaat

SEQ ID NO: 67271 - DNA, 20 bp, Artificial sequence
  SiRNA target sequence
agcacaatggagatctaata

SEQ ID NO: 67272 - DNA, 20 bp, Artificial sequence
  SiRNA target sequence
gcacaatggagatctaatat

SEQ ID NO: 67273 - DNA, 20 bp, Artificial sequence
  SiRNA target sequence
cacaatggagatctaatatt

SEQ ID NO: 67274 - DNA, 20 bp, Artificial sequence
  SiRNA target sequence
acaatggagatctaatatta

SEQ ID NO: 67275 - DNA, 20 bp, Artificial sequence
  SiRNA target sequence
caatggagatctaatattag

SEQ ID NO: 67276 - DNA, 20 bp, Artificial sequence
  SiRNA target sequence
aatggagatctaatattaga

SEQ ID NO: 67277 - DNA, 20 bp, Artificial sequence
  SiRNA target sequence
atggagatctaatattagaa

SEQ ID NO: 67278 - DNA, 20 bp, Artificial sequence
  SiRNA target sequence
tggagatctaatattagaag

SEQ ID NO: 67279 - DNA, 20 bp, Artificial sequence
  SiRNA target sequence
ggagatctaatattagaaga

SEQ ID NO: 67280 - DNA, 20 bp, Artificial sequence
  SiRNA target sequence
gagatctaatattagaagag

SEQ ID NO: 67281 - DNA, 20 bp, Artificial sequence
  SiRNA target sequence
agatctaatattagaagaga

SEQ ID NO: 67282 - DNA, 20 bp, Artificial sequence
  SiRNA target sequence
gatctaatattagaagagaa

SEQ ID NO: 67283 - DNA, 20 bp, Artificial sequence
  SiRNA target sequence
atctaatattagaagagaac

SEQ ID NO: 67284 - DNA, 20 bp, Artificial sequence
  SiRNA target sequence
tctaatattagaagagaact

SEQ ID NO: 67285 - DNA, 20 bp, Artificial sequence
  SiRNA target sequence
ctaatattagaagagaactt

SEQ ID NO: 67286 - DNA, 20 bp, Artificial sequence
  SiRNA target sequence
taatattagaagagaactta

SEQ ID NO: 67287 - DNA, 20 bp, Artificial sequence
  SiRNA target sequence
aatattagaagagaacttaa

SEQ ID NO: 67288 - DNA, 20 bp, Artificial sequence
  SiRNA target sequence
atattagaagagaacttaat

SEQ ID NO: 67289 - DNA, 20 bp, Artificial sequence
  SiRNA target sequence
tattagaagagaacttaata

SEQ ID NO: 67290 - DNA, 20 bp, Artificial sequence
  SiRNA target sequence
attagaagagaacttaataa

SEQ ID NO: 67291 - DNA, 20 bp, Artificial sequence
  SiRNA target sequence
ttagaagagaacttaataac

SEQ ID NO: 67292 - DNA, 20 bp, Artificial sequence
  SiRNA target sequence
tagaagagaacttaataact

SEQ ID NO: 67293 - DNA, 20 bp, Artificial sequence
  SiRNA target sequence
agaagagaacttaataactc

SEQ ID NO: 67294 - DNA, 20 bp, Artificial sequence
  SiRNA target sequence
gaagagaacttaataactct

SEQ ID NO: 67295 - DNA, 20 bp, Artificial sequence
  SiRNA target sequence
aagagaacttaataactctg

SEQ ID NO: 67296 - DNA, 20 bp, Artificial sequence
  SiRNA target sequence
agagaacttaataactctga

SEQ ID NO: 67297 - DNA, 20 bp, Artificial sequence
  SiRNA target sequence
gagaacttaataactctgaa

SEQ ID NO: 67298 - DNA, 20 bp, Artificial sequence
  SiRNA target sequence
agaacttaataactctgaaa

SEQ ID NO: 67299 - DNA, 20 bp, Artificial sequence
  SiRNA target sequence
gaacttaataactctgaaaa

SEQ ID NO: 67300 - DNA, 20 bp, Artificial sequence
  SiRNA target sequence
aacttaataactctgaaaat

SEQ ID NO: 67301 - DNA, 20 bp, Artificial sequence
  SiRNA target sequence
acttaataactctgaaaata

SEQ ID NO: 67302 - DNA, 20 bp, Artificial sequence
  SiRNA target sequence
cttaataactctgaaaatag

SEQ ID NO: 67303 - DNA, 20 bp, Artificial sequence
  SiRNA target sequence
ttaataactctgaaaataga

SEQ ID NO: 67304 - DNA, 20 bp, Artificial sequence
  SiRNA target sequence
taataactctgaaaatagat

SEQ ID NO: 67305 - DNA, 20 bp, Artificial sequence
  SiRNA target sequence
aataactctgaaaatagatc

SEQ ID NO: 67306 - DNA, 20 bp, Artificial sequence
  SiRNA target sequence
ataactctgaaaatagatct

SEQ ID NO: 67307 - DNA, 20 bp, Artificial sequence
  SiRNA target sequence
taactctgaaaatagatcta

SEQ ID NO: 67308 - DNA, 20 bp, Artificial sequence
  SiRNA target sequence
aactctgaaaatagatctag

SEQ ID NO: 67309 - DNA, 20 bp, Artificial sequence
  SiRNA target sequence
actctgaaaatagatctagt

SEQ ID NO: 67310 - DNA, 20 bp, Artificial sequence
  SiRNA target sequence
ctctgaaaatagatctagta

SEQ ID NO: 67311 - DNA, 20 bp, Artificial sequence
  SiRNA target sequence
tctgaaaatagatctagtaa

SEQ ID NO: 67312 - DNA, 20 bp, Artificial sequence
  SiRNA target sequence
ctgaaaatagatctagtaat

SEQ ID NO: 67313 - DNA, 20 bp, Artificial sequence
  SiRNA target sequence
tgaaaatagatctagtaata

SEQ ID NO: 67314 - DNA, 20 bp, Artificial sequence
  SiRNA target sequence
gaaaatagatctagtaataa

SEQ ID NO: 67315 - DNA, 20 bp, Artificial sequence
  SiRNA target sequence
aaaatagatctagtaataaa

SEQ ID NO: 67316 - DNA, 20 bp, Artificial sequence
  SiRNA target sequence
aaatagatctagtaataaac

SEQ ID NO: 67317 - DNA, 20 bp, Artificial sequence
  SiRNA target sequence
aatagatctagtaataaact

SEQ ID NO: 67318 - DNA, 20 bp, Artificial sequence
  SiRNA target sequence
atagatctagtaataaacta

SEQ ID NO: 67319 - DNA, 20 bp, Artificial sequence
  SiRNA target sequence
tagatctagtaataaactac

SEQ ID NO: 67320 - DNA, 20 bp, Artificial sequence
  SiRNA target sequence
agatctagtaataaactaca

SEQ ID NO: 67321 - DNA, 20 bp, Artificial sequence
  SiRNA target sequence
gatctagtaataaactacaa

SEQ ID NO: 67322 - DNA, 20 bp, Artificial sequence
  SiRNA target sequence
atctagtaataaactacaag

SEQ ID NO: 67323 - DNA, 20 bp, Artificial sequence
  SiRNA target sequence
tctagtaataaactacaaga

SEQ ID NO: 67324 - DNA, 20 bp, Artificial sequence
  SiRNA target sequence
ctagtaataaactacaagat

SEQ ID NO: 67325 - DNA, 20 bp, Artificial sequence
  SiRNA target sequence
tagtaataaactacaagatg

SEQ ID NO: 67326 - DNA, 20 bp, Artificial sequence
  SiRNA target sequence
agtaataaactacaagatgg

SEQ ID NO: 67327 - DNA, 20 bp, Artificial sequence
  SiRNA target sequence
gtaataaactacaagatgga

SEQ ID NO: 67328 - DNA, 20 bp, Artificial sequence
  SiRNA target sequence
taataaactacaagatggat

SEQ ID NO: 67329 - DNA, 20 bp, Artificial sequence
  SiRNA target sequence
aataaactacaagatggatt

SEQ ID NO: 67330 - DNA, 20 bp, Artificial sequence
  SiRNA target sequence
ataaactacaagatggatta

SEQ ID NO: 67331 - DNA, 20 bp, Artificial sequence
  SiRNA target sequence
taaactacaagatggattaa

SEQ ID NO: 67332 - DNA, 20 bp, Artificial sequence
  SiRNA target sequence
aaactacaagatggattaaa

SEQ ID NO: 67333 - DNA, 20 bp, Artificial sequence
  SiRNA target sequence
aactacaagatggattaaat

SEQ ID NO: 67334 - DNA, 20 bp, Artificial sequence
  SiRNA target sequence
actacaagatggattaaata

SEQ ID NO: 67335 - DNA, 20 bp, Artificial sequence
  SiRNA target sequence
ctacaagatggattaaataa

SEQ ID NO: 67336 - DNA, 20 bp, Artificial sequence
  SiRNA target sequence
tacaagatggattaaataat

SEQ ID NO: 67337 - DNA, 20 bp, Artificial sequence
  SiRNA target sequence
acaagatggattaaataatc

SEQ ID NO: 67338 - DNA, 20 bp, Artificial sequence
  SiRNA target sequence
caagatggattaaataatca

SEQ ID NO: 67339 - DNA, 20 bp, Artificial sequence
  SiRNA target sequence
aagatggattaaataatcat

SEQ ID NO: 67340 - DNA, 20 bp, Artificial sequence
  SiRNA target sequence
agatggattaaataatcatg

SEQ ID NO: 67341 - DNA, 20 bp, Artificial sequence
  SiRNA target sequence
gatggattaaataatcatga

SEQ ID NO: 67342 - DNA, 20 bp, Artificial sequence
  SiRNA target sequence
atggattaaataatcatgaa

SEQ ID NO: 67343 - DNA, 20 bp, Artificial sequence
  SiRNA target sequence
tggattaaataatcatgaaa

SEQ ID NO: 67344 - DNA, 20 bp, Artificial sequence
  SiRNA target sequence
ggattaaataatcatgaaac

SEQ ID NO: 67345 - DNA, 20 bp, Artificial sequence
  SiRNA target sequence
gattaaataatcatgaaaca

SEQ ID NO: 67346 - DNA, 20 bp, Artificial sequence
  SiRNA target sequence
attaaataatcatgaaacaa

SEQ ID NO: 67347 - DNA, 20 bp, Artificial sequence
  SiRNA target sequence
ttaaataatcatgaaacaat

SEQ ID NO: 67348 - DNA, 20 bp, Artificial sequence
  SiRNA target sequence
taaataatcatgaaacaatc

SEQ ID NO: 67349 - DNA, 20 bp, Artificial sequence
  SiRNA target sequence
aaataatcatgaaacaatcg

SEQ ID NO: 67350 - DNA, 20 bp, Artificial sequence
  SiRNA target sequence
aataatcatgaaacaatcgt

SEQ ID NO: 67351 - DNA, 20 bp, Artificial sequence
  SiRNA target sequence
ataatcatgaaacaatcgtc

SEQ ID NO: 67352 - DNA, 20 bp, Artificial sequence
  SiRNA target sequence
taatcatgaaacaatcgtct

SEQ ID NO: 67353 - DNA, 20 bp, Artificial sequence
  SiRNA target sequence
aatcatgaaacaatcgtctc

SEQ ID NO: 67354 - DNA, 20 bp, Artificial sequence
  SiRNA target sequence
atcatgaaacaatcgtctcc

SEQ ID NO: 67355 - DNA, 20 bp, Artificial sequence
  SiRNA target sequence
tcatgaaacaatcgtctcct

SEQ ID NO: 67356 - DNA, 20 bp, Artificial sequence
  SiRNA target sequence
catgaaacaatcgtctcctt

SEQ ID NO: 67357 - DNA, 20 bp, Artificial sequence
  SiRNA target sequence
atgaaacaatcgtctccttt

SEQ ID NO: 67358 - DNA, 20 bp, Artificial sequence
  SiRNA target sequence
tgaaacaatcgtctcctttg

SEQ ID NO: 67359 - DNA, 20 bp, Artificial sequence
  SiRNA target sequence
gaaacaatcgtctcctttgg

SEQ ID NO: 67360 - DNA, 20 bp, Artificial sequence
  SiRNA target sequence
aaacaatcgtctcctttggg

SEQ ID NO: 67361 - DNA, 20 bp, Artificial sequence
  SiRNA target sequence
aacaatcgtctcctttggga

SEQ ID NO: 67362 - DNA, 20 bp, Artificial sequence
  SiRNA target sequence
acaatcgtctcctttgggac

SEQ ID NO: 67363 - DNA, 20 bp, Artificial sequence
  SiRNA target sequence
caatcgtctcctttgggact

SEQ ID NO: 67364 - DNA, 20 bp, Artificial sequence
  SiRNA target sequence
aatcgtctcctttgggacta

SEQ ID NO: 67365 - DNA, 20 bp, Artificial sequence
  SiRNA target sequence
atcgtctcctttgggactac

SEQ ID NO: 67366 - DNA, 20 bp, Artificial sequence
  SiRNA target sequence
tcgtctcctttgggactaca

SEQ ID NO: 67367 - DNA, 20 bp, Artificial sequence
  SiRNA target sequence
cgtctcctttgggactacag

SEQ ID NO: 67368 - DNA, 20 bp, Artificial sequence
  SiRNA target sequence
gtctcctttgggactacaga

SEQ ID NO: 67369 - DNA, 20 bp, Artificial sequence
  SiRNA target sequence
tctcctttgggactacagat

SEQ ID NO: 67370 - DNA, 20 bp, Artificial sequence
  SiRNA target sequence
ctcctttgggactacagatc

SEQ ID NO: 67371 - DNA, 20 bp, Artificial sequence
  SiRNA target sequence
tcctttgggactacagatct

SEQ ID NO: 67372 - DNA, 20 bp, Artificial sequence
  SiRNA target sequence
cctttgggactacagatctt

SEQ ID NO: 67373 - DNA, 20 bp, Artificial sequence
  SiRNA target sequence
ctttgggactacagatcttg

SEQ ID NO: 67374 - DNA, 20 bp, Artificial sequence
  SiRNA target sequence
tttgggactacagatcttga

SEQ ID NO: 67375 - DNA, 20 bp, Artificial sequence
  SiRNA target sequence
ttgggactacagatcttgaa

SEQ ID NO: 67376 - DNA, 20 bp, Artificial sequence
  SiRNA target sequence
tgggactacagatcttgaag

SEQ ID NO: 67377 - DNA, 20 bp, Artificial sequence
  SiRNA target sequence
gggactacagatcttgaagt

SEQ ID NO: 67378 - DNA, 20 bp, Artificial sequence
  SiRNA target sequence
ggactacagatcttgaagta

SEQ ID NO: 67379 - DNA, 20 bp, Artificial sequence
  SiRNA target sequence
gactacagatcttgaagtag

SEQ ID NO: 67380 - DNA, 20 bp, Artificial sequence
  SiRNA target sequence
actacagatcttgaagtaga

SEQ ID NO: 67381 - DNA, 20 bp, Artificial sequence
  SiRNA target sequence
ctacagatcttgaagtagat

SEQ ID NO: 67382 - DNA, 20 bp, Artificial sequence
  SiRNA target sequence
tacagatcttgaagtagatg

SEQ ID NO: 67383 - DNA, 20 bp, Artificial sequence
  SiRNA target sequence
acagatcttgaagtagatga

SEQ ID NO: 67384 - DNA, 20 bp, Artificial sequence
  SiRNA target sequence
cagatcttgaagtagatgaa

SEQ ID NO: 67385 - DNA, 20 bp, Artificial sequence
  SiRNA target sequence
agatcttgaagtagatgaat

SEQ ID NO: 67386 - DNA, 20 bp, Artificial sequence
  SiRNA target sequence
gatcttgaagtagatgaata

SEQ ID NO: 67387 - DNA, 20 bp, Artificial sequence
  SiRNA target sequence
atcttgaagtagatgaatat

SEQ ID NO: 67388 - DNA, 20 bp, Artificial sequence
  SiRNA target sequence
tcttgaagtagatgaatatg

SEQ ID NO: 67389 - DNA, 20 bp, Artificial sequence
  SiRNA target sequence
cttgaagtagatgaatatga

SEQ ID NO: 67390 - DNA, 20 bp, Artificial sequence
  SiRNA target sequence
ttgaagtagatgaatatgat

SEQ ID NO: 67391 - DNA, 20 bp, Artificial sequence
  SiRNA target sequence
tgaagtagatgaatatgatc

SEQ ID NO: 67392 - DNA, 20 bp, Artificial sequence
  SiRNA target sequence
gaagtagatgaatatgatca

SEQ ID NO: 67393 - DNA, 20 bp, Artificial sequence
  SiRNA target sequence
aagtagatgaatatgatcag

SEQ ID NO: 67394 - DNA, 20 bp, Artificial sequence
  SiRNA target sequence
agtagatgaatatgatcagt

SEQ ID NO: 67395 - DNA, 20 bp, Artificial sequence
  SiRNA target sequence
gtagatgaatatgatcagtt

SEQ ID NO: 67396 - DNA, 20 bp, Artificial sequence
  SiRNA target sequence
tagatgaatatgatcagttt

SEQ ID NO: 67397 - DNA, 20 bp, Artificial sequence
  SiRNA target sequence
agatgaatatgatcagtttc

SEQ ID NO: 67398 - DNA, 20 bp, Artificial sequence
  SiRNA target sequence
gatgaatatgatcagtttct

SEQ ID NO: 67399 - DNA, 20 bp, Artificial sequence
  SiRNA target sequence
atgaatatgatcagtttctt

SEQ ID NO: 67400 - DNA, 20 bp, Artificial sequence
  SiRNA target sequence
tgaatatgatcagtttctta

SEQ ID NO: 67401 - DNA, 20 bp, Artificial sequence
  SiRNA target sequence
gaatatgatcagtttcttaa

SEQ ID NO: 67402 - DNA, 20 bp, Artificial sequence
  SiRNA target sequence
aatatgatcagtttcttaaa

SEQ ID NO: 67403 - DNA, 20 bp, Artificial sequence
  SiRNA target sequence
atatgatcagtttcttaaaa

SEQ ID NO: 67404 - DNA, 20 bp, Artificial sequence
  SiRNA target sequence
tatgatcagtttcttaaaat

SEQ ID NO: 67405 - DNA, 20 bp, Artificial sequence
  SiRNA target sequence
atgatcagtttcttaaaatt

SEQ ID NO: 67406 - DNA, 20 bp, Artificial sequence
  SiRNA target sequence
tgatcagtttcttaaaatta

SEQ ID NO: 67407 - DNA, 20 bp, Artificial sequence
  SiRNA target sequence
gatcagtttcttaaaattaa

SEQ ID NO: 67408 - DNA, 20 bp, Artificial sequence
  SiRNA target sequence
atcagtttcttaaaattaat

SEQ ID NO: 67409 - DNA, 20 bp, Artificial sequence
  SiRNA target sequence
tcagtttcttaaaattaatg

SEQ ID NO: 67410 - DNA, 20 bp, Artificial sequence
  SiRNA target sequence
cagtttcttaaaattaatgc

SEQ ID NO: 67411 - DNA, 20 bp, Artificial sequence
  SiRNA target sequence
agtttcttaaaattaatgca

SEQ ID NO: 67412 - DNA, 20 bp, Artificial sequence
  SiRNA target sequence
gtttcttaaaattaatgcat

SEQ ID NO: 67413 - DNA, 20 bp, Artificial sequence
  SiRNA target sequence
tttcttaaaattaatgcatc

SEQ ID NO: 67414 - DNA, 20 bp, Artificial sequence
  SiRNA target sequence
ttcttaaaattaatgcatct

SEQ ID NO: 67415 - DNA, 20 bp, Artificial sequence
  SiRNA target sequence
tcttaaaattaatgcatcta

SEQ ID NO: 67416 - DNA, 20 bp, Artificial sequence
  SiRNA target sequence
cttaaaattaatgcatctaa

SEQ ID NO: 67417 - DNA, 20 bp, Artificial sequence
  SiRNA target sequence
ttaaaattaatgcatctaat

SEQ ID NO: 67418 - DNA, 20 bp, Artificial sequence
  SiRNA target sequence
taaaattaatgcatctaata

SEQ ID NO: 67419 - DNA, 20 bp, Artificial sequence
  SiRNA target sequence
aaaattaatgcatctaatag

SEQ ID NO: 67420 - DNA, 20 bp, Artificial sequence
  SiRNA target sequence
aaattaatgcatctaatagt

SEQ ID NO: 67421 - DNA, 20 bp, Artificial sequence
  SiRNA target sequence
aattaatgcatctaatagta

SEQ ID NO: 67422 - DNA, 20 bp, Artificial sequence
  SiRNA target sequence
attaatgcatctaatagtaa

SEQ ID NO: 67423 - DNA, 20 bp, Artificial sequence
  SiRNA target sequence
ttaatgcatctaatagtaac

SEQ ID NO: 67424 - DNA, 20 bp, Artificial sequence
  SiRNA target sequence
taatgcatctaatagtaaca

SEQ ID NO: 67425 - DNA, 20 bp, Artificial sequence
  SiRNA target sequence
aatgcatctaatagtaacag

SEQ ID NO: 67426 - DNA, 20 bp, Artificial sequence
  SiRNA target sequence
atgcatctaatagtaacaga

SEQ ID NO: 67427 - DNA, 20 bp, Artificial sequence
  SiRNA target sequence
tgcatctaatagtaacagat

SEQ ID NO: 67428 - DNA, 20 bp, Artificial sequence
  SiRNA target sequence
gcatctaatagtaacagatt

SEQ ID NO: 67429 - DNA, 20 bp, Artificial sequence
  SiRNA target sequence
catctaatagtaacagatta

SEQ ID NO: 67430 - DNA, 20 bp, Artificial sequence
  SiRNA target sequence
atctaatagtaacagattat

SEQ ID NO: 67431 - DNA, 20 bp, Artificial sequence
  SiRNA target sequence
tctaatagtaacagattatg

SEQ ID NO: 67432 - DNA, 20 bp, Artificial sequence
  SiRNA target sequence
ctaatagtaacagattatgg

SEQ ID NO: 67433 - DNA, 20 bp, Artificial sequence
  SiRNA target sequence
taatagtaacagattatgga

SEQ ID NO: 67434 - DNA, 20 bp, Artificial sequence
  SiRNA target sequence
aatagtaacagattatggag

SEQ ID NO: 67435 - DNA, 20 bp, Artificial sequence
  SiRNA target sequence
atagtaacagattatggaga

SEQ ID NO: 67436 - DNA, 20 bp, Artificial sequence
  SiRNA target sequence
tagtaacagattatggagag

SEQ ID NO: 67437 - DNA, 20 bp, Artificial sequence
  SiRNA target sequence
agtaacagattatggagagc

SEQ ID NO: 67438 - DNA, 20 bp, Artificial sequence
  SiRNA target sequence
gtaacagattatggagagca

SEQ ID NO: 67439 - DNA, 20 bp, Artificial sequence
  SiRNA target sequence
taacagattatggagagcac

SEQ ID NO: 67440 - DNA, 20 bp, Artificial sequence
  SiRNA target sequence
aacagattatggagagcact

SEQ ID NO: 67441 - DNA, 20 bp, Artificial sequence
  SiRNA target sequence
acagattatggagagcactg

SEQ ID NO: 67442 - DNA, 20 bp, Artificial sequence
  SiRNA target sequence
cagattatggagagcactgt

SEQ ID NO: 67443 - DNA, 20 bp, Artificial sequence
  SiRNA target sequence
agattatggagagcactgta

SEQ ID NO: 67444 - DNA, 20 bp, Artificial sequence
  SiRNA target sequence
gattatggagagcactgtac

SEQ ID NO: 67445 - DNA, 20 bp, Artificial sequence
  SiRNA target sequence
attatggagagcactgtaca

SEQ ID NO: 67446 - DNA, 20 bp, Artificial sequence
  SiRNA target sequence
ttatggagagcactgtacat

SEQ ID NO: 67447 - DNA, 20 bp, Artificial sequence
  SiRNA target sequence
tatggagagcactgtacatt

SEQ ID NO: 67448 - DNA, 20 bp, Artificial sequence
  SiRNA target sequence
atggagagcactgtacattt

SEQ ID NO: 67449 - DNA, 20 bp, Artificial sequence
  SiRNA target sequence
tggagagcactgtacatttt

SEQ ID NO: 67450 - DNA, 20 bp, Artificial sequence
  SiRNA target sequence
ggagagcactgtacatttta

SEQ ID NO: 67451 - DNA, 20 bp, Artificial sequence
  SiRNA target sequence
gagagcactgtacattttaa

SEQ ID NO: 67452 - DNA, 20 bp, Artificial sequence
  SiRNA target sequence
agagcactgtacattttaaa

SEQ ID NO: 67453 - DNA, 20 bp, Artificial sequence
  SiRNA target sequence
gagcactgtacattttaaat

SEQ ID NO: 67454 - DNA, 20 bp, Artificial sequence
  SiRNA target sequence
agcactgtacattttaaatt

SEQ ID NO: 67455 - DNA, 20 bp, Artificial sequence
  SiRNA target sequence
gcactgtacattttaaattt

SEQ ID NO: 67456 - DNA, 20 bp, Artificial sequence
  SiRNA target sequence
cactgtacattttaaattta

SEQ ID NO: 67457 - DNA, 20 bp, Artificial sequence
  SiRNA target sequence
actgtacattttaaatttat

SEQ ID NO: 67458 - DNA, 20 bp, Artificial sequence
  SiRNA target sequence
ctgtacattttaaatttatc

SEQ ID NO: 67459 - DNA, 20 bp, Artificial sequence
  SiRNA target sequence
tgtacattttaaatttatct

SEQ ID NO: 67460 - DNA, 20 bp, Artificial sequence
  SiRNA target sequence
gtacattttaaatttatctc

SEQ ID NO: 67461 - DNA, 20 bp, Artificial sequence
  SiRNA target sequence
tacattttaaatttatctca

SEQ ID NO: 67462 - DNA, 20 bp, Artificial sequence
  SiRNA target sequence
acattttaaatttatctcag

SEQ ID NO: 67463 - DNA, 20 bp, Artificial sequence
  SiRNA target sequence
cattttaaatttatctcaga

SEQ ID NO: 67464 - DNA, 20 bp, Artificial sequence
  SiRNA target sequence
attttaaatttatctcagag

SEQ ID NO: 67465 - DNA, 20 bp, Artificial sequence
  SiRNA target sequence
ttttaaatttatctcagaga

SEQ ID NO: 67466 - DNA, 20 bp, Artificial sequence
  SiRNA target sequence
tttaaatttatctcagagag

SEQ ID NO: 67467 - DNA, 20 bp, Artificial sequence
  SiRNA target sequence
ttaaatttatctcagagagc

SEQ ID NO: 67468 - DNA, 20 bp, Artificial sequence
  SiRNA target sequence
taaatttatctcagagagca

SEQ ID NO: 67469 - DNA, 20 bp, Artificial sequence
  SiRNA target sequence
aaatttatctcagagagcaa

SEQ ID NO: 67470 - DNA, 20 bp, Artificial sequence
  SiRNA target sequence
aatttatctcagagagcaat

SEQ ID NO: 67471 - DNA, 20 bp, Artificial sequence
  SiRNA target sequence
atttatctcagagagcaatt

SEQ ID NO: 67472 - DNA, 20 bp, Artificial sequence
  SiRNA target sequence
tttatctcagagagcaattt

SEQ ID NO: 67473 - DNA, 20 bp, Artificial sequence
  SiRNA target sequence
ttatctcagagagcaatttt

SEQ ID NO: 67474 - DNA, 20 bp, Artificial sequence
  SiRNA target sequence
tatctcagagagcaattttt

SEQ ID NO: 67475 - DNA, 20 bp, Artificial sequence
  SiRNA target sequence
atctcagagagcaatttttc

SEQ ID NO: 67476 - DNA, 20 bp, Artificial sequence
  SiRNA target sequence
tctcagagagcaatttttct

SEQ ID NO: 67477 - DNA, 20 bp, Artificial sequence
  SiRNA target sequence
ctcagagagcaatttttctc

SEQ ID NO: 67478 - DNA, 20 bp, Artificial sequence
  SiRNA target sequence
tcagagagcaatttttctct

SEQ ID NO: 67479 - DNA, 20 bp, Artificial sequence
  SiRNA target sequence
cagagagcaatttttctctt

SEQ ID NO: 67480 - DNA, 20 bp, Artificial sequence
  SiRNA target sequence
agagagcaatttttctctta

SEQ ID NO: 67481 - DNA, 20 bp, Artificial sequence
  SiRNA target sequence
gagagcaatttttctcttac

SEQ ID NO: 67482 - DNA, 20 bp, Artificial sequence
  SiRNA target sequence
agagcaatttttctcttaca

SEQ ID NO: 67483 - DNA, 20 bp, Artificial sequence
  SiRNA target sequence
gagcaatttttctcttacaa

SEQ ID NO: 67484 - DNA, 20 bp, Artificial sequence
  SiRNA target sequence
agcaatttttctcttacaaa

SEQ ID NO: 67485 - DNA, 20 bp, Artificial sequence
  SiRNA target sequence
gcaatttttctcttacaaag

SEQ ID NO: 67486 - DNA, 20 bp, Artificial sequence
  SiRNA target sequence
caatttttctcttacaaagt

SEQ ID NO: 67487 - DNA, 20 bp, Artificial sequence
  SiRNA target sequence
aatttttctcttacaaagtt

SEQ ID NO: 67488 - DNA, 20 bp, Artificial sequence
  SiRNA target sequence
atttttctcttacaaagttt

SEQ ID NO: 67489 - DNA, 20 bp, Artificial sequence
  SiRNA target sequence
tttttctcttacaaagtttt

SEQ ID NO: 67490 - DNA, 20 bp, Artificial sequence
  SiRNA target sequence
ttttctcttacaaagttttt

SEQ ID NO: 67491 - DNA, 20 bp, Artificial sequence
  SiRNA target sequence
tttctcttacaaagtttttt

SEQ ID NO: 67492 - DNA, 20 bp, Artificial sequence
  SiRNA target sequence
ttctcttacaaagttttttt

SEQ ID NO: 67493 - DNA, 20 bp, Artificial sequence
  SiRNA target sequence
tctcttacaaagttttttta

SEQ ID NO: 67494 - DNA, 20 bp, Artificial sequence
  SiRNA target sequence
ctcttacaaagtttttttat

SEQ ID NO: 67495 - DNA, 20 bp, Artificial sequence
  SiRNA target sequence
tcttacaaagtttttttatt

SEQ ID NO: 67496 - DNA, 20 bp, Artificial sequence
  SiRNA target sequence
cttacaaagtttttttatta

SEQ ID NO: 67497 - DNA, 20 bp, Artificial sequence
  SiRNA target sequence
ttacaaagtttttttattat

SEQ ID NO: 67498 - DNA, 20 bp, Artificial sequence
  SiRNA target sequence
tacaaagtttttttattatt

SEQ ID NO: 67499 - DNA, 20 bp, Artificial sequence
  SiRNA target sequence
acaaagtttttttattattt

SEQ ID NO: 67500 - DNA, 20 bp, Artificial sequence
  SiRNA target sequence
caaagtttttttattattta

SEQ ID NO: 67501 - DNA, 20 bp, Artificial sequence
  SiRNA target sequence
aaagtttttttattatttat

SEQ ID NO: 67502 - DNA, 20 bp, Artificial sequence
  SiRNA target sequence
aagtttttttattatttatg

SEQ ID NO: 67503 - DNA, 20 bp, Artificial sequence
  SiRNA target sequence
agtttttttattatttatgc

SEQ ID NO: 67504 - DNA, 20 bp, Artificial sequence
  SiRNA target sequence
gtttttttattatttatgca

SEQ ID NO: 67505 - DNA, 20 bp, Artificial sequence
  SiRNA target sequence
tttttttattatttatgcag

SEQ ID NO: 67506 - DNA, 20 bp, Artificial sequence
  SiRNA target sequence
ttttttattatttatgcagg

SEQ ID NO: 67507 - DNA, 20 bp, Artificial sequence
  SiRNA target sequence
tttttattatttatgcagga

SEQ ID NO: 67508 - DNA, 20 bp, Artificial sequence
  SiRNA target sequence
ttttattatttatgcaggaa

SEQ ID NO: 67509 - DNA, 20 bp, Artificial sequence
  SiRNA target sequence
tttattatttatgcaggaat

SEQ ID NO: 67510 - DNA, 20 bp, Artificial sequence
  SiRNA target sequence
ttattatttatgcaggaata

SEQ ID NO: 67511 - DNA, 20 bp, Artificial sequence
  SiRNA target sequence
tattatttatgcaggaatat

SEQ ID NO: 67512 - DNA, 20 bp, Artificial sequence
  SiRNA target sequence
attatttatgcaggaatatc

SEQ ID NO: 67513 - DNA, 20 bp, Artificial sequence
  SiRNA target sequence
ttatttatgcaggaatatca

SEQ ID NO: 67514 - DNA, 20 bp, Artificial sequence
  SiRNA target sequence
tatttatgcaggaatatcag

SEQ ID NO: 67515 - DNA, 20 bp, Artificial sequence
  SiRNA target sequence
atttatgcaggaatatcagg

SEQ ID NO: 67516 - DNA, 20 bp, Artificial sequence
  SiRNA target sequence
tttatgcaggaatatcagga

SEQ ID NO: 67517 - DNA, 20 bp, Artificial sequence
  SiRNA target sequence
ttatgcaggaatatcaggaa

SEQ ID NO: 67518 - DNA, 20 bp, Artificial sequence
  SiRNA target sequence
tatgcaggaatatcaggaat

SEQ ID NO: 67519 - DNA, 20 bp, Artificial sequence
  SiRNA target sequence
atgcaggaatatcaggaata

SEQ ID NO: 67520 - DNA, 20 bp, Artificial sequence
  SiRNA target sequence
tgcaggaatatcaggaatat

SEQ ID NO: 67521 - DNA, 20 bp, Artificial sequence
  SiRNA target sequence
gcaggaatatcaggaatatt

SEQ ID NO: 67522 - DNA, 20 bp, Artificial sequence
  SiRNA target sequence
caggaatatcaggaatatta

SEQ ID NO: 67523 - DNA, 20 bp, Artificial sequence
  SiRNA target sequence
aggaatatcaggaatattat

SEQ ID NO: 67524 - DNA, 20 bp, Artificial sequence
  SiRNA target sequence
ggaatatcaggaatattatc

SEQ ID NO: 67525 - DNA, 20 bp, Artificial sequence
  SiRNA target sequence
gaatatcaggaatattatct

SEQ ID NO: 67526 - DNA, 20 bp, Artificial sequence
  SiRNA target sequence
aatatcaggaatattatctc

SEQ ID NO: 67527 - DNA, 20 bp, Artificial sequence
  SiRNA target sequence
atatcaggaatattatctca

SEQ ID NO: 67528 - DNA, 20 bp, Artificial sequence
  SiRNA target sequence
tatcaggaatattatctcaa

SEQ ID NO: 67529 - DNA, 20 bp, Artificial sequence
  SiRNA target sequence
atcaggaatattatctcaaa

SEQ ID NO: 67530 - DNA, 20 bp, Artificial sequence
  SiRNA target sequence
tcaggaatattatctcaaaa

SEQ ID NO: 67531 - DNA, 20 bp, Artificial sequence
  SiRNA target sequence
caggaatattatctcaaaat

SEQ ID NO: 67532 - DNA, 20 bp, Artificial sequence
  SiRNA target sequence
aggaatattatctcaaaata

SEQ ID NO: 67533 - DNA, 20 bp, Artificial sequence
  SiRNA target sequence
ggaatattatctcaaaatat

SEQ ID NO: 67534 - DNA, 20 bp, Artificial sequence
  SiRNA target sequence
gaatattatctcaaaatatg

SEQ ID NO: 67535 - DNA, 20 bp, Artificial sequence
  SiRNA target sequence
aatattatctcaaaatatgt

SEQ ID NO: 67536 - DNA, 20 bp, Artificial sequence
  SiRNA target sequence
atattatctcaaaatatgtc

SEQ ID NO: 67537 - DNA, 20 bp, Artificial sequence
  SiRNA target sequence
tattatctcaaaatatgtca

SEQ ID NO: 67538 - DNA, 20 bp, Artificial sequence
  SiRNA target sequence
attatctcaaaatatgtcat

SEQ ID NO: 67539 - DNA, 20 bp, Artificial sequence
  SiRNA target sequence
ttatctcaaaatatgtcatc

SEQ ID NO: 67540 - DNA, 20 bp, Artificial sequence
  SiRNA target sequence
tatctcaaaatatgtcatct

SEQ ID NO: 67541 - DNA, 20 bp, Artificial sequence
  SiRNA target sequence
atctcaaaatatgtcatcta

SEQ ID NO: 67542 - DNA, 20 bp, Artificial sequence
  SiRNA target sequence
tctcaaaatatgtcatctaa

SEQ ID NO: 67543 - DNA, 20 bp, Artificial sequence
  SiRNA target sequence
ctcaaaatatgtcatctaac

SEQ ID NO: 67544 - DNA, 20 bp, Artificial sequence
  SiRNA target sequence
tcaaaatatgtcatctaacc

SEQ ID NO: 67545 - DNA, 20 bp, Artificial sequence
  SiRNA target sequence
caaaatatgtcatctaacca

SEQ ID NO: 67546 - DNA, 20 bp, Artificial sequence
  SiRNA target sequence
aaaatatgtcatctaaccaa

SEQ ID NO: 67547 - DNA, 20 bp, Artificial sequence
  SiRNA target sequence
aaatatgtcatctaaccaac

SEQ ID NO: 67548 - DNA, 20 bp, Artificial sequence
  SiRNA target sequence
aatatgtcatctaaccaact

SEQ ID NO: 67549 - DNA, 20 bp, Artificial sequence
  SiRNA target sequence
atatgtcatctaaccaactc

SEQ ID NO: 67550 - DNA, 20 bp, Artificial sequence
  SiRNA target sequence
tatgtcatctaaccaactca

SEQ ID NO: 67551 - DNA, 20 bp, Artificial sequence
  SiRNA target sequence
atgtcatctaaccaactcat

SEQ ID NO: 67552 - DNA, 20 bp, Artificial sequence
  SiRNA target sequence
tgtcatctaaccaactcatt

SEQ ID NO: 67553 - DNA, 20 bp, Artificial sequence
  SiRNA target sequence
gtcatctaaccaactcattt

SEQ ID NO: 67554 - DNA, 20 bp, Artificial sequence
  SiRNA target sequence
tcatctaaccaactcattta

SEQ ID NO: 67555 - DNA, 20 bp, Artificial sequence
  SiRNA target sequence
catctaaccaactcatttat

SEQ ID NO: 67556 - DNA, 20 bp, Artificial sequence
  SiRNA target sequence
atctaaccaactcatttatt

SEQ ID NO: 67557 - DNA, 20 bp, Artificial sequence
  SiRNA target sequence
tctaaccaactcatttattt

SEQ ID NO: 67558 - DNA, 20 bp, Artificial sequence
  SiRNA target sequence
ctaaccaactcatttattta

SEQ ID NO: 67559 - DNA, 20 bp, Artificial sequence
  SiRNA target sequence
taaccaactcatttatttaa

SEQ ID NO: 67560 - DNA, 20 bp, Artificial sequence
  SiRNA target sequence
aaccaactcatttatttaat

SEQ ID NO: 67561 - DNA, 20 bp, Artificial sequence
  SiRNA target sequence
accaactcatttatttaatg

SEQ ID NO: 67562 - DNA, 20 bp, Artificial sequence
  SiRNA target sequence
ccaactcatttatttaatgt

SEQ ID NO: 67563 - DNA, 20 bp, Artificial sequence
  SiRNA target sequence
caactcatttatttaatgtc

SEQ ID NO: 67564 - DNA, 20 bp, Artificial sequence
  SiRNA target sequence
aactcatttatttaatgtcc

SEQ ID NO: 67565 - DNA, 20 bp, Artificial sequence
  SiRNA target sequence
actcatttatttaatgtcca

SEQ ID NO: 67566 - DNA, 20 bp, Artificial sequence
  SiRNA target sequence
ctcatttatttaatgtccat

SEQ ID NO: 67567 - DNA, 20 bp, Artificial sequence
  SiRNA target sequence
tcatttatttaatgtccatt

SEQ ID NO: 67568 - DNA, 20 bp, Artificial sequence
  SiRNA target sequence
catttatttaatgtccatta

SEQ ID NO: 67569 - DNA, 20 bp, Artificial sequence
  SiRNA target sequence
atttatttaatgtccattac

SEQ ID NO: 67570 - DNA, 20 bp, Artificial sequence
  SiRNA target sequence
tttatttaatgtccattaca

SEQ ID NO: 67571 - DNA, 20 bp, Artificial sequence
  SiRNA target sequence
ttatttaatgtccattacat

SEQ ID NO: 67572 - DNA, 20 bp, Artificial sequence
  SiRNA target sequence
tatttaatgtccattacatc

SEQ ID NO: 67573 - DNA, 20 bp, Artificial sequence
  SiRNA target sequence
atttaatgtccattacatct

SEQ ID NO: 67574 - DNA, 20 bp, Artificial sequence
  SiRNA target sequence
tttaatgtccattacatcta

SEQ ID NO: 67575 - DNA, 20 bp, Artificial sequence
  SiRNA target sequence
ttaatgtccattacatctac

SEQ ID NO: 67576 - DNA, 20 bp, Artificial sequence
  SiRNA target sequence
taatgtccattacatctacg

SEQ ID NO: 67577 - DNA, 20 bp, Artificial sequence
  SiRNA target sequence
aatgtccattacatctacgg

SEQ ID NO: 67578 - DNA, 20 bp, Artificial sequence
  SiRNA target sequence
atgtccattacatctacggt

SEQ ID NO: 67579 - DNA, 20 bp, Artificial sequence
  SiRNA target sequence
tgtccattacatctacggtt

SEQ ID NO: 67580 - DNA, 20 bp, Artificial sequence
  SiRNA target sequence
gtccattacatctacggtta

SEQ ID NO: 67581 - DNA, 20 bp, Artificial sequence
  SiRNA target sequence
tccattacatctacggttac

SEQ ID NO: 67582 - DNA, 20 bp, Artificial sequence
  SiRNA target sequence
ccattacatctacggttact

SEQ ID NO: 67583 - DNA, 20 bp, Artificial sequence
  SiRNA target sequence
cattacatctacggttacta

SEQ ID NO: 67584 - DNA, 20 bp, Artificial sequence
  SiRNA target sequence
attacatctacggttactat

SEQ ID NO: 67585 - DNA, 20 bp, Artificial sequence
  SiRNA target sequence
ttacatctacggttactatt

SEQ ID NO: 67586 - DNA, 20 bp, Artificial sequence
  SiRNA target sequence
tacatctacggttactatta

SEQ ID NO: 67587 - DNA, 20 bp, Artificial sequence
  SiRNA target sequence
acatctacggttactattaa

SEQ ID NO: 67588 - DNA, 20 bp, Artificial sequence
  SiRNA target sequence
catctacggttactattaat

SEQ ID NO: 67589 - DNA, 20 bp, Artificial sequence
  SiRNA target sequence
atctacggttactattaatt

SEQ ID NO: 67590 - DNA, 20 bp, Artificial sequence
  SiRNA target sequence
tctacggttactattaattt

SEQ ID NO: 67591 - DNA, 20 bp, Artificial sequence
  SiRNA target sequence
ctacggttactattaattta

SEQ ID NO: 67592 - DNA, 20 bp, Artificial sequence
  SiRNA target sequence
tacggttactattaatttaa

SEQ ID NO: 67593 - DNA, 20 bp, Artificial sequence
  SiRNA target sequence
acggttactattaatttaag

SEQ ID NO: 67594 - DNA, 20 bp, Artificial sequence
  SiRNA target sequence
cggttactattaatttaagt

SEQ ID NO: 67595 - DNA, 20 bp, Artificial sequence
  SiRNA target sequence
ggttactattaatttaagta

SEQ ID NO: 67596 - DNA, 20 bp, Artificial sequence
  SiRNA target sequence
gttactattaatttaagtaa

SEQ ID NO: 67597 - DNA, 20 bp, Artificial sequence
  SiRNA target sequence
ttactattaatttaagtaac

SEQ ID NO: 67598 - DNA, 20 bp, Artificial sequence
  SiRNA target sequence
tactattaatttaagtaact

SEQ ID NO: 67599 - DNA, 20 bp, Artificial sequence
  SiRNA target sequence
actattaatttaagtaactt

SEQ ID NO: 67600 - DNA, 20 bp, Artificial sequence
  SiRNA target sequence
ctattaatttaagtaacttg

SEQ ID NO: 67601 - DNA, 20 bp, Artificial sequence
  SiRNA target sequence
tattaatttaagtaacttgg

SEQ ID NO: 67602 - DNA, 20 bp, Artificial sequence
  SiRNA target sequence
attaatttaagtaacttggg

SEQ ID NO: 67603 - DNA, 20 bp, Artificial sequence
  SiRNA target sequence
ttaatttaagtaacttgggt

SEQ ID NO: 67604 - DNA, 20 bp, Artificial sequence
  SiRNA target sequence
taatttaagtaacttgggtt

SEQ ID NO: 67605 - DNA, 20 bp, Artificial sequence
  SiRNA target sequence
aatttaagtaacttgggtta

SEQ ID NO: 67606 - DNA, 20 bp, Artificial sequence
  SiRNA target sequence
atttaagtaacttgggttac

SEQ ID NO: 67607 - DNA, 20 bp, Artificial sequence
  SiRNA target sequence
tttaagtaacttgggttact

SEQ ID NO: 67608 - DNA, 20 bp, Artificial sequence
  SiRNA target sequence
ttaagtaacttgggttactt

SEQ ID NO: 67609 - DNA, 20 bp, Artificial sequence
  SiRNA target sequence
taagtaacttgggttactta

SEQ ID NO: 67610 - DNA, 20 bp, Artificial sequence
  SiRNA target sequence
aagtaacttgggttacttat

SEQ ID NO: 67611 - DNA, 20 bp, Artificial sequence
  SiRNA target sequence
agtaacttgggttacttata

SEQ ID NO: 67612 - DNA, 20 bp, Artificial sequence
  SiRNA target sequence
gtaacttgggttacttatac

SEQ ID NO: 67613 - DNA, 20 bp, Artificial sequence
  SiRNA target sequence
taacttgggttacttataca

SEQ ID NO: 67614 - DNA, 20 bp, Artificial sequence
  SiRNA target sequence
aacttgggttacttatacac

SEQ ID NO: 67615 - DNA, 20 bp, Artificial sequence
  SiRNA target sequence
acttgggttacttatacact

SEQ ID NO: 67616 - DNA, 20 bp, Artificial sequence
  SiRNA target sequence
cttgggttacttatacacta

SEQ ID NO: 67617 - DNA, 20 bp, Artificial sequence
  SiRNA target sequence
ttgggttacttatacactag

SEQ ID NO: 67618 - DNA, 20 bp, Artificial sequence
  SiRNA target sequence
tgggttacttatacactaga

SEQ ID NO: 67619 - DNA, 20 bp, Artificial sequence
  SiRNA target sequence
gggttacttatacactagat

SEQ ID NO: 67620 - DNA, 20 bp, Artificial sequence
  SiRNA target sequence
ggttacttatacactagata

SEQ ID NO: 67621 - DNA, 20 bp, Artificial sequence
  SiRNA target sequence
gttacttatacactagatat

SEQ ID NO: 67622 - DNA, 20 bp, Artificial sequence
  SiRNA target sequence
ttacttatacactagatata

SEQ ID NO: 67623 - DNA, 20 bp, Artificial sequence
  SiRNA target sequence
tacttatacactagatatac

SEQ ID NO: 67624 - DNA, 20 bp, Artificial sequence
  SiRNA target sequence
acttatacactagatataca

SEQ ID NO: 67625 - DNA, 20 bp, Artificial sequence
  SiRNA target sequence
cttatacactagatatacac

SEQ ID NO: 67626 - DNA, 20 bp, Artificial sequence
  SiRNA target sequence
ttatacactagatatacaca

SEQ ID NO: 67627 - DNA, 20 bp, Artificial sequence
  SiRNA target sequence
tatacactagatatacacaa

SEQ ID NO: 67628 - DNA, 20 bp, Artificial sequence
  SiRNA target sequence
atacactagatatacacaag

SEQ ID NO: 67629 - DNA, 20 bp, Artificial sequence
  SiRNA target sequence
tacactagatatacacaagc

SEQ ID NO: 67630 - DNA, 20 bp, Artificial sequence
  SiRNA target sequence
acactagatatacacaagca

SEQ ID NO: 67631 - DNA, 20 bp, Artificial sequence
  SiRNA target sequence
cactagatatacacaagcaa

SEQ ID NO: 67632 - DNA, 20 bp, Artificial sequence
  SiRNA target sequence
actagatatacacaagcaat

SEQ ID NO: 67633 - DNA, 20 bp, Artificial sequence
  SiRNA target sequence
ctagatatacacaagcaata

SEQ ID NO: 67634 - DNA, 20 bp, Artificial sequence
  SiRNA target sequence
tagatatacacaagcaataa

SEQ ID NO: 67635 - DNA, 20 bp, Artificial sequence
  SiRNA target sequence
agatatacacaagcaataat

SEQ ID NO: 67636 - DNA, 20 bp, Artificial sequence
  SiRNA target sequence
gatatacacaagcaataatt

SEQ ID NO: 67637 - DNA, 20 bp, Artificial sequence
  SiRNA target sequence
atatacacaagcaataatta

SEQ ID NO: 67638 - DNA, 20 bp, Artificial sequence
  SiRNA target sequence
tatacacaagcaataattaa

SEQ ID NO: 67639 - DNA, 20 bp, Artificial sequence
  SiRNA target sequence
atacacaagcaataattaat

SEQ ID NO: 67640 - DNA, 20 bp, Artificial sequence
  SiRNA target sequence
tacacaagcaataattaatg

SEQ ID NO: 67641 - DNA, 20 bp, Artificial sequence
  SiRNA target sequence
acacaagcaataattaatgc

SEQ ID NO: 67642 - DNA, 20 bp, Artificial sequence
  SiRNA target sequence
cacaagcaataattaatgca

SEQ ID NO: 67643 - DNA, 20 bp, Artificial sequence
  SiRNA target sequence
acaagcaataattaatgcaa

SEQ ID NO: 67644 - DNA, 20 bp, Artificial sequence
  SiRNA target sequence
caagcaataattaatgcaag

SEQ ID NO: 67645 - DNA, 20 bp, Artificial sequence
  SiRNA target sequence
aagcaataattaatgcaaga

SEQ ID NO: 67646 - DNA, 20 bp, Artificial sequence
  SiRNA target sequence
agcaataattaatgcaagat

SEQ ID NO: 67647 - DNA, 20 bp, Artificial sequence
  SiRNA target sequence
gcaataattaatgcaagatc

SEQ ID NO: 67648 - DNA, 20 bp, Artificial sequence
  SiRNA target sequence
caataattaatgcaagatct

SEQ ID NO: 67649 - DNA, 20 bp, Artificial sequence
  SiRNA target sequence
aataattaatgcaagatcta

SEQ ID NO: 67650 - DNA, 20 bp, Artificial sequence
  SiRNA target sequence
ataattaatgcaagatctac

SEQ ID NO: 67651 - DNA, 20 bp, Artificial sequence
  SiRNA target sequence
taattaatgcaagatctact

SEQ ID NO: 67652 - DNA, 20 bp, Artificial sequence
  SiRNA target sequence
aattaatgcaagatctactt

SEQ ID NO: 67653 - DNA, 20 bp, Artificial sequence
  SiRNA target sequence
attaatgcaagatctactta

SEQ ID NO: 67654 - DNA, 20 bp, Artificial sequence
  SiRNA target sequence
ttaatgcaagatctacttat

SEQ ID NO: 67655 - DNA, 20 bp, Artificial sequence
  SiRNA target sequence
taatgcaagatctacttatg

SEQ ID NO: 67656 - DNA, 20 bp, Artificial sequence
  SiRNA target sequence
aatgcaagatctacttatga

SEQ ID NO: 67657 - DNA, 20 bp, Artificial sequence
  SiRNA target sequence
atgcaagatctacttatgat

SEQ ID NO: 67658 - DNA, 20 bp, Artificial sequence
  SiRNA target sequence
tgcaagatctacttatgata

SEQ ID NO: 67659 - DNA, 20 bp, Artificial sequence
  SiRNA target sequence
gcaagatctacttatgatac

SEQ ID NO: 67660 - DNA, 20 bp, Artificial sequence
  SiRNA target sequence
caagatctacttatgataca

SEQ ID NO: 67661 - DNA, 20 bp, Artificial sequence
  SiRNA target sequence
aagatctacttatgatacaa

SEQ ID NO: 67662 - DNA, 20 bp, Artificial sequence
  SiRNA target sequence
agatctacttatgatacaat

SEQ ID NO: 67663 - DNA, 20 bp, Artificial sequence
  SiRNA target sequence
gatctacttatgatacaatg

SEQ ID NO: 67664 - DNA, 20 bp, Artificial sequence
  SiRNA target sequence
atctacttatgatacaatgt

SEQ ID NO: 67665 - DNA, 20 bp, Artificial sequence
  SiRNA target sequence
tctacttatgatacaatgtt

SEQ ID NO: 67666 - DNA, 20 bp, Artificial sequence
  SiRNA target sequence
ctacttatgatacaatgtta

SEQ ID NO: 67667 - DNA, 20 bp, Artificial sequence
  SiRNA target sequence
tacttatgatacaatgttag

SEQ ID NO: 67668 - DNA, 20 bp, Artificial sequence
  SiRNA target sequence
acttatgatacaatgttaga

SEQ ID NO: 67669 - DNA, 20 bp, Artificial sequence
  SiRNA target sequence
cttatgatacaatgttagat

SEQ ID NO: 67670 - DNA, 20 bp, Artificial sequence
  SiRNA target sequence
ttatgatacaatgttagata

SEQ ID NO: 67671 - DNA, 20 bp, Artificial sequence
  SiRNA target sequence
tatgatacaatgttagatat

SEQ ID NO: 67672 - DNA, 20 bp, Artificial sequence
  SiRNA target sequence
atgatacaatgttagatata

SEQ ID NO: 67673 - DNA, 20 bp, Artificial sequence
  SiRNA target sequence
tgatacaatgttagatataa

SEQ ID NO: 67674 - DNA, 20 bp, Artificial sequence
  SiRNA target sequence
gatacaatgttagatataaa

SEQ ID NO: 67675 - DNA, 20 bp, Artificial sequence
  SiRNA target sequence
atacaatgttagatataaaa

SEQ ID NO: 67676 - DNA, 20 bp, Artificial sequence
  SiRNA target sequence
tacaatgttagatataaaaa

SEQ ID NO: 67677 - DNA, 20 bp, Artificial sequence
  SiRNA target sequence
acaatgttagatataaaaaa

SEQ ID NO: 67678 - DNA, 20 bp, Artificial sequence
  SiRNA target sequence
caatgttagatataaaaaaa

SEQ ID NO: 67679 - DNA, 20 bp, Artificial sequence
  SiRNA target sequence
aatgttagatataaaaaaag

SEQ ID NO: 67680 - DNA, 20 bp, Artificial sequence
  SiRNA target sequence
atgttagatataaaaaaaga

SEQ ID NO: 67681 - DNA, 20 bp, Artificial sequence
  SiRNA target sequence
tgttagatataaaaaaagag

SEQ ID NO: 67682 - DNA, 20 bp, Artificial sequence
  SiRNA target sequence
gttagatataaaaaaagaga

SEQ ID NO: 67683 - DNA, 20 bp, Artificial sequence
  SiRNA target sequence
ttagatataaaaaaagagaa

SEQ ID NO: 67684 - DNA, 20 bp, Artificial sequence
  SiRNA target sequence
tagatataaaaaaagagaat

SEQ ID NO: 67685 - DNA, 20 bp, Artificial sequence
  SiRNA target sequence
agatataaaaaaagagaata

SEQ ID NO: 67686 - DNA, 20 bp, Artificial sequence
  SiRNA target sequence
gatataaaaaaagagaataa

SEQ ID NO: 67687 - DNA, 20 bp, Artificial sequence
  SiRNA target sequence
atataaaaaaagagaataat

SEQ ID NO: 67688 - DNA, 20 bp, Artificial sequence
  SiRNA target sequence
tataaaaaaagagaataata

SEQ ID NO: 67689 - DNA, 20 bp, Artificial sequence
  SiRNA target sequence
ataaaaaaagagaataataa

SEQ ID NO: 67690 - DNA, 20 bp, Artificial sequence
  SiRNA target sequence
taaaaaaagagaataataag

SEQ ID NO: 67691 - DNA, 20 bp, Artificial sequence
  SiRNA target sequence
aaaaaaagagaataataagt

SEQ ID NO: 67692 - DNA, 20 bp, Artificial sequence
  SiRNA target sequence
aaaaaagagaataataagtt

SEQ ID NO: 67693 - DNA, 20 bp, Artificial sequence
  SiRNA target sequence
aaaaagagaataataagttt

SEQ ID NO: 67694 - DNA, 20 bp, Artificial sequence
  SiRNA target sequence
aaaagagaataataagttta

SEQ ID NO: 67695 - DNA, 20 bp, Artificial sequence
  SiRNA target sequence
aaagagaataataagtttaa

SEQ ID NO: 67696 - DNA, 20 bp, Artificial sequence
  SiRNA target sequence
aagagaataataagtttaag

SEQ ID NO: 67697 - DNA, 20 bp, Artificial sequence
  SiRNA target sequence
agagaataataagtttaaga

SEQ ID NO: 67698 - DNA, 20 bp, Artificial sequence
  SiRNA target sequence
gagaataataagtttaagat

SEQ ID NO: 67699 - DNA, 20 bp, Artificial sequence
  SiRNA target sequence
agaataataagtttaagatt

SEQ ID NO: 67700 - DNA, 20 bp, Artificial sequence
  SiRNA target sequence
gaataataagtttaagatta

SEQ ID NO: 67701 - DNA, 20 bp, Artificial sequence
  SiRNA target sequence
aataataagtttaagattac

SEQ ID NO: 67702 - DNA, 20 bp, Artificial sequence
  SiRNA target sequence
ataataagtttaagattaca

SEQ ID NO: 67703 - DNA, 20 bp, Artificial sequence
  SiRNA target sequence
taataagtttaagattacag

SEQ ID NO: 67704 - DNA, 20 bp, Artificial sequence
  SiRNA target sequence
aataagtttaagattacaga

SEQ ID NO: 67705 - DNA, 20 bp, Artificial sequence
  SiRNA target sequence
ataagtttaagattacagaa

SEQ ID NO: 67706 - DNA, 20 bp, Artificial sequence
  SiRNA target sequence
taagtttaagattacagaat

SEQ ID NO: 67707 - DNA, 20 bp, Artificial sequence
  SiRNA target sequence
aagtttaagattacagaatt

SEQ ID NO: 67708 - DNA, 20 bp, Artificial sequence
  SiRNA target sequence
agtttaagattacagaattt

SEQ ID NO: 67709 - DNA, 20 bp, Artificial sequence
  SiRNA target sequence
gtttaagattacagaattta

SEQ ID NO: 67710 - DNA, 20 bp, Artificial sequence
  SiRNA target sequence
tttaagattacagaatttaa

SEQ ID NO: 67711 - DNA, 20 bp, Artificial sequence
  SiRNA target sequence
ttaagattacagaatttaaa

SEQ ID NO: 67712 - DNA, 20 bp, Artificial sequence
  SiRNA target sequence
taagattacagaatttaaag

SEQ ID NO: 67713 - DNA, 20 bp, Artificial sequence
  SiRNA target sequence
aagattacagaatttaaaga

SEQ ID NO: 67714 - DNA, 20 bp, Artificial sequence
  SiRNA target sequence
agattacagaatttaaagaa

SEQ ID NO: 67715 - DNA, 20 bp, Artificial sequence
  SiRNA target sequence
gattacagaatttaaagaaa

SEQ ID NO: 67716 - DNA, 20 bp, Artificial sequence
  SiRNA target sequence
attacagaatttaaagaaag

SEQ ID NO: 67717 - DNA, 20 bp, Artificial sequence
  SiRNA target sequence
ttacagaatttaaagaaagt

SEQ ID NO: 67718 - DNA, 20 bp, Artificial sequence
  SiRNA target sequence
tacagaatttaaagaaagta

SEQ ID NO: 67719 - DNA, 20 bp, Artificial sequence
  SiRNA target sequence
acagaatttaaagaaagtat

SEQ ID NO: 67720 - DNA, 20 bp, Artificial sequence
  SiRNA target sequence
cagaatttaaagaaagtatt

SEQ ID NO: 67721 - DNA, 20 bp, Artificial sequence
  SiRNA target sequence
agaatttaaagaaagtatta

SEQ ID NO: 67722 - DNA, 20 bp, Artificial sequence
  SiRNA target sequence
gaatttaaagaaagtattaa

SEQ ID NO: 67723 - DNA, 20 bp, Artificial sequence
  SiRNA target sequence
aatttaaagaaagtattaag

SEQ ID NO: 67724 - DNA, 20 bp, Artificial sequence
  SiRNA target sequence
atttaaagaaagtattaagt

SEQ ID NO: 67725 - DNA, 20 bp, Artificial sequence
  SiRNA target sequence
tttaaagaaagtattaagtt

SEQ ID NO: 67726 - DNA, 20 bp, Artificial sequence
  SiRNA target sequence
ttaaagaaagtattaagttt

SEQ ID NO: 67727 - DNA, 20 bp, Artificial sequence
  SiRNA target sequence
taaagaaagtattaagttta

SEQ ID NO: 67728 - DNA, 20 bp, Artificial sequence
  SiRNA target sequence
aaagaaagtattaagtttaa

SEQ ID NO: 67729 - DNA, 20 bp, Artificial sequence
  SiRNA target sequence
aagaaagtattaagtttaat

SEQ ID NO: 67730 - DNA, 20 bp, Artificial sequence
  SiRNA target sequence
agaaagtattaagtttaata

SEQ ID NO: 67731 - DNA, 20 bp, Artificial sequence
  SiRNA target sequence
gaaagtattaagtttaataa

SEQ ID NO: 67732 - DNA, 20 bp, Artificial sequence
  SiRNA target sequence
aaagtattaagtttaataat

SEQ ID NO: 67733 - DNA, 20 bp, Artificial sequence
  SiRNA target sequence
aagtattaagtttaataatt

SEQ ID NO: 67734 - DNA, 20 bp, Artificial sequence
  SiRNA target sequence
agtattaagtttaataattt

SEQ ID NO: 67735 - DNA, 20 bp, Artificial sequence
  SiRNA target sequence
gtattaagtttaataatttg

SEQ ID NO: 67736 - DNA, 20 bp, Artificial sequence
  SiRNA target sequence
tattaagtttaataatttgt

SEQ ID NO: 67737 - DNA, 20 bp, Artificial sequence
  SiRNA target sequence
attaagtttaataatttgtc

SEQ ID NO: 67738 - DNA, 20 bp, Artificial sequence
  SiRNA target sequence
ttaagtttaataatttgtca

SEQ ID NO: 67739 - DNA, 20 bp, Artificial sequence
  SiRNA target sequence
taagtttaataatttgtcat

SEQ ID NO: 67740 - DNA, 20 bp, Artificial sequence
  SiRNA target sequence
aagtttaataatttgtcatt

SEQ ID NO: 67741 - DNA, 20 bp, Artificial sequence
  SiRNA target sequence
agtttaataatttgtcattt

SEQ ID NO: 67742 - DNA, 20 bp, Artificial sequence
  SiRNA target sequence
gtttaataatttgtcatttg

SEQ ID NO: 67743 - DNA, 20 bp, Artificial sequence
  SiRNA target sequence
tttaataatttgtcatttgg

SEQ ID NO: 67744 - DNA, 20 bp, Artificial sequence
  SiRNA target sequence
ttaataatttgtcatttggt

SEQ ID NO: 67745 - DNA, 20 bp, Artificial sequence
  SiRNA target sequence
taataatttgtcatttggtt

SEQ ID NO: 67746 - DNA, 20 bp, Artificial sequence
  SiRNA target sequence
aataatttgtcatttggtta

SEQ ID NO: 67747 - DNA, 20 bp, Artificial sequence
  SiRNA target sequence
ataatttgtcatttggttat

SEQ ID NO: 67748 - DNA, 20 bp, Artificial sequence
  SiRNA target sequence
taatttgtcatttggttatg

SEQ ID NO: 67749 - DNA, 20 bp, Artificial sequence
  SiRNA target sequence
aatttgtcatttggttatga

SEQ ID NO: 67750 - DNA, 20 bp, Artificial sequence
  SiRNA target sequence
atttgtcatttggttatgaa

SEQ ID NO: 67751 - DNA, 20 bp, Artificial sequence
  SiRNA target sequence
tttgtcatttggttatgaaa

SEQ ID NO: 67752 - DNA, 20 bp, Artificial sequence
  SiRNA target sequence
ttgtcatttggttatgaaag

SEQ ID NO: 67753 - DNA, 20 bp, Artificial sequence
  SiRNA target sequence
tgtcatttggttatgaaagt

SEQ ID NO: 67754 - DNA, 20 bp, Artificial sequence
  SiRNA target sequence
gtcatttggttatgaaagta

SEQ ID NO: 67755 - DNA, 20 bp, Artificial sequence
  SiRNA target sequence
tcatttggttatgaaagtag

SEQ ID NO: 67756 - DNA, 20 bp, Artificial sequence
  SiRNA target sequence
catttggttatgaaagtaga

SEQ ID NO: 67757 - DNA, 20 bp, Artificial sequence
  SiRNA target sequence
atttggttatgaaagtagac

SEQ ID NO: 67758 - DNA, 20 bp, Artificial sequence
  SiRNA target sequence
tttggttatgaaagtagaca

SEQ ID NO: 67759 - DNA, 20 bp, Artificial sequence
  SiRNA target sequence
ttggttatgaaagtagacaa

SEQ ID NO: 67760 - DNA, 20 bp, Artificial sequence
  SiRNA target sequence
tggttatgaaagtagacaaa

SEQ ID NO: 67761 - DNA, 20 bp, Artificial sequence
  SiRNA target sequence
ggttatgaaagtagacaaat

SEQ ID NO: 67762 - DNA, 20 bp, Artificial sequence
  SiRNA target sequence
gttatgaaagtagacaaatt

SEQ ID NO: 67763 - DNA, 20 bp, Artificial sequence
  SiRNA target sequence
ttatgaaagtagacaaattt

SEQ ID NO: 67764 - DNA, 20 bp, Artificial sequence
  SiRNA target sequence
tatgaaagtagacaaatttt

SEQ ID NO: 67765 - DNA, 20 bp, Artificial sequence
  SiRNA target sequence
atgaaagtagacaaattttt

SEQ ID NO: 67766 - DNA, 20 bp, Artificial sequence
  SiRNA target sequence
tgaaagtagacaaattttta

SEQ ID NO: 67767 - DNA, 20 bp, Artificial sequence
  SiRNA target sequence
gaaagtagacaaatttttaa

SEQ ID NO: 67768 - DNA, 20 bp, Artificial sequence
  SiRNA target sequence
aaagtagacaaatttttaat

SEQ ID NO: 67769 - DNA, 20 bp, Artificial sequence
  SiRNA target sequence
aagtagacaaatttttaata

SEQ ID NO: 67770 - DNA, 20 bp, Artificial sequence
  SiRNA target sequence
agtagacaaatttttaataa

SEQ ID NO: 67771 - DNA, 20 bp, Artificial sequence
  SiRNA target sequence
gtagacaaatttttaataaa

SEQ ID NO: 67772 - DNA, 20 bp, Artificial sequence
  SiRNA target sequence
tagacaaatttttaataaaa

SEQ ID NO: 67773 - DNA, 20 bp, Artificial sequence
  SiRNA target sequence
agacaaatttttaataaaat

SEQ ID NO: 67774 - DNA, 20 bp, Artificial sequence
  SiRNA target sequence
gacaaatttttaataaaata

SEQ ID NO: 67775 - DNA, 20 bp, Artificial sequence
  SiRNA target sequence
acaaatttttaataaaataa

SEQ ID NO: 67776 - DNA, 20 bp, Artificial sequence
  SiRNA target sequence
caaatttttaataaaataaa

SEQ ID NO: 67777 - DNA, 20 bp, Artificial sequence
  SiRNA target sequence
aaatttttaataaaataaat

SEQ ID NO: 67778 - DNA, 20 bp, Artificial sequence
  SiRNA target sequence
aatttttaataaaataaatc

SEQ ID NO: 67779 - DNA, 20 bp, Artificial sequence
  SiRNA target sequence
atttttaataaaataaatct

SEQ ID NO: 67780 - DNA, 20 bp, Artificial sequence
  SiRNA target sequence
tttttaataaaataaatcta

SEQ ID NO: 67781 - DNA, 20 bp, Artificial sequence
  SiRNA target sequence
ttttaataaaataaatctag

SEQ ID NO: 67782 - DNA, 20 bp, Artificial sequence
  SiRNA target sequence
tttaataaaataaatctaga

SEQ ID NO: 67783 - DNA, 20 bp, Artificial sequence
  SiRNA target sequence
ttaataaaataaatctagaa

SEQ ID NO: 67784 - DNA, 20 bp, Artificial sequence
  SiRNA target sequence
taataaaataaatctagaaa

SEQ ID NO: 67785 - DNA, 20 bp, Artificial sequence
  SiRNA target sequence
aataaaataaatctagaaat

SEQ ID NO: 67786 - DNA, 20 bp, Artificial sequence
  SiRNA target sequence
ataaaataaatctagaaata

SEQ ID NO: 67787 - DNA, 20 bp, Artificial sequence
  SiRNA target sequence
taaaataaatctagaaatat

SEQ ID NO: 67788 - DNA, 20 bp, Artificial sequence
  SiRNA target sequence
aaaataaatctagaaatata

SEQ ID NO: 67789 - DNA, 20 bp, Artificial sequence
  SiRNA target sequence
aaataaatctagaaatatac

SEQ ID NO: 67790 - DNA, 20 bp, Artificial sequence
  SiRNA target sequence
aataaatctagaaatataca

SEQ ID NO: 67791 - DNA, 20 bp, Artificial sequence
  SiRNA target sequence
ataaatctagaaatatacaa

SEQ ID NO: 67792 - DNA, 20 bp, Artificial sequence
  SiRNA target sequence
taaatctagaaatatacaaa

SEQ ID NO: 67793 - DNA, 20 bp, Artificial sequence
  SiRNA target sequence
aaatctagaaatatacaaag

SEQ ID NO: 67794 - DNA, 20 bp, Artificial sequence
  SiRNA target sequence
aatctagaaatatacaaagg

SEQ ID NO: 67795 - DNA, 20 bp, Artificial sequence
  SiRNA target sequence
atctagaaatatacaaagga

SEQ ID NO: 67796 - DNA, 20 bp, Artificial sequence
  SiRNA target sequence
tctagaaatatacaaaggag

SEQ ID NO: 67797 - DNA, 20 bp, Artificial sequence
  SiRNA target sequence
ctagaaatatacaaaggaga

SEQ ID NO: 67798 - DNA, 20 bp, Artificial sequence
  SiRNA target sequence
tagaaatatacaaaggagaa

SEQ ID NO: 67799 - DNA, 20 bp, Artificial sequence
  SiRNA target sequence
agaaatatacaaaggagaaa

SEQ ID NO: 67800 - DNA, 20 bp, Artificial sequence
  SiRNA target sequence
gaaatatacaaaggagaaaa

SEQ ID NO: 67801 - DNA, 20 bp, Artificial sequence
  SiRNA target sequence
aaatatacaaaggagaaaaa

SEQ ID NO: 67802 - DNA, 20 bp, Artificial sequence
  SiRNA target sequence
aatatacaaaggagaaaaag

SEQ ID NO: 67803 - DNA, 20 bp, Artificial sequence
  SiRNA target sequence
atatacaaaggagaaaaagt

SEQ ID NO: 67804 - DNA, 20 bp, Artificial sequence
  SiRNA target sequence
tatacaaaggagaaaaagta

SEQ ID NO: 67805 - DNA, 20 bp, Artificial sequence
  SiRNA target sequence
atacaaaggagaaaaagtag

SEQ ID NO: 67806 - DNA, 20 bp, Artificial sequence
  SiRNA target sequence
tacaaaggagaaaaagtagc

SEQ ID NO: 67807 - DNA, 20 bp, Artificial sequence
  SiRNA target sequence
acaaaggagaaaaagtagca

SEQ ID NO: 67808 - DNA, 20 bp, Artificial sequence
  SiRNA target sequence
caaaggagaaaaagtagcaa

SEQ ID NO: 67809 - DNA, 20 bp, Artificial sequence
  SiRNA target sequence
aaaggagaaaaagtagcaat

SEQ ID NO: 67810 - DNA, 20 bp, Artificial sequence
  SiRNA target sequence
aaggagaaaaagtagcaatt

SEQ ID NO: 67811 - DNA, 20 bp, Artificial sequence
  SiRNA target sequence
aggagaaaaagtagcaatta

SEQ ID NO: 67812 - DNA, 20 bp, Artificial sequence
  SiRNA target sequence
ggagaaaaagtagcaattat

SEQ ID NO: 67813 - DNA, 20 bp, Artificial sequence
  SiRNA target sequence
gagaaaaagtagcaattata

SEQ ID NO: 67814 - DNA, 20 bp, Artificial sequence
  SiRNA target sequence
agaaaaagtagcaattatag

SEQ ID NO: 67815 - DNA, 20 bp, Artificial sequence
  SiRNA target sequence
gaaaaagtagcaattatagg

SEQ ID NO: 67816 - DNA, 20 bp, Artificial sequence
  SiRNA target sequence
aaaaagtagcaattataggt

SEQ ID NO: 67817 - DNA, 20 bp, Artificial sequence
  SiRNA target sequence
aaaagtagcaattataggta

SEQ ID NO: 67818 - DNA, 20 bp, Artificial sequence
  SiRNA target sequence
aaagtagcaattataggtaa

SEQ ID NO: 67819 - DNA, 20 bp, Artificial sequence
  SiRNA target sequence
aagtagcaattataggtaaa

SEQ ID NO: 67820 - DNA, 20 bp, Artificial sequence
  SiRNA target sequence
agtagcaattataggtaaaa

SEQ ID NO: 67821 - DNA, 20 bp, Artificial sequence
  SiRNA target sequence
gtagcaattataggtaaaaa

SEQ ID NO: 67822 - DNA, 20 bp, Artificial sequence
  SiRNA target sequence
tagcaattataggtaaaaat

SEQ ID NO: 67823 - DNA, 20 bp, Artificial sequence
  SiRNA target sequence
agcaattataggtaaaaatg

SEQ ID NO: 67824 - DNA, 20 bp, Artificial sequence
  SiRNA target sequence
gcaattataggtaaaaatgg

SEQ ID NO: 67825 - DNA, 20 bp, Artificial sequence
  SiRNA target sequence
caattataggtaaaaatggt

SEQ ID NO: 67826 - DNA, 20 bp, Artificial sequence
  SiRNA target sequence
aattataggtaaaaatggta

SEQ ID NO: 67827 - DNA, 20 bp, Artificial sequence
  SiRNA target sequence
attataggtaaaaatggtag

SEQ ID NO: 67828 - DNA, 20 bp, Artificial sequence
  SiRNA target sequence
ttataggtaaaaatggtagt

SEQ ID NO: 67829 - DNA, 20 bp, Artificial sequence
  SiRNA target sequence
tataggtaaaaatggtagtg

SEQ ID NO: 67830 - DNA, 20 bp, Artificial sequence
  SiRNA target sequence
ataggtaaaaatggtagtgg

SEQ ID NO: 67831 - DNA, 20 bp, Artificial sequence
  SiRNA target sequence
taggtaaaaatggtagtggt

SEQ ID NO: 67832 - DNA, 20 bp, Artificial sequence
  SiRNA target sequence
aggtaaaaatggtagtggta

SEQ ID NO: 67833 - DNA, 20 bp, Artificial sequence
  SiRNA target sequence
ggtaaaaatggtagtggtaa

SEQ ID NO: 67834 - DNA, 20 bp, Artificial sequence
  SiRNA target sequence
gtaaaaatggtagtggtaaa

SEQ ID NO: 67835 - DNA, 20 bp, Artificial sequence
  SiRNA target sequence
taaaaatggtagtggtaaat

SEQ ID NO: 67836 - DNA, 20 bp, Artificial sequence
  SiRNA target sequence
aaaaatggtagtggtaaatc

SEQ ID NO: 67837 - DNA, 20 bp, Artificial sequence
  SiRNA target sequence
aaaatggtagtggtaaatca

SEQ ID NO: 67838 - DNA, 20 bp, Artificial sequence
  SiRNA target sequence
aaatggtagtggtaaatcaa

SEQ ID NO: 67839 - DNA, 20 bp, Artificial sequence
  SiRNA target sequence
aatggtagtggtaaatcaac

SEQ ID NO: 67840 - DNA, 20 bp, Artificial sequence
  SiRNA target sequence
atggtagtggtaaatcaaca

SEQ ID NO: 67841 - DNA, 20 bp, Artificial sequence
  SiRNA target sequence
tggtagtggtaaatcaacat

SEQ ID NO: 67842 - DNA, 20 bp, Artificial sequence
  SiRNA target sequence
ggtagtggtaaatcaacatt

SEQ ID NO: 67843 - DNA, 20 bp, Artificial sequence
  SiRNA target sequence
gtagtggtaaatcaacatta

SEQ ID NO: 67844 - DNA, 20 bp, Artificial sequence
  SiRNA target sequence
tagtggtaaatcaacattac

SEQ ID NO: 67845 - DNA, 20 bp, Artificial sequence
  SiRNA target sequence
agtggtaaatcaacattact

SEQ ID NO: 67846 - DNA, 20 bp, Artificial sequence
  SiRNA target sequence
gtggtaaatcaacattacta

SEQ ID NO: 67847 - DNA, 20 bp, Artificial sequence
  SiRNA target sequence
tggtaaatcaacattactaa

SEQ ID NO: 67848 - DNA, 20 bp, Artificial sequence
  SiRNA target sequence
ggtaaatcaacattactaaa

SEQ ID NO: 67849 - DNA, 20 bp, Artificial sequence
  SiRNA target sequence
gtaaatcaacattactaaaa

SEQ ID NO: 67850 - DNA, 20 bp, Artificial sequence
  SiRNA target sequence
taaatcaacattactaaaac

SEQ ID NO: 67851 - DNA, 20 bp, Artificial sequence
  SiRNA target sequence
aaatcaacattactaaaact

SEQ ID NO: 67852 - DNA, 20 bp, Artificial sequence
  SiRNA target sequence
aatcaacattactaaaacta

SEQ ID NO: 67853 - DNA, 20 bp, Artificial sequence
  SiRNA target sequence
atcaacattactaaaactac

SEQ ID NO: 67854 - DNA, 20 bp, Artificial sequence
  SiRNA target sequence
tcaacattactaaaactact

SEQ ID NO: 67855 - DNA, 20 bp, Artificial sequence
  SiRNA target sequence
caacattactaaaactactg

SEQ ID NO: 67856 - DNA, 20 bp, Artificial sequence
  SiRNA target sequence
aacattactaaaactactgc

SEQ ID NO: 67857 - DNA, 20 bp, Artificial sequence
  SiRNA target sequence
acattactaaaactactgct

SEQ ID NO: 67858 - DNA, 20 bp, Artificial sequence
  SiRNA target sequence
cattactaaaactactgctt

SEQ ID NO: 67859 - DNA, 20 bp, Artificial sequence
  SiRNA target sequence
attactaaaactactgctta

SEQ ID NO: 67860 - DNA, 20 bp, Artificial sequence
  SiRNA target sequence
ttactaaaactactgcttaa

SEQ ID NO: 67861 - DNA, 20 bp, Artificial sequence
  SiRNA target sequence
tactaaaactactgcttaaa

SEQ ID NO: 67862 - DNA, 20 bp, Artificial sequence
  SiRNA target sequence
actaaaactactgcttaaat

SEQ ID NO: 67863 - DNA, 20 bp, Artificial sequence
  SiRNA target sequence
ctaaaactactgcttaaatt

SEQ ID NO: 67864 - DNA, 20 bp, Artificial sequence
  SiRNA target sequence
taaaactactgcttaaattt

SEQ ID NO: 67865 - DNA, 20 bp, Artificial sequence
  SiRNA target sequence
aaaactactgcttaaatttg

SEQ ID NO: 67866 - DNA, 20 bp, Artificial sequence
  SiRNA target sequence
aaactactgcttaaatttga

SEQ ID NO: 67867 - DNA, 20 bp, Artificial sequence
  SiRNA target sequence
aactactgcttaaatttgat

SEQ ID NO: 67868 - DNA, 20 bp, Artificial sequence
  SiRNA target sequence
actactgcttaaatttgatg

SEQ ID NO: 67869 - DNA, 20 bp, Artificial sequence
  SiRNA target sequence
ctactgcttaaatttgatga

SEQ ID NO: 67870 - DNA, 20 bp, Artificial sequence
  SiRNA target sequence
tactgcttaaatttgatgaa

SEQ ID NO: 67871 - DNA, 20 bp, Artificial sequence
  SiRNA target sequence
actgcttaaatttgatgaag

SEQ ID NO: 67872 - DNA, 20 bp, Artificial sequence
  SiRNA target sequence
ctgcttaaatttgatgaaga

SEQ ID NO: 67873 - DNA, 20 bp, Artificial sequence
  SiRNA target sequence
tgcttaaatttgatgaagat

SEQ ID NO: 67874 - DNA, 20 bp, Artificial sequence
  SiRNA target sequence
gcttaaatttgatgaagatt

SEQ ID NO: 67875 - DNA, 20 bp, Artificial sequence
  SiRNA target sequence
cttaaatttgatgaagatta

SEQ ID NO: 67876 - DNA, 20 bp, Artificial sequence
  SiRNA target sequence
ttaaatttgatgaagattac

SEQ ID NO: 67877 - DNA, 20 bp, Artificial sequence
  SiRNA target sequence
taaatttgatgaagattaca

SEQ ID NO: 67878 - DNA, 20 bp, Artificial sequence
  SiRNA target sequence
aaatttgatgaagattacaa

SEQ ID NO: 67879 - DNA, 20 bp, Artificial sequence
  SiRNA target sequence
aatttgatgaagattacaaa

SEQ ID NO: 67880 - DNA, 20 bp, Artificial sequence
  SiRNA target sequence
atttgatgaagattacaaag

SEQ ID NO: 67881 - DNA, 20 bp, Artificial sequence
  SiRNA target sequence
tttgatgaagattacaaagg

SEQ ID NO: 67882 - DNA, 20 bp, Artificial sequence
  SiRNA target sequence
ttgatgaagattacaaaggt

SEQ ID NO: 67883 - DNA, 20 bp, Artificial sequence
  SiRNA target sequence
tgatgaagattacaaaggta

SEQ ID NO: 67884 - DNA, 20 bp, Artificial sequence
  SiRNA target sequence
gatgaagattacaaaggtag

SEQ ID NO: 67885 - DNA, 20 bp, Artificial sequence
  SiRNA target sequence
atgaagattacaaaggtagc

SEQ ID NO: 67886 - DNA, 20 bp, Artificial sequence
  SiRNA target sequence
tgaagattacaaaggtagca

SEQ ID NO: 67887 - DNA, 20 bp, Artificial sequence
  SiRNA target sequence
gaagattacaaaggtagcat

SEQ ID NO: 67888 - DNA, 20 bp, Artificial sequence
  SiRNA target sequence
aagattacaaaggtagcatt

SEQ ID NO: 67889 - DNA, 20 bp, Artificial sequence
  SiRNA target sequence
agattacaaaggtagcattt

SEQ ID NO: 67890 - DNA, 20 bp, Artificial sequence
  SiRNA target sequence
gattacaaaggtagcatttt

SEQ ID NO: 67891 - DNA, 20 bp, Artificial sequence
  SiRNA target sequence
attacaaaggtagcatttta

SEQ ID NO: 67892 - DNA, 20 bp, Artificial sequence
  SiRNA target sequence
ttacaaaggtagcattttaa

SEQ ID NO: 67893 - DNA, 20 bp, Artificial sequence
  SiRNA target sequence
tacaaaggtagcattttaat

SEQ ID NO: 67894 - DNA, 20 bp, Artificial sequence
  SiRNA target sequence
acaaaggtagcattttaata

SEQ ID NO: 67895 - DNA, 20 bp, Artificial sequence
  SiRNA target sequence
caaaggtagcattttaatag

SEQ ID NO: 67896 - DNA, 20 bp, Artificial sequence
  SiRNA target sequence
aaaggtagcattttaataga

SEQ ID NO: 67897 - DNA, 20 bp, Artificial sequence
  SiRNA target sequence
aaggtagcattttaatagat

SEQ ID NO: 67898 - DNA, 20 bp, Artificial sequence
  SiRNA target sequence
aggtagcattttaatagatg

SEQ ID NO: 67899 - DNA, 20 bp, Artificial sequence
  SiRNA target sequence
ggtagcattttaatagatga

SEQ ID NO: 67900 - DNA, 20 bp, Artificial sequence
  SiRNA target sequence
gtagcattttaatagatgac

SEQ ID NO: 67901 - DNA, 20 bp, Artificial sequence
  SiRNA target sequence
tagcattttaatagatgaca

SEQ ID NO: 67902 - DNA, 20 bp, Artificial sequence
  SiRNA target sequence
agcattttaatagatgacat

SEQ ID NO: 67903 - DNA, 20 bp, Artificial sequence
  SiRNA target sequence
gcattttaatagatgacatt

SEQ ID NO: 67904 - DNA, 20 bp, Artificial sequence
  SiRNA target sequence
cattttaatagatgacattg

SEQ ID NO: 67905 - DNA, 20 bp, Artificial sequence
  SiRNA target sequence
attttaatagatgacattga

SEQ ID NO: 67906 - DNA, 20 bp, Artificial sequence
  SiRNA target sequence
ttttaatagatgacattgat

SEQ ID NO: 67907 - DNA, 20 bp, Artificial sequence
  SiRNA target sequence
tttaatagatgacattgata

SEQ ID NO: 67908 - DNA, 20 bp, Artificial sequence
  SiRNA target sequence
ttaatagatgacattgatat

SEQ ID NO: 67909 - DNA, 20 bp, Artificial sequence
  SiRNA target sequence
taatagatgacattgatatt

SEQ ID NO: 67910 - DNA, 20 bp, Artificial sequence
  SiRNA target sequence
aatagatgacattgatatta

SEQ ID NO: 67911 - DNA, 20 bp, Artificial sequence
  SiRNA target sequence
atagatgacattgatattaa

SEQ ID NO: 67912 - DNA, 20 bp, Artificial sequence
  SiRNA target sequence
tagatgacattgatattaaa

SEQ ID NO: 67913 - DNA, 20 bp, Artificial sequence
  SiRNA target sequence
agatgacattgatattaaaa

SEQ ID NO: 67914 - DNA, 20 bp, Artificial sequence
  SiRNA target sequence
gatgacattgatattaaaaa

SEQ ID NO: 67915 - DNA, 20 bp, Artificial sequence
  SiRNA target sequence
atgacattgatattaaaaaa

SEQ ID NO: 67916 - DNA, 20 bp, Artificial sequence
  SiRNA target sequence
tgacattgatattaaaaaaa

SEQ ID NO: 67917 - DNA, 20 bp, Artificial sequence
  SiRNA target sequence
gacattgatattaaaaaaat

SEQ ID NO: 67918 - DNA, 20 bp, Artificial sequence
  SiRNA target sequence
acattgatattaaaaaaatc

SEQ ID NO: 67919 - DNA, 20 bp, Artificial sequence
  SiRNA target sequence
cattgatattaaaaaaatca

SEQ ID NO: 67920 - DNA, 20 bp, Artificial sequence
  SiRNA target sequence
attgatattaaaaaaatcaa

SEQ ID NO: 67921 - DNA, 20 bp, Artificial sequence
  SiRNA target sequence
ttgatattaaaaaaatcaaa

SEQ ID NO: 67922 - DNA, 20 bp, Artificial sequence
  SiRNA target sequence
tgatattaaaaaaatcaaag

SEQ ID NO: 67923 - DNA, 20 bp, Artificial sequence
  SiRNA target sequence
gatattaaaaaaatcaaaga

SEQ ID NO: 67924 - DNA, 20 bp, Artificial sequence
  SiRNA target sequence
atattaaaaaaatcaaagac

SEQ ID NO: 67925 - DNA, 20 bp, Artificial sequence
  SiRNA target sequence
tattaaaaaaatcaaagacg

SEQ ID NO: 67926 - DNA, 20 bp, Artificial sequence
  SiRNA target sequence
attaaaaaaatcaaagacga

SEQ ID NO: 67927 - DNA, 20 bp, Artificial sequence
  SiRNA target sequence
ttaaaaaaatcaaagacgaa

SEQ ID NO: 67928 - DNA, 20 bp, Artificial sequence
  SiRNA target sequence
taaaaaaatcaaagacgaat

SEQ ID NO: 67929 - DNA, 20 bp, Artificial sequence
  SiRNA target sequence
aaaaaaatcaaagacgaatt

SEQ ID NO: 67930 - DNA, 20 bp, Artificial sequence
  SiRNA target sequence
aaaaaatcaaagacgaattt

SEQ ID NO: 67931 - DNA, 20 bp, Artificial sequence
  SiRNA target sequence
aaaaatcaaagacgaatttt

SEQ ID NO: 67932 - DNA, 20 bp, Artificial sequence
  SiRNA target sequence
aaaatcaaagacgaatttta

SEQ ID NO: 67933 - DNA, 20 bp, Artificial sequence
  SiRNA target sequence
aaatcaaagacgaattttat

SEQ ID NO: 67934 - DNA, 20 bp, Artificial sequence
  SiRNA target sequence
aatcaaagacgaattttata

SEQ ID NO: 67935 - DNA, 20 bp, Artificial sequence
  SiRNA target sequence
atcaaagacgaattttatag

SEQ ID NO: 67936 - DNA, 20 bp, Artificial sequence
  SiRNA target sequence
tcaaagacgaattttatagg

SEQ ID NO: 67937 - DNA, 20 bp, Artificial sequence
  SiRNA target sequence
caaagacgaattttatagga

SEQ ID NO: 67938 - DNA, 20 bp, Artificial sequence
  SiRNA target sequence
aaagacgaattttataggaa

SEQ ID NO: 67939 - DNA, 20 bp, Artificial sequence
  SiRNA target sequence
aagacgaattttataggaat

SEQ ID NO: 67940 - DNA, 20 bp, Artificial sequence
  SiRNA target sequence
agacgaattttataggaatt

SEQ ID NO: 67941 - DNA, 20 bp, Artificial sequence
  SiRNA target sequence
gacgaattttataggaattt

SEQ ID NO: 67942 - DNA, 20 bp, Artificial sequence
  SiRNA target sequence
acgaattttataggaattta

SEQ ID NO: 67943 - DNA, 20 bp, Artificial sequence
  SiRNA target sequence
cgaattttataggaatttat

SEQ ID NO: 67944 - DNA, 20 bp, Artificial sequence
  SiRNA target sequence
gaattttataggaatttatt

SEQ ID NO: 67945 - DNA, 20 bp, Artificial sequence
  SiRNA target sequence
aattttataggaatttatta

SEQ ID NO: 67946 - DNA, 20 bp, Artificial sequence
  SiRNA target sequence
attttataggaatttattag

SEQ ID NO: 67947 - DNA, 20 bp, Artificial sequence
  SiRNA target sequence
ttttataggaatttattagg

SEQ ID NO: 67948 - DNA, 20 bp, Artificial sequence
  SiRNA target sequence
tttataggaatttattaggt

SEQ ID NO: 67949 - DNA, 20 bp, Artificial sequence
  SiRNA target sequence
ttataggaatttattaggtt

SEQ ID NO: 67950 - DNA, 20 bp, Artificial sequence
  SiRNA target sequence
tataggaatttattaggtta

SEQ ID NO: 67951 - DNA, 20 bp, Artificial sequence
  SiRNA target sequence
ataggaatttattaggttac

SEQ ID NO: 67952 - DNA, 20 bp, Artificial sequence
  SiRNA target sequence
taggaatttattaggttaca

SEQ ID NO: 67953 - DNA, 20 bp, Artificial sequence
  SiRNA target sequence
aggaatttattaggttacat

SEQ ID NO: 67954 - DNA, 20 bp, Artificial sequence
  SiRNA target sequence
ggaatttattaggttacata

SEQ ID NO: 67955 - DNA, 20 bp, Artificial sequence
  SiRNA target sequence
gaatttattaggttacatac

SEQ ID NO: 67956 - DNA, 20 bp, Artificial sequence
  SiRNA target sequence
aatttattaggttacatacc

SEQ ID NO: 67957 - DNA, 20 bp, Artificial sequence
  SiRNA target sequence
atttattaggttacatacca

SEQ ID NO: 67958 - DNA, 20 bp, Artificial sequence
  SiRNA target sequence
tttattaggttacataccac

SEQ ID NO: 67959 - DNA, 20 bp, Artificial sequence
  SiRNA target sequence
ttattaggttacataccaca

SEQ ID NO: 67960 - DNA, 20 bp, Artificial sequence
  SiRNA target sequence
tattaggttacataccacag

SEQ ID NO: 67961 - DNA, 20 bp, Artificial sequence
  SiRNA target sequence
attaggttacataccacaga

SEQ ID NO: 67962 - DNA, 20 bp, Artificial sequence
  SiRNA target sequence
ttaggttacataccacagaa

SEQ ID NO: 67963 - DNA, 20 bp, Artificial sequence
  SiRNA target sequence
taggttacataccacagaat

SEQ ID NO: 67964 - DNA, 20 bp, Artificial sequence
  SiRNA target sequence
aggttacataccacagaata

SEQ ID NO: 67965 - DNA, 20 bp, Artificial sequence
  SiRNA target sequence
ggttacataccacagaatac

SEQ ID NO: 67966 - DNA, 20 bp, Artificial sequence
  SiRNA target sequence
gttacataccacagaataca

SEQ ID NO: 67967 - DNA, 20 bp, Artificial sequence
  SiRNA target sequence
ttacataccacagaatacat

SEQ ID NO: 67968 - DNA, 20 bp, Artificial sequence
  SiRNA target sequence
tacataccacagaatacatt

SEQ ID NO: 67969 - DNA, 20 bp, Artificial sequence
  SiRNA target sequence
acataccacagaatacattt

SEQ ID NO: 67970 - DNA, 20 bp, Artificial sequence
  SiRNA target sequence
cataccacagaatacatttt

SEQ ID NO: 67971 - DNA, 20 bp, Artificial sequence
  SiRNA target sequence
ataccacagaatacattttt

SEQ ID NO: 67972 - DNA, 20 bp, Artificial sequence
  SiRNA target sequence
taccacagaatacatttttg

SEQ ID NO: 67973 - DNA, 20 bp, Artificial sequence
  SiRNA target sequence
accacagaatacatttttgt

SEQ ID NO: 67974 - DNA, 20 bp, Artificial sequence
  SiRNA target sequence
ccacagaatacatttttgtt

SEQ ID NO: 67975 - DNA, 20 bp, Artificial sequence
  SiRNA target sequence
cacagaatacatttttgttt

SEQ ID NO: 67976 - DNA, 20 bp, Artificial sequence
  SiRNA target sequence
acagaatacatttttgttta

SEQ ID NO: 67977 - DNA, 20 bp, Artificial sequence
  SiRNA target sequence
cagaatacatttttgtttaa

SEQ ID NO: 67978 - DNA, 20 bp, Artificial sequence
  SiRNA target sequence
agaatacatttttgtttaat

SEQ ID NO: 67979 - DNA, 20 bp, Artificial sequence
  SiRNA target sequence
gaatacatttttgtttaatg

SEQ ID NO: 67980 - DNA, 20 bp, Artificial sequence
  SiRNA target sequence
aatacatttttgtttaatga

SEQ ID NO: 67981 - DNA, 20 bp, Artificial sequence
  SiRNA target sequence
atacatttttgtttaatgaa

SEQ ID NO: 67982 - DNA, 20 bp, Artificial sequence
  SiRNA target sequence
tacatttttgtttaatgaat

SEQ ID NO: 67983 - DNA, 20 bp, Artificial sequence
  SiRNA target sequence
acatttttgtttaatgaatc

SEQ ID NO: 67984 - DNA, 20 bp, Artificial sequence
  SiRNA target sequence
catttttgtttaatgaatct

SEQ ID NO: 67985 - DNA, 20 bp, Artificial sequence
  SiRNA target sequence
atttttgtttaatgaatctg

SEQ ID NO: 67986 - DNA, 20 bp, Artificial sequence
  SiRNA target sequence
tttttgtttaatgaatctgt

SEQ ID NO: 67987 - DNA, 20 bp, Artificial sequence
  SiRNA target sequence
ttttgtttaatgaatctgta

SEQ ID NO: 67988 - DNA, 20 bp, Artificial sequence
  SiRNA target sequence
tttgtttaatgaatctgtaa

SEQ ID NO: 67989 - DNA, 20 bp, Artificial sequence
  SiRNA target sequence
ttgtttaatgaatctgtaaa

SEQ ID NO: 67990 - DNA, 20 bp, Artificial sequence
  SiRNA target sequence
tgtttaatgaatctgtaaaa

SEQ ID NO: 67991 - DNA, 20 bp, Artificial sequence
  SiRNA target sequence
gtttaatgaatctgtaaaat

SEQ ID NO: 67992 - DNA, 20 bp, Artificial sequence
  SiRNA target sequence
tttaatgaatctgtaaaata

SEQ ID NO: 67993 - DNA, 20 bp, Artificial sequence
  SiRNA target sequence
ttaatgaatctgtaaaatat

SEQ ID NO: 67994 - DNA, 20 bp, Artificial sequence
  SiRNA target sequence
taatgaatctgtaaaatata

SEQ ID NO: 67995 - DNA, 20 bp, Artificial sequence
  SiRNA target sequence
aatgaatctgtaaaatataa

SEQ ID NO: 67996 - DNA, 20 bp, Artificial sequence
  SiRNA target sequence
atgaatctgtaaaatataat

SEQ ID NO: 67997 - DNA, 20 bp, Artificial sequence
  SiRNA target sequence
tgaatctgtaaaatataata

SEQ ID NO: 67998 - DNA, 20 bp, Artificial sequence
  SiRNA target sequence
gaatctgtaaaatataatat

SEQ ID NO: 67999 - DNA, 20 bp, Artificial sequence
  SiRNA target sequence
aatctgtaaaatataatatt

SEQ ID NO: 68000 - DNA, 20 bp, Artificial sequence
  SiRNA target sequence
atctgtaaaatataatatta

SEQ ID NO: 68001 - DNA, 20 bp, Artificial sequence
  SiRNA target sequence
tctgtaaaatataatattaa

SEQ ID NO: 68002 - DNA, 20 bp, Artificial sequence
  SiRNA target sequence
ctgtaaaatataatattaaa

SEQ ID NO: 68003 - DNA, 20 bp, Artificial sequence
  SiRNA target sequence
tgtaaaatataatattaaat

SEQ ID NO: 68004 - DNA, 20 bp, Artificial sequence
  SiRNA target sequence
gtaaaatataatattaaata

SEQ ID NO: 68005 - DNA, 20 bp, Artificial sequence
  SiRNA target sequence
taaaatataatattaaatac

SEQ ID NO: 68006 - DNA, 20 bp, Artificial sequence
  SiRNA target sequence
aaaatataatattaaatacg

SEQ ID NO: 68007 - DNA, 20 bp, Artificial sequence
  SiRNA target sequence
aaatataatattaaatacgg

SEQ ID NO: 68008 - DNA, 20 bp, Artificial sequence
  SiRNA target sequence
aatataatattaaatacgga

SEQ ID NO: 68009 - DNA, 20 bp, Artificial sequence
  SiRNA target sequence
atataatattaaatacggat

SEQ ID NO: 68010 - DNA, 20 bp, Artificial sequence
  SiRNA target sequence
tataatattaaatacggatc

SEQ ID NO: 68011 - DNA, 20 bp, Artificial sequence
  SiRNA target sequence
ataatattaaatacggatct

SEQ ID NO: 68012 - DNA, 20 bp, Artificial sequence
  SiRNA target sequence
taatattaaatacggatctt

SEQ ID NO: 68013 - DNA, 20 bp, Artificial sequence
  SiRNA target sequence
aatattaaatacggatcttt

SEQ ID NO: 68014 - DNA, 20 bp, Artificial sequence
  SiRNA target sequence
atattaaatacggatctttt

SEQ ID NO: 68015 - DNA, 20 bp, Artificial sequence
  SiRNA target sequence
tattaaatacggatcttttg

SEQ ID NO: 68016 - DNA, 20 bp, Artificial sequence
  SiRNA target sequence
attaaatacggatcttttgg

SEQ ID NO: 68017 - DNA, 20 bp, Artificial sequence
  SiRNA target sequence
ttaaatacggatcttttggt

SEQ ID NO: 68018 - DNA, 20 bp, Artificial sequence
  SiRNA target sequence
taaatacggatcttttggta

SEQ ID NO: 68019 - DNA, 20 bp, Artificial sequence
  SiRNA target sequence
aaatacggatcttttggtat

SEQ ID NO: 68020 - DNA, 20 bp, Artificial sequence
  SiRNA target sequence
aatacggatcttttggtatt

SEQ ID NO: 68021 - DNA, 20 bp, Artificial sequence
  SiRNA target sequence
atacggatcttttggtattt

SEQ ID NO: 68022 - DNA, 20 bp, Artificial sequence
  SiRNA target sequence
tacggatcttttggtatttc

SEQ ID NO: 68023 - DNA, 20 bp, Artificial sequence
  SiRNA target sequence
acggatcttttggtatttca

SEQ ID NO: 68024 - DNA, 20 bp, Artificial sequence
  SiRNA target sequence
cggatcttttggtatttcag

SEQ ID NO: 68025 - DNA, 20 bp, Artificial sequence
  SiRNA target sequence
ggatcttttggtatttcaga

SEQ ID NO: 68026 - DNA, 20 bp, Artificial sequence
  SiRNA target sequence
gatcttttggtatttcagac

SEQ ID NO: 68027 - DNA, 20 bp, Artificial sequence
  SiRNA target sequence
atcttttggtatttcagacg

SEQ ID NO: 68028 - DNA, 20 bp, Artificial sequence
  SiRNA target sequence
tcttttggtatttcagacga

SEQ ID NO: 68029 - DNA, 20 bp, Artificial sequence
  SiRNA target sequence
cttttggtatttcagacgag

SEQ ID NO: 68030 - DNA, 20 bp, Artificial sequence
  SiRNA target sequence
ttttggtatttcagacgagg

SEQ ID NO: 68031 - DNA, 20 bp, Artificial sequence
  SiRNA target sequence
tttggtatttcagacgagga

SEQ ID NO: 68032 - DNA, 20 bp, Artificial sequence
  SiRNA target sequence
ttggtatttcagacgaggat

SEQ ID NO: 68033 - DNA, 20 bp, Artificial sequence
  SiRNA target sequence
tggtatttcagacgaggata

SEQ ID NO: 68034 - DNA, 20 bp, Artificial sequence
  SiRNA target sequence
ggtatttcagacgaggatat

SEQ ID NO: 68035 - DNA, 20 bp, Artificial sequence
  SiRNA target sequence
gtatttcagacgaggatatt

SEQ ID NO: 68036 - DNA, 20 bp, Artificial sequence
  SiRNA target sequence
tatttcagacgaggatattt

SEQ ID NO: 68037 - DNA, 20 bp, Artificial sequence
  SiRNA target sequence
atttcagacgaggatatttt

SEQ ID NO: 68038 - DNA, 20 bp, Artificial sequence
  SiRNA target sequence
tttcagacgaggatattttt

SEQ ID NO: 68039 - DNA, 20 bp, Artificial sequence
  SiRNA target sequence
ttcagacgaggatatttttg

SEQ ID NO: 68040 - DNA, 20 bp, Artificial sequence
  SiRNA target sequence
tcagacgaggatatttttgc

SEQ ID NO: 68041 - DNA, 20 bp, Artificial sequence
  SiRNA target sequence
cagacgaggatatttttgca

SEQ ID NO: 68042 - DNA, 20 bp, Artificial sequence
  SiRNA target sequence
agacgaggatatttttgcat

SEQ ID NO: 68043 - DNA, 20 bp, Artificial sequence
  SiRNA target sequence
gacgaggatatttttgcatt

SEQ ID NO: 68044 - DNA, 20 bp, Artificial sequence
  SiRNA target sequence
acgaggatatttttgcattg

SEQ ID NO: 68045 - DNA, 20 bp, Artificial sequence
  SiRNA target sequence
cgaggatatttttgcattgt

SEQ ID NO: 68046 - DNA, 20 bp, Artificial sequence
  SiRNA target sequence
gaggatatttttgcattgtg

SEQ ID NO: 68047 - DNA, 20 bp, Artificial sequence
  SiRNA target sequence
aggatatttttgcattgtgt

SEQ ID NO: 68048 - DNA, 20 bp, Artificial sequence
  SiRNA target sequence
ggatatttttgcattgtgta

SEQ ID NO: 68049 - DNA, 20 bp, Artificial sequence
  SiRNA target sequence
gatatttttgcattgtgtaa

SEQ ID NO: 68050 - DNA, 20 bp, Artificial sequence
  SiRNA target sequence
atatttttgcattgtgtaaa

SEQ ID NO: 68051 - DNA, 20 bp, Artificial sequence
  SiRNA target sequence
tatttttgcattgtgtaaag

SEQ ID NO: 68052 - DNA, 20 bp, Artificial sequence
  SiRNA target sequence
atttttgcattgtgtaaaga

SEQ ID NO: 68053 - DNA, 20 bp, Artificial sequence
  SiRNA target sequence
tttttgcattgtgtaaagag

SEQ ID NO: 68054 - DNA, 20 bp, Artificial sequence
  SiRNA target sequence
ttttgcattgtgtaaagagt

SEQ ID NO: 68055 - DNA, 20 bp, Artificial sequence
  SiRNA target sequence
tttgcattgtgtaaagagtt

SEQ ID NO: 68056 - DNA, 20 bp, Artificial sequence
  SiRNA target sequence
ttgcattgtgtaaagagttt

SEQ ID NO: 68057 - DNA, 20 bp, Artificial sequence
  SiRNA target sequence
tgcattgtgtaaagagtttg

SEQ ID NO: 68058 - DNA, 20 bp, Artificial sequence
  SiRNA target sequence
gcattgtgtaaagagtttgg

SEQ ID NO: 68059 - DNA, 20 bp, Artificial sequence
  SiRNA target sequence
cattgtgtaaagagtttgga

SEQ ID NO: 68060 - DNA, 20 bp, Artificial sequence
  SiRNA target sequence
attgtgtaaagagtttggat

SEQ ID NO: 68061 - DNA, 20 bp, Artificial sequence
  SiRNA target sequence
ttgtgtaaagagtttggatt

SEQ ID NO: 68062 - DNA, 20 bp, Artificial sequence
  SiRNA target sequence
tgtgtaaagagtttggatta

SEQ ID NO: 68063 - DNA, 20 bp, Artificial sequence
  SiRNA target sequence
gtgtaaagagtttggattat

SEQ ID NO: 68064 - DNA, 20 bp, Artificial sequence
  SiRNA target sequence
tgtaaagagtttggattata

SEQ ID NO: 68065 - DNA, 20 bp, Artificial sequence
  SiRNA target sequence
gtaaagagtttggattatat

SEQ ID NO: 68066 - DNA, 20 bp, Artificial sequence
  SiRNA target sequence
taaagagtttggattatatg

SEQ ID NO: 68067 - DNA, 20 bp, Artificial sequence
  SiRNA target sequence
aaagagtttggattatatga

SEQ ID NO: 68068 - DNA, 20 bp, Artificial sequence
  SiRNA target sequence
aagagtttggattatatgac

SEQ ID NO: 68069 - DNA, 20 bp, Artificial sequence
  SiRNA target sequence
agagtttggattatatgacg

SEQ ID NO: 68070 - DNA, 20 bp, Artificial sequence
  SiRNA target sequence
gagtttggattatatgacgt

SEQ ID NO: 68071 - DNA, 20 bp, Artificial sequence
  SiRNA target sequence
agtttggattatatgacgtt

SEQ ID NO: 68072 - DNA, 20 bp, Artificial sequence
  SiRNA target sequence
gtttggattatatgacgttt

SEQ ID NO: 68073 - DNA, 20 bp, Artificial sequence
  SiRNA target sequence
tttggattatatgacgtttt

SEQ ID NO: 68074 - DNA, 20 bp, Artificial sequence
  SiRNA target sequence
ttggattatatgacgttttc

SEQ ID NO: 68075 - DNA, 20 bp, Artificial sequence
  SiRNA target sequence
tggattatatgacgttttca

SEQ ID NO: 68076 - DNA, 20 bp, Artificial sequence
  SiRNA target sequence
ggattatatgacgttttcat

SEQ ID NO: 68077 - DNA, 20 bp, Artificial sequence
  SiRNA target sequence
gattatatgacgttttcatg

SEQ ID NO: 68078 - DNA, 20 bp, Artificial sequence
  SiRNA target sequence
attatatgacgttttcatga

SEQ ID NO: 68079 - DNA, 20 bp, Artificial sequence
  SiRNA target sequence
ttatatgacgttttcatgaa

SEQ ID NO: 68080 - DNA, 20 bp, Artificial sequence
  SiRNA target sequence
tatatgacgttttcatgaac

SEQ ID NO: 68081 - DNA, 20 bp, Artificial sequence
  SiRNA target sequence
atatgacgttttcatgaacc

SEQ ID NO: 68082 - DNA, 20 bp, Artificial sequence
  SiRNA target sequence
tatgacgttttcatgaacct

SEQ ID NO: 68083 - DNA, 20 bp, Artificial sequence
  SiRNA target sequence
atgacgttttcatgaacctc

SEQ ID NO: 68084 - DNA, 20 bp, Artificial sequence
  SiRNA target sequence
tgacgttttcatgaacctcg

SEQ ID NO: 68085 - DNA, 20 bp, Artificial sequence
  SiRNA target sequence
gacgttttcatgaacctcga

SEQ ID NO: 68086 - DNA, 20 bp, Artificial sequence
  SiRNA target sequence
acgttttcatgaacctcgaa

SEQ ID NO: 68087 - DNA, 20 bp, Artificial sequence
  SiRNA target sequence
cgttttcatgaacctcgaaa

SEQ ID NO: 68088 - DNA, 20 bp, Artificial sequence
  SiRNA target sequence
gttttcatgaacctcgaaaa

SEQ ID NO: 68089 - DNA, 20 bp, Artificial sequence
  SiRNA target sequence
ttttcatgaacctcgaaaat

SEQ ID NO: 68090 - DNA, 20 bp, Artificial sequence
  SiRNA target sequence
tttcatgaacctcgaaaatg

SEQ ID NO: 68091 - DNA, 20 bp, Artificial sequence
  SiRNA target sequence
ttcatgaacctcgaaaatgg

SEQ ID NO: 68092 - DNA, 20 bp, Artificial sequence
  SiRNA target sequence
tcatgaacctcgaaaatggt

SEQ ID NO: 68093 - DNA, 20 bp, Artificial sequence
  SiRNA target sequence
catgaacctcgaaaatggtt

SEQ ID NO: 68094 - DNA, 20 bp, Artificial sequence
  SiRNA target sequence
atgaacctcgaaaatggttt

SEQ ID NO: 68095 - DNA, 20 bp, Artificial sequence
  SiRNA target sequence
tgaacctcgaaaatggtttt

SEQ ID NO: 68096 - DNA, 20 bp, Artificial sequence
  SiRNA target sequence
gaacctcgaaaatggttttg

SEQ ID NO: 68097 - DNA, 20 bp, Artificial sequence
  SiRNA target sequence
aacctcgaaaatggttttga

SEQ ID NO: 68098 - DNA, 20 bp, Artificial sequence
  SiRNA target sequence
acctcgaaaatggttttgat

SEQ ID NO: 68099 - DNA, 20 bp, Artificial sequence
  SiRNA target sequence
cctcgaaaatggttttgata

SEQ ID NO: 68100 - DNA, 20 bp, Artificial sequence
  SiRNA target sequence
ctcgaaaatggttttgatac

SEQ ID NO: 68101 - DNA, 20 bp, Artificial sequence
  SiRNA target sequence
tcgaaaatggttttgatacg

SEQ ID NO: 68102 - DNA, 20 bp, Artificial sequence
  SiRNA target sequence
cgaaaatggttttgatacga

SEQ ID NO: 68103 - DNA, 20 bp, Artificial sequence
  SiRNA target sequence
gaaaatggttttgatacgaa

SEQ ID NO: 68104 - DNA, 20 bp, Artificial sequence
  SiRNA target sequence
aaaatggttttgatacgaat

SEQ ID NO: 68105 - DNA, 20 bp, Artificial sequence
  SiRNA target sequence
aaatggttttgatacgaatg

SEQ ID NO: 68106 - DNA, 20 bp, Artificial sequence
  SiRNA target sequence
aatggttttgatacgaatgt

SEQ ID NO: 68107 - DNA, 20 bp, Artificial sequence
  SiRNA target sequence
atggttttgatacgaatgta

SEQ ID NO: 68108 - DNA, 20 bp, Artificial sequence
  SiRNA target sequence
tggttttgatacgaatgtag

SEQ ID NO: 68109 - DNA, 20 bp, Artificial sequence
  SiRNA target sequence
ggttttgatacgaatgtagg

SEQ ID NO: 68110 - DNA, 20 bp, Artificial sequence
  SiRNA target sequence
gttttgatacgaatgtagga

SEQ ID NO: 68111 - DNA, 20 bp, Artificial sequence
  SiRNA target sequence
ttttgatacgaatgtaggag

SEQ ID NO: 68112 - DNA, 20 bp, Artificial sequence
  SiRNA target sequence
tttgatacgaatgtaggaga

SEQ ID NO: 68113 - DNA, 20 bp, Artificial sequence
  SiRNA target sequence
ttgatacgaatgtaggagaa

SEQ ID NO: 68114 - DNA, 20 bp, Artificial sequence
  SiRNA target sequence
tgatacgaatgtaggagaaa

SEQ ID NO: 68115 - DNA, 20 bp, Artificial sequence
  SiRNA target sequence
gatacgaatgtaggagaaag

SEQ ID NO: 68116 - DNA, 20 bp, Artificial sequence
  SiRNA target sequence
atacgaatgtaggagaaaga

SEQ ID NO: 68117 - DNA, 20 bp, Artificial sequence
  SiRNA target sequence
tacgaatgtaggagaaagag

SEQ ID NO: 68118 - DNA, 20 bp, Artificial sequence
  SiRNA target sequence
acgaatgtaggagaaagagg

SEQ ID NO: 68119 - DNA, 20 bp, Artificial sequence
  SiRNA target sequence
cgaatgtaggagaaagagga

SEQ ID NO: 68120 - DNA, 20 bp, Artificial sequence
  SiRNA target sequence
gaatgtaggagaaagaggaa

SEQ ID NO: 68121 - DNA, 20 bp, Artificial sequence
  SiRNA target sequence
aatgtaggagaaagaggaag

SEQ ID NO: 68122 - DNA, 20 bp, Artificial sequence
  SiRNA target sequence
atgtaggagaaagaggaagg

SEQ ID NO: 68123 - DNA, 20 bp, Artificial sequence
  SiRNA target sequence
tgtaggagaaagaggaaggt

SEQ ID NO: 68124 - DNA, 20 bp, Artificial sequence
  SiRNA target sequence
gtaggagaaagaggaaggtt

SEQ ID NO: 68125 - DNA, 20 bp, Artificial sequence
  SiRNA target sequence
taggagaaagaggaaggtta

SEQ ID NO: 68126 - DNA, 20 bp, Artificial sequence
  SiRNA target sequence
aggagaaagaggaaggttat

SEQ ID NO: 68127 - DNA, 20 bp, Artificial sequence
  SiRNA target sequence
ggagaaagaggaaggttatt

SEQ ID NO: 68128 - DNA, 20 bp, Artificial sequence
  SiRNA target sequence
gagaaagaggaaggttatta

SEQ ID NO: 68129 - DNA, 20 bp, Artificial sequence
  SiRNA target sequence
agaaagaggaaggttattaa

SEQ ID NO: 68130 - DNA, 20 bp, Artificial sequence
  SiRNA target sequence
gaaagaggaaggttattaag

SEQ ID NO: 68131 - DNA, 20 bp, Artificial sequence
  SiRNA target sequence
aaagaggaaggttattaagt

SEQ ID NO: 68132 - DNA, 20 bp, Artificial sequence
  SiRNA target sequence
aagaggaaggttattaagtg

SEQ ID NO: 68133 - DNA, 20 bp, Artificial sequence
  SiRNA target sequence
agaggaaggttattaagtgg

SEQ ID NO: 68134 - DNA, 20 bp, Artificial sequence
  SiRNA target sequence
gaggaaggttattaagtggt

SEQ ID NO: 68135 - DNA, 20 bp, Artificial sequence
  SiRNA target sequence
aggaaggttattaagtggtg

SEQ ID NO: 68136 - DNA, 20 bp, Artificial sequence
  SiRNA target sequence
ggaaggttattaagtggtgg

SEQ ID NO: 68137 - DNA, 20 bp, Artificial sequence
  SiRNA target sequence
gaaggttattaagtggtgga

SEQ ID NO: 68138 - DNA, 20 bp, Artificial sequence
  SiRNA target sequence
aaggttattaagtggtggag

SEQ ID NO: 68139 - DNA, 20 bp, Artificial sequence
  SiRNA target sequence
aggttattaagtggtggaga

SEQ ID NO: 68140 - DNA, 20 bp, Artificial sequence
  SiRNA target sequence
ggttattaagtggtggagaa

SEQ ID NO: 68141 - DNA, 20 bp, Artificial sequence
  SiRNA target sequence
gttattaagtggtggagaaa

SEQ ID NO: 68142 - DNA, 20 bp, Artificial sequence
  SiRNA target sequence
ttattaagtggtggagaaaa

SEQ ID NO: 68143 - DNA, 20 bp, Artificial sequence
  SiRNA target sequence
tattaagtggtggagaaaag

SEQ ID NO: 68144 - DNA, 20 bp, Artificial sequence
  SiRNA target sequence
attaagtggtggagaaaagc

SEQ ID NO: 68145 - DNA, 20 bp, Artificial sequence
  SiRNA target sequence
ttaagtggtggagaaaagca

SEQ ID NO: 68146 - DNA, 20 bp, Artificial sequence
  SiRNA target sequence
taagtggtggagaaaagcaa

SEQ ID NO: 68147 - DNA, 20 bp, Artificial sequence
  SiRNA target sequence
aagtggtggagaaaagcaaa

SEQ ID NO: 68148 - DNA, 20 bp, Artificial sequence
  SiRNA target sequence
agtggtggagaaaagcaaaa

SEQ ID NO: 68149 - DNA, 20 bp, Artificial sequence
  SiRNA target sequence
gtggtggagaaaagcaaaag

SEQ ID NO: 68150 - DNA, 20 bp, Artificial sequence
  SiRNA target sequence
tggtggagaaaagcaaaaga

SEQ ID NO: 68151 - DNA, 20 bp, Artificial sequence
  SiRNA target sequence
ggtggagaaaagcaaaagat

SEQ ID NO: 68152 - DNA, 20 bp, Artificial sequence
  SiRNA target sequence
gtggagaaaagcaaaagatt

SEQ ID NO: 68153 - DNA, 20 bp, Artificial sequence
  SiRNA target sequence
tggagaaaagcaaaagattt

SEQ ID NO: 68154 - DNA, 20 bp, Artificial sequence
  SiRNA target sequence
ggagaaaagcaaaagatttt

SEQ ID NO: 68155 - DNA, 20 bp, Artificial sequence
  SiRNA target sequence
gagaaaagcaaaagatttta

SEQ ID NO: 68156 - DNA, 20 bp, Artificial sequence
  SiRNA target sequence
agaaaagcaaaagattttat

SEQ ID NO: 68157 - DNA, 20 bp, Artificial sequence
  SiRNA target sequence
gaaaagcaaaagattttatt

SEQ ID NO: 68158 - DNA, 20 bp, Artificial sequence
  SiRNA target sequence
aaaagcaaaagattttatta

SEQ ID NO: 68159 - DNA, 20 bp, Artificial sequence
  SiRNA target sequence
aaagcaaaagattttattaa

SEQ ID NO: 68160 - DNA, 20 bp, Artificial sequence
  SiRNA target sequence
aagcaaaagattttattaat

SEQ ID NO: 68161 - DNA, 20 bp, Artificial sequence
  SiRNA target sequence
agcaaaagattttattaatg

SEQ ID NO: 68162 - DNA, 20 bp, Artificial sequence
  SiRNA target sequence
gcaaaagattttattaatgc

SEQ ID NO: 68163 - DNA, 20 bp, Artificial sequence
  SiRNA target sequence
caaaagattttattaatgcg

SEQ ID NO: 68164 - DNA, 20 bp, Artificial sequence
  SiRNA target sequence
aaaagattttattaatgcgt

SEQ ID NO: 68165 - DNA, 20 bp, Artificial sequence
  SiRNA target sequence
aaagattttattaatgcgta

SEQ ID NO: 68166 - DNA, 20 bp, Artificial sequence
  SiRNA target sequence
aagattttattaatgcgtac

SEQ ID NO: 68167 - DNA, 20 bp, Artificial sequence
  SiRNA target sequence
agattttattaatgcgtact

SEQ ID NO: 68168 - DNA, 20 bp, Artificial sequence
  SiRNA target sequence
gattttattaatgcgtacta

SEQ ID NO: 68169 - DNA, 20 bp, Artificial sequence
  SiRNA target sequence
attttattaatgcgtactat

SEQ ID NO: 68170 - DNA, 20 bp, Artificial sequence
  SiRNA target sequence
ttttattaatgcgtactatg

SEQ ID NO: 68171 - DNA, 20 bp, Artificial sequence
  SiRNA target sequence
tttattaatgcgtactatgt

SEQ ID NO: 68172 - DNA, 20 bp, Artificial sequence
  SiRNA target sequence
ttattaatgcgtactatgtt

SEQ ID NO: 68173 - DNA, 20 bp, Artificial sequence
  SiRNA target sequence
tattaatgcgtactatgtta

SEQ ID NO: 68174 - DNA, 20 bp, Artificial sequence
  SiRNA target sequence
attaatgcgtactatgttaa

SEQ ID NO: 68175 - DNA, 20 bp, Artificial sequence
  SiRNA target sequence
ttaatgcgtactatgttaag

SEQ ID NO: 68176 - DNA, 20 bp, Artificial sequence
  SiRNA target sequence
taatgcgtactatgttaaga

SEQ ID NO: 68177 - DNA, 20 bp, Artificial sequence
  SiRNA target sequence
aatgcgtactatgttaagaa

SEQ ID NO: 68178 - DNA, 20 bp, Artificial sequence
  SiRNA target sequence
atgcgtactatgttaagaaa

SEQ ID NO: 68179 - DNA, 20 bp, Artificial sequence
  SiRNA target sequence
tgcgtactatgttaagaaac

SEQ ID NO: 68180 - DNA, 20 bp, Artificial sequence
  SiRNA target sequence
gcgtactatgttaagaaaca

SEQ ID NO: 68181 - DNA, 20 bp, Artificial sequence
  SiRNA target sequence
cgtactatgttaagaaacaa

SEQ ID NO: 68182 - DNA, 20 bp, Artificial sequence
  SiRNA target sequence
gtactatgttaagaaacaag

SEQ ID NO: 68183 - DNA, 20 bp, Artificial sequence
  SiRNA target sequence
tactatgttaagaaacaagg

SEQ ID NO: 68184 - DNA, 20 bp, Artificial sequence
  SiRNA target sequence
actatgttaagaaacaagga

SEQ ID NO: 68185 - DNA, 20 bp, Artificial sequence
  SiRNA target sequence
ctatgttaagaaacaaggag

SEQ ID NO: 68186 - DNA, 20 bp, Artificial sequence
  SiRNA target sequence
tatgttaagaaacaaggaga

SEQ ID NO: 68187 - DNA, 20 bp, Artificial sequence
  SiRNA target sequence
atgttaagaaacaaggagat

SEQ ID NO: 68188 - DNA, 20 bp, Artificial sequence
  SiRNA target sequence
tgttaagaaacaaggagata

SEQ ID NO: 68189 - DNA, 20 bp, Artificial sequence
  SiRNA target sequence
gttaagaaacaaggagataa

SEQ ID NO: 68190 - DNA, 20 bp, Artificial sequence
  SiRNA target sequence
ttaagaaacaaggagataat

SEQ ID NO: 68191 - DNA, 20 bp, Artificial sequence
  SiRNA target sequence
taagaaacaaggagataatg

SEQ ID NO: 68192 - DNA, 20 bp, Artificial sequence
  SiRNA target sequence
aagaaacaaggagataatgg

SEQ ID NO: 68193 - DNA, 20 bp, Artificial sequence
  SiRNA target sequence
agaaacaaggagataatggc

SEQ ID NO: 68194 - DNA, 20 bp, Artificial sequence
  SiRNA target sequence
gaaacaaggagataatggca

SEQ ID NO: 68195 - DNA, 20 bp, Artificial sequence
  SiRNA target sequence
aaacaaggagataatggcat

SEQ ID NO: 68196 - DNA, 20 bp, Artificial sequence
  SiRNA target sequence
aacaaggagataatggcatt

SEQ ID NO: 68197 - DNA, 20 bp, Artificial sequence
  SiRNA target sequence
acaaggagataatggcatta

SEQ ID NO: 68198 - DNA, 20 bp, Artificial sequence
  SiRNA target sequence
caaggagataatggcattag

SEQ ID NO: 68199 - DNA, 20 bp, Artificial sequence
  SiRNA target sequence
aaggagataatggcattaga

SEQ ID NO: 68200 - DNA, 20 bp, Artificial sequence
  SiRNA target sequence
aggagataatggcattagat

SEQ ID NO: 68201 - DNA, 20 bp, Artificial sequence
  SiRNA target sequence
ggagataatggcattagatg

SEQ ID NO: 68202 - DNA, 20 bp, Artificial sequence
  SiRNA target sequence
gagataatggcattagatga

SEQ ID NO: 68203 - DNA, 20 bp, Artificial sequence
  SiRNA target sequence
agataatggcattagatgaa

SEQ ID NO: 68204 - DNA, 20 bp, Artificial sequence
  SiRNA target sequence
gataatggcattagatgaac

SEQ ID NO: 68205 - DNA, 20 bp, Artificial sequence
  SiRNA target sequence
ataatggcattagatgaacc

SEQ ID NO: 68206 - DNA, 20 bp, Artificial sequence
  SiRNA target sequence
taatggcattagatgaaccc

SEQ ID NO: 68207 - DNA, 20 bp, Artificial sequence
  SiRNA target sequence
aatggcattagatgaaccca

SEQ ID NO: 68208 - DNA, 20 bp, Artificial sequence
  SiRNA target sequence
atggcattagatgaacccac

SEQ ID NO: 68209 - DNA, 20 bp, Artificial sequence
  SiRNA target sequence
tggcattagatgaacccact

SEQ ID NO: 68210 - DNA, 20 bp, Artificial sequence
  SiRNA target sequence
ggcattagatgaacccactg

SEQ ID NO: 68211 - DNA, 20 bp, Artificial sequence
  SiRNA target sequence
gcattagatgaacccactgc

SEQ ID NO: 68212 - DNA, 20 bp, Artificial sequence
  SiRNA target sequence
cattagatgaacccactgca

SEQ ID NO: 68213 - DNA, 20 bp, Artificial sequence
  SiRNA target sequence
attagatgaacccactgcag

SEQ ID NO: 68214 - DNA, 20 bp, Artificial sequence
  SiRNA target sequence
ttagatgaacccactgcagc

SEQ ID NO: 68215 - DNA, 20 bp, Artificial sequence
  SiRNA target sequence
tagatgaacccactgcagca

SEQ ID NO: 68216 - DNA, 20 bp, Artificial sequence
  SiRNA target sequence
agatgaacccactgcagcac

SEQ ID NO: 68217 - DNA, 20 bp, Artificial sequence
  SiRNA target sequence
gatgaacccactgcagcact

SEQ ID NO: 68218 - DNA, 20 bp, Artificial sequence
  SiRNA target sequence
atgaacccactgcagcactt

SEQ ID NO: 68219 - DNA, 20 bp, Artificial sequence
  SiRNA target sequence
tgaacccactgcagcacttg

SEQ ID NO: 68220 - DNA, 20 bp, Artificial sequence
  SiRNA target sequence
gaacccactgcagcacttga

SEQ ID NO: 68221 - DNA, 20 bp, Artificial sequence
  SiRNA target sequence
aacccactgcagcacttgat

SEQ ID NO: 68222 - DNA, 20 bp, Artificial sequence
  SiRNA target sequence
acccactgcagcacttgata

SEQ ID NO: 68223 - DNA, 20 bp, Artificial sequence
  SiRNA target sequence
cccactgcagcacttgataa

SEQ ID NO: 68224 - DNA, 20 bp, Artificial sequence
  SiRNA target sequence
ccactgcagcacttgataag

SEQ ID NO: 68225 - DNA, 20 bp, Artificial sequence
  SiRNA target sequence
cactgcagcacttgataagg

SEQ ID NO: 68226 - DNA, 20 bp, Artificial sequence
  SiRNA target sequence
actgcagcacttgataagga

SEQ ID NO: 68227 - DNA, 20 bp, Artificial sequence
  SiRNA target sequence
ctgcagcacttgataaggag

SEQ ID NO: 68228 - DNA, 20 bp, Artificial sequence
  SiRNA target sequence
tgcagcacttgataaggagt

SEQ ID NO: 68229 - DNA, 20 bp, Artificial sequence
  SiRNA target sequence
gcagcacttgataaggagtc

SEQ ID NO: 68230 - DNA, 20 bp, Artificial sequence
  SiRNA target sequence
cagcacttgataaggagtct

SEQ ID NO: 68231 - DNA, 20 bp, Artificial sequence
  SiRNA target sequence
agcacttgataaggagtctg

SEQ ID NO: 68232 - DNA, 20 bp, Artificial sequence
  SiRNA target sequence
gcacttgataaggagtctga

SEQ ID NO: 68233 - DNA, 20 bp, Artificial sequence
  SiRNA target sequence
cacttgataaggagtctgaa

SEQ ID NO: 68234 - DNA, 20 bp, Artificial sequence
  SiRNA target sequence
acttgataaggagtctgaaa

SEQ ID NO: 68235 - DNA, 20 bp, Artificial sequence
  SiRNA target sequence
cttgataaggagtctgaaaa

SEQ ID NO: 68236 - DNA, 20 bp, Artificial sequence
  SiRNA target sequence
ttgataaggagtctgaaaaa

SEQ ID NO: 68237 - DNA, 20 bp, Artificial sequence
  SiRNA target sequence
tgataaggagtctgaaaaaa

SEQ ID NO: 68238 - DNA, 20 bp, Artificial sequence
  SiRNA target sequence
gataaggagtctgaaaaaaa

SEQ ID NO: 68239 - DNA, 20 bp, Artificial sequence
  SiRNA target sequence
ataaggagtctgaaaaaaag

SEQ ID NO: 68240 - DNA, 20 bp, Artificial sequence
  SiRNA target sequence
taaggagtctgaaaaaaaga

SEQ ID NO: 68241 - DNA, 20 bp, Artificial sequence
  SiRNA target sequence
aaggagtctgaaaaaaagat

SEQ ID NO: 68242 - DNA, 20 bp, Artificial sequence
  SiRNA target sequence
aggagtctgaaaaaaagatt

SEQ ID NO: 68243 - DNA, 20 bp, Artificial sequence
  SiRNA target sequence
ggagtctgaaaaaaagattt

SEQ ID NO: 68244 - DNA, 20 bp, Artificial sequence
  SiRNA target sequence
gagtctgaaaaaaagatttt

SEQ ID NO: 68245 - DNA, 20 bp, Artificial sequence
  SiRNA target sequence
agtctgaaaaaaagatttta

SEQ ID NO: 68246 - DNA, 20 bp, Artificial sequence
  SiRNA target sequence
gtctgaaaaaaagattttag

SEQ ID NO: 68247 - DNA, 20 bp, Artificial sequence
  SiRNA target sequence
tctgaaaaaaagattttaga

SEQ ID NO: 68248 - DNA, 20 bp, Artificial sequence
  SiRNA target sequence
ctgaaaaaaagattttagag

SEQ ID NO: 68249 - DNA, 20 bp, Artificial sequence
  SiRNA target sequence
tgaaaaaaagattttagaga

SEQ ID NO: 68250 - DNA, 20 bp, Artificial sequence
  SiRNA target sequence
gaaaaaaagattttagagat

SEQ ID NO: 68251 - DNA, 20 bp, Artificial sequence
  SiRNA target sequence
aaaaaaagattttagagata

SEQ ID NO: 68252 - DNA, 20 bp, Artificial sequence
  SiRNA target sequence
aaaaaagattttagagataa

SEQ ID NO: 68253 - DNA, 20 bp, Artificial sequence
  SiRNA target sequence
aaaaagattttagagataat

SEQ ID NO: 68254 - DNA, 20 bp, Artificial sequence
  SiRNA target sequence
aaaagattttagagataatt

SEQ ID NO: 68255 - DNA, 20 bp, Artificial sequence
  SiRNA target sequence
aaagattttagagataattt

SEQ ID NO: 68256 - DNA, 20 bp, Artificial sequence
  SiRNA target sequence
aagattttagagataatttt

SEQ ID NO: 68257 - DNA, 20 bp, Artificial sequence
  SiRNA target sequence
agattttagagataatttta

SEQ ID NO: 68258 - DNA, 20 bp, Artificial sequence
  SiRNA target sequence
gattttagagataattttac

SEQ ID NO: 68259 - DNA, 20 bp, Artificial sequence
  SiRNA target sequence
attttagagataattttaca

SEQ ID NO: 68260 - DNA, 20 bp, Artificial sequence
  SiRNA target sequence
ttttagagataattttacaa

SEQ ID NO: 68261 - DNA, 20 bp, Artificial sequence
  SiRNA target sequence
tttagagataattttacaac

SEQ ID NO: 68262 - DNA, 20 bp, Artificial sequence
  SiRNA target sequence
ttagagataattttacaaca

SEQ ID NO: 68263 - DNA, 20 bp, Artificial sequence
  SiRNA target sequence
tagagataattttacaacag

SEQ ID NO: 68264 - DNA, 20 bp, Artificial sequence
  SiRNA target sequence
agagataattttacaacagg

SEQ ID NO: 68265 - DNA, 20 bp, Artificial sequence
  SiRNA target sequence
gagataattttacaacagga

SEQ ID NO: 68266 - DNA, 20 bp, Artificial sequence
  SiRNA target sequence
agataattttacaacaggaa

SEQ ID NO: 68267 - DNA, 20 bp, Artificial sequence
  SiRNA target sequence
gataattttacaacaggaag

SEQ ID NO: 68268 - DNA, 20 bp, Artificial sequence
  SiRNA target sequence
ataattttacaacaggaaga

SEQ ID NO: 68269 - DNA, 20 bp, Artificial sequence
  SiRNA target sequence
taattttacaacaggaagat

SEQ ID NO: 68270 - DNA, 20 bp, Artificial sequence
  SiRNA target sequence
aattttacaacaggaagatc

SEQ ID NO: 68271 - DNA, 20 bp, Artificial sequence
  SiRNA target sequence
attttacaacaggaagatcg

SEQ ID NO: 68272 - DNA, 20 bp, Artificial sequence
  SiRNA target sequence
ttttacaacaggaagatcga

SEQ ID NO: 68273 - DNA, 20 bp, Artificial sequence
  SiRNA target sequence
tttacaacaggaagatcgaa

SEQ ID NO: 68274 - DNA, 20 bp, Artificial sequence
  SiRNA target sequence
ttacaacaggaagatcgaac

SEQ ID NO: 68275 - DNA, 20 bp, Artificial sequence
  SiRNA target sequence
tacaacaggaagatcgaaca

SEQ ID NO: 68276 - DNA, 20 bp, Artificial sequence
  SiRNA target sequence
acaacaggaagatcgaacag

SEQ ID NO: 68277 - DNA, 20 bp, Artificial sequence
  SiRNA target sequence
caacaggaagatcgaacagt

SEQ ID NO: 68278 - DNA, 20 bp, Artificial sequence
  SiRNA target sequence
aacaggaagatcgaacagtt

SEQ ID NO: 68279 - DNA, 20 bp, Artificial sequence
  SiRNA target sequence
acaggaagatcgaacagttt

SEQ ID NO: 68280 - DNA, 20 bp, Artificial sequence
  SiRNA target sequence
caggaagatcgaacagtttt

SEQ ID NO: 68281 - DNA, 20 bp, Artificial sequence
  SiRNA target sequence
aggaagatcgaacagttttg

SEQ ID NO: 68282 - DNA, 20 bp, Artificial sequence
  SiRNA target sequence
ggaagatcgaacagttttga

SEQ ID NO: 68283 - DNA, 20 bp, Artificial sequence
  SiRNA target sequence
gaagatcgaacagttttgat

SEQ ID NO: 68284 - DNA, 20 bp, Artificial sequence
  SiRNA target sequence
aagatcgaacagttttgatg

SEQ ID NO: 68285 - DNA, 20 bp, Artificial sequence
  SiRNA target sequence
agatcgaacagttttgatga

SEQ ID NO: 68286 - DNA, 20 bp, Artificial sequence
  SiRNA target sequence
gatcgaacagttttgatgat

SEQ ID NO: 68287 - DNA, 20 bp, Artificial sequence
  SiRNA target sequence
atcgaacagttttgatgata

SEQ ID NO: 68288 - DNA, 20 bp, Artificial sequence
  SiRNA target sequence
tcgaacagttttgatgataa

SEQ ID NO: 68289 - DNA, 20 bp, Artificial sequence
  SiRNA target sequence
cgaacagttttgatgataat

SEQ ID NO: 68290 - DNA, 20 bp, Artificial sequence
  SiRNA target sequence
gaacagttttgatgataatt

SEQ ID NO: 68291 - DNA, 20 bp, Artificial sequence
  SiRNA target sequence
aacagttttgatgataattc

SEQ ID NO: 68292 - DNA, 20 bp, Artificial sequence
  SiRNA target sequence
acagttttgatgataattca

SEQ ID NO: 68293 - DNA, 20 bp, Artificial sequence
  SiRNA target sequence
cagttttgatgataattcat

SEQ ID NO: 68294 - DNA, 20 bp, Artificial sequence
  SiRNA target sequence
agttttgatgataattcata

SEQ ID NO: 68295 - DNA, 20 bp, Artificial sequence
  SiRNA target sequence
gttttgatgataattcataa

SEQ ID NO: 68296 - DNA, 20 bp, Artificial sequence
  SiRNA target sequence
ttttgatgataattcataat

SEQ ID NO: 68297 - DNA, 20 bp, Artificial sequence
  SiRNA target sequence
tttgatgataattcataatc

SEQ ID NO: 68298 - DNA, 20 bp, Artificial sequence
  SiRNA target sequence
ttgatgataattcataatct

SEQ ID NO: 68299 - DNA, 20 bp, Artificial sequence
  SiRNA target sequence
tgatgataattcataatcta

SEQ ID NO: 68300 - DNA, 20 bp, Artificial sequence
  SiRNA target sequence
gatgataattcataatctag

SEQ ID NO: 68301 - DNA, 20 bp, Artificial sequence
  SiRNA target sequence
atgataattcataatctaga

SEQ ID NO: 68302 - DNA, 20 bp, Artificial sequence
  SiRNA target sequence
tgataattcataatctagaa

SEQ ID NO: 68303 - DNA, 20 bp, Artificial sequence
  SiRNA target sequence
gataattcataatctagaac

SEQ ID NO: 68304 - DNA, 20 bp, Artificial sequence
  SiRNA target sequence
ataattcataatctagaact

SEQ ID NO: 68305 - DNA, 20 bp, Artificial sequence
  SiRNA target sequence
taattcataatctagaactt

SEQ ID NO: 68306 - DNA, 20 bp, Artificial sequence
  SiRNA target sequence
aattcataatctagaactta

SEQ ID NO: 68307 - DNA, 20 bp, Artificial sequence
  SiRNA target sequence
attcataatctagaacttat

SEQ ID NO: 68308 - DNA, 20 bp, Artificial sequence
  SiRNA target sequence
ttcataatctagaacttatt

SEQ ID NO: 68309 - DNA, 20 bp, Artificial sequence
  SiRNA target sequence
tcataatctagaacttatta

SEQ ID NO: 68310 - DNA, 20 bp, Artificial sequence
  SiRNA target sequence
cataatctagaacttattaa

SEQ ID NO: 68311 - DNA, 20 bp, Artificial sequence
  SiRNA target sequence
ataatctagaacttattaat

SEQ ID NO: 68312 - DNA, 20 bp, Artificial sequence
  SiRNA target sequence
taatctagaacttattaata

SEQ ID NO: 68313 - DNA, 20 bp, Artificial sequence
  SiRNA target sequence
aatctagaacttattaataa

SEQ ID NO: 68314 - DNA, 20 bp, Artificial sequence
  SiRNA target sequence
atctagaacttattaataaa

SEQ ID NO: 68315 - DNA, 20 bp, Artificial sequence
  SiRNA target sequence
tctagaacttattaataaat

SEQ ID NO: 68316 - DNA, 20 bp, Artificial sequence
  SiRNA target sequence
ctagaacttattaataaatt

SEQ ID NO: 68317 - DNA, 20 bp, Artificial sequence
  SiRNA target sequence
tagaacttattaataaattt

SEQ ID NO: 68318 - DNA, 20 bp, Artificial sequence
  SiRNA target sequence
agaacttattaataaatttg

SEQ ID NO: 68319 - DNA, 20 bp, Artificial sequence
  SiRNA target sequence
gaacttattaataaatttga

SEQ ID NO: 68320 - DNA, 20 bp, Artificial sequence
  SiRNA target sequence
aacttattaataaatttgat

SEQ ID NO: 68321 - DNA, 20 bp, Artificial sequence
  SiRNA target sequence
acttattaataaatttgata

SEQ ID NO: 68322 - DNA, 20 bp, Artificial sequence
  SiRNA target sequence
cttattaataaatttgataa

SEQ ID NO: 68323 - DNA, 20 bp, Artificial sequence
  SiRNA target sequence
ttattaataaatttgataaa

SEQ ID NO: 68324 - DNA, 20 bp, Artificial sequence
  SiRNA target sequence
tattaataaatttgataaaa

SEQ ID NO: 68325 - DNA, 20 bp, Artificial sequence
  SiRNA target sequence
attaataaatttgataaaat

SEQ ID NO: 68326 - DNA, 20 bp, Artificial sequence
  SiRNA target sequence
ttaataaatttgataaaata

SEQ ID NO: 68327 - DNA, 20 bp, Artificial sequence
  SiRNA target sequence
taataaatttgataaaataa

SEQ ID NO: 68328 - DNA, 20 bp, Artificial sequence
  SiRNA target sequence
aataaatttgataaaataat

SEQ ID NO: 68329 - DNA, 20 bp, Artificial sequence
  SiRNA target sequence
ataaatttgataaaataatt

SEQ ID NO: 68330 - DNA, 20 bp, Artificial sequence
  SiRNA target sequence
taaatttgataaaataattt

SEQ ID NO: 68331 - DNA, 20 bp, Artificial sequence
  SiRNA target sequence
aaatttgataaaataattta

SEQ ID NO: 68332 - DNA, 20 bp, Artificial sequence
  SiRNA target sequence
aatttgataaaataatttac

SEQ ID NO: 68333 - DNA, 20 bp, Artificial sequence
  SiRNA target sequence
atttgataaaataatttaca

SEQ ID NO: 68334 - DNA, 20 bp, Artificial sequence
  SiRNA target sequence
tttgataaaataatttacat

SEQ ID NO: 68335 - DNA, 20 bp, Artificial sequence
  SiRNA target sequence
ttgataaaataatttacatt

SEQ ID NO: 68336 - DNA, 20 bp, Artificial sequence
  SiRNA target sequence
tgataaaataatttacattg

SEQ ID NO: 68337 - DNA, 20 bp, Artificial sequence
  SiRNA target sequence
gataaaataatttacattga

SEQ ID NO: 68338 - DNA, 20 bp, Artificial sequence
  SiRNA target sequence
ataaaataatttacattgat

SEQ ID NO: 68339 - DNA, 20 bp, Artificial sequence
  SiRNA target sequence
taaaataatttacattgatg

SEQ ID NO: 68340 - DNA, 20 bp, Artificial sequence
  SiRNA target sequence
aaaataatttacattgatga

SEQ ID NO: 68341 - DNA, 20 bp, Artificial sequence
  SiRNA target sequence
aaataatttacattgatgaa

SEQ ID NO: 68342 - DNA, 20 bp, Artificial sequence
  SiRNA target sequence
aataatttacattgatgaaa

SEQ ID NO: 68343 - DNA, 20 bp, Artificial sequence
  SiRNA target sequence
ataatttacattgatgaaaa

SEQ ID NO: 68344 - DNA, 20 bp, Artificial sequence
  SiRNA target sequence
taatttacattgatgaaaat

SEQ ID NO: 68345 - DNA, 20 bp, Artificial sequence
  SiRNA target sequence
aatttacattgatgaaaata

SEQ ID NO: 68346 - DNA, 20 bp, Artificial sequence
  SiRNA target sequence
atttacattgatgaaaataa

SEQ ID NO: 68347 - DNA, 20 bp, Artificial sequence
  SiRNA target sequence
tttacattgatgaaaataat

SEQ ID NO: 68348 - DNA, 20 bp, Artificial sequence
  SiRNA target sequence
ttacattgatgaaaataata

SEQ ID NO: 68349 - DNA, 20 bp, Artificial sequence
  SiRNA target sequence
tacattgatgaaaataatat

SEQ ID NO: 68350 - DNA, 20 bp, Artificial sequence
  SiRNA target sequence
acattgatgaaaataatata

SEQ ID NO: 68351 - DNA, 20 bp, Artificial sequence
  SiRNA target sequence
cattgatgaaaataatatag

SEQ ID NO: 68352 - DNA, 20 bp, Artificial sequence
  SiRNA target sequence
attgatgaaaataatataga

SEQ ID NO: 68353 - DNA, 20 bp, Artificial sequence
  SiRNA target sequence
ttgatgaaaataatatagaa

SEQ ID NO: 68354 - DNA, 20 bp, Artificial sequence
  SiRNA target sequence
tgatgaaaataatatagaag

SEQ ID NO: 68355 - DNA, 20 bp, Artificial sequence
  SiRNA target sequence
gatgaaaataatatagaagt

SEQ ID NO: 68356 - DNA, 20 bp, Artificial sequence
  SiRNA target sequence
atgaaaataatatagaagtc

SEQ ID NO: 68357 - DNA, 20 bp, Artificial sequence
  SiRNA target sequence
tgaaaataatatagaagtct

SEQ ID NO: 68358 - DNA, 20 bp, Artificial sequence
  SiRNA target sequence
gaaaataatatagaagtcta

SEQ ID NO: 68359 - DNA, 20 bp, Artificial sequence
  SiRNA target sequence
aaaataatatagaagtctat

SEQ ID NO: 68360 - DNA, 20 bp, Artificial sequence
  SiRNA target sequence
aaataatatagaagtctata

SEQ ID NO: 68361 - DNA, 20 bp, Artificial sequence
  SiRNA target sequence
aataatatagaagtctataa

SEQ ID NO: 68362 - DNA, 20 bp, Artificial sequence
  SiRNA target sequence
ataatatagaagtctataaa

SEQ ID NO: 68363 - DNA, 20 bp, Artificial sequence
  SiRNA target sequence
taatatagaagtctataaaa

SEQ ID NO: 68364 - DNA, 20 bp, Artificial sequence
  SiRNA target sequence
aatatagaagtctataaaaa

SEQ ID NO: 68365 - DNA, 20 bp, Artificial sequence
  SiRNA target sequence
atatagaagtctataaaaat

SEQ ID NO: 68366 - DNA, 20 bp, Artificial sequence
  SiRNA target sequence
tatagaagtctataaaaatg

SEQ ID NO: 68367 - DNA, 20 bp, Artificial sequence
  SiRNA target sequence
atagaagtctataaaaatga

SEQ ID NO: 68368 - DNA, 20 bp, Artificial sequence
  SiRNA target sequence
tagaagtctataaaaatgat

SEQ ID NO: 68369 - DNA, 20 bp, Artificial sequence
  SiRNA target sequence
agaagtctataaaaatgata

SEQ ID NO: 68370 - DNA, 20 bp, Artificial sequence
  SiRNA target sequence
gaagtctataaaaatgatat

SEQ ID NO: 68371 - DNA, 20 bp, Artificial sequence
  SiRNA target sequence
aagtctataaaaatgatatt

SEQ ID NO: 68372 - DNA, 20 bp, Artificial sequence
  SiRNA target sequence
agtctataaaaatgatattg

SEQ ID NO: 68373 - DNA, 20 bp, Artificial sequence
  SiRNA target sequence
gtctataaaaatgatattga

SEQ ID NO: 68374 - DNA, 20 bp, Artificial sequence
  SiRNA target sequence
tctataaaaatgatattgaa

SEQ ID NO: 68375 - DNA, 20 bp, Artificial sequence
  SiRNA target sequence
ctataaaaatgatattgaag

SEQ ID NO: 68376 - DNA, 20 bp, Artificial sequence
  SiRNA target sequence
tataaaaatgatattgaagg

SEQ ID NO: 68377 - DNA, 20 bp, Artificial sequence
  SiRNA target sequence
ataaaaatgatattgaagga

SEQ ID NO: 68378 - DNA, 20 bp, Artificial sequence
  SiRNA target sequence
taaaaatgatattgaaggac

SEQ ID NO: 68379 - DNA, 20 bp, Artificial sequence
  SiRNA target sequence
aaaaatgatattgaaggaca

SEQ ID NO: 68380 - DNA, 20 bp, Artificial sequence
  SiRNA target sequence
aaaatgatattgaaggacaa

SEQ ID NO: 68381 - DNA, 20 bp, Artificial sequence
  SiRNA target sequence
aaatgatattgaaggacaaa

SEQ ID NO: 68382 - DNA, 20 bp, Artificial sequence
  SiRNA target sequence
aatgatattgaaggacaaaa

SEQ ID NO: 68383 - DNA, 20 bp, Artificial sequence
  SiRNA target sequence
atgatattgaaggacaaaaa

SEQ ID NO: 68384 - DNA, 20 bp, Artificial sequence
  SiRNA target sequence
tgatattgaaggacaaaaaa

SEQ ID NO: 68385 - DNA, 20 bp, Artificial sequence
  SiRNA target sequence
gatattgaaggacaaaaaaa

SEQ ID NO: 68386 - DNA, 20 bp, Artificial sequence
  SiRNA target sequence
atattgaaggacaaaaaaag

SEQ ID NO: 68387 - DNA, 20 bp, Artificial sequence
  SiRNA target sequence
tattgaaggacaaaaaaagt

SEQ ID NO: 68388 - DNA, 20 bp, Artificial sequence
  SiRNA target sequence
attgaaggacaaaaaaagtt

SEQ ID NO: 68389 - DNA, 20 bp, Artificial sequence
  SiRNA target sequence
ttgaaggacaaaaaaagttt

SEQ ID NO: 68390 - DNA, 20 bp, Artificial sequence
  SiRNA target sequence
tgaaggacaaaaaaagtttt

SEQ ID NO: 68391 - DNA, 20 bp, Artificial sequence
  SiRNA target sequence
gaaggacaaaaaaagttttc

SEQ ID NO: 68392 - DNA, 20 bp, Artificial sequence
  SiRNA target sequence
aaggacaaaaaaagttttct

SEQ ID NO: 68393 - DNA, 20 bp, Artificial sequence
  SiRNA target sequence
aggacaaaaaaagttttcta

SEQ ID NO: 68394 - DNA, 20 bp, Artificial sequence
  SiRNA target sequence
ggacaaaaaaagttttctac

SEQ ID NO: 68395 - DNA, 20 bp, Artificial sequence
  SiRNA target sequence
gacaaaaaaagttttctaca

SEQ ID NO: 68396 - DNA, 20 bp, Artificial sequence
  SiRNA target sequence
acaaaaaaagttttctacaa

SEQ ID NO: 68397 - DNA, 20 bp, Artificial sequence
  SiRNA target sequence
caaaaaaagttttctacaaa

SEQ ID NO: 68398 - DNA, 20 bp, Artificial sequence
  SiRNA target sequence
aaaaaaagttttctacaaat

SEQ ID NO: 68399 - DNA, 20 bp, Artificial sequence
  SiRNA target sequence
aaaaaagttttctacaaatt

SEQ ID NO: 68400 - DNA, 20 bp, Artificial sequence
  SiRNA target sequence
aaaaagttttctacaaattt

SEQ ID NO: 68401 - DNA, 20 bp, Artificial sequence
  SiRNA target sequence
aaaagttttctacaaattta

SEQ ID NO: 68402 - DNA, 20 bp, Artificial sequence
  SiRNA target sequence
aaagttttctacaaatttac

SEQ ID NO: 68403 - DNA, 20 bp, Artificial sequence
  SiRNA target sequence
aagttttctacaaatttaca

SEQ ID NO: 68404 - DNA, 20 bp, Artificial sequence
  SiRNA target sequence
agttttctacaaatttacaa

SEQ ID NO: 68405 - DNA, 20 bp, Artificial sequence
  SiRNA target sequence
gttttctacaaatttacaat

SEQ ID NO: 68406 - DNA, 20 bp, Artificial sequence
  SiRNA target sequence
ttttctacaaatttacaata

SEQ ID NO: 68407 - DNA, 20 bp, Artificial sequence
  SiRNA target sequence
tttctacaaatttacaatat

SEQ ID NO: 68408 - DNA, 20 bp, Artificial sequence
  SiRNA target sequence
ttctacaaatttacaatatt

SEQ ID NO: 68409 - DNA, 20 bp, Artificial sequence
  SiRNA target sequence
tctacaaatttacaatattt

SEQ ID NO: 68410 - DNA, 20 bp, Artificial sequence
  SiRNA target sequence
ctacaaatttacaatatttt

SEQ ID NO: 68411 - DNA, 20 bp, Artificial sequence
  SiRNA target sequence
tacaaatttacaatattttt

SEQ ID NO: 68412 - DNA, 20 bp, Artificial sequence
  SiRNA target sequence
acaaatttacaatatttttt

SEQ ID NO: 68413 - DNA, 20 bp, Artificial sequence
  SiRNA target sequence
caaatttacaatatttttta

SEQ ID NO: 68414 - DNA, 20 bp, Artificial sequence
  SiRNA target sequence
aaatttacaatattttttat

SEQ ID NO: 68415 - DNA, 20 bp, Artificial sequence
  SiRNA target sequence
aatttacaatattttttatc

SEQ ID NO: 68416 - DNA, 20 bp, Artificial sequence
  SiRNA target sequence
atttacaatattttttatca

SEQ ID NO: 68417 - DNA, 20 bp, Artificial sequence
  SiRNA target sequence
tttacaatattttttatcat

SEQ ID NO: 68418 - DNA, 20 bp, Artificial sequence
  SiRNA target sequence
ttacaatattttttatcata

SEQ ID NO: 68419 - DNA, 20 bp, Artificial sequence
  SiRNA target sequence
tacaatattttttatcatac

SEQ ID NO: 68420 - DNA, 20 bp, Artificial sequence
  SiRNA target sequence
acaatattttttatcataca

SEQ ID NO: 68421 - DNA, 20 bp, Artificial sequence
  SiRNA target sequence
caatattttttatcatacaa

SEQ ID NO: 68422 - DNA, 20 bp, Artificial sequence
  SiRNA target sequence
aatattttttatcatacaaa

SEQ ID NO: 68423 - DNA, 20 bp, Artificial sequence
  SiRNA target sequence
atattttttatcatacaaat

SEQ ID NO: 68424 - DNA, 20 bp, Artificial sequence
  SiRNA target sequence
tattttttatcatacaaatt

SEQ ID NO: 68425 - DNA, 20 bp, Artificial sequence
  SiRNA target sequence
attttttatcatacaaatta

SEQ ID NO: 68426 - DNA, 20 bp, Artificial sequence
  SiRNA target sequence
ttttttatcatacaaattag

SEQ ID NO: 68427 - DNA, 20 bp, Artificial sequence
  SiRNA target sequence
tttttatcatacaaattagg

SEQ ID NO: 68428 - DNA, 20 bp, Artificial sequence
  SiRNA target sequence
ttttatcatacaaattaggt

SEQ ID NO: 68429 - DNA, 20 bp, Artificial sequence
  SiRNA target sequence
tttatcatacaaattaggta

SEQ ID NO: 68430 - DNA, 20 bp, Artificial sequence
  SiRNA target sequence
ttatcatacaaattaggtaa

SEQ ID NO: 68431 - DNA, 20 bp, Artificial sequence
  SiRNA target sequence
tatcatacaaattaggtaaa

SEQ ID NO: 68432 - DNA, 20 bp, Artificial sequence
  SiRNA target sequence
atcatacaaattaggtaaat

SEQ ID NO: 68433 - DNA, 20 bp, Artificial sequence
  SiRNA target sequence
tcatacaaattaggtaaata

SEQ ID NO: 68434 - DNA, 20 bp, Artificial sequence
  SiRNA target sequence
catacaaattaggtaaataa

SEQ ID NO: 68435 - DNA, 21 bp, Artificial sequence
  SiRNA target sequence
atgaaaaaaatttcgaataga

SEQ ID NO: 68436 - DNA, 21 bp, Artificial sequence
  SiRNA target sequence
tgaaaaaaatttcgaatagaa

SEQ ID NO: 68437 - DNA, 21 bp, Artificial sequence
  SiRNA target sequence
gaaaaaaatttcgaatagaaa

SEQ ID NO: 68438 - DNA, 21 bp, Artificial sequence
  SiRNA target sequence
aaaaaaatttcgaatagaaaa

SEQ ID NO: 68439 - DNA, 21 bp, Artificial sequence
  SiRNA target sequence
aaaaaatttcgaatagaaaaa

SEQ ID NO: 68440 - DNA, 21 bp, Artificial sequence
  SiRNA target sequence
aaaaatttcgaatagaaaaat

SEQ ID NO: 68441 - DNA, 21 bp, Artificial sequence
  SiRNA target sequence
aaaatttcgaatagaaaaatt

SEQ ID NO: 68442 - DNA, 21 bp, Artificial sequence
  SiRNA target sequence
aaatttcgaatagaaaaatta

SEQ ID NO: 68443 - DNA, 21 bp, Artificial sequence
  SiRNA target sequence
aatttcgaatagaaaaattat

SEQ ID NO: 68444 - DNA, 21 bp, Artificial sequence
  SiRNA target sequence
atttcgaatagaaaaattatc

SEQ ID NO: 68445 - DNA, 21 bp, Artificial sequence
  SiRNA target sequence
tttcgaatagaaaaattatca

SEQ ID NO: 68446 - DNA, 21 bp, Artificial sequence
  SiRNA target sequence
ttcgaatagaaaaattatcaa

SEQ ID NO: 68447 - DNA, 21 bp, Artificial sequence
  SiRNA target sequence
tcgaatagaaaaattatcaaa

SEQ ID NO: 68448 - DNA, 21 bp, Artificial sequence
  SiRNA target sequence
cgaatagaaaaattatcaaag

SEQ ID NO: 68449 - DNA, 21 bp, Artificial sequence
  SiRNA target sequence
gaatagaaaaattatcaaaga

SEQ ID NO: 68450 - DNA, 21 bp, Artificial sequence
  SiRNA target sequence
aatagaaaaattatcaaagaa

SEQ ID NO: 68451 - DNA, 21 bp, Artificial sequence
  SiRNA target sequence
atagaaaaattatcaaagaaa

SEQ ID NO: 68452 - DNA, 21 bp, Artificial sequence
  SiRNA target sequence
tagaaaaattatcaaagaaat

SEQ ID NO: 68453 - DNA, 21 bp, Artificial sequence
  SiRNA target sequence
agaaaaattatcaaagaaatt

SEQ ID NO: 68454 - DNA, 21 bp, Artificial sequence
  SiRNA target sequence
gaaaaattatcaaagaaatta

SEQ ID NO: 68455 - DNA, 21 bp, Artificial sequence
  SiRNA target sequence
aaaaattatcaaagaaattat

SEQ ID NO: 68456 - DNA, 21 bp, Artificial sequence
  SiRNA target sequence
aaaattatcaaagaaattatt

SEQ ID NO: 68457 - DNA, 21 bp, Artificial sequence
  SiRNA target sequence
aaattatcaaagaaattattt

SEQ ID NO: 68458 - DNA, 21 bp, Artificial sequence
  SiRNA target sequence
aattatcaaagaaattattta

SEQ ID NO: 68459 - DNA, 21 bp, Artificial sequence
  SiRNA target sequence
attatcaaagaaattatttac

SEQ ID NO: 68460 - DNA, 21 bp, Artificial sequence
  SiRNA target sequence
ttatcaaagaaattatttaca

SEQ ID NO: 68461 - DNA, 21 bp, Artificial sequence
  SiRNA target sequence
tatcaaagaaattatttacaa

SEQ ID NO: 68462 - DNA, 21 bp, Artificial sequence
  SiRNA target sequence
atcaaagaaattatttacaat

SEQ ID NO: 68463 - DNA, 21 bp, Artificial sequence
  SiRNA target sequence
tcaaagaaattatttacaatg

SEQ ID NO: 68464 - DNA, 21 bp, Artificial sequence
  SiRNA target sequence
caaagaaattatttacaatga

SEQ ID NO: 68465 - DNA, 21 bp, Artificial sequence
  SiRNA target sequence
aaagaaattatttacaatgat

SEQ ID NO: 68466 - DNA, 21 bp, Artificial sequence
  SiRNA target sequence
aagaaattatttacaatgatt

SEQ ID NO: 68467 - DNA, 21 bp, Artificial sequence
  SiRNA target sequence
agaaattatttacaatgattt

SEQ ID NO: 68468 - DNA, 21 bp, Artificial sequence
  SiRNA target sequence
gaaattatttacaatgattta

SEQ ID NO: 68469 - DNA, 21 bp, Artificial sequence
  SiRNA target sequence
aaattatttacaatgatttat

SEQ ID NO: 68470 - DNA, 21 bp, Artificial sequence
  SiRNA target sequence
aattatttacaatgatttatt

SEQ ID NO: 68471 - DNA, 21 bp, Artificial sequence
  SiRNA target sequence
attatttacaatgatttatta

SEQ ID NO: 68472 - DNA, 21 bp, Artificial sequence
  SiRNA target sequence
ttatttacaatgatttattaa

SEQ ID NO: 68473 - DNA, 21 bp, Artificial sequence
  SiRNA target sequence
tatttacaatgatttattaaa

SEQ ID NO: 68474 - DNA, 21 bp, Artificial sequence
  SiRNA target sequence
atttacaatgatttattaaaa

SEQ ID NO: 68475 - DNA, 21 bp, Artificial sequence
  SiRNA target sequence
tttacaatgatttattaaaaa

SEQ ID NO: 68476 - DNA, 21 bp, Artificial sequence
  SiRNA target sequence
ttacaatgatttattaaaaat

SEQ ID NO: 68477 - DNA, 21 bp, Artificial sequence
  SiRNA target sequence
tacaatgatttattaaaaata

SEQ ID NO: 68478 - DNA, 21 bp, Artificial sequence
  SiRNA target sequence
acaatgatttattaaaaataa

SEQ ID NO: 68479 - DNA, 21 bp, Artificial sequence
  SiRNA target sequence
caatgatttattaaaaataag

SEQ ID NO: 68480 - DNA, 21 bp, Artificial sequence
  SiRNA target sequence
aatgatttattaaaaataaga

SEQ ID NO: 68481 - DNA, 21 bp, Artificial sequence
  SiRNA target sequence
atgatttattaaaaataagaa

SEQ ID NO: 68482 - DNA, 21 bp, Artificial sequence
  SiRNA target sequence
tgatttattaaaaataagaat

SEQ ID NO: 68483 - DNA, 21 bp, Artificial sequence
  SiRNA target sequence
gatttattaaaaataagaatg

SEQ ID NO: 68484 - DNA, 21 bp, Artificial sequence
  SiRNA target sequence
atttattaaaaataagaatgt

SEQ ID NO: 68485 - DNA, 21 bp, Artificial sequence
  SiRNA target sequence
tttattaaaaataagaatgtt

SEQ ID NO: 68486 - DNA, 21 bp, Artificial sequence
  SiRNA target sequence
ttattaaaaataagaatgttg

SEQ ID NO: 68487 - DNA, 21 bp, Artificial sequence
  SiRNA target sequence
tattaaaaataagaatgttgc

SEQ ID NO: 68488 - DNA, 21 bp, Artificial sequence
  SiRNA target sequence
attaaaaataagaatgttgcg

SEQ ID NO: 68489 - DNA, 21 bp, Artificial sequence
  SiRNA target sequence
ttaaaaataagaatgttgcga

SEQ ID NO: 68490 - DNA, 21 bp, Artificial sequence
  SiRNA target sequence
taaaaataagaatgttgcgat

SEQ ID NO: 68491 - DNA, 21 bp, Artificial sequence
  SiRNA target sequence
aaaaataagaatgttgcgata

SEQ ID NO: 68492 - DNA, 21 bp, Artificial sequence
  SiRNA target sequence
aaaataagaatgttgcgatat

SEQ ID NO: 68493 - DNA, 21 bp, Artificial sequence
  SiRNA target sequence
aaataagaatgttgcgatatg

SEQ ID NO: 68494 - DNA, 21 bp, Artificial sequence
  SiRNA target sequence
aataagaatgttgcgatatgt

SEQ ID NO: 68495 - DNA, 21 bp, Artificial sequence
  SiRNA target sequence
ataagaatgttgcgatatgtt

SEQ ID NO: 68496 - DNA, 21 bp, Artificial sequence
  SiRNA target sequence
taagaatgttgcgatatgtta

SEQ ID NO: 68497 - DNA, 21 bp, Artificial sequence
  SiRNA target sequence
aagaatgttgcgatatgttat

SEQ ID NO: 68498 - DNA, 21 bp, Artificial sequence
  SiRNA target sequence
agaatgttgcgatatgttatt

SEQ ID NO: 68499 - DNA, 21 bp, Artificial sequence
  SiRNA target sequence
gaatgttgcgatatgttattg

SEQ ID NO: 68500 - DNA, 21 bp, Artificial sequence
  SiRNA target sequence
aatgttgcgatatgttattgt

SEQ ID NO: 68501 - DNA, 21 bp, Artificial sequence
  SiRNA target sequence
atgttgcgatatgttattgta

SEQ ID NO: 68502 - DNA, 21 bp, Artificial sequence
  SiRNA target sequence
tgttgcgatatgttattgtac

SEQ ID NO: 68503 - DNA, 21 bp, Artificial sequence
  SiRNA target sequence
gttgcgatatgttattgtacc

SEQ ID NO: 68504 - DNA, 21 bp, Artificial sequence
  SiRNA target sequence
ttgcgatatgttattgtacca

SEQ ID NO: 68505 - DNA, 21 bp, Artificial sequence
  SiRNA target sequence
tgcgatatgttattgtaccaa

SEQ ID NO: 68506 - DNA, 21 bp, Artificial sequence
  SiRNA target sequence
gcgatatgttattgtaccaat

SEQ ID NO: 68507 - DNA, 21 bp, Artificial sequence
  SiRNA target sequence
cgatatgttattgtaccaata

SEQ ID NO: 68508 - DNA, 21 bp, Artificial sequence
  SiRNA target sequence
gatatgttattgtaccaataa

SEQ ID NO: 68509 - DNA, 21 bp, Artificial sequence
  SiRNA target sequence
atatgttattgtaccaataat

SEQ ID NO: 68510 - DNA, 21 bp, Artificial sequence
  SiRNA target sequence
tatgttattgtaccaataata

SEQ ID NO: 68511 - DNA, 21 bp, Artificial sequence
  SiRNA target sequence
atgttattgtaccaataatat

SEQ ID NO: 68512 - DNA, 21 bp, Artificial sequence
  SiRNA target sequence
tgttattgtaccaataatatt

SEQ ID NO: 68513 - DNA, 21 bp, Artificial sequence
  SiRNA target sequence
gttattgtaccaataatattt

SEQ ID NO: 68514 - DNA, 21 bp, Artificial sequence
  SiRNA target sequence
ttattgtaccaataatatttt

SEQ ID NO: 68515 - DNA, 21 bp, Artificial sequence
  SiRNA target sequence
tattgtaccaataatattttt

SEQ ID NO: 68516 - DNA, 21 bp, Artificial sequence
  SiRNA target sequence
attgtaccaataatattttta

SEQ ID NO: 68517 - DNA, 21 bp, Artificial sequence
  SiRNA target sequence
ttgtaccaataatatttttaa

SEQ ID NO: 68518 - DNA, 21 bp, Artificial sequence
  SiRNA target sequence
tgtaccaataatatttttaac

SEQ ID NO: 68519 - DNA, 21 bp, Artificial sequence
  SiRNA target sequence
gtaccaataatatttttaact

SEQ ID NO: 68520 - DNA, 21 bp, Artificial sequence
  SiRNA target sequence
taccaataatatttttaacta

SEQ ID NO: 68521 - DNA, 21 bp, Artificial sequence
  SiRNA target sequence
accaataatatttttaactat

SEQ ID NO: 68522 - DNA, 21 bp, Artificial sequence
  SiRNA target sequence
ccaataatatttttaactata

SEQ ID NO: 68523 - DNA, 21 bp, Artificial sequence
  SiRNA target sequence
caataatatttttaactatat

SEQ ID NO: 68524 - DNA, 21 bp, Artificial sequence
  SiRNA target sequence
aataatatttttaactatatt

SEQ ID NO: 68525 - DNA, 21 bp, Artificial sequence
  SiRNA target sequence
ataatatttttaactatattt

SEQ ID NO: 68526 - DNA, 21 bp, Artificial sequence
  SiRNA target sequence
taatatttttaactatatttt

SEQ ID NO: 68527 - DNA, 21 bp, Artificial sequence
  SiRNA target sequence
aatatttttaactatatttta

SEQ ID NO: 68528 - DNA, 21 bp, Artificial sequence
  SiRNA target sequence
atatttttaactatattttac

SEQ ID NO: 68529 - DNA, 21 bp, Artificial sequence
  SiRNA target sequence
tatttttaactatattttaca

SEQ ID NO: 68530 - DNA, 21 bp, Artificial sequence
  SiRNA target sequence
atttttaactatattttacac

SEQ ID NO: 68531 - DNA, 21 bp, Artificial sequence
  SiRNA target sequence
tttttaactatattttacact

SEQ ID NO: 68532 - DNA, 21 bp, Artificial sequence
  SiRNA target sequence
ttttaactatattttacactg

SEQ ID NO: 68533 - DNA, 21 bp, Artificial sequence
  SiRNA target sequence
tttaactatattttacactgt

SEQ ID NO: 68534 - DNA, 21 bp, Artificial sequence
  SiRNA target sequence
ttaactatattttacactgtt

SEQ ID NO: 68535 - DNA, 21 bp, Artificial sequence
  SiRNA target sequence
taactatattttacactgttt

SEQ ID NO: 68536 - DNA, 21 bp, Artificial sequence
  SiRNA target sequence
aactatattttacactgtttt

SEQ ID NO: 68537 - DNA, 21 bp, Artificial sequence
  SiRNA target sequence
actatattttacactgtttta

SEQ ID NO: 68538 - DNA, 21 bp, Artificial sequence
  SiRNA target sequence
ctatattttacactgttttag

SEQ ID NO: 68539 - DNA, 21 bp, Artificial sequence
  SiRNA target sequence
tatattttacactgttttaga

SEQ ID NO: 68540 - DNA, 21 bp, Artificial sequence
  SiRNA target sequence
atattttacactgttttagag

SEQ ID NO: 68541 - DNA, 21 bp, Artificial sequence
  SiRNA target sequence
tattttacactgttttagaga

SEQ ID NO: 68542 - DNA, 21 bp, Artificial sequence
  SiRNA target sequence
attttacactgttttagagat

SEQ ID NO: 68543 - DNA, 21 bp, Artificial sequence
  SiRNA target sequence
ttttacactgttttagagata

SEQ ID NO: 68544 - DNA, 21 bp, Artificial sequence
  SiRNA target sequence
tttacactgttttagagataa

SEQ ID NO: 68545 - DNA, 21 bp, Artificial sequence
  SiRNA target sequence
ttacactgttttagagataaa

SEQ ID NO: 68546 - DNA, 21 bp, Artificial sequence
  SiRNA target sequence
tacactgttttagagataaaa

SEQ ID NO: 68547 - DNA, 21 bp, Artificial sequence
  SiRNA target sequence
acactgttttagagataaaaa

SEQ ID NO: 68548 - DNA, 21 bp, Artificial sequence
  SiRNA target sequence
cactgttttagagataaaaat

SEQ ID NO: 68549 - DNA, 21 bp, Artificial sequence
  SiRNA target sequence
actgttttagagataaaaata

SEQ ID NO: 68550 - DNA, 21 bp, Artificial sequence
  SiRNA target sequence
ctgttttagagataaaaataa

SEQ ID NO: 68551 - DNA, 21 bp, Artificial sequence
  SiRNA target sequence
tgttttagagataaaaataag

SEQ ID NO: 68552 - DNA, 21 bp, Artificial sequence
  SiRNA target sequence
gttttagagataaaaataagt

SEQ ID NO: 68553 - DNA, 21 bp, Artificial sequence
  SiRNA target sequence
ttttagagataaaaataagta

SEQ ID NO: 68554 - DNA, 21 bp, Artificial sequence
  SiRNA target sequence
tttagagataaaaataagtac

SEQ ID NO: 68555 - DNA, 21 bp, Artificial sequence
  SiRNA target sequence
ttagagataaaaataagtaca

SEQ ID NO: 68556 - DNA, 21 bp, Artificial sequence
  SiRNA target sequence
tagagataaaaataagtacat

SEQ ID NO: 68557 - DNA, 21 bp, Artificial sequence
  SiRNA target sequence
agagataaaaataagtacatt

SEQ ID NO: 68558 - DNA, 21 bp, Artificial sequence
  SiRNA target sequence
gagataaaaataagtacatta

SEQ ID NO: 68559 - DNA, 21 bp, Artificial sequence
  SiRNA target sequence
agataaaaataagtacattag

SEQ ID NO: 68560 - DNA, 21 bp, Artificial sequence
  SiRNA target sequence
gataaaaataagtacattagt

SEQ ID NO: 68561 - DNA, 21 bp, Artificial sequence
  SiRNA target sequence
ataaaaataagtacattagta

SEQ ID NO: 68562 - DNA, 21 bp, Artificial sequence
  SiRNA target sequence
taaaaataagtacattagtaa

SEQ ID NO: 68563 - DNA, 21 bp, Artificial sequence
  SiRNA target sequence
aaaaataagtacattagtaaa

SEQ ID NO: 68564 - DNA, 21 bp, Artificial sequence
  SiRNA target sequence
aaaataagtacattagtaaag

SEQ ID NO: 68565 - DNA, 21 bp, Artificial sequence
  SiRNA target sequence
aaataagtacattagtaaaga

SEQ ID NO: 68566 - DNA, 21 bp, Artificial sequence
  SiRNA target sequence
aataagtacattagtaaagaa

SEQ ID NO: 68567 - DNA, 21 bp, Artificial sequence
  SiRNA target sequence
ataagtacattagtaaagaat

SEQ ID NO: 68568 - DNA, 21 bp, Artificial sequence
  SiRNA target sequence
taagtacattagtaaagaatc

SEQ ID NO: 68569 - DNA, 21 bp, Artificial sequence
  SiRNA target sequence
aagtacattagtaaagaatct

SEQ ID NO: 68570 - DNA, 21 bp, Artificial sequence
  SiRNA target sequence
agtacattagtaaagaatctt

SEQ ID NO: 68571 - DNA, 21 bp, Artificial sequence
  SiRNA target sequence
gtacattagtaaagaatctta

SEQ ID NO: 68572 - DNA, 21 bp, Artificial sequence
  SiRNA target sequence
tacattagtaaagaatcttaa

SEQ ID NO: 68573 - DNA, 21 bp, Artificial sequence
  SiRNA target sequence
acattagtaaagaatcttaat

SEQ ID NO: 68574 - DNA, 21 bp, Artificial sequence
  SiRNA target sequence
cattagtaaagaatcttaatc

SEQ ID NO: 68575 - DNA, 21 bp, Artificial sequence
  SiRNA target sequence
attagtaaagaatcttaatca

SEQ ID NO: 68576 - DNA, 21 bp, Artificial sequence
  SiRNA target sequence
ttagtaaagaatcttaatcaa

SEQ ID NO: 68577 - DNA, 21 bp, Artificial sequence
  SiRNA target sequence
tagtaaagaatcttaatcaat

SEQ ID NO: 68578 - DNA, 21 bp, Artificial sequence
  SiRNA target sequence
agtaaagaatcttaatcaatc

SEQ ID NO: 68579 - DNA, 21 bp, Artificial sequence
  SiRNA target sequence
gtaaagaatcttaatcaatct

SEQ ID NO: 68580 - DNA, 21 bp, Artificial sequence
  SiRNA target sequence
taaagaatcttaatcaatcta

SEQ ID NO: 68581 - DNA, 21 bp, Artificial sequence
  SiRNA target sequence
aaagaatcttaatcaatctat

SEQ ID NO: 68582 - DNA, 21 bp, Artificial sequence
  SiRNA target sequence
aagaatcttaatcaatctatc

SEQ ID NO: 68583 - DNA, 21 bp, Artificial sequence
  SiRNA target sequence
agaatcttaatcaatctatcg

SEQ ID NO: 68584 - DNA, 21 bp, Artificial sequence
  SiRNA target sequence
gaatcttaatcaatctatcgc

SEQ ID NO: 68585 - DNA, 21 bp, Artificial sequence
  SiRNA target sequence
aatcttaatcaatctatcgca

SEQ ID NO: 68586 - DNA, 21 bp, Artificial sequence
  SiRNA target sequence
atcttaatcaatctatcgcaa

SEQ ID NO: 68587 - DNA, 21 bp, Artificial sequence
  SiRNA target sequence
tcttaatcaatctatcgcaaa

SEQ ID NO: 68588 - DNA, 21 bp, Artificial sequence
  SiRNA target sequence
cttaatcaatctatcgcaaat

SEQ ID NO: 68589 - DNA, 21 bp, Artificial sequence
  SiRNA target sequence
ttaatcaatctatcgcaaatc

SEQ ID NO: 68590 - DNA, 21 bp, Artificial sequence
  SiRNA target sequence
taatcaatctatcgcaaatcg

SEQ ID NO: 68591 - DNA, 21 bp, Artificial sequence
  SiRNA target sequence
aatcaatctatcgcaaatcga

SEQ ID NO: 68592 - DNA, 21 bp, Artificial sequence
  SiRNA target sequence
atcaatctatcgcaaatcgaa

SEQ ID NO: 68593 - DNA, 21 bp, Artificial sequence
  SiRNA target sequence
tcaatctatcgcaaatcgaaa

SEQ ID NO: 68594 - DNA, 21 bp, Artificial sequence
  SiRNA target sequence
caatctatcgcaaatcgaaaa

SEQ ID NO: 68595 - DNA, 21 bp, Artificial sequence
  SiRNA target sequence
aatctatcgcaaatcgaaaag

SEQ ID NO: 68596 - DNA, 21 bp, Artificial sequence
  SiRNA target sequence
atctatcgcaaatcgaaaagg

SEQ ID NO: 68597 - DNA, 21 bp, Artificial sequence
  SiRNA target sequence
tctatcgcaaatcgaaaaggt

SEQ ID NO: 68598 - DNA, 21 bp, Artificial sequence
  SiRNA target sequence
ctatcgcaaatcgaaaaggtg

SEQ ID NO: 68599 - DNA, 21 bp, Artificial sequence
  SiRNA target sequence
tatcgcaaatcgaaaaggtga

SEQ ID NO: 68600 - DNA, 21 bp, Artificial sequence
  SiRNA target sequence
atcgcaaatcgaaaaggtgaa

SEQ ID NO: 68601 - DNA, 21 bp, Artificial sequence
  SiRNA target sequence
tcgcaaatcgaaaaggtgaac

SEQ ID NO: 68602 - DNA, 21 bp, Artificial sequence
  SiRNA target sequence
cgcaaatcgaaaaggtgaaca

SEQ ID NO: 68603 - DNA, 21 bp, Artificial sequence
  SiRNA target sequence
gcaaatcgaaaaggtgaacac

SEQ ID NO: 68604 - DNA, 21 bp, Artificial sequence
  SiRNA target sequence
caaatcgaaaaggtgaacaca

SEQ ID NO: 68605 - DNA, 21 bp, Artificial sequence
  SiRNA target sequence
aaatcgaaaaggtgaacacac

SEQ ID NO: 68606 - DNA, 21 bp, Artificial sequence
  SiRNA target sequence
aatcgaaaaggtgaacacaca

SEQ ID NO: 68607 - DNA, 21 bp, Artificial sequence
  SiRNA target sequence
atcgaaaaggtgaacacacag

SEQ ID NO: 68608 - DNA, 21 bp, Artificial sequence
  SiRNA target sequence
tcgaaaaggtgaacacacagc

SEQ ID NO: 68609 - DNA, 21 bp, Artificial sequence
  SiRNA target sequence
cgaaaaggtgaacacacagca

SEQ ID NO: 68610 - DNA, 21 bp, Artificial sequence
  SiRNA target sequence
gaaaaggtgaacacacagcac

SEQ ID NO: 68611 - DNA, 21 bp, Artificial sequence
  SiRNA target sequence
aaaaggtgaacacacagcact

SEQ ID NO: 68612 - DNA, 21 bp, Artificial sequence
  SiRNA target sequence
aaaggtgaacacacagcactt

SEQ ID NO: 68613 - DNA, 21 bp, Artificial sequence
  SiRNA target sequence
aaggtgaacacacagcacttg

SEQ ID NO: 68614 - DNA, 21 bp, Artificial sequence
  SiRNA target sequence
aggtgaacacacagcacttga

SEQ ID NO: 68615 - DNA, 21 bp, Artificial sequence
  SiRNA target sequence
ggtgaacacacagcacttgaa

SEQ ID NO: 68616 - DNA, 21 bp, Artificial sequence
  SiRNA target sequence
gtgaacacacagcacttgaaa

SEQ ID NO: 68617 - DNA, 21 bp, Artificial sequence
  SiRNA target sequence
tgaacacacagcacttgaaag

SEQ ID NO: 68618 - DNA, 21 bp, Artificial sequence
  SiRNA target sequence
gaacacacagcacttgaaaga

SEQ ID NO: 68619 - DNA, 21 bp, Artificial sequence
  SiRNA target sequence
aacacacagcacttgaaagat

SEQ ID NO: 68620 - DNA, 21 bp, Artificial sequence
  SiRNA target sequence
acacacagcacttgaaagatt

SEQ ID NO: 68621 - DNA, 21 bp, Artificial sequence
  SiRNA target sequence
cacacagcacttgaaagattt

SEQ ID NO: 68622 - DNA, 21 bp, Artificial sequence
  SiRNA target sequence
acacagcacttgaaagatttg

SEQ ID NO: 68623 - DNA, 21 bp, Artificial sequence
  SiRNA target sequence
cacagcacttgaaagatttgt

SEQ ID NO: 68624 - DNA, 21 bp, Artificial sequence
  SiRNA target sequence
acagcacttgaaagatttgtg

SEQ ID NO: 68625 - DNA, 21 bp, Artificial sequence
  SiRNA target sequence
cagcacttgaaagatttgtgt

SEQ ID NO: 68626 - DNA, 21 bp, Artificial sequence
  SiRNA target sequence
agcacttgaaagatttgtgtt

SEQ ID NO: 68627 - DNA, 21 bp, Artificial sequence
  SiRNA target sequence
gcacttgaaagatttgtgtta

SEQ ID NO: 68628 - DNA, 21 bp, Artificial sequence
  SiRNA target sequence
cacttgaaagatttgtgttac

SEQ ID NO: 68629 - DNA, 21 bp, Artificial sequence
  SiRNA target sequence
acttgaaagatttgtgttaca

SEQ ID NO: 68630 - DNA, 21 bp, Artificial sequence
  SiRNA target sequence
cttgaaagatttgtgttacag

SEQ ID NO: 68631 - DNA, 21 bp, Artificial sequence
  SiRNA target sequence
ttgaaagatttgtgttacagt

SEQ ID NO: 68632 - DNA, 21 bp, Artificial sequence
  SiRNA target sequence
tgaaagatttgtgttacagtc

SEQ ID NO: 68633 - DNA, 21 bp, Artificial sequence
  SiRNA target sequence
gaaagatttgtgttacagtca

SEQ ID NO: 68634 - DNA, 21 bp, Artificial sequence
  SiRNA target sequence
aaagatttgtgttacagtcac

SEQ ID NO: 68635 - DNA, 21 bp, Artificial sequence
  SiRNA target sequence
aagatttgtgttacagtcact

SEQ ID NO: 68636 - DNA, 21 bp, Artificial sequence
  SiRNA target sequence
agatttgtgttacagtcactc

SEQ ID NO: 68637 - DNA, 21 bp, Artificial sequence
  SiRNA target sequence
gatttgtgttacagtcactct

SEQ ID NO: 68638 - DNA, 21 bp, Artificial sequence
  SiRNA target sequence
atttgtgttacagtcactctt

SEQ ID NO: 68639 - DNA, 21 bp, Artificial sequence
  SiRNA target sequence
tttgtgttacagtcactctta

SEQ ID NO: 68640 - DNA, 21 bp, Artificial sequence
  SiRNA target sequence
ttgtgttacagtcactcttag

SEQ ID NO: 68641 - DNA, 21 bp, Artificial sequence
  SiRNA target sequence
tgtgttacagtcactcttagt

SEQ ID NO: 68642 - DNA, 21 bp, Artificial sequence
  SiRNA target sequence
gtgttacagtcactcttagtg

SEQ ID NO: 68643 - DNA, 21 bp, Artificial sequence
  SiRNA target sequence
tgttacagtcactcttagtgg

SEQ ID NO: 68644 - DNA, 21 bp, Artificial sequence
  SiRNA target sequence
gttacagtcactcttagtggc

SEQ ID NO: 68645 - DNA, 21 bp, Artificial sequence
  SiRNA target sequence
ttacagtcactcttagtggct

SEQ ID NO: 68646 - DNA, 21 bp, Artificial sequence
  SiRNA target sequence
tacagtcactcttagtggctg

SEQ ID NO: 68647 - DNA, 21 bp, Artificial sequence
  SiRNA target sequence
acagtcactcttagtggctgt

SEQ ID NO: 68648 - DNA, 21 bp, Artificial sequence
  SiRNA target sequence
cagtcactcttagtggctgta

SEQ ID NO: 68649 - DNA, 21 bp, Artificial sequence
  SiRNA target sequence
agtcactcttagtggctgtat

SEQ ID NO: 68650 - DNA, 21 bp, Artificial sequence
  SiRNA target sequence
gtcactcttagtggctgtatt

SEQ ID NO: 68651 - DNA, 21 bp, Artificial sequence
  SiRNA target sequence
tcactcttagtggctgtattg

SEQ ID NO: 68652 - DNA, 21 bp, Artificial sequence
  SiRNA target sequence
cactcttagtggctgtattga

SEQ ID NO: 68653 - DNA, 21 bp, Artificial sequence
  SiRNA target sequence
actcttagtggctgtattgac

SEQ ID NO: 68654 - DNA, 21 bp, Artificial sequence
  SiRNA target sequence
ctcttagtggctgtattgacc

SEQ ID NO: 68655 - DNA, 21 bp, Artificial sequence
  SiRNA target sequence
tcttagtggctgtattgaccg

SEQ ID NO: 68656 - DNA, 21 bp, Artificial sequence
  SiRNA target sequence
cttagtggctgtattgaccga

SEQ ID NO: 68657 - DNA, 21 bp, Artificial sequence
  SiRNA target sequence
ttagtggctgtattgaccgaa

SEQ ID NO: 68658 - DNA, 21 bp, Artificial sequence
  SiRNA target sequence
tagtggctgtattgaccgaac

SEQ ID NO: 68659 - DNA, 21 bp, Artificial sequence
  SiRNA target sequence
agtggctgtattgaccgaact

SEQ ID NO: 68660 - DNA, 21 bp, Artificial sequence
  SiRNA target sequence
gtggctgtattgaccgaactt

SEQ ID NO: 68661 - DNA, 21 bp, Artificial sequence
  SiRNA target sequence
tggctgtattgaccgaactta

SEQ ID NO: 68662 - DNA, 21 bp, Artificial sequence
  SiRNA target sequence
ggctgtattgaccgaacttaa

SEQ ID NO: 68663 - DNA, 21 bp, Artificial sequence
  SiRNA target sequence
gctgtattgaccgaacttaat

SEQ ID NO: 68664 - DNA, 21 bp, Artificial sequence
  SiRNA target sequence
ctgtattgaccgaacttaatg

SEQ ID NO: 68665 - DNA, 21 bp, Artificial sequence
  SiRNA target sequence
tgtattgaccgaacttaatgg

SEQ ID NO: 68666 - DNA, 21 bp, Artificial sequence
  SiRNA target sequence
gtattgaccgaacttaatgga

SEQ ID NO: 68667 - DNA, 21 bp, Artificial sequence
  SiRNA target sequence
tattgaccgaacttaatggat

SEQ ID NO: 68668 - DNA, 21 bp, Artificial sequence
  SiRNA target sequence
attgaccgaacttaatggatt

SEQ ID NO: 68669 - DNA, 21 bp, Artificial sequence
  SiRNA target sequence
ttgaccgaacttaatggattt

SEQ ID NO: 68670 - DNA, 21 bp, Artificial sequence
  SiRNA target sequence
tgaccgaacttaatggattta

SEQ ID NO: 68671 - DNA, 21 bp, Artificial sequence
  SiRNA target sequence
gaccgaacttaatggatttat

SEQ ID NO: 68672 - DNA, 21 bp, Artificial sequence
  SiRNA target sequence
accgaacttaatggatttatt

SEQ ID NO: 68673 - DNA, 21 bp, Artificial sequence
  SiRNA target sequence
ccgaacttaatggatttattt

SEQ ID NO: 68674 - DNA, 21 bp, Artificial sequence
  SiRNA target sequence
cgaacttaatggatttatttt

SEQ ID NO: 68675 - DNA, 21 bp, Artificial sequence
  SiRNA target sequence
gaacttaatggatttattttt

SEQ ID NO: 68676 - DNA, 21 bp, Artificial sequence
  SiRNA target sequence
aacttaatggatttattttta

SEQ ID NO: 68677 - DNA, 21 bp, Artificial sequence
  SiRNA target sequence
acttaatggatttatttttac

SEQ ID NO: 68678 - DNA, 21 bp, Artificial sequence
  SiRNA target sequence
cttaatggatttatttttaca

SEQ ID NO: 68679 - DNA, 21 bp, Artificial sequence
  SiRNA target sequence
ttaatggatttatttttacag

SEQ ID NO: 68680 - DNA, 21 bp, Artificial sequence
  SiRNA target sequence
taatggatttatttttacagg

SEQ ID NO: 68681 - DNA, 21 bp, Artificial sequence
  SiRNA target sequence
aatggatttatttttacaggt

SEQ ID NO: 68682 - DNA, 21 bp, Artificial sequence
  SiRNA target sequence
atggatttatttttacaggtg

SEQ ID NO: 68683 - DNA, 21 bp, Artificial sequence
  SiRNA target sequence
tggatttatttttacaggtgt

SEQ ID NO: 68684 - DNA, 21 bp, Artificial sequence
  SiRNA target sequence
ggatttatttttacaggtgta

SEQ ID NO: 68685 - DNA, 21 bp, Artificial sequence
  SiRNA target sequence
gatttatttttacaggtgtag

SEQ ID NO: 68686 - DNA, 21 bp, Artificial sequence
  SiRNA target sequence
atttatttttacaggtgtagt

SEQ ID NO: 68687 - DNA, 21 bp, Artificial sequence
  SiRNA target sequence
tttatttttacaggtgtagtg

SEQ ID NO: 68688 - DNA, 21 bp, Artificial sequence
  SiRNA target sequence
ttatttttacaggtgtagtgc

SEQ ID NO: 68689 - DNA, 21 bp, Artificial sequence
  SiRNA target sequence
tatttttacaggtgtagtgca

SEQ ID NO: 68690 - DNA, 21 bp, Artificial sequence
  SiRNA target sequence
atttttacaggtgtagtgcaa

SEQ ID NO: 68691 - DNA, 21 bp, Artificial sequence
  SiRNA target sequence
tttttacaggtgtagtgcaat

SEQ ID NO: 68692 - DNA, 21 bp, Artificial sequence
  SiRNA target sequence
ttttacaggtgtagtgcaata

SEQ ID NO: 68693 - DNA, 21 bp, Artificial sequence
  SiRNA target sequence
tttacaggtgtagtgcaatat

SEQ ID NO: 68694 - DNA, 21 bp, Artificial sequence
  SiRNA target sequence
ttacaggtgtagtgcaatata

SEQ ID NO: 68695 - DNA, 21 bp, Artificial sequence
  SiRNA target sequence
tacaggtgtagtgcaatatat

SEQ ID NO: 68696 - DNA, 21 bp, Artificial sequence
  SiRNA target sequence
acaggtgtagtgcaatatatt

SEQ ID NO: 68697 - DNA, 21 bp, Artificial sequence
  SiRNA target sequence
caggtgtagtgcaatatattt

SEQ ID NO: 68698 - DNA, 21 bp, Artificial sequence
  SiRNA target sequence
aggtgtagtgcaatatattta

SEQ ID NO: 68699 - DNA, 21 bp, Artificial sequence
  SiRNA target sequence
ggtgtagtgcaatatatttat

SEQ ID NO: 68700 - DNA, 21 bp, Artificial sequence
  SiRNA target sequence
gtgtagtgcaatatatttata

SEQ ID NO: 68701 - DNA, 21 bp, Artificial sequence
  SiRNA target sequence
tgtagtgcaatatatttatag

SEQ ID NO: 68702 - DNA, 21 bp, Artificial sequence
  SiRNA target sequence
gtagtgcaatatatttataga

SEQ ID NO: 68703 - DNA, 21 bp, Artificial sequence
  SiRNA target sequence
tagtgcaatatatttatagaa

SEQ ID NO: 68704 - DNA, 21 bp, Artificial sequence
  SiRNA target sequence
agtgcaatatatttatagaaa

SEQ ID NO: 68705 - DNA, 21 bp, Artificial sequence
  SiRNA target sequence
gtgcaatatatttatagaaat

SEQ ID NO: 68706 - DNA, 21 bp, Artificial sequence
  SiRNA target sequence
tgcaatatatttatagaaata

SEQ ID NO: 68707 - DNA, 21 bp, Artificial sequence
  SiRNA target sequence
gcaatatatttatagaaatac

SEQ ID NO: 68708 - DNA, 21 bp, Artificial sequence
  SiRNA target sequence
caatatatttatagaaatacg

SEQ ID NO: 68709 - DNA, 21 bp, Artificial sequence
  SiRNA target sequence
aatatatttatagaaatacgg

SEQ ID NO: 68710 - DNA, 21 bp, Artificial sequence
  SiRNA target sequence
atatatttatagaaatacggc

SEQ ID NO: 68711 - DNA, 21 bp, Artificial sequence
  SiRNA target sequence
tatatttatagaaatacggca

SEQ ID NO: 68712 - DNA, 21 bp, Artificial sequence
  SiRNA target sequence
atatttatagaaatacggcaa

SEQ ID NO: 68713 - DNA, 21 bp, Artificial sequence
  SiRNA target sequence
tatttatagaaatacggcaaa

SEQ ID NO: 68714 - DNA, 21 bp, Artificial sequence
  SiRNA target sequence
atttatagaaatacggcaaaa

SEQ ID NO: 68715 - DNA, 21 bp, Artificial sequence
  SiRNA target sequence
tttatagaaatacggcaaaat

SEQ ID NO: 68716 - DNA, 21 bp, Artificial sequence
  SiRNA target sequence
ttatagaaatacggcaaaatc

SEQ ID NO: 68717 - DNA, 21 bp, Artificial sequence
  SiRNA target sequence
tatagaaatacggcaaaatct

SEQ ID NO: 68718 - DNA, 21 bp, Artificial sequence
  SiRNA target sequence
atagaaatacggcaaaatcta

SEQ ID NO: 68719 - DNA, 21 bp, Artificial sequence
  SiRNA target sequence
tagaaatacggcaaaatctac

SEQ ID NO: 68720 - DNA, 21 bp, Artificial sequence
  SiRNA target sequence
agaaatacggcaaaatctaca

SEQ ID NO: 68721 - DNA, 21 bp, Artificial sequence
  SiRNA target sequence
gaaatacggcaaaatctacat

SEQ ID NO: 68722 - DNA, 21 bp, Artificial sequence
  SiRNA target sequence
aaatacggcaaaatctacatt

SEQ ID NO: 68723 - DNA, 21 bp, Artificial sequence
  SiRNA target sequence
aatacggcaaaatctacattc

SEQ ID NO: 68724 - DNA, 21 bp, Artificial sequence
  SiRNA target sequence
atacggcaaaatctacattca

SEQ ID NO: 68725 - DNA, 21 bp, Artificial sequence
  SiRNA target sequence
tacggcaaaatctacattcaa

SEQ ID NO: 68726 - DNA, 21 bp, Artificial sequence
  SiRNA target sequence
acggcaaaatctacattcaaa

SEQ ID NO: 68727 - DNA, 21 bp, Artificial sequence
  SiRNA target sequence
cggcaaaatctacattcaaag

SEQ ID NO: 68728 - DNA, 21 bp, Artificial sequence
  SiRNA target sequence
ggcaaaatctacattcaaagg

SEQ ID NO: 68729 - DNA, 21 bp, Artificial sequence
  SiRNA target sequence
gcaaaatctacattcaaaggc

SEQ ID NO: 68730 - DNA, 21 bp, Artificial sequence
  SiRNA target sequence
caaaatctacattcaaaggct

SEQ ID NO: 68731 - DNA, 21 bp, Artificial sequence
  SiRNA target sequence
aaaatctacattcaaaggctt

SEQ ID NO: 68732 - DNA, 21 bp, Artificial sequence
  SiRNA target sequence
aaatctacattcaaaggcttc

SEQ ID NO: 68733 - DNA, 21 bp, Artificial sequence
  SiRNA target sequence
aatctacattcaaaggcttca

SEQ ID NO: 68734 - DNA, 21 bp, Artificial sequence
  SiRNA target sequence
atctacattcaaaggcttcat

SEQ ID NO: 68735 - DNA, 21 bp, Artificial sequence
  SiRNA target sequence
tctacattcaaaggcttcatt

SEQ ID NO: 68736 - DNA, 21 bp, Artificial sequence
  SiRNA target sequence
ctacattcaaaggcttcattt

SEQ ID NO: 68737 - DNA, 21 bp, Artificial sequence
  SiRNA target sequence
tacattcaaaggcttcatttc

SEQ ID NO: 68738 - DNA, 21 bp, Artificial sequence
  SiRNA target sequence
acattcaaaggcttcatttct

SEQ ID NO: 68739 - DNA, 21 bp, Artificial sequence
  SiRNA target sequence
cattcaaaggcttcatttctc

SEQ ID NO: 68740 - DNA, 21 bp, Artificial sequence
  SiRNA target sequence
attcaaaggcttcatttctct

SEQ ID NO: 68741 - DNA, 21 bp, Artificial sequence
  SiRNA target sequence
ttcaaaggcttcatttctctt

SEQ ID NO: 68742 - DNA, 21 bp, Artificial sequence
  SiRNA target sequence
tcaaaggcttcatttctcttt

SEQ ID NO: 68743 - DNA, 21 bp, Artificial sequence
  SiRNA target sequence
caaaggcttcatttctctttc

SEQ ID NO: 68744 - DNA, 21 bp, Artificial sequence
  SiRNA target sequence
aaaggcttcatttctctttca

SEQ ID NO: 68745 - DNA, 21 bp, Artificial sequence
  SiRNA target sequence
aaggcttcatttctctttcac

SEQ ID NO: 68746 - DNA, 21 bp, Artificial sequence
  SiRNA target sequence
aggcttcatttctctttcacc

SEQ ID NO: 68747 - DNA, 21 bp, Artificial sequence
  SiRNA target sequence
ggcttcatttctctttcacct

SEQ ID NO: 68748 - DNA, 21 bp, Artificial sequence
  SiRNA target sequence
gcttcatttctctttcaccta

SEQ ID NO: 68749 - DNA, 21 bp, Artificial sequence
  SiRNA target sequence
cttcatttctctttcacctaa

SEQ ID NO: 68750 - DNA, 21 bp, Artificial sequence
  SiRNA target sequence
ttcatttctctttcacctaaa

SEQ ID NO: 68751 - DNA, 21 bp, Artificial sequence
  SiRNA target sequence
tcatttctctttcacctaaaa

SEQ ID NO: 68752 - DNA, 21 bp, Artificial sequence
  SiRNA target sequence
catttctctttcacctaaaaa

SEQ ID NO: 68753 - DNA, 21 bp, Artificial sequence
  SiRNA target sequence
atttctctttcacctaaaaat

SEQ ID NO: 68754 - DNA, 21 bp, Artificial sequence
  SiRNA target sequence
tttctctttcacctaaaaatt

SEQ ID NO: 68755 - DNA, 21 bp, Artificial sequence
  SiRNA target sequence
ttctctttcacctaaaaattt

SEQ ID NO: 68756 - DNA, 21 bp, Artificial sequence
  SiRNA target sequence
tctctttcacctaaaaatttt

SEQ ID NO: 68757 - DNA, 21 bp, Artificial sequence
  SiRNA target sequence
ctctttcacctaaaaatttta

SEQ ID NO: 68758 - DNA, 21 bp, Artificial sequence
  SiRNA target sequence
tctttcacctaaaaattttag

SEQ ID NO: 68759 - DNA, 21 bp, Artificial sequence
  SiRNA target sequence
ctttcacctaaaaattttagt

SEQ ID NO: 68760 - DNA, 21 bp, Artificial sequence
  SiRNA target sequence
tttcacctaaaaattttagta

SEQ ID NO: 68761 - DNA, 21 bp, Artificial sequence
  SiRNA target sequence
ttcacctaaaaattttagtac

SEQ ID NO: 68762 - DNA, 21 bp, Artificial sequence
  SiRNA target sequence
tcacctaaaaattttagtacc

SEQ ID NO: 68763 - DNA, 21 bp, Artificial sequence
  SiRNA target sequence
cacctaaaaattttagtacca

SEQ ID NO: 68764 - DNA, 21 bp, Artificial sequence
  SiRNA target sequence
acctaaaaattttagtaccat

SEQ ID NO: 68765 - DNA, 21 bp, Artificial sequence
  SiRNA target sequence
cctaaaaattttagtaccata

SEQ ID NO: 68766 - DNA, 21 bp, Artificial sequence
  SiRNA target sequence
ctaaaaattttagtaccatag

SEQ ID NO: 68767 - DNA, 21 bp, Artificial sequence
  SiRNA target sequence
taaaaattttagtaccatagg

SEQ ID NO: 68768 - DNA, 21 bp, Artificial sequence
  SiRNA target sequence
aaaaattttagtaccataggt

SEQ ID NO: 68769 - DNA, 21 bp, Artificial sequence
  SiRNA target sequence
aaaattttagtaccataggtg

SEQ ID NO: 68770 - DNA, 21 bp, Artificial sequence
  SiRNA target sequence
aaattttagtaccataggtgg

SEQ ID NO: 68771 - DNA, 21 bp, Artificial sequence
  SiRNA target sequence
aattttagtaccataggtggc

SEQ ID NO: 68772 - DNA, 21 bp, Artificial sequence
  SiRNA target sequence
attttagtaccataggtggcg

SEQ ID NO: 68773 - DNA, 21 bp, Artificial sequence
  SiRNA target sequence
ttttagtaccataggtggcgg

SEQ ID NO: 68774 - DNA, 21 bp, Artificial sequence
  SiRNA target sequence
tttagtaccataggtggcgga

SEQ ID NO: 68775 - DNA, 21 bp, Artificial sequence
  SiRNA target sequence
ttagtaccataggtggcggag

SEQ ID NO: 68776 - DNA, 21 bp, Artificial sequence
  SiRNA target sequence
tagtaccataggtggcggaga

SEQ ID NO: 68777 - DNA, 21 bp, Artificial sequence
  SiRNA target sequence
agtaccataggtggcggagaa

SEQ ID NO: 68778 - DNA, 21 bp, Artificial sequence
  SiRNA target sequence
gtaccataggtggcggagaaa

SEQ ID NO: 68779 - DNA, 21 bp, Artificial sequence
  SiRNA target sequence
taccataggtggcggagaaat

SEQ ID NO: 68780 - DNA, 21 bp, Artificial sequence
  SiRNA target sequence
accataggtggcggagaaatt

SEQ ID NO: 68781 - DNA, 21 bp, Artificial sequence
  SiRNA target sequence
ccataggtggcggagaaattc

SEQ ID NO: 68782 - DNA, 21 bp, Artificial sequence
  SiRNA target sequence
cataggtggcggagaaattca

SEQ ID NO: 68783 - DNA, 21 bp, Artificial sequence
  SiRNA target sequence
ataggtggcggagaaattcaa

SEQ ID NO: 68784 - DNA, 21 bp, Artificial sequence
  SiRNA target sequence
taggtggcggagaaattcaaa

SEQ ID NO: 68785 - DNA, 21 bp, Artificial sequence
  SiRNA target sequence
aggtggcggagaaattcaaac

SEQ ID NO: 68786 - DNA, 21 bp, Artificial sequence
  SiRNA target sequence
ggtggcggagaaattcaaaca

SEQ ID NO: 68787 - DNA, 21 bp, Artificial sequence
  SiRNA target sequence
gtggcggagaaattcaaacaa

SEQ ID NO: 68788 - DNA, 21 bp, Artificial sequence
  SiRNA target sequence
tggcggagaaattcaaacaat

SEQ ID NO: 68789 - DNA, 21 bp, Artificial sequence
  SiRNA target sequence
ggcggagaaattcaaacaata

SEQ ID NO: 68790 - DNA, 21 bp, Artificial sequence
  SiRNA target sequence
gcggagaaattcaaacaataa

SEQ ID NO: 68791 - DNA, 21 bp, Artificial sequence
  SiRNA target sequence
cggagaaattcaaacaataat

SEQ ID NO: 68792 - DNA, 21 bp, Artificial sequence
  SiRNA target sequence
ggagaaattcaaacaataata

SEQ ID NO: 68793 - DNA, 21 bp, Artificial sequence
  SiRNA target sequence
gagaaattcaaacaataatag

SEQ ID NO: 68794 - DNA, 21 bp, Artificial sequence
  SiRNA target sequence
agaaattcaaacaataataga

SEQ ID NO: 68795 - DNA, 21 bp, Artificial sequence
  SiRNA target sequence
gaaattcaaacaataatagat

SEQ ID NO: 68796 - DNA, 21 bp, Artificial sequence
  SiRNA target sequence
aaattcaaacaataatagata

SEQ ID NO: 68797 - DNA, 21 bp, Artificial sequence
  SiRNA target sequence
aattcaaacaataatagatag

SEQ ID NO: 68798 - DNA, 21 bp, Artificial sequence
  SiRNA target sequence
attcaaacaataatagataga

SEQ ID NO: 68799 - DNA, 21 bp, Artificial sequence
  SiRNA target sequence
ttcaaacaataatagatagaa

SEQ ID NO: 68800 - DNA, 21 bp, Artificial sequence
  SiRNA target sequence
tcaaacaataatagatagaaa

SEQ ID NO: 68801 - DNA, 21 bp, Artificial sequence
  SiRNA target sequence
caaacaataatagatagaaaa

SEQ ID NO: 68802 - DNA, 21 bp, Artificial sequence
  SiRNA target sequence
aaacaataatagatagaaaat

SEQ ID NO: 68803 - DNA, 21 bp, Artificial sequence
  SiRNA target sequence
aacaataatagatagaaaatc

SEQ ID NO: 68804 - DNA, 21 bp, Artificial sequence
  SiRNA target sequence
acaataatagatagaaaatca

SEQ ID NO: 68805 - DNA, 21 bp, Artificial sequence
  SiRNA target sequence
caataatagatagaaaatcaa

SEQ ID NO: 68806 - DNA, 21 bp, Artificial sequence
  SiRNA target sequence
aataatagatagaaaatcaaa

SEQ ID NO: 68807 - DNA, 21 bp, Artificial sequence
  SiRNA target sequence
ataatagatagaaaatcaaaa

SEQ ID NO: 68808 - DNA, 21 bp, Artificial sequence
  SiRNA target sequence
taatagatagaaaatcaaaat

SEQ ID NO: 68809 - DNA, 21 bp, Artificial sequence
  SiRNA target sequence
aatagatagaaaatcaaaatc

SEQ ID NO: 68810 - DNA, 21 bp, Artificial sequence
  SiRNA target sequence
atagatagaaaatcaaaatct

SEQ ID NO: 68811 - DNA, 21 bp, Artificial sequence
  SiRNA target sequence
tagatagaaaatcaaaatctg

SEQ ID NO: 68812 - DNA, 21 bp, Artificial sequence
  SiRNA target sequence
agatagaaaatcaaaatctgc

SEQ ID NO: 68813 - DNA, 21 bp, Artificial sequence
  SiRNA target sequence
gatagaaaatcaaaatctgca

SEQ ID NO: 68814 - DNA, 21 bp, Artificial sequence
  SiRNA target sequence
atagaaaatcaaaatctgcaa

SEQ ID NO: 68815 - DNA, 21 bp, Artificial sequence
  SiRNA target sequence
tagaaaatcaaaatctgcaag

SEQ ID NO: 68816 - DNA, 21 bp, Artificial sequence
  SiRNA target sequence
agaaaatcaaaatctgcaagt

SEQ ID NO: 68817 - DNA, 21 bp, Artificial sequence
  SiRNA target sequence
gaaaatcaaaatctgcaagtg

SEQ ID NO: 68818 - DNA, 21 bp, Artificial sequence
  SiRNA target sequence
aaaatcaaaatctgcaagtga

SEQ ID NO: 68819 - DNA, 21 bp, Artificial sequence
  SiRNA target sequence
aaatcaaaatctgcaagtgaa

SEQ ID NO: 68820 - DNA, 21 bp, Artificial sequence
  SiRNA target sequence
aatcaaaatctgcaagtgaac

SEQ ID NO: 68821 - DNA, 21 bp, Artificial sequence
  SiRNA target sequence
atcaaaatctgcaagtgaact

SEQ ID NO: 68822 - DNA, 21 bp, Artificial sequence
  SiRNA target sequence
tcaaaatctgcaagtgaactt

SEQ ID NO: 68823 - DNA, 21 bp, Artificial sequence
  SiRNA target sequence
caaaatctgcaagtgaactta

SEQ ID NO: 68824 - DNA, 21 bp, Artificial sequence
  SiRNA target sequence
aaaatctgcaagtgaacttat

SEQ ID NO: 68825 - DNA, 21 bp, Artificial sequence
  SiRNA target sequence
aaatctgcaagtgaacttatt

SEQ ID NO: 68826 - DNA, 21 bp, Artificial sequence
  SiRNA target sequence
aatctgcaagtgaacttattg

SEQ ID NO: 68827 - DNA, 21 bp, Artificial sequence
  SiRNA target sequence
atctgcaagtgaacttattga

SEQ ID NO: 68828 - DNA, 21 bp, Artificial sequence
  SiRNA target sequence
tctgcaagtgaacttattgaa

SEQ ID NO: 68829 - DNA, 21 bp, Artificial sequence
  SiRNA target sequence
ctgcaagtgaacttattgaag

SEQ ID NO: 68830 - DNA, 21 bp, Artificial sequence
  SiRNA target sequence
tgcaagtgaacttattgaagt

SEQ ID NO: 68831 - DNA, 21 bp, Artificial sequence
  SiRNA target sequence
gcaagtgaacttattgaagtg

SEQ ID NO: 68832 - DNA, 21 bp, Artificial sequence
  SiRNA target sequence
caagtgaacttattgaagtgt

SEQ ID NO: 68833 - DNA, 21 bp, Artificial sequence
  SiRNA target sequence
aagtgaacttattgaagtgtt

SEQ ID NO: 68834 - DNA, 21 bp, Artificial sequence
  SiRNA target sequence
agtgaacttattgaagtgttt

SEQ ID NO: 68835 - DNA, 21 bp, Artificial sequence
  SiRNA target sequence
gtgaacttattgaagtgtttc

SEQ ID NO: 68836 - DNA, 21 bp, Artificial sequence
  SiRNA target sequence
tgaacttattgaagtgtttct

SEQ ID NO: 68837 - DNA, 21 bp, Artificial sequence
  SiRNA target sequence
gaacttattgaagtgtttctt

SEQ ID NO: 68838 - DNA, 21 bp, Artificial sequence
  SiRNA target sequence
aacttattgaagtgtttctta

SEQ ID NO: 68839 - DNA, 21 bp, Artificial sequence
  SiRNA target sequence
acttattgaagtgtttcttac

SEQ ID NO: 68840 - DNA, 21 bp, Artificial sequence
  SiRNA target sequence
cttattgaagtgtttcttaca

SEQ ID NO: 68841 - DNA, 21 bp, Artificial sequence
  SiRNA target sequence
ttattgaagtgtttcttacaa

SEQ ID NO: 68842 - DNA, 21 bp, Artificial sequence
  SiRNA target sequence
tattgaagtgtttcttacaag

SEQ ID NO: 68843 - DNA, 21 bp, Artificial sequence
  SiRNA target sequence
attgaagtgtttcttacaagc

SEQ ID NO: 68844 - DNA, 21 bp, Artificial sequence
  SiRNA target sequence
ttgaagtgtttcttacaagct

SEQ ID NO: 68845 - DNA, 21 bp, Artificial sequence
  SiRNA target sequence
tgaagtgtttcttacaagctt

SEQ ID NO: 68846 - DNA, 21 bp, Artificial sequence
  SiRNA target sequence
gaagtgtttcttacaagcttg

SEQ ID NO: 68847 - DNA, 21 bp, Artificial sequence
  SiRNA target sequence
aagtgtttcttacaagcttgc

SEQ ID NO: 68848 - DNA, 21 bp, Artificial sequence
  SiRNA target sequence
agtgtttcttacaagcttgct

SEQ ID NO: 68849 - DNA, 21 bp, Artificial sequence
  SiRNA target sequence
gtgtttcttacaagcttgctt

SEQ ID NO: 68850 - DNA, 21 bp, Artificial sequence
  SiRNA target sequence
tgtttcttacaagcttgcttc

SEQ ID NO: 68851 - DNA, 21 bp, Artificial sequence
  SiRNA target sequence
gtttcttacaagcttgcttcc

SEQ ID NO: 68852 - DNA, 21 bp, Artificial sequence
  SiRNA target sequence
tttcttacaagcttgcttcca

SEQ ID NO: 68853 - DNA, 21 bp, Artificial sequence
  SiRNA target sequence
ttcttacaagcttgcttccaa

SEQ ID NO: 68854 - DNA, 21 bp, Artificial sequence
  SiRNA target sequence
tcttacaagcttgcttccaat

SEQ ID NO: 68855 - DNA, 21 bp, Artificial sequence
  SiRNA target sequence
cttacaagcttgcttccaata

SEQ ID NO: 68856 - DNA, 21 bp, Artificial sequence
  SiRNA target sequence
ttacaagcttgcttccaatat

SEQ ID NO: 68857 - DNA, 21 bp, Artificial sequence
  SiRNA target sequence
tacaagcttgcttccaatatg

SEQ ID NO: 68858 - DNA, 21 bp, Artificial sequence
  SiRNA target sequence
acaagcttgcttccaatatgc

SEQ ID NO: 68859 - DNA, 21 bp, Artificial sequence
  SiRNA target sequence
caagcttgcttccaatatgcc

SEQ ID NO: 68860 - DNA, 21 bp, Artificial sequence
  SiRNA target sequence
aagcttgcttccaatatgcct

SEQ ID NO: 68861 - DNA, 21 bp, Artificial sequence
  SiRNA target sequence
agcttgcttccaatatgcctt

SEQ ID NO: 68862 - DNA, 21 bp, Artificial sequence
  SiRNA target sequence
gcttgcttccaatatgcctta

SEQ ID NO: 68863 - DNA, 21 bp, Artificial sequence
  SiRNA target sequence
cttgcttccaatatgccttaa

SEQ ID NO: 68864 - DNA, 21 bp, Artificial sequence
  SiRNA target sequence
ttgcttccaatatgccttaaa

SEQ ID NO: 68865 - DNA, 21 bp, Artificial sequence
  SiRNA target sequence
tgcttccaatatgccttaaac

SEQ ID NO: 68866 - DNA, 21 bp, Artificial sequence
  SiRNA target sequence
gcttccaatatgccttaaact

SEQ ID NO: 68867 - DNA, 21 bp, Artificial sequence
  SiRNA target sequence
cttccaatatgccttaaactt

SEQ ID NO: 68868 - DNA, 21 bp, Artificial sequence
  SiRNA target sequence
ttccaatatgccttaaacttt

SEQ ID NO: 68869 - DNA, 21 bp, Artificial sequence
  SiRNA target sequence
tccaatatgccttaaactttt

SEQ ID NO: 68870 - DNA, 21 bp, Artificial sequence
  SiRNA target sequence
ccaatatgccttaaactttta

SEQ ID NO: 68871 - DNA, 21 bp, Artificial sequence
  SiRNA target sequence
caatatgccttaaacttttat

SEQ ID NO: 68872 - DNA, 21 bp, Artificial sequence
  SiRNA target sequence
aatatgccttaaacttttatt

SEQ ID NO: 68873 - DNA, 21 bp, Artificial sequence
  SiRNA target sequence
atatgccttaaacttttattt

SEQ ID NO: 68874 - DNA, 21 bp, Artificial sequence
  SiRNA target sequence
tatgccttaaacttttatttg

SEQ ID NO: 68875 - DNA, 21 bp, Artificial sequence
  SiRNA target sequence
atgccttaaacttttatttgc

SEQ ID NO: 68876 - DNA, 21 bp, Artificial sequence
  SiRNA target sequence
tgccttaaacttttatttgcc

SEQ ID NO: 68877 - DNA, 21 bp, Artificial sequence
  SiRNA target sequence
gccttaaacttttatttgccc

SEQ ID NO: 68878 - DNA, 21 bp, Artificial sequence
  SiRNA target sequence
ccttaaacttttatttgccct

SEQ ID NO: 68879 - DNA, 21 bp, Artificial sequence
  SiRNA target sequence
cttaaacttttatttgccctt

SEQ ID NO: 68880 - DNA, 21 bp, Artificial sequence
  SiRNA target sequence
ttaaacttttatttgccctta

SEQ ID NO: 68881 - DNA, 21 bp, Artificial sequence
  SiRNA target sequence
taaacttttatttgcccttat

SEQ ID NO: 68882 - DNA, 21 bp, Artificial sequence
  SiRNA target sequence
aaacttttatttgcccttatt

SEQ ID NO: 68883 - DNA, 21 bp, Artificial sequence
  SiRNA target sequence
aacttttatttgcccttattg

SEQ ID NO: 68884 - DNA, 21 bp, Artificial sequence
  SiRNA target sequence
acttttatttgcccttattgc

SEQ ID NO: 68885 - DNA, 21 bp, Artificial sequence
  SiRNA target sequence
cttttatttgcccttattgca

SEQ ID NO: 68886 - DNA, 21 bp, Artificial sequence
  SiRNA target sequence
ttttatttgcccttattgcag

SEQ ID NO: 68887 - DNA, 21 bp, Artificial sequence
  SiRNA target sequence
tttatttgcccttattgcagt

SEQ ID NO: 68888 - DNA, 21 bp, Artificial sequence
  SiRNA target sequence
ttatttgcccttattgcagtt

SEQ ID NO: 68889 - DNA, 21 bp, Artificial sequence
  SiRNA target sequence
tatttgcccttattgcagtta

SEQ ID NO: 68890 - DNA, 21 bp, Artificial sequence
  SiRNA target sequence
atttgcccttattgcagttat

SEQ ID NO: 68891 - DNA, 21 bp, Artificial sequence
  SiRNA target sequence
tttgcccttattgcagttata

SEQ ID NO: 68892 - DNA, 21 bp, Artificial sequence
  SiRNA target sequence
ttgcccttattgcagttataa

SEQ ID NO: 68893 - DNA, 21 bp, Artificial sequence
  SiRNA target sequence
tgcccttattgcagttataaa

SEQ ID NO: 68894 - DNA, 21 bp, Artificial sequence
  SiRNA target sequence
gcccttattgcagttataaaa

SEQ ID NO: 68895 - DNA, 21 bp, Artificial sequence
  SiRNA target sequence
cccttattgcagttataaaaa

SEQ ID NO: 68896 - DNA, 21 bp, Artificial sequence
  SiRNA target sequence
ccttattgcagttataaaaaa

SEQ ID NO: 68897 - DNA, 21 bp, Artificial sequence
  SiRNA target sequence
cttattgcagttataaaaaat

SEQ ID NO: 68898 - DNA, 21 bp, Artificial sequence
  SiRNA target sequence
ttattgcagttataaaaaata

SEQ ID NO: 68899 - DNA, 21 bp, Artificial sequence
  SiRNA target sequence
tattgcagttataaaaaatat

SEQ ID NO: 68900 - DNA, 21 bp, Artificial sequence
  SiRNA target sequence
attgcagttataaaaaatatg

SEQ ID NO: 68901 - DNA, 21 bp, Artificial sequence
  SiRNA target sequence
ttgcagttataaaaaatatgg

SEQ ID NO: 68902 - DNA, 21 bp, Artificial sequence
  SiRNA target sequence
tgcagttataaaaaatatggg

SEQ ID NO: 68903 - DNA, 21 bp, Artificial sequence
  SiRNA target sequence
gcagttataaaaaatatggga

SEQ ID NO: 68904 - DNA, 21 bp, Artificial sequence
  SiRNA target sequence
cagttataaaaaatatgggag

SEQ ID NO: 68905 - DNA, 21 bp, Artificial sequence
  SiRNA target sequence
agttataaaaaatatgggagg

SEQ ID NO: 68906 - DNA, 21 bp, Artificial sequence
  SiRNA target sequence
gttataaaaaatatgggaggt

SEQ ID NO: 68907 - DNA, 21 bp, Artificial sequence
  SiRNA target sequence
ttataaaaaatatgggaggtc

SEQ ID NO: 68908 - DNA, 21 bp, Artificial sequence
  SiRNA target sequence
tataaaaaatatgggaggtct

SEQ ID NO: 68909 - DNA, 21 bp, Artificial sequence
  SiRNA target sequence
ataaaaaatatgggaggtctt

SEQ ID NO: 68910 - DNA, 21 bp, Artificial sequence
  SiRNA target sequence
taaaaaatatgggaggtcttg

SEQ ID NO: 68911 - DNA, 21 bp, Artificial sequence
  SiRNA target sequence
aaaaaatatgggaggtcttgc

SEQ ID NO: 68912 - DNA, 21 bp, Artificial sequence
  SiRNA target sequence
aaaaatatgggaggtcttgcg

SEQ ID NO: 68913 - DNA, 21 bp, Artificial sequence
  SiRNA target sequence
aaaatatgggaggtcttgcgg

SEQ ID NO: 68914 - DNA, 21 bp, Artificial sequence
  SiRNA target sequence
aaatatgggaggtcttgcggg

SEQ ID NO: 68915 - DNA, 21 bp, Artificial sequence
  SiRNA target sequence
aatatgggaggtcttgcgggc

SEQ ID NO: 68916 - DNA, 21 bp, Artificial sequence
  SiRNA target sequence
atatgggaggtcttgcgggct

SEQ ID NO: 68917 - DNA, 21 bp, Artificial sequence
  SiRNA target sequence
tatgggaggtcttgcgggctt

SEQ ID NO: 68918 - DNA, 21 bp, Artificial sequence
  SiRNA target sequence
atgggaggtcttgcgggcttc

SEQ ID NO: 68919 - DNA, 21 bp, Artificial sequence
  SiRNA target sequence
tgggaggtcttgcgggcttca

SEQ ID NO: 68920 - DNA, 21 bp, Artificial sequence
  SiRNA target sequence
gggaggtcttgcgggcttcat

SEQ ID NO: 68921 - DNA, 21 bp, Artificial sequence
  SiRNA target sequence
ggaggtcttgcgggcttcata

SEQ ID NO: 68922 - DNA, 21 bp, Artificial sequence
  SiRNA target sequence
gaggtcttgcgggcttcataa

SEQ ID NO: 68923 - DNA, 21 bp, Artificial sequence
  SiRNA target sequence
aggtcttgcgggcttcataat

SEQ ID NO: 68924 - DNA, 21 bp, Artificial sequence
  SiRNA target sequence
ggtcttgcgggcttcataatg

SEQ ID NO: 68925 - DNA, 21 bp, Artificial sequence
  SiRNA target sequence
gtcttgcgggcttcataatgt

SEQ ID NO: 68926 - DNA, 21 bp, Artificial sequence
  SiRNA target sequence
tcttgcgggcttcataatgtt

SEQ ID NO: 68927 - DNA, 21 bp, Artificial sequence
  SiRNA target sequence
cttgcgggcttcataatgttt

SEQ ID NO: 68928 - DNA, 21 bp, Artificial sequence
  SiRNA target sequence
ttgcgggcttcataatgtttg

SEQ ID NO: 68929 - DNA, 21 bp, Artificial sequence
  SiRNA target sequence
tgcgggcttcataatgtttgt

SEQ ID NO: 68930 - DNA, 21 bp, Artificial sequence
  SiRNA target sequence
gcgggcttcataatgtttgtt

SEQ ID NO: 68931 - DNA, 21 bp, Artificial sequence
  SiRNA target sequence
cgggcttcataatgtttgttt

SEQ ID NO: 68932 - DNA, 21 bp, Artificial sequence
  SiRNA target sequence
gggcttcataatgtttgtttg

SEQ ID NO: 68933 - DNA, 21 bp, Artificial sequence
  SiRNA target sequence
ggcttcataatgtttgtttgt

SEQ ID NO: 68934 - DNA, 21 bp, Artificial sequence
  SiRNA target sequence
gcttcataatgtttgtttgtg

SEQ ID NO: 68935 - DNA, 21 bp, Artificial sequence
  SiRNA target sequence
cttcataatgtttgtttgtgt

SEQ ID NO: 68936 - DNA, 21 bp, Artificial sequence
  SiRNA target sequence
ttcataatgtttgtttgtgtt

SEQ ID NO: 68937 - DNA, 21 bp, Artificial sequence
  SiRNA target sequence
tcataatgtttgtttgtgttt

SEQ ID NO: 68938 - DNA, 21 bp, Artificial sequence
  SiRNA target sequence
cataatgtttgtttgtgtttc

SEQ ID NO: 68939 - DNA, 21 bp, Artificial sequence
  SiRNA target sequence
ataatgtttgtttgtgtttct

SEQ ID NO: 68940 - DNA, 21 bp, Artificial sequence
  SiRNA target sequence
taatgtttgtttgtgtttctt

SEQ ID NO: 68941 - DNA, 21 bp, Artificial sequence
  SiRNA target sequence
aatgtttgtttgtgtttcttg

SEQ ID NO: 68942 - DNA, 21 bp, Artificial sequence
  SiRNA target sequence
atgtttgtttgtgtttcttgc

SEQ ID NO: 68943 - DNA, 21 bp, Artificial sequence
  SiRNA target sequence
tgtttgtttgtgtttcttgct

SEQ ID NO: 68944 - DNA, 21 bp, Artificial sequence
  SiRNA target sequence
gtttgtttgtgtttcttgcta

SEQ ID NO: 68945 - DNA, 21 bp, Artificial sequence
  SiRNA target sequence
tttgtttgtgtttcttgctat

SEQ ID NO: 68946 - DNA, 21 bp, Artificial sequence
  SiRNA target sequence
ttgtttgtgtttcttgctatg

SEQ ID NO: 68947 - DNA, 21 bp, Artificial sequence
  SiRNA target sequence
tgtttgtgtttcttgctatgc

SEQ ID NO: 68948 - DNA, 21 bp, Artificial sequence
  SiRNA target sequence
gtttgtgtttcttgctatgcg

SEQ ID NO: 68949 - DNA, 21 bp, Artificial sequence
  SiRNA target sequence
tttgtgtttcttgctatgcga

SEQ ID NO: 68950 - DNA, 21 bp, Artificial sequence
  SiRNA target sequence
ttgtgtttcttgctatgcgac

SEQ ID NO: 68951 - DNA, 21 bp, Artificial sequence
  SiRNA target sequence
tgtgtttcttgctatgcgact

SEQ ID NO: 68952 - DNA, 21 bp, Artificial sequence
  SiRNA target sequence
gtgtttcttgctatgcgactg

SEQ ID NO: 68953 - DNA, 21 bp, Artificial sequence
  SiRNA target sequence
tgtttcttgctatgcgactgt

SEQ ID NO: 68954 - DNA, 21 bp, Artificial sequence
  SiRNA target sequence
gtttcttgctatgcgactgtg

SEQ ID NO: 68955 - DNA, 21 bp, Artificial sequence
  SiRNA target sequence
tttcttgctatgcgactgtga

SEQ ID NO: 68956 - DNA, 21 bp, Artificial sequence
  SiRNA target sequence
ttcttgctatgcgactgtgac

SEQ ID NO: 68957 - DNA, 21 bp, Artificial sequence
  SiRNA target sequence
tcttgctatgcgactgtgact

SEQ ID NO: 68958 - DNA, 21 bp, Artificial sequence
  SiRNA target sequence
cttgctatgcgactgtgacta

SEQ ID NO: 68959 - DNA, 21 bp, Artificial sequence
  SiRNA target sequence
ttgctatgcgactgtgactat

SEQ ID NO: 68960 - DNA, 21 bp, Artificial sequence
  SiRNA target sequence
tgctatgcgactgtgactata

SEQ ID NO: 68961 - DNA, 21 bp, Artificial sequence
  SiRNA target sequence
gctatgcgactgtgactatat

SEQ ID NO: 68962 - DNA, 21 bp, Artificial sequence
  SiRNA target sequence
ctatgcgactgtgactatatt

SEQ ID NO: 68963 - DNA, 21 bp, Artificial sequence
  SiRNA target sequence
tatgcgactgtgactatattg

SEQ ID NO: 68964 - DNA, 21 bp, Artificial sequence
  SiRNA target sequence
atgcgactgtgactatattga

SEQ ID NO: 68965 - DNA, 21 bp, Artificial sequence
  SiRNA target sequence
tgcgactgtgactatattgat

SEQ ID NO: 68966 - DNA, 21 bp, Artificial sequence
  SiRNA target sequence
gcgactgtgactatattgata

SEQ ID NO: 68967 - DNA, 21 bp, Artificial sequence
  SiRNA target sequence
cgactgtgactatattgatag

SEQ ID NO: 68968 - DNA, 21 bp, Artificial sequence
  SiRNA target sequence
gactgtgactatattgatagc

SEQ ID NO: 68969 - DNA, 21 bp, Artificial sequence
  SiRNA target sequence
actgtgactatattgatagca

SEQ ID NO: 68970 - DNA, 21 bp, Artificial sequence
  SiRNA target sequence
ctgtgactatattgatagcac

SEQ ID NO: 68971 - DNA, 21 bp, Artificial sequence
  SiRNA target sequence
tgtgactatattgatagcaca

SEQ ID NO: 68972 - DNA, 21 bp, Artificial sequence
  SiRNA target sequence
gtgactatattgatagcacaa

SEQ ID NO: 68973 - DNA, 21 bp, Artificial sequence
  SiRNA target sequence
tgactatattgatagcacaat

SEQ ID NO: 68974 - DNA, 21 bp, Artificial sequence
  SiRNA target sequence
gactatattgatagcacaatg

SEQ ID NO: 68975 - DNA, 21 bp, Artificial sequence
  SiRNA target sequence
actatattgatagcacaatgg

SEQ ID NO: 68976 - DNA, 21 bp, Artificial sequence
  SiRNA target sequence
ctatattgatagcacaatgga

SEQ ID NO: 68977 - DNA, 21 bp, Artificial sequence
  SiRNA target sequence
tatattgatagcacaatggag

SEQ ID NO: 68978 - DNA, 21 bp, Artificial sequence
  SiRNA target sequence
atattgatagcacaatggaga

SEQ ID NO: 68979 - DNA, 21 bp, Artificial sequence
  SiRNA target sequence
tattgatagcacaatggagat

SEQ ID NO: 68980 - DNA, 21 bp, Artificial sequence
  SiRNA target sequence
attgatagcacaatggagatc

SEQ ID NO: 68981 - DNA, 21 bp, Artificial sequence
  SiRNA target sequence
ttgatagcacaatggagatct

SEQ ID NO: 68982 - DNA, 21 bp, Artificial sequence
  SiRNA target sequence
tgatagcacaatggagatcta

SEQ ID NO: 68983 - DNA, 21 bp, Artificial sequence
  SiRNA target sequence
gatagcacaatggagatctaa

SEQ ID NO: 68984 - DNA, 21 bp, Artificial sequence
  SiRNA target sequence
atagcacaatggagatctaat

SEQ ID NO: 68985 - DNA, 21 bp, Artificial sequence
  SiRNA target sequence
tagcacaatggagatctaata

SEQ ID NO: 68986 - DNA, 21 bp, Artificial sequence
  SiRNA target sequence
agcacaatggagatctaatat

SEQ ID NO: 68987 - DNA, 21 bp, Artificial sequence
  SiRNA target sequence
gcacaatggagatctaatatt

SEQ ID NO: 68988 - DNA, 21 bp, Artificial sequence
  SiRNA target sequence
cacaatggagatctaatatta

SEQ ID NO: 68989 - DNA, 21 bp, Artificial sequence
  SiRNA target sequence
acaatggagatctaatattag

SEQ ID NO: 68990 - DNA, 21 bp, Artificial sequence
  SiRNA target sequence
caatggagatctaatattaga

SEQ ID NO: 68991 - DNA, 21 bp, Artificial sequence
  SiRNA target sequence
aatggagatctaatattagaa

SEQ ID NO: 68992 - DNA, 21 bp, Artificial sequence
  SiRNA target sequence
atggagatctaatattagaag

SEQ ID NO: 68993 - DNA, 21 bp, Artificial sequence
  SiRNA target sequence
tggagatctaatattagaaga

SEQ ID NO: 68994 - DNA, 21 bp, Artificial sequence
  SiRNA target sequence
ggagatctaatattagaagag

SEQ ID NO: 68995 - DNA, 21 bp, Artificial sequence
  SiRNA target sequence
gagatctaatattagaagaga

SEQ ID NO: 68996 - DNA, 21 bp, Artificial sequence
  SiRNA target sequence
agatctaatattagaagagaa

SEQ ID NO: 68997 - DNA, 21 bp, Artificial sequence
  SiRNA target sequence
gatctaatattagaagagaac

SEQ ID NO: 68998 - DNA, 21 bp, Artificial sequence
  SiRNA target sequence
atctaatattagaagagaact

SEQ ID NO: 68999 - DNA, 21 bp, Artificial sequence
  SiRNA target sequence
tctaatattagaagagaactt

SEQ ID NO: 69000 - DNA, 21 bp, Artificial sequence
  SiRNA target sequence
ctaatattagaagagaactta

SEQ ID NO: 69001 - DNA, 21 bp, Artificial sequence
  SiRNA target sequence
taatattagaagagaacttaa

SEQ ID NO: 69002 - DNA, 21 bp, Artificial sequence
  SiRNA target sequence
aatattagaagagaacttaat

SEQ ID NO: 69003 - DNA, 21 bp, Artificial sequence
  SiRNA target sequence
atattagaagagaacttaata

SEQ ID NO: 69004 - DNA, 21 bp, Artificial sequence
  SiRNA target sequence
tattagaagagaacttaataa

SEQ ID NO: 69005 - DNA, 21 bp, Artificial sequence
  SiRNA target sequence
attagaagagaacttaataac

SEQ ID NO: 69006 - DNA, 21 bp, Artificial sequence
  SiRNA target sequence
ttagaagagaacttaataact

SEQ ID NO: 69007 - DNA, 21 bp, Artificial sequence
  SiRNA target sequence
tagaagagaacttaataactc

SEQ ID NO: 69008 - DNA, 21 bp, Artificial sequence
  SiRNA target sequence
agaagagaacttaataactct

SEQ ID NO: 69009 - DNA, 21 bp, Artificial sequence
  SiRNA target sequence
gaagagaacttaataactctg

SEQ ID NO: 69010 - DNA, 21 bp, Artificial sequence
  SiRNA target sequence
aagagaacttaataactctga

SEQ ID NO: 69011 - DNA, 21 bp, Artificial sequence
  SiRNA target sequence
agagaacttaataactctgaa

SEQ ID NO: 69012 - DNA, 21 bp, Artificial sequence
  SiRNA target sequence
gagaacttaataactctgaaa

SEQ ID NO: 69013 - DNA, 21 bp, Artificial sequence
  SiRNA target sequence
agaacttaataactctgaaaa

SEQ ID NO: 69014 - DNA, 21 bp, Artificial sequence
  SiRNA target sequence
gaacttaataactctgaaaat

SEQ ID NO: 69015 - DNA, 21 bp, Artificial sequence
  SiRNA target sequence
aacttaataactctgaaaata

SEQ ID NO: 69016 - DNA, 21 bp, Artificial sequence
  SiRNA target sequence
acttaataactctgaaaatag

SEQ ID NO: 69017 - DNA, 21 bp, Artificial sequence
  SiRNA target sequence
cttaataactctgaaaataga

SEQ ID NO: 69018 - DNA, 21 bp, Artificial sequence
  SiRNA target sequence
ttaataactctgaaaatagat

SEQ ID NO: 69019 - DNA, 21 bp, Artificial sequence
  SiRNA target sequence
taataactctgaaaatagatc

SEQ ID NO: 69020 - DNA, 21 bp, Artificial sequence
  SiRNA target sequence
aataactctgaaaatagatct

SEQ ID NO: 69021 - DNA, 21 bp, Artificial sequence
  SiRNA target sequence
ataactctgaaaatagatcta

SEQ ID NO: 69022 - DNA, 21 bp, Artificial sequence
  SiRNA target sequence
taactctgaaaatagatctag

SEQ ID NO: 69023 - DNA, 21 bp, Artificial sequence
  SiRNA target sequence
aactctgaaaatagatctagt

SEQ ID NO: 69024 - DNA, 21 bp, Artificial sequence
  SiRNA target sequence
actctgaaaatagatctagta

SEQ ID NO: 69025 - DNA, 21 bp, Artificial sequence
  SiRNA target sequence
ctctgaaaatagatctagtaa

SEQ ID NO: 69026 - DNA, 21 bp, Artificial sequence
  SiRNA target sequence
tctgaaaatagatctagtaat

SEQ ID NO: 69027 - DNA, 21 bp, Artificial sequence
  SiRNA target sequence
ctgaaaatagatctagtaata

SEQ ID NO: 69028 - DNA, 21 bp, Artificial sequence
  SiRNA target sequence
tgaaaatagatctagtaataa

SEQ ID NO: 69029 - DNA, 21 bp, Artificial sequence
  SiRNA target sequence
gaaaatagatctagtaataaa

SEQ ID NO: 69030 - DNA, 21 bp, Artificial sequence
  SiRNA target sequence
aaaatagatctagtaataaac

SEQ ID NO: 69031 - DNA, 21 bp, Artificial sequence
  SiRNA target sequence
aaatagatctagtaataaact

SEQ ID NO: 69032 - DNA, 21 bp, Artificial sequence
  SiRNA target sequence
aatagatctagtaataaacta

SEQ ID NO: 69033 - DNA, 21 bp, Artificial sequence
  SiRNA target sequence
atagatctagtaataaactac

SEQ ID NO: 69034 - DNA, 21 bp, Artificial sequence
  SiRNA target sequence
tagatctagtaataaactaca

SEQ ID NO: 69035 - DNA, 21 bp, Artificial sequence
  SiRNA target sequence
agatctagtaataaactacaa

SEQ ID NO: 69036 - DNA, 21 bp, Artificial sequence
  SiRNA target sequence
gatctagtaataaactacaag

SEQ ID NO: 69037 - DNA, 21 bp, Artificial sequence
  SiRNA target sequence
atctagtaataaactacaaga

SEQ ID NO: 69038 - DNA, 21 bp, Artificial sequence
  SiRNA target sequence
tctagtaataaactacaagat

SEQ ID NO: 69039 - DNA, 21 bp, Artificial sequence
  SiRNA target sequence
ctagtaataaactacaagatg

SEQ ID NO: 69040 - DNA, 21 bp, Artificial sequence
  SiRNA target sequence
tagtaataaactacaagatgg

SEQ ID NO: 69041 - DNA, 21 bp, Artificial sequence
  SiRNA target sequence
agtaataaactacaagatgga

SEQ ID NO: 69042 - DNA, 21 bp, Artificial sequence
  SiRNA target sequence
gtaataaactacaagatggat

SEQ ID NO: 69043 - DNA, 21 bp, Artificial sequence
  SiRNA target sequence
taataaactacaagatggatt

SEQ ID NO: 69044 - DNA, 21 bp, Artificial sequence
  SiRNA target sequence
aataaactacaagatggatta

SEQ ID NO: 69045 - DNA, 21 bp, Artificial sequence
  SiRNA target sequence
ataaactacaagatggattaa

SEQ ID NO: 69046 - DNA, 21 bp, Artificial sequence
  SiRNA target sequence
taaactacaagatggattaaa

SEQ ID NO: 69047 - DNA, 21 bp, Artificial sequence
  SiRNA target sequence
aaactacaagatggattaaat

SEQ ID NO: 69048 - DNA, 21 bp, Artificial sequence
  SiRNA target sequence
aactacaagatggattaaata

SEQ ID NO: 69049 - DNA, 21 bp, Artificial sequence
  SiRNA target sequence
actacaagatggattaaataa

SEQ ID NO: 69050 - DNA, 21 bp, Artificial sequence
  SiRNA target sequence
ctacaagatggattaaataat

SEQ ID NO: 69051 - DNA, 21 bp, Artificial sequence
  SiRNA target sequence
tacaagatggattaaataatc

SEQ ID NO: 69052 - DNA, 21 bp, Artificial sequence
  SiRNA target sequence
acaagatggattaaataatca

SEQ ID NO: 69053 - DNA, 21 bp, Artificial sequence
  SiRNA target sequence
caagatggattaaataatcat

SEQ ID NO: 69054 - DNA, 21 bp, Artificial sequence
  SiRNA target sequence
aagatggattaaataatcatg

SEQ ID NO: 69055 - DNA, 21 bp, Artificial sequence
  SiRNA target sequence
agatggattaaataatcatga

SEQ ID NO: 69056 - DNA, 21 bp, Artificial sequence
  SiRNA target sequence
gatggattaaataatcatgaa

SEQ ID NO: 69057 - DNA, 21 bp, Artificial sequence
  SiRNA target sequence
atggattaaataatcatgaaa

SEQ ID NO: 69058 - DNA, 21 bp, Artificial sequence
  SiRNA target sequence
tggattaaataatcatgaaac

SEQ ID NO: 69059 - DNA, 21 bp, Artificial sequence
  SiRNA target sequence
ggattaaataatcatgaaaca

SEQ ID NO: 69060 - DNA, 21 bp, Artificial sequence
  SiRNA target sequence
gattaaataatcatgaaacaa

SEQ ID NO: 69061 - DNA, 21 bp, Artificial sequence
  SiRNA target sequence
attaaataatcatgaaacaat

SEQ ID NO: 69062 - DNA, 21 bp, Artificial sequence
  SiRNA target sequence
ttaaataatcatgaaacaatc

SEQ ID NO: 69063 - DNA, 21 bp, Artificial sequence
  SiRNA target sequence
taaataatcatgaaacaatcg

SEQ ID NO: 69064 - DNA, 21 bp, Artificial sequence
  SiRNA target sequence
aaataatcatgaaacaatcgt

SEQ ID NO: 69065 - DNA, 21 bp, Artificial sequence
  SiRNA target sequence
aataatcatgaaacaatcgtc

SEQ ID NO: 69066 - DNA, 21 bp, Artificial sequence
  SiRNA target sequence
ataatcatgaaacaatcgtct

SEQ ID NO: 69067 - DNA, 21 bp, Artificial sequence
  SiRNA target sequence
taatcatgaaacaatcgtctc

SEQ ID NO: 69068 - DNA, 21 bp, Artificial sequence
  SiRNA target sequence
aatcatgaaacaatcgtctcc

SEQ ID NO: 69069 - DNA, 21 bp, Artificial sequence
  SiRNA target sequence
atcatgaaacaatcgtctcct

SEQ ID NO: 69070 - DNA, 21 bp, Artificial sequence
  SiRNA target sequence
tcatgaaacaatcgtctcctt

SEQ ID NO: 69071 - DNA, 21 bp, Artificial sequence
  SiRNA target sequence
catgaaacaatcgtctccttt

SEQ ID NO: 69072 - DNA, 21 bp, Artificial sequence
  SiRNA target sequence
atgaaacaatcgtctcctttg

SEQ ID NO: 69073 - DNA, 21 bp, Artificial sequence
  SiRNA target sequence
tgaaacaatcgtctcctttgg

SEQ ID NO: 69074 - DNA, 21 bp, Artificial sequence
  SiRNA target sequence
gaaacaatcgtctcctttggg

SEQ ID NO: 69075 - DNA, 21 bp, Artificial sequence
  SiRNA target sequence
aaacaatcgtctcctttggga

SEQ ID NO: 69076 - DNA, 21 bp, Artificial sequence
  SiRNA target sequence
aacaatcgtctcctttgggac

SEQ ID NO: 69077 - DNA, 21 bp, Artificial sequence
  SiRNA target sequence
acaatcgtctcctttgggact

SEQ ID NO: 69078 - DNA, 21 bp, Artificial sequence
  SiRNA target sequence
caatcgtctcctttgggacta

SEQ ID NO: 69079 - DNA, 21 bp, Artificial sequence
  SiRNA target sequence
aatcgtctcctttgggactac

SEQ ID NO: 69080 - DNA, 21 bp, Artificial sequence
  SiRNA target sequence
atcgtctcctttgggactaca

SEQ ID NO: 69081 - DNA, 21 bp, Artificial sequence
  SiRNA target sequence
tcgtctcctttgggactacag

SEQ ID NO: 69082 - DNA, 21 bp, Artificial sequence
  SiRNA target sequence
cgtctcctttgggactacaga

SEQ ID NO: 69083 - DNA, 21 bp, Artificial sequence
  SiRNA target sequence
gtctcctttgggactacagat

SEQ ID NO: 69084 - DNA, 21 bp, Artificial sequence
  SiRNA target sequence
tctcctttgggactacagatc

SEQ ID NO: 69085 - DNA, 21 bp, Artificial sequence
  SiRNA target sequence
ctcctttgggactacagatct

SEQ ID NO: 69086 - DNA, 21 bp, Artificial sequence
  SiRNA target sequence
tcctttgggactacagatctt

SEQ ID NO: 69087 - DNA, 21 bp, Artificial sequence
  SiRNA target sequence
cctttgggactacagatcttg

SEQ ID NO: 69088 - DNA, 21 bp, Artificial sequence
  SiRNA target sequence
ctttgggactacagatcttga

SEQ ID NO: 69089 - DNA, 21 bp, Artificial sequence
  SiRNA target sequence
tttgggactacagatcttgaa

SEQ ID NO: 69090 - DNA, 21 bp, Artificial sequence
  SiRNA target sequence
ttgggactacagatcttgaag

SEQ ID NO: 69091 - DNA, 21 bp, Artificial sequence
  SiRNA target sequence
tgggactacagatcttgaagt

SEQ ID NO: 69092 - DNA, 21 bp, Artificial sequence
  SiRNA target sequence
gggactacagatcttgaagta

SEQ ID NO: 69093 - DNA, 21 bp, Artificial sequence
  SiRNA target sequence
ggactacagatcttgaagtag

SEQ ID NO: 69094 - DNA, 21 bp, Artificial sequence
  SiRNA target sequence
gactacagatcttgaagtaga

SEQ ID NO: 69095 - DNA, 21 bp, Artificial sequence
  SiRNA target sequence
actacagatcttgaagtagat

SEQ ID NO: 69096 - DNA, 21 bp, Artificial sequence
  SiRNA target sequence
ctacagatcttgaagtagatg

SEQ ID NO: 69097 - DNA, 21 bp, Artificial sequence
  SiRNA target sequence
tacagatcttgaagtagatga

SEQ ID NO: 69098 - DNA, 21 bp, Artificial sequence
  SiRNA target sequence
acagatcttgaagtagatgaa

SEQ ID NO: 69099 - DNA, 21 bp, Artificial sequence
  SiRNA target sequence
cagatcttgaagtagatgaat

SEQ ID NO: 69100 - DNA, 21 bp, Artificial sequence
  SiRNA target sequence
agatcttgaagtagatgaata

SEQ ID NO: 69101 - DNA, 21 bp, Artificial sequence
  SiRNA target sequence
gatcttgaagtagatgaatat

SEQ ID NO: 69102 - DNA, 21 bp, Artificial sequence
  SiRNA target sequence
atcttgaagtagatgaatatg

SEQ ID NO: 69103 - DNA, 21 bp, Artificial sequence
  SiRNA target sequence
tcttgaagtagatgaatatga

SEQ ID NO: 69104 - DNA, 21 bp, Artificial sequence
  SiRNA target sequence
cttgaagtagatgaatatgat

SEQ ID NO: 69105 - DNA, 21 bp, Artificial sequence
  SiRNA target sequence
ttgaagtagatgaatatgatc

SEQ ID NO: 69106 - DNA, 21 bp, Artificial sequence
  SiRNA target sequence
tgaagtagatgaatatgatca

SEQ ID NO: 69107 - DNA, 21 bp, Artificial sequence
  SiRNA target sequence
gaagtagatgaatatgatcag

SEQ ID NO: 69108 - DNA, 21 bp, Artificial sequence
  SiRNA target sequence
aagtagatgaatatgatcagt

SEQ ID NO: 69109 - DNA, 21 bp, Artificial sequence
  SiRNA target sequence
agtagatgaatatgatcagtt

SEQ ID NO: 69110 - DNA, 21 bp, Artificial sequence
  SiRNA target sequence
gtagatgaatatgatcagttt

SEQ ID NO: 69111 - DNA, 21 bp, Artificial sequence
  SiRNA target sequence
tagatgaatatgatcagtttc

SEQ ID NO: 69112 - DNA, 21 bp, Artificial sequence
  SiRNA target sequence
agatgaatatgatcagtttct

SEQ ID NO: 69113 - DNA, 21 bp, Artificial sequence
  SiRNA target sequence
gatgaatatgatcagtttctt

SEQ ID NO: 69114 - DNA, 21 bp, Artificial sequence
  SiRNA target sequence
atgaatatgatcagtttctta

SEQ ID NO: 69115 - DNA, 21 bp, Artificial sequence
  SiRNA target sequence
tgaatatgatcagtttcttaa

SEQ ID NO: 69116 - DNA, 21 bp, Artificial sequence
  SiRNA target sequence
gaatatgatcagtttcttaaa

SEQ ID NO: 69117 - DNA, 21 bp, Artificial sequence
  SiRNA target sequence
aatatgatcagtttcttaaaa

SEQ ID NO: 69118 - DNA, 21 bp, Artificial sequence
  SiRNA target sequence
atatgatcagtttcttaaaat

SEQ ID NO: 69119 - DNA, 21 bp, Artificial sequence
  SiRNA target sequence
tatgatcagtttcttaaaatt

SEQ ID NO: 69120 - DNA, 21 bp, Artificial sequence
  SiRNA target sequence
atgatcagtttcttaaaatta

SEQ ID NO: 69121 - DNA, 21 bp, Artificial sequence
  SiRNA target sequence
tgatcagtttcttaaaattaa

SEQ ID NO: 69122 - DNA, 21 bp, Artificial sequence
  SiRNA target sequence
gatcagtttcttaaaattaat

SEQ ID NO: 69123 - DNA, 21 bp, Artificial sequence
  SiRNA target sequence
atcagtttcttaaaattaatg

SEQ ID NO: 69124 - DNA, 21 bp, Artificial sequence
  SiRNA target sequence
tcagtttcttaaaattaatgc

SEQ ID NO: 69125 - DNA, 21 bp, Artificial sequence
  SiRNA target sequence
cagtttcttaaaattaatgca

SEQ ID NO: 69126 - DNA, 21 bp, Artificial sequence
  SiRNA target sequence
agtttcttaaaattaatgcat

SEQ ID NO: 69127 - DNA, 21 bp, Artificial sequence
  SiRNA target sequence
gtttcttaaaattaatgcatc

SEQ ID NO: 69128 - DNA, 21 bp, Artificial sequence
  SiRNA target sequence
tttcttaaaattaatgcatct

SEQ ID NO: 69129 - DNA, 21 bp, Artificial sequence
  SiRNA target sequence
ttcttaaaattaatgcatcta

SEQ ID NO: 69130 - DNA, 21 bp, Artificial sequence
  SiRNA target sequence
tcttaaaattaatgcatctaa

SEQ ID NO: 69131 - DNA, 21 bp, Artificial sequence
  SiRNA target sequence
cttaaaattaatgcatctaat

SEQ ID NO: 69132 - DNA, 21 bp, Artificial sequence
  SiRNA target sequence
ttaaaattaatgcatctaata

SEQ ID NO: 69133 - DNA, 21 bp, Artificial sequence
  SiRNA target sequence
taaaattaatgcatctaatag

SEQ ID NO: 69134 - DNA, 21 bp, Artificial sequence
  SiRNA target sequence
aaaattaatgcatctaatagt

SEQ ID NO: 69135 - DNA, 21 bp, Artificial sequence
  SiRNA target sequence
aaattaatgcatctaatagta

SEQ ID NO: 69136 - DNA, 21 bp, Artificial sequence
  SiRNA target sequence
aattaatgcatctaatagtaa

SEQ ID NO: 69137 - DNA, 21 bp, Artificial sequence
  SiRNA target sequence
attaatgcatctaatagtaac

SEQ ID NO: 69138 - DNA, 21 bp, Artificial sequence
  SiRNA target sequence
ttaatgcatctaatagtaaca

SEQ ID NO: 69139 - DNA, 21 bp, Artificial sequence
  SiRNA target sequence
taatgcatctaatagtaacag

SEQ ID NO: 69140 - DNA, 21 bp, Artificial sequence
  SiRNA target sequence
aatgcatctaatagtaacaga

SEQ ID NO: 69141 - DNA, 21 bp, Artificial sequence
  SiRNA target sequence
atgcatctaatagtaacagat

SEQ ID NO: 69142 - DNA, 21 bp, Artificial sequence
  SiRNA target sequence
tgcatctaatagtaacagatt

SEQ ID NO: 69143 - DNA, 21 bp, Artificial sequence
  SiRNA target sequence
gcatctaatagtaacagatta

SEQ ID NO: 69144 - DNA, 21 bp, Artificial sequence
  SiRNA target sequence
catctaatagtaacagattat

SEQ ID NO: 69145 - DNA, 21 bp, Artificial sequence
  SiRNA target sequence
atctaatagtaacagattatg

SEQ ID NO: 69146 - DNA, 21 bp, Artificial sequence
  SiRNA target sequence
tctaatagtaacagattatgg

SEQ ID NO: 69147 - DNA, 21 bp, Artificial sequence
  SiRNA target sequence
ctaatagtaacagattatgga

SEQ ID NO: 69148 - DNA, 21 bp, Artificial sequence
  SiRNA target sequence
taatagtaacagattatggag

SEQ ID NO: 69149 - DNA, 21 bp, Artificial sequence
  SiRNA target sequence
aatagtaacagattatggaga

SEQ ID NO: 69150 - DNA, 21 bp, Artificial sequence
  SiRNA target sequence
atagtaacagattatggagag

SEQ ID NO: 69151 - DNA, 21 bp, Artificial sequence
  SiRNA target sequence
tagtaacagattatggagagc

SEQ ID NO: 69152 - DNA, 21 bp, Artificial sequence
  SiRNA target sequence
agtaacagattatggagagca

SEQ ID NO: 69153 - DNA, 21 bp, Artificial sequence
  SiRNA target sequence
gtaacagattatggagagcac

SEQ ID NO: 69154 - DNA, 21 bp, Artificial sequence
  SiRNA target sequence
taacagattatggagagcact

SEQ ID NO: 69155 - DNA, 21 bp, Artificial sequence
  SiRNA target sequence
aacagattatggagagcactg

SEQ ID NO: 69156 - DNA, 21 bp, Artificial sequence
  SiRNA target sequence
acagattatggagagcactgt

SEQ ID NO: 69157 - DNA, 21 bp, Artificial sequence
  SiRNA target sequence
cagattatggagagcactgta

SEQ ID NO: 69158 - DNA, 21 bp, Artificial sequence
  SiRNA target sequence
agattatggagagcactgtac

SEQ ID NO: 69159 - DNA, 21 bp, Artificial sequence
  SiRNA target sequence
gattatggagagcactgtaca

SEQ ID NO: 69160 - DNA, 21 bp, Artificial sequence
  SiRNA target sequence
attatggagagcactgtacat

SEQ ID NO: 69161 - DNA, 21 bp, Artificial sequence
  SiRNA target sequence
ttatggagagcactgtacatt

SEQ ID NO: 69162 - DNA, 21 bp, Artificial sequence
  SiRNA target sequence
tatggagagcactgtacattt

SEQ ID NO: 69163 - DNA, 21 bp, Artificial sequence
  SiRNA target sequence
atggagagcactgtacatttt

SEQ ID NO: 69164 - DNA, 21 bp, Artificial sequence
  SiRNA target sequence
tggagagcactgtacatttta

SEQ ID NO: 69165 - DNA, 21 bp, Artificial sequence
  SiRNA target sequence
ggagagcactgtacattttaa

SEQ ID NO: 69166 - DNA, 21 bp, Artificial sequence
  SiRNA target sequence
gagagcactgtacattttaaa

SEQ ID NO: 69167 - DNA, 21 bp, Artificial sequence
  SiRNA target sequence
agagcactgtacattttaaat

SEQ ID NO: 69168 - DNA, 21 bp, Artificial sequence
  SiRNA target sequence
gagcactgtacattttaaatt

SEQ ID NO: 69169 - DNA, 21 bp, Artificial sequence
  SiRNA target sequence
agcactgtacattttaaattt

SEQ ID NO: 69170 - DNA, 21 bp, Artificial sequence
  SiRNA target sequence
gcactgtacattttaaattta

SEQ ID NO: 69171 - DNA, 21 bp, Artificial sequence
  SiRNA target sequence
cactgtacattttaaatttat

SEQ ID NO: 69172 - DNA, 21 bp, Artificial sequence
  SiRNA target sequence
actgtacattttaaatttatc

SEQ ID NO: 69173 - DNA, 21 bp, Artificial sequence
  SiRNA target sequence
ctgtacattttaaatttatct

SEQ ID NO: 69174 - DNA, 21 bp, Artificial sequence
  SiRNA target sequence
tgtacattttaaatttatctc

SEQ ID NO: 69175 - DNA, 21 bp, Artificial sequence
  SiRNA target sequence
gtacattttaaatttatctca

SEQ ID NO: 69176 - DNA, 21 bp, Artificial sequence
  SiRNA target sequence
tacattttaaatttatctcag

SEQ ID NO: 69177 - DNA, 21 bp, Artificial sequence
  SiRNA target sequence
acattttaaatttatctcaga

SEQ ID NO: 69178 - DNA, 21 bp, Artificial sequence
  SiRNA target sequence
cattttaaatttatctcagag

SEQ ID NO: 69179 - DNA, 21 bp, Artificial sequence
  SiRNA target sequence
attttaaatttatctcagaga

SEQ ID NO: 69180 - DNA, 21 bp, Artificial sequence
  SiRNA target sequence
ttttaaatttatctcagagag

SEQ ID NO: 69181 - DNA, 21 bp, Artificial sequence
  SiRNA target sequence
tttaaatttatctcagagagc

SEQ ID NO: 69182 - DNA, 21 bp, Artificial sequence
  SiRNA target sequence
ttaaatttatctcagagagca

SEQ ID NO: 69183 - DNA, 21 bp, Artificial sequence
  SiRNA target sequence
taaatttatctcagagagcaa

SEQ ID NO: 69184 - DNA, 21 bp, Artificial sequence
  SiRNA target sequence
aaatttatctcagagagcaat

SEQ ID NO: 69185 - DNA, 21 bp, Artificial sequence
  SiRNA target sequence
aatttatctcagagagcaatt

SEQ ID NO: 69186 - DNA, 21 bp, Artificial sequence
  SiRNA target sequence
atttatctcagagagcaattt

SEQ ID NO: 69187 - DNA, 21 bp, Artificial sequence
  SiRNA target sequence
tttatctcagagagcaatttt

SEQ ID NO: 69188 - DNA, 21 bp, Artificial sequence
  SiRNA target sequence
ttatctcagagagcaattttt

SEQ ID NO: 69189 - DNA, 21 bp, Artificial sequence
  SiRNA target sequence
tatctcagagagcaatttttc

SEQ ID NO: 69190 - DNA, 21 bp, Artificial sequence
  SiRNA target sequence
atctcagagagcaatttttct

SEQ ID NO: 69191 - DNA, 21 bp, Artificial sequence
  SiRNA target sequence
tctcagagagcaatttttctc

SEQ ID NO: 69192 - DNA, 21 bp, Artificial sequence
  SiRNA target sequence
ctcagagagcaatttttctct

SEQ ID NO: 69193 - DNA, 21 bp, Artificial sequence
  SiRNA target sequence
tcagagagcaatttttctctt

SEQ ID NO: 69194 - DNA, 21 bp, Artificial sequence
  SiRNA target sequence
cagagagcaatttttctctta

SEQ ID NO: 69195 - DNA, 21 bp, Artificial sequence
  SiRNA target sequence
agagagcaatttttctcttac

SEQ ID NO: 69196 - DNA, 21 bp, Artificial sequence
  SiRNA target sequence
gagagcaatttttctcttaca

SEQ ID NO: 69197 - DNA, 21 bp, Artificial sequence
  SiRNA target sequence
agagcaatttttctcttacaa

SEQ ID NO: 69198 - DNA, 21 bp, Artificial sequence
  SiRNA target sequence
gagcaatttttctcttacaaa

SEQ ID NO: 69199 - DNA, 21 bp, Artificial sequence
  SiRNA target sequence
agcaatttttctcttacaaag

SEQ ID NO: 69200 - DNA, 21 bp, Artificial sequence
  SiRNA target sequence
gcaatttttctcttacaaagt

SEQ ID NO: 69201 - DNA, 21 bp, Artificial sequence
  SiRNA target sequence
caatttttctcttacaaagtt

SEQ ID NO: 69202 - DNA, 21 bp, Artificial sequence
  SiRNA target sequence
aatttttctcttacaaagttt

SEQ ID NO: 69203 - DNA, 21 bp, Artificial sequence
  SiRNA target sequence
atttttctcttacaaagtttt

SEQ ID NO: 69204 - DNA, 21 bp, Artificial sequence
  SiRNA target sequence
tttttctcttacaaagttttt

SEQ ID NO: 69205 - DNA, 21 bp, Artificial sequence
  SiRNA target sequence
ttttctcttacaaagtttttt

SEQ ID NO: 69206 - DNA, 21 bp, Artificial sequence
  SiRNA target sequence
tttctcttacaaagttttttt

SEQ ID NO: 69207 - DNA, 21 bp, Artificial sequence
  SiRNA target sequence
ttctcttacaaagttttttta

SEQ ID NO: 69208 - DNA, 21 bp, Artificial sequence
  SiRNA target sequence
tctcttacaaagtttttttat

SEQ ID NO: 69209 - DNA, 21 bp, Artificial sequence
  SiRNA target sequence
ctcttacaaagtttttttatt

SEQ ID NO: 69210 - DNA, 21 bp, Artificial sequence
  SiRNA target sequence
tcttacaaagtttttttatta

SEQ ID NO: 69211 - DNA, 21 bp, Artificial sequence
  SiRNA target sequence
cttacaaagtttttttattat

SEQ ID NO: 69212 - DNA, 21 bp, Artificial sequence
  SiRNA target sequence
ttacaaagtttttttattatt

SEQ ID NO: 69213 - DNA, 21 bp, Artificial sequence
  SiRNA target sequence
tacaaagtttttttattattt

SEQ ID NO: 69214 - DNA, 21 bp, Artificial sequence
  SiRNA target sequence
acaaagtttttttattattta

SEQ ID NO: 69215 - DNA, 21 bp, Artificial sequence
  SiRNA target sequence
caaagtttttttattatttat

SEQ ID NO: 69216 - DNA, 21 bp, Artificial sequence
  SiRNA target sequence
aaagtttttttattatttatg

SEQ ID NO: 69217 - DNA, 21 bp, Artificial sequence
  SiRNA target sequence
aagtttttttattatttatgc

SEQ ID NO: 69218 - DNA, 21 bp, Artificial sequence
  SiRNA target sequence
agtttttttattatttatgca

SEQ ID NO: 69219 - DNA, 21 bp, Artificial sequence
  SiRNA target sequence
gtttttttattatttatgcag

SEQ ID NO: 69220 - DNA, 21 bp, Artificial sequence
  SiRNA target sequence
tttttttattatttatgcagg

SEQ ID NO: 69221 - DNA, 21 bp, Artificial sequence
  SiRNA target sequence
ttttttattatttatgcagga

SEQ ID NO: 69222 - DNA, 21 bp, Artificial sequence
  SiRNA target sequence
tttttattatttatgcaggaa

SEQ ID NO: 69223 - DNA, 21 bp, Artificial sequence
  SiRNA target sequence
ttttattatttatgcaggaat

SEQ ID NO: 69224 - DNA, 21 bp, Artificial sequence
  SiRNA target sequence
tttattatttatgcaggaata

SEQ ID NO: 69225 - DNA, 21 bp, Artificial sequence
  SiRNA target sequence
ttattatttatgcaggaatat

SEQ ID NO: 69226 - DNA, 21 bp, Artificial sequence
  SiRNA target sequence
tattatttatgcaggaatatc

SEQ ID NO: 69227 - DNA, 21 bp, Artificial sequence
  SiRNA target sequence
attatttatgcaggaatatca

SEQ ID NO: 69228 - DNA, 21 bp, Artificial sequence
  SiRNA target sequence
ttatttatgcaggaatatcag

SEQ ID NO: 69229 - DNA, 21 bp, Artificial sequence
  SiRNA target sequence
tatttatgcaggaatatcagg

SEQ ID NO: 69230 - DNA, 21 bp, Artificial sequence
  SiRNA target sequence
atttatgcaggaatatcagga

SEQ ID NO: 69231 - DNA, 21 bp, Artificial sequence
  SiRNA target sequence
tttatgcaggaatatcaggaa

SEQ ID NO: 69232 - DNA, 21 bp, Artificial sequence
  SiRNA target sequence
ttatgcaggaatatcaggaat

SEQ ID NO: 69233 - DNA, 21 bp, Artificial sequence
  SiRNA target sequence
tatgcaggaatatcaggaata

SEQ ID NO: 69234 - DNA, 21 bp, Artificial sequence
  SiRNA target sequence
atgcaggaatatcaggaatat

SEQ ID NO: 69235 - DNA, 21 bp, Artificial sequence
  SiRNA target sequence
tgcaggaatatcaggaatatt

SEQ ID NO: 69236 - DNA, 21 bp, Artificial sequence
  SiRNA target sequence
gcaggaatatcaggaatatta

SEQ ID NO: 69237 - DNA, 21 bp, Artificial sequence
  SiRNA target sequence
caggaatatcaggaatattat

SEQ ID NO: 69238 - DNA, 21 bp, Artificial sequence
  SiRNA target sequence
aggaatatcaggaatattatc

SEQ ID NO: 69239 - DNA, 21 bp, Artificial sequence
  SiRNA target sequence
ggaatatcaggaatattatct

SEQ ID NO: 69240 - DNA, 21 bp, Artificial sequence
  SiRNA target sequence
gaatatcaggaatattatctc

SEQ ID NO: 69241 - DNA, 21 bp, Artificial sequence
  SiRNA target sequence
aatatcaggaatattatctca

SEQ ID NO: 69242 - DNA, 21 bp, Artificial sequence
  SiRNA target sequence
atatcaggaatattatctcaa

SEQ ID NO: 69243 - DNA, 21 bp, Artificial sequence
  SiRNA target sequence
tatcaggaatattatctcaaa

SEQ ID NO: 69244 - DNA, 21 bp, Artificial sequence
  SiRNA target sequence
atcaggaatattatctcaaaa

SEQ ID NO: 69245 - DNA, 21 bp, Artificial sequence
  SiRNA target sequence
tcaggaatattatctcaaaat

SEQ ID NO: 69246 - DNA, 21 bp, Artificial sequence
  SiRNA target sequence
caggaatattatctcaaaata

SEQ ID NO: 69247 - DNA, 21 bp, Artificial sequence
  SiRNA target sequence
aggaatattatctcaaaatat

SEQ ID NO: 69248 - DNA, 21 bp, Artificial sequence
  SiRNA target sequence
ggaatattatctcaaaatatg

SEQ ID NO: 69249 - DNA, 21 bp, Artificial sequence
  SiRNA target sequence
gaatattatctcaaaatatgt

SEQ ID NO: 69250 - DNA, 21 bp, Artificial sequence
  SiRNA target sequence
aatattatctcaaaatatgtc

SEQ ID NO: 69251 - DNA, 21 bp, Artificial sequence
  SiRNA target sequence
atattatctcaaaatatgtca

SEQ ID NO: 69252 - DNA, 21 bp, Artificial sequence
  SiRNA target sequence
tattatctcaaaatatgtcat

SEQ ID NO: 69253 - DNA, 21 bp, Artificial sequence
  SiRNA target sequence
attatctcaaaatatgtcatc

SEQ ID NO: 69254 - DNA, 21 bp, Artificial sequence
  SiRNA target sequence
ttatctcaaaatatgtcatct

SEQ ID NO: 69255 - DNA, 21 bp, Artificial sequence
  SiRNA target sequence
tatctcaaaatatgtcatcta

SEQ ID NO: 69256 - DNA, 21 bp, Artificial sequence
  SiRNA target sequence
atctcaaaatatgtcatctaa

SEQ ID NO: 69257 - DNA, 21 bp, Artificial sequence
  SiRNA target sequence
tctcaaaatatgtcatctaac

SEQ ID NO: 69258 - DNA, 21 bp, Artificial sequence
  SiRNA target sequence
ctcaaaatatgtcatctaacc

SEQ ID NO: 69259 - DNA, 21 bp, Artificial sequence
  SiRNA target sequence
tcaaaatatgtcatctaacca

SEQ ID NO: 69260 - DNA, 21 bp, Artificial sequence
  SiRNA target sequence
caaaatatgtcatctaaccaa

SEQ ID NO: 69261 - DNA, 21 bp, Artificial sequence
  SiRNA target sequence
aaaatatgtcatctaaccaac

SEQ ID NO: 69262 - DNA, 21 bp, Artificial sequence
  SiRNA target sequence
aaatatgtcatctaaccaact

SEQ ID NO: 69263 - DNA, 21 bp, Artificial sequence
  SiRNA target sequence
aatatgtcatctaaccaactc

SEQ ID NO: 69264 - DNA, 21 bp, Artificial sequence
  SiRNA target sequence
atatgtcatctaaccaactca

SEQ ID NO: 69265 - DNA, 21 bp, Artificial sequence
  SiRNA target sequence
tatgtcatctaaccaactcat

SEQ ID NO: 69266 - DNA, 21 bp, Artificial sequence
  SiRNA target sequence
atgtcatctaaccaactcatt

SEQ ID NO: 69267 - DNA, 21 bp, Artificial sequence
  SiRNA target sequence
tgtcatctaaccaactcattt

SEQ ID NO: 69268 - DNA, 21 bp, Artificial sequence
  SiRNA target sequence
gtcatctaaccaactcattta

SEQ ID NO: 69269 - DNA, 21 bp, Artificial sequence
  SiRNA target sequence
tcatctaaccaactcatttat

SEQ ID NO: 69270 - DNA, 21 bp, Artificial sequence
  SiRNA target sequence
catctaaccaactcatttatt

SEQ ID NO: 69271 - DNA, 21 bp, Artificial sequence
  SiRNA target sequence
atctaaccaactcatttattt

SEQ ID NO: 69272 - DNA, 21 bp, Artificial sequence
  SiRNA target sequence
tctaaccaactcatttattta

SEQ ID NO: 69273 - DNA, 21 bp, Artificial sequence
  SiRNA target sequence
ctaaccaactcatttatttaa

SEQ ID NO: 69274 - DNA, 21 bp, Artificial sequence
  SiRNA target sequence
taaccaactcatttatttaat

SEQ ID NO: 69275 - DNA, 21 bp, Artificial sequence
  SiRNA target sequence
aaccaactcatttatttaatg

SEQ ID NO: 69276 - DNA, 21 bp, Artificial sequence
  SiRNA target sequence
accaactcatttatttaatgt

SEQ ID NO: 69277 - DNA, 21 bp, Artificial sequence
  SiRNA target sequence
ccaactcatttatttaatgtc

SEQ ID NO: 69278 - DNA, 21 bp, Artificial sequence
  SiRNA target sequence
caactcatttatttaatgtcc

SEQ ID NO: 69279 - DNA, 21 bp, Artificial sequence
  SiRNA target sequence
aactcatttatttaatgtcca

SEQ ID NO: 69280 - DNA, 21 bp, Artificial sequence
  SiRNA target sequence
actcatttatttaatgtccat

SEQ ID NO: 69281 - DNA, 21 bp, Artificial sequence
  SiRNA target sequence
ctcatttatttaatgtccatt

SEQ ID NO: 69282 - DNA, 21 bp, Artificial sequence
  SiRNA target sequence
tcatttatttaatgtccatta

SEQ ID NO: 69283 - DNA, 21 bp, Artificial sequence
  SiRNA target sequence
catttatttaatgtccattac

SEQ ID NO: 69284 - DNA, 21 bp, Artificial sequence
  SiRNA target sequence
atttatttaatgtccattaca

SEQ ID NO: 69285 - DNA, 21 bp, Artificial sequence
  SiRNA target sequence
tttatttaatgtccattacat

SEQ ID NO: 69286 - DNA, 21 bp, Artificial sequence
  SiRNA target sequence
ttatttaatgtccattacatc

SEQ ID NO: 69287 - DNA, 21 bp, Artificial sequence
  SiRNA target sequence
tatttaatgtccattacatct

SEQ ID NO: 69288 - DNA, 21 bp, Artificial sequence
  SiRNA target sequence
atttaatgtccattacatcta

SEQ ID NO: 69289 - DNA, 21 bp, Artificial sequence
  SiRNA target sequence
tttaatgtccattacatctac

SEQ ID NO: 69290 - DNA, 21 bp, Artificial sequence
  SiRNA target sequence
ttaatgtccattacatctacg

SEQ ID NO: 69291 - DNA, 21 bp, Artificial sequence
  SiRNA target sequence
taatgtccattacatctacgg

SEQ ID NO: 69292 - DNA, 21 bp, Artificial sequence
  SiRNA target sequence
aatgtccattacatctacggt

SEQ ID NO: 69293 - DNA, 21 bp, Artificial sequence
  SiRNA target sequence
atgtccattacatctacggtt

SEQ ID NO: 69294 - DNA, 21 bp, Artificial sequence
  SiRNA target sequence
tgtccattacatctacggtta

SEQ ID NO: 69295 - DNA, 21 bp, Artificial sequence
  SiRNA target sequence
gtccattacatctacggttac

SEQ ID NO: 69296 - DNA, 21 bp, Artificial sequence
  SiRNA target sequence
tccattacatctacggttact

SEQ ID NO: 69297 - DNA, 21 bp, Artificial sequence
  SiRNA target sequence
ccattacatctacggttacta

SEQ ID NO: 69298 - DNA, 21 bp, Artificial sequence
  SiRNA target sequence
cattacatctacggttactat

SEQ ID NO: 69299 - DNA, 21 bp, Artificial sequence
  SiRNA target sequence
attacatctacggttactatt

SEQ ID NO: 69300 - DNA, 21 bp, Artificial sequence
  SiRNA target sequence
ttacatctacggttactatta

SEQ ID NO: 69301 - DNA, 21 bp, Artificial sequence
  SiRNA target sequence
tacatctacggttactattaa

SEQ ID NO: 69302 - DNA, 21 bp, Artificial sequence
  SiRNA target sequence
acatctacggttactattaat

SEQ ID NO: 69303 - DNA, 21 bp, Artificial sequence
  SiRNA target sequence
catctacggttactattaatt

SEQ ID NO: 69304 - DNA, 21 bp, Artificial sequence
  SiRNA target sequence
atctacggttactattaattt

SEQ ID NO: 69305 - DNA, 21 bp, Artificial sequence
  SiRNA target sequence
tctacggttactattaattta

SEQ ID NO: 69306 - DNA, 21 bp, Artificial sequence
  SiRNA target sequence
ctacggttactattaatttaa

SEQ ID NO: 69307 - DNA, 21 bp, Artificial sequence
  SiRNA target sequence
tacggttactattaatttaag

SEQ ID NO: 69308 - DNA, 21 bp, Artificial sequence
  SiRNA target sequence
acggttactattaatttaagt

SEQ ID NO: 69309 - DNA, 21 bp, Artificial sequence
  SiRNA target sequence
cggttactattaatttaagta

SEQ ID NO: 69310 - DNA, 21 bp, Artificial sequence
  SiRNA target sequence
ggttactattaatttaagtaa

SEQ ID NO: 69311 - DNA, 21 bp, Artificial sequence
  SiRNA target sequence
gttactattaatttaagtaac

SEQ ID NO: 69312 - DNA, 21 bp, Artificial sequence
  SiRNA target sequence
ttactattaatttaagtaact

SEQ ID NO: 69313 - DNA, 21 bp, Artificial sequence
  SiRNA target sequence
tactattaatttaagtaactt

SEQ ID NO: 69314 - DNA, 21 bp, Artificial sequence
  SiRNA target sequence
actattaatttaagtaacttg

SEQ ID NO: 69315 - DNA, 21 bp, Artificial sequence
  SiRNA target sequence
ctattaatttaagtaacttgg

SEQ ID NO: 69316 - DNA, 21 bp, Artificial sequence
  SiRNA target sequence
tattaatttaagtaacttggg

SEQ ID NO: 69317 - DNA, 21 bp, Artificial sequence
  SiRNA target sequence
attaatttaagtaacttgggt

SEQ ID NO: 69318 - DNA, 21 bp, Artificial sequence
  SiRNA target sequence
ttaatttaagtaacttgggtt

SEQ ID NO: 69319 - DNA, 21 bp, Artificial sequence
  SiRNA target sequence
taatttaagtaacttgggtta

SEQ ID NO: 69320 - DNA, 21 bp, Artificial sequence
  SiRNA target sequence
aatttaagtaacttgggttac

SEQ ID NO: 69321 - DNA, 21 bp, Artificial sequence
  SiRNA target sequence
atttaagtaacttgggttact

SEQ ID NO: 69322 - DNA, 21 bp, Artificial sequence
  SiRNA target sequence
tttaagtaacttgggttactt

SEQ ID NO: 69323 - DNA, 21 bp, Artificial sequence
  SiRNA target sequence
ttaagtaacttgggttactta

SEQ ID NO: 69324 - DNA, 21 bp, Artificial sequence
  SiRNA target sequence
taagtaacttgggttacttat

SEQ ID NO: 69325 - DNA, 21 bp, Artificial sequence
  SiRNA target sequence
aagtaacttgggttacttata

SEQ ID NO: 69326 - DNA, 21 bp, Artificial sequence
  SiRNA target sequence
agtaacttgggttacttatac

SEQ ID NO: 69327 - DNA, 21 bp, Artificial sequence
  SiRNA target sequence
gtaacttgggttacttataca

SEQ ID NO: 69328 - DNA, 21 bp, Artificial sequence
  SiRNA target sequence
taacttgggttacttatacac

SEQ ID NO: 69329 - DNA, 21 bp, Artificial sequence
  SiRNA target sequence
aacttgggttacttatacact

SEQ ID NO: 69330 - DNA, 21 bp, Artificial sequence
  SiRNA target sequence
acttgggttacttatacacta

SEQ ID NO: 69331 - DNA, 21 bp, Artificial sequence
  SiRNA target sequence
cttgggttacttatacactag

SEQ ID NO: 69332 - DNA, 21 bp, Artificial sequence
  SiRNA target sequence
ttgggttacttatacactaga

SEQ ID NO: 69333 - DNA, 21 bp, Artificial sequence
  SiRNA target sequence
tgggttacttatacactagat

SEQ ID NO: 69334 - DNA, 21 bp, Artificial sequence
  SiRNA target sequence
gggttacttatacactagata

SEQ ID NO: 69335 - DNA, 21 bp, Artificial sequence
  SiRNA target sequence
ggttacttatacactagatat

SEQ ID NO: 69336 - DNA, 21 bp, Artificial sequence
  SiRNA target sequence
gttacttatacactagatata

SEQ ID NO: 69337 - DNA, 21 bp, Artificial sequence
  SiRNA target sequence
ttacttatacactagatatac

SEQ ID NO: 69338 - DNA, 21 bp, Artificial sequence
  SiRNA target sequence
tacttatacactagatataca

SEQ ID NO: 69339 - DNA, 21 bp, Artificial sequence
  SiRNA target sequence
acttatacactagatatacac

SEQ ID NO: 69340 - DNA, 21 bp, Artificial sequence
  SiRNA target sequence
cttatacactagatatacaca

SEQ ID NO: 69341 - DNA, 21 bp, Artificial sequence
  SiRNA target sequence
ttatacactagatatacacaa

SEQ ID NO: 69342 - DNA, 21 bp, Artificial sequence
  SiRNA target sequence
tatacactagatatacacaag

SEQ ID NO: 69343 - DNA, 21 bp, Artificial sequence
  SiRNA target sequence
atacactagatatacacaagc

SEQ ID NO: 69344 - DNA, 21 bp, Artificial sequence
  SiRNA target sequence
tacactagatatacacaagca

SEQ ID NO: 69345 - DNA, 21 bp, Artificial sequence
  SiRNA target sequence
acactagatatacacaagcaa

SEQ ID NO: 69346 - DNA, 21 bp, Artificial sequence
  SiRNA target sequence
cactagatatacacaagcaat

SEQ ID NO: 69347 - DNA, 21 bp, Artificial sequence
  SiRNA target sequence
actagatatacacaagcaata

SEQ ID NO: 69348 - DNA, 21 bp, Artificial sequence
  SiRNA target sequence
ctagatatacacaagcaataa

SEQ ID NO: 69349 - DNA, 21 bp, Artificial sequence
  SiRNA target sequence
tagatatacacaagcaataat

SEQ ID NO: 69350 - DNA, 21 bp, Artificial sequence
  SiRNA target sequence
agatatacacaagcaataatt

SEQ ID NO: 69351 - DNA, 21 bp, Artificial sequence
  SiRNA target sequence
gatatacacaagcaataatta

SEQ ID NO: 69352 - DNA, 21 bp, Artificial sequence
  SiRNA target sequence
atatacacaagcaataattaa

SEQ ID NO: 69353 - DNA, 21 bp, Artificial sequence
  SiRNA target sequence
tatacacaagcaataattaat

SEQ ID NO: 69354 - DNA, 21 bp, Artificial sequence
  SiRNA target sequence
atacacaagcaataattaatg

SEQ ID NO: 69355 - DNA, 21 bp, Artificial sequence
  SiRNA target sequence
tacacaagcaataattaatgc

SEQ ID NO: 69356 - DNA, 21 bp, Artificial sequence
  SiRNA target sequence
acacaagcaataattaatgca

SEQ ID NO: 69357 - DNA, 21 bp, Artificial sequence
  SiRNA target sequence
cacaagcaataattaatgcaa

SEQ ID NO: 69358 - DNA, 21 bp, Artificial sequence
  SiRNA target sequence
acaagcaataattaatgcaag

SEQ ID NO: 69359 - DNA, 21 bp, Artificial sequence
  SiRNA target sequence
caagcaataattaatgcaaga

SEQ ID NO: 69360 - DNA, 21 bp, Artificial sequence
  SiRNA target sequence
aagcaataattaatgcaagat

SEQ ID NO: 69361 - DNA, 21 bp, Artificial sequence
  SiRNA target sequence
agcaataattaatgcaagatc

SEQ ID NO: 69362 - DNA, 21 bp, Artificial sequence
  SiRNA target sequence
gcaataattaatgcaagatct

SEQ ID NO: 69363 - DNA, 21 bp, Artificial sequence
  SiRNA target sequence
caataattaatgcaagatcta

SEQ ID NO: 69364 - DNA, 21 bp, Artificial sequence
  SiRNA target sequence
aataattaatgcaagatctac

SEQ ID NO: 69365 - DNA, 21 bp, Artificial sequence
  SiRNA target sequence
ataattaatgcaagatctact

SEQ ID NO: 69366 - DNA, 21 bp, Artificial sequence
  SiRNA target sequence
taattaatgcaagatctactt

SEQ ID NO: 69367 - DNA, 21 bp, Artificial sequence
  SiRNA target sequence
aattaatgcaagatctactta

SEQ ID NO: 69368 - DNA, 21 bp, Artificial sequence
  SiRNA target sequence
attaatgcaagatctacttat

SEQ ID NO: 69369 - DNA, 21 bp, Artificial sequence
  SiRNA target sequence
ttaatgcaagatctacttatg

SEQ ID NO: 69370 - DNA, 21 bp, Artificial sequence
  SiRNA target sequence
taatgcaagatctacttatga

SEQ ID NO: 69371 - DNA, 21 bp, Artificial sequence
  SiRNA target sequence
aatgcaagatctacttatgat

SEQ ID NO: 69372 - DNA, 21 bp, Artificial sequence
  SiRNA target sequence
atgcaagatctacttatgata

SEQ ID NO: 69373 - DNA, 21 bp, Artificial sequence
  SiRNA target sequence
tgcaagatctacttatgatac

SEQ ID NO: 69374 - DNA, 21 bp, Artificial sequence
  SiRNA target sequence
gcaagatctacttatgataca

SEQ ID NO: 69375 - DNA, 21 bp, Artificial sequence
  SiRNA target sequence
caagatctacttatgatacaa

SEQ ID NO: 69376 - DNA, 21 bp, Artificial sequence
  SiRNA target sequence
aagatctacttatgatacaat

SEQ ID NO: 69377 - DNA, 21 bp, Artificial sequence
  SiRNA target sequence
agatctacttatgatacaatg

SEQ ID NO: 69378 - DNA, 21 bp, Artificial sequence
  SiRNA target sequence
gatctacttatgatacaatgt

SEQ ID NO: 69379 - DNA, 21 bp, Artificial sequence
  SiRNA target sequence
atctacttatgatacaatgtt

SEQ ID NO: 69380 - DNA, 21 bp, Artificial sequence
  SiRNA target sequence
tctacttatgatacaatgtta

SEQ ID NO: 69381 - DNA, 21 bp, Artificial sequence
  SiRNA target sequence
ctacttatgatacaatgttag

SEQ ID NO: 69382 - DNA, 21 bp, Artificial sequence
  SiRNA target sequence
tacttatgatacaatgttaga

SEQ ID NO: 69383 - DNA, 21 bp, Artificial sequence
  SiRNA target sequence
acttatgatacaatgttagat

SEQ ID NO: 69384 - DNA, 21 bp, Artificial sequence
  SiRNA target sequence
cttatgatacaatgttagata

SEQ ID NO: 69385 - DNA, 21 bp, Artificial sequence
  SiRNA target sequence
ttatgatacaatgttagatat

SEQ ID NO: 69386 - DNA, 21 bp, Artificial sequence
  SiRNA target sequence
tatgatacaatgttagatata

SEQ ID NO: 69387 - DNA, 21 bp, Artificial sequence
  SiRNA target sequence
atgatacaatgttagatataa

SEQ ID NO: 69388 - DNA, 21 bp, Artificial sequence
  SiRNA target sequence
tgatacaatgttagatataaa

SEQ ID NO: 69389 - DNA, 21 bp, Artificial sequence
  SiRNA target sequence
gatacaatgttagatataaaa

SEQ ID NO: 69390 - DNA, 21 bp, Artificial sequence
  SiRNA target sequence
atacaatgttagatataaaaa

SEQ ID NO: 69391 - DNA, 21 bp, Artificial sequence
  SiRNA target sequence
tacaatgttagatataaaaaa

SEQ ID NO: 69392 - DNA, 21 bp, Artificial sequence
  SiRNA target sequence
acaatgttagatataaaaaaa

SEQ ID NO: 69393 - DNA, 21 bp, Artificial sequence
  SiRNA target sequence
caatgttagatataaaaaaag

SEQ ID NO: 69394 - DNA, 21 bp, Artificial sequence
  SiRNA target sequence
aatgttagatataaaaaaaga

SEQ ID NO: 69395 - DNA, 21 bp, Artificial sequence
  SiRNA target sequence
atgttagatataaaaaaagag

SEQ ID NO: 69396 - DNA, 21 bp, Artificial sequence
  SiRNA target sequence
tgttagatataaaaaaagaga

SEQ ID NO: 69397 - DNA, 21 bp, Artificial sequence
  SiRNA target sequence
gttagatataaaaaaagagaa

SEQ ID NO: 69398 - DNA, 21 bp, Artificial sequence
  SiRNA target sequence
ttagatataaaaaaagagaat

SEQ ID NO: 69399 - DNA, 21 bp, Artificial sequence
  SiRNA target sequence
tagatataaaaaaagagaata

SEQ ID NO: 69400 - DNA, 21 bp, Artificial sequence
  SiRNA target sequence
agatataaaaaaagagaataa

SEQ ID NO: 69401 - DNA, 21 bp, Artificial sequence
  SiRNA target sequence
gatataaaaaaagagaataat

SEQ ID NO: 69402 - DNA, 21 bp, Artificial sequence
  SiRNA target sequence
atataaaaaaagagaataata

SEQ ID NO: 69403 - DNA, 21 bp, Artificial sequence
  SiRNA target sequence
tataaaaaaagagaataataa

SEQ ID NO: 69404 - DNA, 21 bp, Artificial sequence
  SiRNA target sequence
ataaaaaaagagaataataag

SEQ ID NO: 69405 - DNA, 21 bp, Artificial sequence
  SiRNA target sequence
taaaaaaagagaataataagt

SEQ ID NO: 69406 - DNA, 21 bp, Artificial sequence
  SiRNA target sequence
aaaaaaagagaataataagtt

SEQ ID NO: 69407 - DNA, 21 bp, Artificial sequence
  SiRNA target sequence
aaaaaagagaataataagttt

SEQ ID NO: 69408 - DNA, 21 bp, Artificial sequence
  SiRNA target sequence
aaaaagagaataataagttta

SEQ ID NO: 69409 - DNA, 21 bp, Artificial sequence
  SiRNA target sequence
aaaagagaataataagtttaa

SEQ ID NO: 69410 - DNA, 21 bp, Artificial sequence
  SiRNA target sequence
aaagagaataataagtttaag

SEQ ID NO: 69411 - DNA, 21 bp, Artificial sequence
  SiRNA target sequence
aagagaataataagtttaaga

SEQ ID NO: 69412 - DNA, 21 bp, Artificial sequence
  SiRNA target sequence
agagaataataagtttaagat

SEQ ID NO: 69413 - DNA, 21 bp, Artificial sequence
  SiRNA target sequence
gagaataataagtttaagatt

SEQ ID NO: 69414 - DNA, 21 bp, Artificial sequence
  SiRNA target sequence
agaataataagtttaagatta

SEQ ID NO: 69415 - DNA, 21 bp, Artificial sequence
  SiRNA target sequence
gaataataagtttaagattac

SEQ ID NO: 69416 - DNA, 21 bp, Artificial sequence
  SiRNA target sequence
aataataagtttaagattaca

SEQ ID NO: 69417 - DNA, 21 bp, Artificial sequence
  SiRNA target sequence
ataataagtttaagattacag

SEQ ID NO: 69418 - DNA, 21 bp, Artificial sequence
  SiRNA target sequence
taataagtttaagattacaga

SEQ ID NO: 69419 - DNA, 21 bp, Artificial sequence
  SiRNA target sequence
aataagtttaagattacagaa

SEQ ID NO: 69420 - DNA, 21 bp, Artificial sequence
  SiRNA target sequence
ataagtttaagattacagaat

SEQ ID NO: 69421 - DNA, 21 bp, Artificial sequence
  SiRNA target sequence
taagtttaagattacagaatt

SEQ ID NO: 69422 - DNA, 21 bp, Artificial sequence
  SiRNA target sequence
aagtttaagattacagaattt

SEQ ID NO: 69423 - DNA, 21 bp, Artificial sequence
  SiRNA target sequence
agtttaagattacagaattta

SEQ ID NO: 69424 - DNA, 21 bp, Artificial sequence
  SiRNA target sequence
gtttaagattacagaatttaa

SEQ ID NO: 69425 - DNA, 21 bp, Artificial sequence
  SiRNA target sequence
tttaagattacagaatttaaa

SEQ ID NO: 69426 - DNA, 21 bp, Artificial sequence
  SiRNA target sequence
ttaagattacagaatttaaag

SEQ ID NO: 69427 - DNA, 21 bp, Artificial sequence
  SiRNA target sequence
taagattacagaatttaaaga

SEQ ID NO: 69428 - DNA, 21 bp, Artificial sequence
  SiRNA target sequence
aagattacagaatttaaagaa

SEQ ID NO: 69429 - DNA, 21 bp, Artificial sequence
  SiRNA target sequence
agattacagaatttaaagaaa

SEQ ID NO: 69430 - DNA, 21 bp, Artificial sequence
  SiRNA target sequence
gattacagaatttaaagaaag

SEQ ID NO: 69431 - DNA, 21 bp, Artificial sequence
  SiRNA target sequence
attacagaatttaaagaaagt

SEQ ID NO: 69432 - DNA, 21 bp, Artificial sequence
  SiRNA target sequence
ttacagaatttaaagaaagta

SEQ ID NO: 69433 - DNA, 21 bp, Artificial sequence
  SiRNA target sequence
tacagaatttaaagaaagtat

SEQ ID NO: 69434 - DNA, 21 bp, Artificial sequence
  SiRNA target sequence
acagaatttaaagaaagtatt

SEQ ID NO: 69435 - DNA, 21 bp, Artificial sequence
  SiRNA target sequence
cagaatttaaagaaagtatta

SEQ ID NO: 69436 - DNA, 21 bp, Artificial sequence
  SiRNA target sequence
agaatttaaagaaagtattaa

SEQ ID NO: 69437 - DNA, 21 bp, Artificial sequence
  SiRNA target sequence
gaatttaaagaaagtattaag

SEQ ID NO: 69438 - DNA, 21 bp, Artificial sequence
  SiRNA target sequence
aatttaaagaaagtattaagt

SEQ ID NO: 69439 - DNA, 21 bp, Artificial sequence
  SiRNA target sequence
atttaaagaaagtattaagtt

SEQ ID NO: 69440 - DNA, 21 bp, Artificial sequence
  SiRNA target sequence
tttaaagaaagtattaagttt

SEQ ID NO: 69441 - DNA, 21 bp, Artificial sequence
  SiRNA target sequence
ttaaagaaagtattaagttta

SEQ ID NO: 69442 - DNA, 21 bp, Artificial sequence
  SiRNA target sequence
taaagaaagtattaagtttaa

SEQ ID NO: 69443 - DNA, 21 bp, Artificial sequence
  SiRNA target sequence
aaagaaagtattaagtttaat

SEQ ID NO: 69444 - DNA, 21 bp, Artificial sequence
  SiRNA target sequence
aagaaagtattaagtttaata

SEQ ID NO: 69445 - DNA, 21 bp, Artificial sequence
  SiRNA target sequence
agaaagtattaagtttaataa

SEQ ID NO: 69446 - DNA, 21 bp, Artificial sequence
  SiRNA target sequence
gaaagtattaagtttaataat

SEQ ID NO: 69447 - DNA, 21 bp, Artificial sequence
  SiRNA target sequence
aaagtattaagtttaataatt

SEQ ID NO: 69448 - DNA, 21 bp, Artificial sequence
  SiRNA target sequence
aagtattaagtttaataattt

SEQ ID NO: 69449 - DNA, 21 bp, Artificial sequence
  SiRNA target sequence
agtattaagtttaataatttg

SEQ ID NO: 69450 - DNA, 21 bp, Artificial sequence
  SiRNA target sequence
gtattaagtttaataatttgt

SEQ ID NO: 69451 - DNA, 21 bp, Artificial sequence
  SiRNA target sequence
tattaagtttaataatttgtc

SEQ ID NO: 69452 - DNA, 21 bp, Artificial sequence
  SiRNA target sequence
attaagtttaataatttgtca

SEQ ID NO: 69453 - DNA, 21 bp, Artificial sequence
  SiRNA target sequence
ttaagtttaataatttgtcat

SEQ ID NO: 69454 - DNA, 21 bp, Artificial sequence
  SiRNA target sequence
taagtttaataatttgtcatt

SEQ ID NO: 69455 - DNA, 21 bp, Artificial sequence
  SiRNA target sequence
aagtttaataatttgtcattt

SEQ ID NO: 69456 - DNA, 21 bp, Artificial sequence
  SiRNA target sequence
agtttaataatttgtcatttg

SEQ ID NO: 69457 - DNA, 21 bp, Artificial sequence
  SiRNA target sequence
gtttaataatttgtcatttgg

SEQ ID NO: 69458 - DNA, 21 bp, Artificial sequence
  SiRNA target sequence
tttaataatttgtcatttggt

SEQ ID NO: 69459 - DNA, 21 bp, Artificial sequence
  SiRNA target sequence
ttaataatttgtcatttggtt

SEQ ID NO: 69460 - DNA, 21 bp, Artificial sequence
  SiRNA target sequence
taataatttgtcatttggtta

SEQ ID NO: 69461 - DNA, 21 bp, Artificial sequence
  SiRNA target sequence
aataatttgtcatttggttat

SEQ ID NO: 69462 - DNA, 21 bp, Artificial sequence
  SiRNA target sequence
ataatttgtcatttggttatg

SEQ ID NO: 69463 - DNA, 21 bp, Artificial sequence
  SiRNA target sequence
taatttgtcatttggttatga

SEQ ID NO: 69464 - DNA, 21 bp, Artificial sequence
  SiRNA target sequence
aatttgtcatttggttatgaa

SEQ ID NO: 69465 - DNA, 21 bp, Artificial sequence
  SiRNA target sequence
atttgtcatttggttatgaaa

SEQ ID NO: 69466 - DNA, 21 bp, Artificial sequence
  SiRNA target sequence
tttgtcatttggttatgaaag

SEQ ID NO: 69467 - DNA, 21 bp, Artificial sequence
  SiRNA target sequence
ttgtcatttggttatgaaagt

SEQ ID NO: 69468 - DNA, 21 bp, Artificial sequence
  SiRNA target sequence
tgtcatttggttatgaaagta

SEQ ID NO: 69469 - DNA, 21 bp, Artificial sequence
  SiRNA target sequence
gtcatttggttatgaaagtag

SEQ ID NO: 69470 - DNA, 21 bp, Artificial sequence
  SiRNA target sequence
tcatttggttatgaaagtaga

SEQ ID NO: 69471 - DNA, 21 bp, Artificial sequence
  SiRNA target sequence
catttggttatgaaagtagac

SEQ ID NO: 69472 - DNA, 21 bp, Artificial sequence
  SiRNA target sequence
atttggttatgaaagtagaca

SEQ ID NO: 69473 - DNA, 21 bp, Artificial sequence
  SiRNA target sequence
tttggttatgaaagtagacaa

SEQ ID NO: 69474 - DNA, 21 bp, Artificial sequence
  SiRNA target sequence
ttggttatgaaagtagacaaa

SEQ ID NO: 69475 - DNA, 21 bp, Artificial sequence
  SiRNA target sequence
tggttatgaaagtagacaaat

SEQ ID NO: 69476 - DNA, 21 bp, Artificial sequence
  SiRNA target sequence
ggttatgaaagtagacaaatt

SEQ ID NO: 69477 - DNA, 21 bp, Artificial sequence
  SiRNA target sequence
gttatgaaagtagacaaattt

SEQ ID NO: 69478 - DNA, 21 bp, Artificial sequence
  SiRNA target sequence
ttatgaaagtagacaaatttt

SEQ ID NO: 69479 - DNA, 21 bp, Artificial sequence
  SiRNA target sequence
tatgaaagtagacaaattttt

SEQ ID NO: 69480 - DNA, 21 bp, Artificial sequence
  SiRNA target sequence
atgaaagtagacaaattttta

SEQ ID NO: 69481 - DNA, 21 bp, Artificial sequence
  SiRNA target sequence
tgaaagtagacaaatttttaa

SEQ ID NO: 69482 - DNA, 21 bp, Artificial sequence
  SiRNA target sequence
gaaagtagacaaatttttaat

SEQ ID NO: 69483 - DNA, 21 bp, Artificial sequence
  SiRNA target sequence
aaagtagacaaatttttaata

SEQ ID NO: 69484 - DNA, 21 bp, Artificial sequence
  SiRNA target sequence
aagtagacaaatttttaataa

SEQ ID NO: 69485 - DNA, 21 bp, Artificial sequence
  SiRNA target sequence
agtagacaaatttttaataaa

SEQ ID NO: 69486 - DNA, 21 bp, Artificial sequence
  SiRNA target sequence
gtagacaaatttttaataaaa

SEQ ID NO: 69487 - DNA, 21 bp, Artificial sequence
  SiRNA target sequence
tagacaaatttttaataaaat

SEQ ID NO: 69488 - DNA, 21 bp, Artificial sequence
  SiRNA target sequence
agacaaatttttaataaaata

SEQ ID NO: 69489 - DNA, 21 bp, Artificial sequence
  SiRNA target sequence
gacaaatttttaataaaataa

SEQ ID NO: 69490 - DNA, 21 bp, Artificial sequence
  SiRNA target sequence
acaaatttttaataaaataaa

SEQ ID NO: 69491 - DNA, 21 bp, Artificial sequence
  SiRNA target sequence
caaatttttaataaaataaat

SEQ ID NO: 69492 - DNA, 21 bp, Artificial sequence
  SiRNA target sequence
aaatttttaataaaataaatc

SEQ ID NO: 69493 - DNA, 21 bp, Artificial sequence
  SiRNA target sequence
aatttttaataaaataaatct

SEQ ID NO: 69494 - DNA, 21 bp, Artificial sequence
  SiRNA target sequence
atttttaataaaataaatcta

SEQ ID NO: 69495 - DNA, 21 bp, Artificial sequence
  SiRNA target sequence
tttttaataaaataaatctag

SEQ ID NO: 69496 - DNA, 21 bp, Artificial sequence
  SiRNA target sequence
ttttaataaaataaatctaga

SEQ ID NO: 69497 - DNA, 21 bp, Artificial sequence
  SiRNA target sequence
tttaataaaataaatctagaa

SEQ ID NO: 69498 - DNA, 21 bp, Artificial sequence
  SiRNA target sequence
ttaataaaataaatctagaaa

SEQ ID NO: 69499 - DNA, 21 bp, Artificial sequence
  SiRNA target sequence
taataaaataaatctagaaat

SEQ ID NO: 69500 - DNA, 21 bp, Artificial sequence
  SiRNA target sequence
aataaaataaatctagaaata

SEQ ID NO: 69501 - DNA, 21 bp, Artificial sequence
  SiRNA target sequence
ataaaataaatctagaaatat

SEQ ID NO: 69502 - DNA, 21 bp, Artificial sequence
  SiRNA target sequence
taaaataaatctagaaatata

SEQ ID NO: 69503 - DNA, 21 bp, Artificial sequence
  SiRNA target sequence
aaaataaatctagaaatatac

SEQ ID NO: 69504 - DNA, 21 bp, Artificial sequence
  SiRNA target sequence
aaataaatctagaaatataca

SEQ ID NO: 69505 - DNA, 21 bp, Artificial sequence
  SiRNA target sequence
aataaatctagaaatatacaa

SEQ ID NO: 69506 - DNA, 21 bp, Artificial sequence
  SiRNA target sequence
ataaatctagaaatatacaaa

SEQ ID NO: 69507 - DNA, 21 bp, Artificial sequence
  SiRNA target sequence
taaatctagaaatatacaaag

SEQ ID NO: 69508 - DNA, 21 bp, Artificial sequence
  SiRNA target sequence
aaatctagaaatatacaaagg

SEQ ID NO: 69509 - DNA, 21 bp, Artificial sequence
  SiRNA target sequence
aatctagaaatatacaaagga

SEQ ID NO: 69510 - DNA, 21 bp, Artificial sequence
  SiRNA target sequence
atctagaaatatacaaaggag

SEQ ID NO: 69511 - DNA, 21 bp, Artificial sequence
  SiRNA target sequence
tctagaaatatacaaaggaga

SEQ ID NO: 69512 - DNA, 21 bp, Artificial sequence
  SiRNA target sequence
ctagaaatatacaaaggagaa

SEQ ID NO: 69513 - DNA, 21 bp, Artificial sequence
  SiRNA target sequence
tagaaatatacaaaggagaaa

SEQ ID NO: 69514 - DNA, 21 bp, Artificial sequence
  SiRNA target sequence
agaaatatacaaaggagaaaa

SEQ ID NO: 69515 - DNA, 21 bp, Artificial sequence
  SiRNA target sequence
gaaatatacaaaggagaaaaa

SEQ ID NO: 69516 - DNA, 21 bp, Artificial sequence
  SiRNA target sequence
aaatatacaaaggagaaaaag

SEQ ID NO: 69517 - DNA, 21 bp, Artificial sequence
  SiRNA target sequence
aatatacaaaggagaaaaagt

SEQ ID NO: 69518 - DNA, 21 bp, Artificial sequence
  SiRNA target sequence
atatacaaaggagaaaaagta

SEQ ID NO: 69519 - DNA, 21 bp, Artificial sequence
  SiRNA target sequence
tatacaaaggagaaaaagtag

SEQ ID NO: 69520 - DNA, 21 bp, Artificial sequence
  SiRNA target sequence
atacaaaggagaaaaagtagc

SEQ ID NO: 69521 - DNA, 21 bp, Artificial sequence
  SiRNA target sequence
tacaaaggagaaaaagtagca

SEQ ID NO: 69522 - DNA, 21 bp, Artificial sequence
  SiRNA target sequence
acaaaggagaaaaagtagcaa

SEQ ID NO: 69523 - DNA, 21 bp, Artificial sequence
  SiRNA target sequence
caaaggagaaaaagtagcaat

SEQ ID NO: 69524 - DNA, 21 bp, Artificial sequence
  SiRNA target sequence
aaaggagaaaaagtagcaatt

SEQ ID NO: 69525 - DNA, 21 bp, Artificial sequence
  SiRNA target sequence
aaggagaaaaagtagcaatta

SEQ ID NO: 69526 - DNA, 21 bp, Artificial sequence
  SiRNA target sequence
aggagaaaaagtagcaattat

SEQ ID NO: 69527 - DNA, 21 bp, Artificial sequence
  SiRNA target sequence
ggagaaaaagtagcaattata

SEQ ID NO: 69528 - DNA, 21 bp, Artificial sequence
  SiRNA target sequence
gagaaaaagtagcaattatag

SEQ ID NO: 69529 - DNA, 21 bp, Artificial sequence
  SiRNA target sequence
agaaaaagtagcaattatagg

SEQ ID NO: 69530 - DNA, 21 bp, Artificial sequence
  SiRNA target sequence
gaaaaagtagcaattataggt

SEQ ID NO: 69531 - DNA, 21 bp, Artificial sequence
  SiRNA target sequence
aaaaagtagcaattataggta

SEQ ID NO: 69532 - DNA, 21 bp, Artificial sequence
  SiRNA target sequence
aaaagtagcaattataggtaa

SEQ ID NO: 69533 - DNA, 21 bp, Artificial sequence
  SiRNA target sequence
aaagtagcaattataggtaaa

SEQ ID NO: 69534 - DNA, 21 bp, Artificial sequence
  SiRNA target sequence
aagtagcaattataggtaaaa

SEQ ID NO: 69535 - DNA, 21 bp, Artificial sequence
  SiRNA target sequence
agtagcaattataggtaaaaa

SEQ ID NO: 69536 - DNA, 21 bp, Artificial sequence
  SiRNA target sequence
gtagcaattataggtaaaaat

SEQ ID NO: 69537 - DNA, 21 bp, Artificial sequence
  SiRNA target sequence
tagcaattataggtaaaaatg

SEQ ID NO: 69538 - DNA, 21 bp, Artificial sequence
  SiRNA target sequence
agcaattataggtaaaaatgg

SEQ ID NO: 69539 - DNA, 21 bp, Artificial sequence
  SiRNA target sequence
gcaattataggtaaaaatggt

SEQ ID NO: 69540 - DNA, 21 bp, Artificial sequence
  SiRNA target sequence
caattataggtaaaaatggta

SEQ ID NO: 69541 - DNA, 21 bp, Artificial sequence
  SiRNA target sequence
aattataggtaaaaatggtag

SEQ ID NO: 69542 - DNA, 21 bp, Artificial sequence
  SiRNA target sequence
attataggtaaaaatggtagt

SEQ ID NO: 69543 - DNA, 21 bp, Artificial sequence
  SiRNA target sequence
ttataggtaaaaatggtagtg

SEQ ID NO: 69544 - DNA, 21 bp, Artificial sequence
  SiRNA target sequence
tataggtaaaaatggtagtgg

SEQ ID NO: 69545 - DNA, 21 bp, Artificial sequence
  SiRNA target sequence
ataggtaaaaatggtagtggt

SEQ ID NO: 69546 - DNA, 21 bp, Artificial sequence
  SiRNA target sequence
taggtaaaaatggtagtggta

SEQ ID NO: 69547 - DNA, 21 bp, Artificial sequence
  SiRNA target sequence
aggtaaaaatggtagtggtaa

SEQ ID NO: 69548 - DNA, 21 bp, Artificial sequence
  SiRNA target sequence
ggtaaaaatggtagtggtaaa

SEQ ID NO: 69549 - DNA, 21 bp, Artificial sequence
  SiRNA target sequence
gtaaaaatggtagtggtaaat

SEQ ID NO: 69550 - DNA, 21 bp, Artificial sequence
  SiRNA target sequence
taaaaatggtagtggtaaatc

SEQ ID NO: 69551 - DNA, 21 bp, Artificial sequence
  SiRNA target sequence
aaaaatggtagtggtaaatca

SEQ ID NO: 69552 - DNA, 21 bp, Artificial sequence
  SiRNA target sequence
aaaatggtagtggtaaatcaa

SEQ ID NO: 69553 - DNA, 21 bp, Artificial sequence
  SiRNA target sequence
aaatggtagtggtaaatcaac

SEQ ID NO: 69554 - DNA, 21 bp, Artificial sequence
  SiRNA target sequence
aatggtagtggtaaatcaaca

SEQ ID NO: 69555 - DNA, 21 bp, Artificial sequence
  SiRNA target sequence
atggtagtggtaaatcaacat

SEQ ID NO: 69556 - DNA, 21 bp, Artificial sequence
  SiRNA target sequence
tggtagtggtaaatcaacatt

SEQ ID NO: 69557 - DNA, 21 bp, Artificial sequence
  SiRNA target sequence
ggtagtggtaaatcaacatta

SEQ ID NO: 69558 - DNA, 21 bp, Artificial sequence
  SiRNA target sequence
gtagtggtaaatcaacattac

SEQ ID NO: 69559 - DNA, 21 bp, Artificial sequence
  SiRNA target sequence
tagtggtaaatcaacattact

SEQ ID NO: 69560 - DNA, 21 bp, Artificial sequence
  SiRNA target sequence
agtggtaaatcaacattacta

SEQ ID NO: 69561 - DNA, 21 bp, Artificial sequence
  SiRNA target sequence
gtggtaaatcaacattactaa

SEQ ID NO: 69562 - DNA, 21 bp, Artificial sequence
  SiRNA target sequence
tggtaaatcaacattactaaa

SEQ ID NO: 69563 - DNA, 21 bp, Artificial sequence
  SiRNA target sequence
ggtaaatcaacattactaaaa

SEQ ID NO: 69564 - DNA, 21 bp, Artificial sequence
  SiRNA target sequence
gtaaatcaacattactaaaac

SEQ ID NO: 69565 - DNA, 21 bp, Artificial sequence
  SiRNA target sequence
taaatcaacattactaaaact

SEQ ID NO: 69566 - DNA, 21 bp, Artificial sequence
  SiRNA target sequence
aaatcaacattactaaaacta

SEQ ID NO: 69567 - DNA, 21 bp, Artificial sequence
  SiRNA target sequence
aatcaacattactaaaactac

SEQ ID NO: 69568 - DNA, 21 bp, Artificial sequence
  SiRNA target sequence
atcaacattactaaaactact

SEQ ID NO: 69569 - DNA, 21 bp, Artificial sequence
  SiRNA target sequence
tcaacattactaaaactactg

SEQ ID NO: 69570 - DNA, 21 bp, Artificial sequence
  SiRNA target sequence
caacattactaaaactactgc

SEQ ID NO: 69571 - DNA, 21 bp, Artificial sequence
  SiRNA target sequence
aacattactaaaactactgct

SEQ ID NO: 69572 - DNA, 21 bp, Artificial sequence
  SiRNA target sequence
acattactaaaactactgctt

SEQ ID NO: 69573 - DNA, 21 bp, Artificial sequence
  SiRNA target sequence
cattactaaaactactgctta

SEQ ID NO: 69574 - DNA, 21 bp, Artificial sequence
  SiRNA target sequence
attactaaaactactgcttaa

SEQ ID NO: 69575 - DNA, 21 bp, Artificial sequence
  SiRNA target sequence
ttactaaaactactgcttaaa

SEQ ID NO: 69576 - DNA, 21 bp, Artificial sequence
  SiRNA target sequence
tactaaaactactgcttaaat

SEQ ID NO: 69577 - DNA, 21 bp, Artificial sequence
  SiRNA target sequence
actaaaactactgcttaaatt

SEQ ID NO: 69578 - DNA, 21 bp, Artificial sequence
  SiRNA target sequence
ctaaaactactgcttaaattt

SEQ ID NO: 69579 - DNA, 21 bp, Artificial sequence
  SiRNA target sequence
taaaactactgcttaaatttg

SEQ ID NO: 69580 - DNA, 21 bp, Artificial sequence
  SiRNA target sequence
aaaactactgcttaaatttga

SEQ ID NO: 69581 - DNA, 21 bp, Artificial sequence
  SiRNA target sequence
aaactactgcttaaatttgat

SEQ ID NO: 69582 - DNA, 21 bp, Artificial sequence
  SiRNA target sequence
aactactgcttaaatttgatg

SEQ ID NO: 69583 - DNA, 21 bp, Artificial sequence
  SiRNA target sequence
actactgcttaaatttgatga

SEQ ID NO: 69584 - DNA, 21 bp, Artificial sequence
  SiRNA target sequence
ctactgcttaaatttgatgaa

SEQ ID NO: 69585 - DNA, 21 bp, Artificial sequence
  SiRNA target sequence
tactgcttaaatttgatgaag

SEQ ID NO: 69586 - DNA, 21 bp, Artificial sequence
  SiRNA target sequence
actgcttaaatttgatgaaga

SEQ ID NO: 69587 - DNA, 21 bp, Artificial sequence
  SiRNA target sequence
ctgcttaaatttgatgaagat

SEQ ID NO: 69588 - DNA, 21 bp, Artificial sequence
  SiRNA target sequence
tgcttaaatttgatgaagatt

SEQ ID NO: 69589 - DNA, 21 bp, Artificial sequence
  SiRNA target sequence
gcttaaatttgatgaagatta

SEQ ID NO: 69590 - DNA, 21 bp, Artificial sequence
  SiRNA target sequence
cttaaatttgatgaagattac

SEQ ID NO: 69591 - DNA, 21 bp, Artificial sequence
  SiRNA target sequence
ttaaatttgatgaagattaca

SEQ ID NO: 69592 - DNA, 21 bp, Artificial sequence
  SiRNA target sequence
taaatttgatgaagattacaa

SEQ ID NO: 69593 - DNA, 21 bp, Artificial sequence
  SiRNA target sequence
aaatttgatgaagattacaaa

SEQ ID NO: 69594 - DNA, 21 bp, Artificial sequence
  SiRNA target sequence
aatttgatgaagattacaaag

SEQ ID NO: 69595 - DNA, 21 bp, Artificial sequence
  SiRNA target sequence
atttgatgaagattacaaagg

SEQ ID NO: 69596 - DNA, 21 bp, Artificial sequence
  SiRNA target sequence
tttgatgaagattacaaaggt

SEQ ID NO: 69597 - DNA, 21 bp, Artificial sequence
  SiRNA target sequence
ttgatgaagattacaaaggta

SEQ ID NO: 69598 - DNA, 21 bp, Artificial sequence
  SiRNA target sequence
tgatgaagattacaaaggtag

SEQ ID NO: 69599 - DNA, 21 bp, Artificial sequence
  SiRNA target sequence
gatgaagattacaaaggtagc

SEQ ID NO: 69600 - DNA, 21 bp, Artificial sequence
  SiRNA target sequence
atgaagattacaaaggtagca

SEQ ID NO: 69601 - DNA, 21 bp, Artificial sequence
  SiRNA target sequence
tgaagattacaaaggtagcat

SEQ ID NO: 69602 - DNA, 21 bp, Artificial sequence
  SiRNA target sequence
gaagattacaaaggtagcatt

SEQ ID NO: 69603 - DNA, 21 bp, Artificial sequence
  SiRNA target sequence
aagattacaaaggtagcattt

SEQ ID NO: 69604 - DNA, 21 bp, Artificial sequence
  SiRNA target sequence
agattacaaaggtagcatttt

SEQ ID NO: 69605 - DNA, 21 bp, Artificial sequence
  SiRNA target sequence
gattacaaaggtagcatttta

SEQ ID NO: 69606 - DNA, 21 bp, Artificial sequence
  SiRNA target sequence
attacaaaggtagcattttaa

SEQ ID NO: 69607 - DNA, 21 bp, Artificial sequence
  SiRNA target sequence
ttacaaaggtagcattttaat

SEQ ID NO: 69608 - DNA, 21 bp, Artificial sequence
  SiRNA target sequence
tacaaaggtagcattttaata

SEQ ID NO: 69609 - DNA, 21 bp, Artificial sequence
  SiRNA target sequence
acaaaggtagcattttaatag

SEQ ID NO: 69610 - DNA, 21 bp, Artificial sequence
  SiRNA target sequence
caaaggtagcattttaataga

SEQ ID NO: 69611 - DNA, 21 bp, Artificial sequence
  SiRNA target sequence
aaaggtagcattttaatagat

SEQ ID NO: 69612 - DNA, 21 bp, Artificial sequence
  SiRNA target sequence
aaggtagcattttaatagatg

SEQ ID NO: 69613 - DNA, 21 bp, Artificial sequence
  SiRNA target sequence
aggtagcattttaatagatga

SEQ ID NO: 69614 - DNA, 21 bp, Artificial sequence
  SiRNA target sequence
ggtagcattttaatagatgac

SEQ ID NO: 69615 - DNA, 21 bp, Artificial sequence
  SiRNA target sequence
gtagcattttaatagatgaca

SEQ ID NO: 69616 - DNA, 21 bp, Artificial sequence
  SiRNA target sequence
tagcattttaatagatgacat

SEQ ID NO: 69617 - DNA, 21 bp, Artificial sequence
  SiRNA target sequence
agcattttaatagatgacatt

SEQ ID NO: 69618 - DNA, 21 bp, Artificial sequence
  SiRNA target sequence
gcattttaatagatgacattg

SEQ ID NO: 69619 - DNA, 21 bp, Artificial sequence
  SiRNA target sequence
cattttaatagatgacattga

SEQ ID NO: 69620 - DNA, 21 bp, Artificial sequence
  SiRNA target sequence
attttaatagatgacattgat

SEQ ID NO: 69621 - DNA, 21 bp, Artificial sequence
  SiRNA target sequence
ttttaatagatgacattgata

SEQ ID NO: 69622 - DNA, 21 bp, Artificial sequence
  SiRNA target sequence
tttaatagatgacattgatat

SEQ ID NO: 69623 - DNA, 21 bp, Artificial sequence
  SiRNA target sequence
ttaatagatgacattgatatt

SEQ ID NO: 69624 - DNA, 21 bp, Artificial sequence
  SiRNA target sequence
taatagatgacattgatatta

SEQ ID NO: 69625 - DNA, 21 bp, Artificial sequence
  SiRNA target sequence
aatagatgacattgatattaa

SEQ ID NO: 69626 - DNA, 21 bp, Artificial sequence
  SiRNA target sequence
atagatgacattgatattaaa

SEQ ID NO: 69627 - DNA, 21 bp, Artificial sequence
  SiRNA target sequence
tagatgacattgatattaaaa

SEQ ID NO: 69628 - DNA, 21 bp, Artificial sequence
  SiRNA target sequence
agatgacattgatattaaaaa

SEQ ID NO: 69629 - DNA, 21 bp, Artificial sequence
  SiRNA target sequence
gatgacattgatattaaaaaa

SEQ ID NO: 69630 - DNA, 21 bp, Artificial sequence
  SiRNA target sequence
atgacattgatattaaaaaaa

SEQ ID NO: 69631 - DNA, 21 bp, Artificial sequence
  SiRNA target sequence
tgacattgatattaaaaaaat

SEQ ID NO: 69632 - DNA, 21 bp, Artificial sequence
  SiRNA target sequence
gacattgatattaaaaaaatc

SEQ ID NO: 69633 - DNA, 21 bp, Artificial sequence
  SiRNA target sequence
acattgatattaaaaaaatca

SEQ ID NO: 69634 - DNA, 21 bp, Artificial sequence
  SiRNA target sequence
cattgatattaaaaaaatcaa

SEQ ID NO: 69635 - DNA, 21 bp, Artificial sequence
  SiRNA target sequence
attgatattaaaaaaatcaaa

SEQ ID NO: 69636 - DNA, 21 bp, Artificial sequence
  SiRNA target sequence
ttgatattaaaaaaatcaaag

SEQ ID NO: 69637 - DNA, 21 bp, Artificial sequence
  SiRNA target sequence
tgatattaaaaaaatcaaaga

SEQ ID NO: 69638 - DNA, 21 bp, Artificial sequence
  SiRNA target sequence
gatattaaaaaaatcaaagac

SEQ ID NO: 69639 - DNA, 21 bp, Artificial sequence
  SiRNA target sequence
atattaaaaaaatcaaagacg

SEQ ID NO: 69640 - DNA, 21 bp, Artificial sequence
  SiRNA target sequence
tattaaaaaaatcaaagacga

SEQ ID NO: 69641 - DNA, 21 bp, Artificial sequence
  SiRNA target sequence
attaaaaaaatcaaagacgaa

SEQ ID NO: 69642 - DNA, 21 bp, Artificial sequence
  SiRNA target sequence
ttaaaaaaatcaaagacgaat

SEQ ID NO: 69643 - DNA, 21 bp, Artificial sequence
  SiRNA target sequence
taaaaaaatcaaagacgaatt

SEQ ID NO: 69644 - DNA, 21 bp, Artificial sequence
  SiRNA target sequence
aaaaaaatcaaagacgaattt

SEQ ID NO: 69645 - DNA, 21 bp, Artificial sequence
  SiRNA target sequence
aaaaaatcaaagacgaatttt

SEQ ID NO: 69646 - DNA, 21 bp, Artificial sequence
  SiRNA target sequence
aaaaatcaaagacgaatttta

SEQ ID NO: 69647 - DNA, 21 bp, Artificial sequence
  SiRNA target sequence
aaaatcaaagacgaattttat

SEQ ID NO: 69648 - DNA, 21 bp, Artificial sequence
  SiRNA target sequence
aaatcaaagacgaattttata

SEQ ID NO: 69649 - DNA, 21 bp, Artificial sequence
  SiRNA target sequence
aatcaaagacgaattttatag

SEQ ID NO: 69650 - DNA, 21 bp, Artificial sequence
  SiRNA target sequence
atcaaagacgaattttatagg

SEQ ID NO: 69651 - DNA, 21 bp, Artificial sequence
  SiRNA target sequence
tcaaagacgaattttatagga

SEQ ID NO: 69652 - DNA, 21 bp, Artificial sequence
  SiRNA target sequence
caaagacgaattttataggaa

SEQ ID NO: 69653 - DNA, 21 bp, Artificial sequence
  SiRNA target sequence
aaagacgaattttataggaat

SEQ ID NO: 69654 - DNA, 21 bp, Artificial sequence
  SiRNA target sequence
aagacgaattttataggaatt

SEQ ID NO: 69655 - DNA, 21 bp, Artificial sequence
  SiRNA target sequence
agacgaattttataggaattt

SEQ ID NO: 69656 - DNA, 21 bp, Artificial sequence
  SiRNA target sequence
gacgaattttataggaattta

SEQ ID NO: 69657 - DNA, 21 bp, Artificial sequence
  SiRNA target sequence
acgaattttataggaatttat

SEQ ID NO: 69658 - DNA, 21 bp, Artificial sequence
  SiRNA target sequence
cgaattttataggaatttatt

SEQ ID NO: 69659 - DNA, 21 bp, Artificial sequence
  SiRNA target sequence
gaattttataggaatttatta

SEQ ID NO: 69660 - DNA, 21 bp, Artificial sequence
  SiRNA target sequence
aattttataggaatttattag

SEQ ID NO: 69661 - DNA, 21 bp, Artificial sequence
  SiRNA target sequence
attttataggaatttattagg

SEQ ID NO: 69662 - DNA, 21 bp, Artificial sequence
  SiRNA target sequence
ttttataggaatttattaggt

SEQ ID NO: 69663 - DNA, 21 bp, Artificial sequence
  SiRNA target sequence
tttataggaatttattaggtt

SEQ ID NO: 69664 - DNA, 21 bp, Artificial sequence
  SiRNA target sequence
ttataggaatttattaggtta

SEQ ID NO: 69665 - DNA, 21 bp, Artificial sequence
  SiRNA target sequence
tataggaatttattaggttac

SEQ ID NO: 69666 - DNA, 21 bp, Artificial sequence
  SiRNA target sequence
ataggaatttattaggttaca

SEQ ID NO: 69667 - DNA, 21 bp, Artificial sequence
  SiRNA target sequence
taggaatttattaggttacat

SEQ ID NO: 69668 - DNA, 21 bp, Artificial sequence
  SiRNA target sequence
aggaatttattaggttacata

SEQ ID NO: 69669 - DNA, 21 bp, Artificial sequence
  SiRNA target sequence
ggaatttattaggttacatac

SEQ ID NO: 69670 - DNA, 21 bp, Artificial sequence
  SiRNA target sequence
gaatttattaggttacatacc

SEQ ID NO: 69671 - DNA, 21 bp, Artificial sequence
  SiRNA target sequence
aatttattaggttacatacca

SEQ ID NO: 69672 - DNA, 21 bp, Artificial sequence
  SiRNA target sequence
atttattaggttacataccac

SEQ ID NO: 69673 - DNA, 21 bp, Artificial sequence
  SiRNA target sequence
tttattaggttacataccaca

SEQ ID NO: 69674 - DNA, 21 bp, Artificial sequence
  SiRNA target sequence
ttattaggttacataccacag

SEQ ID NO: 69675 - DNA, 21 bp, Artificial sequence
  SiRNA target sequence
tattaggttacataccacaga

SEQ ID NO: 69676 - DNA, 21 bp, Artificial sequence
  SiRNA target sequence
attaggttacataccacagaa

SEQ ID NO: 69677 - DNA, 21 bp, Artificial sequence
  SiRNA target sequence
ttaggttacataccacagaat

SEQ ID NO: 69678 - DNA, 21 bp, Artificial sequence
  SiRNA target sequence
taggttacataccacagaata

SEQ ID NO: 69679 - DNA, 21 bp, Artificial sequence
  SiRNA target sequence
aggttacataccacagaatac

SEQ ID NO: 69680 - DNA, 21 bp, Artificial sequence
  SiRNA target sequence
ggttacataccacagaataca

SEQ ID NO: 69681 - DNA, 21 bp, Artificial sequence
  SiRNA target sequence
gttacataccacagaatacat

SEQ ID NO: 69682 - DNA, 21 bp, Artificial sequence
  SiRNA target sequence
ttacataccacagaatacatt

SEQ ID NO: 69683 - DNA, 21 bp, Artificial sequence
  SiRNA target sequence
tacataccacagaatacattt

SEQ ID NO: 69684 - DNA, 21 bp, Artificial sequence
  SiRNA target sequence
acataccacagaatacatttt

SEQ ID NO: 69685 - DNA, 21 bp, Artificial sequence
  SiRNA target sequence
cataccacagaatacattttt

SEQ ID NO: 69686 - DNA, 21 bp, Artificial sequence
  SiRNA target sequence
ataccacagaatacatttttg

SEQ ID NO: 69687 - DNA, 21 bp, Artificial sequence
  SiRNA target sequence
taccacagaatacatttttgt

SEQ ID NO: 69688 - DNA, 21 bp, Artificial sequence
  SiRNA target sequence
accacagaatacatttttgtt

SEQ ID NO: 69689 - DNA, 21 bp, Artificial sequence
  SiRNA target sequence
ccacagaatacatttttgttt

SEQ ID NO: 69690 - DNA, 21 bp, Artificial sequence
  SiRNA target sequence
cacagaatacatttttgttta

SEQ ID NO: 69691 - DNA, 21 bp, Artificial sequence
  SiRNA target sequence
acagaatacatttttgtttaa

SEQ ID NO: 69692 - DNA, 21 bp, Artificial sequence
  SiRNA target sequence
cagaatacatttttgtttaat

SEQ ID NO: 69693 - DNA, 21 bp, Artificial sequence
  SiRNA target sequence
agaatacatttttgtttaatg

SEQ ID NO: 69694 - DNA, 21 bp, Artificial sequence
  SiRNA target sequence
gaatacatttttgtttaatga

SEQ ID NO: 69695 - DNA, 21 bp, Artificial sequence
  SiRNA target sequence
aatacatttttgtttaatgaa

SEQ ID NO: 69696 - DNA, 21 bp, Artificial sequence
  SiRNA target sequence
atacatttttgtttaatgaat

SEQ ID NO: 69697 - DNA, 21 bp, Artificial sequence
  SiRNA target sequence
tacatttttgtttaatgaatc

SEQ ID NO: 69698 - DNA, 21 bp, Artificial sequence
  SiRNA target sequence
acatttttgtttaatgaatct

SEQ ID NO: 69699 - DNA, 21 bp, Artificial sequence
  SiRNA target sequence
catttttgtttaatgaatctg

SEQ ID NO: 69700 - DNA, 21 bp, Artificial sequence
  SiRNA target sequence
atttttgtttaatgaatctgt

SEQ ID NO: 69701 - DNA, 21 bp, Artificial sequence
  SiRNA target sequence
tttttgtttaatgaatctgta

SEQ ID NO: 69702 - DNA, 21 bp, Artificial sequence
  SiRNA target sequence
ttttgtttaatgaatctgtaa

SEQ ID NO: 69703 - DNA, 21 bp, Artificial sequence
  SiRNA target sequence
tttgtttaatgaatctgtaaa

SEQ ID NO: 69704 - DNA, 21 bp, Artificial sequence
  SiRNA target sequence
ttgtttaatgaatctgtaaaa

SEQ ID NO: 69705 - DNA, 21 bp, Artificial sequence
  SiRNA target sequence
tgtttaatgaatctgtaaaat

SEQ ID NO: 69706 - DNA, 21 bp, Artificial sequence
  SiRNA target sequence
gtttaatgaatctgtaaaata

SEQ ID NO: 69707 - DNA, 21 bp, Artificial sequence
  SiRNA target sequence
tttaatgaatctgtaaaatat

SEQ ID NO: 69708 - DNA, 21 bp, Artificial sequence
  SiRNA target sequence
ttaatgaatctgtaaaatata

SEQ ID NO: 69709 - DNA, 21 bp, Artificial sequence
  SiRNA target sequence
taatgaatctgtaaaatataa

SEQ ID NO: 69710 - DNA, 21 bp, Artificial sequence
  SiRNA target sequence
aatgaatctgtaaaatataat

SEQ ID NO: 69711 - DNA, 21 bp, Artificial sequence
  SiRNA target sequence
atgaatctgtaaaatataata

SEQ ID NO: 69712 - DNA, 21 bp, Artificial sequence
  SiRNA target sequence
tgaatctgtaaaatataatat

SEQ ID NO: 69713 - DNA, 21 bp, Artificial sequence
  SiRNA target sequence
gaatctgtaaaatataatatt

SEQ ID NO: 69714 - DNA, 21 bp, Artificial sequence
  SiRNA target sequence
aatctgtaaaatataatatta

SEQ ID NO: 69715 - DNA, 21 bp, Artificial sequence
  SiRNA target sequence
atctgtaaaatataatattaa

SEQ ID NO: 69716 - DNA, 21 bp, Artificial sequence
  SiRNA target sequence
tctgtaaaatataatattaaa

SEQ ID NO: 69717 - DNA, 21 bp, Artificial sequence
  SiRNA target sequence
ctgtaaaatataatattaaat

SEQ ID NO: 69718 - DNA, 21 bp, Artificial sequence
  SiRNA target sequence
tgtaaaatataatattaaata

SEQ ID NO: 69719 - DNA, 21 bp, Artificial sequence
  SiRNA target sequence
gtaaaatataatattaaatac

SEQ ID NO: 69720 - DNA, 21 bp, Artificial sequence
  SiRNA target sequence
taaaatataatattaaatacg

SEQ ID NO: 69721 - DNA, 21 bp, Artificial sequence
  SiRNA target sequence
aaaatataatattaaatacgg

SEQ ID NO: 69722 - DNA, 21 bp, Artificial sequence
  SiRNA target sequence
aaatataatattaaatacgga

SEQ ID NO: 69723 - DNA, 21 bp, Artificial sequence
  SiRNA target sequence
aatataatattaaatacggat

SEQ ID NO: 69724 - DNA, 21 bp, Artificial sequence
  SiRNA target sequence
atataatattaaatacggatc

SEQ ID NO: 69725 - DNA, 21 bp, Artificial sequence
  SiRNA target sequence
tataatattaaatacggatct

SEQ ID NO: 69726 - DNA, 21 bp, Artificial sequence
  SiRNA target sequence
ataatattaaatacggatctt

SEQ ID NO: 69727 - DNA, 21 bp, Artificial sequence
  SiRNA target sequence
taatattaaatacggatcttt

SEQ ID NO: 69728 - DNA, 21 bp, Artificial sequence
  SiRNA target sequence
aatattaaatacggatctttt

SEQ ID NO: 69729 - DNA, 21 bp, Artificial sequence
  SiRNA target sequence
atattaaatacggatcttttg

SEQ ID NO: 69730 - DNA, 21 bp, Artificial sequence
  SiRNA target sequence
tattaaatacggatcttttgg

SEQ ID NO: 69731 - DNA, 21 bp, Artificial sequence
  SiRNA target sequence
attaaatacggatcttttggt

SEQ ID NO: 69732 - DNA, 21 bp, Artificial sequence
  SiRNA target sequence
ttaaatacggatcttttggta

SEQ ID NO: 69733 - DNA, 21 bp, Artificial sequence
  SiRNA target sequence
taaatacggatcttttggtat

SEQ ID NO: 69734 - DNA, 21 bp, Artificial sequence
  SiRNA target sequence
aaatacggatcttttggtatt

SEQ ID NO: 69735 - DNA, 21 bp, Artificial sequence
  SiRNA target sequence
aatacggatcttttggtattt

SEQ ID NO: 69736 - DNA, 21 bp, Artificial sequence
  SiRNA target sequence
atacggatcttttggtatttc

SEQ ID NO: 69737 - DNA, 21 bp, Artificial sequence
  SiRNA target sequence
tacggatcttttggtatttca

SEQ ID NO: 69738 - DNA, 21 bp, Artificial sequence
  SiRNA target sequence
acggatcttttggtatttcag

SEQ ID NO: 69739 - DNA, 21 bp, Artificial sequence
  SiRNA target sequence
cggatcttttggtatttcaga

SEQ ID NO: 69740 - DNA, 21 bp, Artificial sequence
  SiRNA target sequence
ggatcttttggtatttcagac

SEQ ID NO: 69741 - DNA, 21 bp, Artificial sequence
  SiRNA target sequence
gatcttttggtatttcagacg

SEQ ID NO: 69742 - DNA, 21 bp, Artificial sequence
  SiRNA target sequence
atcttttggtatttcagacga

SEQ ID NO: 69743 - DNA, 21 bp, Artificial sequence
  SiRNA target sequence
tcttttggtatttcagacgag

SEQ ID NO: 69744 - DNA, 21 bp, Artificial sequence
  SiRNA target sequence
cttttggtatttcagacgagg

SEQ ID NO: 69745 - DNA, 21 bp, Artificial sequence
  SiRNA target sequence
ttttggtatttcagacgagga

SEQ ID NO: 69746 - DNA, 21 bp, Artificial sequence
  SiRNA target sequence
tttggtatttcagacgaggat

SEQ ID NO: 69747 - DNA, 21 bp, Artificial sequence
  SiRNA target sequence
ttggtatttcagacgaggata

SEQ ID NO: 69748 - DNA, 21 bp, Artificial sequence
  SiRNA target sequence
tggtatttcagacgaggatat

SEQ ID NO: 69749 - DNA, 21 bp, Artificial sequence
  SiRNA target sequence
ggtatttcagacgaggatatt

SEQ ID NO: 69750 - DNA, 21 bp, Artificial sequence
  SiRNA target sequence
gtatttcagacgaggatattt

SEQ ID NO: 69751 - DNA, 21 bp, Artificial sequence
  SiRNA target sequence
tatttcagacgaggatatttt

SEQ ID NO: 69752 - DNA, 21 bp, Artificial sequence
  SiRNA target sequence
atttcagacgaggatattttt

SEQ ID NO: 69753 - DNA, 21 bp, Artificial sequence
  SiRNA target sequence
tttcagacgaggatatttttg

SEQ ID NO: 69754 - DNA, 21 bp, Artificial sequence
  SiRNA target sequence
ttcagacgaggatatttttgc

SEQ ID NO: 69755 - DNA, 21 bp, Artificial sequence
  SiRNA target sequence
tcagacgaggatatttttgca

SEQ ID NO: 69756 - DNA, 21 bp, Artificial sequence
  SiRNA target sequence
cagacgaggatatttttgcat

SEQ ID NO: 69757 - DNA, 21 bp, Artificial sequence
  SiRNA target sequence
agacgaggatatttttgcatt

SEQ ID NO: 69758 - DNA, 21 bp, Artificial sequence
  SiRNA target sequence
gacgaggatatttttgcattg

SEQ ID NO: 69759 - DNA, 21 bp, Artificial sequence
  SiRNA target sequence
acgaggatatttttgcattgt

SEQ ID NO: 69760 - DNA, 21 bp, Artificial sequence
  SiRNA target sequence
cgaggatatttttgcattgtg

SEQ ID NO: 69761 - DNA, 21 bp, Artificial sequence
  SiRNA target sequence
gaggatatttttgcattgtgt

SEQ ID NO: 69762 - DNA, 21 bp, Artificial sequence
  SiRNA target sequence
aggatatttttgcattgtgta

SEQ ID NO: 69763 - DNA, 21 bp, Artificial sequence
  SiRNA target sequence
ggatatttttgcattgtgtaa

SEQ ID NO: 69764 - DNA, 21 bp, Artificial sequence
  SiRNA target sequence
gatatttttgcattgtgtaaa

SEQ ID NO: 69765 - DNA, 21 bp, Artificial sequence
  SiRNA target sequence
atatttttgcattgtgtaaag

SEQ ID NO: 69766 - DNA, 21 bp, Artificial sequence
  SiRNA target sequence
tatttttgcattgtgtaaaga

SEQ ID NO: 69767 - DNA, 21 bp, Artificial sequence
  SiRNA target sequence
atttttgcattgtgtaaagag

SEQ ID NO: 69768 - DNA, 21 bp, Artificial sequence
  SiRNA target sequence
tttttgcattgtgtaaagagt

SEQ ID NO: 69769 - DNA, 21 bp, Artificial sequence
  SiRNA target sequence
ttttgcattgtgtaaagagtt

SEQ ID NO: 69770 - DNA, 21 bp, Artificial sequence
  SiRNA target sequence
tttgcattgtgtaaagagttt

SEQ ID NO: 69771 - DNA, 21 bp, Artificial sequence
  SiRNA target sequence
ttgcattgtgtaaagagtttg

SEQ ID NO: 69772 - DNA, 21 bp, Artificial sequence
  SiRNA target sequence
tgcattgtgtaaagagtttgg

SEQ ID NO: 69773 - DNA, 21 bp, Artificial sequence
  SiRNA target sequence
gcattgtgtaaagagtttgga

SEQ ID NO: 69774 - DNA, 21 bp, Artificial sequence
  SiRNA target sequence
cattgtgtaaagagtttggat

SEQ ID NO: 69775 - DNA, 21 bp, Artificial sequence
  SiRNA target sequence
attgtgtaaagagtttggatt

SEQ ID NO: 69776 - DNA, 21 bp, Artificial sequence
  SiRNA target sequence
ttgtgtaaagagtttggatta

SEQ ID NO: 69777 - DNA, 21 bp, Artificial sequence
  SiRNA target sequence
tgtgtaaagagtttggattat

SEQ ID NO: 69778 - DNA, 21 bp, Artificial sequence
  SiRNA target sequence
gtgtaaagagtttggattata

SEQ ID NO: 69779 - DNA, 21 bp, Artificial sequence
  SiRNA target sequence
tgtaaagagtttggattatat

SEQ ID NO: 69780 - DNA, 21 bp, Artificial sequence
  SiRNA target sequence
gtaaagagtttggattatatg

SEQ ID NO: 69781 - DNA, 21 bp, Artificial sequence
  SiRNA target sequence
taaagagtttggattatatga

SEQ ID NO: 69782 - DNA, 21 bp, Artificial sequence
  SiRNA target sequence
aaagagtttggattatatgac

SEQ ID NO: 69783 - DNA, 21 bp, Artificial sequence
  SiRNA target sequence
aagagtttggattatatgacg

SEQ ID NO: 69784 - DNA, 21 bp, Artificial sequence
  SiRNA target sequence
agagtttggattatatgacgt

SEQ ID NO: 69785 - DNA, 21 bp, Artificial sequence
  SiRNA target sequence
gagtttggattatatgacgtt

SEQ ID NO: 69786 - DNA, 21 bp, Artificial sequence
  SiRNA target sequence
agtttggattatatgacgttt

SEQ ID NO: 69787 - DNA, 21 bp, Artificial sequence
  SiRNA target sequence
gtttggattatatgacgtttt

SEQ ID NO: 69788 - DNA, 21 bp, Artificial sequence
  SiRNA target sequence
tttggattatatgacgttttc

SEQ ID NO: 69789 - DNA, 21 bp, Artificial sequence
  SiRNA target sequence
ttggattatatgacgttttca

SEQ ID NO: 69790 - DNA, 21 bp, Artificial sequence
  SiRNA target sequence
tggattatatgacgttttcat

SEQ ID NO: 69791 - DNA, 21 bp, Artificial sequence
  SiRNA target sequence
ggattatatgacgttttcatg

SEQ ID NO: 69792 - DNA, 21 bp, Artificial sequence
  SiRNA target sequence
gattatatgacgttttcatga

SEQ ID NO: 69793 - DNA, 21 bp, Artificial sequence
  SiRNA target sequence
attatatgacgttttcatgaa

SEQ ID NO: 69794 - DNA, 21 bp, Artificial sequence
  SiRNA target sequence
ttatatgacgttttcatgaac

SEQ ID NO: 69795 - DNA, 21 bp, Artificial sequence
  SiRNA target sequence
tatatgacgttttcatgaacc

SEQ ID NO: 69796 - DNA, 21 bp, Artificial sequence
  SiRNA target sequence
atatgacgttttcatgaacct

SEQ ID NO: 69797 - DNA, 21 bp, Artificial sequence
  SiRNA target sequence
tatgacgttttcatgaacctc

SEQ ID NO: 69798 - DNA, 21 bp, Artificial sequence
  SiRNA target sequence
atgacgttttcatgaacctcg

SEQ ID NO: 69799 - DNA, 21 bp, Artificial sequence
  SiRNA target sequence
tgacgttttcatgaacctcga

SEQ ID NO: 69800 - DNA, 21 bp, Artificial sequence
  SiRNA target sequence
gacgttttcatgaacctcgaa

SEQ ID NO: 69801 - DNA, 21 bp, Artificial sequence
  SiRNA target sequence
acgttttcatgaacctcgaaa

SEQ ID NO: 69802 - DNA, 21 bp, Artificial sequence
  SiRNA target sequence
cgttttcatgaacctcgaaaa

SEQ ID NO: 69803 - DNA, 21 bp, Artificial sequence
  SiRNA target sequence
gttttcatgaacctcgaaaat

SEQ ID NO: 69804 - DNA, 21 bp, Artificial sequence
  SiRNA target sequence
ttttcatgaacctcgaaaatg

SEQ ID NO: 69805 - DNA, 21 bp, Artificial sequence
  SiRNA target sequence
tttcatgaacctcgaaaatgg

SEQ ID NO: 69806 - DNA, 21 bp, Artificial sequence
  SiRNA target sequence
ttcatgaacctcgaaaatggt

SEQ ID NO: 69807 - DNA, 21 bp, Artificial sequence
  SiRNA target sequence
tcatgaacctcgaaaatggtt

SEQ ID NO: 69808 - DNA, 21 bp, Artificial sequence
  SiRNA target sequence
catgaacctcgaaaatggttt

SEQ ID NO: 69809 - DNA, 21 bp, Artificial sequence
  SiRNA target sequence
atgaacctcgaaaatggtttt

SEQ ID NO: 69810 - DNA, 21 bp, Artificial sequence
  SiRNA target sequence
tgaacctcgaaaatggttttg

SEQ ID NO: 69811 - DNA, 21 bp, Artificial sequence
  SiRNA target sequence
gaacctcgaaaatggttttga

SEQ ID NO: 69812 - DNA, 21 bp, Artificial sequence
  SiRNA target sequence
aacctcgaaaatggttttgat

SEQ ID NO: 69813 - DNA, 21 bp, Artificial sequence
  SiRNA target sequence
acctcgaaaatggttttgata

SEQ ID NO: 69814 - DNA, 21 bp, Artificial sequence
  SiRNA target sequence
cctcgaaaatggttttgatac

SEQ ID NO: 69815 - DNA, 21 bp, Artificial sequence
  SiRNA target sequence
ctcgaaaatggttttgatacg

SEQ ID NO: 69816 - DNA, 21 bp, Artificial sequence
  SiRNA target sequence
tcgaaaatggttttgatacga

SEQ ID NO: 69817 - DNA, 21 bp, Artificial sequence
  SiRNA target sequence
cgaaaatggttttgatacgaa

SEQ ID NO: 69818 - DNA, 21 bp, Artificial sequence
  SiRNA target sequence
gaaaatggttttgatacgaat

SEQ ID NO: 69819 - DNA, 21 bp, Artificial sequence
  SiRNA target sequence
aaaatggttttgatacgaatg

SEQ ID NO: 69820 - DNA, 21 bp, Artificial sequence
  SiRNA target sequence
aaatggttttgatacgaatgt

SEQ ID NO: 69821 - DNA, 21 bp, Artificial sequence
  SiRNA target sequence
aatggttttgatacgaatgta

SEQ ID NO: 69822 - DNA, 21 bp, Artificial sequence
  SiRNA target sequence
atggttttgatacgaatgtag

SEQ ID NO: 69823 - DNA, 21 bp, Artificial sequence
  SiRNA target sequence
tggttttgatacgaatgtagg

SEQ ID NO: 69824 - DNA, 21 bp, Artificial sequence
  SiRNA target sequence
ggttttgatacgaatgtagga

SEQ ID NO: 69825 - DNA, 21 bp, Artificial sequence
  SiRNA target sequence
gttttgatacgaatgtaggag

SEQ ID NO: 69826 - DNA, 21 bp, Artificial sequence
  SiRNA target sequence
ttttgatacgaatgtaggaga

SEQ ID NO: 69827 - DNA, 21 bp, Artificial sequence
  SiRNA target sequence
tttgatacgaatgtaggagaa

SEQ ID NO: 69828 - DNA, 21 bp, Artificial sequence
  SiRNA target sequence
ttgatacgaatgtaggagaaa

SEQ ID NO: 69829 - DNA, 21 bp, Artificial sequence
  SiRNA target sequence
tgatacgaatgtaggagaaag

SEQ ID NO: 69830 - DNA, 21 bp, Artificial sequence
  SiRNA target sequence
gatacgaatgtaggagaaaga

SEQ ID NO: 69831 - DNA, 21 bp, Artificial sequence
  SiRNA target sequence
atacgaatgtaggagaaagag

SEQ ID NO: 69832 - DNA, 21 bp, Artificial sequence
  SiRNA target sequence
tacgaatgtaggagaaagagg

SEQ ID NO: 69833 - DNA, 21 bp, Artificial sequence
  SiRNA target sequence
acgaatgtaggagaaagagga

SEQ ID NO: 69834 - DNA, 21 bp, Artificial sequence
  SiRNA target sequence
cgaatgtaggagaaagaggaa

SEQ ID NO: 69835 - DNA, 21 bp, Artificial sequence
  SiRNA target sequence
gaatgtaggagaaagaggaag

SEQ ID NO: 69836 - DNA, 21 bp, Artificial sequence
  SiRNA target sequence
aatgtaggagaaagaggaagg

SEQ ID NO: 69837 - DNA, 21 bp, Artificial sequence
  SiRNA target sequence
atgtaggagaaagaggaaggt

SEQ ID NO: 69838 - DNA, 21 bp, Artificial sequence
  SiRNA target sequence
tgtaggagaaagaggaaggtt

SEQ ID NO: 69839 - DNA, 21 bp, Artificial sequence
  SiRNA target sequence
gtaggagaaagaggaaggtta

SEQ ID NO: 69840 - DNA, 21 bp, Artificial sequence
  SiRNA target sequence
taggagaaagaggaaggttat

SEQ ID NO: 69841 - DNA, 21 bp, Artificial sequence
  SiRNA target sequence
aggagaaagaggaaggttatt

SEQ ID NO: 69842 - DNA, 21 bp, Artificial sequence
  SiRNA target sequence
ggagaaagaggaaggttatta

SEQ ID NO: 69843 - DNA, 21 bp, Artificial sequence
  SiRNA target sequence
gagaaagaggaaggttattaa

SEQ ID NO: 69844 - DNA, 21 bp, Artificial sequence
  SiRNA target sequence
agaaagaggaaggttattaag

SEQ ID NO: 69845 - DNA, 21 bp, Artificial sequence
  SiRNA target sequence
gaaagaggaaggttattaagt

SEQ ID NO: 69846 - DNA, 21 bp, Artificial sequence
  SiRNA target sequence
aaagaggaaggttattaagtg

SEQ ID NO: 69847 - DNA, 21 bp, Artificial sequence
  SiRNA target sequence
aagaggaaggttattaagtgg

SEQ ID NO: 69848 - DNA, 21 bp, Artificial sequence
  SiRNA target sequence
agaggaaggttattaagtggt

SEQ ID NO: 69849 - DNA, 21 bp, Artificial sequence
  SiRNA target sequence
gaggaaggttattaagtggtg

SEQ ID NO: 69850 - DNA, 21 bp, Artificial sequence
  SiRNA target sequence
aggaaggttattaagtggtgg

SEQ ID NO: 69851 - DNA, 21 bp, Artificial sequence
  SiRNA target sequence
ggaaggttattaagtggtgga

SEQ ID NO: 69852 - DNA, 21 bp, Artificial sequence
  SiRNA target sequence
gaaggttattaagtggtggag

SEQ ID NO: 69853 - DNA, 21 bp, Artificial sequence
  SiRNA target sequence
aaggttattaagtggtggaga

SEQ ID NO: 69854 - DNA, 21 bp, Artificial sequence
  SiRNA target sequence
aggttattaagtggtggagaa

SEQ ID NO: 69855 - DNA, 21 bp, Artificial sequence
  SiRNA target sequence
ggttattaagtggtggagaaa

SEQ ID NO: 69856 - DNA, 21 bp, Artificial sequence
  SiRNA target sequence
gttattaagtggtggagaaaa

SEQ ID NO: 69857 - DNA, 21 bp, Artificial sequence
  SiRNA target sequence
ttattaagtggtggagaaaag

SEQ ID NO: 69858 - DNA, 21 bp, Artificial sequence
  SiRNA target sequence
tattaagtggtggagaaaagc

SEQ ID NO: 69859 - DNA, 21 bp, Artificial sequence
  SiRNA target sequence
attaagtggtggagaaaagca

SEQ ID NO: 69860 - DNA, 21 bp, Artificial sequence
  SiRNA target sequence
ttaagtggtggagaaaagcaa

SEQ ID NO: 69861 - DNA, 21 bp, Artificial sequence
  SiRNA target sequence
taagtggtggagaaaagcaaa

SEQ ID NO: 69862 - DNA, 21 bp, Artificial sequence
  SiRNA target sequence
aagtggtggagaaaagcaaaa

SEQ ID NO: 69863 - DNA, 21 bp, Artificial sequence
  SiRNA target sequence
agtggtggagaaaagcaaaag

SEQ ID NO: 69864 - DNA, 21 bp, Artificial sequence
  SiRNA target sequence
gtggtggagaaaagcaaaaga

SEQ ID NO: 69865 - DNA, 21 bp, Artificial sequence
  SiRNA target sequence
tggtggagaaaagcaaaagat

SEQ ID NO: 69866 - DNA, 21 bp, Artificial sequence
  SiRNA target sequence
ggtggagaaaagcaaaagatt

SEQ ID NO: 69867 - DNA, 21 bp, Artificial sequence
  SiRNA target sequence
gtggagaaaagcaaaagattt

SEQ ID NO: 69868 - DNA, 21 bp, Artificial sequence
  SiRNA target sequence
tggagaaaagcaaaagatttt

SEQ ID NO: 69869 - DNA, 21 bp, Artificial sequence
  SiRNA target sequence
ggagaaaagcaaaagatttta

SEQ ID NO: 69870 - DNA, 21 bp, Artificial sequence
  SiRNA target sequence
gagaaaagcaaaagattttat

SEQ ID NO: 69871 - DNA, 21 bp, Artificial sequence
  SiRNA target sequence
agaaaagcaaaagattttatt

SEQ ID NO: 69872 - DNA, 21 bp, Artificial sequence
  SiRNA target sequence
gaaaagcaaaagattttatta

SEQ ID NO: 69873 - DNA, 21 bp, Artificial sequence
  SiRNA target sequence
aaaagcaaaagattttattaa

SEQ ID NO: 69874 - DNA, 21 bp, Artificial sequence
  SiRNA target sequence
aaagcaaaagattttattaat

SEQ ID NO: 69875 - DNA, 21 bp, Artificial sequence
  SiRNA target sequence
aagcaaaagattttattaatg

SEQ ID NO: 69876 - DNA, 21 bp, Artificial sequence
  SiRNA target sequence
agcaaaagattttattaatgc

SEQ ID NO: 69877 - DNA, 21 bp, Artificial sequence
  SiRNA target sequence
gcaaaagattttattaatgcg

SEQ ID NO: 69878 - DNA, 21 bp, Artificial sequence
  SiRNA target sequence
caaaagattttattaatgcgt

SEQ ID NO: 69879 - DNA, 21 bp, Artificial sequence
  SiRNA target sequence
aaaagattttattaatgcgta

SEQ ID NO: 69880 - DNA, 21 bp, Artificial sequence
  SiRNA target sequence
aaagattttattaatgcgtac

SEQ ID NO: 69881 - DNA, 21 bp, Artificial sequence
  SiRNA target sequence
aagattttattaatgcgtact

SEQ ID NO: 69882 - DNA, 21 bp, Artificial sequence
  SiRNA target sequence
agattttattaatgcgtacta

SEQ ID NO: 69883 - DNA, 21 bp, Artificial sequence
  SiRNA target sequence
gattttattaatgcgtactat

SEQ ID NO: 69884 - DNA, 21 bp, Artificial sequence
  SiRNA target sequence
attttattaatgcgtactatg

SEQ ID NO: 69885 - DNA, 21 bp, Artificial sequence
  SiRNA target sequence
ttttattaatgcgtactatgt

SEQ ID NO: 69886 - DNA, 21 bp, Artificial sequence
  SiRNA target sequence
tttattaatgcgtactatgtt

SEQ ID NO: 69887 - DNA, 21 bp, Artificial sequence
  SiRNA target sequence
ttattaatgcgtactatgtta

SEQ ID NO: 69888 - DNA, 21 bp, Artificial sequence
  SiRNA target sequence
tattaatgcgtactatgttaa

SEQ ID NO: 69889 - DNA, 21 bp, Artificial sequence
  SiRNA target sequence
attaatgcgtactatgttaag

SEQ ID NO: 69890 - DNA, 21 bp, Artificial sequence
  SiRNA target sequence
ttaatgcgtactatgttaaga

SEQ ID NO: 69891 - DNA, 21 bp, Artificial sequence
  SiRNA target sequence
taatgcgtactatgttaagaa

SEQ ID NO: 69892 - DNA, 21 bp, Artificial sequence
  SiRNA target sequence
aatgcgtactatgttaagaaa

SEQ ID NO: 69893 - DNA, 21 bp, Artificial sequence
  SiRNA target sequence
atgcgtactatgttaagaaac

SEQ ID NO: 69894 - DNA, 21 bp, Artificial sequence
  SiRNA target sequence
tgcgtactatgttaagaaaca

SEQ ID NO: 69895 - DNA, 21 bp, Artificial sequence
  SiRNA target sequence
gcgtactatgttaagaaacaa

SEQ ID NO: 69896 - DNA, 21 bp, Artificial sequence
  SiRNA target sequence
cgtactatgttaagaaacaag

SEQ ID NO: 69897 - DNA, 21 bp, Artificial sequence
  SiRNA target sequence
gtactatgttaagaaacaagg

SEQ ID NO: 69898 - DNA, 21 bp, Artificial sequence
  SiRNA target sequence
tactatgttaagaaacaagga

SEQ ID NO: 69899 - DNA, 21 bp, Artificial sequence
  SiRNA target sequence
actatgttaagaaacaaggag

SEQ ID NO: 69900 - DNA, 21 bp, Artificial sequence
  SiRNA target sequence
ctatgttaagaaacaaggaga

SEQ ID NO: 69901 - DNA, 21 bp, Artificial sequence
  SiRNA target sequence
tatgttaagaaacaaggagat

SEQ ID NO: 69902 - DNA, 21 bp, Artificial sequence
  SiRNA target sequence
atgttaagaaacaaggagata

SEQ ID NO: 69903 - DNA, 21 bp, Artificial sequence
  SiRNA target sequence
tgttaagaaacaaggagataa

SEQ ID NO: 69904 - DNA, 21 bp, Artificial sequence
  SiRNA target sequence
gttaagaaacaaggagataat

SEQ ID NO: 69905 - DNA, 21 bp, Artificial sequence
  SiRNA target sequence
ttaagaaacaaggagataatg

SEQ ID NO: 69906 - DNA, 21 bp, Artificial sequence
  SiRNA target sequence
taagaaacaaggagataatgg

SEQ ID NO: 69907 - DNA, 21 bp, Artificial sequence
  SiRNA target sequence
aagaaacaaggagataatggc

SEQ ID NO: 69908 - DNA, 21 bp, Artificial sequence
  SiRNA target sequence
agaaacaaggagataatggca

SEQ ID NO: 69909 - DNA, 21 bp, Artificial sequence
  SiRNA target sequence
gaaacaaggagataatggcat

SEQ ID NO: 69910 - DNA, 21 bp, Artificial sequence
  SiRNA target sequence
aaacaaggagataatggcatt

SEQ ID NO: 69911 - DNA, 21 bp, Artificial sequence
  SiRNA target sequence
aacaaggagataatggcatta

SEQ ID NO: 69912 - DNA, 21 bp, Artificial sequence
  SiRNA target sequence
acaaggagataatggcattag

SEQ ID NO: 69913 - DNA, 21 bp, Artificial sequence
  SiRNA target sequence
caaggagataatggcattaga

SEQ ID NO: 69914 - DNA, 21 bp, Artificial sequence
  SiRNA target sequence
aaggagataatggcattagat

SEQ ID NO: 69915 - DNA, 21 bp, Artificial sequence
  SiRNA target sequence
aggagataatggcattagatg

SEQ ID NO: 69916 - DNA, 21 bp, Artificial sequence
  SiRNA target sequence
ggagataatggcattagatga

SEQ ID NO: 69917 - DNA, 21 bp, Artificial sequence
  SiRNA target sequence
gagataatggcattagatgaa

SEQ ID NO: 69918 - DNA, 21 bp, Artificial sequence
  SiRNA target sequence
agataatggcattagatgaac

SEQ ID NO: 69919 - DNA, 21 bp, Artificial sequence
  SiRNA target sequence
gataatggcattagatgaacc

SEQ ID NO: 69920 - DNA, 21 bp, Artificial sequence
  SiRNA target sequence
ataatggcattagatgaaccc

SEQ ID NO: 69921 - DNA, 21 bp, Artificial sequence
  SiRNA target sequence
taatggcattagatgaaccca

SEQ ID NO: 69922 - DNA, 21 bp, Artificial sequence
  SiRNA target sequence
aatggcattagatgaacccac

SEQ ID NO: 69923 - DNA, 21 bp, Artificial sequence
  SiRNA target sequence
atggcattagatgaacccact

SEQ ID NO: 69924 - DNA, 21 bp, Artificial sequence
  SiRNA target sequence
tggcattagatgaacccactg

SEQ ID NO: 69925 - DNA, 21 bp, Artificial sequence
  SiRNA target sequence
ggcattagatgaacccactgc

SEQ ID NO: 69926 - DNA, 21 bp, Artificial sequence
  SiRNA target sequence
gcattagatgaacccactgca

SEQ ID NO: 69927 - DNA, 21 bp, Artificial sequence
  SiRNA target sequence
cattagatgaacccactgcag

SEQ ID NO: 69928 - DNA, 21 bp, Artificial sequence
  SiRNA target sequence
attagatgaacccactgcagc

SEQ ID NO: 69929 - DNA, 21 bp, Artificial sequence
  SiRNA target sequence
ttagatgaacccactgcagca

SEQ ID NO: 69930 - DNA, 21 bp, Artificial sequence
  SiRNA target sequence
tagatgaacccactgcagcac

SEQ ID NO: 69931 - DNA, 21 bp, Artificial sequence
  SiRNA target sequence
agatgaacccactgcagcact

SEQ ID NO: 69932 - DNA, 21 bp, Artificial sequence
  SiRNA target sequence
gatgaacccactgcagcactt

SEQ ID NO: 69933 - DNA, 21 bp, Artificial sequence
  SiRNA target sequence
atgaacccactgcagcacttg

SEQ ID NO: 69934 - DNA, 21 bp, Artificial sequence
  SiRNA target sequence
tgaacccactgcagcacttga

SEQ ID NO: 69935 - DNA, 21 bp, Artificial sequence
  SiRNA target sequence
gaacccactgcagcacttgat

SEQ ID NO: 69936 - DNA, 21 bp, Artificial sequence
  SiRNA target sequence
aacccactgcagcacttgata

SEQ ID NO: 69937 - DNA, 21 bp, Artificial sequence
  SiRNA target sequence
acccactgcagcacttgataa

SEQ ID NO: 69938 - DNA, 21 bp, Artificial sequence
  SiRNA target sequence
cccactgcagcacttgataag

SEQ ID NO: 69939 - DNA, 21 bp, Artificial sequence
  SiRNA target sequence
ccactgcagcacttgataagg

SEQ ID NO: 69940 - DNA, 21 bp, Artificial sequence
  SiRNA target sequence
cactgcagcacttgataagga

SEQ ID NO: 69941 - DNA, 21 bp, Artificial sequence
  SiRNA target sequence
actgcagcacttgataaggag

SEQ ID NO: 69942 - DNA, 21 bp, Artificial sequence
  SiRNA target sequence
ctgcagcacttgataaggagt

SEQ ID NO: 69943 - DNA, 21 bp, Artificial sequence
  SiRNA target sequence
tgcagcacttgataaggagtc

SEQ ID NO: 69944 - DNA, 21 bp, Artificial sequence
  SiRNA target sequence
gcagcacttgataaggagtct

SEQ ID NO: 69945 - DNA, 21 bp, Artificial sequence
  SiRNA target sequence
cagcacttgataaggagtctg

SEQ ID NO: 69946 - DNA, 21 bp, Artificial sequence
  SiRNA target sequence
agcacttgataaggagtctga

SEQ ID NO: 69947 - DNA, 21 bp, Artificial sequence
  SiRNA target sequence
gcacttgataaggagtctgaa

SEQ ID NO: 69948 - DNA, 21 bp, Artificial sequence
  SiRNA target sequence
cacttgataaggagtctgaaa

SEQ ID NO: 69949 - DNA, 21 bp, Artificial sequence
  SiRNA target sequence
acttgataaggagtctgaaaa

SEQ ID NO: 69950 - DNA, 21 bp, Artificial sequence
  SiRNA target sequence
cttgataaggagtctgaaaaa

SEQ ID NO: 69951 - DNA, 21 bp, Artificial sequence
  SiRNA target sequence
ttgataaggagtctgaaaaaa

SEQ ID NO: 69952 - DNA, 21 bp, Artificial sequence
  SiRNA target sequence
tgataaggagtctgaaaaaaa

SEQ ID NO: 69953 - DNA, 21 bp, Artificial sequence
  SiRNA target sequence
gataaggagtctgaaaaaaag

SEQ ID NO: 69954 - DNA, 21 bp, Artificial sequence
  SiRNA target sequence
ataaggagtctgaaaaaaaga

SEQ ID NO: 69955 - DNA, 21 bp, Artificial sequence
  SiRNA target sequence
taaggagtctgaaaaaaagat

SEQ ID NO: 69956 - DNA, 21 bp, Artificial sequence
  SiRNA target sequence
aaggagtctgaaaaaaagatt

SEQ ID NO: 69957 - DNA, 21 bp, Artificial sequence
  SiRNA target sequence
aggagtctgaaaaaaagattt

SEQ ID NO: 69958 - DNA, 21 bp, Artificial sequence
  SiRNA target sequence
ggagtctgaaaaaaagatttt

SEQ ID NO: 69959 - DNA, 21 bp, Artificial sequence
  SiRNA target sequence
gagtctgaaaaaaagatttta

SEQ ID NO: 69960 - DNA, 21 bp, Artificial sequence
  SiRNA target sequence
agtctgaaaaaaagattttag

SEQ ID NO: 69961 - DNA, 21 bp, Artificial sequence
  SiRNA target sequence
gtctgaaaaaaagattttaga

SEQ ID NO: 69962 - DNA, 21 bp, Artificial sequence
  SiRNA target sequence
tctgaaaaaaagattttagag

SEQ ID NO: 69963 - DNA, 21 bp, Artificial sequence
  SiRNA target sequence
ctgaaaaaaagattttagaga

SEQ ID NO: 69964 - DNA, 21 bp, Artificial sequence
  SiRNA target sequence
tgaaaaaaagattttagagat

SEQ ID NO: 69965 - DNA, 21 bp, Artificial sequence
  SiRNA target sequence
gaaaaaaagattttagagata

SEQ ID NO: 69966 - DNA, 21 bp, Artificial sequence
  SiRNA target sequence
aaaaaaagattttagagataa

SEQ ID NO: 69967 - DNA, 21 bp, Artificial sequence
  SiRNA target sequence
aaaaaagattttagagataat

SEQ ID NO: 69968 - DNA, 21 bp, Artificial sequence
  SiRNA target sequence
aaaaagattttagagataatt

SEQ ID NO: 69969 - DNA, 21 bp, Artificial sequence
  SiRNA target sequence
aaaagattttagagataattt

SEQ ID NO: 69970 - DNA, 21 bp, Artificial sequence
  SiRNA target sequence
aaagattttagagataatttt

SEQ ID NO: 69971 - DNA, 21 bp, Artificial sequence
  SiRNA target sequence
aagattttagagataatttta

SEQ ID NO: 69972 - DNA, 21 bp, Artificial sequence
  SiRNA target sequence
agattttagagataattttac

SEQ ID NO: 69973 - DNA, 21 bp, Artificial sequence
  SiRNA target sequence
gattttagagataattttaca

SEQ ID NO: 69974 - DNA, 21 bp, Artificial sequence
  SiRNA target sequence
attttagagataattttacaa

SEQ ID NO: 69975 - DNA, 21 bp, Artificial sequence
  SiRNA target sequence
ttttagagataattttacaac

SEQ ID NO: 69976 - DNA, 21 bp, Artificial sequence
  SiRNA target sequence
tttagagataattttacaaca

SEQ ID NO: 69977 - DNA, 21 bp, Artificial sequence
  SiRNA target sequence
ttagagataattttacaacag

SEQ ID NO: 69978 - DNA, 21 bp, Artificial sequence
  SiRNA target sequence
tagagataattttacaacagg

SEQ ID NO: 69979 - DNA, 21 bp, Artificial sequence
  SiRNA target sequence
agagataattttacaacagga

SEQ ID NO: 69980 - DNA, 21 bp, Artificial sequence
  SiRNA target sequence
gagataattttacaacaggaa

SEQ ID NO: 69981 - DNA, 21 bp, Artificial sequence
  SiRNA target sequence
agataattttacaacaggaag

SEQ ID NO: 69982 - DNA, 21 bp, Artificial sequence
  SiRNA target sequence
gataattttacaacaggaaga

SEQ ID NO: 69983 - DNA, 21 bp, Artificial sequence
  SiRNA target sequence
ataattttacaacaggaagat

SEQ ID NO: 69984 - DNA, 21 bp, Artificial sequence
  SiRNA target sequence
taattttacaacaggaagatc

SEQ ID NO: 69985 - DNA, 21 bp, Artificial sequence
  SiRNA target sequence
aattttacaacaggaagatcg

SEQ ID NO: 69986 - DNA, 21 bp, Artificial sequence
  SiRNA target sequence
attttacaacaggaagatcga

SEQ ID NO: 69987 - DNA, 21 bp, Artificial sequence
  SiRNA target sequence
ttttacaacaggaagatcgaa

SEQ ID NO: 69988 - DNA, 21 bp, Artificial sequence
  SiRNA target sequence
tttacaacaggaagatcgaac

SEQ ID NO: 69989 - DNA, 21 bp, Artificial sequence
  SiRNA target sequence
ttacaacaggaagatcgaaca

SEQ ID NO: 69990 - DNA, 21 bp, Artificial sequence
  SiRNA target sequence
tacaacaggaagatcgaacag

SEQ ID NO: 69991 - DNA, 21 bp, Artificial sequence
  SiRNA target sequence
acaacaggaagatcgaacagt

SEQ ID NO: 69992 - DNA, 21 bp, Artificial sequence
  SiRNA target sequence
caacaggaagatcgaacagtt

SEQ ID NO: 69993 - DNA, 21 bp, Artificial sequence
  SiRNA target sequence
aacaggaagatcgaacagttt

SEQ ID NO: 69994 - DNA, 21 bp, Artificial sequence
  SiRNA target sequence
acaggaagatcgaacagtttt

SEQ ID NO: 69995 - DNA, 21 bp, Artificial sequence
  SiRNA target sequence
caggaagatcgaacagttttg

SEQ ID NO: 69996 - DNA, 21 bp, Artificial sequence
  SiRNA target sequence
aggaagatcgaacagttttga

SEQ ID NO: 69997 - DNA, 21 bp, Artificial sequence
  SiRNA target sequence
ggaagatcgaacagttttgat

SEQ ID NO: 69998 - DNA, 21 bp, Artificial sequence
  SiRNA target sequence
gaagatcgaacagttttgatg

SEQ ID NO: 69999 - DNA, 21 bp, Artificial sequence
  SiRNA target sequence
aagatcgaacagttttgatga

SEQ ID NO: 70000 - DNA, 21 bp, Artificial sequence
  SiRNA target sequence
agatcgaacagttttgatgat

SEQ ID NO: 70001 - DNA, 21 bp, Artificial sequence
  SiRNA target sequence
gatcgaacagttttgatgata

SEQ ID NO: 70002 - DNA, 21 bp, Artificial sequence
  SiRNA target sequence
atcgaacagttttgatgataa

SEQ ID NO: 70003 - DNA, 21 bp, Artificial sequence
  SiRNA target sequence
tcgaacagttttgatgataat

SEQ ID NO: 70004 - DNA, 21 bp, Artificial sequence
  SiRNA target sequence
cgaacagttttgatgataatt

SEQ ID NO: 70005 - DNA, 21 bp, Artificial sequence
  SiRNA target sequence
gaacagttttgatgataattc

SEQ ID NO: 70006 - DNA, 21 bp, Artificial sequence
  SiRNA target sequence
aacagttttgatgataattca

SEQ ID NO: 70007 - DNA, 21 bp, Artificial sequence
  SiRNA target sequence
acagttttgatgataattcat

SEQ ID NO: 70008 - DNA, 21 bp, Artificial sequence
  SiRNA target sequence
cagttttgatgataattcata

SEQ ID NO: 70009 - DNA, 21 bp, Artificial sequence
  SiRNA target sequence
agttttgatgataattcataa

SEQ ID NO: 70010 - DNA, 21 bp, Artificial sequence
  SiRNA target sequence
gttttgatgataattcataat

SEQ ID NO: 70011 - DNA, 21 bp, Artificial sequence
  SiRNA target sequence
ttttgatgataattcataatc

SEQ ID NO: 70012 - DNA, 21 bp, Artificial sequence
  SiRNA target sequence
tttgatgataattcataatct

SEQ ID NO: 70013 - DNA, 21 bp, Artificial sequence
  SiRNA target sequence
ttgatgataattcataatcta

SEQ ID NO: 70014 - DNA, 21 bp, Artificial sequence
  SiRNA target sequence
tgatgataattcataatctag

SEQ ID NO: 70015 - DNA, 21 bp, Artificial sequence
  SiRNA target sequence
gatgataattcataatctaga

SEQ ID NO: 70016 - DNA, 21 bp, Artificial sequence
  SiRNA target sequence
atgataattcataatctagaa

SEQ ID NO: 70017 - DNA, 21 bp, Artificial sequence
  SiRNA target sequence
tgataattcataatctagaac

SEQ ID NO: 70018 - DNA, 21 bp, Artificial sequence
  SiRNA target sequence
gataattcataatctagaact

SEQ ID NO: 70019 - DNA, 21 bp, Artificial sequence
  SiRNA target sequence
ataattcataatctagaactt

SEQ ID NO: 70020 - DNA, 21 bp, Artificial sequence
  SiRNA target sequence
taattcataatctagaactta

SEQ ID NO: 70021 - DNA, 21 bp, Artificial sequence
  SiRNA target sequence
aattcataatctagaacttat

SEQ ID NO: 70022 - DNA, 21 bp, Artificial sequence
  SiRNA target sequence
attcataatctagaacttatt

SEQ ID NO: 70023 - DNA, 21 bp, Artificial sequence
  SiRNA target sequence
ttcataatctagaacttatta

SEQ ID NO: 70024 - DNA, 21 bp, Artificial sequence
  SiRNA target sequence
tcataatctagaacttattaa

SEQ ID NO: 70025 - DNA, 21 bp, Artificial sequence
  SiRNA target sequence
cataatctagaacttattaat

SEQ ID NO: 70026 - DNA, 21 bp, Artificial sequence
  SiRNA target sequence
ataatctagaacttattaata

SEQ ID NO: 70027 - DNA, 21 bp, Artificial sequence
  SiRNA target sequence
taatctagaacttattaataa

SEQ ID NO: 70028 - DNA, 21 bp, Artificial sequence
  SiRNA target sequence
aatctagaacttattaataaa

SEQ ID NO: 70029 - DNA, 21 bp, Artificial sequence
  SiRNA target sequence
atctagaacttattaataaat

SEQ ID NO: 70030 - DNA, 21 bp, Artificial sequence
  SiRNA target sequence
tctagaacttattaataaatt

SEQ ID NO: 70031 - DNA, 21 bp, Artificial sequence
  SiRNA target sequence
ctagaacttattaataaattt

SEQ ID NO: 70032 - DNA, 21 bp, Artificial sequence
  SiRNA target sequence
tagaacttattaataaatttg

SEQ ID NO: 70033 - DNA, 21 bp, Artificial sequence
  SiRNA target sequence
agaacttattaataaatttga

SEQ ID NO: 70034 - DNA, 21 bp, Artificial sequence
  SiRNA target sequence
gaacttattaataaatttgat

SEQ ID NO: 70035 - DNA, 21 bp, Artificial sequence
  SiRNA target sequence
aacttattaataaatttgata

SEQ ID NO: 70036 - DNA, 21 bp, Artificial sequence
  SiRNA target sequence
acttattaataaatttgataa

SEQ ID NO: 70037 - DNA, 21 bp, Artificial sequence
  SiRNA target sequence
cttattaataaatttgataaa

SEQ ID NO: 70038 - DNA, 21 bp, Artificial sequence
  SiRNA target sequence
ttattaataaatttgataaaa

SEQ ID NO: 70039 - DNA, 21 bp, Artificial sequence
  SiRNA target sequence
tattaataaatttgataaaat

SEQ ID NO: 70040 - DNA, 21 bp, Artificial sequence
  SiRNA target sequence
attaataaatttgataaaata

SEQ ID NO: 70041 - DNA, 21 bp, Artificial sequence
  SiRNA target sequence
ttaataaatttgataaaataa

SEQ ID NO: 70042 - DNA, 21 bp, Artificial sequence
  SiRNA target sequence
taataaatttgataaaataat

SEQ ID NO: 70043 - DNA, 21 bp, Artificial sequence
  SiRNA target sequence
aataaatttgataaaataatt

SEQ ID NO: 70044 - DNA, 21 bp, Artificial sequence
  SiRNA target sequence
ataaatttgataaaataattt

SEQ ID NO: 70045 - DNA, 21 bp, Artificial sequence
  SiRNA target sequence
taaatttgataaaataattta

SEQ ID NO: 70046 - DNA, 21 bp, Artificial sequence
  SiRNA target sequence
aaatttgataaaataatttac

SEQ ID NO: 70047 - DNA, 21 bp, Artificial sequence
  SiRNA target sequence
aatttgataaaataatttaca

SEQ ID NO: 70048 - DNA, 21 bp, Artificial sequence
  SiRNA target sequence
atttgataaaataatttacat

SEQ ID NO: 70049 - DNA, 21 bp, Artificial sequence
  SiRNA target sequence
tttgataaaataatttacatt

SEQ ID NO: 70050 - DNA, 21 bp, Artificial sequence
  SiRNA target sequence
ttgataaaataatttacattg

SEQ ID NO: 70051 - DNA, 21 bp, Artificial sequence
  SiRNA target sequence
tgataaaataatttacattga

SEQ ID NO: 70052 - DNA, 21 bp, Artificial sequence
  SiRNA target sequence
gataaaataatttacattgat

SEQ ID NO: 70053 - DNA, 21 bp, Artificial sequence
  SiRNA target sequence
ataaaataatttacattgatg

SEQ ID NO: 70054 - DNA, 21 bp, Artificial sequence
  SiRNA target sequence
taaaataatttacattgatga

SEQ ID NO: 70055 - DNA, 21 bp, Artificial sequence
  SiRNA target sequence
aaaataatttacattgatgaa

SEQ ID NO: 70056 - DNA, 21 bp, Artificial sequence
  SiRNA target sequence
aaataatttacattgatgaaa

SEQ ID NO: 70057 - DNA, 21 bp, Artificial sequence
  SiRNA target sequence
aataatttacattgatgaaaa

SEQ ID NO: 70058 - DNA, 21 bp, Artificial sequence
  SiRNA target sequence
ataatttacattgatgaaaat

SEQ ID NO: 70059 - DNA, 21 bp, Artificial sequence
  SiRNA target sequence
taatttacattgatgaaaata

SEQ ID NO: 70060 - DNA, 21 bp, Artificial sequence
  SiRNA target sequence
aatttacattgatgaaaataa

SEQ ID NO: 70061 - DNA, 21 bp, Artificial sequence
  SiRNA target sequence
atttacattgatgaaaataat

SEQ ID NO: 70062 - DNA, 21 bp, Artificial sequence
  SiRNA target sequence
tttacattgatgaaaataata

SEQ ID NO: 70063 - DNA, 21 bp, Artificial sequence
  SiRNA target sequence
ttacattgatgaaaataatat

SEQ ID NO: 70064 - DNA, 21 bp, Artificial sequence
  SiRNA target sequence
tacattgatgaaaataatata

SEQ ID NO: 70065 - DNA, 21 bp, Artificial sequence
  SiRNA target sequence
acattgatgaaaataatatag

SEQ ID NO: 70066 - DNA, 21 bp, Artificial sequence
  SiRNA target sequence
cattgatgaaaataatataga

SEQ ID NO: 70067 - DNA, 21 bp, Artificial sequence
  SiRNA target sequence
attgatgaaaataatatagaa

SEQ ID NO: 70068 - DNA, 21 bp, Artificial sequence
  SiRNA target sequence
ttgatgaaaataatatagaag

SEQ ID NO: 70069 - DNA, 21 bp, Artificial sequence
  SiRNA target sequence
tgatgaaaataatatagaagt

SEQ ID NO: 70070 - DNA, 21 bp, Artificial sequence
  SiRNA target sequence
gatgaaaataatatagaagtc

SEQ ID NO: 70071 - DNA, 21 bp, Artificial sequence
  SiRNA target sequence
atgaaaataatatagaagtct

SEQ ID NO: 70072 - DNA, 21 bp, Artificial sequence
  SiRNA target sequence
tgaaaataatatagaagtcta

SEQ ID NO: 70073 - DNA, 21 bp, Artificial sequence
  SiRNA target sequence
gaaaataatatagaagtctat

SEQ ID NO: 70074 - DNA, 21 bp, Artificial sequence
  SiRNA target sequence
aaaataatatagaagtctata

SEQ ID NO: 70075 - DNA, 21 bp, Artificial sequence
  SiRNA target sequence
aaataatatagaagtctataa

SEQ ID NO: 70076 - DNA, 21 bp, Artificial sequence
  SiRNA target sequence
aataatatagaagtctataaa

SEQ ID NO: 70077 - DNA, 21 bp, Artificial sequence
  SiRNA target sequence
ataatatagaagtctataaaa

SEQ ID NO: 70078 - DNA, 21 bp, Artificial sequence
  SiRNA target sequence
taatatagaagtctataaaaa

SEQ ID NO: 70079 - DNA, 21 bp, Artificial sequence
  SiRNA target sequence
aatatagaagtctataaaaat

SEQ ID NO: 70080 - DNA, 21 bp, Artificial sequence
  SiRNA target sequence
atatagaagtctataaaaatg

SEQ ID NO: 70081 - DNA, 21 bp, Artificial sequence
  SiRNA target sequence
tatagaagtctataaaaatga

SEQ ID NO: 70082 - DNA, 21 bp, Artificial sequence
  SiRNA target sequence
atagaagtctataaaaatgat

SEQ ID NO: 70083 - DNA, 21 bp, Artificial sequence
  SiRNA target sequence
tagaagtctataaaaatgata

SEQ ID NO: 70084 - DNA, 21 bp, Artificial sequence
  SiRNA target sequence
agaagtctataaaaatgatat

SEQ ID NO: 70085 - DNA, 21 bp, Artificial sequence
  SiRNA target sequence
gaagtctataaaaatgatatt

SEQ ID NO: 70086 - DNA, 21 bp, Artificial sequence
  SiRNA target sequence
aagtctataaaaatgatattg

SEQ ID NO: 70087 - DNA, 21 bp, Artificial sequence
  SiRNA target sequence
agtctataaaaatgatattga

SEQ ID NO: 70088 - DNA, 21 bp, Artificial sequence
  SiRNA target sequence
gtctataaaaatgatattgaa

SEQ ID NO: 70089 - DNA, 21 bp, Artificial sequence
  SiRNA target sequence
tctataaaaatgatattgaag

SEQ ID NO: 70090 - DNA, 21 bp, Artificial sequence
  SiRNA target sequence
ctataaaaatgatattgaagg

SEQ ID NO: 70091 - DNA, 21 bp, Artificial sequence
  SiRNA target sequence
tataaaaatgatattgaagga

SEQ ID NO: 70092 - DNA, 21 bp, Artificial sequence
  SiRNA target sequence
ataaaaatgatattgaaggac

SEQ ID NO: 70093 - DNA, 21 bp, Artificial sequence
  SiRNA target sequence
taaaaatgatattgaaggaca

SEQ ID NO: 70094 - DNA, 21 bp, Artificial sequence
  SiRNA target sequence
aaaaatgatattgaaggacaa

SEQ ID NO: 70095 - DNA, 21 bp, Artificial sequence
  SiRNA target sequence
aaaatgatattgaaggacaaa

SEQ ID NO: 70096 - DNA, 21 bp, Artificial sequence
  SiRNA target sequence
aaatgatattgaaggacaaaa

SEQ ID NO: 70097 - DNA, 21 bp, Artificial sequence
  SiRNA target sequence
aatgatattgaaggacaaaaa

SEQ ID NO: 70098 - DNA, 21 bp, Artificial sequence
  SiRNA target sequence
atgatattgaaggacaaaaaa

SEQ ID NO: 70099 - DNA, 21 bp, Artificial sequence
  SiRNA target sequence
tgatattgaaggacaaaaaaa

SEQ ID NO: 70100 - DNA, 21 bp, Artificial sequence
  SiRNA target sequence
gatattgaaggacaaaaaaag

SEQ ID NO: 70101 - DNA, 21 bp, Artificial sequence
  SiRNA target sequence
atattgaaggacaaaaaaagt

SEQ ID NO: 70102 - DNA, 21 bp, Artificial sequence
  SiRNA target sequence
tattgaaggacaaaaaaagtt

SEQ ID NO: 70103 - DNA, 21 bp, Artificial sequence
  SiRNA target sequence
attgaaggacaaaaaaagttt

SEQ ID NO: 70104 - DNA, 21 bp, Artificial sequence
  SiRNA target sequence
ttgaaggacaaaaaaagtttt

SEQ ID NO: 70105 - DNA, 21 bp, Artificial sequence
  SiRNA target sequence
tgaaggacaaaaaaagttttc

SEQ ID NO: 70106 - DNA, 21 bp, Artificial sequence
  SiRNA target sequence
gaaggacaaaaaaagttttct

SEQ ID NO: 70107 - DNA, 21 bp, Artificial sequence
  SiRNA target sequence
aaggacaaaaaaagttttcta

SEQ ID NO: 70108 - DNA, 21 bp, Artificial sequence
  SiRNA target sequence
aggacaaaaaaagttttctac

SEQ ID NO: 70109 - DNA, 21 bp, Artificial sequence
  SiRNA target sequence
ggacaaaaaaagttttctaca

SEQ ID NO: 70110 - DNA, 21 bp, Artificial sequence
  SiRNA target sequence
gacaaaaaaagttttctacaa

SEQ ID NO: 70111 - DNA, 21 bp, Artificial sequence
  SiRNA target sequence
acaaaaaaagttttctacaaa

SEQ ID NO: 70112 - DNA, 21 bp, Artificial sequence
  SiRNA target sequence
caaaaaaagttttctacaaat

SEQ ID NO: 70113 - DNA, 21 bp, Artificial sequence
  SiRNA target sequence
aaaaaaagttttctacaaatt

SEQ ID NO: 70114 - DNA, 21 bp, Artificial sequence
  SiRNA target sequence
aaaaaagttttctacaaattt

SEQ ID NO: 70115 - DNA, 21 bp, Artificial sequence
  SiRNA target sequence
aaaaagttttctacaaattta

SEQ ID NO: 70116 - DNA, 21 bp, Artificial sequence
  SiRNA target sequence
aaaagttttctacaaatttac

SEQ ID NO: 70117 - DNA, 21 bp, Artificial sequence
  SiRNA target sequence
aaagttttctacaaatttaca

SEQ ID NO: 70118 - DNA, 21 bp, Artificial sequence
  SiRNA target sequence
aagttttctacaaatttacaa

SEQ ID NO: 70119 - DNA, 21 bp, Artificial sequence
  SiRNA target sequence
agttttctacaaatttacaat

SEQ ID NO: 70120 - DNA, 21 bp, Artificial sequence
  SiRNA target sequence
gttttctacaaatttacaata

SEQ ID NO: 70121 - DNA, 21 bp, Artificial sequence
  SiRNA target sequence
ttttctacaaatttacaatat

SEQ ID NO: 70122 - DNA, 21 bp, Artificial sequence
  SiRNA target sequence
tttctacaaatttacaatatt

SEQ ID NO: 70123 - DNA, 21 bp, Artificial sequence
  SiRNA target sequence
ttctacaaatttacaatattt

SEQ ID NO: 70124 - DNA, 21 bp, Artificial sequence
  SiRNA target sequence
tctacaaatttacaatatttt

SEQ ID NO: 70125 - DNA, 21 bp, Artificial sequence
  SiRNA target sequence
ctacaaatttacaatattttt

SEQ ID NO: 70126 - DNA, 21 bp, Artificial sequence
  SiRNA target sequence
tacaaatttacaatatttttt

SEQ ID NO: 70127 - DNA, 21 bp, Artificial sequence
  SiRNA target sequence
acaaatttacaatatttttta

SEQ ID NO: 70128 - DNA, 21 bp, Artificial sequence
  SiRNA target sequence
caaatttacaatattttttat

SEQ ID NO: 70129 - DNA, 21 bp, Artificial sequence
  SiRNA target sequence
aaatttacaatattttttatc

SEQ ID NO: 70130 - DNA, 21 bp, Artificial sequence
  SiRNA target sequence
aatttacaatattttttatca

SEQ ID NO: 70131 - DNA, 21 bp, Artificial sequence
  SiRNA target sequence
atttacaatattttttatcat

SEQ ID NO: 70132 - DNA, 21 bp, Artificial sequence
  SiRNA target sequence
tttacaatattttttatcata

SEQ ID NO: 70133 - DNA, 21 bp, Artificial sequence
  SiRNA target sequence
ttacaatattttttatcatac

SEQ ID NO: 70134 - DNA, 21 bp, Artificial sequence
  SiRNA target sequence
tacaatattttttatcataca

SEQ ID NO: 70135 - DNA, 21 bp, Artificial sequence
  SiRNA target sequence
acaatattttttatcatacaa

SEQ ID NO: 70136 - DNA, 21 bp, Artificial sequence
  SiRNA target sequence
caatattttttatcatacaaa

SEQ ID NO: 70137 - DNA, 21 bp, Artificial sequence
  SiRNA target sequence
aatattttttatcatacaaat

SEQ ID NO: 70138 - DNA, 21 bp, Artificial sequence
  SiRNA target sequence
atattttttatcatacaaatt

SEQ ID NO: 70139 - DNA, 21 bp, Artificial sequence
  SiRNA target sequence
tattttttatcatacaaatta

SEQ ID NO: 70140 - DNA, 21 bp, Artificial sequence
  SiRNA target sequence
attttttatcatacaaattag

SEQ ID NO: 70141 - DNA, 21 bp, Artificial sequence
  SiRNA target sequence
ttttttatcatacaaattagg

SEQ ID NO: 70142 - DNA, 21 bp, Artificial sequence
  SiRNA target sequence
tttttatcatacaaattaggt

SEQ ID NO: 70143 - DNA, 21 bp, Artificial sequence
  SiRNA target sequence
ttttatcatacaaattaggta

SEQ ID NO: 70144 - DNA, 21 bp, Artificial sequence
  SiRNA target sequence
tttatcatacaaattaggtaa

SEQ ID NO: 70145 - DNA, 21 bp, Artificial sequence
  SiRNA target sequence
ttatcatacaaattaggtaaa

SEQ ID NO: 70146 - DNA, 21 bp, Artificial sequence
  SiRNA target sequence
tatcatacaaattaggtaaat

SEQ ID NO: 70147 - DNA, 21 bp, Artificial sequence
  SiRNA target sequence
atcatacaaattaggtaaata

SEQ ID NO: 70148 - DNA, 21 bp, Artificial sequence
  SiRNA target sequence
tcatacaaattaggtaaataa

SEQ ID NO: 70149 - DNA, 22 bp, Artificial sequence
  SiRNA target sequence
atgaaaaaaatttcgaatagaa

SEQ ID NO: 70150 - DNA, 22 bp, Artificial sequence
  SiRNA target sequence
tgaaaaaaatttcgaatagaaa

SEQ ID NO: 70151 - DNA, 22 bp, Artificial sequence
  SiRNA target sequence
gaaaaaaatttcgaatagaaaa

SEQ ID NO: 70152 - DNA, 22 bp, Artificial sequence
  SiRNA target sequence
aaaaaaatttcgaatagaaaaa

SEQ ID NO: 70153 - DNA, 22 bp, Artificial sequence
  SiRNA target sequence
aaaaaatttcgaatagaaaaat

SEQ ID NO: 70154 - DNA, 22 bp, Artificial sequence
  SiRNA target sequence
aaaaatttcgaatagaaaaatt

SEQ ID NO: 70155 - DNA, 22 bp, Artificial sequence
  SiRNA target sequence
aaaatttcgaatagaaaaatta

SEQ ID NO: 70156 - DNA, 22 bp, Artificial sequence
  SiRNA target sequence
aaatttcgaatagaaaaattat

SEQ ID NO: 70157 - DNA, 22 bp, Artificial sequence
  SiRNA target sequence
aatttcgaatagaaaaattatc

SEQ ID NO: 70158 - DNA, 22 bp, Artificial sequence
  SiRNA target sequence
atttcgaatagaaaaattatca

SEQ ID NO: 70159 - DNA, 22 bp, Artificial sequence
  SiRNA target sequence
tttcgaatagaaaaattatcaa

SEQ ID NO: 70160 - DNA, 22 bp, Artificial sequence
  SiRNA target sequence
ttcgaatagaaaaattatcaaa

SEQ ID NO: 70161 - DNA, 22 bp, Artificial sequence
  SiRNA target sequence
tcgaatagaaaaattatcaaag

SEQ ID NO: 70162 - DNA, 22 bp, Artificial sequence
  SiRNA target sequence
cgaatagaaaaattatcaaaga

SEQ ID NO: 70163 - DNA, 22 bp, Artificial sequence
  SiRNA target sequence
gaatagaaaaattatcaaagaa

SEQ ID NO: 70164 - DNA, 22 bp, Artificial sequence
  SiRNA target sequence
aatagaaaaattatcaaagaaa

SEQ ID NO: 70165 - DNA, 22 bp, Artificial sequence
  SiRNA target sequence
atagaaaaattatcaaagaaat

SEQ ID NO: 70166 - DNA, 22 bp, Artificial sequence
  SiRNA target sequence
tagaaaaattatcaaagaaatt

SEQ ID NO: 70167 - DNA, 22 bp, Artificial sequence
  SiRNA target sequence
agaaaaattatcaaagaaatta

SEQ ID NO: 70168 - DNA, 22 bp, Artificial sequence
  SiRNA target sequence
gaaaaattatcaaagaaattat

SEQ ID NO: 70169 - DNA, 22 bp, Artificial sequence
  SiRNA target sequence
aaaaattatcaaagaaattatt

SEQ ID NO: 70170 - DNA, 22 bp, Artificial sequence
  SiRNA target sequence
aaaattatcaaagaaattattt

SEQ ID NO: 70171 - DNA, 22 bp, Artificial sequence
  SiRNA target sequence
aaattatcaaagaaattattta

SEQ ID NO: 70172 - DNA, 22 bp, Artificial sequence
  SiRNA target sequence
aattatcaaagaaattatttac

SEQ ID NO: 70173 - DNA, 22 bp, Artificial sequence
  SiRNA target sequence
attatcaaagaaattatttaca

SEQ ID NO: 70174 - DNA, 22 bp, Artificial sequence
  SiRNA target sequence
ttatcaaagaaattatttacaa

SEQ ID NO: 70175 - DNA, 22 bp, Artificial sequence
  SiRNA target sequence
tatcaaagaaattatttacaat

SEQ ID NO: 70176 - DNA, 22 bp, Artificial sequence
  SiRNA target sequence
atcaaagaaattatttacaatg

SEQ ID NO: 70177 - DNA, 22 bp, Artificial sequence
  SiRNA target sequence
tcaaagaaattatttacaatga

SEQ ID NO: 70178 - DNA, 22 bp, Artificial sequence
  SiRNA target sequence
caaagaaattatttacaatgat

SEQ ID NO: 70179 - DNA, 22 bp, Artificial sequence
  SiRNA target sequence
aaagaaattatttacaatgatt

SEQ ID NO: 70180 - DNA, 22 bp, Artificial sequence
  SiRNA target sequence
aagaaattatttacaatgattt

SEQ ID NO: 70181 - DNA, 22 bp, Artificial sequence
  SiRNA target sequence
agaaattatttacaatgattta

SEQ ID NO: 70182 - DNA, 22 bp, Artificial sequence
  SiRNA target sequence
gaaattatttacaatgatttat

SEQ ID NO: 70183 - DNA, 22 bp, Artificial sequence
  SiRNA target sequence
aaattatttacaatgatttatt

SEQ ID NO: 70184 - DNA, 22 bp, Artificial sequence
  SiRNA target sequence
aattatttacaatgatttatta

SEQ ID NO: 70185 - DNA, 22 bp, Artificial sequence
  SiRNA target sequence
attatttacaatgatttattaa

SEQ ID NO: 70186 - DNA, 22 bp, Artificial sequence
  SiRNA target sequence
ttatttacaatgatttattaaa

SEQ ID NO: 70187 - DNA, 22 bp, Artificial sequence
  SiRNA target sequence
tatttacaatgatttattaaaa

SEQ ID NO: 70188 - DNA, 22 bp, Artificial sequence
  SiRNA target sequence
atttacaatgatttattaaaaa

SEQ ID NO: 70189 - DNA, 22 bp, Artificial sequence
  SiRNA target sequence
tttacaatgatttattaaaaat

SEQ ID NO: 70190 - DNA, 22 bp, Artificial sequence
  SiRNA target sequence
ttacaatgatttattaaaaata

SEQ ID NO: 70191 - DNA, 22 bp, Artificial sequence
  SiRNA target sequence
tacaatgatttattaaaaataa

SEQ ID NO: 70192 - DNA, 22 bp, Artificial sequence
  SiRNA target sequence
acaatgatttattaaaaataag

SEQ ID NO: 70193 - DNA, 22 bp, Artificial sequence
  SiRNA target sequence
caatgatttattaaaaataaga

SEQ ID NO: 70194 - DNA, 22 bp, Artificial sequence
  SiRNA target sequence
aatgatttattaaaaataagaa

SEQ ID NO: 70195 - DNA, 22 bp, Artificial sequence
  SiRNA target sequence
atgatttattaaaaataagaat

SEQ ID NO: 70196 - DNA, 22 bp, Artificial sequence
  SiRNA target sequence
tgatttattaaaaataagaatg

SEQ ID NO: 70197 - DNA, 22 bp, Artificial sequence
  SiRNA target sequence
gatttattaaaaataagaatgt

SEQ ID NO: 70198 - DNA, 22 bp, Artificial sequence
  SiRNA target sequence
atttattaaaaataagaatgtt

SEQ ID NO: 70199 - DNA, 22 bp, Artificial sequence
  SiRNA target sequence
tttattaaaaataagaatgttg

SEQ ID NO: 70200 - DNA, 22 bp, Artificial sequence
  SiRNA target sequence
ttattaaaaataagaatgttgc

SEQ ID NO: 70201 - DNA, 22 bp, Artificial sequence
  SiRNA target sequence
tattaaaaataagaatgttgcg

SEQ ID NO: 70202 - DNA, 22 bp, Artificial sequence
  SiRNA target sequence
attaaaaataagaatgttgcga

SEQ ID NO: 70203 - DNA, 22 bp, Artificial sequence
  SiRNA target sequence
ttaaaaataagaatgttgcgat

SEQ ID NO: 70204 - DNA, 22 bp, Artificial sequence
  SiRNA target sequence
taaaaataagaatgttgcgata

SEQ ID NO: 70205 - DNA, 22 bp, Artificial sequence
  SiRNA target sequence
aaaaataagaatgttgcgatat

SEQ ID NO: 70206 - DNA, 22 bp, Artificial sequence
  SiRNA target sequence
aaaataagaatgttgcgatatg

SEQ ID NO: 70207 - DNA, 22 bp, Artificial sequence
  SiRNA target sequence
aaataagaatgttgcgatatgt

SEQ ID NO: 70208 - DNA, 22 bp, Artificial sequence
  SiRNA target sequence
aataagaatgttgcgatatgtt

SEQ ID NO: 70209 - DNA, 22 bp, Artificial sequence
  SiRNA target sequence
ataagaatgttgcgatatgtta

SEQ ID NO: 70210 - DNA, 22 bp, Artificial sequence
  SiRNA target sequence
taagaatgttgcgatatgttat

SEQ ID NO: 70211 - DNA, 22 bp, Artificial sequence
  SiRNA target sequence
aagaatgttgcgatatgttatt

SEQ ID NO: 70212 - DNA, 22 bp, Artificial sequence
  SiRNA target sequence
agaatgttgcgatatgttattg

SEQ ID NO: 70213 - DNA, 22 bp, Artificial sequence
  SiRNA target sequence
gaatgttgcgatatgttattgt

SEQ ID NO: 70214 - DNA, 22 bp, Artificial sequence
  SiRNA target sequence
aatgttgcgatatgttattgta

SEQ ID NO: 70215 - DNA, 22 bp, Artificial sequence
  SiRNA target sequence
atgttgcgatatgttattgtac

SEQ ID NO: 70216 - DNA, 22 bp, Artificial sequence
  SiRNA target sequence
tgttgcgatatgttattgtacc

SEQ ID NO: 70217 - DNA, 22 bp, Artificial sequence
  SiRNA target sequence
gttgcgatatgttattgtacca

SEQ ID NO: 70218 - DNA, 22 bp, Artificial sequence
  SiRNA target sequence
ttgcgatatgttattgtaccaa

SEQ ID NO: 70219 - DNA, 22 bp, Artificial sequence
  SiRNA target sequence
tgcgatatgttattgtaccaat

SEQ ID NO: 70220 - DNA, 22 bp, Artificial sequence
  SiRNA target sequence
gcgatatgttattgtaccaata

SEQ ID NO: 70221 - DNA, 22 bp, Artificial sequence
  SiRNA target sequence
cgatatgttattgtaccaataa

SEQ ID NO: 70222 - DNA, 22 bp, Artificial sequence
  SiRNA target sequence
gatatgttattgtaccaataat

SEQ ID NO: 70223 - DNA, 22 bp, Artificial sequence
  SiRNA target sequence
atatgttattgtaccaataata

SEQ ID NO: 70224 - DNA, 22 bp, Artificial sequence
  SiRNA target sequence
tatgttattgtaccaataatat

SEQ ID NO: 70225 - DNA, 22 bp, Artificial sequence
  SiRNA target sequence
atgttattgtaccaataatatt

SEQ ID NO: 70226 - DNA, 22 bp, Artificial sequence
  SiRNA target sequence
tgttattgtaccaataatattt

SEQ ID NO: 70227 - DNA, 22 bp, Artificial sequence
  SiRNA target sequence
gttattgtaccaataatatttt

SEQ ID NO: 70228 - DNA, 22 bp, Artificial sequence
  SiRNA target sequence
ttattgtaccaataatattttt

SEQ ID NO: 70229 - DNA, 22 bp, Artificial sequence
  SiRNA target sequence
tattgtaccaataatattttta

SEQ ID NO: 70230 - DNA, 22 bp, Artificial sequence
  SiRNA target sequence
attgtaccaataatatttttaa

SEQ ID NO: 70231 - DNA, 22 bp, Artificial sequence
  SiRNA target sequence
ttgtaccaataatatttttaac

SEQ ID NO: 70232 - DNA, 22 bp, Artificial sequence
  SiRNA target sequence
tgtaccaataatatttttaact

SEQ ID NO: 70233 - DNA, 22 bp, Artificial sequence
  SiRNA target sequence
gtaccaataatatttttaacta

SEQ ID NO: 70234 - DNA, 22 bp, Artificial sequence
  SiRNA target sequence
taccaataatatttttaactat

SEQ ID NO: 70235 - DNA, 22 bp, Artificial sequence
  SiRNA target sequence
accaataatatttttaactata

SEQ ID NO: 70236 - DNA, 22 bp, Artificial sequence
  SiRNA target sequence
ccaataatatttttaactatat

SEQ ID NO: 70237 - DNA, 22 bp, Artificial sequence
  SiRNA target sequence
caataatatttttaactatatt

SEQ ID NO: 70238 - DNA, 22 bp, Artificial sequence
  SiRNA target sequence
aataatatttttaactatattt

SEQ ID NO: 70239 - DNA, 22 bp, Artificial sequence
  SiRNA target sequence
ataatatttttaactatatttt

SEQ ID NO: 70240 - DNA, 22 bp, Artificial sequence
  SiRNA target sequence
taatatttttaactatatttta

SEQ ID NO: 70241 - DNA, 22 bp, Artificial sequence
  SiRNA target sequence
aatatttttaactatattttac

SEQ ID NO: 70242 - DNA, 22 bp, Artificial sequence
  SiRNA target sequence
atatttttaactatattttaca

SEQ ID NO: 70243 - DNA, 22 bp, Artificial sequence
  SiRNA target sequence
tatttttaactatattttacac

SEQ ID NO: 70244 - DNA, 22 bp, Artificial sequence
  SiRNA target sequence
atttttaactatattttacact

SEQ ID NO: 70245 - DNA, 22 bp, Artificial sequence
  SiRNA target sequence
tttttaactatattttacactg

SEQ ID NO: 70246 - DNA, 22 bp, Artificial sequence
  SiRNA target sequence
ttttaactatattttacactgt

SEQ ID NO: 70247 - DNA, 22 bp, Artificial sequence
  SiRNA target sequence
tttaactatattttacactgtt

SEQ ID NO: 70248 - DNA, 22 bp, Artificial sequence
  SiRNA target sequence
ttaactatattttacactgttt

SEQ ID NO: 70249 - DNA, 22 bp, Artificial sequence
  SiRNA target sequence
taactatattttacactgtttt

SEQ ID NO: 70250 - DNA, 22 bp, Artificial sequence
  SiRNA target sequence
aactatattttacactgtttta

SEQ ID NO: 70251 - DNA, 22 bp, Artificial sequence
  SiRNA target sequence
actatattttacactgttttag

SEQ ID NO: 70252 - DNA, 22 bp, Artificial sequence
  SiRNA target sequence
ctatattttacactgttttaga

SEQ ID NO: 70253 - DNA, 22 bp, Artificial sequence
  SiRNA target sequence
tatattttacactgttttagag

SEQ ID NO: 70254 - DNA, 22 bp, Artificial sequence
  SiRNA target sequence
atattttacactgttttagaga

SEQ ID NO: 70255 - DNA, 22 bp, Artificial sequence
  SiRNA target sequence
tattttacactgttttagagat

SEQ ID NO: 70256 - DNA, 22 bp, Artificial sequence
  SiRNA target sequence
attttacactgttttagagata

SEQ ID NO: 70257 - DNA, 22 bp, Artificial sequence
  SiRNA target sequence
ttttacactgttttagagataa

SEQ ID NO: 70258 - DNA, 22 bp, Artificial sequence
  SiRNA target sequence
tttacactgttttagagataaa

SEQ ID NO: 70259 - DNA, 22 bp, Artificial sequence
  SiRNA target sequence
ttacactgttttagagataaaa

SEQ ID NO: 70260 - DNA, 22 bp, Artificial sequence
  SiRNA target sequence
tacactgttttagagataaaaa

SEQ ID NO: 70261 - DNA, 22 bp, Artificial sequence
  SiRNA target sequence
acactgttttagagataaaaat

SEQ ID NO: 70262 - DNA, 22 bp, Artificial sequence
  SiRNA target sequence
cactgttttagagataaaaata

SEQ ID NO: 70263 - DNA, 22 bp, Artificial sequence
  SiRNA target sequence
actgttttagagataaaaataa

SEQ ID NO: 70264 - DNA, 22 bp, Artificial sequence
  SiRNA target sequence
ctgttttagagataaaaataag

SEQ ID NO: 70265 - DNA, 22 bp, Artificial sequence
  SiRNA target sequence
tgttttagagataaaaataagt

SEQ ID NO: 70266 - DNA, 22 bp, Artificial sequence
  SiRNA target sequence
gttttagagataaaaataagta

SEQ ID NO: 70267 - DNA, 22 bp, Artificial sequence
  SiRNA target sequence
ttttagagataaaaataagtac

SEQ ID NO: 70268 - DNA, 22 bp, Artificial sequence
  SiRNA target sequence
tttagagataaaaataagtaca

SEQ ID NO: 70269 - DNA, 22 bp, Artificial sequence
  SiRNA target sequence
ttagagataaaaataagtacat

SEQ ID NO: 70270 - DNA, 22 bp, Artificial sequence
  SiRNA target sequence
tagagataaaaataagtacatt

SEQ ID NO: 70271 - DNA, 22 bp, Artificial sequence
  SiRNA target sequence
agagataaaaataagtacatta

SEQ ID NO: 70272 - DNA, 22 bp, Artificial sequence
  SiRNA target sequence
gagataaaaataagtacattag

SEQ ID NO: 70273 - DNA, 22 bp, Artificial sequence
  SiRNA target sequence
agataaaaataagtacattagt

SEQ ID NO: 70274 - DNA, 22 bp, Artificial sequence
  SiRNA target sequence
gataaaaataagtacattagta

SEQ ID NO: 70275 - DNA, 22 bp, Artificial sequence
  SiRNA target sequence
ataaaaataagtacattagtaa

SEQ ID NO: 70276 - DNA, 22 bp, Artificial sequence
  SiRNA target sequence
taaaaataagtacattagtaaa

SEQ ID NO: 70277 - DNA, 22 bp, Artificial sequence
  SiRNA target sequence
aaaaataagtacattagtaaag

SEQ ID NO: 70278 - DNA, 22 bp, Artificial sequence
  SiRNA target sequence
aaaataagtacattagtaaaga

SEQ ID NO: 70279 - DNA, 22 bp, Artificial sequence
  SiRNA target sequence
aaataagtacattagtaaagaa

SEQ ID NO: 70280 - DNA, 22 bp, Artificial sequence
  SiRNA target sequence
aataagtacattagtaaagaat

SEQ ID NO: 70281 - DNA, 22 bp, Artificial sequence
  SiRNA target sequence
ataagtacattagtaaagaatc

SEQ ID NO: 70282 - DNA, 22 bp, Artificial sequence
  SiRNA target sequence
taagtacattagtaaagaatct

SEQ ID NO: 70283 - DNA, 22 bp, Artificial sequence
  SiRNA target sequence
aagtacattagtaaagaatctt

SEQ ID NO: 70284 - DNA, 22 bp, Artificial sequence
  SiRNA target sequence
agtacattagtaaagaatctta

SEQ ID NO: 70285 - DNA, 22 bp, Artificial sequence
  SiRNA target sequence
gtacattagtaaagaatcttaa

SEQ ID NO: 70286 - DNA, 22 bp, Artificial sequence
  SiRNA target sequence
tacattagtaaagaatcttaat

SEQ ID NO: 70287 - DNA, 22 bp, Artificial sequence
  SiRNA target sequence
acattagtaaagaatcttaatc

SEQ ID NO: 70288 - DNA, 22 bp, Artificial sequence
  SiRNA target sequence
cattagtaaagaatcttaatca

SEQ ID NO: 70289 - DNA, 22 bp, Artificial sequence
  SiRNA target sequence
attagtaaagaatcttaatcaa

SEQ ID NO: 70290 - DNA, 22 bp, Artificial sequence
  SiRNA target sequence
ttagtaaagaatcttaatcaat

SEQ ID NO: 70291 - DNA, 22 bp, Artificial sequence
  SiRNA target sequence
tagtaaagaatcttaatcaatc

SEQ ID NO: 70292 - DNA, 22 bp, Artificial sequence
  SiRNA target sequence
agtaaagaatcttaatcaatct

SEQ ID NO: 70293 - DNA, 22 bp, Artificial sequence
  SiRNA target sequence
gtaaagaatcttaatcaatcta

SEQ ID NO: 70294 - DNA, 22 bp, Artificial sequence
  SiRNA target sequence
taaagaatcttaatcaatctat

SEQ ID NO: 70295 - DNA, 22 bp, Artificial sequence
  SiRNA target sequence
aaagaatcttaatcaatctatc

SEQ ID NO: 70296 - DNA, 22 bp, Artificial sequence
  SiRNA target sequence
aagaatcttaatcaatctatcg

SEQ ID NO: 70297 - DNA, 22 bp, Artificial sequence
  SiRNA target sequence
agaatcttaatcaatctatcgc

SEQ ID NO: 70298 - DNA, 22 bp, Artificial sequence
  SiRNA target sequence
gaatcttaatcaatctatcgca

SEQ ID NO: 70299 - DNA, 22 bp, Artificial sequence
  SiRNA target sequence
aatcttaatcaatctatcgcaa

SEQ ID NO: 70300 - DNA, 22 bp, Artificial sequence
  SiRNA target sequence
atcttaatcaatctatcgcaaa

SEQ ID NO: 70301 - DNA, 22 bp, Artificial sequence
  SiRNA target sequence
tcttaatcaatctatcgcaaat

SEQ ID NO: 70302 - DNA, 22 bp, Artificial sequence
  SiRNA target sequence
cttaatcaatctatcgcaaatc

SEQ ID NO: 70303 - DNA, 22 bp, Artificial sequence
  SiRNA target sequence
ttaatcaatctatcgcaaatcg

SEQ ID NO: 70304 - DNA, 22 bp, Artificial sequence
  SiRNA target sequence
taatcaatctatcgcaaatcga

SEQ ID NO: 70305 - DNA, 22 bp, Artificial sequence
  SiRNA target sequence
aatcaatctatcgcaaatcgaa

SEQ ID NO: 70306 - DNA, 22 bp, Artificial sequence
  SiRNA target sequence
atcaatctatcgcaaatcgaaa

SEQ ID NO: 70307 - DNA, 22 bp, Artificial sequence
  SiRNA target sequence
tcaatctatcgcaaatcgaaaa

SEQ ID NO: 70308 - DNA, 22 bp, Artificial sequence
  SiRNA target sequence
caatctatcgcaaatcgaaaag

SEQ ID NO: 70309 - DNA, 22 bp, Artificial sequence
  SiRNA target sequence
aatctatcgcaaatcgaaaagg

SEQ ID NO: 70310 - DNA, 22 bp, Artificial sequence
  SiRNA target sequence
atctatcgcaaatcgaaaaggt

SEQ ID NO: 70311 - DNA, 22 bp, Artificial sequence
  SiRNA target sequence
tctatcgcaaatcgaaaaggtg

SEQ ID NO: 70312 - DNA, 22 bp, Artificial sequence
  SiRNA target sequence
ctatcgcaaatcgaaaaggtga

SEQ ID NO: 70313 - DNA, 22 bp, Artificial sequence
  SiRNA target sequence
tatcgcaaatcgaaaaggtgaa

SEQ ID NO: 70314 - DNA, 22 bp, Artificial sequence
  SiRNA target sequence
atcgcaaatcgaaaaggtgaac

SEQ ID NO: 70315 - DNA, 22 bp, Artificial sequence
  SiRNA target sequence
tcgcaaatcgaaaaggtgaaca

SEQ ID NO: 70316 - DNA, 22 bp, Artificial sequence
  SiRNA target sequence
cgcaaatcgaaaaggtgaacac

SEQ ID NO: 70317 - DNA, 22 bp, Artificial sequence
  SiRNA target sequence
gcaaatcgaaaaggtgaacaca

SEQ ID NO: 70318 - DNA, 22 bp, Artificial sequence
  SiRNA target sequence
caaatcgaaaaggtgaacacac

SEQ ID NO: 70319 - DNA, 22 bp, Artificial sequence
  SiRNA target sequence
aaatcgaaaaggtgaacacaca

SEQ ID NO: 70320 - DNA, 22 bp, Artificial sequence
  SiRNA target sequence
aatcgaaaaggtgaacacacag

SEQ ID NO: 70321 - DNA, 22 bp, Artificial sequence
  SiRNA target sequence
atcgaaaaggtgaacacacagc

SEQ ID NO: 70322 - DNA, 22 bp, Artificial sequence
  SiRNA target sequence
tcgaaaaggtgaacacacagca

SEQ ID NO: 70323 - DNA, 22 bp, Artificial sequence
  SiRNA target sequence
cgaaaaggtgaacacacagcac

SEQ ID NO: 70324 - DNA, 22 bp, Artificial sequence
  SiRNA target sequence
gaaaaggtgaacacacagcact

SEQ ID NO: 70325 - DNA, 22 bp, Artificial sequence
  SiRNA target sequence
aaaaggtgaacacacagcactt

SEQ ID NO: 70326 - DNA, 22 bp, Artificial sequence
  SiRNA target sequence
aaaggtgaacacacagcacttg

SEQ ID NO: 70327 - DNA, 22 bp, Artificial sequence
  SiRNA target sequence
aaggtgaacacacagcacttga

SEQ ID NO: 70328 - DNA, 22 bp, Artificial sequence
  SiRNA target sequence
aggtgaacacacagcacttgaa

SEQ ID NO: 70329 - DNA, 22 bp, Artificial sequence
  SiRNA target sequence
ggtgaacacacagcacttgaaa

SEQ ID NO: 70330 - DNA, 22 bp, Artificial sequence
  SiRNA target sequence
gtgaacacacagcacttgaaag

SEQ ID NO: 70331 - DNA, 22 bp, Artificial sequence
  SiRNA target sequence
tgaacacacagcacttgaaaga

SEQ ID NO: 70332 - DNA, 22 bp, Artificial sequence
  SiRNA target sequence
gaacacacagcacttgaaagat

SEQ ID NO: 70333 - DNA, 22 bp, Artificial sequence
  SiRNA target sequence
aacacacagcacttgaaagatt

SEQ ID NO: 70334 - DNA, 22 bp, Artificial sequence
  SiRNA target sequence
acacacagcacttgaaagattt

SEQ ID NO: 70335 - DNA, 22 bp, Artificial sequence
  SiRNA target sequence
cacacagcacttgaaagatttg

SEQ ID NO: 70336 - DNA, 22 bp, Artificial sequence
  SiRNA target sequence
acacagcacttgaaagatttgt

SEQ ID NO: 70337 - DNA, 22 bp, Artificial sequence
  SiRNA target sequence
cacagcacttgaaagatttgtg

SEQ ID NO: 70338 - DNA, 22 bp, Artificial sequence
  SiRNA target sequence
acagcacttgaaagatttgtgt

SEQ ID NO: 70339 - DNA, 22 bp, Artificial sequence
  SiRNA target sequence
cagcacttgaaagatttgtgtt

SEQ ID NO: 70340 - DNA, 22 bp, Artificial sequence
  SiRNA target sequence
agcacttgaaagatttgtgtta

SEQ ID NO: 70341 - DNA, 22 bp, Artificial sequence
  SiRNA target sequence
gcacttgaaagatttgtgttac

SEQ ID NO: 70342 - DNA, 22 bp, Artificial sequence
  SiRNA target sequence
cacttgaaagatttgtgttaca

SEQ ID NO: 70343 - DNA, 22 bp, Artificial sequence
  SiRNA target sequence
acttgaaagatttgtgttacag

SEQ ID NO: 70344 - DNA, 22 bp, Artificial sequence
  SiRNA target sequence
cttgaaagatttgtgttacagt

SEQ ID NO: 70345 - DNA, 22 bp, Artificial sequence
  SiRNA target sequence
ttgaaagatttgtgttacagtc

SEQ ID NO: 70346 - DNA, 22 bp, Artificial sequence
  SiRNA target sequence
tgaaagatttgtgttacagtca

SEQ ID NO: 70347 - DNA, 22 bp, Artificial sequence
  SiRNA target sequence
gaaagatttgtgttacagtcac

SEQ ID NO: 70348 - DNA, 22 bp, Artificial sequence
  SiRNA target sequence
aaagatttgtgttacagtcact

SEQ ID NO: 70349 - DNA, 22 bp, Artificial sequence
  SiRNA target sequence
aagatttgtgttacagtcactc

SEQ ID NO: 70350 - DNA, 22 bp, Artificial sequence
  SiRNA target sequence
agatttgtgttacagtcactct

SEQ ID NO: 70351 - DNA, 22 bp, Artificial sequence
  SiRNA target sequence
gatttgtgttacagtcactctt

SEQ ID NO: 70352 - DNA, 22 bp, Artificial sequence
  SiRNA target sequence
atttgtgttacagtcactctta

SEQ ID NO: 70353 - DNA, 22 bp, Artificial sequence
  SiRNA target sequence
tttgtgttacagtcactcttag

SEQ ID NO: 70354 - DNA, 22 bp, Artificial sequence
  SiRNA target sequence
ttgtgttacagtcactcttagt

SEQ ID NO: 70355 - DNA, 22 bp, Artificial sequence
  SiRNA target sequence
tgtgttacagtcactcttagtg

SEQ ID NO: 70356 - DNA, 22 bp, Artificial sequence
  SiRNA target sequence
gtgttacagtcactcttagtgg

SEQ ID NO: 70357 - DNA, 22 bp, Artificial sequence
  SiRNA target sequence
tgttacagtcactcttagtggc

SEQ ID NO: 70358 - DNA, 22 bp, Artificial sequence
  SiRNA target sequence
gttacagtcactcttagtggct

SEQ ID NO: 70359 - DNA, 22 bp, Artificial sequence
  SiRNA target sequence
ttacagtcactcttagtggctg

SEQ ID NO: 70360 - DNA, 22 bp, Artificial sequence
  SiRNA target sequence
tacagtcactcttagtggctgt

SEQ ID NO: 70361 - DNA, 22 bp, Artificial sequence
  SiRNA target sequence
acagtcactcttagtggctgta

SEQ ID NO: 70362 - DNA, 22 bp, Artificial sequence
  SiRNA target sequence
cagtcactcttagtggctgtat

SEQ ID NO: 70363 - DNA, 22 bp, Artificial sequence
  SiRNA target sequence
agtcactcttagtggctgtatt

SEQ ID NO: 70364 - DNA, 22 bp, Artificial sequence
  SiRNA target sequence
gtcactcttagtggctgtattg

SEQ ID NO: 70365 - DNA, 22 bp, Artificial sequence
  SiRNA target sequence
tcactcttagtggctgtattga

SEQ ID NO: 70366 - DNA, 22 bp, Artificial sequence
  SiRNA target sequence
cactcttagtggctgtattgac

SEQ ID NO: 70367 - DNA, 22 bp, Artificial sequence
  SiRNA target sequence
actcttagtggctgtattgacc

SEQ ID NO: 70368 - DNA, 22 bp, Artificial sequence
  SiRNA target sequence
ctcttagtggctgtattgaccg

SEQ ID NO: 70369 - DNA, 22 bp, Artificial sequence
  SiRNA target sequence
tcttagtggctgtattgaccga

SEQ ID NO: 70370 - DNA, 22 bp, Artificial sequence
  SiRNA target sequence
cttagtggctgtattgaccgaa

SEQ ID NO: 70371 - DNA, 22 bp, Artificial sequence
  SiRNA target sequence
ttagtggctgtattgaccgaac

SEQ ID NO: 70372 - DNA, 22 bp, Artificial sequence
  SiRNA target sequence
tagtggctgtattgaccgaact

SEQ ID NO: 70373 - DNA, 22 bp, Artificial sequence
  SiRNA target sequence
agtggctgtattgaccgaactt

SEQ ID NO: 70374 - DNA, 22 bp, Artificial sequence
  SiRNA target sequence
gtggctgtattgaccgaactta

SEQ ID NO: 70375 - DNA, 22 bp, Artificial sequence
  SiRNA target sequence
tggctgtattgaccgaacttaa

SEQ ID NO: 70376 - DNA, 22 bp, Artificial sequence
  SiRNA target sequence
ggctgtattgaccgaacttaat

SEQ ID NO: 70377 - DNA, 22 bp, Artificial sequence
  SiRNA target sequence
gctgtattgaccgaacttaatg

SEQ ID NO: 70378 - DNA, 22 bp, Artificial sequence
  SiRNA target sequence
ctgtattgaccgaacttaatgg

SEQ ID NO: 70379 - DNA, 22 bp, Artificial sequence
  SiRNA target sequence
tgtattgaccgaacttaatgga

SEQ ID NO: 70380 - DNA, 22 bp, Artificial sequence
  SiRNA target sequence
gtattgaccgaacttaatggat

SEQ ID NO: 70381 - DNA, 22 bp, Artificial sequence
  SiRNA target sequence
tattgaccgaacttaatggatt

SEQ ID NO: 70382 - DNA, 22 bp, Artificial sequence
  SiRNA target sequence
attgaccgaacttaatggattt

SEQ ID NO: 70383 - DNA, 22 bp, Artificial sequence
  SiRNA target sequence
ttgaccgaacttaatggattta

SEQ ID NO: 70384 - DNA, 22 bp, Artificial sequence
  SiRNA target sequence
tgaccgaacttaatggatttat

SEQ ID NO: 70385 - DNA, 22 bp, Artificial sequence
  SiRNA target sequence
gaccgaacttaatggatttatt

SEQ ID NO: 70386 - DNA, 22 bp, Artificial sequence
  SiRNA target sequence
accgaacttaatggatttattt

SEQ ID NO: 70387 - DNA, 22 bp, Artificial sequence
  SiRNA target sequence
ccgaacttaatggatttatttt

SEQ ID NO: 70388 - DNA, 22 bp, Artificial sequence
  SiRNA target sequence
cgaacttaatggatttattttt

SEQ ID NO: 70389 - DNA, 22 bp, Artificial sequence
  SiRNA target sequence
gaacttaatggatttattttta

SEQ ID NO: 70390 - DNA, 22 bp, Artificial sequence
  SiRNA target sequence
aacttaatggatttatttttac

SEQ ID NO: 70391 - DNA, 22 bp, Artificial sequence
  SiRNA target sequence
acttaatggatttatttttaca

SEQ ID NO: 70392 - DNA, 22 bp, Artificial sequence
  SiRNA target sequence
cttaatggatttatttttacag

SEQ ID NO: 70393 - DNA, 22 bp, Artificial sequence
  SiRNA target sequence
ttaatggatttatttttacagg

SEQ ID NO: 70394 - DNA, 22 bp, Artificial sequence
  SiRNA target sequence
taatggatttatttttacaggt

SEQ ID NO: 70395 - DNA, 22 bp, Artificial sequence
  SiRNA target sequence
aatggatttatttttacaggtg

SEQ ID NO: 70396 - DNA, 22 bp, Artificial sequence
  SiRNA target sequence
atggatttatttttacaggtgt

SEQ ID NO: 70397 - DNA, 22 bp, Artificial sequence
  SiRNA target sequence
tggatttatttttacaggtgta

SEQ ID NO: 70398 - DNA, 22 bp, Artificial sequence
  SiRNA target sequence
ggatttatttttacaggtgtag

SEQ ID NO: 70399 - DNA, 22 bp, Artificial sequence
  SiRNA target sequence
gatttatttttacaggtgtagt

SEQ ID NO: 70400 - DNA, 22 bp, Artificial sequence
  SiRNA target sequence
atttatttttacaggtgtagtg

SEQ ID NO: 70401 - DNA, 22 bp, Artificial sequence
  SiRNA target sequence
tttatttttacaggtgtagtgc

SEQ ID NO: 70402 - DNA, 22 bp, Artificial sequence
  SiRNA target sequence
ttatttttacaggtgtagtgca

SEQ ID NO: 70403 - DNA, 22 bp, Artificial sequence
  SiRNA target sequence
tatttttacaggtgtagtgcaa

SEQ ID NO: 70404 - DNA, 22 bp, Artificial sequence
  SiRNA target sequence
atttttacaggtgtagtgcaat

SEQ ID NO: 70405 - DNA, 22 bp, Artificial sequence
  SiRNA target sequence
tttttacaggtgtagtgcaata

SEQ ID NO: 70406 - DNA, 22 bp, Artificial sequence
  SiRNA target sequence
ttttacaggtgtagtgcaatat

SEQ ID NO: 70407 - DNA, 22 bp, Artificial sequence
  SiRNA target sequence
tttacaggtgtagtgcaatata

SEQ ID NO: 70408 - DNA, 22 bp, Artificial sequence
  SiRNA target sequence
ttacaggtgtagtgcaatatat

SEQ ID NO: 70409 - DNA, 22 bp, Artificial sequence
  SiRNA target sequence
tacaggtgtagtgcaatatatt

SEQ ID NO: 70410 - DNA, 22 bp, Artificial sequence
  SiRNA target sequence
acaggtgtagtgcaatatattt

SEQ ID NO: 70411 - DNA, 22 bp, Artificial sequence
  SiRNA target sequence
caggtgtagtgcaatatattta

SEQ ID NO: 70412 - DNA, 22 bp, Artificial sequence
  SiRNA target sequence
aggtgtagtgcaatatatttat

SEQ ID NO: 70413 - DNA, 22 bp, Artificial sequence
  SiRNA target sequence
ggtgtagtgcaatatatttata

SEQ ID NO: 70414 - DNA, 22 bp, Artificial sequence
  SiRNA target sequence
gtgtagtgcaatatatttatag

SEQ ID NO: 70415 - DNA, 22 bp, Artificial sequence
  SiRNA target sequence
tgtagtgcaatatatttataga

SEQ ID NO: 70416 - DNA, 22 bp, Artificial sequence
  SiRNA target sequence
gtagtgcaatatatttatagaa

SEQ ID NO: 70417 - DNA, 22 bp, Artificial sequence
  SiRNA target sequence
tagtgcaatatatttatagaaa

SEQ ID NO: 70418 - DNA, 22 bp, Artificial sequence
  SiRNA target sequence
agtgcaatatatttatagaaat

SEQ ID NO: 70419 - DNA, 22 bp, Artificial sequence
  SiRNA target sequence
gtgcaatatatttatagaaata

SEQ ID NO: 70420 - DNA, 22 bp, Artificial sequence
  SiRNA target sequence
tgcaatatatttatagaaatac

SEQ ID NO: 70421 - DNA, 22 bp, Artificial sequence
  SiRNA target sequence
gcaatatatttatagaaatacg

SEQ ID NO: 70422 - DNA, 22 bp, Artificial sequence
  SiRNA target sequence
caatatatttatagaaatacgg

SEQ ID NO: 70423 - DNA, 22 bp, Artificial sequence
  SiRNA target sequence
aatatatttatagaaatacggc

SEQ ID NO: 70424 - DNA, 22 bp, Artificial sequence
  SiRNA target sequence
atatatttatagaaatacggca

SEQ ID NO: 70425 - DNA, 22 bp, Artificial sequence
  SiRNA target sequence
tatatttatagaaatacggcaa

SEQ ID NO: 70426 - DNA, 22 bp, Artificial sequence
  SiRNA target sequence
atatttatagaaatacggcaaa

SEQ ID NO: 70427 - DNA, 22 bp, Artificial sequence
  SiRNA target sequence
tatttatagaaatacggcaaaa

SEQ ID NO: 70428 - DNA, 22 bp, Artificial sequence
  SiRNA target sequence
atttatagaaatacggcaaaat

SEQ ID NO: 70429 - DNA, 22 bp, Artificial sequence
  SiRNA target sequence
tttatagaaatacggcaaaatc

SEQ ID NO: 70430 - DNA, 22 bp, Artificial sequence
  SiRNA target sequence
ttatagaaatacggcaaaatct

SEQ ID NO: 70431 - DNA, 22 bp, Artificial sequence
  SiRNA target sequence
tatagaaatacggcaaaatcta

SEQ ID NO: 70432 - DNA, 22 bp, Artificial sequence
  SiRNA target sequence
atagaaatacggcaaaatctac

SEQ ID NO: 70433 - DNA, 22 bp, Artificial sequence
  SiRNA target sequence
tagaaatacggcaaaatctaca

SEQ ID NO: 70434 - DNA, 22 bp, Artificial sequence
  SiRNA target sequence
agaaatacggcaaaatctacat

SEQ ID NO: 70435 - DNA, 22 bp, Artificial sequence
  SiRNA target sequence
gaaatacggcaaaatctacatt

SEQ ID NO: 70436 - DNA, 22 bp, Artificial sequence
  SiRNA target sequence
aaatacggcaaaatctacattc

SEQ ID NO: 70437 - DNA, 22 bp, Artificial sequence
  SiRNA target sequence
aatacggcaaaatctacattca

SEQ ID NO: 70438 - DNA, 22 bp, Artificial sequence
  SiRNA target sequence
atacggcaaaatctacattcaa

SEQ ID NO: 70439 - DNA, 22 bp, Artificial sequence
  SiRNA target sequence
tacggcaaaatctacattcaaa

SEQ ID NO: 70440 - DNA, 22 bp, Artificial sequence
  SiRNA target sequence
acggcaaaatctacattcaaag

SEQ ID NO: 70441 - DNA, 22 bp, Artificial sequence
  SiRNA target sequence
cggcaaaatctacattcaaagg

SEQ ID NO: 70442 - DNA, 22 bp, Artificial sequence
  SiRNA target sequence
ggcaaaatctacattcaaaggc

SEQ ID NO: 70443 - DNA, 22 bp, Artificial sequence
  SiRNA target sequence
gcaaaatctacattcaaaggct

SEQ ID NO: 70444 - DNA, 22 bp, Artificial sequence
  SiRNA target sequence
caaaatctacattcaaaggctt

SEQ ID NO: 70445 - DNA, 22 bp, Artificial sequence
  SiRNA target sequence
aaaatctacattcaaaggcttc

SEQ ID NO: 70446 - DNA, 22 bp, Artificial sequence
  SiRNA target sequence
aaatctacattcaaaggcttca

SEQ ID NO: 70447 - DNA, 22 bp, Artificial sequence
  SiRNA target sequence
aatctacattcaaaggcttcat

SEQ ID NO: 70448 - DNA, 22 bp, Artificial sequence
  SiRNA target sequence
atctacattcaaaggcttcatt

SEQ ID NO: 70449 - DNA, 22 bp, Artificial sequence
  SiRNA target sequence
tctacattcaaaggcttcattt

SEQ ID NO: 70450 - DNA, 22 bp, Artificial sequence
  SiRNA target sequence
ctacattcaaaggcttcatttc

SEQ ID NO: 70451 - DNA, 22 bp, Artificial sequence
  SiRNA target sequence
tacattcaaaggcttcatttct

SEQ ID NO: 70452 - DNA, 22 bp, Artificial sequence
  SiRNA target sequence
acattcaaaggcttcatttctc

SEQ ID NO: 70453 - DNA, 22 bp, Artificial sequence
  SiRNA target sequence
cattcaaaggcttcatttctct

SEQ ID NO: 70454 - DNA, 22 bp, Artificial sequence
  SiRNA target sequence
attcaaaggcttcatttctctt

SEQ ID NO: 70455 - DNA, 22 bp, Artificial sequence
  SiRNA target sequence
ttcaaaggcttcatttctcttt

SEQ ID NO: 70456 - DNA, 22 bp, Artificial sequence
  SiRNA target sequence
tcaaaggcttcatttctctttc

SEQ ID NO: 70457 - DNA, 22 bp, Artificial sequence
  SiRNA target sequence
caaaggcttcatttctctttca

SEQ ID NO: 70458 - DNA, 22 bp, Artificial sequence
  SiRNA target sequence
aaaggcttcatttctctttcac

SEQ ID NO: 70459 - DNA, 22 bp, Artificial sequence
  SiRNA target sequence
aaggcttcatttctctttcacc

SEQ ID NO: 70460 - DNA, 22 bp, Artificial sequence
  SiRNA target sequence
aggcttcatttctctttcacct

SEQ ID NO: 70461 - DNA, 22 bp, Artificial sequence
  SiRNA target sequence
ggcttcatttctctttcaccta

SEQ ID NO: 70462 - DNA, 22 bp, Artificial sequence
  SiRNA target sequence
gcttcatttctctttcacctaa

SEQ ID NO: 70463 - DNA, 22 bp, Artificial sequence
  SiRNA target sequence
cttcatttctctttcacctaaa

SEQ ID NO: 70464 - DNA, 22 bp, Artificial sequence
  SiRNA target sequence
ttcatttctctttcacctaaaa

SEQ ID NO: 70465 - DNA, 22 bp, Artificial sequence
  SiRNA target sequence
tcatttctctttcacctaaaaa

SEQ ID NO: 70466 - DNA, 22 bp, Artificial sequence
  SiRNA target sequence
catttctctttcacctaaaaat

SEQ ID NO: 70467 - DNA, 22 bp, Artificial sequence
  SiRNA target sequence
atttctctttcacctaaaaatt

SEQ ID NO: 70468 - DNA, 22 bp, Artificial sequence
  SiRNA target sequence
tttctctttcacctaaaaattt

SEQ ID NO: 70469 - DNA, 22 bp, Artificial sequence
  SiRNA target sequence
ttctctttcacctaaaaatttt

SEQ ID NO: 70470 - DNA, 22 bp, Artificial sequence
  SiRNA target sequence
tctctttcacctaaaaatttta

SEQ ID NO: 70471 - DNA, 22 bp, Artificial sequence
  SiRNA target sequence
ctctttcacctaaaaattttag

SEQ ID NO: 70472 - DNA, 22 bp, Artificial sequence
  SiRNA target sequence
tctttcacctaaaaattttagt

SEQ ID NO: 70473 - DNA, 22 bp, Artificial sequence
  SiRNA target sequence
ctttcacctaaaaattttagta

SEQ ID NO: 70474 - DNA, 22 bp, Artificial sequence
  SiRNA target sequence
tttcacctaaaaattttagtac

SEQ ID NO: 70475 - DNA, 22 bp, Artificial sequence
  SiRNA target sequence
ttcacctaaaaattttagtacc

SEQ ID NO: 70476 - DNA, 22 bp, Artificial sequence
  SiRNA target sequence
tcacctaaaaattttagtacca

SEQ ID NO: 70477 - DNA, 22 bp, Artificial sequence
  SiRNA target sequence
cacctaaaaattttagtaccat

SEQ ID NO: 70478 - DNA, 22 bp, Artificial sequence
  SiRNA target sequence
acctaaaaattttagtaccata

SEQ ID NO: 70479 - DNA, 22 bp, Artificial sequence
  SiRNA target sequence
cctaaaaattttagtaccatag

SEQ ID NO: 70480 - DNA, 22 bp, Artificial sequence
  SiRNA target sequence
ctaaaaattttagtaccatagg

SEQ ID NO: 70481 - DNA, 22 bp, Artificial sequence
  SiRNA target sequence
taaaaattttagtaccataggt

SEQ ID NO: 70482 - DNA, 22 bp, Artificial sequence
  SiRNA target sequence
aaaaattttagtaccataggtg

SEQ ID NO: 70483 - DNA, 22 bp, Artificial sequence
  SiRNA target sequence
aaaattttagtaccataggtgg

SEQ ID NO: 70484 - DNA, 22 bp, Artificial sequence
  SiRNA target sequence
aaattttagtaccataggtggc

SEQ ID NO: 70485 - DNA, 22 bp, Artificial sequence
  SiRNA target sequence
aattttagtaccataggtggcg

SEQ ID NO: 70486 - DNA, 22 bp, Artificial sequence
  SiRNA target sequence
attttagtaccataggtggcgg

SEQ ID NO: 70487 - DNA, 22 bp, Artificial sequence
  SiRNA target sequence
ttttagtaccataggtggcgga

SEQ ID NO: 70488 - DNA, 22 bp, Artificial sequence
  SiRNA target sequence
tttagtaccataggtggcggag

SEQ ID NO: 70489 - DNA, 22 bp, Artificial sequence
  SiRNA target sequence
ttagtaccataggtggcggaga

SEQ ID NO: 70490 - DNA, 22 bp, Artificial sequence
  SiRNA target sequence
tagtaccataggtggcggagaa

SEQ ID NO: 70491 - DNA, 22 bp, Artificial sequence
  SiRNA target sequence
agtaccataggtggcggagaaa

SEQ ID NO: 70492 - DNA, 22 bp, Artificial sequence
  SiRNA target sequence
gtaccataggtggcggagaaat

SEQ ID NO: 70493 - DNA, 22 bp, Artificial sequence
  SiRNA target sequence
taccataggtggcggagaaatt

SEQ ID NO: 70494 - DNA, 22 bp, Artificial sequence
  SiRNA target sequence
accataggtggcggagaaattc

SEQ ID NO: 70495 - DNA, 22 bp, Artificial sequence
  SiRNA target sequence
ccataggtggcggagaaattca

SEQ ID NO: 70496 - DNA, 22 bp, Artificial sequence
  SiRNA target sequence
cataggtggcggagaaattcaa

SEQ ID NO: 70497 - DNA, 22 bp, Artificial sequence
  SiRNA target sequence
ataggtggcggagaaattcaaa

SEQ ID NO: 70498 - DNA, 22 bp, Artificial sequence
  SiRNA target sequence
taggtggcggagaaattcaaac

SEQ ID NO: 70499 - DNA, 22 bp, Artificial sequence
  SiRNA target sequence
aggtggcggagaaattcaaaca

SEQ ID NO: 70500 - DNA, 22 bp, Artificial sequence
  SiRNA target sequence
ggtggcggagaaattcaaacaa

SEQ ID NO: 70501 - DNA, 22 bp, Artificial sequence
  SiRNA target sequence
gtggcggagaaattcaaacaat

SEQ ID NO: 70502 - DNA, 22 bp, Artificial sequence
  SiRNA target sequence
tggcggagaaattcaaacaata

SEQ ID NO: 70503 - DNA, 22 bp, Artificial sequence
  SiRNA target sequence
ggcggagaaattcaaacaataa

SEQ ID NO: 70504 - DNA, 22 bp, Artificial sequence
  SiRNA target sequence
gcggagaaattcaaacaataat

SEQ ID NO: 70505 - DNA, 22 bp, Artificial sequence
  SiRNA target sequence
cggagaaattcaaacaataata

SEQ ID NO: 70506 - DNA, 22 bp, Artificial sequence
  SiRNA target sequence
ggagaaattcaaacaataatag

SEQ ID NO: 70507 - DNA, 22 bp, Artificial sequence
  SiRNA target sequence
gagaaattcaaacaataataga

SEQ ID NO: 70508 - DNA, 22 bp, Artificial sequence
  SiRNA target sequence
agaaattcaaacaataatagat

SEQ ID NO: 70509 - DNA, 22 bp, Artificial sequence
  SiRNA target sequence
gaaattcaaacaataatagata

SEQ ID NO: 70510 - DNA, 22 bp, Artificial sequence
  SiRNA target sequence
aaattcaaacaataatagatag

SEQ ID NO: 70511 - DNA, 22 bp, Artificial sequence
  SiRNA target sequence
aattcaaacaataatagataga

SEQ ID NO: 70512 - DNA, 22 bp, Artificial sequence
  SiRNA target sequence
attcaaacaataatagatagaa

SEQ ID NO: 70513 - DNA, 22 bp, Artificial sequence
  SiRNA target sequence
ttcaaacaataatagatagaaa

SEQ ID NO: 70514 - DNA, 22 bp, Artificial sequence
  SiRNA target sequence
tcaaacaataatagatagaaaa

SEQ ID NO: 70515 - DNA, 22 bp, Artificial sequence
  SiRNA target sequence
caaacaataatagatagaaaat

SEQ ID NO: 70516 - DNA, 22 bp, Artificial sequence
  SiRNA target sequence
aaacaataatagatagaaaatc

SEQ ID NO: 70517 - DNA, 22 bp, Artificial sequence
  SiRNA target sequence
aacaataatagatagaaaatca

SEQ ID NO: 70518 - DNA, 22 bp, Artificial sequence
  SiRNA target sequence
acaataatagatagaaaatcaa

SEQ ID NO: 70519 - DNA, 22 bp, Artificial sequence
  SiRNA target sequence
caataatagatagaaaatcaaa

SEQ ID NO: 70520 - DNA, 22 bp, Artificial sequence
  SiRNA target sequence
aataatagatagaaaatcaaaa

SEQ ID NO: 70521 - DNA, 22 bp, Artificial sequence
  SiRNA target sequence
ataatagatagaaaatcaaaat

SEQ ID NO: 70522 - DNA, 22 bp, Artificial sequence
  SiRNA target sequence
taatagatagaaaatcaaaatc

SEQ ID NO: 70523 - DNA, 22 bp, Artificial sequence
  SiRNA target sequence
aatagatagaaaatcaaaatct

SEQ ID NO: 70524 - DNA, 22 bp, Artificial sequence
  SiRNA target sequence
atagatagaaaatcaaaatctg

SEQ ID NO: 70525 - DNA, 22 bp, Artificial sequence
  SiRNA target sequence
tagatagaaaatcaaaatctgc

SEQ ID NO: 70526 - DNA, 22 bp, Artificial sequence
  SiRNA target sequence
agatagaaaatcaaaatctgca

SEQ ID NO: 70527 - DNA, 22 bp, Artificial sequence
  SiRNA target sequence
gatagaaaatcaaaatctgcaa

SEQ ID NO: 70528 - DNA, 22 bp, Artificial sequence
  SiRNA target sequence
atagaaaatcaaaatctgcaag

SEQ ID NO: 70529 - DNA, 22 bp, Artificial sequence
  SiRNA target sequence
tagaaaatcaaaatctgcaagt

SEQ ID NO: 70530 - DNA, 22 bp, Artificial sequence
  SiRNA target sequence
agaaaatcaaaatctgcaagtg

SEQ ID NO: 70531 - DNA, 22 bp, Artificial sequence
  SiRNA target sequence
gaaaatcaaaatctgcaagtga

SEQ ID NO: 70532 - DNA, 22 bp, Artificial sequence
  SiRNA target sequence
aaaatcaaaatctgcaagtgaa

SEQ ID NO: 70533 - DNA, 22 bp, Artificial sequence
  SiRNA target sequence
aaatcaaaatctgcaagtgaac

SEQ ID NO: 70534 - DNA, 22 bp, Artificial sequence
  SiRNA target sequence
aatcaaaatctgcaagtgaact

SEQ ID NO: 70535 - DNA, 22 bp, Artificial sequence
  SiRNA target sequence
atcaaaatctgcaagtgaactt

SEQ ID NO: 70536 - DNA, 22 bp, Artificial sequence
  SiRNA target sequence
tcaaaatctgcaagtgaactta

SEQ ID NO: 70537 - DNA, 22 bp, Artificial sequence
  SiRNA target sequence
caaaatctgcaagtgaacttat

SEQ ID NO: 70538 - DNA, 22 bp, Artificial sequence
  SiRNA target sequence
aaaatctgcaagtgaacttatt

SEQ ID NO: 70539 - DNA, 22 bp, Artificial sequence
  SiRNA target sequence
aaatctgcaagtgaacttattg

SEQ ID NO: 70540 - DNA, 22 bp, Artificial sequence
  SiRNA target sequence
aatctgcaagtgaacttattga

SEQ ID NO: 70541 - DNA, 22 bp, Artificial sequence
  SiRNA target sequence
atctgcaagtgaacttattgaa

SEQ ID NO: 70542 - DNA, 22 bp, Artificial sequence
  SiRNA target sequence
tctgcaagtgaacttattgaag

SEQ ID NO: 70543 - DNA, 22 bp, Artificial sequence
  SiRNA target sequence
ctgcaagtgaacttattgaagt

SEQ ID NO: 70544 - DNA, 22 bp, Artificial sequence
  SiRNA target sequence
tgcaagtgaacttattgaagtg

SEQ ID NO: 70545 - DNA, 22 bp, Artificial sequence
  SiRNA target sequence
gcaagtgaacttattgaagtgt

SEQ ID NO: 70546 - DNA, 22 bp, Artificial sequence
  SiRNA target sequence
caagtgaacttattgaagtgtt

SEQ ID NO: 70547 - DNA, 22 bp, Artificial sequence
  SiRNA target sequence
aagtgaacttattgaagtgttt

SEQ ID NO: 70548 - DNA, 22 bp, Artificial sequence
  SiRNA target sequence
agtgaacttattgaagtgtttc

SEQ ID NO: 70549 - DNA, 22 bp, Artificial sequence
  SiRNA target sequence
gtgaacttattgaagtgtttct

SEQ ID NO: 70550 - DNA, 22 bp, Artificial sequence
  SiRNA target sequence
tgaacttattgaagtgtttctt

SEQ ID NO: 70551 - DNA, 22 bp, Artificial sequence
  SiRNA target sequence
gaacttattgaagtgtttctta

SEQ ID NO: 70552 - DNA, 22 bp, Artificial sequence
  SiRNA target sequence
aacttattgaagtgtttcttac

SEQ ID NO: 70553 - DNA, 22 bp, Artificial sequence
  SiRNA target sequence
acttattgaagtgtttcttaca

SEQ ID NO: 70554 - DNA, 22 bp, Artificial sequence
  SiRNA target sequence
cttattgaagtgtttcttacaa

SEQ ID NO: 70555 - DNA, 22 bp, Artificial sequence
  SiRNA target sequence
ttattgaagtgtttcttacaag

SEQ ID NO: 70556 - DNA, 22 bp, Artificial sequence
  SiRNA target sequence
tattgaagtgtttcttacaagc

SEQ ID NO: 70557 - DNA, 22 bp, Artificial sequence
  SiRNA target sequence
attgaagtgtttcttacaagct

SEQ ID NO: 70558 - DNA, 22 bp, Artificial sequence
  SiRNA target sequence
ttgaagtgtttcttacaagctt

SEQ ID NO: 70559 - DNA, 22 bp, Artificial sequence
  SiRNA target sequence
tgaagtgtttcttacaagcttg

SEQ ID NO: 70560 - DNA, 22 bp, Artificial sequence
  SiRNA target sequence
gaagtgtttcttacaagcttgc

SEQ ID NO: 70561 - DNA, 22 bp, Artificial sequence
  SiRNA target sequence
aagtgtttcttacaagcttgct

SEQ ID NO: 70562 - DNA, 22 bp, Artificial sequence
  SiRNA target sequence
agtgtttcttacaagcttgctt

SEQ ID NO: 70563 - DNA, 22 bp, Artificial sequence
  SiRNA target sequence
gtgtttcttacaagcttgcttc

SEQ ID NO: 70564 - DNA, 22 bp, Artificial sequence
  SiRNA target sequence
tgtttcttacaagcttgcttcc

SEQ ID NO: 70565 - DNA, 22 bp, Artificial sequence
  SiRNA target sequence
gtttcttacaagcttgcttcca

SEQ ID NO: 70566 - DNA, 22 bp, Artificial sequence
  SiRNA target sequence
tttcttacaagcttgcttccaa

SEQ ID NO: 70567 - DNA, 22 bp, Artificial sequence
  SiRNA target sequence
ttcttacaagcttgcttccaat

SEQ ID NO: 70568 - DNA, 22 bp, Artificial sequence
  SiRNA target sequence
tcttacaagcttgcttccaata

SEQ ID NO: 70569 - DNA, 22 bp, Artificial sequence
  SiRNA target sequence
cttacaagcttgcttccaatat

SEQ ID NO: 70570 - DNA, 22 bp, Artificial sequence
  SiRNA target sequence
ttacaagcttgcttccaatatg

SEQ ID NO: 70571 - DNA, 22 bp, Artificial sequence
  SiRNA target sequence
tacaagcttgcttccaatatgc

SEQ ID NO: 70572 - DNA, 22 bp, Artificial sequence
  SiRNA target sequence
acaagcttgcttccaatatgcc

SEQ ID NO: 70573 - DNA, 22 bp, Artificial sequence
  SiRNA target sequence
caagcttgcttccaatatgcct

SEQ ID NO: 70574 - DNA, 22 bp, Artificial sequence
  SiRNA target sequence
aagcttgcttccaatatgcctt

SEQ ID NO: 70575 - DNA, 22 bp, Artificial sequence
  SiRNA target sequence
agcttgcttccaatatgcctta

SEQ ID NO: 70576 - DNA, 22 bp, Artificial sequence
  SiRNA target sequence
gcttgcttccaatatgccttaa

SEQ ID NO: 70577 - DNA, 22 bp, Artificial sequence
  SiRNA target sequence
cttgcttccaatatgccttaaa

SEQ ID NO: 70578 - DNA, 22 bp, Artificial sequence
  SiRNA target sequence
ttgcttccaatatgccttaaac

SEQ ID NO: 70579 - DNA, 22 bp, Artificial sequence
  SiRNA target sequence
tgcttccaatatgccttaaact

SEQ ID NO: 70580 - DNA, 22 bp, Artificial sequence
  SiRNA target sequence
gcttccaatatgccttaaactt

SEQ ID NO: 70581 - DNA, 22 bp, Artificial sequence
  SiRNA target sequence
cttccaatatgccttaaacttt

SEQ ID NO: 70582 - DNA, 22 bp, Artificial sequence
  SiRNA target sequence
ttccaatatgccttaaactttt

SEQ ID NO: 70583 - DNA, 22 bp, Artificial sequence
  SiRNA target sequence
tccaatatgccttaaactttta

SEQ ID NO: 70584 - DNA, 22 bp, Artificial sequence
  SiRNA target sequence
ccaatatgccttaaacttttat

SEQ ID NO: 70585 - DNA, 22 bp, Artificial sequence
  SiRNA target sequence
caatatgccttaaacttttatt

SEQ ID NO: 70586 - DNA, 22 bp, Artificial sequence
  SiRNA target sequence
aatatgccttaaacttttattt

SEQ ID NO: 70587 - DNA, 22 bp, Artificial sequence
  SiRNA target sequence
atatgccttaaacttttatttg

SEQ ID NO: 70588 - DNA, 22 bp, Artificial sequence
  SiRNA target sequence
tatgccttaaacttttatttgc

SEQ ID NO: 70589 - DNA, 22 bp, Artificial sequence
  SiRNA target sequence
atgccttaaacttttatttgcc

SEQ ID NO: 70590 - DNA, 22 bp, Artificial sequence
  SiRNA target sequence
tgccttaaacttttatttgccc

SEQ ID NO: 70591 - DNA, 22 bp, Artificial sequence
  SiRNA target sequence
gccttaaacttttatttgccct

SEQ ID NO: 70592 - DNA, 22 bp, Artificial sequence
  SiRNA target sequence
ccttaaacttttatttgccctt

SEQ ID NO: 70593 - DNA, 22 bp, Artificial sequence
  SiRNA target sequence
cttaaacttttatttgccctta

SEQ ID NO: 70594 - DNA, 22 bp, Artificial sequence
  SiRNA target sequence
ttaaacttttatttgcccttat

SEQ ID NO: 70595 - DNA, 22 bp, Artificial sequence
  SiRNA target sequence
taaacttttatttgcccttatt

SEQ ID NO: 70596 - DNA, 22 bp, Artificial sequence
  SiRNA target sequence
aaacttttatttgcccttattg

SEQ ID NO: 70597 - DNA, 22 bp, Artificial sequence
  SiRNA target sequence
aacttttatttgcccttattgc

SEQ ID NO: 70598 - DNA, 22 bp, Artificial sequence
  SiRNA target sequence
acttttatttgcccttattgca

SEQ ID NO: 70599 - DNA, 22 bp, Artificial sequence
  SiRNA target sequence
cttttatttgcccttattgcag

SEQ ID NO: 70600 - DNA, 22 bp, Artificial sequence
  SiRNA target sequence
ttttatttgcccttattgcagt

SEQ ID NO: 70601 - DNA, 22 bp, Artificial sequence
  SiRNA target sequence
tttatttgcccttattgcagtt

SEQ ID NO: 70602 - DNA, 22 bp, Artificial sequence
  SiRNA target sequence
ttatttgcccttattgcagtta

SEQ ID NO: 70603 - DNA, 22 bp, Artificial sequence
  SiRNA target sequence
tatttgcccttattgcagttat

SEQ ID NO: 70604 - DNA, 22 bp, Artificial sequence
  SiRNA target sequence
atttgcccttattgcagttata

SEQ ID NO: 70605 - DNA, 22 bp, Artificial sequence
  SiRNA target sequence
tttgcccttattgcagttataa

SEQ ID NO: 70606 - DNA, 22 bp, Artificial sequence
  SiRNA target sequence
ttgcccttattgcagttataaa

SEQ ID NO: 70607 - DNA, 22 bp, Artificial sequence
  SiRNA target sequence
tgcccttattgcagttataaaa

SEQ ID NO: 70608 - DNA, 22 bp, Artificial sequence
  SiRNA target sequence
gcccttattgcagttataaaaa

SEQ ID NO: 70609 - DNA, 22 bp, Artificial sequence
  SiRNA target sequence
cccttattgcagttataaaaaa

SEQ ID NO: 70610 - DNA, 22 bp, Artificial sequence
  SiRNA target sequence
ccttattgcagttataaaaaat

SEQ ID NO: 70611 - DNA, 22 bp, Artificial sequence
  SiRNA target sequence
cttattgcagttataaaaaata

SEQ ID NO: 70612 - DNA, 22 bp, Artificial sequence
  SiRNA target sequence
ttattgcagttataaaaaatat

SEQ ID NO: 70613 - DNA, 22 bp, Artificial sequence
  SiRNA target sequence
tattgcagttataaaaaatatg

SEQ ID NO: 70614 - DNA, 22 bp, Artificial sequence
  SiRNA target sequence
attgcagttataaaaaatatgg

SEQ ID NO: 70615 - DNA, 22 bp, Artificial sequence
  SiRNA target sequence
ttgcagttataaaaaatatggg

SEQ ID NO: 70616 - DNA, 22 bp, Artificial sequence
  SiRNA target sequence
tgcagttataaaaaatatggga

SEQ ID NO: 70617 - DNA, 22 bp, Artificial sequence
  SiRNA target sequence
gcagttataaaaaatatgggag

SEQ ID NO: 70618 - DNA, 22 bp, Artificial sequence
  SiRNA target sequence
cagttataaaaaatatgggagg

SEQ ID NO: 70619 - DNA, 22 bp, Artificial sequence
  SiRNA target sequence
agttataaaaaatatgggaggt

SEQ ID NO: 70620 - DNA, 22 bp, Artificial sequence
  SiRNA target sequence
gttataaaaaatatgggaggtc

SEQ ID NO: 70621 - DNA, 22 bp, Artificial sequence
  SiRNA target sequence
ttataaaaaatatgggaggtct

SEQ ID NO: 70622 - DNA, 22 bp, Artificial sequence
  SiRNA target sequence
tataaaaaatatgggaggtctt

SEQ ID NO: 70623 - DNA, 22 bp, Artificial sequence
  SiRNA target sequence
ataaaaaatatgggaggtcttg

SEQ ID NO: 70624 - DNA, 22 bp, Artificial sequence
  SiRNA target sequence
taaaaaatatgggaggtcttgc

SEQ ID NO: 70625 - DNA, 22 bp, Artificial sequence
  SiRNA target sequence
aaaaaatatgggaggtcttgcg

SEQ ID NO: 70626 - DNA, 22 bp, Artificial sequence
  SiRNA target sequence
aaaaatatgggaggtcttgcgg

SEQ ID NO: 70627 - DNA, 22 bp, Artificial sequence
  SiRNA target sequence
aaaatatgggaggtcttgcggg

SEQ ID NO: 70628 - DNA, 22 bp, Artificial sequence
  SiRNA target sequence
aaatatgggaggtcttgcgggc

SEQ ID NO: 70629 - DNA, 22 bp, Artificial sequence
  SiRNA target sequence
aatatgggaggtcttgcgggct

SEQ ID NO: 70630 - DNA, 22 bp, Artificial sequence
  SiRNA target sequence
atatgggaggtcttgcgggctt

SEQ ID NO: 70631 - DNA, 22 bp, Artificial sequence
  SiRNA target sequence
tatgggaggtcttgcgggcttc

SEQ ID NO: 70632 - DNA, 22 bp, Artificial sequence
  SiRNA target sequence
atgggaggtcttgcgggcttca

SEQ ID NO: 70633 - DNA, 22 bp, Artificial sequence
  SiRNA target sequence
tgggaggtcttgcgggcttcat

SEQ ID NO: 70634 - DNA, 22 bp, Artificial sequence
  SiRNA target sequence
gggaggtcttgcgggcttcata

SEQ ID NO: 70635 - DNA, 22 bp, Artificial sequence
  SiRNA target sequence
ggaggtcttgcgggcttcataa

SEQ ID NO: 70636 - DNA, 22 bp, Artificial sequence
  SiRNA target sequence
gaggtcttgcgggcttcataat

SEQ ID NO: 70637 - DNA, 22 bp, Artificial sequence
  SiRNA target sequence
aggtcttgcgggcttcataatg

SEQ ID NO: 70638 - DNA, 22 bp, Artificial sequence
  SiRNA target sequence
ggtcttgcgggcttcataatgt

SEQ ID NO: 70639 - DNA, 22 bp, Artificial sequence
  SiRNA target sequence
gtcttgcgggcttcataatgtt

SEQ ID NO: 70640 - DNA, 22 bp, Artificial sequence
  SiRNA target sequence
tcttgcgggcttcataatgttt

SEQ ID NO: 70641 - DNA, 22 bp, Artificial sequence
  SiRNA target sequence
cttgcgggcttcataatgtttg

SEQ ID NO: 70642 - DNA, 22 bp, Artificial sequence
  SiRNA target sequence
ttgcgggcttcataatgtttgt

SEQ ID NO: 70643 - DNA, 22 bp, Artificial sequence
  SiRNA target sequence
tgcgggcttcataatgtttgtt

SEQ ID NO: 70644 - DNA, 22 bp, Artificial sequence
  SiRNA target sequence
gcgggcttcataatgtttgttt

SEQ ID NO: 70645 - DNA, 22 bp, Artificial sequence
  SiRNA target sequence
cgggcttcataatgtttgtttg

SEQ ID NO: 70646 - DNA, 22 bp, Artificial sequence
  SiRNA target sequence
gggcttcataatgtttgtttgt

SEQ ID NO: 70647 - DNA, 22 bp, Artificial sequence
  SiRNA target sequence
ggcttcataatgtttgtttgtg

SEQ ID NO: 70648 - DNA, 22 bp, Artificial sequence
  SiRNA target sequence
gcttcataatgtttgtttgtgt

SEQ ID NO: 70649 - DNA, 22 bp, Artificial sequence
  SiRNA target sequence
cttcataatgtttgtttgtgtt

SEQ ID NO: 70650 - DNA, 22 bp, Artificial sequence
  SiRNA target sequence
ttcataatgtttgtttgtgttt

SEQ ID NO: 70651 - DNA, 22 bp, Artificial sequence
  SiRNA target sequence
tcataatgtttgtttgtgtttc

SEQ ID NO: 70652 - DNA, 22 bp, Artificial sequence
  SiRNA target sequence
cataatgtttgtttgtgtttct

SEQ ID NO: 70653 - DNA, 22 bp, Artificial sequence
  SiRNA target sequence
ataatgtttgtttgtgtttctt

SEQ ID NO: 70654 - DNA, 22 bp, Artificial sequence
  SiRNA target sequence
taatgtttgtttgtgtttcttg

SEQ ID NO: 70655 - DNA, 22 bp, Artificial sequence
  SiRNA target sequence
aatgtttgtttgtgtttcttgc

SEQ ID NO: 70656 - DNA, 22 bp, Artificial sequence
  SiRNA target sequence
atgtttgtttgtgtttcttgct

SEQ ID NO: 70657 - DNA, 22 bp, Artificial sequence
  SiRNA target sequence
tgtttgtttgtgtttcttgcta

SEQ ID NO: 70658 - DNA, 22 bp, Artificial sequence
  SiRNA target sequence
gtttgtttgtgtttcttgctat

SEQ ID NO: 70659 - DNA, 22 bp, Artificial sequence
  SiRNA target sequence
tttgtttgtgtttcttgctatg

SEQ ID NO: 70660 - DNA, 22 bp, Artificial sequence
  SiRNA target sequence
ttgtttgtgtttcttgctatgc

SEQ ID NO: 70661 - DNA, 22 bp, Artificial sequence
  SiRNA target sequence
tgtttgtgtttcttgctatgcg

SEQ ID NO: 70662 - DNA, 22 bp, Artificial sequence
  SiRNA target sequence
gtttgtgtttcttgctatgcga

SEQ ID NO: 70663 - DNA, 22 bp, Artificial sequence
  SiRNA target sequence
tttgtgtttcttgctatgcgac

SEQ ID NO: 70664 - DNA, 22 bp, Artificial sequence
  SiRNA target sequence
ttgtgtttcttgctatgcgact

SEQ ID NO: 70665 - DNA, 22 bp, Artificial sequence
  SiRNA target sequence
tgtgtttcttgctatgcgactg

SEQ ID NO: 70666 - DNA, 22 bp, Artificial sequence
  SiRNA target sequence
gtgtttcttgctatgcgactgt

SEQ ID NO: 70667 - DNA, 22 bp, Artificial sequence
  SiRNA target sequence
tgtttcttgctatgcgactgtg

SEQ ID NO: 70668 - DNA, 22 bp, Artificial sequence
  SiRNA target sequence
gtttcttgctatgcgactgtga

SEQ ID NO: 70669 - DNA, 22 bp, Artificial sequence
  SiRNA target sequence
tttcttgctatgcgactgtgac

SEQ ID NO: 70670 - DNA, 22 bp, Artificial sequence
  SiRNA target sequence
ttcttgctatgcgactgtgact

SEQ ID NO: 70671 - DNA, 22 bp, Artificial sequence
  SiRNA target sequence
tcttgctatgcgactgtgacta

SEQ ID NO: 70672 - DNA, 22 bp, Artificial sequence
  SiRNA target sequence
cttgctatgcgactgtgactat

SEQ ID NO: 70673 - DNA, 22 bp, Artificial sequence
  SiRNA target sequence
ttgctatgcgactgtgactata

SEQ ID NO: 70674 - DNA, 22 bp, Artificial sequence
  SiRNA target sequence
tgctatgcgactgtgactatat

SEQ ID NO: 70675 - DNA, 22 bp, Artificial sequence
  SiRNA target sequence
gctatgcgactgtgactatatt

SEQ ID NO: 70676 - DNA, 22 bp, Artificial sequence
  SiRNA target sequence
ctatgcgactgtgactatattg

SEQ ID NO: 70677 - DNA, 22 bp, Artificial sequence
  SiRNA target sequence
tatgcgactgtgactatattga

SEQ ID NO: 70678 - DNA, 22 bp, Artificial sequence
  SiRNA target sequence
atgcgactgtgactatattgat

SEQ ID NO: 70679 - DNA, 22 bp, Artificial sequence
  SiRNA target sequence
tgcgactgtgactatattgata

SEQ ID NO: 70680 - DNA, 22 bp, Artificial sequence
  SiRNA target sequence
gcgactgtgactatattgatag

SEQ ID NO: 70681 - DNA, 22 bp, Artificial sequence
  SiRNA target sequence
cgactgtgactatattgatagc

SEQ ID NO: 70682 - DNA, 22 bp, Artificial sequence
  SiRNA target sequence
gactgtgactatattgatagca

SEQ ID NO: 70683 - DNA, 22 bp, Artificial sequence
  SiRNA target sequence
actgtgactatattgatagcac

SEQ ID NO: 70684 - DNA, 22 bp, Artificial sequence
  SiRNA target sequence
ctgtgactatattgatagcaca

SEQ ID NO: 70685 - DNA, 22 bp, Artificial sequence
  SiRNA target sequence
tgtgactatattgatagcacaa

SEQ ID NO: 70686 - DNA, 22 bp, Artificial sequence
  SiRNA target sequence
gtgactatattgatagcacaat

SEQ ID NO: 70687 - DNA, 22 bp, Artificial sequence
  SiRNA target sequence
tgactatattgatagcacaatg

SEQ ID NO: 70688 - DNA, 22 bp, Artificial sequence
  SiRNA target sequence
gactatattgatagcacaatgg

SEQ ID NO: 70689 - DNA, 22 bp, Artificial sequence
  SiRNA target sequence
actatattgatagcacaatgga

SEQ ID NO: 70690 - DNA, 22 bp, Artificial sequence
  SiRNA target sequence
ctatattgatagcacaatggag

SEQ ID NO: 70691 - DNA, 22 bp, Artificial sequence
  SiRNA target sequence
tatattgatagcacaatggaga

SEQ ID NO: 70692 - DNA, 22 bp, Artificial sequence
  SiRNA target sequence
atattgatagcacaatggagat

SEQ ID NO: 70693 - DNA, 22 bp, Artificial sequence
  SiRNA target sequence
tattgatagcacaatggagatc

SEQ ID NO: 70694 - DNA, 22 bp, Artificial sequence
  SiRNA target sequence
attgatagcacaatggagatct

SEQ ID NO: 70695 - DNA, 22 bp, Artificial sequence
  SiRNA target sequence
ttgatagcacaatggagatcta

SEQ ID NO: 70696 - DNA, 22 bp, Artificial sequence
  SiRNA target sequence
tgatagcacaatggagatctaa

SEQ ID NO: 70697 - DNA, 22 bp, Artificial sequence
  SiRNA target sequence
gatagcacaatggagatctaat

SEQ ID NO: 70698 - DNA, 22 bp, Artificial sequence
  SiRNA target sequence
atagcacaatggagatctaata

SEQ ID NO: 70699 - DNA, 22 bp, Artificial sequence
  SiRNA target sequence
tagcacaatggagatctaatat

SEQ ID NO: 70700 - DNA, 22 bp, Artificial sequence
  SiRNA target sequence
agcacaatggagatctaatatt

SEQ ID NO: 70701 - DNA, 22 bp, Artificial sequence
  SiRNA target sequence
gcacaatggagatctaatatta

SEQ ID NO: 70702 - DNA, 22 bp, Artificial sequence
  SiRNA target sequence
cacaatggagatctaatattag

SEQ ID NO: 70703 - DNA, 22 bp, Artificial sequence
  SiRNA target sequence
acaatggagatctaatattaga

SEQ ID NO: 70704 - DNA, 22 bp, Artificial sequence
  SiRNA target sequence
caatggagatctaatattagaa

SEQ ID NO: 70705 - DNA, 22 bp, Artificial sequence
  SiRNA target sequence
aatggagatctaatattagaag

SEQ ID NO: 70706 - DNA, 22 bp, Artificial sequence
  SiRNA target sequence
atggagatctaatattagaaga

SEQ ID NO: 70707 - DNA, 22 bp, Artificial sequence
  SiRNA target sequence
tggagatctaatattagaagag

SEQ ID NO: 70708 - DNA, 22 bp, Artificial sequence
  SiRNA target sequence
ggagatctaatattagaagaga

SEQ ID NO: 70709 - DNA, 22 bp, Artificial sequence
  SiRNA target sequence
gagatctaatattagaagagaa

SEQ ID NO: 70710 - DNA, 22 bp, Artificial sequence
  SiRNA target sequence
agatctaatattagaagagaac

SEQ ID NO: 70711 - DNA, 22 bp, Artificial sequence
  SiRNA target sequence
gatctaatattagaagagaact

SEQ ID NO: 70712 - DNA, 22 bp, Artificial sequence
  SiRNA target sequence
atctaatattagaagagaactt

SEQ ID NO: 70713 - DNA, 22 bp, Artificial sequence
  SiRNA target sequence
tctaatattagaagagaactta

SEQ ID NO: 70714 - DNA, 22 bp, Artificial sequence
  SiRNA target sequence
ctaatattagaagagaacttaa

SEQ ID NO: 70715 - DNA, 22 bp, Artificial sequence
  SiRNA target sequence
taatattagaagagaacttaat

SEQ ID NO: 70716 - DNA, 22 bp, Artificial sequence
  SiRNA target sequence
aatattagaagagaacttaata

SEQ ID NO: 70717 - DNA, 22 bp, Artificial sequence
  SiRNA target sequence
atattagaagagaacttaataa

SEQ ID NO: 70718 - DNA, 22 bp, Artificial sequence
  SiRNA target sequence
tattagaagagaacttaataac

SEQ ID NO: 70719 - DNA, 22 bp, Artificial sequence
  SiRNA target sequence
attagaagagaacttaataact

SEQ ID NO: 70720 - DNA, 22 bp, Artificial sequence
  SiRNA target sequence
ttagaagagaacttaataactc

SEQ ID NO: 70721 - DNA, 22 bp, Artificial sequence
  SiRNA target sequence
tagaagagaacttaataactct

SEQ ID NO: 70722 - DNA, 22 bp, Artificial sequence
  SiRNA target sequence
agaagagaacttaataactctg

SEQ ID NO: 70723 - DNA, 22 bp, Artificial sequence
  SiRNA target sequence
gaagagaacttaataactctga

SEQ ID NO: 70724 - DNA, 22 bp, Artificial sequence
  SiRNA target sequence
aagagaacttaataactctgaa

SEQ ID NO: 70725 - DNA, 22 bp, Artificial sequence
  SiRNA target sequence
agagaacttaataactctgaaa

SEQ ID NO: 70726 - DNA, 22 bp, Artificial sequence
  SiRNA target sequence
gagaacttaataactctgaaaa

SEQ ID NO: 70727 - DNA, 22 bp, Artificial sequence
  SiRNA target sequence
agaacttaataactctgaaaat

SEQ ID NO: 70728 - DNA, 22 bp, Artificial sequence
  SiRNA target sequence
gaacttaataactctgaaaata

SEQ ID NO: 70729 - DNA, 22 bp, Artificial sequence
  SiRNA target sequence
aacttaataactctgaaaatag

SEQ ID NO: 70730 - DNA, 22 bp, Artificial sequence
  SiRNA target sequence
acttaataactctgaaaataga

SEQ ID NO: 70731 - DNA, 22 bp, Artificial sequence
  SiRNA target sequence
cttaataactctgaaaatagat

SEQ ID NO: 70732 - DNA, 22 bp, Artificial sequence
  SiRNA target sequence
ttaataactctgaaaatagatc

SEQ ID NO: 70733 - DNA, 22 bp, Artificial sequence
  SiRNA target sequence
taataactctgaaaatagatct

SEQ ID NO: 70734 - DNA, 22 bp, Artificial sequence
  SiRNA target sequence
aataactctgaaaatagatcta

SEQ ID NO: 70735 - DNA, 22 bp, Artificial sequence
  SiRNA target sequence
ataactctgaaaatagatctag

SEQ ID NO: 70736 - DNA, 22 bp, Artificial sequence
  SiRNA target sequence
taactctgaaaatagatctagt

SEQ ID NO: 70737 - DNA, 22 bp, Artificial sequence
  SiRNA target sequence
aactctgaaaatagatctagta

SEQ ID NO: 70738 - DNA, 22 bp, Artificial sequence
  SiRNA target sequence
actctgaaaatagatctagtaa

SEQ ID NO: 70739 - DNA, 22 bp, Artificial sequence
  SiRNA target sequence
ctctgaaaatagatctagtaat

SEQ ID NO: 70740 - DNA, 22 bp, Artificial sequence
  SiRNA target sequence
tctgaaaatagatctagtaata

SEQ ID NO: 70741 - DNA, 22 bp, Artificial sequence
  SiRNA target sequence
ctgaaaatagatctagtaataa

SEQ ID NO: 70742 - DNA, 22 bp, Artificial sequence
  SiRNA target sequence
tgaaaatagatctagtaataaa

SEQ ID NO: 70743 - DNA, 22 bp, Artificial sequence
  SiRNA target sequence
gaaaatagatctagtaataaac

SEQ ID NO: 70744 - DNA, 22 bp, Artificial sequence
  SiRNA target sequence
aaaatagatctagtaataaact

SEQ ID NO: 70745 - DNA, 22 bp, Artificial sequence
  SiRNA target sequence
aaatagatctagtaataaacta

SEQ ID NO: 70746 - DNA, 22 bp, Artificial sequence
  SiRNA target sequence
aatagatctagtaataaactac

SEQ ID NO: 70747 - DNA, 22 bp, Artificial sequence
  SiRNA target sequence
atagatctagtaataaactaca

SEQ ID NO: 70748 - DNA, 22 bp, Artificial sequence
  SiRNA target sequence
tagatctagtaataaactacaa

SEQ ID NO: 70749 - DNA, 22 bp, Artificial sequence
  SiRNA target sequence
agatctagtaataaactacaag

SEQ ID NO: 70750 - DNA, 22 bp, Artificial sequence
  SiRNA target sequence
gatctagtaataaactacaaga

SEQ ID NO: 70751 - DNA, 22 bp, Artificial sequence
  SiRNA target sequence
atctagtaataaactacaagat

SEQ ID NO: 70752 - DNA, 22 bp, Artificial sequence
  SiRNA target sequence
tctagtaataaactacaagatg

SEQ ID NO: 70753 - DNA, 22 bp, Artificial sequence
  SiRNA target sequence
ctagtaataaactacaagatgg

SEQ ID NO: 70754 - DNA, 22 bp, Artificial sequence
  SiRNA target sequence
tagtaataaactacaagatgga

SEQ ID NO: 70755 - DNA, 22 bp, Artificial sequence
  SiRNA target sequence
agtaataaactacaagatggat

SEQ ID NO: 70756 - DNA, 22 bp, Artificial sequence
  SiRNA target sequence
gtaataaactacaagatggatt

SEQ ID NO: 70757 - DNA, 22 bp, Artificial sequence
  SiRNA target sequence
taataaactacaagatggatta

SEQ ID NO: 70758 - DNA, 22 bp, Artificial sequence
  SiRNA target sequence
aataaactacaagatggattaa

SEQ ID NO: 70759 - DNA, 22 bp, Artificial sequence
  SiRNA target sequence
ataaactacaagatggattaaa

SEQ ID NO: 70760 - DNA, 22 bp, Artificial sequence
  SiRNA target sequence
taaactacaagatggattaaat

SEQ ID NO: 70761 - DNA, 22 bp, Artificial sequence
  SiRNA target sequence
aaactacaagatggattaaata

SEQ ID NO: 70762 - DNA, 22 bp, Artificial sequence
  SiRNA target sequence
aactacaagatggattaaataa

SEQ ID NO: 70763 - DNA, 22 bp, Artificial sequence
  SiRNA target sequence
actacaagatggattaaataat

SEQ ID NO: 70764 - DNA, 22 bp, Artificial sequence
  SiRNA target sequence
ctacaagatggattaaataatc

SEQ ID NO: 70765 - DNA, 22 bp, Artificial sequence
  SiRNA target sequence
tacaagatggattaaataatca

SEQ ID NO: 70766 - DNA, 22 bp, Artificial sequence
  SiRNA target sequence
acaagatggattaaataatcat

SEQ ID NO: 70767 - DNA, 22 bp, Artificial sequence
  SiRNA target sequence
caagatggattaaataatcatg

SEQ ID NO: 70768 - DNA, 22 bp, Artificial sequence
  SiRNA target sequence
aagatggattaaataatcatga

SEQ ID NO: 70769 - DNA, 22 bp, Artificial sequence
  SiRNA target sequence
agatggattaaataatcatgaa

SEQ ID NO: 70770 - DNA, 22 bp, Artificial sequence
  SiRNA target sequence
gatggattaaataatcatgaaa

SEQ ID NO: 70771 - DNA, 22 bp, Artificial sequence
  SiRNA target sequence
atggattaaataatcatgaaac

SEQ ID NO: 70772 - DNA, 22 bp, Artificial sequence
  SiRNA target sequence
tggattaaataatcatgaaaca

SEQ ID NO: 70773 - DNA, 22 bp, Artificial sequence
  SiRNA target sequence
ggattaaataatcatgaaacaa

SEQ ID NO: 70774 - DNA, 22 bp, Artificial sequence
  SiRNA target sequence
gattaaataatcatgaaacaat

SEQ ID NO: 70775 - DNA, 22 bp, Artificial sequence
  SiRNA target sequence
attaaataatcatgaaacaatc

SEQ ID NO: 70776 - DNA, 22 bp, Artificial sequence
  SiRNA target sequence
ttaaataatcatgaaacaatcg

SEQ ID NO: 70777 - DNA, 22 bp, Artificial sequence
  SiRNA target sequence
taaataatcatgaaacaatcgt

SEQ ID NO: 70778 - DNA, 22 bp, Artificial sequence
  SiRNA target sequence
aaataatcatgaaacaatcgtc

SEQ ID NO: 70779 - DNA, 22 bp, Artificial sequence
  SiRNA target sequence
aataatcatgaaacaatcgtct

SEQ ID NO: 70780 - DNA, 22 bp, Artificial sequence
  SiRNA target sequence
ataatcatgaaacaatcgtctc

SEQ ID NO: 70781 - DNA, 22 bp, Artificial sequence
  SiRNA target sequence
taatcatgaaacaatcgtctcc

SEQ ID NO: 70782 - DNA, 22 bp, Artificial sequence
  SiRNA target sequence
aatcatgaaacaatcgtctcct

SEQ ID NO: 70783 - DNA, 22 bp, Artificial sequence
  SiRNA target sequence
atcatgaaacaatcgtctcctt

SEQ ID NO: 70784 - DNA, 22 bp, Artificial sequence
  SiRNA target sequence
tcatgaaacaatcgtctccttt

SEQ ID NO: 70785 - DNA, 22 bp, Artificial sequence
  SiRNA target sequence
catgaaacaatcgtctcctttg

SEQ ID NO: 70786 - DNA, 22 bp, Artificial sequence
  SiRNA target sequence
atgaaacaatcgtctcctttgg

SEQ ID NO: 70787 - DNA, 22 bp, Artificial sequence
  SiRNA target sequence
tgaaacaatcgtctcctttggg

SEQ ID NO: 70788 - DNA, 22 bp, Artificial sequence
  SiRNA target sequence
gaaacaatcgtctcctttggga

SEQ ID NO: 70789 - DNA, 22 bp, Artificial sequence
  SiRNA target sequence
aaacaatcgtctcctttgggac

SEQ ID NO: 70790 - DNA, 22 bp, Artificial sequence
  SiRNA target sequence
aacaatcgtctcctttgggact

SEQ ID NO: 70791 - DNA, 22 bp, Artificial sequence
  SiRNA target sequence
acaatcgtctcctttgggacta

SEQ ID NO: 70792 - DNA, 22 bp, Artificial sequence
  SiRNA target sequence
caatcgtctcctttgggactac

SEQ ID NO: 70793 - DNA, 22 bp, Artificial sequence
  SiRNA target sequence
aatcgtctcctttgggactaca

SEQ ID NO: 70794 - DNA, 22 bp, Artificial sequence
  SiRNA target sequence
atcgtctcctttgggactacag

SEQ ID NO: 70795 - DNA, 22 bp, Artificial sequence
  SiRNA target sequence
tcgtctcctttgggactacaga

SEQ ID NO: 70796 - DNA, 22 bp, Artificial sequence
  SiRNA target sequence
cgtctcctttgggactacagat

SEQ ID NO: 70797 - DNA, 22 bp, Artificial sequence
  SiRNA target sequence
gtctcctttgggactacagatc

SEQ ID NO: 70798 - DNA, 22 bp, Artificial sequence
  SiRNA target sequence
tctcctttgggactacagatct

SEQ ID NO: 70799 - DNA, 22 bp, Artificial sequence
  SiRNA target sequence
ctcctttgggactacagatctt

SEQ ID NO: 70800 - DNA, 22 bp, Artificial sequence
  SiRNA target sequence
tcctttgggactacagatcttg

SEQ ID NO: 70801 - DNA, 22 bp, Artificial sequence
  SiRNA target sequence
cctttgggactacagatcttga

SEQ ID NO: 70802 - DNA, 22 bp, Artificial sequence
  SiRNA target sequence
ctttgggactacagatcttgaa

SEQ ID NO: 70803 - DNA, 22 bp, Artificial sequence
  SiRNA target sequence
tttgggactacagatcttgaag

SEQ ID NO: 70804 - DNA, 22 bp, Artificial sequence
  SiRNA target sequence
ttgggactacagatcttgaagt

SEQ ID NO: 70805 - DNA, 22 bp, Artificial sequence
  SiRNA target sequence
tgggactacagatcttgaagta

SEQ ID NO: 70806 - DNA, 22 bp, Artificial sequence
  SiRNA target sequence
gggactacagatcttgaagtag

SEQ ID NO: 70807 - DNA, 22 bp, Artificial sequence
  SiRNA target sequence
ggactacagatcttgaagtaga

SEQ ID NO: 70808 - DNA, 22 bp, Artificial sequence
  SiRNA target sequence
gactacagatcttgaagtagat

SEQ ID NO: 70809 - DNA, 22 bp, Artificial sequence
  SiRNA target sequence
actacagatcttgaagtagatg

SEQ ID NO: 70810 - DNA, 22 bp, Artificial sequence
  SiRNA target sequence
ctacagatcttgaagtagatga

SEQ ID NO: 70811 - DNA, 22 bp, Artificial sequence
  SiRNA target sequence
tacagatcttgaagtagatgaa

SEQ ID NO: 70812 - DNA, 22 bp, Artificial sequence
  SiRNA target sequence
acagatcttgaagtagatgaat

SEQ ID NO: 70813 - DNA, 22 bp, Artificial sequence
  SiRNA target sequence
cagatcttgaagtagatgaata

SEQ ID NO: 70814 - DNA, 22 bp, Artificial sequence
  SiRNA target sequence
agatcttgaagtagatgaatat

SEQ ID NO: 70815 - DNA, 22 bp, Artificial sequence
  SiRNA target sequence
gatcttgaagtagatgaatatg

SEQ ID NO: 70816 - DNA, 22 bp, Artificial sequence
  SiRNA target sequence
atcttgaagtagatgaatatga

SEQ ID NO: 70817 - DNA, 22 bp, Artificial sequence
  SiRNA target sequence
tcttgaagtagatgaatatgat

SEQ ID NO: 70818 - DNA, 22 bp, Artificial sequence
  SiRNA target sequence
cttgaagtagatgaatatgatc

SEQ ID NO: 70819 - DNA, 22 bp, Artificial sequence
  SiRNA target sequence
ttgaagtagatgaatatgatca

SEQ ID NO: 70820 - DNA, 22 bp, Artificial sequence
  SiRNA target sequence
tgaagtagatgaatatgatcag

SEQ ID NO: 70821 - DNA, 22 bp, Artificial sequence
  SiRNA target sequence
gaagtagatgaatatgatcagt

SEQ ID NO: 70822 - DNA, 22 bp, Artificial sequence
  SiRNA target sequence
aagtagatgaatatgatcagtt

SEQ ID NO: 70823 - DNA, 22 bp, Artificial sequence
  SiRNA target sequence
agtagatgaatatgatcagttt

SEQ ID NO: 70824 - DNA, 22 bp, Artificial sequence
  SiRNA target sequence
gtagatgaatatgatcagtttc

SEQ ID NO: 70825 - DNA, 22 bp, Artificial sequence
  SiRNA target sequence
tagatgaatatgatcagtttct

SEQ ID NO: 70826 - DNA, 22 bp, Artificial sequence
  SiRNA target sequence
agatgaatatgatcagtttctt

SEQ ID NO: 70827 - DNA, 22 bp, Artificial sequence
  SiRNA target sequence
gatgaatatgatcagtttctta

SEQ ID NO: 70828 - DNA, 22 bp, Artificial sequence
  SiRNA target sequence
atgaatatgatcagtttcttaa

SEQ ID NO: 70829 - DNA, 22 bp, Artificial sequence
  SiRNA target sequence
tgaatatgatcagtttcttaaa

SEQ ID NO: 70830 - DNA, 22 bp, Artificial sequence
  SiRNA target sequence
gaatatgatcagtttcttaaaa

SEQ ID NO: 70831 - DNA, 22 bp, Artificial sequence
  SiRNA target sequence
aatatgatcagtttcttaaaat

SEQ ID NO: 70832 - DNA, 22 bp, Artificial sequence
  SiRNA target sequence
atatgatcagtttcttaaaatt

SEQ ID NO: 70833 - DNA, 22 bp, Artificial sequence
  SiRNA target sequence
tatgatcagtttcttaaaatta

SEQ ID NO: 70834 - DNA, 22 bp, Artificial sequence
  SiRNA target sequence
atgatcagtttcttaaaattaa

SEQ ID NO: 70835 - DNA, 22 bp, Artificial sequence
  SiRNA target sequence
tgatcagtttcttaaaattaat

SEQ ID NO: 70836 - DNA, 22 bp, Artificial sequence
  SiRNA target sequence
gatcagtttcttaaaattaatg

SEQ ID NO: 70837 - DNA, 22 bp, Artificial sequence
  SiRNA target sequence
atcagtttcttaaaattaatgc

SEQ ID NO: 70838 - DNA, 22 bp, Artificial sequence
  SiRNA target sequence
tcagtttcttaaaattaatgca

SEQ ID NO: 70839 - DNA, 22 bp, Artificial sequence
  SiRNA target sequence
cagtttcttaaaattaatgcat

SEQ ID NO: 70840 - DNA, 22 bp, Artificial sequence
  SiRNA target sequence
agtttcttaaaattaatgcatc

SEQ ID NO: 70841 - DNA, 22 bp, Artificial sequence
  SiRNA target sequence
gtttcttaaaattaatgcatct

SEQ ID NO: 70842 - DNA, 22 bp, Artificial sequence
  SiRNA target sequence
tttcttaaaattaatgcatcta

SEQ ID NO: 70843 - DNA, 22 bp, Artificial sequence
  SiRNA target sequence
ttcttaaaattaatgcatctaa

SEQ ID NO: 70844 - DNA, 22 bp, Artificial sequence
  SiRNA target sequence
tcttaaaattaatgcatctaat

SEQ ID NO: 70845 - DNA, 22 bp, Artificial sequence
  SiRNA target sequence
cttaaaattaatgcatctaata

SEQ ID NO: 70846 - DNA, 22 bp, Artificial sequence
  SiRNA target sequence
ttaaaattaatgcatctaatag

SEQ ID NO: 70847 - DNA, 22 bp, Artificial sequence
  SiRNA target sequence
taaaattaatgcatctaatagt

SEQ ID NO: 70848 - DNA, 22 bp, Artificial sequence
  SiRNA target sequence
aaaattaatgcatctaatagta

SEQ ID NO: 70849 - DNA, 22 bp, Artificial sequence
  SiRNA target sequence
aaattaatgcatctaatagtaa

SEQ ID NO: 70850 - DNA, 22 bp, Artificial sequence
  SiRNA target sequence
aattaatgcatctaatagtaac

SEQ ID NO: 70851 - DNA, 22 bp, Artificial sequence
  SiRNA target sequence
attaatgcatctaatagtaaca

SEQ ID NO: 70852 - DNA, 22 bp, Artificial sequence
  SiRNA target sequence
ttaatgcatctaatagtaacag

SEQ ID NO: 70853 - DNA, 22 bp, Artificial sequence
  SiRNA target sequence
taatgcatctaatagtaacaga

SEQ ID NO: 70854 - DNA, 22 bp, Artificial sequence
  SiRNA target sequence
aatgcatctaatagtaacagat

SEQ ID NO: 70855 - DNA, 22 bp, Artificial sequence
  SiRNA target sequence
atgcatctaatagtaacagatt

SEQ ID NO: 70856 - DNA, 22 bp, Artificial sequence
  SiRNA target sequence
tgcatctaatagtaacagatta

SEQ ID NO: 70857 - DNA, 22 bp, Artificial sequence
  SiRNA target sequence
gcatctaatagtaacagattat

SEQ ID NO: 70858 - DNA, 22 bp, Artificial sequence
  SiRNA target sequence
catctaatagtaacagattatg

SEQ ID NO: 70859 - DNA, 22 bp, Artificial sequence
  SiRNA target sequence
atctaatagtaacagattatgg

SEQ ID NO: 70860 - DNA, 22 bp, Artificial sequence
  SiRNA target sequence
tctaatagtaacagattatgga

SEQ ID NO: 70861 - DNA, 22 bp, Artificial sequence
  SiRNA target sequence
ctaatagtaacagattatggag

SEQ ID NO: 70862 - DNA, 22 bp, Artificial sequence
  SiRNA target sequence
taatagtaacagattatggaga

SEQ ID NO: 70863 - DNA, 22 bp, Artificial sequence
  SiRNA target sequence
aatagtaacagattatggagag

SEQ ID NO: 70864 - DNA, 22 bp, Artificial sequence
  SiRNA target sequence
atagtaacagattatggagagc

SEQ ID NO: 70865 - DNA, 22 bp, Artificial sequence
  SiRNA target sequence
tagtaacagattatggagagca

SEQ ID NO: 70866 - DNA, 22 bp, Artificial sequence
  SiRNA target sequence
agtaacagattatggagagcac

SEQ ID NO: 70867 - DNA, 22 bp, Artificial sequence
  SiRNA target sequence
gtaacagattatggagagcact

SEQ ID NO: 70868 - DNA, 22 bp, Artificial sequence
  SiRNA target sequence
taacagattatggagagcactg

SEQ ID NO: 70869 - DNA, 22 bp, Artificial sequence
  SiRNA target sequence
aacagattatggagagcactgt

SEQ ID NO: 70870 - DNA, 22 bp, Artificial sequence
  SiRNA target sequence
acagattatggagagcactgta

SEQ ID NO: 70871 - DNA, 22 bp, Artificial sequence
  SiRNA target sequence
cagattatggagagcactgtac

SEQ ID NO: 70872 - DNA, 22 bp, Artificial sequence
  SiRNA target sequence
agattatggagagcactgtaca

SEQ ID NO: 70873 - DNA, 22 bp, Artificial sequence
  SiRNA target sequence
gattatggagagcactgtacat

SEQ ID NO: 70874 - DNA, 22 bp, Artificial sequence
  SiRNA target sequence
attatggagagcactgtacatt

SEQ ID NO: 70875 - DNA, 22 bp, Artificial sequence
  SiRNA target sequence
ttatggagagcactgtacattt

SEQ ID NO: 70876 - DNA, 22 bp, Artificial sequence
  SiRNA target sequence
tatggagagcactgtacatttt

SEQ ID NO: 70877 - DNA, 22 bp, Artificial sequence
  SiRNA target sequence
atggagagcactgtacatttta

SEQ ID NO: 70878 - DNA, 22 bp, Artificial sequence
  SiRNA target sequence
tggagagcactgtacattttaa

SEQ ID NO: 70879 - DNA, 22 bp, Artificial sequence
  SiRNA target sequence
ggagagcactgtacattttaaa

SEQ ID NO: 70880 - DNA, 22 bp, Artificial sequence
  SiRNA target sequence
gagagcactgtacattttaaat

SEQ ID NO: 70881 - DNA, 22 bp, Artificial sequence
  SiRNA target sequence
agagcactgtacattttaaatt

SEQ ID NO: 70882 - DNA, 22 bp, Artificial sequence
  SiRNA target sequence
gagcactgtacattttaaattt

SEQ ID NO: 70883 - DNA, 22 bp, Artificial sequence
  SiRNA target sequence
agcactgtacattttaaattta

SEQ ID NO: 70884 - DNA, 22 bp, Artificial sequence
  SiRNA target sequence
gcactgtacattttaaatttat

SEQ ID NO: 70885 - DNA, 22 bp, Artificial sequence
  SiRNA target sequence
cactgtacattttaaatttatc

SEQ ID NO: 70886 - DNA, 22 bp, Artificial sequence
  SiRNA target sequence
actgtacattttaaatttatct

SEQ ID NO: 70887 - DNA, 22 bp, Artificial sequence
  SiRNA target sequence
ctgtacattttaaatttatctc

SEQ ID NO: 70888 - DNA, 22 bp, Artificial sequence
  SiRNA target sequence
tgtacattttaaatttatctca

SEQ ID NO: 70889 - DNA, 22 bp, Artificial sequence
  SiRNA target sequence
gtacattttaaatttatctcag

SEQ ID NO: 70890 - DNA, 22 bp, Artificial sequence
  SiRNA target sequence
tacattttaaatttatctcaga

SEQ ID NO: 70891 - DNA, 22 bp, Artificial sequence
  SiRNA target sequence
acattttaaatttatctcagag

SEQ ID NO: 70892 - DNA, 22 bp, Artificial sequence
  SiRNA target sequence
cattttaaatttatctcagaga

SEQ ID NO: 70893 - DNA, 22 bp, Artificial sequence
  SiRNA target sequence
attttaaatttatctcagagag

SEQ ID NO: 70894 - DNA, 22 bp, Artificial sequence
  SiRNA target sequence
ttttaaatttatctcagagagc

SEQ ID NO: 70895 - DNA, 22 bp, Artificial sequence
  SiRNA target sequence
tttaaatttatctcagagagca

SEQ ID NO: 70896 - DNA, 22 bp, Artificial sequence
  SiRNA target sequence
ttaaatttatctcagagagcaa

SEQ ID NO: 70897 - DNA, 22 bp, Artificial sequence
  SiRNA target sequence
taaatttatctcagagagcaat

SEQ ID NO: 70898 - DNA, 22 bp, Artificial sequence
  SiRNA target sequence
aaatttatctcagagagcaatt

SEQ ID NO: 70899 - DNA, 22 bp, Artificial sequence
  SiRNA target sequence
aatttatctcagagagcaattt

SEQ ID NO: 70900 - DNA, 22 bp, Artificial sequence
  SiRNA target sequence
atttatctcagagagcaatttt

SEQ ID NO: 70901 - DNA, 22 bp, Artificial sequence
  SiRNA target sequence
tttatctcagagagcaattttt

SEQ ID NO: 70902 - DNA, 22 bp, Artificial sequence
  SiRNA target sequence
ttatctcagagagcaatttttc

SEQ ID NO: 70903 - DNA, 22 bp, Artificial sequence
  SiRNA target sequence
tatctcagagagcaatttttct

SEQ ID NO: 70904 - DNA, 22 bp, Artificial sequence
  SiRNA target sequence
atctcagagagcaatttttctc

SEQ ID NO: 70905 - DNA, 22 bp, Artificial sequence
  SiRNA target sequence
tctcagagagcaatttttctct

SEQ ID NO: 70906 - DNA, 22 bp, Artificial sequence
  SiRNA target sequence
ctcagagagcaatttttctctt

SEQ ID NO: 70907 - DNA, 22 bp, Artificial sequence
  SiRNA target sequence
tcagagagcaatttttctctta

SEQ ID NO: 70908 - DNA, 22 bp, Artificial sequence
  SiRNA target sequence
cagagagcaatttttctcttac

SEQ ID NO: 70909 - DNA, 22 bp, Artificial sequence
  SiRNA target sequence
agagagcaatttttctcttaca

SEQ ID NO: 70910 - DNA, 22 bp, Artificial sequence
  SiRNA target sequence
gagagcaatttttctcttacaa

SEQ ID NO: 70911 - DNA, 22 bp, Artificial sequence
  SiRNA target sequence
agagcaatttttctcttacaaa

SEQ ID NO: 70912 - DNA, 22 bp, Artificial sequence
  SiRNA target sequence
gagcaatttttctcttacaaag

SEQ ID NO: 70913 - DNA, 22 bp, Artificial sequence
  SiRNA target sequence
agcaatttttctcttacaaagt

SEQ ID NO: 70914 - DNA, 22 bp, Artificial sequence
  SiRNA target sequence
gcaatttttctcttacaaagtt

SEQ ID NO: 70915 - DNA, 22 bp, Artificial sequence
  SiRNA target sequence
caatttttctcttacaaagttt

SEQ ID NO: 70916 - DNA, 22 bp, Artificial sequence
  SiRNA target sequence
aatttttctcttacaaagtttt

SEQ ID NO: 70917 - DNA, 22 bp, Artificial sequence
  SiRNA target sequence
atttttctcttacaaagttttt

SEQ ID NO: 70918 - DNA, 22 bp, Artificial sequence
  SiRNA target sequence
tttttctcttacaaagtttttt

SEQ ID NO: 70919 - DNA, 22 bp, Artificial sequence
  SiRNA target sequence
ttttctcttacaaagttttttt

SEQ ID NO: 70920 - DNA, 22 bp, Artificial sequence
  SiRNA target sequence
tttctcttacaaagttttttta

SEQ ID NO: 70921 - DNA, 22 bp, Artificial sequence
  SiRNA target sequence
ttctcttacaaagtttttttat

SEQ ID NO: 70922 - DNA, 22 bp, Artificial sequence
  SiRNA target sequence
tctcttacaaagtttttttatt

SEQ ID NO: 70923 - DNA, 22 bp, Artificial sequence
  SiRNA target sequence
ctcttacaaagtttttttatta

SEQ ID NO: 70924 - DNA, 22 bp, Artificial sequence
  SiRNA target sequence
tcttacaaagtttttttattat

SEQ ID NO: 70925 - DNA, 22 bp, Artificial sequence
  SiRNA target sequence
cttacaaagtttttttattatt

SEQ ID NO: 70926 - DNA, 22 bp, Artificial sequence
  SiRNA target sequence
ttacaaagtttttttattattt

SEQ ID NO: 70927 - DNA, 22 bp, Artificial sequence
  SiRNA target sequence
tacaaagtttttttattattta

SEQ ID NO: 70928 - DNA, 22 bp, Artificial sequence
  SiRNA target sequence
acaaagtttttttattatttat

SEQ ID NO: 70929 - DNA, 22 bp, Artificial sequence
  SiRNA target sequence
caaagtttttttattatttatg

SEQ ID NO: 70930 - DNA, 22 bp, Artificial sequence
  SiRNA target sequence
aaagtttttttattatttatgc

SEQ ID NO: 70931 - DNA, 22 bp, Artificial sequence
  SiRNA target sequence
aagtttttttattatttatgca

SEQ ID NO: 70932 - DNA, 22 bp, Artificial sequence
  SiRNA target sequence
agtttttttattatttatgcag

SEQ ID NO: 70933 - DNA, 22 bp, Artificial sequence
  SiRNA target sequence
gtttttttattatttatgcagg

SEQ ID NO: 70934 - DNA, 22 bp, Artificial sequence
  SiRNA target sequence
tttttttattatttatgcagga

SEQ ID NO: 70935 - DNA, 22 bp, Artificial sequence
  SiRNA target sequence
ttttttattatttatgcaggaa

SEQ ID NO: 70936 - DNA, 22 bp, Artificial sequence
  SiRNA target sequence
tttttattatttatgcaggaat

SEQ ID NO: 70937 - DNA, 22 bp, Artificial sequence
  SiRNA target sequence
ttttattatttatgcaggaata

SEQ ID NO: 70938 - DNA, 22 bp, Artificial sequence
  SiRNA target sequence
tttattatttatgcaggaatat

SEQ ID NO: 70939 - DNA, 22 bp, Artificial sequence
  SiRNA target sequence
ttattatttatgcaggaatatc

SEQ ID NO: 70940 - DNA, 22 bp, Artificial sequence
  SiRNA target sequence
tattatttatgcaggaatatca

SEQ ID NO: 70941 - DNA, 22 bp, Artificial sequence
  SiRNA target sequence
attatttatgcaggaatatcag

SEQ ID NO: 70942 - DNA, 22 bp, Artificial sequence
  SiRNA target sequence
ttatttatgcaggaatatcagg

SEQ ID NO: 70943 - DNA, 22 bp, Artificial sequence
  SiRNA target sequence
tatttatgcaggaatatcagga

SEQ ID NO: 70944 - DNA, 22 bp, Artificial sequence
  SiRNA target sequence
atttatgcaggaatatcaggaa

SEQ ID NO: 70945 - DNA, 22 bp, Artificial sequence
  SiRNA target sequence
tttatgcaggaatatcaggaat

SEQ ID NO: 70946 - DNA, 22 bp, Artificial sequence
  SiRNA target sequence
ttatgcaggaatatcaggaata

SEQ ID NO: 70947 - DNA, 22 bp, Artificial sequence
  SiRNA target sequence
tatgcaggaatatcaggaatat

SEQ ID NO: 70948 - DNA, 22 bp, Artificial sequence
  SiRNA target sequence
atgcaggaatatcaggaatatt

SEQ ID NO: 70949 - DNA, 22 bp, Artificial sequence
  SiRNA target sequence
tgcaggaatatcaggaatatta

SEQ ID NO: 70950 - DNA, 22 bp, Artificial sequence
  SiRNA target sequence
gcaggaatatcaggaatattat

SEQ ID NO: 70951 - DNA, 22 bp, Artificial sequence
  SiRNA target sequence
caggaatatcaggaatattatc

SEQ ID NO: 70952 - DNA, 22 bp, Artificial sequence
  SiRNA target sequence
aggaatatcaggaatattatct

SEQ ID NO: 70953 - DNA, 22 bp, Artificial sequence
  SiRNA target sequence
ggaatatcaggaatattatctc

SEQ ID NO: 70954 - DNA, 22 bp, Artificial sequence
  SiRNA target sequence
gaatatcaggaatattatctca

SEQ ID NO: 70955 - DNA, 22 bp, Artificial sequence
  SiRNA target sequence
aatatcaggaatattatctcaa

SEQ ID NO: 70956 - DNA, 22 bp, Artificial sequence
  SiRNA target sequence
atatcaggaatattatctcaaa

SEQ ID NO: 70957 - DNA, 22 bp, Artificial sequence
  SiRNA target sequence
tatcaggaatattatctcaaaa

SEQ ID NO: 70958 - DNA, 22 bp, Artificial sequence
  SiRNA target sequence
atcaggaatattatctcaaaat

SEQ ID NO: 70959 - DNA, 22 bp, Artificial sequence
  SiRNA target sequence
tcaggaatattatctcaaaata

SEQ ID NO: 70960 - DNA, 22 bp, Artificial sequence
  SiRNA target sequence
caggaatattatctcaaaatat

SEQ ID NO: 70961 - DNA, 22 bp, Artificial sequence
  SiRNA target sequence
aggaatattatctcaaaatatg

SEQ ID NO: 70962 - DNA, 22 bp, Artificial sequence
  SiRNA target sequence
ggaatattatctcaaaatatgt

SEQ ID NO: 70963 - DNA, 22 bp, Artificial sequence
  SiRNA target sequence
gaatattatctcaaaatatgtc

SEQ ID NO: 70964 - DNA, 22 bp, Artificial sequence
  SiRNA target sequence
aatattatctcaaaatatgtca

SEQ ID NO: 70965 - DNA, 22 bp, Artificial sequence
  SiRNA target sequence
atattatctcaaaatatgtcat

SEQ ID NO: 70966 - DNA, 22 bp, Artificial sequence
  SiRNA target sequence
tattatctcaaaatatgtcatc

SEQ ID NO: 70967 - DNA, 22 bp, Artificial sequence
  SiRNA target sequence
attatctcaaaatatgtcatct

SEQ ID NO: 70968 - DNA, 22 bp, Artificial sequence
  SiRNA target sequence
ttatctcaaaatatgtcatcta

SEQ ID NO: 70969 - DNA, 22 bp, Artificial sequence
  SiRNA target sequence
tatctcaaaatatgtcatctaa

SEQ ID NO: 70970 - DNA, 22 bp, Artificial sequence
  SiRNA target sequence
atctcaaaatatgtcatctaac

SEQ ID NO: 70971 - DNA, 22 bp, Artificial sequence
  SiRNA target sequence
tctcaaaatatgtcatctaacc

SEQ ID NO: 70972 - DNA, 22 bp, Artificial sequence
  SiRNA target sequence
ctcaaaatatgtcatctaacca

SEQ ID NO: 70973 - DNA, 22 bp, Artificial sequence
  SiRNA target sequence
tcaaaatatgtcatctaaccaa

SEQ ID NO: 70974 - DNA, 22 bp, Artificial sequence
  SiRNA target sequence
caaaatatgtcatctaaccaac

SEQ ID NO: 70975 - DNA, 22 bp, Artificial sequence
  SiRNA target sequence
aaaatatgtcatctaaccaact

SEQ ID NO: 70976 - DNA, 22 bp, Artificial sequence
  SiRNA target sequence
aaatatgtcatctaaccaactc

SEQ ID NO: 70977 - DNA, 22 bp, Artificial sequence
  SiRNA target sequence
aatatgtcatctaaccaactca

SEQ ID NO: 70978 - DNA, 22 bp, Artificial sequence
  SiRNA target sequence
atatgtcatctaaccaactcat

SEQ ID NO: 70979 - DNA, 22 bp, Artificial sequence
  SiRNA target sequence
tatgtcatctaaccaactcatt

SEQ ID NO: 70980 - DNA, 22 bp, Artificial sequence
  SiRNA target sequence
atgtcatctaaccaactcattt

SEQ ID NO: 70981 - DNA, 22 bp, Artificial sequence
  SiRNA target sequence
tgtcatctaaccaactcattta

SEQ ID NO: 70982 - DNA, 22 bp, Artificial sequence
  SiRNA target sequence
gtcatctaaccaactcatttat

SEQ ID NO: 70983 - DNA, 22 bp, Artificial sequence
  SiRNA target sequence
tcatctaaccaactcatttatt

SEQ ID NO: 70984 - DNA, 22 bp, Artificial sequence
  SiRNA target sequence
catctaaccaactcatttattt

SEQ ID NO: 70985 - DNA, 22 bp, Artificial sequence
  SiRNA target sequence
atctaaccaactcatttattta

SEQ ID NO: 70986 - DNA, 22 bp, Artificial sequence
  SiRNA target sequence
tctaaccaactcatttatttaa

SEQ ID NO: 70987 - DNA, 22 bp, Artificial sequence
  SiRNA target sequence
ctaaccaactcatttatttaat

SEQ ID NO: 70988 - DNA, 22 bp, Artificial sequence
  SiRNA target sequence
taaccaactcatttatttaatg

SEQ ID NO: 70989 - DNA, 22 bp, Artificial sequence
  SiRNA target sequence
aaccaactcatttatttaatgt

SEQ ID NO: 70990 - DNA, 22 bp, Artificial sequence
  SiRNA target sequence
accaactcatttatttaatgtc

SEQ ID NO: 70991 - DNA, 22 bp, Artificial sequence
  SiRNA target sequence
ccaactcatttatttaatgtcc

SEQ ID NO: 70992 - DNA, 22 bp, Artificial sequence
  SiRNA target sequence
caactcatttatttaatgtcca

SEQ ID NO: 70993 - DNA, 22 bp, Artificial sequence
  SiRNA target sequence
aactcatttatttaatgtccat

SEQ ID NO: 70994 - DNA, 22 bp, Artificial sequence
  SiRNA target sequence
actcatttatttaatgtccatt

SEQ ID NO: 70995 - DNA, 22 bp, Artificial sequence
  SiRNA target sequence
ctcatttatttaatgtccatta

SEQ ID NO: 70996 - DNA, 22 bp, Artificial sequence
  SiRNA target sequence
tcatttatttaatgtccattac

SEQ ID NO: 70997 - DNA, 22 bp, Artificial sequence
  SiRNA target sequence
catttatttaatgtccattaca

SEQ ID NO: 70998 - DNA, 22 bp, Artificial sequence
  SiRNA target sequence
atttatttaatgtccattacat

SEQ ID NO: 70999 - DNA, 22 bp, Artificial sequence
  SiRNA target sequence
tttatttaatgtccattacatc

SEQ ID NO: 71000 - DNA, 22 bp, Artificial sequence
  SiRNA target sequence
ttatttaatgtccattacatct

SEQ ID NO: 71001 - DNA, 22 bp, Artificial sequence
  SiRNA target sequence
tatttaatgtccattacatcta

SEQ ID NO: 71002 - DNA, 22 bp, Artificial sequence
  SiRNA target sequence
atttaatgtccattacatctac

SEQ ID NO: 71003 - DNA, 22 bp, Artificial sequence
  SiRNA target sequence
tttaatgtccattacatctacg

SEQ ID NO: 71004 - DNA, 22 bp, Artificial sequence
  SiRNA target sequence
ttaatgtccattacatctacgg

SEQ ID NO: 71005 - DNA, 22 bp, Artificial sequence
  SiRNA target sequence
taatgtccattacatctacggt

SEQ ID NO: 71006 - DNA, 22 bp, Artificial sequence
  SiRNA target sequence
aatgtccattacatctacggtt

SEQ ID NO: 71007 - DNA, 22 bp, Artificial sequence
  SiRNA target sequence
atgtccattacatctacggtta

SEQ ID NO: 71008 - DNA, 22 bp, Artificial sequence
  SiRNA target sequence
tgtccattacatctacggttac

SEQ ID NO: 71009 - DNA, 22 bp, Artificial sequence
  SiRNA target sequence
gtccattacatctacggttact

SEQ ID NO: 71010 - DNA, 22 bp, Artificial sequence
  SiRNA target sequence
tccattacatctacggttacta

SEQ ID NO: 71011 - DNA, 22 bp, Artificial sequence
  SiRNA target sequence
ccattacatctacggttactat

SEQ ID NO: 71012 - DNA, 22 bp, Artificial sequence
  SiRNA target sequence
cattacatctacggttactatt

SEQ ID NO: 71013 - DNA, 22 bp, Artificial sequence
  SiRNA target sequence
attacatctacggttactatta

SEQ ID NO: 71014 - DNA, 22 bp, Artificial sequence
  SiRNA target sequence
ttacatctacggttactattaa

SEQ ID NO: 71015 - DNA, 22 bp, Artificial sequence
  SiRNA target sequence
tacatctacggttactattaat

SEQ ID NO: 71016 - DNA, 22 bp, Artificial sequence
  SiRNA target sequence
acatctacggttactattaatt

SEQ ID NO: 71017 - DNA, 22 bp, Artificial sequence
  SiRNA target sequence
catctacggttactattaattt

SEQ ID NO: 71018 - DNA, 22 bp, Artificial sequence
  SiRNA target sequence
atctacggttactattaattta

SEQ ID NO: 71019 - DNA, 22 bp, Artificial sequence
  SiRNA target sequence
tctacggttactattaatttaa

SEQ ID NO: 71020 - DNA, 22 bp, Artificial sequence
  SiRNA target sequence
ctacggttactattaatttaag

SEQ ID NO: 71021 - DNA, 22 bp, Artificial sequence
  SiRNA target sequence
tacggttactattaatttaagt

SEQ ID NO: 71022 - DNA, 22 bp, Artificial sequence
  SiRNA target sequence
acggttactattaatttaagta

SEQ ID NO: 71023 - DNA, 22 bp, Artificial sequence
  SiRNA target sequence
cggttactattaatttaagtaa

SEQ ID NO: 71024 - DNA, 22 bp, Artificial sequence
  SiRNA target sequence
ggttactattaatttaagtaac

SEQ ID NO: 71025 - DNA, 22 bp, Artificial sequence
  SiRNA target sequence
gttactattaatttaagtaact

SEQ ID NO: 71026 - DNA, 22 bp, Artificial sequence
  SiRNA target sequence
ttactattaatttaagtaactt

SEQ ID NO: 71027 - DNA, 22 bp, Artificial sequence
  SiRNA target sequence
tactattaatttaagtaacttg

SEQ ID NO: 71028 - DNA, 22 bp, Artificial sequence
  SiRNA target sequence
actattaatttaagtaacttgg

SEQ ID NO: 71029 - DNA, 22 bp, Artificial sequence
  SiRNA target sequence
ctattaatttaagtaacttggg

SEQ ID NO: 71030 - DNA, 22 bp, Artificial sequence
  SiRNA target sequence
tattaatttaagtaacttgggt

SEQ ID NO: 71031 - DNA, 22 bp, Artificial sequence
  SiRNA target sequence
attaatttaagtaacttgggtt

SEQ ID NO: 71032 - DNA, 22 bp, Artificial sequence
  SiRNA target sequence
ttaatttaagtaacttgggtta

SEQ ID NO: 71033 - DNA, 22 bp, Artificial sequence
  SiRNA target sequence
taatttaagtaacttgggttac

SEQ ID NO: 71034 - DNA, 22 bp, Artificial sequence
  SiRNA target sequence
aatttaagtaacttgggttact

SEQ ID NO: 71035 - DNA, 22 bp, Artificial sequence
  SiRNA target sequence
atttaagtaacttgggttactt

SEQ ID NO: 71036 - DNA, 22 bp, Artificial sequence
  SiRNA target sequence
tttaagtaacttgggttactta

SEQ ID NO: 71037 - DNA, 22 bp, Artificial sequence
  SiRNA target sequence
ttaagtaacttgggttacttat

SEQ ID NO: 71038 - DNA, 22 bp, Artificial sequence
  SiRNA target sequence
taagtaacttgggttacttata

SEQ ID NO: 71039 - DNA, 22 bp, Artificial sequence
  SiRNA target sequence
aagtaacttgggttacttatac

SEQ ID NO: 71040 - DNA, 22 bp, Artificial sequence
  SiRNA target sequence
agtaacttgggttacttataca

SEQ ID NO: 71041 - DNA, 22 bp, Artificial sequence
  SiRNA target sequence
gtaacttgggttacttatacac

SEQ ID NO: 71042 - DNA, 22 bp, Artificial sequence
  SiRNA target sequence
taacttgggttacttatacact

SEQ ID NO: 71043 - DNA, 22 bp, Artificial sequence
  SiRNA target sequence
aacttgggttacttatacacta

SEQ ID NO: 71044 - DNA, 22 bp, Artificial sequence
  SiRNA target sequence
acttgggttacttatacactag

SEQ ID NO: 71045 - DNA, 22 bp, Artificial sequence
  SiRNA target sequence
cttgggttacttatacactaga

SEQ ID NO: 71046 - DNA, 22 bp, Artificial sequence
  SiRNA target sequence
ttgggttacttatacactagat

SEQ ID NO: 71047 - DNA, 22 bp, Artificial sequence
  SiRNA target sequence
tgggttacttatacactagata

SEQ ID NO: 71048 - DNA, 22 bp, Artificial sequence
  SiRNA target sequence
gggttacttatacactagatat

SEQ ID NO: 71049 - DNA, 22 bp, Artificial sequence
  SiRNA target sequence
ggttacttatacactagatata

SEQ ID NO: 71050 - DNA, 22 bp, Artificial sequence
  SiRNA target sequence
gttacttatacactagatatac

SEQ ID NO: 71051 - DNA, 22 bp, Artificial sequence
  SiRNA target sequence
ttacttatacactagatataca

SEQ ID NO: 71052 - DNA, 22 bp, Artificial sequence
  SiRNA target sequence
tacttatacactagatatacac

SEQ ID NO: 71053 - DNA, 22 bp, Artificial sequence
  SiRNA target sequence
acttatacactagatatacaca

SEQ ID NO: 71054 - DNA, 22 bp, Artificial sequence
  SiRNA target sequence
cttatacactagatatacacaa

SEQ ID NO: 71055 - DNA, 22 bp, Artificial sequence
  SiRNA target sequence
ttatacactagatatacacaag

SEQ ID NO: 71056 - DNA, 22 bp, Artificial sequence
  SiRNA target sequence
tatacactagatatacacaagc

SEQ ID NO: 71057 - DNA, 22 bp, Artificial sequence
  SiRNA target sequence
atacactagatatacacaagca

SEQ ID NO: 71058 - DNA, 22 bp, Artificial sequence
  SiRNA target sequence
tacactagatatacacaagcaa

SEQ ID NO: 71059 - DNA, 22 bp, Artificial sequence
  SiRNA target sequence
acactagatatacacaagcaat

SEQ ID NO: 71060 - DNA, 22 bp, Artificial sequence
  SiRNA target sequence
cactagatatacacaagcaata

SEQ ID NO: 71061 - DNA, 22 bp, Artificial sequence
  SiRNA target sequence
actagatatacacaagcaataa

SEQ ID NO: 71062 - DNA, 22 bp, Artificial sequence
  SiRNA target sequence
ctagatatacacaagcaataat

SEQ ID NO: 71063 - DNA, 22 bp, Artificial sequence
  SiRNA target sequence
tagatatacacaagcaataatt

SEQ ID NO: 71064 - DNA, 22 bp, Artificial sequence
  SiRNA target sequence
agatatacacaagcaataatta

SEQ ID NO: 71065 - DNA, 22 bp, Artificial sequence
  SiRNA target sequence
gatatacacaagcaataattaa

SEQ ID NO: 71066 - DNA, 22 bp, Artificial sequence
  SiRNA target sequence
atatacacaagcaataattaat

SEQ ID NO: 71067 - DNA, 22 bp, Artificial sequence
  SiRNA target sequence
tatacacaagcaataattaatg

SEQ ID NO: 71068 - DNA, 22 bp, Artificial sequence
  SiRNA target sequence
atacacaagcaataattaatgc

SEQ ID NO: 71069 - DNA, 22 bp, Artificial sequence
  SiRNA target sequence
tacacaagcaataattaatgca

SEQ ID NO: 71070 - DNA, 22 bp, Artificial sequence
  SiRNA target sequence
acacaagcaataattaatgcaa

SEQ ID NO: 71071 - DNA, 22 bp, Artificial sequence
  SiRNA target sequence
cacaagcaataattaatgcaag

SEQ ID NO: 71072 - DNA, 22 bp, Artificial sequence
  SiRNA target sequence
acaagcaataattaatgcaaga

SEQ ID NO: 71073 - DNA, 22 bp, Artificial sequence
  SiRNA target sequence
caagcaataattaatgcaagat

SEQ ID NO: 71074 - DNA, 22 bp, Artificial sequence
  SiRNA target sequence
aagcaataattaatgcaagatc

SEQ ID NO: 71075 - DNA, 22 bp, Artificial sequence
  SiRNA target sequence
agcaataattaatgcaagatct

SEQ ID NO: 71076 - DNA, 22 bp, Artificial sequence
  SiRNA target sequence
gcaataattaatgcaagatcta

SEQ ID NO: 71077 - DNA, 22 bp, Artificial sequence
  SiRNA target sequence
caataattaatgcaagatctac

SEQ ID NO: 71078 - DNA, 22 bp, Artificial sequence
  SiRNA target sequence
aataattaatgcaagatctact

SEQ ID NO: 71079 - DNA, 22 bp, Artificial sequence
  SiRNA target sequence
ataattaatgcaagatctactt

SEQ ID NO: 71080 - DNA, 22 bp, Artificial sequence
  SiRNA target sequence
taattaatgcaagatctactta

SEQ ID NO: 71081 - DNA, 22 bp, Artificial sequence
  SiRNA target sequence
aattaatgcaagatctacttat

SEQ ID NO: 71082 - DNA, 22 bp, Artificial sequence
  SiRNA target sequence
attaatgcaagatctacttatg

SEQ ID NO: 71083 - DNA, 22 bp, Artificial sequence
  SiRNA target sequence
ttaatgcaagatctacttatga

SEQ ID NO: 71084 - DNA, 22 bp, Artificial sequence
  SiRNA target sequence
taatgcaagatctacttatgat

SEQ ID NO: 71085 - DNA, 22 bp, Artificial sequence
  SiRNA target sequence
aatgcaagatctacttatgata

SEQ ID NO: 71086 - DNA, 22 bp, Artificial sequence
  SiRNA target sequence
atgcaagatctacttatgatac

SEQ ID NO: 71087 - DNA, 22 bp, Artificial sequence
  SiRNA target sequence
tgcaagatctacttatgataca

SEQ ID NO: 71088 - DNA, 22 bp, Artificial sequence
  SiRNA target sequence
gcaagatctacttatgatacaa

SEQ ID NO: 71089 - DNA, 22 bp, Artificial sequence
  SiRNA target sequence
caagatctacttatgatacaat

SEQ ID NO: 71090 - DNA, 22 bp, Artificial sequence
  SiRNA target sequence
aagatctacttatgatacaatg

SEQ ID NO: 71091 - DNA, 22 bp, Artificial sequence
  SiRNA target sequence
agatctacttatgatacaatgt

SEQ ID NO: 71092 - DNA, 22 bp, Artificial sequence
  SiRNA target sequence
gatctacttatgatacaatgtt

SEQ ID NO: 71093 - DNA, 22 bp, Artificial sequence
  SiRNA target sequence
atctacttatgatacaatgtta

SEQ ID NO: 71094 - DNA, 22 bp, Artificial sequence
  SiRNA target sequence
tctacttatgatacaatgttag

SEQ ID NO: 71095 - DNA, 22 bp, Artificial sequence
  SiRNA target sequence
ctacttatgatacaatgttaga

SEQ ID NO: 71096 - DNA, 22 bp, Artificial sequence
  SiRNA target sequence
tacttatgatacaatgttagat

SEQ ID NO: 71097 - DNA, 22 bp, Artificial sequence
  SiRNA target sequence
acttatgatacaatgttagata

SEQ ID NO: 71098 - DNA, 22 bp, Artificial sequence
  SiRNA target sequence
cttatgatacaatgttagatat

SEQ ID NO: 71099 - DNA, 22 bp, Artificial sequence
  SiRNA target sequence
ttatgatacaatgttagatata

SEQ ID NO: 71100 - DNA, 22 bp, Artificial sequence
  SiRNA target sequence
tatgatacaatgttagatataa

SEQ ID NO: 71101 - DNA, 22 bp, Artificial sequence
  SiRNA target sequence
atgatacaatgttagatataaa

SEQ ID NO: 71102 - DNA, 22 bp, Artificial sequence
  SiRNA target sequence
tgatacaatgttagatataaaa

SEQ ID NO: 71103 - DNA, 22 bp, Artificial sequence
  SiRNA target sequence
gatacaatgttagatataaaaa

SEQ ID NO: 71104 - DNA, 22 bp, Artificial sequence
  SiRNA target sequence
atacaatgttagatataaaaaa

SEQ ID NO: 71105 - DNA, 22 bp, Artificial sequence
  SiRNA target sequence
tacaatgttagatataaaaaaa

SEQ ID NO: 71106 - DNA, 22 bp, Artificial sequence
  SiRNA target sequence
acaatgttagatataaaaaaag

SEQ ID NO: 71107 - DNA, 22 bp, Artificial sequence
  SiRNA target sequence
caatgttagatataaaaaaaga

SEQ ID NO: 71108 - DNA, 22 bp, Artificial sequence
  SiRNA target sequence
aatgttagatataaaaaaagag

SEQ ID NO: 71109 - DNA, 22 bp, Artificial sequence
  SiRNA target sequence
atgttagatataaaaaaagaga

SEQ ID NO: 71110 - DNA, 22 bp, Artificial sequence
  SiRNA target sequence
tgttagatataaaaaaagagaa

SEQ ID NO: 71111 - DNA, 22 bp, Artificial sequence
  SiRNA target sequence
gttagatataaaaaaagagaat

SEQ ID NO: 71112 - DNA, 22 bp, Artificial sequence
  SiRNA target sequence
ttagatataaaaaaagagaata

SEQ ID NO: 71113 - DNA, 22 bp, Artificial sequence
  SiRNA target sequence
tagatataaaaaaagagaataa

SEQ ID NO: 71114 - DNA, 22 bp, Artificial sequence
  SiRNA target sequence
agatataaaaaaagagaataat

SEQ ID NO: 71115 - DNA, 22 bp, Artificial sequence
  SiRNA target sequence
gatataaaaaaagagaataata

SEQ ID NO: 71116 - DNA, 22 bp, Artificial sequence
  SiRNA target sequence
atataaaaaaagagaataataa

SEQ ID NO: 71117 - DNA, 22 bp, Artificial sequence
  SiRNA target sequence
tataaaaaaagagaataataag

SEQ ID NO: 71118 - DNA, 22 bp, Artificial sequence
  SiRNA target sequence
ataaaaaaagagaataataagt

SEQ ID NO: 71119 - DNA, 22 bp, Artificial sequence
  SiRNA target sequence
taaaaaaagagaataataagtt

SEQ ID NO: 71120 - DNA, 22 bp, Artificial sequence
  SiRNA target sequence
aaaaaaagagaataataagttt

SEQ ID NO: 71121 - DNA, 22 bp, Artificial sequence
  SiRNA target sequence
aaaaaagagaataataagttta

SEQ ID NO: 71122 - DNA, 22 bp, Artificial sequence
  SiRNA target sequence
aaaaagagaataataagtttaa

SEQ ID NO: 71123 - DNA, 22 bp, Artificial sequence
  SiRNA target sequence
aaaagagaataataagtttaag

SEQ ID NO: 71124 - DNA, 22 bp, Artificial sequence
  SiRNA target sequence
aaagagaataataagtttaaga

SEQ ID NO: 71125 - DNA, 22 bp, Artificial sequence
  SiRNA target sequence
aagagaataataagtttaagat

SEQ ID NO: 71126 - DNA, 22 bp, Artificial sequence
  SiRNA target sequence
agagaataataagtttaagatt

SEQ ID NO: 71127 - DNA, 22 bp, Artificial sequence
  SiRNA target sequence
gagaataataagtttaagatta

SEQ ID NO: 71128 - DNA, 22 bp, Artificial sequence
  SiRNA target sequence
agaataataagtttaagattac

SEQ ID NO: 71129 - DNA, 22 bp, Artificial sequence
  SiRNA target sequence
gaataataagtttaagattaca

SEQ ID NO: 71130 - DNA, 22 bp, Artificial sequence
  SiRNA target sequence
aataataagtttaagattacag

SEQ ID NO: 71131 - DNA, 22 bp, Artificial sequence
  SiRNA target sequence
ataataagtttaagattacaga

SEQ ID NO: 71132 - DNA, 22 bp, Artificial sequence
  SiRNA target sequence
taataagtttaagattacagaa

SEQ ID NO: 71133 - DNA, 22 bp, Artificial sequence
  SiRNA target sequence
aataagtttaagattacagaat

SEQ ID NO: 71134 - DNA, 22 bp, Artificial sequence
  SiRNA target sequence
ataagtttaagattacagaatt

SEQ ID NO: 71135 - DNA, 22 bp, Artificial sequence
  SiRNA target sequence
taagtttaagattacagaattt

SEQ ID NO: 71136 - DNA, 22 bp, Artificial sequence
  SiRNA target sequence
aagtttaagattacagaattta

SEQ ID NO: 71137 - DNA, 22 bp, Artificial sequence
  SiRNA target sequence
agtttaagattacagaatttaa

SEQ ID NO: 71138 - DNA, 22 bp, Artificial sequence
  SiRNA target sequence
gtttaagattacagaatttaaa

SEQ ID NO: 71139 - DNA, 22 bp, Artificial sequence
  SiRNA target sequence
tttaagattacagaatttaaag

SEQ ID NO: 71140 - DNA, 22 bp, Artificial sequence
  SiRNA target sequence
ttaagattacagaatttaaaga

SEQ ID NO: 71141 - DNA, 22 bp, Artificial sequence
  SiRNA target sequence
taagattacagaatttaaagaa

SEQ ID NO: 71142 - DNA, 22 bp, Artificial sequence
  SiRNA target sequence
aagattacagaatttaaagaaa

SEQ ID NO: 71143 - DNA, 22 bp, Artificial sequence
  SiRNA target sequence
agattacagaatttaaagaaag

SEQ ID NO: 71144 - DNA, 22 bp, Artificial sequence
  SiRNA target sequence
gattacagaatttaaagaaagt

SEQ ID NO: 71145 - DNA, 22 bp, Artificial sequence
  SiRNA target sequence
attacagaatttaaagaaagta

SEQ ID NO: 71146 - DNA, 22 bp, Artificial sequence
  SiRNA target sequence
ttacagaatttaaagaaagtat

SEQ ID NO: 71147 - DNA, 22 bp, Artificial sequence
  SiRNA target sequence
tacagaatttaaagaaagtatt

SEQ ID NO: 71148 - DNA, 22 bp, Artificial sequence
  SiRNA target sequence
acagaatttaaagaaagtatta

SEQ ID NO: 71149 - DNA, 22 bp, Artificial sequence
  SiRNA target sequence
cagaatttaaagaaagtattaa

SEQ ID NO: 71150 - DNA, 22 bp, Artificial sequence
  SiRNA target sequence
agaatttaaagaaagtattaag

SEQ ID NO: 71151 - DNA, 22 bp, Artificial sequence
  SiRNA target sequence
gaatttaaagaaagtattaagt

SEQ ID NO: 71152 - DNA, 22 bp, Artificial sequence
  SiRNA target sequence
aatttaaagaaagtattaagtt

SEQ ID NO: 71153 - DNA, 22 bp, Artificial sequence
  SiRNA target sequence
atttaaagaaagtattaagttt

SEQ ID NO: 71154 - DNA, 22 bp, Artificial sequence
  SiRNA target sequence
tttaaagaaagtattaagttta

SEQ ID NO: 71155 - DNA, 22 bp, Artificial sequence
  SiRNA target sequence
ttaaagaaagtattaagtttaa

SEQ ID NO: 71156 - DNA, 22 bp, Artificial sequence
  SiRNA target sequence
taaagaaagtattaagtttaat

SEQ ID NO: 71157 - DNA, 22 bp, Artificial sequence
  SiRNA target sequence
aaagaaagtattaagtttaata

SEQ ID NO: 71158 - DNA, 22 bp, Artificial sequence
  SiRNA target sequence
aagaaagtattaagtttaataa

SEQ ID NO: 71159 - DNA, 22 bp, Artificial sequence
  SiRNA target sequence
agaaagtattaagtttaataat

SEQ ID NO: 71160 - DNA, 22 bp, Artificial sequence
  SiRNA target sequence
gaaagtattaagtttaataatt

SEQ ID NO: 71161 - DNA, 22 bp, Artificial sequence
  SiRNA target sequence
aaagtattaagtttaataattt

SEQ ID NO: 71162 - DNA, 22 bp, Artificial sequence
  SiRNA target sequence
aagtattaagtttaataatttg

SEQ ID NO: 71163 - DNA, 22 bp, Artificial sequence
  SiRNA target sequence
agtattaagtttaataatttgt

SEQ ID NO: 71164 - DNA, 22 bp, Artificial sequence
  SiRNA target sequence
gtattaagtttaataatttgtc

SEQ ID NO: 71165 - DNA, 22 bp, Artificial sequence
  SiRNA target sequence
tattaagtttaataatttgtca

SEQ ID NO: 71166 - DNA, 22 bp, Artificial sequence
  SiRNA target sequence
attaagtttaataatttgtcat

SEQ ID NO: 71167 - DNA, 22 bp, Artificial sequence
  SiRNA target sequence
ttaagtttaataatttgtcatt

SEQ ID NO: 71168 - DNA, 22 bp, Artificial sequence
  SiRNA target sequence
taagtttaataatttgtcattt

SEQ ID NO: 71169 - DNA, 22 bp, Artificial sequence
  SiRNA target sequence
aagtttaataatttgtcatttg

SEQ ID NO: 71170 - DNA, 22 bp, Artificial sequence
  SiRNA target sequence
agtttaataatttgtcatttgg

SEQ ID NO: 71171 - DNA, 22 bp, Artificial sequence
  SiRNA target sequence
gtttaataatttgtcatttggt

SEQ ID NO: 71172 - DNA, 22 bp, Artificial sequence
  SiRNA target sequence
tttaataatttgtcatttggtt

SEQ ID NO: 71173 - DNA, 22 bp, Artificial sequence
  SiRNA target sequence
ttaataatttgtcatttggtta

SEQ ID NO: 71174 - DNA, 22 bp, Artificial sequence
  SiRNA target sequence
taataatttgtcatttggttat

SEQ ID NO: 71175 - DNA, 22 bp, Artificial sequence
  SiRNA target sequence
aataatttgtcatttggttatg

SEQ ID NO: 71176 - DNA, 22 bp, Artificial sequence
  SiRNA target sequence
ataatttgtcatttggttatga

SEQ ID NO: 71177 - DNA, 22 bp, Artificial sequence
  SiRNA target sequence
taatttgtcatttggttatgaa

SEQ ID NO: 71178 - DNA, 22 bp, Artificial sequence
  SiRNA target sequence
aatttgtcatttggttatgaaa

SEQ ID NO: 71179 - DNA, 22 bp, Artificial sequence
  SiRNA target sequence
atttgtcatttggttatgaaag

SEQ ID NO: 71180 - DNA, 22 bp, Artificial sequence
  SiRNA target sequence
tttgtcatttggttatgaaagt

SEQ ID NO: 71181 - DNA, 22 bp, Artificial sequence
  SiRNA target sequence
ttgtcatttggttatgaaagta

SEQ ID NO: 71182 - DNA, 22 bp, Artificial sequence
  SiRNA target sequence
tgtcatttggttatgaaagtag

SEQ ID NO: 71183 - DNA, 22 bp, Artificial sequence
  SiRNA target sequence
gtcatttggttatgaaagtaga

SEQ ID NO: 71184 - DNA, 22 bp, Artificial sequence
  SiRNA target sequence
tcatttggttatgaaagtagac

SEQ ID NO: 71185 - DNA, 22 bp, Artificial sequence
  SiRNA target sequence
catttggttatgaaagtagaca

SEQ ID NO: 71186 - DNA, 22 bp, Artificial sequence
  SiRNA target sequence
atttggttatgaaagtagacaa

SEQ ID NO: 71187 - DNA, 22 bp, Artificial sequence
  SiRNA target sequence
tttggttatgaaagtagacaaa

SEQ ID NO: 71188 - DNA, 22 bp, Artificial sequence
  SiRNA target sequence
ttggttatgaaagtagacaaat

SEQ ID NO: 71189 - DNA, 22 bp, Artificial sequence
  SiRNA target sequence
tggttatgaaagtagacaaatt

SEQ ID NO: 71190 - DNA, 22 bp, Artificial sequence
  SiRNA target sequence
ggttatgaaagtagacaaattt

SEQ ID NO: 71191 - DNA, 22 bp, Artificial sequence
  SiRNA target sequence
gttatgaaagtagacaaatttt

SEQ ID NO: 71192 - DNA, 22 bp, Artificial sequence
  SiRNA target sequence
ttatgaaagtagacaaattttt

SEQ ID NO: 71193 - DNA, 22 bp, Artificial sequence
  SiRNA target sequence
tatgaaagtagacaaattttta

SEQ ID NO: 71194 - DNA, 22 bp, Artificial sequence
  SiRNA target sequence
atgaaagtagacaaatttttaa

SEQ ID NO: 71195 - DNA, 22 bp, Artificial sequence
  SiRNA target sequence
tgaaagtagacaaatttttaat

SEQ ID NO: 71196 - DNA, 22 bp, Artificial sequence
  SiRNA target sequence
gaaagtagacaaatttttaata

SEQ ID NO: 71197 - DNA, 22 bp, Artificial sequence
  SiRNA target sequence
aaagtagacaaatttttaataa

SEQ ID NO: 71198 - DNA, 22 bp, Artificial sequence
  SiRNA target sequence
aagtagacaaatttttaataaa

SEQ ID NO: 71199 - DNA, 22 bp, Artificial sequence
  SiRNA target sequence
agtagacaaatttttaataaaa

SEQ ID NO: 71200 - DNA, 22 bp, Artificial sequence
  SiRNA target sequence
gtagacaaatttttaataaaat

SEQ ID NO: 71201 - DNA, 22 bp, Artificial sequence
  SiRNA target sequence
tagacaaatttttaataaaata

SEQ ID NO: 71202 - DNA, 22 bp, Artificial sequence
  SiRNA target sequence
agacaaatttttaataaaataa

SEQ ID NO: 71203 - DNA, 22 bp, Artificial sequence
  SiRNA target sequence
gacaaatttttaataaaataaa

SEQ ID NO: 71204 - DNA, 22 bp, Artificial sequence
  SiRNA target sequence
acaaatttttaataaaataaat

SEQ ID NO: 71205 - DNA, 22 bp, Artificial sequence
  SiRNA target sequence
caaatttttaataaaataaatc

SEQ ID NO: 71206 - DNA, 22 bp, Artificial sequence
  SiRNA target sequence
aaatttttaataaaataaatct

SEQ ID NO: 71207 - DNA, 22 bp, Artificial sequence
  SiRNA target sequence
aatttttaataaaataaatcta

SEQ ID NO: 71208 - DNA, 22 bp, Artificial sequence
  SiRNA target sequence
atttttaataaaataaatctag

SEQ ID NO: 71209 - DNA, 22 bp, Artificial sequence
  SiRNA target sequence
tttttaataaaataaatctaga

SEQ ID NO: 71210 - DNA, 22 bp, Artificial sequence
  SiRNA target sequence
ttttaataaaataaatctagaa

SEQ ID NO: 71211 - DNA, 22 bp, Artificial sequence
  SiRNA target sequence
tttaataaaataaatctagaaa

SEQ ID NO: 71212 - DNA, 22 bp, Artificial sequence
  SiRNA target sequence
ttaataaaataaatctagaaat

SEQ ID NO: 71213 - DNA, 22 bp, Artificial sequence
  SiRNA target sequence
taataaaataaatctagaaata

SEQ ID NO: 71214 - DNA, 22 bp, Artificial sequence
  SiRNA target sequence
aataaaataaatctagaaatat

SEQ ID NO: 71215 - DNA, 22 bp, Artificial sequence
  SiRNA target sequence
ataaaataaatctagaaatata

SEQ ID NO: 71216 - DNA, 22 bp, Artificial sequence
  SiRNA target sequence
taaaataaatctagaaatatac

SEQ ID NO: 71217 - DNA, 22 bp, Artificial sequence
  SiRNA target sequence
aaaataaatctagaaatataca

SEQ ID NO: 71218 - DNA, 22 bp, Artificial sequence
  SiRNA target sequence
aaataaatctagaaatatacaa

SEQ ID NO: 71219 - DNA, 22 bp, Artificial sequence
  SiRNA target sequence
aataaatctagaaatatacaaa

SEQ ID NO: 71220 - DNA, 22 bp, Artificial sequence
  SiRNA target sequence
ataaatctagaaatatacaaag

SEQ ID NO: 71221 - DNA, 22 bp, Artificial sequence
  SiRNA target sequence
taaatctagaaatatacaaagg

SEQ ID NO: 71222 - DNA, 22 bp, Artificial sequence
  SiRNA target sequence
aaatctagaaatatacaaagga

SEQ ID NO: 71223 - DNA, 22 bp, Artificial sequence
  SiRNA target sequence
aatctagaaatatacaaaggag

SEQ ID NO: 71224 - DNA, 22 bp, Artificial sequence
  SiRNA target sequence
atctagaaatatacaaaggaga

SEQ ID NO: 71225 - DNA, 22 bp, Artificial sequence
  SiRNA target sequence
tctagaaatatacaaaggagaa

SEQ ID NO: 71226 - DNA, 22 bp, Artificial sequence
  SiRNA target sequence
ctagaaatatacaaaggagaaa

SEQ ID NO: 71227 - DNA, 22 bp, Artificial sequence
  SiRNA target sequence
tagaaatatacaaaggagaaaa

SEQ ID NO: 71228 - DNA, 22 bp, Artificial sequence
  SiRNA target sequence
agaaatatacaaaggagaaaaa

SEQ ID NO: 71229 - DNA, 22 bp, Artificial sequence
  SiRNA target sequence
gaaatatacaaaggagaaaaag

SEQ ID NO: 71230 - DNA, 22 bp, Artificial sequence
  SiRNA target sequence
aaatatacaaaggagaaaaagt

SEQ ID NO: 71231 - DNA, 22 bp, Artificial sequence
  SiRNA target sequence
aatatacaaaggagaaaaagta

SEQ ID NO: 71232 - DNA, 22 bp, Artificial sequence
  SiRNA target sequence
atatacaaaggagaaaaagtag

SEQ ID NO: 71233 - DNA, 22 bp, Artificial sequence
  SiRNA target sequence
tatacaaaggagaaaaagtagc

SEQ ID NO: 71234 - DNA, 22 bp, Artificial sequence
  SiRNA target sequence
atacaaaggagaaaaagtagca

SEQ ID NO: 71235 - DNA, 22 bp, Artificial sequence
  SiRNA target sequence
tacaaaggagaaaaagtagcaa

SEQ ID NO: 71236 - DNA, 22 bp, Artificial sequence
  SiRNA target sequence
acaaaggagaaaaagtagcaat

SEQ ID NO: 71237 - DNA, 22 bp, Artificial sequence
  SiRNA target sequence
caaaggagaaaaagtagcaatt

SEQ ID NO: 71238 - DNA, 22 bp, Artificial sequence
  SiRNA target sequence
aaaggagaaaaagtagcaatta

SEQ ID NO: 71239 - DNA, 22 bp, Artificial sequence
  SiRNA target sequence
aaggagaaaaagtagcaattat

SEQ ID NO: 71240 - DNA, 22 bp, Artificial sequence
  SiRNA target sequence
aggagaaaaagtagcaattata

SEQ ID NO: 71241 - DNA, 22 bp, Artificial sequence
  SiRNA target sequence
ggagaaaaagtagcaattatag

SEQ ID NO: 71242 - DNA, 22 bp, Artificial sequence
  SiRNA target sequence
gagaaaaagtagcaattatagg

SEQ ID NO: 71243 - DNA, 22 bp, Artificial sequence
  SiRNA target sequence
agaaaaagtagcaattataggt

SEQ ID NO: 71244 - DNA, 22 bp, Artificial sequence
  SiRNA target sequence
gaaaaagtagcaattataggta

SEQ ID NO: 71245 - DNA, 22 bp, Artificial sequence
  SiRNA target sequence
aaaaagtagcaattataggtaa

SEQ ID NO: 71246 - DNA, 22 bp, Artificial sequence
  SiRNA target sequence
aaaagtagcaattataggtaaa

SEQ ID NO: 71247 - DNA, 22 bp, Artificial sequence
  SiRNA target sequence
aaagtagcaattataggtaaaa

SEQ ID NO: 71248 - DNA, 22 bp, Artificial sequence
  SiRNA target sequence
aagtagcaattataggtaaaaa

SEQ ID NO: 71249 - DNA, 22 bp, Artificial sequence
  SiRNA target sequence
agtagcaattataggtaaaaat

SEQ ID NO: 71250 - DNA, 22 bp, Artificial sequence
  SiRNA target sequence
gtagcaattataggtaaaaatg

SEQ ID NO: 71251 - DNA, 22 bp, Artificial sequence
  SiRNA target sequence
tagcaattataggtaaaaatgg

SEQ ID NO: 71252 - DNA, 22 bp, Artificial sequence
  SiRNA target sequence
agcaattataggtaaaaatggt

SEQ ID NO: 71253 - DNA, 22 bp, Artificial sequence
  SiRNA target sequence
gcaattataggtaaaaatggta

SEQ ID NO: 71254 - DNA, 22 bp, Artificial sequence
  SiRNA target sequence
caattataggtaaaaatggtag

SEQ ID NO: 71255 - DNA, 22 bp, Artificial sequence
  SiRNA target sequence
aattataggtaaaaatggtagt

SEQ ID NO: 71256 - DNA, 22 bp, Artificial sequence
  SiRNA target sequence
attataggtaaaaatggtagtg

SEQ ID NO: 71257 - DNA, 22 bp, Artificial sequence
  SiRNA target sequence
ttataggtaaaaatggtagtgg

SEQ ID NO: 71258 - DNA, 22 bp, Artificial sequence
  SiRNA target sequence
tataggtaaaaatggtagtggt

SEQ ID NO: 71259 - DNA, 22 bp, Artificial sequence
  SiRNA target sequence
ataggtaaaaatggtagtggta

SEQ ID NO: 71260 - DNA, 22 bp, Artificial sequence
  SiRNA target sequence
taggtaaaaatggtagtggtaa

SEQ ID NO: 71261 - DNA, 22 bp, Artificial sequence
  SiRNA target sequence
aggtaaaaatggtagtggtaaa

SEQ ID NO: 71262 - DNA, 22 bp, Artificial sequence
  SiRNA target sequence
ggtaaaaatggtagtggtaaat

SEQ ID NO: 71263 - DNA, 22 bp, Artificial sequence
  SiRNA target sequence
gtaaaaatggtagtggtaaatc

SEQ ID NO: 71264 - DNA, 22 bp, Artificial sequence
  SiRNA target sequence
taaaaatggtagtggtaaatca

SEQ ID NO: 71265 - DNA, 22 bp, Artificial sequence
  SiRNA target sequence
aaaaatggtagtggtaaatcaa

SEQ ID NO: 71266 - DNA, 22 bp, Artificial sequence
  SiRNA target sequence
aaaatggtagtggtaaatcaac

SEQ ID NO: 71267 - DNA, 22 bp, Artificial sequence
  SiRNA target sequence
aaatggtagtggtaaatcaaca

SEQ ID NO: 71268 - DNA, 22 bp, Artificial sequence
  SiRNA target sequence
aatggtagtggtaaatcaacat

SEQ ID NO: 71269 - DNA, 22 bp, Artificial sequence
  SiRNA target sequence
atggtagtggtaaatcaacatt

SEQ ID NO: 71270 - DNA, 22 bp, Artificial sequence
  SiRNA target sequence
tggtagtggtaaatcaacatta

SEQ ID NO: 71271 - DNA, 22 bp, Artificial sequence
  SiRNA target sequence
ggtagtggtaaatcaacattac

SEQ ID NO: 71272 - DNA, 22 bp, Artificial sequence
  SiRNA target sequence
gtagtggtaaatcaacattact

SEQ ID NO: 71273 - DNA, 22 bp, Artificial sequence
  SiRNA target sequence
tagtggtaaatcaacattacta

SEQ ID NO: 71274 - DNA, 22 bp, Artificial sequence
  SiRNA target sequence
agtggtaaatcaacattactaa

SEQ ID NO: 71275 - DNA, 22 bp, Artificial sequence
  SiRNA target sequence
gtggtaaatcaacattactaaa

SEQ ID NO: 71276 - DNA, 22 bp, Artificial sequence
  SiRNA target sequence
tggtaaatcaacattactaaaa

SEQ ID NO: 71277 - DNA, 22 bp, Artificial sequence
  SiRNA target sequence
ggtaaatcaacattactaaaac

SEQ ID NO: 71278 - DNA, 22 bp, Artificial sequence
  SiRNA target sequence
gtaaatcaacattactaaaact

SEQ ID NO: 71279 - DNA, 22 bp, Artificial sequence
  SiRNA target sequence
taaatcaacattactaaaacta

SEQ ID NO: 71280 - DNA, 22 bp, Artificial sequence
  SiRNA target sequence
aaatcaacattactaaaactac

SEQ ID NO: 71281 - DNA, 22 bp, Artificial sequence
  SiRNA target sequence
aatcaacattactaaaactact

SEQ ID NO: 71282 - DNA, 22 bp, Artificial sequence
  SiRNA target sequence
atcaacattactaaaactactg

SEQ ID NO: 71283 - DNA, 22 bp, Artificial sequence
  SiRNA target sequence
tcaacattactaaaactactgc

SEQ ID NO: 71284 - DNA, 22 bp, Artificial sequence
  SiRNA target sequence
caacattactaaaactactgct

SEQ ID NO: 71285 - DNA, 22 bp, Artificial sequence
  SiRNA target sequence
aacattactaaaactactgctt

SEQ ID NO: 71286 - DNA, 22 bp, Artificial sequence
  SiRNA target sequence
acattactaaaactactgctta

SEQ ID NO: 71287 - DNA, 22 bp, Artificial sequence
  SiRNA target sequence
cattactaaaactactgcttaa

SEQ ID NO: 71288 - DNA, 22 bp, Artificial sequence
  SiRNA target sequence
attactaaaactactgcttaaa

SEQ ID NO: 71289 - DNA, 22 bp, Artificial sequence
  SiRNA target sequence
ttactaaaactactgcttaaat

SEQ ID NO: 71290 - DNA, 22 bp, Artificial sequence
  SiRNA target sequence
tactaaaactactgcttaaatt

SEQ ID NO: 71291 - DNA, 22 bp, Artificial sequence
  SiRNA target sequence
actaaaactactgcttaaattt

SEQ ID NO: 71292 - DNA, 22 bp, Artificial sequence
  SiRNA target sequence
ctaaaactactgcttaaatttg

SEQ ID NO: 71293 - DNA, 22 bp, Artificial sequence
  SiRNA target sequence
taaaactactgcttaaatttga

SEQ ID NO: 71294 - DNA, 22 bp, Artificial sequence
  SiRNA target sequence
aaaactactgcttaaatttgat

SEQ ID NO: 71295 - DNA, 22 bp, Artificial sequence
  SiRNA target sequence
aaactactgcttaaatttgatg

SEQ ID NO: 71296 - DNA, 22 bp, Artificial sequence
  SiRNA target sequence
aactactgcttaaatttgatga

SEQ ID NO: 71297 - DNA, 22 bp, Artificial sequence
  SiRNA target sequence
actactgcttaaatttgatgaa

SEQ ID NO: 71298 - DNA, 22 bp, Artificial sequence
  SiRNA target sequence
ctactgcttaaatttgatgaag

SEQ ID NO: 71299 - DNA, 22 bp, Artificial sequence
  SiRNA target sequence
tactgcttaaatttgatgaaga

SEQ ID NO: 71300 - DNA, 22 bp, Artificial sequence
  SiRNA target sequence
actgcttaaatttgatgaagat

SEQ ID NO: 71301 - DNA, 22 bp, Artificial sequence
  SiRNA target sequence
ctgcttaaatttgatgaagatt

SEQ ID NO: 71302 - DNA, 22 bp, Artificial sequence
  SiRNA target sequence
tgcttaaatttgatgaagatta

SEQ ID NO: 71303 - DNA, 22 bp, Artificial sequence
  SiRNA target sequence
gcttaaatttgatgaagattac

SEQ ID NO: 71304 - DNA, 22 bp, Artificial sequence
  SiRNA target sequence
cttaaatttgatgaagattaca

SEQ ID NO: 71305 - DNA, 22 bp, Artificial sequence
  SiRNA target sequence
ttaaatttgatgaagattacaa

SEQ ID NO: 71306 - DNA, 22 bp, Artificial sequence
  SiRNA target sequence
taaatttgatgaagattacaaa

SEQ ID NO: 71307 - DNA, 22 bp, Artificial sequence
  SiRNA target sequence
aaatttgatgaagattacaaag

SEQ ID NO: 71308 - DNA, 22 bp, Artificial sequence
  SiRNA target sequence
aatttgatgaagattacaaagg

SEQ ID NO: 71309 - DNA, 22 bp, Artificial sequence
  SiRNA target sequence
atttgatgaagattacaaaggt

SEQ ID NO: 71310 - DNA, 22 bp, Artificial sequence
  SiRNA target sequence
tttgatgaagattacaaaggta

SEQ ID NO: 71311 - DNA, 22 bp, Artificial sequence
  SiRNA target sequence
ttgatgaagattacaaaggtag

SEQ ID NO: 71312 - DNA, 22 bp, Artificial sequence
  SiRNA target sequence
tgatgaagattacaaaggtagc

SEQ ID NO: 71313 - DNA, 22 bp, Artificial sequence
  SiRNA target sequence
gatgaagattacaaaggtagca

SEQ ID NO: 71314 - DNA, 22 bp, Artificial sequence
  SiRNA target sequence
atgaagattacaaaggtagcat

SEQ ID NO: 71315 - DNA, 22 bp, Artificial sequence
  SiRNA target sequence
tgaagattacaaaggtagcatt

SEQ ID NO: 71316 - DNA, 22 bp, Artificial sequence
  SiRNA target sequence
gaagattacaaaggtagcattt

SEQ ID NO: 71317 - DNA, 22 bp, Artificial sequence
  SiRNA target sequence
aagattacaaaggtagcatttt

SEQ ID NO: 71318 - DNA, 22 bp, Artificial sequence
  SiRNA target sequence
agattacaaaggtagcatttta

SEQ ID NO: 71319 - DNA, 22 bp, Artificial sequence
  SiRNA target sequence
gattacaaaggtagcattttaa

SEQ ID NO: 71320 - DNA, 22 bp, Artificial sequence
  SiRNA target sequence
attacaaaggtagcattttaat

SEQ ID NO: 71321 - DNA, 22 bp, Artificial sequence
  SiRNA target sequence
ttacaaaggtagcattttaata

SEQ ID NO: 71322 - DNA, 22 bp, Artificial sequence
  SiRNA target sequence
tacaaaggtagcattttaatag

SEQ ID NO: 71323 - DNA, 22 bp, Artificial sequence
  SiRNA target sequence
acaaaggtagcattttaataga

SEQ ID NO: 71324 - DNA, 22 bp, Artificial sequence
  SiRNA target sequence
caaaggtagcattttaatagat

SEQ ID NO: 71325 - DNA, 22 bp, Artificial sequence
  SiRNA target sequence
aaaggtagcattttaatagatg

SEQ ID NO: 71326 - DNA, 22 bp, Artificial sequence
  SiRNA target sequence
aaggtagcattttaatagatga

SEQ ID NO: 71327 - DNA, 22 bp, Artificial sequence
  SiRNA target sequence
aggtagcattttaatagatgac

SEQ ID NO: 71328 - DNA, 22 bp, Artificial sequence
  SiRNA target sequence
ggtagcattttaatagatgaca

SEQ ID NO: 71329 - DNA, 22 bp, Artificial sequence
  SiRNA target sequence
gtagcattttaatagatgacat

SEQ ID NO: 71330 - DNA, 22 bp, Artificial sequence
  SiRNA target sequence
tagcattttaatagatgacatt

SEQ ID NO: 71331 - DNA, 22 bp, Artificial sequence
  SiRNA target sequence
agcattttaatagatgacattg

SEQ ID NO: 71332 - DNA, 22 bp, Artificial sequence
  SiRNA target sequence
gcattttaatagatgacattga

SEQ ID NO: 71333 - DNA, 22 bp, Artificial sequence
  SiRNA target sequence
cattttaatagatgacattgat

SEQ ID NO: 71334 - DNA, 22 bp, Artificial sequence
  SiRNA target sequence
attttaatagatgacattgata

SEQ ID NO: 71335 - DNA, 22 bp, Artificial sequence
  SiRNA target sequence
ttttaatagatgacattgatat

SEQ ID NO: 71336 - DNA, 22 bp, Artificial sequence
  SiRNA target sequence
tttaatagatgacattgatatt

SEQ ID NO: 71337 - DNA, 22 bp, Artificial sequence
  SiRNA target sequence
ttaatagatgacattgatatta

SEQ ID NO: 71338 - DNA, 22 bp, Artificial sequence
  SiRNA target sequence
taatagatgacattgatattaa

SEQ ID NO: 71339 - DNA, 22 bp, Artificial sequence
  SiRNA target sequence
aatagatgacattgatattaaa

SEQ ID NO: 71340 - DNA, 22 bp, Artificial sequence
  SiRNA target sequence
atagatgacattgatattaaaa

SEQ ID NO: 71341 - DNA, 22 bp, Artificial sequence
  SiRNA target sequence
tagatgacattgatattaaaaa

SEQ ID NO: 71342 - DNA, 22 bp, Artificial sequence
  SiRNA target sequence
agatgacattgatattaaaaaa

SEQ ID NO: 71343 - DNA, 22 bp, Artificial sequence
  SiRNA target sequence
gatgacattgatattaaaaaaa

SEQ ID NO: 71344 - DNA, 22 bp, Artificial sequence
  SiRNA target sequence
atgacattgatattaaaaaaat

SEQ ID NO: 71345 - DNA, 22 bp, Artificial sequence
  SiRNA target sequence
tgacattgatattaaaaaaatc

SEQ ID NO: 71346 - DNA, 22 bp, Artificial sequence
  SiRNA target sequence
gacattgatattaaaaaaatca

SEQ ID NO: 71347 - DNA, 22 bp, Artificial sequence
  SiRNA target sequence
acattgatattaaaaaaatcaa

SEQ ID NO: 71348 - DNA, 22 bp, Artificial sequence
  SiRNA target sequence
cattgatattaaaaaaatcaaa

SEQ ID NO: 71349 - DNA, 22 bp, Artificial sequence
  SiRNA target sequence
attgatattaaaaaaatcaaag

SEQ ID NO: 71350 - DNA, 22 bp, Artificial sequence
  SiRNA target sequence
ttgatattaaaaaaatcaaaga

SEQ ID NO: 71351 - DNA, 22 bp, Artificial sequence
  SiRNA target sequence
tgatattaaaaaaatcaaagac

SEQ ID NO: 71352 - DNA, 22 bp, Artificial sequence
  SiRNA target sequence
gatattaaaaaaatcaaagacg

SEQ ID NO: 71353 - DNA, 22 bp, Artificial sequence
  SiRNA target sequence
atattaaaaaaatcaaagacga

SEQ ID NO: 71354 - DNA, 22 bp, Artificial sequence
  SiRNA target sequence
tattaaaaaaatcaaagacgaa

SEQ ID NO: 71355 - DNA, 22 bp, Artificial sequence
  SiRNA target sequence
attaaaaaaatcaaagacgaat

SEQ ID NO: 71356 - DNA, 22 bp, Artificial sequence
  SiRNA target sequence
ttaaaaaaatcaaagacgaatt

SEQ ID NO: 71357 - DNA, 22 bp, Artificial sequence
  SiRNA target sequence
taaaaaaatcaaagacgaattt

SEQ ID NO: 71358 - DNA, 22 bp, Artificial sequence
  SiRNA target sequence
aaaaaaatcaaagacgaatttt

SEQ ID NO: 71359 - DNA, 22 bp, Artificial sequence
  SiRNA target sequence
aaaaaatcaaagacgaatttta

SEQ ID NO: 71360 - DNA, 22 bp, Artificial sequence
  SiRNA target sequence
aaaaatcaaagacgaattttat

SEQ ID NO: 71361 - DNA, 22 bp, Artificial sequence
  SiRNA target sequence
aaaatcaaagacgaattttata

SEQ ID NO: 71362 - DNA, 22 bp, Artificial sequence
  SiRNA target sequence
aaatcaaagacgaattttatag

SEQ ID NO: 71363 - DNA, 22 bp, Artificial sequence
  SiRNA target sequence
aatcaaagacgaattttatagg

SEQ ID NO: 71364 - DNA, 22 bp, Artificial sequence
  SiRNA target sequence
atcaaagacgaattttatagga

SEQ ID NO: 71365 - DNA, 22 bp, Artificial sequence
  SiRNA target sequence
tcaaagacgaattttataggaa

SEQ ID NO: 71366 - DNA, 22 bp, Artificial sequence
  SiRNA target sequence
caaagacgaattttataggaat

SEQ ID NO: 71367 - DNA, 22 bp, Artificial sequence
  SiRNA target sequence
aaagacgaattttataggaatt

SEQ ID NO: 71368 - DNA, 22 bp, Artificial sequence
  SiRNA target sequence
aagacgaattttataggaattt

SEQ ID NO: 71369 - DNA, 22 bp, Artificial sequence
  SiRNA target sequence
agacgaattttataggaattta

SEQ ID NO: 71370 - DNA, 22 bp, Artificial sequence
  SiRNA target sequence
gacgaattttataggaatttat

SEQ ID NO: 71371 - DNA, 22 bp, Artificial sequence
  SiRNA target sequence
acgaattttataggaatttatt

SEQ ID NO: 71372 - DNA, 22 bp, Artificial sequence
  SiRNA target sequence
cgaattttataggaatttatta

SEQ ID NO: 71373 - DNA, 22 bp, Artificial sequence
  SiRNA target sequence
gaattttataggaatttattag

SEQ ID NO: 71374 - DNA, 22 bp, Artificial sequence
  SiRNA target sequence
aattttataggaatttattagg

SEQ ID NO: 71375 - DNA, 22 bp, Artificial sequence
  SiRNA target sequence
attttataggaatttattaggt

SEQ ID NO: 71376 - DNA, 22 bp, Artificial sequence
  SiRNA target sequence
ttttataggaatttattaggtt

SEQ ID NO: 71377 - DNA, 22 bp, Artificial sequence
  SiRNA target sequence
tttataggaatttattaggtta

SEQ ID NO: 71378 - DNA, 22 bp, Artificial sequence
  SiRNA target sequence
ttataggaatttattaggttac

SEQ ID NO: 71379 - DNA, 22 bp, Artificial sequence
  SiRNA target sequence
tataggaatttattaggttaca

SEQ ID NO: 71380 - DNA, 22 bp, Artificial sequence
  SiRNA target sequence
ataggaatttattaggttacat

SEQ ID NO: 71381 - DNA, 22 bp, Artificial sequence
  SiRNA target sequence
taggaatttattaggttacata

SEQ ID NO: 71382 - DNA, 22 bp, Artificial sequence
  SiRNA target sequence
aggaatttattaggttacatac

SEQ ID NO: 71383 - DNA, 22 bp, Artificial sequence
  SiRNA target sequence
ggaatttattaggttacatacc

SEQ ID NO: 71384 - DNA, 22 bp, Artificial sequence
  SiRNA target sequence
gaatttattaggttacatacca

SEQ ID NO: 71385 - DNA, 22 bp, Artificial sequence
  SiRNA target sequence
aatttattaggttacataccac

SEQ ID NO: 71386 - DNA, 22 bp, Artificial sequence
  SiRNA target sequence
atttattaggttacataccaca

SEQ ID NO: 71387 - DNA, 22 bp, Artificial sequence
  SiRNA target sequence
tttattaggttacataccacag

SEQ ID NO: 71388 - DNA, 22 bp, Artificial sequence
  SiRNA target sequence
ttattaggttacataccacaga

SEQ ID NO: 71389 - DNA, 22 bp, Artificial sequence
  SiRNA target sequence
tattaggttacataccacagaa

SEQ ID NO: 71390 - DNA, 22 bp, Artificial sequence
  SiRNA target sequence
attaggttacataccacagaat

SEQ ID NO: 71391 - DNA, 22 bp, Artificial sequence
  SiRNA target sequence
ttaggttacataccacagaata

SEQ ID NO: 71392 - DNA, 22 bp, Artificial sequence
  SiRNA target sequence
taggttacataccacagaatac

SEQ ID NO: 71393 - DNA, 22 bp, Artificial sequence
  SiRNA target sequence
aggttacataccacagaataca

SEQ ID NO: 71394 - DNA, 22 bp, Artificial sequence
  SiRNA target sequence
ggttacataccacagaatacat

SEQ ID NO: 71395 - DNA, 22 bp, Artificial sequence
  SiRNA target sequence
gttacataccacagaatacatt

SEQ ID NO: 71396 - DNA, 22 bp, Artificial sequence
  SiRNA target sequence
ttacataccacagaatacattt

SEQ ID NO: 71397 - DNA, 22 bp, Artificial sequence
  SiRNA target sequence
tacataccacagaatacatttt

SEQ ID NO: 71398 - DNA, 22 bp, Artificial sequence
  SiRNA target sequence
acataccacagaatacattttt

SEQ ID NO: 71399 - DNA, 22 bp, Artificial sequence
  SiRNA target sequence
cataccacagaatacatttttg

SEQ ID NO: 71400 - DNA, 22 bp, Artificial sequence
  SiRNA target sequence
ataccacagaatacatttttgt

SEQ ID NO: 71401 - DNA, 22 bp, Artificial sequence
  SiRNA target sequence
taccacagaatacatttttgtt

SEQ ID NO: 71402 - DNA, 22 bp, Artificial sequence
  SiRNA target sequence
accacagaatacatttttgttt

SEQ ID NO: 71403 - DNA, 22 bp, Artificial sequence
  SiRNA target sequence
ccacagaatacatttttgttta

SEQ ID NO: 71404 - DNA, 22 bp, Artificial sequence
  SiRNA target sequence
cacagaatacatttttgtttaa

SEQ ID NO: 71405 - DNA, 22 bp, Artificial sequence
  SiRNA target sequence
acagaatacatttttgtttaat

SEQ ID NO: 71406 - DNA, 22 bp, Artificial sequence
  SiRNA target sequence
cagaatacatttttgtttaatg

SEQ ID NO: 71407 - DNA, 22 bp, Artificial sequence
  SiRNA target sequence
agaatacatttttgtttaatga

SEQ ID NO: 71408 - DNA, 22 bp, Artificial sequence
  SiRNA target sequence
gaatacatttttgtttaatgaa

SEQ ID NO: 71409 - DNA, 22 bp, Artificial sequence
  SiRNA target sequence
aatacatttttgtttaatgaat

SEQ ID NO: 71410 - DNA, 22 bp, Artificial sequence
  SiRNA target sequence
atacatttttgtttaatgaatc

SEQ ID NO: 71411 - DNA, 22 bp, Artificial sequence
  SiRNA target sequence
tacatttttgtttaatgaatct

SEQ ID NO: 71412 - DNA, 22 bp, Artificial sequence
  SiRNA target sequence
acatttttgtttaatgaatctg

SEQ ID NO: 71413 - DNA, 22 bp, Artificial sequence
  SiRNA target sequence
catttttgtttaatgaatctgt

SEQ ID NO: 71414 - DNA, 22 bp, Artificial sequence
  SiRNA target sequence
atttttgtttaatgaatctgta

SEQ ID NO: 71415 - DNA, 22 bp, Artificial sequence
  SiRNA target sequence
tttttgtttaatgaatctgtaa

SEQ ID NO: 71416 - DNA, 22 bp, Artificial sequence
  SiRNA target sequence
ttttgtttaatgaatctgtaaa

SEQ ID NO: 71417 - DNA, 22 bp, Artificial sequence
  SiRNA target sequence
tttgtttaatgaatctgtaaaa

SEQ ID NO: 71418 - DNA, 22 bp, Artificial sequence
  SiRNA target sequence
ttgtttaatgaatctgtaaaat

SEQ ID NO: 71419 - DNA, 22 bp, Artificial sequence
  SiRNA target sequence
tgtttaatgaatctgtaaaata

SEQ ID NO: 71420 - DNA, 22 bp, Artificial sequence
  SiRNA target sequence
gtttaatgaatctgtaaaatat

SEQ ID NO: 71421 - DNA, 22 bp, Artificial sequence
  SiRNA target sequence
tttaatgaatctgtaaaatata

SEQ ID NO: 71422 - DNA, 22 bp, Artificial sequence
  SiRNA target sequence
ttaatgaatctgtaaaatataa

SEQ ID NO: 71423 - DNA, 22 bp, Artificial sequence
  SiRNA target sequence
taatgaatctgtaaaatataat

SEQ ID NO: 71424 - DNA, 22 bp, Artificial sequence
  SiRNA target sequence
aatgaatctgtaaaatataata

SEQ ID NO: 71425 - DNA, 22 bp, Artificial sequence
  SiRNA target sequence
atgaatctgtaaaatataatat

SEQ ID NO: 71426 - DNA, 22 bp, Artificial sequence
  SiRNA target sequence
tgaatctgtaaaatataatatt

SEQ ID NO: 71427 - DNA, 22 bp, Artificial sequence
  SiRNA target sequence
gaatctgtaaaatataatatta

SEQ ID NO: 71428 - DNA, 22 bp, Artificial sequence
  SiRNA target sequence
aatctgtaaaatataatattaa

SEQ ID NO: 71429 - DNA, 22 bp, Artificial sequence
  SiRNA target sequence
atctgtaaaatataatattaaa

SEQ ID NO: 71430 - DNA, 22 bp, Artificial sequence
  SiRNA target sequence
tctgtaaaatataatattaaat

SEQ ID NO: 71431 - DNA, 22 bp, Artificial sequence
  SiRNA target sequence
ctgtaaaatataatattaaata

SEQ ID NO: 71432 - DNA, 22 bp, Artificial sequence
  SiRNA target sequence
tgtaaaatataatattaaatac

SEQ ID NO: 71433 - DNA, 22 bp, Artificial sequence
  SiRNA target sequence
gtaaaatataatattaaatacg

SEQ ID NO: 71434 - DNA, 22 bp, Artificial sequence
  SiRNA target sequence
taaaatataatattaaatacgg

SEQ ID NO: 71435 - DNA, 22 bp, Artificial sequence
  SiRNA target sequence
aaaatataatattaaatacgga

SEQ ID NO: 71436 - DNA, 22 bp, Artificial sequence
  SiRNA target sequence
aaatataatattaaatacggat

SEQ ID NO: 71437 - DNA, 22 bp, Artificial sequence
  SiRNA target sequence
aatataatattaaatacggatc

SEQ ID NO: 71438 - DNA, 22 bp, Artificial sequence
  SiRNA target sequence
atataatattaaatacggatct

SEQ ID NO: 71439 - DNA, 22 bp, Artificial sequence
  SiRNA target sequence
tataatattaaatacggatctt

SEQ ID NO: 71440 - DNA, 22 bp, Artificial sequence
  SiRNA target sequence
ataatattaaatacggatcttt

SEQ ID NO: 71441 - DNA, 22 bp, Artificial sequence
  SiRNA target sequence
taatattaaatacggatctttt

SEQ ID NO: 71442 - DNA, 22 bp, Artificial sequence
  SiRNA target sequence
aatattaaatacggatcttttg

SEQ ID NO: 71443 - DNA, 22 bp, Artificial sequence
  SiRNA target sequence
atattaaatacggatcttttgg

SEQ ID NO: 71444 - DNA, 22 bp, Artificial sequence
  SiRNA target sequence
tattaaatacggatcttttggt

SEQ ID NO: 71445 - DNA, 22 bp, Artificial sequence
  SiRNA target sequence
attaaatacggatcttttggta

SEQ ID NO: 71446 - DNA, 22 bp, Artificial sequence
  SiRNA target sequence
ttaaatacggatcttttggtat

SEQ ID NO: 71447 - DNA, 22 bp, Artificial sequence
  SiRNA target sequence
taaatacggatcttttggtatt

SEQ ID NO: 71448 - DNA, 22 bp, Artificial sequence
  SiRNA target sequence
aaatacggatcttttggtattt

SEQ ID NO: 71449 - DNA, 22 bp, Artificial sequence
  SiRNA target sequence
aatacggatcttttggtatttc

SEQ ID NO: 71450 - DNA, 22 bp, Artificial sequence
  SiRNA target sequence
atacggatcttttggtatttca

SEQ ID NO: 71451 - DNA, 22 bp, Artificial sequence
  SiRNA target sequence
tacggatcttttggtatttcag

SEQ ID NO: 71452 - DNA, 22 bp, Artificial sequence
  SiRNA target sequence
acggatcttttggtatttcaga

SEQ ID NO: 71453 - DNA, 22 bp, Artificial sequence
  SiRNA target sequence
cggatcttttggtatttcagac

SEQ ID NO: 71454 - DNA, 22 bp, Artificial sequence
  SiRNA target sequence
ggatcttttggtatttcagacg

SEQ ID NO: 71455 - DNA, 22 bp, Artificial sequence
  SiRNA target sequence
gatcttttggtatttcagacga

SEQ ID NO: 71456 - DNA, 22 bp, Artificial sequence
  SiRNA target sequence
atcttttggtatttcagacgag

SEQ ID NO: 71457 - DNA, 22 bp, Artificial sequence
  SiRNA target sequence
tcttttggtatttcagacgagg

SEQ ID NO: 71458 - DNA, 22 bp, Artificial sequence
  SiRNA target sequence
cttttggtatttcagacgagga

SEQ ID NO: 71459 - DNA, 22 bp, Artificial sequence
  SiRNA target sequence
ttttggtatttcagacgaggat

SEQ ID NO: 71460 - DNA, 22 bp, Artificial sequence
  SiRNA target sequence
tttggtatttcagacgaggata

SEQ ID NO: 71461 - DNA, 22 bp, Artificial sequence
  SiRNA target sequence
ttggtatttcagacgaggatat

SEQ ID NO: 71462 - DNA, 22 bp, Artificial sequence
  SiRNA target sequence
tggtatttcagacgaggatatt

SEQ ID NO: 71463 - DNA, 22 bp, Artificial sequence
  SiRNA target sequence
ggtatttcagacgaggatattt

SEQ ID NO: 71464 - DNA, 22 bp, Artificial sequence
  SiRNA target sequence
gtatttcagacgaggatatttt

SEQ ID NO: 71465 - DNA, 22 bp, Artificial sequence
  SiRNA target sequence
tatttcagacgaggatattttt

SEQ ID NO: 71466 - DNA, 22 bp, Artificial sequence
  SiRNA target sequence
atttcagacgaggatatttttg

SEQ ID NO: 71467 - DNA, 22 bp, Artificial sequence
  SiRNA target sequence
tttcagacgaggatatttttgc

SEQ ID NO: 71468 - DNA, 22 bp, Artificial sequence
  SiRNA target sequence
ttcagacgaggatatttttgca

SEQ ID NO: 71469 - DNA, 22 bp, Artificial sequence
  SiRNA target sequence
tcagacgaggatatttttgcat

SEQ ID NO: 71470 - DNA, 22 bp, Artificial sequence
  SiRNA target sequence
cagacgaggatatttttgcatt

SEQ ID NO: 71471 - DNA, 22 bp, Artificial sequence
  SiRNA target sequence
agacgaggatatttttgcattg

SEQ ID NO: 71472 - DNA, 22 bp, Artificial sequence
  SiRNA target sequence
gacgaggatatttttgcattgt

SEQ ID NO: 71473 - DNA, 22 bp, Artificial sequence
  SiRNA target sequence
acgaggatatttttgcattgtg

SEQ ID NO: 71474 - DNA, 22 bp, Artificial sequence
  SiRNA target sequence
cgaggatatttttgcattgtgt

SEQ ID NO: 71475 - DNA, 22 bp, Artificial sequence
  SiRNA target sequence
gaggatatttttgcattgtgta

SEQ ID NO: 71476 - DNA, 22 bp, Artificial sequence
  SiRNA target sequence
aggatatttttgcattgtgtaa

SEQ ID NO: 71477 - DNA, 22 bp, Artificial sequence
  SiRNA target sequence
ggatatttttgcattgtgtaaa

SEQ ID NO: 71478 - DNA, 22 bp, Artificial sequence
  SiRNA target sequence
gatatttttgcattgtgtaaag

SEQ ID NO: 71479 - DNA, 22 bp, Artificial sequence
  SiRNA target sequence
atatttttgcattgtgtaaaga

SEQ ID NO: 71480 - DNA, 22 bp, Artificial sequence
  SiRNA target sequence
tatttttgcattgtgtaaagag

SEQ ID NO: 71481 - DNA, 22 bp, Artificial sequence
  SiRNA target sequence
atttttgcattgtgtaaagagt

SEQ ID NO: 71482 - DNA, 22 bp, Artificial sequence
  SiRNA target sequence
tttttgcattgtgtaaagagtt

SEQ ID NO: 71483 - DNA, 22 bp, Artificial sequence
  SiRNA target sequence
ttttgcattgtgtaaagagttt

SEQ ID NO: 71484 - DNA, 22 bp, Artificial sequence
  SiRNA target sequence
tttgcattgtgtaaagagtttg

SEQ ID NO: 71485 - DNA, 22 bp, Artificial sequence
  SiRNA target sequence
ttgcattgtgtaaagagtttgg

SEQ ID NO: 71486 - DNA, 22 bp, Artificial sequence
  SiRNA target sequence
tgcattgtgtaaagagtttgga

SEQ ID NO: 71487 - DNA, 22 bp, Artificial sequence
  SiRNA target sequence
gcattgtgtaaagagtttggat

SEQ ID NO: 71488 - DNA, 22 bp, Artificial sequence
  SiRNA target sequence
cattgtgtaaagagtttggatt

SEQ ID NO: 71489 - DNA, 22 bp, Artificial sequence
  SiRNA target sequence
attgtgtaaagagtttggatta

SEQ ID NO: 71490 - DNA, 22 bp, Artificial sequence
  SiRNA target sequence
ttgtgtaaagagtttggattat

SEQ ID NO: 71491 - DNA, 22 bp, Artificial sequence
  SiRNA target sequence
tgtgtaaagagtttggattata

SEQ ID NO: 71492 - DNA, 22 bp, Artificial sequence
  SiRNA target sequence
gtgtaaagagtttggattatat

SEQ ID NO: 71493 - DNA, 22 bp, Artificial sequence
  SiRNA target sequence
tgtaaagagtttggattatatg

SEQ ID NO: 71494 - DNA, 22 bp, Artificial sequence
  SiRNA target sequence
gtaaagagtttggattatatga

SEQ ID NO: 71495 - DNA, 22 bp, Artificial sequence
  SiRNA target sequence
taaagagtttggattatatgac

SEQ ID NO: 71496 - DNA, 22 bp, Artificial sequence
  SiRNA target sequence
aaagagtttggattatatgacg

SEQ ID NO: 71497 - DNA, 22 bp, Artificial sequence
  SiRNA target sequence
aagagtttggattatatgacgt

SEQ ID NO: 71498 - DNA, 22 bp, Artificial sequence
  SiRNA target sequence
agagtttggattatatgacgtt

SEQ ID NO: 71499 - DNA, 22 bp, Artificial sequence
  SiRNA target sequence
gagtttggattatatgacgttt

SEQ ID NO: 71500 - DNA, 22 bp, Artificial sequence
  SiRNA target sequence
agtttggattatatgacgtttt

SEQ ID NO: 71501 - DNA, 22 bp, Artificial sequence
  SiRNA target sequence
gtttggattatatgacgttttc

SEQ ID NO: 71502 - DNA, 22 bp, Artificial sequence
  SiRNA target sequence
tttggattatatgacgttttca

SEQ ID NO: 71503 - DNA, 22 bp, Artificial sequence
  SiRNA target sequence
ttggattatatgacgttttcat

SEQ ID NO: 71504 - DNA, 22 bp, Artificial sequence
  SiRNA target sequence
tggattatatgacgttttcatg

SEQ ID NO: 71505 - DNA, 22 bp, Artificial sequence
  SiRNA target sequence
ggattatatgacgttttcatga

SEQ ID NO: 71506 - DNA, 22 bp, Artificial sequence
  SiRNA target sequence
gattatatgacgttttcatgaa

SEQ ID NO: 71507 - DNA, 22 bp, Artificial sequence
  SiRNA target sequence
attatatgacgttttcatgaac

SEQ ID NO: 71508 - DNA, 22 bp, Artificial sequence
  SiRNA target sequence
ttatatgacgttttcatgaacc

SEQ ID NO: 71509 - DNA, 22 bp, Artificial sequence
  SiRNA target sequence
tatatgacgttttcatgaacct

SEQ ID NO: 71510 - DNA, 22 bp, Artificial sequence
  SiRNA target sequence
atatgacgttttcatgaacctc

SEQ ID NO: 71511 - DNA, 22 bp, Artificial sequence
  SiRNA target sequence
tatgacgttttcatgaacctcg

SEQ ID NO: 71512 - DNA, 22 bp, Artificial sequence
  SiRNA target sequence
atgacgttttcatgaacctcga

SEQ ID NO: 71513 - DNA, 22 bp, Artificial sequence
  SiRNA target sequence
tgacgttttcatgaacctcgaa

SEQ ID NO: 71514 - DNA, 22 bp, Artificial sequence
  SiRNA target sequence
gacgttttcatgaacctcgaaa

SEQ ID NO: 71515 - DNA, 22 bp, Artificial sequence
  SiRNA target sequence
acgttttcatgaacctcgaaaa

SEQ ID NO: 71516 - DNA, 22 bp, Artificial sequence
  SiRNA target sequence
cgttttcatgaacctcgaaaat

SEQ ID NO: 71517 - DNA, 22 bp, Artificial sequence
  SiRNA target sequence
gttttcatgaacctcgaaaatg

SEQ ID NO: 71518 - DNA, 22 bp, Artificial sequence
  SiRNA target sequence
ttttcatgaacctcgaaaatgg

SEQ ID NO: 71519 - DNA, 22 bp, Artificial sequence
  SiRNA target sequence
tttcatgaacctcgaaaatggt

SEQ ID NO: 71520 - DNA, 22 bp, Artificial sequence
  SiRNA target sequence
ttcatgaacctcgaaaatggtt

SEQ ID NO: 71521 - DNA, 22 bp, Artificial sequence
  SiRNA target sequence
tcatgaacctcgaaaatggttt

SEQ ID NO: 71522 - DNA, 22 bp, Artificial sequence
  SiRNA target sequence
catgaacctcgaaaatggtttt

SEQ ID NO: 71523 - DNA, 22 bp, Artificial sequence
  SiRNA target sequence
atgaacctcgaaaatggttttg

SEQ ID NO: 71524 - DNA, 22 bp, Artificial sequence
  SiRNA target sequence
tgaacctcgaaaatggttttga

SEQ ID NO: 71525 - DNA, 22 bp, Artificial sequence
  SiRNA target sequence
gaacctcgaaaatggttttgat

SEQ ID NO: 71526 - DNA, 22 bp, Artificial sequence
  SiRNA target sequence
aacctcgaaaatggttttgata

SEQ ID NO: 71527 - DNA, 22 bp, Artificial sequence
  SiRNA target sequence
acctcgaaaatggttttgatac

SEQ ID NO: 71528 - DNA, 22 bp, Artificial sequence
  SiRNA target sequence
cctcgaaaatggttttgatacg

SEQ ID NO: 71529 - DNA, 22 bp, Artificial sequence
  SiRNA target sequence
ctcgaaaatggttttgatacga

SEQ ID NO: 71530 - DNA, 22 bp, Artificial sequence
  SiRNA target sequence
tcgaaaatggttttgatacgaa

SEQ ID NO: 71531 - DNA, 22 bp, Artificial sequence
  SiRNA target sequence
cgaaaatggttttgatacgaat

SEQ ID NO: 71532 - DNA, 22 bp, Artificial sequence
  SiRNA target sequence
gaaaatggttttgatacgaatg

SEQ ID NO: 71533 - DNA, 22 bp, Artificial sequence
  SiRNA target sequence
aaaatggttttgatacgaatgt

SEQ ID NO: 71534 - DNA, 22 bp, Artificial sequence
  SiRNA target sequence
aaatggttttgatacgaatgta

SEQ ID NO: 71535 - DNA, 22 bp, Artificial sequence
  SiRNA target sequence
aatggttttgatacgaatgtag

SEQ ID NO: 71536 - DNA, 22 bp, Artificial sequence
  SiRNA target sequence
atggttttgatacgaatgtagg

SEQ ID NO: 71537 - DNA, 22 bp, Artificial sequence
  SiRNA target sequence
tggttttgatacgaatgtagga

SEQ ID NO: 71538 - DNA, 22 bp, Artificial sequence
  SiRNA target sequence
ggttttgatacgaatgtaggag

SEQ ID NO: 71539 - DNA, 22 bp, Artificial sequence
  SiRNA target sequence
gttttgatacgaatgtaggaga

SEQ ID NO: 71540 - DNA, 22 bp, Artificial sequence
  SiRNA target sequence
ttttgatacgaatgtaggagaa

SEQ ID NO: 71541 - DNA, 22 bp, Artificial sequence
  SiRNA target sequence
tttgatacgaatgtaggagaaa

SEQ ID NO: 71542 - DNA, 22 bp, Artificial sequence
  SiRNA target sequence
ttgatacgaatgtaggagaaag

SEQ ID NO: 71543 - DNA, 22 bp, Artificial sequence
  SiRNA target sequence
tgatacgaatgtaggagaaaga

SEQ ID NO: 71544 - DNA, 22 bp, Artificial sequence
  SiRNA target sequence
gatacgaatgtaggagaaagag

SEQ ID NO: 71545 - DNA, 22 bp, Artificial sequence
  SiRNA target sequence
atacgaatgtaggagaaagagg

SEQ ID NO: 71546 - DNA, 22 bp, Artificial sequence
  SiRNA target sequence
tacgaatgtaggagaaagagga

SEQ ID NO: 71547 - DNA, 22 bp, Artificial sequence
  SiRNA target sequence
acgaatgtaggagaaagaggaa

SEQ ID NO: 71548 - DNA, 22 bp, Artificial sequence
  SiRNA target sequence
cgaatgtaggagaaagaggaag

SEQ ID NO: 71549 - DNA, 22 bp, Artificial sequence
  SiRNA target sequence
gaatgtaggagaaagaggaagg

SEQ ID NO: 71550 - DNA, 22 bp, Artificial sequence
  SiRNA target sequence
aatgtaggagaaagaggaaggt

SEQ ID NO: 71551 - DNA, 22 bp, Artificial sequence
  SiRNA target sequence
atgtaggagaaagaggaaggtt

SEQ ID NO: 71552 - DNA, 22 bp, Artificial sequence
  SiRNA target sequence
tgtaggagaaagaggaaggtta

SEQ ID NO: 71553 - DNA, 22 bp, Artificial sequence
  SiRNA target sequence
gtaggagaaagaggaaggttat

SEQ ID NO: 71554 - DNA, 22 bp, Artificial sequence
  SiRNA target sequence
taggagaaagaggaaggttatt

SEQ ID NO: 71555 - DNA, 22 bp, Artificial sequence
  SiRNA target sequence
aggagaaagaggaaggttatta

SEQ ID NO: 71556 - DNA, 22 bp, Artificial sequence
  SiRNA target sequence
ggagaaagaggaaggttattaa

SEQ ID NO: 71557 - DNA, 22 bp, Artificial sequence
  SiRNA target sequence
gagaaagaggaaggttattaag

SEQ ID NO: 71558 - DNA, 22 bp, Artificial sequence
  SiRNA target sequence
agaaagaggaaggttattaagt

SEQ ID NO: 71559 - DNA, 22 bp, Artificial sequence
  SiRNA target sequence
gaaagaggaaggttattaagtg

SEQ ID NO: 71560 - DNA, 22 bp, Artificial sequence
  SiRNA target sequence
aaagaggaaggttattaagtgg

SEQ ID NO: 71561 - DNA, 22 bp, Artificial sequence
  SiRNA target sequence
aagaggaaggttattaagtggt

SEQ ID NO: 71562 - DNA, 22 bp, Artificial sequence
  SiRNA target sequence
agaggaaggttattaagtggtg

SEQ ID NO: 71563 - DNA, 22 bp, Artificial sequence
  SiRNA target sequence
gaggaaggttattaagtggtgg

SEQ ID NO: 71564 - DNA, 22 bp, Artificial sequence
  SiRNA target sequence
aggaaggttattaagtggtgga

SEQ ID NO: 71565 - DNA, 22 bp, Artificial sequence
  SiRNA target sequence
ggaaggttattaagtggtggag

SEQ ID NO: 71566 - DNA, 22 bp, Artificial sequence
  SiRNA target sequence
gaaggttattaagtggtggaga

SEQ ID NO: 71567 - DNA, 22 bp, Artificial sequence
  SiRNA target sequence
aaggttattaagtggtggagaa

SEQ ID NO: 71568 - DNA, 22 bp, Artificial sequence
  SiRNA target sequence
aggttattaagtggtggagaaa

SEQ ID NO: 71569 - DNA, 22 bp, Artificial sequence
  SiRNA target sequence
ggttattaagtggtggagaaaa

SEQ ID NO: 71570 - DNA, 22 bp, Artificial sequence
  SiRNA target sequence
gttattaagtggtggagaaaag

SEQ ID NO: 71571 - DNA, 22 bp, Artificial sequence
  SiRNA target sequence
ttattaagtggtggagaaaagc

SEQ ID NO: 71572 - DNA, 22 bp, Artificial sequence
  SiRNA target sequence
tattaagtggtggagaaaagca

SEQ ID NO: 71573 - DNA, 22 bp, Artificial sequence
  SiRNA target sequence
attaagtggtggagaaaagcaa

SEQ ID NO: 71574 - DNA, 22 bp, Artificial sequence
  SiRNA target sequence
ttaagtggtggagaaaagcaaa

SEQ ID NO: 71575 - DNA, 22 bp, Artificial sequence
  SiRNA target sequence
taagtggtggagaaaagcaaaa

SEQ ID NO: 71576 - DNA, 22 bp, Artificial sequence
  SiRNA target sequence
aagtggtggagaaaagcaaaag

SEQ ID NO: 71577 - DNA, 22 bp, Artificial sequence
  SiRNA target sequence
agtggtggagaaaagcaaaaga

SEQ ID NO: 71578 - DNA, 22 bp, Artificial sequence
  SiRNA target sequence
gtggtggagaaaagcaaaagat

SEQ ID NO: 71579 - DNA, 22 bp, Artificial sequence
  SiRNA target sequence
tggtggagaaaagcaaaagatt

SEQ ID NO: 71580 - DNA, 22 bp, Artificial sequence
  SiRNA target sequence
ggtggagaaaagcaaaagattt

SEQ ID NO: 71581 - DNA, 22 bp, Artificial sequence
  SiRNA target sequence
gtggagaaaagcaaaagatttt

SEQ ID NO: 71582 - DNA, 22 bp, Artificial sequence
  SiRNA target sequence
tggagaaaagcaaaagatttta

SEQ ID NO: 71583 - DNA, 22 bp, Artificial sequence
  SiRNA target sequence
ggagaaaagcaaaagattttat

SEQ ID NO: 71584 - DNA, 22 bp, Artificial sequence
  SiRNA target sequence
gagaaaagcaaaagattttatt

SEQ ID NO: 71585 - DNA, 22 bp, Artificial sequence
  SiRNA target sequence
agaaaagcaaaagattttatta

SEQ ID NO: 71586 - DNA, 22 bp, Artificial sequence
  SiRNA target sequence
gaaaagcaaaagattttattaa

SEQ ID NO: 71587 - DNA, 22 bp, Artificial sequence
  SiRNA target sequence
aaaagcaaaagattttattaat

SEQ ID NO: 71588 - DNA, 22 bp, Artificial sequence
  SiRNA target sequence
aaagcaaaagattttattaatg

SEQ ID NO: 71589 - DNA, 22 bp, Artificial sequence
  SiRNA target sequence
aagcaaaagattttattaatgc

SEQ ID NO: 71590 - DNA, 22 bp, Artificial sequence
  SiRNA target sequence
agcaaaagattttattaatgcg

SEQ ID NO: 71591 - DNA, 22 bp, Artificial sequence
  SiRNA target sequence
gcaaaagattttattaatgcgt

SEQ ID NO: 71592 - DNA, 22 bp, Artificial sequence
  SiRNA target sequence
caaaagattttattaatgcgta

SEQ ID NO: 71593 - DNA, 22 bp, Artificial sequence
  SiRNA target sequence
aaaagattttattaatgcgtac

SEQ ID NO: 71594 - DNA, 22 bp, Artificial sequence
  SiRNA target sequence
aaagattttattaatgcgtact

SEQ ID NO: 71595 - DNA, 22 bp, Artificial sequence
  SiRNA target sequence
aagattttattaatgcgtacta

SEQ ID NO: 71596 - DNA, 22 bp, Artificial sequence
  SiRNA target sequence
agattttattaatgcgtactat

SEQ ID NO: 71597 - DNA, 22 bp, Artificial sequence
  SiRNA target sequence
gattttattaatgcgtactatg

SEQ ID NO: 71598 - DNA, 22 bp, Artificial sequence
  SiRNA target sequence
attttattaatgcgtactatgt

SEQ ID NO: 71599 - DNA, 22 bp, Artificial sequence
  SiRNA target sequence
ttttattaatgcgtactatgtt

SEQ ID NO: 71600 - DNA, 22 bp, Artificial sequence
  SiRNA target sequence
tttattaatgcgtactatgtta

SEQ ID NO: 71601 - DNA, 22 bp, Artificial sequence
  SiRNA target sequence
ttattaatgcgtactatgttaa

SEQ ID NO: 71602 - DNA, 22 bp, Artificial sequence
  SiRNA target sequence
tattaatgcgtactatgttaag

SEQ ID NO: 71603 - DNA, 22 bp, Artificial sequence
  SiRNA target sequence
attaatgcgtactatgttaaga

SEQ ID NO: 71604 - DNA, 22 bp, Artificial sequence
  SiRNA target sequence
ttaatgcgtactatgttaagaa

SEQ ID NO: 71605 - DNA, 22 bp, Artificial sequence
  SiRNA target sequence
taatgcgtactatgttaagaaa

SEQ ID NO: 71606 - DNA, 22 bp, Artificial sequence
  SiRNA target sequence
aatgcgtactatgttaagaaac

SEQ ID NO: 71607 - DNA, 22 bp, Artificial sequence
  SiRNA target sequence
atgcgtactatgttaagaaaca

SEQ ID NO: 71608 - DNA, 22 bp, Artificial sequence
  SiRNA target sequence
tgcgtactatgttaagaaacaa

SEQ ID NO: 71609 - DNA, 22 bp, Artificial sequence
  SiRNA target sequence
gcgtactatgttaagaaacaag

SEQ ID NO: 71610 - DNA, 22 bp, Artificial sequence
  SiRNA target sequence
cgtactatgttaagaaacaagg

SEQ ID NO: 71611 - DNA, 22 bp, Artificial sequence
  SiRNA target sequence
gtactatgttaagaaacaagga

SEQ ID NO: 71612 - DNA, 22 bp, Artificial sequence
  SiRNA target sequence
tactatgttaagaaacaaggag

SEQ ID NO: 71613 - DNA, 22 bp, Artificial sequence
  SiRNA target sequence
actatgttaagaaacaaggaga

SEQ ID NO: 71614 - DNA, 22 bp, Artificial sequence
  SiRNA target sequence
ctatgttaagaaacaaggagat

SEQ ID NO: 71615 - DNA, 22 bp, Artificial sequence
  SiRNA target sequence
tatgttaagaaacaaggagata

SEQ ID NO: 71616 - DNA, 22 bp, Artificial sequence
  SiRNA target sequence
atgttaagaaacaaggagataa

SEQ ID NO: 71617 - DNA, 22 bp, Artificial sequence
  SiRNA target sequence
tgttaagaaacaaggagataat

SEQ ID NO: 71618 - DNA, 22 bp, Artificial sequence
  SiRNA target sequence
gttaagaaacaaggagataatg

SEQ ID NO: 71619 - DNA, 22 bp, Artificial sequence
  SiRNA target sequence
ttaagaaacaaggagataatgg

SEQ ID NO: 71620 - DNA, 22 bp, Artificial sequence
  SiRNA target sequence
taagaaacaaggagataatggc

SEQ ID NO: 71621 - DNA, 22 bp, Artificial sequence
  SiRNA target sequence
aagaaacaaggagataatggca

SEQ ID NO: 71622 - DNA, 22 bp, Artificial sequence
  SiRNA target sequence
agaaacaaggagataatggcat

SEQ ID NO: 71623 - DNA, 22 bp, Artificial sequence
  SiRNA target sequence
gaaacaaggagataatggcatt

SEQ ID NO: 71624 - DNA, 22 bp, Artificial sequence
  SiRNA target sequence
aaacaaggagataatggcatta

SEQ ID NO: 71625 - DNA, 22 bp, Artificial sequence
  SiRNA target sequence
aacaaggagataatggcattag

SEQ ID NO: 71626 - DNA, 22 bp, Artificial sequence
  SiRNA target sequence
acaaggagataatggcattaga

SEQ ID NO: 71627 - DNA, 22 bp, Artificial sequence
  SiRNA target sequence
caaggagataatggcattagat

SEQ ID NO: 71628 - DNA, 22 bp, Artificial sequence
  SiRNA target sequence
aaggagataatggcattagatg

SEQ ID NO: 71629 - DNA, 22 bp, Artificial sequence
  SiRNA target sequence
aggagataatggcattagatga

SEQ ID NO: 71630 - DNA, 22 bp, Artificial sequence
  SiRNA target sequence
ggagataatggcattagatgaa

SEQ ID NO: 71631 - DNA, 22 bp, Artificial sequence
  SiRNA target sequence
gagataatggcattagatgaac

SEQ ID NO: 71632 - DNA, 22 bp, Artificial sequence
  SiRNA target sequence
agataatggcattagatgaacc

SEQ ID NO: 71633 - DNA, 22 bp, Artificial sequence
  SiRNA target sequence
gataatggcattagatgaaccc

SEQ ID NO: 71634 - DNA, 22 bp, Artificial sequence
  SiRNA target sequence
ataatggcattagatgaaccca

SEQ ID NO: 71635 - DNA, 22 bp, Artificial sequence
  SiRNA target sequence
taatggcattagatgaacccac

SEQ ID NO: 71636 - DNA, 22 bp, Artificial sequence
  SiRNA target sequence
aatggcattagatgaacccact

SEQ ID NO: 71637 - DNA, 22 bp, Artificial sequence
  SiRNA target sequence
atggcattagatgaacccactg

SEQ ID NO: 71638 - DNA, 22 bp, Artificial sequence
  SiRNA target sequence
tggcattagatgaacccactgc

SEQ ID NO: 71639 - DNA, 22 bp, Artificial sequence
  SiRNA target sequence
ggcattagatgaacccactgca

SEQ ID NO: 71640 - DNA, 22 bp, Artificial sequence
  SiRNA target sequence
gcattagatgaacccactgcag

SEQ ID NO: 71641 - DNA, 22 bp, Artificial sequence
  SiRNA target sequence
cattagatgaacccactgcagc

SEQ ID NO: 71642 - DNA, 22 bp, Artificial sequence
  SiRNA target sequence
attagatgaacccactgcagca

SEQ ID NO: 71643 - DNA, 22 bp, Artificial sequence
  SiRNA target sequence
ttagatgaacccactgcagcac

SEQ ID NO: 71644 - DNA, 22 bp, Artificial sequence
  SiRNA target sequence
tagatgaacccactgcagcact

SEQ ID NO: 71645 - DNA, 22 bp, Artificial sequence
  SiRNA target sequence
agatgaacccactgcagcactt

SEQ ID NO: 71646 - DNA, 22 bp, Artificial sequence
  SiRNA target sequence
gatgaacccactgcagcacttg

SEQ ID NO: 71647 - DNA, 22 bp, Artificial sequence
  SiRNA target sequence
atgaacccactgcagcacttga

SEQ ID NO: 71648 - DNA, 22 bp, Artificial sequence
  SiRNA target sequence
tgaacccactgcagcacttgat

SEQ ID NO: 71649 - DNA, 22 bp, Artificial sequence
  SiRNA target sequence
gaacccactgcagcacttgata

SEQ ID NO: 71650 - DNA, 22 bp, Artificial sequence
  SiRNA target sequence
aacccactgcagcacttgataa

SEQ ID NO: 71651 - DNA, 22 bp, Artificial sequence
  SiRNA target sequence
acccactgcagcacttgataag

SEQ ID NO: 71652 - DNA, 22 bp, Artificial sequence
  SiRNA target sequence
cccactgcagcacttgataagg

SEQ ID NO: 71653 - DNA, 22 bp, Artificial sequence
  SiRNA target sequence
ccactgcagcacttgataagga

SEQ ID NO: 71654 - DNA, 22 bp, Artificial sequence
  SiRNA target sequence
cactgcagcacttgataaggag

SEQ ID NO: 71655 - DNA, 22 bp, Artificial sequence
  SiRNA target sequence
actgcagcacttgataaggagt

SEQ ID NO: 71656 - DNA, 22 bp, Artificial sequence
  SiRNA target sequence
ctgcagcacttgataaggagtc

SEQ ID NO: 71657 - DNA, 22 bp, Artificial sequence
  SiRNA target sequence
tgcagcacttgataaggagtct

SEQ ID NO: 71658 - DNA, 22 bp, Artificial sequence
  SiRNA target sequence
gcagcacttgataaggagtctg

SEQ ID NO: 71659 - DNA, 22 bp, Artificial sequence
  SiRNA target sequence
cagcacttgataaggagtctga

SEQ ID NO: 71660 - DNA, 22 bp, Artificial sequence
  SiRNA target sequence
agcacttgataaggagtctgaa

SEQ ID NO: 71661 - DNA, 22 bp, Artificial sequence
  SiRNA target sequence
gcacttgataaggagtctgaaa

SEQ ID NO: 71662 - DNA, 22 bp, Artificial sequence
  SiRNA target sequence
cacttgataaggagtctgaaaa

SEQ ID NO: 71663 - DNA, 22 bp, Artificial sequence
  SiRNA target sequence
acttgataaggagtctgaaaaa

SEQ ID NO: 71664 - DNA, 22 bp, Artificial sequence
  SiRNA target sequence
cttgataaggagtctgaaaaaa

SEQ ID NO: 71665 - DNA, 22 bp, Artificial sequence
  SiRNA target sequence
ttgataaggagtctgaaaaaaa

SEQ ID NO: 71666 - DNA, 22 bp, Artificial sequence
  SiRNA target sequence
tgataaggagtctgaaaaaaag

SEQ ID NO: 71667 - DNA, 22 bp, Artificial sequence
  SiRNA target sequence
gataaggagtctgaaaaaaaga

SEQ ID NO: 71668 - DNA, 22 bp, Artificial sequence
  SiRNA target sequence
ataaggagtctgaaaaaaagat

SEQ ID NO: 71669 - DNA, 22 bp, Artificial sequence
  SiRNA target sequence
taaggagtctgaaaaaaagatt

SEQ ID NO: 71670 - DNA, 22 bp, Artificial sequence
  SiRNA target sequence
aaggagtctgaaaaaaagattt

SEQ ID NO: 71671 - DNA, 22 bp, Artificial sequence
  SiRNA target sequence
aggagtctgaaaaaaagatttt

SEQ ID NO: 71672 - DNA, 22 bp, Artificial sequence
  SiRNA target sequence
ggagtctgaaaaaaagatttta

SEQ ID NO: 71673 - DNA, 22 bp, Artificial sequence
  SiRNA target sequence
gagtctgaaaaaaagattttag

SEQ ID NO: 71674 - DNA, 22 bp, Artificial sequence
  SiRNA target sequence
agtctgaaaaaaagattttaga

SEQ ID NO: 71675 - DNA, 22 bp, Artificial sequence
  SiRNA target sequence
gtctgaaaaaaagattttagag

SEQ ID NO: 71676 - DNA, 22 bp, Artificial sequence
  SiRNA target sequence
tctgaaaaaaagattttagaga

SEQ ID NO: 71677 - DNA, 22 bp, Artificial sequence
  SiRNA target sequence
ctgaaaaaaagattttagagat

SEQ ID NO: 71678 - DNA, 22 bp, Artificial sequence
  SiRNA target sequence
tgaaaaaaagattttagagata

SEQ ID NO: 71679 - DNA, 22 bp, Artificial sequence
  SiRNA target sequence
gaaaaaaagattttagagataa

SEQ ID NO: 71680 - DNA, 22 bp, Artificial sequence
  SiRNA target sequence
aaaaaaagattttagagataat

SEQ ID NO: 71681 - DNA, 22 bp, Artificial sequence
  SiRNA target sequence
aaaaaagattttagagataatt

SEQ ID NO: 71682 - DNA, 22 bp, Artificial sequence
  SiRNA target sequence
aaaaagattttagagataattt

SEQ ID NO: 71683 - DNA, 22 bp, Artificial sequence
  SiRNA target sequence
aaaagattttagagataatttt

SEQ ID NO: 71684 - DNA, 22 bp, Artificial sequence
  SiRNA target sequence
aaagattttagagataatttta

SEQ ID NO: 71685 - DNA, 22 bp, Artificial sequence
  SiRNA target sequence
aagattttagagataattttac

SEQ ID NO: 71686 - DNA, 22 bp, Artificial sequence
  SiRNA target sequence
agattttagagataattttaca

SEQ ID NO: 71687 - DNA, 22 bp, Artificial sequence
  SiRNA target sequence
gattttagagataattttacaa

SEQ ID NO: 71688 - DNA, 22 bp, Artificial sequence
  SiRNA target sequence
attttagagataattttacaac

SEQ ID NO: 71689 - DNA, 22 bp, Artificial sequence
  SiRNA target sequence
ttttagagataattttacaaca

SEQ ID NO: 71690 - DNA, 22 bp, Artificial sequence
  SiRNA target sequence
tttagagataattttacaacag

SEQ ID NO: 71691 - DNA, 22 bp, Artificial sequence
  SiRNA target sequence
ttagagataattttacaacagg

SEQ ID NO: 71692 - DNA, 22 bp, Artificial sequence
  SiRNA target sequence
tagagataattttacaacagga

SEQ ID NO: 71693 - DNA, 22 bp, Artificial sequence
  SiRNA target sequence
agagataattttacaacaggaa

SEQ ID NO: 71694 - DNA, 22 bp, Artificial sequence
  SiRNA target sequence
gagataattttacaacaggaag

SEQ ID NO: 71695 - DNA, 22 bp, Artificial sequence
  SiRNA target sequence
agataattttacaacaggaaga

SEQ ID NO: 71696 - DNA, 22 bp, Artificial sequence
  SiRNA target sequence
gataattttacaacaggaagat

SEQ ID NO: 71697 - DNA, 22 bp, Artificial sequence
  SiRNA target sequence
ataattttacaacaggaagatc

SEQ ID NO: 71698 - DNA, 22 bp, Artificial sequence
  SiRNA target sequence
taattttacaacaggaagatcg

SEQ ID NO: 71699 - DNA, 22 bp, Artificial sequence
  SiRNA target sequence
aattttacaacaggaagatcga

SEQ ID NO: 71700 - DNA, 22 bp, Artificial sequence
  SiRNA target sequence
attttacaacaggaagatcgaa

SEQ ID NO: 71701 - DNA, 22 bp, Artificial sequence
  SiRNA target sequence
ttttacaacaggaagatcgaac

SEQ ID NO: 71702 - DNA, 22 bp, Artificial sequence
  SiRNA target sequence
tttacaacaggaagatcgaaca

SEQ ID NO: 71703 - DNA, 22 bp, Artificial sequence
  SiRNA target sequence
ttacaacaggaagatcgaacag

SEQ ID NO: 71704 - DNA, 22 bp, Artificial sequence
  SiRNA target sequence
tacaacaggaagatcgaacagt

SEQ ID NO: 71705 - DNA, 22 bp, Artificial sequence
  SiRNA target sequence
acaacaggaagatcgaacagtt

SEQ ID NO: 71706 - DNA, 22 bp, Artificial sequence
  SiRNA target sequence
caacaggaagatcgaacagttt

SEQ ID NO: 71707 - DNA, 22 bp, Artificial sequence
  SiRNA target sequence
aacaggaagatcgaacagtttt

SEQ ID NO: 71708 - DNA, 22 bp, Artificial sequence
  SiRNA target sequence
acaggaagatcgaacagttttg

SEQ ID NO: 71709 - DNA, 22 bp, Artificial sequence
  SiRNA target sequence
caggaagatcgaacagttttga

SEQ ID NO: 71710 - DNA, 22 bp, Artificial sequence
  SiRNA target sequence
aggaagatcgaacagttttgat

SEQ ID NO: 71711 - DNA, 22 bp, Artificial sequence
  SiRNA target sequence
ggaagatcgaacagttttgatg

SEQ ID NO: 71712 - DNA, 22 bp, Artificial sequence
  SiRNA target sequence
gaagatcgaacagttttgatga

SEQ ID NO: 71713 - DNA, 22 bp, Artificial sequence
  SiRNA target sequence
aagatcgaacagttttgatgat

SEQ ID NO: 71714 - DNA, 22 bp, Artificial sequence
  SiRNA target sequence
agatcgaacagttttgatgata

SEQ ID NO: 71715 - DNA, 22 bp, Artificial sequence
  SiRNA target sequence
gatcgaacagttttgatgataa

SEQ ID NO: 71716 - DNA, 22 bp, Artificial sequence
  SiRNA target sequence
atcgaacagttttgatgataat

SEQ ID NO: 71717 - DNA, 22 bp, Artificial sequence
  SiRNA target sequence
tcgaacagttttgatgataatt

SEQ ID NO: 71718 - DNA, 22 bp, Artificial sequence
  SiRNA target sequence
cgaacagttttgatgataattc

SEQ ID NO: 71719 - DNA, 22 bp, Artificial sequence
  SiRNA target sequence
gaacagttttgatgataattca

SEQ ID NO: 71720 - DNA, 22 bp, Artificial sequence
  SiRNA target sequence
aacagttttgatgataattcat

SEQ ID NO: 71721 - DNA, 22 bp, Artificial sequence
  SiRNA target sequence
acagttttgatgataattcata

SEQ ID NO: 71722 - DNA, 22 bp, Artificial sequence
  SiRNA target sequence
cagttttgatgataattcataa

SEQ ID NO: 71723 - DNA, 22 bp, Artificial sequence
  SiRNA target sequence
agttttgatgataattcataat

SEQ ID NO: 71724 - DNA, 22 bp, Artificial sequence
  SiRNA target sequence
gttttgatgataattcataatc

SEQ ID NO: 71725 - DNA, 22 bp, Artificial sequence
  SiRNA target sequence
ttttgatgataattcataatct

SEQ ID NO: 71726 - DNA, 22 bp, Artificial sequence
  SiRNA target sequence
tttgatgataattcataatcta

SEQ ID NO: 71727 - DNA, 22 bp, Artificial sequence
  SiRNA target sequence
ttgatgataattcataatctag

SEQ ID NO: 71728 - DNA, 22 bp, Artificial sequence
  SiRNA target sequence
tgatgataattcataatctaga

SEQ ID NO: 71729 - DNA, 22 bp, Artificial sequence
  SiRNA target sequence
gatgataattcataatctagaa

SEQ ID NO: 71730 - DNA, 22 bp, Artificial sequence
  SiRNA target sequence
atgataattcataatctagaac

SEQ ID NO: 71731 - DNA, 22 bp, Artificial sequence
  SiRNA target sequence
tgataattcataatctagaact

SEQ ID NO: 71732 - DNA, 22 bp, Artificial sequence
  SiRNA target sequence
gataattcataatctagaactt

SEQ ID NO: 71733 - DNA, 22 bp, Artificial sequence
  SiRNA target sequence
ataattcataatctagaactta

SEQ ID NO: 71734 - DNA, 22 bp, Artificial sequence
  SiRNA target sequence
taattcataatctagaacttat

SEQ ID NO: 71735 - DNA, 22 bp, Artificial sequence
  SiRNA target sequence
aattcataatctagaacttatt

SEQ ID NO: 71736 - DNA, 22 bp, Artificial sequence
  SiRNA target sequence
attcataatctagaacttatta

SEQ ID NO: 71737 - DNA, 22 bp, Artificial sequence
  SiRNA target sequence
ttcataatctagaacttattaa

SEQ ID NO: 71738 - DNA, 22 bp, Artificial sequence
  SiRNA target sequence
tcataatctagaacttattaat

SEQ ID NO: 71739 - DNA, 22 bp, Artificial sequence
  SiRNA target sequence
cataatctagaacttattaata

SEQ ID NO: 71740 - DNA, 22 bp, Artificial sequence
  SiRNA target sequence
ataatctagaacttattaataa

SEQ ID NO: 71741 - DNA, 22 bp, Artificial sequence
  SiRNA target sequence
taatctagaacttattaataaa

SEQ ID NO: 71742 - DNA, 22 bp, Artificial sequence
  SiRNA target sequence
aatctagaacttattaataaat

SEQ ID NO: 71743 - DNA, 22 bp, Artificial sequence
  SiRNA target sequence
atctagaacttattaataaatt

SEQ ID NO: 71744 - DNA, 22 bp, Artificial sequence
  SiRNA target sequence
tctagaacttattaataaattt

SEQ ID NO: 71745 - DNA, 22 bp, Artificial sequence
  SiRNA target sequence
ctagaacttattaataaatttg

SEQ ID NO: 71746 - DNA, 22 bp, Artificial sequence
  SiRNA target sequence
tagaacttattaataaatttga

SEQ ID NO: 71747 - DNA, 22 bp, Artificial sequence
  SiRNA target sequence
agaacttattaataaatttgat

SEQ ID NO: 71748 - DNA, 22 bp, Artificial sequence
  SiRNA target sequence
gaacttattaataaatttgata

SEQ ID NO: 71749 - DNA, 22 bp, Artificial sequence
  SiRNA target sequence
aacttattaataaatttgataa

SEQ ID NO: 71750 - DNA, 22 bp, Artificial sequence
  SiRNA target sequence
acttattaataaatttgataaa

SEQ ID NO: 71751 - DNA, 22 bp, Artificial sequence
  SiRNA target sequence
cttattaataaatttgataaaa

SEQ ID NO: 71752 - DNA, 22 bp, Artificial sequence
  SiRNA target sequence
ttattaataaatttgataaaat

SEQ ID NO: 71753 - DNA, 22 bp, Artificial sequence
  SiRNA target sequence
tattaataaatttgataaaata

SEQ ID NO: 71754 - DNA, 22 bp, Artificial sequence
  SiRNA target sequence
attaataaatttgataaaataa

SEQ ID NO: 71755 - DNA, 22 bp, Artificial sequence
  SiRNA target sequence
ttaataaatttgataaaataat

SEQ ID NO: 71756 - DNA, 22 bp, Artificial sequence
  SiRNA target sequence
taataaatttgataaaataatt

SEQ ID NO: 71757 - DNA, 22 bp, Artificial sequence
  SiRNA target sequence
aataaatttgataaaataattt

SEQ ID NO: 71758 - DNA, 22 bp, Artificial sequence
  SiRNA target sequence
ataaatttgataaaataattta

SEQ ID NO: 71759 - DNA, 22 bp, Artificial sequence
  SiRNA target sequence
taaatttgataaaataatttac

SEQ ID NO: 71760 - DNA, 22 bp, Artificial sequence
  SiRNA target sequence
aaatttgataaaataatttaca

SEQ ID NO: 71761 - DNA, 22 bp, Artificial sequence
  SiRNA target sequence
aatttgataaaataatttacat

SEQ ID NO: 71762 - DNA, 22 bp, Artificial sequence
  SiRNA target sequence
atttgataaaataatttacatt

SEQ ID NO: 71763 - DNA, 22 bp, Artificial sequence
  SiRNA target sequence
tttgataaaataatttacattg

SEQ ID NO: 71764 - DNA, 22 bp, Artificial sequence
  SiRNA target sequence
ttgataaaataatttacattga

SEQ ID NO: 71765 - DNA, 22 bp, Artificial sequence
  SiRNA target sequence
tgataaaataatttacattgat

SEQ ID NO: 71766 - DNA, 22 bp, Artificial sequence
  SiRNA target sequence
gataaaataatttacattgatg

SEQ ID NO: 71767 - DNA, 22 bp, Artificial sequence
  SiRNA target sequence
ataaaataatttacattgatga

SEQ ID NO: 71768 - DNA, 22 bp, Artificial sequence
  SiRNA target sequence
taaaataatttacattgatgaa

SEQ ID NO: 71769 - DNA, 22 bp, Artificial sequence
  SiRNA target sequence
aaaataatttacattgatgaaa

SEQ ID NO: 71770 - DNA, 22 bp, Artificial sequence
  SiRNA target sequence
aaataatttacattgatgaaaa

SEQ ID NO: 71771 - DNA, 22 bp, Artificial sequence
  SiRNA target sequence
aataatttacattgatgaaaat

SEQ ID NO: 71772 - DNA, 22 bp, Artificial sequence
  SiRNA target sequence
ataatttacattgatgaaaata

SEQ ID NO: 71773 - DNA, 22 bp, Artificial sequence
  SiRNA target sequence
taatttacattgatgaaaataa

SEQ ID NO: 71774 - DNA, 22 bp, Artificial sequence
  SiRNA target sequence
aatttacattgatgaaaataat

SEQ ID NO: 71775 - DNA, 22 bp, Artificial sequence
  SiRNA target sequence
atttacattgatgaaaataata

SEQ ID NO: 71776 - DNA, 22 bp, Artificial sequence
  SiRNA target sequence
tttacattgatgaaaataatat

SEQ ID NO: 71777 - DNA, 22 bp, Artificial sequence
  SiRNA target sequence
ttacattgatgaaaataatata

SEQ ID NO: 71778 - DNA, 22 bp, Artificial sequence
  SiRNA target sequence
tacattgatgaaaataatatag

SEQ ID NO: 71779 - DNA, 22 bp, Artificial sequence
  SiRNA target sequence
acattgatgaaaataatataga

SEQ ID NO: 71780 - DNA, 22 bp, Artificial sequence
  SiRNA target sequence
cattgatgaaaataatatagaa

SEQ ID NO: 71781 - DNA, 22 bp, Artificial sequence
  SiRNA target sequence
attgatgaaaataatatagaag

SEQ ID NO: 71782 - DNA, 22 bp, Artificial sequence
  SiRNA target sequence
ttgatgaaaataatatagaagt

SEQ ID NO: 71783 - DNA, 22 bp, Artificial sequence
  SiRNA target sequence
tgatgaaaataatatagaagtc

SEQ ID NO: 71784 - DNA, 22 bp, Artificial sequence
  SiRNA target sequence
gatgaaaataatatagaagtct

SEQ ID NO: 71785 - DNA, 22 bp, Artificial sequence
  SiRNA target sequence
atgaaaataatatagaagtcta

SEQ ID NO: 71786 - DNA, 22 bp, Artificial sequence
  SiRNA target sequence
tgaaaataatatagaagtctat

SEQ ID NO: 71787 - DNA, 22 bp, Artificial sequence
  SiRNA target sequence
gaaaataatatagaagtctata

SEQ ID NO: 71788 - DNA, 22 bp, Artificial sequence
  SiRNA target sequence
aaaataatatagaagtctataa

SEQ ID NO: 71789 - DNA, 22 bp, Artificial sequence
  SiRNA target sequence
aaataatatagaagtctataaa

SEQ ID NO: 71790 - DNA, 22 bp, Artificial sequence
  SiRNA target sequence
aataatatagaagtctataaaa

SEQ ID NO: 71791 - DNA, 22 bp, Artificial sequence
  SiRNA target sequence
ataatatagaagtctataaaaa

SEQ ID NO: 71792 - DNA, 22 bp, Artificial sequence
  SiRNA target sequence
taatatagaagtctataaaaat

SEQ ID NO: 71793 - DNA, 22 bp, Artificial sequence
  SiRNA target sequence
aatatagaagtctataaaaatg

SEQ ID NO: 71794 - DNA, 22 bp, Artificial sequence
  SiRNA target sequence
atatagaagtctataaaaatga

SEQ ID NO: 71795 - DNA, 22 bp, Artificial sequence
  SiRNA target sequence
tatagaagtctataaaaatgat

SEQ ID NO: 71796 - DNA, 22 bp, Artificial sequence
  SiRNA target sequence
atagaagtctataaaaatgata

SEQ ID NO: 71797 - DNA, 22 bp, Artificial sequence
  SiRNA target sequence
tagaagtctataaaaatgatat

SEQ ID NO: 71798 - DNA, 22 bp, Artificial sequence
  SiRNA target sequence
agaagtctataaaaatgatatt

SEQ ID NO: 71799 - DNA, 22 bp, Artificial sequence
  SiRNA target sequence
gaagtctataaaaatgatattg

SEQ ID NO: 71800 - DNA, 22 bp, Artificial sequence
  SiRNA target sequence
aagtctataaaaatgatattga

SEQ ID NO: 71801 - DNA, 22 bp, Artificial sequence
  SiRNA target sequence
agtctataaaaatgatattgaa

SEQ ID NO: 71802 - DNA, 22 bp, Artificial sequence
  SiRNA target sequence
gtctataaaaatgatattgaag

SEQ ID NO: 71803 - DNA, 22 bp, Artificial sequence
  SiRNA target sequence
tctataaaaatgatattgaagg

SEQ ID NO: 71804 - DNA, 22 bp, Artificial sequence
  SiRNA target sequence
ctataaaaatgatattgaagga

SEQ ID NO: 71805 - DNA, 22 bp, Artificial sequence
  SiRNA target sequence
tataaaaatgatattgaaggac

SEQ ID NO: 71806 - DNA, 22 bp, Artificial sequence
  SiRNA target sequence
ataaaaatgatattgaaggaca

SEQ ID NO: 71807 - DNA, 22 bp, Artificial sequence
  SiRNA target sequence
taaaaatgatattgaaggacaa

SEQ ID NO: 71808 - DNA, 22 bp, Artificial sequence
  SiRNA target sequence
aaaaatgatattgaaggacaaa

SEQ ID NO: 71809 - DNA, 22 bp, Artificial sequence
  SiRNA target sequence
aaaatgatattgaaggacaaaa

SEQ ID NO: 71810 - DNA, 22 bp, Artificial sequence
  SiRNA target sequence
aaatgatattgaaggacaaaaa

SEQ ID NO: 71811 - DNA, 22 bp, Artificial sequence
  SiRNA target sequence
aatgatattgaaggacaaaaaa

SEQ ID NO: 71812 - DNA, 22 bp, Artificial sequence
  SiRNA target sequence
atgatattgaaggacaaaaaaa

SEQ ID NO: 71813 - DNA, 22 bp, Artificial sequence
  SiRNA target sequence
tgatattgaaggacaaaaaaag

SEQ ID NO: 71814 - DNA, 22 bp, Artificial sequence
  SiRNA target sequence
gatattgaaggacaaaaaaagt

SEQ ID NO: 71815 - DNA, 22 bp, Artificial sequence
  SiRNA target sequence
atattgaaggacaaaaaaagtt

SEQ ID NO: 71816 - DNA, 22 bp, Artificial sequence
  SiRNA target sequence
tattgaaggacaaaaaaagttt

SEQ ID NO: 71817 - DNA, 22 bp, Artificial sequence
  SiRNA target sequence
attgaaggacaaaaaaagtttt

SEQ ID NO: 71818 - DNA, 22 bp, Artificial sequence
  SiRNA target sequence
ttgaaggacaaaaaaagttttc

SEQ ID NO: 71819 - DNA, 22 bp, Artificial sequence
  SiRNA target sequence
tgaaggacaaaaaaagttttct

SEQ ID NO: 71820 - DNA, 22 bp, Artificial sequence
  SiRNA target sequence
gaaggacaaaaaaagttttcta

SEQ ID NO: 71821 - DNA, 22 bp, Artificial sequence
  SiRNA target sequence
aaggacaaaaaaagttttctac

SEQ ID NO: 71822 - DNA, 22 bp, Artificial sequence
  SiRNA target sequence
aggacaaaaaaagttttctaca

SEQ ID NO: 71823 - DNA, 22 bp, Artificial sequence
  SiRNA target sequence
ggacaaaaaaagttttctacaa

SEQ ID NO: 71824 - DNA, 22 bp, Artificial sequence
  SiRNA target sequence
gacaaaaaaagttttctacaaa

SEQ ID NO: 71825 - DNA, 22 bp, Artificial sequence
  SiRNA target sequence
acaaaaaaagttttctacaaat

SEQ ID NO: 71826 - DNA, 22 bp, Artificial sequence
  SiRNA target sequence
caaaaaaagttttctacaaatt

SEQ ID NO: 71827 - DNA, 22 bp, Artificial sequence
  SiRNA target sequence
aaaaaaagttttctacaaattt

SEQ ID NO: 71828 - DNA, 22 bp, Artificial sequence
  SiRNA target sequence
aaaaaagttttctacaaattta

SEQ ID NO: 71829 - DNA, 22 bp, Artificial sequence
  SiRNA target sequence
aaaaagttttctacaaatttac

SEQ ID NO: 71830 - DNA, 22 bp, Artificial sequence
  SiRNA target sequence
aaaagttttctacaaatttaca

SEQ ID NO: 71831 - DNA, 22 bp, Artificial sequence
  SiRNA target sequence
aaagttttctacaaatttacaa

SEQ ID NO: 71832 - DNA, 22 bp, Artificial sequence
  SiRNA target sequence
aagttttctacaaatttacaat

SEQ ID NO: 71833 - DNA, 22 bp, Artificial sequence
  SiRNA target sequence
agttttctacaaatttacaata

SEQ ID NO: 71834 - DNA, 22 bp, Artificial sequence
  SiRNA target sequence
gttttctacaaatttacaatat

SEQ ID NO: 71835 - DNA, 22 bp, Artificial sequence
  SiRNA target sequence
ttttctacaaatttacaatatt

SEQ ID NO: 71836 - DNA, 22 bp, Artificial sequence
  SiRNA target sequence
tttctacaaatttacaatattt

SEQ ID NO: 71837 - DNA, 22 bp, Artificial sequence
  SiRNA target sequence
ttctacaaatttacaatatttt

SEQ ID NO: 71838 - DNA, 22 bp, Artificial sequence
  SiRNA target sequence
tctacaaatttacaatattttt

SEQ ID NO: 71839 - DNA, 22 bp, Artificial sequence
  SiRNA target sequence
ctacaaatttacaatatttttt

SEQ ID NO: 71840 - DNA, 22 bp, Artificial sequence
  SiRNA target sequence
tacaaatttacaatatttttta

SEQ ID NO: 71841 - DNA, 22 bp, Artificial sequence
  SiRNA target sequence
acaaatttacaatattttttat

SEQ ID NO: 71842 - DNA, 22 bp, Artificial sequence
  SiRNA target sequence
caaatttacaatattttttatc

SEQ ID NO: 71843 - DNA, 22 bp, Artificial sequence
  SiRNA target sequence
aaatttacaatattttttatca

SEQ ID NO: 71844 - DNA, 22 bp, Artificial sequence
  SiRNA target sequence
aatttacaatattttttatcat

SEQ ID NO: 71845 - DNA, 22 bp, Artificial sequence
  SiRNA target sequence
atttacaatattttttatcata

SEQ ID NO: 71846 - DNA, 22 bp, Artificial sequence
  SiRNA target sequence
tttacaatattttttatcatac

SEQ ID NO: 71847 - DNA, 22 bp, Artificial sequence
  SiRNA target sequence
ttacaatattttttatcataca

SEQ ID NO: 71848 - DNA, 22 bp, Artificial sequence
  SiRNA target sequence
tacaatattttttatcatacaa

SEQ ID NO: 71849 - DNA, 22 bp, Artificial sequence
  SiRNA target sequence
acaatattttttatcatacaaa

SEQ ID NO: 71850 - DNA, 22 bp, Artificial sequence
  SiRNA target sequence
caatattttttatcatacaaat

SEQ ID NO: 71851 - DNA, 22 bp, Artificial sequence
  SiRNA target sequence
aatattttttatcatacaaatt

SEQ ID NO: 71852 - DNA, 22 bp, Artificial sequence
  SiRNA target sequence
atattttttatcatacaaatta

SEQ ID NO: 71853 - DNA, 22 bp, Artificial sequence
  SiRNA target sequence
tattttttatcatacaaattag

SEQ ID NO: 71854 - DNA, 22 bp, Artificial sequence
  SiRNA target sequence
attttttatcatacaaattagg

SEQ ID NO: 71855 - DNA, 22 bp, Artificial sequence
  SiRNA target sequence
ttttttatcatacaaattaggt

SEQ ID NO: 71856 - DNA, 22 bp, Artificial sequence
  SiRNA target sequence
tttttatcatacaaattaggta

SEQ ID NO: 71857 - DNA, 22 bp, Artificial sequence
  SiRNA target sequence
ttttatcatacaaattaggtaa

SEQ ID NO: 71858 - DNA, 22 bp, Artificial sequence
  SiRNA target sequence
tttatcatacaaattaggtaaa

SEQ ID NO: 71859 - DNA, 22 bp, Artificial sequence
  SiRNA target sequence
ttatcatacaaattaggtaaat

SEQ ID NO: 71860 - DNA, 22 bp, Artificial sequence
  SiRNA target sequence
tatcatacaaattaggtaaata

SEQ ID NO: 71861 - DNA, 22 bp, Artificial sequence
  SiRNA target sequence
atcatacaaattaggtaaataa

SEQ ID NO: 71862 - DNA, 23 bp, Artificial sequence
  SiRNA target sequence
atgaaaaaaatttcgaatagaaa

SEQ ID NO: 71863 - DNA, 23 bp, Artificial sequence
  SiRNA target sequence
tgaaaaaaatttcgaatagaaaa

SEQ ID NO: 71864 - DNA, 23 bp, Artificial sequence
  SiRNA target sequence
gaaaaaaatttcgaatagaaaaa

SEQ ID NO: 71865 - DNA, 23 bp, Artificial sequence
  SiRNA target sequence
aaaaaaatttcgaatagaaaaat

SEQ ID NO: 71866 - DNA, 23 bp, Artificial sequence
  SiRNA target sequence
aaaaaatttcgaatagaaaaatt

SEQ ID NO: 71867 - DNA, 23 bp, Artificial sequence
  SiRNA target sequence
aaaaatttcgaatagaaaaatta

SEQ ID NO: 71868 - DNA, 23 bp, Artificial sequence
  SiRNA target sequence
aaaatttcgaatagaaaaattat

SEQ ID NO: 71869 - DNA, 23 bp, Artificial sequence
  SiRNA target sequence
aaatttcgaatagaaaaattatc

SEQ ID NO: 71870 - DNA, 23 bp, Artificial sequence
  SiRNA target sequence
aatttcgaatagaaaaattatca

SEQ ID NO: 71871 - DNA, 23 bp, Artificial sequence
  SiRNA target sequence
atttcgaatagaaaaattatcaa

SEQ ID NO: 71872 - DNA, 23 bp, Artificial sequence
  SiRNA target sequence
tttcgaatagaaaaattatcaaa

SEQ ID NO: 71873 - DNA, 23 bp, Artificial sequence
  SiRNA target sequence
ttcgaatagaaaaattatcaaag

SEQ ID NO: 71874 - DNA, 23 bp, Artificial sequence
  SiRNA target sequence
tcgaatagaaaaattatcaaaga

SEQ ID NO: 71875 - DNA, 23 bp, Artificial sequence
  SiRNA target sequence
cgaatagaaaaattatcaaagaa

SEQ ID NO: 71876 - DNA, 23 bp, Artificial sequence
  SiRNA target sequence
gaatagaaaaattatcaaagaaa

SEQ ID NO: 71877 - DNA, 23 bp, Artificial sequence
  SiRNA target sequence
aatagaaaaattatcaaagaaat

SEQ ID NO: 71878 - DNA, 23 bp, Artificial sequence
  SiRNA target sequence
atagaaaaattatcaaagaaatt

SEQ ID NO: 71879 - DNA, 23 bp, Artificial sequence
  SiRNA target sequence
tagaaaaattatcaaagaaatta

SEQ ID NO: 71880 - DNA, 23 bp, Artificial sequence
  SiRNA target sequence
agaaaaattatcaaagaaattat

SEQ ID NO: 71881 - DNA, 23 bp, Artificial sequence
  SiRNA target sequence
gaaaaattatcaaagaaattatt

SEQ ID NO: 71882 - DNA, 23 bp, Artificial sequence
  SiRNA target sequence
aaaaattatcaaagaaattattt

SEQ ID NO: 71883 - DNA, 23 bp, Artificial sequence
  SiRNA target sequence
aaaattatcaaagaaattattta

SEQ ID NO: 71884 - DNA, 23 bp, Artificial sequence
  SiRNA target sequence
aaattatcaaagaaattatttac

SEQ ID NO: 71885 - DNA, 23 bp, Artificial sequence
  SiRNA target sequence
aattatcaaagaaattatttaca

SEQ ID NO: 71886 - DNA, 23 bp, Artificial sequence
  SiRNA target sequence
attatcaaagaaattatttacaa

SEQ ID NO: 71887 - DNA, 23 bp, Artificial sequence
  SiRNA target sequence
ttatcaaagaaattatttacaat

SEQ ID NO: 71888 - DNA, 23 bp, Artificial sequence
  SiRNA target sequence
tatcaaagaaattatttacaatg

SEQ ID NO: 71889 - DNA, 23 bp, Artificial sequence
  SiRNA target sequence
atcaaagaaattatttacaatga

SEQ ID NO: 71890 - DNA, 23 bp, Artificial sequence
  SiRNA target sequence
tcaaagaaattatttacaatgat

SEQ ID NO: 71891 - DNA, 23 bp, Artificial sequence
  SiRNA target sequence
caaagaaattatttacaatgatt

SEQ ID NO: 71892 - DNA, 23 bp, Artificial sequence
  SiRNA target sequence
aaagaaattatttacaatgattt

SEQ ID NO: 71893 - DNA, 23 bp, Artificial sequence
  SiRNA target sequence
aagaaattatttacaatgattta

SEQ ID NO: 71894 - DNA, 23 bp, Artificial sequence
  SiRNA target sequence
agaaattatttacaatgatttat

SEQ ID NO: 71895 - DNA, 23 bp, Artificial sequence
  SiRNA target sequence
gaaattatttacaatgatttatt

SEQ ID NO: 71896 - DNA, 23 bp, Artificial sequence
  SiRNA target sequence
aaattatttacaatgatttatta

SEQ ID NO: 71897 - DNA, 23 bp, Artificial sequence
  SiRNA target sequence
aattatttacaatgatttattaa

SEQ ID NO: 71898 - DNA, 23 bp, Artificial sequence
  SiRNA target sequence
attatttacaatgatttattaaa

SEQ ID NO: 71899 - DNA, 23 bp, Artificial sequence
  SiRNA target sequence
ttatttacaatgatttattaaaa

SEQ ID NO: 71900 - DNA, 23 bp, Artificial sequence
  SiRNA target sequence
tatttacaatgatttattaaaaa

SEQ ID NO: 71901 - DNA, 23 bp, Artificial sequence
  SiRNA target sequence
atttacaatgatttattaaaaat

SEQ ID NO: 71902 - DNA, 23 bp, Artificial sequence
  SiRNA target sequence
tttacaatgatttattaaaaata

SEQ ID NO: 71903 - DNA, 23 bp, Artificial sequence
  SiRNA target sequence
ttacaatgatttattaaaaataa

SEQ ID NO: 71904 - DNA, 23 bp, Artificial sequence
  SiRNA target sequence
tacaatgatttattaaaaataag

SEQ ID NO: 71905 - DNA, 23 bp, Artificial sequence
  SiRNA target sequence
acaatgatttattaaaaataaga

SEQ ID NO: 71906 - DNA, 23 bp, Artificial sequence
  SiRNA target sequence
caatgatttattaaaaataagaa

SEQ ID NO: 71907 - DNA, 23 bp, Artificial sequence
  SiRNA target sequence
aatgatttattaaaaataagaat

SEQ ID NO: 71908 - DNA, 23 bp, Artificial sequence
  SiRNA target sequence
atgatttattaaaaataagaatg

SEQ ID NO: 71909 - DNA, 23 bp, Artificial sequence
  SiRNA target sequence
tgatttattaaaaataagaatgt

SEQ ID NO: 71910 - DNA, 23 bp, Artificial sequence
  SiRNA target sequence
gatttattaaaaataagaatgtt

SEQ ID NO: 71911 - DNA, 23 bp, Artificial sequence
  SiRNA target sequence
atttattaaaaataagaatgttg

SEQ ID NO: 71912 - DNA, 23 bp, Artificial sequence
  SiRNA target sequence
tttattaaaaataagaatgttgc

SEQ ID NO: 71913 - DNA, 23 bp, Artificial sequence
  SiRNA target sequence
ttattaaaaataagaatgttgcg

SEQ ID NO: 71914 - DNA, 23 bp, Artificial sequence
  SiRNA target sequence
tattaaaaataagaatgttgcga

SEQ ID NO: 71915 - DNA, 23 bp, Artificial sequence
  SiRNA target sequence
attaaaaataagaatgttgcgat

SEQ ID NO: 71916 - DNA, 23 bp, Artificial sequence
  SiRNA target sequence
ttaaaaataagaatgttgcgata

SEQ ID NO: 71917 - DNA, 23 bp, Artificial sequence
  SiRNA target sequence
taaaaataagaatgttgcgatat

SEQ ID NO: 71918 - DNA, 23 bp, Artificial sequence
  SiRNA target sequence
aaaaataagaatgttgcgatatg

SEQ ID NO: 71919 - DNA, 23 bp, Artificial sequence
  SiRNA target sequence
aaaataagaatgttgcgatatgt

SEQ ID NO: 71920 - DNA, 23 bp, Artificial sequence
  SiRNA target sequence
aaataagaatgttgcgatatgtt

SEQ ID NO: 71921 - DNA, 23 bp, Artificial sequence
  SiRNA target sequence
aataagaatgttgcgatatgtta

SEQ ID NO: 71922 - DNA, 23 bp, Artificial sequence
  SiRNA target sequence
ataagaatgttgcgatatgttat

SEQ ID NO: 71923 - DNA, 23 bp, Artificial sequence
  SiRNA target sequence
taagaatgttgcgatatgttatt

SEQ ID NO: 71924 - DNA, 23 bp, Artificial sequence
  SiRNA target sequence
aagaatgttgcgatatgttattg

SEQ ID NO: 71925 - DNA, 23 bp, Artificial sequence
  SiRNA target sequence
agaatgttgcgatatgttattgt

SEQ ID NO: 71926 - DNA, 23 bp, Artificial sequence
  SiRNA target sequence
gaatgttgcgatatgttattgta

SEQ ID NO: 71927 - DNA, 23 bp, Artificial sequence
  SiRNA target sequence
aatgttgcgatatgttattgtac

SEQ ID NO: 71928 - DNA, 23 bp, Artificial sequence
  SiRNA target sequence
atgttgcgatatgttattgtacc

SEQ ID NO: 71929 - DNA, 23 bp, Artificial sequence
  SiRNA target sequence
tgttgcgatatgttattgtacca

SEQ ID NO: 71930 - DNA, 23 bp, Artificial sequence
  SiRNA target sequence
gttgcgatatgttattgtaccaa

SEQ ID NO: 71931 - DNA, 23 bp, Artificial sequence
  SiRNA target sequence
ttgcgatatgttattgtaccaat

SEQ ID NO: 71932 - DNA, 23 bp, Artificial sequence
  SiRNA target sequence
tgcgatatgttattgtaccaata

SEQ ID NO: 71933 - DNA, 23 bp, Artificial sequence
  SiRNA target sequence
gcgatatgttattgtaccaataa

SEQ ID NO: 71934 - DNA, 23 bp, Artificial sequence
  SiRNA target sequence
cgatatgttattgtaccaataat

SEQ ID NO: 71935 - DNA, 23 bp, Artificial sequence
  SiRNA target sequence
gatatgttattgtaccaataata

SEQ ID NO: 71936 - DNA, 23 bp, Artificial sequence
  SiRNA target sequence
atatgttattgtaccaataatat

SEQ ID NO: 71937 - DNA, 23 bp, Artificial sequence
  SiRNA target sequence
tatgttattgtaccaataatatt

SEQ ID NO: 71938 - DNA, 23 bp, Artificial sequence
  SiRNA target sequence
atgttattgtaccaataatattt

SEQ ID NO: 71939 - DNA, 23 bp, Artificial sequence
  SiRNA target sequence
tgttattgtaccaataatatttt

SEQ ID NO: 71940 - DNA, 23 bp, Artificial sequence
  SiRNA target sequence
gttattgtaccaataatattttt

SEQ ID NO: 71941 - DNA, 23 bp, Artificial sequence
  SiRNA target sequence
ttattgtaccaataatattttta

SEQ ID NO: 71942 - DNA, 23 bp, Artificial sequence
  SiRNA target sequence
tattgtaccaataatatttttaa

SEQ ID NO: 71943 - DNA, 23 bp, Artificial sequence
  SiRNA target sequence
attgtaccaataatatttttaac

SEQ ID NO: 71944 - DNA, 23 bp, Artificial sequence
  SiRNA target sequence
ttgtaccaataatatttttaact

SEQ ID NO: 71945 - DNA, 23 bp, Artificial sequence
  SiRNA target sequence
tgtaccaataatatttttaacta

SEQ ID NO: 71946 - DNA, 23 bp, Artificial sequence
  SiRNA target sequence
gtaccaataatatttttaactat

SEQ ID NO: 71947 - DNA, 23 bp, Artificial sequence
  SiRNA target sequence
taccaataatatttttaactata

SEQ ID NO: 71948 - DNA, 23 bp, Artificial sequence
  SiRNA target sequence
accaataatatttttaactatat

SEQ ID NO: 71949 - DNA, 23 bp, Artificial sequence
  SiRNA target sequence
ccaataatatttttaactatatt

SEQ ID NO: 71950 - DNA, 23 bp, Artificial sequence
  SiRNA target sequence
caataatatttttaactatattt

SEQ ID NO: 71951 - DNA, 23 bp, Artificial sequence
  SiRNA target sequence
aataatatttttaactatatttt

SEQ ID NO: 71952 - DNA, 23 bp, Artificial sequence
  SiRNA target sequence
ataatatttttaactatatttta

SEQ ID NO: 71953 - DNA, 23 bp, Artificial sequence
  SiRNA target sequence
taatatttttaactatattttac

SEQ ID NO: 71954 - DNA, 23 bp, Artificial sequence
  SiRNA target sequence
aatatttttaactatattttaca

SEQ ID NO: 71955 - DNA, 23 bp, Artificial sequence
  SiRNA target sequence
atatttttaactatattttacac

SEQ ID NO: 71956 - DNA, 23 bp, Artificial sequence
  SiRNA target sequence
tatttttaactatattttacact

SEQ ID NO: 71957 - DNA, 23 bp, Artificial sequence
  SiRNA target sequence
atttttaactatattttacactg

SEQ ID NO: 71958 - DNA, 23 bp, Artificial sequence
  SiRNA target sequence
tttttaactatattttacactgt

SEQ ID NO: 71959 - DNA, 23 bp, Artificial sequence
  SiRNA target sequence
ttttaactatattttacactgtt

SEQ ID NO: 71960 - DNA, 23 bp, Artificial sequence
  SiRNA target sequence
tttaactatattttacactgttt

SEQ ID NO: 71961 - DNA, 23 bp, Artificial sequence
  SiRNA target sequence
ttaactatattttacactgtttt

SEQ ID NO: 71962 - DNA, 23 bp, Artificial sequence
  SiRNA target sequence
taactatattttacactgtttta

SEQ ID NO: 71963 - DNA, 23 bp, Artificial sequence
  SiRNA target sequence
aactatattttacactgttttag

SEQ ID NO: 71964 - DNA, 23 bp, Artificial sequence
  SiRNA target sequence
actatattttacactgttttaga

SEQ ID NO: 71965 - DNA, 23 bp, Artificial sequence
  SiRNA target sequence
ctatattttacactgttttagag

SEQ ID NO: 71966 - DNA, 23 bp, Artificial sequence
  SiRNA target sequence
tatattttacactgttttagaga

SEQ ID NO: 71967 - DNA, 23 bp, Artificial sequence
  SiRNA target sequence
atattttacactgttttagagat

SEQ ID NO: 71968 - DNA, 23 bp, Artificial sequence
  SiRNA target sequence
tattttacactgttttagagata

SEQ ID NO: 71969 - DNA, 23 bp, Artificial sequence
  SiRNA target sequence
attttacactgttttagagataa

SEQ ID NO: 71970 - DNA, 23 bp, Artificial sequence
  SiRNA target sequence
ttttacactgttttagagataaa

SEQ ID NO: 71971 - DNA, 23 bp, Artificial sequence
  SiRNA target sequence
tttacactgttttagagataaaa

SEQ ID NO: 71972 - DNA, 23 bp, Artificial sequence
  SiRNA target sequence
ttacactgttttagagataaaaa

SEQ ID NO: 71973 - DNA, 23 bp, Artificial sequence
  SiRNA target sequence
tacactgttttagagataaaaat

SEQ ID NO: 71974 - DNA, 23 bp, Artificial sequence
  SiRNA target sequence
acactgttttagagataaaaata

SEQ ID NO: 71975 - DNA, 23 bp, Artificial sequence
  SiRNA target sequence
cactgttttagagataaaaataa

SEQ ID NO: 71976 - DNA, 23 bp, Artificial sequence
  SiRNA target sequence
actgttttagagataaaaataag

SEQ ID NO: 71977 - DNA, 23 bp, Artificial sequence
  SiRNA target sequence
ctgttttagagataaaaataagt

SEQ ID NO: 71978 - DNA, 23 bp, Artificial sequence
  SiRNA target sequence
tgttttagagataaaaataagta

SEQ ID NO: 71979 - DNA, 23 bp, Artificial sequence
  SiRNA target sequence
gttttagagataaaaataagtac

SEQ ID NO: 71980 - DNA, 23 bp, Artificial sequence
  SiRNA target sequence
ttttagagataaaaataagtaca

SEQ ID NO: 71981 - DNA, 23 bp, Artificial sequence
  SiRNA target sequence
tttagagataaaaataagtacat

SEQ ID NO: 71982 - DNA, 23 bp, Artificial sequence
  SiRNA target sequence
ttagagataaaaataagtacatt

SEQ ID NO: 71983 - DNA, 23 bp, Artificial sequence
  SiRNA target sequence
tagagataaaaataagtacatta

SEQ ID NO: 71984 - DNA, 23 bp, Artificial sequence
  SiRNA target sequence
agagataaaaataagtacattag

SEQ ID NO: 71985 - DNA, 23 bp, Artificial sequence
  SiRNA target sequence
gagataaaaataagtacattagt

SEQ ID NO: 71986 - DNA, 23 bp, Artificial sequence
  SiRNA target sequence
agataaaaataagtacattagta

SEQ ID NO: 71987 - DNA, 23 bp, Artificial sequence
  SiRNA target sequence
gataaaaataagtacattagtaa

SEQ ID NO: 71988 - DNA, 23 bp, Artificial sequence
  SiRNA target sequence
ataaaaataagtacattagtaaa

SEQ ID NO: 71989 - DNA, 23 bp, Artificial sequence
  SiRNA target sequence
taaaaataagtacattagtaaag

SEQ ID NO: 71990 - DNA, 23 bp, Artificial sequence
  SiRNA target sequence
aaaaataagtacattagtaaaga

SEQ ID NO: 71991 - DNA, 23 bp, Artificial sequence
  SiRNA target sequence
aaaataagtacattagtaaagaa

SEQ ID NO: 71992 - DNA, 23 bp, Artificial sequence
  SiRNA target sequence
aaataagtacattagtaaagaat

SEQ ID NO: 71993 - DNA, 23 bp, Artificial sequence
  SiRNA target sequence
aataagtacattagtaaagaatc

SEQ ID NO: 71994 - DNA, 23 bp, Artificial sequence
  SiRNA target sequence
ataagtacattagtaaagaatct

SEQ ID NO: 71995 - DNA, 23 bp, Artificial sequence
  SiRNA target sequence
taagtacattagtaaagaatctt

SEQ ID NO: 71996 - DNA, 23 bp, Artificial sequence
  SiRNA target sequence
aagtacattagtaaagaatctta

SEQ ID NO: 71997 - DNA, 23 bp, Artificial sequence
  SiRNA target sequence
agtacattagtaaagaatcttaa

SEQ ID NO: 71998 - DNA, 23 bp, Artificial sequence
  SiRNA target sequence
gtacattagtaaagaatcttaat

SEQ ID NO: 71999 - DNA, 23 bp, Artificial sequence
  SiRNA target sequence
tacattagtaaagaatcttaatc

SEQ ID NO: 72000 - DNA, 23 bp, Artificial sequence
  SiRNA target sequence
acattagtaaagaatcttaatca

SEQ ID NO: 72001 - DNA, 23 bp, Artificial sequence
  SiRNA target sequence
cattagtaaagaatcttaatcaa

SEQ ID NO: 72002 - DNA, 23 bp, Artificial sequence
  SiRNA target sequence
attagtaaagaatcttaatcaat

SEQ ID NO: 72003 - DNA, 23 bp, Artificial sequence
  SiRNA target sequence
ttagtaaagaatcttaatcaatc

SEQ ID NO: 72004 - DNA, 23 bp, Artificial sequence
  SiRNA target sequence
tagtaaagaatcttaatcaatct

SEQ ID NO: 72005 - DNA, 23 bp, Artificial sequence
  SiRNA target sequence
agtaaagaatcttaatcaatcta

SEQ ID NO: 72006 - DNA, 23 bp, Artificial sequence
  SiRNA target sequence
gtaaagaatcttaatcaatctat

SEQ ID NO: 72007 - DNA, 23 bp, Artificial sequence
  SiRNA target sequence
taaagaatcttaatcaatctatc

SEQ ID NO: 72008 - DNA, 23 bp, Artificial sequence
  SiRNA target sequence
aaagaatcttaatcaatctatcg

SEQ ID NO: 72009 - DNA, 23 bp, Artificial sequence
  SiRNA target sequence
aagaatcttaatcaatctatcgc

SEQ ID NO: 72010 - DNA, 23 bp, Artificial sequence
  SiRNA target sequence
agaatcttaatcaatctatcgca

SEQ ID NO: 72011 - DNA, 23 bp, Artificial sequence
  SiRNA target sequence
gaatcttaatcaatctatcgcaa

SEQ ID NO: 72012 - DNA, 23 bp, Artificial sequence
  SiRNA target sequence
aatcttaatcaatctatcgcaaa

SEQ ID NO: 72013 - DNA, 23 bp, Artificial sequence
  SiRNA target sequence
atcttaatcaatctatcgcaaat

SEQ ID NO: 72014 - DNA, 23 bp, Artificial sequence
  SiRNA target sequence
tcttaatcaatctatcgcaaatc

SEQ ID NO: 72015 - DNA, 23 bp, Artificial sequence
  SiRNA target sequence
cttaatcaatctatcgcaaatcg

SEQ ID NO: 72016 - DNA, 23 bp, Artificial sequence
  SiRNA target sequence
ttaatcaatctatcgcaaatcga

SEQ ID NO: 72017 - DNA, 23 bp, Artificial sequence
  SiRNA target sequence
taatcaatctatcgcaaatcgaa

SEQ ID NO: 72018 - DNA, 23 bp, Artificial sequence
  SiRNA target sequence
aatcaatctatcgcaaatcgaaa

SEQ ID NO: 72019 - DNA, 23 bp, Artificial sequence
  SiRNA target sequence
atcaatctatcgcaaatcgaaaa

SEQ ID NO: 72020 - DNA, 23 bp, Artificial sequence
  SiRNA target sequence
tcaatctatcgcaaatcgaaaag

SEQ ID NO: 72021 - DNA, 23 bp, Artificial sequence
  SiRNA target sequence
caatctatcgcaaatcgaaaagg

SEQ ID NO: 72022 - DNA, 23 bp, Artificial sequence
  SiRNA target sequence
aatctatcgcaaatcgaaaaggt

SEQ ID NO: 72023 - DNA, 23 bp, Artificial sequence
  SiRNA target sequence
atctatcgcaaatcgaaaaggtg

SEQ ID NO: 72024 - DNA, 23 bp, Artificial sequence
  SiRNA target sequence
tctatcgcaaatcgaaaaggtga

SEQ ID NO: 72025 - DNA, 23 bp, Artificial sequence
  SiRNA target sequence
ctatcgcaaatcgaaaaggtgaa

SEQ ID NO: 72026 - DNA, 23 bp, Artificial sequence
  SiRNA target sequence
tatcgcaaatcgaaaaggtgaac

SEQ ID NO: 72027 - DNA, 23 bp, Artificial sequence
  SiRNA target sequence
atcgcaaatcgaaaaggtgaaca

SEQ ID NO: 72028 - DNA, 23 bp, Artificial sequence
  SiRNA target sequence
tcgcaaatcgaaaaggtgaacac

SEQ ID NO: 72029 - DNA, 23 bp, Artificial sequence
  SiRNA target sequence
cgcaaatcgaaaaggtgaacaca

SEQ ID NO: 72030 - DNA, 23 bp, Artificial sequence
  SiRNA target sequence
gcaaatcgaaaaggtgaacacac

SEQ ID NO: 72031 - DNA, 23 bp, Artificial sequence
  SiRNA target sequence
caaatcgaaaaggtgaacacaca

SEQ ID NO: 72032 - DNA, 23 bp, Artificial sequence
  SiRNA target sequence
aaatcgaaaaggtgaacacacag

SEQ ID NO: 72033 - DNA, 23 bp, Artificial sequence
  SiRNA target sequence
aatcgaaaaggtgaacacacagc

SEQ ID NO: 72034 - DNA, 23 bp, Artificial sequence
  SiRNA target sequence
atcgaaaaggtgaacacacagca

SEQ ID NO: 72035 - DNA, 23 bp, Artificial sequence
  SiRNA target sequence
tcgaaaaggtgaacacacagcac

SEQ ID NO: 72036 - DNA, 23 bp, Artificial sequence
  SiRNA target sequence
cgaaaaggtgaacacacagcact

SEQ ID NO: 72037 - DNA, 23 bp, Artificial sequence
  SiRNA target sequence
gaaaaggtgaacacacagcactt

SEQ ID NO: 72038 - DNA, 23 bp, Artificial sequence
  SiRNA target sequence
aaaaggtgaacacacagcacttg

SEQ ID NO: 72039 - DNA, 23 bp, Artificial sequence
  SiRNA target sequence
aaaggtgaacacacagcacttga

SEQ ID NO: 72040 - DNA, 23 bp, Artificial sequence
  SiRNA target sequence
aaggtgaacacacagcacttgaa

SEQ ID NO: 72041 - DNA, 23 bp, Artificial sequence
  SiRNA target sequence
aggtgaacacacagcacttgaaa

SEQ ID NO: 72042 - DNA, 23 bp, Artificial sequence
  SiRNA target sequence
ggtgaacacacagcacttgaaag

SEQ ID NO: 72043 - DNA, 23 bp, Artificial sequence
  SiRNA target sequence
gtgaacacacagcacttgaaaga

SEQ ID NO: 72044 - DNA, 23 bp, Artificial sequence
  SiRNA target sequence
tgaacacacagcacttgaaagat

SEQ ID NO: 72045 - DNA, 23 bp, Artificial sequence
  SiRNA target sequence
gaacacacagcacttgaaagatt

SEQ ID NO: 72046 - DNA, 23 bp, Artificial sequence
  SiRNA target sequence
aacacacagcacttgaaagattt

SEQ ID NO: 72047 - DNA, 23 bp, Artificial sequence
  SiRNA target sequence
acacacagcacttgaaagatttg

SEQ ID NO: 72048 - DNA, 23 bp, Artificial sequence
  SiRNA target sequence
cacacagcacttgaaagatttgt

SEQ ID NO: 72049 - DNA, 23 bp, Artificial sequence
  SiRNA target sequence
acacagcacttgaaagatttgtg

SEQ ID NO: 72050 - DNA, 23 bp, Artificial sequence
  SiRNA target sequence
cacagcacttgaaagatttgtgt

SEQ ID NO: 72051 - DNA, 23 bp, Artificial sequence
  SiRNA target sequence
acagcacttgaaagatttgtgtt

SEQ ID NO: 72052 - DNA, 23 bp, Artificial sequence
  SiRNA target sequence
cagcacttgaaagatttgtgtta

SEQ ID NO: 72053 - DNA, 23 bp, Artificial sequence
  SiRNA target sequence
agcacttgaaagatttgtgttac

SEQ ID NO: 72054 - DNA, 23 bp, Artificial sequence
  SiRNA target sequence
gcacttgaaagatttgtgttaca

SEQ ID NO: 72055 - DNA, 23 bp, Artificial sequence
  SiRNA target sequence
cacttgaaagatttgtgttacag

SEQ ID NO: 72056 - DNA, 23 bp, Artificial sequence
  SiRNA target sequence
acttgaaagatttgtgttacagt

SEQ ID NO: 72057 - DNA, 23 bp, Artificial sequence
  SiRNA target sequence
cttgaaagatttgtgttacagtc

SEQ ID NO: 72058 - DNA, 23 bp, Artificial sequence
  SiRNA target sequence
ttgaaagatttgtgttacagtca

SEQ ID NO: 72059 - DNA, 23 bp, Artificial sequence
  SiRNA target sequence
tgaaagatttgtgttacagtcac

SEQ ID NO: 72060 - DNA, 23 bp, Artificial sequence
  SiRNA target sequence
gaaagatttgtgttacagtcact

SEQ ID NO: 72061 - DNA, 23 bp, Artificial sequence
  SiRNA target sequence
aaagatttgtgttacagtcactc

SEQ ID NO: 72062 - DNA, 23 bp, Artificial sequence
  SiRNA target sequence
aagatttgtgttacagtcactct

SEQ ID NO: 72063 - DNA, 23 bp, Artificial sequence
  SiRNA target sequence
agatttgtgttacagtcactctt

SEQ ID NO: 72064 - DNA, 23 bp, Artificial sequence
  SiRNA target sequence
gatttgtgttacagtcactctta

SEQ ID NO: 72065 - DNA, 23 bp, Artificial sequence
  SiRNA target sequence
atttgtgttacagtcactcttag

SEQ ID NO: 72066 - DNA, 23 bp, Artificial sequence
  SiRNA target sequence
tttgtgttacagtcactcttagt

SEQ ID NO: 72067 - DNA, 23 bp, Artificial sequence
  SiRNA target sequence
ttgtgttacagtcactcttagtg

SEQ ID NO: 72068 - DNA, 23 bp, Artificial sequence
  SiRNA target sequence
tgtgttacagtcactcttagtgg

SEQ ID NO: 72069 - DNA, 23 bp, Artificial sequence
  SiRNA target sequence
gtgttacagtcactcttagtggc

SEQ ID NO: 72070 - DNA, 23 bp, Artificial sequence
  SiRNA target sequence
tgttacagtcactcttagtggct

SEQ ID NO: 72071 - DNA, 23 bp, Artificial sequence
  SiRNA target sequence
gttacagtcactcttagtggctg

SEQ ID NO: 72072 - DNA, 23 bp, Artificial sequence
  SiRNA target sequence
ttacagtcactcttagtggctgt

SEQ ID NO: 72073 - DNA, 23 bp, Artificial sequence
  SiRNA target sequence
tacagtcactcttagtggctgta

SEQ ID NO: 72074 - DNA, 23 bp, Artificial sequence
  SiRNA target sequence
acagtcactcttagtggctgtat

SEQ ID NO: 72075 - DNA, 23 bp, Artificial sequence
  SiRNA target sequence
cagtcactcttagtggctgtatt

SEQ ID NO: 72076 - DNA, 23 bp, Artificial sequence
  SiRNA target sequence
agtcactcttagtggctgtattg

SEQ ID NO: 72077 - DNA, 23 bp, Artificial sequence
  SiRNA target sequence
gtcactcttagtggctgtattga

SEQ ID NO: 72078 - DNA, 23 bp, Artificial sequence
  SiRNA target sequence
tcactcttagtggctgtattgac

SEQ ID NO: 72079 - DNA, 23 bp, Artificial sequence
  SiRNA target sequence
cactcttagtggctgtattgacc

SEQ ID NO: 72080 - DNA, 23 bp, Artificial sequence
  SiRNA target sequence
actcttagtggctgtattgaccg

SEQ ID NO: 72081 - DNA, 23 bp, Artificial sequence
  SiRNA target sequence
ctcttagtggctgtattgaccga

SEQ ID NO: 72082 - DNA, 23 bp, Artificial sequence
  SiRNA target sequence
tcttagtggctgtattgaccgaa

SEQ ID NO: 72083 - DNA, 23 bp, Artificial sequence
  SiRNA target sequence
cttagtggctgtattgaccgaac

SEQ ID NO: 72084 - DNA, 23 bp, Artificial sequence
  SiRNA target sequence
ttagtggctgtattgaccgaact

SEQ ID NO: 72085 - DNA, 23 bp, Artificial sequence
  SiRNA target sequence
tagtggctgtattgaccgaactt

SEQ ID NO: 72086 - DNA, 23 bp, Artificial sequence
  SiRNA target sequence
agtggctgtattgaccgaactta

SEQ ID NO: 72087 - DNA, 23 bp, Artificial sequence
  SiRNA target sequence
gtggctgtattgaccgaacttaa

SEQ ID NO: 72088 - DNA, 23 bp, Artificial sequence
  SiRNA target sequence
tggctgtattgaccgaacttaat

SEQ ID NO: 72089 - DNA, 23 bp, Artificial sequence
  SiRNA target sequence
ggctgtattgaccgaacttaatg

SEQ ID NO: 72090 - DNA, 23 bp, Artificial sequence
  SiRNA target sequence
gctgtattgaccgaacttaatgg

SEQ ID NO: 72091 - DNA, 23 bp, Artificial sequence
  SiRNA target sequence
ctgtattgaccgaacttaatgga

SEQ ID NO: 72092 - DNA, 23 bp, Artificial sequence
  SiRNA target sequence
tgtattgaccgaacttaatggat

SEQ ID NO: 72093 - DNA, 23 bp, Artificial sequence
  SiRNA target sequence
gtattgaccgaacttaatggatt

SEQ ID NO: 72094 - DNA, 23 bp, Artificial sequence
  SiRNA target sequence
tattgaccgaacttaatggattt

SEQ ID NO: 72095 - DNA, 23 bp, Artificial sequence
  SiRNA target sequence
attgaccgaacttaatggattta

SEQ ID NO: 72096 - DNA, 23 bp, Artificial sequence
  SiRNA target sequence
ttgaccgaacttaatggatttat

SEQ ID NO: 72097 - DNA, 23 bp, Artificial sequence
  SiRNA target sequence
tgaccgaacttaatggatttatt

SEQ ID NO: 72098 - DNA, 23 bp, Artificial sequence
  SiRNA target sequence
gaccgaacttaatggatttattt

SEQ ID NO: 72099 - DNA, 23 bp, Artificial sequence
  SiRNA target sequence
accgaacttaatggatttatttt

SEQ ID NO: 72100 - DNA, 23 bp, Artificial sequence
  SiRNA target sequence
ccgaacttaatggatttattttt

SEQ ID NO: 72101 - DNA, 23 bp, Artificial sequence
  SiRNA target sequence
cgaacttaatggatttattttta

SEQ ID NO: 72102 - DNA, 23 bp, Artificial sequence
  SiRNA target sequence
gaacttaatggatttatttttac

SEQ ID NO: 72103 - DNA, 23 bp, Artificial sequence
  SiRNA target sequence
aacttaatggatttatttttaca

SEQ ID NO: 72104 - DNA, 23 bp, Artificial sequence
  SiRNA target sequence
acttaatggatttatttttacag

SEQ ID NO: 72105 - DNA, 23 bp, Artificial sequence
  SiRNA target sequence
cttaatggatttatttttacagg

SEQ ID NO: 72106 - DNA, 23 bp, Artificial sequence
  SiRNA target sequence
ttaatggatttatttttacaggt

SEQ ID NO: 72107 - DNA, 23 bp, Artificial sequence
  SiRNA target sequence
taatggatttatttttacaggtg

SEQ ID NO: 72108 - DNA, 23 bp, Artificial sequence
  SiRNA target sequence
aatggatttatttttacaggtgt

SEQ ID NO: 72109 - DNA, 23 bp, Artificial sequence
  SiRNA target sequence
atggatttatttttacaggtgta

SEQ ID NO: 72110 - DNA, 23 bp, Artificial sequence
  SiRNA target sequence
tggatttatttttacaggtgtag

SEQ ID NO: 72111 - DNA, 23 bp, Artificial sequence
  SiRNA target sequence
ggatttatttttacaggtgtagt

SEQ ID NO: 72112 - DNA, 23 bp, Artificial sequence
  SiRNA target sequence
gatttatttttacaggtgtagtg

SEQ ID NO: 72113 - DNA, 23 bp, Artificial sequence
  SiRNA target sequence
atttatttttacaggtgtagtgc

SEQ ID NO: 72114 - DNA, 23 bp, Artificial sequence
  SiRNA target sequence
tttatttttacaggtgtagtgca

SEQ ID NO: 72115 - DNA, 23 bp, Artificial sequence
  SiRNA target sequence
ttatttttacaggtgtagtgcaa

SEQ ID NO: 72116 - DNA, 23 bp, Artificial sequence
  SiRNA target sequence
tatttttacaggtgtagtgcaat

SEQ ID NO: 72117 - DNA, 23 bp, Artificial sequence
  SiRNA target sequence
atttttacaggtgtagtgcaata

SEQ ID NO: 72118 - DNA, 23 bp, Artificial sequence
  SiRNA target sequence
tttttacaggtgtagtgcaatat

SEQ ID NO: 72119 - DNA, 23 bp, Artificial sequence
  SiRNA target sequence
ttttacaggtgtagtgcaatata

SEQ ID NO: 72120 - DNA, 23 bp, Artificial sequence
  SiRNA target sequence
tttacaggtgtagtgcaatatat

SEQ ID NO: 72121 - DNA, 23 bp, Artificial sequence
  SiRNA target sequence
ttacaggtgtagtgcaatatatt

SEQ ID NO: 72122 - DNA, 23 bp, Artificial sequence
  SiRNA target sequence
tacaggtgtagtgcaatatattt

SEQ ID NO: 72123 - DNA, 23 bp, Artificial sequence
  SiRNA target sequence
acaggtgtagtgcaatatattta

SEQ ID NO: 72124 - DNA, 23 bp, Artificial sequence
  SiRNA target sequence
caggtgtagtgcaatatatttat

SEQ ID NO: 72125 - DNA, 23 bp, Artificial sequence
  SiRNA target sequence
aggtgtagtgcaatatatttata

SEQ ID NO: 72126 - DNA, 23 bp, Artificial sequence
  SiRNA target sequence
ggtgtagtgcaatatatttatag

SEQ ID NO: 72127 - DNA, 23 bp, Artificial sequence
  SiRNA target sequence
gtgtagtgcaatatatttataga

SEQ ID NO: 72128 - DNA, 23 bp, Artificial sequence
  SiRNA target sequence
tgtagtgcaatatatttatagaa

SEQ ID NO: 72129 - DNA, 23 bp, Artificial sequence
  SiRNA target sequence
gtagtgcaatatatttatagaaa

SEQ ID NO: 72130 - DNA, 23 bp, Artificial sequence
  SiRNA target sequence
tagtgcaatatatttatagaaat

SEQ ID NO: 72131 - DNA, 23 bp, Artificial sequence
  SiRNA target sequence
agtgcaatatatttatagaaata

SEQ ID NO: 72132 - DNA, 23 bp, Artificial sequence
  SiRNA target sequence
gtgcaatatatttatagaaatac

SEQ ID NO: 72133 - DNA, 23 bp, Artificial sequence
  SiRNA target sequence
tgcaatatatttatagaaatacg

SEQ ID NO: 72134 - DNA, 23 bp, Artificial sequence
  SiRNA target sequence
gcaatatatttatagaaatacgg

SEQ ID NO: 72135 - DNA, 23 bp, Artificial sequence
  SiRNA target sequence
caatatatttatagaaatacggc

SEQ ID NO: 72136 - DNA, 23 bp, Artificial sequence
  SiRNA target sequence
aatatatttatagaaatacggca

SEQ ID NO: 72137 - DNA, 23 bp, Artificial sequence
  SiRNA target sequence
atatatttatagaaatacggcaa

SEQ ID NO: 72138 - DNA, 23 bp, Artificial sequence
  SiRNA target sequence
tatatttatagaaatacggcaaa

SEQ ID NO: 72139 - DNA, 23 bp, Artificial sequence
  SiRNA target sequence
atatttatagaaatacggcaaaa

SEQ ID NO: 72140 - DNA, 23 bp, Artificial sequence
  SiRNA target sequence
tatttatagaaatacggcaaaat

SEQ ID NO: 72141 - DNA, 23 bp, Artificial sequence
  SiRNA target sequence
atttatagaaatacggcaaaatc

SEQ ID NO: 72142 - DNA, 23 bp, Artificial sequence
  SiRNA target sequence
tttatagaaatacggcaaaatct

SEQ ID NO: 72143 - DNA, 23 bp, Artificial sequence
  SiRNA target sequence
ttatagaaatacggcaaaatcta

SEQ ID NO: 72144 - DNA, 23 bp, Artificial sequence
  SiRNA target sequence
tatagaaatacggcaaaatctac

SEQ ID NO: 72145 - DNA, 23 bp, Artificial sequence
  SiRNA target sequence
atagaaatacggcaaaatctaca

SEQ ID NO: 72146 - DNA, 23 bp, Artificial sequence
  SiRNA target sequence
tagaaatacggcaaaatctacat

SEQ ID NO: 72147 - DNA, 23 bp, Artificial sequence
  SiRNA target sequence
agaaatacggcaaaatctacatt

SEQ ID NO: 72148 - DNA, 23 bp, Artificial sequence
  SiRNA target sequence
gaaatacggcaaaatctacattc

SEQ ID NO: 72149 - DNA, 23 bp, Artificial sequence
  SiRNA target sequence
aaatacggcaaaatctacattca

SEQ ID NO: 72150 - DNA, 23 bp, Artificial sequence
  SiRNA target sequence
aatacggcaaaatctacattcaa

SEQ ID NO: 72151 - DNA, 23 bp, Artificial sequence
  SiRNA target sequence
atacggcaaaatctacattcaaa

SEQ ID NO: 72152 - DNA, 23 bp, Artificial sequence
  SiRNA target sequence
tacggcaaaatctacattcaaag

SEQ ID NO: 72153 - DNA, 23 bp, Artificial sequence
  SiRNA target sequence
acggcaaaatctacattcaaagg

SEQ ID NO: 72154 - DNA, 23 bp, Artificial sequence
  SiRNA target sequence
cggcaaaatctacattcaaaggc

SEQ ID NO: 72155 - DNA, 23 bp, Artificial sequence
  SiRNA target sequence
ggcaaaatctacattcaaaggct

SEQ ID NO: 72156 - DNA, 23 bp, Artificial sequence
  SiRNA target sequence
gcaaaatctacattcaaaggctt

SEQ ID NO: 72157 - DNA, 23 bp, Artificial sequence
  SiRNA target sequence
caaaatctacattcaaaggcttc

SEQ ID NO: 72158 - DNA, 23 bp, Artificial sequence
  SiRNA target sequence
aaaatctacattcaaaggcttca

SEQ ID NO: 72159 - DNA, 23 bp, Artificial sequence
  SiRNA target sequence
aaatctacattcaaaggcttcat

SEQ ID NO: 72160 - DNA, 23 bp, Artificial sequence
  SiRNA target sequence
aatctacattcaaaggcttcatt

SEQ ID NO: 72161 - DNA, 23 bp, Artificial sequence
  SiRNA target sequence
atctacattcaaaggcttcattt

SEQ ID NO: 72162 - DNA, 23 bp, Artificial sequence
  SiRNA target sequence
tctacattcaaaggcttcatttc

SEQ ID NO: 72163 - DNA, 23 bp, Artificial sequence
  SiRNA target sequence
ctacattcaaaggcttcatttct

SEQ ID NO: 72164 - DNA, 23 bp, Artificial sequence
  SiRNA target sequence
tacattcaaaggcttcatttctc

SEQ ID NO: 72165 - DNA, 23 bp, Artificial sequence
  SiRNA target sequence
acattcaaaggcttcatttctct

SEQ ID NO: 72166 - DNA, 23 bp, Artificial sequence
  SiRNA target sequence
cattcaaaggcttcatttctctt

SEQ ID NO: 72167 - DNA, 23 bp, Artificial sequence
  SiRNA target sequence
attcaaaggcttcatttctcttt

SEQ ID NO: 72168 - DNA, 23 bp, Artificial sequence
  SiRNA target sequence
ttcaaaggcttcatttctctttc

SEQ ID NO: 72169 - DNA, 23 bp, Artificial sequence
  SiRNA target sequence
tcaaaggcttcatttctctttca

SEQ ID NO: 72170 - DNA, 23 bp, Artificial sequence
  SiRNA target sequence
caaaggcttcatttctctttcac

SEQ ID NO: 72171 - DNA, 23 bp, Artificial sequence
  SiRNA target sequence
aaaggcttcatttctctttcacc

SEQ ID NO: 72172 - DNA, 23 bp, Artificial sequence
  SiRNA target sequence
aaggcttcatttctctttcacct

SEQ ID NO: 72173 - DNA, 23 bp, Artificial sequence
  SiRNA target sequence
aggcttcatttctctttcaccta

SEQ ID NO: 72174 - DNA, 23 bp, Artificial sequence
  SiRNA target sequence
ggcttcatttctctttcacctaa

SEQ ID NO: 72175 - DNA, 23 bp, Artificial sequence
  SiRNA target sequence
gcttcatttctctttcacctaaa

SEQ ID NO: 72176 - DNA, 23 bp, Artificial sequence
  SiRNA target sequence
cttcatttctctttcacctaaaa

SEQ ID NO: 72177 - DNA, 23 bp, Artificial sequence
  SiRNA target sequence
ttcatttctctttcacctaaaaa

SEQ ID NO: 72178 - DNA, 23 bp, Artificial sequence
  SiRNA target sequence
tcatttctctttcacctaaaaat

SEQ ID NO: 72179 - DNA, 23 bp, Artificial sequence
  SiRNA target sequence
catttctctttcacctaaaaatt

SEQ ID NO: 72180 - DNA, 23 bp, Artificial sequence
  SiRNA target sequence
atttctctttcacctaaaaattt

SEQ ID NO: 72181 - DNA, 23 bp, Artificial sequence
  SiRNA target sequence
tttctctttcacctaaaaatttt

SEQ ID NO: 72182 - DNA, 23 bp, Artificial sequence
  SiRNA target sequence
ttctctttcacctaaaaatttta

SEQ ID NO: 72183 - DNA, 23 bp, Artificial sequence
  SiRNA target sequence
tctctttcacctaaaaattttag

SEQ ID NO: 72184 - DNA, 23 bp, Artificial sequence
  SiRNA target sequence
ctctttcacctaaaaattttagt

SEQ ID NO: 72185 - DNA, 23 bp, Artificial sequence
  SiRNA target sequence
tctttcacctaaaaattttagta

SEQ ID NO: 72186 - DNA, 23 bp, Artificial sequence
  SiRNA target sequence
ctttcacctaaaaattttagtac

SEQ ID NO: 72187 - DNA, 23 bp, Artificial sequence
  SiRNA target sequence
tttcacctaaaaattttagtacc

SEQ ID NO: 72188 - DNA, 23 bp, Artificial sequence
  SiRNA target sequence
ttcacctaaaaattttagtacca

SEQ ID NO: 72189 - DNA, 23 bp, Artificial sequence
  SiRNA target sequence
tcacctaaaaattttagtaccat

SEQ ID NO: 72190 - DNA, 23 bp, Artificial sequence
  SiRNA target sequence
cacctaaaaattttagtaccata

SEQ ID NO: 72191 - DNA, 23 bp, Artificial sequence
  SiRNA target sequence
acctaaaaattttagtaccatag

SEQ ID NO: 72192 - DNA, 23 bp, Artificial sequence
  SiRNA target sequence
cctaaaaattttagtaccatagg

SEQ ID NO: 72193 - DNA, 23 bp, Artificial sequence
  SiRNA target sequence
ctaaaaattttagtaccataggt

SEQ ID NO: 72194 - DNA, 23 bp, Artificial sequence
  SiRNA target sequence
taaaaattttagtaccataggtg

SEQ ID NO: 72195 - DNA, 23 bp, Artificial sequence
  SiRNA target sequence
aaaaattttagtaccataggtgg

SEQ ID NO: 72196 - DNA, 23 bp, Artificial sequence
  SiRNA target sequence
aaaattttagtaccataggtggc

SEQ ID NO: 72197 - DNA, 23 bp, Artificial sequence
  SiRNA target sequence
aaattttagtaccataggtggcg

SEQ ID NO: 72198 - DNA, 23 bp, Artificial sequence
  SiRNA target sequence
aattttagtaccataggtggcgg

SEQ ID NO: 72199 - DNA, 23 bp, Artificial sequence
  SiRNA target sequence
attttagtaccataggtggcgga

SEQ ID NO: 72200 - DNA, 23 bp, Artificial sequence
  SiRNA target sequence
ttttagtaccataggtggcggag

SEQ ID NO: 72201 - DNA, 23 bp, Artificial sequence
  SiRNA target sequence
tttagtaccataggtggcggaga

SEQ ID NO: 72202 - DNA, 23 bp, Artificial sequence
  SiRNA target sequence
ttagtaccataggtggcggagaa

SEQ ID NO: 72203 - DNA, 23 bp, Artificial sequence
  SiRNA target sequence
tagtaccataggtggcggagaaa

SEQ ID NO: 72204 - DNA, 23 bp, Artificial sequence
  SiRNA target sequence
agtaccataggtggcggagaaat

SEQ ID NO: 72205 - DNA, 23 bp, Artificial sequence
  SiRNA target sequence
gtaccataggtggcggagaaatt

SEQ ID NO: 72206 - DNA, 23 bp, Artificial sequence
  SiRNA target sequence
taccataggtggcggagaaattc

SEQ ID NO: 72207 - DNA, 23 bp, Artificial sequence
  SiRNA target sequence
accataggtggcggagaaattca

SEQ ID NO: 72208 - DNA, 23 bp, Artificial sequence
  SiRNA target sequence
ccataggtggcggagaaattcaa

SEQ ID NO: 72209 - DNA, 23 bp, Artificial sequence
  SiRNA target sequence
cataggtggcggagaaattcaaa

SEQ ID NO: 72210 - DNA, 23 bp, Artificial sequence
  SiRNA target sequence
ataggtggcggagaaattcaaac

SEQ ID NO: 72211 - DNA, 23 bp, Artificial sequence
  SiRNA target sequence
taggtggcggagaaattcaaaca

SEQ ID NO: 72212 - DNA, 23 bp, Artificial sequence
  SiRNA target sequence
aggtggcggagaaattcaaacaa

SEQ ID NO: 72213 - DNA, 23 bp, Artificial sequence
  SiRNA target sequence
ggtggcggagaaattcaaacaat

SEQ ID NO: 72214 - DNA, 23 bp, Artificial sequence
  SiRNA target sequence
gtggcggagaaattcaaacaata

SEQ ID NO: 72215 - DNA, 23 bp, Artificial sequence
  SiRNA target sequence
tggcggagaaattcaaacaataa

SEQ ID NO: 72216 - DNA, 23 bp, Artificial sequence
  SiRNA target sequence
ggcggagaaattcaaacaataat

SEQ ID NO: 72217 - DNA, 23 bp, Artificial sequence
  SiRNA target sequence
gcggagaaattcaaacaataata

SEQ ID NO: 72218 - DNA, 23 bp, Artificial sequence
  SiRNA target sequence
cggagaaattcaaacaataatag

SEQ ID NO: 72219 - DNA, 23 bp, Artificial sequence
  SiRNA target sequence
ggagaaattcaaacaataataga

SEQ ID NO: 72220 - DNA, 23 bp, Artificial sequence
  SiRNA target sequence
gagaaattcaaacaataatagat

SEQ ID NO: 72221 - DNA, 23 bp, Artificial sequence
  SiRNA target sequence
agaaattcaaacaataatagata

SEQ ID NO: 72222 - DNA, 23 bp, Artificial sequence
  SiRNA target sequence
gaaattcaaacaataatagatag

SEQ ID NO: 72223 - DNA, 23 bp, Artificial sequence
  SiRNA target sequence
aaattcaaacaataatagataga

SEQ ID NO: 72224 - DNA, 23 bp, Artificial sequence
  SiRNA target sequence
aattcaaacaataatagatagaa

SEQ ID NO: 72225 - DNA, 23 bp, Artificial sequence
  SiRNA target sequence
attcaaacaataatagatagaaa

SEQ ID NO: 72226 - DNA, 23 bp, Artificial sequence
  SiRNA target sequence
ttcaaacaataatagatagaaaa

SEQ ID NO: 72227 - DNA, 23 bp, Artificial sequence
  SiRNA target sequence
tcaaacaataatagatagaaaat

SEQ ID NO: 72228 - DNA, 23 bp, Artificial sequence
  SiRNA target sequence
caaacaataatagatagaaaatc

SEQ ID NO: 72229 - DNA, 23 bp, Artificial sequence
  SiRNA target sequence
aaacaataatagatagaaaatca

SEQ ID NO: 72230 - DNA, 23 bp, Artificial sequence
  SiRNA target sequence
aacaataatagatagaaaatcaa

SEQ ID NO: 72231 - DNA, 23 bp, Artificial sequence
  SiRNA target sequence
acaataatagatagaaaatcaaa

SEQ ID NO: 72232 - DNA, 23 bp, Artificial sequence
  SiRNA target sequence
caataatagatagaaaatcaaaa

SEQ ID NO: 72233 - DNA, 23 bp, Artificial sequence
  SiRNA target sequence
aataatagatagaaaatcaaaat

SEQ ID NO: 72234 - DNA, 23 bp, Artificial sequence
  SiRNA target sequence
ataatagatagaaaatcaaaatc

SEQ ID NO: 72235 - DNA, 23 bp, Artificial sequence
  SiRNA target sequence
taatagatagaaaatcaaaatct

SEQ ID NO: 72236 - DNA, 23 bp, Artificial sequence
  SiRNA target sequence
aatagatagaaaatcaaaatctg

SEQ ID NO: 72237 - DNA, 23 bp, Artificial sequence
  SiRNA target sequence
atagatagaaaatcaaaatctgc

SEQ ID NO: 72238 - DNA, 23 bp, Artificial sequence
  SiRNA target sequence
tagatagaaaatcaaaatctgca

SEQ ID NO: 72239 - DNA, 23 bp, Artificial sequence
  SiRNA target sequence
agatagaaaatcaaaatctgcaa

SEQ ID NO: 72240 - DNA, 23 bp, Artificial sequence
  SiRNA target sequence
gatagaaaatcaaaatctgcaag

SEQ ID NO: 72241 - DNA, 23 bp, Artificial sequence
  SiRNA target sequence
atagaaaatcaaaatctgcaagt

SEQ ID NO: 72242 - DNA, 23 bp, Artificial sequence
  SiRNA target sequence
tagaaaatcaaaatctgcaagtg

SEQ ID NO: 72243 - DNA, 23 bp, Artificial sequence
  SiRNA target sequence
agaaaatcaaaatctgcaagtga

SEQ ID NO: 72244 - DNA, 23 bp, Artificial sequence
  SiRNA target sequence
gaaaatcaaaatctgcaagtgaa

SEQ ID NO: 72245 - DNA, 23 bp, Artificial sequence
  SiRNA target sequence
aaaatcaaaatctgcaagtgaac

SEQ ID NO: 72246 - DNA, 23 bp, Artificial sequence
  SiRNA target sequence
aaatcaaaatctgcaagtgaact

SEQ ID NO: 72247 - DNA, 23 bp, Artificial sequence
  SiRNA target sequence
aatcaaaatctgcaagtgaactt

SEQ ID NO: 72248 - DNA, 23 bp, Artificial sequence
  SiRNA target sequence
atcaaaatctgcaagtgaactta

SEQ ID NO: 72249 - DNA, 23 bp, Artificial sequence
  SiRNA target sequence
tcaaaatctgcaagtgaacttat

SEQ ID NO: 72250 - DNA, 23 bp, Artificial sequence
  SiRNA target sequence
caaaatctgcaagtgaacttatt

SEQ ID NO: 72251 - DNA, 23 bp, Artificial sequence
  SiRNA target sequence
aaaatctgcaagtgaacttattg

SEQ ID NO: 72252 - DNA, 23 bp, Artificial sequence
  SiRNA target sequence
aaatctgcaagtgaacttattga

SEQ ID NO: 72253 - DNA, 23 bp, Artificial sequence
  SiRNA target sequence
aatctgcaagtgaacttattgaa

SEQ ID NO: 72254 - DNA, 23 bp, Artificial sequence
  SiRNA target sequence
atctgcaagtgaacttattgaag

SEQ ID NO: 72255 - DNA, 23 bp, Artificial sequence
  SiRNA target sequence
tctgcaagtgaacttattgaagt

SEQ ID NO: 72256 - DNA, 23 bp, Artificial sequence
  SiRNA target sequence
ctgcaagtgaacttattgaagtg

SEQ ID NO: 72257 - DNA, 23 bp, Artificial sequence
  SiRNA target sequence
tgcaagtgaacttattgaagtgt

SEQ ID NO: 72258 - DNA, 23 bp, Artificial sequence
  SiRNA target sequence
gcaagtgaacttattgaagtgtt

SEQ ID NO: 72259 - DNA, 23 bp, Artificial sequence
  SiRNA target sequence
caagtgaacttattgaagtgttt

SEQ ID NO: 72260 - DNA, 23 bp, Artificial sequence
  SiRNA target sequence
aagtgaacttattgaagtgtttc

SEQ ID NO: 72261 - DNA, 23 bp, Artificial sequence
  SiRNA target sequence
agtgaacttattgaagtgtttct

SEQ ID NO: 72262 - DNA, 23 bp, Artificial sequence
  SiRNA target sequence
gtgaacttattgaagtgtttctt

SEQ ID NO: 72263 - DNA, 23 bp, Artificial sequence
  SiRNA target sequence
tgaacttattgaagtgtttctta

SEQ ID NO: 72264 - DNA, 23 bp, Artificial sequence
  SiRNA target sequence
gaacttattgaagtgtttcttac

SEQ ID NO: 72265 - DNA, 23 bp, Artificial sequence
  SiRNA target sequence
aacttattgaagtgtttcttaca

SEQ ID NO: 72266 - DNA, 23 bp, Artificial sequence
  SiRNA target sequence
acttattgaagtgtttcttacaa

SEQ ID NO: 72267 - DNA, 23 bp, Artificial sequence
  SiRNA target sequence
cttattgaagtgtttcttacaag

SEQ ID NO: 72268 - DNA, 23 bp, Artificial sequence
  SiRNA target sequence
ttattgaagtgtttcttacaagc

SEQ ID NO: 72269 - DNA, 23 bp, Artificial sequence
  SiRNA target sequence
tattgaagtgtttcttacaagct

SEQ ID NO: 72270 - DNA, 23 bp, Artificial sequence
  SiRNA target sequence
attgaagtgtttcttacaagctt

SEQ ID NO: 72271 - DNA, 23 bp, Artificial sequence
  SiRNA target sequence
ttgaagtgtttcttacaagcttg

SEQ ID NO: 72272 - DNA, 23 bp, Artificial sequence
  SiRNA target sequence
tgaagtgtttcttacaagcttgc

SEQ ID NO: 72273 - DNA, 23 bp, Artificial sequence
  SiRNA target sequence
gaagtgtttcttacaagcttgct

SEQ ID NO: 72274 - DNA, 23 bp, Artificial sequence
  SiRNA target sequence
aagtgtttcttacaagcttgctt

SEQ ID NO: 72275 - DNA, 23 bp, Artificial sequence
  SiRNA target sequence
agtgtttcttacaagcttgcttc

SEQ ID NO: 72276 - DNA, 23 bp, Artificial sequence
  SiRNA target sequence
gtgtttcttacaagcttgcttcc

SEQ ID NO: 72277 - DNA, 23 bp, Artificial sequence
  SiRNA target sequence
tgtttcttacaagcttgcttcca

SEQ ID NO: 72278 - DNA, 23 bp, Artificial sequence
  SiRNA target sequence
gtttcttacaagcttgcttccaa

SEQ ID NO: 72279 - DNA, 23 bp, Artificial sequence
  SiRNA target sequence
tttcttacaagcttgcttccaat

SEQ ID NO: 72280 - DNA, 23 bp, Artificial sequence
  SiRNA target sequence
ttcttacaagcttgcttccaata

SEQ ID NO: 72281 - DNA, 23 bp, Artificial sequence
  SiRNA target sequence
tcttacaagcttgcttccaatat

SEQ ID NO: 72282 - DNA, 23 bp, Artificial sequence
  SiRNA target sequence
cttacaagcttgcttccaatatg

SEQ ID NO: 72283 - DNA, 23 bp, Artificial sequence
  SiRNA target sequence
ttacaagcttgcttccaatatgc

SEQ ID NO: 72284 - DNA, 23 bp, Artificial sequence
  SiRNA target sequence
tacaagcttgcttccaatatgcc

SEQ ID NO: 72285 - DNA, 23 bp, Artificial sequence
  SiRNA target sequence
acaagcttgcttccaatatgcct

SEQ ID NO: 72286 - DNA, 23 bp, Artificial sequence
  SiRNA target sequence
caagcttgcttccaatatgcctt

SEQ ID NO: 72287 - DNA, 23 bp, Artificial sequence
  SiRNA target sequence
aagcttgcttccaatatgcctta

SEQ ID NO: 72288 - DNA, 23 bp, Artificial sequence
  SiRNA target sequence
agcttgcttccaatatgccttaa

SEQ ID NO: 72289 - DNA, 23 bp, Artificial sequence
  SiRNA target sequence
gcttgcttccaatatgccttaaa

SEQ ID NO: 72290 - DNA, 23 bp, Artificial sequence
  SiRNA target sequence
cttgcttccaatatgccttaaac

SEQ ID NO: 72291 - DNA, 23 bp, Artificial sequence
  SiRNA target sequence
ttgcttccaatatgccttaaact

SEQ ID NO: 72292 - DNA, 23 bp, Artificial sequence
  SiRNA target sequence
tgcttccaatatgccttaaactt

SEQ ID NO: 72293 - DNA, 23 bp, Artificial sequence
  SiRNA target sequence
gcttccaatatgccttaaacttt

SEQ ID NO: 72294 - DNA, 23 bp, Artificial sequence
  SiRNA target sequence
cttccaatatgccttaaactttt

SEQ ID NO: 72295 - DNA, 23 bp, Artificial sequence
  SiRNA target sequence
ttccaatatgccttaaactttta

SEQ ID NO: 72296 - DNA, 23 bp, Artificial sequence
  SiRNA target sequence
tccaatatgccttaaacttttat

SEQ ID NO: 72297 - DNA, 23 bp, Artificial sequence
  SiRNA target sequence
ccaatatgccttaaacttttatt

SEQ ID NO: 72298 - DNA, 23 bp, Artificial sequence
  SiRNA target sequence
caatatgccttaaacttttattt

SEQ ID NO: 72299 - DNA, 23 bp, Artificial sequence
  SiRNA target sequence
aatatgccttaaacttttatttg

SEQ ID NO: 72300 - DNA, 23 bp, Artificial sequence
  SiRNA target sequence
atatgccttaaacttttatttgc

SEQ ID NO: 72301 - DNA, 23 bp, Artificial sequence
  SiRNA target sequence
tatgccttaaacttttatttgcc

SEQ ID NO: 72302 - DNA, 23 bp, Artificial sequence
  SiRNA target sequence
atgccttaaacttttatttgccc

SEQ ID NO: 72303 - DNA, 23 bp, Artificial sequence
  SiRNA target sequence
tgccttaaacttttatttgccct

SEQ ID NO: 72304 - DNA, 23 bp, Artificial sequence
  SiRNA target sequence
gccttaaacttttatttgccctt

SEQ ID NO: 72305 - DNA, 23 bp, Artificial sequence
  SiRNA target sequence
ccttaaacttttatttgccctta

SEQ ID NO: 72306 - DNA, 23 bp, Artificial sequence
  SiRNA target sequence
cttaaacttttatttgcccttat

SEQ ID NO: 72307 - DNA, 23 bp, Artificial sequence
  SiRNA target sequence
ttaaacttttatttgcccttatt

SEQ ID NO: 72308 - DNA, 23 bp, Artificial sequence
  SiRNA target sequence
taaacttttatttgcccttattg

SEQ ID NO: 72309 - DNA, 23 bp, Artificial sequence
  SiRNA target sequence
aaacttttatttgcccttattgc

SEQ ID NO: 72310 - DNA, 23 bp, Artificial sequence
  SiRNA target sequence
aacttttatttgcccttattgca

SEQ ID NO: 72311 - DNA, 23 bp, Artificial sequence
  SiRNA target sequence
acttttatttgcccttattgcag

SEQ ID NO: 72312 - DNA, 23 bp, Artificial sequence
  SiRNA target sequence
cttttatttgcccttattgcagt

SEQ ID NO: 72313 - DNA, 23 bp, Artificial sequence
  SiRNA target sequence
ttttatttgcccttattgcagtt

SEQ ID NO: 72314 - DNA, 23 bp, Artificial sequence
  SiRNA target sequence
tttatttgcccttattgcagtta

SEQ ID NO: 72315 - DNA, 23 bp, Artificial sequence
  SiRNA target sequence
ttatttgcccttattgcagttat

SEQ ID NO: 72316 - DNA, 23 bp, Artificial sequence
  SiRNA target sequence
tatttgcccttattgcagttata

SEQ ID NO: 72317 - DNA, 23 bp, Artificial sequence
  SiRNA target sequence
atttgcccttattgcagttataa

SEQ ID NO: 72318 - DNA, 23 bp, Artificial sequence
  SiRNA target sequence
tttgcccttattgcagttataaa

SEQ ID NO: 72319 - DNA, 23 bp, Artificial sequence
  SiRNA target sequence
ttgcccttattgcagttataaaa

SEQ ID NO: 72320 - DNA, 23 bp, Artificial sequence
  SiRNA target sequence
tgcccttattgcagttataaaaa

SEQ ID NO: 72321 - DNA, 23 bp, Artificial sequence
  SiRNA target sequence
gcccttattgcagttataaaaaa

SEQ ID NO: 72322 - DNA, 23 bp, Artificial sequence
  SiRNA target sequence
cccttattgcagttataaaaaat

SEQ ID NO: 72323 - DNA, 23 bp, Artificial sequence
  SiRNA target sequence
ccttattgcagttataaaaaata

SEQ ID NO: 72324 - DNA, 23 bp, Artificial sequence
  SiRNA target sequence
cttattgcagttataaaaaatat

SEQ ID NO: 72325 - DNA, 23 bp, Artificial sequence
  SiRNA target sequence
ttattgcagttataaaaaatatg

SEQ ID NO: 72326 - DNA, 23 bp, Artificial sequence
  SiRNA target sequence
tattgcagttataaaaaatatgg

SEQ ID NO: 72327 - DNA, 23 bp, Artificial sequence
  SiRNA target sequence
attgcagttataaaaaatatggg

SEQ ID NO: 72328 - DNA, 23 bp, Artificial sequence
  SiRNA target sequence
ttgcagttataaaaaatatggga

SEQ ID NO: 72329 - DNA, 23 bp, Artificial sequence
  SiRNA target sequence
tgcagttataaaaaatatgggag

SEQ ID NO: 72330 - DNA, 23 bp, Artificial sequence
  SiRNA target sequence
gcagttataaaaaatatgggagg

SEQ ID NO: 72331 - DNA, 23 bp, Artificial sequence
  SiRNA target sequence
cagttataaaaaatatgggaggt

SEQ ID NO: 72332 - DNA, 23 bp, Artificial sequence
  SiRNA target sequence
agttataaaaaatatgggaggtc

SEQ ID NO: 72333 - DNA, 23 bp, Artificial sequence
  SiRNA target sequence
gttataaaaaatatgggaggtct

SEQ ID NO: 72334 - DNA, 23 bp, Artificial sequence
  SiRNA target sequence
ttataaaaaatatgggaggtctt

SEQ ID NO: 72335 - DNA, 23 bp, Artificial sequence
  SiRNA target sequence
tataaaaaatatgggaggtcttg

SEQ ID NO: 72336 - DNA, 23 bp, Artificial sequence
  SiRNA target sequence
ataaaaaatatgggaggtcttgc

SEQ ID NO: 72337 - DNA, 23 bp, Artificial sequence
  SiRNA target sequence
taaaaaatatgggaggtcttgcg

SEQ ID NO: 72338 - DNA, 23 bp, Artificial sequence
  SiRNA target sequence
aaaaaatatgggaggtcttgcgg

SEQ ID NO: 72339 - DNA, 23 bp, Artificial sequence
  SiRNA target sequence
aaaaatatgggaggtcttgcggg

SEQ ID NO: 72340 - DNA, 23 bp, Artificial sequence
  SiRNA target sequence
aaaatatgggaggtcttgcgggc

SEQ ID NO: 72341 - DNA, 23 bp, Artificial sequence
  SiRNA target sequence
aaatatgggaggtcttgcgggct

SEQ ID NO: 72342 - DNA, 23 bp, Artificial sequence
  SiRNA target sequence
aatatgggaggtcttgcgggctt

SEQ ID NO: 72343 - DNA, 23 bp, Artificial sequence
  SiRNA target sequence
atatgggaggtcttgcgggcttc

SEQ ID NO: 72344 - DNA, 23 bp, Artificial sequence
  SiRNA target sequence
tatgggaggtcttgcgggcttca

SEQ ID NO: 72345 - DNA, 23 bp, Artificial sequence
  SiRNA target sequence
atgggaggtcttgcgggcttcat

SEQ ID NO: 72346 - DNA, 23 bp, Artificial sequence
  SiRNA target sequence
tgggaggtcttgcgggcttcata

SEQ ID NO: 72347 - DNA, 23 bp, Artificial sequence
  SiRNA target sequence
gggaggtcttgcgggcttcataa

SEQ ID NO: 72348 - DNA, 23 bp, Artificial sequence
  SiRNA target sequence
ggaggtcttgcgggcttcataat

SEQ ID NO: 72349 - DNA, 23 bp, Artificial sequence
  SiRNA target sequence
gaggtcttgcgggcttcataatg

SEQ ID NO: 72350 - DNA, 23 bp, Artificial sequence
  SiRNA target sequence
aggtcttgcgggcttcataatgt

SEQ ID NO: 72351 - DNA, 23 bp, Artificial sequence
  SiRNA target sequence
ggtcttgcgggcttcataatgtt

SEQ ID NO: 72352 - DNA, 23 bp, Artificial sequence
  SiRNA target sequence
gtcttgcgggcttcataatgttt

SEQ ID NO: 72353 - DNA, 23 bp, Artificial sequence
  SiRNA target sequence
tcttgcgggcttcataatgtttg

SEQ ID NO: 72354 - DNA, 23 bp, Artificial sequence
  SiRNA target sequence
cttgcgggcttcataatgtttgt

SEQ ID NO: 72355 - DNA, 23 bp, Artificial sequence
  SiRNA target sequence
ttgcgggcttcataatgtttgtt

SEQ ID NO: 72356 - DNA, 23 bp, Artificial sequence
  SiRNA target sequence
tgcgggcttcataatgtttgttt

SEQ ID NO: 72357 - DNA, 23 bp, Artificial sequence
  SiRNA target sequence
gcgggcttcataatgtttgtttg

SEQ ID NO: 72358 - DNA, 23 bp, Artificial sequence
  SiRNA target sequence
cgggcttcataatgtttgtttgt

SEQ ID NO: 72359 - DNA, 23 bp, Artificial sequence
  SiRNA target sequence
gggcttcataatgtttgtttgtg

SEQ ID NO: 72360 - DNA, 23 bp, Artificial sequence
  SiRNA target sequence
ggcttcataatgtttgtttgtgt

SEQ ID NO: 72361 - DNA, 23 bp, Artificial sequence
  SiRNA target sequence
gcttcataatgtttgtttgtgtt

SEQ ID NO: 72362 - DNA, 23 bp, Artificial sequence
  SiRNA target sequence
cttcataatgtttgtttgtgttt

SEQ ID NO: 72363 - DNA, 23 bp, Artificial sequence
  SiRNA target sequence
ttcataatgtttgtttgtgtttc

SEQ ID NO: 72364 - DNA, 23 bp, Artificial sequence
  SiRNA target sequence
tcataatgtttgtttgtgtttct

SEQ ID NO: 72365 - DNA, 23 bp, Artificial sequence
  SiRNA target sequence
cataatgtttgtttgtgtttctt

SEQ ID NO: 72366 - DNA, 23 bp, Artificial sequence
  SiRNA target sequence
ataatgtttgtttgtgtttcttg

SEQ ID NO: 72367 - DNA, 23 bp, Artificial sequence
  SiRNA target sequence
taatgtttgtttgtgtttcttgc

SEQ ID NO: 72368 - DNA, 23 bp, Artificial sequence
  SiRNA target sequence
aatgtttgtttgtgtttcttgct

SEQ ID NO: 72369 - DNA, 23 bp, Artificial sequence
  SiRNA target sequence
atgtttgtttgtgtttcttgcta

SEQ ID NO: 72370 - DNA, 23 bp, Artificial sequence
  SiRNA target sequence
tgtttgtttgtgtttcttgctat

SEQ ID NO: 72371 - DNA, 23 bp, Artificial sequence
  SiRNA target sequence
gtttgtttgtgtttcttgctatg

SEQ ID NO: 72372 - DNA, 23 bp, Artificial sequence
  SiRNA target sequence
tttgtttgtgtttcttgctatgc

SEQ ID NO: 72373 - DNA, 23 bp, Artificial sequence
  SiRNA target sequence
ttgtttgtgtttcttgctatgcg

SEQ ID NO: 72374 - DNA, 23 bp, Artificial sequence
  SiRNA target sequence
tgtttgtgtttcttgctatgcga

SEQ ID NO: 72375 - DNA, 23 bp, Artificial sequence
  SiRNA target sequence
gtttgtgtttcttgctatgcgac

SEQ ID NO: 72376 - DNA, 23 bp, Artificial sequence
  SiRNA target sequence
tttgtgtttcttgctatgcgact

SEQ ID NO: 72377 - DNA, 23 bp, Artificial sequence
  SiRNA target sequence
ttgtgtttcttgctatgcgactg

SEQ ID NO: 72378 - DNA, 23 bp, Artificial sequence
  SiRNA target sequence
tgtgtttcttgctatgcgactgt

SEQ ID NO: 72379 - DNA, 23 bp, Artificial sequence
  SiRNA target sequence
gtgtttcttgctatgcgactgtg

SEQ ID NO: 72380 - DNA, 23 bp, Artificial sequence
  SiRNA target sequence
tgtttcttgctatgcgactgtga

SEQ ID NO: 72381 - DNA, 23 bp, Artificial sequence
  SiRNA target sequence
gtttcttgctatgcgactgtgac

SEQ ID NO: 72382 - DNA, 23 bp, Artificial sequence
  SiRNA target sequence
tttcttgctatgcgactgtgact

SEQ ID NO: 72383 - DNA, 23 bp, Artificial sequence
  SiRNA target sequence
ttcttgctatgcgactgtgacta

SEQ ID NO: 72384 - DNA, 23 bp, Artificial sequence
  SiRNA target sequence
tcttgctatgcgactgtgactat

SEQ ID NO: 72385 - DNA, 23 bp, Artificial sequence
  SiRNA target sequence
cttgctatgcgactgtgactata

SEQ ID NO: 72386 - DNA, 23 bp, Artificial sequence
  SiRNA target sequence
ttgctatgcgactgtgactatat

SEQ ID NO: 72387 - DNA, 23 bp, Artificial sequence
  SiRNA target sequence
tgctatgcgactgtgactatatt

SEQ ID NO: 72388 - DNA, 23 bp, Artificial sequence
  SiRNA target sequence
gctatgcgactgtgactatattg

SEQ ID NO: 72389 - DNA, 23 bp, Artificial sequence
  SiRNA target sequence
ctatgcgactgtgactatattga

SEQ ID NO: 72390 - DNA, 23 bp, Artificial sequence
  SiRNA target sequence
tatgcgactgtgactatattgat

SEQ ID NO: 72391 - DNA, 23 bp, Artificial sequence
  SiRNA target sequence
atgcgactgtgactatattgata

SEQ ID NO: 72392 - DNA, 23 bp, Artificial sequence
  SiRNA target sequence
tgcgactgtgactatattgatag

SEQ ID NO: 72393 - DNA, 23 bp, Artificial sequence
  SiRNA target sequence
gcgactgtgactatattgatagc

SEQ ID NO: 72394 - DNA, 23 bp, Artificial sequence
  SiRNA target sequence
cgactgtgactatattgatagca

SEQ ID NO: 72395 - DNA, 23 bp, Artificial sequence
  SiRNA target sequence
gactgtgactatattgatagcac

SEQ ID NO: 72396 - DNA, 23 bp, Artificial sequence
  SiRNA target sequence
actgtgactatattgatagcaca

SEQ ID NO: 72397 - DNA, 23 bp, Artificial sequence
  SiRNA target sequence
ctgtgactatattgatagcacaa

SEQ ID NO: 72398 - DNA, 23 bp, Artificial sequence
  SiRNA target sequence
tgtgactatattgatagcacaat

SEQ ID NO: 72399 - DNA, 23 bp, Artificial sequence
  SiRNA target sequence
gtgactatattgatagcacaatg

SEQ ID NO: 72400 - DNA, 23 bp, Artificial sequence
  SiRNA target sequence
tgactatattgatagcacaatgg

SEQ ID NO: 72401 - DNA, 23 bp, Artificial sequence
  SiRNA target sequence
gactatattgatagcacaatgga

SEQ ID NO: 72402 - DNA, 23 bp, Artificial sequence
  SiRNA target sequence
actatattgatagcacaatggag

SEQ ID NO: 72403 - DNA, 23 bp, Artificial sequence
  SiRNA target sequence
ctatattgatagcacaatggaga

SEQ ID NO: 72404 - DNA, 23 bp, Artificial sequence
  SiRNA target sequence
tatattgatagcacaatggagat

SEQ ID NO: 72405 - DNA, 23 bp, Artificial sequence
  SiRNA target sequence
atattgatagcacaatggagatc

SEQ ID NO: 72406 - DNA, 23 bp, Artificial sequence
  SiRNA target sequence
tattgatagcacaatggagatct

SEQ ID NO: 72407 - DNA, 23 bp, Artificial sequence
  SiRNA target sequence
attgatagcacaatggagatcta

SEQ ID NO: 72408 - DNA, 23 bp, Artificial sequence
  SiRNA target sequence
ttgatagcacaatggagatctaa

SEQ ID NO: 72409 - DNA, 23 bp, Artificial sequence
  SiRNA target sequence
tgatagcacaatggagatctaat

SEQ ID NO: 72410 - DNA, 23 bp, Artificial sequence
  SiRNA target sequence
gatagcacaatggagatctaata

SEQ ID NO: 72411 - DNA, 23 bp, Artificial sequence
  SiRNA target sequence
atagcacaatggagatctaatat

SEQ ID NO: 72412 - DNA, 23 bp, Artificial sequence
  SiRNA target sequence
tagcacaatggagatctaatatt

SEQ ID NO: 72413 - DNA, 23 bp, Artificial sequence
  SiRNA target sequence
agcacaatggagatctaatatta

SEQ ID NO: 72414 - DNA, 23 bp, Artificial sequence
  SiRNA target sequence
gcacaatggagatctaatattag

SEQ ID NO: 72415 - DNA, 23 bp, Artificial sequence
  SiRNA target sequence
cacaatggagatctaatattaga

SEQ ID NO: 72416 - DNA, 23 bp, Artificial sequence
  SiRNA target sequence
acaatggagatctaatattagaa

SEQ ID NO: 72417 - DNA, 23 bp, Artificial sequence
  SiRNA target sequence
caatggagatctaatattagaag

SEQ ID NO: 72418 - DNA, 23 bp, Artificial sequence
  SiRNA target sequence
aatggagatctaatattagaaga

SEQ ID NO: 72419 - DNA, 23 bp, Artificial sequence
  SiRNA target sequence
atggagatctaatattagaagag

SEQ ID NO: 72420 - DNA, 23 bp, Artificial sequence
  SiRNA target sequence
tggagatctaatattagaagaga

SEQ ID NO: 72421 - DNA, 23 bp, Artificial sequence
  SiRNA target sequence
ggagatctaatattagaagagaa

SEQ ID NO: 72422 - DNA, 23 bp, Artificial sequence
  SiRNA target sequence
gagatctaatattagaagagaac

SEQ ID NO: 72423 - DNA, 23 bp, Artificial sequence
  SiRNA target sequence
agatctaatattagaagagaact

SEQ ID NO: 72424 - DNA, 23 bp, Artificial sequence
  SiRNA target sequence
gatctaatattagaagagaactt

SEQ ID NO: 72425 - DNA, 23 bp, Artificial sequence
  SiRNA target sequence
atctaatattagaagagaactta

SEQ ID NO: 72426 - DNA, 23 bp, Artificial sequence
  SiRNA target sequence
tctaatattagaagagaacttaa

SEQ ID NO: 72427 - DNA, 23 bp, Artificial sequence
  SiRNA target sequence
ctaatattagaagagaacttaat

SEQ ID NO: 72428 - DNA, 23 bp, Artificial sequence
  SiRNA target sequence
taatattagaagagaacttaata

SEQ ID NO: 72429 - DNA, 23 bp, Artificial sequence
  SiRNA target sequence
aatattagaagagaacttaataa

SEQ ID NO: 72430 - DNA, 23 bp, Artificial sequence
  SiRNA target sequence
atattagaagagaacttaataac

SEQ ID NO: 72431 - DNA, 23 bp, Artificial sequence
  SiRNA target sequence
tattagaagagaacttaataact

SEQ ID NO: 72432 - DNA, 23 bp, Artificial sequence
  SiRNA target sequence
attagaagagaacttaataactc

SEQ ID NO: 72433 - DNA, 23 bp, Artificial sequence
  SiRNA target sequence
ttagaagagaacttaataactct

SEQ ID NO: 72434 - DNA, 23 bp, Artificial sequence
  SiRNA target sequence
tagaagagaacttaataactctg

SEQ ID NO: 72435 - DNA, 23 bp, Artificial sequence
  SiRNA target sequence
agaagagaacttaataactctga

SEQ ID NO: 72436 - DNA, 23 bp, Artificial sequence
  SiRNA target sequence
gaagagaacttaataactctgaa

SEQ ID NO: 72437 - DNA, 23 bp, Artificial sequence
  SiRNA target sequence
aagagaacttaataactctgaaa

SEQ ID NO: 72438 - DNA, 23 bp, Artificial sequence
  SiRNA target sequence
agagaacttaataactctgaaaa

SEQ ID NO: 72439 - DNA, 23 bp, Artificial sequence
  SiRNA target sequence
gagaacttaataactctgaaaat

SEQ ID NO: 72440 - DNA, 23 bp, Artificial sequence
  SiRNA target sequence
agaacttaataactctgaaaata

SEQ ID NO: 72441 - DNA, 23 bp, Artificial sequence
  SiRNA target sequence
gaacttaataactctgaaaatag

SEQ ID NO: 72442 - DNA, 23 bp, Artificial sequence
  SiRNA target sequence
aacttaataactctgaaaataga

SEQ ID NO: 72443 - DNA, 23 bp, Artificial sequence
  SiRNA target sequence
acttaataactctgaaaatagat

SEQ ID NO: 72444 - DNA, 23 bp, Artificial sequence
  SiRNA target sequence
cttaataactctgaaaatagatc

SEQ ID NO: 72445 - DNA, 23 bp, Artificial sequence
  SiRNA target sequence
ttaataactctgaaaatagatct

SEQ ID NO: 72446 - DNA, 23 bp, Artificial sequence
  SiRNA target sequence
taataactctgaaaatagatcta

SEQ ID NO: 72447 - DNA, 23 bp, Artificial sequence
  SiRNA target sequence
aataactctgaaaatagatctag

SEQ ID NO: 72448 - DNA, 23 bp, Artificial sequence
  SiRNA target sequence
ataactctgaaaatagatctagt

SEQ ID NO: 72449 - DNA, 23 bp, Artificial sequence
  SiRNA target sequence
taactctgaaaatagatctagta

SEQ ID NO: 72450 - DNA, 23 bp, Artificial sequence
  SiRNA target sequence
aactctgaaaatagatctagtaa

SEQ ID NO: 72451 - DNA, 23 bp, Artificial sequence
  SiRNA target sequence
actctgaaaatagatctagtaat

SEQ ID NO: 72452 - DNA, 23 bp, Artificial sequence
  SiRNA target sequence
ctctgaaaatagatctagtaata

SEQ ID NO: 72453 - DNA, 23 bp, Artificial sequence
  SiRNA target sequence
tctgaaaatagatctagtaataa

SEQ ID NO: 72454 - DNA, 23 bp, Artificial sequence
  SiRNA target sequence
ctgaaaatagatctagtaataaa

SEQ ID NO: 72455 - DNA, 23 bp, Artificial sequence
  SiRNA target sequence
tgaaaatagatctagtaataaac

SEQ ID NO: 72456 - DNA, 23 bp, Artificial sequence
  SiRNA target sequence
gaaaatagatctagtaataaact

SEQ ID NO: 72457 - DNA, 23 bp, Artificial sequence
  SiRNA target sequence
aaaatagatctagtaataaacta

SEQ ID NO: 72458 - DNA, 23 bp, Artificial sequence
  SiRNA target sequence
aaatagatctagtaataaactac

SEQ ID NO: 72459 - DNA, 23 bp, Artificial sequence
  SiRNA target sequence
aatagatctagtaataaactaca

SEQ ID NO: 72460 - DNA, 23 bp, Artificial sequence
  SiRNA target sequence
atagatctagtaataaactacaa

SEQ ID NO: 72461 - DNA, 23 bp, Artificial sequence
  SiRNA target sequence
tagatctagtaataaactacaag

SEQ ID NO: 72462 - DNA, 23 bp, Artificial sequence
  SiRNA target sequence
agatctagtaataaactacaaga

SEQ ID NO: 72463 - DNA, 23 bp, Artificial sequence
  SiRNA target sequence
gatctagtaataaactacaagat

SEQ ID NO: 72464 - DNA, 23 bp, Artificial sequence
  SiRNA target sequence
atctagtaataaactacaagatg

SEQ ID NO: 72465 - DNA, 23 bp, Artificial sequence
  SiRNA target sequence
tctagtaataaactacaagatgg

SEQ ID NO: 72466 - DNA, 23 bp, Artificial sequence
  SiRNA target sequence
ctagtaataaactacaagatgga

SEQ ID NO: 72467 - DNA, 23 bp, Artificial sequence
  SiRNA target sequence
tagtaataaactacaagatggat

SEQ ID NO: 72468 - DNA, 23 bp, Artificial sequence
  SiRNA target sequence
agtaataaactacaagatggatt

SEQ ID NO: 72469 - DNA, 23 bp, Artificial sequence
  SiRNA target sequence
gtaataaactacaagatggatta

SEQ ID NO: 72470 - DNA, 23 bp, Artificial sequence
  SiRNA target sequence
taataaactacaagatggattaa

SEQ ID NO: 72471 - DNA, 23 bp, Artificial sequence
  SiRNA target sequence
aataaactacaagatggattaaa

SEQ ID NO: 72472 - DNA, 23 bp, Artificial sequence
  SiRNA target sequence
ataaactacaagatggattaaat

SEQ ID NO: 72473 - DNA, 23 bp, Artificial sequence
  SiRNA target sequence
taaactacaagatggattaaata

SEQ ID NO: 72474 - DNA, 23 bp, Artificial sequence
  SiRNA target sequence
aaactacaagatggattaaataa

SEQ ID NO: 72475 - DNA, 23 bp, Artificial sequence
  SiRNA target sequence
aactacaagatggattaaataat

SEQ ID NO: 72476 - DNA, 23 bp, Artificial sequence
  SiRNA target sequence
actacaagatggattaaataatc

SEQ ID NO: 72477 - DNA, 23 bp, Artificial sequence
  SiRNA target sequence
ctacaagatggattaaataatca

SEQ ID NO: 72478 - DNA, 23 bp, Artificial sequence
  SiRNA target sequence
tacaagatggattaaataatcat

SEQ ID NO: 72479 - DNA, 23 bp, Artificial sequence
  SiRNA target sequence
acaagatggattaaataatcatg

SEQ ID NO: 72480 - DNA, 23 bp, Artificial sequence
  SiRNA target sequence
caagatggattaaataatcatga

SEQ ID NO: 72481 - DNA, 23 bp, Artificial sequence
  SiRNA target sequence
aagatggattaaataatcatgaa

SEQ ID NO: 72482 - DNA, 23 bp, Artificial sequence
  SiRNA target sequence
agatggattaaataatcatgaaa

SEQ ID NO: 72483 - DNA, 23 bp, Artificial sequence
  SiRNA target sequence
gatggattaaataatcatgaaac

SEQ ID NO: 72484 - DNA, 23 bp, Artificial sequence
  SiRNA target sequence
atggattaaataatcatgaaaca

SEQ ID NO: 72485 - DNA, 23 bp, Artificial sequence
  SiRNA target sequence
tggattaaataatcatgaaacaa

SEQ ID NO: 72486 - DNA, 23 bp, Artificial sequence
  SiRNA target sequence
ggattaaataatcatgaaacaat

SEQ ID NO: 72487 - DNA, 23 bp, Artificial sequence
  SiRNA target sequence
gattaaataatcatgaaacaatc

SEQ ID NO: 72488 - DNA, 23 bp, Artificial sequence
  SiRNA target sequence
attaaataatcatgaaacaatcg

SEQ ID NO: 72489 - DNA, 23 bp, Artificial sequence
  SiRNA target sequence
ttaaataatcatgaaacaatcgt

SEQ ID NO: 72490 - DNA, 23 bp, Artificial sequence
  SiRNA target sequence
taaataatcatgaaacaatcgtc

SEQ ID NO: 72491 - DNA, 23 bp, Artificial sequence
  SiRNA target sequence
aaataatcatgaaacaatcgtct

SEQ ID NO: 72492 - DNA, 23 bp, Artificial sequence
  SiRNA target sequence
aataatcatgaaacaatcgtctc

SEQ ID NO: 72493 - DNA, 23 bp, Artificial sequence
  SiRNA target sequence
ataatcatgaaacaatcgtctcc

SEQ ID NO: 72494 - DNA, 23 bp, Artificial sequence
  SiRNA target sequence
taatcatgaaacaatcgtctcct

SEQ ID NO: 72495 - DNA, 23 bp, Artificial sequence
  SiRNA target sequence
aatcatgaaacaatcgtctcctt

SEQ ID NO: 72496 - DNA, 23 bp, Artificial sequence
  SiRNA target sequence
atcatgaaacaatcgtctccttt

SEQ ID NO: 72497 - DNA, 23 bp, Artificial sequence
  SiRNA target sequence
tcatgaaacaatcgtctcctttg

SEQ ID NO: 72498 - DNA, 23 bp, Artificial sequence
  SiRNA target sequence
catgaaacaatcgtctcctttgg

SEQ ID NO: 72499 - DNA, 23 bp, Artificial sequence
  SiRNA target sequence
atgaaacaatcgtctcctttggg

SEQ ID NO: 72500 - DNA, 23 bp, Artificial sequence
  SiRNA target sequence
tgaaacaatcgtctcctttggga

SEQ ID NO: 72501 - DNA, 23 bp, Artificial sequence
  SiRNA target sequence
gaaacaatcgtctcctttgggac

SEQ ID NO: 72502 - DNA, 23 bp, Artificial sequence
  SiRNA target sequence
aaacaatcgtctcctttgggact

SEQ ID NO: 72503 - DNA, 23 bp, Artificial sequence
  SiRNA target sequence
aacaatcgtctcctttgggacta

SEQ ID NO: 72504 - DNA, 23 bp, Artificial sequence
  SiRNA target sequence
acaatcgtctcctttgggactac

SEQ ID NO: 72505 - DNA, 23 bp, Artificial sequence
  SiRNA target sequence
caatcgtctcctttgggactaca

SEQ ID NO: 72506 - DNA, 23 bp, Artificial sequence
  SiRNA target sequence
aatcgtctcctttgggactacag

SEQ ID NO: 72507 - DNA, 23 bp, Artificial sequence
  SiRNA target sequence
atcgtctcctttgggactacaga

SEQ ID NO: 72508 - DNA, 23 bp, Artificial sequence
  SiRNA target sequence
tcgtctcctttgggactacagat

SEQ ID NO: 72509 - DNA, 23 bp, Artificial sequence
  SiRNA target sequence
cgtctcctttgggactacagatc

SEQ ID NO: 72510 - DNA, 23 bp, Artificial sequence
  SiRNA target sequence
gtctcctttgggactacagatct

SEQ ID NO: 72511 - DNA, 23 bp, Artificial sequence
  SiRNA target sequence
tctcctttgggactacagatctt

SEQ ID NO: 72512 - DNA, 23 bp, Artificial sequence
  SiRNA target sequence
ctcctttgggactacagatcttg

SEQ ID NO: 72513 - DNA, 23 bp, Artificial sequence
  SiRNA target sequence
tcctttgggactacagatcttga

SEQ ID NO: 72514 - DNA, 23 bp, Artificial sequence
  SiRNA target sequence
cctttgggactacagatcttgaa

SEQ ID NO: 72515 - DNA, 23 bp, Artificial sequence
  SiRNA target sequence
ctttgggactacagatcttgaag

SEQ ID NO: 72516 - DNA, 23 bp, Artificial sequence
  SiRNA target sequence
tttgggactacagatcttgaagt

SEQ ID NO: 72517 - DNA, 23 bp, Artificial sequence
  SiRNA target sequence
ttgggactacagatcttgaagta

SEQ ID NO: 72518 - DNA, 23 bp, Artificial sequence
  SiRNA target sequence
tgggactacagatcttgaagtag

SEQ ID NO: 72519 - DNA, 23 bp, Artificial sequence
  SiRNA target sequence
gggactacagatcttgaagtaga

SEQ ID NO: 72520 - DNA, 23 bp, Artificial sequence
  SiRNA target sequence
ggactacagatcttgaagtagat

SEQ ID NO: 72521 - DNA, 23 bp, Artificial sequence
  SiRNA target sequence
gactacagatcttgaagtagatg

SEQ ID NO: 72522 - DNA, 23 bp, Artificial sequence
  SiRNA target sequence
actacagatcttgaagtagatga

SEQ ID NO: 72523 - DNA, 23 bp, Artificial sequence
  SiRNA target sequence
ctacagatcttgaagtagatgaa

SEQ ID NO: 72524 - DNA, 23 bp, Artificial sequence
  SiRNA target sequence
tacagatcttgaagtagatgaat

SEQ ID NO: 72525 - DNA, 23 bp, Artificial sequence
  SiRNA target sequence
acagatcttgaagtagatgaata

SEQ ID NO: 72526 - DNA, 23 bp, Artificial sequence
  SiRNA target sequence
cagatcttgaagtagatgaatat

SEQ ID NO: 72527 - DNA, 23 bp, Artificial sequence
  SiRNA target sequence
agatcttgaagtagatgaatatg

SEQ ID NO: 72528 - DNA, 23 bp, Artificial sequence
  SiRNA target sequence
gatcttgaagtagatgaatatga

SEQ ID NO: 72529 - DNA, 23 bp, Artificial sequence
  SiRNA target sequence
atcttgaagtagatgaatatgat

SEQ ID NO: 72530 - DNA, 23 bp, Artificial sequence
  SiRNA target sequence
tcttgaagtagatgaatatgatc

SEQ ID NO: 72531 - DNA, 23 bp, Artificial sequence
  SiRNA target sequence
cttgaagtagatgaatatgatca

SEQ ID NO: 72532 - DNA, 23 bp, Artificial sequence
  SiRNA target sequence
ttgaagtagatgaatatgatcag

SEQ ID NO: 72533 - DNA, 23 bp, Artificial sequence
  SiRNA target sequence
tgaagtagatgaatatgatcagt

SEQ ID NO: 72534 - DNA, 23 bp, Artificial sequence
  SiRNA target sequence
gaagtagatgaatatgatcagtt

SEQ ID NO: 72535 - DNA, 23 bp, Artificial sequence
  SiRNA target sequence
aagtagatgaatatgatcagttt

SEQ ID NO: 72536 - DNA, 23 bp, Artificial sequence
  SiRNA target sequence
agtagatgaatatgatcagtttc

SEQ ID NO: 72537 - DNA, 23 bp, Artificial sequence
  SiRNA target sequence
gtagatgaatatgatcagtttct

SEQ ID NO: 72538 - DNA, 23 bp, Artificial sequence
  SiRNA target sequence
tagatgaatatgatcagtttctt

SEQ ID NO: 72539 - DNA, 23 bp, Artificial sequence
  SiRNA target sequence
agatgaatatgatcagtttctta

SEQ ID NO: 72540 - DNA, 23 bp, Artificial sequence
  SiRNA target sequence
gatgaatatgatcagtttcttaa

SEQ ID NO: 72541 - DNA, 23 bp, Artificial sequence
  SiRNA target sequence
atgaatatgatcagtttcttaaa

SEQ ID NO: 72542 - DNA, 23 bp, Artificial sequence
  SiRNA target sequence
tgaatatgatcagtttcttaaaa

SEQ ID NO: 72543 - DNA, 23 bp, Artificial sequence
  SiRNA target sequence
gaatatgatcagtttcttaaaat

SEQ ID NO: 72544 - DNA, 23 bp, Artificial sequence
  SiRNA target sequence
aatatgatcagtttcttaaaatt

SEQ ID NO: 72545 - DNA, 23 bp, Artificial sequence
  SiRNA target sequence
atatgatcagtttcttaaaatta

SEQ ID NO: 72546 - DNA, 23 bp, Artificial sequence
  SiRNA target sequence
tatgatcagtttcttaaaattaa

SEQ ID NO: 72547 - DNA, 23 bp, Artificial sequence
  SiRNA target sequence
atgatcagtttcttaaaattaat

SEQ ID NO: 72548 - DNA, 23 bp, Artificial sequence
  SiRNA target sequence
tgatcagtttcttaaaattaatg

SEQ ID NO: 72549 - DNA, 23 bp, Artificial sequence
  SiRNA target sequence
gatcagtttcttaaaattaatgc

SEQ ID NO: 72550 - DNA, 23 bp, Artificial sequence
  SiRNA target sequence
atcagtttcttaaaattaatgca

SEQ ID NO: 72551 - DNA, 23 bp, Artificial sequence
  SiRNA target sequence
tcagtttcttaaaattaatgcat

SEQ ID NO: 72552 - DNA, 23 bp, Artificial sequence
  SiRNA target sequence
cagtttcttaaaattaatgcatc

SEQ ID NO: 72553 - DNA, 23 bp, Artificial sequence
  SiRNA target sequence
agtttcttaaaattaatgcatct

SEQ ID NO: 72554 - DNA, 23 bp, Artificial sequence
  SiRNA target sequence
gtttcttaaaattaatgcatcta

SEQ ID NO: 72555 - DNA, 23 bp, Artificial sequence
  SiRNA target sequence
tttcttaaaattaatgcatctaa

SEQ ID NO: 72556 - DNA, 23 bp, Artificial sequence
  SiRNA target sequence
ttcttaaaattaatgcatctaat

SEQ ID NO: 72557 - DNA, 23 bp, Artificial sequence
  SiRNA target sequence
tcttaaaattaatgcatctaata

SEQ ID NO: 72558 - DNA, 23 bp, Artificial sequence
  SiRNA target sequence
cttaaaattaatgcatctaatag

SEQ ID NO: 72559 - DNA, 23 bp, Artificial sequence
  SiRNA target sequence
ttaaaattaatgcatctaatagt

SEQ ID NO: 72560 - DNA, 23 bp, Artificial sequence
  SiRNA target sequence
taaaattaatgcatctaatagta

SEQ ID NO: 72561 - DNA, 23 bp, Artificial sequence
  SiRNA target sequence
aaaattaatgcatctaatagtaa

SEQ ID NO: 72562 - DNA, 23 bp, Artificial sequence
  SiRNA target sequence
aaattaatgcatctaatagtaac

SEQ ID NO: 72563 - DNA, 23 bp, Artificial sequence
  SiRNA target sequence
aattaatgcatctaatagtaaca

SEQ ID NO: 72564 - DNA, 23 bp, Artificial sequence
  SiRNA target sequence
attaatgcatctaatagtaacag

SEQ ID NO: 72565 - DNA, 23 bp, Artificial sequence
  SiRNA target sequence
ttaatgcatctaatagtaacaga

SEQ ID NO: 72566 - DNA, 23 bp, Artificial sequence
  SiRNA target sequence
taatgcatctaatagtaacagat

SEQ ID NO: 72567 - DNA, 23 bp, Artificial sequence
  SiRNA target sequence
aatgcatctaatagtaacagatt

SEQ ID NO: 72568 - DNA, 23 bp, Artificial sequence
  SiRNA target sequence
atgcatctaatagtaacagatta

SEQ ID NO: 72569 - DNA, 23 bp, Artificial sequence
  SiRNA target sequence
tgcatctaatagtaacagattat

SEQ ID NO: 72570 - DNA, 23 bp, Artificial sequence
  SiRNA target sequence
gcatctaatagtaacagattatg

SEQ ID NO: 72571 - DNA, 23 bp, Artificial sequence
  SiRNA target sequence
catctaatagtaacagattatgg

SEQ ID NO: 72572 - DNA, 23 bp, Artificial sequence
  SiRNA target sequence
atctaatagtaacagattatgga

SEQ ID NO: 72573 - DNA, 23 bp, Artificial sequence
  SiRNA target sequence
tctaatagtaacagattatggag

SEQ ID NO: 72574 - DNA, 23 bp, Artificial sequence
  SiRNA target sequence
ctaatagtaacagattatggaga

SEQ ID NO: 72575 - DNA, 23 bp, Artificial sequence
  SiRNA target sequence
taatagtaacagattatggagag

SEQ ID NO: 72576 - DNA, 23 bp, Artificial sequence
  SiRNA target sequence
aatagtaacagattatggagagc

SEQ ID NO: 72577 - DNA, 23 bp, Artificial sequence
  SiRNA target sequence
atagtaacagattatggagagca

SEQ ID NO: 72578 - DNA, 23 bp, Artificial sequence
  SiRNA target sequence
tagtaacagattatggagagcac

SEQ ID NO: 72579 - DNA, 23 bp, Artificial sequence
  SiRNA target sequence
agtaacagattatggagagcact

SEQ ID NO: 72580 - DNA, 23 bp, Artificial sequence
  SiRNA target sequence
gtaacagattatggagagcactg

SEQ ID NO: 72581 - DNA, 23 bp, Artificial sequence
  SiRNA target sequence
taacagattatggagagcactgt

SEQ ID NO: 72582 - DNA, 23 bp, Artificial sequence
  SiRNA target sequence
aacagattatggagagcactgta

SEQ ID NO: 72583 - DNA, 23 bp, Artificial sequence
  SiRNA target sequence
acagattatggagagcactgtac

SEQ ID NO: 72584 - DNA, 23 bp, Artificial sequence
  SiRNA target sequence
cagattatggagagcactgtaca

SEQ ID NO: 72585 - DNA, 23 bp, Artificial sequence
  SiRNA target sequence
agattatggagagcactgtacat

SEQ ID NO: 72586 - DNA, 23 bp, Artificial sequence
  SiRNA target sequence
gattatggagagcactgtacatt

SEQ ID NO: 72587 - DNA, 23 bp, Artificial sequence
  SiRNA target sequence
attatggagagcactgtacattt

SEQ ID NO: 72588 - DNA, 23 bp, Artificial sequence
  SiRNA target sequence
ttatggagagcactgtacatttt

SEQ ID NO: 72589 - DNA, 23 bp, Artificial sequence
  SiRNA target sequence
tatggagagcactgtacatttta

SEQ ID NO: 72590 - DNA, 23 bp, Artificial sequence
  SiRNA target sequence
atggagagcactgtacattttaa

SEQ ID NO: 72591 - DNA, 23 bp, Artificial sequence
  SiRNA target sequence
tggagagcactgtacattttaaa

SEQ ID NO: 72592 - DNA, 23 bp, Artificial sequence
  SiRNA target sequence
ggagagcactgtacattttaaat

SEQ ID NO: 72593 - DNA, 23 bp, Artificial sequence
  SiRNA target sequence
gagagcactgtacattttaaatt

SEQ ID NO: 72594 - DNA, 23 bp, Artificial sequence
  SiRNA target sequence
agagcactgtacattttaaattt

SEQ ID NO: 72595 - DNA, 23 bp, Artificial sequence
  SiRNA target sequence
gagcactgtacattttaaattta

SEQ ID NO: 72596 - DNA, 23 bp, Artificial sequence
  SiRNA target sequence
agcactgtacattttaaatttat

SEQ ID NO: 72597 - DNA, 23 bp, Artificial sequence
  SiRNA target sequence
gcactgtacattttaaatttatc

SEQ ID NO: 72598 - DNA, 23 bp, Artificial sequence
  SiRNA target sequence
cactgtacattttaaatttatct

SEQ ID NO: 72599 - DNA, 23 bp, Artificial sequence
  SiRNA target sequence
actgtacattttaaatttatctc

SEQ ID NO: 72600 - DNA, 23 bp, Artificial sequence
  SiRNA target sequence
ctgtacattttaaatttatctca

SEQ ID NO: 72601 - DNA, 23 bp, Artificial sequence
  SiRNA target sequence
tgtacattttaaatttatctcag

SEQ ID NO: 72602 - DNA, 23 bp, Artificial sequence
  SiRNA target sequence
gtacattttaaatttatctcaga

SEQ ID NO: 72603 - DNA, 23 bp, Artificial sequence
  SiRNA target sequence
tacattttaaatttatctcagag

SEQ ID NO: 72604 - DNA, 23 bp, Artificial sequence
  SiRNA target sequence
acattttaaatttatctcagaga

SEQ ID NO: 72605 - DNA, 23 bp, Artificial sequence
  SiRNA target sequence
cattttaaatttatctcagagag

SEQ ID NO: 72606 - DNA, 23 bp, Artificial sequence
  SiRNA target sequence
attttaaatttatctcagagagc

SEQ ID NO: 72607 - DNA, 23 bp, Artificial sequence
  SiRNA target sequence
ttttaaatttatctcagagagca

SEQ ID NO: 72608 - DNA, 23 bp, Artificial sequence
  SiRNA target sequence
tttaaatttatctcagagagcaa

SEQ ID NO: 72609 - DNA, 23 bp, Artificial sequence
  SiRNA target sequence
ttaaatttatctcagagagcaat

SEQ ID NO: 72610 - DNA, 23 bp, Artificial sequence
  SiRNA target sequence
taaatttatctcagagagcaatt

SEQ ID NO: 72611 - DNA, 23 bp, Artificial sequence
  SiRNA target sequence
aaatttatctcagagagcaattt

SEQ ID NO: 72612 - DNA, 23 bp, Artificial sequence
  SiRNA target sequence
aatttatctcagagagcaatttt

SEQ ID NO: 72613 - DNA, 23 bp, Artificial sequence
  SiRNA target sequence
atttatctcagagagcaattttt

SEQ ID NO: 72614 - DNA, 23 bp, Artificial sequence
  SiRNA target sequence
tttatctcagagagcaatttttc

SEQ ID NO: 72615 - DNA, 23 bp, Artificial sequence
  SiRNA target sequence
ttatctcagagagcaatttttct

SEQ ID NO: 72616 - DNA, 23 bp, Artificial sequence
  SiRNA target sequence
tatctcagagagcaatttttctc

SEQ ID NO: 72617 - DNA, 23 bp, Artificial sequence
  SiRNA target sequence
atctcagagagcaatttttctct

SEQ ID NO: 72618 - DNA, 23 bp, Artificial sequence
  SiRNA target sequence
tctcagagagcaatttttctctt

SEQ ID NO: 72619 - DNA, 23 bp, Artificial sequence
  SiRNA target sequence
ctcagagagcaatttttctctta

SEQ ID NO: 72620 - DNA, 23 bp, Artificial sequence
  SiRNA target sequence
tcagagagcaatttttctcttac

SEQ ID NO: 72621 - DNA, 23 bp, Artificial sequence
  SiRNA target sequence
cagagagcaatttttctcttaca

SEQ ID NO: 72622 - DNA, 23 bp, Artificial sequence
  SiRNA target sequence
agagagcaatttttctcttacaa

SEQ ID NO: 72623 - DNA, 23 bp, Artificial sequence
  SiRNA target sequence
gagagcaatttttctcttacaaa

SEQ ID NO: 72624 - DNA, 23 bp, Artificial sequence
  SiRNA target sequence
agagcaatttttctcttacaaag

SEQ ID NO: 72625 - DNA, 23 bp, Artificial sequence
  SiRNA target sequence
gagcaatttttctcttacaaagt

SEQ ID NO: 72626 - DNA, 23 bp, Artificial sequence
  SiRNA target sequence
agcaatttttctcttacaaagtt

SEQ ID NO: 72627 - DNA, 23 bp, Artificial sequence
  SiRNA target sequence
gcaatttttctcttacaaagttt

SEQ ID NO: 72628 - DNA, 23 bp, Artificial sequence
  SiRNA target sequence
caatttttctcttacaaagtttt

SEQ ID NO: 72629 - DNA, 23 bp, Artificial sequence
  SiRNA target sequence
aatttttctcttacaaagttttt

SEQ ID NO: 72630 - DNA, 23 bp, Artificial sequence
  SiRNA target sequence
atttttctcttacaaagtttttt

SEQ ID NO: 72631 - DNA, 23 bp, Artificial sequence
  SiRNA target sequence
tttttctcttacaaagttttttt

SEQ ID NO: 72632 - DNA, 23 bp, Artificial sequence
  SiRNA target sequence
ttttctcttacaaagttttttta

SEQ ID NO: 72633 - DNA, 23 bp, Artificial sequence
  SiRNA target sequence
tttctcttacaaagtttttttat

SEQ ID NO: 72634 - DNA, 23 bp, Artificial sequence
  SiRNA target sequence
ttctcttacaaagtttttttatt

SEQ ID NO: 72635 - DNA, 23 bp, Artificial sequence
  SiRNA target sequence
tctcttacaaagtttttttatta

SEQ ID NO: 72636 - DNA, 23 bp, Artificial sequence
  SiRNA target sequence
ctcttacaaagtttttttattat

SEQ ID NO: 72637 - DNA, 23 bp, Artificial sequence
  SiRNA target sequence
tcttacaaagtttttttattatt

SEQ ID NO: 72638 - DNA, 23 bp, Artificial sequence
  SiRNA target sequence
cttacaaagtttttttattattt

SEQ ID NO: 72639 - DNA, 23 bp, Artificial sequence
  SiRNA target sequence
ttacaaagtttttttattattta

SEQ ID NO: 72640 - DNA, 23 bp, Artificial sequence
  SiRNA target sequence
tacaaagtttttttattatttat

SEQ ID NO: 72641 - DNA, 23 bp, Artificial sequence
  SiRNA target sequence
acaaagtttttttattatttatg

SEQ ID NO: 72642 - DNA, 23 bp, Artificial sequence
  SiRNA target sequence
caaagtttttttattatttatgc

SEQ ID NO: 72643 - DNA, 23 bp, Artificial sequence
  SiRNA target sequence
aaagtttttttattatttatgca

SEQ ID NO: 72644 - DNA, 23 bp, Artificial sequence
  SiRNA target sequence
aagtttttttattatttatgcag

SEQ ID NO: 72645 - DNA, 23 bp, Artificial sequence
  SiRNA target sequence
agtttttttattatttatgcagg

SEQ ID NO: 72646 - DNA, 23 bp, Artificial sequence
  SiRNA target sequence
gtttttttattatttatgcagga

SEQ ID NO: 72647 - DNA, 23 bp, Artificial sequence
  SiRNA target sequence
tttttttattatttatgcaggaa

SEQ ID NO: 72648 - DNA, 23 bp, Artificial sequence
  SiRNA target sequence
ttttttattatttatgcaggaat

SEQ ID NO: 72649 - DNA, 23 bp, Artificial sequence
  SiRNA target sequence
tttttattatttatgcaggaata

SEQ ID NO: 72650 - DNA, 23 bp, Artificial sequence
  SiRNA target sequence
ttttattatttatgcaggaatat

SEQ ID NO: 72651 - DNA, 23 bp, Artificial sequence
  SiRNA target sequence
tttattatttatgcaggaatatc

SEQ ID NO: 72652 - DNA, 23 bp, Artificial sequence
  SiRNA target sequence
ttattatttatgcaggaatatca

SEQ ID NO: 72653 - DNA, 23 bp, Artificial sequence
  SiRNA target sequence
tattatttatgcaggaatatcag

SEQ ID NO: 72654 - DNA, 23 bp, Artificial sequence
  SiRNA target sequence
attatttatgcaggaatatcagg

SEQ ID NO: 72655 - DNA, 23 bp, Artificial sequence
  SiRNA target sequence
ttatttatgcaggaatatcagga

SEQ ID NO: 72656 - DNA, 23 bp, Artificial sequence
  SiRNA target sequence
tatttatgcaggaatatcaggaa

SEQ ID NO: 72657 - DNA, 23 bp, Artificial sequence
  SiRNA target sequence
atttatgcaggaatatcaggaat

SEQ ID NO: 72658 - DNA, 23 bp, Artificial sequence
  SiRNA target sequence
tttatgcaggaatatcaggaata

SEQ ID NO: 72659 - DNA, 23 bp, Artificial sequence
  SiRNA target sequence
ttatgcaggaatatcaggaatat

SEQ ID NO: 72660 - DNA, 23 bp, Artificial sequence
  SiRNA target sequence
tatgcaggaatatcaggaatatt

SEQ ID NO: 72661 - DNA, 23 bp, Artificial sequence
  SiRNA target sequence
atgcaggaatatcaggaatatta

SEQ ID NO: 72662 - DNA, 23 bp, Artificial sequence
  SiRNA target sequence
tgcaggaatatcaggaatattat

SEQ ID NO: 72663 - DNA, 23 bp, Artificial sequence
  SiRNA target sequence
gcaggaatatcaggaatattatc

SEQ ID NO: 72664 - DNA, 23 bp, Artificial sequence
  SiRNA target sequence
caggaatatcaggaatattatct

SEQ ID NO: 72665 - DNA, 23 bp, Artificial sequence
  SiRNA target sequence
aggaatatcaggaatattatctc

SEQ ID NO: 72666 - DNA, 23 bp, Artificial sequence
  SiRNA target sequence
ggaatatcaggaatattatctca

SEQ ID NO: 72667 - DNA, 23 bp, Artificial sequence
  SiRNA target sequence
gaatatcaggaatattatctcaa

SEQ ID NO: 72668 - DNA, 23 bp, Artificial sequence
  SiRNA target sequence
aatatcaggaatattatctcaaa

SEQ ID NO: 72669 - DNA, 23 bp, Artificial sequence
  SiRNA target sequence
atatcaggaatattatctcaaaa

SEQ ID NO: 72670 - DNA, 23 bp, Artificial sequence
  SiRNA target sequence
tatcaggaatattatctcaaaat

SEQ ID NO: 72671 - DNA, 23 bp, Artificial sequence
  SiRNA target sequence
atcaggaatattatctcaaaata

SEQ ID NO: 72672 - DNA, 23 bp, Artificial sequence
  SiRNA target sequence
tcaggaatattatctcaaaatat

SEQ ID NO: 72673 - DNA, 23 bp, Artificial sequence
  SiRNA target sequence
caggaatattatctcaaaatatg

SEQ ID NO: 72674 - DNA, 23 bp, Artificial sequence
  SiRNA target sequence
aggaatattatctcaaaatatgt

SEQ ID NO: 72675 - DNA, 23 bp, Artificial sequence
  SiRNA target sequence
ggaatattatctcaaaatatgtc

SEQ ID NO: 72676 - DNA, 23 bp, Artificial sequence
  SiRNA target sequence
gaatattatctcaaaatatgtca

SEQ ID NO: 72677 - DNA, 23 bp, Artificial sequence
  SiRNA target sequence
aatattatctcaaaatatgtcat

SEQ ID NO: 72678 - DNA, 23 bp, Artificial sequence
  SiRNA target sequence
atattatctcaaaatatgtcatc

SEQ ID NO: 72679 - DNA, 23 bp, Artificial sequence
  SiRNA target sequence
tattatctcaaaatatgtcatct

SEQ ID NO: 72680 - DNA, 23 bp, Artificial sequence
  SiRNA target sequence
attatctcaaaatatgtcatcta

SEQ ID NO: 72681 - DNA, 23 bp, Artificial sequence
  SiRNA target sequence
ttatctcaaaatatgtcatctaa

SEQ ID NO: 72682 - DNA, 23 bp, Artificial sequence
  SiRNA target sequence
tatctcaaaatatgtcatctaac

SEQ ID NO: 72683 - DNA, 23 bp, Artificial sequence
  SiRNA target sequence
atctcaaaatatgtcatctaacc

SEQ ID NO: 72684 - DNA, 23 bp, Artificial sequence
  SiRNA target sequence
tctcaaaatatgtcatctaacca

SEQ ID NO: 72685 - DNA, 23 bp, Artificial sequence
  SiRNA target sequence
ctcaaaatatgtcatctaaccaa

SEQ ID NO: 72686 - DNA, 23 bp, Artificial sequence
  SiRNA target sequence
tcaaaatatgtcatctaaccaac

SEQ ID NO: 72687 - DNA, 23 bp, Artificial sequence
  SiRNA target sequence
caaaatatgtcatctaaccaact

SEQ ID NO: 72688 - DNA, 23 bp, Artificial sequence
  SiRNA target sequence
aaaatatgtcatctaaccaactc

SEQ ID NO: 72689 - DNA, 23 bp, Artificial sequence
  SiRNA target sequence
aaatatgtcatctaaccaactca

SEQ ID NO: 72690 - DNA, 23 bp, Artificial sequence
  SiRNA target sequence
aatatgtcatctaaccaactcat

SEQ ID NO: 72691 - DNA, 23 bp, Artificial sequence
  SiRNA target sequence
atatgtcatctaaccaactcatt

SEQ ID NO: 72692 - DNA, 23 bp, Artificial sequence
  SiRNA target sequence
tatgtcatctaaccaactcattt

SEQ ID NO: 72693 - DNA, 23 bp, Artificial sequence
  SiRNA target sequence
atgtcatctaaccaactcattta

SEQ ID NO: 72694 - DNA, 23 bp, Artificial sequence
  SiRNA target sequence
tgtcatctaaccaactcatttat

SEQ ID NO: 72695 - DNA, 23 bp, Artificial sequence
  SiRNA target sequence
gtcatctaaccaactcatttatt

SEQ ID NO: 72696 - DNA, 23 bp, Artificial sequence
  SiRNA target sequence
tcatctaaccaactcatttattt

SEQ ID NO: 72697 - DNA, 23 bp, Artificial sequence
  SiRNA target sequence
catctaaccaactcatttattta

SEQ ID NO: 72698 - DNA, 23 bp, Artificial sequence
  SiRNA target sequence
atctaaccaactcatttatttaa

SEQ ID NO: 72699 - DNA, 23 bp, Artificial sequence
  SiRNA target sequence
tctaaccaactcatttatttaat

SEQ ID NO: 72700 - DNA, 23 bp, Artificial sequence
  SiRNA target sequence
ctaaccaactcatttatttaatg

SEQ ID NO: 72701 - DNA, 23 bp, Artificial sequence
  SiRNA target sequence
taaccaactcatttatttaatgt

SEQ ID NO: 72702 - DNA, 23 bp, Artificial sequence
  SiRNA target sequence
aaccaactcatttatttaatgtc

SEQ ID NO: 72703 - DNA, 23 bp, Artificial sequence
  SiRNA target sequence
accaactcatttatttaatgtcc

SEQ ID NO: 72704 - DNA, 23 bp, Artificial sequence
  SiRNA target sequence
ccaactcatttatttaatgtcca

SEQ ID NO: 72705 - DNA, 23 bp, Artificial sequence
  SiRNA target sequence
caactcatttatttaatgtccat

SEQ ID NO: 72706 - DNA, 23 bp, Artificial sequence
  SiRNA target sequence
aactcatttatttaatgtccatt

SEQ ID NO: 72707 - DNA, 23 bp, Artificial sequence
  SiRNA target sequence
actcatttatttaatgtccatta

SEQ ID NO: 72708 - DNA, 23 bp, Artificial sequence
  SiRNA target sequence
ctcatttatttaatgtccattac

SEQ ID NO: 72709 - DNA, 23 bp, Artificial sequence
  SiRNA target sequence
tcatttatttaatgtccattaca

SEQ ID NO: 72710 - DNA, 23 bp, Artificial sequence
  SiRNA target sequence
catttatttaatgtccattacat

SEQ ID NO: 72711 - DNA, 23 bp, Artificial sequence
  SiRNA target sequence
atttatttaatgtccattacatc

SEQ ID NO: 72712 - DNA, 23 bp, Artificial sequence
  SiRNA target sequence
tttatttaatgtccattacatct

SEQ ID NO: 72713 - DNA, 23 bp, Artificial sequence
  SiRNA target sequence
ttatttaatgtccattacatcta

SEQ ID NO: 72714 - DNA, 23 bp, Artificial sequence
  SiRNA target sequence
tatttaatgtccattacatctac

SEQ ID NO: 72715 - DNA, 23 bp, Artificial sequence
  SiRNA target sequence
atttaatgtccattacatctacg

SEQ ID NO: 72716 - DNA, 23 bp, Artificial sequence
  SiRNA target sequence
tttaatgtccattacatctacgg

SEQ ID NO: 72717 - DNA, 23 bp, Artificial sequence
  SiRNA target sequence
ttaatgtccattacatctacggt

SEQ ID NO: 72718 - DNA, 23 bp, Artificial sequence
  SiRNA target sequence
taatgtccattacatctacggtt

SEQ ID NO: 72719 - DNA, 23 bp, Artificial sequence
  SiRNA target sequence
aatgtccattacatctacggtta

SEQ ID NO: 72720 - DNA, 23 bp, Artificial sequence
  SiRNA target sequence
atgtccattacatctacggttac

SEQ ID NO: 72721 - DNA, 23 bp, Artificial sequence
  SiRNA target sequence
tgtccattacatctacggttact

SEQ ID NO: 72722 - DNA, 23 bp, Artificial sequence
  SiRNA target sequence
gtccattacatctacggttacta

SEQ ID NO: 72723 - DNA, 23 bp, Artificial sequence
  SiRNA target sequence
tccattacatctacggttactat

SEQ ID NO: 72724 - DNA, 23 bp, Artificial sequence
  SiRNA target sequence
ccattacatctacggttactatt

SEQ ID NO: 72725 - DNA, 23 bp, Artificial sequence
  SiRNA target sequence
cattacatctacggttactatta

SEQ ID NO: 72726 - DNA, 23 bp, Artificial sequence
  SiRNA target sequence
attacatctacggttactattaa

SEQ ID NO: 72727 - DNA, 23 bp, Artificial sequence
  SiRNA target sequence
ttacatctacggttactattaat

SEQ ID NO: 72728 - DNA, 23 bp, Artificial sequence
  SiRNA target sequence
tacatctacggttactattaatt

SEQ ID NO: 72729 - DNA, 23 bp, Artificial sequence
  SiRNA target sequence
acatctacggttactattaattt

SEQ ID NO: 72730 - DNA, 23 bp, Artificial sequence
  SiRNA target sequence
catctacggttactattaattta

SEQ ID NO: 72731 - DNA, 23 bp, Artificial sequence
  SiRNA target sequence
atctacggttactattaatttaa

SEQ ID NO: 72732 - DNA, 23 bp, Artificial sequence
  SiRNA target sequence
tctacggttactattaatttaag

SEQ ID NO: 72733 - DNA, 23 bp, Artificial sequence
  SiRNA target sequence
ctacggttactattaatttaagt

SEQ ID NO: 72734 - DNA, 23 bp, Artificial sequence
  SiRNA target sequence
tacggttactattaatttaagta

SEQ ID NO: 72735 - DNA, 23 bp, Artificial sequence
  SiRNA target sequence
acggttactattaatttaagtaa

SEQ ID NO: 72736 - DNA, 23 bp, Artificial sequence
  SiRNA target sequence
cggttactattaatttaagtaac

SEQ ID NO: 72737 - DNA, 23 bp, Artificial sequence
  SiRNA target sequence
ggttactattaatttaagtaact

SEQ ID NO: 72738 - DNA, 23 bp, Artificial sequence
  SiRNA target sequence
gttactattaatttaagtaactt

SEQ ID NO: 72739 - DNA, 23 bp, Artificial sequence
  SiRNA target sequence
ttactattaatttaagtaacttg

SEQ ID NO: 72740 - DNA, 23 bp, Artificial sequence
  SiRNA target sequence
tactattaatttaagtaacttgg

SEQ ID NO: 72741 - DNA, 23 bp, Artificial sequence
  SiRNA target sequence
actattaatttaagtaacttggg

SEQ ID NO: 72742 - DNA, 23 bp, Artificial sequence
  SiRNA target sequence
ctattaatttaagtaacttgggt

SEQ ID NO: 72743 - DNA, 23 bp, Artificial sequence
  SiRNA target sequence
tattaatttaagtaacttgggtt

SEQ ID NO: 72744 - DNA, 23 bp, Artificial sequence
  SiRNA target sequence
attaatttaagtaacttgggtta

SEQ ID NO: 72745 - DNA, 23 bp, Artificial sequence
  SiRNA target sequence
ttaatttaagtaacttgggttac

SEQ ID NO: 72746 - DNA, 23 bp, Artificial sequence
  SiRNA target sequence
taatttaagtaacttgggttact

SEQ ID NO: 72747 - DNA, 23 bp, Artificial sequence
  SiRNA target sequence
aatttaagtaacttgggttactt

SEQ ID NO: 72748 - DNA, 23 bp, Artificial sequence
  SiRNA target sequence
atttaagtaacttgggttactta

SEQ ID NO: 72749 - DNA, 23 bp, Artificial sequence
  SiRNA target sequence
tttaagtaacttgggttacttat

SEQ ID NO: 72750 - DNA, 23 bp, Artificial sequence
  SiRNA target sequence
ttaagtaacttgggttacttata

SEQ ID NO: 72751 - DNA, 23 bp, Artificial sequence
  SiRNA target sequence
taagtaacttgggttacttatac

SEQ ID NO: 72752 - DNA, 23 bp, Artificial sequence
  SiRNA target sequence
aagtaacttgggttacttataca

SEQ ID NO: 72753 - DNA, 23 bp, Artificial sequence
  SiRNA target sequence
agtaacttgggttacttatacac

SEQ ID NO: 72754 - DNA, 23 bp, Artificial sequence
  SiRNA target sequence
gtaacttgggttacttatacact

SEQ ID NO: 72755 - DNA, 23 bp, Artificial sequence
  SiRNA target sequence
taacttgggttacttatacacta

SEQ ID NO: 72756 - DNA, 23 bp, Artificial sequence
  SiRNA target sequence
aacttgggttacttatacactag

SEQ ID NO: 72757 - DNA, 23 bp, Artificial sequence
  SiRNA target sequence
acttgggttacttatacactaga

SEQ ID NO: 72758 - DNA, 23 bp, Artificial sequence
  SiRNA target sequence
cttgggttacttatacactagat

SEQ ID NO: 72759 - DNA, 23 bp, Artificial sequence
  SiRNA target sequence
ttgggttacttatacactagata

SEQ ID NO: 72760 - DNA, 23 bp, Artificial sequence
  SiRNA target sequence
tgggttacttatacactagatat

SEQ ID NO: 72761 - DNA, 23 bp, Artificial sequence
  SiRNA target sequence
gggttacttatacactagatata

SEQ ID NO: 72762 - DNA, 23 bp, Artificial sequence
  SiRNA target sequence
ggttacttatacactagatatac

SEQ ID NO: 72763 - DNA, 23 bp, Artificial sequence
  SiRNA target sequence
gttacttatacactagatataca

SEQ ID NO: 72764 - DNA, 23 bp, Artificial sequence
  SiRNA target sequence
ttacttatacactagatatacac

SEQ ID NO: 72765 - DNA, 23 bp, Artificial sequence
  SiRNA target sequence
tacttatacactagatatacaca

SEQ ID NO: 72766 - DNA, 23 bp, Artificial sequence
  SiRNA target sequence
acttatacactagatatacacaa

SEQ ID NO: 72767 - DNA, 23 bp, Artificial sequence
  SiRNA target sequence
cttatacactagatatacacaag

SEQ ID NO: 72768 - DNA, 23 bp, Artificial sequence
  SiRNA target sequence
ttatacactagatatacacaagc

SEQ ID NO: 72769 - DNA, 23 bp, Artificial sequence
  SiRNA target sequence
tatacactagatatacacaagca

SEQ ID NO: 72770 - DNA, 23 bp, Artificial sequence
  SiRNA target sequence
atacactagatatacacaagcaa

SEQ ID NO: 72771 - DNA, 23 bp, Artificial sequence
  SiRNA target sequence
tacactagatatacacaagcaat

SEQ ID NO: 72772 - DNA, 23 bp, Artificial sequence
  SiRNA target sequence
acactagatatacacaagcaata

SEQ ID NO: 72773 - DNA, 23 bp, Artificial sequence
  SiRNA target sequence
cactagatatacacaagcaataa

SEQ ID NO: 72774 - DNA, 23 bp, Artificial sequence
  SiRNA target sequence
actagatatacacaagcaataat

SEQ ID NO: 72775 - DNA, 23 bp, Artificial sequence
  SiRNA target sequence
ctagatatacacaagcaataatt

SEQ ID NO: 72776 - DNA, 23 bp, Artificial sequence
  SiRNA target sequence
tagatatacacaagcaataatta

SEQ ID NO: 72777 - DNA, 23 bp, Artificial sequence
  SiRNA target sequence
agatatacacaagcaataattaa

SEQ ID NO: 72778 - DNA, 23 bp, Artificial sequence
  SiRNA target sequence
gatatacacaagcaataattaat

SEQ ID NO: 72779 - DNA, 23 bp, Artificial sequence
  SiRNA target sequence
atatacacaagcaataattaatg

SEQ ID NO: 72780 - DNA, 23 bp, Artificial sequence
  SiRNA target sequence
tatacacaagcaataattaatgc

SEQ ID NO: 72781 - DNA, 23 bp, Artificial sequence
  SiRNA target sequence
atacacaagcaataattaatgca

SEQ ID NO: 72782 - DNA, 23 bp, Artificial sequence
  SiRNA target sequence
tacacaagcaataattaatgcaa

SEQ ID NO: 72783 - DNA, 23 bp, Artificial sequence
  SiRNA target sequence
acacaagcaataattaatgcaag

SEQ ID NO: 72784 - DNA, 23 bp, Artificial sequence
  SiRNA target sequence
cacaagcaataattaatgcaaga

SEQ ID NO: 72785 - DNA, 23 bp, Artificial sequence
  SiRNA target sequence
acaagcaataattaatgcaagat

SEQ ID NO: 72786 - DNA, 23 bp, Artificial sequence
  SiRNA target sequence
caagcaataattaatgcaagatc

SEQ ID NO: 72787 - DNA, 23 bp, Artificial sequence
  SiRNA target sequence
aagcaataattaatgcaagatct

SEQ ID NO: 72788 - DNA, 23 bp, Artificial sequence
  SiRNA target sequence
agcaataattaatgcaagatcta

SEQ ID NO: 72789 - DNA, 23 bp, Artificial sequence
  SiRNA target sequence
gcaataattaatgcaagatctac

SEQ ID NO: 72790 - DNA, 23 bp, Artificial sequence
  SiRNA target sequence
caataattaatgcaagatctact

SEQ ID NO: 72791 - DNA, 23 bp, Artificial sequence
  SiRNA target sequence
aataattaatgcaagatctactt

SEQ ID NO: 72792 - DNA, 23 bp, Artificial sequence
  SiRNA target sequence
ataattaatgcaagatctactta

SEQ ID NO: 72793 - DNA, 23 bp, Artificial sequence
  SiRNA target sequence
taattaatgcaagatctacttat

SEQ ID NO: 72794 - DNA, 23 bp, Artificial sequence
  SiRNA target sequence
aattaatgcaagatctacttatg

SEQ ID NO: 72795 - DNA, 23 bp, Artificial sequence
  SiRNA target sequence
attaatgcaagatctacttatga

SEQ ID NO: 72796 - DNA, 23 bp, Artificial sequence
  SiRNA target sequence
ttaatgcaagatctacttatgat

SEQ ID NO: 72797 - DNA, 23 bp, Artificial sequence
  SiRNA target sequence
taatgcaagatctacttatgata

SEQ ID NO: 72798 - DNA, 23 bp, Artificial sequence
  SiRNA target sequence
aatgcaagatctacttatgatac

SEQ ID NO: 72799 - DNA, 23 bp, Artificial sequence
  SiRNA target sequence
atgcaagatctacttatgataca

SEQ ID NO: 72800 - DNA, 23 bp, Artificial sequence
  SiRNA target sequence
tgcaagatctacttatgatacaa

SEQ ID NO: 72801 - DNA, 23 bp, Artificial sequence
  SiRNA target sequence
gcaagatctacttatgatacaat

SEQ ID NO: 72802 - DNA, 23 bp, Artificial sequence
  SiRNA target sequence
caagatctacttatgatacaatg

SEQ ID NO: 72803 - DNA, 23 bp, Artificial sequence
  SiRNA target sequence
aagatctacttatgatacaatgt

SEQ ID NO: 72804 - DNA, 23 bp, Artificial sequence
  SiRNA target sequence
agatctacttatgatacaatgtt

SEQ ID NO: 72805 - DNA, 23 bp, Artificial sequence
  SiRNA target sequence
gatctacttatgatacaatgtta

SEQ ID NO: 72806 - DNA, 23 bp, Artificial sequence
  SiRNA target sequence
atctacttatgatacaatgttag

SEQ ID NO: 72807 - DNA, 23 bp, Artificial sequence
  SiRNA target sequence
tctacttatgatacaatgttaga

SEQ ID NO: 72808 - DNA, 23 bp, Artificial sequence
  SiRNA target sequence
ctacttatgatacaatgttagat

SEQ ID NO: 72809 - DNA, 23 bp, Artificial sequence
  SiRNA target sequence
tacttatgatacaatgttagata

SEQ ID NO: 72810 - DNA, 23 bp, Artificial sequence
  SiRNA target sequence
acttatgatacaatgttagatat

SEQ ID NO: 72811 - DNA, 23 bp, Artificial sequence
  SiRNA target sequence
cttatgatacaatgttagatata

SEQ ID NO: 72812 - DNA, 23 bp, Artificial sequence
  SiRNA target sequence
ttatgatacaatgttagatataa

SEQ ID NO: 72813 - DNA, 23 bp, Artificial sequence
  SiRNA target sequence
tatgatacaatgttagatataaa

SEQ ID NO: 72814 - DNA, 23 bp, Artificial sequence
  SiRNA target sequence
atgatacaatgttagatataaaa

SEQ ID NO: 72815 - DNA, 23 bp, Artificial sequence
  SiRNA target sequence
tgatacaatgttagatataaaaa

SEQ ID NO: 72816 - DNA, 23 bp, Artificial sequence
  SiRNA target sequence
gatacaatgttagatataaaaaa

SEQ ID NO: 72817 - DNA, 23 bp, Artificial sequence
  SiRNA target sequence
atacaatgttagatataaaaaaa

SEQ ID NO: 72818 - DNA, 23 bp, Artificial sequence
  SiRNA target sequence
tacaatgttagatataaaaaaag

SEQ ID NO: 72819 - DNA, 23 bp, Artificial sequence
  SiRNA target sequence
acaatgttagatataaaaaaaga

SEQ ID NO: 72820 - DNA, 23 bp, Artificial sequence
  SiRNA target sequence
caatgttagatataaaaaaagag

SEQ ID NO: 72821 - DNA, 23 bp, Artificial sequence
  SiRNA target sequence
aatgttagatataaaaaaagaga

SEQ ID NO: 72822 - DNA, 23 bp, Artificial sequence
  SiRNA target sequence
atgttagatataaaaaaagagaa

SEQ ID NO: 72823 - DNA, 23 bp, Artificial sequence
  SiRNA target sequence
tgttagatataaaaaaagagaat

SEQ ID NO: 72824 - DNA, 23 bp, Artificial sequence
  SiRNA target sequence
gttagatataaaaaaagagaata

SEQ ID NO: 72825 - DNA, 23 bp, Artificial sequence
  SiRNA target sequence
ttagatataaaaaaagagaataa

SEQ ID NO: 72826 - DNA, 23 bp, Artificial sequence
  SiRNA target sequence
tagatataaaaaaagagaataat

SEQ ID NO: 72827 - DNA, 23 bp, Artificial sequence
  SiRNA target sequence
agatataaaaaaagagaataata

SEQ ID NO: 72828 - DNA, 23 bp, Artificial sequence
  SiRNA target sequence
gatataaaaaaagagaataataa

SEQ ID NO: 72829 - DNA, 23 bp, Artificial sequence
  SiRNA target sequence
atataaaaaaagagaataataag

SEQ ID NO: 72830 - DNA, 23 bp, Artificial sequence
  SiRNA target sequence
tataaaaaaagagaataataagt

SEQ ID NO: 72831 - DNA, 23 bp, Artificial sequence
  SiRNA target sequence
ataaaaaaagagaataataagtt

SEQ ID NO: 72832 - DNA, 23 bp, Artificial sequence
  SiRNA target sequence
taaaaaaagagaataataagttt

SEQ ID NO: 72833 - DNA, 23 bp, Artificial sequence
  SiRNA target sequence
aaaaaaagagaataataagttta

SEQ ID NO: 72834 - DNA, 23 bp, Artificial sequence
  SiRNA target sequence
aaaaaagagaataataagtttaa

SEQ ID NO: 72835 - DNA, 23 bp, Artificial sequence
  SiRNA target sequence
aaaaagagaataataagtttaag

SEQ ID NO: 72836 - DNA, 23 bp, Artificial sequence
  SiRNA target sequence
aaaagagaataataagtttaaga

SEQ ID NO: 72837 - DNA, 23 bp, Artificial sequence
  SiRNA target sequence
aaagagaataataagtttaagat

SEQ ID NO: 72838 - DNA, 23 bp, Artificial sequence
  SiRNA target sequence
aagagaataataagtttaagatt

SEQ ID NO: 72839 - DNA, 23 bp, Artificial sequence
  SiRNA target sequence
agagaataataagtttaagatta

SEQ ID NO: 72840 - DNA, 23 bp, Artificial sequence
  SiRNA target sequence
gagaataataagtttaagattac

SEQ ID NO: 72841 - DNA, 23 bp, Artificial sequence
  SiRNA target sequence
agaataataagtttaagattaca

SEQ ID NO: 72842 - DNA, 23 bp, Artificial sequence
  SiRNA target sequence
gaataataagtttaagattacag

SEQ ID NO: 72843 - DNA, 23 bp, Artificial sequence
  SiRNA target sequence
aataataagtttaagattacaga

SEQ ID NO: 72844 - DNA, 23 bp, Artificial sequence
  SiRNA target sequence
ataataagtttaagattacagaa

SEQ ID NO: 72845 - DNA, 23 bp, Artificial sequence
  SiRNA target sequence
taataagtttaagattacagaat

SEQ ID NO: 72846 - DNA, 23 bp, Artificial sequence
  SiRNA target sequence
aataagtttaagattacagaatt

SEQ ID NO: 72847 - DNA, 23 bp, Artificial sequence
  SiRNA target sequence
ataagtttaagattacagaattt

SEQ ID NO: 72848 - DNA, 23 bp, Artificial sequence
  SiRNA target sequence
taagtttaagattacagaattta

SEQ ID NO: 72849 - DNA, 23 bp, Artificial sequence
  SiRNA target sequence
aagtttaagattacagaatttaa

SEQ ID NO: 72850 - DNA, 23 bp, Artificial sequence
  SiRNA target sequence
agtttaagattacagaatttaaa

SEQ ID NO: 72851 - DNA, 23 bp, Artificial sequence
  SiRNA target sequence
gtttaagattacagaatttaaag

SEQ ID NO: 72852 - DNA, 23 bp, Artificial sequence
  SiRNA target sequence
tttaagattacagaatttaaaga

SEQ ID NO: 72853 - DNA, 23 bp, Artificial sequence
  SiRNA target sequence
ttaagattacagaatttaaagaa

SEQ ID NO: 72854 - DNA, 23 bp, Artificial sequence
  SiRNA target sequence
taagattacagaatttaaagaaa

SEQ ID NO: 72855 - DNA, 23 bp, Artificial sequence
  SiRNA target sequence
aagattacagaatttaaagaaag

SEQ ID NO: 72856 - DNA, 23 bp, Artificial sequence
  SiRNA target sequence
agattacagaatttaaagaaagt

SEQ ID NO: 72857 - DNA, 23 bp, Artificial sequence
  SiRNA target sequence
gattacagaatttaaagaaagta

SEQ ID NO: 72858 - DNA, 23 bp, Artificial sequence
  SiRNA target sequence
attacagaatttaaagaaagtat

SEQ ID NO: 72859 - DNA, 23 bp, Artificial sequence
  SiRNA target sequence
ttacagaatttaaagaaagtatt

SEQ ID NO: 72860 - DNA, 23 bp, Artificial sequence
  SiRNA target sequence
tacagaatttaaagaaagtatta

SEQ ID NO: 72861 - DNA, 23 bp, Artificial sequence
  SiRNA target sequence
acagaatttaaagaaagtattaa

SEQ ID NO: 72862 - DNA, 23 bp, Artificial sequence
  SiRNA target sequence
cagaatttaaagaaagtattaag

SEQ ID NO: 72863 - DNA, 23 bp, Artificial sequence
  SiRNA target sequence
agaatttaaagaaagtattaagt

SEQ ID NO: 72864 - DNA, 23 bp, Artificial sequence
  SiRNA target sequence
gaatttaaagaaagtattaagtt

SEQ ID NO: 72865 - DNA, 23 bp, Artificial sequence
  SiRNA target sequence
aatttaaagaaagtattaagttt

SEQ ID NO: 72866 - DNA, 23 bp, Artificial sequence
  SiRNA target sequence
atttaaagaaagtattaagttta

SEQ ID NO: 72867 - DNA, 23 bp, Artificial sequence
  SiRNA target sequence
tttaaagaaagtattaagtttaa

SEQ ID NO: 72868 - DNA, 23 bp, Artificial sequence
  SiRNA target sequence
ttaaagaaagtattaagtttaat

SEQ ID NO: 72869 - DNA, 23 bp, Artificial sequence
  SiRNA target sequence
taaagaaagtattaagtttaata

SEQ ID NO: 72870 - DNA, 23 bp, Artificial sequence
  SiRNA target sequence
aaagaaagtattaagtttaataa

SEQ ID NO: 72871 - DNA, 23 bp, Artificial sequence
  SiRNA target sequence
aagaaagtattaagtttaataat

SEQ ID NO: 72872 - DNA, 23 bp, Artificial sequence
  SiRNA target sequence
agaaagtattaagtttaataatt

SEQ ID NO: 72873 - DNA, 23 bp, Artificial sequence
  SiRNA target sequence
gaaagtattaagtttaataattt

SEQ ID NO: 72874 - DNA, 23 bp, Artificial sequence
  SiRNA target sequence
aaagtattaagtttaataatttg

SEQ ID NO: 72875 - DNA, 23 bp, Artificial sequence
  SiRNA target sequence
aagtattaagtttaataatttgt

SEQ ID NO: 72876 - DNA, 23 bp, Artificial sequence
  SiRNA target sequence
agtattaagtttaataatttgtc

SEQ ID NO: 72877 - DNA, 23 bp, Artificial sequence
  SiRNA target sequence
gtattaagtttaataatttgtca

SEQ ID NO: 72878 - DNA, 23 bp, Artificial sequence
  SiRNA target sequence
tattaagtttaataatttgtcat

SEQ ID NO: 72879 - DNA, 23 bp, Artificial sequence
  SiRNA target sequence
attaagtttaataatttgtcatt

SEQ ID NO: 72880 - DNA, 23 bp, Artificial sequence
  SiRNA target sequence
ttaagtttaataatttgtcattt

SEQ ID NO: 72881 - DNA, 23 bp, Artificial sequence
  SiRNA target sequence
taagtttaataatttgtcatttg

SEQ ID NO: 72882 - DNA, 23 bp, Artificial sequence
  SiRNA target sequence
aagtttaataatttgtcatttgg

SEQ ID NO: 72883 - DNA, 23 bp, Artificial sequence
  SiRNA target sequence
agtttaataatttgtcatttggt

SEQ ID NO: 72884 - DNA, 23 bp, Artificial sequence
  SiRNA target sequence
gtttaataatttgtcatttggtt

SEQ ID NO: 72885 - DNA, 23 bp, Artificial sequence
  SiRNA target sequence
tttaataatttgtcatttggtta

SEQ ID NO: 72886 - DNA, 23 bp, Artificial sequence
  SiRNA target sequence
ttaataatttgtcatttggttat

SEQ ID NO: 72887 - DNA, 23 bp, Artificial sequence
  SiRNA target sequence
taataatttgtcatttggttatg

SEQ ID NO: 72888 - DNA, 23 bp, Artificial sequence
  SiRNA target sequence
aataatttgtcatttggttatga

SEQ ID NO: 72889 - DNA, 23 bp, Artificial sequence
  SiRNA target sequence
ataatttgtcatttggttatgaa

SEQ ID NO: 72890 - DNA, 23 bp, Artificial sequence
  SiRNA target sequence
taatttgtcatttggttatgaaa

SEQ ID NO: 72891 - DNA, 23 bp, Artificial sequence
  SiRNA target sequence
aatttgtcatttggttatgaaag

SEQ ID NO: 72892 - DNA, 23 bp, Artificial sequence
  SiRNA target sequence
atttgtcatttggttatgaaagt

SEQ ID NO: 72893 - DNA, 23 bp, Artificial sequence
  SiRNA target sequence
tttgtcatttggttatgaaagta

SEQ ID NO: 72894 - DNA, 23 bp, Artificial sequence
  SiRNA target sequence
ttgtcatttggttatgaaagtag

SEQ ID NO: 72895 - DNA, 23 bp, Artificial sequence
  SiRNA target sequence
tgtcatttggttatgaaagtaga

SEQ ID NO: 72896 - DNA, 23 bp, Artificial sequence
  SiRNA target sequence
gtcatttggttatgaaagtagac

SEQ ID NO: 72897 - DNA, 23 bp, Artificial sequence
  SiRNA target sequence
tcatttggttatgaaagtagaca

SEQ ID NO: 72898 - DNA, 23 bp, Artificial sequence
  SiRNA target sequence
catttggttatgaaagtagacaa

SEQ ID NO: 72899 - DNA, 23 bp, Artificial sequence
  SiRNA target sequence
atttggttatgaaagtagacaaa

SEQ ID NO: 72900 - DNA, 23 bp, Artificial sequence
  SiRNA target sequence
tttggttatgaaagtagacaaat

SEQ ID NO: 72901 - DNA, 23 bp, Artificial sequence
  SiRNA target sequence
ttggttatgaaagtagacaaatt

SEQ ID NO: 72902 - DNA, 23 bp, Artificial sequence
  SiRNA target sequence
tggttatgaaagtagacaaattt

SEQ ID NO: 72903 - DNA, 23 bp, Artificial sequence
  SiRNA target sequence
ggttatgaaagtagacaaatttt

SEQ ID NO: 72904 - DNA, 23 bp, Artificial sequence
  SiRNA target sequence
gttatgaaagtagacaaattttt

SEQ ID NO: 72905 - DNA, 23 bp, Artificial sequence
  SiRNA target sequence
ttatgaaagtagacaaattttta

SEQ ID NO: 72906 - DNA, 23 bp, Artificial sequence
  SiRNA target sequence
tatgaaagtagacaaatttttaa

SEQ ID NO: 72907 - DNA, 23 bp, Artificial sequence
  SiRNA target sequence
atgaaagtagacaaatttttaat

SEQ ID NO: 72908 - DNA, 23 bp, Artificial sequence
  SiRNA target sequence
tgaaagtagacaaatttttaata

SEQ ID NO: 72909 - DNA, 23 bp, Artificial sequence
  SiRNA target sequence
gaaagtagacaaatttttaataa

SEQ ID NO: 72910 - DNA, 23 bp, Artificial sequence
  SiRNA target sequence
aaagtagacaaatttttaataaa

SEQ ID NO: 72911 - DNA, 23 bp, Artificial sequence
  SiRNA target sequence
aagtagacaaatttttaataaaa

SEQ ID NO: 72912 - DNA, 23 bp, Artificial sequence
  SiRNA target sequence
agtagacaaatttttaataaaat

SEQ ID NO: 72913 - DNA, 23 bp, Artificial sequence
  SiRNA target sequence
gtagacaaatttttaataaaata

SEQ ID NO: 72914 - DNA, 23 bp, Artificial sequence
  SiRNA target sequence
tagacaaatttttaataaaataa

SEQ ID NO: 72915 - DNA, 23 bp, Artificial sequence
  SiRNA target sequence
agacaaatttttaataaaataaa

SEQ ID NO: 72916 - DNA, 23 bp, Artificial sequence
  SiRNA target sequence
gacaaatttttaataaaataaat

SEQ ID NO: 72917 - DNA, 23 bp, Artificial sequence
  SiRNA target sequence
acaaatttttaataaaataaatc

SEQ ID NO: 72918 - DNA, 23 bp, Artificial sequence
  SiRNA target sequence
caaatttttaataaaataaatct

SEQ ID NO: 72919 - DNA, 23 bp, Artificial sequence
  SiRNA target sequence
aaatttttaataaaataaatcta

SEQ ID NO: 72920 - DNA, 23 bp, Artificial sequence
  SiRNA target sequence
aatttttaataaaataaatctag

SEQ ID NO: 72921 - DNA, 23 bp, Artificial sequence
  SiRNA target sequence
atttttaataaaataaatctaga

SEQ ID NO: 72922 - DNA, 23 bp, Artificial sequence
  SiRNA target sequence
tttttaataaaataaatctagaa

SEQ ID NO: 72923 - DNA, 23 bp, Artificial sequence
  SiRNA target sequence
ttttaataaaataaatctagaaa

SEQ ID NO: 72924 - DNA, 23 bp, Artificial sequence
  SiRNA target sequence
tttaataaaataaatctagaaat

SEQ ID NO: 72925 - DNA, 23 bp, Artificial sequence
  SiRNA target sequence
ttaataaaataaatctagaaata

SEQ ID NO: 72926 - DNA, 23 bp, Artificial sequence
  SiRNA target sequence
taataaaataaatctagaaatat

SEQ ID NO: 72927 - DNA, 23 bp, Artificial sequence
  SiRNA target sequence
aataaaataaatctagaaatata

SEQ ID NO: 72928 - DNA, 23 bp, Artificial sequence
  SiRNA target sequence
ataaaataaatctagaaatatac

SEQ ID NO: 72929 - DNA, 23 bp, Artificial sequence
  SiRNA target sequence
taaaataaatctagaaatataca

SEQ ID NO: 72930 - DNA, 23 bp, Artificial sequence
  SiRNA target sequence
aaaataaatctagaaatatacaa

SEQ ID NO: 72931 - DNA, 23 bp, Artificial sequence
  SiRNA target sequence
aaataaatctagaaatatacaaa

SEQ ID NO: 72932 - DNA, 23 bp, Artificial sequence
  SiRNA target sequence
aataaatctagaaatatacaaag

SEQ ID NO: 72933 - DNA, 23 bp, Artificial sequence
  SiRNA target sequence
ataaatctagaaatatacaaagg

SEQ ID NO: 72934 - DNA, 23 bp, Artificial sequence
  SiRNA target sequence
taaatctagaaatatacaaagga

SEQ ID NO: 72935 - DNA, 23 bp, Artificial sequence
  SiRNA target sequence
aaatctagaaatatacaaaggag

SEQ ID NO: 72936 - DNA, 23 bp, Artificial sequence
  SiRNA target sequence
aatctagaaatatacaaaggaga

SEQ ID NO: 72937 - DNA, 23 bp, Artificial sequence
  SiRNA target sequence
atctagaaatatacaaaggagaa

SEQ ID NO: 72938 - DNA, 23 bp, Artificial sequence
  SiRNA target sequence
tctagaaatatacaaaggagaaa

SEQ ID NO: 72939 - DNA, 23 bp, Artificial sequence
  SiRNA target sequence
ctagaaatatacaaaggagaaaa

SEQ ID NO: 72940 - DNA, 23 bp, Artificial sequence
  SiRNA target sequence
tagaaatatacaaaggagaaaaa

SEQ ID NO: 72941 - DNA, 23 bp, Artificial sequence
  SiRNA target sequence
agaaatatacaaaggagaaaaag

SEQ ID NO: 72942 - DNA, 23 bp, Artificial sequence
  SiRNA target sequence
gaaatatacaaaggagaaaaagt

SEQ ID NO: 72943 - DNA, 23 bp, Artificial sequence
  SiRNA target sequence
aaatatacaaaggagaaaaagta

SEQ ID NO: 72944 - DNA, 23 bp, Artificial sequence
  SiRNA target sequence
aatatacaaaggagaaaaagtag

SEQ ID NO: 72945 - DNA, 23 bp, Artificial sequence
  SiRNA target sequence
atatacaaaggagaaaaagtagc

SEQ ID NO: 72946 - DNA, 23 bp, Artificial sequence
  SiRNA target sequence
tatacaaaggagaaaaagtagca

SEQ ID NO: 72947 - DNA, 23 bp, Artificial sequence
  SiRNA target sequence
atacaaaggagaaaaagtagcaa

SEQ ID NO: 72948 - DNA, 23 bp, Artificial sequence
  SiRNA target sequence
tacaaaggagaaaaagtagcaat

SEQ ID NO: 72949 - DNA, 23 bp, Artificial sequence
  SiRNA target sequence
acaaaggagaaaaagtagcaatt

SEQ ID NO: 72950 - DNA, 23 bp, Artificial sequence
  SiRNA target sequence
caaaggagaaaaagtagcaatta

SEQ ID NO: 72951 - DNA, 23 bp, Artificial sequence
  SiRNA target sequence
aaaggagaaaaagtagcaattat

SEQ ID NO: 72952 - DNA, 23 bp, Artificial sequence
  SiRNA target sequence
aaggagaaaaagtagcaattata

SEQ ID NO: 72953 - DNA, 23 bp, Artificial sequence
  SiRNA target sequence
aggagaaaaagtagcaattatag

SEQ ID NO: 72954 - DNA, 23 bp, Artificial sequence
  SiRNA target sequence
ggagaaaaagtagcaattatagg

SEQ ID NO: 72955 - DNA, 23 bp, Artificial sequence
  SiRNA target sequence
gagaaaaagtagcaattataggt

SEQ ID NO: 72956 - DNA, 23 bp, Artificial sequence
  SiRNA target sequence
agaaaaagtagcaattataggta

SEQ ID NO: 72957 - DNA, 23 bp, Artificial sequence
  SiRNA target sequence
gaaaaagtagcaattataggtaa

SEQ ID NO: 72958 - DNA, 23 bp, Artificial sequence
  SiRNA target sequence
aaaaagtagcaattataggtaaa

SEQ ID NO: 72959 - DNA, 23 bp, Artificial sequence
  SiRNA target sequence
aaaagtagcaattataggtaaaa

SEQ ID NO: 72960 - DNA, 23 bp, Artificial sequence
  SiRNA target sequence
aaagtagcaattataggtaaaaa

SEQ ID NO: 72961 - DNA, 23 bp, Artificial sequence
  SiRNA target sequence
aagtagcaattataggtaaaaat

SEQ ID NO: 72962 - DNA, 23 bp, Artificial sequence
  SiRNA target sequence
agtagcaattataggtaaaaatg

SEQ ID NO: 72963 - DNA, 23 bp, Artificial sequence
  SiRNA target sequence
gtagcaattataggtaaaaatgg

SEQ ID NO: 72964 - DNA, 23 bp, Artificial sequence
  SiRNA target sequence
tagcaattataggtaaaaatggt

SEQ ID NO: 72965 - DNA, 23 bp, Artificial sequence
  SiRNA target sequence
agcaattataggtaaaaatggta

SEQ ID NO: 72966 - DNA, 23 bp, Artificial sequence
  SiRNA target sequence
gcaattataggtaaaaatggtag

SEQ ID NO: 72967 - DNA, 23 bp, Artificial sequence
  SiRNA target sequence
caattataggtaaaaatggtagt

SEQ ID NO: 72968 - DNA, 23 bp, Artificial sequence
  SiRNA target sequence
aattataggtaaaaatggtagtg

SEQ ID NO: 72969 - DNA, 23 bp, Artificial sequence
  SiRNA target sequence
attataggtaaaaatggtagtgg

SEQ ID NO: 72970 - DNA, 23 bp, Artificial sequence
  SiRNA target sequence
ttataggtaaaaatggtagtggt

SEQ ID NO: 72971 - DNA, 23 bp, Artificial sequence
  SiRNA target sequence
tataggtaaaaatggtagtggta

SEQ ID NO: 72972 - DNA, 23 bp, Artificial sequence
  SiRNA target sequence
ataggtaaaaatggtagtggtaa

SEQ ID NO: 72973 - DNA, 23 bp, Artificial sequence
  SiRNA target sequence
taggtaaaaatggtagtggtaaa

SEQ ID NO: 72974 - DNA, 23 bp, Artificial sequence
  SiRNA target sequence
aggtaaaaatggtagtggtaaat

SEQ ID NO: 72975 - DNA, 23 bp, Artificial sequence
  SiRNA target sequence
ggtaaaaatggtagtggtaaatc

SEQ ID NO: 72976 - DNA, 23 bp, Artificial sequence
  SiRNA target sequence
gtaaaaatggtagtggtaaatca

SEQ ID NO: 72977 - DNA, 23 bp, Artificial sequence
  SiRNA target sequence
taaaaatggtagtggtaaatcaa

SEQ ID NO: 72978 - DNA, 23 bp, Artificial sequence
  SiRNA target sequence
aaaaatggtagtggtaaatcaac

SEQ ID NO: 72979 - DNA, 23 bp, Artificial sequence
  SiRNA target sequence
aaaatggtagtggtaaatcaaca

SEQ ID NO: 72980 - DNA, 23 bp, Artificial sequence
  SiRNA target sequence
aaatggtagtggtaaatcaacat

SEQ ID NO: 72981 - DNA, 23 bp, Artificial sequence
  SiRNA target sequence
aatggtagtggtaaatcaacatt

SEQ ID NO: 72982 - DNA, 23 bp, Artificial sequence
  SiRNA target sequence
atggtagtggtaaatcaacatta

SEQ ID NO: 72983 - DNA, 23 bp, Artificial sequence
  SiRNA target sequence
tggtagtggtaaatcaacattac

SEQ ID NO: 72984 - DNA, 23 bp, Artificial sequence
  SiRNA target sequence
ggtagtggtaaatcaacattact

SEQ ID NO: 72985 - DNA, 23 bp, Artificial sequence
  SiRNA target sequence
gtagtggtaaatcaacattacta

SEQ ID NO: 72986 - DNA, 23 bp, Artificial sequence
  SiRNA target sequence
tagtggtaaatcaacattactaa

SEQ ID NO: 72987 - DNA, 23 bp, Artificial sequence
  SiRNA target sequence
agtggtaaatcaacattactaaa

SEQ ID NO: 72988 - DNA, 23 bp, Artificial sequence
  SiRNA target sequence
gtggtaaatcaacattactaaaa

SEQ ID NO: 72989 - DNA, 23 bp, Artificial sequence
  SiRNA target sequence
tggtaaatcaacattactaaaac

SEQ ID NO: 72990 - DNA, 23 bp, Artificial sequence
  SiRNA target sequence
ggtaaatcaacattactaaaact

SEQ ID NO: 72991 - DNA, 23 bp, Artificial sequence
  SiRNA target sequence
gtaaatcaacattactaaaacta

SEQ ID NO: 72992 - DNA, 23 bp, Artificial sequence
  SiRNA target sequence
taaatcaacattactaaaactac

SEQ ID NO: 72993 - DNA, 23 bp, Artificial sequence
  SiRNA target sequence
aaatcaacattactaaaactact

SEQ ID NO: 72994 - DNA, 23 bp, Artificial sequence
  SiRNA target sequence
aatcaacattactaaaactactg

SEQ ID NO: 72995 - DNA, 23 bp, Artificial sequence
  SiRNA target sequence
atcaacattactaaaactactgc

SEQ ID NO: 72996 - DNA, 23 bp, Artificial sequence
  SiRNA target sequence
tcaacattactaaaactactgct

SEQ ID NO: 72997 - DNA, 23 bp, Artificial sequence
  SiRNA target sequence
caacattactaaaactactgctt

SEQ ID NO: 72998 - DNA, 23 bp, Artificial sequence
  SiRNA target sequence
aacattactaaaactactgctta

SEQ ID NO: 72999 - DNA, 23 bp, Artificial sequence
  SiRNA target sequence
acattactaaaactactgcttaa

SEQ ID NO: 73000 - DNA, 23 bp, Artificial sequence
  SiRNA target sequence
cattactaaaactactgcttaaa

SEQ ID NO: 73001 - DNA, 23 bp, Artificial sequence
  SiRNA target sequence
attactaaaactactgcttaaat

SEQ ID NO: 73002 - DNA, 23 bp, Artificial sequence
  SiRNA target sequence
ttactaaaactactgcttaaatt

SEQ ID NO: 73003 - DNA, 23 bp, Artificial sequence
  SiRNA target sequence
tactaaaactactgcttaaattt

SEQ ID NO: 73004 - DNA, 23 bp, Artificial sequence
  SiRNA target sequence
actaaaactactgcttaaatttg

SEQ ID NO: 73005 - DNA, 23 bp, Artificial sequence
  SiRNA target sequence
ctaaaactactgcttaaatttga

SEQ ID NO: 73006 - DNA, 23 bp, Artificial sequence
  SiRNA target sequence
taaaactactgcttaaatttgat

SEQ ID NO: 73007 - DNA, 23 bp, Artificial sequence
  SiRNA target sequence
aaaactactgcttaaatttgatg

SEQ ID NO: 73008 - DNA, 23 bp, Artificial sequence
  SiRNA target sequence
aaactactgcttaaatttgatga

SEQ ID NO: 73009 - DNA, 23 bp, Artificial sequence
  SiRNA target sequence
aactactgcttaaatttgatgaa

SEQ ID NO: 73010 - DNA, 23 bp, Artificial sequence
  SiRNA target sequence
actactgcttaaatttgatgaag

SEQ ID NO: 73011 - DNA, 23 bp, Artificial sequence
  SiRNA target sequence
ctactgcttaaatttgatgaaga

SEQ ID NO: 73012 - DNA, 23 bp, Artificial sequence
  SiRNA target sequence
tactgcttaaatttgatgaagat

SEQ ID NO: 73013 - DNA, 23 bp, Artificial sequence
  SiRNA target sequence
actgcttaaatttgatgaagatt

SEQ ID NO: 73014 - DNA, 23 bp, Artificial sequence
  SiRNA target sequence
ctgcttaaatttgatgaagatta

SEQ ID NO: 73015 - DNA, 23 bp, Artificial sequence
  SiRNA target sequence
tgcttaaatttgatgaagattac

SEQ ID NO: 73016 - DNA, 23 bp, Artificial sequence
  SiRNA target sequence
gcttaaatttgatgaagattaca

SEQ ID NO: 73017 - DNA, 23 bp, Artificial sequence
  SiRNA target sequence
cttaaatttgatgaagattacaa

SEQ ID NO: 73018 - DNA, 23 bp, Artificial sequence
  SiRNA target sequence
ttaaatttgatgaagattacaaa

SEQ ID NO: 73019 - DNA, 23 bp, Artificial sequence
  SiRNA target sequence
taaatttgatgaagattacaaag

SEQ ID NO: 73020 - DNA, 23 bp, Artificial sequence
  SiRNA target sequence
aaatttgatgaagattacaaagg

SEQ ID NO: 73021 - DNA, 23 bp, Artificial sequence
  SiRNA target sequence
aatttgatgaagattacaaaggt

SEQ ID NO: 73022 - DNA, 23 bp, Artificial sequence
  SiRNA target sequence
atttgatgaagattacaaaggta

SEQ ID NO: 73023 - DNA, 23 bp, Artificial sequence
  SiRNA target sequence
tttgatgaagattacaaaggtag

SEQ ID NO: 73024 - DNA, 23 bp, Artificial sequence
  SiRNA target sequence
ttgatgaagattacaaaggtagc

SEQ ID NO: 73025 - DNA, 23 bp, Artificial sequence
  SiRNA target sequence
tgatgaagattacaaaggtagca

SEQ ID NO: 73026 - DNA, 23 bp, Artificial sequence
  SiRNA target sequence
gatgaagattacaaaggtagcat

SEQ ID NO: 73027 - DNA, 23 bp, Artificial sequence
  SiRNA target sequence
atgaagattacaaaggtagcatt

SEQ ID NO: 73028 - DNA, 23 bp, Artificial sequence
  SiRNA target sequence
tgaagattacaaaggtagcattt

SEQ ID NO: 73029 - DNA, 23 bp, Artificial sequence
  SiRNA target sequence
gaagattacaaaggtagcatttt

SEQ ID NO: 73030 - DNA, 23 bp, Artificial sequence
  SiRNA target sequence
aagattacaaaggtagcatttta

SEQ ID NO: 73031 - DNA, 23 bp, Artificial sequence
  SiRNA target sequence
agattacaaaggtagcattttaa

SEQ ID NO: 73032 - DNA, 23 bp, Artificial sequence
  SiRNA target sequence
gattacaaaggtagcattttaat

SEQ ID NO: 73033 - DNA, 23 bp, Artificial sequence
  SiRNA target sequence
attacaaaggtagcattttaata

SEQ ID NO: 73034 - DNA, 23 bp, Artificial sequence
  SiRNA target sequence
ttacaaaggtagcattttaatag

SEQ ID NO: 73035 - DNA, 23 bp, Artificial sequence
  SiRNA target sequence
tacaaaggtagcattttaataga

SEQ ID NO: 73036 - DNA, 23 bp, Artificial sequence
  SiRNA target sequence
acaaaggtagcattttaatagat

SEQ ID NO: 73037 - DNA, 23 bp, Artificial sequence
  SiRNA target sequence
caaaggtagcattttaatagatg

SEQ ID NO: 73038 - DNA, 23 bp, Artificial sequence
  SiRNA target sequence
aaaggtagcattttaatagatga

SEQ ID NO: 73039 - DNA, 23 bp, Artificial sequence
  SiRNA target sequence
aaggtagcattttaatagatgac

SEQ ID NO: 73040 - DNA, 23 bp, Artificial sequence
  SiRNA target sequence
aggtagcattttaatagatgaca

SEQ ID NO: 73041 - DNA, 23 bp, Artificial sequence
  SiRNA target sequence
ggtagcattttaatagatgacat

SEQ ID NO: 73042 - DNA, 23 bp, Artificial sequence
  SiRNA target sequence
gtagcattttaatagatgacatt

SEQ ID NO: 73043 - DNA, 23 bp, Artificial sequence
  SiRNA target sequence
tagcattttaatagatgacattg

SEQ ID NO: 73044 - DNA, 23 bp, Artificial sequence
  SiRNA target sequence
agcattttaatagatgacattga

SEQ ID NO: 73045 - DNA, 23 bp, Artificial sequence
  SiRNA target sequence
gcattttaatagatgacattgat

SEQ ID NO: 73046 - DNA, 23 bp, Artificial sequence
  SiRNA target sequence
cattttaatagatgacattgata

SEQ ID NO: 73047 - DNA, 23 bp, Artificial sequence
  SiRNA target sequence
attttaatagatgacattgatat

SEQ ID NO: 73048 - DNA, 23 bp, Artificial sequence
  SiRNA target sequence
ttttaatagatgacattgatatt

SEQ ID NO: 73049 - DNA, 23 bp, Artificial sequence
  SiRNA target sequence
tttaatagatgacattgatatta

SEQ ID NO: 73050 - DNA, 23 bp, Artificial sequence
  SiRNA target sequence
ttaatagatgacattgatattaa

SEQ ID NO: 73051 - DNA, 23 bp, Artificial sequence
  SiRNA target sequence
taatagatgacattgatattaaa

SEQ ID NO: 73052 - DNA, 23 bp, Artificial sequence
  SiRNA target sequence
aatagatgacattgatattaaaa

SEQ ID NO: 73053 - DNA, 23 bp, Artificial sequence
  SiRNA target sequence
atagatgacattgatattaaaaa

SEQ ID NO: 73054 - DNA, 23 bp, Artificial sequence
  SiRNA target sequence
tagatgacattgatattaaaaaa

SEQ ID NO: 73055 - DNA, 23 bp, Artificial sequence
  SiRNA target sequence
agatgacattgatattaaaaaaa

SEQ ID NO: 73056 - DNA, 23 bp, Artificial sequence
  SiRNA target sequence
gatgacattgatattaaaaaaat

SEQ ID NO: 73057 - DNA, 23 bp, Artificial sequence
  SiRNA target sequence
atgacattgatattaaaaaaatc

SEQ ID NO: 73058 - DNA, 23 bp, Artificial sequence
  SiRNA target sequence
tgacattgatattaaaaaaatca

SEQ ID NO: 73059 - DNA, 23 bp, Artificial sequence
  SiRNA target sequence
gacattgatattaaaaaaatcaa

SEQ ID NO: 73060 - DNA, 23 bp, Artificial sequence
  SiRNA target sequence
acattgatattaaaaaaatcaaa

SEQ ID NO: 73061 - DNA, 23 bp, Artificial sequence
  SiRNA target sequence
cattgatattaaaaaaatcaaag

SEQ ID NO: 73062 - DNA, 23 bp, Artificial sequence
  SiRNA target sequence
attgatattaaaaaaatcaaaga

SEQ ID NO: 73063 - DNA, 23 bp, Artificial sequence
  SiRNA target sequence
ttgatattaaaaaaatcaaagac

SEQ ID NO: 73064 - DNA, 23 bp, Artificial sequence
  SiRNA target sequence
tgatattaaaaaaatcaaagacg

SEQ ID NO: 73065 - DNA, 23 bp, Artificial sequence
  SiRNA target sequence
gatattaaaaaaatcaaagacga

SEQ ID NO: 73066 - DNA, 23 bp, Artificial sequence
  SiRNA target sequence
atattaaaaaaatcaaagacgaa

SEQ ID NO: 73067 - DNA, 23 bp, Artificial sequence
  SiRNA target sequence
tattaaaaaaatcaaagacgaat

SEQ ID NO: 73068 - DNA, 23 bp, Artificial sequence
  SiRNA target sequence
attaaaaaaatcaaagacgaatt

SEQ ID NO: 73069 - DNA, 23 bp, Artificial sequence
  SiRNA target sequence
ttaaaaaaatcaaagacgaattt

SEQ ID NO: 73070 - DNA, 23 bp, Artificial sequence
  SiRNA target sequence
taaaaaaatcaaagacgaatttt

SEQ ID NO: 73071 - DNA, 23 bp, Artificial sequence
  SiRNA target sequence
aaaaaaatcaaagacgaatttta

SEQ ID NO: 73072 - DNA, 23 bp, Artificial sequence
  SiRNA target sequence
aaaaaatcaaagacgaattttat

SEQ ID NO: 73073 - DNA, 23 bp, Artificial sequence
  SiRNA target sequence
aaaaatcaaagacgaattttata

SEQ ID NO: 73074 - DNA, 23 bp, Artificial sequence
  SiRNA target sequence
aaaatcaaagacgaattttatag

SEQ ID NO: 73075 - DNA, 23 bp, Artificial sequence
  SiRNA target sequence
aaatcaaagacgaattttatagg

SEQ ID NO: 73076 - DNA, 23 bp, Artificial sequence
  SiRNA target sequence
aatcaaagacgaattttatagga

SEQ ID NO: 73077 - DNA, 23 bp, Artificial sequence
  SiRNA target sequence
atcaaagacgaattttataggaa

SEQ ID NO: 73078 - DNA, 23 bp, Artificial sequence
  SiRNA target sequence
tcaaagacgaattttataggaat

SEQ ID NO: 73079 - DNA, 23 bp, Artificial sequence
  SiRNA target sequence
caaagacgaattttataggaatt

SEQ ID NO: 73080 - DNA, 23 bp, Artificial sequence
  SiRNA target sequence
aaagacgaattttataggaattt

SEQ ID NO: 73081 - DNA, 23 bp, Artificial sequence
  SiRNA target sequence
aagacgaattttataggaattta

SEQ ID NO: 73082 - DNA, 23 bp, Artificial sequence
  SiRNA target sequence
agacgaattttataggaatttat

SEQ ID NO: 73083 - DNA, 23 bp, Artificial sequence
  SiRNA target sequence
gacgaattttataggaatttatt

SEQ ID NO: 73084 - DNA, 23 bp, Artificial sequence
  SiRNA target sequence
acgaattttataggaatttatta

SEQ ID NO: 73085 - DNA, 23 bp, Artificial sequence
  SiRNA target sequence
cgaattttataggaatttattag

SEQ ID NO: 73086 - DNA, 23 bp, Artificial sequence
  SiRNA target sequence
gaattttataggaatttattagg

SEQ ID NO: 73087 - DNA, 23 bp, Artificial sequence
  SiRNA target sequence
aattttataggaatttattaggt

SEQ ID NO: 73088 - DNA, 23 bp, Artificial sequence
  SiRNA target sequence
attttataggaatttattaggtt

SEQ ID NO: 73089 - DNA, 23 bp, Artificial sequence
  SiRNA target sequence
ttttataggaatttattaggtta

SEQ ID NO: 73090 - DNA, 23 bp, Artificial sequence
  SiRNA target sequence
tttataggaatttattaggttac

SEQ ID NO: 73091 - DNA, 23 bp, Artificial sequence
  SiRNA target sequence
ttataggaatttattaggttaca

SEQ ID NO: 73092 - DNA, 23 bp, Artificial sequence
  SiRNA target sequence
tataggaatttattaggttacat

SEQ ID NO: 73093 - DNA, 23 bp, Artificial sequence
  SiRNA target sequence
ataggaatttattaggttacata

SEQ ID NO: 73094 - DNA, 23 bp, Artificial sequence
  SiRNA target sequence
taggaatttattaggttacatac

SEQ ID NO: 73095 - DNA, 23 bp, Artificial sequence
  SiRNA target sequence
aggaatttattaggttacatacc

SEQ ID NO: 73096 - DNA, 23 bp, Artificial sequence
  SiRNA target sequence
ggaatttattaggttacatacca

SEQ ID NO: 73097 - DNA, 23 bp, Artificial sequence
  SiRNA target sequence
gaatttattaggttacataccac

SEQ ID NO: 73098 - DNA, 23 bp, Artificial sequence
  SiRNA target sequence
aatttattaggttacataccaca

SEQ ID NO: 73099 - DNA, 23 bp, Artificial sequence
  SiRNA target sequence
atttattaggttacataccacag

SEQ ID NO: 73100 - DNA, 23 bp, Artificial sequence
  SiRNA target sequence
tttattaggttacataccacaga

SEQ ID NO: 73101 - DNA, 23 bp, Artificial sequence
  SiRNA target sequence
ttattaggttacataccacagaa

SEQ ID NO: 73102 - DNA, 23 bp, Artificial sequence
  SiRNA target sequence
tattaggttacataccacagaat

SEQ ID NO: 73103 - DNA, 23 bp, Artificial sequence
  SiRNA target sequence
attaggttacataccacagaata

SEQ ID NO: 73104 - DNA, 23 bp, Artificial sequence
  SiRNA target sequence
ttaggttacataccacagaatac

SEQ ID NO: 73105 - DNA, 23 bp, Artificial sequence
  SiRNA target sequence
taggttacataccacagaataca

SEQ ID NO: 73106 - DNA, 23 bp, Artificial sequence
  SiRNA target sequence
aggttacataccacagaatacat

SEQ ID NO: 73107 - DNA, 23 bp, Artificial sequence
  SiRNA target sequence
ggttacataccacagaatacatt

SEQ ID NO: 73108 - DNA, 23 bp, Artificial sequence
  SiRNA target sequence
gttacataccacagaatacattt

SEQ ID NO: 73109 - DNA, 23 bp, Artificial sequence
  SiRNA target sequence
ttacataccacagaatacatttt

SEQ ID NO: 73110 - DNA, 23 bp, Artificial sequence
  SiRNA target sequence
tacataccacagaatacattttt

SEQ ID NO: 73111 - DNA, 23 bp, Artificial sequence
  SiRNA target sequence
acataccacagaatacatttttg

SEQ ID NO: 73112 - DNA, 23 bp, Artificial sequence
  SiRNA target sequence
cataccacagaatacatttttgt

SEQ ID NO: 73113 - DNA, 23 bp, Artificial sequence
  SiRNA target sequence
ataccacagaatacatttttgtt

SEQ ID NO: 73114 - DNA, 23 bp, Artificial sequence
  SiRNA target sequence
taccacagaatacatttttgttt

SEQ ID NO: 73115 - DNA, 23 bp, Artificial sequence
  SiRNA target sequence
accacagaatacatttttgttta

SEQ ID NO: 73116 - DNA, 23 bp, Artificial sequence
  SiRNA target sequence
ccacagaatacatttttgtttaa

SEQ ID NO: 73117 - DNA, 23 bp, Artificial sequence
  SiRNA target sequence
cacagaatacatttttgtttaat

SEQ ID NO: 73118 - DNA, 23 bp, Artificial sequence
  SiRNA target sequence
acagaatacatttttgtttaatg

SEQ ID NO: 73119 - DNA, 23 bp, Artificial sequence
  SiRNA target sequence
cagaatacatttttgtttaatga

SEQ ID NO: 73120 - DNA, 23 bp, Artificial sequence
  SiRNA target sequence
agaatacatttttgtttaatgaa

SEQ ID NO: 73121 - DNA, 23 bp, Artificial sequence
  SiRNA target sequence
gaatacatttttgtttaatgaat

SEQ ID NO: 73122 - DNA, 23 bp, Artificial sequence
  SiRNA target sequence
aatacatttttgtttaatgaatc

SEQ ID NO: 73123 - DNA, 23 bp, Artificial sequence
  SiRNA target sequence
atacatttttgtttaatgaatct

SEQ ID NO: 73124 - DNA, 23 bp, Artificial sequence
  SiRNA target sequence
tacatttttgtttaatgaatctg

SEQ ID NO: 73125 - DNA, 23 bp, Artificial sequence
  SiRNA target sequence
acatttttgtttaatgaatctgt

SEQ ID NO: 73126 - DNA, 23 bp, Artificial sequence
  SiRNA target sequence
catttttgtttaatgaatctgta

SEQ ID NO: 73127 - DNA, 23 bp, Artificial sequence
  SiRNA target sequence
atttttgtttaatgaatctgtaa

SEQ ID NO: 73128 - DNA, 23 bp, Artificial sequence
  SiRNA target sequence
tttttgtttaatgaatctgtaaa

SEQ ID NO: 73129 - DNA, 23 bp, Artificial sequence
  SiRNA target sequence
ttttgtttaatgaatctgtaaaa

SEQ ID NO: 73130 - DNA, 23 bp, Artificial sequence
  SiRNA target sequence
tttgtttaatgaatctgtaaaat

SEQ ID NO: 73131 - DNA, 23 bp, Artificial sequence
  SiRNA target sequence
ttgtttaatgaatctgtaaaata

SEQ ID NO: 73132 - DNA, 23 bp, Artificial sequence
  SiRNA target sequence
tgtttaatgaatctgtaaaatat

SEQ ID NO: 73133 - DNA, 23 bp, Artificial sequence
  SiRNA target sequence
gtttaatgaatctgtaaaatata

SEQ ID NO: 73134 - DNA, 23 bp, Artificial sequence
  SiRNA target sequence
tttaatgaatctgtaaaatataa

SEQ ID NO: 73135 - DNA, 23 bp, Artificial sequence
  SiRNA target sequence
ttaatgaatctgtaaaatataat

SEQ ID NO: 73136 - DNA, 23 bp, Artificial sequence
  SiRNA target sequence
taatgaatctgtaaaatataata

SEQ ID NO: 73137 - DNA, 23 bp, Artificial sequence
  SiRNA target sequence
aatgaatctgtaaaatataatat

SEQ ID NO: 73138 - DNA, 23 bp, Artificial sequence
  SiRNA target sequence
atgaatctgtaaaatataatatt

SEQ ID NO: 73139 - DNA, 23 bp, Artificial sequence
  SiRNA target sequence
tgaatctgtaaaatataatatta

SEQ ID NO: 73140 - DNA, 23 bp, Artificial sequence
  SiRNA target sequence
gaatctgtaaaatataatattaa

SEQ ID NO: 73141 - DNA, 23 bp, Artificial sequence
  SiRNA target sequence
aatctgtaaaatataatattaaa

SEQ ID NO: 73142 - DNA, 23 bp, Artificial sequence
  SiRNA target sequence
atctgtaaaatataatattaaat

SEQ ID NO: 73143 - DNA, 23 bp, Artificial sequence
  SiRNA target sequence
tctgtaaaatataatattaaata

SEQ ID NO: 73144 - DNA, 23 bp, Artificial sequence
  SiRNA target sequence
ctgtaaaatataatattaaatac

SEQ ID NO: 73145 - DNA, 23 bp, Artificial sequence
  SiRNA target sequence
tgtaaaatataatattaaatacg

SEQ ID NO: 73146 - DNA, 23 bp, Artificial sequence
  SiRNA target sequence
gtaaaatataatattaaatacgg

SEQ ID NO: 73147 - DNA, 23 bp, Artificial sequence
  SiRNA target sequence
taaaatataatattaaatacgga

SEQ ID NO: 73148 - DNA, 23 bp, Artificial sequence
  SiRNA target sequence
aaaatataatattaaatacggat

SEQ ID NO: 73149 - DNA, 23 bp, Artificial sequence
  SiRNA target sequence
aaatataatattaaatacggatc

SEQ ID NO: 73150 - DNA, 23 bp, Artificial sequence
  SiRNA target sequence
aatataatattaaatacggatct

SEQ ID NO: 73151 - DNA, 23 bp, Artificial sequence
  SiRNA target sequence
atataatattaaatacggatctt

SEQ ID NO: 73152 - DNA, 23 bp, Artificial sequence
  SiRNA target sequence
tataatattaaatacggatcttt

SEQ ID NO: 73153 - DNA, 23 bp, Artificial sequence
  SiRNA target sequence
ataatattaaatacggatctttt

SEQ ID NO: 73154 - DNA, 23 bp, Artificial sequence
  SiRNA target sequence
taatattaaatacggatcttttg

SEQ ID NO: 73155 - DNA, 23 bp, Artificial sequence
  SiRNA target sequence
aatattaaatacggatcttttgg

SEQ ID NO: 73156 - DNA, 23 bp, Artificial sequence
  SiRNA target sequence
atattaaatacggatcttttggt

SEQ ID NO: 73157 - DNA, 23 bp, Artificial sequence
  SiRNA target sequence
tattaaatacggatcttttggta

SEQ ID NO: 73158 - DNA, 23 bp, Artificial sequence
  SiRNA target sequence
attaaatacggatcttttggtat

SEQ ID NO: 73159 - DNA, 23 bp, Artificial sequence
  SiRNA target sequence
ttaaatacggatcttttggtatt

SEQ ID NO: 73160 - DNA, 23 bp, Artificial sequence
  SiRNA target sequence
taaatacggatcttttggtattt

SEQ ID NO: 73161 - DNA, 23 bp, Artificial sequence
  SiRNA target sequence
aaatacggatcttttggtatttc

SEQ ID NO: 73162 - DNA, 23 bp, Artificial sequence
  SiRNA target sequence
aatacggatcttttggtatttca

SEQ ID NO: 73163 - DNA, 23 bp, Artificial sequence
  SiRNA target sequence
atacggatcttttggtatttcag

SEQ ID NO: 73164 - DNA, 23 bp, Artificial sequence
  SiRNA target sequence
tacggatcttttggtatttcaga

SEQ ID NO: 73165 - DNA, 23 bp, Artificial sequence
  SiRNA target sequence
acggatcttttggtatttcagac

SEQ ID NO: 73166 - DNA, 23 bp, Artificial sequence
  SiRNA target sequence
cggatcttttggtatttcagacg

SEQ ID NO: 73167 - DNA, 23 bp, Artificial sequence
  SiRNA target sequence
ggatcttttggtatttcagacga

SEQ ID NO: 73168 - DNA, 23 bp, Artificial sequence
  SiRNA target sequence
gatcttttggtatttcagacgag

SEQ ID NO: 73169 - DNA, 23 bp, Artificial sequence
  SiRNA target sequence
atcttttggtatttcagacgagg

SEQ ID NO: 73170 - DNA, 23 bp, Artificial sequence
  SiRNA target sequence
tcttttggtatttcagacgagga

SEQ ID NO: 73171 - DNA, 23 bp, Artificial sequence
  SiRNA target sequence
cttttggtatttcagacgaggat

SEQ ID NO: 73172 - DNA, 23 bp, Artificial sequence
  SiRNA target sequence
ttttggtatttcagacgaggata

SEQ ID NO: 73173 - DNA, 23 bp, Artificial sequence
  SiRNA target sequence
tttggtatttcagacgaggatat

SEQ ID NO: 73174 - DNA, 23 bp, Artificial sequence
  SiRNA target sequence
ttggtatttcagacgaggatatt

SEQ ID NO: 73175 - DNA, 23 bp, Artificial sequence
  SiRNA target sequence
tggtatttcagacgaggatattt

SEQ ID NO: 73176 - DNA, 23 bp, Artificial sequence
  SiRNA target sequence
ggtatttcagacgaggatatttt

SEQ ID NO: 73177 - DNA, 23 bp, Artificial sequence
  SiRNA target sequence
gtatttcagacgaggatattttt

SEQ ID NO: 73178 - DNA, 23 bp, Artificial sequence
  SiRNA target sequence
tatttcagacgaggatatttttg

SEQ ID NO: 73179 - DNA, 23 bp, Artificial sequence
  SiRNA target sequence
atttcagacgaggatatttttgc

SEQ ID NO: 73180 - DNA, 23 bp, Artificial sequence
  SiRNA target sequence
tttcagacgaggatatttttgca

SEQ ID NO: 73181 - DNA, 23 bp, Artificial sequence
  SiRNA target sequence
ttcagacgaggatatttttgcat

SEQ ID NO: 73182 - DNA, 23 bp, Artificial sequence
  SiRNA target sequence
tcagacgaggatatttttgcatt

SEQ ID NO: 73183 - DNA, 23 bp, Artificial sequence
  SiRNA target sequence
cagacgaggatatttttgcattg

SEQ ID NO: 73184 - DNA, 23 bp, Artificial sequence
  SiRNA target sequence
agacgaggatatttttgcattgt

SEQ ID NO: 73185 - DNA, 23 bp, Artificial sequence
  SiRNA target sequence
gacgaggatatttttgcattgtg

SEQ ID NO: 73186 - DNA, 23 bp, Artificial sequence
  SiRNA target sequence
acgaggatatttttgcattgtgt

SEQ ID NO: 73187 - DNA, 23 bp, Artificial sequence
  SiRNA target sequence
cgaggatatttttgcattgtgta

SEQ ID NO: 73188 - DNA, 23 bp, Artificial sequence
  SiRNA target sequence
gaggatatttttgcattgtgtaa

SEQ ID NO: 73189 - DNA, 23 bp, Artificial sequence
  SiRNA target sequence
aggatatttttgcattgtgtaaa

SEQ ID NO: 73190 - DNA, 23 bp, Artificial sequence
  SiRNA target sequence
ggatatttttgcattgtgtaaag

SEQ ID NO: 73191 - DNA, 23 bp, Artificial sequence
  SiRNA target sequence
gatatttttgcattgtgtaaaga

SEQ ID NO: 73192 - DNA, 23 bp, Artificial sequence
  SiRNA target sequence
atatttttgcattgtgtaaagag

SEQ ID NO: 73193 - DNA, 23 bp, Artificial sequence
  SiRNA target sequence
tatttttgcattgtgtaaagagt

SEQ ID NO: 73194 - DNA, 23 bp, Artificial sequence
  SiRNA target sequence
atttttgcattgtgtaaagagtt

SEQ ID NO: 73195 - DNA, 23 bp, Artificial sequence
  SiRNA target sequence
tttttgcattgtgtaaagagttt

SEQ ID NO: 73196 - DNA, 23 bp, Artificial sequence
  SiRNA target sequence
ttttgcattgtgtaaagagtttg

SEQ ID NO: 73197 - DNA, 23 bp, Artificial sequence
  SiRNA target sequence
tttgcattgtgtaaagagtttgg

SEQ ID NO: 73198 - DNA, 23 bp, Artificial sequence
  SiRNA target sequence
ttgcattgtgtaaagagtttgga

SEQ ID NO: 73199 - DNA, 23 bp, Artificial sequence
  SiRNA target sequence
tgcattgtgtaaagagtttggat

SEQ ID NO: 73200 - DNA, 23 bp, Artificial sequence
  SiRNA target sequence
gcattgtgtaaagagtttggatt

SEQ ID NO: 73201 - DNA, 23 bp, Artificial sequence
  SiRNA target sequence
cattgtgtaaagagtttggatta

SEQ ID NO: 73202 - DNA, 23 bp, Artificial sequence
  SiRNA target sequence
attgtgtaaagagtttggattat

SEQ ID NO: 73203 - DNA, 23 bp, Artificial sequence
  SiRNA target sequence
ttgtgtaaagagtttggattata

SEQ ID NO: 73204 - DNA, 23 bp, Artificial sequence
  SiRNA target sequence
tgtgtaaagagtttggattatat

SEQ ID NO: 73205 - DNA, 23 bp, Artificial sequence
  SiRNA target sequence
gtgtaaagagtttggattatatg

SEQ ID NO: 73206 - DNA, 23 bp, Artificial sequence
  SiRNA target sequence
tgtaaagagtttggattatatga

SEQ ID NO: 73207 - DNA, 23 bp, Artificial sequence
  SiRNA target sequence
gtaaagagtttggattatatgac

SEQ ID NO: 73208 - DNA, 23 bp, Artificial sequence
  SiRNA target sequence
taaagagtttggattatatgacg

SEQ ID NO: 73209 - DNA, 23 bp, Artificial sequence
  SiRNA target sequence
aaagagtttggattatatgacgt

SEQ ID NO: 73210 - DNA, 23 bp, Artificial sequence
  SiRNA target sequence
aagagtttggattatatgacgtt

SEQ ID NO: 73211 - DNA, 23 bp, Artificial sequence
  SiRNA target sequence
agagtttggattatatgacgttt

SEQ ID NO: 73212 - DNA, 23 bp, Artificial sequence
  SiRNA target sequence
gagtttggattatatgacgtttt

SEQ ID NO: 73213 - DNA, 23 bp, Artificial sequence
  SiRNA target sequence
agtttggattatatgacgttttc

SEQ ID NO: 73214 - DNA, 23 bp, Artificial sequence
  SiRNA target sequence
gtttggattatatgacgttttca

SEQ ID NO: 73215 - DNA, 23 bp, Artificial sequence
  SiRNA target sequence
tttggattatatgacgttttcat

SEQ ID NO: 73216 - DNA, 23 bp, Artificial sequence
  SiRNA target sequence
ttggattatatgacgttttcatg

SEQ ID NO: 73217 - DNA, 23 bp, Artificial sequence
  SiRNA target sequence
tggattatatgacgttttcatga

SEQ ID NO: 73218 - DNA, 23 bp, Artificial sequence
  SiRNA target sequence
ggattatatgacgttttcatgaa

SEQ ID NO: 73219 - DNA, 23 bp, Artificial sequence
  SiRNA target sequence
gattatatgacgttttcatgaac

SEQ ID NO: 73220 - DNA, 23 bp, Artificial sequence
  SiRNA target sequence
attatatgacgttttcatgaacc

SEQ ID NO: 73221 - DNA, 23 bp, Artificial sequence
  SiRNA target sequence
ttatatgacgttttcatgaacct

SEQ ID NO: 73222 - DNA, 23 bp, Artificial sequence
  SiRNA target sequence
tatatgacgttttcatgaacctc

SEQ ID NO: 73223 - DNA, 23 bp, Artificial sequence
  SiRNA target sequence
atatgacgttttcatgaacctcg

SEQ ID NO: 73224 - DNA, 23 bp, Artificial sequence
  SiRNA target sequence
tatgacgttttcatgaacctcga

SEQ ID NO: 73225 - DNA, 23 bp, Artificial sequence
  SiRNA target sequence
atgacgttttcatgaacctcgaa

SEQ ID NO: 73226 - DNA, 23 bp, Artificial sequence
  SiRNA target sequence
tgacgttttcatgaacctcgaaa

SEQ ID NO: 73227 - DNA, 23 bp, Artificial sequence
  SiRNA target sequence
gacgttttcatgaacctcgaaaa

SEQ ID NO: 73228 - DNA, 23 bp, Artificial sequence
  SiRNA target sequence
acgttttcatgaacctcgaaaat

SEQ ID NO: 73229 - DNA, 23 bp, Artificial sequence
  SiRNA target sequence
cgttttcatgaacctcgaaaatg

SEQ ID NO: 73230 - DNA, 23 bp, Artificial sequence
  SiRNA target sequence
gttttcatgaacctcgaaaatgg

SEQ ID NO: 73231 - DNA, 23 bp, Artificial sequence
  SiRNA target sequence
ttttcatgaacctcgaaaatggt

SEQ ID NO: 73232 - DNA, 23 bp, Artificial sequence
  SiRNA target sequence
tttcatgaacctcgaaaatggtt

SEQ ID NO: 73233 - DNA, 23 bp, Artificial sequence
  SiRNA target sequence
ttcatgaacctcgaaaatggttt

SEQ ID NO: 73234 - DNA, 23 bp, Artificial sequence
  SiRNA target sequence
tcatgaacctcgaaaatggtttt

SEQ ID NO: 73235 - DNA, 23 bp, Artificial sequence
  SiRNA target sequence
catgaacctcgaaaatggttttg

SEQ ID NO: 73236 - DNA, 23 bp, Artificial sequence
  SiRNA target sequence
atgaacctcgaaaatggttttga

SEQ ID NO: 73237 - DNA, 23 bp, Artificial sequence
  SiRNA target sequence
tgaacctcgaaaatggttttgat

SEQ ID NO: 73238 - DNA, 23 bp, Artificial sequence
  SiRNA target sequence
gaacctcgaaaatggttttgata

SEQ ID NO: 73239 - DNA, 23 bp, Artificial sequence
  SiRNA target sequence
aacctcgaaaatggttttgatac

SEQ ID NO: 73240 - DNA, 23 bp, Artificial sequence
  SiRNA target sequence
acctcgaaaatggttttgatacg

SEQ ID NO: 73241 - DNA, 23 bp, Artificial sequence
  SiRNA target sequence
cctcgaaaatggttttgatacga

SEQ ID NO: 73242 - DNA, 23 bp, Artificial sequence
  SiRNA target sequence
ctcgaaaatggttttgatacgaa

SEQ ID NO: 73243 - DNA, 23 bp, Artificial sequence
  SiRNA target sequence
tcgaaaatggttttgatacgaat

SEQ ID NO: 73244 - DNA, 23 bp, Artificial sequence
  SiRNA target sequence
cgaaaatggttttgatacgaatg

SEQ ID NO: 73245 - DNA, 23 bp, Artificial sequence
  SiRNA target sequence
gaaaatggttttgatacgaatgt

SEQ ID NO: 73246 - DNA, 23 bp, Artificial sequence
  SiRNA target sequence
aaaatggttttgatacgaatgta

SEQ ID NO: 73247 - DNA, 23 bp, Artificial sequence
  SiRNA target sequence
aaatggttttgatacgaatgtag

SEQ ID NO: 73248 - DNA, 23 bp, Artificial sequence
  SiRNA target sequence
aatggttttgatacgaatgtagg

SEQ ID NO: 73249 - DNA, 23 bp, Artificial sequence
  SiRNA target sequence
atggttttgatacgaatgtagga

SEQ ID NO: 73250 - DNA, 23 bp, Artificial sequence
  SiRNA target sequence
tggttttgatacgaatgtaggag

SEQ ID NO: 73251 - DNA, 23 bp, Artificial sequence
  SiRNA target sequence
ggttttgatacgaatgtaggaga

SEQ ID NO: 73252 - DNA, 23 bp, Artificial sequence
  SiRNA target sequence
gttttgatacgaatgtaggagaa

SEQ ID NO: 73253 - DNA, 23 bp, Artificial sequence
  SiRNA target sequence
ttttgatacgaatgtaggagaaa

SEQ ID NO: 73254 - DNA, 23 bp, Artificial sequence
  SiRNA target sequence
tttgatacgaatgtaggagaaag

SEQ ID NO: 73255 - DNA, 23 bp, Artificial sequence
  SiRNA target sequence
ttgatacgaatgtaggagaaaga

SEQ ID NO: 73256 - DNA, 23 bp, Artificial sequence
  SiRNA target sequence
tgatacgaatgtaggagaaagag

SEQ ID NO: 73257 - DNA, 23 bp, Artificial sequence
  SiRNA target sequence
gatacgaatgtaggagaaagagg

SEQ ID NO: 73258 - DNA, 23 bp, Artificial sequence
  SiRNA target sequence
atacgaatgtaggagaaagagga

SEQ ID NO: 73259 - DNA, 23 bp, Artificial sequence
  SiRNA target sequence
tacgaatgtaggagaaagaggaa

SEQ ID NO: 73260 - DNA, 23 bp, Artificial sequence
  SiRNA target sequence
acgaatgtaggagaaagaggaag

SEQ ID NO: 73261 - DNA, 23 bp, Artificial sequence
  SiRNA target sequence
cgaatgtaggagaaagaggaagg

SEQ ID NO: 73262 - DNA, 23 bp, Artificial sequence
  SiRNA target sequence
gaatgtaggagaaagaggaaggt

SEQ ID NO: 73263 - DNA, 23 bp, Artificial sequence
  SiRNA target sequence
aatgtaggagaaagaggaaggtt

SEQ ID NO: 73264 - DNA, 23 bp, Artificial sequence
  SiRNA target sequence
atgtaggagaaagaggaaggtta

SEQ ID NO: 73265 - DNA, 23 bp, Artificial sequence
  SiRNA target sequence
tgtaggagaaagaggaaggttat

SEQ ID NO: 73266 - DNA, 23 bp, Artificial sequence
  SiRNA target sequence
gtaggagaaagaggaaggttatt

SEQ ID NO: 73267 - DNA, 23 bp, Artificial sequence
  SiRNA target sequence
taggagaaagaggaaggttatta

SEQ ID NO: 73268 - DNA, 23 bp, Artificial sequence
  SiRNA target sequence
aggagaaagaggaaggttattaa

SEQ ID NO: 73269 - DNA, 23 bp, Artificial sequence
  SiRNA target sequence
ggagaaagaggaaggttattaag

SEQ ID NO: 73270 - DNA, 23 bp, Artificial sequence
  SiRNA target sequence
gagaaagaggaaggttattaagt

SEQ ID NO: 73271 - DNA, 23 bp, Artificial sequence
  SiRNA target sequence
agaaagaggaaggttattaagtg

SEQ ID NO: 73272 - DNA, 23 bp, Artificial sequence
  SiRNA target sequence
gaaagaggaaggttattaagtgg

SEQ ID NO: 73273 - DNA, 23 bp, Artificial sequence
  SiRNA target sequence
aaagaggaaggttattaagtggt

SEQ ID NO: 73274 - DNA, 23 bp, Artificial sequence
  SiRNA target sequence
aagaggaaggttattaagtggtg

SEQ ID NO: 73275 - DNA, 23 bp, Artificial sequence
  SiRNA target sequence
agaggaaggttattaagtggtgg

SEQ ID NO: 73276 - DNA, 23 bp, Artificial sequence
  SiRNA target sequence
gaggaaggttattaagtggtgga

SEQ ID NO: 73277 - DNA, 23 bp, Artificial sequence
  SiRNA target sequence
aggaaggttattaagtggtggag

SEQ ID NO: 73278 - DNA, 23 bp, Artificial sequence
  SiRNA target sequence
ggaaggttattaagtggtggaga

SEQ ID NO: 73279 - DNA, 23 bp, Artificial sequence
  SiRNA target sequence
gaaggttattaagtggtggagaa

SEQ ID NO: 73280 - DNA, 23 bp, Artificial sequence
  SiRNA target sequence
aaggttattaagtggtggagaaa

SEQ ID NO: 73281 - DNA, 23 bp, Artificial sequence
  SiRNA target sequence
aggttattaagtggtggagaaaa

SEQ ID NO: 73282 - DNA, 23 bp, Artificial sequence
  SiRNA target sequence
ggttattaagtggtggagaaaag

SEQ ID NO: 73283 - DNA, 23 bp, Artificial sequence
  SiRNA target sequence
gttattaagtggtggagaaaagc

SEQ ID NO: 73284 - DNA, 23 bp, Artificial sequence
  SiRNA target sequence
ttattaagtggtggagaaaagca

SEQ ID NO: 73285 - DNA, 23 bp, Artificial sequence
  SiRNA target sequence
tattaagtggtggagaaaagcaa

SEQ ID NO: 73286 - DNA, 23 bp, Artificial sequence
  SiRNA target sequence
attaagtggtggagaaaagcaaa

SEQ ID NO: 73287 - DNA, 23 bp, Artificial sequence
  SiRNA target sequence
ttaagtggtggagaaaagcaaaa

SEQ ID NO: 73288 - DNA, 23 bp, Artificial sequence
  SiRNA target sequence
taagtggtggagaaaagcaaaag

SEQ ID NO: 73289 - DNA, 23 bp, Artificial sequence
  SiRNA target sequence
aagtggtggagaaaagcaaaaga

SEQ ID NO: 73290 - DNA, 23 bp, Artificial sequence
  SiRNA target sequence
agtggtggagaaaagcaaaagat

SEQ ID NO: 73291 - DNA, 23 bp, Artificial sequence
  SiRNA target sequence
gtggtggagaaaagcaaaagatt

SEQ ID NO: 73292 - DNA, 23 bp, Artificial sequence
  SiRNA target sequence
tggtggagaaaagcaaaagattt

SEQ ID NO: 73293 - DNA, 23 bp, Artificial sequence
  SiRNA target sequence
ggtggagaaaagcaaaagatttt

SEQ ID NO: 73294 - DNA, 23 bp, Artificial sequence
  SiRNA target sequence
gtggagaaaagcaaaagatttta

SEQ ID NO: 73295 - DNA, 23 bp, Artificial sequence
  SiRNA target sequence
tggagaaaagcaaaagattttat

SEQ ID NO: 73296 - DNA, 23 bp, Artificial sequence
  SiRNA target sequence
ggagaaaagcaaaagattttatt

SEQ ID NO: 73297 - DNA, 23 bp, Artificial sequence
  SiRNA target sequence
gagaaaagcaaaagattttatta

SEQ ID NO: 73298 - DNA, 23 bp, Artificial sequence
  SiRNA target sequence
agaaaagcaaaagattttattaa

SEQ ID NO: 73299 - DNA, 23 bp, Artificial sequence
  SiRNA target sequence
gaaaagcaaaagattttattaat

SEQ ID NO: 73300 - DNA, 23 bp, Artificial sequence
  SiRNA target sequence
aaaagcaaaagattttattaatg

SEQ ID NO: 73301 - DNA, 23 bp, Artificial sequence
  SiRNA target sequence
aaagcaaaagattttattaatgc

SEQ ID NO: 73302 - DNA, 23 bp, Artificial sequence
  SiRNA target sequence
aagcaaaagattttattaatgcg

SEQ ID NO: 73303 - DNA, 23 bp, Artificial sequence
  SiRNA target sequence
agcaaaagattttattaatgcgt

SEQ ID NO: 73304 - DNA, 23 bp, Artificial sequence
  SiRNA target sequence
gcaaaagattttattaatgcgta

SEQ ID NO: 73305 - DNA, 23 bp, Artificial sequence
  SiRNA target sequence
caaaagattttattaatgcgtac

SEQ ID NO: 73306 - DNA, 23 bp, Artificial sequence
  SiRNA target sequence
aaaagattttattaatgcgtact

SEQ ID NO: 73307 - DNA, 23 bp, Artificial sequence
  SiRNA target sequence
aaagattttattaatgcgtacta

SEQ ID NO: 73308 - DNA, 23 bp, Artificial sequence
  SiRNA target sequence
aagattttattaatgcgtactat

SEQ ID NO: 73309 - DNA, 23 bp, Artificial sequence
  SiRNA target sequence
agattttattaatgcgtactatg

SEQ ID NO: 73310 - DNA, 23 bp, Artificial sequence
  SiRNA target sequence
gattttattaatgcgtactatgt

SEQ ID NO: 73311 - DNA, 23 bp, Artificial sequence
  SiRNA target sequence
attttattaatgcgtactatgtt

SEQ ID NO: 73312 - DNA, 23 bp, Artificial sequence
  SiRNA target sequence
ttttattaatgcgtactatgtta

SEQ ID NO: 73313 - DNA, 23 bp, Artificial sequence
  SiRNA target sequence
tttattaatgcgtactatgttaa

SEQ ID NO: 73314 - DNA, 23 bp, Artificial sequence
  SiRNA target sequence
ttattaatgcgtactatgttaag

SEQ ID NO: 73315 - DNA, 23 bp, Artificial sequence
  SiRNA target sequence
tattaatgcgtactatgttaaga

SEQ ID NO: 73316 - DNA, 23 bp, Artificial sequence
  SiRNA target sequence
attaatgcgtactatgttaagaa

SEQ ID NO: 73317 - DNA, 23 bp, Artificial sequence
  SiRNA target sequence
ttaatgcgtactatgttaagaaa

SEQ ID NO: 73318 - DNA, 23 bp, Artificial sequence
  SiRNA target sequence
taatgcgtactatgttaagaaac

SEQ ID NO: 73319 - DNA, 23 bp, Artificial sequence
  SiRNA target sequence
aatgcgtactatgttaagaaaca

SEQ ID NO: 73320 - DNA, 23 bp, Artificial sequence
  SiRNA target sequence
atgcgtactatgttaagaaacaa

SEQ ID NO: 73321 - DNA, 23 bp, Artificial sequence
  SiRNA target sequence
tgcgtactatgttaagaaacaag

SEQ ID NO: 73322 - DNA, 23 bp, Artificial sequence
  SiRNA target sequence
gcgtactatgttaagaaacaagg

SEQ ID NO: 73323 - DNA, 23 bp, Artificial sequence
  SiRNA target sequence
cgtactatgttaagaaacaagga

SEQ ID NO: 73324 - DNA, 23 bp, Artificial sequence
  SiRNA target sequence
gtactatgttaagaaacaaggag

SEQ ID NO: 73325 - DNA, 23 bp, Artificial sequence
  SiRNA target sequence
tactatgttaagaaacaaggaga

SEQ ID NO: 73326 - DNA, 23 bp, Artificial sequence
  SiRNA target sequence
actatgttaagaaacaaggagat

SEQ ID NO: 73327 - DNA, 23 bp, Artificial sequence
  SiRNA target sequence
ctatgttaagaaacaaggagata

SEQ ID NO: 73328 - DNA, 23 bp, Artificial sequence
  SiRNA target sequence
tatgttaagaaacaaggagataa

SEQ ID NO: 73329 - DNA, 23 bp, Artificial sequence
  SiRNA target sequence
atgttaagaaacaaggagataat

SEQ ID NO: 73330 - DNA, 23 bp, Artificial sequence
  SiRNA target sequence
tgttaagaaacaaggagataatg

SEQ ID NO: 73331 - DNA, 23 bp, Artificial sequence
  SiRNA target sequence
gttaagaaacaaggagataatgg

SEQ ID NO: 73332 - DNA, 23 bp, Artificial sequence
  SiRNA target sequence
ttaagaaacaaggagataatggc

SEQ ID NO: 73333 - DNA, 23 bp, Artificial sequence
  SiRNA target sequence
taagaaacaaggagataatggca

SEQ ID NO: 73334 - DNA, 23 bp, Artificial sequence
  SiRNA target sequence
aagaaacaaggagataatggcat

SEQ ID NO: 73335 - DNA, 23 bp, Artificial sequence
  SiRNA target sequence
agaaacaaggagataatggcatt

SEQ ID NO: 73336 - DNA, 23 bp, Artificial sequence
  SiRNA target sequence
gaaacaaggagataatggcatta

SEQ ID NO: 73337 - DNA, 23 bp, Artificial sequence
  SiRNA target sequence
aaacaaggagataatggcattag

SEQ ID NO: 73338 - DNA, 23 bp, Artificial sequence
  SiRNA target sequence
aacaaggagataatggcattaga

SEQ ID NO: 73339 - DNA, 23 bp, Artificial sequence
  SiRNA target sequence
acaaggagataatggcattagat

SEQ ID NO: 73340 - DNA, 23 bp, Artificial sequence
  SiRNA target sequence
caaggagataatggcattagatg

SEQ ID NO: 73341 - DNA, 23 bp, Artificial sequence
  SiRNA target sequence
aaggagataatggcattagatga

SEQ ID NO: 73342 - DNA, 23 bp, Artificial sequence
  SiRNA target sequence
aggagataatggcattagatgaa

SEQ ID NO: 73343 - DNA, 23 bp, Artificial sequence
  SiRNA target sequence
ggagataatggcattagatgaac

SEQ ID NO: 73344 - DNA, 23 bp, Artificial sequence
  SiRNA target sequence
gagataatggcattagatgaacc

SEQ ID NO: 73345 - DNA, 23 bp, Artificial sequence
  SiRNA target sequence
agataatggcattagatgaaccc

SEQ ID NO: 73346 - DNA, 23 bp, Artificial sequence
  SiRNA target sequence
gataatggcattagatgaaccca

SEQ ID NO: 73347 - DNA, 23 bp, Artificial sequence
  SiRNA target sequence
ataatggcattagatgaacccac

SEQ ID NO: 73348 - DNA, 23 bp, Artificial sequence
  SiRNA target sequence
taatggcattagatgaacccact

SEQ ID NO: 73349 - DNA, 23 bp, Artificial sequence
  SiRNA target sequence
aatggcattagatgaacccactg

SEQ ID NO: 73350 - DNA, 23 bp, Artificial sequence
  SiRNA target sequence
atggcattagatgaacccactgc

SEQ ID NO: 73351 - DNA, 23 bp, Artificial sequence
  SiRNA target sequence
tggcattagatgaacccactgca

SEQ ID NO: 73352 - DNA, 23 bp, Artificial sequence
  SiRNA target sequence
ggcattagatgaacccactgcag

SEQ ID NO: 73353 - DNA, 23 bp, Artificial sequence
  SiRNA target sequence
gcattagatgaacccactgcagc

SEQ ID NO: 73354 - DNA, 23 bp, Artificial sequence
  SiRNA target sequence
cattagatgaacccactgcagca

SEQ ID NO: 73355 - DNA, 23 bp, Artificial sequence
  SiRNA target sequence
attagatgaacccactgcagcac

SEQ ID NO: 73356 - DNA, 23 bp, Artificial sequence
  SiRNA target sequence
ttagatgaacccactgcagcact

SEQ ID NO: 73357 - DNA, 23 bp, Artificial sequence
  SiRNA target sequence
tagatgaacccactgcagcactt

SEQ ID NO: 73358 - DNA, 23 bp, Artificial sequence
  SiRNA target sequence
agatgaacccactgcagcacttg

SEQ ID NO: 73359 - DNA, 23 bp, Artificial sequence
  SiRNA target sequence
gatgaacccactgcagcacttga

SEQ ID NO: 73360 - DNA, 23 bp, Artificial sequence
  SiRNA target sequence
atgaacccactgcagcacttgat

SEQ ID NO: 73361 - DNA, 23 bp, Artificial sequence
  SiRNA target sequence
tgaacccactgcagcacttgata

SEQ ID NO: 73362 - DNA, 23 bp, Artificial sequence
  SiRNA target sequence
gaacccactgcagcacttgataa

SEQ ID NO: 73363 - DNA, 23 bp, Artificial sequence
  SiRNA target sequence
aacccactgcagcacttgataag

SEQ ID NO: 73364 - DNA, 23 bp, Artificial sequence
  SiRNA target sequence
acccactgcagcacttgataagg

SEQ ID NO: 73365 - DNA, 23 bp, Artificial sequence
  SiRNA target sequence
cccactgcagcacttgataagga

SEQ ID NO: 73366 - DNA, 23 bp, Artificial sequence
  SiRNA target sequence
ccactgcagcacttgataaggag

SEQ ID NO: 73367 - DNA, 23 bp, Artificial sequence
  SiRNA target sequence
cactgcagcacttgataaggagt

SEQ ID NO: 73368 - DNA, 23 bp, Artificial sequence
  SiRNA target sequence
actgcagcacttgataaggagtc

SEQ ID NO: 73369 - DNA, 23 bp, Artificial sequence
  SiRNA target sequence
ctgcagcacttgataaggagtct

SEQ ID NO: 73370 - DNA, 23 bp, Artificial sequence
  SiRNA target sequence
tgcagcacttgataaggagtctg

SEQ ID NO: 73371 - DNA, 23 bp, Artificial sequence
  SiRNA target sequence
gcagcacttgataaggagtctga

SEQ ID NO: 73372 - DNA, 23 bp, Artificial sequence
  SiRNA target sequence
cagcacttgataaggagtctgaa

SEQ ID NO: 73373 - DNA, 23 bp, Artificial sequence
  SiRNA target sequence
agcacttgataaggagtctgaaa

SEQ ID NO: 73374 - DNA, 23 bp, Artificial sequence
  SiRNA target sequence
gcacttgataaggagtctgaaaa

SEQ ID NO: 73375 - DNA, 23 bp, Artificial sequence
  SiRNA target sequence
cacttgataaggagtctgaaaaa

SEQ ID NO: 73376 - DNA, 23 bp, Artificial sequence
  SiRNA target sequence
acttgataaggagtctgaaaaaa

SEQ ID NO: 73377 - DNA, 23 bp, Artificial sequence
  SiRNA target sequence
cttgataaggagtctgaaaaaaa

SEQ ID NO: 73378 - DNA, 23 bp, Artificial sequence
  SiRNA target sequence
ttgataaggagtctgaaaaaaag

SEQ ID NO: 73379 - DNA, 23 bp, Artificial sequence
  SiRNA target sequence
tgataaggagtctgaaaaaaaga

SEQ ID NO: 73380 - DNA, 23 bp, Artificial sequence
  SiRNA target sequence
gataaggagtctgaaaaaaagat

SEQ ID NO: 73381 - DNA, 23 bp, Artificial sequence
  SiRNA target sequence
ataaggagtctgaaaaaaagatt

SEQ ID NO: 73382 - DNA, 23 bp, Artificial sequence
  SiRNA target sequence
taaggagtctgaaaaaaagattt

SEQ ID NO: 73383 - DNA, 23 bp, Artificial sequence
  SiRNA target sequence
aaggagtctgaaaaaaagatttt

SEQ ID NO: 73384 - DNA, 23 bp, Artificial sequence
  SiRNA target sequence
aggagtctgaaaaaaagatttta

SEQ ID NO: 73385 - DNA, 23 bp, Artificial sequence
  SiRNA target sequence
ggagtctgaaaaaaagattttag

SEQ ID NO: 73386 - DNA, 23 bp, Artificial sequence
  SiRNA target sequence
gagtctgaaaaaaagattttaga

SEQ ID NO: 73387 - DNA, 23 bp, Artificial sequence
  SiRNA target sequence
agtctgaaaaaaagattttagag

SEQ ID NO: 73388 - DNA, 23 bp, Artificial sequence
  SiRNA target sequence
gtctgaaaaaaagattttagaga

SEQ ID NO: 73389 - DNA, 23 bp, Artificial sequence
  SiRNA target sequence
tctgaaaaaaagattttagagat

SEQ ID NO: 73390 - DNA, 23 bp, Artificial sequence
  SiRNA target sequence
ctgaaaaaaagattttagagata

SEQ ID NO: 73391 - DNA, 23 bp, Artificial sequence
  SiRNA target sequence
tgaaaaaaagattttagagataa

SEQ ID NO: 73392 - DNA, 23 bp, Artificial sequence
  SiRNA target sequence
gaaaaaaagattttagagataat

SEQ ID NO: 73393 - DNA, 23 bp, Artificial sequence
  SiRNA target sequence
aaaaaaagattttagagataatt

SEQ ID NO: 73394 - DNA, 23 bp, Artificial sequence
  SiRNA target sequence
aaaaaagattttagagataattt

SEQ ID NO: 73395 - DNA, 23 bp, Artificial sequence
  SiRNA target sequence
aaaaagattttagagataatttt

SEQ ID NO: 73396 - DNA, 23 bp, Artificial sequence
  SiRNA target sequence
aaaagattttagagataatttta

SEQ ID NO: 73397 - DNA, 23 bp, Artificial sequence
  SiRNA target sequence
aaagattttagagataattttac

SEQ ID NO: 73398 - DNA, 23 bp, Artificial sequence
  SiRNA target sequence
aagattttagagataattttaca

SEQ ID NO: 73399 - DNA, 23 bp, Artificial sequence
  SiRNA target sequence
agattttagagataattttacaa

SEQ ID NO: 73400 - DNA, 23 bp, Artificial sequence
  SiRNA target sequence
gattttagagataattttacaac

SEQ ID NO: 73401 - DNA, 23 bp, Artificial sequence
  SiRNA target sequence
attttagagataattttacaaca

SEQ ID NO: 73402 - DNA, 23 bp, Artificial sequence
  SiRNA target sequence
ttttagagataattttacaacag

SEQ ID NO: 73403 - DNA, 23 bp, Artificial sequence
  SiRNA target sequence
tttagagataattttacaacagg

SEQ ID NO: 73404 - DNA, 23 bp, Artificial sequence
  SiRNA target sequence
ttagagataattttacaacagga

SEQ ID NO: 73405 - DNA, 23 bp, Artificial sequence
  SiRNA target sequence
tagagataattttacaacaggaa

SEQ ID NO: 73406 - DNA, 23 bp, Artificial sequence
  SiRNA target sequence
agagataattttacaacaggaag

SEQ ID NO: 73407 - DNA, 23 bp, Artificial sequence
  SiRNA target sequence
gagataattttacaacaggaaga

SEQ ID NO: 73408 - DNA, 23 bp, Artificial sequence
  SiRNA target sequence
agataattttacaacaggaagat

SEQ ID NO: 73409 - DNA, 23 bp, Artificial sequence
  SiRNA target sequence
gataattttacaacaggaagatc

SEQ ID NO: 73410 - DNA, 23 bp, Artificial sequence
  SiRNA target sequence
ataattttacaacaggaagatcg

SEQ ID NO: 73411 - DNA, 23 bp, Artificial sequence
  SiRNA target sequence
taattttacaacaggaagatcga

SEQ ID NO: 73412 - DNA, 23 bp, Artificial sequence
  SiRNA target sequence
aattttacaacaggaagatcgaa

SEQ ID NO: 73413 - DNA, 23 bp, Artificial sequence
  SiRNA target sequence
attttacaacaggaagatcgaac

SEQ ID NO: 73414 - DNA, 23 bp, Artificial sequence
  SiRNA target sequence
ttttacaacaggaagatcgaaca

SEQ ID NO: 73415 - DNA, 23 bp, Artificial sequence
  SiRNA target sequence
tttacaacaggaagatcgaacag

SEQ ID NO: 73416 - DNA, 23 bp, Artificial sequence
  SiRNA target sequence
ttacaacaggaagatcgaacagt

SEQ ID NO: 73417 - DNA, 23 bp, Artificial sequence
  SiRNA target sequence
tacaacaggaagatcgaacagtt

SEQ ID NO: 73418 - DNA, 23 bp, Artificial sequence
  SiRNA target sequence
acaacaggaagatcgaacagttt

SEQ ID NO: 73419 - DNA, 23 bp, Artificial sequence
  SiRNA target sequence
caacaggaagatcgaacagtttt

SEQ ID NO: 73420 - DNA, 23 bp, Artificial sequence
  SiRNA target sequence
aacaggaagatcgaacagttttg

SEQ ID NO: 73421 - DNA, 23 bp, Artificial sequence
  SiRNA target sequence
acaggaagatcgaacagttttga

SEQ ID NO: 73422 - DNA, 23 bp, Artificial sequence
  SiRNA target sequence
caggaagatcgaacagttttgat

SEQ ID NO: 73423 - DNA, 23 bp, Artificial sequence
  SiRNA target sequence
aggaagatcgaacagttttgatg

SEQ ID NO: 73424 - DNA, 23 bp, Artificial sequence
  SiRNA target sequence
ggaagatcgaacagttttgatga

SEQ ID NO: 73425 - DNA, 23 bp, Artificial sequence
  SiRNA target sequence
gaagatcgaacagttttgatgat

SEQ ID NO: 73426 - DNA, 23 bp, Artificial sequence
  SiRNA target sequence
aagatcgaacagttttgatgata

SEQ ID NO: 73427 - DNA, 23 bp, Artificial sequence
  SiRNA target sequence
agatcgaacagttttgatgataa

SEQ ID NO: 73428 - DNA, 23 bp, Artificial sequence
  SiRNA target sequence
gatcgaacagttttgatgataat

SEQ ID NO: 73429 - DNA, 23 bp, Artificial sequence
  SiRNA target sequence
atcgaacagttttgatgataatt

SEQ ID NO: 73430 - DNA, 23 bp, Artificial sequence
  SiRNA target sequence
tcgaacagttttgatgataattc

SEQ ID NO: 73431 - DNA, 23 bp, Artificial sequence
  SiRNA target sequence
cgaacagttttgatgataattca

SEQ ID NO: 73432 - DNA, 23 bp, Artificial sequence
  SiRNA target sequence
gaacagttttgatgataattcat

SEQ ID NO: 73433 - DNA, 23 bp, Artificial sequence
  SiRNA target sequence
aacagttttgatgataattcata

SEQ ID NO: 73434 - DNA, 23 bp, Artificial sequence
  SiRNA target sequence
acagttttgatgataattcataa

SEQ ID NO: 73435 - DNA, 23 bp, Artificial sequence
  SiRNA target sequence
cagttttgatgataattcataat

SEQ ID NO: 73436 - DNA, 23 bp, Artificial sequence
  SiRNA target sequence
agttttgatgataattcataatc

SEQ ID NO: 73437 - DNA, 23 bp, Artificial sequence
  SiRNA target sequence
gttttgatgataattcataatct

SEQ ID NO: 73438 - DNA, 23 bp, Artificial sequence
  SiRNA target sequence
ttttgatgataattcataatcta

SEQ ID NO: 73439 - DNA, 23 bp, Artificial sequence
  SiRNA target sequence
tttgatgataattcataatctag

SEQ ID NO: 73440 - DNA, 23 bp, Artificial sequence
  SiRNA target sequence
ttgatgataattcataatctaga

SEQ ID NO: 73441 - DNA, 23 bp, Artificial sequence
  SiRNA target sequence
tgatgataattcataatctagaa

SEQ ID NO: 73442 - DNA, 23 bp, Artificial sequence
  SiRNA target sequence
gatgataattcataatctagaac

SEQ ID NO: 73443 - DNA, 23 bp, Artificial sequence
  SiRNA target sequence
atgataattcataatctagaact

SEQ ID NO: 73444 - DNA, 23 bp, Artificial sequence
  SiRNA target sequence
tgataattcataatctagaactt

SEQ ID NO: 73445 - DNA, 23 bp, Artificial sequence
  SiRNA target sequence
gataattcataatctagaactta

SEQ ID NO: 73446 - DNA, 23 bp, Artificial sequence
  SiRNA target sequence
ataattcataatctagaacttat

SEQ ID NO: 73447 - DNA, 23 bp, Artificial sequence
  SiRNA target sequence
taattcataatctagaacttatt

SEQ ID NO: 73448 - DNA, 23 bp, Artificial sequence
  SiRNA target sequence
aattcataatctagaacttatta

SEQ ID NO: 73449 - DNA, 23 bp, Artificial sequence
  SiRNA target sequence
attcataatctagaacttattaa

SEQ ID NO: 73450 - DNA, 23 bp, Artificial sequence
  SiRNA target sequence
ttcataatctagaacttattaat

SEQ ID NO: 73451 - DNA, 23 bp, Artificial sequence
  SiRNA target sequence
tcataatctagaacttattaata

SEQ ID NO: 73452 - DNA, 23 bp, Artificial sequence
  SiRNA target sequence
cataatctagaacttattaataa

SEQ ID NO: 73453 - DNA, 23 bp, Artificial sequence
  SiRNA target sequence
ataatctagaacttattaataaa

SEQ ID NO: 73454 - DNA, 23 bp, Artificial sequence
  SiRNA target sequence
taatctagaacttattaataaat

SEQ ID NO: 73455 - DNA, 23 bp, Artificial sequence
  SiRNA target sequence
aatctagaacttattaataaatt

SEQ ID NO: 73456 - DNA, 23 bp, Artificial sequence
  SiRNA target sequence
atctagaacttattaataaattt

SEQ ID NO: 73457 - DNA, 23 bp, Artificial sequence
  SiRNA target sequence
tctagaacttattaataaatttg

SEQ ID NO: 73458 - DNA, 23 bp, Artificial sequence
  SiRNA target sequence
ctagaacttattaataaatttga

SEQ ID NO: 73459 - DNA, 23 bp, Artificial sequence
  SiRNA target sequence
tagaacttattaataaatttgat

SEQ ID NO: 73460 - DNA, 23 bp, Artificial sequence
  SiRNA target sequence
agaacttattaataaatttgata

SEQ ID NO: 73461 - DNA, 23 bp, Artificial sequence
  SiRNA target sequence
gaacttattaataaatttgataa

SEQ ID NO: 73462 - DNA, 23 bp, Artificial sequence
  SiRNA target sequence
aacttattaataaatttgataaa

SEQ ID NO: 73463 - DNA, 23 bp, Artificial sequence
  SiRNA target sequence
acttattaataaatttgataaaa

SEQ ID NO: 73464 - DNA, 23 bp, Artificial sequence
  SiRNA target sequence
cttattaataaatttgataaaat

SEQ ID NO: 73465 - DNA, 23 bp, Artificial sequence
  SiRNA target sequence
ttattaataaatttgataaaata

SEQ ID NO: 73466 - DNA, 23 bp, Artificial sequence
  SiRNA target sequence
tattaataaatttgataaaataa

SEQ ID NO: 73467 - DNA, 23 bp, Artificial sequence
  SiRNA target sequence
attaataaatttgataaaataat

SEQ ID NO: 73468 - DNA, 23 bp, Artificial sequence
  SiRNA target sequence
ttaataaatttgataaaataatt

SEQ ID NO: 73469 - DNA, 23 bp, Artificial sequence
  SiRNA target sequence
taataaatttgataaaataattt

SEQ ID NO: 73470 - DNA, 23 bp, Artificial sequence
  SiRNA target sequence
aataaatttgataaaataattta

SEQ ID NO: 73471 - DNA, 23 bp, Artificial sequence
  SiRNA target sequence
ataaatttgataaaataatttac

SEQ ID NO: 73472 - DNA, 23 bp, Artificial sequence
  SiRNA target sequence
taaatttgataaaataatttaca

SEQ ID NO: 73473 - DNA, 23 bp, Artificial sequence
  SiRNA target sequence
aaatttgataaaataatttacat

SEQ ID NO: 73474 - DNA, 23 bp, Artificial sequence
  SiRNA target sequence
aatttgataaaataatttacatt

SEQ ID NO: 73475 - DNA, 23 bp, Artificial sequence
  SiRNA target sequence
atttgataaaataatttacattg

SEQ ID NO: 73476 - DNA, 23 bp, Artificial sequence
  SiRNA target sequence
tttgataaaataatttacattga

SEQ ID NO: 73477 - DNA, 23 bp, Artificial sequence
  SiRNA target sequence
ttgataaaataatttacattgat

SEQ ID NO: 73478 - DNA, 23 bp, Artificial sequence
  SiRNA target sequence
tgataaaataatttacattgatg

SEQ ID NO: 73479 - DNA, 23 bp, Artificial sequence
  SiRNA target sequence
gataaaataatttacattgatga

SEQ ID NO: 73480 - DNA, 23 bp, Artificial sequence
  SiRNA target sequence
ataaaataatttacattgatgaa

SEQ ID NO: 73481 - DNA, 23 bp, Artificial sequence
  SiRNA target sequence
taaaataatttacattgatgaaa

SEQ ID NO: 73482 - DNA, 23 bp, Artificial sequence
  SiRNA target sequence
aaaataatttacattgatgaaaa

SEQ ID NO: 73483 - DNA, 23 bp, Artificial sequence
  SiRNA target sequence
aaataatttacattgatgaaaat

SEQ ID NO: 73484 - DNA, 23 bp, Artificial sequence
  SiRNA target sequence
aataatttacattgatgaaaata

SEQ ID NO: 73485 - DNA, 23 bp, Artificial sequence
  SiRNA target sequence
ataatttacattgatgaaaataa

SEQ ID NO: 73486 - DNA, 23 bp, Artificial sequence
  SiRNA target sequence
taatttacattgatgaaaataat

SEQ ID NO: 73487 - DNA, 23 bp, Artificial sequence
  SiRNA target sequence
aatttacattgatgaaaataata

SEQ ID NO: 73488 - DNA, 23 bp, Artificial sequence
  SiRNA target sequence
atttacattgatgaaaataatat

SEQ ID NO: 73489 - DNA, 23 bp, Artificial sequence
  SiRNA target sequence
tttacattgatgaaaataatata

SEQ ID NO: 73490 - DNA, 23 bp, Artificial sequence
  SiRNA target sequence
ttacattgatgaaaataatatag

SEQ ID NO: 73491 - DNA, 23 bp, Artificial sequence
  SiRNA target sequence
tacattgatgaaaataatataga

SEQ ID NO: 73492 - DNA, 23 bp, Artificial sequence
  SiRNA target sequence
acattgatgaaaataatatagaa

SEQ ID NO: 73493 - DNA, 23 bp, Artificial sequence
  SiRNA target sequence
cattgatgaaaataatatagaag

SEQ ID NO: 73494 - DNA, 23 bp, Artificial sequence
  SiRNA target sequence
attgatgaaaataatatagaagt

SEQ ID NO: 73495 - DNA, 23 bp, Artificial sequence
  SiRNA target sequence
ttgatgaaaataatatagaagtc

SEQ ID NO: 73496 - DNA, 23 bp, Artificial sequence
  SiRNA target sequence
tgatgaaaataatatagaagtct

SEQ ID NO: 73497 - DNA, 23 bp, Artificial sequence
  SiRNA target sequence
gatgaaaataatatagaagtcta

SEQ ID NO: 73498 - DNA, 23 bp, Artificial sequence
  SiRNA target sequence
atgaaaataatatagaagtctat

SEQ ID NO: 73499 - DNA, 23 bp, Artificial sequence
  SiRNA target sequence
tgaaaataatatagaagtctata

SEQ ID NO: 73500 - DNA, 23 bp, Artificial sequence
  SiRNA target sequence
gaaaataatatagaagtctataa

SEQ ID NO: 73501 - DNA, 23 bp, Artificial sequence
  SiRNA target sequence
aaaataatatagaagtctataaa

SEQ ID NO: 73502 - DNA, 23 bp, Artificial sequence
  SiRNA target sequence
aaataatatagaagtctataaaa

SEQ ID NO: 73503 - DNA, 23 bp, Artificial sequence
  SiRNA target sequence
aataatatagaagtctataaaaa

SEQ ID NO: 73504 - DNA, 23 bp, Artificial sequence
  SiRNA target sequence
ataatatagaagtctataaaaat

SEQ ID NO: 73505 - DNA, 23 bp, Artificial sequence
  SiRNA target sequence
taatatagaagtctataaaaatg

SEQ ID NO: 73506 - DNA, 23 bp, Artificial sequence
  SiRNA target sequence
aatatagaagtctataaaaatga

SEQ ID NO: 73507 - DNA, 23 bp, Artificial sequence
  SiRNA target sequence
atatagaagtctataaaaatgat

SEQ ID NO: 73508 - DNA, 23 bp, Artificial sequence
  SiRNA target sequence
tatagaagtctataaaaatgata

SEQ ID NO: 73509 - DNA, 23 bp, Artificial sequence
  SiRNA target sequence
atagaagtctataaaaatgatat

SEQ ID NO: 73510 - DNA, 23 bp, Artificial sequence
  SiRNA target sequence
tagaagtctataaaaatgatatt

SEQ ID NO: 73511 - DNA, 23 bp, Artificial sequence
  SiRNA target sequence
agaagtctataaaaatgatattg

SEQ ID NO: 73512 - DNA, 23 bp, Artificial sequence
  SiRNA target sequence
gaagtctataaaaatgatattga

SEQ ID NO: 73513 - DNA, 23 bp, Artificial sequence
  SiRNA target sequence
aagtctataaaaatgatattgaa

SEQ ID NO: 73514 - DNA, 23 bp, Artificial sequence
  SiRNA target sequence
agtctataaaaatgatattgaag

SEQ ID NO: 73515 - DNA, 23 bp, Artificial sequence
  SiRNA target sequence
gtctataaaaatgatattgaagg

SEQ ID NO: 73516 - DNA, 23 bp, Artificial sequence
  SiRNA target sequence
tctataaaaatgatattgaagga

SEQ ID NO: 73517 - DNA, 23 bp, Artificial sequence
  SiRNA target sequence
ctataaaaatgatattgaaggac

SEQ ID NO: 73518 - DNA, 23 bp, Artificial sequence
  SiRNA target sequence
tataaaaatgatattgaaggaca

SEQ ID NO: 73519 - DNA, 23 bp, Artificial sequence
  SiRNA target sequence
ataaaaatgatattgaaggacaa

SEQ ID NO: 73520 - DNA, 23 bp, Artificial sequence
  SiRNA target sequence
taaaaatgatattgaaggacaaa

SEQ ID NO: 73521 - DNA, 23 bp, Artificial sequence
  SiRNA target sequence
aaaaatgatattgaaggacaaaa

SEQ ID NO: 73522 - DNA, 23 bp, Artificial sequence
  SiRNA target sequence
aaaatgatattgaaggacaaaaa

SEQ ID NO: 73523 - DNA, 23 bp, Artificial sequence
  SiRNA target sequence
aaatgatattgaaggacaaaaaa

SEQ ID NO: 73524 - DNA, 23 bp, Artificial sequence
  SiRNA target sequence
aatgatattgaaggacaaaaaaa

SEQ ID NO: 73525 - DNA, 23 bp, Artificial sequence
  SiRNA target sequence
atgatattgaaggacaaaaaaag

SEQ ID NO: 73526 - DNA, 23 bp, Artificial sequence
  SiRNA target sequence
tgatattgaaggacaaaaaaagt

SEQ ID NO: 73527 - DNA, 23 bp, Artificial sequence
  SiRNA target sequence
gatattgaaggacaaaaaaagtt

SEQ ID NO: 73528 - DNA, 23 bp, Artificial sequence
  SiRNA target sequence
atattgaaggacaaaaaaagttt

SEQ ID NO: 73529 - DNA, 23 bp, Artificial sequence
  SiRNA target sequence
tattgaaggacaaaaaaagtttt

SEQ ID NO: 73530 - DNA, 23 bp, Artificial sequence
  SiRNA target sequence
attgaaggacaaaaaaagttttc

SEQ ID NO: 73531 - DNA, 23 bp, Artificial sequence
  SiRNA target sequence
ttgaaggacaaaaaaagttttct

SEQ ID NO: 73532 - DNA, 23 bp, Artificial sequence
  SiRNA target sequence
tgaaggacaaaaaaagttttcta

SEQ ID NO: 73533 - DNA, 23 bp, Artificial sequence
  SiRNA target sequence
gaaggacaaaaaaagttttctac

SEQ ID NO: 73534 - DNA, 23 bp, Artificial sequence
  SiRNA target sequence
aaggacaaaaaaagttttctaca

SEQ ID NO: 73535 - DNA, 23 bp, Artificial sequence
  SiRNA target sequence
aggacaaaaaaagttttctacaa

SEQ ID NO: 73536 - DNA, 23 bp, Artificial sequence
  SiRNA target sequence
ggacaaaaaaagttttctacaaa

SEQ ID NO: 73537 - DNA, 23 bp, Artificial sequence
  SiRNA target sequence
gacaaaaaaagttttctacaaat

SEQ ID NO: 73538 - DNA, 23 bp, Artificial sequence
  SiRNA target sequence
acaaaaaaagttttctacaaatt

SEQ ID NO: 73539 - DNA, 23 bp, Artificial sequence
  SiRNA target sequence
caaaaaaagttttctacaaattt

SEQ ID NO: 73540 - DNA, 23 bp, Artificial sequence
  SiRNA target sequence
aaaaaaagttttctacaaattta

SEQ ID NO: 73541 - DNA, 23 bp, Artificial sequence
  SiRNA target sequence
aaaaaagttttctacaaatttac

SEQ ID NO: 73542 - DNA, 23 bp, Artificial sequence
  SiRNA target sequence
aaaaagttttctacaaatttaca

SEQ ID NO: 73543 - DNA, 23 bp, Artificial sequence
  SiRNA target sequence
aaaagttttctacaaatttacaa

SEQ ID NO: 73544 - DNA, 23 bp, Artificial sequence
  SiRNA target sequence
aaagttttctacaaatttacaat

SEQ ID NO: 73545 - DNA, 23 bp, Artificial sequence
  SiRNA target sequence
aagttttctacaaatttacaata

SEQ ID NO: 73546 - DNA, 23 bp, Artificial sequence
  SiRNA target sequence
agttttctacaaatttacaatat

SEQ ID NO: 73547 - DNA, 23 bp, Artificial sequence
  SiRNA target sequence
gttttctacaaatttacaatatt

SEQ ID NO: 73548 - DNA, 23 bp, Artificial sequence
  SiRNA target sequence
ttttctacaaatttacaatattt

SEQ ID NO: 73549 - DNA, 23 bp, Artificial sequence
  SiRNA target sequence
tttctacaaatttacaatatttt

SEQ ID NO: 73550 - DNA, 23 bp, Artificial sequence
  SiRNA target sequence
ttctacaaatttacaatattttt

SEQ ID NO: 73551 - DNA, 23 bp, Artificial sequence
  SiRNA target sequence
tctacaaatttacaatatttttt

SEQ ID NO: 73552 - DNA, 23 bp, Artificial sequence
  SiRNA target sequence
ctacaaatttacaatatttttta

SEQ ID NO: 73553 - DNA, 23 bp, Artificial sequence
  SiRNA target sequence
tacaaatttacaatattttttat

SEQ ID NO: 73554 - DNA, 23 bp, Artificial sequence
  SiRNA target sequence
acaaatttacaatattttttatc

SEQ ID NO: 73555 - DNA, 23 bp, Artificial sequence
  SiRNA target sequence
caaatttacaatattttttatca

SEQ ID NO: 73556 - DNA, 23 bp, Artificial sequence
  SiRNA target sequence
aaatttacaatattttttatcat

SEQ ID NO: 73557 - DNA, 23 bp, Artificial sequence
  SiRNA target sequence
aatttacaatattttttatcata

SEQ ID NO: 73558 - DNA, 23 bp, Artificial sequence
  SiRNA target sequence
atttacaatattttttatcatac

SEQ ID NO: 73559 - DNA, 23 bp, Artificial sequence
  SiRNA target sequence
tttacaatattttttatcataca

SEQ ID NO: 73560 - DNA, 23 bp, Artificial sequence
  SiRNA target sequence
ttacaatattttttatcatacaa

SEQ ID NO: 73561 - DNA, 23 bp, Artificial sequence
  SiRNA target sequence
tacaatattttttatcatacaaa

SEQ ID NO: 73562 - DNA, 23 bp, Artificial sequence
  SiRNA target sequence
acaatattttttatcatacaaat

SEQ ID NO: 73563 - DNA, 23 bp, Artificial sequence
  SiRNA target sequence
caatattttttatcatacaaatt

SEQ ID NO: 73564 - DNA, 23 bp, Artificial sequence
  SiRNA target sequence
aatattttttatcatacaaatta

SEQ ID NO: 73565 - DNA, 23 bp, Artificial sequence
  SiRNA target sequence
atattttttatcatacaaattag

SEQ ID NO: 73566 - DNA, 23 bp, Artificial sequence
  SiRNA target sequence
tattttttatcatacaaattagg

SEQ ID NO: 73567 - DNA, 23 bp, Artificial sequence
  SiRNA target sequence
attttttatcatacaaattaggt

SEQ ID NO: 73568 - DNA, 23 bp, Artificial sequence
  SiRNA target sequence
ttttttatcatacaaattaggta

SEQ ID NO: 73569 - DNA, 23 bp, Artificial sequence
  SiRNA target sequence
tttttatcatacaaattaggtaa

SEQ ID NO: 73570 - DNA, 23 bp, Artificial sequence
  SiRNA target sequence
ttttatcatacaaattaggtaaa

SEQ ID NO: 73571 - DNA, 23 bp, Artificial sequence
  SiRNA target sequence
tttatcatacaaattaggtaaat

SEQ ID NO: 73572 - DNA, 23 bp, Artificial sequence
  SiRNA target sequence
ttatcatacaaattaggtaaata

SEQ ID NO: 73573 - DNA, 23 bp, Artificial sequence
  SiRNA target sequence
tatcatacaaattaggtaaataa

SEQ ID NO: 73574 - DNA, 24 bp, Artificial sequence
  SiRNA target sequence
atgaaaaaaatttcgaatagaaaa

SEQ ID NO: 73575 - DNA, 24 bp, Artificial sequence
  SiRNA target sequence
tgaaaaaaatttcgaatagaaaaa

SEQ ID NO: 73576 - DNA, 24 bp, Artificial sequence
  SiRNA target sequence
gaaaaaaatttcgaatagaaaaat

SEQ ID NO: 73577 - DNA, 24 bp, Artificial sequence
  SiRNA target sequence
aaaaaaatttcgaatagaaaaatt

SEQ ID NO: 73578 - DNA, 24 bp, Artificial sequence
  SiRNA target sequence
aaaaaatttcgaatagaaaaatta

SEQ ID NO: 73579 - DNA, 24 bp, Artificial sequence
  SiRNA target sequence
aaaaatttcgaatagaaaaattat

SEQ ID NO: 73580 - DNA, 24 bp, Artificial sequence
  SiRNA target sequence
aaaatttcgaatagaaaaattatc

SEQ ID NO: 73581 - DNA, 24 bp, Artificial sequence
  SiRNA target sequence
aaatttcgaatagaaaaattatca

SEQ ID NO: 73582 - DNA, 24 bp, Artificial sequence
  SiRNA target sequence
aatttcgaatagaaaaattatcaa

SEQ ID NO: 73583 - DNA, 24 bp, Artificial sequence
  SiRNA target sequence
atttcgaatagaaaaattatcaaa

SEQ ID NO: 73584 - DNA, 24 bp, Artificial sequence
  SiRNA target sequence
tttcgaatagaaaaattatcaaag

SEQ ID NO: 73585 - DNA, 24 bp, Artificial sequence
  SiRNA target sequence
ttcgaatagaaaaattatcaaaga

SEQ ID NO: 73586 - DNA, 24 bp, Artificial sequence
  SiRNA target sequence
tcgaatagaaaaattatcaaagaa

SEQ ID NO: 73587 - DNA, 24 bp, Artificial sequence
  SiRNA target sequence
cgaatagaaaaattatcaaagaaa

SEQ ID NO: 73588 - DNA, 24 bp, Artificial sequence
  SiRNA target sequence
gaatagaaaaattatcaaagaaat

SEQ ID NO: 73589 - DNA, 24 bp, Artificial sequence
  SiRNA target sequence
aatagaaaaattatcaaagaaatt

SEQ ID NO: 73590 - DNA, 24 bp, Artificial sequence
  SiRNA target sequence
atagaaaaattatcaaagaaatta

SEQ ID NO: 73591 - DNA, 24 bp, Artificial sequence
  SiRNA target sequence
tagaaaaattatcaaagaaattat

SEQ ID NO: 73592 - DNA, 24 bp, Artificial sequence
  SiRNA target sequence
agaaaaattatcaaagaaattatt

SEQ ID NO: 73593 - DNA, 24 bp, Artificial sequence
  SiRNA target sequence
gaaaaattatcaaagaaattattt

SEQ ID NO: 73594 - DNA, 24 bp, Artificial sequence
  SiRNA target sequence
aaaaattatcaaagaaattattta

SEQ ID NO: 73595 - DNA, 24 bp, Artificial sequence
  SiRNA target sequence
aaaattatcaaagaaattatttac

SEQ ID NO: 73596 - DNA, 24 bp, Artificial sequence
  SiRNA target sequence
aaattatcaaagaaattatttaca

SEQ ID NO: 73597 - DNA, 24 bp, Artificial sequence
  SiRNA target sequence
aattatcaaagaaattatttacaa

SEQ ID NO: 73598 - DNA, 24 bp, Artificial sequence
  SiRNA target sequence
attatcaaagaaattatttacaat

SEQ ID NO: 73599 - DNA, 24 bp, Artificial sequence
  SiRNA target sequence
ttatcaaagaaattatttacaatg

SEQ ID NO: 73600 - DNA, 24 bp, Artificial sequence
  SiRNA target sequence
tatcaaagaaattatttacaatga

SEQ ID NO: 73601 - DNA, 24 bp, Artificial sequence
  SiRNA target sequence
atcaaagaaattatttacaatgat

SEQ ID NO: 73602 - DNA, 24 bp, Artificial sequence
  SiRNA target sequence
tcaaagaaattatttacaatgatt

SEQ ID NO: 73603 - DNA, 24 bp, Artificial sequence
  SiRNA target sequence
caaagaaattatttacaatgattt

SEQ ID NO: 73604 - DNA, 24 bp, Artificial sequence
  SiRNA target sequence
aaagaaattatttacaatgattta

SEQ ID NO: 73605 - DNA, 24 bp, Artificial sequence
  SiRNA target sequence
aagaaattatttacaatgatttat

SEQ ID NO: 73606 - DNA, 24 bp, Artificial sequence
  SiRNA target sequence
agaaattatttacaatgatttatt

SEQ ID NO: 73607 - DNA, 24 bp, Artificial sequence
  SiRNA target sequence
gaaattatttacaatgatttatta

SEQ ID NO: 73608 - DNA, 24 bp, Artificial sequence
  SiRNA target sequence
aaattatttacaatgatttattaa

SEQ ID NO: 73609 - DNA, 24 bp, Artificial sequence
  SiRNA target sequence
aattatttacaatgatttattaaa

SEQ ID NO: 73610 - DNA, 24 bp, Artificial sequence
  SiRNA target sequence
attatttacaatgatttattaaaa

SEQ ID NO: 73611 - DNA, 24 bp, Artificial sequence
  SiRNA target sequence
ttatttacaatgatttattaaaaa

SEQ ID NO: 73612 - DNA, 24 bp, Artificial sequence
  SiRNA target sequence
tatttacaatgatttattaaaaat

SEQ ID NO: 73613 - DNA, 24 bp, Artificial sequence
  SiRNA target sequence
atttacaatgatttattaaaaata

SEQ ID NO: 73614 - DNA, 24 bp, Artificial sequence
  SiRNA target sequence
tttacaatgatttattaaaaataa

SEQ ID NO: 73615 - DNA, 24 bp, Artificial sequence
  SiRNA target sequence
ttacaatgatttattaaaaataag

SEQ ID NO: 73616 - DNA, 24 bp, Artificial sequence
  SiRNA target sequence
tacaatgatttattaaaaataaga

SEQ ID NO: 73617 - DNA, 24 bp, Artificial sequence
  SiRNA target sequence
acaatgatttattaaaaataagaa

SEQ ID NO: 73618 - DNA, 24 bp, Artificial sequence
  SiRNA target sequence
caatgatttattaaaaataagaat

SEQ ID NO: 73619 - DNA, 24 bp, Artificial sequence
  SiRNA target sequence
aatgatttattaaaaataagaatg

SEQ ID NO: 73620 - DNA, 24 bp, Artificial sequence
  SiRNA target sequence
atgatttattaaaaataagaatgt

SEQ ID NO: 73621 - DNA, 24 bp, Artificial sequence
  SiRNA target sequence
tgatttattaaaaataagaatgtt

SEQ ID NO: 73622 - DNA, 24 bp, Artificial sequence
  SiRNA target sequence
gatttattaaaaataagaatgttg

SEQ ID NO: 73623 - DNA, 24 bp, Artificial sequence
  SiRNA target sequence
atttattaaaaataagaatgttgc

SEQ ID NO: 73624 - DNA, 24 bp, Artificial sequence
  SiRNA target sequence
tttattaaaaataagaatgttgcg

SEQ ID NO: 73625 - DNA, 24 bp, Artificial sequence
  SiRNA target sequence
ttattaaaaataagaatgttgcga

SEQ ID NO: 73626 - DNA, 24 bp, Artificial sequence
  SiRNA target sequence
tattaaaaataagaatgttgcgat

SEQ ID NO: 73627 - DNA, 24 bp, Artificial sequence
  SiRNA target sequence
attaaaaataagaatgttgcgata

SEQ ID NO: 73628 - DNA, 24 bp, Artificial sequence
  SiRNA target sequence
ttaaaaataagaatgttgcgatat

SEQ ID NO: 73629 - DNA, 24 bp, Artificial sequence
  SiRNA target sequence
taaaaataagaatgttgcgatatg

SEQ ID NO: 73630 - DNA, 24 bp, Artificial sequence
  SiRNA target sequence
aaaaataagaatgttgcgatatgt

SEQ ID NO: 73631 - DNA, 24 bp, Artificial sequence
  SiRNA target sequence
aaaataagaatgttgcgatatgtt

SEQ ID NO: 73632 - DNA, 24 bp, Artificial sequence
  SiRNA target sequence
aaataagaatgttgcgatatgtta

SEQ ID NO: 73633 - DNA, 24 bp, Artificial sequence
  SiRNA target sequence
aataagaatgttgcgatatgttat

SEQ ID NO: 73634 - DNA, 24 bp, Artificial sequence
  SiRNA target sequence
ataagaatgttgcgatatgttatt

SEQ ID NO: 73635 - DNA, 24 bp, Artificial sequence
  SiRNA target sequence
taagaatgttgcgatatgttattg

SEQ ID NO: 73636 - DNA, 24 bp, Artificial sequence
  SiRNA target sequence
aagaatgttgcgatatgttattgt

SEQ ID NO: 73637 - DNA, 24 bp, Artificial sequence
  SiRNA target sequence
agaatgttgcgatatgttattgta

SEQ ID NO: 73638 - DNA, 24 bp, Artificial sequence
  SiRNA target sequence
gaatgttgcgatatgttattgtac

SEQ ID NO: 73639 - DNA, 24 bp, Artificial sequence
  SiRNA target sequence
aatgttgcgatatgttattgtacc

SEQ ID NO: 73640 - DNA, 24 bp, Artificial sequence
  SiRNA target sequence
atgttgcgatatgttattgtacca

SEQ ID NO: 73641 - DNA, 24 bp, Artificial sequence
  SiRNA target sequence
tgttgcgatatgttattgtaccaa

SEQ ID NO: 73642 - DNA, 24 bp, Artificial sequence
  SiRNA target sequence
gttgcgatatgttattgtaccaat

SEQ ID NO: 73643 - DNA, 24 bp, Artificial sequence
  SiRNA target sequence
ttgcgatatgttattgtaccaata

SEQ ID NO: 73644 - DNA, 24 bp, Artificial sequence
  SiRNA target sequence
tgcgatatgttattgtaccaataa

SEQ ID NO: 73645 - DNA, 24 bp, Artificial sequence
  SiRNA target sequence
gcgatatgttattgtaccaataat

SEQ ID NO: 73646 - DNA, 24 bp, Artificial sequence
  SiRNA target sequence
cgatatgttattgtaccaataata

SEQ ID NO: 73647 - DNA, 24 bp, Artificial sequence
  SiRNA target sequence
gatatgttattgtaccaataatat

SEQ ID NO: 73648 - DNA, 24 bp, Artificial sequence
  SiRNA target sequence
atatgttattgtaccaataatatt

SEQ ID NO: 73649 - DNA, 24 bp, Artificial sequence
  SiRNA target sequence
tatgttattgtaccaataatattt

SEQ ID NO: 73650 - DNA, 24 bp, Artificial sequence
  SiRNA target sequence
atgttattgtaccaataatatttt

SEQ ID NO: 73651 - DNA, 24 bp, Artificial sequence
  SiRNA target sequence
tgttattgtaccaataatattttt

SEQ ID NO: 73652 - DNA, 24 bp, Artificial sequence
  SiRNA target sequence
gttattgtaccaataatattttta

SEQ ID NO: 73653 - DNA, 24 bp, Artificial sequence
  SiRNA target sequence
ttattgtaccaataatatttttaa

SEQ ID NO: 73654 - DNA, 24 bp, Artificial sequence
  SiRNA target sequence
tattgtaccaataatatttttaac

SEQ ID NO: 73655 - DNA, 24 bp, Artificial sequence
  SiRNA target sequence
attgtaccaataatatttttaact

SEQ ID NO: 73656 - DNA, 24 bp, Artificial sequence
  SiRNA target sequence
ttgtaccaataatatttttaacta

SEQ ID NO: 73657 - DNA, 24 bp, Artificial sequence
  SiRNA target sequence
tgtaccaataatatttttaactat

SEQ ID NO: 73658 - DNA, 24 bp, Artificial sequence
  SiRNA target sequence
gtaccaataatatttttaactata

SEQ ID NO: 73659 - DNA, 24 bp, Artificial sequence
  SiRNA target sequence
taccaataatatttttaactatat

SEQ ID NO: 73660 - DNA, 24 bp, Artificial sequence
  SiRNA target sequence
accaataatatttttaactatatt

SEQ ID NO: 73661 - DNA, 24 bp, Artificial sequence
  SiRNA target sequence
ccaataatatttttaactatattt

SEQ ID NO: 73662 - DNA, 24 bp, Artificial sequence
  SiRNA target sequence
caataatatttttaactatatttt

SEQ ID NO: 73663 - DNA, 24 bp, Artificial sequence
  SiRNA target sequence
aataatatttttaactatatttta

SEQ ID NO: 73664 - DNA, 24 bp, Artificial sequence
  SiRNA target sequence
ataatatttttaactatattttac

SEQ ID NO: 73665 - DNA, 24 bp, Artificial sequence
  SiRNA target sequence
taatatttttaactatattttaca

SEQ ID NO: 73666 - DNA, 24 bp, Artificial sequence
  SiRNA target sequence
aatatttttaactatattttacac

SEQ ID NO: 73667 - DNA, 24 bp, Artificial sequence
  SiRNA target sequence
atatttttaactatattttacact

SEQ ID NO: 73668 - DNA, 24 bp, Artificial sequence
  SiRNA target sequence
tatttttaactatattttacactg

SEQ ID NO: 73669 - DNA, 24 bp, Artificial sequence
  SiRNA target sequence
atttttaactatattttacactgt

SEQ ID NO: 73670 - DNA, 24 bp, Artificial sequence
  SiRNA target sequence
tttttaactatattttacactgtt

SEQ ID NO: 73671 - DNA, 24 bp, Artificial sequence
  SiRNA target sequence
ttttaactatattttacactgttt

SEQ ID NO: 73672 - DNA, 24 bp, Artificial sequence
  SiRNA target sequence
tttaactatattttacactgtttt

SEQ ID NO: 73673 - DNA, 24 bp, Artificial sequence
  SiRNA target sequence
ttaactatattttacactgtttta

SEQ ID NO: 73674 - DNA, 24 bp, Artificial sequence
  SiRNA target sequence
taactatattttacactgttttag

SEQ ID NO: 73675 - DNA, 24 bp, Artificial sequence
  SiRNA target sequence
aactatattttacactgttttaga

SEQ ID NO: 73676 - DNA, 24 bp, Artificial sequence
  SiRNA target sequence
actatattttacactgttttagag

SEQ ID NO: 73677 - DNA, 24 bp, Artificial sequence
  SiRNA target sequence
ctatattttacactgttttagaga

SEQ ID NO: 73678 - DNA, 24 bp, Artificial sequence
  SiRNA target sequence
tatattttacactgttttagagat

SEQ ID NO: 73679 - DNA, 24 bp, Artificial sequence
  SiRNA target sequence
atattttacactgttttagagata

SEQ ID NO: 73680 - DNA, 24 bp, Artificial sequence
  SiRNA target sequence
tattttacactgttttagagataa

SEQ ID NO: 73681 - DNA, 24 bp, Artificial sequence
  SiRNA target sequence
attttacactgttttagagataaa

SEQ ID NO: 73682 - DNA, 24 bp, Artificial sequence
  SiRNA target sequence
ttttacactgttttagagataaaa

SEQ ID NO: 73683 - DNA, 24 bp, Artificial sequence
  SiRNA target sequence
tttacactgttttagagataaaaa

SEQ ID NO: 73684 - DNA, 24 bp, Artificial sequence
  SiRNA target sequence
ttacactgttttagagataaaaat

SEQ ID NO: 73685 - DNA, 24 bp, Artificial sequence
  SiRNA target sequence
tacactgttttagagataaaaata

SEQ ID NO: 73686 - DNA, 24 bp, Artificial sequence
  SiRNA target sequence
acactgttttagagataaaaataa

SEQ ID NO: 73687 - DNA, 24 bp, Artificial sequence
  SiRNA target sequence
cactgttttagagataaaaataag

SEQ ID NO: 73688 - DNA, 24 bp, Artificial sequence
  SiRNA target sequence
actgttttagagataaaaataagt

SEQ ID NO: 73689 - DNA, 24 bp, Artificial sequence
  SiRNA target sequence
ctgttttagagataaaaataagta

SEQ ID NO: 73690 - DNA, 24 bp, Artificial sequence
  SiRNA target sequence
tgttttagagataaaaataagtac

SEQ ID NO: 73691 - DNA, 24 bp, Artificial sequence
  SiRNA target sequence
gttttagagataaaaataagtaca

SEQ ID NO: 73692 - DNA, 24 bp, Artificial sequence
  SiRNA target sequence
ttttagagataaaaataagtacat

SEQ ID NO: 73693 - DNA, 24 bp, Artificial sequence
  SiRNA target sequence
tttagagataaaaataagtacatt

SEQ ID NO: 73694 - DNA, 24 bp, Artificial sequence
  SiRNA target sequence
ttagagataaaaataagtacatta

SEQ ID NO: 73695 - DNA, 24 bp, Artificial sequence
  SiRNA target sequence
tagagataaaaataagtacattag

SEQ ID NO: 73696 - DNA, 24 bp, Artificial sequence
  SiRNA target sequence
agagataaaaataagtacattagt

SEQ ID NO: 73697 - DNA, 24 bp, Artificial sequence
  SiRNA target sequence
gagataaaaataagtacattagta

SEQ ID NO: 73698 - DNA, 24 bp, Artificial sequence
  SiRNA target sequence
agataaaaataagtacattagtaa

SEQ ID NO: 73699 - DNA, 24 bp, Artificial sequence
  SiRNA target sequence
gataaaaataagtacattagtaaa

SEQ ID NO: 73700 - DNA, 24 bp, Artificial sequence
  SiRNA target sequence
ataaaaataagtacattagtaaag

SEQ ID NO: 73701 - DNA, 24 bp, Artificial sequence
  SiRNA target sequence
taaaaataagtacattagtaaaga

SEQ ID NO: 73702 - DNA, 24 bp, Artificial sequence
  SiRNA target sequence
aaaaataagtacattagtaaagaa

SEQ ID NO: 73703 - DNA, 24 bp, Artificial sequence
  SiRNA target sequence
aaaataagtacattagtaaagaat

SEQ ID NO: 73704 - DNA, 24 bp, Artificial sequence
  SiRNA target sequence
aaataagtacattagtaaagaatc

SEQ ID NO: 73705 - DNA, 24 bp, Artificial sequence
  SiRNA target sequence
aataagtacattagtaaagaatct

SEQ ID NO: 73706 - DNA, 24 bp, Artificial sequence
  SiRNA target sequence
ataagtacattagtaaagaatctt

SEQ ID NO: 73707 - DNA, 24 bp, Artificial sequence
  SiRNA target sequence
taagtacattagtaaagaatctta

SEQ ID NO: 73708 - DNA, 24 bp, Artificial sequence
  SiRNA target sequence
aagtacattagtaaagaatcttaa

SEQ ID NO: 73709 - DNA, 24 bp, Artificial sequence
  SiRNA target sequence
agtacattagtaaagaatcttaat

SEQ ID NO: 73710 - DNA, 24 bp, Artificial sequence
  SiRNA target sequence
gtacattagtaaagaatcttaatc

SEQ ID NO: 73711 - DNA, 24 bp, Artificial sequence
  SiRNA target sequence
tacattagtaaagaatcttaatca

SEQ ID NO: 73712 - DNA, 24 bp, Artificial sequence
  SiRNA target sequence
acattagtaaagaatcttaatcaa

SEQ ID NO: 73713 - DNA, 24 bp, Artificial sequence
  SiRNA target sequence
cattagtaaagaatcttaatcaat

SEQ ID NO: 73714 - DNA, 24 bp, Artificial sequence
  SiRNA target sequence
attagtaaagaatcttaatcaatc

SEQ ID NO: 73715 - DNA, 24 bp, Artificial sequence
  SiRNA target sequence
ttagtaaagaatcttaatcaatct

SEQ ID NO: 73716 - DNA, 24 bp, Artificial sequence
  SiRNA target sequence
tagtaaagaatcttaatcaatcta

SEQ ID NO: 73717 - DNA, 24 bp, Artificial sequence
  SiRNA target sequence
agtaaagaatcttaatcaatctat

SEQ ID NO: 73718 - DNA, 24 bp, Artificial sequence
  SiRNA target sequence
gtaaagaatcttaatcaatctatc

SEQ ID NO: 73719 - DNA, 24 bp, Artificial sequence
  SiRNA target sequence
taaagaatcttaatcaatctatcg

SEQ ID NO: 73720 - DNA, 24 bp, Artificial sequence
  SiRNA target sequence
aaagaatcttaatcaatctatcgc

SEQ ID NO: 73721 - DNA, 24 bp, Artificial sequence
  SiRNA target sequence
aagaatcttaatcaatctatcgca

SEQ ID NO: 73722 - DNA, 24 bp, Artificial sequence
  SiRNA target sequence
agaatcttaatcaatctatcgcaa

SEQ ID NO: 73723 - DNA, 24 bp, Artificial sequence
  SiRNA target sequence
gaatcttaatcaatctatcgcaaa

SEQ ID NO: 73724 - DNA, 24 bp, Artificial sequence
  SiRNA target sequence
aatcttaatcaatctatcgcaaat

SEQ ID NO: 73725 - DNA, 24 bp, Artificial sequence
  SiRNA target sequence
atcttaatcaatctatcgcaaatc

SEQ ID NO: 73726 - DNA, 24 bp, Artificial sequence
  SiRNA target sequence
tcttaatcaatctatcgcaaatcg

SEQ ID NO: 73727 - DNA, 24 bp, Artificial sequence
  SiRNA target sequence
cttaatcaatctatcgcaaatcga

SEQ ID NO: 73728 - DNA, 24 bp, Artificial sequence
  SiRNA target sequence
ttaatcaatctatcgcaaatcgaa

SEQ ID NO: 73729 - DNA, 24 bp, Artificial sequence
  SiRNA target sequence
taatcaatctatcgcaaatcgaaa

SEQ ID NO: 73730 - DNA, 24 bp, Artificial sequence
  SiRNA target sequence
aatcaatctatcgcaaatcgaaaa

SEQ ID NO: 73731 - DNA, 24 bp, Artificial sequence
  SiRNA target sequence
atcaatctatcgcaaatcgaaaag

SEQ ID NO: 73732 - DNA, 24 bp, Artificial sequence
  SiRNA target sequence
tcaatctatcgcaaatcgaaaagg

SEQ ID NO: 73733 - DNA, 24 bp, Artificial sequence
  SiRNA target sequence
caatctatcgcaaatcgaaaaggt

SEQ ID NO: 73734 - DNA, 24 bp, Artificial sequence
  SiRNA target sequence
aatctatcgcaaatcgaaaaggtg

SEQ ID NO: 73735 - DNA, 24 bp, Artificial sequence
  SiRNA target sequence
atctatcgcaaatcgaaaaggtga

SEQ ID NO: 73736 - DNA, 24 bp, Artificial sequence
  SiRNA target sequence
tctatcgcaaatcgaaaaggtgaa

SEQ ID NO: 73737 - DNA, 24 bp, Artificial sequence
  SiRNA target sequence
ctatcgcaaatcgaaaaggtgaac

SEQ ID NO: 73738 - DNA, 24 bp, Artificial sequence
  SiRNA target sequence
tatcgcaaatcgaaaaggtgaaca

SEQ ID NO: 73739 - DNA, 24 bp, Artificial sequence
  SiRNA target sequence
atcgcaaatcgaaaaggtgaacac

SEQ ID NO: 73740 - DNA, 24 bp, Artificial sequence
  SiRNA target sequence
tcgcaaatcgaaaaggtgaacaca

SEQ ID NO: 73741 - DNA, 24 bp, Artificial sequence
  SiRNA target sequence
cgcaaatcgaaaaggtgaacacac

SEQ ID NO: 73742 - DNA, 24 bp, Artificial sequence
  SiRNA target sequence
gcaaatcgaaaaggtgaacacaca

SEQ ID NO: 73743 - DNA, 24 bp, Artificial sequence
  SiRNA target sequence
caaatcgaaaaggtgaacacacag

SEQ ID NO: 73744 - DNA, 24 bp, Artificial sequence
  SiRNA target sequence
aaatcgaaaaggtgaacacacagc

SEQ ID NO: 73745 - DNA, 24 bp, Artificial sequence
  SiRNA target sequence
aatcgaaaaggtgaacacacagca

SEQ ID NO: 73746 - DNA, 24 bp, Artificial sequence
  SiRNA target sequence
atcgaaaaggtgaacacacagcac

SEQ ID NO: 73747 - DNA, 24 bp, Artificial sequence
  SiRNA target sequence
tcgaaaaggtgaacacacagcact

SEQ ID NO: 73748 - DNA, 24 bp, Artificial sequence
  SiRNA target sequence
cgaaaaggtgaacacacagcactt

SEQ ID NO: 73749 - DNA, 24 bp, Artificial sequence
  SiRNA target sequence
gaaaaggtgaacacacagcacttg

SEQ ID NO: 73750 - DNA, 24 bp, Artificial sequence
  SiRNA target sequence
aaaaggtgaacacacagcacttga

SEQ ID NO: 73751 - DNA, 24 bp, Artificial sequence
  SiRNA target sequence
aaaggtgaacacacagcacttgaa

SEQ ID NO: 73752 - DNA, 24 bp, Artificial sequence
  SiRNA target sequence
aaggtgaacacacagcacttgaaa

SEQ ID NO: 73753 - DNA, 24 bp, Artificial sequence
  SiRNA target sequence
aggtgaacacacagcacttgaaag

SEQ ID NO: 73754 - DNA, 24 bp, Artificial sequence
  SiRNA target sequence
ggtgaacacacagcacttgaaaga

SEQ ID NO: 73755 - DNA, 24 bp, Artificial sequence
  SiRNA target sequence
gtgaacacacagcacttgaaagat

SEQ ID NO: 73756 - DNA, 24 bp, Artificial sequence
  SiRNA target sequence
tgaacacacagcacttgaaagatt

SEQ ID NO: 73757 - DNA, 24 bp, Artificial sequence
  SiRNA target sequence
gaacacacagcacttgaaagattt

SEQ ID NO: 73758 - DNA, 24 bp, Artificial sequence
  SiRNA target sequence
aacacacagcacttgaaagatttg

SEQ ID NO: 73759 - DNA, 24 bp, Artificial sequence
  SiRNA target sequence
acacacagcacttgaaagatttgt

SEQ ID NO: 73760 - DNA, 24 bp, Artificial sequence
  SiRNA target sequence
cacacagcacttgaaagatttgtg

SEQ ID NO: 73761 - DNA, 24 bp, Artificial sequence
  SiRNA target sequence
acacagcacttgaaagatttgtgt

SEQ ID NO: 73762 - DNA, 24 bp, Artificial sequence
  SiRNA target sequence
cacagcacttgaaagatttgtgtt

SEQ ID NO: 73763 - DNA, 24 bp, Artificial sequence
  SiRNA target sequence
acagcacttgaaagatttgtgtta

SEQ ID NO: 73764 - DNA, 24 bp, Artificial sequence
  SiRNA target sequence
cagcacttgaaagatttgtgttac

SEQ ID NO: 73765 - DNA, 24 bp, Artificial sequence
  SiRNA target sequence
agcacttgaaagatttgtgttaca

SEQ ID NO: 73766 - DNA, 24 bp, Artificial sequence
  SiRNA target sequence
gcacttgaaagatttgtgttacag

SEQ ID NO: 73767 - DNA, 24 bp, Artificial sequence
  SiRNA target sequence
cacttgaaagatttgtgttacagt

SEQ ID NO: 73768 - DNA, 24 bp, Artificial sequence
  SiRNA target sequence
acttgaaagatttgtgttacagtc

SEQ ID NO: 73769 - DNA, 24 bp, Artificial sequence
  SiRNA target sequence
cttgaaagatttgtgttacagtca

SEQ ID NO: 73770 - DNA, 24 bp, Artificial sequence
  SiRNA target sequence
ttgaaagatttgtgttacagtcac

SEQ ID NO: 73771 - DNA, 24 bp, Artificial sequence
  SiRNA target sequence
tgaaagatttgtgttacagtcact

SEQ ID NO: 73772 - DNA, 24 bp, Artificial sequence
  SiRNA target sequence
gaaagatttgtgttacagtcactc

SEQ ID NO: 73773 - DNA, 24 bp, Artificial sequence
  SiRNA target sequence
aaagatttgtgttacagtcactct

SEQ ID NO: 73774 - DNA, 24 bp, Artificial sequence
  SiRNA target sequence
aagatttgtgttacagtcactctt

SEQ ID NO: 73775 - DNA, 24 bp, Artificial sequence
  SiRNA target sequence
agatttgtgttacagtcactctta

SEQ ID NO: 73776 - DNA, 24 bp, Artificial sequence
  SiRNA target sequence
gatttgtgttacagtcactcttag

SEQ ID NO: 73777 - DNA, 24 bp, Artificial sequence
  SiRNA target sequence
atttgtgttacagtcactcttagt

SEQ ID NO: 73778 - DNA, 24 bp, Artificial sequence
  SiRNA target sequence
tttgtgttacagtcactcttagtg

SEQ ID NO: 73779 - DNA, 24 bp, Artificial sequence
  SiRNA target sequence
ttgtgttacagtcactcttagtgg

SEQ ID NO: 73780 - DNA, 24 bp, Artificial sequence
  SiRNA target sequence
tgtgttacagtcactcttagtggc

SEQ ID NO: 73781 - DNA, 24 bp, Artificial sequence
  SiRNA target sequence
gtgttacagtcactcttagtggct

SEQ ID NO: 73782 - DNA, 24 bp, Artificial sequence
  SiRNA target sequence
tgttacagtcactcttagtggctg

SEQ ID NO: 73783 - DNA, 24 bp, Artificial sequence
  SiRNA target sequence
gttacagtcactcttagtggctgt

SEQ ID NO: 73784 - DNA, 24 bp, Artificial sequence
  SiRNA target sequence
ttacagtcactcttagtggctgta

SEQ ID NO: 73785 - DNA, 24 bp, Artificial sequence
  SiRNA target sequence
tacagtcactcttagtggctgtat

SEQ ID NO: 73786 - DNA, 24 bp, Artificial sequence
  SiRNA target sequence
acagtcactcttagtggctgtatt

SEQ ID NO: 73787 - DNA, 24 bp, Artificial sequence
  SiRNA target sequence
cagtcactcttagtggctgtattg

SEQ ID NO: 73788 - DNA, 24 bp, Artificial sequence
  SiRNA target sequence
agtcactcttagtggctgtattga

SEQ ID NO: 73789 - DNA, 24 bp, Artificial sequence
  SiRNA target sequence
gtcactcttagtggctgtattgac

SEQ ID NO: 73790 - DNA, 24 bp, Artificial sequence
  SiRNA target sequence
tcactcttagtggctgtattgacc

SEQ ID NO: 73791 - DNA, 24 bp, Artificial sequence
  SiRNA target sequence
cactcttagtggctgtattgaccg

SEQ ID NO: 73792 - DNA, 24 bp, Artificial sequence
  SiRNA target sequence
actcttagtggctgtattgaccga

SEQ ID NO: 73793 - DNA, 24 bp, Artificial sequence
  SiRNA target sequence
ctcttagtggctgtattgaccgaa

SEQ ID NO: 73794 - DNA, 24 bp, Artificial sequence
  SiRNA target sequence
tcttagtggctgtattgaccgaac

SEQ ID NO: 73795 - DNA, 24 bp, Artificial sequence
  SiRNA target sequence
cttagtggctgtattgaccgaact

SEQ ID NO: 73796 - DNA, 24 bp, Artificial sequence
  SiRNA target sequence
ttagtggctgtattgaccgaactt

SEQ ID NO: 73797 - DNA, 24 bp, Artificial sequence
  SiRNA target sequence
tagtggctgtattgaccgaactta

SEQ ID NO: 73798 - DNA, 24 bp, Artificial sequence
  SiRNA target sequence
agtggctgtattgaccgaacttaa

SEQ ID NO: 73799 - DNA, 24 bp, Artificial sequence
  SiRNA target sequence
gtggctgtattgaccgaacttaat

SEQ ID NO: 73800 - DNA, 24 bp, Artificial sequence
  SiRNA target sequence
tggctgtattgaccgaacttaatg

SEQ ID NO: 73801 - DNA, 24 bp, Artificial sequence
  SiRNA target sequence
ggctgtattgaccgaacttaatgg

SEQ ID NO: 73802 - DNA, 24 bp, Artificial sequence
  SiRNA target sequence
gctgtattgaccgaacttaatgga

SEQ ID NO: 73803 - DNA, 24 bp, Artificial sequence
  SiRNA target sequence
ctgtattgaccgaacttaatggat

SEQ ID NO: 73804 - DNA, 24 bp, Artificial sequence
  SiRNA target sequence
tgtattgaccgaacttaatggatt

SEQ ID NO: 73805 - DNA, 24 bp, Artificial sequence
  SiRNA target sequence
gtattgaccgaacttaatggattt

SEQ ID NO: 73806 - DNA, 24 bp, Artificial sequence
  SiRNA target sequence
tattgaccgaacttaatggattta

SEQ ID NO: 73807 - DNA, 24 bp, Artificial sequence
  SiRNA target sequence
attgaccgaacttaatggatttat

SEQ ID NO: 73808 - DNA, 24 bp, Artificial sequence
  SiRNA target sequence
ttgaccgaacttaatggatttatt

SEQ ID NO: 73809 - DNA, 24 bp, Artificial sequence
  SiRNA target sequence
tgaccgaacttaatggatttattt

SEQ ID NO: 73810 - DNA, 24 bp, Artificial sequence
  SiRNA target sequence
gaccgaacttaatggatttatttt

SEQ ID NO: 73811 - DNA, 24 bp, Artificial sequence
  SiRNA target sequence
accgaacttaatggatttattttt

SEQ ID NO: 73812 - DNA, 24 bp, Artificial sequence
  SiRNA target sequence
ccgaacttaatggatttattttta

SEQ ID NO: 73813 - DNA, 24 bp, Artificial sequence
  SiRNA target sequence
cgaacttaatggatttatttttac

SEQ ID NO: 73814 - DNA, 24 bp, Artificial sequence
  SiRNA target sequence
gaacttaatggatttatttttaca

SEQ ID NO: 73815 - DNA, 24 bp, Artificial sequence
  SiRNA target sequence
aacttaatggatttatttttacag

SEQ ID NO: 73816 - DNA, 24 bp, Artificial sequence
  SiRNA target sequence
acttaatggatttatttttacagg

SEQ ID NO: 73817 - DNA, 24 bp, Artificial sequence
  SiRNA target sequence
cttaatggatttatttttacaggt

SEQ ID NO: 73818 - DNA, 24 bp, Artificial sequence
  SiRNA target sequence
ttaatggatttatttttacaggtg

SEQ ID NO: 73819 - DNA, 24 bp, Artificial sequence
  SiRNA target sequence
taatggatttatttttacaggtgt

SEQ ID NO: 73820 - DNA, 24 bp, Artificial sequence
  SiRNA target sequence
aatggatttatttttacaggtgta

SEQ ID NO: 73821 - DNA, 24 bp, Artificial sequence
  SiRNA target sequence
atggatttatttttacaggtgtag

SEQ ID NO: 73822 - DNA, 24 bp, Artificial sequence
  SiRNA target sequence
tggatttatttttacaggtgtagt

SEQ ID NO: 73823 - DNA, 24 bp, Artificial sequence
  SiRNA target sequence
ggatttatttttacaggtgtagtg

SEQ ID NO: 73824 - DNA, 24 bp, Artificial sequence
  SiRNA target sequence
gatttatttttacaggtgtagtgc

SEQ ID NO: 73825 - DNA, 24 bp, Artificial sequence
  SiRNA target sequence
atttatttttacaggtgtagtgca

SEQ ID NO: 73826 - DNA, 24 bp, Artificial sequence
  SiRNA target sequence
tttatttttacaggtgtagtgcaa

SEQ ID NO: 73827 - DNA, 24 bp, Artificial sequence
  SiRNA target sequence
ttatttttacaggtgtagtgcaat

SEQ ID NO: 73828 - DNA, 24 bp, Artificial sequence
  SiRNA target sequence
tatttttacaggtgtagtgcaata

SEQ ID NO: 73829 - DNA, 24 bp, Artificial sequence
  SiRNA target sequence
atttttacaggtgtagtgcaatat

SEQ ID NO: 73830 - DNA, 24 bp, Artificial sequence
  SiRNA target sequence
tttttacaggtgtagtgcaatata

SEQ ID NO: 73831 - DNA, 24 bp, Artificial sequence
  SiRNA target sequence
ttttacaggtgtagtgcaatatat

SEQ ID NO: 73832 - DNA, 24 bp, Artificial sequence
  SiRNA target sequence
tttacaggtgtagtgcaatatatt

SEQ ID NO: 73833 - DNA, 24 bp, Artificial sequence
  SiRNA target sequence
ttacaggtgtagtgcaatatattt

SEQ ID NO: 73834 - DNA, 24 bp, Artificial sequence
  SiRNA target sequence
tacaggtgtagtgcaatatattta

SEQ ID NO: 73835 - DNA, 24 bp, Artificial sequence
  SiRNA target sequence
acaggtgtagtgcaatatatttat

SEQ ID NO: 73836 - DNA, 24 bp, Artificial sequence
  SiRNA target sequence
caggtgtagtgcaatatatttata

SEQ ID NO: 73837 - DNA, 24 bp, Artificial sequence
  SiRNA target sequence
aggtgtagtgcaatatatttatag

SEQ ID NO: 73838 - DNA, 24 bp, Artificial sequence
  SiRNA target sequence
ggtgtagtgcaatatatttataga

SEQ ID NO: 73839 - DNA, 24 bp, Artificial sequence
  SiRNA target sequence
gtgtagtgcaatatatttatagaa

SEQ ID NO: 73840 - DNA, 24 bp, Artificial sequence
  SiRNA target sequence
tgtagtgcaatatatttatagaaa

SEQ ID NO: 73841 - DNA, 24 bp, Artificial sequence
  SiRNA target sequence
gtagtgcaatatatttatagaaat

SEQ ID NO: 73842 - DNA, 24 bp, Artificial sequence
  SiRNA target sequence
tagtgcaatatatttatagaaata

SEQ ID NO: 73843 - DNA, 24 bp, Artificial sequence
  SiRNA target sequence
agtgcaatatatttatagaaatac

SEQ ID NO: 73844 - DNA, 24 bp, Artificial sequence
  SiRNA target sequence
gtgcaatatatttatagaaatacg

SEQ ID NO: 73845 - DNA, 24 bp, Artificial sequence
  SiRNA target sequence
tgcaatatatttatagaaatacgg

SEQ ID NO: 73846 - DNA, 24 bp, Artificial sequence
  SiRNA target sequence
gcaatatatttatagaaatacggc

SEQ ID NO: 73847 - DNA, 24 bp, Artificial sequence
  SiRNA target sequence
caatatatttatagaaatacggca

SEQ ID NO: 73848 - DNA, 24 bp, Artificial sequence
  SiRNA target sequence
aatatatttatagaaatacggcaa

SEQ ID NO: 73849 - DNA, 24 bp, Artificial sequence
  SiRNA target sequence
atatatttatagaaatacggcaaa

SEQ ID NO: 73850 - DNA, 24 bp, Artificial sequence
  SiRNA target sequence
tatatttatagaaatacggcaaaa

SEQ ID NO: 73851 - DNA, 24 bp, Artificial sequence
  SiRNA target sequence
atatttatagaaatacggcaaaat

SEQ ID NO: 73852 - DNA, 24 bp, Artificial sequence
  SiRNA target sequence
tatttatagaaatacggcaaaatc

SEQ ID NO: 73853 - DNA, 24 bp, Artificial sequence
  SiRNA target sequence
atttatagaaatacggcaaaatct

SEQ ID NO: 73854 - DNA, 24 bp, Artificial sequence
  SiRNA target sequence
tttatagaaatacggcaaaatcta

SEQ ID NO: 73855 - DNA, 24 bp, Artificial sequence
  SiRNA target sequence
ttatagaaatacggcaaaatctac

SEQ ID NO: 73856 - DNA, 24 bp, Artificial sequence
  SiRNA target sequence
tatagaaatacggcaaaatctaca

SEQ ID NO: 73857 - DNA, 24 bp, Artificial sequence
  SiRNA target sequence
atagaaatacggcaaaatctacat

SEQ ID NO: 73858 - DNA, 24 bp, Artificial sequence
  SiRNA target sequence
tagaaatacggcaaaatctacatt

SEQ ID NO: 73859 - DNA, 24 bp, Artificial sequence
  SiRNA target sequence
agaaatacggcaaaatctacattc

SEQ ID NO: 73860 - DNA, 24 bp, Artificial sequence
  SiRNA target sequence
gaaatacggcaaaatctacattca

SEQ ID NO: 73861 - DNA, 24 bp, Artificial sequence
  SiRNA target sequence
aaatacggcaaaatctacattcaa

SEQ ID NO: 73862 - DNA, 24 bp, Artificial sequence
  SiRNA target sequence
aatacggcaaaatctacattcaaa

SEQ ID NO: 73863 - DNA, 24 bp, Artificial sequence
  SiRNA target sequence
atacggcaaaatctacattcaaag

SEQ ID NO: 73864 - DNA, 24 bp, Artificial sequence
  SiRNA target sequence
tacggcaaaatctacattcaaagg

SEQ ID NO: 73865 - DNA, 24 bp, Artificial sequence
  SiRNA target sequence
acggcaaaatctacattcaaaggc

SEQ ID NO: 73866 - DNA, 24 bp, Artificial sequence
  SiRNA target sequence
cggcaaaatctacattcaaaggct

SEQ ID NO: 73867 - DNA, 24 bp, Artificial sequence
  SiRNA target sequence
ggcaaaatctacattcaaaggctt

SEQ ID NO: 73868 - DNA, 24 bp, Artificial sequence
  SiRNA target sequence
gcaaaatctacattcaaaggcttc

SEQ ID NO: 73869 - DNA, 24 bp, Artificial sequence
  SiRNA target sequence
caaaatctacattcaaaggcttca

SEQ ID NO: 73870 - DNA, 24 bp, Artificial sequence
  SiRNA target sequence
aaaatctacattcaaaggcttcat

SEQ ID NO: 73871 - DNA, 24 bp, Artificial sequence
  SiRNA target sequence
aaatctacattcaaaggcttcatt

SEQ ID NO: 73872 - DNA, 24 bp, Artificial sequence
  SiRNA target sequence
aatctacattcaaaggcttcattt

SEQ ID NO: 73873 - DNA, 24 bp, Artificial sequence
  SiRNA target sequence
atctacattcaaaggcttcatttc

SEQ ID NO: 73874 - DNA, 24 bp, Artificial sequence
  SiRNA target sequence
tctacattcaaaggcttcatttct

SEQ ID NO: 73875 - DNA, 24 bp, Artificial sequence
  SiRNA target sequence
ctacattcaaaggcttcatttctc

SEQ ID NO: 73876 - DNA, 24 bp, Artificial sequence
  SiRNA target sequence
tacattcaaaggcttcatttctct

SEQ ID NO: 73877 - DNA, 24 bp, Artificial sequence
  SiRNA target sequence
acattcaaaggcttcatttctctt

SEQ ID NO: 73878 - DNA, 24 bp, Artificial sequence
  SiRNA target sequence
cattcaaaggcttcatttctcttt

SEQ ID NO: 73879 - DNA, 24 bp, Artificial sequence
  SiRNA target sequence
attcaaaggcttcatttctctttc

SEQ ID NO: 73880 - DNA, 24 bp, Artificial sequence
  SiRNA target sequence
ttcaaaggcttcatttctctttca

SEQ ID NO: 73881 - DNA, 24 bp, Artificial sequence
  SiRNA target sequence
tcaaaggcttcatttctctttcac

SEQ ID NO: 73882 - DNA, 24 bp, Artificial sequence
  SiRNA target sequence
caaaggcttcatttctctttcacc

SEQ ID NO: 73883 - DNA, 24 bp, Artificial sequence
  SiRNA target sequence
aaaggcttcatttctctttcacct

SEQ ID NO: 73884 - DNA, 24 bp, Artificial sequence
  SiRNA target sequence
aaggcttcatttctctttcaccta

SEQ ID NO: 73885 - DNA, 24 bp, Artificial sequence
  SiRNA target sequence
aggcttcatttctctttcacctaa

SEQ ID NO: 73886 - DNA, 24 bp, Artificial sequence
  SiRNA target sequence
ggcttcatttctctttcacctaaa

SEQ ID NO: 73887 - DNA, 24 bp, Artificial sequence
  SiRNA target sequence
gcttcatttctctttcacctaaaa

SEQ ID NO: 73888 - DNA, 24 bp, Artificial sequence
  SiRNA target sequence
cttcatttctctttcacctaaaaa

SEQ ID NO: 73889 - DNA, 24 bp, Artificial sequence
  SiRNA target sequence
ttcatttctctttcacctaaaaat

SEQ ID NO: 73890 - DNA, 24 bp, Artificial sequence
  SiRNA target sequence
tcatttctctttcacctaaaaatt

SEQ ID NO: 73891 - DNA, 24 bp, Artificial sequence
  SiRNA target sequence
catttctctttcacctaaaaattt

SEQ ID NO: 73892 - DNA, 24 bp, Artificial sequence
  SiRNA target sequence
atttctctttcacctaaaaatttt

SEQ ID NO: 73893 - DNA, 24 bp, Artificial sequence
  SiRNA target sequence
tttctctttcacctaaaaatttta

SEQ ID NO: 73894 - DNA, 24 bp, Artificial sequence
  SiRNA target sequence
ttctctttcacctaaaaattttag

SEQ ID NO: 73895 - DNA, 24 bp, Artificial sequence
  SiRNA target sequence
tctctttcacctaaaaattttagt

SEQ ID NO: 73896 - DNA, 24 bp, Artificial sequence
  SiRNA target sequence
ctctttcacctaaaaattttagta

SEQ ID NO: 73897 - DNA, 24 bp, Artificial sequence
  SiRNA target sequence
tctttcacctaaaaattttagtac

SEQ ID NO: 73898 - DNA, 24 bp, Artificial sequence
  SiRNA target sequence
ctttcacctaaaaattttagtacc

SEQ ID NO: 73899 - DNA, 24 bp, Artificial sequence
  SiRNA target sequence
tttcacctaaaaattttagtacca

SEQ ID NO: 73900 - DNA, 24 bp, Artificial sequence
  SiRNA target sequence
ttcacctaaaaattttagtaccat

SEQ ID NO: 73901 - DNA, 24 bp, Artificial sequence
  SiRNA target sequence
tcacctaaaaattttagtaccata

SEQ ID NO: 73902 - DNA, 24 bp, Artificial sequence
  SiRNA target sequence
cacctaaaaattttagtaccatag

SEQ ID NO: 73903 - DNA, 24 bp, Artificial sequence
  SiRNA target sequence
acctaaaaattttagtaccatagg

SEQ ID NO: 73904 - DNA, 24 bp, Artificial sequence
  SiRNA target sequence
cctaaaaattttagtaccataggt

SEQ ID NO: 73905 - DNA, 24 bp, Artificial sequence
  SiRNA target sequence
ctaaaaattttagtaccataggtg

SEQ ID NO: 73906 - DNA, 24 bp, Artificial sequence
  SiRNA target sequence
taaaaattttagtaccataggtgg

SEQ ID NO: 73907 - DNA, 24 bp, Artificial sequence
  SiRNA target sequence
aaaaattttagtaccataggtggc

SEQ ID NO: 73908 - DNA, 24 bp, Artificial sequence
  SiRNA target sequence
aaaattttagtaccataggtggcg

SEQ ID NO: 73909 - DNA, 24 bp, Artificial sequence
  SiRNA target sequence
aaattttagtaccataggtggcgg

SEQ ID NO: 73910 - DNA, 24 bp, Artificial sequence
  SiRNA target sequence
aattttagtaccataggtggcgga

SEQ ID NO: 73911 - DNA, 24 bp, Artificial sequence
  SiRNA target sequence
attttagtaccataggtggcggag

SEQ ID NO: 73912 - DNA, 24 bp, Artificial sequence
  SiRNA target sequence
ttttagtaccataggtggcggaga

SEQ ID NO: 73913 - DNA, 24 bp, Artificial sequence
  SiRNA target sequence
tttagtaccataggtggcggagaa

SEQ ID NO: 73914 - DNA, 24 bp, Artificial sequence
  SiRNA target sequence
ttagtaccataggtggcggagaaa

SEQ ID NO: 73915 - DNA, 24 bp, Artificial sequence
  SiRNA target sequence
tagtaccataggtggcggagaaat

SEQ ID NO: 73916 - DNA, 24 bp, Artificial sequence
  SiRNA target sequence
agtaccataggtggcggagaaatt

SEQ ID NO: 73917 - DNA, 24 bp, Artificial sequence
  SiRNA target sequence
gtaccataggtggcggagaaattc

SEQ ID NO: 73918 - DNA, 24 bp, Artificial sequence
  SiRNA target sequence
taccataggtggcggagaaattca

SEQ ID NO: 73919 - DNA, 24 bp, Artificial sequence
  SiRNA target sequence
accataggtggcggagaaattcaa

SEQ ID NO: 73920 - DNA, 24 bp, Artificial sequence
  SiRNA target sequence
ccataggtggcggagaaattcaaa

SEQ ID NO: 73921 - DNA, 24 bp, Artificial sequence
  SiRNA target sequence
cataggtggcggagaaattcaaac

SEQ ID NO: 73922 - DNA, 24 bp, Artificial sequence
  SiRNA target sequence
ataggtggcggagaaattcaaaca

SEQ ID NO: 73923 - DNA, 24 bp, Artificial sequence
  SiRNA target sequence
taggtggcggagaaattcaaacaa

SEQ ID NO: 73924 - DNA, 24 bp, Artificial sequence
  SiRNA target sequence
aggtggcggagaaattcaaacaat

SEQ ID NO: 73925 - DNA, 24 bp, Artificial sequence
  SiRNA target sequence
ggtggcggagaaattcaaacaata

SEQ ID NO: 73926 - DNA, 24 bp, Artificial sequence
  SiRNA target sequence
gtggcggagaaattcaaacaataa

SEQ ID NO: 73927 - DNA, 24 bp, Artificial sequence
  SiRNA target sequence
tggcggagaaattcaaacaataat

SEQ ID NO: 73928 - DNA, 24 bp, Artificial sequence
  SiRNA target sequence
ggcggagaaattcaaacaataata

SEQ ID NO: 73929 - DNA, 24 bp, Artificial sequence
  SiRNA target sequence
gcggagaaattcaaacaataatag

SEQ ID NO: 73930 - DNA, 24 bp, Artificial sequence
  SiRNA target sequence
cggagaaattcaaacaataataga

SEQ ID NO: 73931 - DNA, 24 bp, Artificial sequence
  SiRNA target sequence
ggagaaattcaaacaataatagat

SEQ ID NO: 73932 - DNA, 24 bp, Artificial sequence
  SiRNA target sequence
gagaaattcaaacaataatagata

SEQ ID NO: 73933 - DNA, 24 bp, Artificial sequence
  SiRNA target sequence
agaaattcaaacaataatagatag

SEQ ID NO: 73934 - DNA, 24 bp, Artificial sequence
  SiRNA target sequence
gaaattcaaacaataatagataga

SEQ ID NO: 73935 - DNA, 24 bp, Artificial sequence
  SiRNA target sequence
aaattcaaacaataatagatagaa

SEQ ID NO: 73936 - DNA, 24 bp, Artificial sequence
  SiRNA target sequence
aattcaaacaataatagatagaaa

SEQ ID NO: 73937 - DNA, 24 bp, Artificial sequence
  SiRNA target sequence
attcaaacaataatagatagaaaa

SEQ ID NO: 73938 - DNA, 24 bp, Artificial sequence
  SiRNA target sequence
ttcaaacaataatagatagaaaat

SEQ ID NO: 73939 - DNA, 24 bp, Artificial sequence
  SiRNA target sequence
tcaaacaataatagatagaaaatc

SEQ ID NO: 73940 - DNA, 24 bp, Artificial sequence
  SiRNA target sequence
caaacaataatagatagaaaatca

SEQ ID NO: 73941 - DNA, 24 bp, Artificial sequence
  SiRNA target sequence
aaacaataatagatagaaaatcaa

SEQ ID NO: 73942 - DNA, 24 bp, Artificial sequence
  SiRNA target sequence
aacaataatagatagaaaatcaaa

SEQ ID NO: 73943 - DNA, 24 bp, Artificial sequence
  SiRNA target sequence
acaataatagatagaaaatcaaaa

SEQ ID NO: 73944 - DNA, 24 bp, Artificial sequence
  SiRNA target sequence
caataatagatagaaaatcaaaat

SEQ ID NO: 73945 - DNA, 24 bp, Artificial sequence
  SiRNA target sequence
aataatagatagaaaatcaaaatc

SEQ ID NO: 73946 - DNA, 24 bp, Artificial sequence
  SiRNA target sequence
ataatagatagaaaatcaaaatct

SEQ ID NO: 73947 - DNA, 24 bp, Artificial sequence
  SiRNA target sequence
taatagatagaaaatcaaaatctg

SEQ ID NO: 73948 - DNA, 24 bp, Artificial sequence
  SiRNA target sequence
aatagatagaaaatcaaaatctgc

SEQ ID NO: 73949 - DNA, 24 bp, Artificial sequence
  SiRNA target sequence
atagatagaaaatcaaaatctgca

SEQ ID NO: 73950 - DNA, 24 bp, Artificial sequence
  SiRNA target sequence
tagatagaaaatcaaaatctgcaa

SEQ ID NO: 73951 - DNA, 24 bp, Artificial sequence
  SiRNA target sequence
agatagaaaatcaaaatctgcaag

SEQ ID NO: 73952 - DNA, 24 bp, Artificial sequence
  SiRNA target sequence
gatagaaaatcaaaatctgcaagt

SEQ ID NO: 73953 - DNA, 24 bp, Artificial sequence
  SiRNA target sequence
atagaaaatcaaaatctgcaagtg

SEQ ID NO: 73954 - DNA, 24 bp, Artificial sequence
  SiRNA target sequence
tagaaaatcaaaatctgcaagtga

SEQ ID NO: 73955 - DNA, 24 bp, Artificial sequence
  SiRNA target sequence
agaaaatcaaaatctgcaagtgaa

SEQ ID NO: 73956 - DNA, 24 bp, Artificial sequence
  SiRNA target sequence
gaaaatcaaaatctgcaagtgaac

SEQ ID NO: 73957 - DNA, 24 bp, Artificial sequence
  SiRNA target sequence
aaaatcaaaatctgcaagtgaact

SEQ ID NO: 73958 - DNA, 24 bp, Artificial sequence
  SiRNA target sequence
aaatcaaaatctgcaagtgaactt

SEQ ID NO: 73959 - DNA, 24 bp, Artificial sequence
  SiRNA target sequence
aatcaaaatctgcaagtgaactta

SEQ ID NO: 73960 - DNA, 24 bp, Artificial sequence
  SiRNA target sequence
atcaaaatctgcaagtgaacttat

SEQ ID NO: 73961 - DNA, 24 bp, Artificial sequence
  SiRNA target sequence
tcaaaatctgcaagtgaacttatt

SEQ ID NO: 73962 - DNA, 24 bp, Artificial sequence
  SiRNA target sequence
caaaatctgcaagtgaacttattg

SEQ ID NO: 73963 - DNA, 24 bp, Artificial sequence
  SiRNA target sequence
aaaatctgcaagtgaacttattga

SEQ ID NO: 73964 - DNA, 24 bp, Artificial sequence
  SiRNA target sequence
aaatctgcaagtgaacttattgaa

SEQ ID NO: 73965 - DNA, 24 bp, Artificial sequence
  SiRNA target sequence
aatctgcaagtgaacttattgaag

SEQ ID NO: 73966 - DNA, 24 bp, Artificial sequence
  SiRNA target sequence
atctgcaagtgaacttattgaagt

SEQ ID NO: 73967 - DNA, 24 bp, Artificial sequence
  SiRNA target sequence
tctgcaagtgaacttattgaagtg

SEQ ID NO: 73968 - DNA, 24 bp, Artificial sequence
  SiRNA target sequence
ctgcaagtgaacttattgaagtgt

SEQ ID NO: 73969 - DNA, 24 bp, Artificial sequence
  SiRNA target sequence
tgcaagtgaacttattgaagtgtt

SEQ ID NO: 73970 - DNA, 24 bp, Artificial sequence
  SiRNA target sequence
gcaagtgaacttattgaagtgttt

SEQ ID NO: 73971 - DNA, 24 bp, Artificial sequence
  SiRNA target sequence
caagtgaacttattgaagtgtttc

SEQ ID NO: 73972 - DNA, 24 bp, Artificial sequence
  SiRNA target sequence
aagtgaacttattgaagtgtttct

SEQ ID NO: 73973 - DNA, 24 bp, Artificial sequence
  SiRNA target sequence
agtgaacttattgaagtgtttctt

SEQ ID NO: 73974 - DNA, 24 bp, Artificial sequence
  SiRNA target sequence
gtgaacttattgaagtgtttctta

SEQ ID NO: 73975 - DNA, 24 bp, Artificial sequence
  SiRNA target sequence
tgaacttattgaagtgtttcttac

SEQ ID NO: 73976 - DNA, 24 bp, Artificial sequence
  SiRNA target sequence
gaacttattgaagtgtttcttaca

SEQ ID NO: 73977 - DNA, 24 bp, Artificial sequence
  SiRNA target sequence
aacttattgaagtgtttcttacaa

SEQ ID NO: 73978 - DNA, 24 bp, Artificial sequence
  SiRNA target sequence
acttattgaagtgtttcttacaag

SEQ ID NO: 73979 - DNA, 24 bp, Artificial sequence
  SiRNA target sequence
cttattgaagtgtttcttacaagc

SEQ ID NO: 73980 - DNA, 24 bp, Artificial sequence
  SiRNA target sequence
ttattgaagtgtttcttacaagct

SEQ ID NO: 73981 - DNA, 24 bp, Artificial sequence
  SiRNA target sequence
tattgaagtgtttcttacaagctt

SEQ ID NO: 73982 - DNA, 24 bp, Artificial sequence
  SiRNA target sequence
attgaagtgtttcttacaagcttg

SEQ ID NO: 73983 - DNA, 24 bp, Artificial sequence
  SiRNA target sequence
ttgaagtgtttcttacaagcttgc

SEQ ID NO: 73984 - DNA, 24 bp, Artificial sequence
  SiRNA target sequence
tgaagtgtttcttacaagcttgct

SEQ ID NO: 73985 - DNA, 24 bp, Artificial sequence
  SiRNA target sequence
gaagtgtttcttacaagcttgctt

SEQ ID NO: 73986 - DNA, 24 bp, Artificial sequence
  SiRNA target sequence
aagtgtttcttacaagcttgcttc

SEQ ID NO: 73987 - DNA, 24 bp, Artificial sequence
  SiRNA target sequence
agtgtttcttacaagcttgcttcc

SEQ ID NO: 73988 - DNA, 24 bp, Artificial sequence
  SiRNA target sequence
gtgtttcttacaagcttgcttcca

SEQ ID NO: 73989 - DNA, 24 bp, Artificial sequence
  SiRNA target sequence
tgtttcttacaagcttgcttccaa

SEQ ID NO: 73990 - DNA, 24 bp, Artificial sequence
  SiRNA target sequence
gtttcttacaagcttgcttccaat

SEQ ID NO: 73991 - DNA, 24 bp, Artificial sequence
  SiRNA target sequence
tttcttacaagcttgcttccaata

SEQ ID NO: 73992 - DNA, 24 bp, Artificial sequence
  SiRNA target sequence
ttcttacaagcttgcttccaatat

SEQ ID NO: 73993 - DNA, 24 bp, Artificial sequence
  SiRNA target sequence
tcttacaagcttgcttccaatatg

SEQ ID NO: 73994 - DNA, 24 bp, Artificial sequence
  SiRNA target sequence
cttacaagcttgcttccaatatgc

SEQ ID NO: 73995 - DNA, 24 bp, Artificial sequence
  SiRNA target sequence
ttacaagcttgcttccaatatgcc

SEQ ID NO: 73996 - DNA, 24 bp, Artificial sequence
  SiRNA target sequence
tacaagcttgcttccaatatgcct

SEQ ID NO: 73997 - DNA, 24 bp, Artificial sequence
  SiRNA target sequence
acaagcttgcttccaatatgcctt

SEQ ID NO: 73998 - DNA, 24 bp, Artificial sequence
  SiRNA target sequence
caagcttgcttccaatatgcctta

SEQ ID NO: 73999 - DNA, 24 bp, Artificial sequence
  SiRNA target sequence
aagcttgcttccaatatgccttaa

SEQ ID NO: 74000 - DNA, 24 bp, Artificial sequence
  SiRNA target sequence
agcttgcttccaatatgccttaaa

SEQ ID NO: 74001 - DNA, 24 bp, Artificial sequence
  SiRNA target sequence
gcttgcttccaatatgccttaaac

SEQ ID NO: 74002 - DNA, 24 bp, Artificial sequence
  SiRNA target sequence
cttgcttccaatatgccttaaact

SEQ ID NO: 74003 - DNA, 24 bp, Artificial sequence
  SiRNA target sequence
ttgcttccaatatgccttaaactt

SEQ ID NO: 74004 - DNA, 24 bp, Artificial sequence
  SiRNA target sequence
tgcttccaatatgccttaaacttt

SEQ ID NO: 74005 - DNA, 24 bp, Artificial sequence
  SiRNA target sequence
gcttccaatatgccttaaactttt

SEQ ID NO: 74006 - DNA, 24 bp, Artificial sequence
  SiRNA target sequence
cttccaatatgccttaaactttta

SEQ ID NO: 74007 - DNA, 24 bp, Artificial sequence
  SiRNA target sequence
ttccaatatgccttaaacttttat

SEQ ID NO: 74008 - DNA, 24 bp, Artificial sequence
  SiRNA target sequence
tccaatatgccttaaacttttatt

SEQ ID NO: 74009 - DNA, 24 bp, Artificial sequence
  SiRNA target sequence
ccaatatgccttaaacttttattt

SEQ ID NO: 74010 - DNA, 24 bp, Artificial sequence
  SiRNA target sequence
caatatgccttaaacttttatttg

SEQ ID NO: 74011 - DNA, 24 bp, Artificial sequence
  SiRNA target sequence
aatatgccttaaacttttatttgc

SEQ ID NO: 74012 - DNA, 24 bp, Artificial sequence
  SiRNA target sequence
atatgccttaaacttttatttgcc

SEQ ID NO: 74013 - DNA, 24 bp, Artificial sequence
  SiRNA target sequence
tatgccttaaacttttatttgccc

SEQ ID NO: 74014 - DNA, 24 bp, Artificial sequence
  SiRNA target sequence
atgccttaaacttttatttgccct

SEQ ID NO: 74015 - DNA, 24 bp, Artificial sequence
  SiRNA target sequence
tgccttaaacttttatttgccctt

SEQ ID NO: 74016 - DNA, 24 bp, Artificial sequence
  SiRNA target sequence
gccttaaacttttatttgccctta

SEQ ID NO: 74017 - DNA, 24 bp, Artificial sequence
  SiRNA target sequence
ccttaaacttttatttgcccttat

SEQ ID NO: 74018 - DNA, 24 bp, Artificial sequence
  SiRNA target sequence
cttaaacttttatttgcccttatt

SEQ ID NO: 74019 - DNA, 24 bp, Artificial sequence
  SiRNA target sequence
ttaaacttttatttgcccttattg

SEQ ID NO: 74020 - DNA, 24 bp, Artificial sequence
  SiRNA target sequence
taaacttttatttgcccttattgc

SEQ ID NO: 74021 - DNA, 24 bp, Artificial sequence
  SiRNA target sequence
aaacttttatttgcccttattgca

SEQ ID NO: 74022 - DNA, 24 bp, Artificial sequence
  SiRNA target sequence
aacttttatttgcccttattgcag

SEQ ID NO: 74023 - DNA, 24 bp, Artificial sequence
  SiRNA target sequence
acttttatttgcccttattgcagt

SEQ ID NO: 74024 - DNA, 24 bp, Artificial sequence
  SiRNA target sequence
cttttatttgcccttattgcagtt

SEQ ID NO: 74025 - DNA, 24 bp, Artificial sequence
  SiRNA target sequence
ttttatttgcccttattgcagtta

SEQ ID NO: 74026 - DNA, 24 bp, Artificial sequence
  SiRNA target sequence
tttatttgcccttattgcagttat

SEQ ID NO: 74027 - DNA, 24 bp, Artificial sequence
  SiRNA target sequence
ttatttgcccttattgcagttata

SEQ ID NO: 74028 - DNA, 24 bp, Artificial sequence
  SiRNA target sequence
tatttgcccttattgcagttataa

SEQ ID NO: 74029 - DNA, 24 bp, Artificial sequence
  SiRNA target sequence
atttgcccttattgcagttataaa

SEQ ID NO: 74030 - DNA, 24 bp, Artificial sequence
  SiRNA target sequence
tttgcccttattgcagttataaaa

SEQ ID NO: 74031 - DNA, 24 bp, Artificial sequence
  SiRNA target sequence
ttgcccttattgcagttataaaaa

SEQ ID NO: 74032 - DNA, 24 bp, Artificial sequence
  SiRNA target sequence
tgcccttattgcagttataaaaaa

SEQ ID NO: 74033 - DNA, 24 bp, Artificial sequence
  SiRNA target sequence
gcccttattgcagttataaaaaat

SEQ ID NO: 74034 - DNA, 24 bp, Artificial sequence
  SiRNA target sequence
cccttattgcagttataaaaaata

SEQ ID NO: 74035 - DNA, 24 bp, Artificial sequence
  SiRNA target sequence
ccttattgcagttataaaaaatat

SEQ ID NO: 74036 - DNA, 24 bp, Artificial sequence
  SiRNA target sequence
cttattgcagttataaaaaatatg

SEQ ID NO: 74037 - DNA, 24 bp, Artificial sequence
  SiRNA target sequence
ttattgcagttataaaaaatatgg

SEQ ID NO: 74038 - DNA, 24 bp, Artificial sequence
  SiRNA target sequence
tattgcagttataaaaaatatggg

SEQ ID NO: 74039 - DNA, 24 bp, Artificial sequence
  SiRNA target sequence
attgcagttataaaaaatatggga

SEQ ID NO: 74040 - DNA, 24 bp, Artificial sequence
  SiRNA target sequence
ttgcagttataaaaaatatgggag

SEQ ID NO: 74041 - DNA, 24 bp, Artificial sequence
  SiRNA target sequence
tgcagttataaaaaatatgggagg

SEQ ID NO: 74042 - DNA, 24 bp, Artificial sequence
  SiRNA target sequence
gcagttataaaaaatatgggaggt

SEQ ID NO: 74043 - DNA, 24 bp, Artificial sequence
  SiRNA target sequence
cagttataaaaaatatgggaggtc

SEQ ID NO: 74044 - DNA, 24 bp, Artificial sequence
  SiRNA target sequence
agttataaaaaatatgggaggtct

SEQ ID NO: 74045 - DNA, 24 bp, Artificial sequence
  SiRNA target sequence
gttataaaaaatatgggaggtctt

SEQ ID NO: 74046 - DNA, 24 bp, Artificial sequence
  SiRNA target sequence
ttataaaaaatatgggaggtcttg

SEQ ID NO: 74047 - DNA, 24 bp, Artificial sequence
  SiRNA target sequence
tataaaaaatatgggaggtcttgc

SEQ ID NO: 74048 - DNA, 24 bp, Artificial sequence
  SiRNA target sequence
ataaaaaatatgggaggtcttgcg

SEQ ID NO: 74049 - DNA, 24 bp, Artificial sequence
  SiRNA target sequence
taaaaaatatgggaggtcttgcgg

SEQ ID NO: 74050 - DNA, 24 bp, Artificial sequence
  SiRNA target sequence
aaaaaatatgggaggtcttgcggg

SEQ ID NO: 74051 - DNA, 24 bp, Artificial sequence
  SiRNA target sequence
aaaaatatgggaggtcttgcgggc

SEQ ID NO: 74052 - DNA, 24 bp, Artificial sequence
  SiRNA target sequence
aaaatatgggaggtcttgcgggct

SEQ ID NO: 74053 - DNA, 24 bp, Artificial sequence
  SiRNA target sequence
aaatatgggaggtcttgcgggctt

SEQ ID NO: 74054 - DNA, 24 bp, Artificial sequence
  SiRNA target sequence
aatatgggaggtcttgcgggcttc

SEQ ID NO: 74055 - DNA, 24 bp, Artificial sequence
  SiRNA target sequence
atatgggaggtcttgcgggcttca

SEQ ID NO: 74056 - DNA, 24 bp, Artificial sequence
  SiRNA target sequence
tatgggaggtcttgcgggcttcat

SEQ ID NO: 74057 - DNA, 24 bp, Artificial sequence
  SiRNA target sequence
atgggaggtcttgcgggcttcata

SEQ ID NO: 74058 - DNA, 24 bp, Artificial sequence
  SiRNA target sequence
tgggaggtcttgcgggcttcataa

SEQ ID NO: 74059 - DNA, 24 bp, Artificial sequence
  SiRNA target sequence
gggaggtcttgcgggcttcataat

SEQ ID NO: 74060 - DNA, 24 bp, Artificial sequence
  SiRNA target sequence
ggaggtcttgcgggcttcataatg

SEQ ID NO: 74061 - DNA, 24 bp, Artificial sequence
  SiRNA target sequence
gaggtcttgcgggcttcataatgt

SEQ ID NO: 74062 - DNA, 24 bp, Artificial sequence
  SiRNA target sequence
aggtcttgcgggcttcataatgtt

SEQ ID NO: 74063 - DNA, 24 bp, Artificial sequence
  SiRNA target sequence
ggtcttgcgggcttcataatgttt

SEQ ID NO: 74064 - DNA, 24 bp, Artificial sequence
  SiRNA target sequence
gtcttgcgggcttcataatgtttg

SEQ ID NO: 74065 - DNA, 24 bp, Artificial sequence
  SiRNA target sequence
tcttgcgggcttcataatgtttgt

SEQ ID NO: 74066 - DNA, 24 bp, Artificial sequence
  SiRNA target sequence
cttgcgggcttcataatgtttgtt

SEQ ID NO: 74067 - DNA, 24 bp, Artificial sequence
  SiRNA target sequence
ttgcgggcttcataatgtttgttt

SEQ ID NO: 74068 - DNA, 24 bp, Artificial sequence
  SiRNA target sequence
tgcgggcttcataatgtttgtttg

SEQ ID NO: 74069 - DNA, 24 bp, Artificial sequence
  SiRNA target sequence
gcgggcttcataatgtttgtttgt

SEQ ID NO: 74070 - DNA, 24 bp, Artificial sequence
  SiRNA target sequence
cgggcttcataatgtttgtttgtg

SEQ ID NO: 74071 - DNA, 24 bp, Artificial sequence
  SiRNA target sequence
gggcttcataatgtttgtttgtgt

SEQ ID NO: 74072 - DNA, 24 bp, Artificial sequence
  SiRNA target sequence
ggcttcataatgtttgtttgtgtt

SEQ ID NO: 74073 - DNA, 24 bp, Artificial sequence
  SiRNA target sequence
gcttcataatgtttgtttgtgttt

SEQ ID NO: 74074 - DNA, 24 bp, Artificial sequence
  SiRNA target sequence
cttcataatgtttgtttgtgtttc

SEQ ID NO: 74075 - DNA, 24 bp, Artificial sequence
  SiRNA target sequence
ttcataatgtttgtttgtgtttct

SEQ ID NO: 74076 - DNA, 24 bp, Artificial sequence
  SiRNA target sequence
tcataatgtttgtttgtgtttctt

SEQ ID NO: 74077 - DNA, 24 bp, Artificial sequence
  SiRNA target sequence
cataatgtttgtttgtgtttcttg

SEQ ID NO: 74078 - DNA, 24 bp, Artificial sequence
  SiRNA target sequence
ataatgtttgtttgtgtttcttgc

SEQ ID NO: 74079 - DNA, 24 bp, Artificial sequence
  SiRNA target sequence
taatgtttgtttgtgtttcttgct

SEQ ID NO: 74080 - DNA, 24 bp, Artificial sequence
  SiRNA target sequence
aatgtttgtttgtgtttcttgcta

SEQ ID NO: 74081 - DNA, 24 bp, Artificial sequence
  SiRNA target sequence
atgtttgtttgtgtttcttgctat

SEQ ID NO: 74082 - DNA, 24 bp, Artificial sequence
  SiRNA target sequence
tgtttgtttgtgtttcttgctatg

SEQ ID NO: 74083 - DNA, 24 bp, Artificial sequence
  SiRNA target sequence
gtttgtttgtgtttcttgctatgc

SEQ ID NO: 74084 - DNA, 24 bp, Artificial sequence
  SiRNA target sequence
tttgtttgtgtttcttgctatgcg

SEQ ID NO: 74085 - DNA, 24 bp, Artificial sequence
  SiRNA target sequence
ttgtttgtgtttcttgctatgcga

SEQ ID NO: 74086 - DNA, 24 bp, Artificial sequence
  SiRNA target sequence
tgtttgtgtttcttgctatgcgac

SEQ ID NO: 74087 - DNA, 24 bp, Artificial sequence
  SiRNA target sequence
gtttgtgtttcttgctatgcgact

SEQ ID NO: 74088 - DNA, 24 bp, Artificial sequence
  SiRNA target sequence
tttgtgtttcttgctatgcgactg

SEQ ID NO: 74089 - DNA, 24 bp, Artificial sequence
  SiRNA target sequence
ttgtgtttcttgctatgcgactgt

SEQ ID NO: 74090 - DNA, 24 bp, Artificial sequence
  SiRNA target sequence
tgtgtttcttgctatgcgactgtg

SEQ ID NO: 74091 - DNA, 24 bp, Artificial sequence
  SiRNA target sequence
gtgtttcttgctatgcgactgtga

SEQ ID NO: 74092 - DNA, 24 bp, Artificial sequence
  SiRNA target sequence
tgtttcttgctatgcgactgtgac

SEQ ID NO: 74093 - DNA, 24 bp, Artificial sequence
  SiRNA target sequence
gtttcttgctatgcgactgtgact

SEQ ID NO: 74094 - DNA, 24 bp, Artificial sequence
  SiRNA target sequence
tttcttgctatgcgactgtgacta

SEQ ID NO: 74095 - DNA, 24 bp, Artificial sequence
  SiRNA target sequence
ttcttgctatgcgactgtgactat

SEQ ID NO: 74096 - DNA, 24 bp, Artificial sequence
  SiRNA target sequence
tcttgctatgcgactgtgactata

SEQ ID NO: 74097 - DNA, 24 bp, Artificial sequence
  SiRNA target sequence
cttgctatgcgactgtgactatat

SEQ ID NO: 74098 - DNA, 24 bp, Artificial sequence
  SiRNA target sequence
ttgctatgcgactgtgactatatt

SEQ ID NO: 74099 - DNA, 24 bp, Artificial sequence
  SiRNA target sequence
tgctatgcgactgtgactatattg

SEQ ID NO: 74100 - DNA, 24 bp, Artificial sequence
  SiRNA target sequence
gctatgcgactgtgactatattga

SEQ ID NO: 74101 - DNA, 24 bp, Artificial sequence
  SiRNA target sequence
ctatgcgactgtgactatattgat

SEQ ID NO: 74102 - DNA, 24 bp, Artificial sequence
  SiRNA target sequence
tatgcgactgtgactatattgata

SEQ ID NO: 74103 - DNA, 24 bp, Artificial sequence
  SiRNA target sequence
atgcgactgtgactatattgatag

SEQ ID NO: 74104 - DNA, 24 bp, Artificial sequence
  SiRNA target sequence
tgcgactgtgactatattgatagc

SEQ ID NO: 74105 - DNA, 24 bp, Artificial sequence
  SiRNA target sequence
gcgactgtgactatattgatagca

SEQ ID NO: 74106 - DNA, 24 bp, Artificial sequence
  SiRNA target sequence
cgactgtgactatattgatagcac

SEQ ID NO: 74107 - DNA, 24 bp, Artificial sequence
  SiRNA target sequence
gactgtgactatattgatagcaca

SEQ ID NO: 74108 - DNA, 24 bp, Artificial sequence
  SiRNA target sequence
actgtgactatattgatagcacaa

SEQ ID NO: 74109 - DNA, 24 bp, Artificial sequence
  SiRNA target sequence
ctgtgactatattgatagcacaat

SEQ ID NO: 74110 - DNA, 24 bp, Artificial sequence
  SiRNA target sequence
tgtgactatattgatagcacaatg

SEQ ID NO: 74111 - DNA, 24 bp, Artificial sequence
  SiRNA target sequence
gtgactatattgatagcacaatgg

SEQ ID NO: 74112 - DNA, 24 bp, Artificial sequence
  SiRNA target sequence
tgactatattgatagcacaatgga

SEQ ID NO: 74113 - DNA, 24 bp, Artificial sequence
  SiRNA target sequence
gactatattgatagcacaatggag

SEQ ID NO: 74114 - DNA, 24 bp, Artificial sequence
  SiRNA target sequence
actatattgatagcacaatggaga

SEQ ID NO: 74115 - DNA, 24 bp, Artificial sequence
  SiRNA target sequence
ctatattgatagcacaatggagat

SEQ ID NO: 74116 - DNA, 24 bp, Artificial sequence
  SiRNA target sequence
tatattgatagcacaatggagatc

SEQ ID NO: 74117 - DNA, 24 bp, Artificial sequence
  SiRNA target sequence
atattgatagcacaatggagatct

SEQ ID NO: 74118 - DNA, 24 bp, Artificial sequence
  SiRNA target sequence
tattgatagcacaatggagatcta

SEQ ID NO: 74119 - DNA, 24 bp, Artificial sequence
  SiRNA target sequence
attgatagcacaatggagatctaa

SEQ ID NO: 74120 - DNA, 24 bp, Artificial sequence
  SiRNA target sequence
ttgatagcacaatggagatctaat

SEQ ID NO: 74121 - DNA, 24 bp, Artificial sequence
  SiRNA target sequence
tgatagcacaatggagatctaata

SEQ ID NO: 74122 - DNA, 24 bp, Artificial sequence
  SiRNA target sequence
gatagcacaatggagatctaatat

SEQ ID NO: 74123 - DNA, 24 bp, Artificial sequence
  SiRNA target sequence
atagcacaatggagatctaatatt

SEQ ID NO: 74124 - DNA, 24 bp, Artificial sequence
  SiRNA target sequence
tagcacaatggagatctaatatta

SEQ ID NO: 74125 - DNA, 24 bp, Artificial sequence
  SiRNA target sequence
agcacaatggagatctaatattag

SEQ ID NO: 74126 - DNA, 24 bp, Artificial sequence
  SiRNA target sequence
gcacaatggagatctaatattaga

SEQ ID NO: 74127 - DNA, 24 bp, Artificial sequence
  SiRNA target sequence
cacaatggagatctaatattagaa

SEQ ID NO: 74128 - DNA, 24 bp, Artificial sequence
  SiRNA target sequence
acaatggagatctaatattagaag

SEQ ID NO: 74129 - DNA, 24 bp, Artificial sequence
  SiRNA target sequence
caatggagatctaatattagaaga

SEQ ID NO: 74130 - DNA, 24 bp, Artificial sequence
  SiRNA target sequence
aatggagatctaatattagaagag

SEQ ID NO: 74131 - DNA, 24 bp, Artificial sequence
  SiRNA target sequence
atggagatctaatattagaagaga

SEQ ID NO: 74132 - DNA, 24 bp, Artificial sequence
  SiRNA target sequence
tggagatctaatattagaagagaa

SEQ ID NO: 74133 - DNA, 24 bp, Artificial sequence
  SiRNA target sequence
ggagatctaatattagaagagaac

SEQ ID NO: 74134 - DNA, 24 bp, Artificial sequence
  SiRNA target sequence
gagatctaatattagaagagaact

SEQ ID NO: 74135 - DNA, 24 bp, Artificial sequence
  SiRNA target sequence
agatctaatattagaagagaactt

SEQ ID NO: 74136 - DNA, 24 bp, Artificial sequence
  SiRNA target sequence
gatctaatattagaagagaactta

SEQ ID NO: 74137 - DNA, 24 bp, Artificial sequence
  SiRNA target sequence
atctaatattagaagagaacttaa

SEQ ID NO: 74138 - DNA, 24 bp, Artificial sequence
  SiRNA target sequence
tctaatattagaagagaacttaat

SEQ ID NO: 74139 - DNA, 24 bp, Artificial sequence
  SiRNA target sequence
ctaatattagaagagaacttaata

SEQ ID NO: 74140 - DNA, 24 bp, Artificial sequence
  SiRNA target sequence
taatattagaagagaacttaataa

SEQ ID NO: 74141 - DNA, 24 bp, Artificial sequence
  SiRNA target sequence
aatattagaagagaacttaataac

SEQ ID NO: 74142 - DNA, 24 bp, Artificial sequence
  SiRNA target sequence
atattagaagagaacttaataact

SEQ ID NO: 74143 - DNA, 24 bp, Artificial sequence
  SiRNA target sequence
tattagaagagaacttaataactc

SEQ ID NO: 74144 - DNA, 24 bp, Artificial sequence
  SiRNA target sequence
attagaagagaacttaataactct

SEQ ID NO: 74145 - DNA, 24 bp, Artificial sequence
  SiRNA target sequence
ttagaagagaacttaataactctg

SEQ ID NO: 74146 - DNA, 24 bp, Artificial sequence
  SiRNA target sequence
tagaagagaacttaataactctga

SEQ ID NO: 74147 - DNA, 24 bp, Artificial sequence
  SiRNA target sequence
agaagagaacttaataactctgaa

SEQ ID NO: 74148 - DNA, 24 bp, Artificial sequence
  SiRNA target sequence
gaagagaacttaataactctgaaa

SEQ ID NO: 74149 - DNA, 24 bp, Artificial sequence
  SiRNA target sequence
aagagaacttaataactctgaaaa

SEQ ID NO: 74150 - DNA, 24 bp, Artificial sequence
  SiRNA target sequence
agagaacttaataactctgaaaat

SEQ ID NO: 74151 - DNA, 24 bp, Artificial sequence
  SiRNA target sequence
gagaacttaataactctgaaaata

SEQ ID NO: 74152 - DNA, 24 bp, Artificial sequence
  SiRNA target sequence
agaacttaataactctgaaaatag

SEQ ID NO: 74153 - DNA, 24 bp, Artificial sequence
  SiRNA target sequence
gaacttaataactctgaaaataga

SEQ ID NO: 74154 - DNA, 24 bp, Artificial sequence
  SiRNA target sequence
aacttaataactctgaaaatagat

SEQ ID NO: 74155 - DNA, 24 bp, Artificial sequence
  SiRNA target sequence
acttaataactctgaaaatagatc

SEQ ID NO: 74156 - DNA, 24 bp, Artificial sequence
  SiRNA target sequence
cttaataactctgaaaatagatct

SEQ ID NO: 74157 - DNA, 24 bp, Artificial sequence
  SiRNA target sequence
ttaataactctgaaaatagatcta

SEQ ID NO: 74158 - DNA, 24 bp, Artificial sequence
  SiRNA target sequence
taataactctgaaaatagatctag

SEQ ID NO: 74159 - DNA, 24 bp, Artificial sequence
  SiRNA target sequence
aataactctgaaaatagatctagt

SEQ ID NO: 74160 - DNA, 24 bp, Artificial sequence
  SiRNA target sequence
ataactctgaaaatagatctagta

SEQ ID NO: 74161 - DNA, 24 bp, Artificial sequence
  SiRNA target sequence
taactctgaaaatagatctagtaa

SEQ ID NO: 74162 - DNA, 24 bp, Artificial sequence
  SiRNA target sequence
aactctgaaaatagatctagtaat

SEQ ID NO: 74163 - DNA, 24 bp, Artificial sequence
  SiRNA target sequence
actctgaaaatagatctagtaata

SEQ ID NO: 74164 - DNA, 24 bp, Artificial sequence
  SiRNA target sequence
ctctgaaaatagatctagtaataa

SEQ ID NO: 74165 - DNA, 24 bp, Artificial sequence
  SiRNA target sequence
tctgaaaatagatctagtaataaa

SEQ ID NO: 74166 - DNA, 24 bp, Artificial sequence
  SiRNA target sequence
ctgaaaatagatctagtaataaac

SEQ ID NO: 74167 - DNA, 24 bp, Artificial sequence
  SiRNA target sequence
tgaaaatagatctagtaataaact

SEQ ID NO: 74168 - DNA, 24 bp, Artificial sequence
  SiRNA target sequence
gaaaatagatctagtaataaacta

SEQ ID NO: 74169 - DNA, 24 bp, Artificial sequence
  SiRNA target sequence
aaaatagatctagtaataaactac

SEQ ID NO: 74170 - DNA, 24 bp, Artificial sequence
  SiRNA target sequence
aaatagatctagtaataaactaca

SEQ ID NO: 74171 - DNA, 24 bp, Artificial sequence
  SiRNA target sequence
aatagatctagtaataaactacaa

SEQ ID NO: 74172 - DNA, 24 bp, Artificial sequence
  SiRNA target sequence
atagatctagtaataaactacaag

SEQ ID NO: 74173 - DNA, 24 bp, Artificial sequence
  SiRNA target sequence
tagatctagtaataaactacaaga

SEQ ID NO: 74174 - DNA, 24 bp, Artificial sequence
  SiRNA target sequence
agatctagtaataaactacaagat

SEQ ID NO: 74175 - DNA, 24 bp, Artificial sequence
  SiRNA target sequence
gatctagtaataaactacaagatg

SEQ ID NO: 74176 - DNA, 24 bp, Artificial sequence
  SiRNA target sequence
atctagtaataaactacaagatgg

SEQ ID NO: 74177 - DNA, 24 bp, Artificial sequence
  SiRNA target sequence
tctagtaataaactacaagatgga

SEQ ID NO: 74178 - DNA, 24 bp, Artificial sequence
  SiRNA target sequence
ctagtaataaactacaagatggat

SEQ ID NO: 74179 - DNA, 24 bp, Artificial sequence
  SiRNA target sequence
tagtaataaactacaagatggatt

SEQ ID NO: 74180 - DNA, 24 bp, Artificial sequence
  SiRNA target sequence
agtaataaactacaagatggatta

SEQ ID NO: 74181 - DNA, 24 bp, Artificial sequence
  SiRNA target sequence
gtaataaactacaagatggattaa

SEQ ID NO: 74182 - DNA, 24 bp, Artificial sequence
  SiRNA target sequence
taataaactacaagatggattaaa

SEQ ID NO: 74183 - DNA, 24 bp, Artificial sequence
  SiRNA target sequence
aataaactacaagatggattaaat

SEQ ID NO: 74184 - DNA, 24 bp, Artificial sequence
  SiRNA target sequence
ataaactacaagatggattaaata

SEQ ID NO: 74185 - DNA, 24 bp, Artificial sequence
  SiRNA target sequence
taaactacaagatggattaaataa

SEQ ID NO: 74186 - DNA, 24 bp, Artificial sequence
  SiRNA target sequence
aaactacaagatggattaaataat

SEQ ID NO: 74187 - DNA, 24 bp, Artificial sequence
  SiRNA target sequence
aactacaagatggattaaataatc

SEQ ID NO: 74188 - DNA, 24 bp, Artificial sequence
  SiRNA target sequence
actacaagatggattaaataatca

SEQ ID NO: 74189 - DNA, 24 bp, Artificial sequence
  SiRNA target sequence
ctacaagatggattaaataatcat

SEQ ID NO: 74190 - DNA, 24 bp, Artificial sequence
  SiRNA target sequence
tacaagatggattaaataatcatg

SEQ ID NO: 74191 - DNA, 24 bp, Artificial sequence
  SiRNA target sequence
acaagatggattaaataatcatga

SEQ ID NO: 74192 - DNA, 24 bp, Artificial sequence
  SiRNA target sequence
caagatggattaaataatcatgaa

SEQ ID NO: 74193 - DNA, 24 bp, Artificial sequence
  SiRNA target sequence
aagatggattaaataatcatgaaa

SEQ ID NO: 74194 - DNA, 24 bp, Artificial sequence
  SiRNA target sequence
agatggattaaataatcatgaaac

SEQ ID NO: 74195 - DNA, 24 bp, Artificial sequence
  SiRNA target sequence
gatggattaaataatcatgaaaca

SEQ ID NO: 74196 - DNA, 24 bp, Artificial sequence
  SiRNA target sequence
atggattaaataatcatgaaacaa

SEQ ID NO: 74197 - DNA, 24 bp, Artificial sequence
  SiRNA target sequence
tggattaaataatcatgaaacaat

SEQ ID NO: 74198 - DNA, 24 bp, Artificial sequence
  SiRNA target sequence
ggattaaataatcatgaaacaatc

SEQ ID NO: 74199 - DNA, 24 bp, Artificial sequence
  SiRNA target sequence
gattaaataatcatgaaacaatcg

SEQ ID NO: 74200 - DNA, 24 bp, Artificial sequence
  SiRNA target sequence
attaaataatcatgaaacaatcgt

SEQ ID NO: 74201 - DNA, 24 bp, Artificial sequence
  SiRNA target sequence
ttaaataatcatgaaacaatcgtc

SEQ ID NO: 74202 - DNA, 24 bp, Artificial sequence
  SiRNA target sequence
taaataatcatgaaacaatcgtct

SEQ ID NO: 74203 - DNA, 24 bp, Artificial sequence
  SiRNA target sequence
aaataatcatgaaacaatcgtctc

SEQ ID NO: 74204 - DNA, 24 bp, Artificial sequence
  SiRNA target sequence
aataatcatgaaacaatcgtctcc

SEQ ID NO: 74205 - DNA, 24 bp, Artificial sequence
  SiRNA target sequence
ataatcatgaaacaatcgtctcct

SEQ ID NO: 74206 - DNA, 24 bp, Artificial sequence
  SiRNA target sequence
taatcatgaaacaatcgtctcctt

SEQ ID NO: 74207 - DNA, 24 bp, Artificial sequence
  SiRNA target sequence
aatcatgaaacaatcgtctccttt

SEQ ID NO: 74208 - DNA, 24 bp, Artificial sequence
  SiRNA target sequence
atcatgaaacaatcgtctcctttg

SEQ ID NO: 74209 - DNA, 24 bp, Artificial sequence
  SiRNA target sequence
tcatgaaacaatcgtctcctttgg

SEQ ID NO: 74210 - DNA, 24 bp, Artificial sequence
  SiRNA target sequence
catgaaacaatcgtctcctttggg

SEQ ID NO: 74211 - DNA, 24 bp, Artificial sequence
  SiRNA target sequence
atgaaacaatcgtctcctttggga

SEQ ID NO: 74212 - DNA, 24 bp, Artificial sequence
  SiRNA target sequence
tgaaacaatcgtctcctttgggac

SEQ ID NO: 74213 - DNA, 24 bp, Artificial sequence
  SiRNA target sequence
gaaacaatcgtctcctttgggact

SEQ ID NO: 74214 - DNA, 24 bp, Artificial sequence
  SiRNA target sequence
aaacaatcgtctcctttgggacta

SEQ ID NO: 74215 - DNA, 24 bp, Artificial sequence
  SiRNA target sequence
aacaatcgtctcctttgggactac

SEQ ID NO: 74216 - DNA, 24 bp, Artificial sequence
  SiRNA target sequence
acaatcgtctcctttgggactaca

SEQ ID NO: 74217 - DNA, 24 bp, Artificial sequence
  SiRNA target sequence
caatcgtctcctttgggactacag

SEQ ID NO: 74218 - DNA, 24 bp, Artificial sequence
  SiRNA target sequence
aatcgtctcctttgggactacaga

SEQ ID NO: 74219 - DNA, 24 bp, Artificial sequence
  SiRNA target sequence
atcgtctcctttgggactacagat

SEQ ID NO: 74220 - DNA, 24 bp, Artificial sequence
  SiRNA target sequence
tcgtctcctttgggactacagatc

SEQ ID NO: 74221 - DNA, 24 bp, Artificial sequence
  SiRNA target sequence
cgtctcctttgggactacagatct

SEQ ID NO: 74222 - DNA, 24 bp, Artificial sequence
  SiRNA target sequence
gtctcctttgggactacagatctt

SEQ ID NO: 74223 - DNA, 24 bp, Artificial sequence
  SiRNA target sequence
tctcctttgggactacagatcttg

SEQ ID NO: 74224 - DNA, 24 bp, Artificial sequence
  SiRNA target sequence
ctcctttgggactacagatcttga

SEQ ID NO: 74225 - DNA, 24 bp, Artificial sequence
  SiRNA target sequence
tcctttgggactacagatcttgaa

SEQ ID NO: 74226 - DNA, 24 bp, Artificial sequence
  SiRNA target sequence
cctttgggactacagatcttgaag

SEQ ID NO: 74227 - DNA, 24 bp, Artificial sequence
  SiRNA target sequence
ctttgggactacagatcttgaagt

SEQ ID NO: 74228 - DNA, 24 bp, Artificial sequence
  SiRNA target sequence
tttgggactacagatcttgaagta

SEQ ID NO: 74229 - DNA, 24 bp, Artificial sequence
  SiRNA target sequence
ttgggactacagatcttgaagtag

SEQ ID NO: 74230 - DNA, 24 bp, Artificial sequence
  SiRNA target sequence
tgggactacagatcttgaagtaga

SEQ ID NO: 74231 - DNA, 24 bp, Artificial sequence
  SiRNA target sequence
gggactacagatcttgaagtagat

SEQ ID NO: 74232 - DNA, 24 bp, Artificial sequence
  SiRNA target sequence
ggactacagatcttgaagtagatg

SEQ ID NO: 74233 - DNA, 24 bp, Artificial sequence
  SiRNA target sequence
gactacagatcttgaagtagatga

SEQ ID NO: 74234 - DNA, 24 bp, Artificial sequence
  SiRNA target sequence
actacagatcttgaagtagatgaa

SEQ ID NO: 74235 - DNA, 24 bp, Artificial sequence
  SiRNA target sequence
ctacagatcttgaagtagatgaat

SEQ ID NO: 74236 - DNA, 24 bp, Artificial sequence
  SiRNA target sequence
tacagatcttgaagtagatgaata

SEQ ID NO: 74237 - DNA, 24 bp, Artificial sequence
  SiRNA target sequence
acagatcttgaagtagatgaatat

SEQ ID NO: 74238 - DNA, 24 bp, Artificial sequence
  SiRNA target sequence
cagatcttgaagtagatgaatatg

SEQ ID NO: 74239 - DNA, 24 bp, Artificial sequence
  SiRNA target sequence
agatcttgaagtagatgaatatga

SEQ ID NO: 74240 - DNA, 24 bp, Artificial sequence
  SiRNA target sequence
gatcttgaagtagatgaatatgat

SEQ ID NO: 74241 - DNA, 24 bp, Artificial sequence
  SiRNA target sequence
atcttgaagtagatgaatatgatc

SEQ ID NO: 74242 - DNA, 24 bp, Artificial sequence
  SiRNA target sequence
tcttgaagtagatgaatatgatca

SEQ ID NO: 74243 - DNA, 24 bp, Artificial sequence
  SiRNA target sequence
cttgaagtagatgaatatgatcag

SEQ ID NO: 74244 - DNA, 24 bp, Artificial sequence
  SiRNA target sequence
ttgaagtagatgaatatgatcagt

SEQ ID NO: 74245 - DNA, 24 bp, Artificial sequence
  SiRNA target sequence
tgaagtagatgaatatgatcagtt

SEQ ID NO: 74246 - DNA, 24 bp, Artificial sequence
  SiRNA target sequence
gaagtagatgaatatgatcagttt

SEQ ID NO: 74247 - DNA, 24 bp, Artificial sequence
  SiRNA target sequence
aagtagatgaatatgatcagtttc

SEQ ID NO: 74248 - DNA, 24 bp, Artificial sequence
  SiRNA target sequence
agtagatgaatatgatcagtttct

SEQ ID NO: 74249 - DNA, 24 bp, Artificial sequence
  SiRNA target sequence
gtagatgaatatgatcagtttctt

SEQ ID NO: 74250 - DNA, 24 bp, Artificial sequence
  SiRNA target sequence
tagatgaatatgatcagtttctta

SEQ ID NO: 74251 - DNA, 24 bp, Artificial sequence
  SiRNA target sequence
agatgaatatgatcagtttcttaa

SEQ ID NO: 74252 - DNA, 24 bp, Artificial sequence
  SiRNA target sequence
gatgaatatgatcagtttcttaaa

SEQ ID NO: 74253 - DNA, 24 bp, Artificial sequence
  SiRNA target sequence
atgaatatgatcagtttcttaaaa

SEQ ID NO: 74254 - DNA, 24 bp, Artificial sequence
  SiRNA target sequence
tgaatatgatcagtttcttaaaat

SEQ ID NO: 74255 - DNA, 24 bp, Artificial sequence
  SiRNA target sequence
gaatatgatcagtttcttaaaatt

SEQ ID NO: 74256 - DNA, 24 bp, Artificial sequence
  SiRNA target sequence
aatatgatcagtttcttaaaatta

SEQ ID NO: 74257 - DNA, 24 bp, Artificial sequence
  SiRNA target sequence
atatgatcagtttcttaaaattaa

SEQ ID NO: 74258 - DNA, 24 bp, Artificial sequence
  SiRNA target sequence
tatgatcagtttcttaaaattaat

SEQ ID NO: 74259 - DNA, 24 bp, Artificial sequence
  SiRNA target sequence
atgatcagtttcttaaaattaatg

SEQ ID NO: 74260 - DNA, 24 bp, Artificial sequence
  SiRNA target sequence
tgatcagtttcttaaaattaatgc

SEQ ID NO: 74261 - DNA, 24 bp, Artificial sequence
  SiRNA target sequence
gatcagtttcttaaaattaatgca

SEQ ID NO: 74262 - DNA, 24 bp, Artificial sequence
  SiRNA target sequence
atcagtttcttaaaattaatgcat

SEQ ID NO: 74263 - DNA, 24 bp, Artificial sequence
  SiRNA target sequence
tcagtttcttaaaattaatgcatc

SEQ ID NO: 74264 - DNA, 24 bp, Artificial sequence
  SiRNA target sequence
cagtttcttaaaattaatgcatct

SEQ ID NO: 74265 - DNA, 24 bp, Artificial sequence
  SiRNA target sequence
agtttcttaaaattaatgcatcta

SEQ ID NO: 74266 - DNA, 24 bp, Artificial sequence
  SiRNA target sequence
gtttcttaaaattaatgcatctaa

SEQ ID NO: 74267 - DNA, 24 bp, Artificial sequence
  SiRNA target sequence
tttcttaaaattaatgcatctaat

SEQ ID NO: 74268 - DNA, 24 bp, Artificial sequence
  SiRNA target sequence
ttcttaaaattaatgcatctaata

SEQ ID NO: 74269 - DNA, 24 bp, Artificial sequence
  SiRNA target sequence
tcttaaaattaatgcatctaatag

SEQ ID NO: 74270 - DNA, 24 bp, Artificial sequence
  SiRNA target sequence
cttaaaattaatgcatctaatagt

SEQ ID NO: 74271 - DNA, 24 bp, Artificial sequence
  SiRNA target sequence
ttaaaattaatgcatctaatagta

SEQ ID NO: 74272 - DNA, 24 bp, Artificial sequence
  SiRNA target sequence
taaaattaatgcatctaatagtaa

SEQ ID NO: 74273 - DNA, 24 bp, Artificial sequence
  SiRNA target sequence
aaaattaatgcatctaatagtaac

SEQ ID NO: 74274 - DNA, 24 bp, Artificial sequence
  SiRNA target sequence
aaattaatgcatctaatagtaaca

SEQ ID NO: 74275 - DNA, 24 bp, Artificial sequence
  SiRNA target sequence
aattaatgcatctaatagtaacag

SEQ ID NO: 74276 - DNA, 24 bp, Artificial sequence
  SiRNA target sequence
attaatgcatctaatagtaacaga

SEQ ID NO: 74277 - DNA, 24 bp, Artificial sequence
  SiRNA target sequence
ttaatgcatctaatagtaacagat

SEQ ID NO: 74278 - DNA, 24 bp, Artificial sequence
  SiRNA target sequence
taatgcatctaatagtaacagatt

SEQ ID NO: 74279 - DNA, 24 bp, Artificial sequence
  SiRNA target sequence
aatgcatctaatagtaacagatta

SEQ ID NO: 74280 - DNA, 24 bp, Artificial sequence
  SiRNA target sequence
atgcatctaatagtaacagattat

SEQ ID NO: 74281 - DNA, 24 bp, Artificial sequence
  SiRNA target sequence
tgcatctaatagtaacagattatg

SEQ ID NO: 74282 - DNA, 24 bp, Artificial sequence
  SiRNA target sequence
gcatctaatagtaacagattatgg

SEQ ID NO: 74283 - DNA, 24 bp, Artificial sequence
  SiRNA target sequence
catctaatagtaacagattatgga

SEQ ID NO: 74284 - DNA, 24 bp, Artificial sequence
  SiRNA target sequence
atctaatagtaacagattatggag

SEQ ID NO: 74285 - DNA, 24 bp, Artificial sequence
  SiRNA target sequence
tctaatagtaacagattatggaga

SEQ ID NO: 74286 - DNA, 24 bp, Artificial sequence
  SiRNA target sequence
ctaatagtaacagattatggagag

SEQ ID NO: 74287 - DNA, 24 bp, Artificial sequence
  SiRNA target sequence
taatagtaacagattatggagagc

SEQ ID NO: 74288 - DNA, 24 bp, Artificial sequence
  SiRNA target sequence
aatagtaacagattatggagagca

SEQ ID NO: 74289 - DNA, 24 bp, Artificial sequence
  SiRNA target sequence
atagtaacagattatggagagcac

SEQ ID NO: 74290 - DNA, 24 bp, Artificial sequence
  SiRNA target sequence
tagtaacagattatggagagcact

SEQ ID NO: 74291 - DNA, 24 bp, Artificial sequence
  SiRNA target sequence
agtaacagattatggagagcactg

SEQ ID NO: 74292 - DNA, 24 bp, Artificial sequence
  SiRNA target sequence
gtaacagattatggagagcactgt

SEQ ID NO: 74293 - DNA, 24 bp, Artificial sequence
  SiRNA target sequence
taacagattatggagagcactgta

SEQ ID NO: 74294 - DNA, 24 bp, Artificial sequence
  SiRNA target sequence
aacagattatggagagcactgtac

SEQ ID NO: 74295 - DNA, 24 bp, Artificial sequence
  SiRNA target sequence
acagattatggagagcactgtaca

SEQ ID NO: 74296 - DNA, 24 bp, Artificial sequence
  SiRNA target sequence
cagattatggagagcactgtacat

SEQ ID NO: 74297 - DNA, 24 bp, Artificial sequence
  SiRNA target sequence
agattatggagagcactgtacatt

SEQ ID NO: 74298 - DNA, 24 bp, Artificial sequence
  SiRNA target sequence
gattatggagagcactgtacattt

SEQ ID NO: 74299 - DNA, 24 bp, Artificial sequence
  SiRNA target sequence
attatggagagcactgtacatttt

SEQ ID NO: 74300 - DNA, 24 bp, Artificial sequence
  SiRNA target sequence
ttatggagagcactgtacatttta

SEQ ID NO: 74301 - DNA, 24 bp, Artificial sequence
  SiRNA target sequence
tatggagagcactgtacattttaa

SEQ ID NO: 74302 - DNA, 24 bp, Artificial sequence
  SiRNA target sequence
atggagagcactgtacattttaaa

SEQ ID NO: 74303 - DNA, 24 bp, Artificial sequence
  SiRNA target sequence
tggagagcactgtacattttaaat

SEQ ID NO: 74304 - DNA, 24 bp, Artificial sequence
  SiRNA target sequence
ggagagcactgtacattttaaatt

SEQ ID NO: 74305 - DNA, 24 bp, Artificial sequence
  SiRNA target sequence
gagagcactgtacattttaaattt

SEQ ID NO: 74306 - DNA, 24 bp, Artificial sequence
  SiRNA target sequence
agagcactgtacattttaaattta

SEQ ID NO: 74307 - DNA, 24 bp, Artificial sequence
  SiRNA target sequence
gagcactgtacattttaaatttat

SEQ ID NO: 74308 - DNA, 24 bp, Artificial sequence
  SiRNA target sequence
agcactgtacattttaaatttatc

SEQ ID NO: 74309 - DNA, 24 bp, Artificial sequence
  SiRNA target sequence
gcactgtacattttaaatttatct

SEQ ID NO: 74310 - DNA, 24 bp, Artificial sequence
  SiRNA target sequence
cactgtacattttaaatttatctc

SEQ ID NO: 74311 - DNA, 24 bp, Artificial sequence
  SiRNA target sequence
actgtacattttaaatttatctca

SEQ ID NO: 74312 - DNA, 24 bp, Artificial sequence
  SiRNA target sequence
ctgtacattttaaatttatctcag

SEQ ID NO: 74313 - DNA, 24 bp, Artificial sequence
  SiRNA target sequence
tgtacattttaaatttatctcaga

SEQ ID NO: 74314 - DNA, 24 bp, Artificial sequence
  SiRNA target sequence
gtacattttaaatttatctcagag

SEQ ID NO: 74315 - DNA, 24 bp, Artificial sequence
  SiRNA target sequence
tacattttaaatttatctcagaga

SEQ ID NO: 74316 - DNA, 24 bp, Artificial sequence
  SiRNA target sequence
acattttaaatttatctcagagag

SEQ ID NO: 74317 - DNA, 24 bp, Artificial sequence
  SiRNA target sequence
cattttaaatttatctcagagagc

SEQ ID NO: 74318 - DNA, 24 bp, Artificial sequence
  SiRNA target sequence
attttaaatttatctcagagagca

SEQ ID NO: 74319 - DNA, 24 bp, Artificial sequence
  SiRNA target sequence
ttttaaatttatctcagagagcaa

SEQ ID NO: 74320 - DNA, 24 bp, Artificial sequence
  SiRNA target sequence
tttaaatttatctcagagagcaat

SEQ ID NO: 74321 - DNA, 24 bp, Artificial sequence
  SiRNA target sequence
ttaaatttatctcagagagcaatt

SEQ ID NO: 74322 - DNA, 24 bp, Artificial sequence
  SiRNA target sequence
taaatttatctcagagagcaattt

SEQ ID NO: 74323 - DNA, 24 bp, Artificial sequence
  SiRNA target sequence
aaatttatctcagagagcaatttt

SEQ ID NO: 74324 - DNA, 24 bp, Artificial sequence
  SiRNA target sequence
aatttatctcagagagcaattttt

SEQ ID NO: 74325 - DNA, 24 bp, Artificial sequence
  SiRNA target sequence
atttatctcagagagcaatttttc

SEQ ID NO: 74326 - DNA, 24 bp, Artificial sequence
  SiRNA target sequence
tttatctcagagagcaatttttct

SEQ ID NO: 74327 - DNA, 24 bp, Artificial sequence
  SiRNA target sequence
ttatctcagagagcaatttttctc

SEQ ID NO: 74328 - DNA, 24 bp, Artificial sequence
  SiRNA target sequence
tatctcagagagcaatttttctct

SEQ ID NO: 74329 - DNA, 24 bp, Artificial sequence
  SiRNA target sequence
atctcagagagcaatttttctctt

SEQ ID NO: 74330 - DNA, 24 bp, Artificial sequence
  SiRNA target sequence
tctcagagagcaatttttctctta

SEQ ID NO: 74331 - DNA, 24 bp, Artificial sequence
  SiRNA target sequence
ctcagagagcaatttttctcttac

SEQ ID NO: 74332 - DNA, 24 bp, Artificial sequence
  SiRNA target sequence
tcagagagcaatttttctcttaca

SEQ ID NO: 74333 - DNA, 24 bp, Artificial sequence
  SiRNA target sequence
cagagagcaatttttctcttacaa

SEQ ID NO: 74334 - DNA, 24 bp, Artificial sequence
  SiRNA target sequence
agagagcaatttttctcttacaaa

SEQ ID NO: 74335 - DNA, 24 bp, Artificial sequence
  SiRNA target sequence
gagagcaatttttctcttacaaag

SEQ ID NO: 74336 - DNA, 24 bp, Artificial sequence
  SiRNA target sequence
agagcaatttttctcttacaaagt

SEQ ID NO: 74337 - DNA, 24 bp, Artificial sequence
  SiRNA target sequence
gagcaatttttctcttacaaagtt

SEQ ID NO: 74338 - DNA, 24 bp, Artificial sequence
  SiRNA target sequence
agcaatttttctcttacaaagttt

SEQ ID NO: 74339 - DNA, 24 bp, Artificial sequence
  SiRNA target sequence
gcaatttttctcttacaaagtttt

SEQ ID NO: 74340 - DNA, 24 bp, Artificial sequence
  SiRNA target sequence
caatttttctcttacaaagttttt

SEQ ID NO: 74341 - DNA, 24 bp, Artificial sequence
  SiRNA target sequence
aatttttctcttacaaagtttttt

SEQ ID NO: 74342 - DNA, 24 bp, Artificial sequence
  SiRNA target sequence
atttttctcttacaaagttttttt

SEQ ID NO: 74343 - DNA, 24 bp, Artificial sequence
  SiRNA target sequence
tttttctcttacaaagttttttta

SEQ ID NO: 74344 - DNA, 24 bp, Artificial sequence
  SiRNA target sequence
ttttctcttacaaagtttttttat

SEQ ID NO: 74345 - DNA, 24 bp, Artificial sequence
  SiRNA target sequence
tttctcttacaaagtttttttatt

SEQ ID NO: 74346 - DNA, 24 bp, Artificial sequence
  SiRNA target sequence
ttctcttacaaagtttttttatta

SEQ ID NO: 74347 - DNA, 24 bp, Artificial sequence
  SiRNA target sequence
tctcttacaaagtttttttattat

SEQ ID NO: 74348 - DNA, 24 bp, Artificial sequence
  SiRNA target sequence
ctcttacaaagtttttttattatt

SEQ ID NO: 74349 - DNA, 24 bp, Artificial sequence
  SiRNA target sequence
tcttacaaagtttttttattattt

SEQ ID NO: 74350 - DNA, 24 bp, Artificial sequence
  SiRNA target sequence
cttacaaagtttttttattattta

SEQ ID NO: 74351 - DNA, 24 bp, Artificial sequence
  SiRNA target sequence
ttacaaagtttttttattatttat

SEQ ID NO: 74352 - DNA, 24 bp, Artificial sequence
  SiRNA target sequence
tacaaagtttttttattatttatg

SEQ ID NO: 74353 - DNA, 24 bp, Artificial sequence
  SiRNA target sequence
acaaagtttttttattatttatgc

SEQ ID NO: 74354 - DNA, 24 bp, Artificial sequence
  SiRNA target sequence
caaagtttttttattatttatgca

SEQ ID NO: 74355 - DNA, 24 bp, Artificial sequence
  SiRNA target sequence
aaagtttttttattatttatgcag

SEQ ID NO: 74356 - DNA, 24 bp, Artificial sequence
  SiRNA target sequence
aagtttttttattatttatgcagg

SEQ ID NO: 74357 - DNA, 24 bp, Artificial sequence
  SiRNA target sequence
agtttttttattatttatgcagga

SEQ ID NO: 74358 - DNA, 24 bp, Artificial sequence
  SiRNA target sequence
gtttttttattatttatgcaggaa

SEQ ID NO: 74359 - DNA, 24 bp, Artificial sequence
  SiRNA target sequence
tttttttattatttatgcaggaat

SEQ ID NO: 74360 - DNA, 24 bp, Artificial sequence
  SiRNA target sequence
ttttttattatttatgcaggaata

SEQ ID NO: 74361 - DNA, 24 bp, Artificial sequence
  SiRNA target sequence
tttttattatttatgcaggaatat

SEQ ID NO: 74362 - DNA, 24 bp, Artificial sequence
  SiRNA target sequence
ttttattatttatgcaggaatatc

SEQ ID NO: 74363 - DNA, 24 bp, Artificial sequence
  SiRNA target sequence
tttattatttatgcaggaatatca

SEQ ID NO: 74364 - DNA, 24 bp, Artificial sequence
  SiRNA target sequence
ttattatttatgcaggaatatcag

SEQ ID NO: 74365 - DNA, 24 bp, Artificial sequence
  SiRNA target sequence
tattatttatgcaggaatatcagg

SEQ ID NO: 74366 - DNA, 24 bp, Artificial sequence
  SiRNA target sequence
attatttatgcaggaatatcagga

SEQ ID NO: 74367 - DNA, 24 bp, Artificial sequence
  SiRNA target sequence
ttatttatgcaggaatatcaggaa

SEQ ID NO: 74368 - DNA, 24 bp, Artificial sequence
  SiRNA target sequence
tatttatgcaggaatatcaggaat

SEQ ID NO: 74369 - DNA, 24 bp, Artificial sequence
  SiRNA target sequence
atttatgcaggaatatcaggaata

SEQ ID NO: 74370 - DNA, 24 bp, Artificial sequence
  SiRNA target sequence
tttatgcaggaatatcaggaatat

SEQ ID NO: 74371 - DNA, 24 bp, Artificial sequence
  SiRNA target sequence
ttatgcaggaatatcaggaatatt

SEQ ID NO: 74372 - DNA, 24 bp, Artificial sequence
  SiRNA target sequence
tatgcaggaatatcaggaatatta

SEQ ID NO: 74373 - DNA, 24 bp, Artificial sequence
  SiRNA target sequence
atgcaggaatatcaggaatattat

SEQ ID NO: 74374 - DNA, 24 bp, Artificial sequence
  SiRNA target sequence
tgcaggaatatcaggaatattatc

SEQ ID NO: 74375 - DNA, 24 bp, Artificial sequence
  SiRNA target sequence
gcaggaatatcaggaatattatct

SEQ ID NO: 74376 - DNA, 24 bp, Artificial sequence
  SiRNA target sequence
caggaatatcaggaatattatctc

SEQ ID NO: 74377 - DNA, 24 bp, Artificial sequence
  SiRNA target sequence
aggaatatcaggaatattatctca

SEQ ID NO: 74378 - DNA, 24 bp, Artificial sequence
  SiRNA target sequence
ggaatatcaggaatattatctcaa

SEQ ID NO: 74379 - DNA, 24 bp, Artificial sequence
  SiRNA target sequence
gaatatcaggaatattatctcaaa

SEQ ID NO: 74380 - DNA, 24 bp, Artificial sequence
  SiRNA target sequence
aatatcaggaatattatctcaaaa

SEQ ID NO: 74381 - DNA, 24 bp, Artificial sequence
  SiRNA target sequence
atatcaggaatattatctcaaaat

SEQ ID NO: 74382 - DNA, 24 bp, Artificial sequence
  SiRNA target sequence
tatcaggaatattatctcaaaata

SEQ ID NO: 74383 - DNA, 24 bp, Artificial sequence
  SiRNA target sequence
atcaggaatattatctcaaaatat

SEQ ID NO: 74384 - DNA, 24 bp, Artificial sequence
  SiRNA target sequence
tcaggaatattatctcaaaatatg

SEQ ID NO: 74385 - DNA, 24 bp, Artificial sequence
  SiRNA target sequence
caggaatattatctcaaaatatgt

SEQ ID NO: 74386 - DNA, 24 bp, Artificial sequence
  SiRNA target sequence
aggaatattatctcaaaatatgtc

SEQ ID NO: 74387 - DNA, 24 bp, Artificial sequence
  SiRNA target sequence
ggaatattatctcaaaatatgtca

SEQ ID NO: 74388 - DNA, 24 bp, Artificial sequence
  SiRNA target sequence
gaatattatctcaaaatatgtcat

SEQ ID NO: 74389 - DNA, 24 bp, Artificial sequence
  SiRNA target sequence
aatattatctcaaaatatgtcatc

SEQ ID NO: 74390 - DNA, 24 bp, Artificial sequence
  SiRNA target sequence
atattatctcaaaatatgtcatct

SEQ ID NO: 74391 - DNA, 24 bp, Artificial sequence
  SiRNA target sequence
tattatctcaaaatatgtcatcta

SEQ ID NO: 74392 - DNA, 24 bp, Artificial sequence
  SiRNA target sequence
attatctcaaaatatgtcatctaa

SEQ ID NO: 74393 - DNA, 24 bp, Artificial sequence
  SiRNA target sequence
ttatctcaaaatatgtcatctaac

SEQ ID NO: 74394 - DNA, 24 bp, Artificial sequence
  SiRNA target sequence
tatctcaaaatatgtcatctaacc

SEQ ID NO: 74395 - DNA, 24 bp, Artificial sequence
  SiRNA target sequence
atctcaaaatatgtcatctaacca

SEQ ID NO: 74396 - DNA, 24 bp, Artificial sequence
  SiRNA target sequence
tctcaaaatatgtcatctaaccaa

SEQ ID NO: 74397 - DNA, 24 bp, Artificial sequence
  SiRNA target sequence
ctcaaaatatgtcatctaaccaac

SEQ ID NO: 74398 - DNA, 24 bp, Artificial sequence
  SiRNA target sequence
tcaaaatatgtcatctaaccaact

SEQ ID NO: 74399 - DNA, 24 bp, Artificial sequence
  SiRNA target sequence
caaaatatgtcatctaaccaactc

SEQ ID NO: 74400 - DNA, 24 bp, Artificial sequence
  SiRNA target sequence
aaaatatgtcatctaaccaactca

SEQ ID NO: 74401 - DNA, 24 bp, Artificial sequence
  SiRNA target sequence
aaatatgtcatctaaccaactcat

SEQ ID NO: 74402 - DNA, 24 bp, Artificial sequence
  SiRNA target sequence
aatatgtcatctaaccaactcatt

SEQ ID NO: 74403 - DNA, 24 bp, Artificial sequence
  SiRNA target sequence
atatgtcatctaaccaactcattt

SEQ ID NO: 74404 - DNA, 24 bp, Artificial sequence
  SiRNA target sequence
tatgtcatctaaccaactcattta

SEQ ID NO: 74405 - DNA, 24 bp, Artificial sequence
  SiRNA target sequence
atgtcatctaaccaactcatttat

SEQ ID NO: 74406 - DNA, 24 bp, Artificial sequence
  SiRNA target sequence
tgtcatctaaccaactcatttatt

SEQ ID NO: 74407 - DNA, 24 bp, Artificial sequence
  SiRNA target sequence
gtcatctaaccaactcatttattt

SEQ ID NO: 74408 - DNA, 24 bp, Artificial sequence
  SiRNA target sequence
tcatctaaccaactcatttattta

SEQ ID NO: 74409 - DNA, 24 bp, Artificial sequence
  SiRNA target sequence
catctaaccaactcatttatttaa

SEQ ID NO: 74410 - DNA, 24 bp, Artificial sequence
  SiRNA target sequence
atctaaccaactcatttatttaat

SEQ ID NO: 74411 - DNA, 24 bp, Artificial sequence
  SiRNA target sequence
tctaaccaactcatttatttaatg

SEQ ID NO: 74412 - DNA, 24 bp, Artificial sequence
  SiRNA target sequence
ctaaccaactcatttatttaatgt

SEQ ID NO: 74413 - DNA, 24 bp, Artificial sequence
  SiRNA target sequence
taaccaactcatttatttaatgtc

SEQ ID NO: 74414 - DNA, 24 bp, Artificial sequence
  SiRNA target sequence
aaccaactcatttatttaatgtcc

SEQ ID NO: 74415 - DNA, 24 bp, Artificial sequence
  SiRNA target sequence
accaactcatttatttaatgtcca

SEQ ID NO: 74416 - DNA, 24 bp, Artificial sequence
  SiRNA target sequence
ccaactcatttatttaatgtccat

SEQ ID NO: 74417 - DNA, 24 bp, Artificial sequence
  SiRNA target sequence
caactcatttatttaatgtccatt

SEQ ID NO: 74418 - DNA, 24 bp, Artificial sequence
  SiRNA target sequence
aactcatttatttaatgtccatta

SEQ ID NO: 74419 - DNA, 24 bp, Artificial sequence
  SiRNA target sequence
actcatttatttaatgtccattac

SEQ ID NO: 74420 - DNA, 24 bp, Artificial sequence
  SiRNA target sequence
ctcatttatttaatgtccattaca

SEQ ID NO: 74421 - DNA, 24 bp, Artificial sequence
  SiRNA target sequence
tcatttatttaatgtccattacat

SEQ ID NO: 74422 - DNA, 24 bp, Artificial sequence
  SiRNA target sequence
catttatttaatgtccattacatc

SEQ ID NO: 74423 - DNA, 24 bp, Artificial sequence
  SiRNA target sequence
atttatttaatgtccattacatct

SEQ ID NO: 74424 - DNA, 24 bp, Artificial sequence
  SiRNA target sequence
tttatttaatgtccattacatcta

SEQ ID NO: 74425 - DNA, 24 bp, Artificial sequence
  SiRNA target sequence
ttatttaatgtccattacatctac

SEQ ID NO: 74426 - DNA, 24 bp, Artificial sequence
  SiRNA target sequence
tatttaatgtccattacatctacg

SEQ ID NO: 74427 - DNA, 24 bp, Artificial sequence
  SiRNA target sequence
atttaatgtccattacatctacgg

SEQ ID NO: 74428 - DNA, 24 bp, Artificial sequence
  SiRNA target sequence
tttaatgtccattacatctacggt

SEQ ID NO: 74429 - DNA, 24 bp, Artificial sequence
  SiRNA target sequence
ttaatgtccattacatctacggtt

SEQ ID NO: 74430 - DNA, 24 bp, Artificial sequence
  SiRNA target sequence
taatgtccattacatctacggtta

SEQ ID NO: 74431 - DNA, 24 bp, Artificial sequence
  SiRNA target sequence
aatgtccattacatctacggttac

SEQ ID NO: 74432 - DNA, 24 bp, Artificial sequence
  SiRNA target sequence
atgtccattacatctacggttact

SEQ ID NO: 74433 - DNA, 24 bp, Artificial sequence
  SiRNA target sequence
tgtccattacatctacggttacta

SEQ ID NO: 74434 - DNA, 24 bp, Artificial sequence
  SiRNA target sequence
gtccattacatctacggttactat

SEQ ID NO: 74435 - DNA, 24 bp, Artificial sequence
  SiRNA target sequence
tccattacatctacggttactatt

SEQ ID NO: 74436 - DNA, 24 bp, Artificial sequence
  SiRNA target sequence
ccattacatctacggttactatta

SEQ ID NO: 74437 - DNA, 24 bp, Artificial sequence
  SiRNA target sequence
cattacatctacggttactattaa

SEQ ID NO: 74438 - DNA, 24 bp, Artificial sequence
  SiRNA target sequence
attacatctacggttactattaat

SEQ ID NO: 74439 - DNA, 24 bp, Artificial sequence
  SiRNA target sequence
ttacatctacggttactattaatt

SEQ ID NO: 74440 - DNA, 24 bp, Artificial sequence
  SiRNA target sequence
tacatctacggttactattaattt

SEQ ID NO: 74441 - DNA, 24 bp, Artificial sequence
  SiRNA target sequence
acatctacggttactattaattta

SEQ ID NO: 74442 - DNA, 24 bp, Artificial sequence
  SiRNA target sequence
catctacggttactattaatttaa

SEQ ID NO: 74443 - DNA, 24 bp, Artificial sequence
  SiRNA target sequence
atctacggttactattaatttaag

SEQ ID NO: 74444 - DNA, 24 bp, Artificial sequence
  SiRNA target sequence
tctacggttactattaatttaagt

SEQ ID NO: 74445 - DNA, 24 bp, Artificial sequence
  SiRNA target sequence
ctacggttactattaatttaagta

SEQ ID NO: 74446 - DNA, 24 bp, Artificial sequence
  SiRNA target sequence
tacggttactattaatttaagtaa

SEQ ID NO: 74447 - DNA, 24 bp, Artificial sequence
  SiRNA target sequence
acggttactattaatttaagtaac

SEQ ID NO: 74448 - DNA, 24 bp, Artificial sequence
  SiRNA target sequence
cggttactattaatttaagtaact

SEQ ID NO: 74449 - DNA, 24 bp, Artificial sequence
  SiRNA target sequence
ggttactattaatttaagtaactt

SEQ ID NO: 74450 - DNA, 24 bp, Artificial sequence
  SiRNA target sequence
gttactattaatttaagtaacttg

SEQ ID NO: 74451 - DNA, 24 bp, Artificial sequence
  SiRNA target sequence
ttactattaatttaagtaacttgg

SEQ ID NO: 74452 - DNA, 24 bp, Artificial sequence
  SiRNA target sequence
tactattaatttaagtaacttggg

SEQ ID NO: 74453 - DNA, 24 bp, Artificial sequence
  SiRNA target sequence
actattaatttaagtaacttgggt

SEQ ID NO: 74454 - DNA, 24 bp, Artificial sequence
  SiRNA target sequence
ctattaatttaagtaacttgggtt

SEQ ID NO: 74455 - DNA, 24 bp, Artificial sequence
  SiRNA target sequence
tattaatttaagtaacttgggtta

SEQ ID NO: 74456 - DNA, 24 bp, Artificial sequence
  SiRNA target sequence
attaatttaagtaacttgggttac

SEQ ID NO: 74457 - DNA, 24 bp, Artificial sequence
  SiRNA target sequence
ttaatttaagtaacttgggttact

SEQ ID NO: 74458 - DNA, 24 bp, Artificial sequence
  SiRNA target sequence
taatttaagtaacttgggttactt

SEQ ID NO: 74459 - DNA, 24 bp, Artificial sequence
  SiRNA target sequence
aatttaagtaacttgggttactta

SEQ ID NO: 74460 - DNA, 24 bp, Artificial sequence
  SiRNA target sequence
atttaagtaacttgggttacttat

SEQ ID NO: 74461 - DNA, 24 bp, Artificial sequence
  SiRNA target sequence
tttaagtaacttgggttacttata

SEQ ID NO: 74462 - DNA, 24 bp, Artificial sequence
  SiRNA target sequence
ttaagtaacttgggttacttatac

SEQ ID NO: 74463 - DNA, 24 bp, Artificial sequence
  SiRNA target sequence
taagtaacttgggttacttataca

SEQ ID NO: 74464 - DNA, 24 bp, Artificial sequence
  SiRNA target sequence
aagtaacttgggttacttatacac

SEQ ID NO: 74465 - DNA, 24 bp, Artificial sequence
  SiRNA target sequence
agtaacttgggttacttatacact

SEQ ID NO: 74466 - DNA, 24 bp, Artificial sequence
  SiRNA target sequence
gtaacttgggttacttatacacta

SEQ ID NO: 74467 - DNA, 24 bp, Artificial sequence
  SiRNA target sequence
taacttgggttacttatacactag

SEQ ID NO: 74468 - DNA, 24 bp, Artificial sequence
  SiRNA target sequence
aacttgggttacttatacactaga

SEQ ID NO: 74469 - DNA, 24 bp, Artificial sequence
  SiRNA target sequence
acttgggttacttatacactagat

SEQ ID NO: 74470 - DNA, 24 bp, Artificial sequence
  SiRNA target sequence
cttgggttacttatacactagata

SEQ ID NO: 74471 - DNA, 24 bp, Artificial sequence
  SiRNA target sequence
ttgggttacttatacactagatat

SEQ ID NO: 74472 - DNA, 24 bp, Artificial sequence
  SiRNA target sequence
tgggttacttatacactagatata

SEQ ID NO: 74473 - DNA, 24 bp, Artificial sequence
  SiRNA target sequence
gggttacttatacactagatatac

SEQ ID NO: 74474 - DNA, 24 bp, Artificial sequence
  SiRNA target sequence
ggttacttatacactagatataca

SEQ ID NO: 74475 - DNA, 24 bp, Artificial sequence
  SiRNA target sequence
gttacttatacactagatatacac

SEQ ID NO: 74476 - DNA, 24 bp, Artificial sequence
  SiRNA target sequence
ttacttatacactagatatacaca

SEQ ID NO: 74477 - DNA, 24 bp, Artificial sequence
  SiRNA target sequence
tacttatacactagatatacacaa

SEQ ID NO: 74478 - DNA, 24 bp, Artificial sequence
  SiRNA target sequence
acttatacactagatatacacaag

SEQ ID NO: 74479 - DNA, 24 bp, Artificial sequence
  SiRNA target sequence
cttatacactagatatacacaagc

SEQ ID NO: 74480 - DNA, 24 bp, Artificial sequence
  SiRNA target sequence
ttatacactagatatacacaagca

SEQ ID NO: 74481 - DNA, 24 bp, Artificial sequence
  SiRNA target sequence
tatacactagatatacacaagcaa

SEQ ID NO: 74482 - DNA, 24 bp, Artificial sequence
  SiRNA target sequence
atacactagatatacacaagcaat

SEQ ID NO: 74483 - DNA, 24 bp, Artificial sequence
  SiRNA target sequence
tacactagatatacacaagcaata

SEQ ID NO: 74484 - DNA, 24 bp, Artificial sequence
  SiRNA target sequence
acactagatatacacaagcaataa

SEQ ID NO: 74485 - DNA, 24 bp, Artificial sequence
  SiRNA target sequence
cactagatatacacaagcaataat

SEQ ID NO: 74486 - DNA, 24 bp, Artificial sequence
  SiRNA target sequence
actagatatacacaagcaataatt

SEQ ID NO: 74487 - DNA, 24 bp, Artificial sequence
  SiRNA target sequence
ctagatatacacaagcaataatta

SEQ ID NO: 74488 - DNA, 24 bp, Artificial sequence
  SiRNA target sequence
tagatatacacaagcaataattaa

SEQ ID NO: 74489 - DNA, 24 bp, Artificial sequence
  SiRNA target sequence
agatatacacaagcaataattaat

SEQ ID NO: 74490 - DNA, 24 bp, Artificial sequence
  SiRNA target sequence
gatatacacaagcaataattaatg

SEQ ID NO: 74491 - DNA, 24 bp, Artificial sequence
  SiRNA target sequence
atatacacaagcaataattaatgc

SEQ ID NO: 74492 - DNA, 24 bp, Artificial sequence
  SiRNA target sequence
tatacacaagcaataattaatgca

SEQ ID NO: 74493 - DNA, 24 bp, Artificial sequence
  SiRNA target sequence
atacacaagcaataattaatgcaa

SEQ ID NO: 74494 - DNA, 24 bp, Artificial sequence
  SiRNA target sequence
tacacaagcaataattaatgcaag

SEQ ID NO: 74495 - DNA, 24 bp, Artificial sequence
  SiRNA target sequence
acacaagcaataattaatgcaaga

SEQ ID NO: 74496 - DNA, 24 bp, Artificial sequence
  SiRNA target sequence
cacaagcaataattaatgcaagat

SEQ ID NO: 74497 - DNA, 24 bp, Artificial sequence
  SiRNA target sequence
acaagcaataattaatgcaagatc

SEQ ID NO: 74498 - DNA, 24 bp, Artificial sequence
  SiRNA target sequence
caagcaataattaatgcaagatct

SEQ ID NO: 74499 - DNA, 24 bp, Artificial sequence
  SiRNA target sequence
aagcaataattaatgcaagatcta

SEQ ID NO: 74500 - DNA, 24 bp, Artificial sequence
  SiRNA target sequence
agcaataattaatgcaagatctac

SEQ ID NO: 74501 - DNA, 24 bp, Artificial sequence
  SiRNA target sequence
gcaataattaatgcaagatctact

SEQ ID NO: 74502 - DNA, 24 bp, Artificial sequence
  SiRNA target sequence
caataattaatgcaagatctactt

SEQ ID NO: 74503 - DNA, 24 bp, Artificial sequence
  SiRNA target sequence
aataattaatgcaagatctactta

SEQ ID NO: 74504 - DNA, 24 bp, Artificial sequence
  SiRNA target sequence
ataattaatgcaagatctacttat

SEQ ID NO: 74505 - DNA, 24 bp, Artificial sequence
  SiRNA target sequence
taattaatgcaagatctacttatg

SEQ ID NO: 74506 - DNA, 24 bp, Artificial sequence
  SiRNA target sequence
aattaatgcaagatctacttatga

SEQ ID NO: 74507 - DNA, 24 bp, Artificial sequence
  SiRNA target sequence
attaatgcaagatctacttatgat

SEQ ID NO: 74508 - DNA, 24 bp, Artificial sequence
  SiRNA target sequence
ttaatgcaagatctacttatgata

SEQ ID NO: 74509 - DNA, 24 bp, Artificial sequence
  SiRNA target sequence
taatgcaagatctacttatgatac

SEQ ID NO: 74510 - DNA, 24 bp, Artificial sequence
  SiRNA target sequence
aatgcaagatctacttatgataca

SEQ ID NO: 74511 - DNA, 24 bp, Artificial sequence
  SiRNA target sequence
atgcaagatctacttatgatacaa

SEQ ID NO: 74512 - DNA, 24 bp, Artificial sequence
  SiRNA target sequence
tgcaagatctacttatgatacaat

SEQ ID NO: 74513 - DNA, 24 bp, Artificial sequence
  SiRNA target sequence
gcaagatctacttatgatacaatg

SEQ ID NO: 74514 - DNA, 24 bp, Artificial sequence
  SiRNA target sequence
caagatctacttatgatacaatgt

SEQ ID NO: 74515 - DNA, 24 bp, Artificial sequence
  SiRNA target sequence
aagatctacttatgatacaatgtt

SEQ ID NO: 74516 - DNA, 24 bp, Artificial sequence
  SiRNA target sequence
agatctacttatgatacaatgtta

SEQ ID NO: 74517 - DNA, 24 bp, Artificial sequence
  SiRNA target sequence
gatctacttatgatacaatgttag

SEQ ID NO: 74518 - DNA, 24 bp, Artificial sequence
  SiRNA target sequence
atctacttatgatacaatgttaga

SEQ ID NO: 74519 - DNA, 24 bp, Artificial sequence
  SiRNA target sequence
tctacttatgatacaatgttagat

SEQ ID NO: 74520 - DNA, 24 bp, Artificial sequence
  SiRNA target sequence
ctacttatgatacaatgttagata

SEQ ID NO: 74521 - DNA, 24 bp, Artificial sequence
  SiRNA target sequence
tacttatgatacaatgttagatat

SEQ ID NO: 74522 - DNA, 24 bp, Artificial sequence
  SiRNA target sequence
acttatgatacaatgttagatata

SEQ ID NO: 74523 - DNA, 24 bp, Artificial sequence
  SiRNA target sequence
cttatgatacaatgttagatataa

SEQ ID NO: 74524 - DNA, 24 bp, Artificial sequence
  SiRNA target sequence
ttatgatacaatgttagatataaa

SEQ ID NO: 74525 - DNA, 24 bp, Artificial sequence
  SiRNA target sequence
tatgatacaatgttagatataaaa

SEQ ID NO: 74526 - DNA, 24 bp, Artificial sequence
  SiRNA target sequence
atgatacaatgttagatataaaaa

SEQ ID NO: 74527 - DNA, 24 bp, Artificial sequence
  SiRNA target sequence
tgatacaatgttagatataaaaaa

SEQ ID NO: 74528 - DNA, 24 bp, Artificial sequence
  SiRNA target sequence
gatacaatgttagatataaaaaaa

SEQ ID NO: 74529 - DNA, 24 bp, Artificial sequence
  SiRNA target sequence
atacaatgttagatataaaaaaag

SEQ ID NO: 74530 - DNA, 24 bp, Artificial sequence
  SiRNA target sequence
tacaatgttagatataaaaaaaga

SEQ ID NO: 74531 - DNA, 24 bp, Artificial sequence
  SiRNA target sequence
acaatgttagatataaaaaaagag

SEQ ID NO: 74532 - DNA, 24 bp, Artificial sequence
  SiRNA target sequence
caatgttagatataaaaaaagaga

SEQ ID NO: 74533 - DNA, 24 bp, Artificial sequence
  SiRNA target sequence
aatgttagatataaaaaaagagaa

SEQ ID NO: 74534 - DNA, 24 bp, Artificial sequence
  SiRNA target sequence
atgttagatataaaaaaagagaat

SEQ ID NO: 74535 - DNA, 24 bp, Artificial sequence
  SiRNA target sequence
tgttagatataaaaaaagagaata

SEQ ID NO: 74536 - DNA, 24 bp, Artificial sequence
  SiRNA target sequence
gttagatataaaaaaagagaataa

SEQ ID NO: 74537 - DNA, 24 bp, Artificial sequence
  SiRNA target sequence
ttagatataaaaaaagagaataat

SEQ ID NO: 74538 - DNA, 24 bp, Artificial sequence
  SiRNA target sequence
tagatataaaaaaagagaataata

SEQ ID NO: 74539 - DNA, 24 bp, Artificial sequence
  SiRNA target sequence
agatataaaaaaagagaataataa

SEQ ID NO: 74540 - DNA, 24 bp, Artificial sequence
  SiRNA target sequence
gatataaaaaaagagaataataag

SEQ ID NO: 74541 - DNA, 24 bp, Artificial sequence
  SiRNA target sequence
atataaaaaaagagaataataagt

SEQ ID NO: 74542 - DNA, 24 bp, Artificial sequence
  SiRNA target sequence
tataaaaaaagagaataataagtt

SEQ ID NO: 74543 - DNA, 24 bp, Artificial sequence
  SiRNA target sequence
ataaaaaaagagaataataagttt

SEQ ID NO: 74544 - DNA, 24 bp, Artificial sequence
  SiRNA target sequence
taaaaaaagagaataataagttta

SEQ ID NO: 74545 - DNA, 24 bp, Artificial sequence
  SiRNA target sequence
aaaaaaagagaataataagtttaa

SEQ ID NO: 74546 - DNA, 24 bp, Artificial sequence
  SiRNA target sequence
aaaaaagagaataataagtttaag

SEQ ID NO: 74547 - DNA, 24 bp, Artificial sequence
  SiRNA target sequence
aaaaagagaataataagtttaaga

SEQ ID NO: 74548 - DNA, 24 bp, Artificial sequence
  SiRNA target sequence
aaaagagaataataagtttaagat

SEQ ID NO: 74549 - DNA, 24 bp, Artificial sequence
  SiRNA target sequence
aaagagaataataagtttaagatt

SEQ ID NO: 74550 - DNA, 24 bp, Artificial sequence
  SiRNA target sequence
aagagaataataagtttaagatta

SEQ ID NO: 74551 - DNA, 24 bp, Artificial sequence
  SiRNA target sequence
agagaataataagtttaagattac

SEQ ID NO: 74552 - DNA, 24 bp, Artificial sequence
  SiRNA target sequence
gagaataataagtttaagattaca

SEQ ID NO: 74553 - DNA, 24 bp, Artificial sequence
  SiRNA target sequence
agaataataagtttaagattacag

SEQ ID NO: 74554 - DNA, 24 bp, Artificial sequence
  SiRNA target sequence
gaataataagtttaagattacaga

SEQ ID NO: 74555 - DNA, 24 bp, Artificial sequence
  SiRNA target sequence
aataataagtttaagattacagaa

SEQ ID NO: 74556 - DNA, 24 bp, Artificial sequence
  SiRNA target sequence
ataataagtttaagattacagaat

SEQ ID NO: 74557 - DNA, 24 bp, Artificial sequence
  SiRNA target sequence
taataagtttaagattacagaatt

SEQ ID NO: 74558 - DNA, 24 bp, Artificial sequence
  SiRNA target sequence
aataagtttaagattacagaattt

SEQ ID NO: 74559 - DNA, 24 bp, Artificial sequence
  SiRNA target sequence
ataagtttaagattacagaattta

SEQ ID NO: 74560 - DNA, 24 bp, Artificial sequence
  SiRNA target sequence
taagtttaagattacagaatttaa

SEQ ID NO: 74561 - DNA, 24 bp, Artificial sequence
  SiRNA target sequence
aagtttaagattacagaatttaaa

SEQ ID NO: 74562 - DNA, 24 bp, Artificial sequence
  SiRNA target sequence
agtttaagattacagaatttaaag

SEQ ID NO: 74563 - DNA, 24 bp, Artificial sequence
  SiRNA target sequence
gtttaagattacagaatttaaaga

SEQ ID NO: 74564 - DNA, 24 bp, Artificial sequence
  SiRNA target sequence
tttaagattacagaatttaaagaa

SEQ ID NO: 74565 - DNA, 24 bp, Artificial sequence
  SiRNA target sequence
ttaagattacagaatttaaagaaa

SEQ ID NO: 74566 - DNA, 24 bp, Artificial sequence
  SiRNA target sequence
taagattacagaatttaaagaaag

SEQ ID NO: 74567 - DNA, 24 bp, Artificial sequence
  SiRNA target sequence
aagattacagaatttaaagaaagt

SEQ ID NO: 74568 - DNA, 24 bp, Artificial sequence
  SiRNA target sequence
agattacagaatttaaagaaagta

SEQ ID NO: 74569 - DNA, 24 bp, Artificial sequence
  SiRNA target sequence
gattacagaatttaaagaaagtat

SEQ ID NO: 74570 - DNA, 24 bp, Artificial sequence
  SiRNA target sequence
attacagaatttaaagaaagtatt

SEQ ID NO: 74571 - DNA, 24 bp, Artificial sequence
  SiRNA target sequence
ttacagaatttaaagaaagtatta

SEQ ID NO: 74572 - DNA, 24 bp, Artificial sequence
  SiRNA target sequence
tacagaatttaaagaaagtattaa

SEQ ID NO: 74573 - DNA, 24 bp, Artificial sequence
  SiRNA target sequence
acagaatttaaagaaagtattaag

SEQ ID NO: 74574 - DNA, 24 bp, Artificial sequence
  SiRNA target sequence
cagaatttaaagaaagtattaagt

SEQ ID NO: 74575 - DNA, 24 bp, Artificial sequence
  SiRNA target sequence
agaatttaaagaaagtattaagtt

SEQ ID NO: 74576 - DNA, 24 bp, Artificial sequence
  SiRNA target sequence
gaatttaaagaaagtattaagttt

SEQ ID NO: 74577 - DNA, 24 bp, Artificial sequence
  SiRNA target sequence
aatttaaagaaagtattaagttta

SEQ ID NO: 74578 - DNA, 24 bp, Artificial sequence
  SiRNA target sequence
atttaaagaaagtattaagtttaa

SEQ ID NO: 74579 - DNA, 24 bp, Artificial sequence
  SiRNA target sequence
tttaaagaaagtattaagtttaat

SEQ ID NO: 74580 - DNA, 24 bp, Artificial sequence
  SiRNA target sequence
ttaaagaaagtattaagtttaata

SEQ ID NO: 74581 - DNA, 24 bp, Artificial sequence
  SiRNA target sequence
taaagaaagtattaagtttaataa

SEQ ID NO: 74582 - DNA, 24 bp, Artificial sequence
  SiRNA target sequence
aaagaaagtattaagtttaataat

SEQ ID NO: 74583 - DNA, 24 bp, Artificial sequence
  SiRNA target sequence
aagaaagtattaagtttaataatt

SEQ ID NO: 74584 - DNA, 24 bp, Artificial sequence
  SiRNA target sequence
agaaagtattaagtttaataattt

SEQ ID NO: 74585 - DNA, 24 bp, Artificial sequence
  SiRNA target sequence
gaaagtattaagtttaataatttg

SEQ ID NO: 74586 - DNA, 24 bp, Artificial sequence
  SiRNA target sequence
aaagtattaagtttaataatttgt

SEQ ID NO: 74587 - DNA, 24 bp, Artificial sequence
  SiRNA target sequence
aagtattaagtttaataatttgtc

SEQ ID NO: 74588 - DNA, 24 bp, Artificial sequence
  SiRNA target sequence
agtattaagtttaataatttgtca

SEQ ID NO: 74589 - DNA, 24 bp, Artificial sequence
  SiRNA target sequence
gtattaagtttaataatttgtcat

SEQ ID NO: 74590 - DNA, 24 bp, Artificial sequence
  SiRNA target sequence
tattaagtttaataatttgtcatt

SEQ ID NO: 74591 - DNA, 24 bp, Artificial sequence
  SiRNA target sequence
attaagtttaataatttgtcattt

SEQ ID NO: 74592 - DNA, 24 bp, Artificial sequence
  SiRNA target sequence
ttaagtttaataatttgtcatttg

SEQ ID NO: 74593 - DNA, 24 bp, Artificial sequence
  SiRNA target sequence
taagtttaataatttgtcatttgg

SEQ ID NO: 74594 - DNA, 24 bp, Artificial sequence
  SiRNA target sequence
aagtttaataatttgtcatttggt

SEQ ID NO: 74595 - DNA, 24 bp, Artificial sequence
  SiRNA target sequence
agtttaataatttgtcatttggtt

SEQ ID NO: 74596 - DNA, 24 bp, Artificial sequence
  SiRNA target sequence
gtttaataatttgtcatttggtta

SEQ ID NO: 74597 - DNA, 24 bp, Artificial sequence
  SiRNA target sequence
tttaataatttgtcatttggttat

SEQ ID NO: 74598 - DNA, 24 bp, Artificial sequence
  SiRNA target sequence
ttaataatttgtcatttggttatg

SEQ ID NO: 74599 - DNA, 24 bp, Artificial sequence
  SiRNA target sequence
taataatttgtcatttggttatga

SEQ ID NO: 74600 - DNA, 24 bp, Artificial sequence
  SiRNA target sequence
aataatttgtcatttggttatgaa

SEQ ID NO: 74601 - DNA, 24 bp, Artificial sequence
  SiRNA target sequence
ataatttgtcatttggttatgaaa

SEQ ID NO: 74602 - DNA, 24 bp, Artificial sequence
  SiRNA target sequence
taatttgtcatttggttatgaaag

SEQ ID NO: 74603 - DNA, 24 bp, Artificial sequence
  SiRNA target sequence
aatttgtcatttggttatgaaagt

SEQ ID NO: 74604 - DNA, 24 bp, Artificial sequence
  SiRNA target sequence
atttgtcatttggttatgaaagta

SEQ ID NO: 74605 - DNA, 24 bp, Artificial sequence
  SiRNA target sequence
tttgtcatttggttatgaaagtag

SEQ ID NO: 74606 - DNA, 24 bp, Artificial sequence
  SiRNA target sequence
ttgtcatttggttatgaaagtaga

SEQ ID NO: 74607 - DNA, 24 bp, Artificial sequence
  SiRNA target sequence
tgtcatttggttatgaaagtagac

SEQ ID NO: 74608 - DNA, 24 bp, Artificial sequence
  SiRNA target sequence
gtcatttggttatgaaagtagaca

SEQ ID NO: 74609 - DNA, 24 bp, Artificial sequence
  SiRNA target sequence
tcatttggttatgaaagtagacaa

SEQ ID NO: 74610 - DNA, 24 bp, Artificial sequence
  SiRNA target sequence
catttggttatgaaagtagacaaa

SEQ ID NO: 74611 - DNA, 24 bp, Artificial sequence
  SiRNA target sequence
atttggttatgaaagtagacaaat

SEQ ID NO: 74612 - DNA, 24 bp, Artificial sequence
  SiRNA target sequence
tttggttatgaaagtagacaaatt

SEQ ID NO: 74613 - DNA, 24 bp, Artificial sequence
  SiRNA target sequence
ttggttatgaaagtagacaaattt

SEQ ID NO: 74614 - DNA, 24 bp, Artificial sequence
  SiRNA target sequence
tggttatgaaagtagacaaatttt

SEQ ID NO: 74615 - DNA, 24 bp, Artificial sequence
  SiRNA target sequence
ggttatgaaagtagacaaattttt

SEQ ID NO: 74616 - DNA, 24 bp, Artificial sequence
  SiRNA target sequence
gttatgaaagtagacaaattttta

SEQ ID NO: 74617 - DNA, 24 bp, Artificial sequence
  SiRNA target sequence
ttatgaaagtagacaaatttttaa

SEQ ID NO: 74618 - DNA, 24 bp, Artificial sequence
  SiRNA target sequence
tatgaaagtagacaaatttttaat

SEQ ID NO: 74619 - DNA, 24 bp, Artificial sequence
  SiRNA target sequence
atgaaagtagacaaatttttaata

SEQ ID NO: 74620 - DNA, 24 bp, Artificial sequence
  SiRNA target sequence
tgaaagtagacaaatttttaataa

SEQ ID NO: 74621 - DNA, 24 bp, Artificial sequence
  SiRNA target sequence
gaaagtagacaaatttttaataaa

SEQ ID NO: 74622 - DNA, 24 bp, Artificial sequence
  SiRNA target sequence
aaagtagacaaatttttaataaaa

SEQ ID NO: 74623 - DNA, 24 bp, Artificial sequence
  SiRNA target sequence
aagtagacaaatttttaataaaat

SEQ ID NO: 74624 - DNA, 24 bp, Artificial sequence
  SiRNA target sequence
agtagacaaatttttaataaaata

SEQ ID NO: 74625 - DNA, 24 bp, Artificial sequence
  SiRNA target sequence
gtagacaaatttttaataaaataa

SEQ ID NO: 74626 - DNA, 24 bp, Artificial sequence
  SiRNA target sequence
tagacaaatttttaataaaataaa

SEQ ID NO: 74627 - DNA, 24 bp, Artificial sequence
  SiRNA target sequence
agacaaatttttaataaaataaat

SEQ ID NO: 74628 - DNA, 24 bp, Artificial sequence
  SiRNA target sequence
gacaaatttttaataaaataaatc

SEQ ID NO: 74629 - DNA, 24 bp, Artificial sequence
  SiRNA target sequence
acaaatttttaataaaataaatct

SEQ ID NO: 74630 - DNA, 24 bp, Artificial sequence
  SiRNA target sequence
caaatttttaataaaataaatcta

SEQ ID NO: 74631 - DNA, 24 bp, Artificial sequence
  SiRNA target sequence
aaatttttaataaaataaatctag

SEQ ID NO: 74632 - DNA, 24 bp, Artificial sequence
  SiRNA target sequence
aatttttaataaaataaatctaga

SEQ ID NO: 74633 - DNA, 24 bp, Artificial sequence
  SiRNA target sequence
atttttaataaaataaatctagaa

SEQ ID NO: 74634 - DNA, 24 bp, Artificial sequence
  SiRNA target sequence
tttttaataaaataaatctagaaa

SEQ ID NO: 74635 - DNA, 24 bp, Artificial sequence
  SiRNA target sequence
ttttaataaaataaatctagaaat

SEQ ID NO: 74636 - DNA, 24 bp, Artificial sequence
  SiRNA target sequence
tttaataaaataaatctagaaata

SEQ ID NO: 74637 - DNA, 24 bp, Artificial sequence
  SiRNA target sequence
ttaataaaataaatctagaaatat

SEQ ID NO: 74638 - DNA, 24 bp, Artificial sequence
  SiRNA target sequence
taataaaataaatctagaaatata

SEQ ID NO: 74639 - DNA, 24 bp, Artificial sequence
  SiRNA target sequence
aataaaataaatctagaaatatac

SEQ ID NO: 74640 - DNA, 24 bp, Artificial sequence
  SiRNA target sequence
ataaaataaatctagaaatataca

SEQ ID NO: 74641 - DNA, 24 bp, Artificial sequence
  SiRNA target sequence
taaaataaatctagaaatatacaa

SEQ ID NO: 74642 - DNA, 24 bp, Artificial sequence
  SiRNA target sequence
aaaataaatctagaaatatacaaa

SEQ ID NO: 74643 - DNA, 24 bp, Artificial sequence
  SiRNA target sequence
aaataaatctagaaatatacaaag

SEQ ID NO: 74644 - DNA, 24 bp, Artificial sequence
  SiRNA target sequence
aataaatctagaaatatacaaagg

SEQ ID NO: 74645 - DNA, 24 bp, Artificial sequence
  SiRNA target sequence
ataaatctagaaatatacaaagga

SEQ ID NO: 74646 - DNA, 24 bp, Artificial sequence
  SiRNA target sequence
taaatctagaaatatacaaaggag

SEQ ID NO: 74647 - DNA, 24 bp, Artificial sequence
  SiRNA target sequence
aaatctagaaatatacaaaggaga

SEQ ID NO: 74648 - DNA, 24 bp, Artificial sequence
  SiRNA target sequence
aatctagaaatatacaaaggagaa

SEQ ID NO: 74649 - DNA, 24 bp, Artificial sequence
  SiRNA target sequence
atctagaaatatacaaaggagaaa

SEQ ID NO: 74650 - DNA, 24 bp, Artificial sequence
  SiRNA target sequence
tctagaaatatacaaaggagaaaa

SEQ ID NO: 74651 - DNA, 24 bp, Artificial sequence
  SiRNA target sequence
ctagaaatatacaaaggagaaaaa

SEQ ID NO: 74652 - DNA, 24 bp, Artificial sequence
  SiRNA target sequence
tagaaatatacaaaggagaaaaag

SEQ ID NO: 74653 - DNA, 24 bp, Artificial sequence
  SiRNA target sequence
agaaatatacaaaggagaaaaagt

SEQ ID NO: 74654 - DNA, 24 bp, Artificial sequence
  SiRNA target sequence
gaaatatacaaaggagaaaaagta

SEQ ID NO: 74655 - DNA, 24 bp, Artificial sequence
  SiRNA target sequence
aaatatacaaaggagaaaaagtag

SEQ ID NO: 74656 - DNA, 24 bp, Artificial sequence
  SiRNA target sequence
aatatacaaaggagaaaaagtagc

SEQ ID NO: 74657 - DNA, 24 bp, Artificial sequence
  SiRNA target sequence
atatacaaaggagaaaaagtagca

SEQ ID NO: 74658 - DNA, 24 bp, Artificial sequence
  SiRNA target sequence
tatacaaaggagaaaaagtagcaa

SEQ ID NO: 74659 - DNA, 24 bp, Artificial sequence
  SiRNA target sequence
atacaaaggagaaaaagtagcaat

SEQ ID NO: 74660 - DNA, 24 bp, Artificial sequence
  SiRNA target sequence
tacaaaggagaaaaagtagcaatt

SEQ ID NO: 74661 - DNA, 24 bp, Artificial sequence
  SiRNA target sequence
acaaaggagaaaaagtagcaatta

SEQ ID NO: 74662 - DNA, 24 bp, Artificial sequence
  SiRNA target sequence
caaaggagaaaaagtagcaattat

SEQ ID NO: 74663 - DNA, 24 bp, Artificial sequence
  SiRNA target sequence
aaaggagaaaaagtagcaattata

SEQ ID NO: 74664 - DNA, 24 bp, Artificial sequence
  SiRNA target sequence
aaggagaaaaagtagcaattatag

SEQ ID NO: 74665 - DNA, 24 bp, Artificial sequence
  SiRNA target sequence
aggagaaaaagtagcaattatagg

SEQ ID NO: 74666 - DNA, 24 bp, Artificial sequence
  SiRNA target sequence
ggagaaaaagtagcaattataggt

SEQ ID NO: 74667 - DNA, 24 bp, Artificial sequence
  SiRNA target sequence
gagaaaaagtagcaattataggta

SEQ ID NO: 74668 - DNA, 24 bp, Artificial sequence
  SiRNA target sequence
agaaaaagtagcaattataggtaa

SEQ ID NO: 74669 - DNA, 24 bp, Artificial sequence
  SiRNA target sequence
gaaaaagtagcaattataggtaaa

SEQ ID NO: 74670 - DNA, 24 bp, Artificial sequence
  SiRNA target sequence
aaaaagtagcaattataggtaaaa

SEQ ID NO: 74671 - DNA, 24 bp, Artificial sequence
  SiRNA target sequence
aaaagtagcaattataggtaaaaa

SEQ ID NO: 74672 - DNA, 24 bp, Artificial sequence
  SiRNA target sequence
aaagtagcaattataggtaaaaat

SEQ ID NO: 74673 - DNA, 24 bp, Artificial sequence
  SiRNA target sequence
aagtagcaattataggtaaaaatg

SEQ ID NO: 74674 - DNA, 24 bp, Artificial sequence
  SiRNA target sequence
agtagcaattataggtaaaaatgg

SEQ ID NO: 74675 - DNA, 24 bp, Artificial sequence
  SiRNA target sequence
gtagcaattataggtaaaaatggt

SEQ ID NO: 74676 - DNA, 24 bp, Artificial sequence
  SiRNA target sequence
tagcaattataggtaaaaatggta

SEQ ID NO: 74677 - DNA, 24 bp, Artificial sequence
  SiRNA target sequence
agcaattataggtaaaaatggtag

SEQ ID NO: 74678 - DNA, 24 bp, Artificial sequence
  SiRNA target sequence
gcaattataggtaaaaatggtagt

SEQ ID NO: 74679 - DNA, 24 bp, Artificial sequence
  SiRNA target sequence
caattataggtaaaaatggtagtg

SEQ ID NO: 74680 - DNA, 24 bp, Artificial sequence
  SiRNA target sequence
aattataggtaaaaatggtagtgg

SEQ ID NO: 74681 - DNA, 24 bp, Artificial sequence
  SiRNA target sequence
attataggtaaaaatggtagtggt

SEQ ID NO: 74682 - DNA, 24 bp, Artificial sequence
  SiRNA target sequence
ttataggtaaaaatggtagtggta

SEQ ID NO: 74683 - DNA, 24 bp, Artificial sequence
  SiRNA target sequence
tataggtaaaaatggtagtggtaa

SEQ ID NO: 74684 - DNA, 24 bp, Artificial sequence
  SiRNA target sequence
ataggtaaaaatggtagtggtaaa

SEQ ID NO: 74685 - DNA, 24 bp, Artificial sequence
  SiRNA target sequence
taggtaaaaatggtagtggtaaat

SEQ ID NO: 74686 - DNA, 24 bp, Artificial sequence
  SiRNA target sequence
aggtaaaaatggtagtggtaaatc

SEQ ID NO: 74687 - DNA, 24 bp, Artificial sequence
  SiRNA target sequence
ggtaaaaatggtagtggtaaatca

SEQ ID NO: 74688 - DNA, 24 bp, Artificial sequence
  SiRNA target sequence
gtaaaaatggtagtggtaaatcaa

SEQ ID NO: 74689 - DNA, 24 bp, Artificial sequence
  SiRNA target sequence
taaaaatggtagtggtaaatcaac

SEQ ID NO: 74690 - DNA, 24 bp, Artificial sequence
  SiRNA target sequence
aaaaatggtagtggtaaatcaaca

SEQ ID NO: 74691 - DNA, 24 bp, Artificial sequence
  SiRNA target sequence
aaaatggtagtggtaaatcaacat

SEQ ID NO: 74692 - DNA, 24 bp, Artificial sequence
  SiRNA target sequence
aaatggtagtggtaaatcaacatt

SEQ ID NO: 74693 - DNA, 24 bp, Artificial sequence
  SiRNA target sequence
aatggtagtggtaaatcaacatta

SEQ ID NO: 74694 - DNA, 24 bp, Artificial sequence
  SiRNA target sequence
atggtagtggtaaatcaacattac

SEQ ID NO: 74695 - DNA, 24 bp, Artificial sequence
  SiRNA target sequence
tggtagtggtaaatcaacattact

SEQ ID NO: 74696 - DNA, 24 bp, Artificial sequence
  SiRNA target sequence
ggtagtggtaaatcaacattacta

SEQ ID NO: 74697 - DNA, 24 bp, Artificial sequence
  SiRNA target sequence
gtagtggtaaatcaacattactaa

SEQ ID NO: 74698 - DNA, 24 bp, Artificial sequence
  SiRNA target sequence
tagtggtaaatcaacattactaaa

SEQ ID NO: 74699 - DNA, 24 bp, Artificial sequence
  SiRNA target sequence
agtggtaaatcaacattactaaaa

SEQ ID NO: 74700 - DNA, 24 bp, Artificial sequence
  SiRNA target sequence
gtggtaaatcaacattactaaaac

SEQ ID NO: 74701 - DNA, 24 bp, Artificial sequence
  SiRNA target sequence
tggtaaatcaacattactaaaact

SEQ ID NO: 74702 - DNA, 24 bp, Artificial sequence
  SiRNA target sequence
ggtaaatcaacattactaaaacta

SEQ ID NO: 74703 - DNA, 24 bp, Artificial sequence
  SiRNA target sequence
gtaaatcaacattactaaaactac

SEQ ID NO: 74704 - DNA, 24 bp, Artificial sequence
  SiRNA target sequence
taaatcaacattactaaaactact

SEQ ID NO: 74705 - DNA, 24 bp, Artificial sequence
  SiRNA target sequence
aaatcaacattactaaaactactg

SEQ ID NO: 74706 - DNA, 24 bp, Artificial sequence
  SiRNA target sequence
aatcaacattactaaaactactgc

SEQ ID NO: 74707 - DNA, 24 bp, Artificial sequence
  SiRNA target sequence
atcaacattactaaaactactgct

SEQ ID NO: 74708 - DNA, 24 bp, Artificial sequence
  SiRNA target sequence
tcaacattactaaaactactgctt

SEQ ID NO: 74709 - DNA, 24 bp, Artificial sequence
  SiRNA target sequence
caacattactaaaactactgctta

SEQ ID NO: 74710 - DNA, 24 bp, Artificial sequence
  SiRNA target sequence
aacattactaaaactactgcttaa

SEQ ID NO: 74711 - DNA, 24 bp, Artificial sequence
  SiRNA target sequence
acattactaaaactactgcttaaa

SEQ ID NO: 74712 - DNA, 24 bp, Artificial sequence
  SiRNA target sequence
cattactaaaactactgcttaaat

SEQ ID NO: 74713 - DNA, 24 bp, Artificial sequence
  SiRNA target sequence
attactaaaactactgcttaaatt

SEQ ID NO: 74714 - DNA, 24 bp, Artificial sequence
  SiRNA target sequence
ttactaaaactactgcttaaattt

SEQ ID NO: 74715 - DNA, 24 bp, Artificial sequence
  SiRNA target sequence
tactaaaactactgcttaaatttg

SEQ ID NO: 74716 - DNA, 24 bp, Artificial sequence
  SiRNA target sequence
actaaaactactgcttaaatttga

SEQ ID NO: 74717 - DNA, 24 bp, Artificial sequence
  SiRNA target sequence
ctaaaactactgcttaaatttgat

SEQ ID NO: 74718 - DNA, 24 bp, Artificial sequence
  SiRNA target sequence
taaaactactgcttaaatttgatg

SEQ ID NO: 74719 - DNA, 24 bp, Artificial sequence
  SiRNA target sequence
aaaactactgcttaaatttgatga

SEQ ID NO: 74720 - DNA, 24 bp, Artificial sequence
  SiRNA target sequence
aaactactgcttaaatttgatgaa

SEQ ID NO: 74721 - DNA, 24 bp, Artificial sequence
  SiRNA target sequence
aactactgcttaaatttgatgaag

SEQ ID NO: 74722 - DNA, 24 bp, Artificial sequence
  SiRNA target sequence
actactgcttaaatttgatgaaga

SEQ ID NO: 74723 - DNA, 24 bp, Artificial sequence
  SiRNA target sequence
ctactgcttaaatttgatgaagat

SEQ ID NO: 74724 - DNA, 24 bp, Artificial sequence
  SiRNA target sequence
tactgcttaaatttgatgaagatt

SEQ ID NO: 74725 - DNA, 24 bp, Artificial sequence
  SiRNA target sequence
actgcttaaatttgatgaagatta

SEQ ID NO: 74726 - DNA, 24 bp, Artificial sequence
  SiRNA target sequence
ctgcttaaatttgatgaagattac

SEQ ID NO: 74727 - DNA, 24 bp, Artificial sequence
  SiRNA target sequence
tgcttaaatttgatgaagattaca

SEQ ID NO: 74728 - DNA, 24 bp, Artificial sequence
  SiRNA target sequence
gcttaaatttgatgaagattacaa

SEQ ID NO: 74729 - DNA, 24 bp, Artificial sequence
  SiRNA target sequence
cttaaatttgatgaagattacaaa

SEQ ID NO: 74730 - DNA, 24 bp, Artificial sequence
  SiRNA target sequence
ttaaatttgatgaagattacaaag

SEQ ID NO: 74731 - DNA, 24 bp, Artificial sequence
  SiRNA target sequence
taaatttgatgaagattacaaagg

SEQ ID NO: 74732 - DNA, 24 bp, Artificial sequence
  SiRNA target sequence
aaatttgatgaagattacaaaggt

SEQ ID NO: 74733 - DNA, 24 bp, Artificial sequence
  SiRNA target sequence
aatttgatgaagattacaaaggta

SEQ ID NO: 74734 - DNA, 24 bp, Artificial sequence
  SiRNA target sequence
atttgatgaagattacaaaggtag

SEQ ID NO: 74735 - DNA, 24 bp, Artificial sequence
  SiRNA target sequence
tttgatgaagattacaaaggtagc

SEQ ID NO: 74736 - DNA, 24 bp, Artificial sequence
  SiRNA target sequence
ttgatgaagattacaaaggtagca

SEQ ID NO: 74737 - DNA, 24 bp, Artificial sequence
  SiRNA target sequence
tgatgaagattacaaaggtagcat

SEQ ID NO: 74738 - DNA, 24 bp, Artificial sequence
  SiRNA target sequence
gatgaagattacaaaggtagcatt

SEQ ID NO: 74739 - DNA, 24 bp, Artificial sequence
  SiRNA target sequence
atgaagattacaaaggtagcattt

SEQ ID NO: 74740 - DNA, 24 bp, Artificial sequence
  SiRNA target sequence
tgaagattacaaaggtagcatttt

SEQ ID NO: 74741 - DNA, 24 bp, Artificial sequence
  SiRNA target sequence
gaagattacaaaggtagcatttta

SEQ ID NO: 74742 - DNA, 24 bp, Artificial sequence
  SiRNA target sequence
aagattacaaaggtagcattttaa

SEQ ID NO: 74743 - DNA, 24 bp, Artificial sequence
  SiRNA target sequence
agattacaaaggtagcattttaat

SEQ ID NO: 74744 - DNA, 24 bp, Artificial sequence
  SiRNA target sequence
gattacaaaggtagcattttaata

SEQ ID NO: 74745 - DNA, 24 bp, Artificial sequence
  SiRNA target sequence
attacaaaggtagcattttaatag

SEQ ID NO: 74746 - DNA, 24 bp, Artificial sequence
  SiRNA target sequence
ttacaaaggtagcattttaataga

SEQ ID NO: 74747 - DNA, 24 bp, Artificial sequence
  SiRNA target sequence
tacaaaggtagcattttaatagat

SEQ ID NO: 74748 - DNA, 24 bp, Artificial sequence
  SiRNA target sequence
acaaaggtagcattttaatagatg

SEQ ID NO: 74749 - DNA, 24 bp, Artificial sequence
  SiRNA target sequence
caaaggtagcattttaatagatga

SEQ ID NO: 74750 - DNA, 24 bp, Artificial sequence
  SiRNA target sequence
aaaggtagcattttaatagatgac

SEQ ID NO: 74751 - DNA, 24 bp, Artificial sequence
  SiRNA target sequence
aaggtagcattttaatagatgaca

SEQ ID NO: 74752 - DNA, 24 bp, Artificial sequence
  SiRNA target sequence
aggtagcattttaatagatgacat

SEQ ID NO: 74753 - DNA, 24 bp, Artificial sequence
  SiRNA target sequence
ggtagcattttaatagatgacatt

SEQ ID NO: 74754 - DNA, 24 bp, Artificial sequence
  SiRNA target sequence
gtagcattttaatagatgacattg

SEQ ID NO: 74755 - DNA, 24 bp, Artificial sequence
  SiRNA target sequence
tagcattttaatagatgacattga

SEQ ID NO: 74756 - DNA, 24 bp, Artificial sequence
  SiRNA target sequence
agcattttaatagatgacattgat

SEQ ID NO: 74757 - DNA, 24 bp, Artificial sequence
  SiRNA target sequence
gcattttaatagatgacattgata

SEQ ID NO: 74758 - DNA, 24 bp, Artificial sequence
  SiRNA target sequence
cattttaatagatgacattgatat

SEQ ID NO: 74759 - DNA, 24 bp, Artificial sequence
  SiRNA target sequence
attttaatagatgacattgatatt

SEQ ID NO: 74760 - DNA, 24 bp, Artificial sequence
  SiRNA target sequence
ttttaatagatgacattgatatta

SEQ ID NO: 74761 - DNA, 24 bp, Artificial sequence
  SiRNA target sequence
tttaatagatgacattgatattaa

SEQ ID NO: 74762 - DNA, 24 bp, Artificial sequence
  SiRNA target sequence
ttaatagatgacattgatattaaa

SEQ ID NO: 74763 - DNA, 24 bp, Artificial sequence
  SiRNA target sequence
taatagatgacattgatattaaaa

SEQ ID NO: 74764 - DNA, 24 bp, Artificial sequence
  SiRNA target sequence
aatagatgacattgatattaaaaa

SEQ ID NO: 74765 - DNA, 24 bp, Artificial sequence
  SiRNA target sequence
atagatgacattgatattaaaaaa

SEQ ID NO: 74766 - DNA, 24 bp, Artificial sequence
  SiRNA target sequence
tagatgacattgatattaaaaaaa

SEQ ID NO: 74767 - DNA, 24 bp, Artificial sequence
  SiRNA target sequence
agatgacattgatattaaaaaaat

SEQ ID NO: 74768 - DNA, 24 bp, Artificial sequence
  SiRNA target sequence
gatgacattgatattaaaaaaatc

SEQ ID NO: 74769 - DNA, 24 bp, Artificial sequence
  SiRNA target sequence
atgacattgatattaaaaaaatca

SEQ ID NO: 74770 - DNA, 24 bp, Artificial sequence
  SiRNA target sequence
tgacattgatattaaaaaaatcaa

SEQ ID NO: 74771 - DNA, 24 bp, Artificial sequence
  SiRNA target sequence
gacattgatattaaaaaaatcaaa

SEQ ID NO: 74772 - DNA, 24 bp, Artificial sequence
  SiRNA target sequence
acattgatattaaaaaaatcaaag

SEQ ID NO: 74773 - DNA, 24 bp, Artificial sequence
  SiRNA target sequence
cattgatattaaaaaaatcaaaga

SEQ ID NO: 74774 - DNA, 24 bp, Artificial sequence
  SiRNA target sequence
attgatattaaaaaaatcaaagac

SEQ ID NO: 74775 - DNA, 24 bp, Artificial sequence
  SiRNA target sequence
ttgatattaaaaaaatcaaagacg

SEQ ID NO: 74776 - DNA, 24 bp, Artificial sequence
  SiRNA target sequence
tgatattaaaaaaatcaaagacga

SEQ ID NO: 74777 - DNA, 24 bp, Artificial sequence
  SiRNA target sequence
gatattaaaaaaatcaaagacgaa

SEQ ID NO: 74778 - DNA, 24 bp, Artificial sequence
  SiRNA target sequence
atattaaaaaaatcaaagacgaat

SEQ ID NO: 74779 - DNA, 24 bp, Artificial sequence
  SiRNA target sequence
tattaaaaaaatcaaagacgaatt

SEQ ID NO: 74780 - DNA, 24 bp, Artificial sequence
  SiRNA target sequence
attaaaaaaatcaaagacgaattt

SEQ ID NO: 74781 - DNA, 24 bp, Artificial sequence
  SiRNA target sequence
ttaaaaaaatcaaagacgaatttt

SEQ ID NO: 74782 - DNA, 24 bp, Artificial sequence
  SiRNA target sequence
taaaaaaatcaaagacgaatttta

SEQ ID NO: 74783 - DNA, 24 bp, Artificial sequence
  SiRNA target sequence
aaaaaaatcaaagacgaattttat

SEQ ID NO: 74784 - DNA, 24 bp, Artificial sequence
  SiRNA target sequence
aaaaaatcaaagacgaattttata

SEQ ID NO: 74785 - DNA, 24 bp, Artificial sequence
  SiRNA target sequence
aaaaatcaaagacgaattttatag

SEQ ID NO: 74786 - DNA, 24 bp, Artificial sequence
  SiRNA target sequence
aaaatcaaagacgaattttatagg

SEQ ID NO: 74787 - DNA, 24 bp, Artificial sequence
  SiRNA target sequence
aaatcaaagacgaattttatagga

SEQ ID NO: 74788 - DNA, 24 bp, Artificial sequence
  SiRNA target sequence
aatcaaagacgaattttataggaa

SEQ ID NO: 74789 - DNA, 24 bp, Artificial sequence
  SiRNA target sequence
atcaaagacgaattttataggaat

SEQ ID NO: 74790 - DNA, 24 bp, Artificial sequence
  SiRNA target sequence
tcaaagacgaattttataggaatt

SEQ ID NO: 74791 - DNA, 24 bp, Artificial sequence
  SiRNA target sequence
caaagacgaattttataggaattt

SEQ ID NO: 74792 - DNA, 24 bp, Artificial sequence
  SiRNA target sequence
aaagacgaattttataggaattta

SEQ ID NO: 74793 - DNA, 24 bp, Artificial sequence
  SiRNA target sequence
aagacgaattttataggaatttat

SEQ ID NO: 74794 - DNA, 24 bp, Artificial sequence
  SiRNA target sequence
agacgaattttataggaatttatt

SEQ ID NO: 74795 - DNA, 24 bp, Artificial sequence
  SiRNA target sequence
gacgaattttataggaatttatta

SEQ ID NO: 74796 - DNA, 24 bp, Artificial sequence
  SiRNA target sequence
acgaattttataggaatttattag

SEQ ID NO: 74797 - DNA, 24 bp, Artificial sequence
  SiRNA target sequence
cgaattttataggaatttattagg

SEQ ID NO: 74798 - DNA, 24 bp, Artificial sequence
  SiRNA target sequence
gaattttataggaatttattaggt

SEQ ID NO: 74799 - DNA, 24 bp, Artificial sequence
  SiRNA target sequence
aattttataggaatttattaggtt

SEQ ID NO: 74800 - DNA, 24 bp, Artificial sequence
  SiRNA target sequence
attttataggaatttattaggtta

SEQ ID NO: 74801 - DNA, 24 bp, Artificial sequence
  SiRNA target sequence
ttttataggaatttattaggttac

SEQ ID NO: 74802 - DNA, 24 bp, Artificial sequence
  SiRNA target sequence
tttataggaatttattaggttaca

SEQ ID NO: 74803 - DNA, 24 bp, Artificial sequence
  SiRNA target sequence
ttataggaatttattaggttacat

SEQ ID NO: 74804 - DNA, 24 bp, Artificial sequence
  SiRNA target sequence
tataggaatttattaggttacata

SEQ ID NO: 74805 - DNA, 24 bp, Artificial sequence
  SiRNA target sequence
ataggaatttattaggttacatac

SEQ ID NO: 74806 - DNA, 24 bp, Artificial sequence
  SiRNA target sequence
taggaatttattaggttacatacc

SEQ ID NO: 74807 - DNA, 24 bp, Artificial sequence
  SiRNA target sequence
aggaatttattaggttacatacca

SEQ ID NO: 74808 - DNA, 24 bp, Artificial sequence
  SiRNA target sequence
ggaatttattaggttacataccac

SEQ ID NO: 74809 - DNA, 24 bp, Artificial sequence
  SiRNA target sequence
gaatttattaggttacataccaca

SEQ ID NO: 74810 - DNA, 24 bp, Artificial sequence
  SiRNA target sequence
aatttattaggttacataccacag

SEQ ID NO: 74811 - DNA, 24 bp, Artificial sequence
  SiRNA target sequence
atttattaggttacataccacaga

SEQ ID NO: 74812 - DNA, 24 bp, Artificial sequence
  SiRNA target sequence
tttattaggttacataccacagaa

SEQ ID NO: 74813 - DNA, 24 bp, Artificial sequence
  SiRNA target sequence
ttattaggttacataccacagaat

SEQ ID NO: 74814 - DNA, 24 bp, Artificial sequence
  SiRNA target sequence
tattaggttacataccacagaata

SEQ ID NO: 74815 - DNA, 24 bp, Artificial sequence
  SiRNA target sequence
attaggttacataccacagaatac

SEQ ID NO: 74816 - DNA, 24 bp, Artificial sequence
  SiRNA target sequence
ttaggttacataccacagaataca

SEQ ID NO: 74817 - DNA, 24 bp, Artificial sequence
  SiRNA target sequence
taggttacataccacagaatacat

SEQ ID NO: 74818 - DNA, 24 bp, Artificial sequence
  SiRNA target sequence
aggttacataccacagaatacatt

SEQ ID NO: 74819 - DNA, 24 bp, Artificial sequence
  SiRNA target sequence
ggttacataccacagaatacattt

SEQ ID NO: 74820 - DNA, 24 bp, Artificial sequence
  SiRNA target sequence
gttacataccacagaatacatttt

SEQ ID NO: 74821 - DNA, 24 bp, Artificial sequence
  SiRNA target sequence
ttacataccacagaatacattttt

SEQ ID NO: 74822 - DNA, 24 bp, Artificial sequence
  SiRNA target sequence
tacataccacagaatacatttttg

SEQ ID NO: 74823 - DNA, 24 bp, Artificial sequence
  SiRNA target sequence
acataccacagaatacatttttgt

SEQ ID NO: 74824 - DNA, 24 bp, Artificial sequence
  SiRNA target sequence
cataccacagaatacatttttgtt

SEQ ID NO: 74825 - DNA, 24 bp, Artificial sequence
  SiRNA target sequence
ataccacagaatacatttttgttt

SEQ ID NO: 74826 - DNA, 24 bp, Artificial sequence
  SiRNA target sequence
taccacagaatacatttttgttta

SEQ ID NO: 74827 - DNA, 24 bp, Artificial sequence
  SiRNA target sequence
accacagaatacatttttgtttaa

SEQ ID NO: 74828 - DNA, 24 bp, Artificial sequence
  SiRNA target sequence
ccacagaatacatttttgtttaat

SEQ ID NO: 74829 - DNA, 24 bp, Artificial sequence
  SiRNA target sequence
cacagaatacatttttgtttaatg

SEQ ID NO: 74830 - DNA, 24 bp, Artificial sequence
  SiRNA target sequence
acagaatacatttttgtttaatga

SEQ ID NO: 74831 - DNA, 24 bp, Artificial sequence
  SiRNA target sequence
cagaatacatttttgtttaatgaa

SEQ ID NO: 74832 - DNA, 24 bp, Artificial sequence
  SiRNA target sequence
agaatacatttttgtttaatgaat

SEQ ID NO: 74833 - DNA, 24 bp, Artificial sequence
  SiRNA target sequence
gaatacatttttgtttaatgaatc

SEQ ID NO: 74834 - DNA, 24 bp, Artificial sequence
  SiRNA target sequence
aatacatttttgtttaatgaatct

SEQ ID NO: 74835 - DNA, 24 bp, Artificial sequence
  SiRNA target sequence
atacatttttgtttaatgaatctg

SEQ ID NO: 74836 - DNA, 24 bp, Artificial sequence
  SiRNA target sequence
tacatttttgtttaatgaatctgt

SEQ ID NO: 74837 - DNA, 24 bp, Artificial sequence
  SiRNA target sequence
acatttttgtttaatgaatctgta

SEQ ID NO: 74838 - DNA, 24 bp, Artificial sequence
  SiRNA target sequence
catttttgtttaatgaatctgtaa

SEQ ID NO: 74839 - DNA, 24 bp, Artificial sequence
  SiRNA target sequence
atttttgtttaatgaatctgtaaa

SEQ ID NO: 74840 - DNA, 24 bp, Artificial sequence
  SiRNA target sequence
tttttgtttaatgaatctgtaaaa

SEQ ID NO: 74841 - DNA, 24 bp, Artificial sequence
  SiRNA target sequence
ttttgtttaatgaatctgtaaaat

SEQ ID NO: 74842 - DNA, 24 bp, Artificial sequence
  SiRNA target sequence
tttgtttaatgaatctgtaaaata

SEQ ID NO: 74843 - DNA, 24 bp, Artificial sequence
  SiRNA target sequence
ttgtttaatgaatctgtaaaatat

SEQ ID NO: 74844 - DNA, 24 bp, Artificial sequence
  SiRNA target sequence
tgtttaatgaatctgtaaaatata

SEQ ID NO: 74845 - DNA, 24 bp, Artificial sequence
  SiRNA target sequence
gtttaatgaatctgtaaaatataa

SEQ ID NO: 74846 - DNA, 24 bp, Artificial sequence
  SiRNA target sequence
tttaatgaatctgtaaaatataat

SEQ ID NO: 74847 - DNA, 24 bp, Artificial sequence
  SiRNA target sequence
ttaatgaatctgtaaaatataata

SEQ ID NO: 74848 - DNA, 24 bp, Artificial sequence
  SiRNA target sequence
taatgaatctgtaaaatataatat

SEQ ID NO: 74849 - DNA, 24 bp, Artificial sequence
  SiRNA target sequence
aatgaatctgtaaaatataatatt

SEQ ID NO: 74850 - DNA, 24 bp, Artificial sequence
  SiRNA target sequence
atgaatctgtaaaatataatatta

SEQ ID NO: 74851 - DNA, 24 bp, Artificial sequence
  SiRNA target sequence
tgaatctgtaaaatataatattaa

SEQ ID NO: 74852 - DNA, 24 bp, Artificial sequence
  SiRNA target sequence
gaatctgtaaaatataatattaaa

SEQ ID NO: 74853 - DNA, 24 bp, Artificial sequence
  SiRNA target sequence
aatctgtaaaatataatattaaat

SEQ ID NO: 74854 - DNA, 24 bp, Artificial sequence
  SiRNA target sequence
atctgtaaaatataatattaaata

SEQ ID NO: 74855 - DNA, 24 bp, Artificial sequence
  SiRNA target sequence
tctgtaaaatataatattaaatac

SEQ ID NO: 74856 - DNA, 24 bp, Artificial sequence
  SiRNA target sequence
ctgtaaaatataatattaaatacg

SEQ ID NO: 74857 - DNA, 24 bp, Artificial sequence
  SiRNA target sequence
tgtaaaatataatattaaatacgg

SEQ ID NO: 74858 - DNA, 24 bp, Artificial sequence
  SiRNA target sequence
gtaaaatataatattaaatacgga

SEQ ID NO: 74859 - DNA, 24 bp, Artificial sequence
  SiRNA target sequence
taaaatataatattaaatacggat

SEQ ID NO: 74860 - DNA, 24 bp, Artificial sequence
  SiRNA target sequence
aaaatataatattaaatacggatc

SEQ ID NO: 74861 - DNA, 24 bp, Artificial sequence
  SiRNA target sequence
aaatataatattaaatacggatct

SEQ ID NO: 74862 - DNA, 24 bp, Artificial sequence
  SiRNA target sequence
aatataatattaaatacggatctt

SEQ ID NO: 74863 - DNA, 24 bp, Artificial sequence
  SiRNA target sequence
atataatattaaatacggatcttt

SEQ ID NO: 74864 - DNA, 24 bp, Artificial sequence
  SiRNA target sequence
tataatattaaatacggatctttt

SEQ ID NO: 74865 - DNA, 24 bp, Artificial sequence
  SiRNA target sequence
ataatattaaatacggatcttttg

SEQ ID NO: 74866 - DNA, 24 bp, Artificial sequence
  SiRNA target sequence
taatattaaatacggatcttttgg

SEQ ID NO: 74867 - DNA, 24 bp, Artificial sequence
  SiRNA target sequence
aatattaaatacggatcttttggt

SEQ ID NO: 74868 - DNA, 24 bp, Artificial sequence
  SiRNA target sequence
atattaaatacggatcttttggta

SEQ ID NO: 74869 - DNA, 24 bp, Artificial sequence
  SiRNA target sequence
tattaaatacggatcttttggtat

SEQ ID NO: 74870 - DNA, 24 bp, Artificial sequence
  SiRNA target sequence
attaaatacggatcttttggtatt

SEQ ID NO: 74871 - DNA, 24 bp, Artificial sequence
  SiRNA target sequence
ttaaatacggatcttttggtattt

SEQ ID NO: 74872 - DNA, 24 bp, Artificial sequence
  SiRNA target sequence
taaatacggatcttttggtatttc

SEQ ID NO: 74873 - DNA, 24 bp, Artificial sequence
  SiRNA target sequence
aaatacggatcttttggtatttca

SEQ ID NO: 74874 - DNA, 24 bp, Artificial sequence
  SiRNA target sequence
aatacggatcttttggtatttcag

SEQ ID NO: 74875 - DNA, 24 bp, Artificial sequence
  SiRNA target sequence
atacggatcttttggtatttcaga

SEQ ID NO: 74876 - DNA, 24 bp, Artificial sequence
  SiRNA target sequence
tacggatcttttggtatttcagac

SEQ ID NO: 74877 - DNA, 24 bp, Artificial sequence
  SiRNA target sequence
acggatcttttggtatttcagacg

SEQ ID NO: 74878 - DNA, 24 bp, Artificial sequence
  SiRNA target sequence
cggatcttttggtatttcagacga

SEQ ID NO: 74879 - DNA, 24 bp, Artificial sequence
  SiRNA target sequence
ggatcttttggtatttcagacgag

SEQ ID NO: 74880 - DNA, 24 bp, Artificial sequence
  SiRNA target sequence
gatcttttggtatttcagacgagg

SEQ ID NO: 74881 - DNA, 24 bp, Artificial sequence
  SiRNA target sequence
atcttttggtatttcagacgagga

SEQ ID NO: 74882 - DNA, 24 bp, Artificial sequence
  SiRNA target sequence
tcttttggtatttcagacgaggat

SEQ ID NO: 74883 - DNA, 24 bp, Artificial sequence
  SiRNA target sequence
cttttggtatttcagacgaggata

SEQ ID NO: 74884 - DNA, 24 bp, Artificial sequence
  SiRNA target sequence
ttttggtatttcagacgaggatat

SEQ ID NO: 74885 - DNA, 24 bp, Artificial sequence
  SiRNA target sequence
tttggtatttcagacgaggatatt

SEQ ID NO: 74886 - DNA, 24 bp, Artificial sequence
  SiRNA target sequence
ttggtatttcagacgaggatattt

SEQ ID NO: 74887 - DNA, 24 bp, Artificial sequence
  SiRNA target sequence
tggtatttcagacgaggatatttt

SEQ ID NO: 74888 - DNA, 24 bp, Artificial sequence
  SiRNA target sequence
ggtatttcagacgaggatattttt

SEQ ID NO: 74889 - DNA, 24 bp, Artificial sequence
  SiRNA target sequence
gtatttcagacgaggatatttttg

SEQ ID NO: 74890 - DNA, 24 bp, Artificial sequence
  SiRNA target sequence
tatttcagacgaggatatttttgc

SEQ ID NO: 74891 - DNA, 24 bp, Artificial sequence
  SiRNA target sequence
atttcagacgaggatatttttgca

SEQ ID NO: 74892 - DNA, 24 bp, Artificial sequence
  SiRNA target sequence
tttcagacgaggatatttttgcat

SEQ ID NO: 74893 - DNA, 24 bp, Artificial sequence
  SiRNA target sequence
ttcagacgaggatatttttgcatt

SEQ ID NO: 74894 - DNA, 24 bp, Artificial sequence
  SiRNA target sequence
tcagacgaggatatttttgcattg

SEQ ID NO: 74895 - DNA, 24 bp, Artificial sequence
  SiRNA target sequence
cagacgaggatatttttgcattgt

SEQ ID NO: 74896 - DNA, 24 bp, Artificial sequence
  SiRNA target sequence
agacgaggatatttttgcattgtg

SEQ ID NO: 74897 - DNA, 24 bp, Artificial sequence
  SiRNA target sequence
gacgaggatatttttgcattgtgt

SEQ ID NO: 74898 - DNA, 24 bp, Artificial sequence
  SiRNA target sequence
acgaggatatttttgcattgtgta

SEQ ID NO: 74899 - DNA, 24 bp, Artificial sequence
  SiRNA target sequence
cgaggatatttttgcattgtgtaa

SEQ ID NO: 74900 - DNA, 24 bp, Artificial sequence
  SiRNA target sequence
gaggatatttttgcattgtgtaaa

SEQ ID NO: 74901 - DNA, 24 bp, Artificial sequence
  SiRNA target sequence
aggatatttttgcattgtgtaaag

SEQ ID NO: 74902 - DNA, 24 bp, Artificial sequence
  SiRNA target sequence
ggatatttttgcattgtgtaaaga

SEQ ID NO: 74903 - DNA, 24 bp, Artificial sequence
  SiRNA target sequence
gatatttttgcattgtgtaaagag

SEQ ID NO: 74904 - DNA, 24 bp, Artificial sequence
  SiRNA target sequence
atatttttgcattgtgtaaagagt

SEQ ID NO: 74905 - DNA, 24 bp, Artificial sequence
  SiRNA target sequence
tatttttgcattgtgtaaagagtt

SEQ ID NO: 74906 - DNA, 24 bp, Artificial sequence
  SiRNA target sequence
atttttgcattgtgtaaagagttt

SEQ ID NO: 74907 - DNA, 24 bp, Artificial sequence
  SiRNA target sequence
tttttgcattgtgtaaagagtttg

SEQ ID NO: 74908 - DNA, 24 bp, Artificial sequence
  SiRNA target sequence
ttttgcattgtgtaaagagtttgg

SEQ ID NO: 74909 - DNA, 24 bp, Artificial sequence
  SiRNA target sequence
tttgcattgtgtaaagagtttgga

SEQ ID NO: 74910 - DNA, 24 bp, Artificial sequence
  SiRNA target sequence
ttgcattgtgtaaagagtttggat

SEQ ID NO: 74911 - DNA, 24 bp, Artificial sequence
  SiRNA target sequence
tgcattgtgtaaagagtttggatt

SEQ ID NO: 74912 - DNA, 24 bp, Artificial sequence
  SiRNA target sequence
gcattgtgtaaagagtttggatta

SEQ ID NO: 74913 - DNA, 24 bp, Artificial sequence
  SiRNA target sequence
cattgtgtaaagagtttggattat

SEQ ID NO: 74914 - DNA, 24 bp, Artificial sequence
  SiRNA target sequence
attgtgtaaagagtttggattata

SEQ ID NO: 74915 - DNA, 24 bp, Artificial sequence
  SiRNA target sequence
ttgtgtaaagagtttggattatat

SEQ ID NO: 74916 - DNA, 24 bp, Artificial sequence
  SiRNA target sequence
tgtgtaaagagtttggattatatg

SEQ ID NO: 74917 - DNA, 24 bp, Artificial sequence
  SiRNA target sequence
gtgtaaagagtttggattatatga

SEQ ID NO: 74918 - DNA, 24 bp, Artificial sequence
  SiRNA target sequence
tgtaaagagtttggattatatgac

SEQ ID NO: 74919 - DNA, 24 bp, Artificial sequence
  SiRNA target sequence
gtaaagagtttggattatatgacg

SEQ ID NO: 74920 - DNA, 24 bp, Artificial sequence
  SiRNA target sequence
taaagagtttggattatatgacgt

SEQ ID NO: 74921 - DNA, 24 bp, Artificial sequence
  SiRNA target sequence
aaagagtttggattatatgacgtt

SEQ ID NO: 74922 - DNA, 24 bp, Artificial sequence
  SiRNA target sequence
aagagtttggattatatgacgttt

SEQ ID NO: 74923 - DNA, 24 bp, Artificial sequence
  SiRNA target sequence
agagtttggattatatgacgtttt

SEQ ID NO: 74924 - DNA, 24 bp, Artificial sequence
  SiRNA target sequence
gagtttggattatatgacgttttc

SEQ ID NO: 74925 - DNA, 24 bp, Artificial sequence
  SiRNA target sequence
agtttggattatatgacgttttca

SEQ ID NO: 74926 - DNA, 24 bp, Artificial sequence
  SiRNA target sequence
gtttggattatatgacgttttcat

SEQ ID NO: 74927 - DNA, 24 bp, Artificial sequence
  SiRNA target sequence
tttggattatatgacgttttcatg

SEQ ID NO: 74928 - DNA, 24 bp, Artificial sequence
  SiRNA target sequence
ttggattatatgacgttttcatga

SEQ ID NO: 74929 - DNA, 24 bp, Artificial sequence
  SiRNA target sequence
tggattatatgacgttttcatgaa

SEQ ID NO: 74930 - DNA, 24 bp, Artificial sequence
  SiRNA target sequence
ggattatatgacgttttcatgaac

SEQ ID NO: 74931 - DNA, 24 bp, Artificial sequence
  SiRNA target sequence
gattatatgacgttttcatgaacc

SEQ ID NO: 74932 - DNA, 24 bp, Artificial sequence
  SiRNA target sequence
attatatgacgttttcatgaacct

SEQ ID NO: 74933 - DNA, 24 bp, Artificial sequence
  SiRNA target sequence
ttatatgacgttttcatgaacctc

SEQ ID NO: 74934 - DNA, 24 bp, Artificial sequence
  SiRNA target sequence
tatatgacgttttcatgaacctcg

SEQ ID NO: 74935 - DNA, 24 bp, Artificial sequence
  SiRNA target sequence
atatgacgttttcatgaacctcga

SEQ ID NO: 74936 - DNA, 24 bp, Artificial sequence
  SiRNA target sequence
tatgacgttttcatgaacctcgaa

SEQ ID NO: 74937 - DNA, 24 bp, Artificial sequence
  SiRNA target sequence
atgacgttttcatgaacctcgaaa

SEQ ID NO: 74938 - DNA, 24 bp, Artificial sequence
  SiRNA target sequence
tgacgttttcatgaacctcgaaaa

SEQ ID NO: 74939 - DNA, 24 bp, Artificial sequence
  SiRNA target sequence
gacgttttcatgaacctcgaaaat

SEQ ID NO: 74940 - DNA, 24 bp, Artificial sequence
  SiRNA target sequence
acgttttcatgaacctcgaaaatg

SEQ ID NO: 74941 - DNA, 24 bp, Artificial sequence
  SiRNA target sequence
cgttttcatgaacctcgaaaatgg

SEQ ID NO: 74942 - DNA, 24 bp, Artificial sequence
  SiRNA target sequence
gttttcatgaacctcgaaaatggt

SEQ ID NO: 74943 - DNA, 24 bp, Artificial sequence
  SiRNA target sequence
ttttcatgaacctcgaaaatggtt

SEQ ID NO: 74944 - DNA, 24 bp, Artificial sequence
  SiRNA target sequence
tttcatgaacctcgaaaatggttt

SEQ ID NO: 74945 - DNA, 24 bp, Artificial sequence
  SiRNA target sequence
ttcatgaacctcgaaaatggtttt

SEQ ID NO: 74946 - DNA, 24 bp, Artificial sequence
  SiRNA target sequence
tcatgaacctcgaaaatggttttg

SEQ ID NO: 74947 - DNA, 24 bp, Artificial sequence
  SiRNA target sequence
catgaacctcgaaaatggttttga

SEQ ID NO: 74948 - DNA, 24 bp, Artificial sequence
  SiRNA target sequence
atgaacctcgaaaatggttttgat

SEQ ID NO: 74949 - DNA, 24 bp, Artificial sequence
  SiRNA target sequence
tgaacctcgaaaatggttttgata

SEQ ID NO: 74950 - DNA, 24 bp, Artificial sequence
  SiRNA target sequence
gaacctcgaaaatggttttgatac

SEQ ID NO: 74951 - DNA, 24 bp, Artificial sequence
  SiRNA target sequence
aacctcgaaaatggttttgatacg

SEQ ID NO: 74952 - DNA, 24 bp, Artificial sequence
  SiRNA target sequence
acctcgaaaatggttttgatacga

SEQ ID NO: 74953 - DNA, 24 bp, Artificial sequence
  SiRNA target sequence
cctcgaaaatggttttgatacgaa

SEQ ID NO: 74954 - DNA, 24 bp, Artificial sequence
  SiRNA target sequence
ctcgaaaatggttttgatacgaat

SEQ ID NO: 74955 - DNA, 24 bp, Artificial sequence
  SiRNA target sequence
tcgaaaatggttttgatacgaatg

SEQ ID NO: 74956 - DNA, 24 bp, Artificial sequence
  SiRNA target sequence
cgaaaatggttttgatacgaatgt

SEQ ID NO: 74957 - DNA, 24 bp, Artificial sequence
  SiRNA target sequence
gaaaatggttttgatacgaatgta

SEQ ID NO: 74958 - DNA, 24 bp, Artificial sequence
  SiRNA target sequence
aaaatggttttgatacgaatgtag

SEQ ID NO: 74959 - DNA, 24 bp, Artificial sequence
  SiRNA target sequence
aaatggttttgatacgaatgtagg

SEQ ID NO: 74960 - DNA, 24 bp, Artificial sequence
  SiRNA target sequence
aatggttttgatacgaatgtagga

SEQ ID NO: 74961 - DNA, 24 bp, Artificial sequence
  SiRNA target sequence
atggttttgatacgaatgtaggag

SEQ ID NO: 74962 - DNA, 24 bp, Artificial sequence
  SiRNA target sequence
tggttttgatacgaatgtaggaga

SEQ ID NO: 74963 - DNA, 24 bp, Artificial sequence
  SiRNA target sequence
ggttttgatacgaatgtaggagaa

SEQ ID NO: 74964 - DNA, 24 bp, Artificial sequence
  SiRNA target sequence
gttttgatacgaatgtaggagaaa

SEQ ID NO: 74965 - DNA, 24 bp, Artificial sequence
  SiRNA target sequence
ttttgatacgaatgtaggagaaag

SEQ ID NO: 74966 - DNA, 24 bp, Artificial sequence
  SiRNA target sequence
tttgatacgaatgtaggagaaaga

SEQ ID NO: 74967 - DNA, 24 bp, Artificial sequence
  SiRNA target sequence
ttgatacgaatgtaggagaaagag

SEQ ID NO: 74968 - DNA, 24 bp, Artificial sequence
  SiRNA target sequence
tgatacgaatgtaggagaaagagg

SEQ ID NO: 74969 - DNA, 24 bp, Artificial sequence
  SiRNA target sequence
gatacgaatgtaggagaaagagga

SEQ ID NO: 74970 - DNA, 24 bp, Artificial sequence
  SiRNA target sequence
atacgaatgtaggagaaagaggaa

SEQ ID NO: 74971 - DNA, 24 bp, Artificial sequence
  SiRNA target sequence
tacgaatgtaggagaaagaggaag

SEQ ID NO: 74972 - DNA, 24 bp, Artificial sequence
  SiRNA target sequence
acgaatgtaggagaaagaggaagg

SEQ ID NO: 74973 - DNA, 24 bp, Artificial sequence
  SiRNA target sequence
cgaatgtaggagaaagaggaaggt

SEQ ID NO: 74974 - DNA, 24 bp, Artificial sequence
  SiRNA target sequence
gaatgtaggagaaagaggaaggtt

SEQ ID NO: 74975 - DNA, 24 bp, Artificial sequence
  SiRNA target sequence
aatgtaggagaaagaggaaggtta

SEQ ID NO: 74976 - DNA, 24 bp, Artificial sequence
  SiRNA target sequence
atgtaggagaaagaggaaggttat

SEQ ID NO: 74977 - DNA, 24 bp, Artificial sequence
  SiRNA target sequence
tgtaggagaaagaggaaggttatt

SEQ ID NO: 74978 - DNA, 24 bp, Artificial sequence
  SiRNA target sequence
gtaggagaaagaggaaggttatta

SEQ ID NO: 74979 - DNA, 24 bp, Artificial sequence
  SiRNA target sequence
taggagaaagaggaaggttattaa

SEQ ID NO: 74980 - DNA, 24 bp, Artificial sequence
  SiRNA target sequence
aggagaaagaggaaggttattaag

SEQ ID NO: 74981 - DNA, 24 bp, Artificial sequence
  SiRNA target sequence
ggagaaagaggaaggttattaagt

SEQ ID NO: 74982 - DNA, 24 bp, Artificial sequence
  SiRNA target sequence
gagaaagaggaaggttattaagtg

SEQ ID NO: 74983 - DNA, 24 bp, Artificial sequence
  SiRNA target sequence
agaaagaggaaggttattaagtgg

SEQ ID NO: 74984 - DNA, 24 bp, Artificial sequence
  SiRNA target sequence
gaaagaggaaggttattaagtggt

SEQ ID NO: 74985 - DNA, 24 bp, Artificial sequence
  SiRNA target sequence
aaagaggaaggttattaagtggtg

SEQ ID NO: 74986 - DNA, 24 bp, Artificial sequence
  SiRNA target sequence
aagaggaaggttattaagtggtgg

SEQ ID NO: 74987 - DNA, 24 bp, Artificial sequence
  SiRNA target sequence
agaggaaggttattaagtggtgga

SEQ ID NO: 74988 - DNA, 24 bp, Artificial sequence
  SiRNA target sequence
gaggaaggttattaagtggtggag

SEQ ID NO: 74989 - DNA, 24 bp, Artificial sequence
  SiRNA target sequence
aggaaggttattaagtggtggaga

SEQ ID NO: 74990 - DNA, 24 bp, Artificial sequence
  SiRNA target sequence
ggaaggttattaagtggtggagaa

SEQ ID NO: 74991 - DNA, 24 bp, Artificial sequence
  SiRNA target sequence
gaaggttattaagtggtggagaaa

SEQ ID NO: 74992 - DNA, 24 bp, Artificial sequence
  SiRNA target sequence
aaggttattaagtggtggagaaaa

SEQ ID NO: 74993 - DNA, 24 bp, Artificial sequence
  SiRNA target sequence
aggttattaagtggtggagaaaag

SEQ ID NO: 74994 - DNA, 24 bp, Artificial sequence
  SiRNA target sequence
ggttattaagtggtggagaaaagc

SEQ ID NO: 74995 - DNA, 24 bp, Artificial sequence
  SiRNA target sequence
gttattaagtggtggagaaaagca

SEQ ID NO: 74996 - DNA, 24 bp, Artificial sequence
  SiRNA target sequence
ttattaagtggtggagaaaagcaa

SEQ ID NO: 74997 - DNA, 24 bp, Artificial sequence
  SiRNA target sequence
tattaagtggtggagaaaagcaaa

SEQ ID NO: 74998 - DNA, 24 bp, Artificial sequence
  SiRNA target sequence
attaagtggtggagaaaagcaaaa

SEQ ID NO: 74999 - DNA, 24 bp, Artificial sequence
  SiRNA target sequence
ttaagtggtggagaaaagcaaaag

SEQ ID NO: 75000 - DNA, 24 bp, Artificial sequence
  SiRNA target sequence
taagtggtggagaaaagcaaaaga

SEQ ID NO: 75001 - DNA, 24 bp, Artificial sequence
  SiRNA target sequence
aagtggtggagaaaagcaaaagat

SEQ ID NO: 75002 - DNA, 24 bp, Artificial sequence
  SiRNA target sequence
agtggtggagaaaagcaaaagatt

SEQ ID NO: 75003 - DNA, 24 bp, Artificial sequence
  SiRNA target sequence
gtggtggagaaaagcaaaagattt

SEQ ID NO: 75004 - DNA, 24 bp, Artificial sequence
  SiRNA target sequence
tggtggagaaaagcaaaagatttt

SEQ ID NO: 75005 - DNA, 24 bp, Artificial sequence
  SiRNA target sequence
ggtggagaaaagcaaaagatttta

SEQ ID NO: 75006 - DNA, 24 bp, Artificial sequence
  SiRNA target sequence
gtggagaaaagcaaaagattttat

SEQ ID NO: 75007 - DNA, 24 bp, Artificial sequence
  SiRNA target sequence
tggagaaaagcaaaagattttatt

SEQ ID NO: 75008 - DNA, 24 bp, Artificial sequence
  SiRNA target sequence
ggagaaaagcaaaagattttatta

SEQ ID NO: 75009 - DNA, 24 bp, Artificial sequence
  SiRNA target sequence
gagaaaagcaaaagattttattaa

SEQ ID NO: 75010 - DNA, 24 bp, Artificial sequence
  SiRNA target sequence
agaaaagcaaaagattttattaat

SEQ ID NO: 75011 - DNA, 24 bp, Artificial sequence
  SiRNA target sequence
gaaaagcaaaagattttattaatg

SEQ ID NO: 75012 - DNA, 24 bp, Artificial sequence
  SiRNA target sequence
aaaagcaaaagattttattaatgc

SEQ ID NO: 75013 - DNA, 24 bp, Artificial sequence
  SiRNA target sequence
aaagcaaaagattttattaatgcg

SEQ ID NO: 75014 - DNA, 24 bp, Artificial sequence
  SiRNA target sequence
aagcaaaagattttattaatgcgt

SEQ ID NO: 75015 - DNA, 24 bp, Artificial sequence
  SiRNA target sequence
agcaaaagattttattaatgcgta

SEQ ID NO: 75016 - DNA, 24 bp, Artificial sequence
  SiRNA target sequence
gcaaaagattttattaatgcgtac

SEQ ID NO: 75017 - DNA, 24 bp, Artificial sequence
  SiRNA target sequence
caaaagattttattaatgcgtact

SEQ ID NO: 75018 - DNA, 24 bp, Artificial sequence
  SiRNA target sequence
aaaagattttattaatgcgtacta

SEQ ID NO: 75019 - DNA, 24 bp, Artificial sequence
  SiRNA target sequence
aaagattttattaatgcgtactat

SEQ ID NO: 75020 - DNA, 24 bp, Artificial sequence
  SiRNA target sequence
aagattttattaatgcgtactatg

SEQ ID NO: 75021 - DNA, 24 bp, Artificial sequence
  SiRNA target sequence
agattttattaatgcgtactatgt

SEQ ID NO: 75022 - DNA, 24 bp, Artificial sequence
  SiRNA target sequence
gattttattaatgcgtactatgtt

SEQ ID NO: 75023 - DNA, 24 bp, Artificial sequence
  SiRNA target sequence
attttattaatgcgtactatgtta

SEQ ID NO: 75024 - DNA, 24 bp, Artificial sequence
  SiRNA target sequence
ttttattaatgcgtactatgttaa

SEQ ID NO: 75025 - DNA, 24 bp, Artificial sequence
  SiRNA target sequence
tttattaatgcgtactatgttaag

SEQ ID NO: 75026 - DNA, 24 bp, Artificial sequence
  SiRNA target sequence
ttattaatgcgtactatgttaaga

SEQ ID NO: 75027 - DNA, 24 bp, Artificial sequence
  SiRNA target sequence
tattaatgcgtactatgttaagaa

SEQ ID NO: 75028 - DNA, 24 bp, Artificial sequence
  SiRNA target sequence
attaatgcgtactatgttaagaaa

SEQ ID NO: 75029 - DNA, 24 bp, Artificial sequence
  SiRNA target sequence
ttaatgcgtactatgttaagaaac

SEQ ID NO: 75030 - DNA, 24 bp, Artificial sequence
  SiRNA target sequence
taatgcgtactatgttaagaaaca

SEQ ID NO: 75031 - DNA, 24 bp, Artificial sequence
  SiRNA target sequence
aatgcgtactatgttaagaaacaa

SEQ ID NO: 75032 - DNA, 24 bp, Artificial sequence
  SiRNA target sequence
atgcgtactatgttaagaaacaag

SEQ ID NO: 75033 - DNA, 24 bp, Artificial sequence
  SiRNA target sequence
tgcgtactatgttaagaaacaagg

SEQ ID NO: 75034 - DNA, 24 bp, Artificial sequence
  SiRNA target sequence
gcgtactatgttaagaaacaagga

SEQ ID NO: 75035 - DNA, 24 bp, Artificial sequence
  SiRNA target sequence
cgtactatgttaagaaacaaggag

SEQ ID NO: 75036 - DNA, 24 bp, Artificial sequence
  SiRNA target sequence
gtactatgttaagaaacaaggaga

SEQ ID NO: 75037 - DNA, 24 bp, Artificial sequence
  SiRNA target sequence
tactatgttaagaaacaaggagat

SEQ ID NO: 75038 - DNA, 24 bp, Artificial sequence
  SiRNA target sequence
actatgttaagaaacaaggagata

SEQ ID NO: 75039 - DNA, 24 bp, Artificial sequence
  SiRNA target sequence
ctatgttaagaaacaaggagataa

SEQ ID NO: 75040 - DNA, 24 bp, Artificial sequence
  SiRNA target sequence
tatgttaagaaacaaggagataat

SEQ ID NO: 75041 - DNA, 24 bp, Artificial sequence
  SiRNA target sequence
atgttaagaaacaaggagataatg

SEQ ID NO: 75042 - DNA, 24 bp, Artificial sequence
  SiRNA target sequence
tgttaagaaacaaggagataatgg

SEQ ID NO: 75043 - DNA, 24 bp, Artificial sequence
  SiRNA target sequence
gttaagaaacaaggagataatggc

SEQ ID NO: 75044 - DNA, 24 bp, Artificial sequence
  SiRNA target sequence
ttaagaaacaaggagataatggca

SEQ ID NO: 75045 - DNA, 24 bp, Artificial sequence
  SiRNA target sequence
taagaaacaaggagataatggcat

SEQ ID NO: 75046 - DNA, 24 bp, Artificial sequence
  SiRNA target sequence
aagaaacaaggagataatggcatt

SEQ ID NO: 75047 - DNA, 24 bp, Artificial sequence
  SiRNA target sequence
agaaacaaggagataatggcatta

SEQ ID NO: 75048 - DNA, 24 bp, Artificial sequence
  SiRNA target sequence
gaaacaaggagataatggcattag

SEQ ID NO: 75049 - DNA, 24 bp, Artificial sequence
  SiRNA target sequence
aaacaaggagataatggcattaga

SEQ ID NO: 75050 - DNA, 24 bp, Artificial sequence
  SiRNA target sequence
aacaaggagataatggcattagat

SEQ ID NO: 75051 - DNA, 24 bp, Artificial sequence
  SiRNA target sequence
acaaggagataatggcattagatg

SEQ ID NO: 75052 - DNA, 24 bp, Artificial sequence
  SiRNA target sequence
caaggagataatggcattagatga

SEQ ID NO: 75053 - DNA, 24 bp, Artificial sequence
  SiRNA target sequence
aaggagataatggcattagatgaa

SEQ ID NO: 75054 - DNA, 24 bp, Artificial sequence
  SiRNA target sequence
aggagataatggcattagatgaac

SEQ ID NO: 75055 - DNA, 24 bp, Artificial sequence
  SiRNA target sequence
ggagataatggcattagatgaacc

SEQ ID NO: 75056 - DNA, 24 bp, Artificial sequence
  SiRNA target sequence
gagataatggcattagatgaaccc

SEQ ID NO: 75057 - DNA, 24 bp, Artificial sequence
  SiRNA target sequence
agataatggcattagatgaaccca

SEQ ID NO: 75058 - DNA, 24 bp, Artificial sequence
  SiRNA target sequence
gataatggcattagatgaacccac

SEQ ID NO: 75059 - DNA, 24 bp, Artificial sequence
  SiRNA target sequence
ataatggcattagatgaacccact

SEQ ID NO: 75060 - DNA, 24 bp, Artificial sequence
  SiRNA target sequence
taatggcattagatgaacccactg

SEQ ID NO: 75061 - DNA, 24 bp, Artificial sequence
  SiRNA target sequence
aatggcattagatgaacccactgc

SEQ ID NO: 75062 - DNA, 24 bp, Artificial sequence
  SiRNA target sequence
atggcattagatgaacccactgca

SEQ ID NO: 75063 - DNA, 24 bp, Artificial sequence
  SiRNA target sequence
tggcattagatgaacccactgcag

SEQ ID NO: 75064 - DNA, 24 bp, Artificial sequence
  SiRNA target sequence
ggcattagatgaacccactgcagc

SEQ ID NO: 75065 - DNA, 24 bp, Artificial sequence
  SiRNA target sequence
gcattagatgaacccactgcagca

SEQ ID NO: 75066 - DNA, 24 bp, Artificial sequence
  SiRNA target sequence
cattagatgaacccactgcagcac

SEQ ID NO: 75067 - DNA, 24 bp, Artificial sequence
  SiRNA target sequence
attagatgaacccactgcagcact

SEQ ID NO: 75068 - DNA, 24 bp, Artificial sequence
  SiRNA target sequence
ttagatgaacccactgcagcactt

SEQ ID NO: 75069 - DNA, 24 bp, Artificial sequence
  SiRNA target sequence
tagatgaacccactgcagcacttg

SEQ ID NO: 75070 - DNA, 24 bp, Artificial sequence
  SiRNA target sequence
agatgaacccactgcagcacttga

SEQ ID NO: 75071 - DNA, 24 bp, Artificial sequence
  SiRNA target sequence
gatgaacccactgcagcacttgat

SEQ ID NO: 75072 - DNA, 24 bp, Artificial sequence
  SiRNA target sequence
atgaacccactgcagcacttgata

SEQ ID NO: 75073 - DNA, 24 bp, Artificial sequence
  SiRNA target sequence
tgaacccactgcagcacttgataa

SEQ ID NO: 75074 - DNA, 24 bp, Artificial sequence
  SiRNA target sequence
gaacccactgcagcacttgataag

SEQ ID NO: 75075 - DNA, 24 bp, Artificial sequence
  SiRNA target sequence
aacccactgcagcacttgataagg

SEQ ID NO: 75076 - DNA, 24 bp, Artificial sequence
  SiRNA target sequence
acccactgcagcacttgataagga

SEQ ID NO: 75077 - DNA, 24 bp, Artificial sequence
  SiRNA target sequence
cccactgcagcacttgataaggag

SEQ ID NO: 75078 - DNA, 24 bp, Artificial sequence
  SiRNA target sequence
ccactgcagcacttgataaggagt

SEQ ID NO: 75079 - DNA, 24 bp, Artificial sequence
  SiRNA target sequence
cactgcagcacttgataaggagtc

SEQ ID NO: 75080 - DNA, 24 bp, Artificial sequence
  SiRNA target sequence
actgcagcacttgataaggagtct

SEQ ID NO: 75081 - DNA, 24 bp, Artificial sequence
  SiRNA target sequence
ctgcagcacttgataaggagtctg

SEQ ID NO: 75082 - DNA, 24 bp, Artificial sequence
  SiRNA target sequence
tgcagcacttgataaggagtctga

SEQ ID NO: 75083 - DNA, 24 bp, Artificial sequence
  SiRNA target sequence
gcagcacttgataaggagtctgaa

SEQ ID NO: 75084 - DNA, 24 bp, Artificial sequence
  SiRNA target sequence
cagcacttgataaggagtctgaaa

SEQ ID NO: 75085 - DNA, 24 bp, Artificial sequence
  SiRNA target sequence
agcacttgataaggagtctgaaaa

SEQ ID NO: 75086 - DNA, 24 bp, Artificial sequence
  SiRNA target sequence
gcacttgataaggagtctgaaaaa

SEQ ID NO: 75087 - DNA, 24 bp, Artificial sequence
  SiRNA target sequence
cacttgataaggagtctgaaaaaa

SEQ ID NO: 75088 - DNA, 24 bp, Artificial sequence
  SiRNA target sequence
acttgataaggagtctgaaaaaaa

SEQ ID NO: 75089 - DNA, 24 bp, Artificial sequence
  SiRNA target sequence
cttgataaggagtctgaaaaaaag

SEQ ID NO: 75090 - DNA, 24 bp, Artificial sequence
  SiRNA target sequence
ttgataaggagtctgaaaaaaaga

SEQ ID NO: 75091 - DNA, 24 bp, Artificial sequence
  SiRNA target sequence
tgataaggagtctgaaaaaaagat

SEQ ID NO: 75092 - DNA, 24 bp, Artificial sequence
  SiRNA target sequence
gataaggagtctgaaaaaaagatt

SEQ ID NO: 75093 - DNA, 24 bp, Artificial sequence
  SiRNA target sequence
ataaggagtctgaaaaaaagattt

SEQ ID NO: 75094 - DNA, 24 bp, Artificial sequence
  SiRNA target sequence
taaggagtctgaaaaaaagatttt

SEQ ID NO: 75095 - DNA, 24 bp, Artificial sequence
  SiRNA target sequence
aaggagtctgaaaaaaagatttta

SEQ ID NO: 75096 - DNA, 24 bp, Artificial sequence
  SiRNA target sequence
aggagtctgaaaaaaagattttag

SEQ ID NO: 75097 - DNA, 24 bp, Artificial sequence
  SiRNA target sequence
ggagtctgaaaaaaagattttaga

SEQ ID NO: 75098 - DNA, 24 bp, Artificial sequence
  SiRNA target sequence
gagtctgaaaaaaagattttagag

SEQ ID NO: 75099 - DNA, 24 bp, Artificial sequence
  SiRNA target sequence
agtctgaaaaaaagattttagaga

SEQ ID NO: 75100 - DNA, 24 bp, Artificial sequence
  SiRNA target sequence
gtctgaaaaaaagattttagagat

SEQ ID NO: 75101 - DNA, 24 bp, Artificial sequence
  SiRNA target sequence
tctgaaaaaaagattttagagata

SEQ ID NO: 75102 - DNA, 24 bp, Artificial sequence
  SiRNA target sequence
ctgaaaaaaagattttagagataa

SEQ ID NO: 75103 - DNA, 24 bp, Artificial sequence
  SiRNA target sequence
tgaaaaaaagattttagagataat

SEQ ID NO: 75104 - DNA, 24 bp, Artificial sequence
  SiRNA target sequence
gaaaaaaagattttagagataatt

SEQ ID NO: 75105 - DNA, 24 bp, Artificial sequence
  SiRNA target sequence
aaaaaaagattttagagataattt

SEQ ID NO: 75106 - DNA, 24 bp, Artificial sequence
  SiRNA target sequence
aaaaaagattttagagataatttt

SEQ ID NO: 75107 - DNA, 24 bp, Artificial sequence
  SiRNA target sequence
aaaaagattttagagataatttta

SEQ ID NO: 75108 - DNA, 24 bp, Artificial sequence
  SiRNA target sequence
aaaagattttagagataattttac

SEQ ID NO: 75109 - DNA, 24 bp, Artificial sequence
  SiRNA target sequence
aaagattttagagataattttaca

SEQ ID NO: 75110 - DNA, 24 bp, Artificial sequence
  SiRNA target sequence
aagattttagagataattttacaa

SEQ ID NO: 75111 - DNA, 24 bp, Artificial sequence
  SiRNA target sequence
agattttagagataattttacaac

SEQ ID NO: 75112 - DNA, 24 bp, Artificial sequence
  SiRNA target sequence
gattttagagataattttacaaca

SEQ ID NO: 75113 - DNA, 24 bp, Artificial sequence
  SiRNA target sequence
attttagagataattttacaacag

SEQ ID NO: 75114 - DNA, 24 bp, Artificial sequence
  SiRNA target sequence
ttttagagataattttacaacagg

SEQ ID NO: 75115 - DNA, 24 bp, Artificial sequence
  SiRNA target sequence
tttagagataattttacaacagga

SEQ ID NO: 75116 - DNA, 24 bp, Artificial sequence
  SiRNA target sequence
ttagagataattttacaacaggaa

SEQ ID NO: 75117 - DNA, 24 bp, Artificial sequence
  SiRNA target sequence
tagagataattttacaacaggaag

SEQ ID NO: 75118 - DNA, 24 bp, Artificial sequence
  SiRNA target sequence
agagataattttacaacaggaaga

SEQ ID NO: 75119 - DNA, 24 bp, Artificial sequence
  SiRNA target sequence
gagataattttacaacaggaagat

SEQ ID NO: 75120 - DNA, 24 bp, Artificial sequence
  SiRNA target sequence
agataattttacaacaggaagatc

SEQ ID NO: 75121 - DNA, 24 bp, Artificial sequence
  SiRNA target sequence
gataattttacaacaggaagatcg

SEQ ID NO: 75122 - DNA, 24 bp, Artificial sequence
  SiRNA target sequence
ataattttacaacaggaagatcga

SEQ ID NO: 75123 - DNA, 24 bp, Artificial sequence
  SiRNA target sequence
taattttacaacaggaagatcgaa

SEQ ID NO: 75124 - DNA, 24 bp, Artificial sequence
  SiRNA target sequence
aattttacaacaggaagatcgaac

SEQ ID NO: 75125 - DNA, 24 bp, Artificial sequence
  SiRNA target sequence
attttacaacaggaagatcgaaca

SEQ ID NO: 75126 - DNA, 24 bp, Artificial sequence
  SiRNA target sequence
ttttacaacaggaagatcgaacag

SEQ ID NO: 75127 - DNA, 24 bp, Artificial sequence
  SiRNA target sequence
tttacaacaggaagatcgaacagt

SEQ ID NO: 75128 - DNA, 24 bp, Artificial sequence
  SiRNA target sequence
ttacaacaggaagatcgaacagtt

SEQ ID NO: 75129 - DNA, 24 bp, Artificial sequence
  SiRNA target sequence
tacaacaggaagatcgaacagttt

SEQ ID NO: 75130 - DNA, 24 bp, Artificial sequence
  SiRNA target sequence
acaacaggaagatcgaacagtttt

SEQ ID NO: 75131 - DNA, 24 bp, Artificial sequence
  SiRNA target sequence
caacaggaagatcgaacagttttg

SEQ ID NO: 75132 - DNA, 24 bp, Artificial sequence
  SiRNA target sequence
aacaggaagatcgaacagttttga

SEQ ID NO: 75133 - DNA, 24 bp, Artificial sequence
  SiRNA target sequence
acaggaagatcgaacagttttgat

SEQ ID NO: 75134 - DNA, 24 bp, Artificial sequence
  SiRNA target sequence
caggaagatcgaacagttttgatg

SEQ ID NO: 75135 - DNA, 24 bp, Artificial sequence
  SiRNA target sequence
aggaagatcgaacagttttgatga

SEQ ID NO: 75136 - DNA, 24 bp, Artificial sequence
  SiRNA target sequence
ggaagatcgaacagttttgatgat

SEQ ID NO: 75137 - DNA, 24 bp, Artificial sequence
  SiRNA target sequence
gaagatcgaacagttttgatgata

SEQ ID NO: 75138 - DNA, 24 bp, Artificial sequence
  SiRNA target sequence
aagatcgaacagttttgatgataa

SEQ ID NO: 75139 - DNA, 24 bp, Artificial sequence
  SiRNA target sequence
agatcgaacagttttgatgataat

SEQ ID NO: 75140 - DNA, 24 bp, Artificial sequence
  SiRNA target sequence
gatcgaacagttttgatgataatt

SEQ ID NO: 75141 - DNA, 24 bp, Artificial sequence
  SiRNA target sequence
atcgaacagttttgatgataattc

SEQ ID NO: 75142 - DNA, 24 bp, Artificial sequence
  SiRNA target sequence
tcgaacagttttgatgataattca

SEQ ID NO: 75143 - DNA, 24 bp, Artificial sequence
  SiRNA target sequence
cgaacagttttgatgataattcat

SEQ ID NO: 75144 - DNA, 24 bp, Artificial sequence
  SiRNA target sequence
gaacagttttgatgataattcata

SEQ ID NO: 75145 - DNA, 24 bp, Artificial sequence
  SiRNA target sequence
aacagttttgatgataattcataa

SEQ ID NO: 75146 - DNA, 24 bp, Artificial sequence
  SiRNA target sequence
acagttttgatgataattcataat

SEQ ID NO: 75147 - DNA, 24 bp, Artificial sequence
  SiRNA target sequence
cagttttgatgataattcataatc

SEQ ID NO: 75148 - DNA, 24 bp, Artificial sequence
  SiRNA target sequence
agttttgatgataattcataatct

SEQ ID NO: 75149 - DNA, 24 bp, Artificial sequence
  SiRNA target sequence
gttttgatgataattcataatcta

SEQ ID NO: 75150 - DNA, 24 bp, Artificial sequence
  SiRNA target sequence
ttttgatgataattcataatctag

SEQ ID NO: 75151 - DNA, 24 bp, Artificial sequence
  SiRNA target sequence
tttgatgataattcataatctaga

SEQ ID NO: 75152 - DNA, 24 bp, Artificial sequence
  SiRNA target sequence
ttgatgataattcataatctagaa

SEQ ID NO: 75153 - DNA, 24 bp, Artificial sequence
  SiRNA target sequence
tgatgataattcataatctagaac

SEQ ID NO: 75154 - DNA, 24 bp, Artificial sequence
  SiRNA target sequence
gatgataattcataatctagaact

SEQ ID NO: 75155 - DNA, 24 bp, Artificial sequence
  SiRNA target sequence
atgataattcataatctagaactt

SEQ ID NO: 75156 - DNA, 24 bp, Artificial sequence
  SiRNA target sequence
tgataattcataatctagaactta

SEQ ID NO: 75157 - DNA, 24 bp, Artificial sequence
  SiRNA target sequence
gataattcataatctagaacttat

SEQ ID NO: 75158 - DNA, 24 bp, Artificial sequence
  SiRNA target sequence
ataattcataatctagaacttatt

SEQ ID NO: 75159 - DNA, 24 bp, Artificial sequence
  SiRNA target sequence
taattcataatctagaacttatta

SEQ ID NO: 75160 - DNA, 24 bp, Artificial sequence
  SiRNA target sequence
aattcataatctagaacttattaa

SEQ ID NO: 75161 - DNA, 24 bp, Artificial sequence
  SiRNA target sequence
attcataatctagaacttattaat

SEQ ID NO: 75162 - DNA, 24 bp, Artificial sequence
  SiRNA target sequence
ttcataatctagaacttattaata

SEQ ID NO: 75163 - DNA, 24 bp, Artificial sequence
  SiRNA target sequence
tcataatctagaacttattaataa

SEQ ID NO: 75164 - DNA, 24 bp, Artificial sequence
  SiRNA target sequence
cataatctagaacttattaataaa

SEQ ID NO: 75165 - DNA, 24 bp, Artificial sequence
  SiRNA target sequence
ataatctagaacttattaataaat

SEQ ID NO: 75166 - DNA, 24 bp, Artificial sequence
  SiRNA target sequence
taatctagaacttattaataaatt

SEQ ID NO: 75167 - DNA, 24 bp, Artificial sequence
  SiRNA target sequence
aatctagaacttattaataaattt

SEQ ID NO: 75168 - DNA, 24 bp, Artificial sequence
  SiRNA target sequence
atctagaacttattaataaatttg

SEQ ID NO: 75169 - DNA, 24 bp, Artificial sequence
  SiRNA target sequence
tctagaacttattaataaatttga

SEQ ID NO: 75170 - DNA, 24 bp, Artificial sequence
  SiRNA target sequence
ctagaacttattaataaatttgat

SEQ ID NO: 75171 - DNA, 24 bp, Artificial sequence
  SiRNA target sequence
tagaacttattaataaatttgata

SEQ ID NO: 75172 - DNA, 24 bp, Artificial sequence
  SiRNA target sequence
agaacttattaataaatttgataa

SEQ ID NO: 75173 - DNA, 24 bp, Artificial sequence
  SiRNA target sequence
gaacttattaataaatttgataaa

SEQ ID NO: 75174 - DNA, 24 bp, Artificial sequence
  SiRNA target sequence
aacttattaataaatttgataaaa

SEQ ID NO: 75175 - DNA, 24 bp, Artificial sequence
  SiRNA target sequence
acttattaataaatttgataaaat

SEQ ID NO: 75176 - DNA, 24 bp, Artificial sequence
  SiRNA target sequence
cttattaataaatttgataaaata

SEQ ID NO: 75177 - DNA, 24 bp, Artificial sequence
  SiRNA target sequence
ttattaataaatttgataaaataa

SEQ ID NO: 75178 - DNA, 24 bp, Artificial sequence
  SiRNA target sequence
tattaataaatttgataaaataat

SEQ ID NO: 75179 - DNA, 24 bp, Artificial sequence
  SiRNA target sequence
attaataaatttgataaaataatt

SEQ ID NO: 75180 - DNA, 24 bp, Artificial sequence
  SiRNA target sequence
ttaataaatttgataaaataattt

SEQ ID NO: 75181 - DNA, 24 bp, Artificial sequence
  SiRNA target sequence
taataaatttgataaaataattta

SEQ ID NO: 75182 - DNA, 24 bp, Artificial sequence
  SiRNA target sequence
aataaatttgataaaataatttac

SEQ ID NO: 75183 - DNA, 24 bp, Artificial sequence
  SiRNA target sequence
ataaatttgataaaataatttaca

SEQ ID NO: 75184 - DNA, 24 bp, Artificial sequence
  SiRNA target sequence
taaatttgataaaataatttacat

SEQ ID NO: 75185 - DNA, 24 bp, Artificial sequence
  SiRNA target sequence
aaatttgataaaataatttacatt

SEQ ID NO: 75186 - DNA, 24 bp, Artificial sequence
  SiRNA target sequence
aatttgataaaataatttacattg

SEQ ID NO: 75187 - DNA, 24 bp, Artificial sequence
  SiRNA target sequence
atttgataaaataatttacattga

SEQ ID NO: 75188 - DNA, 24 bp, Artificial sequence
  SiRNA target sequence
tttgataaaataatttacattgat

SEQ ID NO: 75189 - DNA, 24 bp, Artificial sequence
  SiRNA target sequence
ttgataaaataatttacattgatg

SEQ ID NO: 75190 - DNA, 24 bp, Artificial sequence
  SiRNA target sequence
tgataaaataatttacattgatga

SEQ ID NO: 75191 - DNA, 24 bp, Artificial sequence
  SiRNA target sequence
gataaaataatttacattgatgaa

SEQ ID NO: 75192 - DNA, 24 bp, Artificial sequence
  SiRNA target sequence
ataaaataatttacattgatgaaa

SEQ ID NO: 75193 - DNA, 24 bp, Artificial sequence
  SiRNA target sequence
taaaataatttacattgatgaaaa

SEQ ID NO: 75194 - DNA, 24 bp, Artificial sequence
  SiRNA target sequence
aaaataatttacattgatgaaaat

SEQ ID NO: 75195 - DNA, 24 bp, Artificial sequence
  SiRNA target sequence
aaataatttacattgatgaaaata

SEQ ID NO: 75196 - DNA, 24 bp, Artificial sequence
  SiRNA target sequence
aataatttacattgatgaaaataa

SEQ ID NO: 75197 - DNA, 24 bp, Artificial sequence
  SiRNA target sequence
ataatttacattgatgaaaataat

SEQ ID NO: 75198 - DNA, 24 bp, Artificial sequence
  SiRNA target sequence
taatttacattgatgaaaataata

SEQ ID NO: 75199 - DNA, 24 bp, Artificial sequence
  SiRNA target sequence
aatttacattgatgaaaataatat

SEQ ID NO: 75200 - DNA, 24 bp, Artificial sequence
  SiRNA target sequence
atttacattgatgaaaataatata

SEQ ID NO: 75201 - DNA, 24 bp, Artificial sequence
  SiRNA target sequence
tttacattgatgaaaataatatag

SEQ ID NO: 75202 - DNA, 24 bp, Artificial sequence
  SiRNA target sequence
ttacattgatgaaaataatataga

SEQ ID NO: 75203 - DNA, 24 bp, Artificial sequence
  SiRNA target sequence
tacattgatgaaaataatatagaa

SEQ ID NO: 75204 - DNA, 24 bp, Artificial sequence
  SiRNA target sequence
acattgatgaaaataatatagaag

SEQ ID NO: 75205 - DNA, 24 bp, Artificial sequence
  SiRNA target sequence
cattgatgaaaataatatagaagt

SEQ ID NO: 75206 - DNA, 24 bp, Artificial sequence
  SiRNA target sequence
attgatgaaaataatatagaagtc

SEQ ID NO: 75207 - DNA, 24 bp, Artificial sequence
  SiRNA target sequence
ttgatgaaaataatatagaagtct

SEQ ID NO: 75208 - DNA, 24 bp, Artificial sequence
  SiRNA target sequence
tgatgaaaataatatagaagtcta

SEQ ID NO: 75209 - DNA, 24 bp, Artificial sequence
  SiRNA target sequence
gatgaaaataatatagaagtctat

SEQ ID NO: 75210 - DNA, 24 bp, Artificial sequence
  SiRNA target sequence
atgaaaataatatagaagtctata

SEQ ID NO: 75211 - DNA, 24 bp, Artificial sequence
  SiRNA target sequence
tgaaaataatatagaagtctataa

SEQ ID NO: 75212 - DNA, 24 bp, Artificial sequence
  SiRNA target sequence
gaaaataatatagaagtctataaa

SEQ ID NO: 75213 - DNA, 24 bp, Artificial sequence
  SiRNA target sequence
aaaataatatagaagtctataaaa

SEQ ID NO: 75214 - DNA, 24 bp, Artificial sequence
  SiRNA target sequence
aaataatatagaagtctataaaaa

SEQ ID NO: 75215 - DNA, 24 bp, Artificial sequence
  SiRNA target sequence
aataatatagaagtctataaaaat

SEQ ID NO: 75216 - DNA, 24 bp, Artificial sequence
  SiRNA target sequence
ataatatagaagtctataaaaatg

SEQ ID NO: 75217 - DNA, 24 bp, Artificial sequence
  SiRNA target sequence
taatatagaagtctataaaaatga

SEQ ID NO: 75218 - DNA, 24 bp, Artificial sequence
  SiRNA target sequence
aatatagaagtctataaaaatgat

SEQ ID NO: 75219 - DNA, 24 bp, Artificial sequence
  SiRNA target sequence
atatagaagtctataaaaatgata

SEQ ID NO: 75220 - DNA, 24 bp, Artificial sequence
  SiRNA target sequence
tatagaagtctataaaaatgatat

SEQ ID NO: 75221 - DNA, 24 bp, Artificial sequence
  SiRNA target sequence
atagaagtctataaaaatgatatt

SEQ ID NO: 75222 - DNA, 24 bp, Artificial sequence
  SiRNA target sequence
tagaagtctataaaaatgatattg

SEQ ID NO: 75223 - DNA, 24 bp, Artificial sequence
  SiRNA target sequence
agaagtctataaaaatgatattga

SEQ ID NO: 75224 - DNA, 24 bp, Artificial sequence
  SiRNA target sequence
gaagtctataaaaatgatattgaa

SEQ ID NO: 75225 - DNA, 24 bp, Artificial sequence
  SiRNA target sequence
aagtctataaaaatgatattgaag

SEQ ID NO: 75226 - DNA, 24 bp, Artificial sequence
  SiRNA target sequence
agtctataaaaatgatattgaagg

SEQ ID NO: 75227 - DNA, 24 bp, Artificial sequence
  SiRNA target sequence
gtctataaaaatgatattgaagga

SEQ ID NO: 75228 - DNA, 24 bp, Artificial sequence
  SiRNA target sequence
tctataaaaatgatattgaaggac

SEQ ID NO: 75229 - DNA, 24 bp, Artificial sequence
  SiRNA target sequence
ctataaaaatgatattgaaggaca

SEQ ID NO: 75230 - DNA, 24 bp, Artificial sequence
  SiRNA target sequence
tataaaaatgatattgaaggacaa

SEQ ID NO: 75231 - DNA, 24 bp, Artificial sequence
  SiRNA target sequence
ataaaaatgatattgaaggacaaa

SEQ ID NO: 75232 - DNA, 24 bp, Artificial sequence
  SiRNA target sequence
taaaaatgatattgaaggacaaaa

SEQ ID NO: 75233 - DNA, 24 bp, Artificial sequence
  SiRNA target sequence
aaaaatgatattgaaggacaaaaa

SEQ ID NO: 75234 - DNA, 24 bp, Artificial sequence
  SiRNA target sequence
aaaatgatattgaaggacaaaaaa

SEQ ID NO: 75235 - DNA, 24 bp, Artificial sequence
  SiRNA target sequence
aaatgatattgaaggacaaaaaaa

SEQ ID NO: 75236 - DNA, 24 bp, Artificial sequence
  SiRNA target sequence
aatgatattgaaggacaaaaaaag

SEQ ID NO: 75237 - DNA, 24 bp, Artificial sequence
  SiRNA target sequence
atgatattgaaggacaaaaaaagt

SEQ ID NO: 75238 - DNA, 24 bp, Artificial sequence
  SiRNA target sequence
tgatattgaaggacaaaaaaagtt

SEQ ID NO: 75239 - DNA, 24 bp, Artificial sequence
  SiRNA target sequence
gatattgaaggacaaaaaaagttt

SEQ ID NO: 75240 - DNA, 24 bp, Artificial sequence
  SiRNA target sequence
atattgaaggacaaaaaaagtttt

SEQ ID NO: 75241 - DNA, 24 bp, Artificial sequence
  SiRNA target sequence
tattgaaggacaaaaaaagttttc

SEQ ID NO: 75242 - DNA, 24 bp, Artificial sequence
  SiRNA target sequence
attgaaggacaaaaaaagttttct

SEQ ID NO: 75243 - DNA, 24 bp, Artificial sequence
  SiRNA target sequence
ttgaaggacaaaaaaagttttcta

SEQ ID NO: 75244 - DNA, 24 bp, Artificial sequence
  SiRNA target sequence
tgaaggacaaaaaaagttttctac

SEQ ID NO: 75245 - DNA, 24 bp, Artificial sequence
  SiRNA target sequence
gaaggacaaaaaaagttttctaca

SEQ ID NO: 75246 - DNA, 24 bp, Artificial sequence
  SiRNA target sequence
aaggacaaaaaaagttttctacaa

SEQ ID NO: 75247 - DNA, 24 bp, Artificial sequence
  SiRNA target sequence
aggacaaaaaaagttttctacaaa

SEQ ID NO: 75248 - DNA, 24 bp, Artificial sequence
  SiRNA target sequence
ggacaaaaaaagttttctacaaat

SEQ ID NO: 75249 - DNA, 24 bp, Artificial sequence
  SiRNA target sequence
gacaaaaaaagttttctacaaatt

SEQ ID NO: 75250 - DNA, 24 bp, Artificial sequence
  SiRNA target sequence
acaaaaaaagttttctacaaattt

SEQ ID NO: 75251 - DNA, 24 bp, Artificial sequence
  SiRNA target sequence
caaaaaaagttttctacaaattta

SEQ ID NO: 75252 - DNA, 24 bp, Artificial sequence
  SiRNA target sequence
aaaaaaagttttctacaaatttac

SEQ ID NO: 75253 - DNA, 24 bp, Artificial sequence
  SiRNA target sequence
aaaaaagttttctacaaatttaca

SEQ ID NO: 75254 - DNA, 24 bp, Artificial sequence
  SiRNA target sequence
aaaaagttttctacaaatttacaa

SEQ ID NO: 75255 - DNA, 24 bp, Artificial sequence
  SiRNA target sequence
aaaagttttctacaaatttacaat

SEQ ID NO: 75256 - DNA, 24 bp, Artificial sequence
  SiRNA target sequence
aaagttttctacaaatttacaata

SEQ ID NO: 75257 - DNA, 24 bp, Artificial sequence
  SiRNA target sequence
aagttttctacaaatttacaatat

SEQ ID NO: 75258 - DNA, 24 bp, Artificial sequence
  SiRNA target sequence
agttttctacaaatttacaatatt

SEQ ID NO: 75259 - DNA, 24 bp, Artificial sequence
  SiRNA target sequence
gttttctacaaatttacaatattt

SEQ ID NO: 75260 - DNA, 24 bp, Artificial sequence
  SiRNA target sequence
ttttctacaaatttacaatatttt

SEQ ID NO: 75261 - DNA, 24 bp, Artificial sequence
  SiRNA target sequence
tttctacaaatttacaatattttt

SEQ ID NO: 75262 - DNA, 24 bp, Artificial sequence
  SiRNA target sequence
ttctacaaatttacaatatttttt

SEQ ID NO: 75263 - DNA, 24 bp, Artificial sequence
  SiRNA target sequence
tctacaaatttacaatatttttta

SEQ ID NO: 75264 - DNA, 24 bp, Artificial sequence
  SiRNA target sequence
ctacaaatttacaatattttttat

SEQ ID NO: 75265 - DNA, 24 bp, Artificial sequence
  SiRNA target sequence
tacaaatttacaatattttttatc

SEQ ID NO: 75266 - DNA, 24 bp, Artificial sequence
  SiRNA target sequence
acaaatttacaatattttttatca

SEQ ID NO: 75267 - DNA, 24 bp, Artificial sequence
  SiRNA target sequence
caaatttacaatattttttatcat

SEQ ID NO: 75268 - DNA, 24 bp, Artificial sequence
  SiRNA target sequence
aaatttacaatattttttatcata

SEQ ID NO: 75269 - DNA, 24 bp, Artificial sequence
  SiRNA target sequence
aatttacaatattttttatcatac

SEQ ID NO: 75270 - DNA, 24 bp, Artificial sequence
  SiRNA target sequence
atttacaatattttttatcataca

SEQ ID NO: 75271 - DNA, 24 bp, Artificial sequence
  SiRNA target sequence
tttacaatattttttatcatacaa

SEQ ID NO: 75272 - DNA, 24 bp, Artificial sequence
  SiRNA target sequence
ttacaatattttttatcatacaaa

SEQ ID NO: 75273 - DNA, 24 bp, Artificial sequence
  SiRNA target sequence
tacaatattttttatcatacaaat

SEQ ID NO: 75274 - DNA, 24 bp, Artificial sequence
  SiRNA target sequence
acaatattttttatcatacaaatt

SEQ ID NO: 75275 - DNA, 24 bp, Artificial sequence
  SiRNA target sequence
caatattttttatcatacaaatta

SEQ ID NO: 75276 - DNA, 24 bp, Artificial sequence
  SiRNA target sequence
aatattttttatcatacaaattag

SEQ ID NO: 75277 - DNA, 24 bp, Artificial sequence
  SiRNA target sequence
atattttttatcatacaaattagg

SEQ ID NO: 75278 - DNA, 24 bp, Artificial sequence
  SiRNA target sequence
tattttttatcatacaaattaggt

SEQ ID NO: 75279 - DNA, 24 bp, Artificial sequence
  SiRNA target sequence
attttttatcatacaaattaggta

SEQ ID NO: 75280 - DNA, 24 bp, Artificial sequence
  SiRNA target sequence
ttttttatcatacaaattaggtaa

SEQ ID NO: 75281 - DNA, 24 bp, Artificial sequence
  SiRNA target sequence
tttttatcatacaaattaggtaaa

SEQ ID NO: 75282 - DNA, 24 bp, Artificial sequence
  SiRNA target sequence
ttttatcatacaaattaggtaaat

SEQ ID NO: 75283 - DNA, 24 bp, Artificial sequence
  SiRNA target sequence
tttatcatacaaattaggtaaata

SEQ ID NO: 75284 - DNA, 24 bp, Artificial sequence
  SiRNA target sequence
ttatcatacaaattaggtaaataa

SEQ ID NO: 75285 - DNA, 25 bp, Artificial sequence
  SiRNA target sequence
atgaaaaaaatttcgaatagaaaaa

SEQ ID NO: 75286 - DNA, 25 bp, Artificial sequence
  SiRNA target sequence
tgaaaaaaatttcgaatagaaaaat

SEQ ID NO: 75287 - DNA, 25 bp, Artificial sequence
  SiRNA target sequence
gaaaaaaatttcgaatagaaaaatt

SEQ ID NO: 75288 - DNA, 25 bp, Artificial sequence
  SiRNA target sequence
aaaaaaatttcgaatagaaaaatta

SEQ ID NO: 75289 - DNA, 25 bp, Artificial sequence
  SiRNA target sequence
aaaaaatttcgaatagaaaaattat

SEQ ID NO: 75290 - DNA, 25 bp, Artificial sequence
  SiRNA target sequence
aaaaatttcgaatagaaaaattatc

SEQ ID NO: 75291 - DNA, 25 bp, Artificial sequence
  SiRNA target sequence
aaaatttcgaatagaaaaattatca

SEQ ID NO: 75292 - DNA, 25 bp, Artificial sequence
  SiRNA target sequence
aaatttcgaatagaaaaattatcaa

SEQ ID NO: 75293 - DNA, 25 bp, Artificial sequence
  SiRNA target sequence
aatttcgaatagaaaaattatcaaa

SEQ ID NO: 75294 - DNA, 25 bp, Artificial sequence
  SiRNA target sequence
atttcgaatagaaaaattatcaaag

SEQ ID NO: 75295 - DNA, 25 bp, Artificial sequence
  SiRNA target sequence
tttcgaatagaaaaattatcaaaga

SEQ ID NO: 75296 - DNA, 25 bp, Artificial sequence
  SiRNA target sequence
ttcgaatagaaaaattatcaaagaa

SEQ ID NO: 75297 - DNA, 25 bp, Artificial sequence
  SiRNA target sequence
tcgaatagaaaaattatcaaagaaa

SEQ ID NO: 75298 - DNA, 25 bp, Artificial sequence
  SiRNA target sequence
cgaatagaaaaattatcaaagaaat

SEQ ID NO: 75299 - DNA, 25 bp, Artificial sequence
  SiRNA target sequence
gaatagaaaaattatcaaagaaatt

SEQ ID NO: 75300 - DNA, 25 bp, Artificial sequence
  SiRNA target sequence
aatagaaaaattatcaaagaaatta

SEQ ID NO: 75301 - DNA, 25 bp, Artificial sequence
  SiRNA target sequence
atagaaaaattatcaaagaaattat

SEQ ID NO: 75302 - DNA, 25 bp, Artificial sequence
  SiRNA target sequence
tagaaaaattatcaaagaaattatt

SEQ ID NO: 75303 - DNA, 25 bp, Artificial sequence
  SiRNA target sequence
agaaaaattatcaaagaaattattt

SEQ ID NO: 75304 - DNA, 25 bp, Artificial sequence
  SiRNA target sequence
gaaaaattatcaaagaaattattta

SEQ ID NO: 75305 - DNA, 25 bp, Artificial sequence
  SiRNA target sequence
aaaaattatcaaagaaattatttac

SEQ ID NO: 75306 - DNA, 25 bp, Artificial sequence
  SiRNA target sequence
aaaattatcaaagaaattatttaca

SEQ ID NO: 75307 - DNA, 25 bp, Artificial sequence
  SiRNA target sequence
aaattatcaaagaaattatttacaa

SEQ ID NO: 75308 - DNA, 25 bp, Artificial sequence
  SiRNA target sequence
aattatcaaagaaattatttacaat

SEQ ID NO: 75309 - DNA, 25 bp, Artificial sequence
  SiRNA target sequence
attatcaaagaaattatttacaatg

SEQ ID NO: 75310 - DNA, 25 bp, Artificial sequence
  SiRNA target sequence
ttatcaaagaaattatttacaatga

SEQ ID NO: 75311 - DNA, 25 bp, Artificial sequence
  SiRNA target sequence
tatcaaagaaattatttacaatgat

SEQ ID NO: 75312 - DNA, 25 bp, Artificial sequence
  SiRNA target sequence
atcaaagaaattatttacaatgatt

SEQ ID NO: 75313 - DNA, 25 bp, Artificial sequence
  SiRNA target sequence
tcaaagaaattatttacaatgattt

SEQ ID NO: 75314 - DNA, 25 bp, Artificial sequence
  SiRNA target sequence
caaagaaattatttacaatgattta

SEQ ID NO: 75315 - DNA, 25 bp, Artificial sequence
  SiRNA target sequence
aaagaaattatttacaatgatttat

SEQ ID NO: 75316 - DNA, 25 bp, Artificial sequence
  SiRNA target sequence
aagaaattatttacaatgatttatt

SEQ ID NO: 75317 - DNA, 25 bp, Artificial sequence
  SiRNA target sequence
agaaattatttacaatgatttatta

SEQ ID NO: 75318 - DNA, 25 bp, Artificial sequence
  SiRNA target sequence
gaaattatttacaatgatttattaa

SEQ ID NO: 75319 - DNA, 25 bp, Artificial sequence
  SiRNA target sequence
aaattatttacaatgatttattaaa

SEQ ID NO: 75320 - DNA, 25 bp, Artificial sequence
  SiRNA target sequence
aattatttacaatgatttattaaaa

SEQ ID NO: 75321 - DNA, 25 bp, Artificial sequence
  SiRNA target sequence
attatttacaatgatttattaaaaa

SEQ ID NO: 75322 - DNA, 25 bp, Artificial sequence
  SiRNA target sequence
ttatttacaatgatttattaaaaat

SEQ ID NO: 75323 - DNA, 25 bp, Artificial sequence
  SiRNA target sequence
tatttacaatgatttattaaaaata

SEQ ID NO: 75324 - DNA, 25 bp, Artificial sequence
  SiRNA target sequence
atttacaatgatttattaaaaataa

SEQ ID NO: 75325 - DNA, 25 bp, Artificial sequence
  SiRNA target sequence
tttacaatgatttattaaaaataag

SEQ ID NO: 75326 - DNA, 25 bp, Artificial sequence
  SiRNA target sequence
ttacaatgatttattaaaaataaga

SEQ ID NO: 75327 - DNA, 25 bp, Artificial sequence
  SiRNA target sequence
tacaatgatttattaaaaataagaa

SEQ ID NO: 75328 - DNA, 25 bp, Artificial sequence
  SiRNA target sequence
acaatgatttattaaaaataagaat

SEQ ID NO: 75329 - DNA, 25 bp, Artificial sequence
  SiRNA target sequence
caatgatttattaaaaataagaatg

SEQ ID NO: 75330 - DNA, 25 bp, Artificial sequence
  SiRNA target sequence
aatgatttattaaaaataagaatgt

SEQ ID NO: 75331 - DNA, 25 bp, Artificial sequence
  SiRNA target sequence
atgatttattaaaaataagaatgtt

SEQ ID NO: 75332 - DNA, 25 bp, Artificial sequence
  SiRNA target sequence
tgatttattaaaaataagaatgttg

SEQ ID NO: 75333 - DNA, 25 bp, Artificial sequence
  SiRNA target sequence
gatttattaaaaataagaatgttgc

SEQ ID NO: 75334 - DNA, 25 bp, Artificial sequence
  SiRNA target sequence
atttattaaaaataagaatgttgcg

SEQ ID NO: 75335 - DNA, 25 bp, Artificial sequence
  SiRNA target sequence
tttattaaaaataagaatgttgcga

SEQ ID NO: 75336 - DNA, 25 bp, Artificial sequence
  SiRNA target sequence
ttattaaaaataagaatgttgcgat

SEQ ID NO: 75337 - DNA, 25 bp, Artificial sequence
  SiRNA target sequence
tattaaaaataagaatgttgcgata

SEQ ID NO: 75338 - DNA, 25 bp, Artificial sequence
  SiRNA target sequence
attaaaaataagaatgttgcgatat

SEQ ID NO: 75339 - DNA, 25 bp, Artificial sequence
  SiRNA target sequence
ttaaaaataagaatgttgcgatatg

SEQ ID NO: 75340 - DNA, 25 bp, Artificial sequence
  SiRNA target sequence
taaaaataagaatgttgcgatatgt

SEQ ID NO: 75341 - DNA, 25 bp, Artificial sequence
  SiRNA target sequence
aaaaataagaatgttgcgatatgtt

SEQ ID NO: 75342 - DNA, 25 bp, Artificial sequence
  SiRNA target sequence
aaaataagaatgttgcgatatgtta

SEQ ID NO: 75343 - DNA, 25 bp, Artificial sequence
  SiRNA target sequence
aaataagaatgttgcgatatgttat

SEQ ID NO: 75344 - DNA, 25 bp, Artificial sequence
  SiRNA target sequence
aataagaatgttgcgatatgttatt

SEQ ID NO: 75345 - DNA, 25 bp, Artificial sequence
  SiRNA target sequence
ataagaatgttgcgatatgttattg

SEQ ID NO: 75346 - DNA, 25 bp, Artificial sequence
  SiRNA target sequence
taagaatgttgcgatatgttattgt

SEQ ID NO: 75347 - DNA, 25 bp, Artificial sequence
  SiRNA target sequence
aagaatgttgcgatatgttattgta

SEQ ID NO: 75348 - DNA, 25 bp, Artificial sequence
  SiRNA target sequence
agaatgttgcgatatgttattgtac

SEQ ID NO: 75349 - DNA, 25 bp, Artificial sequence
  SiRNA target sequence
gaatgttgcgatatgttattgtacc

SEQ ID NO: 75350 - DNA, 25 bp, Artificial sequence
  SiRNA target sequence
aatgttgcgatatgttattgtacca

SEQ ID NO: 75351 - DNA, 25 bp, Artificial sequence
  SiRNA target sequence
atgttgcgatatgttattgtaccaa

SEQ ID NO: 75352 - DNA, 25 bp, Artificial sequence
  SiRNA target sequence
tgttgcgatatgttattgtaccaat

SEQ ID NO: 75353 - DNA, 25 bp, Artificial sequence
  SiRNA target sequence
gttgcgatatgttattgtaccaata

SEQ ID NO: 75354 - DNA, 25 bp, Artificial sequence
  SiRNA target sequence
ttgcgatatgttattgtaccaataa

SEQ ID NO: 75355 - DNA, 25 bp, Artificial sequence
  SiRNA target sequence
tgcgatatgttattgtaccaataat

SEQ ID NO: 75356 - DNA, 25 bp, Artificial sequence
  SiRNA target sequence
gcgatatgttattgtaccaataata

SEQ ID NO: 75357 - DNA, 25 bp, Artificial sequence
  SiRNA target sequence
cgatatgttattgtaccaataatat

SEQ ID NO: 75358 - DNA, 25 bp, Artificial sequence
  SiRNA target sequence
gatatgttattgtaccaataatatt

SEQ ID NO: 75359 - DNA, 25 bp, Artificial sequence
  SiRNA target sequence
atatgttattgtaccaataatattt

SEQ ID NO: 75360 - DNA, 25 bp, Artificial sequence
  SiRNA target sequence
tatgttattgtaccaataatatttt

SEQ ID NO: 75361 - DNA, 25 bp, Artificial sequence
  SiRNA target sequence
atgttattgtaccaataatattttt

SEQ ID NO: 75362 - DNA, 25 bp, Artificial sequence
  SiRNA target sequence
tgttattgtaccaataatattttta

SEQ ID NO: 75363 - DNA, 25 bp, Artificial sequence
  SiRNA target sequence
gttattgtaccaataatatttttaa

SEQ ID NO: 75364 - DNA, 25 bp, Artificial sequence
  SiRNA target sequence
ttattgtaccaataatatttttaac

SEQ ID NO: 75365 - DNA, 25 bp, Artificial sequence
  SiRNA target sequence
tattgtaccaataatatttttaact

SEQ ID NO: 75366 - DNA, 25 bp, Artificial sequence
  SiRNA target sequence
attgtaccaataatatttttaacta

SEQ ID NO: 75367 - DNA, 25 bp, Artificial sequence
  SiRNA target sequence
ttgtaccaataatatttttaactat

SEQ ID NO: 75368 - DNA, 25 bp, Artificial sequence
  SiRNA target sequence
tgtaccaataatatttttaactata

SEQ ID NO: 75369 - DNA, 25 bp, Artificial sequence
  SiRNA target sequence
gtaccaataatatttttaactatat

SEQ ID NO: 75370 - DNA, 25 bp, Artificial sequence
  SiRNA target sequence
taccaataatatttttaactatatt

SEQ ID NO: 75371 - DNA, 25 bp, Artificial sequence
  SiRNA target sequence
accaataatatttttaactatattt

SEQ ID NO: 75372 - DNA, 25 bp, Artificial sequence
  SiRNA target sequence
ccaataatatttttaactatatttt

SEQ ID NO: 75373 - DNA, 25 bp, Artificial sequence
  SiRNA target sequence
caataatatttttaactatatttta

SEQ ID NO: 75374 - DNA, 25 bp, Artificial sequence
  SiRNA target sequence
aataatatttttaactatattttac

SEQ ID NO: 75375 - DNA, 25 bp, Artificial sequence
  SiRNA target sequence
ataatatttttaactatattttaca

SEQ ID NO: 75376 - DNA, 25 bp, Artificial sequence
  SiRNA target sequence
taatatttttaactatattttacac

SEQ ID NO: 75377 - DNA, 25 bp, Artificial sequence
  SiRNA target sequence
aatatttttaactatattttacact

SEQ ID NO: 75378 - DNA, 25 bp, Artificial sequence
  SiRNA target sequence
atatttttaactatattttacactg

SEQ ID NO: 75379 - DNA, 25 bp, Artificial sequence
  SiRNA target sequence
tatttttaactatattttacactgt

SEQ ID NO: 75380 - DNA, 25 bp, Artificial sequence
  SiRNA target sequence
atttttaactatattttacactgtt

SEQ ID NO: 75381 - DNA, 25 bp, Artificial sequence
  SiRNA target sequence
tttttaactatattttacactgttt

SEQ ID NO: 75382 - DNA, 25 bp, Artificial sequence
  SiRNA target sequence
ttttaactatattttacactgtttt

SEQ ID NO: 75383 - DNA, 25 bp, Artificial sequence
  SiRNA target sequence
tttaactatattttacactgtttta

SEQ ID NO: 75384 - DNA, 25 bp, Artificial sequence
  SiRNA target sequence
ttaactatattttacactgttttag

SEQ ID NO: 75385 - DNA, 25 bp, Artificial sequence
  SiRNA target sequence
taactatattttacactgttttaga

SEQ ID NO: 75386 - DNA, 25 bp, Artificial sequence
  SiRNA target sequence
aactatattttacactgttttagag

SEQ ID NO: 75387 - DNA, 25 bp, Artificial sequence
  SiRNA target sequence
actatattttacactgttttagaga

SEQ ID NO: 75388 - DNA, 25 bp, Artificial sequence
  SiRNA target sequence
ctatattttacactgttttagagat

SEQ ID NO: 75389 - DNA, 25 bp, Artificial sequence
  SiRNA target sequence
tatattttacactgttttagagata

SEQ ID NO: 75390 - DNA, 25 bp, Artificial sequence
  SiRNA target sequence
atattttacactgttttagagataa

SEQ ID NO: 75391 - DNA, 25 bp, Artificial sequence
  SiRNA target sequence
tattttacactgttttagagataaa

SEQ ID NO: 75392 - DNA, 25 bp, Artificial sequence
  SiRNA target sequence
attttacactgttttagagataaaa

SEQ ID NO: 75393 - DNA, 25 bp, Artificial sequence
  SiRNA target sequence
ttttacactgttttagagataaaaa

SEQ ID NO: 75394 - DNA, 25 bp, Artificial sequence
  SiRNA target sequence
tttacactgttttagagataaaaat

SEQ ID NO: 75395 - DNA, 25 bp, Artificial sequence
  SiRNA target sequence
ttacactgttttagagataaaaata

SEQ ID NO: 75396 - DNA, 25 bp, Artificial sequence
  SiRNA target sequence
tacactgttttagagataaaaataa

SEQ ID NO: 75397 - DNA, 25 bp, Artificial sequence
  SiRNA target sequence
acactgttttagagataaaaataag

SEQ ID NO: 75398 - DNA, 25 bp, Artificial sequence
  SiRNA target sequence
cactgttttagagataaaaataagt

SEQ ID NO: 75399 - DNA, 25 bp, Artificial sequence
  SiRNA target sequence
actgttttagagataaaaataagta

SEQ ID NO: 75400 - DNA, 25 bp, Artificial sequence
  SiRNA target sequence
ctgttttagagataaaaataagtac

SEQ ID NO: 75401 - DNA, 25 bp, Artificial sequence
  SiRNA target sequence
tgttttagagataaaaataagtaca

SEQ ID NO: 75402 - DNA, 25 bp, Artificial sequence
  SiRNA target sequence
gttttagagataaaaataagtacat

SEQ ID NO: 75403 - DNA, 25 bp, Artificial sequence
  SiRNA target sequence
ttttagagataaaaataagtacatt

SEQ ID NO: 75404 - DNA, 25 bp, Artificial sequence
  SiRNA target sequence
tttagagataaaaataagtacatta

SEQ ID NO: 75405 - DNA, 25 bp, Artificial sequence
  SiRNA target sequence
ttagagataaaaataagtacattag

SEQ ID NO: 75406 - DNA, 25 bp, Artificial sequence
  SiRNA target sequence
tagagataaaaataagtacattagt

SEQ ID NO: 75407 - DNA, 25 bp, Artificial sequence
  SiRNA target sequence
agagataaaaataagtacattagta

SEQ ID NO: 75408 - DNA, 25 bp, Artificial sequence
  SiRNA target sequence
gagataaaaataagtacattagtaa

SEQ ID NO: 75409 - DNA, 25 bp, Artificial sequence
  SiRNA target sequence
agataaaaataagtacattagtaaa

SEQ ID NO: 75410 - DNA, 25 bp, Artificial sequence
  SiRNA target sequence
gataaaaataagtacattagtaaag

SEQ ID NO: 75411 - DNA, 25 bp, Artificial sequence
  SiRNA target sequence
ataaaaataagtacattagtaaaga

SEQ ID NO: 75412 - DNA, 25 bp, Artificial sequence
  SiRNA target sequence
taaaaataagtacattagtaaagaa

SEQ ID NO: 75413 - DNA, 25 bp, Artificial sequence
  SiRNA target sequence
aaaaataagtacattagtaaagaat

SEQ ID NO: 75414 - DNA, 25 bp, Artificial sequence
  SiRNA target sequence
aaaataagtacattagtaaagaatc

SEQ ID NO: 75415 - DNA, 25 bp, Artificial sequence
  SiRNA target sequence
aaataagtacattagtaaagaatct

SEQ ID NO: 75416 - DNA, 25 bp, Artificial sequence
  SiRNA target sequence
aataagtacattagtaaagaatctt

SEQ ID NO: 75417 - DNA, 25 bp, Artificial sequence
  SiRNA target sequence
ataagtacattagtaaagaatctta

SEQ ID NO: 75418 - DNA, 25 bp, Artificial sequence
  SiRNA target sequence
taagtacattagtaaagaatcttaa

SEQ ID NO: 75419 - DNA, 25 bp, Artificial sequence
  SiRNA target sequence
aagtacattagtaaagaatcttaat

SEQ ID NO: 75420 - DNA, 25 bp, Artificial sequence
  SiRNA target sequence
agtacattagtaaagaatcttaatc

SEQ ID NO: 75421 - DNA, 25 bp, Artificial sequence
  SiRNA target sequence
gtacattagtaaagaatcttaatca

SEQ ID NO: 75422 - DNA, 25 bp, Artificial sequence
  SiRNA target sequence
tacattagtaaagaatcttaatcaa

SEQ ID NO: 75423 - DNA, 25 bp, Artificial sequence
  SiRNA target sequence
acattagtaaagaatcttaatcaat

SEQ ID NO: 75424 - DNA, 25 bp, Artificial sequence
  SiRNA target sequence
cattagtaaagaatcttaatcaatc

SEQ ID NO: 75425 - DNA, 25 bp, Artificial sequence
  SiRNA target sequence
attagtaaagaatcttaatcaatct

SEQ ID NO: 75426 - DNA, 25 bp, Artificial sequence
  SiRNA target sequence
ttagtaaagaatcttaatcaatcta

SEQ ID NO: 75427 - DNA, 25 bp, Artificial sequence
  SiRNA target sequence
tagtaaagaatcttaatcaatctat

SEQ ID NO: 75428 - DNA, 25 bp, Artificial sequence
  SiRNA target sequence
agtaaagaatcttaatcaatctatc

SEQ ID NO: 75429 - DNA, 25 bp, Artificial sequence
  SiRNA target sequence
gtaaagaatcttaatcaatctatcg

SEQ ID NO: 75430 - DNA, 25 bp, Artificial sequence
  SiRNA target sequence
taaagaatcttaatcaatctatcgc

SEQ ID NO: 75431 - DNA, 25 bp, Artificial sequence
  SiRNA target sequence
aaagaatcttaatcaatctatcgca

SEQ ID NO: 75432 - DNA, 25 bp, Artificial sequence
  SiRNA target sequence
aagaatcttaatcaatctatcgcaa

SEQ ID NO: 75433 - DNA, 25 bp, Artificial sequence
  SiRNA target sequence
agaatcttaatcaatctatcgcaaa

SEQ ID NO: 75434 - DNA, 25 bp, Artificial sequence
  SiRNA target sequence
gaatcttaatcaatctatcgcaaat

SEQ ID NO: 75435 - DNA, 25 bp, Artificial sequence
  SiRNA target sequence
aatcttaatcaatctatcgcaaatc

SEQ ID NO: 75436 - DNA, 25 bp, Artificial sequence
  SiRNA target sequence
atcttaatcaatctatcgcaaatcg

SEQ ID NO: 75437 - DNA, 25 bp, Artificial sequence
  SiRNA target sequence
tcttaatcaatctatcgcaaatcga

SEQ ID NO: 75438 - DNA, 25 bp, Artificial sequence
  SiRNA target sequence
cttaatcaatctatcgcaaatcgaa

SEQ ID NO: 75439 - DNA, 25 bp, Artificial sequence
  SiRNA target sequence
ttaatcaatctatcgcaaatcgaaa

SEQ ID NO: 75440 - DNA, 25 bp, Artificial sequence
  SiRNA target sequence
taatcaatctatcgcaaatcgaaaa

SEQ ID NO: 75441 - DNA, 25 bp, Artificial sequence
  SiRNA target sequence
aatcaatctatcgcaaatcgaaaag

SEQ ID NO: 75442 - DNA, 25 bp, Artificial sequence
  SiRNA target sequence
atcaatctatcgcaaatcgaaaagg

SEQ ID NO: 75443 - DNA, 25 bp, Artificial sequence
  SiRNA target sequence
tcaatctatcgcaaatcgaaaaggt

SEQ ID NO: 75444 - DNA, 25 bp, Artificial sequence
  SiRNA target sequence
caatctatcgcaaatcgaaaaggtg

SEQ ID NO: 75445 - DNA, 25 bp, Artificial sequence
  SiRNA target sequence
aatctatcgcaaatcgaaaaggtga

SEQ ID NO: 75446 - DNA, 25 bp, Artificial sequence
  SiRNA target sequence
atctatcgcaaatcgaaaaggtgaa

SEQ ID NO: 75447 - DNA, 25 bp, Artificial sequence
  SiRNA target sequence
tctatcgcaaatcgaaaaggtgaac

SEQ ID NO: 75448 - DNA, 25 bp, Artificial sequence
  SiRNA target sequence
ctatcgcaaatcgaaaaggtgaaca

SEQ ID NO: 75449 - DNA, 25 bp, Artificial sequence
  SiRNA target sequence
tatcgcaaatcgaaaaggtgaacac

SEQ ID NO: 75450 - DNA, 25 bp, Artificial sequence
  SiRNA target sequence
atcgcaaatcgaaaaggtgaacaca

SEQ ID NO: 75451 - DNA, 25 bp, Artificial sequence
  SiRNA target sequence
tcgcaaatcgaaaaggtgaacacac

SEQ ID NO: 75452 - DNA, 25 bp, Artificial sequence
  SiRNA target sequence
cgcaaatcgaaaaggtgaacacaca

SEQ ID NO: 75453 - DNA, 25 bp, Artificial sequence
  SiRNA target sequence
gcaaatcgaaaaggtgaacacacag

SEQ ID NO: 75454 - DNA, 25 bp, Artificial sequence
  SiRNA target sequence
caaatcgaaaaggtgaacacacagc

SEQ ID NO: 75455 - DNA, 25 bp, Artificial sequence
  SiRNA target sequence
aaatcgaaaaggtgaacacacagca

SEQ ID NO: 75456 - DNA, 25 bp, Artificial sequence
  SiRNA target sequence
aatcgaaaaggtgaacacacagcac

SEQ ID NO: 75457 - DNA, 25 bp, Artificial sequence
  SiRNA target sequence
atcgaaaaggtgaacacacagcact

SEQ ID NO: 75458 - DNA, 25 bp, Artificial sequence
  SiRNA target sequence
tcgaaaaggtgaacacacagcactt

SEQ ID NO: 75459 - DNA, 25 bp, Artificial sequence
  SiRNA target sequence
cgaaaaggtgaacacacagcacttg

SEQ ID NO: 75460 - DNA, 25 bp, Artificial sequence
  SiRNA target sequence
gaaaaggtgaacacacagcacttga

SEQ ID NO: 75461 - DNA, 25 bp, Artificial sequence
  SiRNA target sequence
aaaaggtgaacacacagcacttgaa

SEQ ID NO: 75462 - DNA, 25 bp, Artificial sequence
  SiRNA target sequence
aaaggtgaacacacagcacttgaaa

SEQ ID NO: 75463 - DNA, 25 bp, Artificial sequence
  SiRNA target sequence
aaggtgaacacacagcacttgaaag

SEQ ID NO: 75464 - DNA, 25 bp, Artificial sequence
  SiRNA target sequence
aggtgaacacacagcacttgaaaga

SEQ ID NO: 75465 - DNA, 25 bp, Artificial sequence
  SiRNA target sequence
ggtgaacacacagcacttgaaagat

SEQ ID NO: 75466 - DNA, 25 bp, Artificial sequence
  SiRNA target sequence
gtgaacacacagcacttgaaagatt

SEQ ID NO: 75467 - DNA, 25 bp, Artificial sequence
  SiRNA target sequence
tgaacacacagcacttgaaagattt

SEQ ID NO: 75468 - DNA, 25 bp, Artificial sequence
  SiRNA target sequence
gaacacacagcacttgaaagatttg

SEQ ID NO: 75469 - DNA, 25 bp, Artificial sequence
  SiRNA target sequence
aacacacagcacttgaaagatttgt

SEQ ID NO: 75470 - DNA, 25 bp, Artificial sequence
  SiRNA target sequence
acacacagcacttgaaagatttgtg

SEQ ID NO: 75471 - DNA, 25 bp, Artificial sequence
  SiRNA target sequence
cacacagcacttgaaagatttgtgt

SEQ ID NO: 75472 - DNA, 25 bp, Artificial sequence
  SiRNA target sequence
acacagcacttgaaagatttgtgtt

SEQ ID NO: 75473 - DNA, 25 bp, Artificial sequence
  SiRNA target sequence
cacagcacttgaaagatttgtgtta

SEQ ID NO: 75474 - DNA, 25 bp, Artificial sequence
  SiRNA target sequence
acagcacttgaaagatttgtgttac

SEQ ID NO: 75475 - DNA, 25 bp, Artificial sequence
  SiRNA target sequence
cagcacttgaaagatttgtgttaca

SEQ ID NO: 75476 - DNA, 25 bp, Artificial sequence
  SiRNA target sequence
agcacttgaaagatttgtgttacag

SEQ ID NO: 75477 - DNA, 25 bp, Artificial sequence
  SiRNA target sequence
gcacttgaaagatttgtgttacagt

SEQ ID NO: 75478 - DNA, 25 bp, Artificial sequence
  SiRNA target sequence
cacttgaaagatttgtgttacagtc

SEQ ID NO: 75479 - DNA, 25 bp, Artificial sequence
  SiRNA target sequence
acttgaaagatttgtgttacagtca

SEQ ID NO: 75480 - DNA, 25 bp, Artificial sequence
  SiRNA target sequence
cttgaaagatttgtgttacagtcac

SEQ ID NO: 75481 - DNA, 25 bp, Artificial sequence
  SiRNA target sequence
ttgaaagatttgtgttacagtcact

SEQ ID NO: 75482 - DNA, 25 bp, Artificial sequence
  SiRNA target sequence
tgaaagatttgtgttacagtcactc

SEQ ID NO: 75483 - DNA, 25 bp, Artificial sequence
  SiRNA target sequence
gaaagatttgtgttacagtcactct

SEQ ID NO: 75484 - DNA, 25 bp, Artificial sequence
  SiRNA target sequence
aaagatttgtgttacagtcactctt

SEQ ID NO: 75485 - DNA, 25 bp, Artificial sequence
  SiRNA target sequence
aagatttgtgttacagtcactctta

SEQ ID NO: 75486 - DNA, 25 bp, Artificial sequence
  SiRNA target sequence
agatttgtgttacagtcactcttag

SEQ ID NO: 75487 - DNA, 25 bp, Artificial sequence
  SiRNA target sequence
gatttgtgttacagtcactcttagt

SEQ ID NO: 75488 - DNA, 25 bp, Artificial sequence
  SiRNA target sequence
atttgtgttacagtcactcttagtg

SEQ ID NO: 75489 - DNA, 25 bp, Artificial sequence
  SiRNA target sequence
tttgtgttacagtcactcttagtgg

SEQ ID NO: 75490 - DNA, 25 bp, Artificial sequence
  SiRNA target sequence
ttgtgttacagtcactcttagtggc

SEQ ID NO: 75491 - DNA, 25 bp, Artificial sequence
  SiRNA target sequence
tgtgttacagtcactcttagtggct

SEQ ID NO: 75492 - DNA, 25 bp, Artificial sequence
  SiRNA target sequence
gtgttacagtcactcttagtggctg

SEQ ID NO: 75493 - DNA, 25 bp, Artificial sequence
  SiRNA target sequence
tgttacagtcactcttagtggctgt

SEQ ID NO: 75494 - DNA, 25 bp, Artificial sequence
  SiRNA target sequence
gttacagtcactcttagtggctgta

SEQ ID NO: 75495 - DNA, 25 bp, Artificial sequence
  SiRNA target sequence
ttacagtcactcttagtggctgtat

SEQ ID NO: 75496 - DNA, 25 bp, Artificial sequence
  SiRNA target sequence
tacagtcactcttagtggctgtatt

SEQ ID NO: 75497 - DNA, 25 bp, Artificial sequence
  SiRNA target sequence
acagtcactcttagtggctgtattg

SEQ ID NO: 75498 - DNA, 25 bp, Artificial sequence
  SiRNA target sequence
cagtcactcttagtggctgtattga

SEQ ID NO: 75499 - DNA, 25 bp, Artificial sequence
  SiRNA target sequence
agtcactcttagtggctgtattgac

SEQ ID NO: 75500 - DNA, 25 bp, Artificial sequence
  SiRNA target sequence
gtcactcttagtggctgtattgacc

SEQ ID NO: 75501 - DNA, 25 bp, Artificial sequence
  SiRNA target sequence
tcactcttagtggctgtattgaccg

SEQ ID NO: 75502 - DNA, 25 bp, Artificial sequence
  SiRNA target sequence
cactcttagtggctgtattgaccga

SEQ ID NO: 75503 - DNA, 25 bp, Artificial sequence
  SiRNA target sequence
actcttagtggctgtattgaccgaa

SEQ ID NO: 75504 - DNA, 25 bp, Artificial sequence
  SiRNA target sequence
ctcttagtggctgtattgaccgaac

SEQ ID NO: 75505 - DNA, 25 bp, Artificial sequence
  SiRNA target sequence
tcttagtggctgtattgaccgaact

SEQ ID NO: 75506 - DNA, 25 bp, Artificial sequence
  SiRNA target sequence
cttagtggctgtattgaccgaactt

SEQ ID NO: 75507 - DNA, 25 bp, Artificial sequence
  SiRNA target sequence
ttagtggctgtattgaccgaactta

SEQ ID NO: 75508 - DNA, 25 bp, Artificial sequence
  SiRNA target sequence
tagtggctgtattgaccgaacttaa

SEQ ID NO: 75509 - DNA, 25 bp, Artificial sequence
  SiRNA target sequence
agtggctgtattgaccgaacttaat

SEQ ID NO: 75510 - DNA, 25 bp, Artificial sequence
  SiRNA target sequence
gtggctgtattgaccgaacttaatg

SEQ ID NO: 75511 - DNA, 25 bp, Artificial sequence
  SiRNA target sequence
tggctgtattgaccgaacttaatgg

SEQ ID NO: 75512 - DNA, 25 bp, Artificial sequence
  SiRNA target sequence
ggctgtattgaccgaacttaatgga

SEQ ID NO: 75513 - DNA, 25 bp, Artificial sequence
  SiRNA target sequence
gctgtattgaccgaacttaatggat

SEQ ID NO: 75514 - DNA, 25 bp, Artificial sequence
  SiRNA target sequence
ctgtattgaccgaacttaatggatt

SEQ ID NO: 75515 - DNA, 25 bp, Artificial sequence
  SiRNA target sequence
tgtattgaccgaacttaatggattt

SEQ ID NO: 75516 - DNA, 25 bp, Artificial sequence
  SiRNA target sequence
gtattgaccgaacttaatggattta

SEQ ID NO: 75517 - DNA, 25 bp, Artificial sequence
  SiRNA target sequence
tattgaccgaacttaatggatttat

SEQ ID NO: 75518 - DNA, 25 bp, Artificial sequence
  SiRNA target sequence
attgaccgaacttaatggatttatt

SEQ ID NO: 75519 - DNA, 25 bp, Artificial sequence
  SiRNA target sequence
ttgaccgaacttaatggatttattt

SEQ ID NO: 75520 - DNA, 25 bp, Artificial sequence
  SiRNA target sequence
tgaccgaacttaatggatttatttt

SEQ ID NO: 75521 - DNA, 25 bp, Artificial sequence
  SiRNA target sequence
gaccgaacttaatggatttattttt

SEQ ID NO: 75522 - DNA, 25 bp, Artificial sequence
  SiRNA target sequence
accgaacttaatggatttattttta

SEQ ID NO: 75523 - DNA, 25 bp, Artificial sequence
  SiRNA target sequence
ccgaacttaatggatttatttttac

SEQ ID NO: 75524 - DNA, 25 bp, Artificial sequence
  SiRNA target sequence
cgaacttaatggatttatttttaca

SEQ ID NO: 75525 - DNA, 25 bp, Artificial sequence
  SiRNA target sequence
gaacttaatggatttatttttacag

SEQ ID NO: 75526 - DNA, 25 bp, Artificial sequence
  SiRNA target sequence
aacttaatggatttatttttacagg

SEQ ID NO: 75527 - DNA, 25 bp, Artificial sequence
  SiRNA target sequence
acttaatggatttatttttacaggt

SEQ ID NO: 75528 - DNA, 25 bp, Artificial sequence
  SiRNA target sequence
cttaatggatttatttttacaggtg

SEQ ID NO: 75529 - DNA, 25 bp, Artificial sequence
  SiRNA target sequence
ttaatggatttatttttacaggtgt

SEQ ID NO: 75530 - DNA, 25 bp, Artificial sequence
  SiRNA target sequence
taatggatttatttttacaggtgta

SEQ ID NO: 75531 - DNA, 25 bp, Artificial sequence
  SiRNA target sequence
aatggatttatttttacaggtgtag

SEQ ID NO: 75532 - DNA, 25 bp, Artificial sequence
  SiRNA target sequence
atggatttatttttacaggtgtagt

SEQ ID NO: 75533 - DNA, 25 bp, Artificial sequence
  SiRNA target sequence
tggatttatttttacaggtgtagtg

SEQ ID NO: 75534 - DNA, 25 bp, Artificial sequence
  SiRNA target sequence
ggatttatttttacaggtgtagtgc

SEQ ID NO: 75535 - DNA, 25 bp, Artificial sequence
  SiRNA target sequence
gatttatttttacaggtgtagtgca

SEQ ID NO: 75536 - DNA, 25 bp, Artificial sequence
  SiRNA target sequence
atttatttttacaggtgtagtgcaa

SEQ ID NO: 75537 - DNA, 25 bp, Artificial sequence
  SiRNA target sequence
tttatttttacaggtgtagtgcaat

SEQ ID NO: 75538 - DNA, 25 bp, Artificial sequence
  SiRNA target sequence
ttatttttacaggtgtagtgcaata

SEQ ID NO: 75539 - DNA, 25 bp, Artificial sequence
  SiRNA target sequence
tatttttacaggtgtagtgcaatat

SEQ ID NO: 75540 - DNA, 25 bp, Artificial sequence
  SiRNA target sequence
atttttacaggtgtagtgcaatata

SEQ ID NO: 75541 - DNA, 25 bp, Artificial sequence
  SiRNA target sequence
tttttacaggtgtagtgcaatatat

SEQ ID NO: 75542 - DNA, 25 bp, Artificial sequence
  SiRNA target sequence
ttttacaggtgtagtgcaatatatt

SEQ ID NO: 75543 - DNA, 25 bp, Artificial sequence
  SiRNA target sequence
tttacaggtgtagtgcaatatattt

SEQ ID NO: 75544 - DNA, 25 bp, Artificial sequence
  SiRNA target sequence
ttacaggtgtagtgcaatatattta

SEQ ID NO: 75545 - DNA, 25 bp, Artificial sequence
  SiRNA target sequence
tacaggtgtagtgcaatatatttat

SEQ ID NO: 75546 - DNA, 25 bp, Artificial sequence
  SiRNA target sequence
acaggtgtagtgcaatatatttata

SEQ ID NO: 75547 - DNA, 25 bp, Artificial sequence
  SiRNA target sequence
caggtgtagtgcaatatatttatag

SEQ ID NO: 75548 - DNA, 25 bp, Artificial sequence
  SiRNA target sequence
aggtgtagtgcaatatatttataga

SEQ ID NO: 75549 - DNA, 25 bp, Artificial sequence
  SiRNA target sequence
ggtgtagtgcaatatatttatagaa

SEQ ID NO: 75550 - DNA, 25 bp, Artificial sequence
  SiRNA target sequence
gtgtagtgcaatatatttatagaaa

SEQ ID NO: 75551 - DNA, 25 bp, Artificial sequence
  SiRNA target sequence
tgtagtgcaatatatttatagaaat

SEQ ID NO: 75552 - DNA, 25 bp, Artificial sequence
  SiRNA target sequence
gtagtgcaatatatttatagaaata

SEQ ID NO: 75553 - DNA, 25 bp, Artificial sequence
  SiRNA target sequence
tagtgcaatatatttatagaaatac

SEQ ID NO: 75554 - DNA, 25 bp, Artificial sequence
  SiRNA target sequence
agtgcaatatatttatagaaatacg

SEQ ID NO: 75555 - DNA, 25 bp, Artificial sequence
  SiRNA target sequence
gtgcaatatatttatagaaatacgg

SEQ ID NO: 75556 - DNA, 25 bp, Artificial sequence
  SiRNA target sequence
tgcaatatatttatagaaatacggc

SEQ ID NO: 75557 - DNA, 25 bp, Artificial sequence
  SiRNA target sequence
gcaatatatttatagaaatacggca

SEQ ID NO: 75558 - DNA, 25 bp, Artificial sequence
  SiRNA target sequence
caatatatttatagaaatacggcaa

SEQ ID NO: 75559 - DNA, 25 bp, Artificial sequence
  SiRNA target sequence
aatatatttatagaaatacggcaaa

SEQ ID NO: 75560 - DNA, 25 bp, Artificial sequence
  SiRNA target sequence
atatatttatagaaatacggcaaaa

SEQ ID NO: 75561 - DNA, 25 bp, Artificial sequence
  SiRNA target sequence
tatatttatagaaatacggcaaaat

SEQ ID NO: 75562 - DNA, 25 bp, Artificial sequence
  SiRNA target sequence
atatttatagaaatacggcaaaatc

SEQ ID NO: 75563 - DNA, 25 bp, Artificial sequence
  SiRNA target sequence
tatttatagaaatacggcaaaatct

SEQ ID NO: 75564 - DNA, 25 bp, Artificial sequence
  SiRNA target sequence
atttatagaaatacggcaaaatcta

SEQ ID NO: 75565 - DNA, 25 bp, Artificial sequence
  SiRNA target sequence
tttatagaaatacggcaaaatctac

SEQ ID NO: 75566 - DNA, 25 bp, Artificial sequence
  SiRNA target sequence
ttatagaaatacggcaaaatctaca

SEQ ID NO: 75567 - DNA, 25 bp, Artificial sequence
  SiRNA target sequence
tatagaaatacggcaaaatctacat

SEQ ID NO: 75568 - DNA, 25 bp, Artificial sequence
  SiRNA target sequence
atagaaatacggcaaaatctacatt

SEQ ID NO: 75569 - DNA, 25 bp, Artificial sequence
  SiRNA target sequence
tagaaatacggcaaaatctacattc

SEQ ID NO: 75570 - DNA, 25 bp, Artificial sequence
  SiRNA target sequence
agaaatacggcaaaatctacattca

SEQ ID NO: 75571 - DNA, 25 bp, Artificial sequence
  SiRNA target sequence
gaaatacggcaaaatctacattcaa

SEQ ID NO: 75572 - DNA, 25 bp, Artificial sequence
  SiRNA target sequence
aaatacggcaaaatctacattcaaa

SEQ ID NO: 75573 - DNA, 25 bp, Artificial sequence
  SiRNA target sequence
aatacggcaaaatctacattcaaag

SEQ ID NO: 75574 - DNA, 25 bp, Artificial sequence
  SiRNA target sequence
atacggcaaaatctacattcaaagg

SEQ ID NO: 75575 - DNA, 25 bp, Artificial sequence
  SiRNA target sequence
tacggcaaaatctacattcaaaggc

SEQ ID NO: 75576 - DNA, 25 bp, Artificial sequence
  SiRNA target sequence
acggcaaaatctacattcaaaggct

SEQ ID NO: 75577 - DNA, 25 bp, Artificial sequence
  SiRNA target sequence
cggcaaaatctacattcaaaggctt

SEQ ID NO: 75578 - DNA, 25 bp, Artificial sequence
  SiRNA target sequence
ggcaaaatctacattcaaaggcttc

SEQ ID NO: 75579 - DNA, 25 bp, Artificial sequence
  SiRNA target sequence
gcaaaatctacattcaaaggcttca

SEQ ID NO: 75580 - DNA, 25 bp, Artificial sequence
  SiRNA target sequence
caaaatctacattcaaaggcttcat

SEQ ID NO: 75581 - DNA, 25 bp, Artificial sequence
  SiRNA target sequence
aaaatctacattcaaaggcttcatt

SEQ ID NO: 75582 - DNA, 25 bp, Artificial sequence
  SiRNA target sequence
aaatctacattcaaaggcttcattt

SEQ ID NO: 75583 - DNA, 25 bp, Artificial sequence
  SiRNA target sequence
aatctacattcaaaggcttcatttc

SEQ ID NO: 75584 - DNA, 25 bp, Artificial sequence
  SiRNA target sequence
atctacattcaaaggcttcatttct

SEQ ID NO: 75585 - DNA, 25 bp, Artificial sequence
  SiRNA target sequence
tctacattcaaaggcttcatttctc

SEQ ID NO: 75586 - DNA, 25 bp, Artificial sequence
  SiRNA target sequence
ctacattcaaaggcttcatttctct

SEQ ID NO: 75587 - DNA, 25 bp, Artificial sequence
  SiRNA target sequence
tacattcaaaggcttcatttctctt

SEQ ID NO: 75588 - DNA, 25 bp, Artificial sequence
  SiRNA target sequence
acattcaaaggcttcatttctcttt

SEQ ID NO: 75589 - DNA, 25 bp, Artificial sequence
  SiRNA target sequence
cattcaaaggcttcatttctctttc

SEQ ID NO: 75590 - DNA, 25 bp, Artificial sequence
  SiRNA target sequence
attcaaaggcttcatttctctttca

SEQ ID NO: 75591 - DNA, 25 bp, Artificial sequence
  SiRNA target sequence
ttcaaaggcttcatttctctttcac

SEQ ID NO: 75592 - DNA, 25 bp, Artificial sequence
  SiRNA target sequence
tcaaaggcttcatttctctttcacc

SEQ ID NO: 75593 - DNA, 25 bp, Artificial sequence
  SiRNA target sequence
caaaggcttcatttctctttcacct

SEQ ID NO: 75594 - DNA, 25 bp, Artificial sequence
  SiRNA target sequence
aaaggcttcatttctctttcaccta

SEQ ID NO: 75595 - DNA, 25 bp, Artificial sequence
  SiRNA target sequence
aaggcttcatttctctttcacctaa

SEQ ID NO: 75596 - DNA, 25 bp, Artificial sequence
  SiRNA target sequence
aggcttcatttctctttcacctaaa

SEQ ID NO: 75597 - DNA, 25 bp, Artificial sequence
  SiRNA target sequence
ggcttcatttctctttcacctaaaa

SEQ ID NO: 75598 - DNA, 25 bp, Artificial sequence
  SiRNA target sequence
gcttcatttctctttcacctaaaaa

SEQ ID NO: 75599 - DNA, 25 bp, Artificial sequence
  SiRNA target sequence
cttcatttctctttcacctaaaaat

SEQ ID NO: 75600 - DNA, 25 bp, Artificial sequence
  SiRNA target sequence
ttcatttctctttcacctaaaaatt

SEQ ID NO: 75601 - DNA, 25 bp, Artificial sequence
  SiRNA target sequence
tcatttctctttcacctaaaaattt

SEQ ID NO: 75602 - DNA, 25 bp, Artificial sequence
  SiRNA target sequence
catttctctttcacctaaaaatttt

SEQ ID NO: 75603 - DNA, 25 bp, Artificial sequence
  SiRNA target sequence
atttctctttcacctaaaaatttta

SEQ ID NO: 75604 - DNA, 25 bp, Artificial sequence
  SiRNA target sequence
tttctctttcacctaaaaattttag

SEQ ID NO: 75605 - DNA, 25 bp, Artificial sequence
  SiRNA target sequence
ttctctttcacctaaaaattttagt

SEQ ID NO: 75606 - DNA, 25 bp, Artificial sequence
  SiRNA target sequence
tctctttcacctaaaaattttagta

SEQ ID NO: 75607 - DNA, 25 bp, Artificial sequence
  SiRNA target sequence
ctctttcacctaaaaattttagtac

SEQ ID NO: 75608 - DNA, 25 bp, Artificial sequence
  SiRNA target sequence
tctttcacctaaaaattttagtacc

SEQ ID NO: 75609 - DNA, 25 bp, Artificial sequence
  SiRNA target sequence
ctttcacctaaaaattttagtacca

SEQ ID NO: 75610 - DNA, 25 bp, Artificial sequence
  SiRNA target sequence
tttcacctaaaaattttagtaccat

SEQ ID NO: 75611 - DNA, 25 bp, Artificial sequence
  SiRNA target sequence
ttcacctaaaaattttagtaccata

SEQ ID NO: 75612 - DNA, 25 bp, Artificial sequence
  SiRNA target sequence
tcacctaaaaattttagtaccatag

SEQ ID NO: 75613 - DNA, 25 bp, Artificial sequence
  SiRNA target sequence
cacctaaaaattttagtaccatagg

SEQ ID NO: 75614 - DNA, 25 bp, Artificial sequence
  SiRNA target sequence
acctaaaaattttagtaccataggt

SEQ ID NO: 75615 - DNA, 25 bp, Artificial sequence
  SiRNA target sequence
cctaaaaattttagtaccataggtg

SEQ ID NO: 75616 - DNA, 25 bp, Artificial sequence
  SiRNA target sequence
ctaaaaattttagtaccataggtgg

SEQ ID NO: 75617 - DNA, 25 bp, Artificial sequence
  SiRNA target sequence
taaaaattttagtaccataggtggc

SEQ ID NO: 75618 - DNA, 25 bp, Artificial sequence
  SiRNA target sequence
aaaaattttagtaccataggtggcg

SEQ ID NO: 75619 - DNA, 25 bp, Artificial sequence
  SiRNA target sequence
aaaattttagtaccataggtggcgg

SEQ ID NO: 75620 - DNA, 25 bp, Artificial sequence
  SiRNA target sequence
aaattttagtaccataggtggcgga

SEQ ID NO: 75621 - DNA, 25 bp, Artificial sequence
  SiRNA target sequence
aattttagtaccataggtggcggag

SEQ ID NO: 75622 - DNA, 25 bp, Artificial sequence
  SiRNA target sequence
attttagtaccataggtggcggaga

SEQ ID NO: 75623 - DNA, 25 bp, Artificial sequence
  SiRNA target sequence
ttttagtaccataggtggcggagaa

SEQ ID NO: 75624 - DNA, 25 bp, Artificial sequence
  SiRNA target sequence
tttagtaccataggtggcggagaaa

SEQ ID NO: 75625 - DNA, 25 bp, Artificial sequence
  SiRNA target sequence
ttagtaccataggtggcggagaaat

SEQ ID NO: 75626 - DNA, 25 bp, Artificial sequence
  SiRNA target sequence
tagtaccataggtggcggagaaatt

SEQ ID NO: 75627 - DNA, 25 bp, Artificial sequence
  SiRNA target sequence
agtaccataggtggcggagaaattc

SEQ ID NO: 75628 - DNA, 25 bp, Artificial sequence
  SiRNA target sequence
gtaccataggtggcggagaaattca

SEQ ID NO: 75629 - DNA, 25 bp, Artificial sequence
  SiRNA target sequence
taccataggtggcggagaaattcaa

SEQ ID NO: 75630 - DNA, 25 bp, Artificial sequence
  SiRNA target sequence
accataggtggcggagaaattcaaa

SEQ ID NO: 75631 - DNA, 25 bp, Artificial sequence
  SiRNA target sequence
ccataggtggcggagaaattcaaac

SEQ ID NO: 75632 - DNA, 25 bp, Artificial sequence
  SiRNA target sequence
cataggtggcggagaaattcaaaca

SEQ ID NO: 75633 - DNA, 25 bp, Artificial sequence
  SiRNA target sequence
ataggtggcggagaaattcaaacaa

SEQ ID NO: 75634 - DNA, 25 bp, Artificial sequence
  SiRNA target sequence
taggtggcggagaaattcaaacaat

SEQ ID NO: 75635 - DNA, 25 bp, Artificial sequence
  SiRNA target sequence
aggtggcggagaaattcaaacaata

SEQ ID NO: 75636 - DNA, 25 bp, Artificial sequence
  SiRNA target sequence
ggtggcggagaaattcaaacaataa

SEQ ID NO: 75637 - DNA, 25 bp, Artificial sequence
  SiRNA target sequence
gtggcggagaaattcaaacaataat

SEQ ID NO: 75638 - DNA, 25 bp, Artificial sequence
  SiRNA target sequence
tggcggagaaattcaaacaataata

SEQ ID NO: 75639 - DNA, 25 bp, Artificial sequence
  SiRNA target sequence
ggcggagaaattcaaacaataatag

SEQ ID NO: 75640 - DNA, 25 bp, Artificial sequence
  SiRNA target sequence
gcggagaaattcaaacaataataga

SEQ ID NO: 75641 - DNA, 25 bp, Artificial sequence
  SiRNA target sequence
cggagaaattcaaacaataatagat

SEQ ID NO: 75642 - DNA, 25 bp, Artificial sequence
  SiRNA target sequence
ggagaaattcaaacaataatagata

SEQ ID NO: 75643 - DNA, 25 bp, Artificial sequence
  SiRNA target sequence
gagaaattcaaacaataatagatag

SEQ ID NO: 75644 - DNA, 25 bp, Artificial sequence
  SiRNA target sequence
agaaattcaaacaataatagataga

SEQ ID NO: 75645 - DNA, 25 bp, Artificial sequence
  SiRNA target sequence
gaaattcaaacaataatagatagaa

SEQ ID NO: 75646 - DNA, 25 bp, Artificial sequence
  SiRNA target sequence
aaattcaaacaataatagatagaaa

SEQ ID NO: 75647 - DNA, 25 bp, Artificial sequence
  SiRNA target sequence
aattcaaacaataatagatagaaaa

SEQ ID NO: 75648 - DNA, 25 bp, Artificial sequence
  SiRNA target sequence
attcaaacaataatagatagaaaat

SEQ ID NO: 75649 - DNA, 25 bp, Artificial sequence
  SiRNA target sequence
ttcaaacaataatagatagaaaatc

SEQ ID NO: 75650 - DNA, 25 bp, Artificial sequence
  SiRNA target sequence
tcaaacaataatagatagaaaatca

SEQ ID NO: 75651 - DNA, 25 bp, Artificial sequence
  SiRNA target sequence
caaacaataatagatagaaaatcaa

SEQ ID NO: 75652 - DNA, 25 bp, Artificial sequence
  SiRNA target sequence
aaacaataatagatagaaaatcaaa

SEQ ID NO: 75653 - DNA, 25 bp, Artificial sequence
  SiRNA target sequence
aacaataatagatagaaaatcaaaa

SEQ ID NO: 75654 - DNA, 25 bp, Artificial sequence
  SiRNA target sequence
acaataatagatagaaaatcaaaat

SEQ ID NO: 75655 - DNA, 25 bp, Artificial sequence
  SiRNA target sequence
caataatagatagaaaatcaaaatc

SEQ ID NO: 75656 - DNA, 25 bp, Artificial sequence
  SiRNA target sequence
aataatagatagaaaatcaaaatct

SEQ ID NO: 75657 - DNA, 25 bp, Artificial sequence
  SiRNA target sequence
ataatagatagaaaatcaaaatctg

SEQ ID NO: 75658 - DNA, 25 bp, Artificial sequence
  SiRNA target sequence
taatagatagaaaatcaaaatctgc

SEQ ID NO: 75659 - DNA, 25 bp, Artificial sequence
  SiRNA target sequence
aatagatagaaaatcaaaatctgca

SEQ ID NO: 75660 - DNA, 25 bp, Artificial sequence
  SiRNA target sequence
atagatagaaaatcaaaatctgcaa

SEQ ID NO: 75661 - DNA, 25 bp, Artificial sequence
  SiRNA target sequence
tagatagaaaatcaaaatctgcaag

SEQ ID NO: 75662 - DNA, 25 bp, Artificial sequence
  SiRNA target sequence
agatagaaaatcaaaatctgcaagt

SEQ ID NO: 75663 - DNA, 25 bp, Artificial sequence
  SiRNA target sequence
gatagaaaatcaaaatctgcaagtg

SEQ ID NO: 75664 - DNA, 25 bp, Artificial sequence
  SiRNA target sequence
atagaaaatcaaaatctgcaagtga

SEQ ID NO: 75665 - DNA, 25 bp, Artificial sequence
  SiRNA target sequence
tagaaaatcaaaatctgcaagtgaa

SEQ ID NO: 75666 - DNA, 25 bp, Artificial sequence
  SiRNA target sequence
agaaaatcaaaatctgcaagtgaac

SEQ ID NO: 75667 - DNA, 25 bp, Artificial sequence
  SiRNA target sequence
gaaaatcaaaatctgcaagtgaact

SEQ ID NO: 75668 - DNA, 25 bp, Artificial sequence
  SiRNA target sequence
aaaatcaaaatctgcaagtgaactt

SEQ ID NO: 75669 - DNA, 25 bp, Artificial sequence
  SiRNA target sequence
aaatcaaaatctgcaagtgaactta

SEQ ID NO: 75670 - DNA, 25 bp, Artificial sequence
  SiRNA target sequence
aatcaaaatctgcaagtgaacttat

SEQ ID NO: 75671 - DNA, 25 bp, Artificial sequence
  SiRNA target sequence
atcaaaatctgcaagtgaacttatt

SEQ ID NO: 75672 - DNA, 25 bp, Artificial sequence
  SiRNA target sequence
tcaaaatctgcaagtgaacttattg

SEQ ID NO: 75673 - DNA, 25 bp, Artificial sequence
  SiRNA target sequence
caaaatctgcaagtgaacttattga

SEQ ID NO: 75674 - DNA, 25 bp, Artificial sequence
  SiRNA target sequence
aaaatctgcaagtgaacttattgaa

SEQ ID NO: 75675 - DNA, 25 bp, Artificial sequence
  SiRNA target sequence
aaatctgcaagtgaacttattgaag

SEQ ID NO: 75676 - DNA, 25 bp, Artificial sequence
  SiRNA target sequence
aatctgcaagtgaacttattgaagt

SEQ ID NO: 75677 - DNA, 25 bp, Artificial sequence
  SiRNA target sequence
atctgcaagtgaacttattgaagtg

SEQ ID NO: 75678 - DNA, 25 bp, Artificial sequence
  SiRNA target sequence
tctgcaagtgaacttattgaagtgt

SEQ ID NO: 75679 - DNA, 25 bp, Artificial sequence
  SiRNA target sequence
ctgcaagtgaacttattgaagtgtt

SEQ ID NO: 75680 - DNA, 25 bp, Artificial sequence
  SiRNA target sequence
tgcaagtgaacttattgaagtgttt

SEQ ID NO: 75681 - DNA, 25 bp, Artificial sequence
  SiRNA target sequence
gcaagtgaacttattgaagtgtttc

SEQ ID NO: 75682 - DNA, 25 bp, Artificial sequence
  SiRNA target sequence
caagtgaacttattgaagtgtttct

SEQ ID NO: 75683 - DNA, 25 bp, Artificial sequence
  SiRNA target sequence
aagtgaacttattgaagtgtttctt

SEQ ID NO: 75684 - DNA, 25 bp, Artificial sequence
  SiRNA target sequence
agtgaacttattgaagtgtttctta

SEQ ID NO: 75685 - DNA, 25 bp, Artificial sequence
  SiRNA target sequence
gtgaacttattgaagtgtttcttac

SEQ ID NO: 75686 - DNA, 25 bp, Artificial sequence
  SiRNA target sequence
tgaacttattgaagtgtttcttaca

SEQ ID NO: 75687 - DNA, 25 bp, Artificial sequence
  SiRNA target sequence
gaacttattgaagtgtttcttacaa

SEQ ID NO: 75688 - DNA, 25 bp, Artificial sequence
  SiRNA target sequence
aacttattgaagtgtttcttacaag

SEQ ID NO: 75689 - DNA, 25 bp, Artificial sequence
  SiRNA target sequence
acttattgaagtgtttcttacaagc

SEQ ID NO: 75690 - DNA, 25 bp, Artificial sequence
  SiRNA target sequence
cttattgaagtgtttcttacaagct

SEQ ID NO: 75691 - DNA, 25 bp, Artificial sequence
  SiRNA target sequence
ttattgaagtgtttcttacaagctt

SEQ ID NO: 75692 - DNA, 25 bp, Artificial sequence
  SiRNA target sequence
tattgaagtgtttcttacaagcttg

SEQ ID NO: 75693 - DNA, 25 bp, Artificial sequence
  SiRNA target sequence
attgaagtgtttcttacaagcttgc

SEQ ID NO: 75694 - DNA, 25 bp, Artificial sequence
  SiRNA target sequence
ttgaagtgtttcttacaagcttgct

SEQ ID NO: 75695 - DNA, 25 bp, Artificial sequence
  SiRNA target sequence
tgaagtgtttcttacaagcttgctt

SEQ ID NO: 75696 - DNA, 25 bp, Artificial sequence
  SiRNA target sequence
gaagtgtttcttacaagcttgcttc

SEQ ID NO: 75697 - DNA, 25 bp, Artificial sequence
  SiRNA target sequence
aagtgtttcttacaagcttgcttcc

SEQ ID NO: 75698 - DNA, 25 bp, Artificial sequence
  SiRNA target sequence
agtgtttcttacaagcttgcttcca

SEQ ID NO: 75699 - DNA, 25 bp, Artificial sequence
  SiRNA target sequence
gtgtttcttacaagcttgcttccaa

SEQ ID NO: 75700 - DNA, 25 bp, Artificial sequence
  SiRNA target sequence
tgtttcttacaagcttgcttccaat

SEQ ID NO: 75701 - DNA, 25 bp, Artificial sequence
  SiRNA target sequence
gtttcttacaagcttgcttccaata

SEQ ID NO: 75702 - DNA, 25 bp, Artificial sequence
  SiRNA target sequence
tttcttacaagcttgcttccaatat

SEQ ID NO: 75703 - DNA, 25 bp, Artificial sequence
  SiRNA target sequence
ttcttacaagcttgcttccaatatg

SEQ ID NO: 75704 - DNA, 25 bp, Artificial sequence
  SiRNA target sequence
tcttacaagcttgcttccaatatgc

SEQ ID NO: 75705 - DNA, 25 bp, Artificial sequence
  SiRNA target sequence
cttacaagcttgcttccaatatgcc

SEQ ID NO: 75706 - DNA, 25 bp, Artificial sequence
  SiRNA target sequence
ttacaagcttgcttccaatatgcct

SEQ ID NO: 75707 - DNA, 25 bp, Artificial sequence
  SiRNA target sequence
tacaagcttgcttccaatatgcctt

SEQ ID NO: 75708 - DNA, 25 bp, Artificial sequence
  SiRNA target sequence
acaagcttgcttccaatatgcctta

SEQ ID NO: 75709 - DNA, 25 bp, Artificial sequence
  SiRNA target sequence
caagcttgcttccaatatgccttaa

SEQ ID NO: 75710 - DNA, 25 bp, Artificial sequence
  SiRNA target sequence
aagcttgcttccaatatgccttaaa

SEQ ID NO: 75711 - DNA, 25 bp, Artificial sequence
  SiRNA target sequence
agcttgcttccaatatgccttaaac

SEQ ID NO: 75712 - DNA, 25 bp, Artificial sequence
  SiRNA target sequence
gcttgcttccaatatgccttaaact

SEQ ID NO: 75713 - DNA, 25 bp, Artificial sequence
  SiRNA target sequence
cttgcttccaatatgccttaaactt

SEQ ID NO: 75714 - DNA, 25 bp, Artificial sequence
  SiRNA target sequence
ttgcttccaatatgccttaaacttt

SEQ ID NO: 75715 - DNA, 25 bp, Artificial sequence
  SiRNA target sequence
tgcttccaatatgccttaaactttt

SEQ ID NO: 75716 - DNA, 25 bp, Artificial sequence
  SiRNA target sequence
gcttccaatatgccttaaactttta

SEQ ID NO: 75717 - DNA, 25 bp, Artificial sequence
  SiRNA target sequence
cttccaatatgccttaaacttttat

SEQ ID NO: 75718 - DNA, 25 bp, Artificial sequence
  SiRNA target sequence
ttccaatatgccttaaacttttatt

SEQ ID NO: 75719 - DNA, 25 bp, Artificial sequence
  SiRNA target sequence
tccaatatgccttaaacttttattt

SEQ ID NO: 75720 - DNA, 25 bp, Artificial sequence
  SiRNA target sequence
ccaatatgccttaaacttttatttg

SEQ ID NO: 75721 - DNA, 25 bp, Artificial sequence
  SiRNA target sequence
caatatgccttaaacttttatttgc

SEQ ID NO: 75722 - DNA, 25 bp, Artificial sequence
  SiRNA target sequence
aatatgccttaaacttttatttgcc

SEQ ID NO: 75723 - DNA, 25 bp, Artificial sequence
  SiRNA target sequence
atatgccttaaacttttatttgccc

SEQ ID NO: 75724 - DNA, 25 bp, Artificial sequence
  SiRNA target sequence
tatgccttaaacttttatttgccct

SEQ ID NO: 75725 - DNA, 25 bp, Artificial sequence
  SiRNA target sequence
atgccttaaacttttatttgccctt

SEQ ID NO: 75726 - DNA, 25 bp, Artificial sequence
  SiRNA target sequence
tgccttaaacttttatttgccctta

SEQ ID NO: 75727 - DNA, 25 bp, Artificial sequence
  SiRNA target sequence
gccttaaacttttatttgcccttat

SEQ ID NO: 75728 - DNA, 25 bp, Artificial sequence
  SiRNA target sequence
ccttaaacttttatttgcccttatt

SEQ ID NO: 75729 - DNA, 25 bp, Artificial sequence
  SiRNA target sequence
cttaaacttttatttgcccttattg

SEQ ID NO: 75730 - DNA, 25 bp, Artificial sequence
  SiRNA target sequence
ttaaacttttatttgcccttattgc

SEQ ID NO: 75731 - DNA, 25 bp, Artificial sequence
  SiRNA target sequence
taaacttttatttgcccttattgca

SEQ ID NO: 75732 - DNA, 25 bp, Artificial sequence
  SiRNA target sequence
aaacttttatttgcccttattgcag

SEQ ID NO: 75733 - DNA, 25 bp, Artificial sequence
  SiRNA target sequence
aacttttatttgcccttattgcagt

SEQ ID NO: 75734 - DNA, 25 bp, Artificial sequence
  SiRNA target sequence
acttttatttgcccttattgcagtt

SEQ ID NO: 75735 - DNA, 25 bp, Artificial sequence
  SiRNA target sequence
cttttatttgcccttattgcagtta

SEQ ID NO: 75736 - DNA, 25 bp, Artificial sequence
  SiRNA target sequence
ttttatttgcccttattgcagttat

SEQ ID NO: 75737 - DNA, 25 bp, Artificial sequence
  SiRNA target sequence
tttatttgcccttattgcagttata

SEQ ID NO: 75738 - DNA, 25 bp, Artificial sequence
  SiRNA target sequence
ttatttgcccttattgcagttataa

SEQ ID NO: 75739 - DNA, 25 bp, Artificial sequence
  SiRNA target sequence
tatttgcccttattgcagttataaa

SEQ ID NO: 75740 - DNA, 25 bp, Artificial sequence
  SiRNA target sequence
atttgcccttattgcagttataaaa

SEQ ID NO: 75741 - DNA, 25 bp, Artificial sequence
  SiRNA target sequence
tttgcccttattgcagttataaaaa

SEQ ID NO: 75742 - DNA, 25 bp, Artificial sequence
  SiRNA target sequence
ttgcccttattgcagttataaaaaa

SEQ ID NO: 75743 - DNA, 25 bp, Artificial sequence
  SiRNA target sequence
tgcccttattgcagttataaaaaat

SEQ ID NO: 75744 - DNA, 25 bp, Artificial sequence
  SiRNA target sequence
gcccttattgcagttataaaaaata

SEQ ID NO: 75745 - DNA, 25 bp, Artificial sequence
  SiRNA target sequence
cccttattgcagttataaaaaatat

SEQ ID NO: 75746 - DNA, 25 bp, Artificial sequence
  SiRNA target sequence
ccttattgcagttataaaaaatatg

SEQ ID NO: 75747 - DNA, 25 bp, Artificial sequence
  SiRNA target sequence
cttattgcagttataaaaaatatgg

SEQ ID NO: 75748 - DNA, 25 bp, Artificial sequence
  SiRNA target sequence
ttattgcagttataaaaaatatggg

SEQ ID NO: 75749 - DNA, 25 bp, Artificial sequence
  SiRNA target sequence
tattgcagttataaaaaatatggga

SEQ ID NO: 75750 - DNA, 25 bp, Artificial sequence
  SiRNA target sequence
attgcagttataaaaaatatgggag

SEQ ID NO: 75751 - DNA, 25 bp, Artificial sequence
  SiRNA target sequence
ttgcagttataaaaaatatgggagg

SEQ ID NO: 75752 - DNA, 25 bp, Artificial sequence
  SiRNA target sequence
tgcagttataaaaaatatgggaggt

SEQ ID NO: 75753 - DNA, 25 bp, Artificial sequence
  SiRNA target sequence
gcagttataaaaaatatgggaggtc

SEQ ID NO: 75754 - DNA, 25 bp, Artificial sequence
  SiRNA target sequence
cagttataaaaaatatgggaggtct

SEQ ID NO: 75755 - DNA, 25 bp, Artificial sequence
  SiRNA target sequence
agttataaaaaatatgggaggtctt

SEQ ID NO: 75756 - DNA, 25 bp, Artificial sequence
  SiRNA target sequence
gttataaaaaatatgggaggtcttg

SEQ ID NO: 75757 - DNA, 25 bp, Artificial sequence
  SiRNA target sequence
ttataaaaaatatgggaggtcttgc

SEQ ID NO: 75758 - DNA, 25 bp, Artificial sequence
  SiRNA target sequence
tataaaaaatatgggaggtcttgcg

SEQ ID NO: 75759 - DNA, 25 bp, Artificial sequence
  SiRNA target sequence
ataaaaaatatgggaggtcttgcgg

SEQ ID NO: 75760 - DNA, 25 bp, Artificial sequence
  SiRNA target sequence
taaaaaatatgggaggtcttgcggg

SEQ ID NO: 75761 - DNA, 25 bp, Artificial sequence
  SiRNA target sequence
aaaaaatatgggaggtcttgcgggc

SEQ ID NO: 75762 - DNA, 25 bp, Artificial sequence
  SiRNA target sequence
aaaaatatgggaggtcttgcgggct

SEQ ID NO: 75763 - DNA, 25 bp, Artificial sequence
  SiRNA target sequence
aaaatatgggaggtcttgcgggctt

SEQ ID NO: 75764 - DNA, 25 bp, Artificial sequence
  SiRNA target sequence
aaatatgggaggtcttgcgggcttc

SEQ ID NO: 75765 - DNA, 25 bp, Artificial sequence
  SiRNA target sequence
aatatgggaggtcttgcgggcttca

SEQ ID NO: 75766 - DNA, 25 bp, Artificial sequence
  SiRNA target sequence
atatgggaggtcttgcgggcttcat

SEQ ID NO: 75767 - DNA, 25 bp, Artificial sequence
  SiRNA target sequence
tatgggaggtcttgcgggcttcata

SEQ ID NO: 75768 - DNA, 25 bp, Artificial sequence
  SiRNA target sequence
atgggaggtcttgcgggcttcataa

SEQ ID NO: 75769 - DNA, 25 bp, Artificial sequence
  SiRNA target sequence
tgggaggtcttgcgggcttcataat

SEQ ID NO: 75770 - DNA, 25 bp, Artificial sequence
  SiRNA target sequence
gggaggtcttgcgggcttcataatg

SEQ ID NO: 75771 - DNA, 25 bp, Artificial sequence
  SiRNA target sequence
ggaggtcttgcgggcttcataatgt

SEQ ID NO: 75772 - DNA, 25 bp, Artificial sequence
  SiRNA target sequence
gaggtcttgcgggcttcataatgtt

SEQ ID NO: 75773 - DNA, 25 bp, Artificial sequence
  SiRNA target sequence
aggtcttgcgggcttcataatgttt

SEQ ID NO: 75774 - DNA, 25 bp, Artificial sequence
  SiRNA target sequence
ggtcttgcgggcttcataatgtttg

SEQ ID NO: 75775 - DNA, 25 bp, Artificial sequence
  SiRNA target sequence
gtcttgcgggcttcataatgtttgt

SEQ ID NO: 75776 - DNA, 25 bp, Artificial sequence
  SiRNA target sequence
tcttgcgggcttcataatgtttgtt

SEQ ID NO: 75777 - DNA, 25 bp, Artificial sequence
  SiRNA target sequence
cttgcgggcttcataatgtttgttt

SEQ ID NO: 75778 - DNA, 25 bp, Artificial sequence
  SiRNA target sequence
ttgcgggcttcataatgtttgtttg

SEQ ID NO: 75779 - DNA, 25 bp, Artificial sequence
  SiRNA target sequence
tgcgggcttcataatgtttgtttgt

SEQ ID NO: 75780 - DNA, 25 bp, Artificial sequence
  SiRNA target sequence
gcgggcttcataatgtttgtttgtg

SEQ ID NO: 75781 - DNA, 25 bp, Artificial sequence
  SiRNA target sequence
cgggcttcataatgtttgtttgtgt

SEQ ID NO: 75782 - DNA, 25 bp, Artificial sequence
  SiRNA target sequence
gggcttcataatgtttgtttgtgtt

SEQ ID NO: 75783 - DNA, 25 bp, Artificial sequence
  SiRNA target sequence
ggcttcataatgtttgtttgtgttt

SEQ ID NO: 75784 - DNA, 25 bp, Artificial sequence
  SiRNA target sequence
gcttcataatgtttgtttgtgtttc

SEQ ID NO: 75785 - DNA, 25 bp, Artificial sequence
  SiRNA target sequence
cttcataatgtttgtttgtgtttct

SEQ ID NO: 75786 - DNA, 25 bp, Artificial sequence
  SiRNA target sequence
ttcataatgtttgtttgtgtttctt

SEQ ID NO: 75787 - DNA, 25 bp, Artificial sequence
  SiRNA target sequence
tcataatgtttgtttgtgtttcttg

SEQ ID NO: 75788 - DNA, 25 bp, Artificial sequence
  SiRNA target sequence
cataatgtttgtttgtgtttcttgc

SEQ ID NO: 75789 - DNA, 25 bp, Artificial sequence
  SiRNA target sequence
ataatgtttgtttgtgtttcttgct

SEQ ID NO: 75790 - DNA, 25 bp, Artificial sequence
  SiRNA target sequence
taatgtttgtttgtgtttcttgcta

SEQ ID NO: 75791 - DNA, 25 bp, Artificial sequence
  SiRNA target sequence
aatgtttgtttgtgtttcttgctat

SEQ ID NO: 75792 - DNA, 25 bp, Artificial sequence
  SiRNA target sequence
atgtttgtttgtgtttcttgctatg

SEQ ID NO: 75793 - DNA, 25 bp, Artificial sequence
  SiRNA target sequence
tgtttgtttgtgtttcttgctatgc

SEQ ID NO: 75794 - DNA, 25 bp, Artificial sequence
  SiRNA target sequence
gtttgtttgtgtttcttgctatgcg

SEQ ID NO: 75795 - DNA, 25 bp, Artificial sequence
  SiRNA target sequence
tttgtttgtgtttcttgctatgcga

SEQ ID NO: 75796 - DNA, 25 bp, Artificial sequence
  SiRNA target sequence
ttgtttgtgtttcttgctatgcgac

SEQ ID NO: 75797 - DNA, 25 bp, Artificial sequence
  SiRNA target sequence
tgtttgtgtttcttgctatgcgact

SEQ ID NO: 75798 - DNA, 25 bp, Artificial sequence
  SiRNA target sequence
gtttgtgtttcttgctatgcgactg

SEQ ID NO: 75799 - DNA, 25 bp, Artificial sequence
  SiRNA target sequence
tttgtgtttcttgctatgcgactgt

SEQ ID NO: 75800 - DNA, 25 bp, Artificial sequence
  SiRNA target sequence
ttgtgtttcttgctatgcgactgtg

SEQ ID NO: 75801 - DNA, 25 bp, Artificial sequence
  SiRNA target sequence
tgtgtttcttgctatgcgactgtga

SEQ ID NO: 75802 - DNA, 25 bp, Artificial sequence
  SiRNA target sequence
gtgtttcttgctatgcgactgtgac

SEQ ID NO: 75803 - DNA, 25 bp, Artificial sequence
  SiRNA target sequence
tgtttcttgctatgcgactgtgact

SEQ ID NO: 75804 - DNA, 25 bp, Artificial sequence
  SiRNA target sequence
gtttcttgctatgcgactgtgacta

SEQ ID NO: 75805 - DNA, 25 bp, Artificial sequence
  SiRNA target sequence
tttcttgctatgcgactgtgactat

SEQ ID NO: 75806 - DNA, 25 bp, Artificial sequence
  SiRNA target sequence
ttcttgctatgcgactgtgactata

SEQ ID NO: 75807 - DNA, 25 bp, Artificial sequence
  SiRNA target sequence
tcttgctatgcgactgtgactatat

SEQ ID NO: 75808 - DNA, 25 bp, Artificial sequence
  SiRNA target sequence
cttgctatgcgactgtgactatatt

SEQ ID NO: 75809 - DNA, 25 bp, Artificial sequence
  SiRNA target sequence
ttgctatgcgactgtgactatattg

SEQ ID NO: 75810 - DNA, 25 bp, Artificial sequence
  SiRNA target sequence
tgctatgcgactgtgactatattga

SEQ ID NO: 75811 - DNA, 25 bp, Artificial sequence
  SiRNA target sequence
gctatgcgactgtgactatattgat

SEQ ID NO: 75812 - DNA, 25 bp, Artificial sequence
  SiRNA target sequence
ctatgcgactgtgactatattgata

SEQ ID NO: 75813 - DNA, 25 bp, Artificial sequence
  SiRNA target sequence
tatgcgactgtgactatattgatag

SEQ ID NO: 75814 - DNA, 25 bp, Artificial sequence
  SiRNA target sequence
atgcgactgtgactatattgatagc

SEQ ID NO: 75815 - DNA, 25 bp, Artificial sequence
  SiRNA target sequence
tgcgactgtgactatattgatagca

SEQ ID NO: 75816 - DNA, 25 bp, Artificial sequence
  SiRNA target sequence
gcgactgtgactatattgatagcac

SEQ ID NO: 75817 - DNA, 25 bp, Artificial sequence
  SiRNA target sequence
cgactgtgactatattgatagcaca

SEQ ID NO: 75818 - DNA, 25 bp, Artificial sequence
  SiRNA target sequence
gactgtgactatattgatagcacaa

SEQ ID NO: 75819 - DNA, 25 bp, Artificial sequence
  SiRNA target sequence
actgtgactatattgatagcacaat

SEQ ID NO: 75820 - DNA, 25 bp, Artificial sequence
  SiRNA target sequence
ctgtgactatattgatagcacaatg

SEQ ID NO: 75821 - DNA, 25 bp, Artificial sequence
  SiRNA target sequence
tgtgactatattgatagcacaatgg

SEQ ID NO: 75822 - DNA, 25 bp, Artificial sequence
  SiRNA target sequence
gtgactatattgatagcacaatgga

SEQ ID NO: 75823 - DNA, 25 bp, Artificial sequence
  SiRNA target sequence
tgactatattgatagcacaatggag

SEQ ID NO: 75824 - DNA, 25 bp, Artificial sequence
  SiRNA target sequence
gactatattgatagcacaatggaga

SEQ ID NO: 75825 - DNA, 25 bp, Artificial sequence
  SiRNA target sequence
actatattgatagcacaatggagat

SEQ ID NO: 75826 - DNA, 25 bp, Artificial sequence
  SiRNA target sequence
ctatattgatagcacaatggagatc

SEQ ID NO: 75827 - DNA, 25 bp, Artificial sequence
  SiRNA target sequence
tatattgatagcacaatggagatct

SEQ ID NO: 75828 - DNA, 25 bp, Artificial sequence
  SiRNA target sequence
atattgatagcacaatggagatcta

SEQ ID NO: 75829 - DNA, 25 bp, Artificial sequence
  SiRNA target sequence
tattgatagcacaatggagatctaa

SEQ ID NO: 75830 - DNA, 25 bp, Artificial sequence
  SiRNA target sequence
attgatagcacaatggagatctaat

SEQ ID NO: 75831 - DNA, 25 bp, Artificial sequence
  SiRNA target sequence
ttgatagcacaatggagatctaata

SEQ ID NO: 75832 - DNA, 25 bp, Artificial sequence
  SiRNA target sequence
tgatagcacaatggagatctaatat

SEQ ID NO: 75833 - DNA, 25 bp, Artificial sequence
  SiRNA target sequence
gatagcacaatggagatctaatatt

SEQ ID NO: 75834 - DNA, 25 bp, Artificial sequence
  SiRNA target sequence
atagcacaatggagatctaatatta

SEQ ID NO: 75835 - DNA, 25 bp, Artificial sequence
  SiRNA target sequence
tagcacaatggagatctaatattag

SEQ ID NO: 75836 - DNA, 25 bp, Artificial sequence
  SiRNA target sequence
agcacaatggagatctaatattaga

SEQ ID NO: 75837 - DNA, 25 bp, Artificial sequence
  SiRNA target sequence
gcacaatggagatctaatattagaa

SEQ ID NO: 75838 - DNA, 25 bp, Artificial sequence
  SiRNA target sequence
cacaatggagatctaatattagaag

SEQ ID NO: 75839 - DNA, 25 bp, Artificial sequence
  SiRNA target sequence
acaatggagatctaatattagaaga

SEQ ID NO: 75840 - DNA, 25 bp, Artificial sequence
  SiRNA target sequence
caatggagatctaatattagaagag

SEQ ID NO: 75841 - DNA, 25 bp, Artificial sequence
  SiRNA target sequence
aatggagatctaatattagaagaga

SEQ ID NO: 75842 - DNA, 25 bp, Artificial sequence
  SiRNA target sequence
atggagatctaatattagaagagaa

SEQ ID NO: 75843 - DNA, 25 bp, Artificial sequence
  SiRNA target sequence
tggagatctaatattagaagagaac

SEQ ID NO: 75844 - DNA, 25 bp, Artificial sequence
  SiRNA target sequence
ggagatctaatattagaagagaact

SEQ ID NO: 75845 - DNA, 25 bp, Artificial sequence
  SiRNA target sequence
gagatctaatattagaagagaactt

SEQ ID NO: 75846 - DNA, 25 bp, Artificial sequence
  SiRNA target sequence
agatctaatattagaagagaactta

SEQ ID NO: 75847 - DNA, 25 bp, Artificial sequence
  SiRNA target sequence
gatctaatattagaagagaacttaa

SEQ ID NO: 75848 - DNA, 25 bp, Artificial sequence
  SiRNA target sequence
atctaatattagaagagaacttaat

SEQ ID NO: 75849 - DNA, 25 bp, Artificial sequence
  SiRNA target sequence
tctaatattagaagagaacttaata

SEQ ID NO: 75850 - DNA, 25 bp, Artificial sequence
  SiRNA target sequence
ctaatattagaagagaacttaataa

SEQ ID NO: 75851 - DNA, 25 bp, Artificial sequence
  SiRNA target sequence
taatattagaagagaacttaataac

SEQ ID NO: 75852 - DNA, 25 bp, Artificial sequence
  SiRNA target sequence
aatattagaagagaacttaataact

SEQ ID NO: 75853 - DNA, 25 bp, Artificial sequence
  SiRNA target sequence
atattagaagagaacttaataactc

SEQ ID NO: 75854 - DNA, 25 bp, Artificial sequence
  SiRNA target sequence
tattagaagagaacttaataactct

SEQ ID NO: 75855 - DNA, 25 bp, Artificial sequence
  SiRNA target sequence
attagaagagaacttaataactctg

SEQ ID NO: 75856 - DNA, 25 bp, Artificial sequence
  SiRNA target sequence
ttagaagagaacttaataactctga

SEQ ID NO: 75857 - DNA, 25 bp, Artificial sequence
  SiRNA target sequence
tagaagagaacttaataactctgaa

SEQ ID NO: 75858 - DNA, 25 bp, Artificial sequence
  SiRNA target sequence
agaagagaacttaataactctgaaa

SEQ ID NO: 75859 - DNA, 25 bp, Artificial sequence
  SiRNA target sequence
gaagagaacttaataactctgaaaa

SEQ ID NO: 75860 - DNA, 25 bp, Artificial sequence
  SiRNA target sequence
aagagaacttaataactctgaaaat

SEQ ID NO: 75861 - DNA, 25 bp, Artificial sequence
  SiRNA target sequence
agagaacttaataactctgaaaata

SEQ ID NO: 75862 - DNA, 25 bp, Artificial sequence
  SiRNA target sequence
gagaacttaataactctgaaaatag

SEQ ID NO: 75863 - DNA, 25 bp, Artificial sequence
  SiRNA target sequence
agaacttaataactctgaaaataga

SEQ ID NO: 75864 - DNA, 25 bp, Artificial sequence
  SiRNA target sequence
gaacttaataactctgaaaatagat

SEQ ID NO: 75865 - DNA, 25 bp, Artificial sequence
  SiRNA target sequence
aacttaataactctgaaaatagatc

SEQ ID NO: 75866 - DNA, 25 bp, Artificial sequence
  SiRNA target sequence
acttaataactctgaaaatagatct

SEQ ID NO: 75867 - DNA, 25 bp, Artificial sequence
  SiRNA target sequence
cttaataactctgaaaatagatcta

SEQ ID NO: 75868 - DNA, 25 bp, Artificial sequence
  SiRNA target sequence
ttaataactctgaaaatagatctag

SEQ ID NO: 75869 - DNA, 25 bp, Artificial sequence
  SiRNA target sequence
taataactctgaaaatagatctagt

SEQ ID NO: 75870 - DNA, 25 bp, Artificial sequence
  SiRNA target sequence
aataactctgaaaatagatctagta

SEQ ID NO: 75871 - DNA, 25 bp, Artificial sequence
  SiRNA target sequence
ataactctgaaaatagatctagtaa

SEQ ID NO: 75872 - DNA, 25 bp, Artificial sequence
  SiRNA target sequence
taactctgaaaatagatctagtaat

SEQ ID NO: 75873 - DNA, 25 bp, Artificial sequence
  SiRNA target sequence
aactctgaaaatagatctagtaata

SEQ ID NO: 75874 - DNA, 25 bp, Artificial sequence
  SiRNA target sequence
actctgaaaatagatctagtaataa

SEQ ID NO: 75875 - DNA, 25 bp, Artificial sequence
  SiRNA target sequence
ctctgaaaatagatctagtaataaa

SEQ ID NO: 75876 - DNA, 25 bp, Artificial sequence
  SiRNA target sequence
tctgaaaatagatctagtaataaac

SEQ ID NO: 75877 - DNA, 25 bp, Artificial sequence
  SiRNA target sequence
ctgaaaatagatctagtaataaact

SEQ ID NO: 75878 - DNA, 25 bp, Artificial sequence
  SiRNA target sequence
tgaaaatagatctagtaataaacta

SEQ ID NO: 75879 - DNA, 25 bp, Artificial sequence
  SiRNA target sequence
gaaaatagatctagtaataaactac

SEQ ID NO: 75880 - DNA, 25 bp, Artificial sequence
  SiRNA target sequence
aaaatagatctagtaataaactaca

SEQ ID NO: 75881 - DNA, 25 bp, Artificial sequence
  SiRNA target sequence
aaatagatctagtaataaactacaa

SEQ ID NO: 75882 - DNA, 25 bp, Artificial sequence
  SiRNA target sequence
aatagatctagtaataaactacaag

SEQ ID NO: 75883 - DNA, 25 bp, Artificial sequence
  SiRNA target sequence
atagatctagtaataaactacaaga

SEQ ID NO: 75884 - DNA, 25 bp, Artificial sequence
  SiRNA target sequence
tagatctagtaataaactacaagat

SEQ ID NO: 75885 - DNA, 25 bp, Artificial sequence
  SiRNA target sequence
agatctagtaataaactacaagatg

SEQ ID NO: 75886 - DNA, 25 bp, Artificial sequence
  SiRNA target sequence
gatctagtaataaactacaagatgg

SEQ ID NO: 75887 - DNA, 25 bp, Artificial sequence
  SiRNA target sequence
atctagtaataaactacaagatgga

SEQ ID NO: 75888 - DNA, 25 bp, Artificial sequence
  SiRNA target sequence
tctagtaataaactacaagatggat

SEQ ID NO: 75889 - DNA, 25 bp, Artificial sequence
  SiRNA target sequence
ctagtaataaactacaagatggatt

SEQ ID NO: 75890 - DNA, 25 bp, Artificial sequence
  SiRNA target sequence
tagtaataaactacaagatggatta

SEQ ID NO: 75891 - DNA, 25 bp, Artificial sequence
  SiRNA target sequence
agtaataaactacaagatggattaa

SEQ ID NO: 75892 - DNA, 25 bp, Artificial sequence
  SiRNA target sequence
gtaataaactacaagatggattaaa

SEQ ID NO: 75893 - DNA, 25 bp, Artificial sequence
  SiRNA target sequence
taataaactacaagatggattaaat

SEQ ID NO: 75894 - DNA, 25 bp, Artificial sequence
  SiRNA target sequence
aataaactacaagatggattaaata

SEQ ID NO: 75895 - DNA, 25 bp, Artificial sequence
  SiRNA target sequence
ataaactacaagatggattaaataa

SEQ ID NO: 75896 - DNA, 25 bp, Artificial sequence
  SiRNA target sequence
taaactacaagatggattaaataat

SEQ ID NO: 75897 - DNA, 25 bp, Artificial sequence
  SiRNA target sequence
aaactacaagatggattaaataatc

SEQ ID NO: 75898 - DNA, 25 bp, Artificial sequence
  SiRNA target sequence
aactacaagatggattaaataatca

SEQ ID NO: 75899 - DNA, 25 bp, Artificial sequence
  SiRNA target sequence
actacaagatggattaaataatcat

SEQ ID NO: 75900 - DNA, 25 bp, Artificial sequence
  SiRNA target sequence
ctacaagatggattaaataatcatg

SEQ ID NO: 75901 - DNA, 25 bp, Artificial sequence
  SiRNA target sequence
tacaagatggattaaataatcatga

SEQ ID NO: 75902 - DNA, 25 bp, Artificial sequence
  SiRNA target sequence
acaagatggattaaataatcatgaa

SEQ ID NO: 75903 - DNA, 25 bp, Artificial sequence
  SiRNA target sequence
caagatggattaaataatcatgaaa

SEQ ID NO: 75904 - DNA, 25 bp, Artificial sequence
  SiRNA target sequence
aagatggattaaataatcatgaaac

SEQ ID NO: 75905 - DNA, 25 bp, Artificial sequence
  SiRNA target sequence
agatggattaaataatcatgaaaca

SEQ ID NO: 75906 - DNA, 25 bp, Artificial sequence
  SiRNA target sequence
gatggattaaataatcatgaaacaa

SEQ ID NO: 75907 - DNA, 25 bp, Artificial sequence
  SiRNA target sequence
atggattaaataatcatgaaacaat

SEQ ID NO: 75908 - DNA, 25 bp, Artificial sequence
  SiRNA target sequence
tggattaaataatcatgaaacaatc

SEQ ID NO: 75909 - DNA, 25 bp, Artificial sequence
  SiRNA target sequence
ggattaaataatcatgaaacaatcg

SEQ ID NO: 75910 - DNA, 25 bp, Artificial sequence
  SiRNA target sequence
gattaaataatcatgaaacaatcgt

SEQ ID NO: 75911 - DNA, 25 bp, Artificial sequence
  SiRNA target sequence
attaaataatcatgaaacaatcgtc

SEQ ID NO: 75912 - DNA, 25 bp, Artificial sequence
  SiRNA target sequence
ttaaataatcatgaaacaatcgtct

SEQ ID NO: 75913 - DNA, 25 bp, Artificial sequence
  SiRNA target sequence
taaataatcatgaaacaatcgtctc

SEQ ID NO: 75914 - DNA, 25 bp, Artificial sequence
  SiRNA target sequence
aaataatcatgaaacaatcgtctcc

SEQ ID NO: 75915 - DNA, 25 bp, Artificial sequence
  SiRNA target sequence
aataatcatgaaacaatcgtctcct

SEQ ID NO: 75916 - DNA, 25 bp, Artificial sequence
  SiRNA target sequence
ataatcatgaaacaatcgtctcctt

SEQ ID NO: 75917 - DNA, 25 bp, Artificial sequence
  SiRNA target sequence
taatcatgaaacaatcgtctccttt

SEQ ID NO: 75918 - DNA, 25 bp, Artificial sequence
  SiRNA target sequence
aatcatgaaacaatcgtctcctttg

SEQ ID NO: 75919 - DNA, 25 bp, Artificial sequence
  SiRNA target sequence
atcatgaaacaatcgtctcctttgg

SEQ ID NO: 75920 - DNA, 25 bp, Artificial sequence
  SiRNA target sequence
tcatgaaacaatcgtctcctttggg

SEQ ID NO: 75921 - DNA, 25 bp, Artificial sequence
  SiRNA target sequence
catgaaacaatcgtctcctttggga

SEQ ID NO: 75922 - DNA, 25 bp, Artificial sequence
  SiRNA target sequence
atgaaacaatcgtctcctttgggac

SEQ ID NO: 75923 - DNA, 25 bp, Artificial sequence
  SiRNA target sequence
tgaaacaatcgtctcctttgggact

SEQ ID NO: 75924 - DNA, 25 bp, Artificial sequence
  SiRNA target sequence
gaaacaatcgtctcctttgggacta

SEQ ID NO: 75925 - DNA, 25 bp, Artificial sequence
  SiRNA target sequence
aaacaatcgtctcctttgggactac

SEQ ID NO: 75926 - DNA, 25 bp, Artificial sequence
  SiRNA target sequence
aacaatcgtctcctttgggactaca

SEQ ID NO: 75927 - DNA, 25 bp, Artificial sequence
  SiRNA target sequence
acaatcgtctcctttgggactacag

SEQ ID NO: 75928 - DNA, 25 bp, Artificial sequence
  SiRNA target sequence
caatcgtctcctttgggactacaga

SEQ ID NO: 75929 - DNA, 25 bp, Artificial sequence
  SiRNA target sequence
aatcgtctcctttgggactacagat

SEQ ID NO: 75930 - DNA, 25 bp, Artificial sequence
  SiRNA target sequence
atcgtctcctttgggactacagatc

SEQ ID NO: 75931 - DNA, 25 bp, Artificial sequence
  SiRNA target sequence
tcgtctcctttgggactacagatct

SEQ ID NO: 75932 - DNA, 25 bp, Artificial sequence
  SiRNA target sequence
cgtctcctttgggactacagatctt

SEQ ID NO: 75933 - DNA, 25 bp, Artificial sequence
  SiRNA target sequence
gtctcctttgggactacagatcttg

SEQ ID NO: 75934 - DNA, 25 bp, Artificial sequence
  SiRNA target sequence
tctcctttgggactacagatcttga

SEQ ID NO: 75935 - DNA, 25 bp, Artificial sequence
  SiRNA target sequence
ctcctttgggactacagatcttgaa

SEQ ID NO: 75936 - DNA, 25 bp, Artificial sequence
  SiRNA target sequence
tcctttgggactacagatcttgaag

SEQ ID NO: 75937 - DNA, 25 bp, Artificial sequence
  SiRNA target sequence
cctttgggactacagatcttgaagt

SEQ ID NO: 75938 - DNA, 25 bp, Artificial sequence
  SiRNA target sequence
ctttgggactacagatcttgaagta

SEQ ID NO: 75939 - DNA, 25 bp, Artificial sequence
  SiRNA target sequence
tttgggactacagatcttgaagtag

SEQ ID NO: 75940 - DNA, 25 bp, Artificial sequence
  SiRNA target sequence
ttgggactacagatcttgaagtaga

SEQ ID NO: 75941 - DNA, 25 bp, Artificial sequence
  SiRNA target sequence
tgggactacagatcttgaagtagat

SEQ ID NO: 75942 - DNA, 25 bp, Artificial sequence
  SiRNA target sequence
gggactacagatcttgaagtagatg

SEQ ID NO: 75943 - DNA, 25 bp, Artificial sequence
  SiRNA target sequence
ggactacagatcttgaagtagatga

SEQ ID NO: 75944 - DNA, 25 bp, Artificial sequence
  SiRNA target sequence
gactacagatcttgaagtagatgaa

SEQ ID NO: 75945 - DNA, 25 bp, Artificial sequence
  SiRNA target sequence
actacagatcttgaagtagatgaat

SEQ ID NO: 75946 - DNA, 25 bp, Artificial sequence
  SiRNA target sequence
ctacagatcttgaagtagatgaata

SEQ ID NO: 75947 - DNA, 25 bp, Artificial sequence
  SiRNA target sequence
tacagatcttgaagtagatgaatat

SEQ ID NO: 75948 - DNA, 25 bp, Artificial sequence
  SiRNA target sequence
acagatcttgaagtagatgaatatg

SEQ ID NO: 75949 - DNA, 25 bp, Artificial sequence
  SiRNA target sequence
cagatcttgaagtagatgaatatga

SEQ ID NO: 75950 - DNA, 25 bp, Artificial sequence
  SiRNA target sequence
agatcttgaagtagatgaatatgat

SEQ ID NO: 75951 - DNA, 25 bp, Artificial sequence
  SiRNA target sequence
gatcttgaagtagatgaatatgatc

SEQ ID NO: 75952 - DNA, 25 bp, Artificial sequence
  SiRNA target sequence
atcttgaagtagatgaatatgatca

SEQ ID NO: 75953 - DNA, 25 bp, Artificial sequence
  SiRNA target sequence
tcttgaagtagatgaatatgatcag

SEQ ID NO: 75954 - DNA, 25 bp, Artificial sequence
  SiRNA target sequence
cttgaagtagatgaatatgatcagt

SEQ ID NO: 75955 - DNA, 25 bp, Artificial sequence
  SiRNA target sequence
ttgaagtagatgaatatgatcagtt

SEQ ID NO: 75956 - DNA, 25 bp, Artificial sequence
  SiRNA target sequence
tgaagtagatgaatatgatcagttt

SEQ ID NO: 75957 - DNA, 25 bp, Artificial sequence
  SiRNA target sequence
gaagtagatgaatatgatcagtttc

SEQ ID NO: 75958 - DNA, 25 bp, Artificial sequence
  SiRNA target sequence
aagtagatgaatatgatcagtttct

SEQ ID NO: 75959 - DNA, 25 bp, Artificial sequence
  SiRNA target sequence
agtagatgaatatgatcagtttctt

SEQ ID NO: 75960 - DNA, 25 bp, Artificial sequence
  SiRNA target sequence
gtagatgaatatgatcagtttctta

SEQ ID NO: 75961 - DNA, 25 bp, Artificial sequence
  SiRNA target sequence
tagatgaatatgatcagtttcttaa

SEQ ID NO: 75962 - DNA, 25 bp, Artificial sequence
  SiRNA target sequence
agatgaatatgatcagtttcttaaa

SEQ ID NO: 75963 - DNA, 25 bp, Artificial sequence
  SiRNA target sequence
gatgaatatgatcagtttcttaaaa

SEQ ID NO: 75964 - DNA, 25 bp, Artificial sequence
  SiRNA target sequence
atgaatatgatcagtttcttaaaat

SEQ ID NO: 75965 - DNA, 25 bp, Artificial sequence
  SiRNA target sequence
tgaatatgatcagtttcttaaaatt

SEQ ID NO: 75966 - DNA, 25 bp, Artificial sequence
  SiRNA target sequence
gaatatgatcagtttcttaaaatta

SEQ ID NO: 75967 - DNA, 25 bp, Artificial sequence
  SiRNA target sequence
aatatgatcagtttcttaaaattaa

SEQ ID NO: 75968 - DNA, 25 bp, Artificial sequence
  SiRNA target sequence
atatgatcagtttcttaaaattaat

SEQ ID NO: 75969 - DNA, 25 bp, Artificial sequence
  SiRNA target sequence
tatgatcagtttcttaaaattaatg

SEQ ID NO: 75970 - DNA, 25 bp, Artificial sequence
  SiRNA target sequence
atgatcagtttcttaaaattaatgc

SEQ ID NO: 75971 - DNA, 25 bp, Artificial sequence
  SiRNA target sequence
tgatcagtttcttaaaattaatgca

SEQ ID NO: 75972 - DNA, 25 bp, Artificial sequence
  SiRNA target sequence
gatcagtttcttaaaattaatgcat

SEQ ID NO: 75973 - DNA, 25 bp, Artificial sequence
  SiRNA target sequence
atcagtttcttaaaattaatgcatc

SEQ ID NO: 75974 - DNA, 25 bp, Artificial sequence
  SiRNA target sequence
tcagtttcttaaaattaatgcatct

SEQ ID NO: 75975 - DNA, 25 bp, Artificial sequence
  SiRNA target sequence
cagtttcttaaaattaatgcatcta

SEQ ID NO: 75976 - DNA, 25 bp, Artificial sequence
  SiRNA target sequence
agtttcttaaaattaatgcatctaa

SEQ ID NO: 75977 - DNA, 25 bp, Artificial sequence
  SiRNA target sequence
gtttcttaaaattaatgcatctaat

SEQ ID NO: 75978 - DNA, 25 bp, Artificial sequence
  SiRNA target sequence
tttcttaaaattaatgcatctaata

SEQ ID NO: 75979 - DNA, 25 bp, Artificial sequence
  SiRNA target sequence
ttcttaaaattaatgcatctaatag

SEQ ID NO: 75980 - DNA, 25 bp, Artificial sequence
  SiRNA target sequence
tcttaaaattaatgcatctaatagt

SEQ ID NO: 75981 - DNA, 25 bp, Artificial sequence
  SiRNA target sequence
cttaaaattaatgcatctaatagta

SEQ ID NO: 75982 - DNA, 25 bp, Artificial sequence
  SiRNA target sequence
ttaaaattaatgcatctaatagtaa

SEQ ID NO: 75983 - DNA, 25 bp, Artificial sequence
  SiRNA target sequence
taaaattaatgcatctaatagtaac

SEQ ID NO: 75984 - DNA, 25 bp, Artificial sequence
  SiRNA target sequence
aaaattaatgcatctaatagtaaca

SEQ ID NO: 75985 - DNA, 25 bp, Artificial sequence
  SiRNA target sequence
aaattaatgcatctaatagtaacag

SEQ ID NO: 75986 - DNA, 25 bp, Artificial sequence
  SiRNA target sequence
aattaatgcatctaatagtaacaga

SEQ ID NO: 75987 - DNA, 25 bp, Artificial sequence
  SiRNA target sequence
attaatgcatctaatagtaacagat

SEQ ID NO: 75988 - DNA, 25 bp, Artificial sequence
  SiRNA target sequence
ttaatgcatctaatagtaacagatt

SEQ ID NO: 75989 - DNA, 25 bp, Artificial sequence
  SiRNA target sequence
taatgcatctaatagtaacagatta

SEQ ID NO: 75990 - DNA, 25 bp, Artificial sequence
  SiRNA target sequence
aatgcatctaatagtaacagattat

SEQ ID NO: 75991 - DNA, 25 bp, Artificial sequence
  SiRNA target sequence
atgcatctaatagtaacagattatg

SEQ ID NO: 75992 - DNA, 25 bp, Artificial sequence
  SiRNA target sequence
tgcatctaatagtaacagattatgg

SEQ ID NO: 75993 - DNA, 25 bp, Artificial sequence
  SiRNA target sequence
gcatctaatagtaacagattatgga

SEQ ID NO: 75994 - DNA, 25 bp, Artificial sequence
  SiRNA target sequence
catctaatagtaacagattatggag

SEQ ID NO: 75995 - DNA, 25 bp, Artificial sequence
  SiRNA target sequence
atctaatagtaacagattatggaga

SEQ ID NO: 75996 - DNA, 25 bp, Artificial sequence
  SiRNA target sequence
tctaatagtaacagattatggagag

SEQ ID NO: 75997 - DNA, 25 bp, Artificial sequence
  SiRNA target sequence
ctaatagtaacagattatggagagc

SEQ ID NO: 75998 - DNA, 25 bp, Artificial sequence
  SiRNA target sequence
taatagtaacagattatggagagca

SEQ ID NO: 75999 - DNA, 25 bp, Artificial sequence
  SiRNA target sequence
aatagtaacagattatggagagcac

SEQ ID NO: 76000 - DNA, 25 bp, Artificial sequence
  SiRNA target sequence
atagtaacagattatggagagcact

SEQ ID NO: 76001 - DNA, 25 bp, Artificial sequence
  SiRNA target sequence
tagtaacagattatggagagcactg

SEQ ID NO: 76002 - DNA, 25 bp, Artificial sequence
  SiRNA target sequence
agtaacagattatggagagcactgt

SEQ ID NO: 76003 - DNA, 25 bp, Artificial sequence
  SiRNA target sequence
gtaacagattatggagagcactgta

SEQ ID NO: 76004 - DNA, 25 bp, Artificial sequence
  SiRNA target sequence
taacagattatggagagcactgtac

SEQ ID NO: 76005 - DNA, 25 bp, Artificial sequence
  SiRNA target sequence
aacagattatggagagcactgtaca

SEQ ID NO: 76006 - DNA, 25 bp, Artificial sequence
  SiRNA target sequence
acagattatggagagcactgtacat

SEQ ID NO: 76007 - DNA, 25 bp, Artificial sequence
  SiRNA target sequence
cagattatggagagcactgtacatt

SEQ ID NO: 76008 - DNA, 25 bp, Artificial sequence
  SiRNA target sequence
agattatggagagcactgtacattt

SEQ ID NO: 76009 - DNA, 25 bp, Artificial sequence
  SiRNA target sequence
gattatggagagcactgtacatttt

SEQ ID NO: 76010 - DNA, 25 bp, Artificial sequence
  SiRNA target sequence
attatggagagcactgtacatttta

SEQ ID NO: 76011 - DNA, 25 bp, Artificial sequence
  SiRNA target sequence
ttatggagagcactgtacattttaa

SEQ ID NO: 76012 - DNA, 25 bp, Artificial sequence
  SiRNA target sequence
tatggagagcactgtacattttaaa

SEQ ID NO: 76013 - DNA, 25 bp, Artificial sequence
  SiRNA target sequence
atggagagcactgtacattttaaat

SEQ ID NO: 76014 - DNA, 25 bp, Artificial sequence
  SiRNA target sequence
tggagagcactgtacattttaaatt

SEQ ID NO: 76015 - DNA, 25 bp, Artificial sequence
  SiRNA target sequence
ggagagcactgtacattttaaattt

SEQ ID NO: 76016 - DNA, 25 bp, Artificial sequence
  SiRNA target sequence
gagagcactgtacattttaaattta

SEQ ID NO: 76017 - DNA, 25 bp, Artificial sequence
  SiRNA target sequence
agagcactgtacattttaaatttat

SEQ ID NO: 76018 - DNA, 25 bp, Artificial sequence
  SiRNA target sequence
gagcactgtacattttaaatttatc

SEQ ID NO: 76019 - DNA, 25 bp, Artificial sequence
  SiRNA target sequence
agcactgtacattttaaatttatct

SEQ ID NO: 76020 - DNA, 25 bp, Artificial sequence
  SiRNA target sequence
gcactgtacattttaaatttatctc

SEQ ID NO: 76021 - DNA, 25 bp, Artificial sequence
  SiRNA target sequence
cactgtacattttaaatttatctca

SEQ ID NO: 76022 - DNA, 25 bp, Artificial sequence
  SiRNA target sequence
actgtacattttaaatttatctcag

SEQ ID NO: 76023 - DNA, 25 bp, Artificial sequence
  SiRNA target sequence
ctgtacattttaaatttatctcaga

SEQ ID NO: 76024 - DNA, 25 bp, Artificial sequence
  SiRNA target sequence
tgtacattttaaatttatctcagag

SEQ ID NO: 76025 - DNA, 25 bp, Artificial sequence
  SiRNA target sequence
gtacattttaaatttatctcagaga

SEQ ID NO: 76026 - DNA, 25 bp, Artificial sequence
  SiRNA target sequence
tacattttaaatttatctcagagag

SEQ ID NO: 76027 - DNA, 25 bp, Artificial sequence
  SiRNA target sequence
acattttaaatttatctcagagagc

SEQ ID NO: 76028 - DNA, 25 bp, Artificial sequence
  SiRNA target sequence
cattttaaatttatctcagagagca

SEQ ID NO: 76029 - DNA, 25 bp, Artificial sequence
  SiRNA target sequence
attttaaatttatctcagagagcaa

SEQ ID NO: 76030 - DNA, 25 bp, Artificial sequence
  SiRNA target sequence
ttttaaatttatctcagagagcaat

SEQ ID NO: 76031 - DNA, 25 bp, Artificial sequence
  SiRNA target sequence
tttaaatttatctcagagagcaatt

SEQ ID NO: 76032 - DNA, 25 bp, Artificial sequence
  SiRNA target sequence
ttaaatttatctcagagagcaattt

SEQ ID NO: 76033 - DNA, 25 bp, Artificial sequence
  SiRNA target sequence
taaatttatctcagagagcaatttt

SEQ ID NO: 76034 - DNA, 25 bp, Artificial sequence
  SiRNA target sequence
aaatttatctcagagagcaattttt

SEQ ID NO: 76035 - DNA, 25 bp, Artificial sequence
  SiRNA target sequence
aatttatctcagagagcaatttttc

SEQ ID NO: 76036 - DNA, 25 bp, Artificial sequence
  SiRNA target sequence
atttatctcagagagcaatttttct

SEQ ID NO: 76037 - DNA, 25 bp, Artificial sequence
  SiRNA target sequence
tttatctcagagagcaatttttctc

SEQ ID NO: 76038 - DNA, 25 bp, Artificial sequence
  SiRNA target sequence
ttatctcagagagcaatttttctct

SEQ ID NO: 76039 - DNA, 25 bp, Artificial sequence
  SiRNA target sequence
tatctcagagagcaatttttctctt

SEQ ID NO: 76040 - DNA, 25 bp, Artificial sequence
  SiRNA target sequence
atctcagagagcaatttttctctta

SEQ ID NO: 76041 - DNA, 25 bp, Artificial sequence
  SiRNA target sequence
tctcagagagcaatttttctcttac

SEQ ID NO: 76042 - DNA, 25 bp, Artificial sequence
  SiRNA target sequence
ctcagagagcaatttttctcttaca

SEQ ID NO: 76043 - DNA, 25 bp, Artificial sequence
  SiRNA target sequence
tcagagagcaatttttctcttacaa

SEQ ID NO: 76044 - DNA, 25 bp, Artificial sequence
  SiRNA target sequence
cagagagcaatttttctcttacaaa

SEQ ID NO: 76045 - DNA, 25 bp, Artificial sequence
  SiRNA target sequence
agagagcaatttttctcttacaaag

SEQ ID NO: 76046 - DNA, 25 bp, Artificial sequence
  SiRNA target sequence
gagagcaatttttctcttacaaagt

SEQ ID NO: 76047 - DNA, 25 bp, Artificial sequence
  SiRNA target sequence
agagcaatttttctcttacaaagtt

SEQ ID NO: 76048 - DNA, 25 bp, Artificial sequence
  SiRNA target sequence
gagcaatttttctcttacaaagttt

SEQ ID NO: 76049 - DNA, 25 bp, Artificial sequence
  SiRNA target sequence
agcaatttttctcttacaaagtttt

SEQ ID NO: 76050 - DNA, 25 bp, Artificial sequence
  SiRNA target sequence
gcaatttttctcttacaaagttttt

SEQ ID NO: 76051 - DNA, 25 bp, Artificial sequence
  SiRNA target sequence
caatttttctcttacaaagtttttt

SEQ ID NO: 76052 - DNA, 25 bp, Artificial sequence
  SiRNA target sequence
aatttttctcttacaaagttttttt

SEQ ID NO: 76053 - DNA, 25 bp, Artificial sequence
  SiRNA target sequence
atttttctcttacaaagttttttta

SEQ ID NO: 76054 - DNA, 25 bp, Artificial sequence
  SiRNA target sequence
tttttctcttacaaagtttttttat

SEQ ID NO: 76055 - DNA, 25 bp, Artificial sequence
  SiRNA target sequence
ttttctcttacaaagtttttttatt

SEQ ID NO: 76056 - DNA, 25 bp, Artificial sequence
  SiRNA target sequence
tttctcttacaaagtttttttatta

SEQ ID NO: 76057 - DNA, 25 bp, Artificial sequence
  SiRNA target sequence
ttctcttacaaagtttttttattat

SEQ ID NO: 76058 - DNA, 25 bp, Artificial sequence
  SiRNA target sequence
tctcttacaaagtttttttattatt

SEQ ID NO: 76059 - DNA, 25 bp, Artificial sequence
  SiRNA target sequence
ctcttacaaagtttttttattattt

SEQ ID NO: 76060 - DNA, 25 bp, Artificial sequence
  SiRNA target sequence
tcttacaaagtttttttattattta

SEQ ID NO: 76061 - DNA, 25 bp, Artificial sequence
  SiRNA target sequence
cttacaaagtttttttattatttat

SEQ ID NO: 76062 - DNA, 25 bp, Artificial sequence
  SiRNA target sequence
ttacaaagtttttttattatttatg

SEQ ID NO: 76063 - DNA, 25 bp, Artificial sequence
  SiRNA target sequence
tacaaagtttttttattatttatgc

SEQ ID NO: 76064 - DNA, 25 bp, Artificial sequence
  SiRNA target sequence
acaaagtttttttattatttatgca

SEQ ID NO: 76065 - DNA, 25 bp, Artificial sequence
  SiRNA target sequence
caaagtttttttattatttatgcag

SEQ ID NO: 76066 - DNA, 25 bp, Artificial sequence
  SiRNA target sequence
aaagtttttttattatttatgcagg

SEQ ID NO: 76067 - DNA, 25 bp, Artificial sequence
  SiRNA target sequence
aagtttttttattatttatgcagga

SEQ ID NO: 76068 - DNA, 25 bp, Artificial sequence
  SiRNA target sequence
agtttttttattatttatgcaggaa

SEQ ID NO: 76069 - DNA, 25 bp, Artificial sequence
  SiRNA target sequence
gtttttttattatttatgcaggaat

SEQ ID NO: 76070 - DNA, 25 bp, Artificial sequence
  SiRNA target sequence
tttttttattatttatgcaggaata

SEQ ID NO: 76071 - DNA, 25 bp, Artificial sequence
  SiRNA target sequence
ttttttattatttatgcaggaatat

SEQ ID NO: 76072 - DNA, 25 bp, Artificial sequence
  SiRNA target sequence
tttttattatttatgcaggaatatc

SEQ ID NO: 76073 - DNA, 25 bp, Artificial sequence
  SiRNA target sequence
ttttattatttatgcaggaatatca

SEQ ID NO: 76074 - DNA, 25 bp, Artificial sequence
  SiRNA target sequence
tttattatttatgcaggaatatcag

SEQ ID NO: 76075 - DNA, 25 bp, Artificial sequence
  SiRNA target sequence
ttattatttatgcaggaatatcagg

SEQ ID NO: 76076 - DNA, 25 bp, Artificial sequence
  SiRNA target sequence
tattatttatgcaggaatatcagga

SEQ ID NO: 76077 - DNA, 25 bp, Artificial sequence
  SiRNA target sequence
attatttatgcaggaatatcaggaa

SEQ ID NO: 76078 - DNA, 25 bp, Artificial sequence
  SiRNA target sequence
ttatttatgcaggaatatcaggaat

SEQ ID NO: 76079 - DNA, 25 bp, Artificial sequence
  SiRNA target sequence
tatttatgcaggaatatcaggaata

SEQ ID NO: 76080 - DNA, 25 bp, Artificial sequence
  SiRNA target sequence
atttatgcaggaatatcaggaatat

SEQ ID NO: 76081 - DNA, 25 bp, Artificial sequence
  SiRNA target sequence
tttatgcaggaatatcaggaatatt

SEQ ID NO: 76082 - DNA, 25 bp, Artificial sequence
  SiRNA target sequence
ttatgcaggaatatcaggaatatta

SEQ ID NO: 76083 - DNA, 25 bp, Artificial sequence
  SiRNA target sequence
tatgcaggaatatcaggaatattat

SEQ ID NO: 76084 - DNA, 25 bp, Artificial sequence
  SiRNA target sequence
atgcaggaatatcaggaatattatc

SEQ ID NO: 76085 - DNA, 25 bp, Artificial sequence
  SiRNA target sequence
tgcaggaatatcaggaatattatct

SEQ ID NO: 76086 - DNA, 25 bp, Artificial sequence
  SiRNA target sequence
gcaggaatatcaggaatattatctc

SEQ ID NO: 76087 - DNA, 25 bp, Artificial sequence
  SiRNA target sequence
caggaatatcaggaatattatctca

SEQ ID NO: 76088 - DNA, 25 bp, Artificial sequence
  SiRNA target sequence
aggaatatcaggaatattatctcaa

SEQ ID NO: 76089 - DNA, 25 bp, Artificial sequence
  SiRNA target sequence
ggaatatcaggaatattatctcaaa

SEQ ID NO: 76090 - DNA, 25 bp, Artificial sequence
  SiRNA target sequence
gaatatcaggaatattatctcaaaa

SEQ ID NO: 76091 - DNA, 25 bp, Artificial sequence
  SiRNA target sequence
aatatcaggaatattatctcaaaat

SEQ ID NO: 76092 - DNA, 25 bp, Artificial sequence
  SiRNA target sequence
atatcaggaatattatctcaaaata

SEQ ID NO: 76093 - DNA, 25 bp, Artificial sequence
  SiRNA target sequence
tatcaggaatattatctcaaaatat

SEQ ID NO: 76094 - DNA, 25 bp, Artificial sequence
  SiRNA target sequence
atcaggaatattatctcaaaatatg

SEQ ID NO: 76095 - DNA, 25 bp, Artificial sequence
  SiRNA target sequence
tcaggaatattatctcaaaatatgt

SEQ ID NO: 76096 - DNA, 25 bp, Artificial sequence
  SiRNA target sequence
caggaatattatctcaaaatatgtc

SEQ ID NO: 76097 - DNA, 25 bp, Artificial sequence
  SiRNA target sequence
aggaatattatctcaaaatatgtca

SEQ ID NO: 76098 - DNA, 25 bp, Artificial sequence
  SiRNA target sequence
ggaatattatctcaaaatatgtcat

SEQ ID NO: 76099 - DNA, 25 bp, Artificial sequence
  SiRNA target sequence
gaatattatctcaaaatatgtcatc

SEQ ID NO: 76100 - DNA, 25 bp, Artificial sequence
  SiRNA target sequence
aatattatctcaaaatatgtcatct

SEQ ID NO: 76101 - DNA, 25 bp, Artificial sequence
  SiRNA target sequence
atattatctcaaaatatgtcatcta

SEQ ID NO: 76102 - DNA, 25 bp, Artificial sequence
  SiRNA target sequence
tattatctcaaaatatgtcatctaa

SEQ ID NO: 76103 - DNA, 25 bp, Artificial sequence
  SiRNA target sequence
attatctcaaaatatgtcatctaac

SEQ ID NO: 76104 - DNA, 25 bp, Artificial sequence
  SiRNA target sequence
ttatctcaaaatatgtcatctaacc

SEQ ID NO: 76105 - DNA, 25 bp, Artificial sequence
  SiRNA target sequence
tatctcaaaatatgtcatctaacca

SEQ ID NO: 76106 - DNA, 25 bp, Artificial sequence
  SiRNA target sequence
atctcaaaatatgtcatctaaccaa

SEQ ID NO: 76107 - DNA, 25 bp, Artificial sequence
  SiRNA target sequence
tctcaaaatatgtcatctaaccaac

SEQ ID NO: 76108 - DNA, 25 bp, Artificial sequence
  SiRNA target sequence
ctcaaaatatgtcatctaaccaact

SEQ ID NO: 76109 - DNA, 25 bp, Artificial sequence
  SiRNA target sequence
tcaaaatatgtcatctaaccaactc

SEQ ID NO: 76110 - DNA, 25 bp, Artificial sequence
  SiRNA target sequence
caaaatatgtcatctaaccaactca

SEQ ID NO: 76111 - DNA, 25 bp, Artificial sequence
  SiRNA target sequence
aaaatatgtcatctaaccaactcat

SEQ ID NO: 76112 - DNA, 25 bp, Artificial sequence
  SiRNA target sequence
aaatatgtcatctaaccaactcatt

SEQ ID NO: 76113 - DNA, 25 bp, Artificial sequence
  SiRNA target sequence
aatatgtcatctaaccaactcattt

SEQ ID NO: 76114 - DNA, 25 bp, Artificial sequence
  SiRNA target sequence
atatgtcatctaaccaactcattta

SEQ ID NO: 76115 - DNA, 25 bp, Artificial sequence
  SiRNA target sequence
tatgtcatctaaccaactcatttat

SEQ ID NO: 76116 - DNA, 25 bp, Artificial sequence
  SiRNA target sequence
atgtcatctaaccaactcatttatt

SEQ ID NO: 76117 - DNA, 25 bp, Artificial sequence
  SiRNA target sequence
tgtcatctaaccaactcatttattt

SEQ ID NO: 76118 - DNA, 25 bp, Artificial sequence
  SiRNA target sequence
gtcatctaaccaactcatttattta

SEQ ID NO: 76119 - DNA, 25 bp, Artificial sequence
  SiRNA target sequence
tcatctaaccaactcatttatttaa

SEQ ID NO: 76120 - DNA, 25 bp, Artificial sequence
  SiRNA target sequence
catctaaccaactcatttatttaat

SEQ ID NO: 76121 - DNA, 25 bp, Artificial sequence
  SiRNA target sequence
atctaaccaactcatttatttaatg

SEQ ID NO: 76122 - DNA, 25 bp, Artificial sequence
  SiRNA target sequence
tctaaccaactcatttatttaatgt

SEQ ID NO: 76123 - DNA, 25 bp, Artificial sequence
  SiRNA target sequence
ctaaccaactcatttatttaatgtc

SEQ ID NO: 76124 - DNA, 25 bp, Artificial sequence
  SiRNA target sequence
taaccaactcatttatttaatgtcc

SEQ ID NO: 76125 - DNA, 25 bp, Artificial sequence
  SiRNA target sequence
aaccaactcatttatttaatgtcca

SEQ ID NO: 76126 - DNA, 25 bp, Artificial sequence
  SiRNA target sequence
accaactcatttatttaatgtccat

SEQ ID NO: 76127 - DNA, 25 bp, Artificial sequence
  SiRNA target sequence
ccaactcatttatttaatgtccatt

SEQ ID NO: 76128 - DNA, 25 bp, Artificial sequence
  SiRNA target sequence
caactcatttatttaatgtccatta

SEQ ID NO: 76129 - DNA, 25 bp, Artificial sequence
  SiRNA target sequence
aactcatttatttaatgtccattac

SEQ ID NO: 76130 - DNA, 25 bp, Artificial sequence
  SiRNA target sequence
actcatttatttaatgtccattaca

SEQ ID NO: 76131 - DNA, 25 bp, Artificial sequence
  SiRNA target sequence
ctcatttatttaatgtccattacat

SEQ ID NO: 76132 - DNA, 25 bp, Artificial sequence
  SiRNA target sequence
tcatttatttaatgtccattacatc

SEQ ID NO: 76133 - DNA, 25 bp, Artificial sequence
  SiRNA target sequence
catttatttaatgtccattacatct

SEQ ID NO: 76134 - DNA, 25 bp, Artificial sequence
  SiRNA target sequence
atttatttaatgtccattacatcta

SEQ ID NO: 76135 - DNA, 25 bp, Artificial sequence
  SiRNA target sequence
tttatttaatgtccattacatctac

SEQ ID NO: 76136 - DNA, 25 bp, Artificial sequence
  SiRNA target sequence
ttatttaatgtccattacatctacg

SEQ ID NO: 76137 - DNA, 25 bp, Artificial sequence
  SiRNA target sequence
tatttaatgtccattacatctacgg

SEQ ID NO: 76138 - DNA, 25 bp, Artificial sequence
  SiRNA target sequence
atttaatgtccattacatctacggt

SEQ ID NO: 76139 - DNA, 25 bp, Artificial sequence
  SiRNA target sequence
tttaatgtccattacatctacggtt

SEQ ID NO: 76140 - DNA, 25 bp, Artificial sequence
  SiRNA target sequence
ttaatgtccattacatctacggtta

SEQ ID NO: 76141 - DNA, 25 bp, Artificial sequence
  SiRNA target sequence
taatgtccattacatctacggttac

SEQ ID NO: 76142 - DNA, 25 bp, Artificial sequence
  SiRNA target sequence
aatgtccattacatctacggttact

SEQ ID NO: 76143 - DNA, 25 bp, Artificial sequence
  SiRNA target sequence
atgtccattacatctacggttacta

SEQ ID NO: 76144 - DNA, 25 bp, Artificial sequence
  SiRNA target sequence
tgtccattacatctacggttactat

SEQ ID NO: 76145 - DNA, 25 bp, Artificial sequence
  SiRNA target sequence
gtccattacatctacggttactatt

SEQ ID NO: 76146 - DNA, 25 bp, Artificial sequence
  SiRNA target sequence
tccattacatctacggttactatta

SEQ ID NO: 76147 - DNA, 25 bp, Artificial sequence
  SiRNA target sequence
ccattacatctacggttactattaa

SEQ ID NO: 76148 - DNA, 25 bp, Artificial sequence
  SiRNA target sequence
cattacatctacggttactattaat

SEQ ID NO: 76149 - DNA, 25 bp, Artificial sequence
  SiRNA target sequence
attacatctacggttactattaatt

SEQ ID NO: 76150 - DNA, 25 bp, Artificial sequence
  SiRNA target sequence
ttacatctacggttactattaattt

SEQ ID NO: 76151 - DNA, 25 bp, Artificial sequence
  SiRNA target sequence
tacatctacggttactattaattta

SEQ ID NO: 76152 - DNA, 25 bp, Artificial sequence
  SiRNA target sequence
acatctacggttactattaatttaa

SEQ ID NO: 76153 - DNA, 25 bp, Artificial sequence
  SiRNA target sequence
catctacggttactattaatttaag

SEQ ID NO: 76154 - DNA, 25 bp, Artificial sequence
  SiRNA target sequence
atctacggttactattaatttaagt

SEQ ID NO: 76155 - DNA, 25 bp, Artificial sequence
  SiRNA target sequence
tctacggttactattaatttaagta

SEQ ID NO: 76156 - DNA, 25 bp, Artificial sequence
  SiRNA target sequence
ctacggttactattaatttaagtaa

SEQ ID NO: 76157 - DNA, 25 bp, Artificial sequence
  SiRNA target sequence
tacggttactattaatttaagtaac

SEQ ID NO: 76158 - DNA, 25 bp, Artificial sequence
  SiRNA target sequence
acggttactattaatttaagtaact

SEQ ID NO: 76159 - DNA, 25 bp, Artificial sequence
  SiRNA target sequence
cggttactattaatttaagtaactt

SEQ ID NO: 76160 - DNA, 25 bp, Artificial sequence
  SiRNA target sequence
ggttactattaatttaagtaacttg

SEQ ID NO: 76161 - DNA, 25 bp, Artificial sequence
  SiRNA target sequence
gttactattaatttaagtaacttgg

SEQ ID NO: 76162 - DNA, 25 bp, Artificial sequence
  SiRNA target sequence
ttactattaatttaagtaacttggg

SEQ ID NO: 76163 - DNA, 25 bp, Artificial sequence
  SiRNA target sequence
tactattaatttaagtaacttgggt

SEQ ID NO: 76164 - DNA, 25 bp, Artificial sequence
  SiRNA target sequence
actattaatttaagtaacttgggtt

SEQ ID NO: 76165 - DNA, 25 bp, Artificial sequence
  SiRNA target sequence
ctattaatttaagtaacttgggtta

SEQ ID NO: 76166 - DNA, 25 bp, Artificial sequence
  SiRNA target sequence
tattaatttaagtaacttgggttac

SEQ ID NO: 76167 - DNA, 25 bp, Artificial sequence
  SiRNA target sequence
attaatttaagtaacttgggttact

SEQ ID NO: 76168 - DNA, 25 bp, Artificial sequence
  SiRNA target sequence
ttaatttaagtaacttgggttactt

SEQ ID NO: 76169 - DNA, 25 bp, Artificial sequence
  SiRNA target sequence
taatttaagtaacttgggttactta

SEQ ID NO: 76170 - DNA, 25 bp, Artificial sequence
  SiRNA target sequence
aatttaagtaacttgggttacttat

SEQ ID NO: 76171 - DNA, 25 bp, Artificial sequence
  SiRNA target sequence
atttaagtaacttgggttacttata

SEQ ID NO: 76172 - DNA, 25 bp, Artificial sequence
  SiRNA target sequence
tttaagtaacttgggttacttatac

SEQ ID NO: 76173 - DNA, 25 bp, Artificial sequence
  SiRNA target sequence
ttaagtaacttgggttacttataca

SEQ ID NO: 76174 - DNA, 25 bp, Artificial sequence
  SiRNA target sequence
taagtaacttgggttacttatacac

SEQ ID NO: 76175 - DNA, 25 bp, Artificial sequence
  SiRNA target sequence
aagtaacttgggttacttatacact

SEQ ID NO: 76176 - DNA, 25 bp, Artificial sequence
  SiRNA target sequence
agtaacttgggttacttatacacta

SEQ ID NO: 76177 - DNA, 25 bp, Artificial sequence
  SiRNA target sequence
gtaacttgggttacttatacactag

SEQ ID NO: 76178 - DNA, 25 bp, Artificial sequence
  SiRNA target sequence
taacttgggttacttatacactaga

SEQ ID NO: 76179 - DNA, 25 bp, Artificial sequence
  SiRNA target sequence
aacttgggttacttatacactagat

SEQ ID NO: 76180 - DNA, 25 bp, Artificial sequence
  SiRNA target sequence
acttgggttacttatacactagata

SEQ ID NO: 76181 - DNA, 25 bp, Artificial sequence
  SiRNA target sequence
cttgggttacttatacactagatat

SEQ ID NO: 76182 - DNA, 25 bp, Artificial sequence
  SiRNA target sequence
ttgggttacttatacactagatata

SEQ ID NO: 76183 - DNA, 25 bp, Artificial sequence
  SiRNA target sequence
tgggttacttatacactagatatac

SEQ ID NO: 76184 - DNA, 25 bp, Artificial sequence
  SiRNA target sequence
gggttacttatacactagatataca

SEQ ID NO: 76185 - DNA, 25 bp, Artificial sequence
  SiRNA target sequence
ggttacttatacactagatatacac

SEQ ID NO: 76186 - DNA, 25 bp, Artificial sequence
  SiRNA target sequence
gttacttatacactagatatacaca

SEQ ID NO: 76187 - DNA, 25 bp, Artificial sequence
  SiRNA target sequence
ttacttatacactagatatacacaa

SEQ ID NO: 76188 - DNA, 25 bp, Artificial sequence
  SiRNA target sequence
tacttatacactagatatacacaag

SEQ ID NO: 76189 - DNA, 25 bp, Artificial sequence
  SiRNA target sequence
acttatacactagatatacacaagc

SEQ ID NO: 76190 - DNA, 25 bp, Artificial sequence
  SiRNA target sequence
cttatacactagatatacacaagca

SEQ ID NO: 76191 - DNA, 25 bp, Artificial sequence
  SiRNA target sequence
ttatacactagatatacacaagcaa

SEQ ID NO: 76192 - DNA, 25 bp, Artificial sequence
  SiRNA target sequence
tatacactagatatacacaagcaat

SEQ ID NO: 76193 - DNA, 25 bp, Artificial sequence
  SiRNA target sequence
atacactagatatacacaagcaata

SEQ ID NO: 76194 - DNA, 25 bp, Artificial sequence
  SiRNA target sequence
tacactagatatacacaagcaataa

SEQ ID NO: 76195 - DNA, 25 bp, Artificial sequence
  SiRNA target sequence
acactagatatacacaagcaataat

SEQ ID NO: 76196 - DNA, 25 bp, Artificial sequence
  SiRNA target sequence
cactagatatacacaagcaataatt

SEQ ID NO: 76197 - DNA, 25 bp, Artificial sequence
  SiRNA target sequence
actagatatacacaagcaataatta

SEQ ID NO: 76198 - DNA, 25 bp, Artificial sequence
  SiRNA target sequence
ctagatatacacaagcaataattaa

SEQ ID NO: 76199 - DNA, 25 bp, Artificial sequence
  SiRNA target sequence
tagatatacacaagcaataattaat

SEQ ID NO: 76200 - DNA, 25 bp, Artificial sequence
  SiRNA target sequence
agatatacacaagcaataattaatg

SEQ ID NO: 76201 - DNA, 25 bp, Artificial sequence
  SiRNA target sequence
gatatacacaagcaataattaatgc

SEQ ID NO: 76202 - DNA, 25 bp, Artificial sequence
  SiRNA target sequence
atatacacaagcaataattaatgca

SEQ ID NO: 76203 - DNA, 25 bp, Artificial sequence
  SiRNA target sequence
tatacacaagcaataattaatgcaa

SEQ ID NO: 76204 - DNA, 25 bp, Artificial sequence
  SiRNA target sequence
atacacaagcaataattaatgcaag

SEQ ID NO: 76205 - DNA, 25 bp, Artificial sequence
  SiRNA target sequence
tacacaagcaataattaatgcaaga

SEQ ID NO: 76206 - DNA, 25 bp, Artificial sequence
  SiRNA target sequence
acacaagcaataattaatgcaagat

SEQ ID NO: 76207 - DNA, 25 bp, Artificial sequence
  SiRNA target sequence
cacaagcaataattaatgcaagatc

SEQ ID NO: 76208 - DNA, 25 bp, Artificial sequence
  SiRNA target sequence
acaagcaataattaatgcaagatct

SEQ ID NO: 76209 - DNA, 25 bp, Artificial sequence
  SiRNA target sequence
caagcaataattaatgcaagatcta

SEQ ID NO: 76210 - DNA, 25 bp, Artificial sequence
  SiRNA target sequence
aagcaataattaatgcaagatctac

SEQ ID NO: 76211 - DNA, 25 bp, Artificial sequence
  SiRNA target sequence
agcaataattaatgcaagatctact

SEQ ID NO: 76212 - DNA, 25 bp, Artificial sequence
  SiRNA target sequence
gcaataattaatgcaagatctactt

SEQ ID NO: 76213 - DNA, 25 bp, Artificial sequence
  SiRNA target sequence
caataattaatgcaagatctactta

SEQ ID NO: 76214 - DNA, 25 bp, Artificial sequence
  SiRNA target sequence
aataattaatgcaagatctacttat

SEQ ID NO: 76215 - DNA, 25 bp, Artificial sequence
  SiRNA target sequence
ataattaatgcaagatctacttatg

SEQ ID NO: 76216 - DNA, 25 bp, Artificial sequence
  SiRNA target sequence
taattaatgcaagatctacttatga

SEQ ID NO: 76217 - DNA, 25 bp, Artificial sequence
  SiRNA target sequence
aattaatgcaagatctacttatgat

SEQ ID NO: 76218 - DNA, 25 bp, Artificial sequence
  SiRNA target sequence
attaatgcaagatctacttatgata

SEQ ID NO: 76219 - DNA, 25 bp, Artificial sequence
  SiRNA target sequence
ttaatgcaagatctacttatgatac

SEQ ID NO: 76220 - DNA, 25 bp, Artificial sequence
  SiRNA target sequence
taatgcaagatctacttatgataca

SEQ ID NO: 76221 - DNA, 25 bp, Artificial sequence
  SiRNA target sequence
aatgcaagatctacttatgatacaa

SEQ ID NO: 76222 - DNA, 25 bp, Artificial sequence
  SiRNA target sequence
atgcaagatctacttatgatacaat

SEQ ID NO: 76223 - DNA, 25 bp, Artificial sequence
  SiRNA target sequence
tgcaagatctacttatgatacaatg

SEQ ID NO: 76224 - DNA, 25 bp, Artificial sequence
  SiRNA target sequence
gcaagatctacttatgatacaatgt

SEQ ID NO: 76225 - DNA, 25 bp, Artificial sequence
  SiRNA target sequence
caagatctacttatgatacaatgtt

SEQ ID NO: 76226 - DNA, 25 bp, Artificial sequence
  SiRNA target sequence
aagatctacttatgatacaatgtta

SEQ ID NO: 76227 - DNA, 25 bp, Artificial sequence
  SiRNA target sequence
agatctacttatgatacaatgttag

SEQ ID NO: 76228 - DNA, 25 bp, Artificial sequence
  SiRNA target sequence
gatctacttatgatacaatgttaga

SEQ ID NO: 76229 - DNA, 25 bp, Artificial sequence
  SiRNA target sequence
atctacttatgatacaatgttagat

SEQ ID NO: 76230 - DNA, 25 bp, Artificial sequence
  SiRNA target sequence
tctacttatgatacaatgttagata

SEQ ID NO: 76231 - DNA, 25 bp, Artificial sequence
  SiRNA target sequence
ctacttatgatacaatgttagatat

SEQ ID NO: 76232 - DNA, 25 bp, Artificial sequence
  SiRNA target sequence
tacttatgatacaatgttagatata

SEQ ID NO: 76233 - DNA, 25 bp, Artificial sequence
  SiRNA target sequence
acttatgatacaatgttagatataa

SEQ ID NO: 76234 - DNA, 25 bp, Artificial sequence
  SiRNA target sequence
cttatgatacaatgttagatataaa

SEQ ID NO: 76235 - DNA, 25 bp, Artificial sequence
  SiRNA target sequence
ttatgatacaatgttagatataaaa

SEQ ID NO: 76236 - DNA, 25 bp, Artificial sequence
  SiRNA target sequence
tatgatacaatgttagatataaaaa

SEQ ID NO: 76237 - DNA, 25 bp, Artificial sequence
  SiRNA target sequence
atgatacaatgttagatataaaaaa

SEQ ID NO: 76238 - DNA, 25 bp, Artificial sequence
  SiRNA target sequence
tgatacaatgttagatataaaaaaa

SEQ ID NO: 76239 - DNA, 25 bp, Artificial sequence
  SiRNA target sequence
gatacaatgttagatataaaaaaag

SEQ ID NO: 76240 - DNA, 25 bp, Artificial sequence
  SiRNA target sequence
atacaatgttagatataaaaaaaga

SEQ ID NO: 76241 - DNA, 25 bp, Artificial sequence
  SiRNA target sequence
tacaatgttagatataaaaaaagag

SEQ ID NO: 76242 - DNA, 25 bp, Artificial sequence
  SiRNA target sequence
acaatgttagatataaaaaaagaga

SEQ ID NO: 76243 - DNA, 25 bp, Artificial sequence
  SiRNA target sequence
caatgttagatataaaaaaagagaa

SEQ ID NO: 76244 - DNA, 25 bp, Artificial sequence
  SiRNA target sequence
aatgttagatataaaaaaagagaat

SEQ ID NO: 76245 - DNA, 25 bp, Artificial sequence
  SiRNA target sequence
atgttagatataaaaaaagagaata

SEQ ID NO: 76246 - DNA, 25 bp, Artificial sequence
  SiRNA target sequence
tgttagatataaaaaaagagaataa

SEQ ID NO: 76247 - DNA, 25 bp, Artificial sequence
  SiRNA target sequence
gttagatataaaaaaagagaataat

SEQ ID NO: 76248 - DNA, 25 bp, Artificial sequence
  SiRNA target sequence
ttagatataaaaaaagagaataata

SEQ ID NO: 76249 - DNA, 25 bp, Artificial sequence
  SiRNA target sequence
tagatataaaaaaagagaataataa

SEQ ID NO: 76250 - DNA, 25 bp, Artificial sequence
  SiRNA target sequence
agatataaaaaaagagaataataag

SEQ ID NO: 76251 - DNA, 25 bp, Artificial sequence
  SiRNA target sequence
gatataaaaaaagagaataataagt

SEQ ID NO: 76252 - DNA, 25 bp, Artificial sequence
  SiRNA target sequence
atataaaaaaagagaataataagtt

SEQ ID NO: 76253 - DNA, 25 bp, Artificial sequence
  SiRNA target sequence
tataaaaaaagagaataataagttt

SEQ ID NO: 76254 - DNA, 25 bp, Artificial sequence
  SiRNA target sequence
ataaaaaaagagaataataagttta

SEQ ID NO: 76255 - DNA, 25 bp, Artificial sequence
  SiRNA target sequence
taaaaaaagagaataataagtttaa

SEQ ID NO: 76256 - DNA, 25 bp, Artificial sequence
  SiRNA target sequence
aaaaaaagagaataataagtttaag

SEQ ID NO: 76257 - DNA, 25 bp, Artificial sequence
  SiRNA target sequence
aaaaaagagaataataagtttaaga

SEQ ID NO: 76258 - DNA, 25 bp, Artificial sequence
  SiRNA target sequence
aaaaagagaataataagtttaagat

SEQ ID NO: 76259 - DNA, 25 bp, Artificial sequence
  SiRNA target sequence
aaaagagaataataagtttaagatt

SEQ ID NO: 76260 - DNA, 25 bp, Artificial sequence
  SiRNA target sequence
aaagagaataataagtttaagatta

SEQ ID NO: 76261 - DNA, 25 bp, Artificial sequence
  SiRNA target sequence
aagagaataataagtttaagattac

SEQ ID NO: 76262 - DNA, 25 bp, Artificial sequence
  SiRNA target sequence
agagaataataagtttaagattaca

SEQ ID NO: 76263 - DNA, 25 bp, Artificial sequence
  SiRNA target sequence
gagaataataagtttaagattacag

SEQ ID NO: 76264 - DNA, 25 bp, Artificial sequence
  SiRNA target sequence
agaataataagtttaagattacaga

SEQ ID NO: 76265 - DNA, 25 bp, Artificial sequence
  SiRNA target sequence
gaataataagtttaagattacagaa

SEQ ID NO: 76266 - DNA, 25 bp, Artificial sequence
  SiRNA target sequence
aataataagtttaagattacagaat

SEQ ID NO: 76267 - DNA, 25 bp, Artificial sequence
  SiRNA target sequence
ataataagtttaagattacagaatt

SEQ ID NO: 76268 - DNA, 25 bp, Artificial sequence
  SiRNA target sequence
taataagtttaagattacagaattt

SEQ ID NO: 76269 - DNA, 25 bp, Artificial sequence
  SiRNA target sequence
aataagtttaagattacagaattta

SEQ ID NO: 76270 - DNA, 25 bp, Artificial sequence
  SiRNA target sequence
ataagtttaagattacagaatttaa

SEQ ID NO: 76271 - DNA, 25 bp, Artificial sequence
  SiRNA target sequence
taagtttaagattacagaatttaaa

SEQ ID NO: 76272 - DNA, 25 bp, Artificial sequence
  SiRNA target sequence
aagtttaagattacagaatttaaag

SEQ ID NO: 76273 - DNA, 25 bp, Artificial sequence
  SiRNA target sequence
agtttaagattacagaatttaaaga

SEQ ID NO: 76274 - DNA, 25 bp, Artificial sequence
  SiRNA target sequence
gtttaagattacagaatttaaagaa

SEQ ID NO: 76275 - DNA, 25 bp, Artificial sequence
  SiRNA target sequence
tttaagattacagaatttaaagaaa

SEQ ID NO: 76276 - DNA, 25 bp, Artificial sequence
  SiRNA target sequence
ttaagattacagaatttaaagaaag

SEQ ID NO: 76277 - DNA, 25 bp, Artificial sequence
  SiRNA target sequence
taagattacagaatttaaagaaagt

SEQ ID NO: 76278 - DNA, 25 bp, Artificial sequence
  SiRNA target sequence
aagattacagaatttaaagaaagta

SEQ ID NO: 76279 - DNA, 25 bp, Artificial sequence
  SiRNA target sequence
agattacagaatttaaagaaagtat

SEQ ID NO: 76280 - DNA, 25 bp, Artificial sequence
  SiRNA target sequence
gattacagaatttaaagaaagtatt

SEQ ID NO: 76281 - DNA, 25 bp, Artificial sequence
  SiRNA target sequence
attacagaatttaaagaaagtatta

SEQ ID NO: 76282 - DNA, 25 bp, Artificial sequence
  SiRNA target sequence
ttacagaatttaaagaaagtattaa

SEQ ID NO: 76283 - DNA, 25 bp, Artificial sequence
  SiRNA target sequence
tacagaatttaaagaaagtattaag

SEQ ID NO: 76284 - DNA, 25 bp, Artificial sequence
  SiRNA target sequence
acagaatttaaagaaagtattaagt

SEQ ID NO: 76285 - DNA, 25 bp, Artificial sequence
  SiRNA target sequence
cagaatttaaagaaagtattaagtt

SEQ ID NO: 76286 - DNA, 25 bp, Artificial sequence
  SiRNA target sequence
agaatttaaagaaagtattaagttt

SEQ ID NO: 76287 - DNA, 25 bp, Artificial sequence
  SiRNA target sequence
gaatttaaagaaagtattaagttta

SEQ ID NO: 76288 - DNA, 25 bp, Artificial sequence
  SiRNA target sequence
aatttaaagaaagtattaagtttaa

SEQ ID NO: 76289 - DNA, 25 bp, Artificial sequence
  SiRNA target sequence
atttaaagaaagtattaagtttaat

SEQ ID NO: 76290 - DNA, 25 bp, Artificial sequence
  SiRNA target sequence
tttaaagaaagtattaagtttaata

SEQ ID NO: 76291 - DNA, 25 bp, Artificial sequence
  SiRNA target sequence
ttaaagaaagtattaagtttaataa

SEQ ID NO: 76292 - DNA, 25 bp, Artificial sequence
  SiRNA target sequence
taaagaaagtattaagtttaataat

SEQ ID NO: 76293 - DNA, 25 bp, Artificial sequence
  SiRNA target sequence
aaagaaagtattaagtttaataatt

SEQ ID NO: 76294 - DNA, 25 bp, Artificial sequence
  SiRNA target sequence
aagaaagtattaagtttaataattt

SEQ ID NO: 76295 - DNA, 25 bp, Artificial sequence
  SiRNA target sequence
agaaagtattaagtttaataatttg

SEQ ID NO: 76296 - DNA, 25 bp, Artificial sequence
  SiRNA target sequence
gaaagtattaagtttaataatttgt

SEQ ID NO: 76297 - DNA, 25 bp, Artificial sequence
  SiRNA target sequence
aaagtattaagtttaataatttgtc

SEQ ID NO: 76298 - DNA, 25 bp, Artificial sequence
  SiRNA target sequence
aagtattaagtttaataatttgtca

SEQ ID NO: 76299 - DNA, 25 bp, Artificial sequence
  SiRNA target sequence
agtattaagtttaataatttgtcat

SEQ ID NO: 76300 - DNA, 25 bp, Artificial sequence
  SiRNA target sequence
gtattaagtttaataatttgtcatt

SEQ ID NO: 76301 - DNA, 25 bp, Artificial sequence
  SiRNA target sequence
tattaagtttaataatttgtcattt

SEQ ID NO: 76302 - DNA, 25 bp, Artificial sequence
  SiRNA target sequence
attaagtttaataatttgtcatttg

SEQ ID NO: 76303 - DNA, 25 bp, Artificial sequence
  SiRNA target sequence
ttaagtttaataatttgtcatttgg

SEQ ID NO: 76304 - DNA, 25 bp, Artificial sequence
  SiRNA target sequence
taagtttaataatttgtcatttggt

SEQ ID NO: 76305 - DNA, 25 bp, Artificial sequence
  SiRNA target sequence
aagtttaataatttgtcatttggtt

SEQ ID NO: 76306 - DNA, 25 bp, Artificial sequence
  SiRNA target sequence
agtttaataatttgtcatttggtta

SEQ ID NO: 76307 - DNA, 25 bp, Artificial sequence
  SiRNA target sequence
gtttaataatttgtcatttggttat

SEQ ID NO: 76308 - DNA, 25 bp, Artificial sequence
  SiRNA target sequence
tttaataatttgtcatttggttatg

SEQ ID NO: 76309 - DNA, 25 bp, Artificial sequence
  SiRNA target sequence
ttaataatttgtcatttggttatga

SEQ ID NO: 76310 - DNA, 25 bp, Artificial sequence
  SiRNA target sequence
taataatttgtcatttggttatgaa

SEQ ID NO: 76311 - DNA, 25 bp, Artificial sequence
  SiRNA target sequence
aataatttgtcatttggttatgaaa

SEQ ID NO: 76312 - DNA, 25 bp, Artificial sequence
  SiRNA target sequence
ataatttgtcatttggttatgaaag

SEQ ID NO: 76313 - DNA, 25 bp, Artificial sequence
  SiRNA target sequence
taatttgtcatttggttatgaaagt

SEQ ID NO: 76314 - DNA, 25 bp, Artificial sequence
  SiRNA target sequence
aatttgtcatttggttatgaaagta

SEQ ID NO: 76315 - DNA, 25 bp, Artificial sequence
  SiRNA target sequence
atttgtcatttggttatgaaagtag

SEQ ID NO: 76316 - DNA, 25 bp, Artificial sequence
  SiRNA target sequence
tttgtcatttggttatgaaagtaga

SEQ ID NO: 76317 - DNA, 25 bp, Artificial sequence
  SiRNA target sequence
ttgtcatttggttatgaaagtagac

SEQ ID NO: 76318 - DNA, 25 bp, Artificial sequence
  SiRNA target sequence
tgtcatttggttatgaaagtagaca

SEQ ID NO: 76319 - DNA, 25 bp, Artificial sequence
  SiRNA target sequence
gtcatttggttatgaaagtagacaa

SEQ ID NO: 76320 - DNA, 25 bp, Artificial sequence
  SiRNA target sequence
tcatttggttatgaaagtagacaaa

SEQ ID NO: 76321 - DNA, 25 bp, Artificial sequence
  SiRNA target sequence
catttggttatgaaagtagacaaat

SEQ ID NO: 76322 - DNA, 25 bp, Artificial sequence
  SiRNA target sequence
atttggttatgaaagtagacaaatt

SEQ ID NO: 76323 - DNA, 25 bp, Artificial sequence
  SiRNA target sequence
tttggttatgaaagtagacaaattt

SEQ ID NO: 76324 - DNA, 25 bp, Artificial sequence
  SiRNA target sequence
ttggttatgaaagtagacaaatttt

SEQ ID NO: 76325 - DNA, 25 bp, Artificial sequence
  SiRNA target sequence
tggttatgaaagtagacaaattttt

SEQ ID NO: 76326 - DNA, 25 bp, Artificial sequence
  SiRNA target sequence
ggttatgaaagtagacaaattttta

SEQ ID NO: 76327 - DNA, 25 bp, Artificial sequence
  SiRNA target sequence
gttatgaaagtagacaaatttttaa

SEQ ID NO: 76328 - DNA, 25 bp, Artificial sequence
  SiRNA target sequence
ttatgaaagtagacaaatttttaat

SEQ ID NO: 76329 - DNA, 25 bp, Artificial sequence
  SiRNA target sequence
tatgaaagtagacaaatttttaata

SEQ ID NO: 76330 - DNA, 25 bp, Artificial sequence
  SiRNA target sequence
atgaaagtagacaaatttttaataa

SEQ ID NO: 76331 - DNA, 25 bp, Artificial sequence
  SiRNA target sequence
tgaaagtagacaaatttttaataaa

SEQ ID NO: 76332 - DNA, 25 bp, Artificial sequence
  SiRNA target sequence
gaaagtagacaaatttttaataaaa

SEQ ID NO: 76333 - DNA, 25 bp, Artificial sequence
  SiRNA target sequence
aaagtagacaaatttttaataaaat

SEQ ID NO: 76334 - DNA, 25 bp, Artificial sequence
  SiRNA target sequence
aagtagacaaatttttaataaaata

SEQ ID NO: 76335 - DNA, 25 bp, Artificial sequence
  SiRNA target sequence
agtagacaaatttttaataaaataa

SEQ ID NO: 76336 - DNA, 25 bp, Artificial sequence
  SiRNA target sequence
gtagacaaatttttaataaaataaa

SEQ ID NO: 76337 - DNA, 25 bp, Artificial sequence
  SiRNA target sequence
tagacaaatttttaataaaataaat

SEQ ID NO: 76338 - DNA, 25 bp, Artificial sequence
  SiRNA target sequence
agacaaatttttaataaaataaatc

SEQ ID NO: 76339 - DNA, 25 bp, Artificial sequence
  SiRNA target sequence
gacaaatttttaataaaataaatct

SEQ ID NO: 76340 - DNA, 25 bp, Artificial sequence
  SiRNA target sequence
acaaatttttaataaaataaatcta

SEQ ID NO: 76341 - DNA, 25 bp, Artificial sequence
  SiRNA target sequence
caaatttttaataaaataaatctag

SEQ ID NO: 76342 - DNA, 25 bp, Artificial sequence
  SiRNA target sequence
aaatttttaataaaataaatctaga

SEQ ID NO: 76343 - DNA, 25 bp, Artificial sequence
  SiRNA target sequence
aatttttaataaaataaatctagaa

SEQ ID NO: 76344 - DNA, 25 bp, Artificial sequence
  SiRNA target sequence
atttttaataaaataaatctagaaa

SEQ ID NO: 76345 - DNA, 25 bp, Artificial sequence
  SiRNA target sequence
tttttaataaaataaatctagaaat

SEQ ID NO: 76346 - DNA, 25 bp, Artificial sequence
  SiRNA target sequence
ttttaataaaataaatctagaaata

SEQ ID NO: 76347 - DNA, 25 bp, Artificial sequence
  SiRNA target sequence
tttaataaaataaatctagaaatat

SEQ ID NO: 76348 - DNA, 25 bp, Artificial sequence
  SiRNA target sequence
ttaataaaataaatctagaaatata

SEQ ID NO: 76349 - DNA, 25 bp, Artificial sequence
  SiRNA target sequence
taataaaataaatctagaaatatac

SEQ ID NO: 76350 - DNA, 25 bp, Artificial sequence
  SiRNA target sequence
aataaaataaatctagaaatataca

SEQ ID NO: 76351 - DNA, 25 bp, Artificial sequence
  SiRNA target sequence
ataaaataaatctagaaatatacaa

SEQ ID NO: 76352 - DNA, 25 bp, Artificial sequence
  SiRNA target sequence
taaaataaatctagaaatatacaaa

SEQ ID NO: 76353 - DNA, 25 bp, Artificial sequence
  SiRNA target sequence
aaaataaatctagaaatatacaaag

SEQ ID NO: 76354 - DNA, 25 bp, Artificial sequence
  SiRNA target sequence
aaataaatctagaaatatacaaagg

SEQ ID NO: 76355 - DNA, 25 bp, Artificial sequence
  SiRNA target sequence
aataaatctagaaatatacaaagga

SEQ ID NO: 76356 - DNA, 25 bp, Artificial sequence
  SiRNA target sequence
ataaatctagaaatatacaaaggag

SEQ ID NO: 76357 - DNA, 25 bp, Artificial sequence
  SiRNA target sequence
taaatctagaaatatacaaaggaga

SEQ ID NO: 76358 - DNA, 25 bp, Artificial sequence
  SiRNA target sequence
aaatctagaaatatacaaaggagaa

SEQ ID NO: 76359 - DNA, 25 bp, Artificial sequence
  SiRNA target sequence
aatctagaaatatacaaaggagaaa

SEQ ID NO: 76360 - DNA, 25 bp, Artificial sequence
  SiRNA target sequence
atctagaaatatacaaaggagaaaa

SEQ ID NO: 76361 - DNA, 25 bp, Artificial sequence
  SiRNA target sequence
tctagaaatatacaaaggagaaaaa

SEQ ID NO: 76362 - DNA, 25 bp, Artificial sequence
  SiRNA target sequence
ctagaaatatacaaaggagaaaaag

SEQ ID NO: 76363 - DNA, 25 bp, Artificial sequence
  SiRNA target sequence
tagaaatatacaaaggagaaaaagt

SEQ ID NO: 76364 - DNA, 25 bp, Artificial sequence
  SiRNA target sequence
agaaatatacaaaggagaaaaagta

SEQ ID NO: 76365 - DNA, 25 bp, Artificial sequence
  SiRNA target sequence
gaaatatacaaaggagaaaaagtag

SEQ ID NO: 76366 - DNA, 25 bp, Artificial sequence
  SiRNA target sequence
aaatatacaaaggagaaaaagtagc

SEQ ID NO: 76367 - DNA, 25 bp, Artificial sequence
  SiRNA target sequence
aatatacaaaggagaaaaagtagca

SEQ ID NO: 76368 - DNA, 25 bp, Artificial sequence
  SiRNA target sequence
atatacaaaggagaaaaagtagcaa

SEQ ID NO: 76369 - DNA, 25 bp, Artificial sequence
  SiRNA target sequence
tatacaaaggagaaaaagtagcaat

SEQ ID NO: 76370 - DNA, 25 bp, Artificial sequence
  SiRNA target sequence
atacaaaggagaaaaagtagcaatt

SEQ ID NO: 76371 - DNA, 25 bp, Artificial sequence
  SiRNA target sequence
tacaaaggagaaaaagtagcaatta

SEQ ID NO: 76372 - DNA, 25 bp, Artificial sequence
  SiRNA target sequence
acaaaggagaaaaagtagcaattat

SEQ ID NO: 76373 - DNA, 25 bp, Artificial sequence
  SiRNA target sequence
caaaggagaaaaagtagcaattata

SEQ ID NO: 76374 - DNA, 25 bp, Artificial sequence
  SiRNA target sequence
aaaggagaaaaagtagcaattatag

SEQ ID NO: 76375 - DNA, 25 bp, Artificial sequence
  SiRNA target sequence
aaggagaaaaagtagcaattatagg

SEQ ID NO: 76376 - DNA, 25 bp, Artificial sequence
  SiRNA target sequence
aggagaaaaagtagcaattataggt

SEQ ID NO: 76377 - DNA, 25 bp, Artificial sequence
  SiRNA target sequence
ggagaaaaagtagcaattataggta

SEQ ID NO: 76378 - DNA, 25 bp, Artificial sequence
  SiRNA target sequence
gagaaaaagtagcaattataggtaa

SEQ ID NO: 76379 - DNA, 25 bp, Artificial sequence
  SiRNA target sequence
agaaaaagtagcaattataggtaaa

SEQ ID NO: 76380 - DNA, 25 bp, Artificial sequence
  SiRNA target sequence
gaaaaagtagcaattataggtaaaa

SEQ ID NO: 76381 - DNA, 25 bp, Artificial sequence
  SiRNA target sequence
aaaaagtagcaattataggtaaaaa

SEQ ID NO: 76382 - DNA, 25 bp, Artificial sequence
  SiRNA target sequence
aaaagtagcaattataggtaaaaat

SEQ ID NO: 76383 - DNA, 25 bp, Artificial sequence
  SiRNA target sequence
aaagtagcaattataggtaaaaatg

SEQ ID NO: 76384 - DNA, 25 bp, Artificial sequence
  SiRNA target sequence
aagtagcaattataggtaaaaatgg

SEQ ID NO: 76385 - DNA, 25 bp, Artificial sequence
  SiRNA target sequence
agtagcaattataggtaaaaatggt

SEQ ID NO: 76386 - DNA, 25 bp, Artificial sequence
  SiRNA target sequence
gtagcaattataggtaaaaatggta

SEQ ID NO: 76387 - DNA, 25 bp, Artificial sequence
  SiRNA target sequence
tagcaattataggtaaaaatggtag

SEQ ID NO: 76388 - DNA, 25 bp, Artificial sequence
  SiRNA target sequence
agcaattataggtaaaaatggtagt

SEQ ID NO: 76389 - DNA, 25 bp, Artificial sequence
  SiRNA target sequence
gcaattataggtaaaaatggtagtg

SEQ ID NO: 76390 - DNA, 25 bp, Artificial sequence
  SiRNA target sequence
caattataggtaaaaatggtagtgg

SEQ ID NO: 76391 - DNA, 25 bp, Artificial sequence
  SiRNA target sequence
aattataggtaaaaatggtagtggt

SEQ ID NO: 76392 - DNA, 25 bp, Artificial sequence
  SiRNA target sequence
attataggtaaaaatggtagtggta

SEQ ID NO: 76393 - DNA, 25 bp, Artificial sequence
  SiRNA target sequence
ttataggtaaaaatggtagtggtaa

SEQ ID NO: 76394 - DNA, 25 bp, Artificial sequence
  SiRNA target sequence
tataggtaaaaatggtagtggtaaa

SEQ ID NO: 76395 - DNA, 25 bp, Artificial sequence
  SiRNA target sequence
ataggtaaaaatggtagtggtaaat

SEQ ID NO: 76396 - DNA, 25 bp, Artificial sequence
  SiRNA target sequence
taggtaaaaatggtagtggtaaatc

SEQ ID NO: 76397 - DNA, 25 bp, Artificial sequence
  SiRNA target sequence
aggtaaaaatggtagtggtaaatca

SEQ ID NO: 76398 - DNA, 25 bp, Artificial sequence
  SiRNA target sequence
ggtaaaaatggtagtggtaaatcaa

SEQ ID NO: 76399 - DNA, 25 bp, Artificial sequence
  SiRNA target sequence
gtaaaaatggtagtggtaaatcaac

SEQ ID NO: 76400 - DNA, 25 bp, Artificial sequence
  SiRNA target sequence
taaaaatggtagtggtaaatcaaca

SEQ ID NO: 76401 - DNA, 25 bp, Artificial sequence
  SiRNA target sequence
aaaaatggtagtggtaaatcaacat

SEQ ID NO: 76402 - DNA, 25 bp, Artificial sequence
  SiRNA target sequence
aaaatggtagtggtaaatcaacatt

SEQ ID NO: 76403 - DNA, 25 bp, Artificial sequence
  SiRNA target sequence
aaatggtagtggtaaatcaacatta

SEQ ID NO: 76404 - DNA, 25 bp, Artificial sequence
  SiRNA target sequence
aatggtagtggtaaatcaacattac

SEQ ID NO: 76405 - DNA, 25 bp, Artificial sequence
  SiRNA target sequence
atggtagtggtaaatcaacattact

SEQ ID NO: 76406 - DNA, 25 bp, Artificial sequence
  SiRNA target sequence
tggtagtggtaaatcaacattacta

SEQ ID NO: 76407 - DNA, 25 bp, Artificial sequence
  SiRNA target sequence
ggtagtggtaaatcaacattactaa

SEQ ID NO: 76408 - DNA, 25 bp, Artificial sequence
  SiRNA target sequence
gtagtggtaaatcaacattactaaa

SEQ ID NO: 76409 - DNA, 25 bp, Artificial sequence
  SiRNA target sequence
tagtggtaaatcaacattactaaaa

SEQ ID NO: 76410 - DNA, 25 bp, Artificial sequence
  SiRNA target sequence
agtggtaaatcaacattactaaaac

SEQ ID NO: 76411 - DNA, 25 bp, Artificial sequence
  SiRNA target sequence
gtggtaaatcaacattactaaaact

SEQ ID NO: 76412 - DNA, 25 bp, Artificial sequence
  SiRNA target sequence
tggtaaatcaacattactaaaacta

SEQ ID NO: 76413 - DNA, 25 bp, Artificial sequence
  SiRNA target sequence
ggtaaatcaacattactaaaactac

SEQ ID NO: 76414 - DNA, 25 bp, Artificial sequence
  SiRNA target sequence
gtaaatcaacattactaaaactact

SEQ ID NO: 76415 - DNA, 25 bp, Artificial sequence
  SiRNA target sequence
taaatcaacattactaaaactactg

SEQ ID NO: 76416 - DNA, 25 bp, Artificial sequence
  SiRNA target sequence
aaatcaacattactaaaactactgc

SEQ ID NO: 76417 - DNA, 25 bp, Artificial sequence
  SiRNA target sequence
aatcaacattactaaaactactgct

SEQ ID NO: 76418 - DNA, 25 bp, Artificial sequence
  SiRNA target sequence
atcaacattactaaaactactgctt

SEQ ID NO: 76419 - DNA, 25 bp, Artificial sequence
  SiRNA target sequence
tcaacattactaaaactactgctta

SEQ ID NO: 76420 - DNA, 25 bp, Artificial sequence
  SiRNA target sequence
caacattactaaaactactgcttaa

SEQ ID NO: 76421 - DNA, 25 bp, Artificial sequence
  SiRNA target sequence
aacattactaaaactactgcttaaa

SEQ ID NO: 76422 - DNA, 25 bp, Artificial sequence
  SiRNA target sequence
acattactaaaactactgcttaaat

SEQ ID NO: 76423 - DNA, 25 bp, Artificial sequence
  SiRNA target sequence
cattactaaaactactgcttaaatt

SEQ ID NO: 76424 - DNA, 25 bp, Artificial sequence
  SiRNA target sequence
attactaaaactactgcttaaattt

SEQ ID NO: 76425 - DNA, 25 bp, Artificial sequence
  SiRNA target sequence
ttactaaaactactgcttaaatttg

SEQ ID NO: 76426 - DNA, 25 bp, Artificial sequence
  SiRNA target sequence
tactaaaactactgcttaaatttga

SEQ ID NO: 76427 - DNA, 25 bp, Artificial sequence
  SiRNA target sequence
actaaaactactgcttaaatttgat

SEQ ID NO: 76428 - DNA, 25 bp, Artificial sequence
  SiRNA target sequence
ctaaaactactgcttaaatttgatg

SEQ ID NO: 76429 - DNA, 25 bp, Artificial sequence
  SiRNA target sequence
taaaactactgcttaaatttgatga

SEQ ID NO: 76430 - DNA, 25 bp, Artificial sequence
  SiRNA target sequence
aaaactactgcttaaatttgatgaa

SEQ ID NO: 76431 - DNA, 25 bp, Artificial sequence
  SiRNA target sequence
aaactactgcttaaatttgatgaag

SEQ ID NO: 76432 - DNA, 25 bp, Artificial sequence
  SiRNA target sequence
aactactgcttaaatttgatgaaga

SEQ ID NO: 76433 - DNA, 25 bp, Artificial sequence
  SiRNA target sequence
actactgcttaaatttgatgaagat

SEQ ID NO: 76434 - DNA, 25 bp, Artificial sequence
  SiRNA target sequence
ctactgcttaaatttgatgaagatt

SEQ ID NO: 76435 - DNA, 25 bp, Artificial sequence
  SiRNA target sequence
tactgcttaaatttgatgaagatta

SEQ ID NO: 76436 - DNA, 25 bp, Artificial sequence
  SiRNA target sequence
actgcttaaatttgatgaagattac

SEQ ID NO: 76437 - DNA, 25 bp, Artificial sequence
  SiRNA target sequence
ctgcttaaatttgatgaagattaca

SEQ ID NO: 76438 - DNA, 25 bp, Artificial sequence
  SiRNA target sequence
tgcttaaatttgatgaagattacaa

SEQ ID NO: 76439 - DNA, 25 bp, Artificial sequence
  SiRNA target sequence
gcttaaatttgatgaagattacaaa

SEQ ID NO: 76440 - DNA, 25 bp, Artificial sequence
  SiRNA target sequence
cttaaatttgatgaagattacaaag

SEQ ID NO: 76441 - DNA, 25 bp, Artificial sequence
  SiRNA target sequence
ttaaatttgatgaagattacaaagg

SEQ ID NO: 76442 - DNA, 25 bp, Artificial sequence
  SiRNA target sequence
taaatttgatgaagattacaaaggt

SEQ ID NO: 76443 - DNA, 25 bp, Artificial sequence
  SiRNA target sequence
aaatttgatgaagattacaaaggta

SEQ ID NO: 76444 - DNA, 25 bp, Artificial sequence
  SiRNA target sequence
aatttgatgaagattacaaaggtag

SEQ ID NO: 76445 - DNA, 25 bp, Artificial sequence
  SiRNA target sequence
atttgatgaagattacaaaggtagc

SEQ ID NO: 76446 - DNA, 25 bp, Artificial sequence
  SiRNA target sequence
tttgatgaagattacaaaggtagca

SEQ ID NO: 76447 - DNA, 25 bp, Artificial sequence
  SiRNA target sequence
ttgatgaagattacaaaggtagcat

SEQ ID NO: 76448 - DNA, 25 bp, Artificial sequence
  SiRNA target sequence
tgatgaagattacaaaggtagcatt

SEQ ID NO: 76449 - DNA, 25 bp, Artificial sequence
  SiRNA target sequence
gatgaagattacaaaggtagcattt

SEQ ID NO: 76450 - DNA, 25 bp, Artificial sequence
  SiRNA target sequence
atgaagattacaaaggtagcatttt

SEQ ID NO: 76451 - DNA, 25 bp, Artificial sequence
  SiRNA target sequence
tgaagattacaaaggtagcatttta

SEQ ID NO: 76452 - DNA, 25 bp, Artificial sequence
  SiRNA target sequence
gaagattacaaaggtagcattttaa

SEQ ID NO: 76453 - DNA, 25 bp, Artificial sequence
  SiRNA target sequence
aagattacaaaggtagcattttaat

SEQ ID NO: 76454 - DNA, 25 bp, Artificial sequence
  SiRNA target sequence
agattacaaaggtagcattttaata

SEQ ID NO: 76455 - DNA, 25 bp, Artificial sequence
  SiRNA target sequence
gattacaaaggtagcattttaatag

SEQ ID NO: 76456 - DNA, 25 bp, Artificial sequence
  SiRNA target sequence
attacaaaggtagcattttaataga

SEQ ID NO: 76457 - DNA, 25 bp, Artificial sequence
  SiRNA target sequence
ttacaaaggtagcattttaatagat

SEQ ID NO: 76458 - DNA, 25 bp, Artificial sequence
  SiRNA target sequence
tacaaaggtagcattttaatagatg

SEQ ID NO: 76459 - DNA, 25 bp, Artificial sequence
  SiRNA target sequence
acaaaggtagcattttaatagatga

SEQ ID NO: 76460 - DNA, 25 bp, Artificial sequence
  SiRNA target sequence
caaaggtagcattttaatagatgac

SEQ ID NO: 76461 - DNA, 25 bp, Artificial sequence
  SiRNA target sequence
aaaggtagcattttaatagatgaca

SEQ ID NO: 76462 - DNA, 25 bp, Artificial sequence
  SiRNA target sequence
aaggtagcattttaatagatgacat

SEQ ID NO: 76463 - DNA, 25 bp, Artificial sequence
  SiRNA target sequence
aggtagcattttaatagatgacatt

SEQ ID NO: 76464 - DNA, 25 bp, Artificial sequence
  SiRNA target sequence
ggtagcattttaatagatgacattg

SEQ ID NO: 76465 - DNA, 25 bp, Artificial sequence
  SiRNA target sequence
gtagcattttaatagatgacattga

SEQ ID NO: 76466 - DNA, 25 bp, Artificial sequence
  SiRNA target sequence
tagcattttaatagatgacattgat

SEQ ID NO: 76467 - DNA, 25 bp, Artificial sequence
  SiRNA target sequence
agcattttaatagatgacattgata

SEQ ID NO: 76468 - DNA, 25 bp, Artificial sequence
  SiRNA target sequence
gcattttaatagatgacattgatat

SEQ ID NO: 76469 - DNA, 25 bp, Artificial sequence
  SiRNA target sequence
cattttaatagatgacattgatatt

SEQ ID NO: 76470 - DNA, 25 bp, Artificial sequence
  SiRNA target sequence
attttaatagatgacattgatatta

SEQ ID NO: 76471 - DNA, 25 bp, Artificial sequence
  SiRNA target sequence
ttttaatagatgacattgatattaa

SEQ ID NO: 76472 - DNA, 25 bp, Artificial sequence
  SiRNA target sequence
tttaatagatgacattgatattaaa

SEQ ID NO: 76473 - DNA, 25 bp, Artificial sequence
  SiRNA target sequence
ttaatagatgacattgatattaaaa

SEQ ID NO: 76474 - DNA, 25 bp, Artificial sequence
  SiRNA target sequence
taatagatgacattgatattaaaaa

SEQ ID NO: 76475 - DNA, 25 bp, Artificial sequence
  SiRNA target sequence
aatagatgacattgatattaaaaaa

SEQ ID NO: 76476 - DNA, 25 bp, Artificial sequence
  SiRNA target sequence
atagatgacattgatattaaaaaaa

SEQ ID NO: 76477 - DNA, 25 bp, Artificial sequence
  SiRNA target sequence
tagatgacattgatattaaaaaaat

SEQ ID NO: 76478 - DNA, 25 bp, Artificial sequence
  SiRNA target sequence
agatgacattgatattaaaaaaatc

SEQ ID NO: 76479 - DNA, 25 bp, Artificial sequence
  SiRNA target sequence
gatgacattgatattaaaaaaatca

SEQ ID NO: 76480 - DNA, 25 bp, Artificial sequence
  SiRNA target sequence
atgacattgatattaaaaaaatcaa

SEQ ID NO: 76481 - DNA, 25 bp, Artificial sequence
  SiRNA target sequence
tgacattgatattaaaaaaatcaaa

SEQ ID NO: 76482 - DNA, 25 bp, Artificial sequence
  SiRNA target sequence
gacattgatattaaaaaaatcaaag

SEQ ID NO: 76483 - DNA, 25 bp, Artificial sequence
  SiRNA target sequence
acattgatattaaaaaaatcaaaga

SEQ ID NO: 76484 - DNA, 25 bp, Artificial sequence
  SiRNA target sequence
cattgatattaaaaaaatcaaagac

SEQ ID NO: 76485 - DNA, 25 bp, Artificial sequence
  SiRNA target sequence
attgatattaaaaaaatcaaagacg

SEQ ID NO: 76486 - DNA, 25 bp, Artificial sequence
  SiRNA target sequence
ttgatattaaaaaaatcaaagacga

SEQ ID NO: 76487 - DNA, 25 bp, Artificial sequence
  SiRNA target sequence
tgatattaaaaaaatcaaagacgaa

SEQ ID NO: 76488 - DNA, 25 bp, Artificial sequence
  SiRNA target sequence
gatattaaaaaaatcaaagacgaat

SEQ ID NO: 76489 - DNA, 25 bp, Artificial sequence
  SiRNA target sequence
atattaaaaaaatcaaagacgaatt

SEQ ID NO: 76490 - DNA, 25 bp, Artificial sequence
  SiRNA target sequence
tattaaaaaaatcaaagacgaattt

SEQ ID NO: 76491 - DNA, 25 bp, Artificial sequence
  SiRNA target sequence
attaaaaaaatcaaagacgaatttt

SEQ ID NO: 76492 - DNA, 25 bp, Artificial sequence
  SiRNA target sequence
ttaaaaaaatcaaagacgaatttta

SEQ ID NO: 76493 - DNA, 25 bp, Artificial sequence
  SiRNA target sequence
taaaaaaatcaaagacgaattttat

SEQ ID NO: 76494 - DNA, 25 bp, Artificial sequence
  SiRNA target sequence
aaaaaaatcaaagacgaattttata

SEQ ID NO: 76495 - DNA, 25 bp, Artificial sequence
  SiRNA target sequence
aaaaaatcaaagacgaattttatag

SEQ ID NO: 76496 - DNA, 25 bp, Artificial sequence
  SiRNA target sequence
aaaaatcaaagacgaattttatagg

SEQ ID NO: 76497 - DNA, 25 bp, Artificial sequence
  SiRNA target sequence
aaaatcaaagacgaattttatagga

SEQ ID NO: 76498 - DNA, 25 bp, Artificial sequence
  SiRNA target sequence
aaatcaaagacgaattttataggaa

SEQ ID NO: 76499 - DNA, 25 bp, Artificial sequence
  SiRNA target sequence
aatcaaagacgaattttataggaat

SEQ ID NO: 76500 - DNA, 25 bp, Artificial sequence
  SiRNA target sequence
atcaaagacgaattttataggaatt

SEQ ID NO: 76501 - DNA, 25 bp, Artificial sequence
  SiRNA target sequence
tcaaagacgaattttataggaattt

SEQ ID NO: 76502 - DNA, 25 bp, Artificial sequence
  SiRNA target sequence
caaagacgaattttataggaattta

SEQ ID NO: 76503 - DNA, 25 bp, Artificial sequence
  SiRNA target sequence
aaagacgaattttataggaatttat

SEQ ID NO: 76504 - DNA, 25 bp, Artificial sequence
  SiRNA target sequence
aagacgaattttataggaatttatt

SEQ ID NO: 76505 - DNA, 25 bp, Artificial sequence
  SiRNA target sequence
agacgaattttataggaatttatta

SEQ ID NO: 76506 - DNA, 25 bp, Artificial sequence
  SiRNA target sequence
gacgaattttataggaatttattag

SEQ ID NO: 76507 - DNA, 25 bp, Artificial sequence
  SiRNA target sequence
acgaattttataggaatttattagg

SEQ ID NO: 76508 - DNA, 25 bp, Artificial sequence
  SiRNA target sequence
cgaattttataggaatttattaggt

SEQ ID NO: 76509 - DNA, 25 bp, Artificial sequence
  SiRNA target sequence
gaattttataggaatttattaggtt

SEQ ID NO: 76510 - DNA, 25 bp, Artificial sequence
  SiRNA target sequence
aattttataggaatttattaggtta

SEQ ID NO: 76511 - DNA, 25 bp, Artificial sequence
  SiRNA target sequence
attttataggaatttattaggttac

SEQ ID NO: 76512 - DNA, 25 bp, Artificial sequence
  SiRNA target sequence
ttttataggaatttattaggttaca

SEQ ID NO: 76513 - DNA, 25 bp, Artificial sequence
  SiRNA target sequence
tttataggaatttattaggttacat

SEQ ID NO: 76514 - DNA, 25 bp, Artificial sequence
  SiRNA target sequence
ttataggaatttattaggttacata

SEQ ID NO: 76515 - DNA, 25 bp, Artificial sequence
  SiRNA target sequence
tataggaatttattaggttacatac

SEQ ID NO: 76516 - DNA, 25 bp, Artificial sequence
  SiRNA target sequence
ataggaatttattaggttacatacc

SEQ ID NO: 76517 - DNA, 25 bp, Artificial sequence
  SiRNA target sequence
taggaatttattaggttacatacca

SEQ ID NO: 76518 - DNA, 25 bp, Artificial sequence
  SiRNA target sequence
aggaatttattaggttacataccac

SEQ ID NO: 76519 - DNA, 25 bp, Artificial sequence
  SiRNA target sequence
ggaatttattaggttacataccaca

SEQ ID NO: 76520 - DNA, 25 bp, Artificial sequence
  SiRNA target sequence
gaatttattaggttacataccacag

SEQ ID NO: 76521 - DNA, 25 bp, Artificial sequence
  SiRNA target sequence
aatttattaggttacataccacaga

SEQ ID NO: 76522 - DNA, 25 bp, Artificial sequence
  SiRNA target sequence
atttattaggttacataccacagaa

SEQ ID NO: 76523 - DNA, 25 bp, Artificial sequence
  SiRNA target sequence
tttattaggttacataccacagaat

SEQ ID NO: 76524 - DNA, 25 bp, Artificial sequence
  SiRNA target sequence
ttattaggttacataccacagaata

SEQ ID NO: 76525 - DNA, 25 bp, Artificial sequence
  SiRNA target sequence
tattaggttacataccacagaatac

SEQ ID NO: 76526 - DNA, 25 bp, Artificial sequence
  SiRNA target sequence
attaggttacataccacagaataca

SEQ ID NO: 76527 - DNA, 25 bp, Artificial sequence
  SiRNA target sequence
ttaggttacataccacagaatacat

SEQ ID NO: 76528 - DNA, 25 bp, Artificial sequence
  SiRNA target sequence
taggttacataccacagaatacatt

SEQ ID NO: 76529 - DNA, 25 bp, Artificial sequence
  SiRNA target sequence
aggttacataccacagaatacattt

SEQ ID NO: 76530 - DNA, 25 bp, Artificial sequence
  SiRNA target sequence
ggttacataccacagaatacatttt

SEQ ID NO: 76531 - DNA, 25 bp, Artificial sequence
  SiRNA target sequence
gttacataccacagaatacattttt

SEQ ID NO: 76532 - DNA, 25 bp, Artificial sequence
  SiRNA target sequence
ttacataccacagaatacatttttg

SEQ ID NO: 76533 - DNA, 25 bp, Artificial sequence
  SiRNA target sequence
tacataccacagaatacatttttgt

SEQ ID NO: 76534 - DNA, 25 bp, Artificial sequence
  SiRNA target sequence
acataccacagaatacatttttgtt

SEQ ID NO: 76535 - DNA, 25 bp, Artificial sequence
  SiRNA target sequence
cataccacagaatacatttttgttt

SEQ ID NO: 76536 - DNA, 25 bp, Artificial sequence
  SiRNA target sequence
ataccacagaatacatttttgttta

SEQ ID NO: 76537 - DNA, 25 bp, Artificial sequence
  SiRNA target sequence
taccacagaatacatttttgtttaa

SEQ ID NO: 76538 - DNA, 25 bp, Artificial sequence
  SiRNA target sequence
accacagaatacatttttgtttaat

SEQ ID NO: 76539 - DNA, 25 bp, Artificial sequence
  SiRNA target sequence
ccacagaatacatttttgtttaatg

SEQ ID NO: 76540 - DNA, 25 bp, Artificial sequence
  SiRNA target sequence
cacagaatacatttttgtttaatga

SEQ ID NO: 76541 - DNA, 25 bp, Artificial sequence
  SiRNA target sequence
acagaatacatttttgtttaatgaa

SEQ ID NO: 76542 - DNA, 25 bp, Artificial sequence
  SiRNA target sequence
cagaatacatttttgtttaatgaat

SEQ ID NO: 76543 - DNA, 25 bp, Artificial sequence
  SiRNA target sequence
agaatacatttttgtttaatgaatc

SEQ ID NO: 76544 - DNA, 25 bp, Artificial sequence
  SiRNA target sequence
gaatacatttttgtttaatgaatct

SEQ ID NO: 76545 - DNA, 25 bp, Artificial sequence
  SiRNA target sequence
aatacatttttgtttaatgaatctg

SEQ ID NO: 76546 - DNA, 25 bp, Artificial sequence
  SiRNA target sequence
atacatttttgtttaatgaatctgt

SEQ ID NO: 76547 - DNA, 25 bp, Artificial sequence
  SiRNA target sequence
tacatttttgtttaatgaatctgta

SEQ ID NO: 76548 - DNA, 25 bp, Artificial sequence
  SiRNA target sequence
acatttttgtttaatgaatctgtaa

SEQ ID NO: 76549 - DNA, 25 bp, Artificial sequence
  SiRNA target sequence
catttttgtttaatgaatctgtaaa

SEQ ID NO: 76550 - DNA, 25 bp, Artificial sequence
  SiRNA target sequence
atttttgtttaatgaatctgtaaaa

SEQ ID NO: 76551 - DNA, 25 bp, Artificial sequence
  SiRNA target sequence
tttttgtttaatgaatctgtaaaat

SEQ ID NO: 76552 - DNA, 25 bp, Artificial sequence
  SiRNA target sequence
ttttgtttaatgaatctgtaaaata

SEQ ID NO: 76553 - DNA, 25 bp, Artificial sequence
  SiRNA target sequence
tttgtttaatgaatctgtaaaatat

SEQ ID NO: 76554 - DNA, 25 bp, Artificial sequence
  SiRNA target sequence
ttgtttaatgaatctgtaaaatata

SEQ ID NO: 76555 - DNA, 25 bp, Artificial sequence
  SiRNA target sequence
tgtttaatgaatctgtaaaatataa

SEQ ID NO: 76556 - DNA, 25 bp, Artificial sequence
  SiRNA target sequence
gtttaatgaatctgtaaaatataat

SEQ ID NO: 76557 - DNA, 25 bp, Artificial sequence
  SiRNA target sequence
tttaatgaatctgtaaaatataata

SEQ ID NO: 76558 - DNA, 25 bp, Artificial sequence
  SiRNA target sequence
ttaatgaatctgtaaaatataatat

SEQ ID NO: 76559 - DNA, 25 bp, Artificial sequence
  SiRNA target sequence
taatgaatctgtaaaatataatatt

SEQ ID NO: 76560 - DNA, 25 bp, Artificial sequence
  SiRNA target sequence
aatgaatctgtaaaatataatatta

SEQ ID NO: 76561 - DNA, 25 bp, Artificial sequence
  SiRNA target sequence
atgaatctgtaaaatataatattaa

SEQ ID NO: 76562 - DNA, 25 bp, Artificial sequence
  SiRNA target sequence
tgaatctgtaaaatataatattaaa

SEQ ID NO: 76563 - DNA, 25 bp, Artificial sequence
  SiRNA target sequence
gaatctgtaaaatataatattaaat

SEQ ID NO: 76564 - DNA, 25 bp, Artificial sequence
  SiRNA target sequence
aatctgtaaaatataatattaaata

SEQ ID NO: 76565 - DNA, 25 bp, Artificial sequence
  SiRNA target sequence
atctgtaaaatataatattaaatac

SEQ ID NO: 76566 - DNA, 25 bp, Artificial sequence
  SiRNA target sequence
tctgtaaaatataatattaaatacg

SEQ ID NO: 76567 - DNA, 25 bp, Artificial sequence
  SiRNA target sequence
ctgtaaaatataatattaaatacgg

SEQ ID NO: 76568 - DNA, 25 bp, Artificial sequence
  SiRNA target sequence
tgtaaaatataatattaaatacgga

SEQ ID NO: 76569 - DNA, 25 bp, Artificial sequence
  SiRNA target sequence
gtaaaatataatattaaatacggat

SEQ ID NO: 76570 - DNA, 25 bp, Artificial sequence
  SiRNA target sequence
taaaatataatattaaatacggatc

SEQ ID NO: 76571 - DNA, 25 bp, Artificial sequence
  SiRNA target sequence
aaaatataatattaaatacggatct

SEQ ID NO: 76572 - DNA, 25 bp, Artificial sequence
  SiRNA target sequence
aaatataatattaaatacggatctt

SEQ ID NO: 76573 - DNA, 25 bp, Artificial sequence
  SiRNA target sequence
aatataatattaaatacggatcttt

SEQ ID NO: 76574 - DNA, 25 bp, Artificial sequence
  SiRNA target sequence
atataatattaaatacggatctttt

SEQ ID NO: 76575 - DNA, 25 bp, Artificial sequence
  SiRNA target sequence
tataatattaaatacggatcttttg

SEQ ID NO: 76576 - DNA, 25 bp, Artificial sequence
  SiRNA target sequence
ataatattaaatacggatcttttgg

SEQ ID NO: 76577 - DNA, 25 bp, Artificial sequence
  SiRNA target sequence
taatattaaatacggatcttttggt

SEQ ID NO: 76578 - DNA, 25 bp, Artificial sequence
  SiRNA target sequence
aatattaaatacggatcttttggta

SEQ ID NO: 76579 - DNA, 25 bp, Artificial sequence
  SiRNA target sequence
atattaaatacggatcttttggtat

SEQ ID NO: 76580 - DNA, 25 bp, Artificial sequence
  SiRNA target sequence
tattaaatacggatcttttggtatt

SEQ ID NO: 76581 - DNA, 25 bp, Artificial sequence
  SiRNA target sequence
attaaatacggatcttttggtattt

SEQ ID NO: 76582 - DNA, 25 bp, Artificial sequence
  SiRNA target sequence
ttaaatacggatcttttggtatttc

SEQ ID NO: 76583 - DNA, 25 bp, Artificial sequence
  SiRNA target sequence
taaatacggatcttttggtatttca

SEQ ID NO: 76584 - DNA, 25 bp, Artificial sequence
  SiRNA target sequence
aaatacggatcttttggtatttcag

SEQ ID NO: 76585 - DNA, 25 bp, Artificial sequence
  SiRNA target sequence
aatacggatcttttggtatttcaga

SEQ ID NO: 76586 - DNA, 25 bp, Artificial sequence
  SiRNA target sequence
atacggatcttttggtatttcagac

SEQ ID NO: 76587 - DNA, 25 bp, Artificial sequence
  SiRNA target sequence
tacggatcttttggtatttcagacg

SEQ ID NO: 76588 - DNA, 25 bp, Artificial sequence
  SiRNA target sequence
acggatcttttggtatttcagacga

SEQ ID NO: 76589 - DNA, 25 bp, Artificial sequence
  SiRNA target sequence
cggatcttttggtatttcagacgag

SEQ ID NO: 76590 - DNA, 25 bp, Artificial sequence
  SiRNA target sequence
ggatcttttggtatttcagacgagg

SEQ ID NO: 76591 - DNA, 25 bp, Artificial sequence
  SiRNA target sequence
gatcttttggtatttcagacgagga

SEQ ID NO: 76592 - DNA, 25 bp, Artificial sequence
  SiRNA target sequence
atcttttggtatttcagacgaggat

SEQ ID NO: 76593 - DNA, 25 bp, Artificial sequence
  SiRNA target sequence
tcttttggtatttcagacgaggata

SEQ ID NO: 76594 - DNA, 25 bp, Artificial sequence
  SiRNA target sequence
cttttggtatttcagacgaggatat

SEQ ID NO: 76595 - DNA, 25 bp, Artificial sequence
  SiRNA target sequence
ttttggtatttcagacgaggatatt

SEQ ID NO: 76596 - DNA, 25 bp, Artificial sequence
  SiRNA target sequence
tttggtatttcagacgaggatattt

SEQ ID NO: 76597 - DNA, 25 bp, Artificial sequence
  SiRNA target sequence
ttggtatttcagacgaggatatttt

SEQ ID NO: 76598 - DNA, 25 bp, Artificial sequence
  SiRNA target sequence
tggtatttcagacgaggatattttt

SEQ ID NO: 76599 - DNA, 25 bp, Artificial sequence
  SiRNA target sequence
ggtatttcagacgaggatatttttg

SEQ ID NO: 76600 - DNA, 25 bp, Artificial sequence
  SiRNA target sequence
gtatttcagacgaggatatttttgc

SEQ ID NO: 76601 - DNA, 25 bp, Artificial sequence
  SiRNA target sequence
tatttcagacgaggatatttttgca

SEQ ID NO: 76602 - DNA, 25 bp, Artificial sequence
  SiRNA target sequence
atttcagacgaggatatttttgcat

SEQ ID NO: 76603 - DNA, 25 bp, Artificial sequence
  SiRNA target sequence
tttcagacgaggatatttttgcatt

SEQ ID NO: 76604 - DNA, 25 bp, Artificial sequence
  SiRNA target sequence
ttcagacgaggatatttttgcattg

SEQ ID NO: 76605 - DNA, 25 bp, Artificial sequence
  SiRNA target sequence
tcagacgaggatatttttgcattgt

SEQ ID NO: 76606 - DNA, 25 bp, Artificial sequence
  SiRNA target sequence
cagacgaggatatttttgcattgtg

SEQ ID NO: 76607 - DNA, 25 bp, Artificial sequence
  SiRNA target sequence
agacgaggatatttttgcattgtgt

SEQ ID NO: 76608 - DNA, 25 bp, Artificial sequence
  SiRNA target sequence
gacgaggatatttttgcattgtgta

SEQ ID NO: 76609 - DNA, 25 bp, Artificial sequence
  SiRNA target sequence
acgaggatatttttgcattgtgtaa

SEQ ID NO: 76610 - DNA, 25 bp, Artificial sequence
  SiRNA target sequence
cgaggatatttttgcattgtgtaaa

SEQ ID NO: 76611 - DNA, 25 bp, Artificial sequence
  SiRNA target sequence
gaggatatttttgcattgtgtaaag

SEQ ID NO: 76612 - DNA, 25 bp, Artificial sequence
  SiRNA target sequence
aggatatttttgcattgtgtaaaga

SEQ ID NO: 76613 - DNA, 25 bp, Artificial sequence
  SiRNA target sequence
ggatatttttgcattgtgtaaagag

SEQ ID NO: 76614 - DNA, 25 bp, Artificial sequence
  SiRNA target sequence
gatatttttgcattgtgtaaagagt

SEQ ID NO: 76615 - DNA, 25 bp, Artificial sequence
  SiRNA target sequence
atatttttgcattgtgtaaagagtt

SEQ ID NO: 76616 - DNA, 25 bp, Artificial sequence
  SiRNA target sequence
tatttttgcattgtgtaaagagttt

SEQ ID NO: 76617 - DNA, 25 bp, Artificial sequence
  SiRNA target sequence
atttttgcattgtgtaaagagtttg

SEQ ID NO: 76618 - DNA, 25 bp, Artificial sequence
  SiRNA target sequence
tttttgcattgtgtaaagagtttgg

SEQ ID NO: 76619 - DNA, 25 bp, Artificial sequence
  SiRNA target sequence
ttttgcattgtgtaaagagtttgga

SEQ ID NO: 76620 - DNA, 25 bp, Artificial sequence
  SiRNA target sequence
tttgcattgtgtaaagagtttggat

SEQ ID NO: 76621 - DNA, 25 bp, Artificial sequence
  SiRNA target sequence
ttgcattgtgtaaagagtttggatt

SEQ ID NO: 76622 - DNA, 25 bp, Artificial sequence
  SiRNA target sequence
tgcattgtgtaaagagtttggatta

SEQ ID NO: 76623 - DNA, 25 bp, Artificial sequence
  SiRNA target sequence
gcattgtgtaaagagtttggattat

SEQ ID NO: 76624 - DNA, 25 bp, Artificial sequence
  SiRNA target sequence
cattgtgtaaagagtttggattata

SEQ ID NO: 76625 - DNA, 25 bp, Artificial sequence
  SiRNA target sequence
attgtgtaaagagtttggattatat

SEQ ID NO: 76626 - DNA, 25 bp, Artificial sequence
  SiRNA target sequence
ttgtgtaaagagtttggattatatg

SEQ ID NO: 76627 - DNA, 25 bp, Artificial sequence
  SiRNA target sequence
tgtgtaaagagtttggattatatga

SEQ ID NO: 76628 - DNA, 25 bp, Artificial sequence
  SiRNA target sequence
gtgtaaagagtttggattatatgac

SEQ ID NO: 76629 - DNA, 25 bp, Artificial sequence
  SiRNA target sequence
tgtaaagagtttggattatatgacg

SEQ ID NO: 76630 - DNA, 25 bp, Artificial sequence
  SiRNA target sequence
gtaaagagtttggattatatgacgt

SEQ ID NO: 76631 - DNA, 25 bp, Artificial sequence
  SiRNA target sequence
taaagagtttggattatatgacgtt

SEQ ID NO: 76632 - DNA, 25 bp, Artificial sequence
  SiRNA target sequence
aaagagtttggattatatgacgttt

SEQ ID NO: 76633 - DNA, 25 bp, Artificial sequence
  SiRNA target sequence
aagagtttggattatatgacgtttt

SEQ ID NO: 76634 - DNA, 25 bp, Artificial sequence
  SiRNA target sequence
agagtttggattatatgacgttttc

SEQ ID NO: 76635 - DNA, 25 bp, Artificial sequence
  SiRNA target sequence
gagtttggattatatgacgttttca

SEQ ID NO: 76636 - DNA, 25 bp, Artificial sequence
  SiRNA target sequence
agtttggattatatgacgttttcat

SEQ ID NO: 76637 - DNA, 25 bp, Artificial sequence
  SiRNA target sequence
gtttggattatatgacgttttcatg

SEQ ID NO: 76638 - DNA, 25 bp, Artificial sequence
  SiRNA target sequence
tttggattatatgacgttttcatga

SEQ ID NO: 76639 - DNA, 25 bp, Artificial sequence
  SiRNA target sequence
ttggattatatgacgttttcatgaa

SEQ ID NO: 76640 - DNA, 25 bp, Artificial sequence
  SiRNA target sequence
tggattatatgacgttttcatgaac

SEQ ID NO: 76641 - DNA, 25 bp, Artificial sequence
  SiRNA target sequence
ggattatatgacgttttcatgaacc

SEQ ID NO: 76642 - DNA, 25 bp, Artificial sequence
  SiRNA target sequence
gattatatgacgttttcatgaacct

SEQ ID NO: 76643 - DNA, 25 bp, Artificial sequence
  SiRNA target sequence
attatatgacgttttcatgaacctc

SEQ ID NO: 76644 - DNA, 25 bp, Artificial sequence
  SiRNA target sequence
ttatatgacgttttcatgaacctcg

SEQ ID NO: 76645 - DNA, 25 bp, Artificial sequence
  SiRNA target sequence
tatatgacgttttcatgaacctcga

SEQ ID NO: 76646 - DNA, 25 bp, Artificial sequence
  SiRNA target sequence
atatgacgttttcatgaacctcgaa

SEQ ID NO: 76647 - DNA, 25 bp, Artificial sequence
  SiRNA target sequence
tatgacgttttcatgaacctcgaaa

SEQ ID NO: 76648 - DNA, 25 bp, Artificial sequence
  SiRNA target sequence
atgacgttttcatgaacctcgaaaa

SEQ ID NO: 76649 - DNA, 25 bp, Artificial sequence
  SiRNA target sequence
tgacgttttcatgaacctcgaaaat

SEQ ID NO: 76650 - DNA, 25 bp, Artificial sequence
  SiRNA target sequence
gacgttttcatgaacctcgaaaatg

SEQ ID NO: 76651 - DNA, 25 bp, Artificial sequence
  SiRNA target sequence
acgttttcatgaacctcgaaaatgg

SEQ ID NO: 76652 - DNA, 25 bp, Artificial sequence
  SiRNA target sequence
cgttttcatgaacctcgaaaatggt

SEQ ID NO: 76653 - DNA, 25 bp, Artificial sequence
  SiRNA target sequence
gttttcatgaacctcgaaaatggtt

SEQ ID NO: 76654 - DNA, 25 bp, Artificial sequence
  SiRNA target sequence
ttttcatgaacctcgaaaatggttt

SEQ ID NO: 76655 - DNA, 25 bp, Artificial sequence
  SiRNA target sequence
tttcatgaacctcgaaaatggtttt

SEQ ID NO: 76656 - DNA, 25 bp, Artificial sequence
  SiRNA target sequence
ttcatgaacctcgaaaatggttttg

SEQ ID NO: 76657 - DNA, 25 bp, Artificial sequence
  SiRNA target sequence
tcatgaacctcgaaaatggttttga

SEQ ID NO: 76658 - DNA, 25 bp, Artificial sequence
  SiRNA target sequence
catgaacctcgaaaatggttttgat

SEQ ID NO: 76659 - DNA, 25 bp, Artificial sequence
  SiRNA target sequence
atgaacctcgaaaatggttttgata

SEQ ID NO: 76660 - DNA, 25 bp, Artificial sequence
  SiRNA target sequence
tgaacctcgaaaatggttttgatac

SEQ ID NO: 76661 - DNA, 25 bp, Artificial sequence
  SiRNA target sequence
gaacctcgaaaatggttttgatacg

SEQ ID NO: 76662 - DNA, 25 bp, Artificial sequence
  SiRNA target sequence
aacctcgaaaatggttttgatacga

SEQ ID NO: 76663 - DNA, 25 bp, Artificial sequence
  SiRNA target sequence
acctcgaaaatggttttgatacgaa

SEQ ID NO: 76664 - DNA, 25 bp, Artificial sequence
  SiRNA target sequence
cctcgaaaatggttttgatacgaat

SEQ ID NO: 76665 - DNA, 25 bp, Artificial sequence
  SiRNA target sequence
ctcgaaaatggttttgatacgaatg

SEQ ID NO: 76666 - DNA, 25 bp, Artificial sequence
  SiRNA target sequence
tcgaaaatggttttgatacgaatgt

SEQ ID NO: 76667 - DNA, 25 bp, Artificial sequence
  SiRNA target sequence
cgaaaatggttttgatacgaatgta

SEQ ID NO: 76668 - DNA, 25 bp, Artificial sequence
  SiRNA target sequence
gaaaatggttttgatacgaatgtag

SEQ ID NO: 76669 - DNA, 25 bp, Artificial sequence
  SiRNA target sequence
aaaatggttttgatacgaatgtagg

SEQ ID NO: 76670 - DNA, 25 bp, Artificial sequence
  SiRNA target sequence
aaatggttttgatacgaatgtagga

SEQ ID NO: 76671 - DNA, 25 bp, Artificial sequence
  SiRNA target sequence
aatggttttgatacgaatgtaggag

SEQ ID NO: 76672 - DNA, 25 bp, Artificial sequence
  SiRNA target sequence
atggttttgatacgaatgtaggaga

SEQ ID NO: 76673 - DNA, 25 bp, Artificial sequence
  SiRNA target sequence
tggttttgatacgaatgtaggagaa

SEQ ID NO: 76674 - DNA, 25 bp, Artificial sequence
  SiRNA target sequence
ggttttgatacgaatgtaggagaaa

SEQ ID NO: 76675 - DNA, 25 bp, Artificial sequence
  SiRNA target sequence
gttttgatacgaatgtaggagaaag

SEQ ID NO: 76676 - DNA, 25 bp, Artificial sequence
  SiRNA target sequence
ttttgatacgaatgtaggagaaaga

SEQ ID NO: 76677 - DNA, 25 bp, Artificial sequence
  SiRNA target sequence
tttgatacgaatgtaggagaaagag

SEQ ID NO: 76678 - DNA, 25 bp, Artificial sequence
  SiRNA target sequence
ttgatacgaatgtaggagaaagagg

SEQ ID NO: 76679 - DNA, 25 bp, Artificial sequence
  SiRNA target sequence
tgatacgaatgtaggagaaagagga

SEQ ID NO: 76680 - DNA, 25 bp, Artificial sequence
  SiRNA target sequence
gatacgaatgtaggagaaagaggaa

SEQ ID NO: 76681 - DNA, 25 bp, Artificial sequence
  SiRNA target sequence
atacgaatgtaggagaaagaggaag

SEQ ID NO: 76682 - DNA, 25 bp, Artificial sequence
  SiRNA target sequence
tacgaatgtaggagaaagaggaagg

SEQ ID NO: 76683 - DNA, 25 bp, Artificial sequence
  SiRNA target sequence
acgaatgtaggagaaagaggaaggt

SEQ ID NO: 76684 - DNA, 25 bp, Artificial sequence
  SiRNA target sequence
cgaatgtaggagaaagaggaaggtt

SEQ ID NO: 76685 - DNA, 25 bp, Artificial sequence
  SiRNA target sequence
gaatgtaggagaaagaggaaggtta

SEQ ID NO: 76686 - DNA, 25 bp, Artificial sequence
  SiRNA target sequence
aatgtaggagaaagaggaaggttat

SEQ ID NO: 76687 - DNA, 25 bp, Artificial sequence
  SiRNA target sequence
atgtaggagaaagaggaaggttatt

SEQ ID NO: 76688 - DNA, 25 bp, Artificial sequence
  SiRNA target sequence
tgtaggagaaagaggaaggttatta

SEQ ID NO: 76689 - DNA, 25 bp, Artificial sequence
  SiRNA target sequence
gtaggagaaagaggaaggttattaa

SEQ ID NO: 76690 - DNA, 25 bp, Artificial sequence
  SiRNA target sequence
taggagaaagaggaaggttattaag

SEQ ID NO: 76691 - DNA, 25 bp, Artificial sequence
  SiRNA target sequence
aggagaaagaggaaggttattaagt

SEQ ID NO: 76692 - DNA, 25 bp, Artificial sequence
  SiRNA target sequence
ggagaaagaggaaggttattaagtg

SEQ ID NO: 76693 - DNA, 25 bp, Artificial sequence
  SiRNA target sequence
gagaaagaggaaggttattaagtgg

SEQ ID NO: 76694 - DNA, 25 bp, Artificial sequence
  SiRNA target sequence
agaaagaggaaggttattaagtggt

SEQ ID NO: 76695 - DNA, 25 bp, Artificial sequence
  SiRNA target sequence
gaaagaggaaggttattaagtggtg

SEQ ID NO: 76696 - DNA, 25 bp, Artificial sequence
  SiRNA target sequence
aaagaggaaggttattaagtggtgg

SEQ ID NO: 76697 - DNA, 25 bp, Artificial sequence
  SiRNA target sequence
aagaggaaggttattaagtggtgga

SEQ ID NO: 76698 - DNA, 25 bp, Artificial sequence
  SiRNA target sequence
agaggaaggttattaagtggtggag

SEQ ID NO: 76699 - DNA, 25 bp, Artificial sequence
  SiRNA target sequence
gaggaaggttattaagtggtggaga

SEQ ID NO: 76700 - DNA, 25 bp, Artificial sequence
  SiRNA target sequence
aggaaggttattaagtggtggagaa

SEQ ID NO: 76701 - DNA, 25 bp, Artificial sequence
  SiRNA target sequence
ggaaggttattaagtggtggagaaa

SEQ ID NO: 76702 - DNA, 25 bp, Artificial sequence
  SiRNA target sequence
gaaggttattaagtggtggagaaaa

SEQ ID NO: 76703 - DNA, 25 bp, Artificial sequence
  SiRNA target sequence
aaggttattaagtggtggagaaaag

SEQ ID NO: 76704 - DNA, 25 bp, Artificial sequence
  SiRNA target sequence
aggttattaagtggtggagaaaagc

SEQ ID NO: 76705 - DNA, 25 bp, Artificial sequence
  SiRNA target sequence
ggttattaagtggtggagaaaagca

SEQ ID NO: 76706 - DNA, 25 bp, Artificial sequence
  SiRNA target sequence
gttattaagtggtggagaaaagcaa

SEQ ID NO: 76707 - DNA, 25 bp, Artificial sequence
  SiRNA target sequence
ttattaagtggtggagaaaagcaaa

SEQ ID NO: 76708 - DNA, 25 bp, Artificial sequence
  SiRNA target sequence
tattaagtggtggagaaaagcaaaa

SEQ ID NO: 76709 - DNA, 25 bp, Artificial sequence
  SiRNA target sequence
attaagtggtggagaaaagcaaaag

SEQ ID NO: 76710 - DNA, 25 bp, Artificial sequence
  SiRNA target sequence
ttaagtggtggagaaaagcaaaaga

SEQ ID NO: 76711 - DNA, 25 bp, Artificial sequence
  SiRNA target sequence
taagtggtggagaaaagcaaaagat

SEQ ID NO: 76712 - DNA, 25 bp, Artificial sequence
  SiRNA target sequence
aagtggtggagaaaagcaaaagatt

SEQ ID NO: 76713 - DNA, 25 bp, Artificial sequence
  SiRNA target sequence
agtggtggagaaaagcaaaagattt

SEQ ID NO: 76714 - DNA, 25 bp, Artificial sequence
  SiRNA target sequence
gtggtggagaaaagcaaaagatttt

SEQ ID NO: 76715 - DNA, 25 bp, Artificial sequence
  SiRNA target sequence
tggtggagaaaagcaaaagatttta

SEQ ID NO: 76716 - DNA, 25 bp, Artificial sequence
  SiRNA target sequence
ggtggagaaaagcaaaagattttat

SEQ ID NO: 76717 - DNA, 25 bp, Artificial sequence
  SiRNA target sequence
gtggagaaaagcaaaagattttatt

SEQ ID NO: 76718 - DNA, 25 bp, Artificial sequence
  SiRNA target sequence
tggagaaaagcaaaagattttatta

SEQ ID NO: 76719 - DNA, 25 bp, Artificial sequence
  SiRNA target sequence
ggagaaaagcaaaagattttattaa

SEQ ID NO: 76720 - DNA, 25 bp, Artificial sequence
  SiRNA target sequence
gagaaaagcaaaagattttattaat

SEQ ID NO: 76721 - DNA, 25 bp, Artificial sequence
  SiRNA target sequence
agaaaagcaaaagattttattaatg

SEQ ID NO: 76722 - DNA, 25 bp, Artificial sequence
  SiRNA target sequence
gaaaagcaaaagattttattaatgc

SEQ ID NO: 76723 - DNA, 25 bp, Artificial sequence
  SiRNA target sequence
aaaagcaaaagattttattaatgcg

SEQ ID NO: 76724 - DNA, 25 bp, Artificial sequence
  SiRNA target sequence
aaagcaaaagattttattaatgcgt

SEQ ID NO: 76725 - DNA, 25 bp, Artificial sequence
  SiRNA target sequence
aagcaaaagattttattaatgcgta

SEQ ID NO: 76726 - DNA, 25 bp, Artificial sequence
  SiRNA target sequence
agcaaaagattttattaatgcgtac

SEQ ID NO: 76727 - DNA, 25 bp, Artificial sequence
  SiRNA target sequence
gcaaaagattttattaatgcgtact

SEQ ID NO: 76728 - DNA, 25 bp, Artificial sequence
  SiRNA target sequence
caaaagattttattaatgcgtacta

SEQ ID NO: 76729 - DNA, 25 bp, Artificial sequence
  SiRNA target sequence
aaaagattttattaatgcgtactat

SEQ ID NO: 76730 - DNA, 25 bp, Artificial sequence
  SiRNA target sequence
aaagattttattaatgcgtactatg

SEQ ID NO: 76731 - DNA, 25 bp, Artificial sequence
  SiRNA target sequence
aagattttattaatgcgtactatgt

SEQ ID NO: 76732 - DNA, 25 bp, Artificial sequence
  SiRNA target sequence
agattttattaatgcgtactatgtt

SEQ ID NO: 76733 - DNA, 25 bp, Artificial sequence
  SiRNA target sequence
gattttattaatgcgtactatgtta

SEQ ID NO: 76734 - DNA, 25 bp, Artificial sequence
  SiRNA target sequence
attttattaatgcgtactatgttaa

SEQ ID NO: 76735 - DNA, 25 bp, Artificial sequence
  SiRNA target sequence
ttttattaatgcgtactatgttaag

SEQ ID NO: 76736 - DNA, 25 bp, Artificial sequence
  SiRNA target sequence
tttattaatgcgtactatgttaaga

SEQ ID NO: 76737 - DNA, 25 bp, Artificial sequence
  SiRNA target sequence
ttattaatgcgtactatgttaagaa

SEQ ID NO: 76738 - DNA, 25 bp, Artificial sequence
  SiRNA target sequence
tattaatgcgtactatgttaagaaa

SEQ ID NO: 76739 - DNA, 25 bp, Artificial sequence
  SiRNA target sequence
attaatgcgtactatgttaagaaac

SEQ ID NO: 76740 - DNA, 25 bp, Artificial sequence
  SiRNA target sequence
ttaatgcgtactatgttaagaaaca

SEQ ID NO: 76741 - DNA, 25 bp, Artificial sequence
  SiRNA target sequence
taatgcgtactatgttaagaaacaa

SEQ ID NO: 76742 - DNA, 25 bp, Artificial sequence
  SiRNA target sequence
aatgcgtactatgttaagaaacaag

SEQ ID NO: 76743 - DNA, 25 bp, Artificial sequence
  SiRNA target sequence
atgcgtactatgttaagaaacaagg

SEQ ID NO: 76744 - DNA, 25 bp, Artificial sequence
  SiRNA target sequence
tgcgtactatgttaagaaacaagga

SEQ ID NO: 76745 - DNA, 25 bp, Artificial sequence
  SiRNA target sequence
gcgtactatgttaagaaacaaggag

SEQ ID NO: 76746 - DNA, 25 bp, Artificial sequence
  SiRNA target sequence
cgtactatgttaagaaacaaggaga

SEQ ID NO: 76747 - DNA, 25 bp, Artificial sequence
  SiRNA target sequence
gtactatgttaagaaacaaggagat

SEQ ID NO: 76748 - DNA, 25 bp, Artificial sequence
  SiRNA target sequence
tactatgttaagaaacaaggagata

SEQ ID NO: 76749 - DNA, 25 bp, Artificial sequence
  SiRNA target sequence
actatgttaagaaacaaggagataa

SEQ ID NO: 76750 - DNA, 25 bp, Artificial sequence
  SiRNA target sequence
ctatgttaagaaacaaggagataat

SEQ ID NO: 76751 - DNA, 25 bp, Artificial sequence
  SiRNA target sequence
tatgttaagaaacaaggagataatg

SEQ ID NO: 76752 - DNA, 25 bp, Artificial sequence
  SiRNA target sequence
atgttaagaaacaaggagataatgg

SEQ ID NO: 76753 - DNA, 25 bp, Artificial sequence
  SiRNA target sequence
tgttaagaaacaaggagataatggc

SEQ ID NO: 76754 - DNA, 25 bp, Artificial sequence
  SiRNA target sequence
gttaagaaacaaggagataatggca

SEQ ID NO: 76755 - DNA, 25 bp, Artificial sequence
  SiRNA target sequence
ttaagaaacaaggagataatggcat

SEQ ID NO: 76756 - DNA, 25 bp, Artificial sequence
  SiRNA target sequence
taagaaacaaggagataatggcatt

SEQ ID NO: 76757 - DNA, 25 bp, Artificial sequence
  SiRNA target sequence
aagaaacaaggagataatggcatta

SEQ ID NO: 76758 - DNA, 25 bp, Artificial sequence
  SiRNA target sequence
agaaacaaggagataatggcattag

SEQ ID NO: 76759 - DNA, 25 bp, Artificial sequence
  SiRNA target sequence
gaaacaaggagataatggcattaga

SEQ ID NO: 76760 - DNA, 25 bp, Artificial sequence
  SiRNA target sequence
aaacaaggagataatggcattagat

SEQ ID NO: 76761 - DNA, 25 bp, Artificial sequence
  SiRNA target sequence
aacaaggagataatggcattagatg

SEQ ID NO: 76762 - DNA, 25 bp, Artificial sequence
  SiRNA target sequence
acaaggagataatggcattagatga

SEQ ID NO: 76763 - DNA, 25 bp, Artificial sequence
  SiRNA target sequence
caaggagataatggcattagatgaa

SEQ ID NO: 76764 - DNA, 25 bp, Artificial sequence
  SiRNA target sequence
aaggagataatggcattagatgaac

SEQ ID NO: 76765 - DNA, 25 bp, Artificial sequence
  SiRNA target sequence
aggagataatggcattagatgaacc

SEQ ID NO: 76766 - DNA, 25 bp, Artificial sequence
  SiRNA target sequence
ggagataatggcattagatgaaccc

SEQ ID NO: 76767 - DNA, 25 bp, Artificial sequence
  SiRNA target sequence
gagataatggcattagatgaaccca

SEQ ID NO: 76768 - DNA, 25 bp, Artificial sequence
  SiRNA target sequence
agataatggcattagatgaacccac

SEQ ID NO: 76769 - DNA, 25 bp, Artificial sequence
  SiRNA target sequence
gataatggcattagatgaacccact

SEQ ID NO: 76770 - DNA, 25 bp, Artificial sequence
  SiRNA target sequence
ataatggcattagatgaacccactg

SEQ ID NO: 76771 - DNA, 25 bp, Artificial sequence
  SiRNA target sequence
taatggcattagatgaacccactgc

SEQ ID NO: 76772 - DNA, 25 bp, Artificial sequence
  SiRNA target sequence
aatggcattagatgaacccactgca

SEQ ID NO: 76773 - DNA, 25 bp, Artificial sequence
  SiRNA target sequence
atggcattagatgaacccactgcag

SEQ ID NO: 76774 - DNA, 25 bp, Artificial sequence
  SiRNA target sequence
tggcattagatgaacccactgcagc

SEQ ID NO: 76775 - DNA, 25 bp, Artificial sequence
  SiRNA target sequence
ggcattagatgaacccactgcagca

SEQ ID NO: 76776 - DNA, 25 bp, Artificial sequence
  SiRNA target sequence
gcattagatgaacccactgcagcac

SEQ ID NO: 76777 - DNA, 25 bp, Artificial sequence
  SiRNA target sequence
cattagatgaacccactgcagcact

SEQ ID NO: 76778 - DNA, 25 bp, Artificial sequence
  SiRNA target sequence
attagatgaacccactgcagcactt

SEQ ID NO: 76779 - DNA, 25 bp, Artificial sequence
  SiRNA target sequence
ttagatgaacccactgcagcacttg

SEQ ID NO: 76780 - DNA, 25 bp, Artificial sequence
  SiRNA target sequence
tagatgaacccactgcagcacttga

SEQ ID NO: 76781 - DNA, 25 bp, Artificial sequence
  SiRNA target sequence
agatgaacccactgcagcacttgat

SEQ ID NO: 76782 - DNA, 25 bp, Artificial sequence
  SiRNA target sequence
gatgaacccactgcagcacttgata

SEQ ID NO: 76783 - DNA, 25 bp, Artificial sequence
  SiRNA target sequence
atgaacccactgcagcacttgataa

SEQ ID NO: 76784 - DNA, 25 bp, Artificial sequence
  SiRNA target sequence
tgaacccactgcagcacttgataag

SEQ ID NO: 76785 - DNA, 25 bp, Artificial sequence
  SiRNA target sequence
gaacccactgcagcacttgataagg

SEQ ID NO: 76786 - DNA, 25 bp, Artificial sequence
  SiRNA target sequence
aacccactgcagcacttgataagga

SEQ ID NO: 76787 - DNA, 25 bp, Artificial sequence
  SiRNA target sequence
acccactgcagcacttgataaggag

SEQ ID NO: 76788 - DNA, 25 bp, Artificial sequence
  SiRNA target sequence
cccactgcagcacttgataaggagt

SEQ ID NO: 76789 - DNA, 25 bp, Artificial sequence
  SiRNA target sequence
ccactgcagcacttgataaggagtc

SEQ ID NO: 76790 - DNA, 25 bp, Artificial sequence
  SiRNA target sequence
cactgcagcacttgataaggagtct

SEQ ID NO: 76791 - DNA, 25 bp, Artificial sequence
  SiRNA target sequence
actgcagcacttgataaggagtctg

SEQ ID NO: 76792 - DNA, 25 bp, Artificial sequence
  SiRNA target sequence
ctgcagcacttgataaggagtctga

SEQ ID NO: 76793 - DNA, 25 bp, Artificial sequence
  SiRNA target sequence
tgcagcacttgataaggagtctgaa

SEQ ID NO: 76794 - DNA, 25 bp, Artificial sequence
  SiRNA target sequence
gcagcacttgataaggagtctgaaa

SEQ ID NO: 76795 - DNA, 25 bp, Artificial sequence
  SiRNA target sequence
cagcacttgataaggagtctgaaaa

SEQ ID NO: 76796 - DNA, 25 bp, Artificial sequence
  SiRNA target sequence
agcacttgataaggagtctgaaaaa

SEQ ID NO: 76797 - DNA, 25 bp, Artificial sequence
  SiRNA target sequence
gcacttgataaggagtctgaaaaaa

SEQ ID NO: 76798 - DNA, 25 bp, Artificial sequence
  SiRNA target sequence
cacttgataaggagtctgaaaaaaa

SEQ ID NO: 76799 - DNA, 25 bp, Artificial sequence
  SiRNA target sequence
acttgataaggagtctgaaaaaaag

SEQ ID NO: 76800 - DNA, 25 bp, Artificial sequence
  SiRNA target sequence
cttgataaggagtctgaaaaaaaga

SEQ ID NO: 76801 - DNA, 25 bp, Artificial sequence
  SiRNA target sequence
ttgataaggagtctgaaaaaaagat

SEQ ID NO: 76802 - DNA, 25 bp, Artificial sequence
  SiRNA target sequence
tgataaggagtctgaaaaaaagatt

SEQ ID NO: 76803 - DNA, 25 bp, Artificial sequence
  SiRNA target sequence
gataaggagtctgaaaaaaagattt

SEQ ID NO: 76804 - DNA, 25 bp, Artificial sequence
  SiRNA target sequence
ataaggagtctgaaaaaaagatttt

SEQ ID NO: 76805 - DNA, 25 bp, Artificial sequence
  SiRNA target sequence
taaggagtctgaaaaaaagatttta

SEQ ID NO: 76806 - DNA, 25 bp, Artificial sequence
  SiRNA target sequence
aaggagtctgaaaaaaagattttag

SEQ ID NO: 76807 - DNA, 25 bp, Artificial sequence
  SiRNA target sequence
aggagtctgaaaaaaagattttaga

SEQ ID NO: 76808 - DNA, 25 bp, Artificial sequence
  SiRNA target sequence
ggagtctgaaaaaaagattttagag

SEQ ID NO: 76809 - DNA, 25 bp, Artificial sequence
  SiRNA target sequence
gagtctgaaaaaaagattttagaga

SEQ ID NO: 76810 - DNA, 25 bp, Artificial sequence
  SiRNA target sequence
agtctgaaaaaaagattttagagat

SEQ ID NO: 76811 - DNA, 25 bp, Artificial sequence
  SiRNA target sequence
gtctgaaaaaaagattttagagata

SEQ ID NO: 76812 - DNA, 25 bp, Artificial sequence
  SiRNA target sequence
tctgaaaaaaagattttagagataa

SEQ ID NO: 76813 - DNA, 25 bp, Artificial sequence
  SiRNA target sequence
ctgaaaaaaagattttagagataat

SEQ ID NO: 76814 - DNA, 25 bp, Artificial sequence
  SiRNA target sequence
tgaaaaaaagattttagagataatt

SEQ ID NO: 76815 - DNA, 25 bp, Artificial sequence
  SiRNA target sequence
gaaaaaaagattttagagataattt

SEQ ID NO: 76816 - DNA, 25 bp, Artificial sequence
  SiRNA target sequence
aaaaaaagattttagagataatttt

SEQ ID NO: 76817 - DNA, 25 bp, Artificial sequence
  SiRNA target sequence
aaaaaagattttagagataatttta

SEQ ID NO: 76818 - DNA, 25 bp, Artificial sequence
  SiRNA target sequence
aaaaagattttagagataattttac

SEQ ID NO: 76819 - DNA, 25 bp, Artificial sequence
  SiRNA target sequence
aaaagattttagagataattttaca

SEQ ID NO: 76820 - DNA, 25 bp, Artificial sequence
  SiRNA target sequence
aaagattttagagataattttacaa

SEQ ID NO: 76821 - DNA, 25 bp, Artificial sequence
  SiRNA target sequence
aagattttagagataattttacaac

SEQ ID NO: 76822 - DNA, 25 bp, Artificial sequence
  SiRNA target sequence
agattttagagataattttacaaca

SEQ ID NO: 76823 - DNA, 25 bp, Artificial sequence
  SiRNA target sequence
gattttagagataattttacaacag

SEQ ID NO: 76824 - DNA, 25 bp, Artificial sequence
  SiRNA target sequence
attttagagataattttacaacagg

SEQ ID NO: 76825 - DNA, 25 bp, Artificial sequence
  SiRNA target sequence
ttttagagataattttacaacagga

SEQ ID NO: 76826 - DNA, 25 bp, Artificial sequence
  SiRNA target sequence
tttagagataattttacaacaggaa

SEQ ID NO: 76827 - DNA, 25 bp, Artificial sequence
  SiRNA target sequence
ttagagataattttacaacaggaag

SEQ ID NO: 76828 - DNA, 25 bp, Artificial sequence
  SiRNA target sequence
tagagataattttacaacaggaaga

SEQ ID NO: 76829 - DNA, 25 bp, Artificial sequence
  SiRNA target sequence
agagataattttacaacaggaagat

SEQ ID NO: 76830 - DNA, 25 bp, Artificial sequence
  SiRNA target sequence
gagataattttacaacaggaagatc

SEQ ID NO: 76831 - DNA, 25 bp, Artificial sequence
  SiRNA target sequence
agataattttacaacaggaagatcg

SEQ ID NO: 76832 - DNA, 25 bp, Artificial sequence
  SiRNA target sequence
gataattttacaacaggaagatcga

SEQ ID NO: 76833 - DNA, 25 bp, Artificial sequence
  SiRNA target sequence
ataattttacaacaggaagatcgaa

SEQ ID NO: 76834 - DNA, 25 bp, Artificial sequence
  SiRNA target sequence
taattttacaacaggaagatcgaac

SEQ ID NO: 76835 - DNA, 25 bp, Artificial sequence
  SiRNA target sequence
aattttacaacaggaagatcgaaca

SEQ ID NO: 76836 - DNA, 25 bp, Artificial sequence
  SiRNA target sequence
attttacaacaggaagatcgaacag

SEQ ID NO: 76837 - DNA, 25 bp, Artificial sequence
  SiRNA target sequence
ttttacaacaggaagatcgaacagt

SEQ ID NO: 76838 - DNA, 25 bp, Artificial sequence
  SiRNA target sequence
tttacaacaggaagatcgaacagtt

SEQ ID NO: 76839 - DNA, 25 bp, Artificial sequence
  SiRNA target sequence
ttacaacaggaagatcgaacagttt

SEQ ID NO: 76840 - DNA, 25 bp, Artificial sequence
  SiRNA target sequence
tacaacaggaagatcgaacagtttt

SEQ ID NO: 76841 - DNA, 25 bp, Artificial sequence
  SiRNA target sequence
acaacaggaagatcgaacagttttg

SEQ ID NO: 76842 - DNA, 25 bp, Artificial sequence
  SiRNA target sequence
caacaggaagatcgaacagttttga

SEQ ID NO: 76843 - DNA, 25 bp, Artificial sequence
  SiRNA target sequence
aacaggaagatcgaacagttttgat

SEQ ID NO: 76844 - DNA, 25 bp, Artificial sequence
  SiRNA target sequence
acaggaagatcgaacagttttgatg

SEQ ID NO: 76845 - DNA, 25 bp, Artificial sequence
  SiRNA target sequence
caggaagatcgaacagttttgatga

SEQ ID NO: 76846 - DNA, 25 bp, Artificial sequence
  SiRNA target sequence
aggaagatcgaacagttttgatgat

SEQ ID NO: 76847 - DNA, 25 bp, Artificial sequence
  SiRNA target sequence
ggaagatcgaacagttttgatgata

SEQ ID NO: 76848 - DNA, 25 bp, Artificial sequence
  SiRNA target sequence
gaagatcgaacagttttgatgataa

SEQ ID NO: 76849 - DNA, 25 bp, Artificial sequence
  SiRNA target sequence
aagatcgaacagttttgatgataat

SEQ ID NO: 76850 - DNA, 25 bp, Artificial sequence
  SiRNA target sequence
agatcgaacagttttgatgataatt

SEQ ID NO: 76851 - DNA, 25 bp, Artificial sequence
  SiRNA target sequence
gatcgaacagttttgatgataattc

SEQ ID NO: 76852 - DNA, 25 bp, Artificial sequence
  SiRNA target sequence
atcgaacagttttgatgataattca

SEQ ID NO: 76853 - DNA, 25 bp, Artificial sequence
  SiRNA target sequence
tcgaacagttttgatgataattcat

SEQ ID NO: 76854 - DNA, 25 bp, Artificial sequence
  SiRNA target sequence
cgaacagttttgatgataattcata

SEQ ID NO: 76855 - DNA, 25 bp, Artificial sequence
  SiRNA target sequence
gaacagttttgatgataattcataa

SEQ ID NO: 76856 - DNA, 25 bp, Artificial sequence
  SiRNA target sequence
aacagttttgatgataattcataat

SEQ ID NO: 76857 - DNA, 25 bp, Artificial sequence
  SiRNA target sequence
acagttttgatgataattcataatc

SEQ ID NO: 76858 - DNA, 25 bp, Artificial sequence
  SiRNA target sequence
cagttttgatgataattcataatct

SEQ ID NO: 76859 - DNA, 25 bp, Artificial sequence
  SiRNA target sequence
agttttgatgataattcataatcta

SEQ ID NO: 76860 - DNA, 25 bp, Artificial sequence
  SiRNA target sequence
gttttgatgataattcataatctag

SEQ ID NO: 76861 - DNA, 25 bp, Artificial sequence
  SiRNA target sequence
ttttgatgataattcataatctaga

SEQ ID NO: 76862 - DNA, 25 bp, Artificial sequence
  SiRNA target sequence
tttgatgataattcataatctagaa

SEQ ID NO: 76863 - DNA, 25 bp, Artificial sequence
  SiRNA target sequence
ttgatgataattcataatctagaac

SEQ ID NO: 76864 - DNA, 25 bp, Artificial sequence
  SiRNA target sequence
tgatgataattcataatctagaact

SEQ ID NO: 76865 - DNA, 25 bp, Artificial sequence
  SiRNA target sequence
gatgataattcataatctagaactt

SEQ ID NO: 76866 - DNA, 25 bp, Artificial sequence
  SiRNA target sequence
atgataattcataatctagaactta

SEQ ID NO: 76867 - DNA, 25 bp, Artificial sequence
  SiRNA target sequence
tgataattcataatctagaacttat

SEQ ID NO: 76868 - DNA, 25 bp, Artificial sequence
  SiRNA target sequence
gataattcataatctagaacttatt

SEQ ID NO: 76869 - DNA, 25 bp, Artificial sequence
  SiRNA target sequence
ataattcataatctagaacttatta

SEQ ID NO: 76870 - DNA, 25 bp, Artificial sequence
  SiRNA target sequence
taattcataatctagaacttattaa

SEQ ID NO: 76871 - DNA, 25 bp, Artificial sequence
  SiRNA target sequence
aattcataatctagaacttattaat

SEQ ID NO: 76872 - DNA, 25 bp, Artificial sequence
  SiRNA target sequence
attcataatctagaacttattaata

SEQ ID NO: 76873 - DNA, 25 bp, Artificial sequence
  SiRNA target sequence
ttcataatctagaacttattaataa

SEQ ID NO: 76874 - DNA, 25 bp, Artificial sequence
  SiRNA target sequence
tcataatctagaacttattaataaa

SEQ ID NO: 76875 - DNA, 25 bp, Artificial sequence
  SiRNA target sequence
cataatctagaacttattaataaat

SEQ ID NO: 76876 - DNA, 25 bp, Artificial sequence
  SiRNA target sequence
ataatctagaacttattaataaatt

SEQ ID NO: 76877 - DNA, 25 bp, Artificial sequence
  SiRNA target sequence
taatctagaacttattaataaattt

SEQ ID NO: 76878 - DNA, 25 bp, Artificial sequence
  SiRNA target sequence
aatctagaacttattaataaatttg

SEQ ID NO: 76879 - DNA, 25 bp, Artificial sequence
  SiRNA target sequence
atctagaacttattaataaatttga

SEQ ID NO: 76880 - DNA, 25 bp, Artificial sequence
  SiRNA target sequence
tctagaacttattaataaatttgat

SEQ ID NO: 76881 - DNA, 25 bp, Artificial sequence
  SiRNA target sequence
ctagaacttattaataaatttgata

SEQ ID NO: 76882 - DNA, 25 bp, Artificial sequence
  SiRNA target sequence
tagaacttattaataaatttgataa

SEQ ID NO: 76883 - DNA, 25 bp, Artificial sequence
  SiRNA target sequence
agaacttattaataaatttgataaa

SEQ ID NO: 76884 - DNA, 25 bp, Artificial sequence
  SiRNA target sequence
gaacttattaataaatttgataaaa

SEQ ID NO: 76885 - DNA, 25 bp, Artificial sequence
  SiRNA target sequence
aacttattaataaatttgataaaat

SEQ ID NO: 76886 - DNA, 25 bp, Artificial sequence
  SiRNA target sequence
acttattaataaatttgataaaata

SEQ ID NO: 76887 - DNA, 25 bp, Artificial sequence
  SiRNA target sequence
cttattaataaatttgataaaataa

SEQ ID NO: 76888 - DNA, 25 bp, Artificial sequence
  SiRNA target sequence
ttattaataaatttgataaaataat

SEQ ID NO: 76889 - DNA, 25 bp, Artificial sequence
  SiRNA target sequence
tattaataaatttgataaaataatt

SEQ ID NO: 76890 - DNA, 25 bp, Artificial sequence
  SiRNA target sequence
attaataaatttgataaaataattt

SEQ ID NO: 76891 - DNA, 25 bp, Artificial sequence
  SiRNA target sequence
ttaataaatttgataaaataattta

SEQ ID NO: 76892 - DNA, 25 bp, Artificial sequence
  SiRNA target sequence
taataaatttgataaaataatttac

SEQ ID NO: 76893 - DNA, 25 bp, Artificial sequence
  SiRNA target sequence
aataaatttgataaaataatttaca

SEQ ID NO: 76894 - DNA, 25 bp, Artificial sequence
  SiRNA target sequence
ataaatttgataaaataatttacat

SEQ ID NO: 76895 - DNA, 25 bp, Artificial sequence
  SiRNA target sequence
taaatttgataaaataatttacatt

SEQ ID NO: 76896 - DNA, 25 bp, Artificial sequence
  SiRNA target sequence
aaatttgataaaataatttacattg

SEQ ID NO: 76897 - DNA, 25 bp, Artificial sequence
  SiRNA target sequence
aatttgataaaataatttacattga

SEQ ID NO: 76898 - DNA, 25 bp, Artificial sequence
  SiRNA target sequence
atttgataaaataatttacattgat

SEQ ID NO: 76899 - DNA, 25 bp, Artificial sequence
  SiRNA target sequence
tttgataaaataatttacattgatg

SEQ ID NO: 76900 - DNA, 25 bp, Artificial sequence
  SiRNA target sequence
ttgataaaataatttacattgatga

SEQ ID NO: 76901 - DNA, 25 bp, Artificial sequence
  SiRNA target sequence
tgataaaataatttacattgatgaa

SEQ ID NO: 76902 - DNA, 25 bp, Artificial sequence
  SiRNA target sequence
gataaaataatttacattgatgaaa

SEQ ID NO: 76903 - DNA, 25 bp, Artificial sequence
  SiRNA target sequence
ataaaataatttacattgatgaaaa

SEQ ID NO: 76904 - DNA, 25 bp, Artificial sequence
  SiRNA target sequence
taaaataatttacattgatgaaaat

SEQ ID NO: 76905 - DNA, 25 bp, Artificial sequence
  SiRNA target sequence
aaaataatttacattgatgaaaata

SEQ ID NO: 76906 - DNA, 25 bp, Artificial sequence
  SiRNA target sequence
aaataatttacattgatgaaaataa

SEQ ID NO: 76907 - DNA, 25 bp, Artificial sequence
  SiRNA target sequence
aataatttacattgatgaaaataat

SEQ ID NO: 76908 - DNA, 25 bp, Artificial sequence
  SiRNA target sequence
ataatttacattgatgaaaataata

SEQ ID NO: 76909 - DNA, 25 bp, Artificial sequence
  SiRNA target sequence
taatttacattgatgaaaataatat

SEQ ID NO: 76910 - DNA, 25 bp, Artificial sequence
  SiRNA target sequence
aatttacattgatgaaaataatata

SEQ ID NO: 76911 - DNA, 25 bp, Artificial sequence
  SiRNA target sequence
atttacattgatgaaaataatatag

SEQ ID NO: 76912 - DNA, 25 bp, Artificial sequence
  SiRNA target sequence
tttacattgatgaaaataatataga

SEQ ID NO: 76913 - DNA, 25 bp, Artificial sequence
  SiRNA target sequence
ttacattgatgaaaataatatagaa

SEQ ID NO: 76914 - DNA, 25 bp, Artificial sequence
  SiRNA target sequence
tacattgatgaaaataatatagaag

SEQ ID NO: 76915 - DNA, 25 bp, Artificial sequence
  SiRNA target sequence
acattgatgaaaataatatagaagt

SEQ ID NO: 76916 - DNA, 25 bp, Artificial sequence
  SiRNA target sequence
cattgatgaaaataatatagaagtc

SEQ ID NO: 76917 - DNA, 25 bp, Artificial sequence
  SiRNA target sequence
attgatgaaaataatatagaagtct

SEQ ID NO: 76918 - DNA, 25 bp, Artificial sequence
  SiRNA target sequence
ttgatgaaaataatatagaagtcta

SEQ ID NO: 76919 - DNA, 25 bp, Artificial sequence
  SiRNA target sequence
tgatgaaaataatatagaagtctat

SEQ ID NO: 76920 - DNA, 25 bp, Artificial sequence
  SiRNA target sequence
gatgaaaataatatagaagtctata

SEQ ID NO: 76921 - DNA, 25 bp, Artificial sequence
  SiRNA target sequence
atgaaaataatatagaagtctataa

SEQ ID NO: 76922 - DNA, 25 bp, Artificial sequence
  SiRNA target sequence
tgaaaataatatagaagtctataaa

SEQ ID NO: 76923 - DNA, 25 bp, Artificial sequence
  SiRNA target sequence
gaaaataatatagaagtctataaaa

SEQ ID NO: 76924 - DNA, 25 bp, Artificial sequence
  SiRNA target sequence
aaaataatatagaagtctataaaaa

SEQ ID NO: 76925 - DNA, 25 bp, Artificial sequence
  SiRNA target sequence
aaataatatagaagtctataaaaat

SEQ ID NO: 76926 - DNA, 25 bp, Artificial sequence
  SiRNA target sequence
aataatatagaagtctataaaaatg

SEQ ID NO: 76927 - DNA, 25 bp, Artificial sequence
  SiRNA target sequence
ataatatagaagtctataaaaatga

SEQ ID NO: 76928 - DNA, 25 bp, Artificial sequence
  SiRNA target sequence
taatatagaagtctataaaaatgat

SEQ ID NO: 76929 - DNA, 25 bp, Artificial sequence
  SiRNA target sequence
aatatagaagtctataaaaatgata

SEQ ID NO: 76930 - DNA, 25 bp, Artificial sequence
  SiRNA target sequence
atatagaagtctataaaaatgatat

SEQ ID NO: 76931 - DNA, 25 bp, Artificial sequence
  SiRNA target sequence
tatagaagtctataaaaatgatatt

SEQ ID NO: 76932 - DNA, 25 bp, Artificial sequence
  SiRNA target sequence
atagaagtctataaaaatgatattg

SEQ ID NO: 76933 - DNA, 25 bp, Artificial sequence
  SiRNA target sequence
tagaagtctataaaaatgatattga

SEQ ID NO: 76934 - DNA, 25 bp, Artificial sequence
  SiRNA target sequence
agaagtctataaaaatgatattgaa

SEQ ID NO: 76935 - DNA, 25 bp, Artificial sequence
  SiRNA target sequence
gaagtctataaaaatgatattgaag

SEQ ID NO: 76936 - DNA, 25 bp, Artificial sequence
  SiRNA target sequence
aagtctataaaaatgatattgaagg

SEQ ID NO: 76937 - DNA, 25 bp, Artificial sequence
  SiRNA target sequence
agtctataaaaatgatattgaagga

SEQ ID NO: 76938 - DNA, 25 bp, Artificial sequence
  SiRNA target sequence
gtctataaaaatgatattgaaggac

SEQ ID NO: 76939 - DNA, 25 bp, Artificial sequence
  SiRNA target sequence
tctataaaaatgatattgaaggaca

SEQ ID NO: 76940 - DNA, 25 bp, Artificial sequence
  SiRNA target sequence
ctataaaaatgatattgaaggacaa

SEQ ID NO: 76941 - DNA, 25 bp, Artificial sequence
  SiRNA target sequence
tataaaaatgatattgaaggacaaa

SEQ ID NO: 76942 - DNA, 25 bp, Artificial sequence
  SiRNA target sequence
ataaaaatgatattgaaggacaaaa

SEQ ID NO: 76943 - DNA, 25 bp, Artificial sequence
  SiRNA target sequence
taaaaatgatattgaaggacaaaaa

SEQ ID NO: 76944 - DNA, 25 bp, Artificial sequence
  SiRNA target sequence
aaaaatgatattgaaggacaaaaaa

SEQ ID NO: 76945 - DNA, 25 bp, Artificial sequence
  SiRNA target sequence
aaaatgatattgaaggacaaaaaaa

SEQ ID NO: 76946 - DNA, 25 bp, Artificial sequence
  SiRNA target sequence
aaatgatattgaaggacaaaaaaag

SEQ ID NO: 76947 - DNA, 25 bp, Artificial sequence
  SiRNA target sequence
aatgatattgaaggacaaaaaaagt

SEQ ID NO: 76948 - DNA, 25 bp, Artificial sequence
  SiRNA target sequence
atgatattgaaggacaaaaaaagtt

SEQ ID NO: 76949 - DNA, 25 bp, Artificial sequence
  SiRNA target sequence
tgatattgaaggacaaaaaaagttt

SEQ ID NO: 76950 - DNA, 25 bp, Artificial sequence
  SiRNA target sequence
gatattgaaggacaaaaaaagtttt

SEQ ID NO: 76951 - DNA, 25 bp, Artificial sequence
  SiRNA target sequence
atattgaaggacaaaaaaagttttc

SEQ ID NO: 76952 - DNA, 25 bp, Artificial sequence
  SiRNA target sequence
tattgaaggacaaaaaaagttttct

SEQ ID NO: 76953 - DNA, 25 bp, Artificial sequence
  SiRNA target sequence
attgaaggacaaaaaaagttttcta

SEQ ID NO: 76954 - DNA, 25 bp, Artificial sequence
  SiRNA target sequence
ttgaaggacaaaaaaagttttctac

SEQ ID NO: 76955 - DNA, 25 bp, Artificial sequence
  SiRNA target sequence
tgaaggacaaaaaaagttttctaca

SEQ ID NO: 76956 - DNA, 25 bp, Artificial sequence
  SiRNA target sequence
gaaggacaaaaaaagttttctacaa

SEQ ID NO: 76957 - DNA, 25 bp, Artificial sequence
  SiRNA target sequence
aaggacaaaaaaagttttctacaaa

SEQ ID NO: 76958 - DNA, 25 bp, Artificial sequence
  SiRNA target sequence
aggacaaaaaaagttttctacaaat

SEQ ID NO: 76959 - DNA, 25 bp, Artificial sequence
  SiRNA target sequence
ggacaaaaaaagttttctacaaatt

SEQ ID NO: 76960 - DNA, 25 bp, Artificial sequence
  SiRNA target sequence
gacaaaaaaagttttctacaaattt

SEQ ID NO: 76961 - DNA, 25 bp, Artificial sequence
  SiRNA target sequence
acaaaaaaagttttctacaaattta

SEQ ID NO: 76962 - DNA, 25 bp, Artificial sequence
  SiRNA target sequence
caaaaaaagttttctacaaatttac

SEQ ID NO: 76963 - DNA, 25 bp, Artificial sequence
  SiRNA target sequence
aaaaaaagttttctacaaatttaca

SEQ ID NO: 76964 - DNA, 25 bp, Artificial sequence
  SiRNA target sequence
aaaaaagttttctacaaatttacaa

SEQ ID NO: 76965 - DNA, 25 bp, Artificial sequence
  SiRNA target sequence
aaaaagttttctacaaatttacaat

SEQ ID NO: 76966 - DNA, 25 bp, Artificial sequence
  SiRNA target sequence
aaaagttttctacaaatttacaata

SEQ ID NO: 76967 - DNA, 25 bp, Artificial sequence
  SiRNA target sequence
aaagttttctacaaatttacaatat

SEQ ID NO: 76968 - DNA, 25 bp, Artificial sequence
  SiRNA target sequence
aagttttctacaaatttacaatatt

SEQ ID NO: 76969 - DNA, 25 bp, Artificial sequence
  SiRNA target sequence
agttttctacaaatttacaatattt

SEQ ID NO: 76970 - DNA, 25 bp, Artificial sequence
  SiRNA target sequence
gttttctacaaatttacaatatttt

SEQ ID NO: 76971 - DNA, 25 bp, Artificial sequence
  SiRNA target sequence
ttttctacaaatttacaatattttt

SEQ ID NO: 76972 - DNA, 25 bp, Artificial sequence
  SiRNA target sequence
tttctacaaatttacaatatttttt

SEQ ID NO: 76973 - DNA, 25 bp, Artificial sequence
  SiRNA target sequence
ttctacaaatttacaatatttttta

SEQ ID NO: 76974 - DNA, 25 bp, Artificial sequence
  SiRNA target sequence
tctacaaatttacaatattttttat

SEQ ID NO: 76975 - DNA, 25 bp, Artificial sequence
  SiRNA target sequence
ctacaaatttacaatattttttatc

SEQ ID NO: 76976 - DNA, 25 bp, Artificial sequence
  SiRNA target sequence
tacaaatttacaatattttttatca

SEQ ID NO: 76977 - DNA, 25 bp, Artificial sequence
  SiRNA target sequence
acaaatttacaatattttttatcat

SEQ ID NO: 76978 - DNA, 25 bp, Artificial sequence
  SiRNA target sequence
caaatttacaatattttttatcata

SEQ ID NO: 76979 - DNA, 25 bp, Artificial sequence
  SiRNA target sequence
aaatttacaatattttttatcatac

SEQ ID NO: 76980 - DNA, 25 bp, Artificial sequence
  SiRNA target sequence
aatttacaatattttttatcataca

SEQ ID NO: 76981 - DNA, 25 bp, Artificial sequence
  SiRNA target sequence
atttacaatattttttatcatacaa

SEQ ID NO: 76982 - DNA, 25 bp, Artificial sequence
  SiRNA target sequence
tttacaatattttttatcatacaaa

SEQ ID NO: 76983 - DNA, 25 bp, Artificial sequence
  SiRNA target sequence
ttacaatattttttatcatacaaat

SEQ ID NO: 76984 - DNA, 25 bp, Artificial sequence
  SiRNA target sequence
tacaatattttttatcatacaaatt

SEQ ID NO: 76985 - DNA, 25 bp, Artificial sequence
  SiRNA target sequence
acaatattttttatcatacaaatta

SEQ ID NO: 76986 - DNA, 25 bp, Artificial sequence
  SiRNA target sequence
caatattttttatcatacaaattag

SEQ ID NO: 76987 - DNA, 25 bp, Artificial sequence
  SiRNA target sequence
aatattttttatcatacaaattagg

SEQ ID NO: 76988 - DNA, 25 bp, Artificial sequence
  SiRNA target sequence
atattttttatcatacaaattaggt

SEQ ID NO: 76989 - DNA, 25 bp, Artificial sequence
  SiRNA target sequence
tattttttatcatacaaattaggta

SEQ ID NO: 76990 - DNA, 25 bp, Artificial sequence
  SiRNA target sequence
attttttatcatacaaattaggtaa

SEQ ID NO: 76991 - DNA, 25 bp, Artificial sequence
  SiRNA target sequence
ttttttatcatacaaattaggtaaa

SEQ ID NO: 76992 - DNA, 25 bp, Artificial sequence
  SiRNA target sequence
tttttatcatacaaattaggtaaat

SEQ ID NO: 76993 - DNA, 25 bp, Artificial sequence
  SiRNA target sequence
ttttatcatacaaattaggtaaata

SEQ ID NO: 76994 - DNA, 25 bp, Artificial sequence
  SiRNA target sequence
tttatcatacaaattaggtaaataa

SEQ ID NO: 76995 - DNA, 26 bp, Artificial sequence
  SiRNA target sequence
atgaaaaaaatttcgaatagaaaaat

SEQ ID NO: 76996 - DNA, 26 bp, Artificial sequence
  SiRNA target sequence
tgaaaaaaatttcgaatagaaaaatt

SEQ ID NO: 76997 - DNA, 26 bp, Artificial sequence
  SiRNA target sequence
gaaaaaaatttcgaatagaaaaatta

SEQ ID NO: 76998 - DNA, 26 bp, Artificial sequence
  SiRNA target sequence
aaaaaaatttcgaatagaaaaattat

SEQ ID NO: 76999 - DNA, 26 bp, Artificial sequence
  SiRNA target sequence
aaaaaatttcgaatagaaaaattatc

SEQ ID NO: 77000 - DNA, 26 bp, Artificial sequence
  SiRNA target sequence
aaaaatttcgaatagaaaaattatca

SEQ ID NO: 77001 - DNA, 26 bp, Artificial sequence
  SiRNA target sequence
aaaatttcgaatagaaaaattatcaa

SEQ ID NO: 77002 - DNA, 26 bp, Artificial sequence
  SiRNA target sequence
aaatttcgaatagaaaaattatcaaa

SEQ ID NO: 77003 - DNA, 26 bp, Artificial sequence
  SiRNA target sequence
aatttcgaatagaaaaattatcaaag

SEQ ID NO: 77004 - DNA, 26 bp, Artificial sequence
  SiRNA target sequence
atttcgaatagaaaaattatcaaaga

SEQ ID NO: 77005 - DNA, 26 bp, Artificial sequence
  SiRNA target sequence
tttcgaatagaaaaattatcaaagaa

SEQ ID NO: 77006 - DNA, 26 bp, Artificial sequence
  SiRNA target sequence
ttcgaatagaaaaattatcaaagaaa

SEQ ID NO: 77007 - DNA, 26 bp, Artificial sequence
  SiRNA target sequence
tcgaatagaaaaattatcaaagaaat

SEQ ID NO: 77008 - DNA, 26 bp, Artificial sequence
  SiRNA target sequence
cgaatagaaaaattatcaaagaaatt

SEQ ID NO: 77009 - DNA, 26 bp, Artificial sequence
  SiRNA target sequence
gaatagaaaaattatcaaagaaatta

SEQ ID NO: 77010 - DNA, 26 bp, Artificial sequence
  SiRNA target sequence
aatagaaaaattatcaaagaaattat

SEQ ID NO: 77011 - DNA, 26 bp, Artificial sequence
  SiRNA target sequence
atagaaaaattatcaaagaaattatt

SEQ ID NO: 77012 - DNA, 26 bp, Artificial sequence
  SiRNA target sequence
tagaaaaattatcaaagaaattattt

SEQ ID NO: 77013 - DNA, 26 bp, Artificial sequence
  SiRNA target sequence
agaaaaattatcaaagaaattattta

SEQ ID NO: 77014 - DNA, 26 bp, Artificial sequence
  SiRNA target sequence
gaaaaattatcaaagaaattatttac

SEQ ID NO: 77015 - DNA, 26 bp, Artificial sequence
  SiRNA target sequence
aaaaattatcaaagaaattatttaca

SEQ ID NO: 77016 - DNA, 26 bp, Artificial sequence
  SiRNA target sequence
aaaattatcaaagaaattatttacaa

SEQ ID NO: 77017 - DNA, 26 bp, Artificial sequence
  SiRNA target sequence
aaattatcaaagaaattatttacaat

SEQ ID NO: 77018 - DNA, 26 bp, Artificial sequence
  SiRNA target sequence
aattatcaaagaaattatttacaatg

SEQ ID NO: 77019 - DNA, 26 bp, Artificial sequence
  SiRNA target sequence
attatcaaagaaattatttacaatga

SEQ ID NO: 77020 - DNA, 26 bp, Artificial sequence
  SiRNA target sequence
ttatcaaagaaattatttacaatgat

SEQ ID NO: 77021 - DNA, 26 bp, Artificial sequence
  SiRNA target sequence
tatcaaagaaattatttacaatgatt

SEQ ID NO: 77022 - DNA, 26 bp, Artificial sequence
  SiRNA target sequence
atcaaagaaattatttacaatgattt

SEQ ID NO: 77023 - DNA, 26 bp, Artificial sequence
  SiRNA target sequence
tcaaagaaattatttacaatgattta

SEQ ID NO: 77024 - DNA, 26 bp, Artificial sequence
  SiRNA target sequence
caaagaaattatttacaatgatttat

SEQ ID NO: 77025 - DNA, 26 bp, Artificial sequence
  SiRNA target sequence
aaagaaattatttacaatgatttatt

SEQ ID NO: 77026 - DNA, 26 bp, Artificial sequence
  SiRNA target sequence
aagaaattatttacaatgatttatta

SEQ ID NO: 77027 - DNA, 26 bp, Artificial sequence
  SiRNA target sequence
agaaattatttacaatgatttattaa

SEQ ID NO: 77028 - DNA, 26 bp, Artificial sequence
  SiRNA target sequence
gaaattatttacaatgatttattaaa

SEQ ID NO: 77029 - DNA, 26 bp, Artificial sequence
  SiRNA target sequence
aaattatttacaatgatttattaaaa

SEQ ID NO: 77030 - DNA, 26 bp, Artificial sequence
  SiRNA target sequence
aattatttacaatgatttattaaaaa

SEQ ID NO: 77031 - DNA, 26 bp, Artificial sequence
  SiRNA target sequence
attatttacaatgatttattaaaaat

SEQ ID NO: 77032 - DNA, 26 bp, Artificial sequence
  SiRNA target sequence
ttatttacaatgatttattaaaaata

SEQ ID NO: 77033 - DNA, 26 bp, Artificial sequence
  SiRNA target sequence
tatttacaatgatttattaaaaataa

SEQ ID NO: 77034 - DNA, 26 bp, Artificial sequence
  SiRNA target sequence
atttacaatgatttattaaaaataag

SEQ ID NO: 77035 - DNA, 26 bp, Artificial sequence
  SiRNA target sequence
tttacaatgatttattaaaaataaga

SEQ ID NO: 77036 - DNA, 26 bp, Artificial sequence
  SiRNA target sequence
ttacaatgatttattaaaaataagaa

SEQ ID NO: 77037 - DNA, 26 bp, Artificial sequence
  SiRNA target sequence
tacaatgatttattaaaaataagaat

SEQ ID NO: 77038 - DNA, 26 bp, Artificial sequence
  SiRNA target sequence
acaatgatttattaaaaataagaatg

SEQ ID NO: 77039 - DNA, 26 bp, Artificial sequence
  SiRNA target sequence
caatgatttattaaaaataagaatgt

SEQ ID NO: 77040 - DNA, 26 bp, Artificial sequence
  SiRNA target sequence
aatgatttattaaaaataagaatgtt

SEQ ID NO: 77041 - DNA, 26 bp, Artificial sequence
  SiRNA target sequence
atgatttattaaaaataagaatgttg

SEQ ID NO: 77042 - DNA, 26 bp, Artificial sequence
  SiRNA target sequence
tgatttattaaaaataagaatgttgc

SEQ ID NO: 77043 - DNA, 26 bp, Artificial sequence
  SiRNA target sequence
gatttattaaaaataagaatgttgcg

SEQ ID NO: 77044 - DNA, 26 bp, Artificial sequence
  SiRNA target sequence
atttattaaaaataagaatgttgcga

SEQ ID NO: 77045 - DNA, 26 bp, Artificial sequence
  SiRNA target sequence
tttattaaaaataagaatgttgcgat

SEQ ID NO: 77046 - DNA, 26 bp, Artificial sequence
  SiRNA target sequence
ttattaaaaataagaatgttgcgata

SEQ ID NO: 77047 - DNA, 26 bp, Artificial sequence
  SiRNA target sequence
tattaaaaataagaatgttgcgatat

SEQ ID NO: 77048 - DNA, 26 bp, Artificial sequence
  SiRNA target sequence
attaaaaataagaatgttgcgatatg

SEQ ID NO: 77049 - DNA, 26 bp, Artificial sequence
  SiRNA target sequence
ttaaaaataagaatgttgcgatatgt

SEQ ID NO: 77050 - DNA, 26 bp, Artificial sequence
  SiRNA target sequence
taaaaataagaatgttgcgatatgtt

SEQ ID NO: 77051 - DNA, 26 bp, Artificial sequence
  SiRNA target sequence
aaaaataagaatgttgcgatatgtta

SEQ ID NO: 77052 - DNA, 26 bp, Artificial sequence
  SiRNA target sequence
aaaataagaatgttgcgatatgttat

SEQ ID NO: 77053 - DNA, 26 bp, Artificial sequence
  SiRNA target sequence
aaataagaatgttgcgatatgttatt

SEQ ID NO: 77054 - DNA, 26 bp, Artificial sequence
  SiRNA target sequence
aataagaatgttgcgatatgttattg

SEQ ID NO: 77055 - DNA, 26 bp, Artificial sequence
  SiRNA target sequence
ataagaatgttgcgatatgttattgt

SEQ ID NO: 77056 - DNA, 26 bp, Artificial sequence
  SiRNA target sequence
taagaatgttgcgatatgttattgta

SEQ ID NO: 77057 - DNA, 26 bp, Artificial sequence
  SiRNA target sequence
aagaatgttgcgatatgttattgtac

SEQ ID NO: 77058 - DNA, 26 bp, Artificial sequence
  SiRNA target sequence
agaatgttgcgatatgttattgtacc

SEQ ID NO: 77059 - DNA, 26 bp, Artificial sequence
  SiRNA target sequence
gaatgttgcgatatgttattgtacca

SEQ ID NO: 77060 - DNA, 26 bp, Artificial sequence
  SiRNA target sequence
aatgttgcgatatgttattgtaccaa

SEQ ID NO: 77061 - DNA, 26 bp, Artificial sequence
  SiRNA target sequence
atgttgcgatatgttattgtaccaat

SEQ ID NO: 77062 - DNA, 26 bp, Artificial sequence
  SiRNA target sequence
tgttgcgatatgttattgtaccaata

SEQ ID NO: 77063 - DNA, 26 bp, Artificial sequence
  SiRNA target sequence
gttgcgatatgttattgtaccaataa

SEQ ID NO: 77064 - DNA, 26 bp, Artificial sequence
  SiRNA target sequence
ttgcgatatgttattgtaccaataat

SEQ ID NO: 77065 - DNA, 26 bp, Artificial sequence
  SiRNA target sequence
tgcgatatgttattgtaccaataata

SEQ ID NO: 77066 - DNA, 26 bp, Artificial sequence
  SiRNA target sequence
gcgatatgttattgtaccaataatat

SEQ ID NO: 77067 - DNA, 26 bp, Artificial sequence
  SiRNA target sequence
cgatatgttattgtaccaataatatt

SEQ ID NO: 77068 - DNA, 26 bp, Artificial sequence
  SiRNA target sequence
gatatgttattgtaccaataatattt

SEQ ID NO: 77069 - DNA, 26 bp, Artificial sequence
  SiRNA target sequence
atatgttattgtaccaataatatttt

SEQ ID NO: 77070 - DNA, 26 bp, Artificial sequence
  SiRNA target sequence
tatgttattgtaccaataatattttt

SEQ ID NO: 77071 - DNA, 26 bp, Artificial sequence
  SiRNA target sequence
atgttattgtaccaataatattttta

SEQ ID NO: 77072 - DNA, 26 bp, Artificial sequence
  SiRNA target sequence
tgttattgtaccaataatatttttaa

SEQ ID NO: 77073 - DNA, 26 bp, Artificial sequence
  SiRNA target sequence
gttattgtaccaataatatttttaac

SEQ ID NO: 77074 - DNA, 26 bp, Artificial sequence
  SiRNA target sequence
ttattgtaccaataatatttttaact

SEQ ID NO: 77075 - DNA, 26 bp, Artificial sequence
  SiRNA target sequence
tattgtaccaataatatttttaacta

SEQ ID NO: 77076 - DNA, 26 bp, Artificial sequence
  SiRNA target sequence
attgtaccaataatatttttaactat

SEQ ID NO: 77077 - DNA, 26 bp, Artificial sequence
  SiRNA target sequence
ttgtaccaataatatttttaactata

SEQ ID NO: 77078 - DNA, 26 bp, Artificial sequence
  SiRNA target sequence
tgtaccaataatatttttaactatat

SEQ ID NO: 77079 - DNA, 26 bp, Artificial sequence
  SiRNA target sequence
gtaccaataatatttttaactatatt

SEQ ID NO: 77080 - DNA, 26 bp, Artificial sequence
  SiRNA target sequence
taccaataatatttttaactatattt

SEQ ID NO: 77081 - DNA, 26 bp, Artificial sequence
  SiRNA target sequence
accaataatatttttaactatatttt

SEQ ID NO: 77082 - DNA, 26 bp, Artificial sequence
  SiRNA target sequence
ccaataatatttttaactatatttta

SEQ ID NO: 77083 - DNA, 26 bp, Artificial sequence
  SiRNA target sequence
caataatatttttaactatattttac

SEQ ID NO: 77084 - DNA, 26 bp, Artificial sequence
  SiRNA target sequence
aataatatttttaactatattttaca

SEQ ID NO: 77085 - DNA, 26 bp, Artificial sequence
  SiRNA target sequence
ataatatttttaactatattttacac

SEQ ID NO: 77086 - DNA, 26 bp, Artificial sequence
  SiRNA target sequence
taatatttttaactatattttacact

SEQ ID NO: 77087 - DNA, 26 bp, Artificial sequence
  SiRNA target sequence
aatatttttaactatattttacactg

SEQ ID NO: 77088 - DNA, 26 bp, Artificial sequence
  SiRNA target sequence
atatttttaactatattttacactgt

SEQ ID NO: 77089 - DNA, 26 bp, Artificial sequence
  SiRNA target sequence
tatttttaactatattttacactgtt

SEQ ID NO: 77090 - DNA, 26 bp, Artificial sequence
  SiRNA target sequence
atttttaactatattttacactgttt

SEQ ID NO: 77091 - DNA, 26 bp, Artificial sequence
  SiRNA target sequence
tttttaactatattttacactgtttt

SEQ ID NO: 77092 - DNA, 26 bp, Artificial sequence
  SiRNA target sequence
ttttaactatattttacactgtttta

SEQ ID NO: 77093 - DNA, 26 bp, Artificial sequence
  SiRNA target sequence
tttaactatattttacactgttttag

SEQ ID NO: 77094 - DNA, 26 bp, Artificial sequence
  SiRNA target sequence
ttaactatattttacactgttttaga

SEQ ID NO: 77095 - DNA, 26 bp, Artificial sequence
  SiRNA target sequence
taactatattttacactgttttagag

SEQ ID NO: 77096 - DNA, 26 bp, Artificial sequence
  SiRNA target sequence
aactatattttacactgttttagaga

SEQ ID NO: 77097 - DNA, 26 bp, Artificial sequence
  SiRNA target sequence
actatattttacactgttttagagat

SEQ ID NO: 77098 - DNA, 26 bp, Artificial sequence
  SiRNA target sequence
ctatattttacactgttttagagata

SEQ ID NO: 77099 - DNA, 26 bp, Artificial sequence
  SiRNA target sequence
tatattttacactgttttagagataa

SEQ ID NO: 77100 - DNA, 26 bp, Artificial sequence
  SiRNA target sequence
atattttacactgttttagagataaa

SEQ ID NO: 77101 - DNA, 26 bp, Artificial sequence
  SiRNA target sequence
tattttacactgttttagagataaaa

SEQ ID NO: 77102 - DNA, 26 bp, Artificial sequence
  SiRNA target sequence
attttacactgttttagagataaaaa

SEQ ID NO: 77103 - DNA, 26 bp, Artificial sequence
  SiRNA target sequence
ttttacactgttttagagataaaaat

SEQ ID NO: 77104 - DNA, 26 bp, Artificial sequence
  SiRNA target sequence
tttacactgttttagagataaaaata

SEQ ID NO: 77105 - DNA, 26 bp, Artificial sequence
  SiRNA target sequence
ttacactgttttagagataaaaataa

SEQ ID NO: 77106 - DNA, 26 bp, Artificial sequence
  SiRNA target sequence
tacactgttttagagataaaaataag

SEQ ID NO: 77107 - DNA, 26 bp, Artificial sequence
  SiRNA target sequence
acactgttttagagataaaaataagt

SEQ ID NO: 77108 - DNA, 26 bp, Artificial sequence
  SiRNA target sequence
cactgttttagagataaaaataagta

SEQ ID NO: 77109 - DNA, 26 bp, Artificial sequence
  SiRNA target sequence
actgttttagagataaaaataagtac

SEQ ID NO: 77110 - DNA, 26 bp, Artificial sequence
  SiRNA target sequence
ctgttttagagataaaaataagtaca

SEQ ID NO: 77111 - DNA, 26 bp, Artificial sequence
  SiRNA target sequence
tgttttagagataaaaataagtacat

SEQ ID NO: 77112 - DNA, 26 bp, Artificial sequence
  SiRNA target sequence
gttttagagataaaaataagtacatt

SEQ ID NO: 77113 - DNA, 26 bp, Artificial sequence
  SiRNA target sequence
ttttagagataaaaataagtacatta

SEQ ID NO: 77114 - DNA, 26 bp, Artificial sequence
  SiRNA target sequence
tttagagataaaaataagtacattag

SEQ ID NO: 77115 - DNA, 26 bp, Artificial sequence
  SiRNA target sequence
ttagagataaaaataagtacattagt

SEQ ID NO: 77116 - DNA, 26 bp, Artificial sequence
  SiRNA target sequence
tagagataaaaataagtacattagta

SEQ ID NO: 77117 - DNA, 26 bp, Artificial sequence
  SiRNA target sequence
agagataaaaataagtacattagtaa

SEQ ID NO: 77118 - DNA, 26 bp, Artificial sequence
  SiRNA target sequence
gagataaaaataagtacattagtaaa

SEQ ID NO: 77119 - DNA, 26 bp, Artificial sequence
  SiRNA target sequence
agataaaaataagtacattagtaaag

SEQ ID NO: 77120 - DNA, 26 bp, Artificial sequence
  SiRNA target sequence
gataaaaataagtacattagtaaaga

SEQ ID NO: 77121 - DNA, 26 bp, Artificial sequence
  SiRNA target sequence
ataaaaataagtacattagtaaagaa

SEQ ID NO: 77122 - DNA, 26 bp, Artificial sequence
  SiRNA target sequence
taaaaataagtacattagtaaagaat

SEQ ID NO: 77123 - DNA, 26 bp, Artificial sequence
  SiRNA target sequence
aaaaataagtacattagtaaagaatc

SEQ ID NO: 77124 - DNA, 26 bp, Artificial sequence
  SiRNA target sequence
aaaataagtacattagtaaagaatct

SEQ ID NO: 77125 - DNA, 26 bp, Artificial sequence
  SiRNA target sequence
aaataagtacattagtaaagaatctt

SEQ ID NO: 77126 - DNA, 26 bp, Artificial sequence
  SiRNA target sequence
aataagtacattagtaaagaatctta

SEQ ID NO: 77127 - DNA, 26 bp, Artificial sequence
  SiRNA target sequence
ataagtacattagtaaagaatcttaa

SEQ ID NO: 77128 - DNA, 26 bp, Artificial sequence
  SiRNA target sequence
taagtacattagtaaagaatcttaat

SEQ ID NO: 77129 - DNA, 26 bp, Artificial sequence
  SiRNA target sequence
aagtacattagtaaagaatcttaatc

SEQ ID NO: 77130 - DNA, 26 bp, Artificial sequence
  SiRNA target sequence
agtacattagtaaagaatcttaatca

SEQ ID NO: 77131 - DNA, 26 bp, Artificial sequence
  SiRNA target sequence
gtacattagtaaagaatcttaatcaa

SEQ ID NO: 77132 - DNA, 26 bp, Artificial sequence
  SiRNA target sequence
tacattagtaaagaatcttaatcaat

SEQ ID NO: 77133 - DNA, 26 bp, Artificial sequence
  SiRNA target sequence
acattagtaaagaatcttaatcaatc

SEQ ID NO: 77134 - DNA, 26 bp, Artificial sequence
  SiRNA target sequence
cattagtaaagaatcttaatcaatct

SEQ ID NO: 77135 - DNA, 26 bp, Artificial sequence
  SiRNA target sequence
attagtaaagaatcttaatcaatcta

SEQ ID NO: 77136 - DNA, 26 bp, Artificial sequence
  SiRNA target sequence
ttagtaaagaatcttaatcaatctat

SEQ ID NO: 77137 - DNA, 26 bp, Artificial sequence
  SiRNA target sequence
tagtaaagaatcttaatcaatctatc

SEQ ID NO: 77138 - DNA, 26 bp, Artificial sequence
  SiRNA target sequence
agtaaagaatcttaatcaatctatcg

SEQ ID NO: 77139 - DNA, 26 bp, Artificial sequence
  SiRNA target sequence
gtaaagaatcttaatcaatctatcgc

SEQ ID NO: 77140 - DNA, 26 bp, Artificial sequence
  SiRNA target sequence
taaagaatcttaatcaatctatcgca

SEQ ID NO: 77141 - DNA, 26 bp, Artificial sequence
  SiRNA target sequence
aaagaatcttaatcaatctatcgcaa

SEQ ID NO: 77142 - DNA, 26 bp, Artificial sequence
  SiRNA target sequence
aagaatcttaatcaatctatcgcaaa

SEQ ID NO: 77143 - DNA, 26 bp, Artificial sequence
  SiRNA target sequence
agaatcttaatcaatctatcgcaaat

SEQ ID NO: 77144 - DNA, 26 bp, Artificial sequence
  SiRNA target sequence
gaatcttaatcaatctatcgcaaatc

SEQ ID NO: 77145 - DNA, 26 bp, Artificial sequence
  SiRNA target sequence
aatcttaatcaatctatcgcaaatcg

SEQ ID NO: 77146 - DNA, 26 bp, Artificial sequence
  SiRNA target sequence
atcttaatcaatctatcgcaaatcga

SEQ ID NO: 77147 - DNA, 26 bp, Artificial sequence
  SiRNA target sequence
tcttaatcaatctatcgcaaatcgaa

SEQ ID NO: 77148 - DNA, 26 bp, Artificial sequence
  SiRNA target sequence
cttaatcaatctatcgcaaatcgaaa

SEQ ID NO: 77149 - DNA, 26 bp, Artificial sequence
  SiRNA target sequence
ttaatcaatctatcgcaaatcgaaaa

SEQ ID NO: 77150 - DNA, 26 bp, Artificial sequence
  SiRNA target sequence
taatcaatctatcgcaaatcgaaaag

SEQ ID NO: 77151 - DNA, 26 bp, Artificial sequence
  SiRNA target sequence
aatcaatctatcgcaaatcgaaaagg

SEQ ID NO: 77152 - DNA, 26 bp, Artificial sequence
  SiRNA target sequence
atcaatctatcgcaaatcgaaaaggt

SEQ ID NO: 77153 - DNA, 26 bp, Artificial sequence
  SiRNA target sequence
tcaatctatcgcaaatcgaaaaggtg

SEQ ID NO: 77154 - DNA, 26 bp, Artificial sequence
  SiRNA target sequence
caatctatcgcaaatcgaaaaggtga

SEQ ID NO: 77155 - DNA, 26 bp, Artificial sequence
  SiRNA target sequence
aatctatcgcaaatcgaaaaggtgaa

SEQ ID NO: 77156 - DNA, 26 bp, Artificial sequence
  SiRNA target sequence
atctatcgcaaatcgaaaaggtgaac

SEQ ID NO: 77157 - DNA, 26 bp, Artificial sequence
  SiRNA target sequence
tctatcgcaaatcgaaaaggtgaaca

SEQ ID NO: 77158 - DNA, 26 bp, Artificial sequence
  SiRNA target sequence
ctatcgcaaatcgaaaaggtgaacac

SEQ ID NO: 77159 - DNA, 26 bp, Artificial sequence
  SiRNA target sequence
tatcgcaaatcgaaaaggtgaacaca

SEQ ID NO: 77160 - DNA, 26 bp, Artificial sequence
  SiRNA target sequence
atcgcaaatcgaaaaggtgaacacac

SEQ ID NO: 77161 - DNA, 26 bp, Artificial sequence
  SiRNA target sequence
tcgcaaatcgaaaaggtgaacacaca

SEQ ID NO: 77162 - DNA, 26 bp, Artificial sequence
  SiRNA target sequence
cgcaaatcgaaaaggtgaacacacag

SEQ ID NO: 77163 - DNA, 26 bp, Artificial sequence
  SiRNA target sequence
gcaaatcgaaaaggtgaacacacagc

SEQ ID NO: 77164 - DNA, 26 bp, Artificial sequence
  SiRNA target sequence
caaatcgaaaaggtgaacacacagca

SEQ ID NO: 77165 - DNA, 26 bp, Artificial sequence
  SiRNA target sequence
aaatcgaaaaggtgaacacacagcac

SEQ ID NO: 77166 - DNA, 26 bp, Artificial sequence
  SiRNA target sequence
aatcgaaaaggtgaacacacagcact

SEQ ID NO: 77167 - DNA, 26 bp, Artificial sequence
  SiRNA target sequence
atcgaaaaggtgaacacacagcactt

SEQ ID NO: 77168 - DNA, 26 bp, Artificial sequence
  SiRNA target sequence
tcgaaaaggtgaacacacagcacttg

SEQ ID NO: 77169 - DNA, 26 bp, Artificial sequence
  SiRNA target sequence
cgaaaaggtgaacacacagcacttga

SEQ ID NO: 77170 - DNA, 26 bp, Artificial sequence
  SiRNA target sequence
gaaaaggtgaacacacagcacttgaa

SEQ ID NO: 77171 - DNA, 26 bp, Artificial sequence
  SiRNA target sequence
aaaaggtgaacacacagcacttgaaa

SEQ ID NO: 77172 - DNA, 26 bp, Artificial sequence
  SiRNA target sequence
aaaggtgaacacacagcacttgaaag

SEQ ID NO: 77173 - DNA, 26 bp, Artificial sequence
  SiRNA target sequence
aaggtgaacacacagcacttgaaaga

SEQ ID NO: 77174 - DNA, 26 bp, Artificial sequence
  SiRNA target sequence
aggtgaacacacagcacttgaaagat

SEQ ID NO: 77175 - DNA, 26 bp, Artificial sequence
  SiRNA target sequence
ggtgaacacacagcacttgaaagatt

SEQ ID NO: 77176 - DNA, 26 bp, Artificial sequence
  SiRNA target sequence
gtgaacacacagcacttgaaagattt

SEQ ID NO: 77177 - DNA, 26 bp, Artificial sequence
  SiRNA target sequence
tgaacacacagcacttgaaagatttg

SEQ ID NO: 77178 - DNA, 26 bp, Artificial sequence
  SiRNA target sequence
gaacacacagcacttgaaagatttgt

SEQ ID NO: 77179 - DNA, 26 bp, Artificial sequence
  SiRNA target sequence
aacacacagcacttgaaagatttgtg

SEQ ID NO: 77180 - DNA, 26 bp, Artificial sequence
  SiRNA target sequence
acacacagcacttgaaagatttgtgt

SEQ ID NO: 77181 - DNA, 26 bp, Artificial sequence
  SiRNA target sequence
cacacagcacttgaaagatttgtgtt

SEQ ID NO: 77182 - DNA, 26 bp, Artificial sequence
  SiRNA target sequence
acacagcacttgaaagatttgtgtta

SEQ ID NO: 77183 - DNA, 26 bp, Artificial sequence
  SiRNA target sequence
cacagcacttgaaagatttgtgttac

SEQ ID NO: 77184 - DNA, 26 bp, Artificial sequence
  SiRNA target sequence
acagcacttgaaagatttgtgttaca

SEQ ID NO: 77185 - DNA, 26 bp, Artificial sequence
  SiRNA target sequence
cagcacttgaaagatttgtgttacag

SEQ ID NO: 77186 - DNA, 26 bp, Artificial sequence
  SiRNA target sequence
agcacttgaaagatttgtgttacagt

SEQ ID NO: 77187 - DNA, 26 bp, Artificial sequence
  SiRNA target sequence
gcacttgaaagatttgtgttacagtc

SEQ ID NO: 77188 - DNA, 26 bp, Artificial sequence
  SiRNA target sequence
cacttgaaagatttgtgttacagtca

SEQ ID NO: 77189 - DNA, 26 bp, Artificial sequence
  SiRNA target sequence
acttgaaagatttgtgttacagtcac

SEQ ID NO: 77190 - DNA, 26 bp, Artificial sequence
  SiRNA target sequence
cttgaaagatttgtgttacagtcact

SEQ ID NO: 77191 - DNA, 26 bp, Artificial sequence
  SiRNA target sequence
ttgaaagatttgtgttacagtcactc

SEQ ID NO: 77192 - DNA, 26 bp, Artificial sequence
  SiRNA target sequence
tgaaagatttgtgttacagtcactct

SEQ ID NO: 77193 - DNA, 26 bp, Artificial sequence
  SiRNA target sequence
gaaagatttgtgttacagtcactctt

SEQ ID NO: 77194 - DNA, 26 bp, Artificial sequence
  SiRNA target sequence
aaagatttgtgttacagtcactctta

SEQ ID NO: 77195 - DNA, 26 bp, Artificial sequence
  SiRNA target sequence
aagatttgtgttacagtcactcttag

SEQ ID NO: 77196 - DNA, 26 bp, Artificial sequence
  SiRNA target sequence
agatttgtgttacagtcactcttagt

SEQ ID NO: 77197 - DNA, 26 bp, Artificial sequence
  SiRNA target sequence
gatttgtgttacagtcactcttagtg

SEQ ID NO: 77198 - DNA, 26 bp, Artificial sequence
  SiRNA target sequence
atttgtgttacagtcactcttagtgg

SEQ ID NO: 77199 - DNA, 26 bp, Artificial sequence
  SiRNA target sequence
tttgtgttacagtcactcttagtggc

SEQ ID NO: 77200 - DNA, 26 bp, Artificial sequence
  SiRNA target sequence
ttgtgttacagtcactcttagtggct

SEQ ID NO: 77201 - DNA, 26 bp, Artificial sequence
  SiRNA target sequence
tgtgttacagtcactcttagtggctg

SEQ ID NO: 77202 - DNA, 26 bp, Artificial sequence
  SiRNA target sequence
gtgttacagtcactcttagtggctgt

SEQ ID NO: 77203 - DNA, 26 bp, Artificial sequence
  SiRNA target sequence
tgttacagtcactcttagtggctgta

SEQ ID NO: 77204 - DNA, 26 bp, Artificial sequence
  SiRNA target sequence
gttacagtcactcttagtggctgtat

SEQ ID NO: 77205 - DNA, 26 bp, Artificial sequence
  SiRNA target sequence
ttacagtcactcttagtggctgtatt

SEQ ID NO: 77206 - DNA, 26 bp, Artificial sequence
  SiRNA target sequence
tacagtcactcttagtggctgtattg

SEQ ID NO: 77207 - DNA, 26 bp, Artificial sequence
  SiRNA target sequence
acagtcactcttagtggctgtattga

SEQ ID NO: 77208 - DNA, 26 bp, Artificial sequence
  SiRNA target sequence
cagtcactcttagtggctgtattgac

SEQ ID NO: 77209 - DNA, 26 bp, Artificial sequence
  SiRNA target sequence
agtcactcttagtggctgtattgacc

SEQ ID NO: 77210 - DNA, 26 bp, Artificial sequence
  SiRNA target sequence
gtcactcttagtggctgtattgaccg

SEQ ID NO: 77211 - DNA, 26 bp, Artificial sequence
  SiRNA target sequence
tcactcttagtggctgtattgaccga

SEQ ID NO: 77212 - DNA, 26 bp, Artificial sequence
  SiRNA target sequence
cactcttagtggctgtattgaccgaa

SEQ ID NO: 77213 - DNA, 26 bp, Artificial sequence
  SiRNA target sequence
actcttagtggctgtattgaccgaac

SEQ ID NO: 77214 - DNA, 26 bp, Artificial sequence
  SiRNA target sequence
ctcttagtggctgtattgaccgaact

SEQ ID NO: 77215 - DNA, 26 bp, Artificial sequence
  SiRNA target sequence
tcttagtggctgtattgaccgaactt

SEQ ID NO: 77216 - DNA, 26 bp, Artificial sequence
  SiRNA target sequence
cttagtggctgtattgaccgaactta

SEQ ID NO: 77217 - DNA, 26 bp, Artificial sequence
  SiRNA target sequence
ttagtggctgtattgaccgaacttaa

SEQ ID NO: 77218 - DNA, 26 bp, Artificial sequence
  SiRNA target sequence
tagtggctgtattgaccgaacttaat

SEQ ID NO: 77219 - DNA, 26 bp, Artificial sequence
  SiRNA target sequence
agtggctgtattgaccgaacttaatg

SEQ ID NO: 77220 - DNA, 26 bp, Artificial sequence
  SiRNA target sequence
gtggctgtattgaccgaacttaatgg

SEQ ID NO: 77221 - DNA, 26 bp, Artificial sequence
  SiRNA target sequence
tggctgtattgaccgaacttaatgga

SEQ ID NO: 77222 - DNA, 26 bp, Artificial sequence
  SiRNA target sequence
ggctgtattgaccgaacttaatggat

SEQ ID NO: 77223 - DNA, 26 bp, Artificial sequence
  SiRNA target sequence
gctgtattgaccgaacttaatggatt

SEQ ID NO: 77224 - DNA, 26 bp, Artificial sequence
  SiRNA target sequence
ctgtattgaccgaacttaatggattt

SEQ ID NO: 77225 - DNA, 26 bp, Artificial sequence
  SiRNA target sequence
tgtattgaccgaacttaatggattta

SEQ ID NO: 77226 - DNA, 26 bp, Artificial sequence
  SiRNA target sequence
gtattgaccgaacttaatggatttat

SEQ ID NO: 77227 - DNA, 26 bp, Artificial sequence
  SiRNA target sequence
tattgaccgaacttaatggatttatt

SEQ ID NO: 77228 - DNA, 26 bp, Artificial sequence
  SiRNA target sequence
attgaccgaacttaatggatttattt

SEQ ID NO: 77229 - DNA, 26 bp, Artificial sequence
  SiRNA target sequence
ttgaccgaacttaatggatttatttt

SEQ ID NO: 77230 - DNA, 26 bp, Artificial sequence
  SiRNA target sequence
tgaccgaacttaatggatttattttt

SEQ ID NO: 77231 - DNA, 26 bp, Artificial sequence
  SiRNA target sequence
gaccgaacttaatggatttattttta

SEQ ID NO: 77232 - DNA, 26 bp, Artificial sequence
  SiRNA target sequence
accgaacttaatggatttatttttac

SEQ ID NO: 77233 - DNA, 26 bp, Artificial sequence
  SiRNA target sequence
ccgaacttaatggatttatttttaca

SEQ ID NO: 77234 - DNA, 26 bp, Artificial sequence
  SiRNA target sequence
cgaacttaatggatttatttttacag

SEQ ID NO: 77235 - DNA, 26 bp, Artificial sequence
  SiRNA target sequence
gaacttaatggatttatttttacagg

SEQ ID NO: 77236 - DNA, 26 bp, Artificial sequence
  SiRNA target sequence
aacttaatggatttatttttacaggt

SEQ ID NO: 77237 - DNA, 26 bp, Artificial sequence
  SiRNA target sequence
acttaatggatttatttttacaggtg

SEQ ID NO: 77238 - DNA, 26 bp, Artificial sequence
  SiRNA target sequence
cttaatggatttatttttacaggtgt

SEQ ID NO: 77239 - DNA, 26 bp, Artificial sequence
  SiRNA target sequence
ttaatggatttatttttacaggtgta

SEQ ID NO: 77240 - DNA, 26 bp, Artificial sequence
  SiRNA target sequence
taatggatttatttttacaggtgtag

SEQ ID NO: 77241 - DNA, 26 bp, Artificial sequence
  SiRNA target sequence
aatggatttatttttacaggtgtagt

SEQ ID NO: 77242 - DNA, 26 bp, Artificial sequence
  SiRNA target sequence
atggatttatttttacaggtgtagtg

SEQ ID NO: 77243 - DNA, 26 bp, Artificial sequence
  SiRNA target sequence
tggatttatttttacaggtgtagtgc

SEQ ID NO: 77244 - DNA, 26 bp, Artificial sequence
  SiRNA target sequence
ggatttatttttacaggtgtagtgca

SEQ ID NO: 77245 - DNA, 26 bp, Artificial sequence
  SiRNA target sequence
gatttatttttacaggtgtagtgcaa

SEQ ID NO: 77246 - DNA, 26 bp, Artificial sequence
  SiRNA target sequence
atttatttttacaggtgtagtgcaat

SEQ ID NO: 77247 - DNA, 26 bp, Artificial sequence
  SiRNA target sequence
tttatttttacaggtgtagtgcaata

SEQ ID NO: 77248 - DNA, 26 bp, Artificial sequence
  SiRNA target sequence
ttatttttacaggtgtagtgcaatat

SEQ ID NO: 77249 - DNA, 26 bp, Artificial sequence
  SiRNA target sequence
tatttttacaggtgtagtgcaatata

SEQ ID NO: 77250 - DNA, 26 bp, Artificial sequence
  SiRNA target sequence
atttttacaggtgtagtgcaatatat

SEQ ID NO: 77251 - DNA, 26 bp, Artificial sequence
  SiRNA target sequence
tttttacaggtgtagtgcaatatatt

SEQ ID NO: 77252 - DNA, 26 bp, Artificial sequence
  SiRNA target sequence
ttttacaggtgtagtgcaatatattt

SEQ ID NO: 77253 - DNA, 26 bp, Artificial sequence
  SiRNA target sequence
tttacaggtgtagtgcaatatattta

SEQ ID NO: 77254 - DNA, 26 bp, Artificial sequence
  SiRNA target sequence
ttacaggtgtagtgcaatatatttat

SEQ ID NO: 77255 - DNA, 26 bp, Artificial sequence
  SiRNA target sequence
tacaggtgtagtgcaatatatttata

SEQ ID NO: 77256 - DNA, 26 bp, Artificial sequence
  SiRNA target sequence
acaggtgtagtgcaatatatttatag

SEQ ID NO: 77257 - DNA, 26 bp, Artificial sequence
  SiRNA target sequence
caggtgtagtgcaatatatttataga

SEQ ID NO: 77258 - DNA, 26 bp, Artificial sequence
  SiRNA target sequence
aggtgtagtgcaatatatttatagaa

SEQ ID NO: 77259 - DNA, 26 bp, Artificial sequence
  SiRNA target sequence
ggtgtagtgcaatatatttatagaaa

SEQ ID NO: 77260 - DNA, 26 bp, Artificial sequence
  SiRNA target sequence
gtgtagtgcaatatatttatagaaat

SEQ ID NO: 77261 - DNA, 26 bp, Artificial sequence
  SiRNA target sequence
tgtagtgcaatatatttatagaaata

SEQ ID NO: 77262 - DNA, 26 bp, Artificial sequence
  SiRNA target sequence
gtagtgcaatatatttatagaaatac

SEQ ID NO: 77263 - DNA, 26 bp, Artificial sequence
  SiRNA target sequence
tagtgcaatatatttatagaaatacg

SEQ ID NO: 77264 - DNA, 26 bp, Artificial sequence
  SiRNA target sequence
agtgcaatatatttatagaaatacgg

SEQ ID NO: 77265 - DNA, 26 bp, Artificial sequence
  SiRNA target sequence
gtgcaatatatttatagaaatacggc

SEQ ID NO: 77266 - DNA, 26 bp, Artificial sequence
  SiRNA target sequence
tgcaatatatttatagaaatacggca

SEQ ID NO: 77267 - DNA, 26 bp, Artificial sequence
  SiRNA target sequence
gcaatatatttatagaaatacggcaa

SEQ ID NO: 77268 - DNA, 26 bp, Artificial sequence
  SiRNA target sequence
caatatatttatagaaatacggcaaa

SEQ ID NO: 77269 - DNA, 26 bp, Artificial sequence
  SiRNA target sequence
aatatatttatagaaatacggcaaaa

SEQ ID NO: 77270 - DNA, 26 bp, Artificial sequence
  SiRNA target sequence
atatatttatagaaatacggcaaaat

SEQ ID NO: 77271 - DNA, 26 bp, Artificial sequence
  SiRNA target sequence
tatatttatagaaatacggcaaaatc

SEQ ID NO: 77272 - DNA, 26 bp, Artificial sequence
  SiRNA target sequence
atatttatagaaatacggcaaaatct

SEQ ID NO: 77273 - DNA, 26 bp, Artificial sequence
  SiRNA target sequence
tatttatagaaatacggcaaaatcta

SEQ ID NO: 77274 - DNA, 26 bp, Artificial sequence
  SiRNA target sequence
atttatagaaatacggcaaaatctac

SEQ ID NO: 77275 - DNA, 26 bp, Artificial sequence
  SiRNA target sequence
tttatagaaatacggcaaaatctaca

SEQ ID NO: 77276 - DNA, 26 bp, Artificial sequence
  SiRNA target sequence
ttatagaaatacggcaaaatctacat

SEQ ID NO: 77277 - DNA, 26 bp, Artificial sequence
  SiRNA target sequence
tatagaaatacggcaaaatctacatt

SEQ ID NO: 77278 - DNA, 26 bp, Artificial sequence
  SiRNA target sequence
atagaaatacggcaaaatctacattc

SEQ ID NO: 77279 - DNA, 26 bp, Artificial sequence
  SiRNA target sequence
tagaaatacggcaaaatctacattca

SEQ ID NO: 77280 - DNA, 26 bp, Artificial sequence
  SiRNA target sequence
agaaatacggcaaaatctacattcaa

SEQ ID NO: 77281 - DNA, 26 bp, Artificial sequence
  SiRNA target sequence
gaaatacggcaaaatctacattcaaa

SEQ ID NO: 77282 - DNA, 26 bp, Artificial sequence
  SiRNA target sequence
aaatacggcaaaatctacattcaaag

SEQ ID NO: 77283 - DNA, 26 bp, Artificial sequence
  SiRNA target sequence
aatacggcaaaatctacattcaaagg

SEQ ID NO: 77284 - DNA, 26 bp, Artificial sequence
  SiRNA target sequence
atacggcaaaatctacattcaaaggc

SEQ ID NO: 77285 - DNA, 26 bp, Artificial sequence
  SiRNA target sequence
tacggcaaaatctacattcaaaggct

SEQ ID NO: 77286 - DNA, 26 bp, Artificial sequence
  SiRNA target sequence
acggcaaaatctacattcaaaggctt

SEQ ID NO: 77287 - DNA, 26 bp, Artificial sequence
  SiRNA target sequence
cggcaaaatctacattcaaaggcttc

SEQ ID NO: 77288 - DNA, 26 bp, Artificial sequence
  SiRNA target sequence
ggcaaaatctacattcaaaggcttca

SEQ ID NO: 77289 - DNA, 26 bp, Artificial sequence
  SiRNA target sequence
gcaaaatctacattcaaaggcttcat

SEQ ID NO: 77290 - DNA, 26 bp, Artificial sequence
  SiRNA target sequence
caaaatctacattcaaaggcttcatt

SEQ ID NO: 77291 - DNA, 26 bp, Artificial sequence
  SiRNA target sequence
aaaatctacattcaaaggcttcattt

SEQ ID NO: 77292 - DNA, 26 bp, Artificial sequence
  SiRNA target sequence
aaatctacattcaaaggcttcatttc

SEQ ID NO: 77293 - DNA, 26 bp, Artificial sequence
  SiRNA target sequence
aatctacattcaaaggcttcatttct

SEQ ID NO: 77294 - DNA, 26 bp, Artificial sequence
  SiRNA target sequence
atctacattcaaaggcttcatttctc

SEQ ID NO: 77295 - DNA, 26 bp, Artificial sequence
  SiRNA target sequence
tctacattcaaaggcttcatttctct

SEQ ID NO: 77296 - DNA, 26 bp, Artificial sequence
  SiRNA target sequence
ctacattcaaaggcttcatttctctt

SEQ ID NO: 77297 - DNA, 26 bp, Artificial sequence
  SiRNA target sequence
tacattcaaaggcttcatttctcttt

SEQ ID NO: 77298 - DNA, 26 bp, Artificial sequence
  SiRNA target sequence
acattcaaaggcttcatttctctttc

SEQ ID NO: 77299 - DNA, 26 bp, Artificial sequence
  SiRNA target sequence
cattcaaaggcttcatttctctttca

SEQ ID NO: 77300 - DNA, 26 bp, Artificial sequence
  SiRNA target sequence
attcaaaggcttcatttctctttcac

SEQ ID NO: 77301 - DNA, 26 bp, Artificial sequence
  SiRNA target sequence
ttcaaaggcttcatttctctttcacc

SEQ ID NO: 77302 - DNA, 26 bp, Artificial sequence
  SiRNA target sequence
tcaaaggcttcatttctctttcacct

SEQ ID NO: 77303 - DNA, 26 bp, Artificial sequence
  SiRNA target sequence
caaaggcttcatttctctttcaccta

SEQ ID NO: 77304 - DNA, 26 bp, Artificial sequence
  SiRNA target sequence
aaaggcttcatttctctttcacctaa

SEQ ID NO: 77305 - DNA, 26 bp, Artificial sequence
  SiRNA target sequence
aaggcttcatttctctttcacctaaa

SEQ ID NO: 77306 - DNA, 26 bp, Artificial sequence
  SiRNA target sequence
aggcttcatttctctttcacctaaaa

SEQ ID NO: 77307 - DNA, 26 bp, Artificial sequence
  SiRNA target sequence
ggcttcatttctctttcacctaaaaa

SEQ ID NO: 77308 - DNA, 26 bp, Artificial sequence
  SiRNA target sequence
gcttcatttctctttcacctaaaaat

SEQ ID NO: 77309 - DNA, 26 bp, Artificial sequence
  SiRNA target sequence
cttcatttctctttcacctaaaaatt

SEQ ID NO: 77310 - DNA, 26 bp, Artificial sequence
  SiRNA target sequence
ttcatttctctttcacctaaaaattt

SEQ ID NO: 77311 - DNA, 26 bp, Artificial sequence
  SiRNA target sequence
tcatttctctttcacctaaaaatttt

SEQ ID NO: 77312 - DNA, 26 bp, Artificial sequence
  SiRNA target sequence
catttctctttcacctaaaaatttta

SEQ ID NO: 77313 - DNA, 26 bp, Artificial sequence
  SiRNA target sequence
atttctctttcacctaaaaattttag

SEQ ID NO: 77314 - DNA, 26 bp, Artificial sequence
  SiRNA target sequence
tttctctttcacctaaaaattttagt

SEQ ID NO: 77315 - DNA, 26 bp, Artificial sequence
  SiRNA target sequence
ttctctttcacctaaaaattttagta

SEQ ID NO: 77316 - DNA, 26 bp, Artificial sequence
  SiRNA target sequence
tctctttcacctaaaaattttagtac

SEQ ID NO: 77317 - DNA, 26 bp, Artificial sequence
  SiRNA target sequence
ctctttcacctaaaaattttagtacc

SEQ ID NO: 77318 - DNA, 26 bp, Artificial sequence
  SiRNA target sequence
tctttcacctaaaaattttagtacca

SEQ ID NO: 77319 - DNA, 26 bp, Artificial sequence
  SiRNA target sequence
ctttcacctaaaaattttagtaccat

SEQ ID NO: 77320 - DNA, 26 bp, Artificial sequence
  SiRNA target sequence
tttcacctaaaaattttagtaccata

SEQ ID NO: 77321 - DNA, 26 bp, Artificial sequence
  SiRNA target sequence
ttcacctaaaaattttagtaccatag

SEQ ID NO: 77322 - DNA, 26 bp, Artificial sequence
  SiRNA target sequence
tcacctaaaaattttagtaccatagg

SEQ ID NO: 77323 - DNA, 26 bp, Artificial sequence
  SiRNA target sequence
cacctaaaaattttagtaccataggt

SEQ ID NO: 77324 - DNA, 26 bp, Artificial sequence
  SiRNA target sequence
acctaaaaattttagtaccataggtg

SEQ ID NO: 77325 - DNA, 26 bp, Artificial sequence
  SiRNA target sequence
cctaaaaattttagtaccataggtgg

SEQ ID NO: 77326 - DNA, 26 bp, Artificial sequence
  SiRNA target sequence
ctaaaaattttagtaccataggtggc

SEQ ID NO: 77327 - DNA, 26 bp, Artificial sequence
  SiRNA target sequence
taaaaattttagtaccataggtggcg

SEQ ID NO: 77328 - DNA, 26 bp, Artificial sequence
  SiRNA target sequence
aaaaattttagtaccataggtggcgg

SEQ ID NO: 77329 - DNA, 26 bp, Artificial sequence
  SiRNA target sequence
aaaattttagtaccataggtggcgga

SEQ ID NO: 77330 - DNA, 26 bp, Artificial sequence
  SiRNA target sequence
aaattttagtaccataggtggcggag

SEQ ID NO: 77331 - DNA, 26 bp, Artificial sequence
  SiRNA target sequence
aattttagtaccataggtggcggaga

SEQ ID NO: 77332 - DNA, 26 bp, Artificial sequence
  SiRNA target sequence
attttagtaccataggtggcggagaa

SEQ ID NO: 77333 - DNA, 26 bp, Artificial sequence
  SiRNA target sequence
ttttagtaccataggtggcggagaaa

SEQ ID NO: 77334 - DNA, 26 bp, Artificial sequence
  SiRNA target sequence
tttagtaccataggtggcggagaaat

SEQ ID NO: 77335 - DNA, 26 bp, Artificial sequence
  SiRNA target sequence
ttagtaccataggtggcggagaaatt

SEQ ID NO: 77336 - DNA, 26 bp, Artificial sequence
  SiRNA target sequence
tagtaccataggtggcggagaaattc

SEQ ID NO: 77337 - DNA, 26 bp, Artificial sequence
  SiRNA target sequence
agtaccataggtggcggagaaattca

SEQ ID NO: 77338 - DNA, 26 bp, Artificial sequence
  SiRNA target sequence
gtaccataggtggcggagaaattcaa

SEQ ID NO: 77339 - DNA, 26 bp, Artificial sequence
  SiRNA target sequence
taccataggtggcggagaaattcaaa

SEQ ID NO: 77340 - DNA, 26 bp, Artificial sequence
  SiRNA target sequence
accataggtggcggagaaattcaaac

SEQ ID NO: 77341 - DNA, 26 bp, Artificial sequence
  SiRNA target sequence
ccataggtggcggagaaattcaaaca

SEQ ID NO: 77342 - DNA, 26 bp, Artificial sequence
  SiRNA target sequence
cataggtggcggagaaattcaaacaa

SEQ ID NO: 77343 - DNA, 26 bp, Artificial sequence
  SiRNA target sequence
ataggtggcggagaaattcaaacaat

SEQ ID NO: 77344 - DNA, 26 bp, Artificial sequence
  SiRNA target sequence
taggtggcggagaaattcaaacaata

SEQ ID NO: 77345 - DNA, 26 bp, Artificial sequence
  SiRNA target sequence
aggtggcggagaaattcaaacaataa

SEQ ID NO: 77346 - DNA, 26 bp, Artificial sequence
  SiRNA target sequence
ggtggcggagaaattcaaacaataat

SEQ ID NO: 77347 - DNA, 26 bp, Artificial sequence
  SiRNA target sequence
gtggcggagaaattcaaacaataata

SEQ ID NO: 77348 - DNA, 26 bp, Artificial sequence
  SiRNA target sequence
tggcggagaaattcaaacaataatag

SEQ ID NO: 77349 - DNA, 26 bp, Artificial sequence
  SiRNA target sequence
ggcggagaaattcaaacaataataga

SEQ ID NO: 77350 - DNA, 26 bp, Artificial sequence
  SiRNA target sequence
gcggagaaattcaaacaataatagat

SEQ ID NO: 77351 - DNA, 26 bp, Artificial sequence
  SiRNA target sequence
cggagaaattcaaacaataatagata

SEQ ID NO: 77352 - DNA, 26 bp, Artificial sequence
  SiRNA target sequence
ggagaaattcaaacaataatagatag

SEQ ID NO: 77353 - DNA, 26 bp, Artificial sequence
  SiRNA target sequence
gagaaattcaaacaataatagataga

SEQ ID NO: 77354 - DNA, 26 bp, Artificial sequence
  SiRNA target sequence
agaaattcaaacaataatagatagaa

SEQ ID NO: 77355 - DNA, 26 bp, Artificial sequence
  SiRNA target sequence
gaaattcaaacaataatagatagaaa

SEQ ID NO: 77356 - DNA, 26 bp, Artificial sequence
  SiRNA target sequence
aaattcaaacaataatagatagaaaa

SEQ ID NO: 77357 - DNA, 26 bp, Artificial sequence
  SiRNA target sequence
aattcaaacaataatagatagaaaat

SEQ ID NO: 77358 - DNA, 26 bp, Artificial sequence
  SiRNA target sequence
attcaaacaataatagatagaaaatc

SEQ ID NO: 77359 - DNA, 26 bp, Artificial sequence
  SiRNA target sequence
ttcaaacaataatagatagaaaatca

SEQ ID NO: 77360 - DNA, 26 bp, Artificial sequence
  SiRNA target sequence
tcaaacaataatagatagaaaatcaa

SEQ ID NO: 77361 - DNA, 26 bp, Artificial sequence
  SiRNA target sequence
caaacaataatagatagaaaatcaaa

SEQ ID NO: 77362 - DNA, 26 bp, Artificial sequence
  SiRNA target sequence
aaacaataatagatagaaaatcaaaa

SEQ ID NO: 77363 - DNA, 26 bp, Artificial sequence
  SiRNA target sequence
aacaataatagatagaaaatcaaaat

SEQ ID NO: 77364 - DNA, 26 bp, Artificial sequence
  SiRNA target sequence
acaataatagatagaaaatcaaaatc

SEQ ID NO: 77365 - DNA, 26 bp, Artificial sequence
  SiRNA target sequence
caataatagatagaaaatcaaaatct

SEQ ID NO: 77366 - DNA, 26 bp, Artificial sequence
  SiRNA target sequence
aataatagatagaaaatcaaaatctg

SEQ ID NO: 77367 - DNA, 26 bp, Artificial sequence
  SiRNA target sequence
ataatagatagaaaatcaaaatctgc

SEQ ID NO: 77368 - DNA, 26 bp, Artificial sequence
  SiRNA target sequence
taatagatagaaaatcaaaatctgca

SEQ ID NO: 77369 - DNA, 26 bp, Artificial sequence
  SiRNA target sequence
aatagatagaaaatcaaaatctgcaa

SEQ ID NO: 77370 - DNA, 26 bp, Artificial sequence
  SiRNA target sequence
atagatagaaaatcaaaatctgcaag

SEQ ID NO: 77371 - DNA, 26 bp, Artificial sequence
  SiRNA target sequence
tagatagaaaatcaaaatctgcaagt

SEQ ID NO: 77372 - DNA, 26 bp, Artificial sequence
  SiRNA target sequence
agatagaaaatcaaaatctgcaagtg

SEQ ID NO: 77373 - DNA, 26 bp, Artificial sequence
  SiRNA target sequence
gatagaaaatcaaaatctgcaagtga

SEQ ID NO: 77374 - DNA, 26 bp, Artificial sequence
  SiRNA target sequence
atagaaaatcaaaatctgcaagtgaa

SEQ ID NO: 77375 - DNA, 26 bp, Artificial sequence
  SiRNA target sequence
tagaaaatcaaaatctgcaagtgaac

SEQ ID NO: 77376 - DNA, 26 bp, Artificial sequence
  SiRNA target sequence
agaaaatcaaaatctgcaagtgaact

SEQ ID NO: 77377 - DNA, 26 bp, Artificial sequence
  SiRNA target sequence
gaaaatcaaaatctgcaagtgaactt

SEQ ID NO: 77378 - DNA, 26 bp, Artificial sequence
  SiRNA target sequence
aaaatcaaaatctgcaagtgaactta

SEQ ID NO: 77379 - DNA, 26 bp, Artificial sequence
  SiRNA target sequence
aaatcaaaatctgcaagtgaacttat

SEQ ID NO: 77380 - DNA, 26 bp, Artificial sequence
  SiRNA target sequence
aatcaaaatctgcaagtgaacttatt

SEQ ID NO: 77381 - DNA, 26 bp, Artificial sequence
  SiRNA target sequence
atcaaaatctgcaagtgaacttattg

SEQ ID NO: 77382 - DNA, 26 bp, Artificial sequence
  SiRNA target sequence
tcaaaatctgcaagtgaacttattga

SEQ ID NO: 77383 - DNA, 26 bp, Artificial sequence
  SiRNA target sequence
caaaatctgcaagtgaacttattgaa

SEQ ID NO: 77384 - DNA, 26 bp, Artificial sequence
  SiRNA target sequence
aaaatctgcaagtgaacttattgaag

SEQ ID NO: 77385 - DNA, 26 bp, Artificial sequence
  SiRNA target sequence
aaatctgcaagtgaacttattgaagt

SEQ ID NO: 77386 - DNA, 26 bp, Artificial sequence
  SiRNA target sequence
aatctgcaagtgaacttattgaagtg

SEQ ID NO: 77387 - DNA, 26 bp, Artificial sequence
  SiRNA target sequence
atctgcaagtgaacttattgaagtgt

SEQ ID NO: 77388 - DNA, 26 bp, Artificial sequence
  SiRNA target sequence
tctgcaagtgaacttattgaagtgtt

SEQ ID NO: 77389 - DNA, 26 bp, Artificial sequence
  SiRNA target sequence
ctgcaagtgaacttattgaagtgttt

SEQ ID NO: 77390 - DNA, 26 bp, Artificial sequence
  SiRNA target sequence
tgcaagtgaacttattgaagtgtttc

SEQ ID NO: 77391 - DNA, 26 bp, Artificial sequence
  SiRNA target sequence
gcaagtgaacttattgaagtgtttct

SEQ ID NO: 77392 - DNA, 26 bp, Artificial sequence
  SiRNA target sequence
caagtgaacttattgaagtgtttctt

SEQ ID NO: 77393 - DNA, 26 bp, Artificial sequence
  SiRNA target sequence
aagtgaacttattgaagtgtttctta

SEQ ID NO: 77394 - DNA, 26 bp, Artificial sequence
  SiRNA target sequence
agtgaacttattgaagtgtttcttac

SEQ ID NO: 77395 - DNA, 26 bp, Artificial sequence
  SiRNA target sequence
gtgaacttattgaagtgtttcttaca

SEQ ID NO: 77396 - DNA, 26 bp, Artificial sequence
  SiRNA target sequence
tgaacttattgaagtgtttcttacaa

SEQ ID NO: 77397 - DNA, 26 bp, Artificial sequence
  SiRNA target sequence
gaacttattgaagtgtttcttacaag

SEQ ID NO: 77398 - DNA, 26 bp, Artificial sequence
  SiRNA target sequence
aacttattgaagtgtttcttacaagc

SEQ ID NO: 77399 - DNA, 26 bp, Artificial sequence
  SiRNA target sequence
acttattgaagtgtttcttacaagct

SEQ ID NO: 77400 - DNA, 26 bp, Artificial sequence
  SiRNA target sequence
cttattgaagtgtttcttacaagctt

SEQ ID NO: 77401 - DNA, 26 bp, Artificial sequence
  SiRNA target sequence
ttattgaagtgtttcttacaagcttg

SEQ ID NO: 77402 - DNA, 26 bp, Artificial sequence
  SiRNA target sequence
tattgaagtgtttcttacaagcttgc

SEQ ID NO: 77403 - DNA, 26 bp, Artificial sequence
  SiRNA target sequence
attgaagtgtttcttacaagcttgct

SEQ ID NO: 77404 - DNA, 26 bp, Artificial sequence
  SiRNA target sequence
ttgaagtgtttcttacaagcttgctt

SEQ ID NO: 77405 - DNA, 26 bp, Artificial sequence
  SiRNA target sequence
tgaagtgtttcttacaagcttgcttc

SEQ ID NO: 77406 - DNA, 26 bp, Artificial sequence
  SiRNA target sequence
gaagtgtttcttacaagcttgcttcc

SEQ ID NO: 77407 - DNA, 26 bp, Artificial sequence
  SiRNA target sequence
aagtgtttcttacaagcttgcttcca

SEQ ID NO: 77408 - DNA, 26 bp, Artificial sequence
  SiRNA target sequence
agtgtttcttacaagcttgcttccaa

SEQ ID NO: 77409 - DNA, 26 bp, Artificial sequence
  SiRNA target sequence
gtgtttcttacaagcttgcttccaat

SEQ ID NO: 77410 - DNA, 26 bp, Artificial sequence
  SiRNA target sequence
tgtttcttacaagcttgcttccaata

SEQ ID NO: 77411 - DNA, 26 bp, Artificial sequence
  SiRNA target sequence
gtttcttacaagcttgcttccaatat

SEQ ID NO: 77412 - DNA, 26 bp, Artificial sequence
  SiRNA target sequence
tttcttacaagcttgcttccaatatg

SEQ ID NO: 77413 - DNA, 26 bp, Artificial sequence
  SiRNA target sequence
ttcttacaagcttgcttccaatatgc

SEQ ID NO: 77414 - DNA, 26 bp, Artificial sequence
  SiRNA target sequence
tcttacaagcttgcttccaatatgcc

SEQ ID NO: 77415 - DNA, 26 bp, Artificial sequence
  SiRNA target sequence
cttacaagcttgcttccaatatgcct

SEQ ID NO: 77416 - DNA, 26 bp, Artificial sequence
  SiRNA target sequence
ttacaagcttgcttccaatatgcctt

SEQ ID NO: 77417 - DNA, 26 bp, Artificial sequence
  SiRNA target sequence
tacaagcttgcttccaatatgcctta

SEQ ID NO: 77418 - DNA, 26 bp, Artificial sequence
  SiRNA target sequence
acaagcttgcttccaatatgccttaa

SEQ ID NO: 77419 - DNA, 26 bp, Artificial sequence
  SiRNA target sequence
caagcttgcttccaatatgccttaaa

SEQ ID NO: 77420 - DNA, 26 bp, Artificial sequence
  SiRNA target sequence
aagcttgcttccaatatgccttaaac

SEQ ID NO: 77421 - DNA, 26 bp, Artificial sequence
  SiRNA target sequence
agcttgcttccaatatgccttaaact

SEQ ID NO: 77422 - DNA, 26 bp, Artificial sequence
  SiRNA target sequence
gcttgcttccaatatgccttaaactt

SEQ ID NO: 77423 - DNA, 26 bp, Artificial sequence
  SiRNA target sequence
cttgcttccaatatgccttaaacttt

SEQ ID NO: 77424 - DNA, 26 bp, Artificial sequence
  SiRNA target sequence
ttgcttccaatatgccttaaactttt

SEQ ID NO: 77425 - DNA, 26 bp, Artificial sequence
  SiRNA target sequence
tgcttccaatatgccttaaactttta

SEQ ID NO: 77426 - DNA, 26 bp, Artificial sequence
  SiRNA target sequence
gcttccaatatgccttaaacttttat

SEQ ID NO: 77427 - DNA, 26 bp, Artificial sequence
  SiRNA target sequence
cttccaatatgccttaaacttttatt

SEQ ID NO: 77428 - DNA, 26 bp, Artificial sequence
  SiRNA target sequence
ttccaatatgccttaaacttttattt

SEQ ID NO: 77429 - DNA, 26 bp, Artificial sequence
  SiRNA target sequence
tccaatatgccttaaacttttatttg

SEQ ID NO: 77430 - DNA, 26 bp, Artificial sequence
  SiRNA target sequence
ccaatatgccttaaacttttatttgc

SEQ ID NO: 77431 - DNA, 26 bp, Artificial sequence
  SiRNA target sequence
caatatgccttaaacttttatttgcc

SEQ ID NO: 77432 - DNA, 26 bp, Artificial sequence
  SiRNA target sequence
aatatgccttaaacttttatttgccc

SEQ ID NO: 77433 - DNA, 26 bp, Artificial sequence
  SiRNA target sequence
atatgccttaaacttttatttgccct

SEQ ID NO: 77434 - DNA, 26 bp, Artificial sequence
  SiRNA target sequence
tatgccttaaacttttatttgccctt

SEQ ID NO: 77435 - DNA, 26 bp, Artificial sequence
  SiRNA target sequence
atgccttaaacttttatttgccctta

SEQ ID NO: 77436 - DNA, 26 bp, Artificial sequence
  SiRNA target sequence
tgccttaaacttttatttgcccttat

SEQ ID NO: 77437 - DNA, 26 bp, Artificial sequence
  SiRNA target sequence
gccttaaacttttatttgcccttatt

SEQ ID NO: 77438 - DNA, 26 bp, Artificial sequence
  SiRNA target sequence
ccttaaacttttatttgcccttattg

SEQ ID NO: 77439 - DNA, 26 bp, Artificial sequence
  SiRNA target sequence
cttaaacttttatttgcccttattgc

SEQ ID NO: 77440 - DNA, 26 bp, Artificial sequence
  SiRNA target sequence
ttaaacttttatttgcccttattgca

SEQ ID NO: 77441 - DNA, 26 bp, Artificial sequence
  SiRNA target sequence
taaacttttatttgcccttattgcag

SEQ ID NO: 77442 - DNA, 26 bp, Artificial sequence
  SiRNA target sequence
aaacttttatttgcccttattgcagt

SEQ ID NO: 77443 - DNA, 26 bp, Artificial sequence
  SiRNA target sequence
aacttttatttgcccttattgcagtt

SEQ ID NO: 77444 - DNA, 26 bp, Artificial sequence
  SiRNA target sequence
acttttatttgcccttattgcagtta

SEQ ID NO: 77445 - DNA, 26 bp, Artificial sequence
  SiRNA target sequence
cttttatttgcccttattgcagttat

SEQ ID NO: 77446 - DNA, 26 bp, Artificial sequence
  SiRNA target sequence
ttttatttgcccttattgcagttata

SEQ ID NO: 77447 - DNA, 26 bp, Artificial sequence
  SiRNA target sequence
tttatttgcccttattgcagttataa

SEQ ID NO: 77448 - DNA, 26 bp, Artificial sequence
  SiRNA target sequence
ttatttgcccttattgcagttataaa

SEQ ID NO: 77449 - DNA, 26 bp, Artificial sequence
  SiRNA target sequence
tatttgcccttattgcagttataaaa

SEQ ID NO: 77450 - DNA, 26 bp, Artificial sequence
  SiRNA target sequence
atttgcccttattgcagttataaaaa

SEQ ID NO: 77451 - DNA, 26 bp, Artificial sequence
  SiRNA target sequence
tttgcccttattgcagttataaaaaa

SEQ ID NO: 77452 - DNA, 26 bp, Artificial sequence
  SiRNA target sequence
ttgcccttattgcagttataaaaaat

SEQ ID NO: 77453 - DNA, 26 bp, Artificial sequence
  SiRNA target sequence
tgcccttattgcagttataaaaaata

SEQ ID NO: 77454 - DNA, 26 bp, Artificial sequence
  SiRNA target sequence
gcccttattgcagttataaaaaatat

SEQ ID NO: 77455 - DNA, 26 bp, Artificial sequence
  SiRNA target sequence
cccttattgcagttataaaaaatatg

SEQ ID NO: 77456 - DNA, 26 bp, Artificial sequence
  SiRNA target sequence
ccttattgcagttataaaaaatatgg

SEQ ID NO: 77457 - DNA, 26 bp, Artificial sequence
  SiRNA target sequence
cttattgcagttataaaaaatatggg

SEQ ID NO: 77458 - DNA, 26 bp, Artificial sequence
  SiRNA target sequence
ttattgcagttataaaaaatatggga

SEQ ID NO: 77459 - DNA, 26 bp, Artificial sequence
  SiRNA target sequence
tattgcagttataaaaaatatgggag

SEQ ID NO: 77460 - DNA, 26 bp, Artificial sequence
  SiRNA target sequence
attgcagttataaaaaatatgggagg

SEQ ID NO: 77461 - DNA, 26 bp, Artificial sequence
  SiRNA target sequence
ttgcagttataaaaaatatgggaggt

SEQ ID NO: 77462 - DNA, 26 bp, Artificial sequence
  SiRNA target sequence
tgcagttataaaaaatatgggaggtc

SEQ ID NO: 77463 - DNA, 26 bp, Artificial sequence
  SiRNA target sequence
gcagttataaaaaatatgggaggtct

SEQ ID NO: 77464 - DNA, 26 bp, Artificial sequence
  SiRNA target sequence
cagttataaaaaatatgggaggtctt

SEQ ID NO: 77465 - DNA, 26 bp, Artificial sequence
  SiRNA target sequence
agttataaaaaatatgggaggtcttg

SEQ ID NO: 77466 - DNA, 26 bp, Artificial sequence
  SiRNA target sequence
gttataaaaaatatgggaggtcttgc

SEQ ID NO: 77467 - DNA, 26 bp, Artificial sequence
  SiRNA target sequence
ttataaaaaatatgggaggtcttgcg

SEQ ID NO: 77468 - DNA, 26 bp, Artificial sequence
  SiRNA target sequence
tataaaaaatatgggaggtcttgcgg

SEQ ID NO: 77469 - DNA, 26 bp, Artificial sequence
  SiRNA target sequence
ataaaaaatatgggaggtcttgcggg

SEQ ID NO: 77470 - DNA, 26 bp, Artificial sequence
  SiRNA target sequence
taaaaaatatgggaggtcttgcgggc

SEQ ID NO: 77471 - DNA, 26 bp, Artificial sequence
  SiRNA target sequence
aaaaaatatgggaggtcttgcgggct

SEQ ID NO: 77472 - DNA, 26 bp, Artificial sequence
  SiRNA target sequence
aaaaatatgggaggtcttgcgggctt

SEQ ID NO: 77473 - DNA, 26 bp, Artificial sequence
  SiRNA target sequence
aaaatatgggaggtcttgcgggcttc

SEQ ID NO: 77474 - DNA, 26 bp, Artificial sequence
  SiRNA target sequence
aaatatgggaggtcttgcgggcttca

SEQ ID NO: 77475 - DNA, 26 bp, Artificial sequence
  SiRNA target sequence
aatatgggaggtcttgcgggcttcat

SEQ ID NO: 77476 - DNA, 26 bp, Artificial sequence
  SiRNA target sequence
atatgggaggtcttgcgggcttcata

SEQ ID NO: 77477 - DNA, 26 bp, Artificial sequence
  SiRNA target sequence
tatgggaggtcttgcgggcttcataa

SEQ ID NO: 77478 - DNA, 26 bp, Artificial sequence
  SiRNA target sequence
atgggaggtcttgcgggcttcataat

SEQ ID NO: 77479 - DNA, 26 bp, Artificial sequence
  SiRNA target sequence
tgggaggtcttgcgggcttcataatg

SEQ ID NO: 77480 - DNA, 26 bp, Artificial sequence
  SiRNA target sequence
gggaggtcttgcgggcttcataatgt

SEQ ID NO: 77481 - DNA, 26 bp, Artificial sequence
  SiRNA target sequence
ggaggtcttgcgggcttcataatgtt

SEQ ID NO: 77482 - DNA, 26 bp, Artificial sequence
  SiRNA target sequence
gaggtcttgcgggcttcataatgttt

SEQ ID NO: 77483 - DNA, 26 bp, Artificial sequence
  SiRNA target sequence
aggtcttgcgggcttcataatgtttg

SEQ ID NO: 77484 - DNA, 26 bp, Artificial sequence
  SiRNA target sequence
ggtcttgcgggcttcataatgtttgt

SEQ ID NO: 77485 - DNA, 26 bp, Artificial sequence
  SiRNA target sequence
gtcttgcgggcttcataatgtttgtt

SEQ ID NO: 77486 - DNA, 26 bp, Artificial sequence
  SiRNA target sequence
tcttgcgggcttcataatgtttgttt

SEQ ID NO: 77487 - DNA, 26 bp, Artificial sequence
  SiRNA target sequence
cttgcgggcttcataatgtttgtttg

SEQ ID NO: 77488 - DNA, 26 bp, Artificial sequence
  SiRNA target sequence
ttgcgggcttcataatgtttgtttgt

SEQ ID NO: 77489 - DNA, 26 bp, Artificial sequence
  SiRNA target sequence
tgcgggcttcataatgtttgtttgtg

SEQ ID NO: 77490 - DNA, 26 bp, Artificial sequence
  SiRNA target sequence
gcgggcttcataatgtttgtttgtgt

SEQ ID NO: 77491 - DNA, 26 bp, Artificial sequence
  SiRNA target sequence
cgggcttcataatgtttgtttgtgtt

SEQ ID NO: 77492 - DNA, 26 bp, Artificial sequence
  SiRNA target sequence
gggcttcataatgtttgtttgtgttt

SEQ ID NO: 77493 - DNA, 26 bp, Artificial sequence
  SiRNA target sequence
ggcttcataatgtttgtttgtgtttc

SEQ ID NO: 77494 - DNA, 26 bp, Artificial sequence
  SiRNA target sequence
gcttcataatgtttgtttgtgtttct

SEQ ID NO: 77495 - DNA, 26 bp, Artificial sequence
  SiRNA target sequence
cttcataatgtttgtttgtgtttctt

SEQ ID NO: 77496 - DNA, 26 bp, Artificial sequence
  SiRNA target sequence
ttcataatgtttgtttgtgtttcttg

SEQ ID NO: 77497 - DNA, 26 bp, Artificial sequence
  SiRNA target sequence
tcataatgtttgtttgtgtttcttgc

SEQ ID NO: 77498 - DNA, 26 bp, Artificial sequence
  SiRNA target sequence
cataatgtttgtttgtgtttcttgct

SEQ ID NO: 77499 - DNA, 26 bp, Artificial sequence
  SiRNA target sequence
ataatgtttgtttgtgtttcttgcta

SEQ ID NO: 77500 - DNA, 26 bp, Artificial sequence
  SiRNA target sequence
taatgtttgtttgtgtttcttgctat

SEQ ID NO: 77501 - DNA, 26 bp, Artificial sequence
  SiRNA target sequence
aatgtttgtttgtgtttcttgctatg

SEQ ID NO: 77502 - DNA, 26 bp, Artificial sequence
  SiRNA target sequence
atgtttgtttgtgtttcttgctatgc

SEQ ID NO: 77503 - DNA, 26 bp, Artificial sequence
  SiRNA target sequence
tgtttgtttgtgtttcttgctatgcg

SEQ ID NO: 77504 - DNA, 26 bp, Artificial sequence
  SiRNA target sequence
gtttgtttgtgtttcttgctatgcga

SEQ ID NO: 77505 - DNA, 26 bp, Artificial sequence
  SiRNA target sequence
tttgtttgtgtttcttgctatgcgac

SEQ ID NO: 77506 - DNA, 26 bp, Artificial sequence
  SiRNA target sequence
ttgtttgtgtttcttgctatgcgact

SEQ ID NO: 77507 - DNA, 26 bp, Artificial sequence
  SiRNA target sequence
tgtttgtgtttcttgctatgcgactg

SEQ ID NO: 77508 - DNA, 26 bp, Artificial sequence
  SiRNA target sequence
gtttgtgtttcttgctatgcgactgt

SEQ ID NO: 77509 - DNA, 26 bp, Artificial sequence
  SiRNA target sequence
tttgtgtttcttgctatgcgactgtg

SEQ ID NO: 77510 - DNA, 26 bp, Artificial sequence
  SiRNA target sequence
ttgtgtttcttgctatgcgactgtga

SEQ ID NO: 77511 - DNA, 26 bp, Artificial sequence
  SiRNA target sequence
tgtgtttcttgctatgcgactgtgac

SEQ ID NO: 77512 - DNA, 26 bp, Artificial sequence
  SiRNA target sequence
gtgtttcttgctatgcgactgtgact

SEQ ID NO: 77513 - DNA, 26 bp, Artificial sequence
  SiRNA target sequence
tgtttcttgctatgcgactgtgacta

SEQ ID NO: 77514 - DNA, 26 bp, Artificial sequence
  SiRNA target sequence
gtttcttgctatgcgactgtgactat

SEQ ID NO: 77515 - DNA, 26 bp, Artificial sequence
  SiRNA target sequence
tttcttgctatgcgactgtgactata

SEQ ID NO: 77516 - DNA, 26 bp, Artificial sequence
  SiRNA target sequence
ttcttgctatgcgactgtgactatat

SEQ ID NO: 77517 - DNA, 26 bp, Artificial sequence
  SiRNA target sequence
tcttgctatgcgactgtgactatatt

SEQ ID NO: 77518 - DNA, 26 bp, Artificial sequence
  SiRNA target sequence
cttgctatgcgactgtgactatattg

SEQ ID NO: 77519 - DNA, 26 bp, Artificial sequence
  SiRNA target sequence
ttgctatgcgactgtgactatattga

SEQ ID NO: 77520 - DNA, 26 bp, Artificial sequence
  SiRNA target sequence
tgctatgcgactgtgactatattgat

SEQ ID NO: 77521 - DNA, 26 bp, Artificial sequence
  SiRNA target sequence
gctatgcgactgtgactatattgata

SEQ ID NO: 77522 - DNA, 26 bp, Artificial sequence
  SiRNA target sequence
ctatgcgactgtgactatattgatag

SEQ ID NO: 77523 - DNA, 26 bp, Artificial sequence
  SiRNA target sequence
tatgcgactgtgactatattgatagc

SEQ ID NO: 77524 - DNA, 26 bp, Artificial sequence
  SiRNA target sequence
atgcgactgtgactatattgatagca

SEQ ID NO: 77525 - DNA, 26 bp, Artificial sequence
  SiRNA target sequence
tgcgactgtgactatattgatagcac

SEQ ID NO: 77526 - DNA, 26 bp, Artificial sequence
  SiRNA target sequence
gcgactgtgactatattgatagcaca

SEQ ID NO: 77527 - DNA, 26 bp, Artificial sequence
  SiRNA target sequence
cgactgtgactatattgatagcacaa

SEQ ID NO: 77528 - DNA, 26 bp, Artificial sequence
  SiRNA target sequence
gactgtgactatattgatagcacaat

SEQ ID NO: 77529 - DNA, 26 bp, Artificial sequence
  SiRNA target sequence
actgtgactatattgatagcacaatg

SEQ ID NO: 77530 - DNA, 26 bp, Artificial sequence
  SiRNA target sequence
ctgtgactatattgatagcacaatgg

SEQ ID NO: 77531 - DNA, 26 bp, Artificial sequence
  SiRNA target sequence
tgtgactatattgatagcacaatgga

SEQ ID NO: 77532 - DNA, 26 bp, Artificial sequence
  SiRNA target sequence
gtgactatattgatagcacaatggag

SEQ ID NO: 77533 - DNA, 26 bp, Artificial sequence
  SiRNA target sequence
tgactatattgatagcacaatggaga

SEQ ID NO: 77534 - DNA, 26 bp, Artificial sequence
  SiRNA target sequence
gactatattgatagcacaatggagat

SEQ ID NO: 77535 - DNA, 26 bp, Artificial sequence
  SiRNA target sequence
actatattgatagcacaatggagatc

SEQ ID NO: 77536 - DNA, 26 bp, Artificial sequence
  SiRNA target sequence
ctatattgatagcacaatggagatct

SEQ ID NO: 77537 - DNA, 26 bp, Artificial sequence
  SiRNA target sequence
tatattgatagcacaatggagatcta

SEQ ID NO: 77538 - DNA, 26 bp, Artificial sequence
  SiRNA target sequence
atattgatagcacaatggagatctaa

SEQ ID NO: 77539 - DNA, 26 bp, Artificial sequence
  SiRNA target sequence
tattgatagcacaatggagatctaat

SEQ ID NO: 77540 - DNA, 26 bp, Artificial sequence
  SiRNA target sequence
attgatagcacaatggagatctaata

SEQ ID NO: 77541 - DNA, 26 bp, Artificial sequence
  SiRNA target sequence
ttgatagcacaatggagatctaatat

SEQ ID NO: 77542 - DNA, 26 bp, Artificial sequence
  SiRNA target sequence
tgatagcacaatggagatctaatatt

SEQ ID NO: 77543 - DNA, 26 bp, Artificial sequence
  SiRNA target sequence
gatagcacaatggagatctaatatta

SEQ ID NO: 77544 - DNA, 26 bp, Artificial sequence
  SiRNA target sequence
atagcacaatggagatctaatattag

SEQ ID NO: 77545 - DNA, 26 bp, Artificial sequence
  SiRNA target sequence
tagcacaatggagatctaatattaga

SEQ ID NO: 77546 - DNA, 26 bp, Artificial sequence
  SiRNA target sequence
agcacaatggagatctaatattagaa

SEQ ID NO: 77547 - DNA, 26 bp, Artificial sequence
  SiRNA target sequence
gcacaatggagatctaatattagaag

SEQ ID NO: 77548 - DNA, 26 bp, Artificial sequence
  SiRNA target sequence
cacaatggagatctaatattagaaga

SEQ ID NO: 77549 - DNA, 26 bp, Artificial sequence
  SiRNA target sequence
acaatggagatctaatattagaagag

SEQ ID NO: 77550 - DNA, 26 bp, Artificial sequence
  SiRNA target sequence
caatggagatctaatattagaagaga

SEQ ID NO: 77551 - DNA, 26 bp, Artificial sequence
  SiRNA target sequence
aatggagatctaatattagaagagaa

SEQ ID NO: 77552 - DNA, 26 bp, Artificial sequence
  SiRNA target sequence
atggagatctaatattagaagagaac

SEQ ID NO: 77553 - DNA, 26 bp, Artificial sequence
  SiRNA target sequence
tggagatctaatattagaagagaact

SEQ ID NO: 77554 - DNA, 26 bp, Artificial sequence
  SiRNA target sequence
ggagatctaatattagaagagaactt

SEQ ID NO: 77555 - DNA, 26 bp, Artificial sequence
  SiRNA target sequence
gagatctaatattagaagagaactta

SEQ ID NO: 77556 - DNA, 26 bp, Artificial sequence
  SiRNA target sequence
agatctaatattagaagagaacttaa

SEQ ID NO: 77557 - DNA, 26 bp, Artificial sequence
  SiRNA target sequence
gatctaatattagaagagaacttaat

SEQ ID NO: 77558 - DNA, 26 bp, Artificial sequence
  SiRNA target sequence
atctaatattagaagagaacttaata

SEQ ID NO: 77559 - DNA, 26 bp, Artificial sequence
  SiRNA target sequence
tctaatattagaagagaacttaataa

SEQ ID NO: 77560 - DNA, 26 bp, Artificial sequence
  SiRNA target sequence
ctaatattagaagagaacttaataac

SEQ ID NO: 77561 - DNA, 26 bp, Artificial sequence
  SiRNA target sequence
taatattagaagagaacttaataact

SEQ ID NO: 77562 - DNA, 26 bp, Artificial sequence
  SiRNA target sequence
aatattagaagagaacttaataactc

SEQ ID NO: 77563 - DNA, 26 bp, Artificial sequence
  SiRNA target sequence
atattagaagagaacttaataactct

SEQ ID NO: 77564 - DNA, 26 bp, Artificial sequence
  SiRNA target sequence
tattagaagagaacttaataactctg

SEQ ID NO: 77565 - DNA, 26 bp, Artificial sequence
  SiRNA target sequence
attagaagagaacttaataactctga

SEQ ID NO: 77566 - DNA, 26 bp, Artificial sequence
  SiRNA target sequence
ttagaagagaacttaataactctgaa

SEQ ID NO: 77567 - DNA, 26 bp, Artificial sequence
  SiRNA target sequence
tagaagagaacttaataactctgaaa

SEQ ID NO: 77568 - DNA, 26 bp, Artificial sequence
  SiRNA target sequence
agaagagaacttaataactctgaaaa

SEQ ID NO: 77569 - DNA, 26 bp, Artificial sequence
  SiRNA target sequence
gaagagaacttaataactctgaaaat

SEQ ID NO: 77570 - DNA, 26 bp, Artificial sequence
  SiRNA target sequence
aagagaacttaataactctgaaaata

SEQ ID NO: 77571 - DNA, 26 bp, Artificial sequence
  SiRNA target sequence
agagaacttaataactctgaaaatag

SEQ ID NO: 77572 - DNA, 26 bp, Artificial sequence
  SiRNA target sequence
gagaacttaataactctgaaaataga

SEQ ID NO: 77573 - DNA, 26 bp, Artificial sequence
  SiRNA target sequence
agaacttaataactctgaaaatagat

SEQ ID NO: 77574 - DNA, 26 bp, Artificial sequence
  SiRNA target sequence
gaacttaataactctgaaaatagatc

SEQ ID NO: 77575 - DNA, 26 bp, Artificial sequence
  SiRNA target sequence
aacttaataactctgaaaatagatct

SEQ ID NO: 77576 - DNA, 26 bp, Artificial sequence
  SiRNA target sequence
acttaataactctgaaaatagatcta

SEQ ID NO: 77577 - DNA, 26 bp, Artificial sequence
  SiRNA target sequence
cttaataactctgaaaatagatctag

SEQ ID NO: 77578 - DNA, 26 bp, Artificial sequence
  SiRNA target sequence
ttaataactctgaaaatagatctagt

SEQ ID NO: 77579 - DNA, 26 bp, Artificial sequence
  SiRNA target sequence
taataactctgaaaatagatctagta

SEQ ID NO: 77580 - DNA, 26 bp, Artificial sequence
  SiRNA target sequence
aataactctgaaaatagatctagtaa

SEQ ID NO: 77581 - DNA, 26 bp, Artificial sequence
  SiRNA target sequence
ataactctgaaaatagatctagtaat

SEQ ID NO: 77582 - DNA, 26 bp, Artificial sequence
  SiRNA target sequence
taactctgaaaatagatctagtaata

SEQ ID NO: 77583 - DNA, 26 bp, Artificial sequence
  SiRNA target sequence
aactctgaaaatagatctagtaataa

SEQ ID NO: 77584 - DNA, 26 bp, Artificial sequence
  SiRNA target sequence
actctgaaaatagatctagtaataaa

SEQ ID NO: 77585 - DNA, 26 bp, Artificial sequence
  SiRNA target sequence
ctctgaaaatagatctagtaataaac

SEQ ID NO: 77586 - DNA, 26 bp, Artificial sequence
  SiRNA target sequence
tctgaaaatagatctagtaataaact

SEQ ID NO: 77587 - DNA, 26 bp, Artificial sequence
  SiRNA target sequence
ctgaaaatagatctagtaataaacta

SEQ ID NO: 77588 - DNA, 26 bp, Artificial sequence
  SiRNA target sequence
tgaaaatagatctagtaataaactac

SEQ ID NO: 77589 - DNA, 26 bp, Artificial sequence
  SiRNA target sequence
gaaaatagatctagtaataaactaca

SEQ ID NO: 77590 - DNA, 26 bp, Artificial sequence
  SiRNA target sequence
aaaatagatctagtaataaactacaa

SEQ ID NO: 77591 - DNA, 26 bp, Artificial sequence
  SiRNA target sequence
aaatagatctagtaataaactacaag

SEQ ID NO: 77592 - DNA, 26 bp, Artificial sequence
  SiRNA target sequence
aatagatctagtaataaactacaaga

SEQ ID NO: 77593 - DNA, 26 bp, Artificial sequence
  SiRNA target sequence
atagatctagtaataaactacaagat

SEQ ID NO: 77594 - DNA, 26 bp, Artificial sequence
  SiRNA target sequence
tagatctagtaataaactacaagatg

SEQ ID NO: 77595 - DNA, 26 bp, Artificial sequence
  SiRNA target sequence
agatctagtaataaactacaagatgg

SEQ ID NO: 77596 - DNA, 26 bp, Artificial sequence
  SiRNA target sequence
gatctagtaataaactacaagatgga

SEQ ID NO: 77597 - DNA, 26 bp, Artificial sequence
  SiRNA target sequence
atctagtaataaactacaagatggat

SEQ ID NO: 77598 - DNA, 26 bp, Artificial sequence
  SiRNA target sequence
tctagtaataaactacaagatggatt

SEQ ID NO: 77599 - DNA, 26 bp, Artificial sequence
  SiRNA target sequence
ctagtaataaactacaagatggatta

SEQ ID NO: 77600 - DNA, 26 bp, Artificial sequence
  SiRNA target sequence
tagtaataaactacaagatggattaa

SEQ ID NO: 77601 - DNA, 26 bp, Artificial sequence
  SiRNA target sequence
agtaataaactacaagatggattaaa

SEQ ID NO: 77602 - DNA, 26 bp, Artificial sequence
  SiRNA target sequence
gtaataaactacaagatggattaaat

SEQ ID NO: 77603 - DNA, 26 bp, Artificial sequence
  SiRNA target sequence
taataaactacaagatggattaaata

SEQ ID NO: 77604 - DNA, 26 bp, Artificial sequence
  SiRNA target sequence
aataaactacaagatggattaaataa

SEQ ID NO: 77605 - DNA, 26 bp, Artificial sequence
  SiRNA target sequence
ataaactacaagatggattaaataat

SEQ ID NO: 77606 - DNA, 26 bp, Artificial sequence
  SiRNA target sequence
taaactacaagatggattaaataatc

SEQ ID NO: 77607 - DNA, 26 bp, Artificial sequence
  SiRNA target sequence
aaactacaagatggattaaataatca

SEQ ID NO: 77608 - DNA, 26 bp, Artificial sequence
  SiRNA target sequence
aactacaagatggattaaataatcat

SEQ ID NO: 77609 - DNA, 26 bp, Artificial sequence
  SiRNA target sequence
actacaagatggattaaataatcatg

SEQ ID NO: 77610 - DNA, 26 bp, Artificial sequence
  SiRNA target sequence
ctacaagatggattaaataatcatga

SEQ ID NO: 77611 - DNA, 26 bp, Artificial sequence
  SiRNA target sequence
tacaagatggattaaataatcatgaa

SEQ ID NO: 77612 - DNA, 26 bp, Artificial sequence
  SiRNA target sequence
acaagatggattaaataatcatgaaa

SEQ ID NO: 77613 - DNA, 26 bp, Artificial sequence
  SiRNA target sequence
caagatggattaaataatcatgaaac

SEQ ID NO: 77614 - DNA, 26 bp, Artificial sequence
  SiRNA target sequence
aagatggattaaataatcatgaaaca

SEQ ID NO: 77615 - DNA, 26 bp, Artificial sequence
  SiRNA target sequence
agatggattaaataatcatgaaacaa

SEQ ID NO: 77616 - DNA, 26 bp, Artificial sequence
  SiRNA target sequence
gatggattaaataatcatgaaacaat

SEQ ID NO: 77617 - DNA, 26 bp, Artificial sequence
  SiRNA target sequence
atggattaaataatcatgaaacaatc

SEQ ID NO: 77618 - DNA, 26 bp, Artificial sequence
  SiRNA target sequence
tggattaaataatcatgaaacaatcg

SEQ ID NO: 77619 - DNA, 26 bp, Artificial sequence
  SiRNA target sequence
ggattaaataatcatgaaacaatcgt

SEQ ID NO: 77620 - DNA, 26 bp, Artificial sequence
  SiRNA target sequence
gattaaataatcatgaaacaatcgtc

SEQ ID NO: 77621 - DNA, 26 bp, Artificial sequence
  SiRNA target sequence
attaaataatcatgaaacaatcgtct

SEQ ID NO: 77622 - DNA, 26 bp, Artificial sequence
  SiRNA target sequence
ttaaataatcatgaaacaatcgtctc

SEQ ID NO: 77623 - DNA, 26 bp, Artificial sequence
  SiRNA target sequence
taaataatcatgaaacaatcgtctcc

SEQ ID NO: 77624 - DNA, 26 bp, Artificial sequence
  SiRNA target sequence
aaataatcatgaaacaatcgtctcct

SEQ ID NO: 77625 - DNA, 26 bp, Artificial sequence
  SiRNA target sequence
aataatcatgaaacaatcgtctcctt

SEQ ID NO: 77626 - DNA, 26 bp, Artificial sequence
  SiRNA target sequence
ataatcatgaaacaatcgtctccttt

SEQ ID NO: 77627 - DNA, 26 bp, Artificial sequence
  SiRNA target sequence
taatcatgaaacaatcgtctcctttg

SEQ ID NO: 77628 - DNA, 26 bp, Artificial sequence
  SiRNA target sequence
aatcatgaaacaatcgtctcctttgg

SEQ ID NO: 77629 - DNA, 26 bp, Artificial sequence
  SiRNA target sequence
atcatgaaacaatcgtctcctttggg

SEQ ID NO: 77630 - DNA, 26 bp, Artificial sequence
  SiRNA target sequence
tcatgaaacaatcgtctcctttggga

SEQ ID NO: 77631 - DNA, 26 bp, Artificial sequence
  SiRNA target sequence
catgaaacaatcgtctcctttgggac

SEQ ID NO: 77632 - DNA, 26 bp, Artificial sequence
  SiRNA target sequence
atgaaacaatcgtctcctttgggact

SEQ ID NO: 77633 - DNA, 26 bp, Artificial sequence
  SiRNA target sequence
tgaaacaatcgtctcctttgggacta

SEQ ID NO: 77634 - DNA, 26 bp, Artificial sequence
  SiRNA target sequence
gaaacaatcgtctcctttgggactac

SEQ ID NO: 77635 - DNA, 26 bp, Artificial sequence
  SiRNA target sequence
aaacaatcgtctcctttgggactaca

SEQ ID NO: 77636 - DNA, 26 bp, Artificial sequence
  SiRNA target sequence
aacaatcgtctcctttgggactacag

SEQ ID NO: 77637 - DNA, 26 bp, Artificial sequence
  SiRNA target sequence
acaatcgtctcctttgggactacaga

SEQ ID NO: 77638 - DNA, 26 bp, Artificial sequence
  SiRNA target sequence
caatcgtctcctttgggactacagat

SEQ ID NO: 77639 - DNA, 26 bp, Artificial sequence
  SiRNA target sequence
aatcgtctcctttgggactacagatc

SEQ ID NO: 77640 - DNA, 26 bp, Artificial sequence
  SiRNA target sequence
atcgtctcctttgggactacagatct

SEQ ID NO: 77641 - DNA, 26 bp, Artificial sequence
  SiRNA target sequence
tcgtctcctttgggactacagatctt

SEQ ID NO: 77642 - DNA, 26 bp, Artificial sequence
  SiRNA target sequence
cgtctcctttgggactacagatcttg

SEQ ID NO: 77643 - DNA, 26 bp, Artificial sequence
  SiRNA target sequence
gtctcctttgggactacagatcttga

SEQ ID NO: 77644 - DNA, 26 bp, Artificial sequence
  SiRNA target sequence
tctcctttgggactacagatcttgaa

SEQ ID NO: 77645 - DNA, 26 bp, Artificial sequence
  SiRNA target sequence
ctcctttgggactacagatcttgaag

SEQ ID NO: 77646 - DNA, 26 bp, Artificial sequence
  SiRNA target sequence
tcctttgggactacagatcttgaagt

SEQ ID NO: 77647 - DNA, 26 bp, Artificial sequence
  SiRNA target sequence
cctttgggactacagatcttgaagta

SEQ ID NO: 77648 - DNA, 26 bp, Artificial sequence
  SiRNA target sequence
ctttgggactacagatcttgaagtag

SEQ ID NO: 77649 - DNA, 26 bp, Artificial sequence
  SiRNA target sequence
tttgggactacagatcttgaagtaga

SEQ ID NO: 77650 - DNA, 26 bp, Artificial sequence
  SiRNA target sequence
ttgggactacagatcttgaagtagat

SEQ ID NO: 77651 - DNA, 26 bp, Artificial sequence
  SiRNA target sequence
tgggactacagatcttgaagtagatg

SEQ ID NO: 77652 - DNA, 26 bp, Artificial sequence
  SiRNA target sequence
gggactacagatcttgaagtagatga

SEQ ID NO: 77653 - DNA, 26 bp, Artificial sequence
  SiRNA target sequence
ggactacagatcttgaagtagatgaa

SEQ ID NO: 77654 - DNA, 26 bp, Artificial sequence
  SiRNA target sequence
gactacagatcttgaagtagatgaat

SEQ ID NO: 77655 - DNA, 26 bp, Artificial sequence
  SiRNA target sequence
actacagatcttgaagtagatgaata

SEQ ID NO: 77656 - DNA, 26 bp, Artificial sequence
  SiRNA target sequence
ctacagatcttgaagtagatgaatat

SEQ ID NO: 77657 - DNA, 26 bp, Artificial sequence
  SiRNA target sequence
tacagatcttgaagtagatgaatatg

SEQ ID NO: 77658 - DNA, 26 bp, Artificial sequence
  SiRNA target sequence
acagatcttgaagtagatgaatatga

SEQ ID NO: 77659 - DNA, 26 bp, Artificial sequence
  SiRNA target sequence
cagatcttgaagtagatgaatatgat

SEQ ID NO: 77660 - DNA, 26 bp, Artificial sequence
  SiRNA target sequence
agatcttgaagtagatgaatatgatc

SEQ ID NO: 77661 - DNA, 26 bp, Artificial sequence
  SiRNA target sequence
gatcttgaagtagatgaatatgatca

SEQ ID NO: 77662 - DNA, 26 bp, Artificial sequence
  SiRNA target sequence
atcttgaagtagatgaatatgatcag

SEQ ID NO: 77663 - DNA, 26 bp, Artificial sequence
  SiRNA target sequence
tcttgaagtagatgaatatgatcagt

SEQ ID NO: 77664 - DNA, 26 bp, Artificial sequence
  SiRNA target sequence
cttgaagtagatgaatatgatcagtt

SEQ ID NO: 77665 - DNA, 26 bp, Artificial sequence
  SiRNA target sequence
ttgaagtagatgaatatgatcagttt

SEQ ID NO: 77666 - DNA, 26 bp, Artificial sequence
  SiRNA target sequence
tgaagtagatgaatatgatcagtttc

SEQ ID NO: 77667 - DNA, 26 bp, Artificial sequence
  SiRNA target sequence
gaagtagatgaatatgatcagtttct

SEQ ID NO: 77668 - DNA, 26 bp, Artificial sequence
  SiRNA target sequence
aagtagatgaatatgatcagtttctt

SEQ ID NO: 77669 - DNA, 26 bp, Artificial sequence
  SiRNA target sequence
agtagatgaatatgatcagtttctta

SEQ ID NO: 77670 - DNA, 26 bp, Artificial sequence
  SiRNA target sequence
gtagatgaatatgatcagtttcttaa

SEQ ID NO: 77671 - DNA, 26 bp, Artificial sequence
  SiRNA target sequence
tagatgaatatgatcagtttcttaaa

SEQ ID NO: 77672 - DNA, 26 bp, Artificial sequence
  SiRNA target sequence
agatgaatatgatcagtttcttaaaa

SEQ ID NO: 77673 - DNA, 26 bp, Artificial sequence
  SiRNA target sequence
gatgaatatgatcagtttcttaaaat

SEQ ID NO: 77674 - DNA, 26 bp, Artificial sequence
  SiRNA target sequence
atgaatatgatcagtttcttaaaatt

SEQ ID NO: 77675 - DNA, 26 bp, Artificial sequence
  SiRNA target sequence
tgaatatgatcagtttcttaaaatta

SEQ ID NO: 77676 - DNA, 26 bp, Artificial sequence
  SiRNA target sequence
gaatatgatcagtttcttaaaattaa

SEQ ID NO: 77677 - DNA, 26 bp, Artificial sequence
  SiRNA target sequence
aatatgatcagtttcttaaaattaat

SEQ ID NO: 77678 - DNA, 26 bp, Artificial sequence
  SiRNA target sequence
atatgatcagtttcttaaaattaatg

SEQ ID NO: 77679 - DNA, 26 bp, Artificial sequence
  SiRNA target sequence
tatgatcagtttcttaaaattaatgc

SEQ ID NO: 77680 - DNA, 26 bp, Artificial sequence
  SiRNA target sequence
atgatcagtttcttaaaattaatgca

SEQ ID NO: 77681 - DNA, 26 bp, Artificial sequence
  SiRNA target sequence
tgatcagtttcttaaaattaatgcat

SEQ ID NO: 77682 - DNA, 26 bp, Artificial sequence
  SiRNA target sequence
gatcagtttcttaaaattaatgcatc

SEQ ID NO: 77683 - DNA, 26 bp, Artificial sequence
  SiRNA target sequence
atcagtttcttaaaattaatgcatct

SEQ ID NO: 77684 - DNA, 26 bp, Artificial sequence
  SiRNA target sequence
tcagtttcttaaaattaatgcatcta

SEQ ID NO: 77685 - DNA, 26 bp, Artificial sequence
  SiRNA target sequence
cagtttcttaaaattaatgcatctaa

SEQ ID NO: 77686 - DNA, 26 bp, Artificial sequence
  SiRNA target sequence
agtttcttaaaattaatgcatctaat

SEQ ID NO: 77687 - DNA, 26 bp, Artificial sequence
  SiRNA target sequence
gtttcttaaaattaatgcatctaata

SEQ ID NO: 77688 - DNA, 26 bp, Artificial sequence
  SiRNA target sequence
tttcttaaaattaatgcatctaatag

SEQ ID NO: 77689 - DNA, 26 bp, Artificial sequence
  SiRNA target sequence
ttcttaaaattaatgcatctaatagt

SEQ ID NO: 77690 - DNA, 26 bp, Artificial sequence
  SiRNA target sequence
tcttaaaattaatgcatctaatagta

SEQ ID NO: 77691 - DNA, 26 bp, Artificial sequence
  SiRNA target sequence
cttaaaattaatgcatctaatagtaa

SEQ ID NO: 77692 - DNA, 26 bp, Artificial sequence
  SiRNA target sequence
ttaaaattaatgcatctaatagtaac

SEQ ID NO: 77693 - DNA, 26 bp, Artificial sequence
  SiRNA target sequence
taaaattaatgcatctaatagtaaca

SEQ ID NO: 77694 - DNA, 26 bp, Artificial sequence
  SiRNA target sequence
aaaattaatgcatctaatagtaacag

SEQ ID NO: 77695 - DNA, 26 bp, Artificial sequence
  SiRNA target sequence
aaattaatgcatctaatagtaacaga

SEQ ID NO: 77696 - DNA, 26 bp, Artificial sequence
  SiRNA target sequence
aattaatgcatctaatagtaacagat

SEQ ID NO: 77697 - DNA, 26 bp, Artificial sequence
  SiRNA target sequence
attaatgcatctaatagtaacagatt

SEQ ID NO: 77698 - DNA, 26 bp, Artificial sequence
  SiRNA target sequence
ttaatgcatctaatagtaacagatta

SEQ ID NO: 77699 - DNA, 26 bp, Artificial sequence
  SiRNA target sequence
taatgcatctaatagtaacagattat

SEQ ID NO: 77700 - DNA, 26 bp, Artificial sequence
  SiRNA target sequence
aatgcatctaatagtaacagattatg

SEQ ID NO: 77701 - DNA, 26 bp, Artificial sequence
  SiRNA target sequence
atgcatctaatagtaacagattatgg

SEQ ID NO: 77702 - DNA, 26 bp, Artificial sequence
  SiRNA target sequence
tgcatctaatagtaacagattatgga

SEQ ID NO: 77703 - DNA, 26 bp, Artificial sequence
  SiRNA target sequence
gcatctaatagtaacagattatggag

SEQ ID NO: 77704 - DNA, 26 bp, Artificial sequence
  SiRNA target sequence
catctaatagtaacagattatggaga

SEQ ID NO: 77705 - DNA, 26 bp, Artificial sequence
  SiRNA target sequence
atctaatagtaacagattatggagag

SEQ ID NO: 77706 - DNA, 26 bp, Artificial sequence
  SiRNA target sequence
tctaatagtaacagattatggagagc

SEQ ID NO: 77707 - DNA, 26 bp, Artificial sequence
  SiRNA target sequence
ctaatagtaacagattatggagagca

SEQ ID NO: 77708 - DNA, 26 bp, Artificial sequence
  SiRNA target sequence
taatagtaacagattatggagagcac

SEQ ID NO: 77709 - DNA, 26 bp, Artificial sequence
  SiRNA target sequence
aatagtaacagattatggagagcact

SEQ ID NO: 77710 - DNA, 26 bp, Artificial sequence
  SiRNA target sequence
atagtaacagattatggagagcactg

SEQ ID NO: 77711 - DNA, 26 bp, Artificial sequence
  SiRNA target sequence
tagtaacagattatggagagcactgt

SEQ ID NO: 77712 - DNA, 26 bp, Artificial sequence
  SiRNA target sequence
agtaacagattatggagagcactgta

SEQ ID NO: 77713 - DNA, 26 bp, Artificial sequence
  SiRNA target sequence
gtaacagattatggagagcactgtac

SEQ ID NO: 77714 - DNA, 26 bp, Artificial sequence
  SiRNA target sequence
taacagattatggagagcactgtaca

SEQ ID NO: 77715 - DNA, 26 bp, Artificial sequence
  SiRNA target sequence
aacagattatggagagcactgtacat

SEQ ID NO: 77716 - DNA, 26 bp, Artificial sequence
  SiRNA target sequence
acagattatggagagcactgtacatt

SEQ ID NO: 77717 - DNA, 26 bp, Artificial sequence
  SiRNA target sequence
cagattatggagagcactgtacattt

SEQ ID NO: 77718 - DNA, 26 bp, Artificial sequence
  SiRNA target sequence
agattatggagagcactgtacatttt

SEQ ID NO: 77719 - DNA, 26 bp, Artificial sequence
  SiRNA target sequence
gattatggagagcactgtacatttta

SEQ ID NO: 77720 - DNA, 26 bp, Artificial sequence
  SiRNA target sequence
attatggagagcactgtacattttaa

SEQ ID NO: 77721 - DNA, 26 bp, Artificial sequence
  SiRNA target sequence
ttatggagagcactgtacattttaaa

SEQ ID NO: 77722 - DNA, 26 bp, Artificial sequence
  SiRNA target sequence
tatggagagcactgtacattttaaat

SEQ ID NO: 77723 - DNA, 26 bp, Artificial sequence
  SiRNA target sequence
atggagagcactgtacattttaaatt

SEQ ID NO: 77724 - DNA, 26 bp, Artificial sequence
  SiRNA target sequence
tggagagcactgtacattttaaattt

SEQ ID NO: 77725 - DNA, 26 bp, Artificial sequence
  SiRNA target sequence
ggagagcactgtacattttaaattta

SEQ ID NO: 77726 - DNA, 26 bp, Artificial sequence
  SiRNA target sequence
gagagcactgtacattttaaatttat

SEQ ID NO: 77727 - DNA, 26 bp, Artificial sequence
  SiRNA target sequence
agagcactgtacattttaaatttatc

SEQ ID NO: 77728 - DNA, 26 bp, Artificial sequence
  SiRNA target sequence
gagcactgtacattttaaatttatct

SEQ ID NO: 77729 - DNA, 26 bp, Artificial sequence
  SiRNA target sequence
agcactgtacattttaaatttatctc

SEQ ID NO: 77730 - DNA, 26 bp, Artificial sequence
  SiRNA target sequence
gcactgtacattttaaatttatctca

SEQ ID NO: 77731 - DNA, 26 bp, Artificial sequence
  SiRNA target sequence
cactgtacattttaaatttatctcag

SEQ ID NO: 77732 - DNA, 26 bp, Artificial sequence
  SiRNA target sequence
actgtacattttaaatttatctcaga

SEQ ID NO: 77733 - DNA, 26 bp, Artificial sequence
  SiRNA target sequence
ctgtacattttaaatttatctcagag

SEQ ID NO: 77734 - DNA, 26 bp, Artificial sequence
  SiRNA target sequence
tgtacattttaaatttatctcagaga

SEQ ID NO: 77735 - DNA, 26 bp, Artificial sequence
  SiRNA target sequence
gtacattttaaatttatctcagagag

SEQ ID NO: 77736 - DNA, 26 bp, Artificial sequence
  SiRNA target sequence
tacattttaaatttatctcagagagc

SEQ ID NO: 77737 - DNA, 26 bp, Artificial sequence
  SiRNA target sequence
acattttaaatttatctcagagagca

SEQ ID NO: 77738 - DNA, 26 bp, Artificial sequence
  SiRNA target sequence
cattttaaatttatctcagagagcaa

SEQ ID NO: 77739 - DNA, 26 bp, Artificial sequence
  SiRNA target sequence
attttaaatttatctcagagagcaat

SEQ ID NO: 77740 - DNA, 26 bp, Artificial sequence
  SiRNA target sequence
ttttaaatttatctcagagagcaatt

SEQ ID NO: 77741 - DNA, 26 bp, Artificial sequence
  SiRNA target sequence
tttaaatttatctcagagagcaattt

SEQ ID NO: 77742 - DNA, 26 bp, Artificial sequence
  SiRNA target sequence
ttaaatttatctcagagagcaatttt

SEQ ID NO: 77743 - DNA, 26 bp, Artificial sequence
  SiRNA target sequence
taaatttatctcagagagcaattttt

SEQ ID NO: 77744 - DNA, 26 bp, Artificial sequence
  SiRNA target sequence
aaatttatctcagagagcaatttttc

SEQ ID NO: 77745 - DNA, 26 bp, Artificial sequence
  SiRNA target sequence
aatttatctcagagagcaatttttct

SEQ ID NO: 77746 - DNA, 26 bp, Artificial sequence
  SiRNA target sequence
atttatctcagagagcaatttttctc

SEQ ID NO: 77747 - DNA, 26 bp, Artificial sequence
  SiRNA target sequence
tttatctcagagagcaatttttctct

SEQ ID NO: 77748 - DNA, 26 bp, Artificial sequence
  SiRNA target sequence
ttatctcagagagcaatttttctctt

SEQ ID NO: 77749 - DNA, 26 bp, Artificial sequence
  SiRNA target sequence
tatctcagagagcaatttttctctta

SEQ ID NO: 77750 - DNA, 26 bp, Artificial sequence
  SiRNA target sequence
atctcagagagcaatttttctcttac

SEQ ID NO: 77751 - DNA, 26 bp, Artificial sequence
  SiRNA target sequence
tctcagagagcaatttttctcttaca

SEQ ID NO: 77752 - DNA, 26 bp, Artificial sequence
  SiRNA target sequence
ctcagagagcaatttttctcttacaa

SEQ ID NO: 77753 - DNA, 26 bp, Artificial sequence
  SiRNA target sequence
tcagagagcaatttttctcttacaaa

SEQ ID NO: 77754 - DNA, 26 bp, Artificial sequence
  SiRNA target sequence
cagagagcaatttttctcttacaaag

SEQ ID NO: 77755 - DNA, 26 bp, Artificial sequence
  SiRNA target sequence
agagagcaatttttctcttacaaagt

SEQ ID NO: 77756 - DNA, 26 bp, Artificial sequence
  SiRNA target sequence
gagagcaatttttctcttacaaagtt

SEQ ID NO: 77757 - DNA, 26 bp, Artificial sequence
  SiRNA target sequence
agagcaatttttctcttacaaagttt

SEQ ID NO: 77758 - DNA, 26 bp, Artificial sequence
  SiRNA target sequence
gagcaatttttctcttacaaagtttt

SEQ ID NO: 77759 - DNA, 26 bp, Artificial sequence
  SiRNA target sequence
agcaatttttctcttacaaagttttt

SEQ ID NO: 77760 - DNA, 26 bp, Artificial sequence
  SiRNA target sequence
gcaatttttctcttacaaagtttttt

SEQ ID NO: 77761 - DNA, 26 bp, Artificial sequence
  SiRNA target sequence
caatttttctcttacaaagttttttt

SEQ ID NO: 77762 - DNA, 26 bp, Artificial sequence
  SiRNA target sequence
aatttttctcttacaaagttttttta

SEQ ID NO: 77763 - DNA, 26 bp, Artificial sequence
  SiRNA target sequence
atttttctcttacaaagtttttttat

SEQ ID NO: 77764 - DNA, 26 bp, Artificial sequence
  SiRNA target sequence
tttttctcttacaaagtttttttatt

SEQ ID NO: 77765 - DNA, 26 bp, Artificial sequence
  SiRNA target sequence
ttttctcttacaaagtttttttatta

SEQ ID NO: 77766 - DNA, 26 bp, Artificial sequence
  SiRNA target sequence
tttctcttacaaagtttttttattat

SEQ ID NO: 77767 - DNA, 26 bp, Artificial sequence
  SiRNA target sequence
ttctcttacaaagtttttttattatt

SEQ ID NO: 77768 - DNA, 26 bp, Artificial sequence
  SiRNA target sequence
tctcttacaaagtttttttattattt

SEQ ID NO: 77769 - DNA, 26 bp, Artificial sequence
  SiRNA target sequence
ctcttacaaagtttttttattattta

SEQ ID NO: 77770 - DNA, 26 bp, Artificial sequence
  SiRNA target sequence
tcttacaaagtttttttattatttat

SEQ ID NO: 77771 - DNA, 26 bp, Artificial sequence
  SiRNA target sequence
cttacaaagtttttttattatttatg

SEQ ID NO: 77772 - DNA, 26 bp, Artificial sequence
  SiRNA target sequence
ttacaaagtttttttattatttatgc

SEQ ID NO: 77773 - DNA, 26 bp, Artificial sequence
  SiRNA target sequence
tacaaagtttttttattatttatgca

SEQ ID NO: 77774 - DNA, 26 bp, Artificial sequence
  SiRNA target sequence
acaaagtttttttattatttatgcag

SEQ ID NO: 77775 - DNA, 26 bp, Artificial sequence
  SiRNA target sequence
caaagtttttttattatttatgcagg

SEQ ID NO: 77776 - DNA, 26 bp, Artificial sequence
  SiRNA target sequence
aaagtttttttattatttatgcagga

SEQ ID NO: 77777 - DNA, 26 bp, Artificial sequence
  SiRNA target sequence
aagtttttttattatttatgcaggaa

SEQ ID NO: 77778 - DNA, 26 bp, Artificial sequence
  SiRNA target sequence
agtttttttattatttatgcaggaat

SEQ ID NO: 77779 - DNA, 26 bp, Artificial sequence
  SiRNA target sequence
gtttttttattatttatgcaggaata

SEQ ID NO: 77780 - DNA, 26 bp, Artificial sequence
  SiRNA target sequence
tttttttattatttatgcaggaatat

SEQ ID NO: 77781 - DNA, 26 bp, Artificial sequence
  SiRNA target sequence
ttttttattatttatgcaggaatatc

SEQ ID NO: 77782 - DNA, 26 bp, Artificial sequence
  SiRNA target sequence
tttttattatttatgcaggaatatca

SEQ ID NO: 77783 - DNA, 26 bp, Artificial sequence
  SiRNA target sequence
ttttattatttatgcaggaatatcag

SEQ ID NO: 77784 - DNA, 26 bp, Artificial sequence
  SiRNA target sequence
tttattatttatgcaggaatatcagg

SEQ ID NO: 77785 - DNA, 26 bp, Artificial sequence
  SiRNA target sequence
ttattatttatgcaggaatatcagga

SEQ ID NO: 77786 - DNA, 26 bp, Artificial sequence
  SiRNA target sequence
tattatttatgcaggaatatcaggaa

SEQ ID NO: 77787 - DNA, 26 bp, Artificial sequence
  SiRNA target sequence
attatttatgcaggaatatcaggaat

SEQ ID NO: 77788 - DNA, 26 bp, Artificial sequence
  SiRNA target sequence
ttatttatgcaggaatatcaggaata

SEQ ID NO: 77789 - DNA, 26 bp, Artificial sequence
  SiRNA target sequence
tatttatgcaggaatatcaggaatat

SEQ ID NO: 77790 - DNA, 26 bp, Artificial sequence
  SiRNA target sequence
atttatgcaggaatatcaggaatatt

SEQ ID NO: 77791 - DNA, 26 bp, Artificial sequence
  SiRNA target sequence
tttatgcaggaatatcaggaatatta

SEQ ID NO: 77792 - DNA, 26 bp, Artificial sequence
  SiRNA target sequence
ttatgcaggaatatcaggaatattat

SEQ ID NO: 77793 - DNA, 26 bp, Artificial sequence
  SiRNA target sequence
tatgcaggaatatcaggaatattatc

SEQ ID NO: 77794 - DNA, 26 bp, Artificial sequence
  SiRNA target sequence
atgcaggaatatcaggaatattatct

SEQ ID NO: 77795 - DNA, 26 bp, Artificial sequence
  SiRNA target sequence
tgcaggaatatcaggaatattatctc

SEQ ID NO: 77796 - DNA, 26 bp, Artificial sequence
  SiRNA target sequence
gcaggaatatcaggaatattatctca

SEQ ID NO: 77797 - DNA, 26 bp, Artificial sequence
  SiRNA target sequence
caggaatatcaggaatattatctcaa

SEQ ID NO: 77798 - DNA, 26 bp, Artificial sequence
  SiRNA target sequence
aggaatatcaggaatattatctcaaa

SEQ ID NO: 77799 - DNA, 26 bp, Artificial sequence
  SiRNA target sequence
ggaatatcaggaatattatctcaaaa

SEQ ID NO: 77800 - DNA, 26 bp, Artificial sequence
  SiRNA target sequence
gaatatcaggaatattatctcaaaat

SEQ ID NO: 77801 - DNA, 26 bp, Artificial sequence
  SiRNA target sequence
aatatcaggaatattatctcaaaata

SEQ ID NO: 77802 - DNA, 26 bp, Artificial sequence
  SiRNA target sequence
atatcaggaatattatctcaaaatat

SEQ ID NO: 77803 - DNA, 26 bp, Artificial sequence
  SiRNA target sequence
tatcaggaatattatctcaaaatatg

SEQ ID NO: 77804 - DNA, 26 bp, Artificial sequence
  SiRNA target sequence
atcaggaatattatctcaaaatatgt

SEQ ID NO: 77805 - DNA, 26 bp, Artificial sequence
  SiRNA target sequence
tcaggaatattatctcaaaatatgtc

SEQ ID NO: 77806 - DNA, 26 bp, Artificial sequence
  SiRNA target sequence
caggaatattatctcaaaatatgtca

SEQ ID NO: 77807 - DNA, 26 bp, Artificial sequence
  SiRNA target sequence
aggaatattatctcaaaatatgtcat

SEQ ID NO: 77808 - DNA, 26 bp, Artificial sequence
  SiRNA target sequence
ggaatattatctcaaaatatgtcatc

SEQ ID NO: 77809 - DNA, 26 bp, Artificial sequence
  SiRNA target sequence
gaatattatctcaaaatatgtcatct

SEQ ID NO: 77810 - DNA, 26 bp, Artificial sequence
  SiRNA target sequence
aatattatctcaaaatatgtcatcta

SEQ ID NO: 77811 - DNA, 26 bp, Artificial sequence
  SiRNA target sequence
atattatctcaaaatatgtcatctaa

SEQ ID NO: 77812 - DNA, 26 bp, Artificial sequence
  SiRNA target sequence
tattatctcaaaatatgtcatctaac

SEQ ID NO: 77813 - DNA, 26 bp, Artificial sequence
  SiRNA target sequence
attatctcaaaatatgtcatctaacc

SEQ ID NO: 77814 - DNA, 26 bp, Artificial sequence
  SiRNA target sequence
ttatctcaaaatatgtcatctaacca

SEQ ID NO: 77815 - DNA, 26 bp, Artificial sequence
  SiRNA target sequence
tatctcaaaatatgtcatctaaccaa

SEQ ID NO: 77816 - DNA, 26 bp, Artificial sequence
  SiRNA target sequence
atctcaaaatatgtcatctaaccaac

SEQ ID NO: 77817 - DNA, 26 bp, Artificial sequence
  SiRNA target sequence
tctcaaaatatgtcatctaaccaact

SEQ ID NO: 77818 - DNA, 26 bp, Artificial sequence
  SiRNA target sequence
ctcaaaatatgtcatctaaccaactc

SEQ ID NO: 77819 - DNA, 26 bp, Artificial sequence
  SiRNA target sequence
tcaaaatatgtcatctaaccaactca

SEQ ID NO: 77820 - DNA, 26 bp, Artificial sequence
  SiRNA target sequence
caaaatatgtcatctaaccaactcat

SEQ ID NO: 77821 - DNA, 26 bp, Artificial sequence
  SiRNA target sequence
aaaatatgtcatctaaccaactcatt

SEQ ID NO: 77822 - DNA, 26 bp, Artificial sequence
  SiRNA target sequence
aaatatgtcatctaaccaactcattt

SEQ ID NO: 77823 - DNA, 26 bp, Artificial sequence
  SiRNA target sequence
aatatgtcatctaaccaactcattta

SEQ ID NO: 77824 - DNA, 26 bp, Artificial sequence
  SiRNA target sequence
atatgtcatctaaccaactcatttat

SEQ ID NO: 77825 - DNA, 26 bp, Artificial sequence
  SiRNA target sequence
tatgtcatctaaccaactcatttatt

SEQ ID NO: 77826 - DNA, 26 bp, Artificial sequence
  SiRNA target sequence
atgtcatctaaccaactcatttattt

SEQ ID NO: 77827 - DNA, 26 bp, Artificial sequence
  SiRNA target sequence
tgtcatctaaccaactcatttattta

SEQ ID NO: 77828 - DNA, 26 bp, Artificial sequence
  SiRNA target sequence
gtcatctaaccaactcatttatttaa

SEQ ID NO: 77829 - DNA, 26 bp, Artificial sequence
  SiRNA target sequence
tcatctaaccaactcatttatttaat

SEQ ID NO: 77830 - DNA, 26 bp, Artificial sequence
  SiRNA target sequence
catctaaccaactcatttatttaatg

SEQ ID NO: 77831 - DNA, 26 bp, Artificial sequence
  SiRNA target sequence
atctaaccaactcatttatttaatgt

SEQ ID NO: 77832 - DNA, 26 bp, Artificial sequence
  SiRNA target sequence
tctaaccaactcatttatttaatgtc

SEQ ID NO: 77833 - DNA, 26 bp, Artificial sequence
  SiRNA target sequence
ctaaccaactcatttatttaatgtcc

SEQ ID NO: 77834 - DNA, 26 bp, Artificial sequence
  SiRNA target sequence
taaccaactcatttatttaatgtcca

SEQ ID NO: 77835 - DNA, 26 bp, Artificial sequence
  SiRNA target sequence
aaccaactcatttatttaatgtccat

SEQ ID NO: 77836 - DNA, 26 bp, Artificial sequence
  SiRNA target sequence
accaactcatttatttaatgtccatt

SEQ ID NO: 77837 - DNA, 26 bp, Artificial sequence
  SiRNA target sequence
ccaactcatttatttaatgtccatta

SEQ ID NO: 77838 - DNA, 26 bp, Artificial sequence
  SiRNA target sequence
caactcatttatttaatgtccattac

SEQ ID NO: 77839 - DNA, 26 bp, Artificial sequence
  SiRNA target sequence
aactcatttatttaatgtccattaca

SEQ ID NO: 77840 - DNA, 26 bp, Artificial sequence
  SiRNA target sequence
actcatttatttaatgtccattacat

SEQ ID NO: 77841 - DNA, 26 bp, Artificial sequence
  SiRNA target sequence
ctcatttatttaatgtccattacatc

SEQ ID NO: 77842 - DNA, 26 bp, Artificial sequence
  SiRNA target sequence
tcatttatttaatgtccattacatct

SEQ ID NO: 77843 - DNA, 26 bp, Artificial sequence
  SiRNA target sequence
catttatttaatgtccattacatcta

SEQ ID NO: 77844 - DNA, 26 bp, Artificial sequence
  SiRNA target sequence
atttatttaatgtccattacatctac

SEQ ID NO: 77845 - DNA, 26 bp, Artificial sequence
  SiRNA target sequence
tttatttaatgtccattacatctacg

SEQ ID NO: 77846 - DNA, 26 bp, Artificial sequence
  SiRNA target sequence
ttatttaatgtccattacatctacgg

SEQ ID NO: 77847 - DNA, 26 bp, Artificial sequence
  SiRNA target sequence
tatttaatgtccattacatctacggt

SEQ ID NO: 77848 - DNA, 26 bp, Artificial sequence
  SiRNA target sequence
atttaatgtccattacatctacggtt

SEQ ID NO: 77849 - DNA, 26 bp, Artificial sequence
  SiRNA target sequence
tttaatgtccattacatctacggtta

SEQ ID NO: 77850 - DNA, 26 bp, Artificial sequence
  SiRNA target sequence
ttaatgtccattacatctacggttac

SEQ ID NO: 77851 - DNA, 26 bp, Artificial sequence
  SiRNA target sequence
taatgtccattacatctacggttact

SEQ ID NO: 77852 - DNA, 26 bp, Artificial sequence
  SiRNA target sequence
aatgtccattacatctacggttacta

SEQ ID NO: 77853 - DNA, 26 bp, Artificial sequence
  SiRNA target sequence
atgtccattacatctacggttactat

SEQ ID NO: 77854 - DNA, 26 bp, Artificial sequence
  SiRNA target sequence
tgtccattacatctacggttactatt

SEQ ID NO: 77855 - DNA, 26 bp, Artificial sequence
  SiRNA target sequence
gtccattacatctacggttactatta

SEQ ID NO: 77856 - DNA, 26 bp, Artificial sequence
  SiRNA target sequence
tccattacatctacggttactattaa

SEQ ID NO: 77857 - DNA, 26 bp, Artificial sequence
  SiRNA target sequence
ccattacatctacggttactattaat

SEQ ID NO: 77858 - DNA, 26 bp, Artificial sequence
  SiRNA target sequence
cattacatctacggttactattaatt

SEQ ID NO: 77859 - DNA, 26 bp, Artificial sequence
  SiRNA target sequence
attacatctacggttactattaattt

SEQ ID NO: 77860 - DNA, 26 bp, Artificial sequence
  SiRNA target sequence
ttacatctacggttactattaattta

SEQ ID NO: 77861 - DNA, 26 bp, Artificial sequence
  SiRNA target sequence
tacatctacggttactattaatttaa

SEQ ID NO: 77862 - DNA, 26 bp, Artificial sequence
  SiRNA target sequence
acatctacggttactattaatttaag

SEQ ID NO: 77863 - DNA, 26 bp, Artificial sequence
  SiRNA target sequence
catctacggttactattaatttaagt

SEQ ID NO: 77864 - DNA, 26 bp, Artificial sequence
  SiRNA target sequence
atctacggttactattaatttaagta

SEQ ID NO: 77865 - DNA, 26 bp, Artificial sequence
  SiRNA target sequence
tctacggttactattaatttaagtaa

SEQ ID NO: 77866 - DNA, 26 bp, Artificial sequence
  SiRNA target sequence
ctacggttactattaatttaagtaac

SEQ ID NO: 77867 - DNA, 26 bp, Artificial sequence
  SiRNA target sequence
tacggttactattaatttaagtaact

SEQ ID NO: 77868 - DNA, 26 bp, Artificial sequence
  SiRNA target sequence
acggttactattaatttaagtaactt

SEQ ID NO: 77869 - DNA, 26 bp, Artificial sequence
  SiRNA target sequence
cggttactattaatttaagtaacttg

SEQ ID NO: 77870 - DNA, 26 bp, Artificial sequence
  SiRNA target sequence
ggttactattaatttaagtaacttgg

SEQ ID NO: 77871 - DNA, 26 bp, Artificial sequence
  SiRNA target sequence
gttactattaatttaagtaacttggg

SEQ ID NO: 77872 - DNA, 26 bp, Artificial sequence
  SiRNA target sequence
ttactattaatttaagtaacttgggt

SEQ ID NO: 77873 - DNA, 26 bp, Artificial sequence
  SiRNA target sequence
tactattaatttaagtaacttgggtt

SEQ ID NO: 77874 - DNA, 26 bp, Artificial sequence
  SiRNA target sequence
actattaatttaagtaacttgggtta

SEQ ID NO: 77875 - DNA, 26 bp, Artificial sequence
  SiRNA target sequence
ctattaatttaagtaacttgggttac

SEQ ID NO: 77876 - DNA, 26 bp, Artificial sequence
  SiRNA target sequence
tattaatttaagtaacttgggttact

SEQ ID NO: 77877 - DNA, 26 bp, Artificial sequence
  SiRNA target sequence
attaatttaagtaacttgggttactt

SEQ ID NO: 77878 - DNA, 26 bp, Artificial sequence
  SiRNA target sequence
ttaatttaagtaacttgggttactta

SEQ ID NO: 77879 - DNA, 26 bp, Artificial sequence
  SiRNA target sequence
taatttaagtaacttgggttacttat

SEQ ID NO: 77880 - DNA, 26 bp, Artificial sequence
  SiRNA target sequence
aatttaagtaacttgggttacttata

SEQ ID NO: 77881 - DNA, 26 bp, Artificial sequence
  SiRNA target sequence
atttaagtaacttgggttacttatac

SEQ ID NO: 77882 - DNA, 26 bp, Artificial sequence
  SiRNA target sequence
tttaagtaacttgggttacttataca

SEQ ID NO: 77883 - DNA, 26 bp, Artificial sequence
  SiRNA target sequence
ttaagtaacttgggttacttatacac

SEQ ID NO: 77884 - DNA, 26 bp, Artificial sequence
  SiRNA target sequence
taagtaacttgggttacttatacact

SEQ ID NO: 77885 - DNA, 26 bp, Artificial sequence
  SiRNA target sequence
aagtaacttgggttacttatacacta

SEQ ID NO: 77886 - DNA, 26 bp, Artificial sequence
  SiRNA target sequence
agtaacttgggttacttatacactag

SEQ ID NO: 77887 - DNA, 26 bp, Artificial sequence
  SiRNA target sequence
gtaacttgggttacttatacactaga

SEQ ID NO: 77888 - DNA, 26 bp, Artificial sequence
  SiRNA target sequence
taacttgggttacttatacactagat

SEQ ID NO: 77889 - DNA, 26 bp, Artificial sequence
  SiRNA target sequence
aacttgggttacttatacactagata

SEQ ID NO: 77890 - DNA, 26 bp, Artificial sequence
  SiRNA target sequence
acttgggttacttatacactagatat

SEQ ID NO: 77891 - DNA, 26 bp, Artificial sequence
  SiRNA target sequence
cttgggttacttatacactagatata

SEQ ID NO: 77892 - DNA, 26 bp, Artificial sequence
  SiRNA target sequence
ttgggttacttatacactagatatac

SEQ ID NO: 77893 - DNA, 26 bp, Artificial sequence
  SiRNA target sequence
tgggttacttatacactagatataca

SEQ ID NO: 77894 - DNA, 26 bp, Artificial sequence
  SiRNA target sequence
gggttacttatacactagatatacac

SEQ ID NO: 77895 - DNA, 26 bp, Artificial sequence
  SiRNA target sequence
ggttacttatacactagatatacaca

SEQ ID NO: 77896 - DNA, 26 bp, Artificial sequence
  SiRNA target sequence
gttacttatacactagatatacacaa

SEQ ID NO: 77897 - DNA, 26 bp, Artificial sequence
  SiRNA target sequence
ttacttatacactagatatacacaag

SEQ ID NO: 77898 - DNA, 26 bp, Artificial sequence
  SiRNA target sequence
tacttatacactagatatacacaagc

SEQ ID NO: 77899 - DNA, 26 bp, Artificial sequence
  SiRNA target sequence
acttatacactagatatacacaagca

SEQ ID NO: 77900 - DNA, 26 bp, Artificial sequence
  SiRNA target sequence
cttatacactagatatacacaagcaa

SEQ ID NO: 77901 - DNA, 26 bp, Artificial sequence
  SiRNA target sequence
ttatacactagatatacacaagcaat

SEQ ID NO: 77902 - DNA, 26 bp, Artificial sequence
  SiRNA target sequence
tatacactagatatacacaagcaata

SEQ ID NO: 77903 - DNA, 26 bp, Artificial sequence
  SiRNA target sequence
atacactagatatacacaagcaataa

SEQ ID NO: 77904 - DNA, 26 bp, Artificial sequence
  SiRNA target sequence
tacactagatatacacaagcaataat

SEQ ID NO: 77905 - DNA, 26 bp, Artificial sequence
  SiRNA target sequence
acactagatatacacaagcaataatt

SEQ ID NO: 77906 - DNA, 26 bp, Artificial sequence
  SiRNA target sequence
cactagatatacacaagcaataatta

SEQ ID NO: 77907 - DNA, 26 bp, Artificial sequence
  SiRNA target sequence
actagatatacacaagcaataattaa

SEQ ID NO: 77908 - DNA, 26 bp, Artificial sequence
  SiRNA target sequence
ctagatatacacaagcaataattaat

SEQ ID NO: 77909 - DNA, 26 bp, Artificial sequence
  SiRNA target sequence
tagatatacacaagcaataattaatg

SEQ ID NO: 77910 - DNA, 26 bp, Artificial sequence
  SiRNA target sequence
agatatacacaagcaataattaatgc

SEQ ID NO: 77911 - DNA, 26 bp, Artificial sequence
  SiRNA target sequence
gatatacacaagcaataattaatgca

SEQ ID NO: 77912 - DNA, 26 bp, Artificial sequence
  SiRNA target sequence
atatacacaagcaataattaatgcaa

SEQ ID NO: 77913 - DNA, 26 bp, Artificial sequence
  SiRNA target sequence
tatacacaagcaataattaatgcaag

SEQ ID NO: 77914 - DNA, 26 bp, Artificial sequence
  SiRNA target sequence
atacacaagcaataattaatgcaaga

SEQ ID NO: 77915 - DNA, 26 bp, Artificial sequence
  SiRNA target sequence
tacacaagcaataattaatgcaagat

SEQ ID NO: 77916 - DNA, 26 bp, Artificial sequence
  SiRNA target sequence
acacaagcaataattaatgcaagatc

SEQ ID NO: 77917 - DNA, 26 bp, Artificial sequence
  SiRNA target sequence
cacaagcaataattaatgcaagatct

SEQ ID NO: 77918 - DNA, 26 bp, Artificial sequence
  SiRNA target sequence
acaagcaataattaatgcaagatcta

SEQ ID NO: 77919 - DNA, 26 bp, Artificial sequence
  SiRNA target sequence
caagcaataattaatgcaagatctac

SEQ ID NO: 77920 - DNA, 26 bp, Artificial sequence
  SiRNA target sequence
aagcaataattaatgcaagatctact

SEQ ID NO: 77921 - DNA, 26 bp, Artificial sequence
  SiRNA target sequence
agcaataattaatgcaagatctactt

SEQ ID NO: 77922 - DNA, 26 bp, Artificial sequence
  SiRNA target sequence
gcaataattaatgcaagatctactta

SEQ ID NO: 77923 - DNA, 26 bp, Artificial sequence
  SiRNA target sequence
caataattaatgcaagatctacttat

SEQ ID NO: 77924 - DNA, 26 bp, Artificial sequence
  SiRNA target sequence
aataattaatgcaagatctacttatg

SEQ ID NO: 77925 - DNA, 26 bp, Artificial sequence
  SiRNA target sequence
ataattaatgcaagatctacttatga

SEQ ID NO: 77926 - DNA, 26 bp, Artificial sequence
  SiRNA target sequence
taattaatgcaagatctacttatgat

SEQ ID NO: 77927 - DNA, 26 bp, Artificial sequence
  SiRNA target sequence
aattaatgcaagatctacttatgata

SEQ ID NO: 77928 - DNA, 26 bp, Artificial sequence
  SiRNA target sequence
attaatgcaagatctacttatgatac

SEQ ID NO: 77929 - DNA, 26 bp, Artificial sequence
  SiRNA target sequence
ttaatgcaagatctacttatgataca

SEQ ID NO: 77930 - DNA, 26 bp, Artificial sequence
  SiRNA target sequence
taatgcaagatctacttatgatacaa

SEQ ID NO: 77931 - DNA, 26 bp, Artificial sequence
  SiRNA target sequence
aatgcaagatctacttatgatacaat

SEQ ID NO: 77932 - DNA, 26 bp, Artificial sequence
  SiRNA target sequence
atgcaagatctacttatgatacaatg

SEQ ID NO: 77933 - DNA, 26 bp, Artificial sequence
  SiRNA target sequence
tgcaagatctacttatgatacaatgt

SEQ ID NO: 77934 - DNA, 26 bp, Artificial sequence
  SiRNA target sequence
gcaagatctacttatgatacaatgtt

SEQ ID NO: 77935 - DNA, 26 bp, Artificial sequence
  SiRNA target sequence
caagatctacttatgatacaatgtta

SEQ ID NO: 77936 - DNA, 26 bp, Artificial sequence
  SiRNA target sequence
aagatctacttatgatacaatgttag

SEQ ID NO: 77937 - DNA, 26 bp, Artificial sequence
  SiRNA target sequence
agatctacttatgatacaatgttaga

SEQ ID NO: 77938 - DNA, 26 bp, Artificial sequence
  SiRNA target sequence
gatctacttatgatacaatgttagat

SEQ ID NO: 77939 - DNA, 26 bp, Artificial sequence
  SiRNA target sequence
atctacttatgatacaatgttagata

SEQ ID NO: 77940 - DNA, 26 bp, Artificial sequence
  SiRNA target sequence
tctacttatgatacaatgttagatat

SEQ ID NO: 77941 - DNA, 26 bp, Artificial sequence
  SiRNA target sequence
ctacttatgatacaatgttagatata

SEQ ID NO: 77942 - DNA, 26 bp, Artificial sequence
  SiRNA target sequence
tacttatgatacaatgttagatataa

SEQ ID NO: 77943 - DNA, 26 bp, Artificial sequence
  SiRNA target sequence
acttatgatacaatgttagatataaa

SEQ ID NO: 77944 - DNA, 26 bp, Artificial sequence
  SiRNA target sequence
cttatgatacaatgttagatataaaa

SEQ ID NO: 77945 - DNA, 26 bp, Artificial sequence
  SiRNA target sequence
ttatgatacaatgttagatataaaaa

SEQ ID NO: 77946 - DNA, 26 bp, Artificial sequence
  SiRNA target sequence
tatgatacaatgttagatataaaaaa

SEQ ID NO: 77947 - DNA, 26 bp, Artificial sequence
  SiRNA target sequence
atgatacaatgttagatataaaaaaa

SEQ ID NO: 77948 - DNA, 26 bp, Artificial sequence
  SiRNA target sequence
tgatacaatgttagatataaaaaaag

SEQ ID NO: 77949 - DNA, 26 bp, Artificial sequence
  SiRNA target sequence
gatacaatgttagatataaaaaaaga

SEQ ID NO: 77950 - DNA, 26 bp, Artificial sequence
  SiRNA target sequence
atacaatgttagatataaaaaaagag

SEQ ID NO: 77951 - DNA, 26 bp, Artificial sequence
  SiRNA target sequence
tacaatgttagatataaaaaaagaga

SEQ ID NO: 77952 - DNA, 26 bp, Artificial sequence
  SiRNA target sequence
acaatgttagatataaaaaaagagaa

SEQ ID NO: 77953 - DNA, 26 bp, Artificial sequence
  SiRNA target sequence
caatgttagatataaaaaaagagaat

SEQ ID NO: 77954 - DNA, 26 bp, Artificial sequence
  SiRNA target sequence
aatgttagatataaaaaaagagaata

SEQ ID NO: 77955 - DNA, 26 bp, Artificial sequence
  SiRNA target sequence
atgttagatataaaaaaagagaataa

SEQ ID NO: 77956 - DNA, 26 bp, Artificial sequence
  SiRNA target sequence
tgttagatataaaaaaagagaataat

SEQ ID NO: 77957 - DNA, 26 bp, Artificial sequence
  SiRNA target sequence
gttagatataaaaaaagagaataata

SEQ ID NO: 77958 - DNA, 26 bp, Artificial sequence
  SiRNA target sequence
ttagatataaaaaaagagaataataa

SEQ ID NO: 77959 - DNA, 26 bp, Artificial sequence
  SiRNA target sequence
tagatataaaaaaagagaataataag

SEQ ID NO: 77960 - DNA, 26 bp, Artificial sequence
  SiRNA target sequence
agatataaaaaaagagaataataagt

SEQ ID NO: 77961 - DNA, 26 bp, Artificial sequence
  SiRNA target sequence
gatataaaaaaagagaataataagtt

SEQ ID NO: 77962 - DNA, 26 bp, Artificial sequence
  SiRNA target sequence
atataaaaaaagagaataataagttt

SEQ ID NO: 77963 - DNA, 26 bp, Artificial sequence
  SiRNA target sequence
tataaaaaaagagaataataagttta

SEQ ID NO: 77964 - DNA, 26 bp, Artificial sequence
  SiRNA target sequence
ataaaaaaagagaataataagtttaa

SEQ ID NO: 77965 - DNA, 26 bp, Artificial sequence
  SiRNA target sequence
taaaaaaagagaataataagtttaag

SEQ ID NO: 77966 - DNA, 26 bp, Artificial sequence
  SiRNA target sequence
aaaaaaagagaataataagtttaaga

SEQ ID NO: 77967 - DNA, 26 bp, Artificial sequence
  SiRNA target sequence
aaaaaagagaataataagtttaagat

SEQ ID NO: 77968 - DNA, 26 bp, Artificial sequence
  SiRNA target sequence
aaaaagagaataataagtttaagatt

SEQ ID NO: 77969 - DNA, 26 bp, Artificial sequence
  SiRNA target sequence
aaaagagaataataagtttaagatta

SEQ ID NO: 77970 - DNA, 26 bp, Artificial sequence
  SiRNA target sequence
aaagagaataataagtttaagattac

SEQ ID NO: 77971 - DNA, 26 bp, Artificial sequence
  SiRNA target sequence
aagagaataataagtttaagattaca

SEQ ID NO: 77972 - DNA, 26 bp, Artificial sequence
  SiRNA target sequence
agagaataataagtttaagattacag

SEQ ID NO: 77973 - DNA, 26 bp, Artificial sequence
  SiRNA target sequence
gagaataataagtttaagattacaga

SEQ ID NO: 77974 - DNA, 26 bp, Artificial sequence
  SiRNA target sequence
agaataataagtttaagattacagaa

SEQ ID NO: 77975 - DNA, 26 bp, Artificial sequence
  SiRNA target sequence
gaataataagtttaagattacagaat

SEQ ID NO: 77976 - DNA, 26 bp, Artificial sequence
  SiRNA target sequence
aataataagtttaagattacagaatt

SEQ ID NO: 77977 - DNA, 26 bp, Artificial sequence
  SiRNA target sequence
ataataagtttaagattacagaattt

SEQ ID NO: 77978 - DNA, 26 bp, Artificial sequence
  SiRNA target sequence
taataagtttaagattacagaattta

SEQ ID NO: 77979 - DNA, 26 bp, Artificial sequence
  SiRNA target sequence
aataagtttaagattacagaatttaa

SEQ ID NO: 77980 - DNA, 26 bp, Artificial sequence
  SiRNA target sequence
ataagtttaagattacagaatttaaa

SEQ ID NO: 77981 - DNA, 26 bp, Artificial sequence
  SiRNA target sequence
taagtttaagattacagaatttaaag

SEQ ID NO: 77982 - DNA, 26 bp, Artificial sequence
  SiRNA target sequence
aagtttaagattacagaatttaaaga

SEQ ID NO: 77983 - DNA, 26 bp, Artificial sequence
  SiRNA target sequence
agtttaagattacagaatttaaagaa

SEQ ID NO: 77984 - DNA, 26 bp, Artificial sequence
  SiRNA target sequence
gtttaagattacagaatttaaagaaa

SEQ ID NO: 77985 - DNA, 26 bp, Artificial sequence
  SiRNA target sequence
tttaagattacagaatttaaagaaag

SEQ ID NO: 77986 - DNA, 26 bp, Artificial sequence
  SiRNA target sequence
ttaagattacagaatttaaagaaagt

SEQ ID NO: 77987 - DNA, 26 bp, Artificial sequence
  SiRNA target sequence
taagattacagaatttaaagaaagta

SEQ ID NO: 77988 - DNA, 26 bp, Artificial sequence
  SiRNA target sequence
aagattacagaatttaaagaaagtat

SEQ ID NO: 77989 - DNA, 26 bp, Artificial sequence
  SiRNA target sequence
agattacagaatttaaagaaagtatt

SEQ ID NO: 77990 - DNA, 26 bp, Artificial sequence
  SiRNA target sequence
gattacagaatttaaagaaagtatta

SEQ ID NO: 77991 - DNA, 26 bp, Artificial sequence
  SiRNA target sequence
attacagaatttaaagaaagtattaa

SEQ ID NO: 77992 - DNA, 26 bp, Artificial sequence
  SiRNA target sequence
ttacagaatttaaagaaagtattaag

SEQ ID NO: 77993 - DNA, 26 bp, Artificial sequence
  SiRNA target sequence
tacagaatttaaagaaagtattaagt

SEQ ID NO: 77994 - DNA, 26 bp, Artificial sequence
  SiRNA target sequence
acagaatttaaagaaagtattaagtt

SEQ ID NO: 77995 - DNA, 26 bp, Artificial sequence
  SiRNA target sequence
cagaatttaaagaaagtattaagttt

SEQ ID NO: 77996 - DNA, 26 bp, Artificial sequence
  SiRNA target sequence
agaatttaaagaaagtattaagttta

SEQ ID NO: 77997 - DNA, 26 bp, Artificial sequence
  SiRNA target sequence
gaatttaaagaaagtattaagtttaa

SEQ ID NO: 77998 - DNA, 26 bp, Artificial sequence
  SiRNA target sequence
aatttaaagaaagtattaagtttaat

SEQ ID NO: 77999 - DNA, 26 bp, Artificial sequence
  SiRNA target sequence
atttaaagaaagtattaagtttaata

SEQ ID NO: 78000 - DNA, 26 bp, Artificial sequence
  SiRNA target sequence
tttaaagaaagtattaagtttaataa

SEQ ID NO: 78001 - DNA, 26 bp, Artificial sequence
  SiRNA target sequence
ttaaagaaagtattaagtttaataat

SEQ ID NO: 78002 - DNA, 26 bp, Artificial sequence
  SiRNA target sequence
taaagaaagtattaagtttaataatt

SEQ ID NO: 78003 - DNA, 26 bp, Artificial sequence
  SiRNA target sequence
aaagaaagtattaagtttaataattt

SEQ ID NO: 78004 - DNA, 26 bp, Artificial sequence
  SiRNA target sequence
aagaaagtattaagtttaataatttg

SEQ ID NO: 78005 - DNA, 26 bp, Artificial sequence
  SiRNA target sequence
agaaagtattaagtttaataatttgt

SEQ ID NO: 78006 - DNA, 26 bp, Artificial sequence
  SiRNA target sequence
gaaagtattaagtttaataatttgtc

SEQ ID NO: 78007 - DNA, 26 bp, Artificial sequence
  SiRNA target sequence
aaagtattaagtttaataatttgtca

SEQ ID NO: 78008 - DNA, 26 bp, Artificial sequence
  SiRNA target sequence
aagtattaagtttaataatttgtcat

SEQ ID NO: 78009 - DNA, 26 bp, Artificial sequence
  SiRNA target sequence
agtattaagtttaataatttgtcatt

SEQ ID NO: 78010 - DNA, 26 bp, Artificial sequence
  SiRNA target sequence
gtattaagtttaataatttgtcattt

SEQ ID NO: 78011 - DNA, 26 bp, Artificial sequence
  SiRNA target sequence
tattaagtttaataatttgtcatttg

SEQ ID NO: 78012 - DNA, 26 bp, Artificial sequence
  SiRNA target sequence
attaagtttaataatttgtcatttgg

SEQ ID NO: 78013 - DNA, 26 bp, Artificial sequence
  SiRNA target sequence
ttaagtttaataatttgtcatttggt

SEQ ID NO: 78014 - DNA, 26 bp, Artificial sequence
  SiRNA target sequence
taagtttaataatttgtcatttggtt

SEQ ID NO: 78015 - DNA, 26 bp, Artificial sequence
  SiRNA target sequence
aagtttaataatttgtcatttggtta

SEQ ID NO: 78016 - DNA, 26 bp, Artificial sequence
  SiRNA target sequence
agtttaataatttgtcatttggttat

SEQ ID NO: 78017 - DNA, 26 bp, Artificial sequence
  SiRNA target sequence
gtttaataatttgtcatttggttatg

SEQ ID NO: 78018 - DNA, 26 bp, Artificial sequence
  SiRNA target sequence
tttaataatttgtcatttggttatga

SEQ ID NO: 78019 - DNA, 26 bp, Artificial sequence
  SiRNA target sequence
ttaataatttgtcatttggttatgaa

SEQ ID NO: 78020 - DNA, 26 bp, Artificial sequence
  SiRNA target sequence
taataatttgtcatttggttatgaaa

SEQ ID NO: 78021 - DNA, 26 bp, Artificial sequence
  SiRNA target sequence
aataatttgtcatttggttatgaaag

SEQ ID NO: 78022 - DNA, 26 bp, Artificial sequence
  SiRNA target sequence
ataatttgtcatttggttatgaaagt

SEQ ID NO: 78023 - DNA, 26 bp, Artificial sequence
  SiRNA target sequence
taatttgtcatttggttatgaaagta

SEQ ID NO: 78024 - DNA, 26 bp, Artificial sequence
  SiRNA target sequence
aatttgtcatttggttatgaaagtag

SEQ ID NO: 78025 - DNA, 26 bp, Artificial sequence
  SiRNA target sequence
atttgtcatttggttatgaaagtaga

SEQ ID NO: 78026 - DNA, 26 bp, Artificial sequence
  SiRNA target sequence
tttgtcatttggttatgaaagtagac

SEQ ID NO: 78027 - DNA, 26 bp, Artificial sequence
  SiRNA target sequence
ttgtcatttggttatgaaagtagaca

SEQ ID NO: 78028 - DNA, 26 bp, Artificial sequence
  SiRNA target sequence
tgtcatttggttatgaaagtagacaa

SEQ ID NO: 78029 - DNA, 26 bp, Artificial sequence
  SiRNA target sequence
gtcatttggttatgaaagtagacaaa

SEQ ID NO: 78030 - DNA, 26 bp, Artificial sequence
  SiRNA target sequence
tcatttggttatgaaagtagacaaat

SEQ ID NO: 78031 - DNA, 26 bp, Artificial sequence
  SiRNA target sequence
catttggttatgaaagtagacaaatt

SEQ ID NO: 78032 - DNA, 26 bp, Artificial sequence
  SiRNA target sequence
atttggttatgaaagtagacaaattt

SEQ ID NO: 78033 - DNA, 26 bp, Artificial sequence
  SiRNA target sequence
tttggttatgaaagtagacaaatttt

SEQ ID NO: 78034 - DNA, 26 bp, Artificial sequence
  SiRNA target sequence
ttggttatgaaagtagacaaattttt

SEQ ID NO: 78035 - DNA, 26 bp, Artificial sequence
  SiRNA target sequence
tggttatgaaagtagacaaattttta

SEQ ID NO: 78036 - DNA, 26 bp, Artificial sequence
  SiRNA target sequence
ggttatgaaagtagacaaatttttaa

SEQ ID NO: 78037 - DNA, 26 bp, Artificial sequence
  SiRNA target sequence
gttatgaaagtagacaaatttttaat

SEQ ID NO: 78038 - DNA, 26 bp, Artificial sequence
  SiRNA target sequence
ttatgaaagtagacaaatttttaata

SEQ ID NO: 78039 - DNA, 26 bp, Artificial sequence
  SiRNA target sequence
tatgaaagtagacaaatttttaataa

SEQ ID NO: 78040 - DNA, 26 bp, Artificial sequence
  SiRNA target sequence
atgaaagtagacaaatttttaataaa

SEQ ID NO: 78041 - DNA, 26 bp, Artificial sequence
  SiRNA target sequence
tgaaagtagacaaatttttaataaaa

SEQ ID NO: 78042 - DNA, 26 bp, Artificial sequence
  SiRNA target sequence
gaaagtagacaaatttttaataaaat

SEQ ID NO: 78043 - DNA, 26 bp, Artificial sequence
  SiRNA target sequence
aaagtagacaaatttttaataaaata

SEQ ID NO: 78044 - DNA, 26 bp, Artificial sequence
  SiRNA target sequence
aagtagacaaatttttaataaaataa

SEQ ID NO: 78045 - DNA, 26 bp, Artificial sequence
  SiRNA target sequence
agtagacaaatttttaataaaataaa

SEQ ID NO: 78046 - DNA, 26 bp, Artificial sequence
  SiRNA target sequence
gtagacaaatttttaataaaataaat

SEQ ID NO: 78047 - DNA, 26 bp, Artificial sequence
  SiRNA target sequence
tagacaaatttttaataaaataaatc

SEQ ID NO: 78048 - DNA, 26 bp, Artificial sequence
  SiRNA target sequence
agacaaatttttaataaaataaatct

SEQ ID NO: 78049 - DNA, 26 bp, Artificial sequence
  SiRNA target sequence
gacaaatttttaataaaataaatcta

SEQ ID NO: 78050 - DNA, 26 bp, Artificial sequence
  SiRNA target sequence
acaaatttttaataaaataaatctag

SEQ ID NO: 78051 - DNA, 26 bp, Artificial sequence
  SiRNA target sequence
caaatttttaataaaataaatctaga

SEQ ID NO: 78052 - DNA, 26 bp, Artificial sequence
  SiRNA target sequence
aaatttttaataaaataaatctagaa

SEQ ID NO: 78053 - DNA, 26 bp, Artificial sequence
  SiRNA target sequence
aatttttaataaaataaatctagaaa

SEQ ID NO: 78054 - DNA, 26 bp, Artificial sequence
  SiRNA target sequence
atttttaataaaataaatctagaaat

SEQ ID NO: 78055 - DNA, 26 bp, Artificial sequence
  SiRNA target sequence
tttttaataaaataaatctagaaata

SEQ ID NO: 78056 - DNA, 26 bp, Artificial sequence
  SiRNA target sequence
ttttaataaaataaatctagaaatat

SEQ ID NO: 78057 - DNA, 26 bp, Artificial sequence
  SiRNA target sequence
tttaataaaataaatctagaaatata

SEQ ID NO: 78058 - DNA, 26 bp, Artificial sequence
  SiRNA target sequence
ttaataaaataaatctagaaatatac

SEQ ID NO: 78059 - DNA, 26 bp, Artificial sequence
  SiRNA target sequence
taataaaataaatctagaaatataca

SEQ ID NO: 78060 - DNA, 26 bp, Artificial sequence
  SiRNA target sequence
aataaaataaatctagaaatatacaa

SEQ ID NO: 78061 - DNA, 26 bp, Artificial sequence
  SiRNA target sequence
ataaaataaatctagaaatatacaaa

SEQ ID NO: 78062 - DNA, 26 bp, Artificial sequence
  SiRNA target sequence
taaaataaatctagaaatatacaaag

SEQ ID NO: 78063 - DNA, 26 bp, Artificial sequence
  SiRNA target sequence
aaaataaatctagaaatatacaaagg

SEQ ID NO: 78064 - DNA, 26 bp, Artificial sequence
  SiRNA target sequence
aaataaatctagaaatatacaaagga

SEQ ID NO: 78065 - DNA, 26 bp, Artificial sequence
  SiRNA target sequence
aataaatctagaaatatacaaaggag

SEQ ID NO: 78066 - DNA, 26 bp, Artificial sequence
  SiRNA target sequence
ataaatctagaaatatacaaaggaga

SEQ ID NO: 78067 - DNA, 26 bp, Artificial sequence
  SiRNA target sequence
taaatctagaaatatacaaaggagaa

SEQ ID NO: 78068 - DNA, 26 bp, Artificial sequence
  SiRNA target sequence
aaatctagaaatatacaaaggagaaa

SEQ ID NO: 78069 - DNA, 26 bp, Artificial sequence
  SiRNA target sequence
aatctagaaatatacaaaggagaaaa

SEQ ID NO: 78070 - DNA, 26 bp, Artificial sequence
  SiRNA target sequence
atctagaaatatacaaaggagaaaaa

SEQ ID NO: 78071 - DNA, 26 bp, Artificial sequence
  SiRNA target sequence
tctagaaatatacaaaggagaaaaag

SEQ ID NO: 78072 - DNA, 26 bp, Artificial sequence
  SiRNA target sequence
ctagaaatatacaaaggagaaaaagt

SEQ ID NO: 78073 - DNA, 26 bp, Artificial sequence
  SiRNA target sequence
tagaaatatacaaaggagaaaaagta

SEQ ID NO: 78074 - DNA, 26 bp, Artificial sequence
  SiRNA target sequence
agaaatatacaaaggagaaaaagtag

SEQ ID NO: 78075 - DNA, 26 bp, Artificial sequence
  SiRNA target sequence
gaaatatacaaaggagaaaaagtagc

SEQ ID NO: 78076 - DNA, 26 bp, Artificial sequence
  SiRNA target sequence
aaatatacaaaggagaaaaagtagca

SEQ ID NO: 78077 - DNA, 26 bp, Artificial sequence
  SiRNA target sequence
aatatacaaaggagaaaaagtagcaa

SEQ ID NO: 78078 - DNA, 26 bp, Artificial sequence
  SiRNA target sequence
atatacaaaggagaaaaagtagcaat

SEQ ID NO: 78079 - DNA, 26 bp, Artificial sequence
  SiRNA target sequence
tatacaaaggagaaaaagtagcaatt

SEQ ID NO: 78080 - DNA, 26 bp, Artificial sequence
  SiRNA target sequence
atacaaaggagaaaaagtagcaatta

SEQ ID NO: 78081 - DNA, 26 bp, Artificial sequence
  SiRNA target sequence
tacaaaggagaaaaagtagcaattat

SEQ ID NO: 78082 - DNA, 26 bp, Artificial sequence
  SiRNA target sequence
acaaaggagaaaaagtagcaattata

SEQ ID NO: 78083 - DNA, 26 bp, Artificial sequence
  SiRNA target sequence
caaaggagaaaaagtagcaattatag

SEQ ID NO: 78084 - DNA, 26 bp, Artificial sequence
  SiRNA target sequence
aaaggagaaaaagtagcaattatagg

SEQ ID NO: 78085 - DNA, 26 bp, Artificial sequence
  SiRNA target sequence
aaggagaaaaagtagcaattataggt

SEQ ID NO: 78086 - DNA, 26 bp, Artificial sequence
  SiRNA target sequence
aggagaaaaagtagcaattataggta

SEQ ID NO: 78087 - DNA, 26 bp, Artificial sequence
  SiRNA target sequence
ggagaaaaagtagcaattataggtaa

SEQ ID NO: 78088 - DNA, 26 bp, Artificial sequence
  SiRNA target sequence
gagaaaaagtagcaattataggtaaa

SEQ ID NO: 78089 - DNA, 26 bp, Artificial sequence
  SiRNA target sequence
agaaaaagtagcaattataggtaaaa

SEQ ID NO: 78090 - DNA, 26 bp, Artificial sequence
  SiRNA target sequence
gaaaaagtagcaattataggtaaaaa

SEQ ID NO: 78091 - DNA, 26 bp, Artificial sequence
  SiRNA target sequence
aaaaagtagcaattataggtaaaaat

SEQ ID NO: 78092 - DNA, 26 bp, Artificial sequence
  SiRNA target sequence
aaaagtagcaattataggtaaaaatg

SEQ ID NO: 78093 - DNA, 26 bp, Artificial sequence
  SiRNA target sequence
aaagtagcaattataggtaaaaatgg

SEQ ID NO: 78094 - DNA, 26 bp, Artificial sequence
  SiRNA target sequence
aagtagcaattataggtaaaaatggt

SEQ ID NO: 78095 - DNA, 26 bp, Artificial sequence
  SiRNA target sequence
agtagcaattataggtaaaaatggta

SEQ ID NO: 78096 - DNA, 26 bp, Artificial sequence
  SiRNA target sequence
gtagcaattataggtaaaaatggtag

SEQ ID NO: 78097 - DNA, 26 bp, Artificial sequence
  SiRNA target sequence
tagcaattataggtaaaaatggtagt

SEQ ID NO: 78098 - DNA, 26 bp, Artificial sequence
  SiRNA target sequence
agcaattataggtaaaaatggtagtg

SEQ ID NO: 78099 - DNA, 26 bp, Artificial sequence
  SiRNA target sequence
gcaattataggtaaaaatggtagtgg

SEQ ID NO: 78100 - DNA, 26 bp, Artificial sequence
  SiRNA target sequence
caattataggtaaaaatggtagtggt

SEQ ID NO: 78101 - DNA, 26 bp, Artificial sequence
  SiRNA target sequence
aattataggtaaaaatggtagtggta

SEQ ID NO: 78102 - DNA, 26 bp, Artificial sequence
  SiRNA target sequence
attataggtaaaaatggtagtggtaa

SEQ ID NO: 78103 - DNA, 26 bp, Artificial sequence
  SiRNA target sequence
ttataggtaaaaatggtagtggtaaa

SEQ ID NO: 78104 - DNA, 26 bp, Artificial sequence
  SiRNA target sequence
tataggtaaaaatggtagtggtaaat

SEQ ID NO: 78105 - DNA, 26 bp, Artificial sequence
  SiRNA target sequence
ataggtaaaaatggtagtggtaaatc

SEQ ID NO: 78106 - DNA, 26 bp, Artificial sequence
  SiRNA target sequence
taggtaaaaatggtagtggtaaatca

SEQ ID NO: 78107 - DNA, 26 bp, Artificial sequence
  SiRNA target sequence
aggtaaaaatggtagtggtaaatcaa

SEQ ID NO: 78108 - DNA, 26 bp, Artificial sequence
  SiRNA target sequence
ggtaaaaatggtagtggtaaatcaac

SEQ ID NO: 78109 - DNA, 26 bp, Artificial sequence
  SiRNA target sequence
gtaaaaatggtagtggtaaatcaaca

SEQ ID NO: 78110 - DNA, 26 bp, Artificial sequence
  SiRNA target sequence
taaaaatggtagtggtaaatcaacat

SEQ ID NO: 78111 - DNA, 26 bp, Artificial sequence
  SiRNA target sequence
aaaaatggtagtggtaaatcaacatt

SEQ ID NO: 78112 - DNA, 26 bp, Artificial sequence
  SiRNA target sequence
aaaatggtagtggtaaatcaacatta

SEQ ID NO: 78113 - DNA, 26 bp, Artificial sequence
  SiRNA target sequence
aaatggtagtggtaaatcaacattac

SEQ ID NO: 78114 - DNA, 26 bp, Artificial sequence
  SiRNA target sequence
aatggtagtggtaaatcaacattact

SEQ ID NO: 78115 - DNA, 26 bp, Artificial sequence
  SiRNA target sequence
atggtagtggtaaatcaacattacta

SEQ ID NO: 78116 - DNA, 26 bp, Artificial sequence
  SiRNA target sequence
tggtagtggtaaatcaacattactaa

SEQ ID NO: 78117 - DNA, 26 bp, Artificial sequence
  SiRNA target sequence
ggtagtggtaaatcaacattactaaa

SEQ ID NO: 78118 - DNA, 26 bp, Artificial sequence
  SiRNA target sequence
gtagtggtaaatcaacattactaaaa

SEQ ID NO: 78119 - DNA, 26 bp, Artificial sequence
  SiRNA target sequence
tagtggtaaatcaacattactaaaac

SEQ ID NO: 78120 - DNA, 26 bp, Artificial sequence
  SiRNA target sequence
agtggtaaatcaacattactaaaact

SEQ ID NO: 78121 - DNA, 26 bp, Artificial sequence
  SiRNA target sequence
gtggtaaatcaacattactaaaacta

SEQ ID NO: 78122 - DNA, 26 bp, Artificial sequence
  SiRNA target sequence
tggtaaatcaacattactaaaactac

SEQ ID NO: 78123 - DNA, 26 bp, Artificial sequence
  SiRNA target sequence
ggtaaatcaacattactaaaactact

SEQ ID NO: 78124 - DNA, 26 bp, Artificial sequence
  SiRNA target sequence
gtaaatcaacattactaaaactactg

SEQ ID NO: 78125 - DNA, 26 bp, Artificial sequence
  SiRNA target sequence
taaatcaacattactaaaactactgc

SEQ ID NO: 78126 - DNA, 26 bp, Artificial sequence
  SiRNA target sequence
aaatcaacattactaaaactactgct

SEQ ID NO: 78127 - DNA, 26 bp, Artificial sequence
  SiRNA target sequence
aatcaacattactaaaactactgctt

SEQ ID NO: 78128 - DNA, 26 bp, Artificial sequence
  SiRNA target sequence
atcaacattactaaaactactgctta

SEQ ID NO: 78129 - DNA, 26 bp, Artificial sequence
  SiRNA target sequence
tcaacattactaaaactactgcttaa

SEQ ID NO: 78130 - DNA, 26 bp, Artificial sequence
  SiRNA target sequence
caacattactaaaactactgcttaaa

SEQ ID NO: 78131 - DNA, 26 bp, Artificial sequence
  SiRNA target sequence
aacattactaaaactactgcttaaat

SEQ ID NO: 78132 - DNA, 26 bp, Artificial sequence
  SiRNA target sequence
acattactaaaactactgcttaaatt

SEQ ID NO: 78133 - DNA, 26 bp, Artificial sequence
  SiRNA target sequence
cattactaaaactactgcttaaattt

SEQ ID NO: 78134 - DNA, 26 bp, Artificial sequence
  SiRNA target sequence
attactaaaactactgcttaaatttg

SEQ ID NO: 78135 - DNA, 26 bp, Artificial sequence
  SiRNA target sequence
ttactaaaactactgcttaaatttga

SEQ ID NO: 78136 - DNA, 26 bp, Artificial sequence
  SiRNA target sequence
tactaaaactactgcttaaatttgat

SEQ ID NO: 78137 - DNA, 26 bp, Artificial sequence
  SiRNA target sequence
actaaaactactgcttaaatttgatg

SEQ ID NO: 78138 - DNA, 26 bp, Artificial sequence
  SiRNA target sequence
ctaaaactactgcttaaatttgatga

SEQ ID NO: 78139 - DNA, 26 bp, Artificial sequence
  SiRNA target sequence
taaaactactgcttaaatttgatgaa

SEQ ID NO: 78140 - DNA, 26 bp, Artificial sequence
  SiRNA target sequence
aaaactactgcttaaatttgatgaag

SEQ ID NO: 78141 - DNA, 26 bp, Artificial sequence
  SiRNA target sequence
aaactactgcttaaatttgatgaaga

SEQ ID NO: 78142 - DNA, 26 bp, Artificial sequence
  SiRNA target sequence
aactactgcttaaatttgatgaagat

SEQ ID NO: 78143 - DNA, 26 bp, Artificial sequence
  SiRNA target sequence
actactgcttaaatttgatgaagatt

SEQ ID NO: 78144 - DNA, 26 bp, Artificial sequence
  SiRNA target sequence
ctactgcttaaatttgatgaagatta

SEQ ID NO: 78145 - DNA, 26 bp, Artificial sequence
  SiRNA target sequence
tactgcttaaatttgatgaagattac

SEQ ID NO: 78146 - DNA, 26 bp, Artificial sequence
  SiRNA target sequence
actgcttaaatttgatgaagattaca

SEQ ID NO: 78147 - DNA, 26 bp, Artificial sequence
  SiRNA target sequence
ctgcttaaatttgatgaagattacaa

SEQ ID NO: 78148 - DNA, 26 bp, Artificial sequence
  SiRNA target sequence
tgcttaaatttgatgaagattacaaa

SEQ ID NO: 78149 - DNA, 26 bp, Artificial sequence
  SiRNA target sequence
gcttaaatttgatgaagattacaaag

SEQ ID NO: 78150 - DNA, 26 bp, Artificial sequence
  SiRNA target sequence
cttaaatttgatgaagattacaaagg

SEQ ID NO: 78151 - DNA, 26 bp, Artificial sequence
  SiRNA target sequence
ttaaatttgatgaagattacaaaggt

SEQ ID NO: 78152 - DNA, 26 bp, Artificial sequence
  SiRNA target sequence
taaatttgatgaagattacaaaggta

SEQ ID NO: 78153 - DNA, 26 bp, Artificial sequence
  SiRNA target sequence
aaatttgatgaagattacaaaggtag

SEQ ID NO: 78154 - DNA, 26 bp, Artificial sequence
  SiRNA target sequence
aatttgatgaagattacaaaggtagc

SEQ ID NO: 78155 - DNA, 26 bp, Artificial sequence
  SiRNA target sequence
atttgatgaagattacaaaggtagca

SEQ ID NO: 78156 - DNA, 26 bp, Artificial sequence
  SiRNA target sequence
tttgatgaagattacaaaggtagcat

SEQ ID NO: 78157 - DNA, 26 bp, Artificial sequence
  SiRNA target sequence
ttgatgaagattacaaaggtagcatt

SEQ ID NO: 78158 - DNA, 26 bp, Artificial sequence
  SiRNA target sequence
tgatgaagattacaaaggtagcattt

SEQ ID NO: 78159 - DNA, 26 bp, Artificial sequence
  SiRNA target sequence
gatgaagattacaaaggtagcatttt

SEQ ID NO: 78160 - DNA, 26 bp, Artificial sequence
  SiRNA target sequence
atgaagattacaaaggtagcatttta

SEQ ID NO: 78161 - DNA, 26 bp, Artificial sequence
  SiRNA target sequence
tgaagattacaaaggtagcattttaa

SEQ ID NO: 78162 - DNA, 26 bp, Artificial sequence
  SiRNA target sequence
gaagattacaaaggtagcattttaat

SEQ ID NO: 78163 - DNA, 26 bp, Artificial sequence
  SiRNA target sequence
aagattacaaaggtagcattttaata

SEQ ID NO: 78164 - DNA, 26 bp, Artificial sequence
  SiRNA target sequence
agattacaaaggtagcattttaatag

SEQ ID NO: 78165 - DNA, 26 bp, Artificial sequence
  SiRNA target sequence
gattacaaaggtagcattttaataga

SEQ ID NO: 78166 - DNA, 26 bp, Artificial sequence
  SiRNA target sequence
attacaaaggtagcattttaatagat

SEQ ID NO: 78167 - DNA, 26 bp, Artificial sequence
  SiRNA target sequence
ttacaaaggtagcattttaatagatg

SEQ ID NO: 78168 - DNA, 26 bp, Artificial sequence
  SiRNA target sequence
tacaaaggtagcattttaatagatga

SEQ ID NO: 78169 - DNA, 26 bp, Artificial sequence
  SiRNA target sequence
acaaaggtagcattttaatagatgac

SEQ ID NO: 78170 - DNA, 26 bp, Artificial sequence
  SiRNA target sequence
caaaggtagcattttaatagatgaca

SEQ ID NO: 78171 - DNA, 26 bp, Artificial sequence
  SiRNA target sequence
aaaggtagcattttaatagatgacat

SEQ ID NO: 78172 - DNA, 26 bp, Artificial sequence
  SiRNA target sequence
aaggtagcattttaatagatgacatt

SEQ ID NO: 78173 - DNA, 26 bp, Artificial sequence
  SiRNA target sequence
aggtagcattttaatagatgacattg

SEQ ID NO: 78174 - DNA, 26 bp, Artificial sequence
  SiRNA target sequence
ggtagcattttaatagatgacattga

SEQ ID NO: 78175 - DNA, 26 bp, Artificial sequence
  SiRNA target sequence
gtagcattttaatagatgacattgat

SEQ ID NO: 78176 - DNA, 26 bp, Artificial sequence
  SiRNA target sequence
tagcattttaatagatgacattgata

SEQ ID NO: 78177 - DNA, 26 bp, Artificial sequence
  SiRNA target sequence
agcattttaatagatgacattgatat

SEQ ID NO: 78178 - DNA, 26 bp, Artificial sequence
  SiRNA target sequence
gcattttaatagatgacattgatatt

SEQ ID NO: 78179 - DNA, 26 bp, Artificial sequence
  SiRNA target sequence
cattttaatagatgacattgatatta

SEQ ID NO: 78180 - DNA, 26 bp, Artificial sequence
  SiRNA target sequence
attttaatagatgacattgatattaa

SEQ ID NO: 78181 - DNA, 26 bp, Artificial sequence
  SiRNA target sequence
ttttaatagatgacattgatattaaa

SEQ ID NO: 78182 - DNA, 26 bp, Artificial sequence
  SiRNA target sequence
tttaatagatgacattgatattaaaa

SEQ ID NO: 78183 - DNA, 26 bp, Artificial sequence
  SiRNA target sequence
ttaatagatgacattgatattaaaaa

SEQ ID NO: 78184 - DNA, 26 bp, Artificial sequence
  SiRNA target sequence
taatagatgacattgatattaaaaaa

SEQ ID NO: 78185 - DNA, 26 bp, Artificial sequence
  SiRNA target sequence
aatagatgacattgatattaaaaaaa

SEQ ID NO: 78186 - DNA, 26 bp, Artificial sequence
  SiRNA target sequence
atagatgacattgatattaaaaaaat

SEQ ID NO: 78187 - DNA, 26 bp, Artificial sequence
  SiRNA target sequence
tagatgacattgatattaaaaaaatc

SEQ ID NO: 78188 - DNA, 26 bp, Artificial sequence
  SiRNA target sequence
agatgacattgatattaaaaaaatca

SEQ ID NO: 78189 - DNA, 26 bp, Artificial sequence
  SiRNA target sequence
gatgacattgatattaaaaaaatcaa

SEQ ID NO: 78190 - DNA, 26 bp, Artificial sequence
  SiRNA target sequence
atgacattgatattaaaaaaatcaaa

SEQ ID NO: 78191 - DNA, 26 bp, Artificial sequence
  SiRNA target sequence
tgacattgatattaaaaaaatcaaag

SEQ ID NO: 78192 - DNA, 26 bp, Artificial sequence
  SiRNA target sequence
gacattgatattaaaaaaatcaaaga

SEQ ID NO: 78193 - DNA, 26 bp, Artificial sequence
  SiRNA target sequence
acattgatattaaaaaaatcaaagac

SEQ ID NO: 78194 - DNA, 26 bp, Artificial sequence
  SiRNA target sequence
cattgatattaaaaaaatcaaagacg

SEQ ID NO: 78195 - DNA, 26 bp, Artificial sequence
  SiRNA target sequence
attgatattaaaaaaatcaaagacga

SEQ ID NO: 78196 - DNA, 26 bp, Artificial sequence
  SiRNA target sequence
ttgatattaaaaaaatcaaagacgaa

SEQ ID NO: 78197 - DNA, 26 bp, Artificial sequence
  SiRNA target sequence
tgatattaaaaaaatcaaagacgaat

SEQ ID NO: 78198 - DNA, 26 bp, Artificial sequence
  SiRNA target sequence
gatattaaaaaaatcaaagacgaatt

SEQ ID NO: 78199 - DNA, 26 bp, Artificial sequence
  SiRNA target sequence
atattaaaaaaatcaaagacgaattt

SEQ ID NO: 78200 - DNA, 26 bp, Artificial sequence
  SiRNA target sequence
tattaaaaaaatcaaagacgaatttt

SEQ ID NO: 78201 - DNA, 26 bp, Artificial sequence
  SiRNA target sequence
attaaaaaaatcaaagacgaatttta

SEQ ID NO: 78202 - DNA, 26 bp, Artificial sequence
  SiRNA target sequence
ttaaaaaaatcaaagacgaattttat

SEQ ID NO: 78203 - DNA, 26 bp, Artificial sequence
  SiRNA target sequence
taaaaaaatcaaagacgaattttata

SEQ ID NO: 78204 - DNA, 26 bp, Artificial sequence
  SiRNA target sequence
aaaaaaatcaaagacgaattttatag

SEQ ID NO: 78205 - DNA, 26 bp, Artificial sequence
  SiRNA target sequence
aaaaaatcaaagacgaattttatagg

SEQ ID NO: 78206 - DNA, 26 bp, Artificial sequence
  SiRNA target sequence
aaaaatcaaagacgaattttatagga

SEQ ID NO: 78207 - DNA, 26 bp, Artificial sequence
  SiRNA target sequence
aaaatcaaagacgaattttataggaa

SEQ ID NO: 78208 - DNA, 26 bp, Artificial sequence
  SiRNA target sequence
aaatcaaagacgaattttataggaat

SEQ ID NO: 78209 - DNA, 26 bp, Artificial sequence
  SiRNA target sequence
aatcaaagacgaattttataggaatt

SEQ ID NO: 78210 - DNA, 26 bp, Artificial sequence
  SiRNA target sequence
atcaaagacgaattttataggaattt

SEQ ID NO: 78211 - DNA, 26 bp, Artificial sequence
  SiRNA target sequence
tcaaagacgaattttataggaattta

SEQ ID NO: 78212 - DNA, 26 bp, Artificial sequence
  SiRNA target sequence
caaagacgaattttataggaatttat

SEQ ID NO: 78213 - DNA, 26 bp, Artificial sequence
  SiRNA target sequence
aaagacgaattttataggaatttatt

SEQ ID NO: 78214 - DNA, 26 bp, Artificial sequence
  SiRNA target sequence
aagacgaattttataggaatttatta

SEQ ID NO: 78215 - DNA, 26 bp, Artificial sequence
  SiRNA target sequence
agacgaattttataggaatttattag

SEQ ID NO: 78216 - DNA, 26 bp, Artificial sequence
  SiRNA target sequence
gacgaattttataggaatttattagg

SEQ ID NO: 78217 - DNA, 26 bp, Artificial sequence
  SiRNA target sequence
acgaattttataggaatttattaggt

SEQ ID NO: 78218 - DNA, 26 bp, Artificial sequence
  SiRNA target sequence
cgaattttataggaatttattaggtt

SEQ ID NO: 78219 - DNA, 26 bp, Artificial sequence
  SiRNA target sequence
gaattttataggaatttattaggtta

SEQ ID NO: 78220 - DNA, 26 bp, Artificial sequence
  SiRNA target sequence
aattttataggaatttattaggttac

SEQ ID NO: 78221 - DNA, 26 bp, Artificial sequence
  SiRNA target sequence
attttataggaatttattaggttaca

SEQ ID NO: 78222 - DNA, 26 bp, Artificial sequence
  SiRNA target sequence
ttttataggaatttattaggttacat

SEQ ID NO: 78223 - DNA, 26 bp, Artificial sequence
  SiRNA target sequence
tttataggaatttattaggttacata

SEQ ID NO: 78224 - DNA, 26 bp, Artificial sequence
  SiRNA target sequence
ttataggaatttattaggttacatac

SEQ ID NO: 78225 - DNA, 26 bp, Artificial sequence
  SiRNA target sequence
tataggaatttattaggttacatacc

SEQ ID NO: 78226 - DNA, 26 bp, Artificial sequence
  SiRNA target sequence
ataggaatttattaggttacatacca

SEQ ID NO: 78227 - DNA, 26 bp, Artificial sequence
  SiRNA target sequence
taggaatttattaggttacataccac

SEQ ID NO: 78228 - DNA, 26 bp, Artificial sequence
  SiRNA target sequence
aggaatttattaggttacataccaca

SEQ ID NO: 78229 - DNA, 26 bp, Artificial sequence
  SiRNA target sequence
ggaatttattaggttacataccacag

SEQ ID NO: 78230 - DNA, 26 bp, Artificial sequence
  SiRNA target sequence
gaatttattaggttacataccacaga

SEQ ID NO: 78231 - DNA, 26 bp, Artificial sequence
  SiRNA target sequence
aatttattaggttacataccacagaa

SEQ ID NO: 78232 - DNA, 26 bp, Artificial sequence
  SiRNA target sequence
atttattaggttacataccacagaat

SEQ ID NO: 78233 - DNA, 26 bp, Artificial sequence
  SiRNA target sequence
tttattaggttacataccacagaata

SEQ ID NO: 78234 - DNA, 26 bp, Artificial sequence
  SiRNA target sequence
ttattaggttacataccacagaatac

SEQ ID NO: 78235 - DNA, 26 bp, Artificial sequence
  SiRNA target sequence
tattaggttacataccacagaataca

SEQ ID NO: 78236 - DNA, 26 bp, Artificial sequence
  SiRNA target sequence
attaggttacataccacagaatacat

SEQ ID NO: 78237 - DNA, 26 bp, Artificial sequence
  SiRNA target sequence
ttaggttacataccacagaatacatt

SEQ ID NO: 78238 - DNA, 26 bp, Artificial sequence
  SiRNA target sequence
taggttacataccacagaatacattt

SEQ ID NO: 78239 - DNA, 26 bp, Artificial sequence
  SiRNA target sequence
aggttacataccacagaatacatttt

SEQ ID NO: 78240 - DNA, 26 bp, Artificial sequence
  SiRNA target sequence
ggttacataccacagaatacattttt

SEQ ID NO: 78241 - DNA, 26 bp, Artificial sequence
  SiRNA target sequence
gttacataccacagaatacatttttg

SEQ ID NO: 78242 - DNA, 26 bp, Artificial sequence
  SiRNA target sequence
ttacataccacagaatacatttttgt

SEQ ID NO: 78243 - DNA, 26 bp, Artificial sequence
  SiRNA target sequence
tacataccacagaatacatttttgtt

SEQ ID NO: 78244 - DNA, 26 bp, Artificial sequence
  SiRNA target sequence
acataccacagaatacatttttgttt

SEQ ID NO: 78245 - DNA, 26 bp, Artificial sequence
  SiRNA target sequence
cataccacagaatacatttttgttta

SEQ ID NO: 78246 - DNA, 26 bp, Artificial sequence
  SiRNA target sequence
ataccacagaatacatttttgtttaa

SEQ ID NO: 78247 - DNA, 26 bp, Artificial sequence
  SiRNA target sequence
taccacagaatacatttttgtttaat

SEQ ID NO: 78248 - DNA, 26 bp, Artificial sequence
  SiRNA target sequence
accacagaatacatttttgtttaatg

SEQ ID NO: 78249 - DNA, 26 bp, Artificial sequence
  SiRNA target sequence
ccacagaatacatttttgtttaatga

SEQ ID NO: 78250 - DNA, 26 bp, Artificial sequence
  SiRNA target sequence
cacagaatacatttttgtttaatgaa

SEQ ID NO: 78251 - DNA, 26 bp, Artificial sequence
  SiRNA target sequence
acagaatacatttttgtttaatgaat

SEQ ID NO: 78252 - DNA, 26 bp, Artificial sequence
  SiRNA target sequence
cagaatacatttttgtttaatgaatc

SEQ ID NO: 78253 - DNA, 26 bp, Artificial sequence
  SiRNA target sequence
agaatacatttttgtttaatgaatct

SEQ ID NO: 78254 - DNA, 26 bp, Artificial sequence
  SiRNA target sequence
gaatacatttttgtttaatgaatctg

SEQ ID NO: 78255 - DNA, 26 bp, Artificial sequence
  SiRNA target sequence
aatacatttttgtttaatgaatctgt

SEQ ID NO: 78256 - DNA, 26 bp, Artificial sequence
  SiRNA target sequence
atacatttttgtttaatgaatctgta

SEQ ID NO: 78257 - DNA, 26 bp, Artificial sequence
  SiRNA target sequence
tacatttttgtttaatgaatctgtaa

SEQ ID NO: 78258 - DNA, 26 bp, Artificial sequence
  SiRNA target sequence
acatttttgtttaatgaatctgtaaa

SEQ ID NO: 78259 - DNA, 26 bp, Artificial sequence
  SiRNA target sequence
catttttgtttaatgaatctgtaaaa

SEQ ID NO: 78260 - DNA, 26 bp, Artificial sequence
  SiRNA target sequence
atttttgtttaatgaatctgtaaaat

SEQ ID NO: 78261 - DNA, 26 bp, Artificial sequence
  SiRNA target sequence
tttttgtttaatgaatctgtaaaata

SEQ ID NO: 78262 - DNA, 26 bp, Artificial sequence
  SiRNA target sequence
ttttgtttaatgaatctgtaaaatat

SEQ ID NO: 78263 - DNA, 26 bp, Artificial sequence
  SiRNA target sequence
tttgtttaatgaatctgtaaaatata

SEQ ID NO: 78264 - DNA, 26 bp, Artificial sequence
  SiRNA target sequence
ttgtttaatgaatctgtaaaatataa

SEQ ID NO: 78265 - DNA, 26 bp, Artificial sequence
  SiRNA target sequence
tgtttaatgaatctgtaaaatataat

SEQ ID NO: 78266 - DNA, 26 bp, Artificial sequence
  SiRNA target sequence
gtttaatgaatctgtaaaatataata

SEQ ID NO: 78267 - DNA, 26 bp, Artificial sequence
  SiRNA target sequence
tttaatgaatctgtaaaatataatat

SEQ ID NO: 78268 - DNA, 26 bp, Artificial sequence
  SiRNA target sequence
ttaatgaatctgtaaaatataatatt

SEQ ID NO: 78269 - DNA, 26 bp, Artificial sequence
  SiRNA target sequence
taatgaatctgtaaaatataatatta

SEQ ID NO: 78270 - DNA, 26 bp, Artificial sequence
  SiRNA target sequence
aatgaatctgtaaaatataatattaa

SEQ ID NO: 78271 - DNA, 26 bp, Artificial sequence
  SiRNA target sequence
atgaatctgtaaaatataatattaaa

SEQ ID NO: 78272 - DNA, 26 bp, Artificial sequence
  SiRNA target sequence
tgaatctgtaaaatataatattaaat

SEQ ID NO: 78273 - DNA, 26 bp, Artificial sequence
  SiRNA target sequence
gaatctgtaaaatataatattaaata

SEQ ID NO: 78274 - DNA, 26 bp, Artificial sequence
  SiRNA target sequence
aatctgtaaaatataatattaaatac

SEQ ID NO: 78275 - DNA, 26 bp, Artificial sequence
  SiRNA target sequence
atctgtaaaatataatattaaatacg

SEQ ID NO: 78276 - DNA, 26 bp, Artificial sequence
  SiRNA target sequence
tctgtaaaatataatattaaatacgg

SEQ ID NO: 78277 - DNA, 26 bp, Artificial sequence
  SiRNA target sequence
ctgtaaaatataatattaaatacgga

SEQ ID NO: 78278 - DNA, 26 bp, Artificial sequence
  SiRNA target sequence
tgtaaaatataatattaaatacggat

SEQ ID NO: 78279 - DNA, 26 bp, Artificial sequence
  SiRNA target sequence
gtaaaatataatattaaatacggatc

SEQ ID NO: 78280 - DNA, 26 bp, Artificial sequence
  SiRNA target sequence
taaaatataatattaaatacggatct

SEQ ID NO: 78281 - DNA, 26 bp, Artificial sequence
  SiRNA target sequence
aaaatataatattaaatacggatctt

SEQ ID NO: 78282 - DNA, 26 bp, Artificial sequence
  SiRNA target sequence
aaatataatattaaatacggatcttt

SEQ ID NO: 78283 - DNA, 26 bp, Artificial sequence
  SiRNA target sequence
aatataatattaaatacggatctttt

SEQ ID NO: 78284 - DNA, 26 bp, Artificial sequence
  SiRNA target sequence
atataatattaaatacggatcttttg

SEQ ID NO: 78285 - DNA, 26 bp, Artificial sequence
  SiRNA target sequence
tataatattaaatacggatcttttgg

SEQ ID NO: 78286 - DNA, 26 bp, Artificial sequence
  SiRNA target sequence
ataatattaaatacggatcttttggt

SEQ ID NO: 78287 - DNA, 26 bp, Artificial sequence
  SiRNA target sequence
taatattaaatacggatcttttggta

SEQ ID NO: 78288 - DNA, 26 bp, Artificial sequence
  SiRNA target sequence
aatattaaatacggatcttttggtat

SEQ ID NO: 78289 - DNA, 26 bp, Artificial sequence
  SiRNA target sequence
atattaaatacggatcttttggtatt

SEQ ID NO: 78290 - DNA, 26 bp, Artificial sequence
  SiRNA target sequence
tattaaatacggatcttttggtattt

SEQ ID NO: 78291 - DNA, 26 bp, Artificial sequence
  SiRNA target sequence
attaaatacggatcttttggtatttc

SEQ ID NO: 78292 - DNA, 26 bp, Artificial sequence
  SiRNA target sequence
ttaaatacggatcttttggtatttca

SEQ ID NO: 78293 - DNA, 26 bp, Artificial sequence
  SiRNA target sequence
taaatacggatcttttggtatttcag

SEQ ID NO: 78294 - DNA, 26 bp, Artificial sequence
  SiRNA target sequence
aaatacggatcttttggtatttcaga

SEQ ID NO: 78295 - DNA, 26 bp, Artificial sequence
  SiRNA target sequence
aatacggatcttttggtatttcagac

SEQ ID NO: 78296 - DNA, 26 bp, Artificial sequence
  SiRNA target sequence
atacggatcttttggtatttcagacg

SEQ ID NO: 78297 - DNA, 26 bp, Artificial sequence
  SiRNA target sequence
tacggatcttttggtatttcagacga

SEQ ID NO: 78298 - DNA, 26 bp, Artificial sequence
  SiRNA target sequence
acggatcttttggtatttcagacgag

SEQ ID NO: 78299 - DNA, 26 bp, Artificial sequence
  SiRNA target sequence
cggatcttttggtatttcagacgagg

SEQ ID NO: 78300 - DNA, 26 bp, Artificial sequence
  SiRNA target sequence
ggatcttttggtatttcagacgagga

SEQ ID NO: 78301 - DNA, 26 bp, Artificial sequence
  SiRNA target sequence
gatcttttggtatttcagacgaggat

SEQ ID NO: 78302 - DNA, 26 bp, Artificial sequence
  SiRNA target sequence
atcttttggtatttcagacgaggata

SEQ ID NO: 78303 - DNA, 26 bp, Artificial sequence
  SiRNA target sequence
tcttttggtatttcagacgaggatat

SEQ ID NO: 78304 - DNA, 26 bp, Artificial sequence
  SiRNA target sequence
cttttggtatttcagacgaggatatt

SEQ ID NO: 78305 - DNA, 26 bp, Artificial sequence
  SiRNA target sequence
ttttggtatttcagacgaggatattt

SEQ ID NO: 78306 - DNA, 26 bp, Artificial sequence
  SiRNA target sequence
tttggtatttcagacgaggatatttt

SEQ ID NO: 78307 - DNA, 26 bp, Artificial sequence
  SiRNA target sequence
ttggtatttcagacgaggatattttt

SEQ ID NO: 78308 - DNA, 26 bp, Artificial sequence
  SiRNA target sequence
tggtatttcagacgaggatatttttg

SEQ ID NO: 78309 - DNA, 26 bp, Artificial sequence
  SiRNA target sequence
ggtatttcagacgaggatatttttgc

SEQ ID NO: 78310 - DNA, 26 bp, Artificial sequence
  SiRNA target sequence
gtatttcagacgaggatatttttgca

SEQ ID NO: 78311 - DNA, 26 bp, Artificial sequence
  SiRNA target sequence
tatttcagacgaggatatttttgcat

SEQ ID NO: 78312 - DNA, 26 bp, Artificial sequence
  SiRNA target sequence
atttcagacgaggatatttttgcatt

SEQ ID NO: 78313 - DNA, 26 bp, Artificial sequence
  SiRNA target sequence
tttcagacgaggatatttttgcattg

SEQ ID NO: 78314 - DNA, 26 bp, Artificial sequence
  SiRNA target sequence
ttcagacgaggatatttttgcattgt

SEQ ID NO: 78315 - DNA, 26 bp, Artificial sequence
  SiRNA target sequence
tcagacgaggatatttttgcattgtg

SEQ ID NO: 78316 - DNA, 26 bp, Artificial sequence
  SiRNA target sequence
cagacgaggatatttttgcattgtgt

SEQ ID NO: 78317 - DNA, 26 bp, Artificial sequence
  SiRNA target sequence
agacgaggatatttttgcattgtgta

SEQ ID NO: 78318 - DNA, 26 bp, Artificial sequence
  SiRNA target sequence
gacgaggatatttttgcattgtgtaa

SEQ ID NO: 78319 - DNA, 26 bp, Artificial sequence
  SiRNA target sequence
acgaggatatttttgcattgtgtaaa

SEQ ID NO: 78320 - DNA, 26 bp, Artificial sequence
  SiRNA target sequence
cgaggatatttttgcattgtgtaaag

SEQ ID NO: 78321 - DNA, 26 bp, Artificial sequence
  SiRNA target sequence
gaggatatttttgcattgtgtaaaga

SEQ ID NO: 78322 - DNA, 26 bp, Artificial sequence
  SiRNA target sequence
aggatatttttgcattgtgtaaagag

SEQ ID NO: 78323 - DNA, 26 bp, Artificial sequence
  SiRNA target sequence
ggatatttttgcattgtgtaaagagt

SEQ ID NO: 78324 - DNA, 26 bp, Artificial sequence
  SiRNA target sequence
gatatttttgcattgtgtaaagagtt

SEQ ID NO: 78325 - DNA, 26 bp, Artificial sequence
  SiRNA target sequence
atatttttgcattgtgtaaagagttt

SEQ ID NO: 78326 - DNA, 26 bp, Artificial sequence
  SiRNA target sequence
tatttttgcattgtgtaaagagtttg

SEQ ID NO: 78327 - DNA, 26 bp, Artificial sequence
  SiRNA target sequence
atttttgcattgtgtaaagagtttgg

SEQ ID NO: 78328 - DNA, 26 bp, Artificial sequence
  SiRNA target sequence
tttttgcattgtgtaaagagtttgga

SEQ ID NO: 78329 - DNA, 26 bp, Artificial sequence
  SiRNA target sequence
ttttgcattgtgtaaagagtttggat

SEQ ID NO: 78330 - DNA, 26 bp, Artificial sequence
  SiRNA target sequence
tttgcattgtgtaaagagtttggatt

SEQ ID NO: 78331 - DNA, 26 bp, Artificial sequence
  SiRNA target sequence
ttgcattgtgtaaagagtttggatta

SEQ ID NO: 78332 - DNA, 26 bp, Artificial sequence
  SiRNA target sequence
tgcattgtgtaaagagtttggattat

SEQ ID NO: 78333 - DNA, 26 bp, Artificial sequence
  SiRNA target sequence
gcattgtgtaaagagtttggattata

SEQ ID NO: 78334 - DNA, 26 bp, Artificial sequence
  SiRNA target sequence
cattgtgtaaagagtttggattatat

SEQ ID NO: 78335 - DNA, 26 bp, Artificial sequence
  SiRNA target sequence
attgtgtaaagagtttggattatatg

SEQ ID NO: 78336 - DNA, 26 bp, Artificial sequence
  SiRNA target sequence
ttgtgtaaagagtttggattatatga

SEQ ID NO: 78337 - DNA, 26 bp, Artificial sequence
  SiRNA target sequence
tgtgtaaagagtttggattatatgac

SEQ ID NO: 78338 - DNA, 26 bp, Artificial sequence
  SiRNA target sequence
gtgtaaagagtttggattatatgacg

SEQ ID NO: 78339 - DNA, 26 bp, Artificial sequence
  SiRNA target sequence
tgtaaagagtttggattatatgacgt

SEQ ID NO: 78340 - DNA, 26 bp, Artificial sequence
  SiRNA target sequence
gtaaagagtttggattatatgacgtt

SEQ ID NO: 78341 - DNA, 26 bp, Artificial sequence
  SiRNA target sequence
taaagagtttggattatatgacgttt

SEQ ID NO: 78342 - DNA, 26 bp, Artificial sequence
  SiRNA target sequence
aaagagtttggattatatgacgtttt

SEQ ID NO: 78343 - DNA, 26 bp, Artificial sequence
  SiRNA target sequence
aagagtttggattatatgacgttttc

SEQ ID NO: 78344 - DNA, 26 bp, Artificial sequence
  SiRNA target sequence
agagtttggattatatgacgttttca

SEQ ID NO: 78345 - DNA, 26 bp, Artificial sequence
  SiRNA target sequence
gagtttggattatatgacgttttcat

SEQ ID NO: 78346 - DNA, 26 bp, Artificial sequence
  SiRNA target sequence
agtttggattatatgacgttttcatg

SEQ ID NO: 78347 - DNA, 26 bp, Artificial sequence
  SiRNA target sequence
gtttggattatatgacgttttcatga

SEQ ID NO: 78348 - DNA, 26 bp, Artificial sequence
  SiRNA target sequence
tttggattatatgacgttttcatgaa

SEQ ID NO: 78349 - DNA, 26 bp, Artificial sequence
  SiRNA target sequence
ttggattatatgacgttttcatgaac

SEQ ID NO: 78350 - DNA, 26 bp, Artificial sequence
  SiRNA target sequence
tggattatatgacgttttcatgaacc

SEQ ID NO: 78351 - DNA, 26 bp, Artificial sequence
  SiRNA target sequence
ggattatatgacgttttcatgaacct

SEQ ID NO: 78352 - DNA, 26 bp, Artificial sequence
  SiRNA target sequence
gattatatgacgttttcatgaacctc

SEQ ID NO: 78353 - DNA, 26 bp, Artificial sequence
  SiRNA target sequence
attatatgacgttttcatgaacctcg

SEQ ID NO: 78354 - DNA, 26 bp, Artificial sequence
  SiRNA target sequence
ttatatgacgttttcatgaacctcga

SEQ ID NO: 78355 - DNA, 26 bp, Artificial sequence
  SiRNA target sequence
tatatgacgttttcatgaacctcgaa

SEQ ID NO: 78356 - DNA, 26 bp, Artificial sequence
  SiRNA target sequence
atatgacgttttcatgaacctcgaaa

SEQ ID NO: 78357 - DNA, 26 bp, Artificial sequence
  SiRNA target sequence
tatgacgttttcatgaacctcgaaaa

SEQ ID NO: 78358 - DNA, 26 bp, Artificial sequence
  SiRNA target sequence
atgacgttttcatgaacctcgaaaat

SEQ ID NO: 78359 - DNA, 26 bp, Artificial sequence
  SiRNA target sequence
tgacgttttcatgaacctcgaaaatg

SEQ ID NO: 78360 - DNA, 26 bp, Artificial sequence
  SiRNA target sequence
gacgttttcatgaacctcgaaaatgg

SEQ ID NO: 78361 - DNA, 26 bp, Artificial sequence
  SiRNA target sequence
acgttttcatgaacctcgaaaatggt

SEQ ID NO: 78362 - DNA, 26 bp, Artificial sequence
  SiRNA target sequence
cgttttcatgaacctcgaaaatggtt

SEQ ID NO: 78363 - DNA, 26 bp, Artificial sequence
  SiRNA target sequence
gttttcatgaacctcgaaaatggttt

SEQ ID NO: 78364 - DNA, 26 bp, Artificial sequence
  SiRNA target sequence
ttttcatgaacctcgaaaatggtttt

SEQ ID NO: 78365 - DNA, 26 bp, Artificial sequence
  SiRNA target sequence
tttcatgaacctcgaaaatggttttg

SEQ ID NO: 78366 - DNA, 26 bp, Artificial sequence
  SiRNA target sequence
ttcatgaacctcgaaaatggttttga

SEQ ID NO: 78367 - DNA, 26 bp, Artificial sequence
  SiRNA target sequence
tcatgaacctcgaaaatggttttgat

SEQ ID NO: 78368 - DNA, 26 bp, Artificial sequence
  SiRNA target sequence
catgaacctcgaaaatggttttgata

SEQ ID NO: 78369 - DNA, 26 bp, Artificial sequence
  SiRNA target sequence
atgaacctcgaaaatggttttgatac

SEQ ID NO: 78370 - DNA, 26 bp, Artificial sequence
  SiRNA target sequence
tgaacctcgaaaatggttttgatacg

SEQ ID NO: 78371 - DNA, 26 bp, Artificial sequence
  SiRNA target sequence
gaacctcgaaaatggttttgatacga

SEQ ID NO: 78372 - DNA, 26 bp, Artificial sequence
  SiRNA target sequence
aacctcgaaaatggttttgatacgaa

SEQ ID NO: 78373 - DNA, 26 bp, Artificial sequence
  SiRNA target sequence
acctcgaaaatggttttgatacgaat

SEQ ID NO: 78374 - DNA, 26 bp, Artificial sequence
  SiRNA target sequence
cctcgaaaatggttttgatacgaatg

SEQ ID NO: 78375 - DNA, 26 bp, Artificial sequence
  SiRNA target sequence
ctcgaaaatggttttgatacgaatgt

SEQ ID NO: 78376 - DNA, 26 bp, Artificial sequence
  SiRNA target sequence
tcgaaaatggttttgatacgaatgta

SEQ ID NO: 78377 - DNA, 26 bp, Artificial sequence
  SiRNA target sequence
cgaaaatggttttgatacgaatgtag

SEQ ID NO: 78378 - DNA, 26 bp, Artificial sequence
  SiRNA target sequence
gaaaatggttttgatacgaatgtagg

SEQ ID NO: 78379 - DNA, 26 bp, Artificial sequence
  SiRNA target sequence
aaaatggttttgatacgaatgtagga

SEQ ID NO: 78380 - DNA, 26 bp, Artificial sequence
  SiRNA target sequence
aaatggttttgatacgaatgtaggag

SEQ ID NO: 78381 - DNA, 26 bp, Artificial sequence
  SiRNA target sequence
aatggttttgatacgaatgtaggaga

SEQ ID NO: 78382 - DNA, 26 bp, Artificial sequence
  SiRNA target sequence
atggttttgatacgaatgtaggagaa

SEQ ID NO: 78383 - DNA, 26 bp, Artificial sequence
  SiRNA target sequence
tggttttgatacgaatgtaggagaaa

SEQ ID NO: 78384 - DNA, 26 bp, Artificial sequence
  SiRNA target sequence
ggttttgatacgaatgtaggagaaag

SEQ ID NO: 78385 - DNA, 26 bp, Artificial sequence
  SiRNA target sequence
gttttgatacgaatgtaggagaaaga

SEQ ID NO: 78386 - DNA, 26 bp, Artificial sequence
  SiRNA target sequence
ttttgatacgaatgtaggagaaagag

SEQ ID NO: 78387 - DNA, 26 bp, Artificial sequence
  SiRNA target sequence
tttgatacgaatgtaggagaaagagg

SEQ ID NO: 78388 - DNA, 26 bp, Artificial sequence
  SiRNA target sequence
ttgatacgaatgtaggagaaagagga

SEQ ID NO: 78389 - DNA, 26 bp, Artificial sequence
  SiRNA target sequence
tgatacgaatgtaggagaaagaggaa

SEQ ID NO: 78390 - DNA, 26 bp, Artificial sequence
  SiRNA target sequence
gatacgaatgtaggagaaagaggaag

SEQ ID NO: 78391 - DNA, 26 bp, Artificial sequence
  SiRNA target sequence
atacgaatgtaggagaaagaggaagg

SEQ ID NO: 78392 - DNA, 26 bp, Artificial sequence
  SiRNA target sequence
tacgaatgtaggagaaagaggaaggt

SEQ ID NO: 78393 - DNA, 26 bp, Artificial sequence
  SiRNA target sequence
acgaatgtaggagaaagaggaaggtt

SEQ ID NO: 78394 - DNA, 26 bp, Artificial sequence
  SiRNA target sequence
cgaatgtaggagaaagaggaaggtta

SEQ ID NO: 78395 - DNA, 26 bp, Artificial sequence
  SiRNA target sequence
gaatgtaggagaaagaggaaggttat

SEQ ID NO: 78396 - DNA, 26 bp, Artificial sequence
  SiRNA target sequence
aatgtaggagaaagaggaaggttatt

SEQ ID NO: 78397 - DNA, 26 bp, Artificial sequence
  SiRNA target sequence
atgtaggagaaagaggaaggttatta

SEQ ID NO: 78398 - DNA, 26 bp, Artificial sequence
  SiRNA target sequence
tgtaggagaaagaggaaggttattaa

SEQ ID NO: 78399 - DNA, 26 bp, Artificial sequence
  SiRNA target sequence
gtaggagaaagaggaaggttattaag

SEQ ID NO: 78400 - DNA, 26 bp, Artificial sequence
  SiRNA target sequence
taggagaaagaggaaggttattaagt

SEQ ID NO: 78401 - DNA, 26 bp, Artificial sequence
  SiRNA target sequence
aggagaaagaggaaggttattaagtg

SEQ ID NO: 78402 - DNA, 26 bp, Artificial sequence
  SiRNA target sequence
ggagaaagaggaaggttattaagtgg

SEQ ID NO: 78403 - DNA, 26 bp, Artificial sequence
  SiRNA target sequence
gagaaagaggaaggttattaagtggt

SEQ ID NO: 78404 - DNA, 26 bp, Artificial sequence
  SiRNA target sequence
agaaagaggaaggttattaagtggtg

SEQ ID NO: 78405 - DNA, 26 bp, Artificial sequence
  SiRNA target sequence
gaaagaggaaggttattaagtggtgg

SEQ ID NO: 78406 - DNA, 26 bp, Artificial sequence
  SiRNA target sequence
aaagaggaaggttattaagtggtgga

SEQ ID NO: 78407 - DNA, 26 bp, Artificial sequence
  SiRNA target sequence
aagaggaaggttattaagtggtggag

SEQ ID NO: 78408 - DNA, 26 bp, Artificial sequence
  SiRNA target sequence
agaggaaggttattaagtggtggaga

SEQ ID NO: 78409 - DNA, 26 bp, Artificial sequence
  SiRNA target sequence
gaggaaggttattaagtggtggagaa

SEQ ID NO: 78410 - DNA, 26 bp, Artificial sequence
  SiRNA target sequence
aggaaggttattaagtggtggagaaa

SEQ ID NO: 78411 - DNA, 26 bp, Artificial sequence
  SiRNA target sequence
ggaaggttattaagtggtggagaaaa

SEQ ID NO: 78412 - DNA, 26 bp, Artificial sequence
  SiRNA target sequence
gaaggttattaagtggtggagaaaag

SEQ ID NO: 78413 - DNA, 26 bp, Artificial sequence
  SiRNA target sequence
aaggttattaagtggtggagaaaagc

SEQ ID NO: 78414 - DNA, 26 bp, Artificial sequence
  SiRNA target sequence
aggttattaagtggtggagaaaagca

SEQ ID NO: 78415 - DNA, 26 bp, Artificial sequence
  SiRNA target sequence
ggttattaagtggtggagaaaagcaa

SEQ ID NO: 78416 - DNA, 26 bp, Artificial sequence
  SiRNA target sequence
gttattaagtggtggagaaaagcaaa

SEQ ID NO: 78417 - DNA, 26 bp, Artificial sequence
  SiRNA target sequence
ttattaagtggtggagaaaagcaaaa

SEQ ID NO: 78418 - DNA, 26 bp, Artificial sequence
  SiRNA target sequence
tattaagtggtggagaaaagcaaaag

SEQ ID NO: 78419 - DNA, 26 bp, Artificial sequence
  SiRNA target sequence
attaagtggtggagaaaagcaaaaga

SEQ ID NO: 78420 - DNA, 26 bp, Artificial sequence
  SiRNA target sequence
ttaagtggtggagaaaagcaaaagat

SEQ ID NO: 78421 - DNA, 26 bp, Artificial sequence
  SiRNA target sequence
taagtggtggagaaaagcaaaagatt

SEQ ID NO: 78422 - DNA, 26 bp, Artificial sequence
  SiRNA target sequence
aagtggtggagaaaagcaaaagattt

SEQ ID NO: 78423 - DNA, 26 bp, Artificial sequence
  SiRNA target sequence
agtggtggagaaaagcaaaagatttt

SEQ ID NO: 78424 - DNA, 26 bp, Artificial sequence
  SiRNA target sequence
gtggtggagaaaagcaaaagatttta

SEQ ID NO: 78425 - DNA, 26 bp, Artificial sequence
  SiRNA target sequence
tggtggagaaaagcaaaagattttat

SEQ ID NO: 78426 - DNA, 26 bp, Artificial sequence
  SiRNA target sequence
ggtggagaaaagcaaaagattttatt

SEQ ID NO: 78427 - DNA, 26 bp, Artificial sequence
  SiRNA target sequence
gtggagaaaagcaaaagattttatta

SEQ ID NO: 78428 - DNA, 26 bp, Artificial sequence
  SiRNA target sequence
tggagaaaagcaaaagattttattaa

SEQ ID NO: 78429 - DNA, 26 bp, Artificial sequence
  SiRNA target sequence
ggagaaaagcaaaagattttattaat

SEQ ID NO: 78430 - DNA, 26 bp, Artificial sequence
  SiRNA target sequence
gagaaaagcaaaagattttattaatg

SEQ ID NO: 78431 - DNA, 26 bp, Artificial sequence
  SiRNA target sequence
agaaaagcaaaagattttattaatgc

SEQ ID NO: 78432 - DNA, 26 bp, Artificial sequence
  SiRNA target sequence
gaaaagcaaaagattttattaatgcg

SEQ ID NO: 78433 - DNA, 26 bp, Artificial sequence
  SiRNA target sequence
aaaagcaaaagattttattaatgcgt

SEQ ID NO: 78434 - DNA, 26 bp, Artificial sequence
  SiRNA target sequence
aaagcaaaagattttattaatgcgta

SEQ ID NO: 78435 - DNA, 26 bp, Artificial sequence
  SiRNA target sequence
aagcaaaagattttattaatgcgtac

SEQ ID NO: 78436 - DNA, 26 bp, Artificial sequence
  SiRNA target sequence
agcaaaagattttattaatgcgtact

SEQ ID NO: 78437 - DNA, 26 bp, Artificial sequence
  SiRNA target sequence
gcaaaagattttattaatgcgtacta

SEQ ID NO: 78438 - DNA, 26 bp, Artificial sequence
  SiRNA target sequence
caaaagattttattaatgcgtactat

SEQ ID NO: 78439 - DNA, 26 bp, Artificial sequence
  SiRNA target sequence
aaaagattttattaatgcgtactatg

SEQ ID NO: 78440 - DNA, 26 bp, Artificial sequence
  SiRNA target sequence
aaagattttattaatgcgtactatgt

SEQ ID NO: 78441 - DNA, 26 bp, Artificial sequence
  SiRNA target sequence
aagattttattaatgcgtactatgtt

SEQ ID NO: 78442 - DNA, 26 bp, Artificial sequence
  SiRNA target sequence
agattttattaatgcgtactatgtta

SEQ ID NO: 78443 - DNA, 26 bp, Artificial sequence
  SiRNA target sequence
gattttattaatgcgtactatgttaa

SEQ ID NO: 78444 - DNA, 26 bp, Artificial sequence
  SiRNA target sequence
attttattaatgcgtactatgttaag

SEQ ID NO: 78445 - DNA, 26 bp, Artificial sequence
  SiRNA target sequence
ttttattaatgcgtactatgttaaga

SEQ ID NO: 78446 - DNA, 26 bp, Artificial sequence
  SiRNA target sequence
tttattaatgcgtactatgttaagaa

SEQ ID NO: 78447 - DNA, 26 bp, Artificial sequence
  SiRNA target sequence
ttattaatgcgtactatgttaagaaa

SEQ ID NO: 78448 - DNA, 26 bp, Artificial sequence
  SiRNA target sequence
tattaatgcgtactatgttaagaaac

SEQ ID NO: 78449 - DNA, 26 bp, Artificial sequence
  SiRNA target sequence
attaatgcgtactatgttaagaaaca

SEQ ID NO: 78450 - DNA, 26 bp, Artificial sequence
  SiRNA target sequence
ttaatgcgtactatgttaagaaacaa

SEQ ID NO: 78451 - DNA, 26 bp, Artificial sequence
  SiRNA target sequence
taatgcgtactatgttaagaaacaag

SEQ ID NO: 78452 - DNA, 26 bp, Artificial sequence
  SiRNA target sequence
aatgcgtactatgttaagaaacaagg

SEQ ID NO: 78453 - DNA, 26 bp, Artificial sequence
  SiRNA target sequence
atgcgtactatgttaagaaacaagga

SEQ ID NO: 78454 - DNA, 26 bp, Artificial sequence
  SiRNA target sequence
tgcgtactatgttaagaaacaaggag

SEQ ID NO: 78455 - DNA, 26 bp, Artificial sequence
  SiRNA target sequence
gcgtactatgttaagaaacaaggaga

SEQ ID NO: 78456 - DNA, 26 bp, Artificial sequence
  SiRNA target sequence
cgtactatgttaagaaacaaggagat

SEQ ID NO: 78457 - DNA, 26 bp, Artificial sequence
  SiRNA target sequence
gtactatgttaagaaacaaggagata

SEQ ID NO: 78458 - DNA, 26 bp, Artificial sequence
  SiRNA target sequence
tactatgttaagaaacaaggagataa

SEQ ID NO: 78459 - DNA, 26 bp, Artificial sequence
  SiRNA target sequence
actatgttaagaaacaaggagataat

SEQ ID NO: 78460 - DNA, 26 bp, Artificial sequence
  SiRNA target sequence
ctatgttaagaaacaaggagataatg

SEQ ID NO: 78461 - DNA, 26 bp, Artificial sequence
  SiRNA target sequence
tatgttaagaaacaaggagataatgg

SEQ ID NO: 78462 - DNA, 26 bp, Artificial sequence
  SiRNA target sequence
atgttaagaaacaaggagataatggc

SEQ ID NO: 78463 - DNA, 26 bp, Artificial sequence
  SiRNA target sequence
tgttaagaaacaaggagataatggca

SEQ ID NO: 78464 - DNA, 26 bp, Artificial sequence
  SiRNA target sequence
gttaagaaacaaggagataatggcat

SEQ ID NO: 78465 - DNA, 26 bp, Artificial sequence
  SiRNA target sequence
ttaagaaacaaggagataatggcatt

SEQ ID NO: 78466 - DNA, 26 bp, Artificial sequence
  SiRNA target sequence
taagaaacaaggagataatggcatta

SEQ ID NO: 78467 - DNA, 26 bp, Artificial sequence
  SiRNA target sequence
aagaaacaaggagataatggcattag

SEQ ID NO: 78468 - DNA, 26 bp, Artificial sequence
  SiRNA target sequence
agaaacaaggagataatggcattaga

SEQ ID NO: 78469 - DNA, 26 bp, Artificial sequence
  SiRNA target sequence
gaaacaaggagataatggcattagat

SEQ ID NO: 78470 - DNA, 26 bp, Artificial sequence
  SiRNA target sequence
aaacaaggagataatggcattagatg

SEQ ID NO: 78471 - DNA, 26 bp, Artificial sequence
  SiRNA target sequence
aacaaggagataatggcattagatga

SEQ ID NO: 78472 - DNA, 26 bp, Artificial sequence
  SiRNA target sequence
acaaggagataatggcattagatgaa

SEQ ID NO: 78473 - DNA, 26 bp, Artificial sequence
  SiRNA target sequence
caaggagataatggcattagatgaac

SEQ ID NO: 78474 - DNA, 26 bp, Artificial sequence
  SiRNA target sequence
aaggagataatggcattagatgaacc

SEQ ID NO: 78475 - DNA, 26 bp, Artificial sequence
  SiRNA target sequence
aggagataatggcattagatgaaccc

SEQ ID NO: 78476 - DNA, 26 bp, Artificial sequence
  SiRNA target sequence
ggagataatggcattagatgaaccca

SEQ ID NO: 78477 - DNA, 26 bp, Artificial sequence
  SiRNA target sequence
gagataatggcattagatgaacccac

SEQ ID NO: 78478 - DNA, 26 bp, Artificial sequence
  SiRNA target sequence
agataatggcattagatgaacccact

SEQ ID NO: 78479 - DNA, 26 bp, Artificial sequence
  SiRNA target sequence
gataatggcattagatgaacccactg

SEQ ID NO: 78480 - DNA, 26 bp, Artificial sequence
  SiRNA target sequence
ataatggcattagatgaacccactgc

SEQ ID NO: 78481 - DNA, 26 bp, Artificial sequence
  SiRNA target sequence
taatggcattagatgaacccactgca

SEQ ID NO: 78482 - DNA, 26 bp, Artificial sequence
  SiRNA target sequence
aatggcattagatgaacccactgcag

SEQ ID NO: 78483 - DNA, 26 bp, Artificial sequence
  SiRNA target sequence
atggcattagatgaacccactgcagc

SEQ ID NO: 78484 - DNA, 26 bp, Artificial sequence
  SiRNA target sequence
tggcattagatgaacccactgcagca

SEQ ID NO: 78485 - DNA, 26 bp, Artificial sequence
  SiRNA target sequence
ggcattagatgaacccactgcagcac

SEQ ID NO: 78486 - DNA, 26 bp, Artificial sequence
  SiRNA target sequence
gcattagatgaacccactgcagcact

SEQ ID NO: 78487 - DNA, 26 bp, Artificial sequence
  SiRNA target sequence
cattagatgaacccactgcagcactt

SEQ ID NO: 78488 - DNA, 26 bp, Artificial sequence
  SiRNA target sequence
attagatgaacccactgcagcacttg

SEQ ID NO: 78489 - DNA, 26 bp, Artificial sequence
  SiRNA target sequence
ttagatgaacccactgcagcacttga

SEQ ID NO: 78490 - DNA, 26 bp, Artificial sequence
  SiRNA target sequence
tagatgaacccactgcagcacttgat

SEQ ID NO: 78491 - DNA, 26 bp, Artificial sequence
  SiRNA target sequence
agatgaacccactgcagcacttgata

SEQ ID NO: 78492 - DNA, 26 bp, Artificial sequence
  SiRNA target sequence
gatgaacccactgcagcacttgataa

SEQ ID NO: 78493 - DNA, 26 bp, Artificial sequence
  SiRNA target sequence
atgaacccactgcagcacttgataag

SEQ ID NO: 78494 - DNA, 26 bp, Artificial sequence
  SiRNA target sequence
tgaacccactgcagcacttgataagg

SEQ ID NO: 78495 - DNA, 26 bp, Artificial sequence
  SiRNA target sequence
gaacccactgcagcacttgataagga

SEQ ID NO: 78496 - DNA, 26 bp, Artificial sequence
  SiRNA target sequence
aacccactgcagcacttgataaggag

SEQ ID NO: 78497 - DNA, 26 bp, Artificial sequence
  SiRNA target sequence
acccactgcagcacttgataaggagt

SEQ ID NO: 78498 - DNA, 26 bp, Artificial sequence
  SiRNA target sequence
cccactgcagcacttgataaggagtc

SEQ ID NO: 78499 - DNA, 26 bp, Artificial sequence
  SiRNA target sequence
ccactgcagcacttgataaggagtct

SEQ ID NO: 78500 - DNA, 26 bp, Artificial sequence
  SiRNA target sequence
cactgcagcacttgataaggagtctg

SEQ ID NO: 78501 - DNA, 26 bp, Artificial sequence
  SiRNA target sequence
actgcagcacttgataaggagtctga

SEQ ID NO: 78502 - DNA, 26 bp, Artificial sequence
  SiRNA target sequence
ctgcagcacttgataaggagtctgaa

SEQ ID NO: 78503 - DNA, 26 bp, Artificial sequence
  SiRNA target sequence
tgcagcacttgataaggagtctgaaa

SEQ ID NO: 78504 - DNA, 26 bp, Artificial sequence
  SiRNA target sequence
gcagcacttgataaggagtctgaaaa

SEQ ID NO: 78505 - DNA, 26 bp, Artificial sequence
  SiRNA target sequence
cagcacttgataaggagtctgaaaaa

SEQ ID NO: 78506 - DNA, 26 bp, Artificial sequence
  SiRNA target sequence
agcacttgataaggagtctgaaaaaa

SEQ ID NO: 78507 - DNA, 26 bp, Artificial sequence
  SiRNA target sequence
gcacttgataaggagtctgaaaaaaa

SEQ ID NO: 78508 - DNA, 26 bp, Artificial sequence
  SiRNA target sequence
cacttgataaggagtctgaaaaaaag

SEQ ID NO: 78509 - DNA, 26 bp, Artificial sequence
  SiRNA target sequence
acttgataaggagtctgaaaaaaaga

SEQ ID NO: 78510 - DNA, 26 bp, Artificial sequence
  SiRNA target sequence
cttgataaggagtctgaaaaaaagat

SEQ ID NO: 78511 - DNA, 26 bp, Artificial sequence
  SiRNA target sequence
ttgataaggagtctgaaaaaaagatt

SEQ ID NO: 78512 - DNA, 26 bp, Artificial sequence
  SiRNA target sequence
tgataaggagtctgaaaaaaagattt

SEQ ID NO: 78513 - DNA, 26 bp, Artificial sequence
  SiRNA target sequence
gataaggagtctgaaaaaaagatttt

SEQ ID NO: 78514 - DNA, 26 bp, Artificial sequence
  SiRNA target sequence
ataaggagtctgaaaaaaagatttta

SEQ ID NO: 78515 - DNA, 26 bp, Artificial sequence
  SiRNA target sequence
taaggagtctgaaaaaaagattttag

SEQ ID NO: 78516 - DNA, 26 bp, Artificial sequence
  SiRNA target sequence
aaggagtctgaaaaaaagattttaga

SEQ ID NO: 78517 - DNA, 26 bp, Artificial sequence
  SiRNA target sequence
aggagtctgaaaaaaagattttagag

SEQ ID NO: 78518 - DNA, 26 bp, Artificial sequence
  SiRNA target sequence
ggagtctgaaaaaaagattttagaga

SEQ ID NO: 78519 - DNA, 26 bp, Artificial sequence
  SiRNA target sequence
gagtctgaaaaaaagattttagagat

SEQ ID NO: 78520 - DNA, 26 bp, Artificial sequence
  SiRNA target sequence
agtctgaaaaaaagattttagagata

SEQ ID NO: 78521 - DNA, 26 bp, Artificial sequence
  SiRNA target sequence
gtctgaaaaaaagattttagagataa

SEQ ID NO: 78522 - DNA, 26 bp, Artificial sequence
  SiRNA target sequence
tctgaaaaaaagattttagagataat

SEQ ID NO: 78523 - DNA, 26 bp, Artificial sequence
  SiRNA target sequence
ctgaaaaaaagattttagagataatt

SEQ ID NO: 78524 - DNA, 26 bp, Artificial sequence
  SiRNA target sequence
tgaaaaaaagattttagagataattt

SEQ ID NO: 78525 - DNA, 26 bp, Artificial sequence
  SiRNA target sequence
gaaaaaaagattttagagataatttt

SEQ ID NO: 78526 - DNA, 26 bp, Artificial sequence
  SiRNA target sequence
aaaaaaagattttagagataatttta

SEQ ID NO: 78527 - DNA, 26 bp, Artificial sequence
  SiRNA target sequence
aaaaaagattttagagataattttac

SEQ ID NO: 78528 - DNA, 26 bp, Artificial sequence
  SiRNA target sequence
aaaaagattttagagataattttaca

SEQ ID NO: 78529 - DNA, 26 bp, Artificial sequence
  SiRNA target sequence
aaaagattttagagataattttacaa

SEQ ID NO: 78530 - DNA, 26 bp, Artificial sequence
  SiRNA target sequence
aaagattttagagataattttacaac

SEQ ID NO: 78531 - DNA, 26 bp, Artificial sequence
  SiRNA target sequence
aagattttagagataattttacaaca

SEQ ID NO: 78532 - DNA, 26 bp, Artificial sequence
  SiRNA target sequence
agattttagagataattttacaacag

SEQ ID NO: 78533 - DNA, 26 bp, Artificial sequence
  SiRNA target sequence
gattttagagataattttacaacagg

SEQ ID NO: 78534 - DNA, 26 bp, Artificial sequence
  SiRNA target sequence
attttagagataattttacaacagga

SEQ ID NO: 78535 - DNA, 26 bp, Artificial sequence
  SiRNA target sequence
ttttagagataattttacaacaggaa

SEQ ID NO: 78536 - DNA, 26 bp, Artificial sequence
  SiRNA target sequence
tttagagataattttacaacaggaag

SEQ ID NO: 78537 - DNA, 26 bp, Artificial sequence
  SiRNA target sequence
ttagagataattttacaacaggaaga

SEQ ID NO: 78538 - DNA, 26 bp, Artificial sequence
  SiRNA target sequence
tagagataattttacaacaggaagat

SEQ ID NO: 78539 - DNA, 26 bp, Artificial sequence
  SiRNA target sequence
agagataattttacaacaggaagatc

SEQ ID NO: 78540 - DNA, 26 bp, Artificial sequence
  SiRNA target sequence
gagataattttacaacaggaagatcg

SEQ ID NO: 78541 - DNA, 26 bp, Artificial sequence
  SiRNA target sequence
agataattttacaacaggaagatcga

SEQ ID NO: 78542 - DNA, 26 bp, Artificial sequence
  SiRNA target sequence
gataattttacaacaggaagatcgaa

SEQ ID NO: 78543 - DNA, 26 bp, Artificial sequence
  SiRNA target sequence
ataattttacaacaggaagatcgaac

SEQ ID NO: 78544 - DNA, 26 bp, Artificial sequence
  SiRNA target sequence
taattttacaacaggaagatcgaaca

SEQ ID NO: 78545 - DNA, 26 bp, Artificial sequence
  SiRNA target sequence
aattttacaacaggaagatcgaacag

SEQ ID NO: 78546 - DNA, 26 bp, Artificial sequence
  SiRNA target sequence
attttacaacaggaagatcgaacagt

SEQ ID NO: 78547 - DNA, 26 bp, Artificial sequence
  SiRNA target sequence
ttttacaacaggaagatcgaacagtt

SEQ ID NO: 78548 - DNA, 26 bp, Artificial sequence
  SiRNA target sequence
tttacaacaggaagatcgaacagttt

SEQ ID NO: 78549 - DNA, 26 bp, Artificial sequence
  SiRNA target sequence
ttacaacaggaagatcgaacagtttt

SEQ ID NO: 78550 - DNA, 26 bp, Artificial sequence
  SiRNA target sequence
tacaacaggaagatcgaacagttttg

SEQ ID NO: 78551 - DNA, 26 bp, Artificial sequence
  SiRNA target sequence
acaacaggaagatcgaacagttttga

SEQ ID NO: 78552 - DNA, 26 bp, Artificial sequence
  SiRNA target sequence
caacaggaagatcgaacagttttgat

SEQ ID NO: 78553 - DNA, 26 bp, Artificial sequence
  SiRNA target sequence
aacaggaagatcgaacagttttgatg

SEQ ID NO: 78554 - DNA, 26 bp, Artificial sequence
  SiRNA target sequence
acaggaagatcgaacagttttgatga

SEQ ID NO: 78555 - DNA, 26 bp, Artificial sequence
  SiRNA target sequence
caggaagatcgaacagttttgatgat

SEQ ID NO: 78556 - DNA, 26 bp, Artificial sequence
  SiRNA target sequence
aggaagatcgaacagttttgatgata

SEQ ID NO: 78557 - DNA, 26 bp, Artificial sequence
  SiRNA target sequence
ggaagatcgaacagttttgatgataa

SEQ ID NO: 78558 - DNA, 26 bp, Artificial sequence
  SiRNA target sequence
gaagatcgaacagttttgatgataat

SEQ ID NO: 78559 - DNA, 26 bp, Artificial sequence
  SiRNA target sequence
aagatcgaacagttttgatgataatt

SEQ ID NO: 78560 - DNA, 26 bp, Artificial sequence
  SiRNA target sequence
agatcgaacagttttgatgataattc

SEQ ID NO: 78561 - DNA, 26 bp, Artificial sequence
  SiRNA target sequence
gatcgaacagttttgatgataattca

SEQ ID NO: 78562 - DNA, 26 bp, Artificial sequence
  SiRNA target sequence
atcgaacagttttgatgataattcat

SEQ ID NO: 78563 - DNA, 26 bp, Artificial sequence
  SiRNA target sequence
tcgaacagttttgatgataattcata

SEQ ID NO: 78564 - DNA, 26 bp, Artificial sequence
  SiRNA target sequence
cgaacagttttgatgataattcataa

SEQ ID NO: 78565 - DNA, 26 bp, Artificial sequence
  SiRNA target sequence
gaacagttttgatgataattcataat

SEQ ID NO: 78566 - DNA, 26 bp, Artificial sequence
  SiRNA target sequence
aacagttttgatgataattcataatc

SEQ ID NO: 78567 - DNA, 26 bp, Artificial sequence
  SiRNA target sequence
acagttttgatgataattcataatct

SEQ ID NO: 78568 - DNA, 26 bp, Artificial sequence
  SiRNA target sequence
cagttttgatgataattcataatcta

SEQ ID NO: 78569 - DNA, 26 bp, Artificial sequence
  SiRNA target sequence
agttttgatgataattcataatctag

SEQ ID NO: 78570 - DNA, 26 bp, Artificial sequence
  SiRNA target sequence
gttttgatgataattcataatctaga

SEQ ID NO: 78571 - DNA, 26 bp, Artificial sequence
  SiRNA target sequence
ttttgatgataattcataatctagaa

SEQ ID NO: 78572 - DNA, 26 bp, Artificial sequence
  SiRNA target sequence
tttgatgataattcataatctagaac

SEQ ID NO: 78573 - DNA, 26 bp, Artificial sequence
  SiRNA target sequence
ttgatgataattcataatctagaact

SEQ ID NO: 78574 - DNA, 26 bp, Artificial sequence
  SiRNA target sequence
tgatgataattcataatctagaactt

SEQ ID NO: 78575 - DNA, 26 bp, Artificial sequence
  SiRNA target sequence
gatgataattcataatctagaactta

SEQ ID NO: 78576 - DNA, 26 bp, Artificial sequence
  SiRNA target sequence
atgataattcataatctagaacttat

SEQ ID NO: 78577 - DNA, 26 bp, Artificial sequence
  SiRNA target sequence
tgataattcataatctagaacttatt

SEQ ID NO: 78578 - DNA, 26 bp, Artificial sequence
  SiRNA target sequence
gataattcataatctagaacttatta

SEQ ID NO: 78579 - DNA, 26 bp, Artificial sequence
  SiRNA target sequence
ataattcataatctagaacttattaa

SEQ ID NO: 78580 - DNA, 26 bp, Artificial sequence
  SiRNA target sequence
taattcataatctagaacttattaat

SEQ ID NO: 78581 - DNA, 26 bp, Artificial sequence
  SiRNA target sequence
aattcataatctagaacttattaata

SEQ ID NO: 78582 - DNA, 26 bp, Artificial sequence
  SiRNA target sequence
attcataatctagaacttattaataa

SEQ ID NO: 78583 - DNA, 26 bp, Artificial sequence
  SiRNA target sequence
ttcataatctagaacttattaataaa

SEQ ID NO: 78584 - DNA, 26 bp, Artificial sequence
  SiRNA target sequence
tcataatctagaacttattaataaat

SEQ ID NO: 78585 - DNA, 26 bp, Artificial sequence
  SiRNA target sequence
cataatctagaacttattaataaatt

SEQ ID NO: 78586 - DNA, 26 bp, Artificial sequence
  SiRNA target sequence
ataatctagaacttattaataaattt

SEQ ID NO: 78587 - DNA, 26 bp, Artificial sequence
  SiRNA target sequence
taatctagaacttattaataaatttg

SEQ ID NO: 78588 - DNA, 26 bp, Artificial sequence
  SiRNA target sequence
aatctagaacttattaataaatttga

SEQ ID NO: 78589 - DNA, 26 bp, Artificial sequence
  SiRNA target sequence
atctagaacttattaataaatttgat

SEQ ID NO: 78590 - DNA, 26 bp, Artificial sequence
  SiRNA target sequence
tctagaacttattaataaatttgata

SEQ ID NO: 78591 - DNA, 26 bp, Artificial sequence
  SiRNA target sequence
ctagaacttattaataaatttgataa

SEQ ID NO: 78592 - DNA, 26 bp, Artificial sequence
  SiRNA target sequence
tagaacttattaataaatttgataaa

SEQ ID NO: 78593 - DNA, 26 bp, Artificial sequence
  SiRNA target sequence
agaacttattaataaatttgataaaa

SEQ ID NO: 78594 - DNA, 26 bp, Artificial sequence
  SiRNA target sequence
gaacttattaataaatttgataaaat

SEQ ID NO: 78595 - DNA, 26 bp, Artificial sequence
  SiRNA target sequence
aacttattaataaatttgataaaata

SEQ ID NO: 78596 - DNA, 26 bp, Artificial sequence
  SiRNA target sequence
acttattaataaatttgataaaataa

SEQ ID NO: 78597 - DNA, 26 bp, Artificial sequence
  SiRNA target sequence
cttattaataaatttgataaaataat

SEQ ID NO: 78598 - DNA, 26 bp, Artificial sequence
  SiRNA target sequence
ttattaataaatttgataaaataatt

SEQ ID NO: 78599 - DNA, 26 bp, Artificial sequence
  SiRNA target sequence
tattaataaatttgataaaataattt

SEQ ID NO: 78600 - DNA, 26 bp, Artificial sequence
  SiRNA target sequence
attaataaatttgataaaataattta

SEQ ID NO: 78601 - DNA, 26 bp, Artificial sequence
  SiRNA target sequence
ttaataaatttgataaaataatttac

SEQ ID NO: 78602 - DNA, 26 bp, Artificial sequence
  SiRNA target sequence
taataaatttgataaaataatttaca

SEQ ID NO: 78603 - DNA, 26 bp, Artificial sequence
  SiRNA target sequence
aataaatttgataaaataatttacat

SEQ ID NO: 78604 - DNA, 26 bp, Artificial sequence
  SiRNA target sequence
ataaatttgataaaataatttacatt

SEQ ID NO: 78605 - DNA, 26 bp, Artificial sequence
  SiRNA target sequence
taaatttgataaaataatttacattg

SEQ ID NO: 78606 - DNA, 26 bp, Artificial sequence
  SiRNA target sequence
aaatttgataaaataatttacattga

SEQ ID NO: 78607 - DNA, 26 bp, Artificial sequence
  SiRNA target sequence
aatttgataaaataatttacattgat

SEQ ID NO: 78608 - DNA, 26 bp, Artificial sequence
  SiRNA target sequence
atttgataaaataatttacattgatg

SEQ ID NO: 78609 - DNA, 26 bp, Artificial sequence
  SiRNA target sequence
tttgataaaataatttacattgatga

SEQ ID NO: 78610 - DNA, 26 bp, Artificial sequence
  SiRNA target sequence
ttgataaaataatttacattgatgaa

SEQ ID NO: 78611 - DNA, 26 bp, Artificial sequence
  SiRNA target sequence
tgataaaataatttacattgatgaaa

SEQ ID NO: 78612 - DNA, 26 bp, Artificial sequence
  SiRNA target sequence
gataaaataatttacattgatgaaaa

SEQ ID NO: 78613 - DNA, 26 bp, Artificial sequence
  SiRNA target sequence
ataaaataatttacattgatgaaaat

SEQ ID NO: 78614 - DNA, 26 bp, Artificial sequence
  SiRNA target sequence
taaaataatttacattgatgaaaata

SEQ ID NO: 78615 - DNA, 26 bp, Artificial sequence
  SiRNA target sequence
aaaataatttacattgatgaaaataa

SEQ ID NO: 78616 - DNA, 26 bp, Artificial sequence
  SiRNA target sequence
aaataatttacattgatgaaaataat

SEQ ID NO: 78617 - DNA, 26 bp, Artificial sequence
  SiRNA target sequence
aataatttacattgatgaaaataata

SEQ ID NO: 78618 - DNA, 26 bp, Artificial sequence
  SiRNA target sequence
ataatttacattgatgaaaataatat

SEQ ID NO: 78619 - DNA, 26 bp, Artificial sequence
  SiRNA target sequence
taatttacattgatgaaaataatata

SEQ ID NO: 78620 - DNA, 26 bp, Artificial sequence
  SiRNA target sequence
aatttacattgatgaaaataatatag

SEQ ID NO: 78621 - DNA, 26 bp, Artificial sequence
  SiRNA target sequence
atttacattgatgaaaataatataga

SEQ ID NO: 78622 - DNA, 26 bp, Artificial sequence
  SiRNA target sequence
tttacattgatgaaaataatatagaa

SEQ ID NO: 78623 - DNA, 26 bp, Artificial sequence
  SiRNA target sequence
ttacattgatgaaaataatatagaag

SEQ ID NO: 78624 - DNA, 26 bp, Artificial sequence
  SiRNA target sequence
tacattgatgaaaataatatagaagt

SEQ ID NO: 78625 - DNA, 26 bp, Artificial sequence
  SiRNA target sequence
acattgatgaaaataatatagaagtc

SEQ ID NO: 78626 - DNA, 26 bp, Artificial sequence
  SiRNA target sequence
cattgatgaaaataatatagaagtct

SEQ ID NO: 78627 - DNA, 26 bp, Artificial sequence
  SiRNA target sequence
attgatgaaaataatatagaagtcta

SEQ ID NO: 78628 - DNA, 26 bp, Artificial sequence
  SiRNA target sequence
ttgatgaaaataatatagaagtctat

SEQ ID NO: 78629 - DNA, 26 bp, Artificial sequence
  SiRNA target sequence
tgatgaaaataatatagaagtctata

SEQ ID NO: 78630 - DNA, 26 bp, Artificial sequence
  SiRNA target sequence
gatgaaaataatatagaagtctataa

SEQ ID NO: 78631 - DNA, 26 bp, Artificial sequence
  SiRNA target sequence
atgaaaataatatagaagtctataaa

SEQ ID NO: 78632 - DNA, 26 bp, Artificial sequence
  SiRNA target sequence
tgaaaataatatagaagtctataaaa

SEQ ID NO: 78633 - DNA, 26 bp, Artificial sequence
  SiRNA target sequence
gaaaataatatagaagtctataaaaa

SEQ ID NO: 78634 - DNA, 26 bp, Artificial sequence
  SiRNA target sequence
aaaataatatagaagtctataaaaat

SEQ ID NO: 78635 - DNA, 26 bp, Artificial sequence
  SiRNA target sequence
aaataatatagaagtctataaaaatg

SEQ ID NO: 78636 - DNA, 26 bp, Artificial sequence
  SiRNA target sequence
aataatatagaagtctataaaaatga

SEQ ID NO: 78637 - DNA, 26 bp, Artificial sequence
  SiRNA target sequence
ataatatagaagtctataaaaatgat

SEQ ID NO: 78638 - DNA, 26 bp, Artificial sequence
  SiRNA target sequence
taatatagaagtctataaaaatgata

SEQ ID NO: 78639 - DNA, 26 bp, Artificial sequence
  SiRNA target sequence
aatatagaagtctataaaaatgatat

SEQ ID NO: 78640 - DNA, 26 bp, Artificial sequence
  SiRNA target sequence
atatagaagtctataaaaatgatatt

SEQ ID NO: 78641 - DNA, 26 bp, Artificial sequence
  SiRNA target sequence
tatagaagtctataaaaatgatattg

SEQ ID NO: 78642 - DNA, 26 bp, Artificial sequence
  SiRNA target sequence
atagaagtctataaaaatgatattga

SEQ ID NO: 78643 - DNA, 26 bp, Artificial sequence
  SiRNA target sequence
tagaagtctataaaaatgatattgaa

SEQ ID NO: 78644 - DNA, 26 bp, Artificial sequence
  SiRNA target sequence
agaagtctataaaaatgatattgaag

SEQ ID NO: 78645 - DNA, 26 bp, Artificial sequence
  SiRNA target sequence
gaagtctataaaaatgatattgaagg

SEQ ID NO: 78646 - DNA, 26 bp, Artificial sequence
  SiRNA target sequence
aagtctataaaaatgatattgaagga

SEQ ID NO: 78647 - DNA, 26 bp, Artificial sequence
  SiRNA target sequence
agtctataaaaatgatattgaaggac

SEQ ID NO: 78648 - DNA, 26 bp, Artificial sequence
  SiRNA target sequence
gtctataaaaatgatattgaaggaca

SEQ ID NO: 78649 - DNA, 26 bp, Artificial sequence
  SiRNA target sequence
tctataaaaatgatattgaaggacaa

SEQ ID NO: 78650 - DNA, 26 bp, Artificial sequence
  SiRNA target sequence
ctataaaaatgatattgaaggacaaa

SEQ ID NO: 78651 - DNA, 26 bp, Artificial sequence
  SiRNA target sequence
tataaaaatgatattgaaggacaaaa

SEQ ID NO: 78652 - DNA, 26 bp, Artificial sequence
  SiRNA target sequence
ataaaaatgatattgaaggacaaaaa

SEQ ID NO: 78653 - DNA, 26 bp, Artificial sequence
  SiRNA target sequence
taaaaatgatattgaaggacaaaaaa

SEQ ID NO: 78654 - DNA, 26 bp, Artificial sequence
  SiRNA target sequence
aaaaatgatattgaaggacaaaaaaa

SEQ ID NO: 78655 - DNA, 26 bp, Artificial sequence
  SiRNA target sequence
aaaatgatattgaaggacaaaaaaag

SEQ ID NO: 78656 - DNA, 26 bp, Artificial sequence
  SiRNA target sequence
aaatgatattgaaggacaaaaaaagt

SEQ ID NO: 78657 - DNA, 26 bp, Artificial sequence
  SiRNA target sequence
aatgatattgaaggacaaaaaaagtt

SEQ ID NO: 78658 - DNA, 26 bp, Artificial sequence
  SiRNA target sequence
atgatattgaaggacaaaaaaagttt

SEQ ID NO: 78659 - DNA, 26 bp, Artificial sequence
  SiRNA target sequence
tgatattgaaggacaaaaaaagtttt

SEQ ID NO: 78660 - DNA, 26 bp, Artificial sequence
  SiRNA target sequence
gatattgaaggacaaaaaaagttttc

SEQ ID NO: 78661 - DNA, 26 bp, Artificial sequence
  SiRNA target sequence
atattgaaggacaaaaaaagttttct

SEQ ID NO: 78662 - DNA, 26 bp, Artificial sequence
  SiRNA target sequence
tattgaaggacaaaaaaagttttcta

SEQ ID NO: 78663 - DNA, 26 bp, Artificial sequence
  SiRNA target sequence
attgaaggacaaaaaaagttttctac

SEQ ID NO: 78664 - DNA, 26 bp, Artificial sequence
  SiRNA target sequence
ttgaaggacaaaaaaagttttctaca

SEQ ID NO: 78665 - DNA, 26 bp, Artificial sequence
  SiRNA target sequence
tgaaggacaaaaaaagttttctacaa

SEQ ID NO: 78666 - DNA, 26 bp, Artificial sequence
  SiRNA target sequence
gaaggacaaaaaaagttttctacaaa

SEQ ID NO: 78667 - DNA, 26 bp, Artificial sequence
  SiRNA target sequence
aaggacaaaaaaagttttctacaaat

SEQ ID NO: 78668 - DNA, 26 bp, Artificial sequence
  SiRNA target sequence
aggacaaaaaaagttttctacaaatt

SEQ ID NO: 78669 - DNA, 26 bp, Artificial sequence
  SiRNA target sequence
ggacaaaaaaagttttctacaaattt

SEQ ID NO: 78670 - DNA, 26 bp, Artificial sequence
  SiRNA target sequence
gacaaaaaaagttttctacaaattta

SEQ ID NO: 78671 - DNA, 26 bp, Artificial sequence
  SiRNA target sequence
acaaaaaaagttttctacaaatttac

SEQ ID NO: 78672 - DNA, 26 bp, Artificial sequence
  SiRNA target sequence
caaaaaaagttttctacaaatttaca

SEQ ID NO: 78673 - DNA, 26 bp, Artificial sequence
  SiRNA target sequence
aaaaaaagttttctacaaatttacaa

SEQ ID NO: 78674 - DNA, 26 bp, Artificial sequence
  SiRNA target sequence
aaaaaagttttctacaaatttacaat

SEQ ID NO: 78675 - DNA, 26 bp, Artificial sequence
  SiRNA target sequence
aaaaagttttctacaaatttacaata

SEQ ID NO: 78676 - DNA, 26 bp, Artificial sequence
  SiRNA target sequence
aaaagttttctacaaatttacaatat

SEQ ID NO: 78677 - DNA, 26 bp, Artificial sequence
  SiRNA target sequence
aaagttttctacaaatttacaatatt

SEQ ID NO: 78678 - DNA, 26 bp, Artificial sequence
  SiRNA target sequence
aagttttctacaaatttacaatattt

SEQ ID NO: 78679 - DNA, 26 bp, Artificial sequence
  SiRNA target sequence
agttttctacaaatttacaatatttt

SEQ ID NO: 78680 - DNA, 26 bp, Artificial sequence
  SiRNA target sequence
gttttctacaaatttacaatattttt

SEQ ID NO: 78681 - DNA, 26 bp, Artificial sequence
  SiRNA target sequence
ttttctacaaatttacaatatttttt

SEQ ID NO: 78682 - DNA, 26 bp, Artificial sequence
  SiRNA target sequence
tttctacaaatttacaatatttttta

SEQ ID NO: 78683 - DNA, 26 bp, Artificial sequence
  SiRNA target sequence
ttctacaaatttacaatattttttat

SEQ ID NO: 78684 - DNA, 26 bp, Artificial sequence
  SiRNA target sequence
tctacaaatttacaatattttttatc

SEQ ID NO: 78685 - DNA, 26 bp, Artificial sequence
  SiRNA target sequence
ctacaaatttacaatattttttatca

SEQ ID NO: 78686 - DNA, 26 bp, Artificial sequence
  SiRNA target sequence
tacaaatttacaatattttttatcat

SEQ ID NO: 78687 - DNA, 26 bp, Artificial sequence
  SiRNA target sequence
acaaatttacaatattttttatcata

SEQ ID NO: 78688 - DNA, 26 bp, Artificial sequence
  SiRNA target sequence
caaatttacaatattttttatcatac

SEQ ID NO: 78689 - DNA, 26 bp, Artificial sequence
  SiRNA target sequence
aaatttacaatattttttatcataca

SEQ ID NO: 78690 - DNA, 26 bp, Artificial sequence
  SiRNA target sequence
aatttacaatattttttatcatacaa

SEQ ID NO: 78691 - DNA, 26 bp, Artificial sequence
  SiRNA target sequence
atttacaatattttttatcatacaaa

SEQ ID NO: 78692 - DNA, 26 bp, Artificial sequence
  SiRNA target sequence
tttacaatattttttatcatacaaat

SEQ ID NO: 78693 - DNA, 26 bp, Artificial sequence
  SiRNA target sequence
ttacaatattttttatcatacaaatt

SEQ ID NO: 78694 - DNA, 26 bp, Artificial sequence
  SiRNA target sequence
tacaatattttttatcatacaaatta

SEQ ID NO: 78695 - DNA, 26 bp, Artificial sequence
  SiRNA target sequence
acaatattttttatcatacaaattag

SEQ ID NO: 78696 - DNA, 26 bp, Artificial sequence
  SiRNA target sequence
caatattttttatcatacaaattagg

SEQ ID NO: 78697 - DNA, 26 bp, Artificial sequence
  SiRNA target sequence
aatattttttatcatacaaattaggt

SEQ ID NO: 78698 - DNA, 26 bp, Artificial sequence
  SiRNA target sequence
atattttttatcatacaaattaggta

SEQ ID NO: 78699 - DNA, 26 bp, Artificial sequence
  SiRNA target sequence
tattttttatcatacaaattaggtaa

SEQ ID NO: 78700 - DNA, 26 bp, Artificial sequence
  SiRNA target sequence
attttttatcatacaaattaggtaaa

SEQ ID NO: 78701 - DNA, 26 bp, Artificial sequence
  SiRNA target sequence
ttttttatcatacaaattaggtaaat

SEQ ID NO: 78702 - DNA, 26 bp, Artificial sequence
  SiRNA target sequence
tttttatcatacaaattaggtaaata

SEQ ID NO: 78703 - DNA, 26 bp, Artificial sequence
  SiRNA target sequence
ttttatcatacaaattaggtaaataa

SEQ ID NO: 78704 - DNA, 27 bp, Artificial sequence
  SiRNA target sequence
atgaaaaaaatttcgaatagaaaaatt

SEQ ID NO: 78705 - DNA, 27 bp, Artificial sequence
  SiRNA target sequence
tgaaaaaaatttcgaatagaaaaatta

SEQ ID NO: 78706 - DNA, 27 bp, Artificial sequence
  SiRNA target sequence
gaaaaaaatttcgaatagaaaaattat

SEQ ID NO: 78707 - DNA, 27 bp, Artificial sequence
  SiRNA target sequence
aaaaaaatttcgaatagaaaaattatc

SEQ ID NO: 78708 - DNA, 27 bp, Artificial sequence
  SiRNA target sequence
aaaaaatttcgaatagaaaaattatca

SEQ ID NO: 78709 - DNA, 27 bp, Artificial sequence
  SiRNA target sequence
aaaaatttcgaatagaaaaattatcaa

SEQ ID NO: 78710 - DNA, 27 bp, Artificial sequence
  SiRNA target sequence
aaaatttcgaatagaaaaattatcaaa

SEQ ID NO: 78711 - DNA, 27 bp, Artificial sequence
  SiRNA target sequence
aaatttcgaatagaaaaattatcaaag

SEQ ID NO: 78712 - DNA, 27 bp, Artificial sequence
  SiRNA target sequence
aatttcgaatagaaaaattatcaaaga

SEQ ID NO: 78713 - DNA, 27 bp, Artificial sequence
  SiRNA target sequence
atttcgaatagaaaaattatcaaagaa

SEQ ID NO: 78714 - DNA, 27 bp, Artificial sequence
  SiRNA target sequence
tttcgaatagaaaaattatcaaagaaa

SEQ ID NO: 78715 - DNA, 27 bp, Artificial sequence
  SiRNA target sequence
ttcgaatagaaaaattatcaaagaaat

SEQ ID NO: 78716 - DNA, 27 bp, Artificial sequence
  SiRNA target sequence
tcgaatagaaaaattatcaaagaaatt

SEQ ID NO: 78717 - DNA, 27 bp, Artificial sequence
  SiRNA target sequence
cgaatagaaaaattatcaaagaaatta

SEQ ID NO: 78718 - DNA, 27 bp, Artificial sequence
  SiRNA target sequence
gaatagaaaaattatcaaagaaattat

SEQ ID NO: 78719 - DNA, 27 bp, Artificial sequence
  SiRNA target sequence
aatagaaaaattatcaaagaaattatt

SEQ ID NO: 78720 - DNA, 27 bp, Artificial sequence
  SiRNA target sequence
atagaaaaattatcaaagaaattattt

SEQ ID NO: 78721 - DNA, 27 bp, Artificial sequence
  SiRNA target sequence
tagaaaaattatcaaagaaattattta

SEQ ID NO: 78722 - DNA, 27 bp, Artificial sequence
  SiRNA target sequence
agaaaaattatcaaagaaattatttac

SEQ ID NO: 78723 - DNA, 27 bp, Artificial sequence
  SiRNA target sequence
gaaaaattatcaaagaaattatttaca

SEQ ID NO: 78724 - DNA, 27 bp, Artificial sequence
  SiRNA target sequence
aaaaattatcaaagaaattatttacaa

SEQ ID NO: 78725 - DNA, 27 bp, Artificial sequence
  SiRNA target sequence
aaaattatcaaagaaattatttacaat

SEQ ID NO: 78726 - DNA, 27 bp, Artificial sequence
  SiRNA target sequence
aaattatcaaagaaattatttacaatg

SEQ ID NO: 78727 - DNA, 27 bp, Artificial sequence
  SiRNA target sequence
aattatcaaagaaattatttacaatga

SEQ ID NO: 78728 - DNA, 27 bp, Artificial sequence
  SiRNA target sequence
attatcaaagaaattatttacaatgat

SEQ ID NO: 78729 - DNA, 27 bp, Artificial sequence
  SiRNA target sequence
ttatcaaagaaattatttacaatgatt

SEQ ID NO: 78730 - DNA, 27 bp, Artificial sequence
  SiRNA target sequence
tatcaaagaaattatttacaatgattt

SEQ ID NO: 78731 - DNA, 27 bp, Artificial sequence
  SiRNA target sequence
atcaaagaaattatttacaatgattta

SEQ ID NO: 78732 - DNA, 27 bp, Artificial sequence
  SiRNA target sequence
tcaaagaaattatttacaatgatttat

SEQ ID NO: 78733 - DNA, 27 bp, Artificial sequence
  SiRNA target sequence
caaagaaattatttacaatgatttatt

SEQ ID NO: 78734 - DNA, 27 bp, Artificial sequence
  SiRNA target sequence
aaagaaattatttacaatgatttatta

SEQ ID NO: 78735 - DNA, 27 bp, Artificial sequence
  SiRNA target sequence
aagaaattatttacaatgatttattaa

SEQ ID NO: 78736 - DNA, 27 bp, Artificial sequence
  SiRNA target sequence
agaaattatttacaatgatttattaaa

SEQ ID NO: 78737 - DNA, 27 bp, Artificial sequence
  SiRNA target sequence
gaaattatttacaatgatttattaaaa

SEQ ID NO: 78738 - DNA, 27 bp, Artificial sequence
  SiRNA target sequence
aaattatttacaatgatttattaaaaa

SEQ ID NO: 78739 - DNA, 27 bp, Artificial sequence
  SiRNA target sequence
aattatttacaatgatttattaaaaat

SEQ ID NO: 78740 - DNA, 27 bp, Artificial sequence
  SiRNA target sequence
attatttacaatgatttattaaaaata

SEQ ID NO: 78741 - DNA, 27 bp, Artificial sequence
  SiRNA target sequence
ttatttacaatgatttattaaaaataa

SEQ ID NO: 78742 - DNA, 27 bp, Artificial sequence
  SiRNA target sequence
tatttacaatgatttattaaaaataag

SEQ ID NO: 78743 - DNA, 27 bp, Artificial sequence
  SiRNA target sequence
atttacaatgatttattaaaaataaga

SEQ ID NO: 78744 - DNA, 27 bp, Artificial sequence
  SiRNA target sequence
tttacaatgatttattaaaaataagaa

SEQ ID NO: 78745 - DNA, 27 bp, Artificial sequence
  SiRNA target sequence
ttacaatgatttattaaaaataagaat

SEQ ID NO: 78746 - DNA, 27 bp, Artificial sequence
  SiRNA target sequence
tacaatgatttattaaaaataagaatg

SEQ ID NO: 78747 - DNA, 27 bp, Artificial sequence
  SiRNA target sequence
acaatgatttattaaaaataagaatgt

SEQ ID NO: 78748 - DNA, 27 bp, Artificial sequence
  SiRNA target sequence
caatgatttattaaaaataagaatgtt

SEQ ID NO: 78749 - DNA, 27 bp, Artificial sequence
  SiRNA target sequence
aatgatttattaaaaataagaatgttg

SEQ ID NO: 78750 - DNA, 27 bp, Artificial sequence
  SiRNA target sequence
atgatttattaaaaataagaatgttgc

SEQ ID NO: 78751 - DNA, 27 bp, Artificial sequence
  SiRNA target sequence
tgatttattaaaaataagaatgttgcg

SEQ ID NO: 78752 - DNA, 27 bp, Artificial sequence
  SiRNA target sequence
gatttattaaaaataagaatgttgcga

SEQ ID NO: 78753 - DNA, 27 bp, Artificial sequence
  SiRNA target sequence
atttattaaaaataagaatgttgcgat

SEQ ID NO: 78754 - DNA, 27 bp, Artificial sequence
  SiRNA target sequence
tttattaaaaataagaatgttgcgata

SEQ ID NO: 78755 - DNA, 27 bp, Artificial sequence
  SiRNA target sequence
ttattaaaaataagaatgttgcgatat

SEQ ID NO: 78756 - DNA, 27 bp, Artificial sequence
  SiRNA target sequence
tattaaaaataagaatgttgcgatatg

SEQ ID NO: 78757 - DNA, 27 bp, Artificial sequence
  SiRNA target sequence
attaaaaataagaatgttgcgatatgt

SEQ ID NO: 78758 - DNA, 27 bp, Artificial sequence
  SiRNA target sequence
ttaaaaataagaatgttgcgatatgtt

SEQ ID NO: 78759 - DNA, 27 bp, Artificial sequence
  SiRNA target sequence
taaaaataagaatgttgcgatatgtta

SEQ ID NO: 78760 - DNA, 27 bp, Artificial sequence
  SiRNA target sequence
aaaaataagaatgttgcgatatgttat

SEQ ID NO: 78761 - DNA, 27 bp, Artificial sequence
  SiRNA target sequence
aaaataagaatgttgcgatatgttatt

SEQ ID NO: 78762 - DNA, 27 bp, Artificial sequence
  SiRNA target sequence
aaataagaatgttgcgatatgttattg

SEQ ID NO: 78763 - DNA, 27 bp, Artificial sequence
  SiRNA target sequence
aataagaatgttgcgatatgttattgt

SEQ ID NO: 78764 - DNA, 27 bp, Artificial sequence
  SiRNA target sequence
ataagaatgttgcgatatgttattgta

SEQ ID NO: 78765 - DNA, 27 bp, Artificial sequence
  SiRNA target sequence
taagaatgttgcgatatgttattgtac

SEQ ID NO: 78766 - DNA, 27 bp, Artificial sequence
  SiRNA target sequence
aagaatgttgcgatatgttattgtacc

SEQ ID NO: 78767 - DNA, 27 bp, Artificial sequence
  SiRNA target sequence
agaatgttgcgatatgttattgtacca

SEQ ID NO: 78768 - DNA, 27 bp, Artificial sequence
  SiRNA target sequence
gaatgttgcgatatgttattgtaccaa

SEQ ID NO: 78769 - DNA, 27 bp, Artificial sequence
  SiRNA target sequence
aatgttgcgatatgttattgtaccaat

SEQ ID NO: 78770 - DNA, 27 bp, Artificial sequence
  SiRNA target sequence
atgttgcgatatgttattgtaccaata

SEQ ID NO: 78771 - DNA, 27 bp, Artificial sequence
  SiRNA target sequence
tgttgcgatatgttattgtaccaataa

SEQ ID NO: 78772 - DNA, 27 bp, Artificial sequence
  SiRNA target sequence
gttgcgatatgttattgtaccaataat

SEQ ID NO: 78773 - DNA, 27 bp, Artificial sequence
  SiRNA target sequence
ttgcgatatgttattgtaccaataata

SEQ ID NO: 78774 - DNA, 27 bp, Artificial sequence
  SiRNA target sequence
tgcgatatgttattgtaccaataatat

SEQ ID NO: 78775 - DNA, 27 bp, Artificial sequence
  SiRNA target sequence
gcgatatgttattgtaccaataatatt

SEQ ID NO: 78776 - DNA, 27 bp, Artificial sequence
  SiRNA target sequence
cgatatgttattgtaccaataatattt

SEQ ID NO: 78777 - DNA, 27 bp, Artificial sequence
  SiRNA target sequence
gatatgttattgtaccaataatatttt

SEQ ID NO: 78778 - DNA, 27 bp, Artificial sequence
  SiRNA target sequence
atatgttattgtaccaataatattttt

SEQ ID NO: 78779 - DNA, 27 bp, Artificial sequence
  SiRNA target sequence
tatgttattgtaccaataatattttta

SEQ ID NO: 78780 - DNA, 27 bp, Artificial sequence
  SiRNA target sequence
atgttattgtaccaataatatttttaa

SEQ ID NO: 78781 - DNA, 27 bp, Artificial sequence
  SiRNA target sequence
tgttattgtaccaataatatttttaac

SEQ ID NO: 78782 - DNA, 27 bp, Artificial sequence
  SiRNA target sequence
gttattgtaccaataatatttttaact

SEQ ID NO: 78783 - DNA, 27 bp, Artificial sequence
  SiRNA target sequence
ttattgtaccaataatatttttaacta

SEQ ID NO: 78784 - DNA, 27 bp, Artificial sequence
  SiRNA target sequence
tattgtaccaataatatttttaactat

SEQ ID NO: 78785 - DNA, 27 bp, Artificial sequence
  SiRNA target sequence
attgtaccaataatatttttaactata

SEQ ID NO: 78786 - DNA, 27 bp, Artificial sequence
  SiRNA target sequence
ttgtaccaataatatttttaactatat

SEQ ID NO: 78787 - DNA, 27 bp, Artificial sequence
  SiRNA target sequence
tgtaccaataatatttttaactatatt

SEQ ID NO: 78788 - DNA, 27 bp, Artificial sequence
  SiRNA target sequence
gtaccaataatatttttaactatattt

SEQ ID NO: 78789 - DNA, 27 bp, Artificial sequence
  SiRNA target sequence
taccaataatatttttaactatatttt

SEQ ID NO: 78790 - DNA, 27 bp, Artificial sequence
  SiRNA target sequence
accaataatatttttaactatatttta

SEQ ID NO: 78791 - DNA, 27 bp, Artificial sequence
  SiRNA target sequence
ccaataatatttttaactatattttac

SEQ ID NO: 78792 - DNA, 27 bp, Artificial sequence
  SiRNA target sequence
caataatatttttaactatattttaca

SEQ ID NO: 78793 - DNA, 27 bp, Artificial sequence
  SiRNA target sequence
aataatatttttaactatattttacac

SEQ ID NO: 78794 - DNA, 27 bp, Artificial sequence
  SiRNA target sequence
ataatatttttaactatattttacact

SEQ ID NO: 78795 - DNA, 27 bp, Artificial sequence
  SiRNA target sequence
taatatttttaactatattttacactg

SEQ ID NO: 78796 - DNA, 27 bp, Artificial sequence
  SiRNA target sequence
aatatttttaactatattttacactgt

SEQ ID NO: 78797 - DNA, 27 bp, Artificial sequence
  SiRNA target sequence
atatttttaactatattttacactgtt

SEQ ID NO: 78798 - DNA, 27 bp, Artificial sequence
  SiRNA target sequence
tatttttaactatattttacactgttt

SEQ ID NO: 78799 - DNA, 27 bp, Artificial sequence
  SiRNA target sequence
atttttaactatattttacactgtttt

SEQ ID NO: 78800 - DNA, 27 bp, Artificial sequence
  SiRNA target sequence
tttttaactatattttacactgtttta

SEQ ID NO: 78801 - DNA, 27 bp, Artificial sequence
  SiRNA target sequence
ttttaactatattttacactgttttag

SEQ ID NO: 78802 - DNA, 27 bp, Artificial sequence
  SiRNA target sequence
tttaactatattttacactgttttaga

SEQ ID NO: 78803 - DNA, 27 bp, Artificial sequence
  SiRNA target sequence
ttaactatattttacactgttttagag

SEQ ID NO: 78804 - DNA, 27 bp, Artificial sequence
  SiRNA target sequence
taactatattttacactgttttagaga

SEQ ID NO: 78805 - DNA, 27 bp, Artificial sequence
  SiRNA target sequence
aactatattttacactgttttagagat

SEQ ID NO: 78806 - DNA, 27 bp, Artificial sequence
  SiRNA target sequence
actatattttacactgttttagagata

SEQ ID NO: 78807 - DNA, 27 bp, Artificial sequence
  SiRNA target sequence
ctatattttacactgttttagagataa

SEQ ID NO: 78808 - DNA, 27 bp, Artificial sequence
  SiRNA target sequence
tatattttacactgttttagagataaa

SEQ ID NO: 78809 - DNA, 27 bp, Artificial sequence
  SiRNA target sequence
atattttacactgttttagagataaaa

SEQ ID NO: 78810 - DNA, 27 bp, Artificial sequence
  SiRNA target sequence
tattttacactgttttagagataaaaa

SEQ ID NO: 78811 - DNA, 27 bp, Artificial sequence
  SiRNA target sequence
attttacactgttttagagataaaaat

SEQ ID NO: 78812 - DNA, 27 bp, Artificial sequence
  SiRNA target sequence
ttttacactgttttagagataaaaata

SEQ ID NO: 78813 - DNA, 27 bp, Artificial sequence
  SiRNA target sequence
tttacactgttttagagataaaaataa

SEQ ID NO: 78814 - DNA, 27 bp, Artificial sequence
  SiRNA target sequence
ttacactgttttagagataaaaataag

SEQ ID NO: 78815 - DNA, 27 bp, Artificial sequence
  SiRNA target sequence
tacactgttttagagataaaaataagt

SEQ ID NO: 78816 - DNA, 27 bp, Artificial sequence
  SiRNA target sequence
acactgttttagagataaaaataagta

SEQ ID NO: 78817 - DNA, 27 bp, Artificial sequence
  SiRNA target sequence
cactgttttagagataaaaataagtac

SEQ ID NO: 78818 - DNA, 27 bp, Artificial sequence
  SiRNA target sequence
actgttttagagataaaaataagtaca

SEQ ID NO: 78819 - DNA, 27 bp, Artificial sequence
  SiRNA target sequence
ctgttttagagataaaaataagtacat

SEQ ID NO: 78820 - DNA, 27 bp, Artificial sequence
  SiRNA target sequence
tgttttagagataaaaataagtacatt

SEQ ID NO: 78821 - DNA, 27 bp, Artificial sequence
  SiRNA target sequence
gttttagagataaaaataagtacatta

SEQ ID NO: 78822 - DNA, 27 bp, Artificial sequence
  SiRNA target sequence
ttttagagataaaaataagtacattag

SEQ ID NO: 78823 - DNA, 27 bp, Artificial sequence
  SiRNA target sequence
tttagagataaaaataagtacattagt

SEQ ID NO: 78824 - DNA, 27 bp, Artificial sequence
  SiRNA target sequence
ttagagataaaaataagtacattagta

SEQ ID NO: 78825 - DNA, 27 bp, Artificial sequence
  SiRNA target sequence
tagagataaaaataagtacattagtaa

SEQ ID NO: 78826 - DNA, 27 bp, Artificial sequence
  SiRNA target sequence
agagataaaaataagtacattagtaaa

SEQ ID NO: 78827 - DNA, 27 bp, Artificial sequence
  SiRNA target sequence
gagataaaaataagtacattagtaaag

SEQ ID NO: 78828 - DNA, 27 bp, Artificial sequence
  SiRNA target sequence
agataaaaataagtacattagtaaaga

SEQ ID NO: 78829 - DNA, 27 bp, Artificial sequence
  SiRNA target sequence
gataaaaataagtacattagtaaagaa

SEQ ID NO: 78830 - DNA, 27 bp, Artificial sequence
  SiRNA target sequence
ataaaaataagtacattagtaaagaat

SEQ ID NO: 78831 - DNA, 27 bp, Artificial sequence
  SiRNA target sequence
taaaaataagtacattagtaaagaatc

SEQ ID NO: 78832 - DNA, 27 bp, Artificial sequence
  SiRNA target sequence
aaaaataagtacattagtaaagaatct

SEQ ID NO: 78833 - DNA, 27 bp, Artificial sequence
  SiRNA target sequence
aaaataagtacattagtaaagaatctt

SEQ ID NO: 78834 - DNA, 27 bp, Artificial sequence
  SiRNA target sequence
aaataagtacattagtaaagaatctta

SEQ ID NO: 78835 - DNA, 27 bp, Artificial sequence
  SiRNA target sequence
aataagtacattagtaaagaatcttaa

SEQ ID NO: 78836 - DNA, 27 bp, Artificial sequence
  SiRNA target sequence
ataagtacattagtaaagaatcttaat

SEQ ID NO: 78837 - DNA, 27 bp, Artificial sequence
  SiRNA target sequence
taagtacattagtaaagaatcttaatc

SEQ ID NO: 78838 - DNA, 27 bp, Artificial sequence
  SiRNA target sequence
aagtacattagtaaagaatcttaatca

SEQ ID NO: 78839 - DNA, 27 bp, Artificial sequence
  SiRNA target sequence
agtacattagtaaagaatcttaatcaa

SEQ ID NO: 78840 - DNA, 27 bp, Artificial sequence
  SiRNA target sequence
gtacattagtaaagaatcttaatcaat

SEQ ID NO: 78841 - DNA, 27 bp, Artificial sequence
  SiRNA target sequence
tacattagtaaagaatcttaatcaatc

SEQ ID NO: 78842 - DNA, 27 bp, Artificial sequence
  SiRNA target sequence
acattagtaaagaatcttaatcaatct

SEQ ID NO: 78843 - DNA, 27 bp, Artificial sequence
  SiRNA target sequence
cattagtaaagaatcttaatcaatcta

SEQ ID NO: 78844 - DNA, 27 bp, Artificial sequence
  SiRNA target sequence
attagtaaagaatcttaatcaatctat

SEQ ID NO: 78845 - DNA, 27 bp, Artificial sequence
  SiRNA target sequence
ttagtaaagaatcttaatcaatctatc

SEQ ID NO: 78846 - DNA, 27 bp, Artificial sequence
  SiRNA target sequence
tagtaaagaatcttaatcaatctatcg

SEQ ID NO: 78847 - DNA, 27 bp, Artificial sequence
  SiRNA target sequence
agtaaagaatcttaatcaatctatcgc

SEQ ID NO: 78848 - DNA, 27 bp, Artificial sequence
  SiRNA target sequence
gtaaagaatcttaatcaatctatcgca

SEQ ID NO: 78849 - DNA, 27 bp, Artificial sequence
  SiRNA target sequence
taaagaatcttaatcaatctatcgcaa

SEQ ID NO: 78850 - DNA, 27 bp, Artificial sequence
  SiRNA target sequence
aaagaatcttaatcaatctatcgcaaa

SEQ ID NO: 78851 - DNA, 27 bp, Artificial sequence
  SiRNA target sequence
aagaatcttaatcaatctatcgcaaat

SEQ ID NO: 78852 - DNA, 27 bp, Artificial sequence
  SiRNA target sequence
agaatcttaatcaatctatcgcaaatc

SEQ ID NO: 78853 - DNA, 27 bp, Artificial sequence
  SiRNA target sequence
gaatcttaatcaatctatcgcaaatcg

SEQ ID NO: 78854 - DNA, 27 bp, Artificial sequence
  SiRNA target sequence
aatcttaatcaatctatcgcaaatcga

SEQ ID NO: 78855 - DNA, 27 bp, Artificial sequence
  SiRNA target sequence
atcttaatcaatctatcgcaaatcgaa

SEQ ID NO: 78856 - DNA, 27 bp, Artificial sequence
  SiRNA target sequence
tcttaatcaatctatcgcaaatcgaaa

SEQ ID NO: 78857 - DNA, 27 bp, Artificial sequence
  SiRNA target sequence
cttaatcaatctatcgcaaatcgaaaa

SEQ ID NO: 78858 - DNA, 27 bp, Artificial sequence
  SiRNA target sequence
ttaatcaatctatcgcaaatcgaaaag

SEQ ID NO: 78859 - DNA, 27 bp, Artificial sequence
  SiRNA target sequence
taatcaatctatcgcaaatcgaaaagg

SEQ ID NO: 78860 - DNA, 27 bp, Artificial sequence
  SiRNA target sequence
aatcaatctatcgcaaatcgaaaaggt

SEQ ID NO: 78861 - DNA, 27 bp, Artificial sequence
  SiRNA target sequence
atcaatctatcgcaaatcgaaaaggtg

SEQ ID NO: 78862 - DNA, 27 bp, Artificial sequence
  SiRNA target sequence
tcaatctatcgcaaatcgaaaaggtga

SEQ ID NO: 78863 - DNA, 27 bp, Artificial sequence
  SiRNA target sequence
caatctatcgcaaatcgaaaaggtgaa

SEQ ID NO: 78864 - DNA, 27 bp, Artificial sequence
  SiRNA target sequence
aatctatcgcaaatcgaaaaggtgaac

SEQ ID NO: 78865 - DNA, 27 bp, Artificial sequence
  SiRNA target sequence
atctatcgcaaatcgaaaaggtgaaca

SEQ ID NO: 78866 - DNA, 27 bp, Artificial sequence
  SiRNA target sequence
tctatcgcaaatcgaaaaggtgaacac

SEQ ID NO: 78867 - DNA, 27 bp, Artificial sequence
  SiRNA target sequence
ctatcgcaaatcgaaaaggtgaacaca

SEQ ID NO: 78868 - DNA, 27 bp, Artificial sequence
  SiRNA target sequence
tatcgcaaatcgaaaaggtgaacacac

SEQ ID NO: 78869 - DNA, 27 bp, Artificial sequence
  SiRNA target sequence
atcgcaaatcgaaaaggtgaacacaca

SEQ ID NO: 78870 - DNA, 27 bp, Artificial sequence
  SiRNA target sequence
tcgcaaatcgaaaaggtgaacacacag

SEQ ID NO: 78871 - DNA, 27 bp, Artificial sequence
  SiRNA target sequence
cgcaaatcgaaaaggtgaacacacagc

SEQ ID NO: 78872 - DNA, 27 bp, Artificial sequence
  SiRNA target sequence
gcaaatcgaaaaggtgaacacacagca

SEQ ID NO: 78873 - DNA, 27 bp, Artificial sequence
  SiRNA target sequence
caaatcgaaaaggtgaacacacagcac

SEQ ID NO: 78874 - DNA, 27 bp, Artificial sequence
  SiRNA target sequence
aaatcgaaaaggtgaacacacagcact

SEQ ID NO: 78875 - DNA, 27 bp, Artificial sequence
  SiRNA target sequence
aatcgaaaaggtgaacacacagcactt

SEQ ID NO: 78876 - DNA, 27 bp, Artificial sequence
  SiRNA target sequence
atcgaaaaggtgaacacacagcacttg

SEQ ID NO: 78877 - DNA, 27 bp, Artificial sequence
  SiRNA target sequence
tcgaaaaggtgaacacacagcacttga

SEQ ID NO: 78878 - DNA, 27 bp, Artificial sequence
  SiRNA target sequence
cgaaaaggtgaacacacagcacttgaa

SEQ ID NO: 78879 - DNA, 27 bp, Artificial sequence
  SiRNA target sequence
gaaaaggtgaacacacagcacttgaaa

SEQ ID NO: 78880 - DNA, 27 bp, Artificial sequence
  SiRNA target sequence
aaaaggtgaacacacagcacttgaaag

SEQ ID NO: 78881 - DNA, 27 bp, Artificial sequence
  SiRNA target sequence
aaaggtgaacacacagcacttgaaaga

SEQ ID NO: 78882 - DNA, 27 bp, Artificial sequence
  SiRNA target sequence
aaggtgaacacacagcacttgaaagat

SEQ ID NO: 78883 - DNA, 27 bp, Artificial sequence
  SiRNA target sequence
aggtgaacacacagcacttgaaagatt

SEQ ID NO: 78884 - DNA, 27 bp, Artificial sequence
  SiRNA target sequence
ggtgaacacacagcacttgaaagattt

SEQ ID NO: 78885 - DNA, 27 bp, Artificial sequence
  SiRNA target sequence
gtgaacacacagcacttgaaagatttg

SEQ ID NO: 78886 - DNA, 27 bp, Artificial sequence
  SiRNA target sequence
tgaacacacagcacttgaaagatttgt

SEQ ID NO: 78887 - DNA, 27 bp, Artificial sequence
  SiRNA target sequence
gaacacacagcacttgaaagatttgtg

SEQ ID NO: 78888 - DNA, 27 bp, Artificial sequence
  SiRNA target sequence
aacacacagcacttgaaagatttgtgt

SEQ ID NO: 78889 - DNA, 27 bp, Artificial sequence
  SiRNA target sequence
acacacagcacttgaaagatttgtgtt

SEQ ID NO: 78890 - DNA, 27 bp, Artificial sequence
  SiRNA target sequence
cacacagcacttgaaagatttgtgtta

SEQ ID NO: 78891 - DNA, 27 bp, Artificial sequence
  SiRNA target sequence
acacagcacttgaaagatttgtgttac

SEQ ID NO: 78892 - DNA, 27 bp, Artificial sequence
  SiRNA target sequence
cacagcacttgaaagatttgtgttaca

SEQ ID NO: 78893 - DNA, 27 bp, Artificial sequence
  SiRNA target sequence
acagcacttgaaagatttgtgttacag

SEQ ID NO: 78894 - DNA, 27 bp, Artificial sequence
  SiRNA target sequence
cagcacttgaaagatttgtgttacagt

SEQ ID NO: 78895 - DNA, 27 bp, Artificial sequence
  SiRNA target sequence
agcacttgaaagatttgtgttacagtc

SEQ ID NO: 78896 - DNA, 27 bp, Artificial sequence
  SiRNA target sequence
gcacttgaaagatttgtgttacagtca

SEQ ID NO: 78897 - DNA, 27 bp, Artificial sequence
  SiRNA target sequence
cacttgaaagatttgtgttacagtcac

SEQ ID NO: 78898 - DNA, 27 bp, Artificial sequence
  SiRNA target sequence
acttgaaagatttgtgttacagtcact

SEQ ID NO: 78899 - DNA, 27 bp, Artificial sequence
  SiRNA target sequence
cttgaaagatttgtgttacagtcactc

SEQ ID NO: 78900 - DNA, 27 bp, Artificial sequence
  SiRNA target sequence
ttgaaagatttgtgttacagtcactct

SEQ ID NO: 78901 - DNA, 27 bp, Artificial sequence
  SiRNA target sequence
tgaaagatttgtgttacagtcactctt

SEQ ID NO: 78902 - DNA, 27 bp, Artificial sequence
  SiRNA target sequence
gaaagatttgtgttacagtcactctta

SEQ ID NO: 78903 - DNA, 27 bp, Artificial sequence
  SiRNA target sequence
aaagatttgtgttacagtcactcttag

SEQ ID NO: 78904 - DNA, 27 bp, Artificial sequence
  SiRNA target sequence
aagatttgtgttacagtcactcttagt

SEQ ID NO: 78905 - DNA, 27 bp, Artificial sequence
  SiRNA target sequence
agatttgtgttacagtcactcttagtg

SEQ ID NO: 78906 - DNA, 27 bp, Artificial sequence
  SiRNA target sequence
gatttgtgttacagtcactcttagtgg

SEQ ID NO: 78907 - DNA, 27 bp, Artificial sequence
  SiRNA target sequence
atttgtgttacagtcactcttagtggc

SEQ ID NO: 78908 - DNA, 27 bp, Artificial sequence
  SiRNA target sequence
tttgtgttacagtcactcttagtggct

SEQ ID NO: 78909 - DNA, 27 bp, Artificial sequence
  SiRNA target sequence
ttgtgttacagtcactcttagtggctg

SEQ ID NO: 78910 - DNA, 27 bp, Artificial sequence
  SiRNA target sequence
tgtgttacagtcactcttagtggctgt

SEQ ID NO: 78911 - DNA, 27 bp, Artificial sequence
  SiRNA target sequence
gtgttacagtcactcttagtggctgta

SEQ ID NO: 78912 - DNA, 27 bp, Artificial sequence
  SiRNA target sequence
tgttacagtcactcttagtggctgtat

SEQ ID NO: 78913 - DNA, 27 bp, Artificial sequence
  SiRNA target sequence
gttacagtcactcttagtggctgtatt

SEQ ID NO: 78914 - DNA, 27 bp, Artificial sequence
  SiRNA target sequence
ttacagtcactcttagtggctgtattg

SEQ ID NO: 78915 - DNA, 27 bp, Artificial sequence
  SiRNA target sequence
tacagtcactcttagtggctgtattga

SEQ ID NO: 78916 - DNA, 27 bp, Artificial sequence
  SiRNA target sequence
acagtcactcttagtggctgtattgac

SEQ ID NO: 78917 - DNA, 27 bp, Artificial sequence
  SiRNA target sequence
cagtcactcttagtggctgtattgacc

SEQ ID NO: 78918 - DNA, 27 bp, Artificial sequence
  SiRNA target sequence
agtcactcttagtggctgtattgaccg

SEQ ID NO: 78919 - DNA, 27 bp, Artificial sequence
  SiRNA target sequence
gtcactcttagtggctgtattgaccga

SEQ ID NO: 78920 - DNA, 27 bp, Artificial sequence
  SiRNA target sequence
tcactcttagtggctgtattgaccgaa

SEQ ID NO: 78921 - DNA, 27 bp, Artificial sequence
  SiRNA target sequence
cactcttagtggctgtattgaccgaac

SEQ ID NO: 78922 - DNA, 27 bp, Artificial sequence
  SiRNA target sequence
actcttagtggctgtattgaccgaact

SEQ ID NO: 78923 - DNA, 27 bp, Artificial sequence
  SiRNA target sequence
ctcttagtggctgtattgaccgaactt

SEQ ID NO: 78924 - DNA, 27 bp, Artificial sequence
  SiRNA target sequence
tcttagtggctgtattgaccgaactta

SEQ ID NO: 78925 - DNA, 27 bp, Artificial sequence
  SiRNA target sequence
cttagtggctgtattgaccgaacttaa

SEQ ID NO: 78926 - DNA, 27 bp, Artificial sequence
  SiRNA target sequence
ttagtggctgtattgaccgaacttaat

SEQ ID NO: 78927 - DNA, 27 bp, Artificial sequence
  SiRNA target sequence
tagtggctgtattgaccgaacttaatg

SEQ ID NO: 78928 - DNA, 27 bp, Artificial sequence
  SiRNA target sequence
agtggctgtattgaccgaacttaatgg

SEQ ID NO: 78929 - DNA, 27 bp, Artificial sequence
  SiRNA target sequence
gtggctgtattgaccgaacttaatgga

SEQ ID NO: 78930 - DNA, 27 bp, Artificial sequence
  SiRNA target sequence
tggctgtattgaccgaacttaatggat

SEQ ID NO: 78931 - DNA, 27 bp, Artificial sequence
  SiRNA target sequence
ggctgtattgaccgaacttaatggatt

SEQ ID NO: 78932 - DNA, 27 bp, Artificial sequence
  SiRNA target sequence
gctgtattgaccgaacttaatggattt

SEQ ID NO: 78933 - DNA, 27 bp, Artificial sequence
  SiRNA target sequence
ctgtattgaccgaacttaatggattta

SEQ ID NO: 78934 - DNA, 27 bp, Artificial sequence
  SiRNA target sequence
tgtattgaccgaacttaatggatttat

SEQ ID NO: 78935 - DNA, 27 bp, Artificial sequence
  SiRNA target sequence
gtattgaccgaacttaatggatttatt

SEQ ID NO: 78936 - DNA, 27 bp, Artificial sequence
  SiRNA target sequence
tattgaccgaacttaatggatttattt

SEQ ID NO: 78937 - DNA, 27 bp, Artificial sequence
  SiRNA target sequence
attgaccgaacttaatggatttatttt

SEQ ID NO: 78938 - DNA, 27 bp, Artificial sequence
  SiRNA target sequence
ttgaccgaacttaatggatttattttt

SEQ ID NO: 78939 - DNA, 27 bp, Artificial sequence
  SiRNA target sequence
tgaccgaacttaatggatttattttta

SEQ ID NO: 78940 - DNA, 27 bp, Artificial sequence
  SiRNA target sequence
gaccgaacttaatggatttatttttac

SEQ ID NO: 78941 - DNA, 27 bp, Artificial sequence
  SiRNA target sequence
accgaacttaatggatttatttttaca

SEQ ID NO: 78942 - DNA, 27 bp, Artificial sequence
  SiRNA target sequence
ccgaacttaatggatttatttttacag

SEQ ID NO: 78943 - DNA, 27 bp, Artificial sequence
  SiRNA target sequence
cgaacttaatggatttatttttacagg

SEQ ID NO: 78944 - DNA, 27 bp, Artificial sequence
  SiRNA target sequence
gaacttaatggatttatttttacaggt

SEQ ID NO: 78945 - DNA, 27 bp, Artificial sequence
  SiRNA target sequence
aacttaatggatttatttttacaggtg

SEQ ID NO: 78946 - DNA, 27 bp, Artificial sequence
  SiRNA target sequence
acttaatggatttatttttacaggtgt

SEQ ID NO: 78947 - DNA, 27 bp, Artificial sequence
  SiRNA target sequence
cttaatggatttatttttacaggtgta

SEQ ID NO: 78948 - DNA, 27 bp, Artificial sequence
  SiRNA target sequence
ttaatggatttatttttacaggtgtag

SEQ ID NO: 78949 - DNA, 27 bp, Artificial sequence
  SiRNA target sequence
taatggatttatttttacaggtgtagt

SEQ ID NO: 78950 - DNA, 27 bp, Artificial sequence
  SiRNA target sequence
aatggatttatttttacaggtgtagtg

SEQ ID NO: 78951 - DNA, 27 bp, Artificial sequence
  SiRNA target sequence
atggatttatttttacaggtgtagtgc

SEQ ID NO: 78952 - DNA, 27 bp, Artificial sequence
  SiRNA target sequence
tggatttatttttacaggtgtagtgca

SEQ ID NO: 78953 - DNA, 27 bp, Artificial sequence
  SiRNA target sequence
ggatttatttttacaggtgtagtgcaa

SEQ ID NO: 78954 - DNA, 27 bp, Artificial sequence
  SiRNA target sequence
gatttatttttacaggtgtagtgcaat

SEQ ID NO: 78955 - DNA, 27 bp, Artificial sequence
  SiRNA target sequence
atttatttttacaggtgtagtgcaata

SEQ ID NO: 78956 - DNA, 27 bp, Artificial sequence
  SiRNA target sequence
tttatttttacaggtgtagtgcaatat

SEQ ID NO: 78957 - DNA, 27 bp, Artificial sequence
  SiRNA target sequence
ttatttttacaggtgtagtgcaatata

SEQ ID NO: 78958 - DNA, 27 bp, Artificial sequence
  SiRNA target sequence
tatttttacaggtgtagtgcaatatat

SEQ ID NO: 78959 - DNA, 27 bp, Artificial sequence
  SiRNA target sequence
atttttacaggtgtagtgcaatatatt

SEQ ID NO: 78960 - DNA, 27 bp, Artificial sequence
  SiRNA target sequence
tttttacaggtgtagtgcaatatattt

SEQ ID NO: 78961 - DNA, 27 bp, Artificial sequence
  SiRNA target sequence
ttttacaggtgtagtgcaatatattta

SEQ ID NO: 78962 - DNA, 27 bp, Artificial sequence
  SiRNA target sequence
tttacaggtgtagtgcaatatatttat

SEQ ID NO: 78963 - DNA, 27 bp, Artificial sequence
  SiRNA target sequence
ttacaggtgtagtgcaatatatttata

SEQ ID NO: 78964 - DNA, 27 bp, Artificial sequence
  SiRNA target sequence
tacaggtgtagtgcaatatatttatag

SEQ ID NO: 78965 - DNA, 27 bp, Artificial sequence
  SiRNA target sequence
acaggtgtagtgcaatatatttataga

SEQ ID NO: 78966 - DNA, 27 bp, Artificial sequence
  SiRNA target sequence
caggtgtagtgcaatatatttatagaa

SEQ ID NO: 78967 - DNA, 27 bp, Artificial sequence
  SiRNA target sequence
aggtgtagtgcaatatatttatagaaa

SEQ ID NO: 78968 - DNA, 27 bp, Artificial sequence
  SiRNA target sequence
ggtgtagtgcaatatatttatagaaat

SEQ ID NO: 78969 - DNA, 27 bp, Artificial sequence
  SiRNA target sequence
gtgtagtgcaatatatttatagaaata

SEQ ID NO: 78970 - DNA, 27 bp, Artificial sequence
  SiRNA target sequence
tgtagtgcaatatatttatagaaatac

SEQ ID NO: 78971 - DNA, 27 bp, Artificial sequence
  SiRNA target sequence
gtagtgcaatatatttatagaaatacg

SEQ ID NO: 78972 - DNA, 27 bp, Artificial sequence
  SiRNA target sequence
tagtgcaatatatttatagaaatacgg

SEQ ID NO: 78973 - DNA, 27 bp, Artificial sequence
  SiRNA target sequence
agtgcaatatatttatagaaatacggc

SEQ ID NO: 78974 - DNA, 27 bp, Artificial sequence
  SiRNA target sequence
gtgcaatatatttatagaaatacggca

SEQ ID NO: 78975 - DNA, 27 bp, Artificial sequence
  SiRNA target sequence
tgcaatatatttatagaaatacggcaa

SEQ ID NO: 78976 - DNA, 27 bp, Artificial sequence
  SiRNA target sequence
gcaatatatttatagaaatacggcaaa

SEQ ID NO: 78977 - DNA, 27 bp, Artificial sequence
  SiRNA target sequence
caatatatttatagaaatacggcaaaa

SEQ ID NO: 78978 - DNA, 27 bp, Artificial sequence
  SiRNA target sequence
aatatatttatagaaatacggcaaaat

SEQ ID NO: 78979 - DNA, 27 bp, Artificial sequence
  SiRNA target sequence
atatatttatagaaatacggcaaaatc

SEQ ID NO: 78980 - DNA, 27 bp, Artificial sequence
  SiRNA target sequence
tatatttatagaaatacggcaaaatct

SEQ ID NO: 78981 - DNA, 27 bp, Artificial sequence
  SiRNA target sequence
atatttatagaaatacggcaaaatcta

SEQ ID NO: 78982 - DNA, 27 bp, Artificial sequence
  SiRNA target sequence
tatttatagaaatacggcaaaatctac

SEQ ID NO: 78983 - DNA, 27 bp, Artificial sequence
  SiRNA target sequence
atttatagaaatacggcaaaatctaca

SEQ ID NO: 78984 - DNA, 27 bp, Artificial sequence
  SiRNA target sequence
tttatagaaatacggcaaaatctacat

SEQ ID NO: 78985 - DNA, 27 bp, Artificial sequence
  SiRNA target sequence
ttatagaaatacggcaaaatctacatt

SEQ ID NO: 78986 - DNA, 27 bp, Artificial sequence
  SiRNA target sequence
tatagaaatacggcaaaatctacattc

SEQ ID NO: 78987 - DNA, 27 bp, Artificial sequence
  SiRNA target sequence
atagaaatacggcaaaatctacattca

SEQ ID NO: 78988 - DNA, 27 bp, Artificial sequence
  SiRNA target sequence
tagaaatacggcaaaatctacattcaa

SEQ ID NO: 78989 - DNA, 27 bp, Artificial sequence
  SiRNA target sequence
agaaatacggcaaaatctacattcaaa

SEQ ID NO: 78990 - DNA, 27 bp, Artificial sequence
  SiRNA target sequence
gaaatacggcaaaatctacattcaaag

SEQ ID NO: 78991 - DNA, 27 bp, Artificial sequence
  SiRNA target sequence
aaatacggcaaaatctacattcaaagg

SEQ ID NO: 78992 - DNA, 27 bp, Artificial sequence
  SiRNA target sequence
aatacggcaaaatctacattcaaaggc

SEQ ID NO: 78993 - DNA, 27 bp, Artificial sequence
  SiRNA target sequence
atacggcaaaatctacattcaaaggct

SEQ ID NO: 78994 - DNA, 27 bp, Artificial sequence
  SiRNA target sequence
tacggcaaaatctacattcaaaggctt

SEQ ID NO: 78995 - DNA, 27 bp, Artificial sequence
  SiRNA target sequence
acggcaaaatctacattcaaaggcttc

SEQ ID NO: 78996 - DNA, 27 bp, Artificial sequence
  SiRNA target sequence
cggcaaaatctacattcaaaggcttca

SEQ ID NO: 78997 - DNA, 27 bp, Artificial sequence
  SiRNA target sequence
ggcaaaatctacattcaaaggcttcat

SEQ ID NO: 78998 - DNA, 27 bp, Artificial sequence
  SiRNA target sequence
gcaaaatctacattcaaaggcttcatt

SEQ ID NO: 78999 - DNA, 27 bp, Artificial sequence
  SiRNA target sequence
caaaatctacattcaaaggcttcattt

SEQ ID NO: 79000 - DNA, 27 bp, Artificial sequence
  SiRNA target sequence
aaaatctacattcaaaggcttcatttc

SEQ ID NO: 79001 - DNA, 27 bp, Artificial sequence
  SiRNA target sequence
aaatctacattcaaaggcttcatttct

SEQ ID NO: 79002 - DNA, 27 bp, Artificial sequence
  SiRNA target sequence
aatctacattcaaaggcttcatttctc

SEQ ID NO: 79003 - DNA, 27 bp, Artificial sequence
  SiRNA target sequence
atctacattcaaaggcttcatttctct

SEQ ID NO: 79004 - DNA, 27 bp, Artificial sequence
  SiRNA target sequence
tctacattcaaaggcttcatttctctt

SEQ ID NO: 79005 - DNA, 27 bp, Artificial sequence
  SiRNA target sequence
ctacattcaaaggcttcatttctcttt

SEQ ID NO: 79006 - DNA, 27 bp, Artificial sequence
  SiRNA target sequence
tacattcaaaggcttcatttctctttc

SEQ ID NO: 79007 - DNA, 27 bp, Artificial sequence
  SiRNA target sequence
acattcaaaggcttcatttctctttca

SEQ ID NO: 79008 - DNA, 27 bp, Artificial sequence
  SiRNA target sequence
cattcaaaggcttcatttctctttcac

SEQ ID NO: 79009 - DNA, 27 bp, Artificial sequence
  SiRNA target sequence
attcaaaggcttcatttctctttcacc

SEQ ID NO: 79010 - DNA, 27 bp, Artificial sequence
  SiRNA target sequence
ttcaaaggcttcatttctctttcacct

SEQ ID NO: 79011 - DNA, 27 bp, Artificial sequence
  SiRNA target sequence
tcaaaggcttcatttctctttcaccta

SEQ ID NO: 79012 - DNA, 27 bp, Artificial sequence
  SiRNA target sequence
caaaggcttcatttctctttcacctaa

SEQ ID NO: 79013 - DNA, 27 bp, Artificial sequence
  SiRNA target sequence
aaaggcttcatttctctttcacctaaa

SEQ ID NO: 79014 - DNA, 27 bp, Artificial sequence
  SiRNA target sequence
aaggcttcatttctctttcacctaaaa

SEQ ID NO: 79015 - DNA, 27 bp, Artificial sequence
  SiRNA target sequence
aggcttcatttctctttcacctaaaaa

SEQ ID NO: 79016 - DNA, 27 bp, Artificial sequence
  SiRNA target sequence
ggcttcatttctctttcacctaaaaat

SEQ ID NO: 79017 - DNA, 27 bp, Artificial sequence
  SiRNA target sequence
gcttcatttctctttcacctaaaaatt

SEQ ID NO: 79018 - DNA, 27 bp, Artificial sequence
  SiRNA target sequence
cttcatttctctttcacctaaaaattt

SEQ ID NO: 79019 - DNA, 27 bp, Artificial sequence
  SiRNA target sequence
ttcatttctctttcacctaaaaatttt

SEQ ID NO: 79020 - DNA, 27 bp, Artificial sequence
  SiRNA target sequence
tcatttctctttcacctaaaaatttta

SEQ ID NO: 79021 - DNA, 27 bp, Artificial sequence
  SiRNA target sequence
catttctctttcacctaaaaattttag

SEQ ID NO: 79022 - DNA, 27 bp, Artificial sequence
  SiRNA target sequence
atttctctttcacctaaaaattttagt

SEQ ID NO: 79023 - DNA, 27 bp, Artificial sequence
  SiRNA target sequence
tttctctttcacctaaaaattttagta

SEQ ID NO: 79024 - DNA, 27 bp, Artificial sequence
  SiRNA target sequence
ttctctttcacctaaaaattttagtac

SEQ ID NO: 79025 - DNA, 27 bp, Artificial sequence
  SiRNA target sequence
tctctttcacctaaaaattttagtacc

SEQ ID NO: 79026 - DNA, 27 bp, Artificial sequence
  SiRNA target sequence
ctctttcacctaaaaattttagtacca

SEQ ID NO: 79027 - DNA, 27 bp, Artificial sequence
  SiRNA target sequence
tctttcacctaaaaattttagtaccat

SEQ ID NO: 79028 - DNA, 27 bp, Artificial sequence
  SiRNA target sequence
ctttcacctaaaaattttagtaccata

SEQ ID NO: 79029 - DNA, 27 bp, Artificial sequence
  SiRNA target sequence
tttcacctaaaaattttagtaccatag

SEQ ID NO: 79030 - DNA, 27 bp, Artificial sequence
  SiRNA target sequence
ttcacctaaaaattttagtaccatagg

SEQ ID NO: 79031 - DNA, 27 bp, Artificial sequence
  SiRNA target sequence
tcacctaaaaattttagtaccataggt

SEQ ID NO: 79032 - DNA, 27 bp, Artificial sequence
  SiRNA target sequence
cacctaaaaattttagtaccataggtg

SEQ ID NO: 79033 - DNA, 27 bp, Artificial sequence
  SiRNA target sequence
acctaaaaattttagtaccataggtgg

SEQ ID NO: 79034 - DNA, 27 bp, Artificial sequence
  SiRNA target sequence
cctaaaaattttagtaccataggtggc

SEQ ID NO: 79035 - DNA, 27 bp, Artificial sequence
  SiRNA target sequence
ctaaaaattttagtaccataggtggcg

SEQ ID NO: 79036 - DNA, 27 bp, Artificial sequence
  SiRNA target sequence
taaaaattttagtaccataggtggcgg

SEQ ID NO: 79037 - DNA, 27 bp, Artificial sequence
  SiRNA target sequence
aaaaattttagtaccataggtggcgga

SEQ ID NO: 79038 - DNA, 27 bp, Artificial sequence
  SiRNA target sequence
aaaattttagtaccataggtggcggag

SEQ ID NO: 79039 - DNA, 27 bp, Artificial sequence
  SiRNA target sequence
aaattttagtaccataggtggcggaga

SEQ ID NO: 79040 - DNA, 27 bp, Artificial sequence
  SiRNA target sequence
aattttagtaccataggtggcggagaa

SEQ ID NO: 79041 - DNA, 27 bp, Artificial sequence
  SiRNA target sequence
attttagtaccataggtggcggagaaa

SEQ ID NO: 79042 - DNA, 27 bp, Artificial sequence
  SiRNA target sequence
ttttagtaccataggtggcggagaaat

SEQ ID NO: 79043 - DNA, 27 bp, Artificial sequence
  SiRNA target sequence
tttagtaccataggtggcggagaaatt

SEQ ID NO: 79044 - DNA, 27 bp, Artificial sequence
  SiRNA target sequence
ttagtaccataggtggcggagaaattc

SEQ ID NO: 79045 - DNA, 27 bp, Artificial sequence
  SiRNA target sequence
tagtaccataggtggcggagaaattca

SEQ ID NO: 79046 - DNA, 27 bp, Artificial sequence
  SiRNA target sequence
agtaccataggtggcggagaaattcaa

SEQ ID NO: 79047 - DNA, 27 bp, Artificial sequence
  SiRNA target sequence
gtaccataggtggcggagaaattcaaa

SEQ ID NO: 79048 - DNA, 27 bp, Artificial sequence
  SiRNA target sequence
taccataggtggcggagaaattcaaac

SEQ ID NO: 79049 - DNA, 27 bp, Artificial sequence
  SiRNA target sequence
accataggtggcggagaaattcaaaca

SEQ ID NO: 79050 - DNA, 27 bp, Artificial sequence
  SiRNA target sequence
ccataggtggcggagaaattcaaacaa

SEQ ID NO: 79051 - DNA, 27 bp, Artificial sequence
  SiRNA target sequence
cataggtggcggagaaattcaaacaat

SEQ ID NO: 79052 - DNA, 27 bp, Artificial sequence
  SiRNA target sequence
ataggtggcggagaaattcaaacaata

SEQ ID NO: 79053 - DNA, 27 bp, Artificial sequence
  SiRNA target sequence
taggtggcggagaaattcaaacaataa

SEQ ID NO: 79054 - DNA, 27 bp, Artificial sequence
  SiRNA target sequence
aggtggcggagaaattcaaacaataat

SEQ ID NO: 79055 - DNA, 27 bp, Artificial sequence
  SiRNA target sequence
ggtggcggagaaattcaaacaataata

SEQ ID NO: 79056 - DNA, 27 bp, Artificial sequence
  SiRNA target sequence
gtggcggagaaattcaaacaataatag

SEQ ID NO: 79057 - DNA, 27 bp, Artificial sequence
  SiRNA target sequence
tggcggagaaattcaaacaataataga

SEQ ID NO: 79058 - DNA, 27 bp, Artificial sequence
  SiRNA target sequence
ggcggagaaattcaaacaataatagat

SEQ ID NO: 79059 - DNA, 27 bp, Artificial sequence
  SiRNA target sequence
gcggagaaattcaaacaataatagata

SEQ ID NO: 79060 - DNA, 27 bp, Artificial sequence
  SiRNA target sequence
cggagaaattcaaacaataatagatag

SEQ ID NO: 79061 - DNA, 27 bp, Artificial sequence
  SiRNA target sequence
ggagaaattcaaacaataatagataga

SEQ ID NO: 79062 - DNA, 27 bp, Artificial sequence
  SiRNA target sequence
gagaaattcaaacaataatagatagaa

SEQ ID NO: 79063 - DNA, 27 bp, Artificial sequence
  SiRNA target sequence
agaaattcaaacaataatagatagaaa

SEQ ID NO: 79064 - DNA, 27 bp, Artificial sequence
  SiRNA target sequence
gaaattcaaacaataatagatagaaaa

SEQ ID NO: 79065 - DNA, 27 bp, Artificial sequence
  SiRNA target sequence
aaattcaaacaataatagatagaaaat

SEQ ID NO: 79066 - DNA, 27 bp, Artificial sequence
  SiRNA target sequence
aattcaaacaataatagatagaaaatc

SEQ ID NO: 79067 - DNA, 27 bp, Artificial sequence
  SiRNA target sequence
attcaaacaataatagatagaaaatca

SEQ ID NO: 79068 - DNA, 27 bp, Artificial sequence
  SiRNA target sequence
ttcaaacaataatagatagaaaatcaa

SEQ ID NO: 79069 - DNA, 27 bp, Artificial sequence
  SiRNA target sequence
tcaaacaataatagatagaaaatcaaa

SEQ ID NO: 79070 - DNA, 27 bp, Artificial sequence
  SiRNA target sequence
caaacaataatagatagaaaatcaaaa

SEQ ID NO: 79071 - DNA, 27 bp, Artificial sequence
  SiRNA target sequence
aaacaataatagatagaaaatcaaaat

SEQ ID NO: 79072 - DNA, 27 bp, Artificial sequence
  SiRNA target sequence
aacaataatagatagaaaatcaaaatc

SEQ ID NO: 79073 - DNA, 27 bp, Artificial sequence
  SiRNA target sequence
acaataatagatagaaaatcaaaatct

SEQ ID NO: 79074 - DNA, 27 bp, Artificial sequence
  SiRNA target sequence
caataatagatagaaaatcaaaatctg

SEQ ID NO: 79075 - DNA, 27 bp, Artificial sequence
  SiRNA target sequence
aataatagatagaaaatcaaaatctgc

SEQ ID NO: 79076 - DNA, 27 bp, Artificial sequence
  SiRNA target sequence
ataatagatagaaaatcaaaatctgca

SEQ ID NO: 79077 - DNA, 27 bp, Artificial sequence
  SiRNA target sequence
taatagatagaaaatcaaaatctgcaa

SEQ ID NO: 79078 - DNA, 27 bp, Artificial sequence
  SiRNA target sequence
aatagatagaaaatcaaaatctgcaag

SEQ ID NO: 79079 - DNA, 27 bp, Artificial sequence
  SiRNA target sequence
atagatagaaaatcaaaatctgcaagt

SEQ ID NO: 79080 - DNA, 27 bp, Artificial sequence
  SiRNA target sequence
tagatagaaaatcaaaatctgcaagtg

SEQ ID NO: 79081 - DNA, 27 bp, Artificial sequence
  SiRNA target sequence
agatagaaaatcaaaatctgcaagtga

SEQ ID NO: 79082 - DNA, 27 bp, Artificial sequence
  SiRNA target sequence
gatagaaaatcaaaatctgcaagtgaa

SEQ ID NO: 79083 - DNA, 27 bp, Artificial sequence
  SiRNA target sequence
atagaaaatcaaaatctgcaagtgaac

SEQ ID NO: 79084 - DNA, 27 bp, Artificial sequence
  SiRNA target sequence
tagaaaatcaaaatctgcaagtgaact

SEQ ID NO: 79085 - DNA, 27 bp, Artificial sequence
  SiRNA target sequence
agaaaatcaaaatctgcaagtgaactt

SEQ ID NO: 79086 - DNA, 27 bp, Artificial sequence
  SiRNA target sequence
gaaaatcaaaatctgcaagtgaactta

SEQ ID NO: 79087 - DNA, 27 bp, Artificial sequence
  SiRNA target sequence
aaaatcaaaatctgcaagtgaacttat

SEQ ID NO: 79088 - DNA, 27 bp, Artificial sequence
  SiRNA target sequence
aaatcaaaatctgcaagtgaacttatt

SEQ ID NO: 79089 - DNA, 27 bp, Artificial sequence
  SiRNA target sequence
aatcaaaatctgcaagtgaacttattg

SEQ ID NO: 79090 - DNA, 27 bp, Artificial sequence
  SiRNA target sequence
atcaaaatctgcaagtgaacttattga

SEQ ID NO: 79091 - DNA, 27 bp, Artificial sequence
  SiRNA target sequence
tcaaaatctgcaagtgaacttattgaa

SEQ ID NO: 79092 - DNA, 27 bp, Artificial sequence
  SiRNA target sequence
caaaatctgcaagtgaacttattgaag

SEQ ID NO: 79093 - DNA, 27 bp, Artificial sequence
  SiRNA target sequence
aaaatctgcaagtgaacttattgaagt

SEQ ID NO: 79094 - DNA, 27 bp, Artificial sequence
  SiRNA target sequence
aaatctgcaagtgaacttattgaagtg

SEQ ID NO: 79095 - DNA, 27 bp, Artificial sequence
  SiRNA target sequence
aatctgcaagtgaacttattgaagtgt

SEQ ID NO: 79096 - DNA, 27 bp, Artificial sequence
  SiRNA target sequence
atctgcaagtgaacttattgaagtgtt

SEQ ID NO: 79097 - DNA, 27 bp, Artificial sequence
  SiRNA target sequence
tctgcaagtgaacttattgaagtgttt

SEQ ID NO: 79098 - DNA, 27 bp, Artificial sequence
  SiRNA target sequence
ctgcaagtgaacttattgaagtgtttc

SEQ ID NO: 79099 - DNA, 27 bp, Artificial sequence
  SiRNA target sequence
tgcaagtgaacttattgaagtgtttct

SEQ ID NO: 79100 - DNA, 27 bp, Artificial sequence
  SiRNA target sequence
gcaagtgaacttattgaagtgtttctt

SEQ ID NO: 79101 - DNA, 27 bp, Artificial sequence
  SiRNA target sequence
caagtgaacttattgaagtgtttctta

SEQ ID NO: 79102 - DNA, 27 bp, Artificial sequence
  SiRNA target sequence
aagtgaacttattgaagtgtttcttac

SEQ ID NO: 79103 - DNA, 27 bp, Artificial sequence
  SiRNA target sequence
agtgaacttattgaagtgtttcttaca

SEQ ID NO: 79104 - DNA, 27 bp, Artificial sequence
  SiRNA target sequence
gtgaacttattgaagtgtttcttacaa

SEQ ID NO: 79105 - DNA, 27 bp, Artificial sequence
  SiRNA target sequence
tgaacttattgaagtgtttcttacaag

SEQ ID NO: 79106 - DNA, 27 bp, Artificial sequence
  SiRNA target sequence
gaacttattgaagtgtttcttacaagc

SEQ ID NO: 79107 - DNA, 27 bp, Artificial sequence
  SiRNA target sequence
aacttattgaagtgtttcttacaagct

SEQ ID NO: 79108 - DNA, 27 bp, Artificial sequence
  SiRNA target sequence
acttattgaagtgtttcttacaagctt

SEQ ID NO: 79109 - DNA, 27 bp, Artificial sequence
  SiRNA target sequence
cttattgaagtgtttcttacaagcttg

SEQ ID NO: 79110 - DNA, 27 bp, Artificial sequence
  SiRNA target sequence
ttattgaagtgtttcttacaagcttgc

SEQ ID NO: 79111 - DNA, 27 bp, Artificial sequence
  SiRNA target sequence
tattgaagtgtttcttacaagcttgct

SEQ ID NO: 79112 - DNA, 27 bp, Artificial sequence
  SiRNA target sequence
attgaagtgtttcttacaagcttgctt

SEQ ID NO: 79113 - DNA, 27 bp, Artificial sequence
  SiRNA target sequence
ttgaagtgtttcttacaagcttgcttc

SEQ ID NO: 79114 - DNA, 27 bp, Artificial sequence
  SiRNA target sequence
tgaagtgtttcttacaagcttgcttcc

SEQ ID NO: 79115 - DNA, 27 bp, Artificial sequence
  SiRNA target sequence
gaagtgtttcttacaagcttgcttcca

SEQ ID NO: 79116 - DNA, 27 bp, Artificial sequence
  SiRNA target sequence
aagtgtttcttacaagcttgcttccaa

SEQ ID NO: 79117 - DNA, 27 bp, Artificial sequence
  SiRNA target sequence
agtgtttcttacaagcttgcttccaat

SEQ ID NO: 79118 - DNA, 27 bp, Artificial sequence
  SiRNA target sequence
gtgtttcttacaagcttgcttccaata

SEQ ID NO: 79119 - DNA, 27 bp, Artificial sequence
  SiRNA target sequence
tgtttcttacaagcttgcttccaatat

SEQ ID NO: 79120 - DNA, 27 bp, Artificial sequence
  SiRNA target sequence
gtttcttacaagcttgcttccaatatg

SEQ ID NO: 79121 - DNA, 27 bp, Artificial sequence
  SiRNA target sequence
tttcttacaagcttgcttccaatatgc

SEQ ID NO: 79122 - DNA, 27 bp, Artificial sequence
  SiRNA target sequence
ttcttacaagcttgcttccaatatgcc

SEQ ID NO: 79123 - DNA, 27 bp, Artificial sequence
  SiRNA target sequence
tcttacaagcttgcttccaatatgcct

SEQ ID NO: 79124 - DNA, 27 bp, Artificial sequence
  SiRNA target sequence
cttacaagcttgcttccaatatgcctt

SEQ ID NO: 79125 - DNA, 27 bp, Artificial sequence
  SiRNA target sequence
ttacaagcttgcttccaatatgcctta

SEQ ID NO: 79126 - DNA, 27 bp, Artificial sequence
  SiRNA target sequence
tacaagcttgcttccaatatgccttaa

SEQ ID NO: 79127 - DNA, 27 bp, Artificial sequence
  SiRNA target sequence
acaagcttgcttccaatatgccttaaa

SEQ ID NO: 79128 - DNA, 27 bp, Artificial sequence
  SiRNA target sequence
caagcttgcttccaatatgccttaaac

SEQ ID NO: 79129 - DNA, 27 bp, Artificial sequence
  SiRNA target sequence
aagcttgcttccaatatgccttaaact

SEQ ID NO: 79130 - DNA, 27 bp, Artificial sequence
  SiRNA target sequence
agcttgcttccaatatgccttaaactt

SEQ ID NO: 79131 - DNA, 27 bp, Artificial sequence
  SiRNA target sequence
gcttgcttccaatatgccttaaacttt

SEQ ID NO: 79132 - DNA, 27 bp, Artificial sequence
  SiRNA target sequence
cttgcttccaatatgccttaaactttt

SEQ ID NO: 79133 - DNA, 27 bp, Artificial sequence
  SiRNA target sequence
ttgcttccaatatgccttaaactttta

SEQ ID NO: 79134 - DNA, 27 bp, Artificial sequence
  SiRNA target sequence
tgcttccaatatgccttaaacttttat

SEQ ID NO: 79135 - DNA, 27 bp, Artificial sequence
  SiRNA target sequence
gcttccaatatgccttaaacttttatt

SEQ ID NO: 79136 - DNA, 27 bp, Artificial sequence
  SiRNA target sequence
cttccaatatgccttaaacttttattt

SEQ ID NO: 79137 - DNA, 27 bp, Artificial sequence
  SiRNA target sequence
ttccaatatgccttaaacttttatttg

SEQ ID NO: 79138 - DNA, 27 bp, Artificial sequence
  SiRNA target sequence
tccaatatgccttaaacttttatttgc

SEQ ID NO: 79139 - DNA, 27 bp, Artificial sequence
  SiRNA target sequence
ccaatatgccttaaacttttatttgcc

SEQ ID NO: 79140 - DNA, 27 bp, Artificial sequence
  SiRNA target sequence
caatatgccttaaacttttatttgccc

SEQ ID NO: 79141 - DNA, 27 bp, Artificial sequence
  SiRNA target sequence
aatatgccttaaacttttatttgccct

SEQ ID NO: 79142 - DNA, 27 bp, Artificial sequence
  SiRNA target sequence
atatgccttaaacttttatttgccctt

SEQ ID NO: 79143 - DNA, 27 bp, Artificial sequence
  SiRNA target sequence
tatgccttaaacttttatttgccctta

SEQ ID NO: 79144 - DNA, 27 bp, Artificial sequence
  SiRNA target sequence
atgccttaaacttttatttgcccttat

SEQ ID NO: 79145 - DNA, 27 bp, Artificial sequence
  SiRNA target sequence
tgccttaaacttttatttgcccttatt

SEQ ID NO: 79146 - DNA, 27 bp, Artificial sequence
  SiRNA target sequence
gccttaaacttttatttgcccttattg

SEQ ID NO: 79147 - DNA, 27 bp, Artificial sequence
  SiRNA target sequence
ccttaaacttttatttgcccttattgc

SEQ ID NO: 79148 - DNA, 27 bp, Artificial sequence
  SiRNA target sequence
cttaaacttttatttgcccttattgca

SEQ ID NO: 79149 - DNA, 27 bp, Artificial sequence
  SiRNA target sequence
ttaaacttttatttgcccttattgcag

SEQ ID NO: 79150 - DNA, 27 bp, Artificial sequence
  SiRNA target sequence
taaacttttatttgcccttattgcagt

SEQ ID NO: 79151 - DNA, 27 bp, Artificial sequence
  SiRNA target sequence
aaacttttatttgcccttattgcagtt

SEQ ID NO: 79152 - DNA, 27 bp, Artificial sequence
  SiRNA target sequence
aacttttatttgcccttattgcagtta

SEQ ID NO: 79153 - DNA, 27 bp, Artificial sequence
  SiRNA target sequence
acttttatttgcccttattgcagttat

SEQ ID NO: 79154 - DNA, 27 bp, Artificial sequence
  SiRNA target sequence
cttttatttgcccttattgcagttata

SEQ ID NO: 79155 - DNA, 27 bp, Artificial sequence
  SiRNA target sequence
ttttatttgcccttattgcagttataa

SEQ ID NO: 79156 - DNA, 27 bp, Artificial sequence
  SiRNA target sequence
tttatttgcccttattgcagttataaa

SEQ ID NO: 79157 - DNA, 27 bp, Artificial sequence
  SiRNA target sequence
ttatttgcccttattgcagttataaaa

SEQ ID NO: 79158 - DNA, 27 bp, Artificial sequence
  SiRNA target sequence
tatttgcccttattgcagttataaaaa

SEQ ID NO: 79159 - DNA, 27 bp, Artificial sequence
  SiRNA target sequence
atttgcccttattgcagttataaaaaa

SEQ ID NO: 79160 - DNA, 27 bp, Artificial sequence
  SiRNA target sequence
tttgcccttattgcagttataaaaaat

SEQ ID NO: 79161 - DNA, 27 bp, Artificial sequence
  SiRNA target sequence
ttgcccttattgcagttataaaaaata

SEQ ID NO: 79162 - DNA, 27 bp, Artificial sequence
  SiRNA target sequence
tgcccttattgcagttataaaaaatat

SEQ ID NO: 79163 - DNA, 27 bp, Artificial sequence
  SiRNA target sequence
gcccttattgcagttataaaaaatatg

SEQ ID NO: 79164 - DNA, 27 bp, Artificial sequence
  SiRNA target sequence
cccttattgcagttataaaaaatatgg

SEQ ID NO: 79165 - DNA, 27 bp, Artificial sequence
  SiRNA target sequence
ccttattgcagttataaaaaatatggg

SEQ ID NO: 79166 - DNA, 27 bp, Artificial sequence
  SiRNA target sequence
cttattgcagttataaaaaatatggga

SEQ ID NO: 79167 - DNA, 27 bp, Artificial sequence
  SiRNA target sequence
ttattgcagttataaaaaatatgggag

SEQ ID NO: 79168 - DNA, 27 bp, Artificial sequence
  SiRNA target sequence
tattgcagttataaaaaatatgggagg

SEQ ID NO: 79169 - DNA, 27 bp, Artificial sequence
  SiRNA target sequence
attgcagttataaaaaatatgggaggt

SEQ ID NO: 79170 - DNA, 27 bp, Artificial sequence
  SiRNA target sequence
ttgcagttataaaaaatatgggaggtc

SEQ ID NO: 79171 - DNA, 27 bp, Artificial sequence
  SiRNA target sequence
tgcagttataaaaaatatgggaggtct

SEQ ID NO: 79172 - DNA, 27 bp, Artificial sequence
  SiRNA target sequence
gcagttataaaaaatatgggaggtctt

SEQ ID NO: 79173 - DNA, 27 bp, Artificial sequence
  SiRNA target sequence
cagttataaaaaatatgggaggtcttg

SEQ ID NO: 79174 - DNA, 27 bp, Artificial sequence
  SiRNA target sequence
agttataaaaaatatgggaggtcttgc

SEQ ID NO: 79175 - DNA, 27 bp, Artificial sequence
  SiRNA target sequence
gttataaaaaatatgggaggtcttgcg

SEQ ID NO: 79176 - DNA, 27 bp, Artificial sequence
  SiRNA target sequence
ttataaaaaatatgggaggtcttgcgg

SEQ ID NO: 79177 - DNA, 27 bp, Artificial sequence
  SiRNA target sequence
tataaaaaatatgggaggtcttgcggg

SEQ ID NO: 79178 - DNA, 27 bp, Artificial sequence
  SiRNA target sequence
ataaaaaatatgggaggtcttgcgggc

SEQ ID NO: 79179 - DNA, 27 bp, Artificial sequence
  SiRNA target sequence
taaaaaatatgggaggtcttgcgggct

SEQ ID NO: 79180 - DNA, 27 bp, Artificial sequence
  SiRNA target sequence
aaaaaatatgggaggtcttgcgggctt

SEQ ID NO: 79181 - DNA, 27 bp, Artificial sequence
  SiRNA target sequence
aaaaatatgggaggtcttgcgggcttc

SEQ ID NO: 79182 - DNA, 27 bp, Artificial sequence
  SiRNA target sequence
aaaatatgggaggtcttgcgggcttca

SEQ ID NO: 79183 - DNA, 27 bp, Artificial sequence
  SiRNA target sequence
aaatatgggaggtcttgcgggcttcat

SEQ ID NO: 79184 - DNA, 27 bp, Artificial sequence
  SiRNA target sequence
aatatgggaggtcttgcgggcttcata

SEQ ID NO: 79185 - DNA, 27 bp, Artificial sequence
  SiRNA target sequence
atatgggaggtcttgcgggcttcataa

SEQ ID NO: 79186 - DNA, 27 bp, Artificial sequence
  SiRNA target sequence
tatgggaggtcttgcgggcttcataat

SEQ ID NO: 79187 - DNA, 27 bp, Artificial sequence
  SiRNA target sequence
atgggaggtcttgcgggcttcataatg

SEQ ID NO: 79188 - DNA, 27 bp, Artificial sequence
  SiRNA target sequence
tgggaggtcttgcgggcttcataatgt

SEQ ID NO: 79189 - DNA, 27 bp, Artificial sequence
  SiRNA target sequence
gggaggtcttgcgggcttcataatgtt

SEQ ID NO: 79190 - DNA, 27 bp, Artificial sequence
  SiRNA target sequence
ggaggtcttgcgggcttcataatgttt

SEQ ID NO: 79191 - DNA, 27 bp, Artificial sequence
  SiRNA target sequence
gaggtcttgcgggcttcataatgtttg

SEQ ID NO: 79192 - DNA, 27 bp, Artificial sequence
  SiRNA target sequence
aggtcttgcgggcttcataatgtttgt

SEQ ID NO: 79193 - DNA, 27 bp, Artificial sequence
  SiRNA target sequence
ggtcttgcgggcttcataatgtttgtt

SEQ ID NO: 79194 - DNA, 27 bp, Artificial sequence
  SiRNA target sequence
gtcttgcgggcttcataatgtttgttt

SEQ ID NO: 79195 - DNA, 27 bp, Artificial sequence
  SiRNA target sequence
tcttgcgggcttcataatgtttgtttg

SEQ ID NO: 79196 - DNA, 27 bp, Artificial sequence
  SiRNA target sequence
cttgcgggcttcataatgtttgtttgt

SEQ ID NO: 79197 - DNA, 27 bp, Artificial sequence
  SiRNA target sequence
ttgcgggcttcataatgtttgtttgtg

SEQ ID NO: 79198 - DNA, 27 bp, Artificial sequence
  SiRNA target sequence
tgcgggcttcataatgtttgtttgtgt

SEQ ID NO: 79199 - DNA, 27 bp, Artificial sequence
  SiRNA target sequence
gcgggcttcataatgtttgtttgtgtt

SEQ ID NO: 79200 - DNA, 27 bp, Artificial sequence
  SiRNA target sequence
cgggcttcataatgtttgtttgtgttt

SEQ ID NO: 79201 - DNA, 27 bp, Artificial sequence
  SiRNA target sequence
gggcttcataatgtttgtttgtgtttc

SEQ ID NO: 79202 - DNA, 27 bp, Artificial sequence
  SiRNA target sequence
ggcttcataatgtttgtttgtgtttct

SEQ ID NO: 79203 - DNA, 27 bp, Artificial sequence
  SiRNA target sequence
gcttcataatgtttgtttgtgtttctt

SEQ ID NO: 79204 - DNA, 27 bp, Artificial sequence
  SiRNA target sequence
cttcataatgtttgtttgtgtttcttg

SEQ ID NO: 79205 - DNA, 27 bp, Artificial sequence
  SiRNA target sequence
ttcataatgtttgtttgtgtttcttgc

SEQ ID NO: 79206 - DNA, 27 bp, Artificial sequence
  SiRNA target sequence
tcataatgtttgtttgtgtttcttgct

SEQ ID NO: 79207 - DNA, 27 bp, Artificial sequence
  SiRNA target sequence
cataatgtttgtttgtgtttcttgcta

SEQ ID NO: 79208 - DNA, 27 bp, Artificial sequence
  SiRNA target sequence
ataatgtttgtttgtgtttcttgctat

SEQ ID NO: 79209 - DNA, 27 bp, Artificial sequence
  SiRNA target sequence
taatgtttgtttgtgtttcttgctatg

SEQ ID NO: 79210 - DNA, 27 bp, Artificial sequence
  SiRNA target sequence
aatgtttgtttgtgtttcttgctatgc

SEQ ID NO: 79211 - DNA, 27 bp, Artificial sequence
  SiRNA target sequence
atgtttgtttgtgtttcttgctatgcg

SEQ ID NO: 79212 - DNA, 27 bp, Artificial sequence
  SiRNA target sequence
tgtttgtttgtgtttcttgctatgcga

SEQ ID NO: 79213 - DNA, 27 bp, Artificial sequence
  SiRNA target sequence
gtttgtttgtgtttcttgctatgcgac

SEQ ID NO: 79214 - DNA, 27 bp, Artificial sequence
  SiRNA target sequence
tttgtttgtgtttcttgctatgcgact

SEQ ID NO: 79215 - DNA, 27 bp, Artificial sequence
  SiRNA target sequence
ttgtttgtgtttcttgctatgcgactg

SEQ ID NO: 79216 - DNA, 27 bp, Artificial sequence
  SiRNA target sequence
tgtttgtgtttcttgctatgcgactgt

SEQ ID NO: 79217 - DNA, 27 bp, Artificial sequence
  SiRNA target sequence
gtttgtgtttcttgctatgcgactgtg

SEQ ID NO: 79218 - DNA, 27 bp, Artificial sequence
  SiRNA target sequence
tttgtgtttcttgctatgcgactgtga

SEQ ID NO: 79219 - DNA, 27 bp, Artificial sequence
  SiRNA target sequence
ttgtgtttcttgctatgcgactgtgac

SEQ ID NO: 79220 - DNA, 27 bp, Artificial sequence
  SiRNA target sequence
tgtgtttcttgctatgcgactgtgact

SEQ ID NO: 79221 - DNA, 27 bp, Artificial sequence
  SiRNA target sequence
gtgtttcttgctatgcgactgtgacta

SEQ ID NO: 79222 - DNA, 27 bp, Artificial sequence
  SiRNA target sequence
tgtttcttgctatgcgactgtgactat

SEQ ID NO: 79223 - DNA, 27 bp, Artificial sequence
  SiRNA target sequence
gtttcttgctatgcgactgtgactata

SEQ ID NO: 79224 - DNA, 27 bp, Artificial sequence
  SiRNA target sequence
tttcttgctatgcgactgtgactatat

SEQ ID NO: 79225 - DNA, 27 bp, Artificial sequence
  SiRNA target sequence
ttcttgctatgcgactgtgactatatt

SEQ ID NO: 79226 - DNA, 27 bp, Artificial sequence
  SiRNA target sequence
tcttgctatgcgactgtgactatattg

SEQ ID NO: 79227 - DNA, 27 bp, Artificial sequence
  SiRNA target sequence
cttgctatgcgactgtgactatattga

SEQ ID NO: 79228 - DNA, 27 bp, Artificial sequence
  SiRNA target sequence
ttgctatgcgactgtgactatattgat

SEQ ID NO: 79229 - DNA, 27 bp, Artificial sequence
  SiRNA target sequence
tgctatgcgactgtgactatattgata

SEQ ID NO: 79230 - DNA, 27 bp, Artificial sequence
  SiRNA target sequence
gctatgcgactgtgactatattgatag

SEQ ID NO: 79231 - DNA, 27 bp, Artificial sequence
  SiRNA target sequence
ctatgcgactgtgactatattgatagc

SEQ ID NO: 79232 - DNA, 27 bp, Artificial sequence
  SiRNA target sequence
tatgcgactgtgactatattgatagca

SEQ ID NO: 79233 - DNA, 27 bp, Artificial sequence
  SiRNA target sequence
atgcgactgtgactatattgatagcac

SEQ ID NO: 79234 - DNA, 27 bp, Artificial sequence
  SiRNA target sequence
tgcgactgtgactatattgatagcaca

SEQ ID NO: 79235 - DNA, 27 bp, Artificial sequence
  SiRNA target sequence
gcgactgtgactatattgatagcacaa

SEQ ID NO: 79236 - DNA, 27 bp, Artificial sequence
  SiRNA target sequence
cgactgtgactatattgatagcacaat

SEQ ID NO: 79237 - DNA, 27 bp, Artificial sequence
  SiRNA target sequence
gactgtgactatattgatagcacaatg

SEQ ID NO: 79238 - DNA, 27 bp, Artificial sequence
  SiRNA target sequence
actgtgactatattgatagcacaatgg

SEQ ID NO: 79239 - DNA, 27 bp, Artificial sequence
  SiRNA target sequence
ctgtgactatattgatagcacaatgga

SEQ ID NO: 79240 - DNA, 27 bp, Artificial sequence
  SiRNA target sequence
tgtgactatattgatagcacaatggag

SEQ ID NO: 79241 - DNA, 27 bp, Artificial sequence
  SiRNA target sequence
gtgactatattgatagcacaatggaga

SEQ ID NO: 79242 - DNA, 27 bp, Artificial sequence
  SiRNA target sequence
tgactatattgatagcacaatggagat

SEQ ID NO: 79243 - DNA, 27 bp, Artificial sequence
  SiRNA target sequence
gactatattgatagcacaatggagatc

SEQ ID NO: 79244 - DNA, 27 bp, Artificial sequence
  SiRNA target sequence
actatattgatagcacaatggagatct

SEQ ID NO: 79245 - DNA, 27 bp, Artificial sequence
  SiRNA target sequence
ctatattgatagcacaatggagatcta

SEQ ID NO: 79246 - DNA, 27 bp, Artificial sequence
  SiRNA target sequence
tatattgatagcacaatggagatctaa

SEQ ID NO: 79247 - DNA, 27 bp, Artificial sequence
  SiRNA target sequence
atattgatagcacaatggagatctaat

SEQ ID NO: 79248 - DNA, 27 bp, Artificial sequence
  SiRNA target sequence
tattgatagcacaatggagatctaata

SEQ ID NO: 79249 - DNA, 27 bp, Artificial sequence
  SiRNA target sequence
attgatagcacaatggagatctaatat

SEQ ID NO: 79250 - DNA, 27 bp, Artificial sequence
  SiRNA target sequence
ttgatagcacaatggagatctaatatt

SEQ ID NO: 79251 - DNA, 27 bp, Artificial sequence
  SiRNA target sequence
tgatagcacaatggagatctaatatta

SEQ ID NO: 79252 - DNA, 27 bp, Artificial sequence
  SiRNA target sequence
gatagcacaatggagatctaatattag

SEQ ID NO: 79253 - DNA, 27 bp, Artificial sequence
  SiRNA target sequence
atagcacaatggagatctaatattaga

SEQ ID NO: 79254 - DNA, 27 bp, Artificial sequence
  SiRNA target sequence
tagcacaatggagatctaatattagaa

SEQ ID NO: 79255 - DNA, 27 bp, Artificial sequence
  SiRNA target sequence
agcacaatggagatctaatattagaag

SEQ ID NO: 79256 - DNA, 27 bp, Artificial sequence
  SiRNA target sequence
gcacaatggagatctaatattagaaga

SEQ ID NO: 79257 - DNA, 27 bp, Artificial sequence
  SiRNA target sequence
cacaatggagatctaatattagaagag

SEQ ID NO: 79258 - DNA, 27 bp, Artificial sequence
  SiRNA target sequence
acaatggagatctaatattagaagaga

SEQ ID NO: 79259 - DNA, 27 bp, Artificial sequence
  SiRNA target sequence
caatggagatctaatattagaagagaa

SEQ ID NO: 79260 - DNA, 27 bp, Artificial sequence
  SiRNA target sequence
aatggagatctaatattagaagagaac

SEQ ID NO: 79261 - DNA, 27 bp, Artificial sequence
  SiRNA target sequence
atggagatctaatattagaagagaact

SEQ ID NO: 79262 - DNA, 27 bp, Artificial sequence
  SiRNA target sequence
tggagatctaatattagaagagaactt

SEQ ID NO: 79263 - DNA, 27 bp, Artificial sequence
  SiRNA target sequence
ggagatctaatattagaagagaactta

SEQ ID NO: 79264 - DNA, 27 bp, Artificial sequence
  SiRNA target sequence
gagatctaatattagaagagaacttaa

SEQ ID NO: 79265 - DNA, 27 bp, Artificial sequence
  SiRNA target sequence
agatctaatattagaagagaacttaat

SEQ ID NO: 79266 - DNA, 27 bp, Artificial sequence
  SiRNA target sequence
gatctaatattagaagagaacttaata

SEQ ID NO: 79267 - DNA, 27 bp, Artificial sequence
  SiRNA target sequence
atctaatattagaagagaacttaataa

SEQ ID NO: 79268 - DNA, 27 bp, Artificial sequence
  SiRNA target sequence
tctaatattagaagagaacttaataac

SEQ ID NO: 79269 - DNA, 27 bp, Artificial sequence
  SiRNA target sequence
ctaatattagaagagaacttaataact

SEQ ID NO: 79270 - DNA, 27 bp, Artificial sequence
  SiRNA target sequence
taatattagaagagaacttaataactc

SEQ ID NO: 79271 - DNA, 27 bp, Artificial sequence
  SiRNA target sequence
aatattagaagagaacttaataactct

SEQ ID NO: 79272 - DNA, 27 bp, Artificial sequence
  SiRNA target sequence
atattagaagagaacttaataactctg

SEQ ID NO: 79273 - DNA, 27 bp, Artificial sequence
  SiRNA target sequence
tattagaagagaacttaataactctga

SEQ ID NO: 79274 - DNA, 27 bp, Artificial sequence
  SiRNA target sequence
attagaagagaacttaataactctgaa

SEQ ID NO: 79275 - DNA, 27 bp, Artificial sequence
  SiRNA target sequence
ttagaagagaacttaataactctgaaa

SEQ ID NO: 79276 - DNA, 27 bp, Artificial sequence
  SiRNA target sequence
tagaagagaacttaataactctgaaaa

SEQ ID NO: 79277 - DNA, 27 bp, Artificial sequence
  SiRNA target sequence
agaagagaacttaataactctgaaaat

SEQ ID NO: 79278 - DNA, 27 bp, Artificial sequence
  SiRNA target sequence
gaagagaacttaataactctgaaaata

SEQ ID NO: 79279 - DNA, 27 bp, Artificial sequence
  SiRNA target sequence
aagagaacttaataactctgaaaatag

SEQ ID NO: 79280 - DNA, 27 bp, Artificial sequence
  SiRNA target sequence
agagaacttaataactctgaaaataga

SEQ ID NO: 79281 - DNA, 27 bp, Artificial sequence
  SiRNA target sequence
gagaacttaataactctgaaaatagat

SEQ ID NO: 79282 - DNA, 27 bp, Artificial sequence
  SiRNA target sequence
agaacttaataactctgaaaatagatc

SEQ ID NO: 79283 - DNA, 27 bp, Artificial sequence
  SiRNA target sequence
gaacttaataactctgaaaatagatct

SEQ ID NO: 79284 - DNA, 27 bp, Artificial sequence
  SiRNA target sequence
aacttaataactctgaaaatagatcta

SEQ ID NO: 79285 - DNA, 27 bp, Artificial sequence
  SiRNA target sequence
acttaataactctgaaaatagatctag

SEQ ID NO: 79286 - DNA, 27 bp, Artificial sequence
  SiRNA target sequence
cttaataactctgaaaatagatctagt

SEQ ID NO: 79287 - DNA, 27 bp, Artificial sequence
  SiRNA target sequence
ttaataactctgaaaatagatctagta

SEQ ID NO: 79288 - DNA, 27 bp, Artificial sequence
  SiRNA target sequence
taataactctgaaaatagatctagtaa

SEQ ID NO: 79289 - DNA, 27 bp, Artificial sequence
  SiRNA target sequence
aataactctgaaaatagatctagtaat

SEQ ID NO: 79290 - DNA, 27 bp, Artificial sequence
  SiRNA target sequence
ataactctgaaaatagatctagtaata

SEQ ID NO: 79291 - DNA, 27 bp, Artificial sequence
  SiRNA target sequence
taactctgaaaatagatctagtaataa

SEQ ID NO: 79292 - DNA, 27 bp, Artificial sequence
  SiRNA target sequence
aactctgaaaatagatctagtaataaa

SEQ ID NO: 79293 - DNA, 27 bp, Artificial sequence
  SiRNA target sequence
actctgaaaatagatctagtaataaac

SEQ ID NO: 79294 - DNA, 27 bp, Artificial sequence
  SiRNA target sequence
ctctgaaaatagatctagtaataaact

SEQ ID NO: 79295 - DNA, 27 bp, Artificial sequence
  SiRNA target sequence
tctgaaaatagatctagtaataaacta

SEQ ID NO: 79296 - DNA, 27 bp, Artificial sequence
  SiRNA target sequence
ctgaaaatagatctagtaataaactac

SEQ ID NO: 79297 - DNA, 27 bp, Artificial sequence
  SiRNA target sequence
tgaaaatagatctagtaataaactaca

SEQ ID NO: 79298 - DNA, 27 bp, Artificial sequence
  SiRNA target sequence
gaaaatagatctagtaataaactacaa

SEQ ID NO: 79299 - DNA, 27 bp, Artificial sequence
  SiRNA target sequence
aaaatagatctagtaataaactacaag

SEQ ID NO: 79300 - DNA, 27 bp, Artificial sequence
  SiRNA target sequence
aaatagatctagtaataaactacaaga

SEQ ID NO: 79301 - DNA, 27 bp, Artificial sequence
  SiRNA target sequence
aatagatctagtaataaactacaagat

SEQ ID NO: 79302 - DNA, 27 bp, Artificial sequence
  SiRNA target sequence
atagatctagtaataaactacaagatg

SEQ ID NO: 79303 - DNA, 27 bp, Artificial sequence
  SiRNA target sequence
tagatctagtaataaactacaagatgg

SEQ ID NO: 79304 - DNA, 27 bp, Artificial sequence
  SiRNA target sequence
agatctagtaataaactacaagatgga

SEQ ID NO: 79305 - DNA, 27 bp, Artificial sequence
  SiRNA target sequence
gatctagtaataaactacaagatggat

SEQ ID NO: 79306 - DNA, 27 bp, Artificial sequence
  SiRNA target sequence
atctagtaataaactacaagatggatt

SEQ ID NO: 79307 - DNA, 27 bp, Artificial sequence
  SiRNA target sequence
tctagtaataaactacaagatggatta

SEQ ID NO: 79308 - DNA, 27 bp, Artificial sequence
  SiRNA target sequence
ctagtaataaactacaagatggattaa

SEQ ID NO: 79309 - DNA, 27 bp, Artificial sequence
  SiRNA target sequence
tagtaataaactacaagatggattaaa

SEQ ID NO: 79310 - DNA, 27 bp, Artificial sequence
  SiRNA target sequence
agtaataaactacaagatggattaaat

SEQ ID NO: 79311 - DNA, 27 bp, Artificial sequence
  SiRNA target sequence
gtaataaactacaagatggattaaata

SEQ ID NO: 79312 - DNA, 27 bp, Artificial sequence
  SiRNA target sequence
taataaactacaagatggattaaataa

SEQ ID NO: 79313 - DNA, 27 bp, Artificial sequence
  SiRNA target sequence
aataaactacaagatggattaaataat

SEQ ID NO: 79314 - DNA, 27 bp, Artificial sequence
  SiRNA target sequence
ataaactacaagatggattaaataatc

SEQ ID NO: 79315 - DNA, 27 bp, Artificial sequence
  SiRNA target sequence
taaactacaagatggattaaataatca

SEQ ID NO: 79316 - DNA, 27 bp, Artificial sequence
  SiRNA target sequence
aaactacaagatggattaaataatcat

SEQ ID NO: 79317 - DNA, 27 bp, Artificial sequence
  SiRNA target sequence
aactacaagatggattaaataatcatg

SEQ ID NO: 79318 - DNA, 27 bp, Artificial sequence
  SiRNA target sequence
actacaagatggattaaataatcatga

SEQ ID NO: 79319 - DNA, 27 bp, Artificial sequence
  SiRNA target sequence
ctacaagatggattaaataatcatgaa

SEQ ID NO: 79320 - DNA, 27 bp, Artificial sequence
  SiRNA target sequence
tacaagatggattaaataatcatgaaa

SEQ ID NO: 79321 - DNA, 27 bp, Artificial sequence
  SiRNA target sequence
acaagatggattaaataatcatgaaac

SEQ ID NO: 79322 - DNA, 27 bp, Artificial sequence
  SiRNA target sequence
caagatggattaaataatcatgaaaca

SEQ ID NO: 79323 - DNA, 27 bp, Artificial sequence
  SiRNA target sequence
aagatggattaaataatcatgaaacaa

SEQ ID NO: 79324 - DNA, 27 bp, Artificial sequence
  SiRNA target sequence
agatggattaaataatcatgaaacaat

SEQ ID NO: 79325 - DNA, 27 bp, Artificial sequence
  SiRNA target sequence
gatggattaaataatcatgaaacaatc

SEQ ID NO: 79326 - DNA, 27 bp, Artificial sequence
  SiRNA target sequence
atggattaaataatcatgaaacaatcg

SEQ ID NO: 79327 - DNA, 27 bp, Artificial sequence
  SiRNA target sequence
tggattaaataatcatgaaacaatcgt

SEQ ID NO: 79328 - DNA, 27 bp, Artificial sequence
  SiRNA target sequence
ggattaaataatcatgaaacaatcgtc

SEQ ID NO: 79329 - DNA, 27 bp, Artificial sequence
  SiRNA target sequence
gattaaataatcatgaaacaatcgtct

SEQ ID NO: 79330 - DNA, 27 bp, Artificial sequence
  SiRNA target sequence
attaaataatcatgaaacaatcgtctc

SEQ ID NO: 79331 - DNA, 27 bp, Artificial sequence
  SiRNA target sequence
ttaaataatcatgaaacaatcgtctcc

SEQ ID NO: 79332 - DNA, 27 bp, Artificial sequence
  SiRNA target sequence
taaataatcatgaaacaatcgtctcct

SEQ ID NO: 79333 - DNA, 27 bp, Artificial sequence
  SiRNA target sequence
aaataatcatgaaacaatcgtctcctt

SEQ ID NO: 79334 - DNA, 27 bp, Artificial sequence
  SiRNA target sequence
aataatcatgaaacaatcgtctccttt

SEQ ID NO: 79335 - DNA, 27 bp, Artificial sequence
  SiRNA target sequence
ataatcatgaaacaatcgtctcctttg

SEQ ID NO: 79336 - DNA, 27 bp, Artificial sequence
  SiRNA target sequence
taatcatgaaacaatcgtctcctttgg

SEQ ID NO: 79337 - DNA, 27 bp, Artificial sequence
  SiRNA target sequence
aatcatgaaacaatcgtctcctttggg

SEQ ID NO: 79338 - DNA, 27 bp, Artificial sequence
  SiRNA target sequence
atcatgaaacaatcgtctcctttggga

SEQ ID NO: 79339 - DNA, 27 bp, Artificial sequence
  SiRNA target sequence
tcatgaaacaatcgtctcctttgggac

SEQ ID NO: 79340 - DNA, 27 bp, Artificial sequence
  SiRNA target sequence
catgaaacaatcgtctcctttgggact

SEQ ID NO: 79341 - DNA, 27 bp, Artificial sequence
  SiRNA target sequence
atgaaacaatcgtctcctttgggacta

SEQ ID NO: 79342 - DNA, 27 bp, Artificial sequence
  SiRNA target sequence
tgaaacaatcgtctcctttgggactac

SEQ ID NO: 79343 - DNA, 27 bp, Artificial sequence
  SiRNA target sequence
gaaacaatcgtctcctttgggactaca

SEQ ID NO: 79344 - DNA, 27 bp, Artificial sequence
  SiRNA target sequence
aaacaatcgtctcctttgggactacag

SEQ ID NO: 79345 - DNA, 27 bp, Artificial sequence
  SiRNA target sequence
aacaatcgtctcctttgggactacaga

SEQ ID NO: 79346 - DNA, 27 bp, Artificial sequence
  SiRNA target sequence
acaatcgtctcctttgggactacagat

SEQ ID NO: 79347 - DNA, 27 bp, Artificial sequence
  SiRNA target sequence
caatcgtctcctttgggactacagatc

SEQ ID NO: 79348 - DNA, 27 bp, Artificial sequence
  SiRNA target sequence
aatcgtctcctttgggactacagatct

SEQ ID NO: 79349 - DNA, 27 bp, Artificial sequence
  SiRNA target sequence
atcgtctcctttgggactacagatctt

SEQ ID NO: 79350 - DNA, 27 bp, Artificial sequence
  SiRNA target sequence
tcgtctcctttgggactacagatcttg

SEQ ID NO: 79351 - DNA, 27 bp, Artificial sequence
  SiRNA target sequence
cgtctcctttgggactacagatcttga

SEQ ID NO: 79352 - DNA, 27 bp, Artificial sequence
  SiRNA target sequence
gtctcctttgggactacagatcttgaa

SEQ ID NO: 79353 - DNA, 27 bp, Artificial sequence
  SiRNA target sequence
tctcctttgggactacagatcttgaag

SEQ ID NO: 79354 - DNA, 27 bp, Artificial sequence
  SiRNA target sequence
ctcctttgggactacagatcttgaagt

SEQ ID NO: 79355 - DNA, 27 bp, Artificial sequence
  SiRNA target sequence
tcctttgggactacagatcttgaagta

SEQ ID NO: 79356 - DNA, 27 bp, Artificial sequence
  SiRNA target sequence
cctttgggactacagatcttgaagtag

SEQ ID NO: 79357 - DNA, 27 bp, Artificial sequence
  SiRNA target sequence
ctttgggactacagatcttgaagtaga

SEQ ID NO: 79358 - DNA, 27 bp, Artificial sequence
  SiRNA target sequence
tttgggactacagatcttgaagtagat

SEQ ID NO: 79359 - DNA, 27 bp, Artificial sequence
  SiRNA target sequence
ttgggactacagatcttgaagtagatg

SEQ ID NO: 79360 - DNA, 27 bp, Artificial sequence
  SiRNA target sequence
tgggactacagatcttgaagtagatga

SEQ ID NO: 79361 - DNA, 27 bp, Artificial sequence
  SiRNA target sequence
gggactacagatcttgaagtagatgaa

SEQ ID NO: 79362 - DNA, 27 bp, Artificial sequence
  SiRNA target sequence
ggactacagatcttgaagtagatgaat

SEQ ID NO: 79363 - DNA, 27 bp, Artificial sequence
  SiRNA target sequence
gactacagatcttgaagtagatgaata

SEQ ID NO: 79364 - DNA, 27 bp, Artificial sequence
  SiRNA target sequence
actacagatcttgaagtagatgaatat

SEQ ID NO: 79365 - DNA, 27 bp, Artificial sequence
  SiRNA target sequence
ctacagatcttgaagtagatgaatatg

SEQ ID NO: 79366 - DNA, 27 bp, Artificial sequence
  SiRNA target sequence
tacagatcttgaagtagatgaatatga

SEQ ID NO: 79367 - DNA, 27 bp, Artificial sequence
  SiRNA target sequence
acagatcttgaagtagatgaatatgat

SEQ ID NO: 79368 - DNA, 27 bp, Artificial sequence
  SiRNA target sequence
cagatcttgaagtagatgaatatgatc

SEQ ID NO: 79369 - DNA, 27 bp, Artificial sequence
  SiRNA target sequence
agatcttgaagtagatgaatatgatca

SEQ ID NO: 79370 - DNA, 27 bp, Artificial sequence
  SiRNA target sequence
gatcttgaagtagatgaatatgatcag

SEQ ID NO: 79371 - DNA, 27 bp, Artificial sequence
  SiRNA target sequence
atcttgaagtagatgaatatgatcagt

SEQ ID NO: 79372 - DNA, 27 bp, Artificial sequence
  SiRNA target sequence
tcttgaagtagatgaatatgatcagtt

SEQ ID NO: 79373 - DNA, 27 bp, Artificial sequence
  SiRNA target sequence
cttgaagtagatgaatatgatcagttt

SEQ ID NO: 79374 - DNA, 27 bp, Artificial sequence
  SiRNA target sequence
ttgaagtagatgaatatgatcagtttc

SEQ ID NO: 79375 - DNA, 27 bp, Artificial sequence
  SiRNA target sequence
tgaagtagatgaatatgatcagtttct

SEQ ID NO: 79376 - DNA, 27 bp, Artificial sequence
  SiRNA target sequence
gaagtagatgaatatgatcagtttctt

SEQ ID NO: 79377 - DNA, 27 bp, Artificial sequence
  SiRNA target sequence
aagtagatgaatatgatcagtttctta

SEQ ID NO: 79378 - DNA, 27 bp, Artificial sequence
  SiRNA target sequence
agtagatgaatatgatcagtttcttaa

SEQ ID NO: 79379 - DNA, 27 bp, Artificial sequence
  SiRNA target sequence
gtagatgaatatgatcagtttcttaaa

SEQ ID NO: 79380 - DNA, 27 bp, Artificial sequence
  SiRNA target sequence
tagatgaatatgatcagtttcttaaaa

SEQ ID NO: 79381 - DNA, 27 bp, Artificial sequence
  SiRNA target sequence
agatgaatatgatcagtttcttaaaat

SEQ ID NO: 79382 - DNA, 27 bp, Artificial sequence
  SiRNA target sequence
gatgaatatgatcagtttcttaaaatt

SEQ ID NO: 79383 - DNA, 27 bp, Artificial sequence
  SiRNA target sequence
atgaatatgatcagtttcttaaaatta

SEQ ID NO: 79384 - DNA, 27 bp, Artificial sequence
  SiRNA target sequence
tgaatatgatcagtttcttaaaattaa

SEQ ID NO: 79385 - DNA, 27 bp, Artificial sequence
  SiRNA target sequence
gaatatgatcagtttcttaaaattaat

SEQ ID NO: 79386 - DNA, 27 bp, Artificial sequence
  SiRNA target sequence
aatatgatcagtttcttaaaattaatg

SEQ ID NO: 79387 - DNA, 27 bp, Artificial sequence
  SiRNA target sequence
atatgatcagtttcttaaaattaatgc

SEQ ID NO: 79388 - DNA, 27 bp, Artificial sequence
  SiRNA target sequence
tatgatcagtttcttaaaattaatgca

SEQ ID NO: 79389 - DNA, 27 bp, Artificial sequence
  SiRNA target sequence
atgatcagtttcttaaaattaatgcat

SEQ ID NO: 79390 - DNA, 27 bp, Artificial sequence
  SiRNA target sequence
tgatcagtttcttaaaattaatgcatc

SEQ ID NO: 79391 - DNA, 27 bp, Artificial sequence
  SiRNA target sequence
gatcagtttcttaaaattaatgcatct

SEQ ID NO: 79392 - DNA, 27 bp, Artificial sequence
  SiRNA target sequence
atcagtttcttaaaattaatgcatcta

SEQ ID NO: 79393 - DNA, 27 bp, Artificial sequence
  SiRNA target sequence
tcagtttcttaaaattaatgcatctaa

SEQ ID NO: 79394 - DNA, 27 bp, Artificial sequence
  SiRNA target sequence
cagtttcttaaaattaatgcatctaat

SEQ ID NO: 79395 - DNA, 27 bp, Artificial sequence
  SiRNA target sequence
agtttcttaaaattaatgcatctaata

SEQ ID NO: 79396 - DNA, 27 bp, Artificial sequence
  SiRNA target sequence
gtttcttaaaattaatgcatctaatag

SEQ ID NO: 79397 - DNA, 27 bp, Artificial sequence
  SiRNA target sequence
tttcttaaaattaatgcatctaatagt

SEQ ID NO: 79398 - DNA, 27 bp, Artificial sequence
  SiRNA target sequence
ttcttaaaattaatgcatctaatagta

SEQ ID NO: 79399 - DNA, 27 bp, Artificial sequence
  SiRNA target sequence
tcttaaaattaatgcatctaatagtaa

SEQ ID NO: 79400 - DNA, 27 bp, Artificial sequence
  SiRNA target sequence
cttaaaattaatgcatctaatagtaac

SEQ ID NO: 79401 - DNA, 27 bp, Artificial sequence
  SiRNA target sequence
ttaaaattaatgcatctaatagtaaca

SEQ ID NO: 79402 - DNA, 27 bp, Artificial sequence
  SiRNA target sequence
taaaattaatgcatctaatagtaacag

SEQ ID NO: 79403 - DNA, 27 bp, Artificial sequence
  SiRNA target sequence
aaaattaatgcatctaatagtaacaga

SEQ ID NO: 79404 - DNA, 27 bp, Artificial sequence
  SiRNA target sequence
aaattaatgcatctaatagtaacagat

SEQ ID NO: 79405 - DNA, 27 bp, Artificial sequence
  SiRNA target sequence
aattaatgcatctaatagtaacagatt

SEQ ID NO: 79406 - DNA, 27 bp, Artificial sequence
  SiRNA target sequence
attaatgcatctaatagtaacagatta

SEQ ID NO: 79407 - DNA, 27 bp, Artificial sequence
  SiRNA target sequence
ttaatgcatctaatagtaacagattat

SEQ ID NO: 79408 - DNA, 27 bp, Artificial sequence
  SiRNA target sequence
taatgcatctaatagtaacagattatg

SEQ ID NO: 79409 - DNA, 27 bp, Artificial sequence
  SiRNA target sequence
aatgcatctaatagtaacagattatgg

SEQ ID NO: 79410 - DNA, 27 bp, Artificial sequence
  SiRNA target sequence
atgcatctaatagtaacagattatgga

SEQ ID NO: 79411 - DNA, 27 bp, Artificial sequence
  SiRNA target sequence
tgcatctaatagtaacagattatggag

SEQ ID NO: 79412 - DNA, 27 bp, Artificial sequence
  SiRNA target sequence
gcatctaatagtaacagattatggaga

SEQ ID NO: 79413 - DNA, 27 bp, Artificial sequence
  SiRNA target sequence
catctaatagtaacagattatggagag

SEQ ID NO: 79414 - DNA, 27 bp, Artificial sequence
  SiRNA target sequence
atctaatagtaacagattatggagagc

SEQ ID NO: 79415 - DNA, 27 bp, Artificial sequence
  SiRNA target sequence
tctaatagtaacagattatggagagca

SEQ ID NO: 79416 - DNA, 27 bp, Artificial sequence
  SiRNA target sequence
ctaatagtaacagattatggagagcac

SEQ ID NO: 79417 - DNA, 27 bp, Artificial sequence
  SiRNA target sequence
taatagtaacagattatggagagcact

SEQ ID NO: 79418 - DNA, 27 bp, Artificial sequence
  SiRNA target sequence
aatagtaacagattatggagagcactg

SEQ ID NO: 79419 - DNA, 27 bp, Artificial sequence
  SiRNA target sequence
atagtaacagattatggagagcactgt

SEQ ID NO: 79420 - DNA, 27 bp, Artificial sequence
  SiRNA target sequence
tagtaacagattatggagagcactgta

SEQ ID NO: 79421 - DNA, 27 bp, Artificial sequence
  SiRNA target sequence
agtaacagattatggagagcactgtac

SEQ ID NO: 79422 - DNA, 27 bp, Artificial sequence
  SiRNA target sequence
gtaacagattatggagagcactgtaca

SEQ ID NO: 79423 - DNA, 27 bp, Artificial sequence
  SiRNA target sequence
taacagattatggagagcactgtacat

SEQ ID NO: 79424 - DNA, 27 bp, Artificial sequence
  SiRNA target sequence
aacagattatggagagcactgtacatt

SEQ ID NO: 79425 - DNA, 27 bp, Artificial sequence
  SiRNA target sequence
acagattatggagagcactgtacattt

SEQ ID NO: 79426 - DNA, 27 bp, Artificial sequence
  SiRNA target sequence
cagattatggagagcactgtacatttt

SEQ ID NO: 79427 - DNA, 27 bp, Artificial sequence
  SiRNA target sequence
agattatggagagcactgtacatttta

SEQ ID NO: 79428 - DNA, 27 bp, Artificial sequence
  SiRNA target sequence
gattatggagagcactgtacattttaa

SEQ ID NO: 79429 - DNA, 27 bp, Artificial sequence
  SiRNA target sequence
attatggagagcactgtacattttaaa

SEQ ID NO: 79430 - DNA, 27 bp, Artificial sequence
  SiRNA target sequence
ttatggagagcactgtacattttaaat

SEQ ID NO: 79431 - DNA, 27 bp, Artificial sequence
  SiRNA target sequence
tatggagagcactgtacattttaaatt

SEQ ID NO: 79432 - DNA, 27 bp, Artificial sequence
  SiRNA target sequence
atggagagcactgtacattttaaattt

SEQ ID NO: 79433 - DNA, 27 bp, Artificial sequence
  SiRNA target sequence
tggagagcactgtacattttaaattta

SEQ ID NO: 79434 - DNA, 27 bp, Artificial sequence
  SiRNA target sequence
ggagagcactgtacattttaaatttat

SEQ ID NO: 79435 - DNA, 27 bp, Artificial sequence
  SiRNA target sequence
gagagcactgtacattttaaatttatc

SEQ ID NO: 79436 - DNA, 27 bp, Artificial sequence
  SiRNA target sequence
agagcactgtacattttaaatttatct

SEQ ID NO: 79437 - DNA, 27 bp, Artificial sequence
  SiRNA target sequence
gagcactgtacattttaaatttatctc

SEQ ID NO: 79438 - DNA, 27 bp, Artificial sequence
  SiRNA target sequence
agcactgtacattttaaatttatctca

SEQ ID NO: 79439 - DNA, 27 bp, Artificial sequence
  SiRNA target sequence
gcactgtacattttaaatttatctcag

SEQ ID NO: 79440 - DNA, 27 bp, Artificial sequence
  SiRNA target sequence
cactgtacattttaaatttatctcaga

SEQ ID NO: 79441 - DNA, 27 bp, Artificial sequence
  SiRNA target sequence
actgtacattttaaatttatctcagag

SEQ ID NO: 79442 - DNA, 27 bp, Artificial sequence
  SiRNA target sequence
ctgtacattttaaatttatctcagaga

SEQ ID NO: 79443 - DNA, 27 bp, Artificial sequence
  SiRNA target sequence
tgtacattttaaatttatctcagagag

SEQ ID NO: 79444 - DNA, 27 bp, Artificial sequence
  SiRNA target sequence
gtacattttaaatttatctcagagagc

SEQ ID NO: 79445 - DNA, 27 bp, Artificial sequence
  SiRNA target sequence
tacattttaaatttatctcagagagca

SEQ ID NO: 79446 - DNA, 27 bp, Artificial sequence
  SiRNA target sequence
acattttaaatttatctcagagagcaa

SEQ ID NO: 79447 - DNA, 27 bp, Artificial sequence
  SiRNA target sequence
cattttaaatttatctcagagagcaat

SEQ ID NO: 79448 - DNA, 27 bp, Artificial sequence
  SiRNA target sequence
attttaaatttatctcagagagcaatt

SEQ ID NO: 79449 - DNA, 27 bp, Artificial sequence
  SiRNA target sequence
ttttaaatttatctcagagagcaattt

SEQ ID NO: 79450 - DNA, 27 bp, Artificial sequence
  SiRNA target sequence
tttaaatttatctcagagagcaatttt

SEQ ID NO: 79451 - DNA, 27 bp, Artificial sequence
  SiRNA target sequence
ttaaatttatctcagagagcaattttt

SEQ ID NO: 79452 - DNA, 27 bp, Artificial sequence
  SiRNA target sequence
taaatttatctcagagagcaatttttc

SEQ ID NO: 79453 - DNA, 27 bp, Artificial sequence
  SiRNA target sequence
aaatttatctcagagagcaatttttct

SEQ ID NO: 79454 - DNA, 27 bp, Artificial sequence
  SiRNA target sequence
aatttatctcagagagcaatttttctc

SEQ ID NO: 79455 - DNA, 27 bp, Artificial sequence
  SiRNA target sequence
atttatctcagagagcaatttttctct

SEQ ID NO: 79456 - DNA, 27 bp, Artificial sequence
  SiRNA target sequence
tttatctcagagagcaatttttctctt

SEQ ID NO: 79457 - DNA, 27 bp, Artificial sequence
  SiRNA target sequence
ttatctcagagagcaatttttctctta

SEQ ID NO: 79458 - DNA, 27 bp, Artificial sequence
  SiRNA target sequence
tatctcagagagcaatttttctcttac

SEQ ID NO: 79459 - DNA, 27 bp, Artificial sequence
  SiRNA target sequence
atctcagagagcaatttttctcttaca

SEQ ID NO: 79460 - DNA, 27 bp, Artificial sequence
  SiRNA target sequence
tctcagagagcaatttttctcttacaa

SEQ ID NO: 79461 - DNA, 27 bp, Artificial sequence
  SiRNA target sequence
ctcagagagcaatttttctcttacaaa

SEQ ID NO: 79462 - DNA, 27 bp, Artificial sequence
  SiRNA target sequence
tcagagagcaatttttctcttacaaag

SEQ ID NO: 79463 - DNA, 27 bp, Artificial sequence
  SiRNA target sequence
cagagagcaatttttctcttacaaagt

SEQ ID NO: 79464 - DNA, 27 bp, Artificial sequence
  SiRNA target sequence
agagagcaatttttctcttacaaagtt

SEQ ID NO: 79465 - DNA, 27 bp, Artificial sequence
  SiRNA target sequence
gagagcaatttttctcttacaaagttt

SEQ ID NO: 79466 - DNA, 27 bp, Artificial sequence
  SiRNA target sequence
agagcaatttttctcttacaaagtttt

SEQ ID NO: 79467 - DNA, 27 bp, Artificial sequence
  SiRNA target sequence
gagcaatttttctcttacaaagttttt

SEQ ID NO: 79468 - DNA, 27 bp, Artificial sequence
  SiRNA target sequence
agcaatttttctcttacaaagtttttt

SEQ ID NO: 79469 - DNA, 27 bp, Artificial sequence
  SiRNA target sequence
gcaatttttctcttacaaagttttttt

SEQ ID NO: 79470 - DNA, 27 bp, Artificial sequence
  SiRNA target sequence
caatttttctcttacaaagttttttta

SEQ ID NO: 79471 - DNA, 27 bp, Artificial sequence
  SiRNA target sequence
aatttttctcttacaaagtttttttat

SEQ ID NO: 79472 - DNA, 27 bp, Artificial sequence
  SiRNA target sequence
atttttctcttacaaagtttttttatt

SEQ ID NO: 79473 - DNA, 27 bp, Artificial sequence
  SiRNA target sequence
tttttctcttacaaagtttttttatta

SEQ ID NO: 79474 - DNA, 27 bp, Artificial sequence
  SiRNA target sequence
ttttctcttacaaagtttttttattat

SEQ ID NO: 79475 - DNA, 27 bp, Artificial sequence
  SiRNA target sequence
tttctcttacaaagtttttttattatt

SEQ ID NO: 79476 - DNA, 27 bp, Artificial sequence
  SiRNA target sequence
ttctcttacaaagtttttttattattt

SEQ ID NO: 79477 - DNA, 27 bp, Artificial sequence
  SiRNA target sequence
tctcttacaaagtttttttattattta

SEQ ID NO: 79478 - DNA, 27 bp, Artificial sequence
  SiRNA target sequence
ctcttacaaagtttttttattatttat

SEQ ID NO: 79479 - DNA, 27 bp, Artificial sequence
  SiRNA target sequence
tcttacaaagtttttttattatttatg

SEQ ID NO: 79480 - DNA, 27 bp, Artificial sequence
  SiRNA target sequence
cttacaaagtttttttattatttatgc

SEQ ID NO: 79481 - DNA, 27 bp, Artificial sequence
  SiRNA target sequence
ttacaaagtttttttattatttatgca

SEQ ID NO: 79482 - DNA, 27 bp, Artificial sequence
  SiRNA target sequence
tacaaagtttttttattatttatgcag

SEQ ID NO: 79483 - DNA, 27 bp, Artificial sequence
  SiRNA target sequence
acaaagtttttttattatttatgcagg

SEQ ID NO: 79484 - DNA, 27 bp, Artificial sequence
  SiRNA target sequence
caaagtttttttattatttatgcagga

SEQ ID NO: 79485 - DNA, 27 bp, Artificial sequence
  SiRNA target sequence
aaagtttttttattatttatgcaggaa

SEQ ID NO: 79486 - DNA, 27 bp, Artificial sequence
  SiRNA target sequence
aagtttttttattatttatgcaggaat

SEQ ID NO: 79487 - DNA, 27 bp, Artificial sequence
  SiRNA target sequence
agtttttttattatttatgcaggaata

SEQ ID NO: 79488 - DNA, 27 bp, Artificial sequence
  SiRNA target sequence
gtttttttattatttatgcaggaatat

SEQ ID NO: 79489 - DNA, 27 bp, Artificial sequence
  SiRNA target sequence
tttttttattatttatgcaggaatatc

SEQ ID NO: 79490 - DNA, 27 bp, Artificial sequence
  SiRNA target sequence
ttttttattatttatgcaggaatatca

SEQ ID NO: 79491 - DNA, 27 bp, Artificial sequence
  SiRNA target sequence
tttttattatttatgcaggaatatcag

SEQ ID NO: 79492 - DNA, 27 bp, Artificial sequence
  SiRNA target sequence
ttttattatttatgcaggaatatcagg

SEQ ID NO: 79493 - DNA, 27 bp, Artificial sequence
  SiRNA target sequence
tttattatttatgcaggaatatcagga

SEQ ID NO: 79494 - DNA, 27 bp, Artificial sequence
  SiRNA target sequence
ttattatttatgcaggaatatcaggaa

SEQ ID NO: 79495 - DNA, 27 bp, Artificial sequence
  SiRNA target sequence
tattatttatgcaggaatatcaggaat

SEQ ID NO: 79496 - DNA, 27 bp, Artificial sequence
  SiRNA target sequence
attatttatgcaggaatatcaggaata

SEQ ID NO: 79497 - DNA, 27 bp, Artificial sequence
  SiRNA target sequence
ttatttatgcaggaatatcaggaatat

SEQ ID NO: 79498 - DNA, 27 bp, Artificial sequence
  SiRNA target sequence
tatttatgcaggaatatcaggaatatt

SEQ ID NO: 79499 - DNA, 27 bp, Artificial sequence
  SiRNA target sequence
atttatgcaggaatatcaggaatatta

SEQ ID NO: 79500 - DNA, 27 bp, Artificial sequence
  SiRNA target sequence
tttatgcaggaatatcaggaatattat

SEQ ID NO: 79501 - DNA, 27 bp, Artificial sequence
  SiRNA target sequence
ttatgcaggaatatcaggaatattatc

SEQ ID NO: 79502 - DNA, 27 bp, Artificial sequence
  SiRNA target sequence
tatgcaggaatatcaggaatattatct

SEQ ID NO: 79503 - DNA, 27 bp, Artificial sequence
  SiRNA target sequence
atgcaggaatatcaggaatattatctc

SEQ ID NO: 79504 - DNA, 27 bp, Artificial sequence
  SiRNA target sequence
tgcaggaatatcaggaatattatctca

SEQ ID NO: 79505 - DNA, 27 bp, Artificial sequence
  SiRNA target sequence
gcaggaatatcaggaatattatctcaa

SEQ ID NO: 79506 - DNA, 27 bp, Artificial sequence
  SiRNA target sequence
caggaatatcaggaatattatctcaaa

SEQ ID NO: 79507 - DNA, 27 bp, Artificial sequence
  SiRNA target sequence
aggaatatcaggaatattatctcaaaa

SEQ ID NO: 79508 - DNA, 27 bp, Artificial sequence
  SiRNA target sequence
ggaatatcaggaatattatctcaaaat

SEQ ID NO: 79509 - DNA, 27 bp, Artificial sequence
  SiRNA target sequence
gaatatcaggaatattatctcaaaata

SEQ ID NO: 79510 - DNA, 27 bp, Artificial sequence
  SiRNA target sequence
aatatcaggaatattatctcaaaatat

SEQ ID NO: 79511 - DNA, 27 bp, Artificial sequence
  SiRNA target sequence
atatcaggaatattatctcaaaatatg

SEQ ID NO: 79512 - DNA, 27 bp, Artificial sequence
  SiRNA target sequence
tatcaggaatattatctcaaaatatgt

SEQ ID NO: 79513 - DNA, 27 bp, Artificial sequence
  SiRNA target sequence
atcaggaatattatctcaaaatatgtc

SEQ ID NO: 79514 - DNA, 27 bp, Artificial sequence
  SiRNA target sequence
tcaggaatattatctcaaaatatgtca

SEQ ID NO: 79515 - DNA, 27 bp, Artificial sequence
  SiRNA target sequence
caggaatattatctcaaaatatgtcat

SEQ ID NO: 79516 - DNA, 27 bp, Artificial sequence
  SiRNA target sequence
aggaatattatctcaaaatatgtcatc

SEQ ID NO: 79517 - DNA, 27 bp, Artificial sequence
  SiRNA target sequence
ggaatattatctcaaaatatgtcatct

SEQ ID NO: 79518 - DNA, 27 bp, Artificial sequence
  SiRNA target sequence
gaatattatctcaaaatatgtcatcta

SEQ ID NO: 79519 - DNA, 27 bp, Artificial sequence
  SiRNA target sequence
aatattatctcaaaatatgtcatctaa

SEQ ID NO: 79520 - DNA, 27 bp, Artificial sequence
  SiRNA target sequence
atattatctcaaaatatgtcatctaac

SEQ ID NO: 79521 - DNA, 27 bp, Artificial sequence
  SiRNA target sequence
tattatctcaaaatatgtcatctaacc

SEQ ID NO: 79522 - DNA, 27 bp, Artificial sequence
  SiRNA target sequence
attatctcaaaatatgtcatctaacca

SEQ ID NO: 79523 - DNA, 27 bp, Artificial sequence
  SiRNA target sequence
ttatctcaaaatatgtcatctaaccaa

SEQ ID NO: 79524 - DNA, 27 bp, Artificial sequence
  SiRNA target sequence
tatctcaaaatatgtcatctaaccaac

SEQ ID NO: 79525 - DNA, 27 bp, Artificial sequence
  SiRNA target sequence
atctcaaaatatgtcatctaaccaact

SEQ ID NO: 79526 - DNA, 27 bp, Artificial sequence
  SiRNA target sequence
tctcaaaatatgtcatctaaccaactc

SEQ ID NO: 79527 - DNA, 27 bp, Artificial sequence
  SiRNA target sequence
ctcaaaatatgtcatctaaccaactca

SEQ ID NO: 79528 - DNA, 27 bp, Artificial sequence
  SiRNA target sequence
tcaaaatatgtcatctaaccaactcat

SEQ ID NO: 79529 - DNA, 27 bp, Artificial sequence
  SiRNA target sequence
caaaatatgtcatctaaccaactcatt

SEQ ID NO: 79530 - DNA, 27 bp, Artificial sequence
  SiRNA target sequence
aaaatatgtcatctaaccaactcattt

SEQ ID NO: 79531 - DNA, 27 bp, Artificial sequence
  SiRNA target sequence
aaatatgtcatctaaccaactcattta

SEQ ID NO: 79532 - DNA, 27 bp, Artificial sequence
  SiRNA target sequence
aatatgtcatctaaccaactcatttat

SEQ ID NO: 79533 - DNA, 27 bp, Artificial sequence
  SiRNA target sequence
atatgtcatctaaccaactcatttatt

SEQ ID NO: 79534 - DNA, 27 bp, Artificial sequence
  SiRNA target sequence
tatgtcatctaaccaactcatttattt

SEQ ID NO: 79535 - DNA, 27 bp, Artificial sequence
  SiRNA target sequence
atgtcatctaaccaactcatttattta

SEQ ID NO: 79536 - DNA, 27 bp, Artificial sequence
  SiRNA target sequence
tgtcatctaaccaactcatttatttaa

SEQ ID NO: 79537 - DNA, 27 bp, Artificial sequence
  SiRNA target sequence
gtcatctaaccaactcatttatttaat

SEQ ID NO: 79538 - DNA, 27 bp, Artificial sequence
  SiRNA target sequence
tcatctaaccaactcatttatttaatg

SEQ ID NO: 79539 - DNA, 27 bp, Artificial sequence
  SiRNA target sequence
catctaaccaactcatttatttaatgt

SEQ ID NO: 79540 - DNA, 27 bp, Artificial sequence
  SiRNA target sequence
atctaaccaactcatttatttaatgtc

SEQ ID NO: 79541 - DNA, 27 bp, Artificial sequence
  SiRNA target sequence
tctaaccaactcatttatttaatgtcc

SEQ ID NO: 79542 - DNA, 27 bp, Artificial sequence
  SiRNA target sequence
ctaaccaactcatttatttaatgtcca

SEQ ID NO: 79543 - DNA, 27 bp, Artificial sequence
  SiRNA target sequence
taaccaactcatttatttaatgtccat

SEQ ID NO: 79544 - DNA, 27 bp, Artificial sequence
  SiRNA target sequence
aaccaactcatttatttaatgtccatt

SEQ ID NO: 79545 - DNA, 27 bp, Artificial sequence
  SiRNA target sequence
accaactcatttatttaatgtccatta

SEQ ID NO: 79546 - DNA, 27 bp, Artificial sequence
  SiRNA target sequence
ccaactcatttatttaatgtccattac

SEQ ID NO: 79547 - DNA, 27 bp, Artificial sequence
  SiRNA target sequence
caactcatttatttaatgtccattaca

SEQ ID NO: 79548 - DNA, 27 bp, Artificial sequence
  SiRNA target sequence
aactcatttatttaatgtccattacat

SEQ ID NO: 79549 - DNA, 27 bp, Artificial sequence
  SiRNA target sequence
actcatttatttaatgtccattacatc

SEQ ID NO: 79550 - DNA, 27 bp, Artificial sequence
  SiRNA target sequence
ctcatttatttaatgtccattacatct

SEQ ID NO: 79551 - DNA, 27 bp, Artificial sequence
  SiRNA target sequence
tcatttatttaatgtccattacatcta

SEQ ID NO: 79552 - DNA, 27 bp, Artificial sequence
  SiRNA target sequence
catttatttaatgtccattacatctac

SEQ ID NO: 79553 - DNA, 27 bp, Artificial sequence
  SiRNA target sequence
atttatttaatgtccattacatctacg

SEQ ID NO: 79554 - DNA, 27 bp, Artificial sequence
  SiRNA target sequence
tttatttaatgtccattacatctacgg

SEQ ID NO: 79555 - DNA, 27 bp, Artificial sequence
  SiRNA target sequence
ttatttaatgtccattacatctacggt

SEQ ID NO: 79556 - DNA, 27 bp, Artificial sequence
  SiRNA target sequence
tatttaatgtccattacatctacggtt

SEQ ID NO: 79557 - DNA, 27 bp, Artificial sequence
  SiRNA target sequence
atttaatgtccattacatctacggtta

SEQ ID NO: 79558 - DNA, 27 bp, Artificial sequence
  SiRNA target sequence
tttaatgtccattacatctacggttac

SEQ ID NO: 79559 - DNA, 27 bp, Artificial sequence
  SiRNA target sequence
ttaatgtccattacatctacggttact

SEQ ID NO: 79560 - DNA, 27 bp, Artificial sequence
  SiRNA target sequence
taatgtccattacatctacggttacta

SEQ ID NO: 79561 - DNA, 27 bp, Artificial sequence
  SiRNA target sequence
aatgtccattacatctacggttactat

SEQ ID NO: 79562 - DNA, 27 bp, Artificial sequence
  SiRNA target sequence
atgtccattacatctacggttactatt

SEQ ID NO: 79563 - DNA, 27 bp, Artificial sequence
  SiRNA target sequence
tgtccattacatctacggttactatta

SEQ ID NO: 79564 - DNA, 27 bp, Artificial sequence
  SiRNA target sequence
gtccattacatctacggttactattaa

SEQ ID NO: 79565 - DNA, 27 bp, Artificial sequence
  SiRNA target sequence
tccattacatctacggttactattaat

SEQ ID NO: 79566 - DNA, 27 bp, Artificial sequence
  SiRNA target sequence
ccattacatctacggttactattaatt

SEQ ID NO: 79567 - DNA, 27 bp, Artificial sequence
  SiRNA target sequence
cattacatctacggttactattaattt

SEQ ID NO: 79568 - DNA, 27 bp, Artificial sequence
  SiRNA target sequence
attacatctacggttactattaattta

SEQ ID NO: 79569 - DNA, 27 bp, Artificial sequence
  SiRNA target sequence
ttacatctacggttactattaatttaa

SEQ ID NO: 79570 - DNA, 27 bp, Artificial sequence
  SiRNA target sequence
tacatctacggttactattaatttaag

SEQ ID NO: 79571 - DNA, 27 bp, Artificial sequence
  SiRNA target sequence
acatctacggttactattaatttaagt

SEQ ID NO: 79572 - DNA, 27 bp, Artificial sequence
  SiRNA target sequence
catctacggttactattaatttaagta

SEQ ID NO: 79573 - DNA, 27 bp, Artificial sequence
  SiRNA target sequence
atctacggttactattaatttaagtaa

SEQ ID NO: 79574 - DNA, 27 bp, Artificial sequence
  SiRNA target sequence
tctacggttactattaatttaagtaac

SEQ ID NO: 79575 - DNA, 27 bp, Artificial sequence
  SiRNA target sequence
ctacggttactattaatttaagtaact

SEQ ID NO: 79576 - DNA, 27 bp, Artificial sequence
  SiRNA target sequence
tacggttactattaatttaagtaactt

SEQ ID NO: 79577 - DNA, 27 bp, Artificial sequence
  SiRNA target sequence
acggttactattaatttaagtaacttg

SEQ ID NO: 79578 - DNA, 27 bp, Artificial sequence
  SiRNA target sequence
cggttactattaatttaagtaacttgg

SEQ ID NO: 79579 - DNA, 27 bp, Artificial sequence
  SiRNA target sequence
ggttactattaatttaagtaacttggg

SEQ ID NO: 79580 - DNA, 27 bp, Artificial sequence
  SiRNA target sequence
gttactattaatttaagtaacttgggt

SEQ ID NO: 79581 - DNA, 27 bp, Artificial sequence
  SiRNA target sequence
ttactattaatttaagtaacttgggtt

SEQ ID NO: 79582 - DNA, 27 bp, Artificial sequence
  SiRNA target sequence
tactattaatttaagtaacttgggtta

SEQ ID NO: 79583 - DNA, 27 bp, Artificial sequence
  SiRNA target sequence
actattaatttaagtaacttgggttac

SEQ ID NO: 79584 - DNA, 27 bp, Artificial sequence
  SiRNA target sequence
ctattaatttaagtaacttgggttact

SEQ ID NO: 79585 - DNA, 27 bp, Artificial sequence
  SiRNA target sequence
tattaatttaagtaacttgggttactt

SEQ ID NO: 79586 - DNA, 27 bp, Artificial sequence
  SiRNA target sequence
attaatttaagtaacttgggttactta

SEQ ID NO: 79587 - DNA, 27 bp, Artificial sequence
  SiRNA target sequence
ttaatttaagtaacttgggttacttat

SEQ ID NO: 79588 - DNA, 27 bp, Artificial sequence
  SiRNA target sequence
taatttaagtaacttgggttacttata

SEQ ID NO: 79589 - DNA, 27 bp, Artificial sequence
  SiRNA target sequence
aatttaagtaacttgggttacttatac

SEQ ID NO: 79590 - DNA, 27 bp, Artificial sequence
  SiRNA target sequence
atttaagtaacttgggttacttataca

SEQ ID NO: 79591 - DNA, 27 bp, Artificial sequence
  SiRNA target sequence
tttaagtaacttgggttacttatacac

SEQ ID NO: 79592 - DNA, 27 bp, Artificial sequence
  SiRNA target sequence
ttaagtaacttgggttacttatacact

SEQ ID NO: 79593 - DNA, 27 bp, Artificial sequence
  SiRNA target sequence
taagtaacttgggttacttatacacta

SEQ ID NO: 79594 - DNA, 27 bp, Artificial sequence
  SiRNA target sequence
aagtaacttgggttacttatacactag

SEQ ID NO: 79595 - DNA, 27 bp, Artificial sequence
  SiRNA target sequence
agtaacttgggttacttatacactaga

SEQ ID NO: 79596 - DNA, 27 bp, Artificial sequence
  SiRNA target sequence
gtaacttgggttacttatacactagat

SEQ ID NO: 79597 - DNA, 27 bp, Artificial sequence
  SiRNA target sequence
taacttgggttacttatacactagata

SEQ ID NO: 79598 - DNA, 27 bp, Artificial sequence
  SiRNA target sequence
aacttgggttacttatacactagatat

SEQ ID NO: 79599 - DNA, 27 bp, Artificial sequence
  SiRNA target sequence
acttgggttacttatacactagatata

SEQ ID NO: 79600 - DNA, 27 bp, Artificial sequence
  SiRNA target sequence
cttgggttacttatacactagatatac

SEQ ID NO: 79601 - DNA, 27 bp, Artificial sequence
  SiRNA target sequence
ttgggttacttatacactagatataca

SEQ ID NO: 79602 - DNA, 27 bp, Artificial sequence
  SiRNA target sequence
tgggttacttatacactagatatacac

SEQ ID NO: 79603 - DNA, 27 bp, Artificial sequence
  SiRNA target sequence
gggttacttatacactagatatacaca

SEQ ID NO: 79604 - DNA, 27 bp, Artificial sequence
  SiRNA target sequence
ggttacttatacactagatatacacaa

SEQ ID NO: 79605 - DNA, 27 bp, Artificial sequence
  SiRNA target sequence
gttacttatacactagatatacacaag

SEQ ID NO: 79606 - DNA, 27 bp, Artificial sequence
  SiRNA target sequence
ttacttatacactagatatacacaagc

SEQ ID NO: 79607 - DNA, 27 bp, Artificial sequence
  SiRNA target sequence
tacttatacactagatatacacaagca

SEQ ID NO: 79608 - DNA, 27 bp, Artificial sequence
  SiRNA target sequence
acttatacactagatatacacaagcaa

SEQ ID NO: 79609 - DNA, 27 bp, Artificial sequence
  SiRNA target sequence
cttatacactagatatacacaagcaat

SEQ ID NO: 79610 - DNA, 27 bp, Artificial sequence
  SiRNA target sequence
ttatacactagatatacacaagcaata

SEQ ID NO: 79611 - DNA, 27 bp, Artificial sequence
  SiRNA target sequence
tatacactagatatacacaagcaataa

SEQ ID NO: 79612 - DNA, 27 bp, Artificial sequence
  SiRNA target sequence
atacactagatatacacaagcaataat

SEQ ID NO: 79613 - DNA, 27 bp, Artificial sequence
  SiRNA target sequence
tacactagatatacacaagcaataatt

SEQ ID NO: 79614 - DNA, 27 bp, Artificial sequence
  SiRNA target sequence
acactagatatacacaagcaataatta

SEQ ID NO: 79615 - DNA, 27 bp, Artificial sequence
  SiRNA target sequence
cactagatatacacaagcaataattaa

SEQ ID NO: 79616 - DNA, 27 bp, Artificial sequence
  SiRNA target sequence
actagatatacacaagcaataattaat

SEQ ID NO: 79617 - DNA, 27 bp, Artificial sequence
  SiRNA target sequence
ctagatatacacaagcaataattaatg

SEQ ID NO: 79618 - DNA, 27 bp, Artificial sequence
  SiRNA target sequence
tagatatacacaagcaataattaatgc

SEQ ID NO: 79619 - DNA, 27 bp, Artificial sequence
  SiRNA target sequence
agatatacacaagcaataattaatgca

SEQ ID NO: 79620 - DNA, 27 bp, Artificial sequence
  SiRNA target sequence
gatatacacaagcaataattaatgcaa

SEQ ID NO: 79621 - DNA, 27 bp, Artificial sequence
  SiRNA target sequence
atatacacaagcaataattaatgcaag

SEQ ID NO: 79622 - DNA, 27 bp, Artificial sequence
  SiRNA target sequence
tatacacaagcaataattaatgcaaga

SEQ ID NO: 79623 - DNA, 27 bp, Artificial sequence
  SiRNA target sequence
atacacaagcaataattaatgcaagat

SEQ ID NO: 79624 - DNA, 27 bp, Artificial sequence
  SiRNA target sequence
tacacaagcaataattaatgcaagatc

SEQ ID NO: 79625 - DNA, 27 bp, Artificial sequence
  SiRNA target sequence
acacaagcaataattaatgcaagatct

SEQ ID NO: 79626 - DNA, 27 bp, Artificial sequence
  SiRNA target sequence
cacaagcaataattaatgcaagatcta

SEQ ID NO: 79627 - DNA, 27 bp, Artificial sequence
  SiRNA target sequence
acaagcaataattaatgcaagatctac

SEQ ID NO: 79628 - DNA, 27 bp, Artificial sequence
  SiRNA target sequence
caagcaataattaatgcaagatctact

SEQ ID NO: 79629 - DNA, 27 bp, Artificial sequence
  SiRNA target sequence
aagcaataattaatgcaagatctactt

SEQ ID NO: 79630 - DNA, 27 bp, Artificial sequence
  SiRNA target sequence
agcaataattaatgcaagatctactta

SEQ ID NO: 79631 - DNA, 27 bp, Artificial sequence
  SiRNA target sequence
gcaataattaatgcaagatctacttat

SEQ ID NO: 79632 - DNA, 27 bp, Artificial sequence
  SiRNA target sequence
caataattaatgcaagatctacttatg

SEQ ID NO: 79633 - DNA, 27 bp, Artificial sequence
  SiRNA target sequence
aataattaatgcaagatctacttatga

SEQ ID NO: 79634 - DNA, 27 bp, Artificial sequence
  SiRNA target sequence
ataattaatgcaagatctacttatgat

SEQ ID NO: 79635 - DNA, 27 bp, Artificial sequence
  SiRNA target sequence
taattaatgcaagatctacttatgata

SEQ ID NO: 79636 - DNA, 27 bp, Artificial sequence
  SiRNA target sequence
aattaatgcaagatctacttatgatac

SEQ ID NO: 79637 - DNA, 27 bp, Artificial sequence
  SiRNA target sequence
attaatgcaagatctacttatgataca

SEQ ID NO: 79638 - DNA, 27 bp, Artificial sequence
  SiRNA target sequence
ttaatgcaagatctacttatgatacaa

SEQ ID NO: 79639 - DNA, 27 bp, Artificial sequence
  SiRNA target sequence
taatgcaagatctacttatgatacaat

SEQ ID NO: 79640 - DNA, 27 bp, Artificial sequence
  SiRNA target sequence
aatgcaagatctacttatgatacaatg

SEQ ID NO: 79641 - DNA, 27 bp, Artificial sequence
  SiRNA target sequence
atgcaagatctacttatgatacaatgt

SEQ ID NO: 79642 - DNA, 27 bp, Artificial sequence
  SiRNA target sequence
tgcaagatctacttatgatacaatgtt

SEQ ID NO: 79643 - DNA, 27 bp, Artificial sequence
  SiRNA target sequence
gcaagatctacttatgatacaatgtta

SEQ ID NO: 79644 - DNA, 27 bp, Artificial sequence
  SiRNA target sequence
caagatctacttatgatacaatgttag

SEQ ID NO: 79645 - DNA, 27 bp, Artificial sequence
  SiRNA target sequence
aagatctacttatgatacaatgttaga

SEQ ID NO: 79646 - DNA, 27 bp, Artificial sequence
  SiRNA target sequence
agatctacttatgatacaatgttagat

SEQ ID NO: 79647 - DNA, 27 bp, Artificial sequence
  SiRNA target sequence
gatctacttatgatacaatgttagata

SEQ ID NO: 79648 - DNA, 27 bp, Artificial sequence
  SiRNA target sequence
atctacttatgatacaatgttagatat

SEQ ID NO: 79649 - DNA, 27 bp, Artificial sequence
  SiRNA target sequence
tctacttatgatacaatgttagatata

SEQ ID NO: 79650 - DNA, 27 bp, Artificial sequence
  SiRNA target sequence
ctacttatgatacaatgttagatataa

SEQ ID NO: 79651 - DNA, 27 bp, Artificial sequence
  SiRNA target sequence
tacttatgatacaatgttagatataaa

SEQ ID NO: 79652 - DNA, 27 bp, Artificial sequence
  SiRNA target sequence
acttatgatacaatgttagatataaaa

SEQ ID NO: 79653 - DNA, 27 bp, Artificial sequence
  SiRNA target sequence
cttatgatacaatgttagatataaaaa

SEQ ID NO: 79654 - DNA, 27 bp, Artificial sequence
  SiRNA target sequence
ttatgatacaatgttagatataaaaaa

SEQ ID NO: 79655 - DNA, 27 bp, Artificial sequence
  SiRNA target sequence
tatgatacaatgttagatataaaaaaa

SEQ ID NO: 79656 - DNA, 27 bp, Artificial sequence
  SiRNA target sequence
atgatacaatgttagatataaaaaaag

SEQ ID NO: 79657 - DNA, 27 bp, Artificial sequence
  SiRNA target sequence
tgatacaatgttagatataaaaaaaga

SEQ ID NO: 79658 - DNA, 27 bp, Artificial sequence
  SiRNA target sequence
gatacaatgttagatataaaaaaagag

SEQ ID NO: 79659 - DNA, 27 bp, Artificial sequence
  SiRNA target sequence
atacaatgttagatataaaaaaagaga

SEQ ID NO: 79660 - DNA, 27 bp, Artificial sequence
  SiRNA target sequence
tacaatgttagatataaaaaaagagaa

SEQ ID NO: 79661 - DNA, 27 bp, Artificial sequence
  SiRNA target sequence
acaatgttagatataaaaaaagagaat

SEQ ID NO: 79662 - DNA, 27 bp, Artificial sequence
  SiRNA target sequence
caatgttagatataaaaaaagagaata

SEQ ID NO: 79663 - DNA, 27 bp, Artificial sequence
  SiRNA target sequence
aatgttagatataaaaaaagagaataa

SEQ ID NO: 79664 - DNA, 27 bp, Artificial sequence
  SiRNA target sequence
atgttagatataaaaaaagagaataat

SEQ ID NO: 79665 - DNA, 27 bp, Artificial sequence
  SiRNA target sequence
tgttagatataaaaaaagagaataata

SEQ ID NO: 79666 - DNA, 27 bp, Artificial sequence
  SiRNA target sequence
gttagatataaaaaaagagaataataa

SEQ ID NO: 79667 - DNA, 27 bp, Artificial sequence
  SiRNA target sequence
ttagatataaaaaaagagaataataag

SEQ ID NO: 79668 - DNA, 27 bp, Artificial sequence
  SiRNA target sequence
tagatataaaaaaagagaataataagt

SEQ ID NO: 79669 - DNA, 27 bp, Artificial sequence
  SiRNA target sequence
agatataaaaaaagagaataataagtt

SEQ ID NO: 79670 - DNA, 27 bp, Artificial sequence
  SiRNA target sequence
gatataaaaaaagagaataataagttt

SEQ ID NO: 79671 - DNA, 27 bp, Artificial sequence
  SiRNA target sequence
atataaaaaaagagaataataagttta

SEQ ID NO: 79672 - DNA, 27 bp, Artificial sequence
  SiRNA target sequence
tataaaaaaagagaataataagtttaa

SEQ ID NO: 79673 - DNA, 27 bp, Artificial sequence
  SiRNA target sequence
ataaaaaaagagaataataagtttaag

SEQ ID NO: 79674 - DNA, 27 bp, Artificial sequence
  SiRNA target sequence
taaaaaaagagaataataagtttaaga

SEQ ID NO: 79675 - DNA, 27 bp, Artificial sequence
  SiRNA target sequence
aaaaaaagagaataataagtttaagat

SEQ ID NO: 79676 - DNA, 27 bp, Artificial sequence
  SiRNA target sequence
aaaaaagagaataataagtttaagatt

SEQ ID NO: 79677 - DNA, 27 bp, Artificial sequence
  SiRNA target sequence
aaaaagagaataataagtttaagatta

SEQ ID NO: 79678 - DNA, 27 bp, Artificial sequence
  SiRNA target sequence
aaaagagaataataagtttaagattac

SEQ ID NO: 79679 - DNA, 27 bp, Artificial sequence
  SiRNA target sequence
aaagagaataataagtttaagattaca

SEQ ID NO: 79680 - DNA, 27 bp, Artificial sequence
  SiRNA target sequence
aagagaataataagtttaagattacag

SEQ ID NO: 79681 - DNA, 27 bp, Artificial sequence
  SiRNA target sequence
agagaataataagtttaagattacaga

SEQ ID NO: 79682 - DNA, 27 bp, Artificial sequence
  SiRNA target sequence
gagaataataagtttaagattacagaa

SEQ ID NO: 79683 - DNA, 27 bp, Artificial sequence
  SiRNA target sequence
agaataataagtttaagattacagaat

SEQ ID NO: 79684 - DNA, 27 bp, Artificial sequence
  SiRNA target sequence
gaataataagtttaagattacagaatt

SEQ ID NO: 79685 - DNA, 27 bp, Artificial sequence
  SiRNA target sequence
aataataagtttaagattacagaattt

SEQ ID NO: 79686 - DNA, 27 bp, Artificial sequence
  SiRNA target sequence
ataataagtttaagattacagaattta

SEQ ID NO: 79687 - DNA, 27 bp, Artificial sequence
  SiRNA target sequence
taataagtttaagattacagaatttaa

SEQ ID NO: 79688 - DNA, 27 bp, Artificial sequence
  SiRNA target sequence
aataagtttaagattacagaatttaaa

SEQ ID NO: 79689 - DNA, 27 bp, Artificial sequence
  SiRNA target sequence
ataagtttaagattacagaatttaaag

SEQ ID NO: 79690 - DNA, 27 bp, Artificial sequence
  SiRNA target sequence
taagtttaagattacagaatttaaaga

SEQ ID NO: 79691 - DNA, 27 bp, Artificial sequence
  SiRNA target sequence
aagtttaagattacagaatttaaagaa

SEQ ID NO: 79692 - DNA, 27 bp, Artificial sequence
  SiRNA target sequence
agtttaagattacagaatttaaagaaa

SEQ ID NO: 79693 - DNA, 27 bp, Artificial sequence
  SiRNA target sequence
gtttaagattacagaatttaaagaaag

SEQ ID NO: 79694 - DNA, 27 bp, Artificial sequence
  SiRNA target sequence
tttaagattacagaatttaaagaaagt

SEQ ID NO: 79695 - DNA, 27 bp, Artificial sequence
  SiRNA target sequence
ttaagattacagaatttaaagaaagta

SEQ ID NO: 79696 - DNA, 27 bp, Artificial sequence
  SiRNA target sequence
taagattacagaatttaaagaaagtat

SEQ ID NO: 79697 - DNA, 27 bp, Artificial sequence
  SiRNA target sequence
aagattacagaatttaaagaaagtatt

SEQ ID NO: 79698 - DNA, 27 bp, Artificial sequence
  SiRNA target sequence
agattacagaatttaaagaaagtatta

SEQ ID NO: 79699 - DNA, 27 bp, Artificial sequence
  SiRNA target sequence
gattacagaatttaaagaaagtattaa

SEQ ID NO: 79700 - DNA, 27 bp, Artificial sequence
  SiRNA target sequence
attacagaatttaaagaaagtattaag

SEQ ID NO: 79701 - DNA, 27 bp, Artificial sequence
  SiRNA target sequence
ttacagaatttaaagaaagtattaagt

SEQ ID NO: 79702 - DNA, 27 bp, Artificial sequence
  SiRNA target sequence
tacagaatttaaagaaagtattaagtt

SEQ ID NO: 79703 - DNA, 27 bp, Artificial sequence
  SiRNA target sequence
acagaatttaaagaaagtattaagttt

SEQ ID NO: 79704 - DNA, 27 bp, Artificial sequence
  SiRNA target sequence
cagaatttaaagaaagtattaagttta

SEQ ID NO: 79705 - DNA, 27 bp, Artificial sequence
  SiRNA target sequence
agaatttaaagaaagtattaagtttaa

SEQ ID NO: 79706 - DNA, 27 bp, Artificial sequence
  SiRNA target sequence
gaatttaaagaaagtattaagtttaat

SEQ ID NO: 79707 - DNA, 27 bp, Artificial sequence
  SiRNA target sequence
aatttaaagaaagtattaagtttaata

SEQ ID NO: 79708 - DNA, 27 bp, Artificial sequence
  SiRNA target sequence
atttaaagaaagtattaagtttaataa

SEQ ID NO: 79709 - DNA, 27 bp, Artificial sequence
  SiRNA target sequence
tttaaagaaagtattaagtttaataat

SEQ ID NO: 79710 - DNA, 27 bp, Artificial sequence
  SiRNA target sequence
ttaaagaaagtattaagtttaataatt

SEQ ID NO: 79711 - DNA, 27 bp, Artificial sequence
  SiRNA target sequence
taaagaaagtattaagtttaataattt

SEQ ID NO: 79712 - DNA, 27 bp, Artificial sequence
  SiRNA target sequence
aaagaaagtattaagtttaataatttg

SEQ ID NO: 79713 - DNA, 27 bp, Artificial sequence
  SiRNA target sequence
aagaaagtattaagtttaataatttgt

SEQ ID NO: 79714 - DNA, 27 bp, Artificial sequence
  SiRNA target sequence
agaaagtattaagtttaataatttgtc

SEQ ID NO: 79715 - DNA, 27 bp, Artificial sequence
  SiRNA target sequence
gaaagtattaagtttaataatttgtca

SEQ ID NO: 79716 - DNA, 27 bp, Artificial sequence
  SiRNA target sequence
aaagtattaagtttaataatttgtcat

SEQ ID NO: 79717 - DNA, 27 bp, Artificial sequence
  SiRNA target sequence
aagtattaagtttaataatttgtcatt

SEQ ID NO: 79718 - DNA, 27 bp, Artificial sequence
  SiRNA target sequence
agtattaagtttaataatttgtcattt

SEQ ID NO: 79719 - DNA, 27 bp, Artificial sequence
  SiRNA target sequence
gtattaagtttaataatttgtcatttg

SEQ ID NO: 79720 - DNA, 27 bp, Artificial sequence
  SiRNA target sequence
tattaagtttaataatttgtcatttgg

SEQ ID NO: 79721 - DNA, 27 bp, Artificial sequence
  SiRNA target sequence
attaagtttaataatttgtcatttggt

SEQ ID NO: 79722 - DNA, 27 bp, Artificial sequence
  SiRNA target sequence
ttaagtttaataatttgtcatttggtt

SEQ ID NO: 79723 - DNA, 27 bp, Artificial sequence
  SiRNA target sequence
taagtttaataatttgtcatttggtta

SEQ ID NO: 79724 - DNA, 27 bp, Artificial sequence
  SiRNA target sequence
aagtttaataatttgtcatttggttat

SEQ ID NO: 79725 - DNA, 27 bp, Artificial sequence
  SiRNA target sequence
agtttaataatttgtcatttggttatg

SEQ ID NO: 79726 - DNA, 27 bp, Artificial sequence
  SiRNA target sequence
gtttaataatttgtcatttggttatga

SEQ ID NO: 79727 - DNA, 27 bp, Artificial sequence
  SiRNA target sequence
tttaataatttgtcatttggttatgaa

SEQ ID NO: 79728 - DNA, 27 bp, Artificial sequence
  SiRNA target sequence
ttaataatttgtcatttggttatgaaa

SEQ ID NO: 79729 - DNA, 27 bp, Artificial sequence
  SiRNA target sequence
taataatttgtcatttggttatgaaag

SEQ ID NO: 79730 - DNA, 27 bp, Artificial sequence
  SiRNA target sequence
aataatttgtcatttggttatgaaagt

SEQ ID NO: 79731 - DNA, 27 bp, Artificial sequence
  SiRNA target sequence
ataatttgtcatttggttatgaaagta

SEQ ID NO: 79732 - DNA, 27 bp, Artificial sequence
  SiRNA target sequence
taatttgtcatttggttatgaaagtag

SEQ ID NO: 79733 - DNA, 27 bp, Artificial sequence
  SiRNA target sequence
aatttgtcatttggttatgaaagtaga

SEQ ID NO: 79734 - DNA, 27 bp, Artificial sequence
  SiRNA target sequence
atttgtcatttggttatgaaagtagac

SEQ ID NO: 79735 - DNA, 27 bp, Artificial sequence
  SiRNA target sequence
tttgtcatttggttatgaaagtagaca

SEQ ID NO: 79736 - DNA, 27 bp, Artificial sequence
  SiRNA target sequence
ttgtcatttggttatgaaagtagacaa

SEQ ID NO: 79737 - DNA, 27 bp, Artificial sequence
  SiRNA target sequence
tgtcatttggttatgaaagtagacaaa

SEQ ID NO: 79738 - DNA, 27 bp, Artificial sequence
  SiRNA target sequence
gtcatttggttatgaaagtagacaaat

SEQ ID NO: 79739 - DNA, 27 bp, Artificial sequence
  SiRNA target sequence
tcatttggttatgaaagtagacaaatt

SEQ ID NO: 79740 - DNA, 27 bp, Artificial sequence
  SiRNA target sequence
catttggttatgaaagtagacaaattt

SEQ ID NO: 79741 - DNA, 27 bp, Artificial sequence
  SiRNA target sequence
atttggttatgaaagtagacaaatttt

SEQ ID NO: 79742 - DNA, 27 bp, Artificial sequence
  SiRNA target sequence
tttggttatgaaagtagacaaattttt

SEQ ID NO: 79743 - DNA, 27 bp, Artificial sequence
  SiRNA target sequence
ttggttatgaaagtagacaaattttta

SEQ ID NO: 79744 - DNA, 27 bp, Artificial sequence
  SiRNA target sequence
tggttatgaaagtagacaaatttttaa

SEQ ID NO: 79745 - DNA, 27 bp, Artificial sequence
  SiRNA target sequence
ggttatgaaagtagacaaatttttaat

SEQ ID NO: 79746 - DNA, 27 bp, Artificial sequence
  SiRNA target sequence
gttatgaaagtagacaaatttttaata

SEQ ID NO: 79747 - DNA, 27 bp, Artificial sequence
  SiRNA target sequence
ttatgaaagtagacaaatttttaataa

SEQ ID NO: 79748 - DNA, 27 bp, Artificial sequence
  SiRNA target sequence
tatgaaagtagacaaatttttaataaa

SEQ ID NO: 79749 - DNA, 27 bp, Artificial sequence
  SiRNA target sequence
atgaaagtagacaaatttttaataaaa

SEQ ID NO: 79750 - DNA, 27 bp, Artificial sequence
  SiRNA target sequence
tgaaagtagacaaatttttaataaaat

SEQ ID NO: 79751 - DNA, 27 bp, Artificial sequence
  SiRNA target sequence
gaaagtagacaaatttttaataaaata

SEQ ID NO: 79752 - DNA, 27 bp, Artificial sequence
  SiRNA target sequence
aaagtagacaaatttttaataaaataa

SEQ ID NO: 79753 - DNA, 27 bp, Artificial sequence
  SiRNA target sequence
aagtagacaaatttttaataaaataaa

SEQ ID NO: 79754 - DNA, 27 bp, Artificial sequence
  SiRNA target sequence
agtagacaaatttttaataaaataaat

SEQ ID NO: 79755 - DNA, 27 bp, Artificial sequence
  SiRNA target sequence
gtagacaaatttttaataaaataaatc

SEQ ID NO: 79756 - DNA, 27 bp, Artificial sequence
  SiRNA target sequence
tagacaaatttttaataaaataaatct

SEQ ID NO: 79757 - DNA, 27 bp, Artificial sequence
  SiRNA target sequence
agacaaatttttaataaaataaatcta

SEQ ID NO: 79758 - DNA, 27 bp, Artificial sequence
  SiRNA target sequence
gacaaatttttaataaaataaatctag

SEQ ID NO: 79759 - DNA, 27 bp, Artificial sequence
  SiRNA target sequence
acaaatttttaataaaataaatctaga

SEQ ID NO: 79760 - DNA, 27 bp, Artificial sequence
  SiRNA target sequence
caaatttttaataaaataaatctagaa

SEQ ID NO: 79761 - DNA, 27 bp, Artificial sequence
  SiRNA target sequence
aaatttttaataaaataaatctagaaa

SEQ ID NO: 79762 - DNA, 27 bp, Artificial sequence
  SiRNA target sequence
aatttttaataaaataaatctagaaat

SEQ ID NO: 79763 - DNA, 27 bp, Artificial sequence
  SiRNA target sequence
atttttaataaaataaatctagaaata

SEQ ID NO: 79764 - DNA, 27 bp, Artificial sequence
  SiRNA target sequence
tttttaataaaataaatctagaaatat

SEQ ID NO: 79765 - DNA, 27 bp, Artificial sequence
  SiRNA target sequence
ttttaataaaataaatctagaaatata

SEQ ID NO: 79766 - DNA, 27 bp, Artificial sequence
  SiRNA target sequence
tttaataaaataaatctagaaatatac

SEQ ID NO: 79767 - DNA, 27 bp, Artificial sequence
  SiRNA target sequence
ttaataaaataaatctagaaatataca

SEQ ID NO: 79768 - DNA, 27 bp, Artificial sequence
  SiRNA target sequence
taataaaataaatctagaaatatacaa

SEQ ID NO: 79769 - DNA, 27 bp, Artificial sequence
  SiRNA target sequence
aataaaataaatctagaaatatacaaa

SEQ ID NO: 79770 - DNA, 27 bp, Artificial sequence
  SiRNA target sequence
ataaaataaatctagaaatatacaaag

SEQ ID NO: 79771 - DNA, 27 bp, Artificial sequence
  SiRNA target sequence
taaaataaatctagaaatatacaaagg

SEQ ID NO: 79772 - DNA, 27 bp, Artificial sequence
  SiRNA target sequence
aaaataaatctagaaatatacaaagga

SEQ ID NO: 79773 - DNA, 27 bp, Artificial sequence
  SiRNA target sequence
aaataaatctagaaatatacaaaggag

SEQ ID NO: 79774 - DNA, 27 bp, Artificial sequence
  SiRNA target sequence
aataaatctagaaatatacaaaggaga

SEQ ID NO: 79775 - DNA, 27 bp, Artificial sequence
  SiRNA target sequence
ataaatctagaaatatacaaaggagaa

SEQ ID NO: 79776 - DNA, 27 bp, Artificial sequence
  SiRNA target sequence
taaatctagaaatatacaaaggagaaa

SEQ ID NO: 79777 - DNA, 27 bp, Artificial sequence
  SiRNA target sequence
aaatctagaaatatacaaaggagaaaa

SEQ ID NO: 79778 - DNA, 27 bp, Artificial sequence
  SiRNA target sequence
aatctagaaatatacaaaggagaaaaa

SEQ ID NO: 79779 - DNA, 27 bp, Artificial sequence
  SiRNA target sequence
atctagaaatatacaaaggagaaaaag

SEQ ID NO: 79780 - DNA, 27 bp, Artificial sequence
  SiRNA target sequence
tctagaaatatacaaaggagaaaaagt

SEQ ID NO: 79781 - DNA, 27 bp, Artificial sequence
  SiRNA target sequence
ctagaaatatacaaaggagaaaaagta

SEQ ID NO: 79782 - DNA, 27 bp, Artificial sequence
  SiRNA target sequence
tagaaatatacaaaggagaaaaagtag

SEQ ID NO: 79783 - DNA, 27 bp, Artificial sequence
  SiRNA target sequence
agaaatatacaaaggagaaaaagtagc

SEQ ID NO: 79784 - DNA, 27 bp, Artificial sequence
  SiRNA target sequence
gaaatatacaaaggagaaaaagtagca

SEQ ID NO: 79785 - DNA, 27 bp, Artificial sequence
  SiRNA target sequence
aaatatacaaaggagaaaaagtagcaa

SEQ ID NO: 79786 - DNA, 27 bp, Artificial sequence
  SiRNA target sequence
aatatacaaaggagaaaaagtagcaat

SEQ ID NO: 79787 - DNA, 27 bp, Artificial sequence
  SiRNA target sequence
atatacaaaggagaaaaagtagcaatt

SEQ ID NO: 79788 - DNA, 27 bp, Artificial sequence
  SiRNA target sequence
tatacaaaggagaaaaagtagcaatta

SEQ ID NO: 79789 - DNA, 27 bp, Artificial sequence
  SiRNA target sequence
atacaaaggagaaaaagtagcaattat

SEQ ID NO: 79790 - DNA, 27 bp, Artificial sequence
  SiRNA target sequence
tacaaaggagaaaaagtagcaattata

SEQ ID NO: 79791 - DNA, 27 bp, Artificial sequence
  SiRNA target sequence
acaaaggagaaaaagtagcaattatag

SEQ ID NO: 79792 - DNA, 27 bp, Artificial sequence
  SiRNA target sequence
caaaggagaaaaagtagcaattatagg

SEQ ID NO: 79793 - DNA, 27 bp, Artificial sequence
  SiRNA target sequence
aaaggagaaaaagtagcaattataggt

SEQ ID NO: 79794 - DNA, 27 bp, Artificial sequence
  SiRNA target sequence
aaggagaaaaagtagcaattataggta

SEQ ID NO: 79795 - DNA, 27 bp, Artificial sequence
  SiRNA target sequence
aggagaaaaagtagcaattataggtaa

SEQ ID NO: 79796 - DNA, 27 bp, Artificial sequence
  SiRNA target sequence
ggagaaaaagtagcaattataggtaaa

SEQ ID NO: 79797 - DNA, 27 bp, Artificial sequence
  SiRNA target sequence
gagaaaaagtagcaattataggtaaaa

SEQ ID NO: 79798 - DNA, 27 bp, Artificial sequence
  SiRNA target sequence
agaaaaagtagcaattataggtaaaaa

SEQ ID NO: 79799 - DNA, 27 bp, Artificial sequence
  SiRNA target sequence
gaaaaagtagcaattataggtaaaaat

SEQ ID NO: 79800 - DNA, 27 bp, Artificial sequence
  SiRNA target sequence
aaaaagtagcaattataggtaaaaatg

SEQ ID NO: 79801 - DNA, 27 bp, Artificial sequence
  SiRNA target sequence
aaaagtagcaattataggtaaaaatgg

SEQ ID NO: 79802 - DNA, 27 bp, Artificial sequence
  SiRNA target sequence
aaagtagcaattataggtaaaaatggt

SEQ ID NO: 79803 - DNA, 27 bp, Artificial sequence
  SiRNA target sequence
aagtagcaattataggtaaaaatggta

SEQ ID NO: 79804 - DNA, 27 bp, Artificial sequence
  SiRNA target sequence
agtagcaattataggtaaaaatggtag

SEQ ID NO: 79805 - DNA, 27 bp, Artificial sequence
  SiRNA target sequence
gtagcaattataggtaaaaatggtagt

SEQ ID NO: 79806 - DNA, 27 bp, Artificial sequence
  SiRNA target sequence
tagcaattataggtaaaaatggtagtg

SEQ ID NO: 79807 - DNA, 27 bp, Artificial sequence
  SiRNA target sequence
agcaattataggtaaaaatggtagtgg

SEQ ID NO: 79808 - DNA, 27 bp, Artificial sequence
  SiRNA target sequence
gcaattataggtaaaaatggtagtggt

SEQ ID NO: 79809 - DNA, 27 bp, Artificial sequence
  SiRNA target sequence
caattataggtaaaaatggtagtggta

SEQ ID NO: 79810 - DNA, 27 bp, Artificial sequence
  SiRNA target sequence
aattataggtaaaaatggtagtggtaa

SEQ ID NO: 79811 - DNA, 27 bp, Artificial sequence
  SiRNA target sequence
attataggtaaaaatggtagtggtaaa

SEQ ID NO: 79812 - DNA, 27 bp, Artificial sequence
  SiRNA target sequence
ttataggtaaaaatggtagtggtaaat

SEQ ID NO: 79813 - DNA, 27 bp, Artificial sequence
  SiRNA target sequence
tataggtaaaaatggtagtggtaaatc

SEQ ID NO: 79814 - DNA, 27 bp, Artificial sequence
  SiRNA target sequence
ataggtaaaaatggtagtggtaaatca

SEQ ID NO: 79815 - DNA, 27 bp, Artificial sequence
  SiRNA target sequence
taggtaaaaatggtagtggtaaatcaa

SEQ ID NO: 79816 - DNA, 27 bp, Artificial sequence
  SiRNA target sequence
aggtaaaaatggtagtggtaaatcaac

SEQ ID NO: 79817 - DNA, 27 bp, Artificial sequence
  SiRNA target sequence
ggtaaaaatggtagtggtaaatcaaca

SEQ ID NO: 79818 - DNA, 27 bp, Artificial sequence
  SiRNA target sequence
gtaaaaatggtagtggtaaatcaacat

SEQ ID NO: 79819 - DNA, 27 bp, Artificial sequence
  SiRNA target sequence
taaaaatggtagtggtaaatcaacatt

SEQ ID NO: 79820 - DNA, 27 bp, Artificial sequence
  SiRNA target sequence
aaaaatggtagtggtaaatcaacatta

SEQ ID NO: 79821 - DNA, 27 bp, Artificial sequence
  SiRNA target sequence
aaaatggtagtggtaaatcaacattac

SEQ ID NO: 79822 - DNA, 27 bp, Artificial sequence
  SiRNA target sequence
aaatggtagtggtaaatcaacattact

SEQ ID NO: 79823 - DNA, 27 bp, Artificial sequence
  SiRNA target sequence
aatggtagtggtaaatcaacattacta

SEQ ID NO: 79824 - DNA, 27 bp, Artificial sequence
  SiRNA target sequence
atggtagtggtaaatcaacattactaa

SEQ ID NO: 79825 - DNA, 27 bp, Artificial sequence
  SiRNA target sequence
tggtagtggtaaatcaacattactaaa

SEQ ID NO: 79826 - DNA, 27 bp, Artificial sequence
  SiRNA target sequence
ggtagtggtaaatcaacattactaaaa

SEQ ID NO: 79827 - DNA, 27 bp, Artificial sequence
  SiRNA target sequence
gtagtggtaaatcaacattactaaaac

SEQ ID NO: 79828 - DNA, 27 bp, Artificial sequence
  SiRNA target sequence
tagtggtaaatcaacattactaaaact

SEQ ID NO: 79829 - DNA, 27 bp, Artificial sequence
  SiRNA target sequence
agtggtaaatcaacattactaaaacta

SEQ ID NO: 79830 - DNA, 27 bp, Artificial sequence
  SiRNA target sequence
gtggtaaatcaacattactaaaactac

SEQ ID NO: 79831 - DNA, 27 bp, Artificial sequence
  SiRNA target sequence
tggtaaatcaacattactaaaactact

SEQ ID NO: 79832 - DNA, 27 bp, Artificial sequence
  SiRNA target sequence
ggtaaatcaacattactaaaactactg

SEQ ID NO: 79833 - DNA, 27 bp, Artificial sequence
  SiRNA target sequence
gtaaatcaacattactaaaactactgc

SEQ ID NO: 79834 - DNA, 27 bp, Artificial sequence
  SiRNA target sequence
taaatcaacattactaaaactactgct

SEQ ID NO: 79835 - DNA, 27 bp, Artificial sequence
  SiRNA target sequence
aaatcaacattactaaaactactgctt

SEQ ID NO: 79836 - DNA, 27 bp, Artificial sequence
  SiRNA target sequence
aatcaacattactaaaactactgctta

SEQ ID NO: 79837 - DNA, 27 bp, Artificial sequence
  SiRNA target sequence
atcaacattactaaaactactgcttaa

SEQ ID NO: 79838 - DNA, 27 bp, Artificial sequence
  SiRNA target sequence
tcaacattactaaaactactgcttaaa

SEQ ID NO: 79839 - DNA, 27 bp, Artificial sequence
  SiRNA target sequence
caacattactaaaactactgcttaaat

SEQ ID NO: 79840 - DNA, 27 bp, Artificial sequence
  SiRNA target sequence
aacattactaaaactactgcttaaatt

SEQ ID NO: 79841 - DNA, 27 bp, Artificial sequence
  SiRNA target sequence
acattactaaaactactgcttaaattt

SEQ ID NO: 79842 - DNA, 27 bp, Artificial sequence
  SiRNA target sequence
cattactaaaactactgcttaaatttg

SEQ ID NO: 79843 - DNA, 27 bp, Artificial sequence
  SiRNA target sequence
attactaaaactactgcttaaatttga

SEQ ID NO: 79844 - DNA, 27 bp, Artificial sequence
  SiRNA target sequence
ttactaaaactactgcttaaatttgat

SEQ ID NO: 79845 - DNA, 27 bp, Artificial sequence
  SiRNA target sequence
tactaaaactactgcttaaatttgatg

SEQ ID NO: 79846 - DNA, 27 bp, Artificial sequence
  SiRNA target sequence
actaaaactactgcttaaatttgatga

SEQ ID NO: 79847 - DNA, 27 bp, Artificial sequence
  SiRNA target sequence
ctaaaactactgcttaaatttgatgaa

SEQ ID NO: 79848 - DNA, 27 bp, Artificial sequence
  SiRNA target sequence
taaaactactgcttaaatttgatgaag

SEQ ID NO: 79849 - DNA, 27 bp, Artificial sequence
  SiRNA target sequence
aaaactactgcttaaatttgatgaaga

SEQ ID NO: 79850 - DNA, 27 bp, Artificial sequence
  SiRNA target sequence
aaactactgcttaaatttgatgaagat

SEQ ID NO: 79851 - DNA, 27 bp, Artificial sequence
  SiRNA target sequence
aactactgcttaaatttgatgaagatt

SEQ ID NO: 79852 - DNA, 27 bp, Artificial sequence
  SiRNA target sequence
actactgcttaaatttgatgaagatta

SEQ ID NO: 79853 - DNA, 27 bp, Artificial sequence
  SiRNA target sequence
ctactgcttaaatttgatgaagattac

SEQ ID NO: 79854 - DNA, 27 bp, Artificial sequence
  SiRNA target sequence
tactgcttaaatttgatgaagattaca

SEQ ID NO: 79855 - DNA, 27 bp, Artificial sequence
  SiRNA target sequence
actgcttaaatttgatgaagattacaa

SEQ ID NO: 79856 - DNA, 27 bp, Artificial sequence
  SiRNA target sequence
ctgcttaaatttgatgaagattacaaa

SEQ ID NO: 79857 - DNA, 27 bp, Artificial sequence
  SiRNA target sequence
tgcttaaatttgatgaagattacaaag

SEQ ID NO: 79858 - DNA, 27 bp, Artificial sequence
  SiRNA target sequence
gcttaaatttgatgaagattacaaagg

SEQ ID NO: 79859 - DNA, 27 bp, Artificial sequence
  SiRNA target sequence
cttaaatttgatgaagattacaaaggt

SEQ ID NO: 79860 - DNA, 27 bp, Artificial sequence
  SiRNA target sequence
ttaaatttgatgaagattacaaaggta

SEQ ID NO: 79861 - DNA, 27 bp, Artificial sequence
  SiRNA target sequence
taaatttgatgaagattacaaaggtag

SEQ ID NO: 79862 - DNA, 27 bp, Artificial sequence
  SiRNA target sequence
aaatttgatgaagattacaaaggtagc

SEQ ID NO: 79863 - DNA, 27 bp, Artificial sequence
  SiRNA target sequence
aatttgatgaagattacaaaggtagca

SEQ ID NO: 79864 - DNA, 27 bp, Artificial sequence
  SiRNA target sequence
atttgatgaagattacaaaggtagcat

SEQ ID NO: 79865 - DNA, 27 bp, Artificial sequence
  SiRNA target sequence
tttgatgaagattacaaaggtagcatt

SEQ ID NO: 79866 - DNA, 27 bp, Artificial sequence
  SiRNA target sequence
ttgatgaagattacaaaggtagcattt

SEQ ID NO: 79867 - DNA, 27 bp, Artificial sequence
  SiRNA target sequence
tgatgaagattacaaaggtagcatttt

SEQ ID NO: 79868 - DNA, 27 bp, Artificial sequence
  SiRNA target sequence
gatgaagattacaaaggtagcatttta

SEQ ID NO: 79869 - DNA, 27 bp, Artificial sequence
  SiRNA target sequence
atgaagattacaaaggtagcattttaa

SEQ ID NO: 79870 - DNA, 27 bp, Artificial sequence
  SiRNA target sequence
tgaagattacaaaggtagcattttaat

SEQ ID NO: 79871 - DNA, 27 bp, Artificial sequence
  SiRNA target sequence
gaagattacaaaggtagcattttaata

SEQ ID NO: 79872 - DNA, 27 bp, Artificial sequence
  SiRNA target sequence
aagattacaaaggtagcattttaatag

SEQ ID NO: 79873 - DNA, 27 bp, Artificial sequence
  SiRNA target sequence
agattacaaaggtagcattttaataga

SEQ ID NO: 79874 - DNA, 27 bp, Artificial sequence
  SiRNA target sequence
gattacaaaggtagcattttaatagat

SEQ ID NO: 79875 - DNA, 27 bp, Artificial sequence
  SiRNA target sequence
attacaaaggtagcattttaatagatg

SEQ ID NO: 79876 - DNA, 27 bp, Artificial sequence
  SiRNA target sequence
ttacaaaggtagcattttaatagatga

SEQ ID NO: 79877 - DNA, 27 bp, Artificial sequence
  SiRNA target sequence
tacaaaggtagcattttaatagatgac

SEQ ID NO: 79878 - DNA, 27 bp, Artificial sequence
  SiRNA target sequence
acaaaggtagcattttaatagatgaca

SEQ ID NO: 79879 - DNA, 27 bp, Artificial sequence
  SiRNA target sequence
caaaggtagcattttaatagatgacat

SEQ ID NO: 79880 - DNA, 27 bp, Artificial sequence
  SiRNA target sequence
aaaggtagcattttaatagatgacatt

SEQ ID NO: 79881 - DNA, 27 bp, Artificial sequence
  SiRNA target sequence
aaggtagcattttaatagatgacattg

SEQ ID NO: 79882 - DNA, 27 bp, Artificial sequence
  SiRNA target sequence
aggtagcattttaatagatgacattga

SEQ ID NO: 79883 - DNA, 27 bp, Artificial sequence
  SiRNA target sequence
ggtagcattttaatagatgacattgat

SEQ ID NO: 79884 - DNA, 27 bp, Artificial sequence
  SiRNA target sequence
gtagcattttaatagatgacattgata

SEQ ID NO: 79885 - DNA, 27 bp, Artificial sequence
  SiRNA target sequence
tagcattttaatagatgacattgatat

SEQ ID NO: 79886 - DNA, 27 bp, Artificial sequence
  SiRNA target sequence
agcattttaatagatgacattgatatt

SEQ ID NO: 79887 - DNA, 27 bp, Artificial sequence
  SiRNA target sequence
gcattttaatagatgacattgatatta

SEQ ID NO: 79888 - DNA, 27 bp, Artificial sequence
  SiRNA target sequence
cattttaatagatgacattgatattaa

SEQ ID NO: 79889 - DNA, 27 bp, Artificial sequence
  SiRNA target sequence
attttaatagatgacattgatattaaa

SEQ ID NO: 79890 - DNA, 27 bp, Artificial sequence
  SiRNA target sequence
ttttaatagatgacattgatattaaaa

SEQ ID NO: 79891 - DNA, 27 bp, Artificial sequence
  SiRNA target sequence
tttaatagatgacattgatattaaaaa

SEQ ID NO: 79892 - DNA, 27 bp, Artificial sequence
  SiRNA target sequence
ttaatagatgacattgatattaaaaaa

SEQ ID NO: 79893 - DNA, 27 bp, Artificial sequence
  SiRNA target sequence
taatagatgacattgatattaaaaaaa

SEQ ID NO: 79894 - DNA, 27 bp, Artificial sequence
  SiRNA target sequence
aatagatgacattgatattaaaaaaat

SEQ ID NO: 79895 - DNA, 27 bp, Artificial sequence
  SiRNA target sequence
atagatgacattgatattaaaaaaatc

SEQ ID NO: 79896 - DNA, 27 bp, Artificial sequence
  SiRNA target sequence
tagatgacattgatattaaaaaaatca

SEQ ID NO: 79897 - DNA, 27 bp, Artificial sequence
  SiRNA target sequence
agatgacattgatattaaaaaaatcaa

SEQ ID NO: 79898 - DNA, 27 bp, Artificial sequence
  SiRNA target sequence
gatgacattgatattaaaaaaatcaaa

SEQ ID NO: 79899 - DNA, 27 bp, Artificial sequence
  SiRNA target sequence
atgacattgatattaaaaaaatcaaag

SEQ ID NO: 79900 - DNA, 27 bp, Artificial sequence
  SiRNA target sequence
tgacattgatattaaaaaaatcaaaga

SEQ ID NO: 79901 - DNA, 27 bp, Artificial sequence
  SiRNA target sequence
gacattgatattaaaaaaatcaaagac

SEQ ID NO: 79902 - DNA, 27 bp, Artificial sequence
  SiRNA target sequence
acattgatattaaaaaaatcaaagacg

SEQ ID NO: 79903 - DNA, 27 bp, Artificial sequence
  SiRNA target sequence
cattgatattaaaaaaatcaaagacga

SEQ ID NO: 79904 - DNA, 27 bp, Artificial sequence
  SiRNA target sequence
attgatattaaaaaaatcaaagacgaa

SEQ ID NO: 79905 - DNA, 27 bp, Artificial sequence
  SiRNA target sequence
ttgatattaaaaaaatcaaagacgaat

SEQ ID NO: 79906 - DNA, 27 bp, Artificial sequence
  SiRNA target sequence
tgatattaaaaaaatcaaagacgaatt

SEQ ID NO: 79907 - DNA, 27 bp, Artificial sequence
  SiRNA target sequence
gatattaaaaaaatcaaagacgaattt

SEQ ID NO: 79908 - DNA, 27 bp, Artificial sequence
  SiRNA target sequence
atattaaaaaaatcaaagacgaatttt

SEQ ID NO: 79909 - DNA, 27 bp, Artificial sequence
  SiRNA target sequence
tattaaaaaaatcaaagacgaatttta

SEQ ID NO: 79910 - DNA, 27 bp, Artificial sequence
  SiRNA target sequence
attaaaaaaatcaaagacgaattttat

SEQ ID NO: 79911 - DNA, 27 bp, Artificial sequence
  SiRNA target sequence
ttaaaaaaatcaaagacgaattttata

SEQ ID NO: 79912 - DNA, 27 bp, Artificial sequence
  SiRNA target sequence
taaaaaaatcaaagacgaattttatag

SEQ ID NO: 79913 - DNA, 27 bp, Artificial sequence
  SiRNA target sequence
aaaaaaatcaaagacgaattttatagg

SEQ ID NO: 79914 - DNA, 27 bp, Artificial sequence
  SiRNA target sequence
aaaaaatcaaagacgaattttatagga

SEQ ID NO: 79915 - DNA, 27 bp, Artificial sequence
  SiRNA target sequence
aaaaatcaaagacgaattttataggaa

SEQ ID NO: 79916 - DNA, 27 bp, Artificial sequence
  SiRNA target sequence
aaaatcaaagacgaattttataggaat

SEQ ID NO: 79917 - DNA, 27 bp, Artificial sequence
  SiRNA target sequence
aaatcaaagacgaattttataggaatt

SEQ ID NO: 79918 - DNA, 27 bp, Artificial sequence
  SiRNA target sequence
aatcaaagacgaattttataggaattt

SEQ ID NO: 79919 - DNA, 27 bp, Artificial sequence
  SiRNA target sequence
atcaaagacgaattttataggaattta

SEQ ID NO: 79920 - DNA, 27 bp, Artificial sequence
  SiRNA target sequence
tcaaagacgaattttataggaatttat

SEQ ID NO: 79921 - DNA, 27 bp, Artificial sequence
  SiRNA target sequence
caaagacgaattttataggaatttatt

SEQ ID NO: 79922 - DNA, 27 bp, Artificial sequence
  SiRNA target sequence
aaagacgaattttataggaatttatta

SEQ ID NO: 79923 - DNA, 27 bp, Artificial sequence
  SiRNA target sequence
aagacgaattttataggaatttattag

SEQ ID NO: 79924 - DNA, 27 bp, Artificial sequence
  SiRNA target sequence
agacgaattttataggaatttattagg

SEQ ID NO: 79925 - DNA, 27 bp, Artificial sequence
  SiRNA target sequence
gacgaattttataggaatttattaggt

SEQ ID NO: 79926 - DNA, 27 bp, Artificial sequence
  SiRNA target sequence
acgaattttataggaatttattaggtt

SEQ ID NO: 79927 - DNA, 27 bp, Artificial sequence
  SiRNA target sequence
cgaattttataggaatttattaggtta

SEQ ID NO: 79928 - DNA, 27 bp, Artificial sequence
  SiRNA target sequence
gaattttataggaatttattaggttac

SEQ ID NO: 79929 - DNA, 27 bp, Artificial sequence
  SiRNA target sequence
aattttataggaatttattaggttaca

SEQ ID NO: 79930 - DNA, 27 bp, Artificial sequence
  SiRNA target sequence
attttataggaatttattaggttacat

SEQ ID NO: 79931 - DNA, 27 bp, Artificial sequence
  SiRNA target sequence
ttttataggaatttattaggttacata

SEQ ID NO: 79932 - DNA, 27 bp, Artificial sequence
  SiRNA target sequence
tttataggaatttattaggttacatac

SEQ ID NO: 79933 - DNA, 27 bp, Artificial sequence
  SiRNA target sequence
ttataggaatttattaggttacatacc

SEQ ID NO: 79934 - DNA, 27 bp, Artificial sequence
  SiRNA target sequence
tataggaatttattaggttacatacca

SEQ ID NO: 79935 - DNA, 27 bp, Artificial sequence
  SiRNA target sequence
ataggaatttattaggttacataccac

SEQ ID NO: 79936 - DNA, 27 bp, Artificial sequence
  SiRNA target sequence
taggaatttattaggttacataccaca

SEQ ID NO: 79937 - DNA, 27 bp, Artificial sequence
  SiRNA target sequence
aggaatttattaggttacataccacag

SEQ ID NO: 79938 - DNA, 27 bp, Artificial sequence
  SiRNA target sequence
ggaatttattaggttacataccacaga

SEQ ID NO: 79939 - DNA, 27 bp, Artificial sequence
  SiRNA target sequence
gaatttattaggttacataccacagaa

SEQ ID NO: 79940 - DNA, 27 bp, Artificial sequence
  SiRNA target sequence
aatttattaggttacataccacagaat

SEQ ID NO: 79941 - DNA, 27 bp, Artificial sequence
  SiRNA target sequence
atttattaggttacataccacagaata

SEQ ID NO: 79942 - DNA, 27 bp, Artificial sequence
  SiRNA target sequence
tttattaggttacataccacagaatac

SEQ ID NO: 79943 - DNA, 27 bp, Artificial sequence
  SiRNA target sequence
ttattaggttacataccacagaataca

SEQ ID NO: 79944 - DNA, 27 bp, Artificial sequence
  SiRNA target sequence
tattaggttacataccacagaatacat

SEQ ID NO: 79945 - DNA, 27 bp, Artificial sequence
  SiRNA target sequence
attaggttacataccacagaatacatt

SEQ ID NO: 79946 - DNA, 27 bp, Artificial sequence
  SiRNA target sequence
ttaggttacataccacagaatacattt

SEQ ID NO: 79947 - DNA, 27 bp, Artificial sequence
  SiRNA target sequence
taggttacataccacagaatacatttt

SEQ ID NO: 79948 - DNA, 27 bp, Artificial sequence
  SiRNA target sequence
aggttacataccacagaatacattttt

SEQ ID NO: 79949 - DNA, 27 bp, Artificial sequence
  SiRNA target sequence
ggttacataccacagaatacatttttg

SEQ ID NO: 79950 - DNA, 27 bp, Artificial sequence
  SiRNA target sequence
gttacataccacagaatacatttttgt

SEQ ID NO: 79951 - DNA, 27 bp, Artificial sequence
  SiRNA target sequence
ttacataccacagaatacatttttgtt

SEQ ID NO: 79952 - DNA, 27 bp, Artificial sequence
  SiRNA target sequence
tacataccacagaatacatttttgttt

SEQ ID NO: 79953 - DNA, 27 bp, Artificial sequence
  SiRNA target sequence
acataccacagaatacatttttgttta

SEQ ID NO: 79954 - DNA, 27 bp, Artificial sequence
  SiRNA target sequence
cataccacagaatacatttttgtttaa

SEQ ID NO: 79955 - DNA, 27 bp, Artificial sequence
  SiRNA target sequence
ataccacagaatacatttttgtttaat

SEQ ID NO: 79956 - DNA, 27 bp, Artificial sequence
  SiRNA target sequence
taccacagaatacatttttgtttaatg

SEQ ID NO: 79957 - DNA, 27 bp, Artificial sequence
  SiRNA target sequence
accacagaatacatttttgtttaatga

SEQ ID NO: 79958 - DNA, 27 bp, Artificial sequence
  SiRNA target sequence
ccacagaatacatttttgtttaatgaa

SEQ ID NO: 79959 - DNA, 27 bp, Artificial sequence
  SiRNA target sequence
cacagaatacatttttgtttaatgaat

SEQ ID NO: 79960 - DNA, 27 bp, Artificial sequence
  SiRNA target sequence
acagaatacatttttgtttaatgaatc

SEQ ID NO: 79961 - DNA, 27 bp, Artificial sequence
  SiRNA target sequence
cagaatacatttttgtttaatgaatct

SEQ ID NO: 79962 - DNA, 27 bp, Artificial sequence
  SiRNA target sequence
agaatacatttttgtttaatgaatctg

SEQ ID NO: 79963 - DNA, 27 bp, Artificial sequence
  SiRNA target sequence
gaatacatttttgtttaatgaatctgt

SEQ ID NO: 79964 - DNA, 27 bp, Artificial sequence
  SiRNA target sequence
aatacatttttgtttaatgaatctgta

SEQ ID NO: 79965 - DNA, 27 bp, Artificial sequence
  SiRNA target sequence
atacatttttgtttaatgaatctgtaa

SEQ ID NO: 79966 - DNA, 27 bp, Artificial sequence
  SiRNA target sequence
tacatttttgtttaatgaatctgtaaa

SEQ ID NO: 79967 - DNA, 27 bp, Artificial sequence
  SiRNA target sequence
acatttttgtttaatgaatctgtaaaa

SEQ ID NO: 79968 - DNA, 27 bp, Artificial sequence
  SiRNA target sequence
catttttgtttaatgaatctgtaaaat

SEQ ID NO: 79969 - DNA, 27 bp, Artificial sequence
  SiRNA target sequence
atttttgtttaatgaatctgtaaaata

SEQ ID NO: 79970 - DNA, 27 bp, Artificial sequence
  SiRNA target sequence
tttttgtttaatgaatctgtaaaatat

SEQ ID NO: 79971 - DNA, 27 bp, Artificial sequence
  SiRNA target sequence
ttttgtttaatgaatctgtaaaatata

SEQ ID NO: 79972 - DNA, 27 bp, Artificial sequence
  SiRNA target sequence
tttgtttaatgaatctgtaaaatataa

SEQ ID NO: 79973 - DNA, 27 bp, Artificial sequence
  SiRNA target sequence
ttgtttaatgaatctgtaaaatataat

SEQ ID NO: 79974 - DNA, 27 bp, Artificial sequence
  SiRNA target sequence
tgtttaatgaatctgtaaaatataata

SEQ ID NO: 79975 - DNA, 27 bp, Artificial sequence
  SiRNA target sequence
gtttaatgaatctgtaaaatataatat

SEQ ID NO: 79976 - DNA, 27 bp, Artificial sequence
  SiRNA target sequence
tttaatgaatctgtaaaatataatatt

SEQ ID NO: 79977 - DNA, 27 bp, Artificial sequence
  SiRNA target sequence
ttaatgaatctgtaaaatataatatta

SEQ ID NO: 79978 - DNA, 27 bp, Artificial sequence
  SiRNA target sequence
taatgaatctgtaaaatataatattaa

SEQ ID NO: 79979 - DNA, 27 bp, Artificial sequence
  SiRNA target sequence
aatgaatctgtaaaatataatattaaa

SEQ ID NO: 79980 - DNA, 27 bp, Artificial sequence
  SiRNA target sequence
atgaatctgtaaaatataatattaaat

SEQ ID NO: 79981 - DNA, 27 bp, Artificial sequence
  SiRNA target sequence
tgaatctgtaaaatataatattaaata

SEQ ID NO: 79982 - DNA, 27 bp, Artificial sequence
  SiRNA target sequence
gaatctgtaaaatataatattaaatac

SEQ ID NO: 79983 - DNA, 27 bp, Artificial sequence
  SiRNA target sequence
aatctgtaaaatataatattaaatacg

SEQ ID NO: 79984 - DNA, 27 bp, Artificial sequence
  SiRNA target sequence
atctgtaaaatataatattaaatacgg

SEQ ID NO: 79985 - DNA, 27 bp, Artificial sequence
  SiRNA target sequence
tctgtaaaatataatattaaatacgga

SEQ ID NO: 79986 - DNA, 27 bp, Artificial sequence
  SiRNA target sequence
ctgtaaaatataatattaaatacggat

SEQ ID NO: 79987 - DNA, 27 bp, Artificial sequence
  SiRNA target sequence
tgtaaaatataatattaaatacggatc

SEQ ID NO: 79988 - DNA, 27 bp, Artificial sequence
  SiRNA target sequence
gtaaaatataatattaaatacggatct

SEQ ID NO: 79989 - DNA, 27 bp, Artificial sequence
  SiRNA target sequence
taaaatataatattaaatacggatctt

SEQ ID NO: 79990 - DNA, 27 bp, Artificial sequence
  SiRNA target sequence
aaaatataatattaaatacggatcttt

SEQ ID NO: 79991 - DNA, 27 bp, Artificial sequence
  SiRNA target sequence
aaatataatattaaatacggatctttt

SEQ ID NO: 79992 - DNA, 27 bp, Artificial sequence
  SiRNA target sequence
aatataatattaaatacggatcttttg

SEQ ID NO: 79993 - DNA, 27 bp, Artificial sequence
  SiRNA target sequence
atataatattaaatacggatcttttgg

SEQ ID NO: 79994 - DNA, 27 bp, Artificial sequence
  SiRNA target sequence
tataatattaaatacggatcttttggt

SEQ ID NO: 79995 - DNA, 27 bp, Artificial sequence
  SiRNA target sequence
ataatattaaatacggatcttttggta

SEQ ID NO: 79996 - DNA, 27 bp, Artificial sequence
  SiRNA target sequence
taatattaaatacggatcttttggtat

SEQ ID NO: 79997 - DNA, 27 bp, Artificial sequence
  SiRNA target sequence
aatattaaatacggatcttttggtatt

SEQ ID NO: 79998 - DNA, 27 bp, Artificial sequence
  SiRNA target sequence
atattaaatacggatcttttggtattt

SEQ ID NO: 79999 - DNA, 27 bp, Artificial sequence
  SiRNA target sequence
tattaaatacggatcttttggtatttc

SEQ ID NO: 80000 - DNA, 27 bp, Artificial sequence
  SiRNA target sequence
attaaatacggatcttttggtatttca

SEQ ID NO: 80001 - DNA, 27 bp, Artificial sequence
  SiRNA target sequence
ttaaatacggatcttttggtatttcag

SEQ ID NO: 80002 - DNA, 27 bp, Artificial sequence
  SiRNA target sequence
taaatacggatcttttggtatttcaga

SEQ ID NO: 80003 - DNA, 27 bp, Artificial sequence
  SiRNA target sequence
aaatacggatcttttggtatttcagac

SEQ ID NO: 80004 - DNA, 27 bp, Artificial sequence
  SiRNA target sequence
aatacggatcttttggtatttcagacg

SEQ ID NO: 80005 - DNA, 27 bp, Artificial sequence
  SiRNA target sequence
atacggatcttttggtatttcagacga

SEQ ID NO: 80006 - DNA, 27 bp, Artificial sequence
  SiRNA target sequence
tacggatcttttggtatttcagacgag

SEQ ID NO: 80007 - DNA, 27 bp, Artificial sequence
  SiRNA target sequence
acggatcttttggtatttcagacgagg

SEQ ID NO: 80008 - DNA, 27 bp, Artificial sequence
  SiRNA target sequence
cggatcttttggtatttcagacgagga

SEQ ID NO: 80009 - DNA, 27 bp, Artificial sequence
  SiRNA target sequence
ggatcttttggtatttcagacgaggat

SEQ ID NO: 80010 - DNA, 27 bp, Artificial sequence
  SiRNA target sequence
gatcttttggtatttcagacgaggata

SEQ ID NO: 80011 - DNA, 27 bp, Artificial sequence
  SiRNA target sequence
atcttttggtatttcagacgaggatat

SEQ ID NO: 80012 - DNA, 27 bp, Artificial sequence
  SiRNA target sequence
tcttttggtatttcagacgaggatatt

SEQ ID NO: 80013 - DNA, 27 bp, Artificial sequence
  SiRNA target sequence
cttttggtatttcagacgaggatattt

SEQ ID NO: 80014 - DNA, 27 bp, Artificial sequence
  SiRNA target sequence
ttttggtatttcagacgaggatatttt

SEQ ID NO: 80015 - DNA, 27 bp, Artificial sequence
  SiRNA target sequence
tttggtatttcagacgaggatattttt

SEQ ID NO: 80016 - DNA, 27 bp, Artificial sequence
  SiRNA target sequence
ttggtatttcagacgaggatatttttg

SEQ ID NO: 80017 - DNA, 27 bp, Artificial sequence
  SiRNA target sequence
tggtatttcagacgaggatatttttgc

SEQ ID NO: 80018 - DNA, 27 bp, Artificial sequence
  SiRNA target sequence
ggtatttcagacgaggatatttttgca

SEQ ID NO: 80019 - DNA, 27 bp, Artificial sequence
  SiRNA target sequence
gtatttcagacgaggatatttttgcat

SEQ ID NO: 80020 - DNA, 27 bp, Artificial sequence
  SiRNA target sequence
tatttcagacgaggatatttttgcatt

SEQ ID NO: 80021 - DNA, 27 bp, Artificial sequence
  SiRNA target sequence
atttcagacgaggatatttttgcattg

SEQ ID NO: 80022 - DNA, 27 bp, Artificial sequence
  SiRNA target sequence
tttcagacgaggatatttttgcattgt

SEQ ID NO: 80023 - DNA, 27 bp, Artificial sequence
  SiRNA target sequence
ttcagacgaggatatttttgcattgtg

SEQ ID NO: 80024 - DNA, 27 bp, Artificial sequence
  SiRNA target sequence
tcagacgaggatatttttgcattgtgt

SEQ ID NO: 80025 - DNA, 27 bp, Artificial sequence
  SiRNA target sequence
cagacgaggatatttttgcattgtgta

SEQ ID NO: 80026 - DNA, 27 bp, Artificial sequence
  SiRNA target sequence
agacgaggatatttttgcattgtgtaa

SEQ ID NO: 80027 - DNA, 27 bp, Artificial sequence
  SiRNA target sequence
gacgaggatatttttgcattgtgtaaa

SEQ ID NO: 80028 - DNA, 27 bp, Artificial sequence
  SiRNA target sequence
acgaggatatttttgcattgtgtaaag

SEQ ID NO: 80029 - DNA, 27 bp, Artificial sequence
  SiRNA target sequence
cgaggatatttttgcattgtgtaaaga

SEQ ID NO: 80030 - DNA, 27 bp, Artificial sequence
  SiRNA target sequence
gaggatatttttgcattgtgtaaagag

SEQ ID NO: 80031 - DNA, 27 bp, Artificial sequence
  SiRNA target sequence
aggatatttttgcattgtgtaaagagt

SEQ ID NO: 80032 - DNA, 27 bp, Artificial sequence
  SiRNA target sequence
ggatatttttgcattgtgtaaagagtt

SEQ ID NO: 80033 - DNA, 27 bp, Artificial sequence
  SiRNA target sequence
gatatttttgcattgtgtaaagagttt

SEQ ID NO: 80034 - DNA, 27 bp, Artificial sequence
  SiRNA target sequence
atatttttgcattgtgtaaagagtttg

SEQ ID NO: 80035 - DNA, 27 bp, Artificial sequence
  SiRNA target sequence
tatttttgcattgtgtaaagagtttgg

SEQ ID NO: 80036 - DNA, 27 bp, Artificial sequence
  SiRNA target sequence
atttttgcattgtgtaaagagtttgga

SEQ ID NO: 80037 - DNA, 27 bp, Artificial sequence
  SiRNA target sequence
tttttgcattgtgtaaagagtttggat

SEQ ID NO: 80038 - DNA, 27 bp, Artificial sequence
  SiRNA target sequence
ttttgcattgtgtaaagagtttggatt

SEQ ID NO: 80039 - DNA, 27 bp, Artificial sequence
  SiRNA target sequence
tttgcattgtgtaaagagtttggatta

SEQ ID NO: 80040 - DNA, 27 bp, Artificial sequence
  SiRNA target sequence
ttgcattgtgtaaagagtttggattat

SEQ ID NO: 80041 - DNA, 27 bp, Artificial sequence
  SiRNA target sequence
tgcattgtgtaaagagtttggattata

SEQ ID NO: 80042 - DNA, 27 bp, Artificial sequence
  SiRNA target sequence
gcattgtgtaaagagtttggattatat

SEQ ID NO: 80043 - DNA, 27 bp, Artificial sequence
  SiRNA target sequence
cattgtgtaaagagtttggattatatg

SEQ ID NO: 80044 - DNA, 27 bp, Artificial sequence
  SiRNA target sequence
attgtgtaaagagtttggattatatga

SEQ ID NO: 80045 - DNA, 27 bp, Artificial sequence
  SiRNA target sequence
ttgtgtaaagagtttggattatatgac

SEQ ID NO: 80046 - DNA, 27 bp, Artificial sequence
  SiRNA target sequence
tgtgtaaagagtttggattatatgacg

SEQ ID NO: 80047 - DNA, 27 bp, Artificial sequence
  SiRNA target sequence
gtgtaaagagtttggattatatgacgt

SEQ ID NO: 80048 - DNA, 27 bp, Artificial sequence
  SiRNA target sequence
tgtaaagagtttggattatatgacgtt

SEQ ID NO: 80049 - DNA, 27 bp, Artificial sequence
  SiRNA target sequence
gtaaagagtttggattatatgacgttt

SEQ ID NO: 80050 - DNA, 27 bp, Artificial sequence
  SiRNA target sequence
taaagagtttggattatatgacgtttt

SEQ ID NO: 80051 - DNA, 27 bp, Artificial sequence
  SiRNA target sequence
aaagagtttggattatatgacgttttc

SEQ ID NO: 80052 - DNA, 27 bp, Artificial sequence
  SiRNA target sequence
aagagtttggattatatgacgttttca

SEQ ID NO: 80053 - DNA, 27 bp, Artificial sequence
  SiRNA target sequence
agagtttggattatatgacgttttcat

SEQ ID NO: 80054 - DNA, 27 bp, Artificial sequence
  SiRNA target sequence
gagtttggattatatgacgttttcatg

SEQ ID NO: 80055 - DNA, 27 bp, Artificial sequence
  SiRNA target sequence
agtttggattatatgacgttttcatga

SEQ ID NO: 80056 - DNA, 27 bp, Artificial sequence
  SiRNA target sequence
gtttggattatatgacgttttcatgaa

SEQ ID NO: 80057 - DNA, 27 bp, Artificial sequence
  SiRNA target sequence
tttggattatatgacgttttcatgaac

SEQ ID NO: 80058 - DNA, 27 bp, Artificial sequence
  SiRNA target sequence
ttggattatatgacgttttcatgaacc

SEQ ID NO: 80059 - DNA, 27 bp, Artificial sequence
  SiRNA target sequence
tggattatatgacgttttcatgaacct

SEQ ID NO: 80060 - DNA, 27 bp, Artificial sequence
  SiRNA target sequence
ggattatatgacgttttcatgaacctc

SEQ ID NO: 80061 - DNA, 27 bp, Artificial sequence
  SiRNA target sequence
gattatatgacgttttcatgaacctcg

SEQ ID NO: 80062 - DNA, 27 bp, Artificial sequence
  SiRNA target sequence
attatatgacgttttcatgaacctcga

SEQ ID NO: 80063 - DNA, 27 bp, Artificial sequence
  SiRNA target sequence
ttatatgacgttttcatgaacctcgaa

SEQ ID NO: 80064 - DNA, 27 bp, Artificial sequence
  SiRNA target sequence
tatatgacgttttcatgaacctcgaaa

SEQ ID NO: 80065 - DNA, 27 bp, Artificial sequence
  SiRNA target sequence
atatgacgttttcatgaacctcgaaaa

SEQ ID NO: 80066 - DNA, 27 bp, Artificial sequence
  SiRNA target sequence
tatgacgttttcatgaacctcgaaaat

SEQ ID NO: 80067 - DNA, 27 bp, Artificial sequence
  SiRNA target sequence
atgacgttttcatgaacctcgaaaatg

SEQ ID NO: 80068 - DNA, 27 bp, Artificial sequence
  SiRNA target sequence
tgacgttttcatgaacctcgaaaatgg

SEQ ID NO: 80069 - DNA, 27 bp, Artificial sequence
  SiRNA target sequence
gacgttttcatgaacctcgaaaatggt

SEQ ID NO: 80070 - DNA, 27 bp, Artificial sequence
  SiRNA target sequence
acgttttcatgaacctcgaaaatggtt

SEQ ID NO: 80071 - DNA, 27 bp, Artificial sequence
  SiRNA target sequence
cgttttcatgaacctcgaaaatggttt

SEQ ID NO: 80072 - DNA, 27 bp, Artificial sequence
  SiRNA target sequence
gttttcatgaacctcgaaaatggtttt

SEQ ID NO: 80073 - DNA, 27 bp, Artificial sequence
  SiRNA target sequence
ttttcatgaacctcgaaaatggttttg

SEQ ID NO: 80074 - DNA, 27 bp, Artificial sequence
  SiRNA target sequence
tttcatgaacctcgaaaatggttttga

SEQ ID NO: 80075 - DNA, 27 bp, Artificial sequence
  SiRNA target sequence
ttcatgaacctcgaaaatggttttgat

SEQ ID NO: 80076 - DNA, 27 bp, Artificial sequence
  SiRNA target sequence
tcatgaacctcgaaaatggttttgata

SEQ ID NO: 80077 - DNA, 27 bp, Artificial sequence
  SiRNA target sequence
catgaacctcgaaaatggttttgatac

SEQ ID NO: 80078 - DNA, 27 bp, Artificial sequence
  SiRNA target sequence
atgaacctcgaaaatggttttgatacg

SEQ ID NO: 80079 - DNA, 27 bp, Artificial sequence
  SiRNA target sequence
tgaacctcgaaaatggttttgatacga

SEQ ID NO: 80080 - DNA, 27 bp, Artificial sequence
  SiRNA target sequence
gaacctcgaaaatggttttgatacgaa

SEQ ID NO: 80081 - DNA, 27 bp, Artificial sequence
  SiRNA target sequence
aacctcgaaaatggttttgatacgaat

SEQ ID NO: 80082 - DNA, 27 bp, Artificial sequence
  SiRNA target sequence
acctcgaaaatggttttgatacgaatg

SEQ ID NO: 80083 - DNA, 27 bp, Artificial sequence
  SiRNA target sequence
cctcgaaaatggttttgatacgaatgt

SEQ ID NO: 80084 - DNA, 27 bp, Artificial sequence
  SiRNA target sequence
ctcgaaaatggttttgatacgaatgta

SEQ ID NO: 80085 - DNA, 27 bp, Artificial sequence
  SiRNA target sequence
tcgaaaatggttttgatacgaatgtag

SEQ ID NO: 80086 - DNA, 27 bp, Artificial sequence
  SiRNA target sequence
cgaaaatggttttgatacgaatgtagg

SEQ ID NO: 80087 - DNA, 27 bp, Artificial sequence
  SiRNA target sequence
gaaaatggttttgatacgaatgtagga

SEQ ID NO: 80088 - DNA, 27 bp, Artificial sequence
  SiRNA target sequence
aaaatggttttgatacgaatgtaggag

SEQ ID NO: 80089 - DNA, 27 bp, Artificial sequence
  SiRNA target sequence
aaatggttttgatacgaatgtaggaga

SEQ ID NO: 80090 - DNA, 27 bp, Artificial sequence
  SiRNA target sequence
aatggttttgatacgaatgtaggagaa

SEQ ID NO: 80091 - DNA, 27 bp, Artificial sequence
  SiRNA target sequence
atggttttgatacgaatgtaggagaaa

SEQ ID NO: 80092 - DNA, 27 bp, Artificial sequence
  SiRNA target sequence
tggttttgatacgaatgtaggagaaag

SEQ ID NO: 80093 - DNA, 27 bp, Artificial sequence
  SiRNA target sequence
ggttttgatacgaatgtaggagaaaga

SEQ ID NO: 80094 - DNA, 27 bp, Artificial sequence
  SiRNA target sequence
gttttgatacgaatgtaggagaaagag

SEQ ID NO: 80095 - DNA, 27 bp, Artificial sequence
  SiRNA target sequence
ttttgatacgaatgtaggagaaagagg

SEQ ID NO: 80096 - DNA, 27 bp, Artificial sequence
  SiRNA target sequence
tttgatacgaatgtaggagaaagagga

SEQ ID NO: 80097 - DNA, 27 bp, Artificial sequence
  SiRNA target sequence
ttgatacgaatgtaggagaaagaggaa

SEQ ID NO: 80098 - DNA, 27 bp, Artificial sequence
  SiRNA target sequence
tgatacgaatgtaggagaaagaggaag

SEQ ID NO: 80099 - DNA, 27 bp, Artificial sequence
  SiRNA target sequence
gatacgaatgtaggagaaagaggaagg

SEQ ID NO: 80100 - DNA, 27 bp, Artificial sequence
  SiRNA target sequence
atacgaatgtaggagaaagaggaaggt

SEQ ID NO: 80101 - DNA, 27 bp, Artificial sequence
  SiRNA target sequence
tacgaatgtaggagaaagaggaaggtt

SEQ ID NO: 80102 - DNA, 27 bp, Artificial sequence
  SiRNA target sequence
acgaatgtaggagaaagaggaaggtta

SEQ ID NO: 80103 - DNA, 27 bp, Artificial sequence
  SiRNA target sequence
cgaatgtaggagaaagaggaaggttat

SEQ ID NO: 80104 - DNA, 27 bp, Artificial sequence
  SiRNA target sequence
gaatgtaggagaaagaggaaggttatt

SEQ ID NO: 80105 - DNA, 27 bp, Artificial sequence
  SiRNA target sequence
aatgtaggagaaagaggaaggttatta

SEQ ID NO: 80106 - DNA, 27 bp, Artificial sequence
  SiRNA target sequence
atgtaggagaaagaggaaggttattaa

SEQ ID NO: 80107 - DNA, 27 bp, Artificial sequence
  SiRNA target sequence
tgtaggagaaagaggaaggttattaag

SEQ ID NO: 80108 - DNA, 27 bp, Artificial sequence
  SiRNA target sequence
gtaggagaaagaggaaggttattaagt

SEQ ID NO: 80109 - DNA, 27 bp, Artificial sequence
  SiRNA target sequence
taggagaaagaggaaggttattaagtg

SEQ ID NO: 80110 - DNA, 27 bp, Artificial sequence
  SiRNA target sequence
aggagaaagaggaaggttattaagtgg

SEQ ID NO: 80111 - DNA, 27 bp, Artificial sequence
  SiRNA target sequence
ggagaaagaggaaggttattaagtggt

SEQ ID NO: 80112 - DNA, 27 bp, Artificial sequence
  SiRNA target sequence
gagaaagaggaaggttattaagtggtg

SEQ ID NO: 80113 - DNA, 27 bp, Artificial sequence
  SiRNA target sequence
agaaagaggaaggttattaagtggtgg

SEQ ID NO: 80114 - DNA, 27 bp, Artificial sequence
  SiRNA target sequence
gaaagaggaaggttattaagtggtgga

SEQ ID NO: 80115 - DNA, 27 bp, Artificial sequence
  SiRNA target sequence
aaagaggaaggttattaagtggtggag

SEQ ID NO: 80116 - DNA, 27 bp, Artificial sequence
  SiRNA target sequence
aagaggaaggttattaagtggtggaga

SEQ ID NO: 80117 - DNA, 27 bp, Artificial sequence
  SiRNA target sequence
agaggaaggttattaagtggtggagaa

SEQ ID NO: 80118 - DNA, 27 bp, Artificial sequence
  SiRNA target sequence
gaggaaggttattaagtggtggagaaa

SEQ ID NO: 80119 - DNA, 27 bp, Artificial sequence
  SiRNA target sequence
aggaaggttattaagtggtggagaaaa

SEQ ID NO: 80120 - DNA, 27 bp, Artificial sequence
  SiRNA target sequence
ggaaggttattaagtggtggagaaaag

SEQ ID NO: 80121 - DNA, 27 bp, Artificial sequence
  SiRNA target sequence
gaaggttattaagtggtggagaaaagc

SEQ ID NO: 80122 - DNA, 27 bp, Artificial sequence
  SiRNA target sequence
aaggttattaagtggtggagaaaagca

SEQ ID NO: 80123 - DNA, 27 bp, Artificial sequence
  SiRNA target sequence
aggttattaagtggtggagaaaagcaa

SEQ ID NO: 80124 - DNA, 27 bp, Artificial sequence
  SiRNA target sequence
ggttattaagtggtggagaaaagcaaa

SEQ ID NO: 80125 - DNA, 27 bp, Artificial sequence
  SiRNA target sequence
gttattaagtggtggagaaaagcaaaa

SEQ ID NO: 80126 - DNA, 27 bp, Artificial sequence
  SiRNA target sequence
ttattaagtggtggagaaaagcaaaag

SEQ ID NO: 80127 - DNA, 27 bp, Artificial sequence
  SiRNA target sequence
tattaagtggtggagaaaagcaaaaga

SEQ ID NO: 80128 - DNA, 27 bp, Artificial sequence
  SiRNA target sequence
attaagtggtggagaaaagcaaaagat

SEQ ID NO: 80129 - DNA, 27 bp, Artificial sequence
  SiRNA target sequence
ttaagtggtggagaaaagcaaaagatt

SEQ ID NO: 80130 - DNA, 27 bp, Artificial sequence
  SiRNA target sequence
taagtggtggagaaaagcaaaagattt

SEQ ID NO: 80131 - DNA, 27 bp, Artificial sequence
  SiRNA target sequence
aagtggtggagaaaagcaaaagatttt

SEQ ID NO: 80132 - DNA, 27 bp, Artificial sequence
  SiRNA target sequence
agtggtggagaaaagcaaaagatttta

SEQ ID NO: 80133 - DNA, 27 bp, Artificial sequence
  SiRNA target sequence
gtggtggagaaaagcaaaagattttat

SEQ ID NO: 80134 - DNA, 27 bp, Artificial sequence
  SiRNA target sequence
tggtggagaaaagcaaaagattttatt

SEQ ID NO: 80135 - DNA, 27 bp, Artificial sequence
  SiRNA target sequence
ggtggagaaaagcaaaagattttatta

SEQ ID NO: 80136 - DNA, 27 bp, Artificial sequence
  SiRNA target sequence
gtggagaaaagcaaaagattttattaa

SEQ ID NO: 80137 - DNA, 27 bp, Artificial sequence
  SiRNA target sequence
tggagaaaagcaaaagattttattaat

SEQ ID NO: 80138 - DNA, 27 bp, Artificial sequence
  SiRNA target sequence
ggagaaaagcaaaagattttattaatg

SEQ ID NO: 80139 - DNA, 27 bp, Artificial sequence
  SiRNA target sequence
gagaaaagcaaaagattttattaatgc

SEQ ID NO: 80140 - DNA, 27 bp, Artificial sequence
  SiRNA target sequence
agaaaagcaaaagattttattaatgcg

SEQ ID NO: 80141 - DNA, 27 bp, Artificial sequence
  SiRNA target sequence
gaaaagcaaaagattttattaatgcgt

SEQ ID NO: 80142 - DNA, 27 bp, Artificial sequence
  SiRNA target sequence
aaaagcaaaagattttattaatgcgta

SEQ ID NO: 80143 - DNA, 27 bp, Artificial sequence
  SiRNA target sequence
aaagcaaaagattttattaatgcgtac

SEQ ID NO: 80144 - DNA, 27 bp, Artificial sequence
  SiRNA target sequence
aagcaaaagattttattaatgcgtact

SEQ ID NO: 80145 - DNA, 27 bp, Artificial sequence
  SiRNA target sequence
agcaaaagattttattaatgcgtacta

SEQ ID NO: 80146 - DNA, 27 bp, Artificial sequence
  SiRNA target sequence
gcaaaagattttattaatgcgtactat

SEQ ID NO: 80147 - DNA, 27 bp, Artificial sequence
  SiRNA target sequence
caaaagattttattaatgcgtactatg

SEQ ID NO: 80148 - DNA, 27 bp, Artificial sequence
  SiRNA target sequence
aaaagattttattaatgcgtactatgt

SEQ ID NO: 80149 - DNA, 27 bp, Artificial sequence
  SiRNA target sequence
aaagattttattaatgcgtactatgtt

SEQ ID NO: 80150 - DNA, 27 bp, Artificial sequence
  SiRNA target sequence
aagattttattaatgcgtactatgtta

SEQ ID NO: 80151 - DNA, 27 bp, Artificial sequence
  SiRNA target sequence
agattttattaatgcgtactatgttaa

SEQ ID NO: 80152 - DNA, 27 bp, Artificial sequence
  SiRNA target sequence
gattttattaatgcgtactatgttaag

SEQ ID NO: 80153 - DNA, 27 bp, Artificial sequence
  SiRNA target sequence
attttattaatgcgtactatgttaaga

SEQ ID NO: 80154 - DNA, 27 bp, Artificial sequence
  SiRNA target sequence
ttttattaatgcgtactatgttaagaa

SEQ ID NO: 80155 - DNA, 27 bp, Artificial sequence
  SiRNA target sequence
tttattaatgcgtactatgttaagaaa

SEQ ID NO: 80156 - DNA, 27 bp, Artificial sequence
  SiRNA target sequence
ttattaatgcgtactatgttaagaaac

SEQ ID NO: 80157 - DNA, 27 bp, Artificial sequence
  SiRNA target sequence
tattaatgcgtactatgttaagaaaca

SEQ ID NO: 80158 - DNA, 27 bp, Artificial sequence
  SiRNA target sequence
attaatgcgtactatgttaagaaacaa

SEQ ID NO: 80159 - DNA, 27 bp, Artificial sequence
  SiRNA target sequence
ttaatgcgtactatgttaagaaacaag

SEQ ID NO: 80160 - DNA, 27 bp, Artificial sequence
  SiRNA target sequence
taatgcgtactatgttaagaaacaagg

SEQ ID NO: 80161 - DNA, 27 bp, Artificial sequence
  SiRNA target sequence
aatgcgtactatgttaagaaacaagga

SEQ ID NO: 80162 - DNA, 27 bp, Artificial sequence
  SiRNA target sequence
atgcgtactatgttaagaaacaaggag

SEQ ID NO: 80163 - DNA, 27 bp, Artificial sequence
  SiRNA target sequence
tgcgtactatgttaagaaacaaggaga

SEQ ID NO: 80164 - DNA, 27 bp, Artificial sequence
  SiRNA target sequence
gcgtactatgttaagaaacaaggagat

SEQ ID NO: 80165 - DNA, 27 bp, Artificial sequence
  SiRNA target sequence
cgtactatgttaagaaacaaggagata

SEQ ID NO: 80166 - DNA, 27 bp, Artificial sequence
  SiRNA target sequence
gtactatgttaagaaacaaggagataa

SEQ ID NO: 80167 - DNA, 27 bp, Artificial sequence
  SiRNA target sequence
tactatgttaagaaacaaggagataat

SEQ ID NO: 80168 - DNA, 27 bp, Artificial sequence
  SiRNA target sequence
actatgttaagaaacaaggagataatg

SEQ ID NO: 80169 - DNA, 27 bp, Artificial sequence
  SiRNA target sequence
ctatgttaagaaacaaggagataatgg

SEQ ID NO: 80170 - DNA, 27 bp, Artificial sequence
  SiRNA target sequence
tatgttaagaaacaaggagataatggc

SEQ ID NO: 80171 - DNA, 27 bp, Artificial sequence
  SiRNA target sequence
atgttaagaaacaaggagataatggca

SEQ ID NO: 80172 - DNA, 27 bp, Artificial sequence
  SiRNA target sequence
tgttaagaaacaaggagataatggcat

SEQ ID NO: 80173 - DNA, 27 bp, Artificial sequence
  SiRNA target sequence
gttaagaaacaaggagataatggcatt

SEQ ID NO: 80174 - DNA, 27 bp, Artificial sequence
  SiRNA target sequence
ttaagaaacaaggagataatggcatta

SEQ ID NO: 80175 - DNA, 27 bp, Artificial sequence
  SiRNA target sequence
taagaaacaaggagataatggcattag

SEQ ID NO: 80176 - DNA, 27 bp, Artificial sequence
  SiRNA target sequence
aagaaacaaggagataatggcattaga

SEQ ID NO: 80177 - DNA, 27 bp, Artificial sequence
  SiRNA target sequence
agaaacaaggagataatggcattagat

SEQ ID NO: 80178 - DNA, 27 bp, Artificial sequence
  SiRNA target sequence
gaaacaaggagataatggcattagatg

SEQ ID NO: 80179 - DNA, 27 bp, Artificial sequence
  SiRNA target sequence
aaacaaggagataatggcattagatga

SEQ ID NO: 80180 - DNA, 27 bp, Artificial sequence
  SiRNA target sequence
aacaaggagataatggcattagatgaa

SEQ ID NO: 80181 - DNA, 27 bp, Artificial sequence
  SiRNA target sequence
acaaggagataatggcattagatgaac

SEQ ID NO: 80182 - DNA, 27 bp, Artificial sequence
  SiRNA target sequence
caaggagataatggcattagatgaacc

SEQ ID NO: 80183 - DNA, 27 bp, Artificial sequence
  SiRNA target sequence
aaggagataatggcattagatgaaccc

SEQ ID NO: 80184 - DNA, 27 bp, Artificial sequence
  SiRNA target sequence
aggagataatggcattagatgaaccca

SEQ ID NO: 80185 - DNA, 27 bp, Artificial sequence
  SiRNA target sequence
ggagataatggcattagatgaacccac

SEQ ID NO: 80186 - DNA, 27 bp, Artificial sequence
  SiRNA target sequence
gagataatggcattagatgaacccact

SEQ ID NO: 80187 - DNA, 27 bp, Artificial sequence
  SiRNA target sequence
agataatggcattagatgaacccactg

SEQ ID NO: 80188 - DNA, 27 bp, Artificial sequence
  SiRNA target sequence
gataatggcattagatgaacccactgc

SEQ ID NO: 80189 - DNA, 27 bp, Artificial sequence
  SiRNA target sequence
ataatggcattagatgaacccactgca

SEQ ID NO: 80190 - DNA, 27 bp, Artificial sequence
  SiRNA target sequence
taatggcattagatgaacccactgcag

SEQ ID NO: 80191 - DNA, 27 bp, Artificial sequence
  SiRNA target sequence
aatggcattagatgaacccactgcagc

SEQ ID NO: 80192 - DNA, 27 bp, Artificial sequence
  SiRNA target sequence
atggcattagatgaacccactgcagca

SEQ ID NO: 80193 - DNA, 27 bp, Artificial sequence
  SiRNA target sequence
tggcattagatgaacccactgcagcac

SEQ ID NO: 80194 - DNA, 27 bp, Artificial sequence
  SiRNA target sequence
ggcattagatgaacccactgcagcact

SEQ ID NO: 80195 - DNA, 27 bp, Artificial sequence
  SiRNA target sequence
gcattagatgaacccactgcagcactt

SEQ ID NO: 80196 - DNA, 27 bp, Artificial sequence
  SiRNA target sequence
cattagatgaacccactgcagcacttg

SEQ ID NO: 80197 - DNA, 27 bp, Artificial sequence
  SiRNA target sequence
attagatgaacccactgcagcacttga

SEQ ID NO: 80198 - DNA, 27 bp, Artificial sequence
  SiRNA target sequence
ttagatgaacccactgcagcacttgat

SEQ ID NO: 80199 - DNA, 27 bp, Artificial sequence
  SiRNA target sequence
tagatgaacccactgcagcacttgata

SEQ ID NO: 80200 - DNA, 27 bp, Artificial sequence
  SiRNA target sequence
agatgaacccactgcagcacttgataa

SEQ ID NO: 80201 - DNA, 27 bp, Artificial sequence
  SiRNA target sequence
gatgaacccactgcagcacttgataag

SEQ ID NO: 80202 - DNA, 27 bp, Artificial sequence
  SiRNA target sequence
atgaacccactgcagcacttgataagg

SEQ ID NO: 80203 - DNA, 27 bp, Artificial sequence
  SiRNA target sequence
tgaacccactgcagcacttgataagga

SEQ ID NO: 80204 - DNA, 27 bp, Artificial sequence
  SiRNA target sequence
gaacccactgcagcacttgataaggag

SEQ ID NO: 80205 - DNA, 27 bp, Artificial sequence
  SiRNA target sequence
aacccactgcagcacttgataaggagt

SEQ ID NO: 80206 - DNA, 27 bp, Artificial sequence
  SiRNA target sequence
acccactgcagcacttgataaggagtc

SEQ ID NO: 80207 - DNA, 27 bp, Artificial sequence
  SiRNA target sequence
cccactgcagcacttgataaggagtct

SEQ ID NO: 80208 - DNA, 27 bp, Artificial sequence
  SiRNA target sequence
ccactgcagcacttgataaggagtctg

SEQ ID NO: 80209 - DNA, 27 bp, Artificial sequence
  SiRNA target sequence
cactgcagcacttgataaggagtctga

SEQ ID NO: 80210 - DNA, 27 bp, Artificial sequence
  SiRNA target sequence
actgcagcacttgataaggagtctgaa

SEQ ID NO: 80211 - DNA, 27 bp, Artificial sequence
  SiRNA target sequence
ctgcagcacttgataaggagtctgaaa

SEQ ID NO: 80212 - DNA, 27 bp, Artificial sequence
  SiRNA target sequence
tgcagcacttgataaggagtctgaaaa

SEQ ID NO: 80213 - DNA, 27 bp, Artificial sequence
  SiRNA target sequence
gcagcacttgataaggagtctgaaaaa

SEQ ID NO: 80214 - DNA, 27 bp, Artificial sequence
  SiRNA target sequence
cagcacttgataaggagtctgaaaaaa

SEQ ID NO: 80215 - DNA, 27 bp, Artificial sequence
  SiRNA target sequence
agcacttgataaggagtctgaaaaaaa

SEQ ID NO: 80216 - DNA, 27 bp, Artificial sequence
  SiRNA target sequence
gcacttgataaggagtctgaaaaaaag

SEQ ID NO: 80217 - DNA, 27 bp, Artificial sequence
  SiRNA target sequence
cacttgataaggagtctgaaaaaaaga

SEQ ID NO: 80218 - DNA, 27 bp, Artificial sequence
  SiRNA target sequence
acttgataaggagtctgaaaaaaagat

SEQ ID NO: 80219 - DNA, 27 bp, Artificial sequence
  SiRNA target sequence
cttgataaggagtctgaaaaaaagatt

SEQ ID NO: 80220 - DNA, 27 bp, Artificial sequence
  SiRNA target sequence
ttgataaggagtctgaaaaaaagattt

SEQ ID NO: 80221 - DNA, 27 bp, Artificial sequence
  SiRNA target sequence
tgataaggagtctgaaaaaaagatttt

SEQ ID NO: 80222 - DNA, 27 bp, Artificial sequence
  SiRNA target sequence
gataaggagtctgaaaaaaagatttta

SEQ ID NO: 80223 - DNA, 27 bp, Artificial sequence
  SiRNA target sequence
ataaggagtctgaaaaaaagattttag

SEQ ID NO: 80224 - DNA, 27 bp, Artificial sequence
  SiRNA target sequence
taaggagtctgaaaaaaagattttaga

SEQ ID NO: 80225 - DNA, 27 bp, Artificial sequence
  SiRNA target sequence
aaggagtctgaaaaaaagattttagag

SEQ ID NO: 80226 - DNA, 27 bp, Artificial sequence
  SiRNA target sequence
aggagtctgaaaaaaagattttagaga

SEQ ID NO: 80227 - DNA, 27 bp, Artificial sequence
  SiRNA target sequence
ggagtctgaaaaaaagattttagagat

SEQ ID NO: 80228 - DNA, 27 bp, Artificial sequence
  SiRNA target sequence
gagtctgaaaaaaagattttagagata

SEQ ID NO: 80229 - DNA, 27 bp, Artificial sequence
  SiRNA target sequence
agtctgaaaaaaagattttagagataa

SEQ ID NO: 80230 - DNA, 27 bp, Artificial sequence
  SiRNA target sequence
gtctgaaaaaaagattttagagataat

SEQ ID NO: 80231 - DNA, 27 bp, Artificial sequence
  SiRNA target sequence
tctgaaaaaaagattttagagataatt

SEQ ID NO: 80232 - DNA, 27 bp, Artificial sequence
  SiRNA target sequence
ctgaaaaaaagattttagagataattt

SEQ ID NO: 80233 - DNA, 27 bp, Artificial sequence
  SiRNA target sequence
tgaaaaaaagattttagagataatttt

SEQ ID NO: 80234 - DNA, 27 bp, Artificial sequence
  SiRNA target sequence
gaaaaaaagattttagagataatttta

SEQ ID NO: 80235 - DNA, 27 bp, Artificial sequence
  SiRNA target sequence
aaaaaaagattttagagataattttac

SEQ ID NO: 80236 - DNA, 27 bp, Artificial sequence
  SiRNA target sequence
aaaaaagattttagagataattttaca

SEQ ID NO: 80237 - DNA, 27 bp, Artificial sequence
  SiRNA target sequence
aaaaagattttagagataattttacaa

SEQ ID NO: 80238 - DNA, 27 bp, Artificial sequence
  SiRNA target sequence
aaaagattttagagataattttacaac

SEQ ID NO: 80239 - DNA, 27 bp, Artificial sequence
  SiRNA target sequence
aaagattttagagataattttacaaca

SEQ ID NO: 80240 - DNA, 27 bp, Artificial sequence
  SiRNA target sequence
aagattttagagataattttacaacag

SEQ ID NO: 80241 - DNA, 27 bp, Artificial sequence
  SiRNA target sequence
agattttagagataattttacaacagg

SEQ ID NO: 80242 - DNA, 27 bp, Artificial sequence
  SiRNA target sequence
gattttagagataattttacaacagga

SEQ ID NO: 80243 - DNA, 27 bp, Artificial sequence
  SiRNA target sequence
attttagagataattttacaacaggaa

SEQ ID NO: 80244 - DNA, 27 bp, Artificial sequence
  SiRNA target sequence
ttttagagataattttacaacaggaag

SEQ ID NO: 80245 - DNA, 27 bp, Artificial sequence
  SiRNA target sequence
tttagagataattttacaacaggaaga

SEQ ID NO: 80246 - DNA, 27 bp, Artificial sequence
  SiRNA target sequence
ttagagataattttacaacaggaagat

SEQ ID NO: 80247 - DNA, 27 bp, Artificial sequence
  SiRNA target sequence
tagagataattttacaacaggaagatc

SEQ ID NO: 80248 - DNA, 27 bp, Artificial sequence
  SiRNA target sequence
agagataattttacaacaggaagatcg

SEQ ID NO: 80249 - DNA, 27 bp, Artificial sequence
  SiRNA target sequence
gagataattttacaacaggaagatcga

SEQ ID NO: 80250 - DNA, 27 bp, Artificial sequence
  SiRNA target sequence
agataattttacaacaggaagatcgaa

SEQ ID NO: 80251 - DNA, 27 bp, Artificial sequence
  SiRNA target sequence
gataattttacaacaggaagatcgaac

SEQ ID NO: 80252 - DNA, 27 bp, Artificial sequence
  SiRNA target sequence
ataattttacaacaggaagatcgaaca

SEQ ID NO: 80253 - DNA, 27 bp, Artificial sequence
  SiRNA target sequence
taattttacaacaggaagatcgaacag

SEQ ID NO: 80254 - DNA, 27 bp, Artificial sequence
  SiRNA target sequence
aattttacaacaggaagatcgaacagt

SEQ ID NO: 80255 - DNA, 27 bp, Artificial sequence
  SiRNA target sequence
attttacaacaggaagatcgaacagtt

SEQ ID NO: 80256 - DNA, 27 bp, Artificial sequence
  SiRNA target sequence
ttttacaacaggaagatcgaacagttt

SEQ ID NO: 80257 - DNA, 27 bp, Artificial sequence
  SiRNA target sequence
tttacaacaggaagatcgaacagtttt

SEQ ID NO: 80258 - DNA, 27 bp, Artificial sequence
  SiRNA target sequence
ttacaacaggaagatcgaacagttttg

SEQ ID NO: 80259 - DNA, 27 bp, Artificial sequence
  SiRNA target sequence
tacaacaggaagatcgaacagttttga

SEQ ID NO: 80260 - DNA, 27 bp, Artificial sequence
  SiRNA target sequence
acaacaggaagatcgaacagttttgat

SEQ ID NO: 80261 - DNA, 27 bp, Artificial sequence
  SiRNA target sequence
caacaggaagatcgaacagttttgatg

SEQ ID NO: 80262 - DNA, 27 bp, Artificial sequence
  SiRNA target sequence
aacaggaagatcgaacagttttgatga

SEQ ID NO: 80263 - DNA, 27 bp, Artificial sequence
  SiRNA target sequence
acaggaagatcgaacagttttgatgat

SEQ ID NO: 80264 - DNA, 27 bp, Artificial sequence
  SiRNA target sequence
caggaagatcgaacagttttgatgata

SEQ ID NO: 80265 - DNA, 27 bp, Artificial sequence
  SiRNA target sequence
aggaagatcgaacagttttgatgataa

SEQ ID NO: 80266 - DNA, 27 bp, Artificial sequence
  SiRNA target sequence
ggaagatcgaacagttttgatgataat

SEQ ID NO: 80267 - DNA, 27 bp, Artificial sequence
  SiRNA target sequence
gaagatcgaacagttttgatgataatt

SEQ ID NO: 80268 - DNA, 27 bp, Artificial sequence
  SiRNA target sequence
aagatcgaacagttttgatgataattc

SEQ ID NO: 80269 - DNA, 27 bp, Artificial sequence
  SiRNA target sequence
agatcgaacagttttgatgataattca

SEQ ID NO: 80270 - DNA, 27 bp, Artificial sequence
  SiRNA target sequence
gatcgaacagttttgatgataattcat

SEQ ID NO: 80271 - DNA, 27 bp, Artificial sequence
  SiRNA target sequence
atcgaacagttttgatgataattcata

SEQ ID NO: 80272 - DNA, 27 bp, Artificial sequence
  SiRNA target sequence
tcgaacagttttgatgataattcataa

SEQ ID NO: 80273 - DNA, 27 bp, Artificial sequence
  SiRNA target sequence
cgaacagttttgatgataattcataat

SEQ ID NO: 80274 - DNA, 27 bp, Artificial sequence
  SiRNA target sequence
gaacagttttgatgataattcataatc

SEQ ID NO: 80275 - DNA, 27 bp, Artificial sequence
  SiRNA target sequence
aacagttttgatgataattcataatct

SEQ ID NO: 80276 - DNA, 27 bp, Artificial sequence
  SiRNA target sequence
acagttttgatgataattcataatcta

SEQ ID NO: 80277 - DNA, 27 bp, Artificial sequence
  SiRNA target sequence
cagttttgatgataattcataatctag

SEQ ID NO: 80278 - DNA, 27 bp, Artificial sequence
  SiRNA target sequence
agttttgatgataattcataatctaga

SEQ ID NO: 80279 - DNA, 27 bp, Artificial sequence
  SiRNA target sequence
gttttgatgataattcataatctagaa

SEQ ID NO: 80280 - DNA, 27 bp, Artificial sequence
  SiRNA target sequence
ttttgatgataattcataatctagaac

SEQ ID NO: 80281 - DNA, 27 bp, Artificial sequence
  SiRNA target sequence
tttgatgataattcataatctagaact

SEQ ID NO: 80282 - DNA, 27 bp, Artificial sequence
  SiRNA target sequence
ttgatgataattcataatctagaactt

SEQ ID NO: 80283 - DNA, 27 bp, Artificial sequence
  SiRNA target sequence
tgatgataattcataatctagaactta

SEQ ID NO: 80284 - DNA, 27 bp, Artificial sequence
  SiRNA target sequence
gatgataattcataatctagaacttat

SEQ ID NO: 80285 - DNA, 27 bp, Artificial sequence
  SiRNA target sequence
atgataattcataatctagaacttatt

SEQ ID NO: 80286 - DNA, 27 bp, Artificial sequence
  SiRNA target sequence
tgataattcataatctagaacttatta

SEQ ID NO: 80287 - DNA, 27 bp, Artificial sequence
  SiRNA target sequence
gataattcataatctagaacttattaa

SEQ ID NO: 80288 - DNA, 27 bp, Artificial sequence
  SiRNA target sequence
ataattcataatctagaacttattaat

SEQ ID NO: 80289 - DNA, 27 bp, Artificial sequence
  SiRNA target sequence
taattcataatctagaacttattaata

SEQ ID NO: 80290 - DNA, 27 bp, Artificial sequence
  SiRNA target sequence
aattcataatctagaacttattaataa

SEQ ID NO: 80291 - DNA, 27 bp, Artificial sequence
  SiRNA target sequence
attcataatctagaacttattaataaa

SEQ ID NO: 80292 - DNA, 27 bp, Artificial sequence
  SiRNA target sequence
ttcataatctagaacttattaataaat

SEQ ID NO: 80293 - DNA, 27 bp, Artificial sequence
  SiRNA target sequence
tcataatctagaacttattaataaatt

SEQ ID NO: 80294 - DNA, 27 bp, Artificial sequence
  SiRNA target sequence
cataatctagaacttattaataaattt

SEQ ID NO: 80295 - DNA, 27 bp, Artificial sequence
  SiRNA target sequence
ataatctagaacttattaataaatttg

SEQ ID NO: 80296 - DNA, 27 bp, Artificial sequence
  SiRNA target sequence
taatctagaacttattaataaatttga

SEQ ID NO: 80297 - DNA, 27 bp, Artificial sequence
  SiRNA target sequence
aatctagaacttattaataaatttgat

SEQ ID NO: 80298 - DNA, 27 bp, Artificial sequence
  SiRNA target sequence
atctagaacttattaataaatttgata

SEQ ID NO: 80299 - DNA, 27 bp, Artificial sequence
  SiRNA target sequence
tctagaacttattaataaatttgataa

SEQ ID NO: 80300 - DNA, 27 bp, Artificial sequence
  SiRNA target sequence
ctagaacttattaataaatttgataaa

SEQ ID NO: 80301 - DNA, 27 bp, Artificial sequence
  SiRNA target sequence
tagaacttattaataaatttgataaaa

SEQ ID NO: 80302 - DNA, 27 bp, Artificial sequence
  SiRNA target sequence
agaacttattaataaatttgataaaat

SEQ ID NO: 80303 - DNA, 27 bp, Artificial sequence
  SiRNA target sequence
gaacttattaataaatttgataaaata

SEQ ID NO: 80304 - DNA, 27 bp, Artificial sequence
  SiRNA target sequence
aacttattaataaatttgataaaataa

SEQ ID NO: 80305 - DNA, 27 bp, Artificial sequence
  SiRNA target sequence
acttattaataaatttgataaaataat

SEQ ID NO: 80306 - DNA, 27 bp, Artificial sequence
  SiRNA target sequence
cttattaataaatttgataaaataatt

SEQ ID NO: 80307 - DNA, 27 bp, Artificial sequence
  SiRNA target sequence
ttattaataaatttgataaaataattt

SEQ ID NO: 80308 - DNA, 27 bp, Artificial sequence
  SiRNA target sequence
tattaataaatttgataaaataattta

SEQ ID NO: 80309 - DNA, 27 bp, Artificial sequence
  SiRNA target sequence
attaataaatttgataaaataatttac

SEQ ID NO: 80310 - DNA, 27 bp, Artificial sequence
  SiRNA target sequence
ttaataaatttgataaaataatttaca

SEQ ID NO: 80311 - DNA, 27 bp, Artificial sequence
  SiRNA target sequence
taataaatttgataaaataatttacat

SEQ ID NO: 80312 - DNA, 27 bp, Artificial sequence
  SiRNA target sequence
aataaatttgataaaataatttacatt

SEQ ID NO: 80313 - DNA, 27 bp, Artificial sequence
  SiRNA target sequence
ataaatttgataaaataatttacattg

SEQ ID NO: 80314 - DNA, 27 bp, Artificial sequence
  SiRNA target sequence
taaatttgataaaataatttacattga

SEQ ID NO: 80315 - DNA, 27 bp, Artificial sequence
  SiRNA target sequence
aaatttgataaaataatttacattgat

SEQ ID NO: 80316 - DNA, 27 bp, Artificial sequence
  SiRNA target sequence
aatttgataaaataatttacattgatg

SEQ ID NO: 80317 - DNA, 27 bp, Artificial sequence
  SiRNA target sequence
atttgataaaataatttacattgatga

SEQ ID NO: 80318 - DNA, 27 bp, Artificial sequence
  SiRNA target sequence
tttgataaaataatttacattgatgaa

SEQ ID NO: 80319 - DNA, 27 bp, Artificial sequence
  SiRNA target sequence
ttgataaaataatttacattgatgaaa

SEQ ID NO: 80320 - DNA, 27 bp, Artificial sequence
  SiRNA target sequence
tgataaaataatttacattgatgaaaa

SEQ ID NO: 80321 - DNA, 27 bp, Artificial sequence
  SiRNA target sequence
gataaaataatttacattgatgaaaat

SEQ ID NO: 80322 - DNA, 27 bp, Artificial sequence
  SiRNA target sequence
ataaaataatttacattgatgaaaata

SEQ ID NO: 80323 - DNA, 27 bp, Artificial sequence
  SiRNA target sequence
taaaataatttacattgatgaaaataa

SEQ ID NO: 80324 - DNA, 27 bp, Artificial sequence
  SiRNA target sequence
aaaataatttacattgatgaaaataat

SEQ ID NO: 80325 - DNA, 27 bp, Artificial sequence
  SiRNA target sequence
aaataatttacattgatgaaaataata

SEQ ID NO: 80326 - DNA, 27 bp, Artificial sequence
  SiRNA target sequence
aataatttacattgatgaaaataatat

SEQ ID NO: 80327 - DNA, 27 bp, Artificial sequence
  SiRNA target sequence
ataatttacattgatgaaaataatata

SEQ ID NO: 80328 - DNA, 27 bp, Artificial sequence
  SiRNA target sequence
taatttacattgatgaaaataatatag

SEQ ID NO: 80329 - DNA, 27 bp, Artificial sequence
  SiRNA target sequence
aatttacattgatgaaaataatataga

SEQ ID NO: 80330 - DNA, 27 bp, Artificial sequence
  SiRNA target sequence
atttacattgatgaaaataatatagaa

SEQ ID NO: 80331 - DNA, 27 bp, Artificial sequence
  SiRNA target sequence
tttacattgatgaaaataatatagaag

SEQ ID NO: 80332 - DNA, 27 bp, Artificial sequence
  SiRNA target sequence
ttacattgatgaaaataatatagaagt

SEQ ID NO: 80333 - DNA, 27 bp, Artificial sequence
  SiRNA target sequence
tacattgatgaaaataatatagaagtc

SEQ ID NO: 80334 - DNA, 27 bp, Artificial sequence
  SiRNA target sequence
acattgatgaaaataatatagaagtct

SEQ ID NO: 80335 - DNA, 27 bp, Artificial sequence
  SiRNA target sequence
cattgatgaaaataatatagaagtcta

SEQ ID NO: 80336 - DNA, 27 bp, Artificial sequence
  SiRNA target sequence
attgatgaaaataatatagaagtctat

SEQ ID NO: 80337 - DNA, 27 bp, Artificial sequence
  SiRNA target sequence
ttgatgaaaataatatagaagtctata

SEQ ID NO: 80338 - DNA, 27 bp, Artificial sequence
  SiRNA target sequence
tgatgaaaataatatagaagtctataa

SEQ ID NO: 80339 - DNA, 27 bp, Artificial sequence
  SiRNA target sequence
gatgaaaataatatagaagtctataaa

SEQ ID NO: 80340 - DNA, 27 bp, Artificial sequence
  SiRNA target sequence
atgaaaataatatagaagtctataaaa

SEQ ID NO: 80341 - DNA, 27 bp, Artificial sequence
  SiRNA target sequence
tgaaaataatatagaagtctataaaaa

SEQ ID NO: 80342 - DNA, 27 bp, Artificial sequence
  SiRNA target sequence
gaaaataatatagaagtctataaaaat

SEQ ID NO: 80343 - DNA, 27 bp, Artificial sequence
  SiRNA target sequence
aaaataatatagaagtctataaaaatg

SEQ ID NO: 80344 - DNA, 27 bp, Artificial sequence
  SiRNA target sequence
aaataatatagaagtctataaaaatga

SEQ ID NO: 80345 - DNA, 27 bp, Artificial sequence
  SiRNA target sequence
aataatatagaagtctataaaaatgat

SEQ ID NO: 80346 - DNA, 27 bp, Artificial sequence
  SiRNA target sequence
ataatatagaagtctataaaaatgata

SEQ ID NO: 80347 - DNA, 27 bp, Artificial sequence
  SiRNA target sequence
taatatagaagtctataaaaatgatat

SEQ ID NO: 80348 - DNA, 27 bp, Artificial sequence
  SiRNA target sequence
aatatagaagtctataaaaatgatatt

SEQ ID NO: 80349 - DNA, 27 bp, Artificial sequence
  SiRNA target sequence
atatagaagtctataaaaatgatattg

SEQ ID NO: 80350 - DNA, 27 bp, Artificial sequence
  SiRNA target sequence
tatagaagtctataaaaatgatattga

SEQ ID NO: 80351 - DNA, 27 bp, Artificial sequence
  SiRNA target sequence
atagaagtctataaaaatgatattgaa

SEQ ID NO: 80352 - DNA, 27 bp, Artificial sequence
  SiRNA target sequence
tagaagtctataaaaatgatattgaag

SEQ ID NO: 80353 - DNA, 27 bp, Artificial sequence
  SiRNA target sequence
agaagtctataaaaatgatattgaagg

SEQ ID NO: 80354 - DNA, 27 bp, Artificial sequence
  SiRNA target sequence
gaagtctataaaaatgatattgaagga

SEQ ID NO: 80355 - DNA, 27 bp, Artificial sequence
  SiRNA target sequence
aagtctataaaaatgatattgaaggac

SEQ ID NO: 80356 - DNA, 27 bp, Artificial sequence
  SiRNA target sequence
agtctataaaaatgatattgaaggaca

SEQ ID NO: 80357 - DNA, 27 bp, Artificial sequence
  SiRNA target sequence
gtctataaaaatgatattgaaggacaa

SEQ ID NO: 80358 - DNA, 27 bp, Artificial sequence
  SiRNA target sequence
tctataaaaatgatattgaaggacaaa

SEQ ID NO: 80359 - DNA, 27 bp, Artificial sequence
  SiRNA target sequence
ctataaaaatgatattgaaggacaaaa

SEQ ID NO: 80360 - DNA, 27 bp, Artificial sequence
  SiRNA target sequence
tataaaaatgatattgaaggacaaaaa

SEQ ID NO: 80361 - DNA, 27 bp, Artificial sequence
  SiRNA target sequence
ataaaaatgatattgaaggacaaaaaa

SEQ ID NO: 80362 - DNA, 27 bp, Artificial sequence
  SiRNA target sequence
taaaaatgatattgaaggacaaaaaaa

SEQ ID NO: 80363 - DNA, 27 bp, Artificial sequence
  SiRNA target sequence
aaaaatgatattgaaggacaaaaaaag

SEQ ID NO: 80364 - DNA, 27 bp, Artificial sequence
  SiRNA target sequence
aaaatgatattgaaggacaaaaaaagt

SEQ ID NO: 80365 - DNA, 27 bp, Artificial sequence
  SiRNA target sequence
aaatgatattgaaggacaaaaaaagtt

SEQ ID NO: 80366 - DNA, 27 bp, Artificial sequence
  SiRNA target sequence
aatgatattgaaggacaaaaaaagttt

SEQ ID NO: 80367 - DNA, 27 bp, Artificial sequence
  SiRNA target sequence
atgatattgaaggacaaaaaaagtttt

SEQ ID NO: 80368 - DNA, 27 bp, Artificial sequence
  SiRNA target sequence
tgatattgaaggacaaaaaaagttttc

SEQ ID NO: 80369 - DNA, 27 bp, Artificial sequence
  SiRNA target sequence
gatattgaaggacaaaaaaagttttct

SEQ ID NO: 80370 - DNA, 27 bp, Artificial sequence
  SiRNA target sequence
atattgaaggacaaaaaaagttttcta

SEQ ID NO: 80371 - DNA, 27 bp, Artificial sequence
  SiRNA target sequence
tattgaaggacaaaaaaagttttctac

SEQ ID NO: 80372 - DNA, 27 bp, Artificial sequence
  SiRNA target sequence
attgaaggacaaaaaaagttttctaca

SEQ ID NO: 80373 - DNA, 27 bp, Artificial sequence
  SiRNA target sequence
ttgaaggacaaaaaaagttttctacaa

SEQ ID NO: 80374 - DNA, 27 bp, Artificial sequence
  SiRNA target sequence
tgaaggacaaaaaaagttttctacaaa

SEQ ID NO: 80375 - DNA, 27 bp, Artificial sequence
  SiRNA target sequence
gaaggacaaaaaaagttttctacaaat

SEQ ID NO: 80376 - DNA, 27 bp, Artificial sequence
  SiRNA target sequence
aaggacaaaaaaagttttctacaaatt

SEQ ID NO: 80377 - DNA, 27 bp, Artificial sequence
  SiRNA target sequence
aggacaaaaaaagttttctacaaattt

SEQ ID NO: 80378 - DNA, 27 bp, Artificial sequence
  SiRNA target sequence
ggacaaaaaaagttttctacaaattta

SEQ ID NO: 80379 - DNA, 27 bp, Artificial sequence
  SiRNA target sequence
gacaaaaaaagttttctacaaatttac

SEQ ID NO: 80380 - DNA, 27 bp, Artificial sequence
  SiRNA target sequence
acaaaaaaagttttctacaaatttaca

SEQ ID NO: 80381 - DNA, 27 bp, Artificial sequence
  SiRNA target sequence
caaaaaaagttttctacaaatttacaa

SEQ ID NO: 80382 - DNA, 27 bp, Artificial sequence
  SiRNA target sequence
aaaaaaagttttctacaaatttacaat

SEQ ID NO: 80383 - DNA, 27 bp, Artificial sequence
  SiRNA target sequence
aaaaaagttttctacaaatttacaata

SEQ ID NO: 80384 - DNA, 27 bp, Artificial sequence
  SiRNA target sequence
aaaaagttttctacaaatttacaatat

SEQ ID NO: 80385 - DNA, 27 bp, Artificial sequence
  SiRNA target sequence
aaaagttttctacaaatttacaatatt

SEQ ID NO: 80386 - DNA, 27 bp, Artificial sequence
  SiRNA target sequence
aaagttttctacaaatttacaatattt

SEQ ID NO: 80387 - DNA, 27 bp, Artificial sequence
  SiRNA target sequence
aagttttctacaaatttacaatatttt

SEQ ID NO: 80388 - DNA, 27 bp, Artificial sequence
  SiRNA target sequence
agttttctacaaatttacaatattttt

SEQ ID NO: 80389 - DNA, 27 bp, Artificial sequence
  SiRNA target sequence
gttttctacaaatttacaatatttttt

SEQ ID NO: 80390 - DNA, 27 bp, Artificial sequence
  SiRNA target sequence
ttttctacaaatttacaatatttttta

SEQ ID NO: 80391 - DNA, 27 bp, Artificial sequence
  SiRNA target sequence
tttctacaaatttacaatattttttat

SEQ ID NO: 80392 - DNA, 27 bp, Artificial sequence
  SiRNA target sequence
ttctacaaatttacaatattttttatc

SEQ ID NO: 80393 - DNA, 27 bp, Artificial sequence
  SiRNA target sequence
tctacaaatttacaatattttttatca

SEQ ID NO: 80394 - DNA, 27 bp, Artificial sequence
  SiRNA target sequence
ctacaaatttacaatattttttatcat

SEQ ID NO: 80395 - DNA, 27 bp, Artificial sequence
  SiRNA target sequence
tacaaatttacaatattttttatcata

SEQ ID NO: 80396 - DNA, 27 bp, Artificial sequence
  SiRNA target sequence
acaaatttacaatattttttatcatac

SEQ ID NO: 80397 - DNA, 27 bp, Artificial sequence
  SiRNA target sequence
caaatttacaatattttttatcataca

SEQ ID NO: 80398 - DNA, 27 bp, Artificial sequence
  SiRNA target sequence
aaatttacaatattttttatcatacaa

SEQ ID NO: 80399 - DNA, 27 bp, Artificial sequence
  SiRNA target sequence
aatttacaatattttttatcatacaaa

SEQ ID NO: 80400 - DNA, 27 bp, Artificial sequence
  SiRNA target sequence
atttacaatattttttatcatacaaat

SEQ ID NO: 80401 - DNA, 27 bp, Artificial sequence
  SiRNA target sequence
tttacaatattttttatcatacaaatt

SEQ ID NO: 80402 - DNA, 27 bp, Artificial sequence
  SiRNA target sequence
ttacaatattttttatcatacaaatta

SEQ ID NO: 80403 - DNA, 27 bp, Artificial sequence
  SiRNA target sequence
tacaatattttttatcatacaaattag

SEQ ID NO: 80404 - DNA, 27 bp, Artificial sequence
  SiRNA target sequence
acaatattttttatcatacaaattagg

SEQ ID NO: 80405 - DNA, 27 bp, Artificial sequence
  SiRNA target sequence
caatattttttatcatacaaattaggt

SEQ ID NO: 80406 - DNA, 27 bp, Artificial sequence
  SiRNA target sequence
aatattttttatcatacaaattaggta

SEQ ID NO: 80407 - DNA, 27 bp, Artificial sequence
  SiRNA target sequence
atattttttatcatacaaattaggtaa

SEQ ID NO: 80408 - DNA, 27 bp, Artificial sequence
  SiRNA target sequence
tattttttatcatacaaattaggtaaa

SEQ ID NO: 80409 - DNA, 27 bp, Artificial sequence
  SiRNA target sequence
attttttatcatacaaattaggtaaat

SEQ ID NO: 80410 - DNA, 27 bp, Artificial sequence
  SiRNA target sequence
ttttttatcatacaaattaggtaaata

SEQ ID NO: 80411 - DNA, 27 bp, Artificial sequence
  SiRNA target sequence
tttttatcatacaaattaggtaaataa

SEQ ID NO: 80412 - DNA, 19 bp, Artificial sequence
  SiRNA target sequence
ttattctggttcacaacca

SEQ ID NO: 80413 - DNA, 19 bp, Artificial sequence
  SiRNA target sequence
tattctggttcacaaccac

SEQ ID NO: 80414 - DNA, 19 bp, Artificial sequence
  SiRNA target sequence
attctggttcacaaccaca

SEQ ID NO: 80415 - DNA, 19 bp, Artificial sequence
  SiRNA target sequence
ttctggttcacaaccacaa

SEQ ID NO: 80416 - DNA, 19 bp, Artificial sequence
  SiRNA target sequence
tctggttcacaaccacaac

SEQ ID NO: 80417 - DNA, 19 bp, Artificial sequence
  SiRNA target sequence
ctggttcacaaccacaact

SEQ ID NO: 80418 - DNA, 19 bp, Artificial sequence
  SiRNA target sequence
tggttcacaaccacaactc

SEQ ID NO: 80419 - DNA, 19 bp, Artificial sequence
  SiRNA target sequence
ggttcacaaccacaactcc

SEQ ID NO: 80420 - DNA, 19 bp, Artificial sequence
  SiRNA target sequence
gttcacaaccacaactcca

SEQ ID NO: 80421 - DNA, 19 bp, Artificial sequence
  SiRNA target sequence
ttcacaaccacaactccaa

SEQ ID NO: 80422 - DNA, 19 bp, Artificial sequence
  SiRNA target sequence
tcacaaccacaactccaaa

SEQ ID NO: 80423 - DNA, 19 bp, Artificial sequence
  SiRNA target sequence
cacaaccacaactccaaac

SEQ ID NO: 80424 - DNA, 19 bp, Artificial sequence
  SiRNA target sequence
acaaccacaactccaaaca

SEQ ID NO: 80425 - DNA, 19 bp, Artificial sequence
  SiRNA target sequence
caaccacaactccaaacac

SEQ ID NO: 80426 - DNA, 19 bp, Artificial sequence
  SiRNA target sequence
aaccacaactccaaacacc

SEQ ID NO: 80427 - DNA, 19 bp, Artificial sequence
  SiRNA target sequence
accacaactccaaacacct

SEQ ID NO: 80428 - DNA, 19 bp, Artificial sequence
  SiRNA target sequence
ccacaactccaaacacctt

SEQ ID NO: 80429 - DNA, 19 bp, Artificial sequence
  SiRNA target sequence
cacaactccaaacaccttc

SEQ ID NO: 80430 - DNA, 19 bp, Artificial sequence
  SiRNA target sequence
acaactccaaacaccttct

SEQ ID NO: 80431 - DNA, 19 bp, Artificial sequence
  SiRNA target sequence
caactccaaacaccttcta

SEQ ID NO: 80432 - DNA, 19 bp, Artificial sequence
  SiRNA target sequence
aactccaaacaccttctac

SEQ ID NO: 80433 - DNA, 19 bp, Artificial sequence
  SiRNA target sequence
actccaaacaccttctacc

SEQ ID NO: 80434 - DNA, 19 bp, Artificial sequence
  SiRNA target sequence
ctccaaacaccttctacct

SEQ ID NO: 80435 - DNA, 19 bp, Artificial sequence
  SiRNA target sequence
tccaaacaccttctacctt

SEQ ID NO: 80436 - DNA, 19 bp, Artificial sequence
  SiRNA target sequence
ccaaacaccttctaccttt

SEQ ID NO: 80437 - DNA, 19 bp, Artificial sequence
  SiRNA target sequence
caaacaccttctacctttt

SEQ ID NO: 80438 - DNA, 19 bp, Artificial sequence
  SiRNA target sequence
aaacaccttctaccttttt

SEQ ID NO: 80439 - DNA, 19 bp, Artificial sequence
  SiRNA target sequence
aacaccttctaccttttta

SEQ ID NO: 80440 - DNA, 19 bp, Artificial sequence
  SiRNA target sequence
acaccttctacctttttac

SEQ ID NO: 80441 - DNA, 19 bp, Artificial sequence
  SiRNA target sequence
caccttctacctttttaca

SEQ ID NO: 80442 - DNA, 19 bp, Artificial sequence
  SiRNA target sequence
accttctacctttttacag

SEQ ID NO: 80443 - DNA, 19 bp, Artificial sequence
  SiRNA target sequence
ccttctacctttttacagt

SEQ ID NO: 80444 - DNA, 19 bp, Artificial sequence
  SiRNA target sequence
cttctacctttttacagtc

SEQ ID NO: 80445 - DNA, 19 bp, Artificial sequence
  SiRNA target sequence
ttctacctttttacagtcc

SEQ ID NO: 80446 - DNA, 19 bp, Artificial sequence
  SiRNA target sequence
tctacctttttacagtcca

SEQ ID NO: 80447 - DNA, 19 bp, Artificial sequence
  SiRNA target sequence
ctacctttttacagtccat

SEQ ID NO: 80448 - DNA, 19 bp, Artificial sequence
  SiRNA target sequence
tacctttttacagtccata

SEQ ID NO: 80449 - DNA, 19 bp, Artificial sequence
  SiRNA target sequence
acctttttacagtccataa

SEQ ID NO: 80450 - DNA, 19 bp, Artificial sequence
  SiRNA target sequence
cctttttacagtccataat

SEQ ID NO: 80451 - DNA, 19 bp, Artificial sequence
  SiRNA target sequence
ctttttacagtccataatg

SEQ ID NO: 80452 - DNA, 19 bp, Artificial sequence
  SiRNA target sequence
tttttacagtccataatgg

SEQ ID NO: 80453 - DNA, 19 bp, Artificial sequence
  SiRNA target sequence
ttttacagtccataatggg

SEQ ID NO: 80454 - DNA, 19 bp, Artificial sequence
  SiRNA target sequence
tttacagtccataatgggc

SEQ ID NO: 80455 - DNA, 19 bp, Artificial sequence
  SiRNA target sequence
ttacagtccataatgggct

SEQ ID NO: 80456 - DNA, 19 bp, Artificial sequence
  SiRNA target sequence
tacagtccataatgggctt

SEQ ID NO: 80457 - DNA, 19 bp, Artificial sequence
  SiRNA target sequence
acagtccataatgggcttt

SEQ ID NO: 80458 - DNA, 19 bp, Artificial sequence
  SiRNA target sequence
cagtccataatgggctttc

SEQ ID NO: 80459 - DNA, 19 bp, Artificial sequence
  SiRNA target sequence
agtccataatgggctttcc

SEQ ID NO: 80460 - DNA, 19 bp, Artificial sequence
  SiRNA target sequence
gtccataatgggctttcct

SEQ ID NO: 80461 - DNA, 19 bp, Artificial sequence
  SiRNA target sequence
tccataatgggctttccta

SEQ ID NO: 80462 - DNA, 19 bp, Artificial sequence
  SiRNA target sequence
ccataatgggctttcctaa

SEQ ID NO: 80463 - DNA, 19 bp, Artificial sequence
  SiRNA target sequence
cataatgggctttcctaat

SEQ ID NO: 80464 - DNA, 19 bp, Artificial sequence
  SiRNA target sequence
ataatgggctttcctaatc

SEQ ID NO: 80465 - DNA, 19 bp, Artificial sequence
  SiRNA target sequence
taatgggctttcctaatct

SEQ ID NO: 80466 - DNA, 19 bp, Artificial sequence
  SiRNA target sequence
aatgggctttcctaatctt

SEQ ID NO: 80467 - DNA, 19 bp, Artificial sequence
  SiRNA target sequence
atgggctttcctaatcttt

SEQ ID NO: 80468 - DNA, 19 bp, Artificial sequence
  SiRNA target sequence
tgggctttcctaatctttt

SEQ ID NO: 80469 - DNA, 19 bp, Artificial sequence
  SiRNA target sequence
gggctttcctaatctttta

SEQ ID NO: 80470 - DNA, 19 bp, Artificial sequence
  SiRNA target sequence
ggctttcctaatcttttat

SEQ ID NO: 80471 - DNA, 19 bp, Artificial sequence
  SiRNA target sequence
gctttcctaatcttttatt

SEQ ID NO: 80472 - DNA, 19 bp, Artificial sequence
  SiRNA target sequence
ctttcctaatcttttatta

SEQ ID NO: 80473 - DNA, 19 bp, Artificial sequence
  SiRNA target sequence
tttcctaatcttttattaa

SEQ ID NO: 80474 - DNA, 19 bp, Artificial sequence
  SiRNA target sequence
ttcctaatcttttattaac

SEQ ID NO: 80475 - DNA, 19 bp, Artificial sequence
  SiRNA target sequence
tcctaatcttttattaact

SEQ ID NO: 80476 - DNA, 19 bp, Artificial sequence
  SiRNA target sequence
cctaatcttttattaacta

SEQ ID NO: 80477 - DNA, 19 bp, Artificial sequence
  SiRNA target sequence
ctaatcttttattaactat

SEQ ID NO: 80478 - DNA, 19 bp, Artificial sequence
  SiRNA target sequence
taatcttttattaactatg

SEQ ID NO: 80479 - DNA, 19 bp, Artificial sequence
  SiRNA target sequence
aatcttttattaactatgt

SEQ ID NO: 80480 - DNA, 19 bp, Artificial sequence
  SiRNA target sequence
atcttttattaactatgtt

SEQ ID NO: 80481 - DNA, 19 bp, Artificial sequence
  SiRNA target sequence
tcttttattaactatgtta

SEQ ID NO: 80482 - DNA, 19 bp, Artificial sequence
  SiRNA target sequence
cttttattaactatgttat

SEQ ID NO: 80483 - DNA, 19 bp, Artificial sequence
  SiRNA target sequence
ttttattaactatgttatg

SEQ ID NO: 80484 - DNA, 19 bp, Artificial sequence
  SiRNA target sequence
tttattaactatgttatgt

SEQ ID NO: 80485 - DNA, 19 bp, Artificial sequence
  SiRNA target sequence
ttattaactatgttatgtg

SEQ ID NO: 80486 - DNA, 19 bp, Artificial sequence
  SiRNA target sequence
tattaactatgttatgtgc

SEQ ID NO: 80487 - DNA, 19 bp, Artificial sequence
  SiRNA target sequence
attaactatgttatgtgct

SEQ ID NO: 80488 - DNA, 19 bp, Artificial sequence
  SiRNA target sequence
ttaactatgttatgtgctt

SEQ ID NO: 80489 - DNA, 19 bp, Artificial sequence
  SiRNA target sequence
taactatgttatgtgcttt

SEQ ID NO: 80490 - DNA, 19 bp, Artificial sequence
  SiRNA target sequence
aactatgttatgtgcttta

SEQ ID NO: 80491 - DNA, 19 bp, Artificial sequence
  SiRNA target sequence
actatgttatgtgctttac

SEQ ID NO: 80492 - DNA, 19 bp, Artificial sequence
  SiRNA target sequence
ctatgttatgtgctttaca

SEQ ID NO: 80493 - DNA, 19 bp, Artificial sequence
  SiRNA target sequence
tatgttatgtgctttacat

SEQ ID NO: 80494 - DNA, 19 bp, Artificial sequence
  SiRNA target sequence
atgttatgtgctttacata

SEQ ID NO: 80495 - DNA, 19 bp, Artificial sequence
  SiRNA target sequence
tgttatgtgctttacatag

SEQ ID NO: 80496 - DNA, 19 bp, Artificial sequence
  SiRNA target sequence
gttatgtgctttacatagc

SEQ ID NO: 80497 - DNA, 19 bp, Artificial sequence
  SiRNA target sequence
ttatgtgctttacatagcc

SEQ ID NO: 80498 - DNA, 19 bp, Artificial sequence
  SiRNA target sequence
tatgtgctttacatagcca

SEQ ID NO: 80499 - DNA, 19 bp, Artificial sequence
  SiRNA target sequence
atgtgctttacatagccac

SEQ ID NO: 80500 - DNA, 19 bp, Artificial sequence
  SiRNA target sequence
tgtgctttacatagccact

SEQ ID NO: 80501 - DNA, 19 bp, Artificial sequence
  SiRNA target sequence
gtgctttacatagccactg

SEQ ID NO: 80502 - DNA, 19 bp, Artificial sequence
  SiRNA target sequence
tgctttacatagccactgg

SEQ ID NO: 80503 - DNA, 19 bp, Artificial sequence
  SiRNA target sequence
gctttacatagccactgga

SEQ ID NO: 80504 - DNA, 19 bp, Artificial sequence
  SiRNA target sequence
ctttacatagccactggac

SEQ ID NO: 80505 - DNA, 19 bp, Artificial sequence
  SiRNA target sequence
tttacatagccactggaca

SEQ ID NO: 80506 - DNA, 19 bp, Artificial sequence
  SiRNA target sequence
ttacatagccactggacaa

SEQ ID NO: 80507 - DNA, 19 bp, Artificial sequence
  SiRNA target sequence
tacatagccactggacaaa

SEQ ID NO: 80508 - DNA, 19 bp, Artificial sequence
  SiRNA target sequence
acatagccactggacaaat

SEQ ID NO: 80509 - DNA, 19 bp, Artificial sequence
  SiRNA target sequence
catagccactggacaaatt

SEQ ID NO: 80510 - DNA, 19 bp, Artificial sequence
  SiRNA target sequence
atagccactggacaaattc

SEQ ID NO: 80511 - DNA, 19 bp, Artificial sequence
  SiRNA target sequence
tagccactggacaaattcg

SEQ ID NO: 80512 - DNA, 19 bp, Artificial sequence
  SiRNA target sequence
agccactggacaaattcgt

SEQ ID NO: 80513 - DNA, 19 bp, Artificial sequence
  SiRNA target sequence
gccactggacaaattcgtc

SEQ ID NO: 80514 - DNA, 19 bp, Artificial sequence
  SiRNA target sequence
ccactggacaaattcgtca

SEQ ID NO: 80515 - DNA, 19 bp, Artificial sequence
  SiRNA target sequence
cactggacaaattcgtcat

SEQ ID NO: 80516 - DNA, 19 bp, Artificial sequence
  SiRNA target sequence
actggacaaattcgtcatg

SEQ ID NO: 80517 - DNA, 19 bp, Artificial sequence
  SiRNA target sequence
ctggacaaattcgtcatgt

SEQ ID NO: 80518 - DNA, 19 bp, Artificial sequence
  SiRNA target sequence
tggacaaattcgtcatgtg

SEQ ID NO: 80519 - DNA, 19 bp, Artificial sequence
  SiRNA target sequence
ggacaaattcgtcatgtgt

SEQ ID NO: 80520 - DNA, 19 bp, Artificial sequence
  SiRNA target sequence
gacaaattcgtcatgtgtg

SEQ ID NO: 80521 - DNA, 19 bp, Artificial sequence
  SiRNA target sequence
acaaattcgtcatgtgtgg

SEQ ID NO: 80522 - DNA, 19 bp, Artificial sequence
  SiRNA target sequence
caaattcgtcatgtgtggc

SEQ ID NO: 80523 - DNA, 19 bp, Artificial sequence
  SiRNA target sequence
aaattcgtcatgtgtggca

SEQ ID NO: 80524 - DNA, 19 bp, Artificial sequence
  SiRNA target sequence
aattcgtcatgtgtggcaa

SEQ ID NO: 80525 - DNA, 19 bp, Artificial sequence
  SiRNA target sequence
attcgtcatgtgtggcaac

SEQ ID NO: 80526 - DNA, 19 bp, Artificial sequence
  SiRNA target sequence
ttcgtcatgtgtggcaact

SEQ ID NO: 80527 - DNA, 19 bp, Artificial sequence
  SiRNA target sequence
tcgtcatgtgtggcaactt

SEQ ID NO: 80528 - DNA, 19 bp, Artificial sequence
  SiRNA target sequence
cgtcatgtgtggcaacttg

SEQ ID NO: 80529 - DNA, 19 bp, Artificial sequence
  SiRNA target sequence
gtcatgtgtggcaacttgt

SEQ ID NO: 80530 - DNA, 19 bp, Artificial sequence
  SiRNA target sequence
tcatgtgtggcaacttgtg

SEQ ID NO: 80531 - DNA, 19 bp, Artificial sequence
  SiRNA target sequence
catgtgtggcaacttgtgg

SEQ ID NO: 80532 - DNA, 19 bp, Artificial sequence
  SiRNA target sequence
atgtgtggcaacttgtgga

SEQ ID NO: 80533 - DNA, 19 bp, Artificial sequence
  SiRNA target sequence
tgtgtggcaacttgtggag

SEQ ID NO: 80534 - DNA, 19 bp, Artificial sequence
  SiRNA target sequence
gtgtggcaacttgtggagg

SEQ ID NO: 80535 - DNA, 19 bp, Artificial sequence
  SiRNA target sequence
tgtggcaacttgtggagga

SEQ ID NO: 80536 - DNA, 19 bp, Artificial sequence
  SiRNA target sequence
gtggcaacttgtggaggat

SEQ ID NO: 80537 - DNA, 19 bp, Artificial sequence
  SiRNA target sequence
tggcaacttgtggaggatt

SEQ ID NO: 80538 - DNA, 19 bp, Artificial sequence
  SiRNA target sequence
ggcaacttgtggaggattt

SEQ ID NO: 80539 - DNA, 19 bp, Artificial sequence
  SiRNA target sequence
gcaacttgtggaggattta

SEQ ID NO: 80540 - DNA, 19 bp, Artificial sequence
  SiRNA target sequence
caacttgtggaggatttaa

SEQ ID NO: 80541 - DNA, 19 bp, Artificial sequence
  SiRNA target sequence
aacttgtggaggatttaag

SEQ ID NO: 80542 - DNA, 19 bp, Artificial sequence
  SiRNA target sequence
acttgtggaggatttaagc

SEQ ID NO: 80543 - DNA, 19 bp, Artificial sequence
  SiRNA target sequence
cttgtggaggatttaagct

SEQ ID NO: 80544 - DNA, 19 bp, Artificial sequence
  SiRNA target sequence
ttgtggaggatttaagctt

SEQ ID NO: 80545 - DNA, 19 bp, Artificial sequence
  SiRNA target sequence
tgtggaggatttaagctta

SEQ ID NO: 80546 - DNA, 19 bp, Artificial sequence
  SiRNA target sequence
gtggaggatttaagcttaa

SEQ ID NO: 80547 - DNA, 19 bp, Artificial sequence
  SiRNA target sequence
tggaggatttaagcttaac

SEQ ID NO: 80548 - DNA, 19 bp, Artificial sequence
  SiRNA target sequence
ggaggatttaagcttaaca

SEQ ID NO: 80549 - DNA, 19 bp, Artificial sequence
  SiRNA target sequence
gaggatttaagcttaacag

SEQ ID NO: 80550 - DNA, 19 bp, Artificial sequence
  SiRNA target sequence
aggatttaagcttaacagt

SEQ ID NO: 80551 - DNA, 19 bp, Artificial sequence
  SiRNA target sequence
ggatttaagcttaacagtc

SEQ ID NO: 80552 - DNA, 19 bp, Artificial sequence
  SiRNA target sequence
gatttaagcttaacagtct

SEQ ID NO: 80553 - DNA, 19 bp, Artificial sequence
  SiRNA target sequence
atttaagcttaacagtctt

SEQ ID NO: 80554 - DNA, 19 bp, Artificial sequence
  SiRNA target sequence
tttaagcttaacagtcttt

SEQ ID NO: 80555 - DNA, 19 bp, Artificial sequence
  SiRNA target sequence
ttaagcttaacagtctttg

SEQ ID NO: 80556 - DNA, 19 bp, Artificial sequence
  SiRNA target sequence
taagcttaacagtctttga

SEQ ID NO: 80557 - DNA, 19 bp, Artificial sequence
  SiRNA target sequence
aagcttaacagtctttgaa

SEQ ID NO: 80558 - DNA, 19 bp, Artificial sequence
  SiRNA target sequence
agcttaacagtctttgaaa

SEQ ID NO: 80559 - DNA, 19 bp, Artificial sequence
  SiRNA target sequence
gcttaacagtctttgaaaa

SEQ ID NO: 80560 - DNA, 19 bp, Artificial sequence
  SiRNA target sequence
cttaacagtctttgaaaat

SEQ ID NO: 80561 - DNA, 19 bp, Artificial sequence
  SiRNA target sequence
ttaacagtctttgaaaatg

SEQ ID NO: 80562 - DNA, 19 bp, Artificial sequence
  SiRNA target sequence
taacagtctttgaaaatgt

SEQ ID NO: 80563 - DNA, 19 bp, Artificial sequence
  SiRNA target sequence
aacagtctttgaaaatgtc

SEQ ID NO: 80564 - DNA, 19 bp, Artificial sequence
  SiRNA target sequence
acagtctttgaaaatgtcc

SEQ ID NO: 80565 - DNA, 19 bp, Artificial sequence
  SiRNA target sequence
cagtctttgaaaatgtcca

SEQ ID NO: 80566 - DNA, 19 bp, Artificial sequence
  SiRNA target sequence
agtctttgaaaatgtccac

SEQ ID NO: 80567 - DNA, 19 bp, Artificial sequence
  SiRNA target sequence
gtctttgaaaatgtccaca

SEQ ID NO: 80568 - DNA, 19 bp, Artificial sequence
  SiRNA target sequence
tctttgaaaatgtccacaa

SEQ ID NO: 80569 - DNA, 19 bp, Artificial sequence
  SiRNA target sequence
ctttgaaaatgtccacaac

SEQ ID NO: 80570 - DNA, 19 bp, Artificial sequence
  SiRNA target sequence
tttgaaaatgtccacaaca

SEQ ID NO: 80571 - DNA, 19 bp, Artificial sequence
  SiRNA target sequence
ttgaaaatgtccacaacat

SEQ ID NO: 80572 - DNA, 19 bp, Artificial sequence
  SiRNA target sequence
tgaaaatgtccacaacatt

SEQ ID NO: 80573 - DNA, 19 bp, Artificial sequence
  SiRNA target sequence
gaaaatgtccacaacattc

SEQ ID NO: 80574 - DNA, 19 bp, Artificial sequence
  SiRNA target sequence
aaaatgtccacaacattct

SEQ ID NO: 80575 - DNA, 19 bp, Artificial sequence
  SiRNA target sequence
aaatgtccacaacattctg

SEQ ID NO: 80576 - DNA, 19 bp, Artificial sequence
  SiRNA target sequence
aatgtccacaacattctgc

SEQ ID NO: 80577 - DNA, 19 bp, Artificial sequence
  SiRNA target sequence
atgtccacaacattctgca

SEQ ID NO: 80578 - DNA, 19 bp, Artificial sequence
  SiRNA target sequence
tgtccacaacattctgcac

SEQ ID NO: 80579 - DNA, 19 bp, Artificial sequence
  SiRNA target sequence
gtccacaacattctgcaca

SEQ ID NO: 80580 - DNA, 19 bp, Artificial sequence
  SiRNA target sequence
tccacaacattctgcacag

SEQ ID NO: 80581 - DNA, 19 bp, Artificial sequence
  SiRNA target sequence
ccacaacattctgcacagg

SEQ ID NO: 80582 - DNA, 19 bp, Artificial sequence
  SiRNA target sequence
cacaacattctgcacaggg

SEQ ID NO: 80583 - DNA, 19 bp, Artificial sequence
  SiRNA target sequence
acaacattctgcacagggg

SEQ ID NO: 80584 - DNA, 19 bp, Artificial sequence
  SiRNA target sequence
caacattctgcacagggga

SEQ ID NO: 80585 - DNA, 19 bp, Artificial sequence
  SiRNA target sequence
aacattctgcacaggggaa

SEQ ID NO: 80586 - DNA, 19 bp, Artificial sequence
  SiRNA target sequence
acattctgcacaggggaaa

SEQ ID NO: 80587 - DNA, 19 bp, Artificial sequence
  SiRNA target sequence
cattctgcacaggggaaaa

SEQ ID NO: 80588 - DNA, 19 bp, Artificial sequence
  SiRNA target sequence
attctgcacaggggaaaag

SEQ ID NO: 80589 - DNA, 19 bp, Artificial sequence
  SiRNA target sequence
ttctgcacaggggaaaaga

SEQ ID NO: 80590 - DNA, 19 bp, Artificial sequence
  SiRNA target sequence
tctgcacaggggaaaagag

SEQ ID NO: 80591 - DNA, 19 bp, Artificial sequence
  SiRNA target sequence
ctgcacaggggaaaagaga

SEQ ID NO: 80592 - DNA, 19 bp, Artificial sequence
  SiRNA target sequence
tgcacaggggaaaagagat

SEQ ID NO: 80593 - DNA, 19 bp, Artificial sequence
  SiRNA target sequence
gcacaggggaaaagagatg

SEQ ID NO: 80594 - DNA, 19 bp, Artificial sequence
  SiRNA target sequence
cacaggggaaaagagatga

SEQ ID NO: 80595 - DNA, 19 bp, Artificial sequence
  SiRNA target sequence
acaggggaaaagagatgat

SEQ ID NO: 80596 - DNA, 19 bp, Artificial sequence
  SiRNA target sequence
caggggaaaagagatgata

SEQ ID NO: 80597 - DNA, 19 bp, Artificial sequence
  SiRNA target sequence
aggggaaaagagatgataa

SEQ ID NO: 80598 - DNA, 19 bp, Artificial sequence
  SiRNA target sequence
ggggaaaagagatgataaa

SEQ ID NO: 80599 - DNA, 19 bp, Artificial sequence
  SiRNA target sequence
gggaaaagagatgataaaa

SEQ ID NO: 80600 - DNA, 19 bp, Artificial sequence
  SiRNA target sequence
ggaaaagagatgataaaag

SEQ ID NO: 80601 - DNA, 19 bp, Artificial sequence
  SiRNA target sequence
gaaaagagatgataaaagg

SEQ ID NO: 80602 - DNA, 19 bp, Artificial sequence
  SiRNA target sequence
aaaagagatgataaaaggt

SEQ ID NO: 80603 - DNA, 19 bp, Artificial sequence
  SiRNA target sequence
aaagagatgataaaaggta

SEQ ID NO: 80604 - DNA, 19 bp, Artificial sequence
  SiRNA target sequence
aagagatgataaaaggtaa

SEQ ID NO: 80605 - DNA, 19 bp, Artificial sequence
  SiRNA target sequence
agagatgataaaaggtaaa

SEQ ID NO: 80606 - DNA, 19 bp, Artificial sequence
  SiRNA target sequence
gagatgataaaaggtaaat

SEQ ID NO: 80607 - DNA, 19 bp, Artificial sequence
  SiRNA target sequence
agatgataaaaggtaaata

SEQ ID NO: 80608 - DNA, 19 bp, Artificial sequence
  SiRNA target sequence
gatgataaaaggtaaataa

SEQ ID NO: 80609 - DNA, 19 bp, Artificial sequence
  SiRNA target sequence
atgataaaaggtaaataaa

SEQ ID NO: 80610 - DNA, 19 bp, Artificial sequence
  SiRNA target sequence
tgataaaaggtaaataaat

SEQ ID NO: 80611 - DNA, 19 bp, Artificial sequence
  SiRNA target sequence
gataaaaggtaaataaatt

SEQ ID NO: 80612 - DNA, 19 bp, Artificial sequence
  SiRNA target sequence
ataaaaggtaaataaattg

SEQ ID NO: 80613 - DNA, 19 bp, Artificial sequence
  SiRNA target sequence
taaaaggtaaataaattga

SEQ ID NO: 80614 - DNA, 19 bp, Artificial sequence
  SiRNA target sequence
aaaaggtaaataaattgaa

SEQ ID NO: 80615 - DNA, 19 bp, Artificial sequence
  SiRNA target sequence
aaaggtaaataaattgaag

SEQ ID NO: 80616 - DNA, 19 bp, Artificial sequence
  SiRNA target sequence
aaggtaaataaattgaagt

SEQ ID NO: 80617 - DNA, 19 bp, Artificial sequence
  SiRNA target sequence
aggtaaataaattgaagtg

SEQ ID NO: 80618 - DNA, 19 bp, Artificial sequence
  SiRNA target sequence
ggtaaataaattgaagtgt

SEQ ID NO: 80619 - DNA, 19 bp, Artificial sequence
  SiRNA target sequence
gtaaataaattgaagtgta

SEQ ID NO: 80620 - DNA, 19 bp, Artificial sequence
  SiRNA target sequence
taaataaattgaagtgtat

SEQ ID NO: 80621 - DNA, 19 bp, Artificial sequence
  SiRNA target sequence
aaataaattgaagtgtatc

SEQ ID NO: 80622 - DNA, 19 bp, Artificial sequence
  SiRNA target sequence
aataaattgaagtgtatct

SEQ ID NO: 80623 - DNA, 19 bp, Artificial sequence
  SiRNA target sequence
ataaattgaagtgtatctt

SEQ ID NO: 80624 - DNA, 19 bp, Artificial sequence
  SiRNA target sequence
taaattgaagtgtatcttt

SEQ ID NO: 80625 - DNA, 19 bp, Artificial sequence
  SiRNA target sequence
aaattgaagtgtatctttt

SEQ ID NO: 80626 - DNA, 19 bp, Artificial sequence
  SiRNA target sequence
aattgaagtgtatcttttt

SEQ ID NO: 80627 - DNA, 19 bp, Artificial sequence
  SiRNA target sequence
attgaagtgtatctttttt

SEQ ID NO: 80628 - DNA, 19 bp, Artificial sequence
  SiRNA target sequence
ttgaagtgtatctttttta

SEQ ID NO: 80629 - DNA, 19 bp, Artificial sequence
  SiRNA target sequence
tgaagtgtatcttttttat

SEQ ID NO: 80630 - DNA, 19 bp, Artificial sequence
  SiRNA target sequence
gaagtgtatcttttttatg

SEQ ID NO: 80631 - DNA, 19 bp, Artificial sequence
  SiRNA target sequence
aagtgtatcttttttatgt

SEQ ID NO: 80632 - DNA, 19 bp, Artificial sequence
  SiRNA target sequence
agtgtatcttttttatgtt

SEQ ID NO: 80633 - DNA, 19 bp, Artificial sequence
  SiRNA target sequence
gtgtatcttttttatgttg

SEQ ID NO: 80634 - DNA, 19 bp, Artificial sequence
  SiRNA target sequence
tgtatcttttttatgttgt

SEQ ID NO: 80635 - DNA, 19 bp, Artificial sequence
  SiRNA target sequence
gtatcttttttatgttgta

SEQ ID NO: 80636 - DNA, 19 bp, Artificial sequence
  SiRNA target sequence
tatcttttttatgttgtac

SEQ ID NO: 80637 - DNA, 19 bp, Artificial sequence
  SiRNA target sequence
atcttttttatgttgtact

SEQ ID NO: 80638 - DNA, 19 bp, Artificial sequence
  SiRNA target sequence
tcttttttatgttgtactg

SEQ ID NO: 80639 - DNA, 19 bp, Artificial sequence
  SiRNA target sequence
cttttttatgttgtactgt

SEQ ID NO: 80640 - DNA, 19 bp, Artificial sequence
  SiRNA target sequence
ttttttatgttgtactgta

SEQ ID NO: 80641 - DNA, 19 bp, Artificial sequence
  SiRNA target sequence
tttttatgttgtactgtag

SEQ ID NO: 80642 - DNA, 19 bp, Artificial sequence
  SiRNA target sequence
ttttatgttgtactgtagg

SEQ ID NO: 80643 - DNA, 19 bp, Artificial sequence
  SiRNA target sequence
tttatgttgtactgtagga

SEQ ID NO: 80644 - DNA, 19 bp, Artificial sequence
  SiRNA target sequence
ttatgttgtactgtaggaa

SEQ ID NO: 80645 - DNA, 19 bp, Artificial sequence
  SiRNA target sequence
tatgttgtactgtaggaaa

SEQ ID NO: 80646 - DNA, 19 bp, Artificial sequence
  SiRNA target sequence
atgttgtactgtaggaaat

SEQ ID NO: 80647 - DNA, 19 bp, Artificial sequence
  SiRNA target sequence
tgttgtactgtaggaaatg

SEQ ID NO: 80648 - DNA, 19 bp, Artificial sequence
  SiRNA target sequence
gttgtactgtaggaaatgc

SEQ ID NO: 80649 - DNA, 19 bp, Artificial sequence
  SiRNA target sequence
ttgtactgtaggaaatgca

SEQ ID NO: 80650 - DNA, 19 bp, Artificial sequence
  SiRNA target sequence
tgtactgtaggaaatgcag

SEQ ID NO: 80651 - DNA, 19 bp, Artificial sequence
  SiRNA target sequence
gtactgtaggaaatgcagg

SEQ ID NO: 80652 - DNA, 19 bp, Artificial sequence
  SiRNA target sequence
tactgtaggaaatgcagga

SEQ ID NO: 80653 - DNA, 19 bp, Artificial sequence
  SiRNA target sequence
actgtaggaaatgcaggat

SEQ ID NO: 80654 - DNA, 19 bp, Artificial sequence
  SiRNA target sequence
ctgtaggaaatgcaggata

SEQ ID NO: 80655 - DNA, 19 bp, Artificial sequence
  SiRNA target sequence
tgtaggaaatgcaggataa

SEQ ID NO: 80656 - DNA, 19 bp, Artificial sequence
  SiRNA target sequence
gtaggaaatgcaggataaa

SEQ ID NO: 80657 - DNA, 19 bp, Artificial sequence
  SiRNA target sequence
taggaaatgcaggataaac

SEQ ID NO: 80658 - DNA, 19 bp, Artificial sequence
  SiRNA target sequence
aggaaatgcaggataaaca

SEQ ID NO: 80659 - DNA, 19 bp, Artificial sequence
  SiRNA target sequence
ggaaatgcaggataaacag

SEQ ID NO: 80660 - DNA, 19 bp, Artificial sequence
  SiRNA target sequence
gaaatgcaggataaacagc

SEQ ID NO: 80661 - DNA, 19 bp, Artificial sequence
  SiRNA target sequence
aaatgcaggataaacagct

SEQ ID NO: 80662 - DNA, 19 bp, Artificial sequence
  SiRNA target sequence
aatgcaggataaacagctg

SEQ ID NO: 80663 - DNA, 19 bp, Artificial sequence
  SiRNA target sequence
atgcaggataaacagctgc

SEQ ID NO: 80664 - DNA, 19 bp, Artificial sequence
  SiRNA target sequence
tgcaggataaacagctgcc

SEQ ID NO: 80665 - DNA, 19 bp, Artificial sequence
  SiRNA target sequence
gcaggataaacagctgcca

SEQ ID NO: 80666 - DNA, 19 bp, Artificial sequence
  SiRNA target sequence
caggataaacagctgccat

SEQ ID NO: 80667 - DNA, 19 bp, Artificial sequence
  SiRNA target sequence
aggataaacagctgccatg

SEQ ID NO: 80668 - DNA, 19 bp, Artificial sequence
  SiRNA target sequence
ggataaacagctgccatgg

SEQ ID NO: 80669 - DNA, 19 bp, Artificial sequence
  SiRNA target sequence
gataaacagctgccatggt

SEQ ID NO: 80670 - DNA, 19 bp, Artificial sequence
  SiRNA target sequence
ataaacagctgccatggta

SEQ ID NO: 80671 - DNA, 19 bp, Artificial sequence
  SiRNA target sequence
taaacagctgccatggtat

SEQ ID NO: 80672 - DNA, 19 bp, Artificial sequence
  SiRNA target sequence
aaacagctgccatggtatg

SEQ ID NO: 80673 - DNA, 19 bp, Artificial sequence
  SiRNA target sequence
aacagctgccatggtatgt

SEQ ID NO: 80674 - DNA, 19 bp, Artificial sequence
  SiRNA target sequence
acagctgccatggtatgta

SEQ ID NO: 80675 - DNA, 19 bp, Artificial sequence
  SiRNA target sequence
cagctgccatggtatgtaa

SEQ ID NO: 80676 - DNA, 19 bp, Artificial sequence
  SiRNA target sequence
agctgccatggtatgtaaa

SEQ ID NO: 80677 - DNA, 19 bp, Artificial sequence
  SiRNA target sequence
gctgccatggtatgtaaaa

SEQ ID NO: 80678 - DNA, 19 bp, Artificial sequence
  SiRNA target sequence
ctgccatggtatgtaaaag

SEQ ID NO: 80679 - DNA, 19 bp, Artificial sequence
  SiRNA target sequence
tgccatggtatgtaaaagt

SEQ ID NO: 80680 - DNA, 19 bp, Artificial sequence
  SiRNA target sequence
gccatggtatgtaaaagtg

SEQ ID NO: 80681 - DNA, 19 bp, Artificial sequence
  SiRNA target sequence
ccatggtatgtaaaagtgt

SEQ ID NO: 80682 - DNA, 19 bp, Artificial sequence
  SiRNA target sequence
catggtatgtaaaagtgtc

SEQ ID NO: 80683 - DNA, 19 bp, Artificial sequence
  SiRNA target sequence
atggtatgtaaaagtgtcc

SEQ ID NO: 80684 - DNA, 19 bp, Artificial sequence
  SiRNA target sequence
tggtatgtaaaagtgtcca

SEQ ID NO: 80685 - DNA, 19 bp, Artificial sequence
  SiRNA target sequence
ggtatgtaaaagtgtccat

SEQ ID NO: 80686 - DNA, 19 bp, Artificial sequence
  SiRNA target sequence
gtatgtaaaagtgtccatg

SEQ ID NO: 80687 - DNA, 19 bp, Artificial sequence
  SiRNA target sequence
tatgtaaaagtgtccatgt

SEQ ID NO: 80688 - DNA, 19 bp, Artificial sequence
  SiRNA target sequence
atgtaaaagtgtccatgtt

SEQ ID NO: 80689 - DNA, 19 bp, Artificial sequence
  SiRNA target sequence
tgtaaaagtgtccatgttg

SEQ ID NO: 80690 - DNA, 19 bp, Artificial sequence
  SiRNA target sequence
gtaaaagtgtccatgttgc

SEQ ID NO: 80691 - DNA, 19 bp, Artificial sequence
  SiRNA target sequence
taaaagtgtccatgttgct

SEQ ID NO: 80692 - DNA, 19 bp, Artificial sequence
  SiRNA target sequence
aaaagtgtccatgttgctc

SEQ ID NO: 80693 - DNA, 19 bp, Artificial sequence
  SiRNA target sequence
aaagtgtccatgttgctct

SEQ ID NO: 80694 - DNA, 19 bp, Artificial sequence
  SiRNA target sequence
aagtgtccatgttgctctc

SEQ ID NO: 80695 - DNA, 19 bp, Artificial sequence
  SiRNA target sequence
agtgtccatgttgctctcc

SEQ ID NO: 80696 - DNA, 19 bp, Artificial sequence
  SiRNA target sequence
gtgtccatgttgctctccc

SEQ ID NO: 80697 - DNA, 19 bp, Artificial sequence
  SiRNA target sequence
tgtccatgttgctctcccc

SEQ ID NO: 80698 - DNA, 19 bp, Artificial sequence
  SiRNA target sequence
gtccatgttgctctcccca

SEQ ID NO: 80699 - DNA, 19 bp, Artificial sequence
  SiRNA target sequence
tccatgttgctctccccaa

SEQ ID NO: 80700 - DNA, 19 bp, Artificial sequence
  SiRNA target sequence
ccatgttgctctccccaat

SEQ ID NO: 80701 - DNA, 19 bp, Artificial sequence
  SiRNA target sequence
catgttgctctccccaatc

SEQ ID NO: 80702 - DNA, 19 bp, Artificial sequence
  SiRNA target sequence
atgttgctctccccaatct

SEQ ID NO: 80703 - DNA, 19 bp, Artificial sequence
  SiRNA target sequence
tgttgctctccccaatcta

SEQ ID NO: 80704 - DNA, 19 bp, Artificial sequence
  SiRNA target sequence
gttgctctccccaatctat

SEQ ID NO: 80705 - DNA, 19 bp, Artificial sequence
  SiRNA target sequence
ttgctctccccaatctatc

SEQ ID NO: 80706 - DNA, 19 bp, Artificial sequence
  SiRNA target sequence
tgctctccccaatctatct

SEQ ID NO: 80707 - DNA, 19 bp, Artificial sequence
  SiRNA target sequence
gctctccccaatctatctt

SEQ ID NO: 80708 - DNA, 19 bp, Artificial sequence
  SiRNA target sequence
ctctccccaatctatcttt

SEQ ID NO: 80709 - DNA, 19 bp, Artificial sequence
  SiRNA target sequence
tctccccaatctatcttta

SEQ ID NO: 80710 - DNA, 19 bp, Artificial sequence
  SiRNA target sequence
ctccccaatctatctttaa

SEQ ID NO: 80711 - DNA, 19 bp, Artificial sequence
  SiRNA target sequence
tccccaatctatctttaac

SEQ ID NO: 80712 - DNA, 19 bp, Artificial sequence
  SiRNA target sequence
ccccaatctatctttaact

SEQ ID NO: 80713 - DNA, 19 bp, Artificial sequence
  SiRNA target sequence
cccaatctatctttaactt

SEQ ID NO: 80714 - DNA, 19 bp, Artificial sequence
  SiRNA target sequence
ccaatctatctttaacttc

SEQ ID NO: 80715 - DNA, 19 bp, Artificial sequence
  SiRNA target sequence
caatctatctttaacttcc

SEQ ID NO: 80716 - DNA, 19 bp, Artificial sequence
  SiRNA target sequence
aatctatctttaacttcct

SEQ ID NO: 80717 - DNA, 19 bp, Artificial sequence
  SiRNA target sequence
atctatctttaacttcctt

SEQ ID NO: 80718 - DNA, 19 bp, Artificial sequence
  SiRNA target sequence
tctatctttaacttcctta

SEQ ID NO: 80719 - DNA, 19 bp, Artificial sequence
  SiRNA target sequence
ctatctttaacttccttat

SEQ ID NO: 80720 - DNA, 19 bp, Artificial sequence
  SiRNA target sequence
tatctttaacttccttatt

SEQ ID NO: 80721 - DNA, 19 bp, Artificial sequence
  SiRNA target sequence
atctttaacttccttattt

SEQ ID NO: 80722 - DNA, 19 bp, Artificial sequence
  SiRNA target sequence
tctttaacttccttatttg

SEQ ID NO: 80723 - DNA, 19 bp, Artificial sequence
  SiRNA target sequence
ctttaacttccttatttgt

SEQ ID NO: 80724 - DNA, 19 bp, Artificial sequence
  SiRNA target sequence
tttaacttccttatttgtt

SEQ ID NO: 80725 - DNA, 19 bp, Artificial sequence
  SiRNA target sequence
ttaacttccttatttgtta

SEQ ID NO: 80726 - DNA, 19 bp, Artificial sequence
  SiRNA target sequence
taacttccttatttgttaa

SEQ ID NO: 80727 - DNA, 19 bp, Artificial sequence
  SiRNA target sequence
aacttccttatttgttaat

SEQ ID NO: 80728 - DNA, 19 bp, Artificial sequence
  SiRNA target sequence
acttccttatttgttaatt

SEQ ID NO: 80729 - DNA, 19 bp, Artificial sequence
  SiRNA target sequence
cttccttatttgttaattt

SEQ ID NO: 80730 - DNA, 19 bp, Artificial sequence
  SiRNA target sequence
ttccttatttgttaatttt

SEQ ID NO: 80731 - DNA, 19 bp, Artificial sequence
  SiRNA target sequence
tccttatttgttaattttt

SEQ ID NO: 80732 - DNA, 19 bp, Artificial sequence
  SiRNA target sequence
ccttatttgttaatttttg

SEQ ID NO: 80733 - DNA, 19 bp, Artificial sequence
  SiRNA target sequence
cttatttgttaatttttga

SEQ ID NO: 80734 - DNA, 19 bp, Artificial sequence
  SiRNA target sequence
ttatttgttaatttttgat

SEQ ID NO: 80735 - DNA, 19 bp, Artificial sequence
  SiRNA target sequence
tatttgttaatttttgatt

SEQ ID NO: 80736 - DNA, 19 bp, Artificial sequence
  SiRNA target sequence
atttgttaatttttgatta

SEQ ID NO: 80737 - DNA, 19 bp, Artificial sequence
  SiRNA target sequence
tttgttaatttttgattat

SEQ ID NO: 80738 - DNA, 19 bp, Artificial sequence
  SiRNA target sequence
ttgttaatttttgattatg

SEQ ID NO: 80739 - DNA, 19 bp, Artificial sequence
  SiRNA target sequence
tgttaatttttgattatga

SEQ ID NO: 80740 - DNA, 19 bp, Artificial sequence
  SiRNA target sequence
gttaatttttgattatgaa

SEQ ID NO: 80741 - DNA, 19 bp, Artificial sequence
  SiRNA target sequence
ttaatttttgattatgaat

SEQ ID NO: 80742 - DNA, 19 bp, Artificial sequence
  SiRNA target sequence
taatttttgattatgaatt

SEQ ID NO: 80743 - DNA, 19 bp, Artificial sequence
  SiRNA target sequence
aatttttgattatgaatta

SEQ ID NO: 80744 - DNA, 19 bp, Artificial sequence
  SiRNA target sequence
atttttgattatgaattag

SEQ ID NO: 80745 - DNA, 19 bp, Artificial sequence
  SiRNA target sequence
tttttgattatgaattaga

SEQ ID NO: 80746 - DNA, 19 bp, Artificial sequence
  SiRNA target sequence
ttttgattatgaattagac

SEQ ID NO: 80747 - DNA, 19 bp, Artificial sequence
  SiRNA target sequence
tttgattatgaattagacc

SEQ ID NO: 80748 - DNA, 19 bp, Artificial sequence
  SiRNA target sequence
ttgattatgaattagacct

SEQ ID NO: 80749 - DNA, 19 bp, Artificial sequence
  SiRNA target sequence
tgattatgaattagaccta

SEQ ID NO: 80750 - DNA, 19 bp, Artificial sequence
  SiRNA target sequence
gattatgaattagacctaa

SEQ ID NO: 80751 - DNA, 19 bp, Artificial sequence
  SiRNA target sequence
attatgaattagacctaat

SEQ ID NO: 80752 - DNA, 19 bp, Artificial sequence
  SiRNA target sequence
ttatgaattagacctaatt

SEQ ID NO: 80753 - DNA, 19 bp, Artificial sequence
  SiRNA target sequence
tatgaattagacctaattc

SEQ ID NO: 80754 - DNA, 19 bp, Artificial sequence
  SiRNA target sequence
atgaattagacctaattca

SEQ ID NO: 80755 - DNA, 19 bp, Artificial sequence
  SiRNA target sequence
tgaattagacctaattcac

SEQ ID NO: 80756 - DNA, 19 bp, Artificial sequence
  SiRNA target sequence
gaattagacctaattcacc

SEQ ID NO: 80757 - DNA, 19 bp, Artificial sequence
  SiRNA target sequence
aattagacctaattcacct

SEQ ID NO: 80758 - DNA, 19 bp, Artificial sequence
  SiRNA target sequence
attagacctaattcaccta

SEQ ID NO: 80759 - DNA, 19 bp, Artificial sequence
  SiRNA target sequence
ttagacctaattcacctac

SEQ ID NO: 80760 - DNA, 19 bp, Artificial sequence
  SiRNA target sequence
tagacctaattcacctact

SEQ ID NO: 80761 - DNA, 19 bp, Artificial sequence
  SiRNA target sequence
agacctaattcacctactt

SEQ ID NO: 80762 - DNA, 19 bp, Artificial sequence
  SiRNA target sequence
gacctaattcacctacttt

SEQ ID NO: 80763 - DNA, 19 bp, Artificial sequence
  SiRNA target sequence
acctaattcacctactttt

SEQ ID NO: 80764 - DNA, 19 bp, Artificial sequence
  SiRNA target sequence
cctaattcacctacttttg

SEQ ID NO: 80765 - DNA, 19 bp, Artificial sequence
  SiRNA target sequence
ctaattcacctacttttgg

SEQ ID NO: 80766 - DNA, 19 bp, Artificial sequence
  SiRNA target sequence
taattcacctacttttggt

SEQ ID NO: 80767 - DNA, 19 bp, Artificial sequence
  SiRNA target sequence
aattcacctacttttggtg

SEQ ID NO: 80768 - DNA, 19 bp, Artificial sequence
  SiRNA target sequence
attcacctacttttggtga

SEQ ID NO: 80769 - DNA, 19 bp, Artificial sequence
  SiRNA target sequence
ttcacctacttttggtgaa

SEQ ID NO: 80770 - DNA, 19 bp, Artificial sequence
  SiRNA target sequence
tcacctacttttggtgaaa

SEQ ID NO: 80771 - DNA, 19 bp, Artificial sequence
  SiRNA target sequence
cacctacttttggtgaaat

SEQ ID NO: 80772 - DNA, 19 bp, Artificial sequence
  SiRNA target sequence
acctacttttggtgaaata

SEQ ID NO: 80773 - DNA, 19 bp, Artificial sequence
  SiRNA target sequence
cctacttttggtgaaatag

SEQ ID NO: 80774 - DNA, 19 bp, Artificial sequence
  SiRNA target sequence
ctacttttggtgaaataga

SEQ ID NO: 80775 - DNA, 19 bp, Artificial sequence
  SiRNA target sequence
tacttttggtgaaatagat

SEQ ID NO: 80776 - DNA, 19 bp, Artificial sequence
  SiRNA target sequence
acttttggtgaaatagatt

SEQ ID NO: 80777 - DNA, 19 bp, Artificial sequence
  SiRNA target sequence
cttttggtgaaatagattg

SEQ ID NO: 80778 - DNA, 19 bp, Artificial sequence
  SiRNA target sequence
ttttggtgaaatagattgt

SEQ ID NO: 80779 - DNA, 19 bp, Artificial sequence
  SiRNA target sequence
tttggtgaaatagattgta

SEQ ID NO: 80780 - DNA, 19 bp, Artificial sequence
  SiRNA target sequence
ttggtgaaatagattgtaa

SEQ ID NO: 80781 - DNA, 19 bp, Artificial sequence
  SiRNA target sequence
tggtgaaatagattgtaaa

SEQ ID NO: 80782 - DNA, 19 bp, Artificial sequence
  SiRNA target sequence
ggtgaaatagattgtaaaa

SEQ ID NO: 80783 - DNA, 19 bp, Artificial sequence
  SiRNA target sequence
gtgaaatagattgtaaaac

SEQ ID NO: 80784 - DNA, 19 bp, Artificial sequence
  SiRNA target sequence
tgaaatagattgtaaaaca

SEQ ID NO: 80785 - DNA, 19 bp, Artificial sequence
  SiRNA target sequence
gaaatagattgtaaaacag

SEQ ID NO: 80786 - DNA, 19 bp, Artificial sequence
  SiRNA target sequence
aaatagattgtaaaacaga

SEQ ID NO: 80787 - DNA, 19 bp, Artificial sequence
  SiRNA target sequence
aatagattgtaaaacagat

SEQ ID NO: 80788 - DNA, 19 bp, Artificial sequence
  SiRNA target sequence
atagattgtaaaacagatt

SEQ ID NO: 80789 - DNA, 19 bp, Artificial sequence
  SiRNA target sequence
tagattgtaaaacagattt

SEQ ID NO: 80790 - DNA, 19 bp, Artificial sequence
  SiRNA target sequence
agattgtaaaacagatttt

SEQ ID NO: 80791 - DNA, 19 bp, Artificial sequence
  SiRNA target sequence
gattgtaaaacagattttc

SEQ ID NO: 80792 - DNA, 19 bp, Artificial sequence
  SiRNA target sequence
attgtaaaacagattttcc

SEQ ID NO: 80793 - DNA, 19 bp, Artificial sequence
  SiRNA target sequence
ttgtaaaacagattttcca

SEQ ID NO: 80794 - DNA, 19 bp, Artificial sequence
  SiRNA target sequence
tgtaaaacagattttccaa

SEQ ID NO: 80795 - DNA, 19 bp, Artificial sequence
  SiRNA target sequence
gtaaaacagattttccaag

SEQ ID NO: 80796 - DNA, 19 bp, Artificial sequence
  SiRNA target sequence
taaaacagattttccaagt

SEQ ID NO: 80797 - DNA, 19 bp, Artificial sequence
  SiRNA target sequence
aaaacagattttccaagtg

SEQ ID NO: 80798 - DNA, 19 bp, Artificial sequence
  SiRNA target sequence
aaacagattttccaagtga

SEQ ID NO: 80799 - DNA, 19 bp, Artificial sequence
  SiRNA target sequence
aacagattttccaagtgag

SEQ ID NO: 80800 - DNA, 19 bp, Artificial sequence
  SiRNA target sequence
acagattttccaagtgagt

SEQ ID NO: 80801 - DNA, 19 bp, Artificial sequence
  SiRNA target sequence
cagattttccaagtgagtt

SEQ ID NO: 80802 - DNA, 19 bp, Artificial sequence
  SiRNA target sequence
agattttccaagtgagttg

SEQ ID NO: 80803 - DNA, 19 bp, Artificial sequence
  SiRNA target sequence
gattttccaagtgagttgt

SEQ ID NO: 80804 - DNA, 19 bp, Artificial sequence
  SiRNA target sequence
attttccaagtgagttgtc

SEQ ID NO: 80805 - DNA, 19 bp, Artificial sequence
  SiRNA target sequence
ttttccaagtgagttgtct

SEQ ID NO: 80806 - DNA, 19 bp, Artificial sequence
  SiRNA target sequence
tttccaagtgagttgtctg

SEQ ID NO: 80807 - DNA, 19 bp, Artificial sequence
  SiRNA target sequence
ttccaagtgagttgtctgc

SEQ ID NO: 80808 - DNA, 19 bp, Artificial sequence
  SiRNA target sequence
tccaagtgagttgtctgca

SEQ ID NO: 80809 - DNA, 19 bp, Artificial sequence
  SiRNA target sequence
ccaagtgagttgtctgcat

SEQ ID NO: 80810 - DNA, 19 bp, Artificial sequence
  SiRNA target sequence
caagtgagttgtctgcatg

SEQ ID NO: 80811 - DNA, 19 bp, Artificial sequence
  SiRNA target sequence
aagtgagttgtctgcatgt

SEQ ID NO: 80812 - DNA, 19 bp, Artificial sequence
  SiRNA target sequence
agtgagttgtctgcatgtg

SEQ ID NO: 80813 - DNA, 19 bp, Artificial sequence
  SiRNA target sequence
gtgagttgtctgcatgtgt

SEQ ID NO: 80814 - DNA, 19 bp, Artificial sequence
  SiRNA target sequence
tgagttgtctgcatgtgta

SEQ ID NO: 80815 - DNA, 19 bp, Artificial sequence
  SiRNA target sequence
gagttgtctgcatgtgtat

SEQ ID NO: 80816 - DNA, 19 bp, Artificial sequence
  SiRNA target sequence
agttgtctgcatgtgtatg

SEQ ID NO: 80817 - DNA, 19 bp, Artificial sequence
  SiRNA target sequence
gttgtctgcatgtgtatgc

SEQ ID NO: 80818 - DNA, 19 bp, Artificial sequence
  SiRNA target sequence
ttgtctgcatgtgtatgcg

SEQ ID NO: 80819 - DNA, 19 bp, Artificial sequence
  SiRNA target sequence
tgtctgcatgtgtatgcgg

SEQ ID NO: 80820 - DNA, 19 bp, Artificial sequence
  SiRNA target sequence
gtctgcatgtgtatgcggg

SEQ ID NO: 80821 - DNA, 19 bp, Artificial sequence
  SiRNA target sequence
tctgcatgtgtatgcggga

SEQ ID NO: 80822 - DNA, 19 bp, Artificial sequence
  SiRNA target sequence
ctgcatgtgtatgcgggaa

SEQ ID NO: 80823 - DNA, 19 bp, Artificial sequence
  SiRNA target sequence
tgcatgtgtatgcgggaaa

SEQ ID NO: 80824 - DNA, 19 bp, Artificial sequence
  SiRNA target sequence
gcatgtgtatgcgggaaaa

SEQ ID NO: 80825 - DNA, 19 bp, Artificial sequence
  SiRNA target sequence
catgtgtatgcgggaaaaa

SEQ ID NO: 80826 - DNA, 19 bp, Artificial sequence
  SiRNA target sequence
atgtgtatgcgggaaaaaa

SEQ ID NO: 80827 - DNA, 19 bp, Artificial sequence
  SiRNA target sequence
tgtgtatgcgggaaaaaat

SEQ ID NO: 80828 - DNA, 19 bp, Artificial sequence
  SiRNA target sequence
gtgtatgcgggaaaaaatg

SEQ ID NO: 80829 - DNA, 19 bp, Artificial sequence
  SiRNA target sequence
tgtatgcgggaaaaaatgc

SEQ ID NO: 80830 - DNA, 19 bp, Artificial sequence
  SiRNA target sequence
gtatgcgggaaaaaatgct

SEQ ID NO: 80831 - DNA, 19 bp, Artificial sequence
  SiRNA target sequence
tatgcgggaaaaaatgctg

SEQ ID NO: 80832 - DNA, 19 bp, Artificial sequence
  SiRNA target sequence
atgcgggaaaaaatgctgt

SEQ ID NO: 80833 - DNA, 19 bp, Artificial sequence
  SiRNA target sequence
tgcgggaaaaaatgctgtt

SEQ ID NO: 80834 - DNA, 19 bp, Artificial sequence
  SiRNA target sequence
gcgggaaaaaatgctgttt

SEQ ID NO: 80835 - DNA, 19 bp, Artificial sequence
  SiRNA target sequence
cgggaaaaaatgctgtttt

SEQ ID NO: 80836 - DNA, 19 bp, Artificial sequence
  SiRNA target sequence
gggaaaaaatgctgttttg

SEQ ID NO: 80837 - DNA, 19 bp, Artificial sequence
  SiRNA target sequence
ggaaaaaatgctgttttgc

SEQ ID NO: 80838 - DNA, 19 bp, Artificial sequence
  SiRNA target sequence
gaaaaaatgctgttttgct

SEQ ID NO: 80839 - DNA, 19 bp, Artificial sequence
  SiRNA target sequence
aaaaaatgctgttttgcta

SEQ ID NO: 80840 - DNA, 19 bp, Artificial sequence
  SiRNA target sequence
aaaaatgctgttttgctaa

SEQ ID NO: 80841 - DNA, 19 bp, Artificial sequence
  SiRNA target sequence
aaaatgctgttttgctaaa

SEQ ID NO: 80842 - DNA, 19 bp, Artificial sequence
  SiRNA target sequence
aaatgctgttttgctaaat

SEQ ID NO: 80843 - DNA, 19 bp, Artificial sequence
  SiRNA target sequence
aatgctgttttgctaaata

SEQ ID NO: 80844 - DNA, 19 bp, Artificial sequence
  SiRNA target sequence
atgctgttttgctaaataa

SEQ ID NO: 80845 - DNA, 19 bp, Artificial sequence
  SiRNA target sequence
tgctgttttgctaaataaa

SEQ ID NO: 80846 - DNA, 19 bp, Artificial sequence
  SiRNA target sequence
gctgttttgctaaataaac

SEQ ID NO: 80847 - DNA, 19 bp, Artificial sequence
  SiRNA target sequence
ctgttttgctaaataaaca

SEQ ID NO: 80848 - DNA, 19 bp, Artificial sequence
  SiRNA target sequence
tgttttgctaaataaacaa

SEQ ID NO: 80849 - DNA, 19 bp, Artificial sequence
  SiRNA target sequence
gttttgctaaataaacaat

SEQ ID NO: 80850 - DNA, 19 bp, Artificial sequence
  SiRNA target sequence
ttttgctaaataaacaatc

SEQ ID NO: 80851 - DNA, 19 bp, Artificial sequence
  SiRNA target sequence
tttgctaaataaacaatcc

SEQ ID NO: 80852 - DNA, 19 bp, Artificial sequence
  SiRNA target sequence
ttgctaaataaacaatcca

SEQ ID NO: 80853 - DNA, 19 bp, Artificial sequence
  SiRNA target sequence
tgctaaataaacaatccat

SEQ ID NO: 80854 - DNA, 19 bp, Artificial sequence
  SiRNA target sequence
gctaaataaacaatccata

SEQ ID NO: 80855 - DNA, 19 bp, Artificial sequence
  SiRNA target sequence
ctaaataaacaatccatac

SEQ ID NO: 80856 - DNA, 19 bp, Artificial sequence
  SiRNA target sequence
taaataaacaatccataca

SEQ ID NO: 80857 - DNA, 19 bp, Artificial sequence
  SiRNA target sequence
aaataaacaatccatacac

SEQ ID NO: 80858 - DNA, 19 bp, Artificial sequence
  SiRNA target sequence
aataaacaatccatacacc

SEQ ID NO: 80859 - DNA, 19 bp, Artificial sequence
  SiRNA target sequence
ataaacaatccatacaccc

SEQ ID NO: 80860 - DNA, 19 bp, Artificial sequence
  SiRNA target sequence
taaacaatccatacaccca

SEQ ID NO: 80861 - DNA, 19 bp, Artificial sequence
  SiRNA target sequence
aaacaatccatacacccaa

SEQ ID NO: 80862 - DNA, 19 bp, Artificial sequence
  SiRNA target sequence
aacaatccatacacccaat

SEQ ID NO: 80863 - DNA, 19 bp, Artificial sequence
  SiRNA target sequence
acaatccatacacccaata

SEQ ID NO: 80864 - DNA, 19 bp, Artificial sequence
  SiRNA target sequence
caatccatacacccaataa

SEQ ID NO: 80865 - DNA, 19 bp, Artificial sequence
  SiRNA target sequence
aatccatacacccaataag

SEQ ID NO: 80866 - DNA, 19 bp, Artificial sequence
  SiRNA target sequence
atccatacacccaataaga

SEQ ID NO: 80867 - DNA, 19 bp, Artificial sequence
  SiRNA target sequence
tccatacacccaataagat

SEQ ID NO: 80868 - DNA, 19 bp, Artificial sequence
  SiRNA target sequence
ccatacacccaataagata

SEQ ID NO: 80869 - DNA, 19 bp, Artificial sequence
  SiRNA target sequence
catacacccaataagataa

SEQ ID NO: 80870 - DNA, 19 bp, Artificial sequence
  SiRNA target sequence
atacacccaataagataat

SEQ ID NO: 80871 - DNA, 19 bp, Artificial sequence
  SiRNA target sequence
tacacccaataagataata

SEQ ID NO: 80872 - DNA, 19 bp, Artificial sequence
  SiRNA target sequence
acacccaataagataataa

SEQ ID NO: 80873 - DNA, 19 bp, Artificial sequence
  SiRNA target sequence
cacccaataagataataag

SEQ ID NO: 80874 - DNA, 19 bp, Artificial sequence
  SiRNA target sequence
acccaataagataataagt

SEQ ID NO: 80875 - DNA, 19 bp, Artificial sequence
  SiRNA target sequence
cccaataagataataagtc

SEQ ID NO: 80876 - DNA, 19 bp, Artificial sequence
  SiRNA target sequence
ccaataagataataagtcc

SEQ ID NO: 80877 - DNA, 19 bp, Artificial sequence
  SiRNA target sequence
caataagataataagtcct

SEQ ID NO: 80878 - DNA, 19 bp, Artificial sequence
  SiRNA target sequence
aataagataataagtcctc

SEQ ID NO: 80879 - DNA, 19 bp, Artificial sequence
  SiRNA target sequence
ataagataataagtcctct

SEQ ID NO: 80880 - DNA, 19 bp, Artificial sequence
  SiRNA target sequence
taagataataagtcctctt

SEQ ID NO: 80881 - DNA, 19 bp, Artificial sequence
  SiRNA target sequence
aagataataagtcctctta

SEQ ID NO: 80882 - DNA, 19 bp, Artificial sequence
  SiRNA target sequence
agataataagtcctcttaa

SEQ ID NO: 80883 - DNA, 19 bp, Artificial sequence
  SiRNA target sequence
gataataagtcctcttaat

SEQ ID NO: 80884 - DNA, 19 bp, Artificial sequence
  SiRNA target sequence
ataataagtcctcttaata

SEQ ID NO: 80885 - DNA, 19 bp, Artificial sequence
  SiRNA target sequence
taataagtcctcttaatac

SEQ ID NO: 80886 - DNA, 19 bp, Artificial sequence
  SiRNA target sequence
aataagtcctcttaatact

SEQ ID NO: 80887 - DNA, 19 bp, Artificial sequence
  SiRNA target sequence
ataagtcctcttaatactt

SEQ ID NO: 80888 - DNA, 19 bp, Artificial sequence
  SiRNA target sequence
taagtcctcttaatacttt

SEQ ID NO: 80889 - DNA, 19 bp, Artificial sequence
  SiRNA target sequence
aagtcctcttaatactttc

SEQ ID NO: 80890 - DNA, 19 bp, Artificial sequence
  SiRNA target sequence
agtcctcttaatactttct

SEQ ID NO: 80891 - DNA, 19 bp, Artificial sequence
  SiRNA target sequence
gtcctcttaatactttctg

SEQ ID NO: 80892 - DNA, 19 bp, Artificial sequence
  SiRNA target sequence
tcctcttaatactttctgc

SEQ ID NO: 80893 - DNA, 19 bp, Artificial sequence
  SiRNA target sequence
cctcttaatactttctgct

SEQ ID NO: 80894 - DNA, 19 bp, Artificial sequence
  SiRNA target sequence
ctcttaatactttctgctc

SEQ ID NO: 80895 - DNA, 19 bp, Artificial sequence
  SiRNA target sequence
tcttaatactttctgctct

SEQ ID NO: 80896 - DNA, 19 bp, Artificial sequence
  SiRNA target sequence
cttaatactttctgctctt

SEQ ID NO: 80897 - DNA, 19 bp, Artificial sequence
  SiRNA target sequence
ttaatactttctgctcttt

SEQ ID NO: 80898 - DNA, 19 bp, Artificial sequence
  SiRNA target sequence
taatactttctgctctttg

SEQ ID NO: 80899 - DNA, 19 bp, Artificial sequence
  SiRNA target sequence
aatactttctgctctttgt

SEQ ID NO: 80900 - DNA, 19 bp, Artificial sequence
  SiRNA target sequence
atactttctgctctttgtt

SEQ ID NO: 80901 - DNA, 19 bp, Artificial sequence
  SiRNA target sequence
tactttctgctctttgttc

SEQ ID NO: 80902 - DNA, 19 bp, Artificial sequence
  SiRNA target sequence
actttctgctctttgttca

SEQ ID NO: 80903 - DNA, 19 bp, Artificial sequence
  SiRNA target sequence
ctttctgctctttgttcat

SEQ ID NO: 80904 - DNA, 20 bp, Artificial sequence
  SiRNA target sequence
ttattctggttcacaaccac

SEQ ID NO: 80905 - DNA, 20 bp, Artificial sequence
  SiRNA target sequence
tattctggttcacaaccaca

SEQ ID NO: 80906 - DNA, 20 bp, Artificial sequence
  SiRNA target sequence
attctggttcacaaccacaa

SEQ ID NO: 80907 - DNA, 20 bp, Artificial sequence
  SiRNA target sequence
ttctggttcacaaccacaac

SEQ ID NO: 80908 - DNA, 20 bp, Artificial sequence
  SiRNA target sequence
tctggttcacaaccacaact

SEQ ID NO: 80909 - DNA, 20 bp, Artificial sequence
  SiRNA target sequence
ctggttcacaaccacaactc

SEQ ID NO: 80910 - DNA, 20 bp, Artificial sequence
  SiRNA target sequence
tggttcacaaccacaactcc

SEQ ID NO: 80911 - DNA, 20 bp, Artificial sequence
  SiRNA target sequence
ggttcacaaccacaactcca

SEQ ID NO: 80912 - DNA, 20 bp, Artificial sequence
  SiRNA target sequence
gttcacaaccacaactccaa

SEQ ID NO: 80913 - DNA, 20 bp, Artificial sequence
  SiRNA target sequence
ttcacaaccacaactccaaa

SEQ ID NO: 80914 - DNA, 20 bp, Artificial sequence
  SiRNA target sequence
tcacaaccacaactccaaac

SEQ ID NO: 80915 - DNA, 20 bp, Artificial sequence
  SiRNA target sequence
cacaaccacaactccaaaca

SEQ ID NO: 80916 - DNA, 20 bp, Artificial sequence
  SiRNA target sequence
acaaccacaactccaaacac

SEQ ID NO: 80917 - DNA, 20 bp, Artificial sequence
  SiRNA target sequence
caaccacaactccaaacacc

SEQ ID NO: 80918 - DNA, 20 bp, Artificial sequence
  SiRNA target sequence
aaccacaactccaaacacct

SEQ ID NO: 80919 - DNA, 20 bp, Artificial sequence
  SiRNA target sequence
accacaactccaaacacctt

SEQ ID NO: 80920 - DNA, 20 bp, Artificial sequence
  SiRNA target sequence
ccacaactccaaacaccttc

SEQ ID NO: 80921 - DNA, 20 bp, Artificial sequence
  SiRNA target sequence
cacaactccaaacaccttct

SEQ ID NO: 80922 - DNA, 20 bp, Artificial sequence
  SiRNA target sequence
acaactccaaacaccttcta

SEQ ID NO: 80923 - DNA, 20 bp, Artificial sequence
  SiRNA target sequence
caactccaaacaccttctac

SEQ ID NO: 80924 - DNA, 20 bp, Artificial sequence
  SiRNA target sequence
aactccaaacaccttctacc

SEQ ID NO: 80925 - DNA, 20 bp, Artificial sequence
  SiRNA target sequence
actccaaacaccttctacct

SEQ ID NO: 80926 - DNA, 20 bp, Artificial sequence
  SiRNA target sequence
ctccaaacaccttctacctt

SEQ ID NO: 80927 - DNA, 20 bp, Artificial sequence
  SiRNA target sequence
tccaaacaccttctaccttt

SEQ ID NO: 80928 - DNA, 20 bp, Artificial sequence
  SiRNA target sequence
ccaaacaccttctacctttt

SEQ ID NO: 80929 - DNA, 20 bp, Artificial sequence
  SiRNA target sequence
caaacaccttctaccttttt

SEQ ID NO: 80930 - DNA, 20 bp, Artificial sequence
  SiRNA target sequence
aaacaccttctaccttttta

SEQ ID NO: 80931 - DNA, 20 bp, Artificial sequence
  SiRNA target sequence
aacaccttctacctttttac

SEQ ID NO: 80932 - DNA, 20 bp, Artificial sequence
  SiRNA target sequence
acaccttctacctttttaca

SEQ ID NO: 80933 - DNA, 20 bp, Artificial sequence
  SiRNA target sequence
caccttctacctttttacag

SEQ ID NO: 80934 - DNA, 20 bp, Artificial sequence
  SiRNA target sequence
accttctacctttttacagt

SEQ ID NO: 80935 - DNA, 20 bp, Artificial sequence
  SiRNA target sequence
ccttctacctttttacagtc

SEQ ID NO: 80936 - DNA, 20 bp, Artificial sequence
  SiRNA target sequence
cttctacctttttacagtcc

SEQ ID NO: 80937 - DNA, 20 bp, Artificial sequence
  SiRNA target sequence
ttctacctttttacagtcca

SEQ ID NO: 80938 - DNA, 20 bp, Artificial sequence
  SiRNA target sequence
tctacctttttacagtccat

SEQ ID NO: 80939 - DNA, 20 bp, Artificial sequence
  SiRNA target sequence
ctacctttttacagtccata

SEQ ID NO: 80940 - DNA, 20 bp, Artificial sequence
  SiRNA target sequence
tacctttttacagtccataa

SEQ ID NO: 80941 - DNA, 20 bp, Artificial sequence
  SiRNA target sequence
acctttttacagtccataat

SEQ ID NO: 80942 - DNA, 20 bp, Artificial sequence
  SiRNA target sequence
cctttttacagtccataatg

SEQ ID NO: 80943 - DNA, 20 bp, Artificial sequence
  SiRNA target sequence
ctttttacagtccataatgg

SEQ ID NO: 80944 - DNA, 20 bp, Artificial sequence
  SiRNA target sequence
tttttacagtccataatggg

SEQ ID NO: 80945 - DNA, 20 bp, Artificial sequence
  SiRNA target sequence
ttttacagtccataatgggc

SEQ ID NO: 80946 - DNA, 20 bp, Artificial sequence
  SiRNA target sequence
tttacagtccataatgggct

SEQ ID NO: 80947 - DNA, 20 bp, Artificial sequence
  SiRNA target sequence
ttacagtccataatgggctt

SEQ ID NO: 80948 - DNA, 20 bp, Artificial sequence
  SiRNA target sequence
tacagtccataatgggcttt

SEQ ID NO: 80949 - DNA, 20 bp, Artificial sequence
  SiRNA target sequence
acagtccataatgggctttc

SEQ ID NO: 80950 - DNA, 20 bp, Artificial sequence
  SiRNA target sequence
cagtccataatgggctttcc

SEQ ID NO: 80951 - DNA, 20 bp, Artificial sequence
  SiRNA target sequence
agtccataatgggctttcct

SEQ ID NO: 80952 - DNA, 20 bp, Artificial sequence
  SiRNA target sequence
gtccataatgggctttccta

SEQ ID NO: 80953 - DNA, 20 bp, Artificial sequence
  SiRNA target sequence
tccataatgggctttcctaa

SEQ ID NO: 80954 - DNA, 20 bp, Artificial sequence
  SiRNA target sequence
ccataatgggctttcctaat

SEQ ID NO: 80955 - DNA, 20 bp, Artificial sequence
  SiRNA target sequence
cataatgggctttcctaatc

SEQ ID NO: 80956 - DNA, 20 bp, Artificial sequence
  SiRNA target sequence
ataatgggctttcctaatct

SEQ ID NO: 80957 - DNA, 20 bp, Artificial sequence
  SiRNA target sequence
taatgggctttcctaatctt

SEQ ID NO: 80958 - DNA, 20 bp, Artificial sequence
  SiRNA target sequence
aatgggctttcctaatcttt

SEQ ID NO: 80959 - DNA, 20 bp, Artificial sequence
  SiRNA target sequence
atgggctttcctaatctttt

SEQ ID NO: 80960 - DNA, 20 bp, Artificial sequence
  SiRNA target sequence
tgggctttcctaatctttta

SEQ ID NO: 80961 - DNA, 20 bp, Artificial sequence
  SiRNA target sequence
gggctttcctaatcttttat

SEQ ID NO: 80962 - DNA, 20 bp, Artificial sequence
  SiRNA target sequence
ggctttcctaatcttttatt

SEQ ID NO: 80963 - DNA, 20 bp, Artificial sequence
  SiRNA target sequence
gctttcctaatcttttatta

SEQ ID NO: 80964 - DNA, 20 bp, Artificial sequence
  SiRNA target sequence
ctttcctaatcttttattaa

SEQ ID NO: 80965 - DNA, 20 bp, Artificial sequence
  SiRNA target sequence
tttcctaatcttttattaac

SEQ ID NO: 80966 - DNA, 20 bp, Artificial sequence
  SiRNA target sequence
ttcctaatcttttattaact

SEQ ID NO: 80967 - DNA, 20 bp, Artificial sequence
  SiRNA target sequence
tcctaatcttttattaacta

SEQ ID NO: 80968 - DNA, 20 bp, Artificial sequence
  SiRNA target sequence
cctaatcttttattaactat

SEQ ID NO: 80969 - DNA, 20 bp, Artificial sequence
  SiRNA target sequence
ctaatcttttattaactatg

SEQ ID NO: 80970 - DNA, 20 bp, Artificial sequence
  SiRNA target sequence
taatcttttattaactatgt

SEQ ID NO: 80971 - DNA, 20 bp, Artificial sequence
  SiRNA target sequence
aatcttttattaactatgtt

SEQ ID NO: 80972 - DNA, 20 bp, Artificial sequence
  SiRNA target sequence
atcttttattaactatgtta

SEQ ID NO: 80973 - DNA, 20 bp, Artificial sequence
  SiRNA target sequence
tcttttattaactatgttat

SEQ ID NO: 80974 - DNA, 20 bp, Artificial sequence
  SiRNA target sequence
cttttattaactatgttatg

SEQ ID NO: 80975 - DNA, 20 bp, Artificial sequence
  SiRNA target sequence
ttttattaactatgttatgt

SEQ ID NO: 80976 - DNA, 20 bp, Artificial sequence
  SiRNA target sequence
tttattaactatgttatgtg

SEQ ID NO: 80977 - DNA, 20 bp, Artificial sequence
  SiRNA target sequence
ttattaactatgttatgtgc

SEQ ID NO: 80978 - DNA, 20 bp, Artificial sequence
  SiRNA target sequence
tattaactatgttatgtgct

SEQ ID NO: 80979 - DNA, 20 bp, Artificial sequence
  SiRNA target sequence
attaactatgttatgtgctt

SEQ ID NO: 80980 - DNA, 20 bp, Artificial sequence
  SiRNA target sequence
ttaactatgttatgtgcttt

SEQ ID NO: 80981 - DNA, 20 bp, Artificial sequence
  SiRNA target sequence
taactatgttatgtgcttta

SEQ ID NO: 80982 - DNA, 20 bp, Artificial sequence
  SiRNA target sequence
aactatgttatgtgctttac

SEQ ID NO: 80983 - DNA, 20 bp, Artificial sequence
  SiRNA target sequence
actatgttatgtgctttaca

SEQ ID NO: 80984 - DNA, 20 bp, Artificial sequence
  SiRNA target sequence
ctatgttatgtgctttacat

SEQ ID NO: 80985 - DNA, 20 bp, Artificial sequence
  SiRNA target sequence
tatgttatgtgctttacata

SEQ ID NO: 80986 - DNA, 20 bp, Artificial sequence
  SiRNA target sequence
atgttatgtgctttacatag

SEQ ID NO: 80987 - DNA, 20 bp, Artificial sequence
  SiRNA target sequence
tgttatgtgctttacatagc

SEQ ID NO: 80988 - DNA, 20 bp, Artificial sequence
  SiRNA target sequence
gttatgtgctttacatagcc

SEQ ID NO: 80989 - DNA, 20 bp, Artificial sequence
  SiRNA target sequence
ttatgtgctttacatagcca

SEQ ID NO: 80990 - DNA, 20 bp, Artificial sequence
  SiRNA target sequence
tatgtgctttacatagccac

SEQ ID NO: 80991 - DNA, 20 bp, Artificial sequence
  SiRNA target sequence
atgtgctttacatagccact

SEQ ID NO: 80992 - DNA, 20 bp, Artificial sequence
  SiRNA target sequence
tgtgctttacatagccactg

SEQ ID NO: 80993 - DNA, 20 bp, Artificial sequence
  SiRNA target sequence
gtgctttacatagccactgg

SEQ ID NO: 80994 - DNA, 20 bp, Artificial sequence
  SiRNA target sequence
tgctttacatagccactgga

SEQ ID NO: 80995 - DNA, 20 bp, Artificial sequence
  SiRNA target sequence
gctttacatagccactggac

SEQ ID NO: 80996 - DNA, 20 bp, Artificial sequence
  SiRNA target sequence
ctttacatagccactggaca

SEQ ID NO: 80997 - DNA, 20 bp, Artificial sequence
  SiRNA target sequence
tttacatagccactggacaa

SEQ ID NO: 80998 - DNA, 20 bp, Artificial sequence
  SiRNA target sequence
ttacatagccactggacaaa

SEQ ID NO: 80999 - DNA, 20 bp, Artificial sequence
  SiRNA target sequence
tacatagccactggacaaat

SEQ ID NO: 81000 - DNA, 20 bp, Artificial sequence
  SiRNA target sequence
acatagccactggacaaatt

SEQ ID NO: 81001 - DNA, 20 bp, Artificial sequence
  SiRNA target sequence
catagccactggacaaattc

SEQ ID NO: 81002 - DNA, 20 bp, Artificial sequence
  SiRNA target sequence
atagccactggacaaattcg

SEQ ID NO: 81003 - DNA, 20 bp, Artificial sequence
  SiRNA target sequence
tagccactggacaaattcgt

SEQ ID NO: 81004 - DNA, 20 bp, Artificial sequence
  SiRNA target sequence
agccactggacaaattcgtc

SEQ ID NO: 81005 - DNA, 20 bp, Artificial sequence
  SiRNA target sequence
gccactggacaaattcgtca

SEQ ID NO: 81006 - DNA, 20 bp, Artificial sequence
  SiRNA target sequence
ccactggacaaattcgtcat

SEQ ID NO: 81007 - DNA, 20 bp, Artificial sequence
  SiRNA target sequence
cactggacaaattcgtcatg

SEQ ID NO: 81008 - DNA, 20 bp, Artificial sequence
  SiRNA target sequence
actggacaaattcgtcatgt

SEQ ID NO: 81009 - DNA, 20 bp, Artificial sequence
  SiRNA target sequence
ctggacaaattcgtcatgtg

SEQ ID NO: 81010 - DNA, 20 bp, Artificial sequence
  SiRNA target sequence
tggacaaattcgtcatgtgt

SEQ ID NO: 81011 - DNA, 20 bp, Artificial sequence
  SiRNA target sequence
ggacaaattcgtcatgtgtg

SEQ ID NO: 81012 - DNA, 20 bp, Artificial sequence
  SiRNA target sequence
gacaaattcgtcatgtgtgg

SEQ ID NO: 81013 - DNA, 20 bp, Artificial sequence
  SiRNA target sequence
acaaattcgtcatgtgtggc

SEQ ID NO: 81014 - DNA, 20 bp, Artificial sequence
  SiRNA target sequence
caaattcgtcatgtgtggca

SEQ ID NO: 81015 - DNA, 20 bp, Artificial sequence
  SiRNA target sequence
aaattcgtcatgtgtggcaa

SEQ ID NO: 81016 - DNA, 20 bp, Artificial sequence
  SiRNA target sequence
aattcgtcatgtgtggcaac

SEQ ID NO: 81017 - DNA, 20 bp, Artificial sequence
  SiRNA target sequence
attcgtcatgtgtggcaact

SEQ ID NO: 81018 - DNA, 20 bp, Artificial sequence
  SiRNA target sequence
ttcgtcatgtgtggcaactt

SEQ ID NO: 81019 - DNA, 20 bp, Artificial sequence
  SiRNA target sequence
tcgtcatgtgtggcaacttg

SEQ ID NO: 81020 - DNA, 20 bp, Artificial sequence
  SiRNA target sequence
cgtcatgtgtggcaacttgt

SEQ ID NO: 81021 - DNA, 20 bp, Artificial sequence
  SiRNA target sequence
gtcatgtgtggcaacttgtg

SEQ ID NO: 81022 - DNA, 20 bp, Artificial sequence
  SiRNA target sequence
tcatgtgtggcaacttgtgg

SEQ ID NO: 81023 - DNA, 20 bp, Artificial sequence
  SiRNA target sequence
catgtgtggcaacttgtgga

SEQ ID NO: 81024 - DNA, 20 bp, Artificial sequence
  SiRNA target sequence
atgtgtggcaacttgtggag

SEQ ID NO: 81025 - DNA, 20 bp, Artificial sequence
  SiRNA target sequence
tgtgtggcaacttgtggagg

SEQ ID NO: 81026 - DNA, 20 bp, Artificial sequence
  SiRNA target sequence
gtgtggcaacttgtggagga

SEQ ID NO: 81027 - DNA, 20 bp, Artificial sequence
  SiRNA target sequence
tgtggcaacttgtggaggat

SEQ ID NO: 81028 - DNA, 20 bp, Artificial sequence
  SiRNA target sequence
gtggcaacttgtggaggatt

SEQ ID NO: 81029 - DNA, 20 bp, Artificial sequence
  SiRNA target sequence
tggcaacttgtggaggattt

SEQ ID NO: 81030 - DNA, 20 bp, Artificial sequence
  SiRNA target sequence
ggcaacttgtggaggattta

SEQ ID NO: 81031 - DNA, 20 bp, Artificial sequence
  SiRNA target sequence
gcaacttgtggaggatttaa

SEQ ID NO: 81032 - DNA, 20 bp, Artificial sequence
  SiRNA target sequence
caacttgtggaggatttaag

SEQ ID NO: 81033 - DNA, 20 bp, Artificial sequence
  SiRNA target sequence
aacttgtggaggatttaagc

SEQ ID NO: 81034 - DNA, 20 bp, Artificial sequence
  SiRNA target sequence
acttgtggaggatttaagct

SEQ ID NO: 81035 - DNA, 20 bp, Artificial sequence
  SiRNA target sequence
cttgtggaggatttaagctt

SEQ ID NO: 81036 - DNA, 20 bp, Artificial sequence
  SiRNA target sequence
ttgtggaggatttaagctta

SEQ ID NO: 81037 - DNA, 20 bp, Artificial sequence
  SiRNA target sequence
tgtggaggatttaagcttaa

SEQ ID NO: 81038 - DNA, 20 bp, Artificial sequence
  SiRNA target sequence
gtggaggatttaagcttaac

SEQ ID NO: 81039 - DNA, 20 bp, Artificial sequence
  SiRNA target sequence
tggaggatttaagcttaaca

SEQ ID NO: 81040 - DNA, 20 bp, Artificial sequence
  SiRNA target sequence
ggaggatttaagcttaacag

SEQ ID NO: 81041 - DNA, 20 bp, Artificial sequence
  SiRNA target sequence
gaggatttaagcttaacagt

SEQ ID NO: 81042 - DNA, 20 bp, Artificial sequence
  SiRNA target sequence
aggatttaagcttaacagtc

SEQ ID NO: 81043 - DNA, 20 bp, Artificial sequence
  SiRNA target sequence
ggatttaagcttaacagtct

SEQ ID NO: 81044 - DNA, 20 bp, Artificial sequence
  SiRNA target sequence
gatttaagcttaacagtctt

SEQ ID NO: 81045 - DNA, 20 bp, Artificial sequence
  SiRNA target sequence
atttaagcttaacagtcttt

SEQ ID NO: 81046 - DNA, 20 bp, Artificial sequence
  SiRNA target sequence
tttaagcttaacagtctttg

SEQ ID NO: 81047 - DNA, 20 bp, Artificial sequence
  SiRNA target sequence
ttaagcttaacagtctttga

SEQ ID NO: 81048 - DNA, 20 bp, Artificial sequence
  SiRNA target sequence
taagcttaacagtctttgaa

SEQ ID NO: 81049 - DNA, 20 bp, Artificial sequence
  SiRNA target sequence
aagcttaacagtctttgaaa

SEQ ID NO: 81050 - DNA, 20 bp, Artificial sequence
  SiRNA target sequence
agcttaacagtctttgaaaa

SEQ ID NO: 81051 - DNA, 20 bp, Artificial sequence
  SiRNA target sequence
gcttaacagtctttgaaaat

SEQ ID NO: 81052 - DNA, 20 bp, Artificial sequence
  SiRNA target sequence
cttaacagtctttgaaaatg

SEQ ID NO: 81053 - DNA, 20 bp, Artificial sequence
  SiRNA target sequence
ttaacagtctttgaaaatgt

SEQ ID NO: 81054 - DNA, 20 bp, Artificial sequence
  SiRNA target sequence
taacagtctttgaaaatgtc

SEQ ID NO: 81055 - DNA, 20 bp, Artificial sequence
  SiRNA target sequence
aacagtctttgaaaatgtcc

SEQ ID NO: 81056 - DNA, 20 bp, Artificial sequence
  SiRNA target sequence
acagtctttgaaaatgtcca

SEQ ID NO: 81057 - DNA, 20 bp, Artificial sequence
  SiRNA target sequence
cagtctttgaaaatgtccac

SEQ ID NO: 81058 - DNA, 20 bp, Artificial sequence
  SiRNA target sequence
agtctttgaaaatgtccaca

SEQ ID NO: 81059 - DNA, 20 bp, Artificial sequence
  SiRNA target sequence
gtctttgaaaatgtccacaa

SEQ ID NO: 81060 - DNA, 20 bp, Artificial sequence
  SiRNA target sequence
tctttgaaaatgtccacaac

SEQ ID NO: 81061 - DNA, 20 bp, Artificial sequence
  SiRNA target sequence
ctttgaaaatgtccacaaca

SEQ ID NO: 81062 - DNA, 20 bp, Artificial sequence
  SiRNA target sequence
tttgaaaatgtccacaacat

SEQ ID NO: 81063 - DNA, 20 bp, Artificial sequence
  SiRNA target sequence
ttgaaaatgtccacaacatt

SEQ ID NO: 81064 - DNA, 20 bp, Artificial sequence
  SiRNA target sequence
tgaaaatgtccacaacattc

SEQ ID NO: 81065 - DNA, 20 bp, Artificial sequence
  SiRNA target sequence
gaaaatgtccacaacattct

SEQ ID NO: 81066 - DNA, 20 bp, Artificial sequence
  SiRNA target sequence
aaaatgtccacaacattctg

SEQ ID NO: 81067 - DNA, 20 bp, Artificial sequence
  SiRNA target sequence
aaatgtccacaacattctgc

SEQ ID NO: 81068 - DNA, 20 bp, Artificial sequence
  SiRNA target sequence
aatgtccacaacattctgca

SEQ ID NO: 81069 - DNA, 20 bp, Artificial sequence
  SiRNA target sequence
atgtccacaacattctgcac

SEQ ID NO: 81070 - DNA, 20 bp, Artificial sequence
  SiRNA target sequence
tgtccacaacattctgcaca

SEQ ID NO: 81071 - DNA, 20 bp, Artificial sequence
  SiRNA target sequence
gtccacaacattctgcacag

SEQ ID NO: 81072 - DNA, 20 bp, Artificial sequence
  SiRNA target sequence
tccacaacattctgcacagg

SEQ ID NO: 81073 - DNA, 20 bp, Artificial sequence
  SiRNA target sequence
ccacaacattctgcacaggg

SEQ ID NO: 81074 - DNA, 20 bp, Artificial sequence
  SiRNA target sequence
cacaacattctgcacagggg

SEQ ID NO: 81075 - DNA, 20 bp, Artificial sequence
  SiRNA target sequence
acaacattctgcacagggga

SEQ ID NO: 81076 - DNA, 20 bp, Artificial sequence
  SiRNA target sequence
caacattctgcacaggggaa

SEQ ID NO: 81077 - DNA, 20 bp, Artificial sequence
  SiRNA target sequence
aacattctgcacaggggaaa

SEQ ID NO: 81078 - DNA, 20 bp, Artificial sequence
  SiRNA target sequence
acattctgcacaggggaaaa

SEQ ID NO: 81079 - DNA, 20 bp, Artificial sequence
  SiRNA target sequence
cattctgcacaggggaaaag

SEQ ID NO: 81080 - DNA, 20 bp, Artificial sequence
  SiRNA target sequence
attctgcacaggggaaaaga

SEQ ID NO: 81081 - DNA, 20 bp, Artificial sequence
  SiRNA target sequence
ttctgcacaggggaaaagag

SEQ ID NO: 81082 - DNA, 20 bp, Artificial sequence
  SiRNA target sequence
tctgcacaggggaaaagaga

SEQ ID NO: 81083 - DNA, 20 bp, Artificial sequence
  SiRNA target sequence
ctgcacaggggaaaagagat

SEQ ID NO: 81084 - DNA, 20 bp, Artificial sequence
  SiRNA target sequence
tgcacaggggaaaagagatg

SEQ ID NO: 81085 - DNA, 20 bp, Artificial sequence
  SiRNA target sequence
gcacaggggaaaagagatga

SEQ ID NO: 81086 - DNA, 20 bp, Artificial sequence
  SiRNA target sequence
cacaggggaaaagagatgat

SEQ ID NO: 81087 - DNA, 20 bp, Artificial sequence
  SiRNA target sequence
acaggggaaaagagatgata

SEQ ID NO: 81088 - DNA, 20 bp, Artificial sequence
  SiRNA target sequence
caggggaaaagagatgataa

SEQ ID NO: 81089 - DNA, 20 bp, Artificial sequence
  SiRNA target sequence
aggggaaaagagatgataaa

SEQ ID NO: 81090 - DNA, 20 bp, Artificial sequence
  SiRNA target sequence
ggggaaaagagatgataaaa

SEQ ID NO: 81091 - DNA, 20 bp, Artificial sequence
  SiRNA target sequence
gggaaaagagatgataaaag

SEQ ID NO: 81092 - DNA, 20 bp, Artificial sequence
  SiRNA target sequence
ggaaaagagatgataaaagg

SEQ ID NO: 81093 - DNA, 20 bp, Artificial sequence
  SiRNA target sequence
gaaaagagatgataaaaggt

SEQ ID NO: 81094 - DNA, 20 bp, Artificial sequence
  SiRNA target sequence
aaaagagatgataaaaggta

SEQ ID NO: 81095 - DNA, 20 bp, Artificial sequence
  SiRNA target sequence
aaagagatgataaaaggtaa

SEQ ID NO: 81096 - DNA, 20 bp, Artificial sequence
  SiRNA target sequence
aagagatgataaaaggtaaa

SEQ ID NO: 81097 - DNA, 20 bp, Artificial sequence
  SiRNA target sequence
agagatgataaaaggtaaat

SEQ ID NO: 81098 - DNA, 20 bp, Artificial sequence
  SiRNA target sequence
gagatgataaaaggtaaata

SEQ ID NO: 81099 - DNA, 20 bp, Artificial sequence
  SiRNA target sequence
agatgataaaaggtaaataa

SEQ ID NO: 81100 - DNA, 20 bp, Artificial sequence
  SiRNA target sequence
gatgataaaaggtaaataaa

SEQ ID NO: 81101 - DNA, 20 bp, Artificial sequence
  SiRNA target sequence
atgataaaaggtaaataaat

SEQ ID NO: 81102 - DNA, 20 bp, Artificial sequence
  SiRNA target sequence
tgataaaaggtaaataaatt

SEQ ID NO: 81103 - DNA, 20 bp, Artificial sequence
  SiRNA target sequence
gataaaaggtaaataaattg

SEQ ID NO: 81104 - DNA, 20 bp, Artificial sequence
  SiRNA target sequence
ataaaaggtaaataaattga

SEQ ID NO: 81105 - DNA, 20 bp, Artificial sequence
  SiRNA target sequence
taaaaggtaaataaattgaa

SEQ ID NO: 81106 - DNA, 20 bp, Artificial sequence
  SiRNA target sequence
aaaaggtaaataaattgaag

SEQ ID NO: 81107 - DNA, 20 bp, Artificial sequence
  SiRNA target sequence
aaaggtaaataaattgaagt

SEQ ID NO: 81108 - DNA, 20 bp, Artificial sequence
  SiRNA target sequence
aaggtaaataaattgaagtg

SEQ ID NO: 81109 - DNA, 20 bp, Artificial sequence
  SiRNA target sequence
aggtaaataaattgaagtgt

SEQ ID NO: 81110 - DNA, 20 bp, Artificial sequence
  SiRNA target sequence
ggtaaataaattgaagtgta

SEQ ID NO: 81111 - DNA, 20 bp, Artificial sequence
  SiRNA target sequence
gtaaataaattgaagtgtat

SEQ ID NO: 81112 - DNA, 20 bp, Artificial sequence
  SiRNA target sequence
taaataaattgaagtgtatc

SEQ ID NO: 81113 - DNA, 20 bp, Artificial sequence
  SiRNA target sequence
aaataaattgaagtgtatct

SEQ ID NO: 81114 - DNA, 20 bp, Artificial sequence
  SiRNA target sequence
aataaattgaagtgtatctt

SEQ ID NO: 81115 - DNA, 20 bp, Artificial sequence
  SiRNA target sequence
ataaattgaagtgtatcttt

SEQ ID NO: 81116 - DNA, 20 bp, Artificial sequence
  SiRNA target sequence
taaattgaagtgtatctttt

SEQ ID NO: 81117 - DNA, 20 bp, Artificial sequence
  SiRNA target sequence
aaattgaagtgtatcttttt

SEQ ID NO: 81118 - DNA, 20 bp, Artificial sequence
  SiRNA target sequence
aattgaagtgtatctttttt

SEQ ID NO: 81119 - DNA, 20 bp, Artificial sequence
  SiRNA target sequence
attgaagtgtatctttttta

SEQ ID NO: 81120 - DNA, 20 bp, Artificial sequence
  SiRNA target sequence
ttgaagtgtatcttttttat

SEQ ID NO: 81121 - DNA, 20 bp, Artificial sequence
  SiRNA target sequence
tgaagtgtatcttttttatg

SEQ ID NO: 81122 - DNA, 20 bp, Artificial sequence
  SiRNA target sequence
gaagtgtatcttttttatgt

SEQ ID NO: 81123 - DNA, 20 bp, Artificial sequence
  SiRNA target sequence
aagtgtatcttttttatgtt

SEQ ID NO: 81124 - DNA, 20 bp, Artificial sequence
  SiRNA target sequence
agtgtatcttttttatgttg

SEQ ID NO: 81125 - DNA, 20 bp, Artificial sequence
  SiRNA target sequence
gtgtatcttttttatgttgt

SEQ ID NO: 81126 - DNA, 20 bp, Artificial sequence
  SiRNA target sequence
tgtatcttttttatgttgta

SEQ ID NO: 81127 - DNA, 20 bp, Artificial sequence
  SiRNA target sequence
gtatcttttttatgttgtac

SEQ ID NO: 81128 - DNA, 20 bp, Artificial sequence
  SiRNA target sequence
tatcttttttatgttgtact

SEQ ID NO: 81129 - DNA, 20 bp, Artificial sequence
  SiRNA target sequence
atcttttttatgttgtactg

SEQ ID NO: 81130 - DNA, 20 bp, Artificial sequence
  SiRNA target sequence
tcttttttatgttgtactgt

SEQ ID NO: 81131 - DNA, 20 bp, Artificial sequence
  SiRNA target sequence
cttttttatgttgtactgta

SEQ ID NO: 81132 - DNA, 20 bp, Artificial sequence
  SiRNA target sequence
ttttttatgttgtactgtag

SEQ ID NO: 81133 - DNA, 20 bp, Artificial sequence
  SiRNA target sequence
tttttatgttgtactgtagg

SEQ ID NO: 81134 - DNA, 20 bp, Artificial sequence
  SiRNA target sequence
ttttatgttgtactgtagga

SEQ ID NO: 81135 - DNA, 20 bp, Artificial sequence
  SiRNA target sequence
tttatgttgtactgtaggaa

SEQ ID NO: 81136 - DNA, 20 bp, Artificial sequence
  SiRNA target sequence
ttatgttgtactgtaggaaa

SEQ ID NO: 81137 - DNA, 20 bp, Artificial sequence
  SiRNA target sequence
tatgttgtactgtaggaaat

SEQ ID NO: 81138 - DNA, 20 bp, Artificial sequence
  SiRNA target sequence
atgttgtactgtaggaaatg

SEQ ID NO: 81139 - DNA, 20 bp, Artificial sequence
  SiRNA target sequence
tgttgtactgtaggaaatgc

SEQ ID NO: 81140 - DNA, 20 bp, Artificial sequence
  SiRNA target sequence
gttgtactgtaggaaatgca

SEQ ID NO: 81141 - DNA, 20 bp, Artificial sequence
  SiRNA target sequence
ttgtactgtaggaaatgcag

SEQ ID NO: 81142 - DNA, 20 bp, Artificial sequence
  SiRNA target sequence
tgtactgtaggaaatgcagg

SEQ ID NO: 81143 - DNA, 20 bp, Artificial sequence
  SiRNA target sequence
gtactgtaggaaatgcagga

SEQ ID NO: 81144 - DNA, 20 bp, Artificial sequence
  SiRNA target sequence
tactgtaggaaatgcaggat

SEQ ID NO: 81145 - DNA, 20 bp, Artificial sequence
  SiRNA target sequence
actgtaggaaatgcaggata

SEQ ID NO: 81146 - DNA, 20 bp, Artificial sequence
  SiRNA target sequence
ctgtaggaaatgcaggataa

SEQ ID NO: 81147 - DNA, 20 bp, Artificial sequence
  SiRNA target sequence
tgtaggaaatgcaggataaa

SEQ ID NO: 81148 - DNA, 20 bp, Artificial sequence
  SiRNA target sequence
gtaggaaatgcaggataaac

SEQ ID NO: 81149 - DNA, 20 bp, Artificial sequence
  SiRNA target sequence
taggaaatgcaggataaaca

SEQ ID NO: 81150 - DNA, 20 bp, Artificial sequence
  SiRNA target sequence
aggaaatgcaggataaacag

SEQ ID NO: 81151 - DNA, 20 bp, Artificial sequence
  SiRNA target sequence
ggaaatgcaggataaacagc

SEQ ID NO: 81152 - DNA, 20 bp, Artificial sequence
  SiRNA target sequence
gaaatgcaggataaacagct

SEQ ID NO: 81153 - DNA, 20 bp, Artificial sequence
  SiRNA target sequence
aaatgcaggataaacagctg

SEQ ID NO: 81154 - DNA, 20 bp, Artificial sequence
  SiRNA target sequence
aatgcaggataaacagctgc

SEQ ID NO: 81155 - DNA, 20 bp, Artificial sequence
  SiRNA target sequence
atgcaggataaacagctgcc

SEQ ID NO: 81156 - DNA, 20 bp, Artificial sequence
  SiRNA target sequence
tgcaggataaacagctgcca

SEQ ID NO: 81157 - DNA, 20 bp, Artificial sequence
  SiRNA target sequence
gcaggataaacagctgccat

SEQ ID NO: 81158 - DNA, 20 bp, Artificial sequence
  SiRNA target sequence
caggataaacagctgccatg

SEQ ID NO: 81159 - DNA, 20 bp, Artificial sequence
  SiRNA target sequence
aggataaacagctgccatgg

SEQ ID NO: 81160 - DNA, 20 bp, Artificial sequence
  SiRNA target sequence
ggataaacagctgccatggt

SEQ ID NO: 81161 - DNA, 20 bp, Artificial sequence
  SiRNA target sequence
gataaacagctgccatggta

SEQ ID NO: 81162 - DNA, 20 bp, Artificial sequence
  SiRNA target sequence
ataaacagctgccatggtat

SEQ ID NO: 81163 - DNA, 20 bp, Artificial sequence
  SiRNA target sequence
taaacagctgccatggtatg

SEQ ID NO: 81164 - DNA, 20 bp, Artificial sequence
  SiRNA target sequence
aaacagctgccatggtatgt

SEQ ID NO: 81165 - DNA, 20 bp, Artificial sequence
  SiRNA target sequence
aacagctgccatggtatgta

SEQ ID NO: 81166 - DNA, 20 bp, Artificial sequence
  SiRNA target sequence
acagctgccatggtatgtaa

SEQ ID NO: 81167 - DNA, 20 bp, Artificial sequence
  SiRNA target sequence
cagctgccatggtatgtaaa

SEQ ID NO: 81168 - DNA, 20 bp, Artificial sequence
  SiRNA target sequence
agctgccatggtatgtaaaa

SEQ ID NO: 81169 - DNA, 20 bp, Artificial sequence
  SiRNA target sequence
gctgccatggtatgtaaaag

SEQ ID NO: 81170 - DNA, 20 bp, Artificial sequence
  SiRNA target sequence
ctgccatggtatgtaaaagt

SEQ ID NO: 81171 - DNA, 20 bp, Artificial sequence
  SiRNA target sequence
tgccatggtatgtaaaagtg

SEQ ID NO: 81172 - DNA, 20 bp, Artificial sequence
  SiRNA target sequence
gccatggtatgtaaaagtgt

SEQ ID NO: 81173 - DNA, 20 bp, Artificial sequence
  SiRNA target sequence
ccatggtatgtaaaagtgtc

SEQ ID NO: 81174 - DNA, 20 bp, Artificial sequence
  SiRNA target sequence
catggtatgtaaaagtgtcc

SEQ ID NO: 81175 - DNA, 20 bp, Artificial sequence
  SiRNA target sequence
atggtatgtaaaagtgtcca

SEQ ID NO: 81176 - DNA, 20 bp, Artificial sequence
  SiRNA target sequence
tggtatgtaaaagtgtccat

SEQ ID NO: 81177 - DNA, 20 bp, Artificial sequence
  SiRNA target sequence
ggtatgtaaaagtgtccatg

SEQ ID NO: 81178 - DNA, 20 bp, Artificial sequence
  SiRNA target sequence
gtatgtaaaagtgtccatgt

SEQ ID NO: 81179 - DNA, 20 bp, Artificial sequence
  SiRNA target sequence
tatgtaaaagtgtccatgtt

SEQ ID NO: 81180 - DNA, 20 bp, Artificial sequence
  SiRNA target sequence
atgtaaaagtgtccatgttg

SEQ ID NO: 81181 - DNA, 20 bp, Artificial sequence
  SiRNA target sequence
tgtaaaagtgtccatgttgc

SEQ ID NO: 81182 - DNA, 20 bp, Artificial sequence
  SiRNA target sequence
gtaaaagtgtccatgttgct

SEQ ID NO: 81183 - DNA, 20 bp, Artificial sequence
  SiRNA target sequence
taaaagtgtccatgttgctc

SEQ ID NO: 81184 - DNA, 20 bp, Artificial sequence
  SiRNA target sequence
aaaagtgtccatgttgctct

SEQ ID NO: 81185 - DNA, 20 bp, Artificial sequence
  SiRNA target sequence
aaagtgtccatgttgctctc

SEQ ID NO: 81186 - DNA, 20 bp, Artificial sequence
  SiRNA target sequence
aagtgtccatgttgctctcc

SEQ ID NO: 81187 - DNA, 20 bp, Artificial sequence
  SiRNA target sequence
agtgtccatgttgctctccc

SEQ ID NO: 81188 - DNA, 20 bp, Artificial sequence
  SiRNA target sequence
gtgtccatgttgctctcccc

SEQ ID NO: 81189 - DNA, 20 bp, Artificial sequence
  SiRNA target sequence
tgtccatgttgctctcccca

SEQ ID NO: 81190 - DNA, 20 bp, Artificial sequence
  SiRNA target sequence
gtccatgttgctctccccaa

SEQ ID NO: 81191 - DNA, 20 bp, Artificial sequence
  SiRNA target sequence
tccatgttgctctccccaat

SEQ ID NO: 81192 - DNA, 20 bp, Artificial sequence
  SiRNA target sequence
ccatgttgctctccccaatc

SEQ ID NO: 81193 - DNA, 20 bp, Artificial sequence
  SiRNA target sequence
catgttgctctccccaatct

SEQ ID NO: 81194 - DNA, 20 bp, Artificial sequence
  SiRNA target sequence
atgttgctctccccaatcta

SEQ ID NO: 81195 - DNA, 20 bp, Artificial sequence
  SiRNA target sequence
tgttgctctccccaatctat

SEQ ID NO: 81196 - DNA, 20 bp, Artificial sequence
  SiRNA target sequence
gttgctctccccaatctatc

SEQ ID NO: 81197 - DNA, 20 bp, Artificial sequence
  SiRNA target sequence
ttgctctccccaatctatct

SEQ ID NO: 81198 - DNA, 20 bp, Artificial sequence
  SiRNA target sequence
tgctctccccaatctatctt

SEQ ID NO: 81199 - DNA, 20 bp, Artificial sequence
  SiRNA target sequence
gctctccccaatctatcttt

SEQ ID NO: 81200 - DNA, 20 bp, Artificial sequence
  SiRNA target sequence
ctctccccaatctatcttta

SEQ ID NO: 81201 - DNA, 20 bp, Artificial sequence
  SiRNA target sequence
tctccccaatctatctttaa

SEQ ID NO: 81202 - DNA, 20 bp, Artificial sequence
  SiRNA target sequence
ctccccaatctatctttaac

SEQ ID NO: 81203 - DNA, 20 bp, Artificial sequence
  SiRNA target sequence
tccccaatctatctttaact

SEQ ID NO: 81204 - DNA, 20 bp, Artificial sequence
  SiRNA target sequence
ccccaatctatctttaactt

SEQ ID NO: 81205 - DNA, 20 bp, Artificial sequence
  SiRNA target sequence
cccaatctatctttaacttc

SEQ ID NO: 81206 - DNA, 20 bp, Artificial sequence
  SiRNA target sequence
ccaatctatctttaacttcc

SEQ ID NO: 81207 - DNA, 20 bp, Artificial sequence
  SiRNA target sequence
caatctatctttaacttcct

SEQ ID NO: 81208 - DNA, 20 bp, Artificial sequence
  SiRNA target sequence
aatctatctttaacttcctt

SEQ ID NO: 81209 - DNA, 20 bp, Artificial sequence
  SiRNA target sequence
atctatctttaacttcctta

SEQ ID NO: 81210 - DNA, 20 bp, Artificial sequence
  SiRNA target sequence
tctatctttaacttccttat

SEQ ID NO: 81211 - DNA, 20 bp, Artificial sequence
  SiRNA target sequence
ctatctttaacttccttatt

SEQ ID NO: 81212 - DNA, 20 bp, Artificial sequence
  SiRNA target sequence
tatctttaacttccttattt

SEQ ID NO: 81213 - DNA, 20 bp, Artificial sequence
  SiRNA target sequence
atctttaacttccttatttg

SEQ ID NO: 81214 - DNA, 20 bp, Artificial sequence
  SiRNA target sequence
tctttaacttccttatttgt

SEQ ID NO: 81215 - DNA, 20 bp, Artificial sequence
  SiRNA target sequence
ctttaacttccttatttgtt

SEQ ID NO: 81216 - DNA, 20 bp, Artificial sequence
  SiRNA target sequence
tttaacttccttatttgtta

SEQ ID NO: 81217 - DNA, 20 bp, Artificial sequence
  SiRNA target sequence
ttaacttccttatttgttaa

SEQ ID NO: 81218 - DNA, 20 bp, Artificial sequence
  SiRNA target sequence
taacttccttatttgttaat

SEQ ID NO: 81219 - DNA, 20 bp, Artificial sequence
  SiRNA target sequence
aacttccttatttgttaatt

SEQ ID NO: 81220 - DNA, 20 bp, Artificial sequence
  SiRNA target sequence
acttccttatttgttaattt

SEQ ID NO: 81221 - DNA, 20 bp, Artificial sequence
  SiRNA target sequence
cttccttatttgttaatttt

SEQ ID NO: 81222 - DNA, 20 bp, Artificial sequence
  SiRNA target sequence
ttccttatttgttaattttt

SEQ ID NO: 81223 - DNA, 20 bp, Artificial sequence
  SiRNA target sequence
tccttatttgttaatttttg

SEQ ID NO: 81224 - DNA, 20 bp, Artificial sequence
  SiRNA target sequence
ccttatttgttaatttttga

SEQ ID NO: 81225 - DNA, 20 bp, Artificial sequence
  SiRNA target sequence
cttatttgttaatttttgat

SEQ ID NO: 81226 - DNA, 20 bp, Artificial sequence
  SiRNA target sequence
ttatttgttaatttttgatt

SEQ ID NO: 81227 - DNA, 20 bp, Artificial sequence
  SiRNA target sequence
tatttgttaatttttgatta

SEQ ID NO: 81228 - DNA, 20 bp, Artificial sequence
  SiRNA target sequence
atttgttaatttttgattat

SEQ ID NO: 81229 - DNA, 20 bp, Artificial sequence
  SiRNA target sequence
tttgttaatttttgattatg

SEQ ID NO: 81230 - DNA, 20 bp, Artificial sequence
  SiRNA target sequence
ttgttaatttttgattatga

SEQ ID NO: 81231 - DNA, 20 bp, Artificial sequence
  SiRNA target sequence
tgttaatttttgattatgaa

SEQ ID NO: 81232 - DNA, 20 bp, Artificial sequence
  SiRNA target sequence
gttaatttttgattatgaat

SEQ ID NO: 81233 - DNA, 20 bp, Artificial sequence
  SiRNA target sequence
ttaatttttgattatgaatt

SEQ ID NO: 81234 - DNA, 20 bp, Artificial sequence
  SiRNA target sequence
taatttttgattatgaatta

SEQ ID NO: 81235 - DNA, 20 bp, Artificial sequence
  SiRNA target sequence
aatttttgattatgaattag

SEQ ID NO: 81236 - DNA, 20 bp, Artificial sequence
  SiRNA target sequence
atttttgattatgaattaga

SEQ ID NO: 81237 - DNA, 20 bp, Artificial sequence
  SiRNA target sequence
tttttgattatgaattagac

SEQ ID NO: 81238 - DNA, 20 bp, Artificial sequence
  SiRNA target sequence
ttttgattatgaattagacc

SEQ ID NO: 81239 - DNA, 20 bp, Artificial sequence
  SiRNA target sequence
tttgattatgaattagacct

SEQ ID NO: 81240 - DNA, 20 bp, Artificial sequence
  SiRNA target sequence
ttgattatgaattagaccta

SEQ ID NO: 81241 - DNA, 20 bp, Artificial sequence
  SiRNA target sequence
tgattatgaattagacctaa

SEQ ID NO: 81242 - DNA, 20 bp, Artificial sequence
  SiRNA target sequence
gattatgaattagacctaat

SEQ ID NO: 81243 - DNA, 20 bp, Artificial sequence
  SiRNA target sequence
attatgaattagacctaatt

SEQ ID NO: 81244 - DNA, 20 bp, Artificial sequence
  SiRNA target sequence
ttatgaattagacctaattc

SEQ ID NO: 81245 - DNA, 20 bp, Artificial sequence
  SiRNA target sequence
tatgaattagacctaattca

SEQ ID NO: 81246 - DNA, 20 bp, Artificial sequence
  SiRNA target sequence
atgaattagacctaattcac

SEQ ID NO: 81247 - DNA, 20 bp, Artificial sequence
  SiRNA target sequence
tgaattagacctaattcacc

SEQ ID NO: 81248 - DNA, 20 bp, Artificial sequence
  SiRNA target sequence
gaattagacctaattcacct

SEQ ID NO: 81249 - DNA, 20 bp, Artificial sequence
  SiRNA target sequence
aattagacctaattcaccta

SEQ ID NO: 81250 - DNA, 20 bp, Artificial sequence
  SiRNA target sequence
attagacctaattcacctac

SEQ ID NO: 81251 - DNA, 20 bp, Artificial sequence
  SiRNA target sequence
ttagacctaattcacctact

SEQ ID NO: 81252 - DNA, 20 bp, Artificial sequence
  SiRNA target sequence
tagacctaattcacctactt

SEQ ID NO: 81253 - DNA, 20 bp, Artificial sequence
  SiRNA target sequence
agacctaattcacctacttt

SEQ ID NO: 81254 - DNA, 20 bp, Artificial sequence
  SiRNA target sequence
gacctaattcacctactttt

SEQ ID NO: 81255 - DNA, 20 bp, Artificial sequence
  SiRNA target sequence
acctaattcacctacttttg

SEQ ID NO: 81256 - DNA, 20 bp, Artificial sequence
  SiRNA target sequence
cctaattcacctacttttgg

SEQ ID NO: 81257 - DNA, 20 bp, Artificial sequence
  SiRNA target sequence
ctaattcacctacttttggt

SEQ ID NO: 81258 - DNA, 20 bp, Artificial sequence
  SiRNA target sequence
taattcacctacttttggtg

SEQ ID NO: 81259 - DNA, 20 bp, Artificial sequence
  SiRNA target sequence
aattcacctacttttggtga

SEQ ID NO: 81260 - DNA, 20 bp, Artificial sequence
  SiRNA target sequence
attcacctacttttggtgaa

SEQ ID NO: 81261 - DNA, 20 bp, Artificial sequence
  SiRNA target sequence
ttcacctacttttggtgaaa

SEQ ID NO: 81262 - DNA, 20 bp, Artificial sequence
  SiRNA target sequence
tcacctacttttggtgaaat

SEQ ID NO: 81263 - DNA, 20 bp, Artificial sequence
  SiRNA target sequence
cacctacttttggtgaaata

SEQ ID NO: 81264 - DNA, 20 bp, Artificial sequence
  SiRNA target sequence
acctacttttggtgaaatag

SEQ ID NO: 81265 - DNA, 20 bp, Artificial sequence
  SiRNA target sequence
cctacttttggtgaaataga

SEQ ID NO: 81266 - DNA, 20 bp, Artificial sequence
  SiRNA target sequence
ctacttttggtgaaatagat

SEQ ID NO: 81267 - DNA, 20 bp, Artificial sequence
  SiRNA target sequence
tacttttggtgaaatagatt

SEQ ID NO: 81268 - DNA, 20 bp, Artificial sequence
  SiRNA target sequence
acttttggtgaaatagattg

SEQ ID NO: 81269 - DNA, 20 bp, Artificial sequence
  SiRNA target sequence
cttttggtgaaatagattgt

SEQ ID NO: 81270 - DNA, 20 bp, Artificial sequence
  SiRNA target sequence
ttttggtgaaatagattgta

SEQ ID NO: 81271 - DNA, 20 bp, Artificial sequence
  SiRNA target sequence
tttggtgaaatagattgtaa

SEQ ID NO: 81272 - DNA, 20 bp, Artificial sequence
  SiRNA target sequence
ttggtgaaatagattgtaaa

SEQ ID NO: 81273 - DNA, 20 bp, Artificial sequence
  SiRNA target sequence
tggtgaaatagattgtaaaa

SEQ ID NO: 81274 - DNA, 20 bp, Artificial sequence
  SiRNA target sequence
ggtgaaatagattgtaaaac

SEQ ID NO: 81275 - DNA, 20 bp, Artificial sequence
  SiRNA target sequence
gtgaaatagattgtaaaaca

SEQ ID NO: 81276 - DNA, 20 bp, Artificial sequence
  SiRNA target sequence
tgaaatagattgtaaaacag

SEQ ID NO: 81277 - DNA, 20 bp, Artificial sequence
  SiRNA target sequence
gaaatagattgtaaaacaga

SEQ ID NO: 81278 - DNA, 20 bp, Artificial sequence
  SiRNA target sequence
aaatagattgtaaaacagat

SEQ ID NO: 81279 - DNA, 20 bp, Artificial sequence
  SiRNA target sequence
aatagattgtaaaacagatt

SEQ ID NO: 81280 - DNA, 20 bp, Artificial sequence
  SiRNA target sequence
atagattgtaaaacagattt

SEQ ID NO: 81281 - DNA, 20 bp, Artificial sequence
  SiRNA target sequence
tagattgtaaaacagatttt

SEQ ID NO: 81282 - DNA, 20 bp, Artificial sequence
  SiRNA target sequence
agattgtaaaacagattttc

SEQ ID NO: 81283 - DNA, 20 bp, Artificial sequence
  SiRNA target sequence
gattgtaaaacagattttcc

SEQ ID NO: 81284 - DNA, 20 bp, Artificial sequence
  SiRNA target sequence
attgtaaaacagattttcca

SEQ ID NO: 81285 - DNA, 20 bp, Artificial sequence
  SiRNA target sequence
ttgtaaaacagattttccaa

SEQ ID NO: 81286 - DNA, 20 bp, Artificial sequence
  SiRNA target sequence
tgtaaaacagattttccaag

SEQ ID NO: 81287 - DNA, 20 bp, Artificial sequence
  SiRNA target sequence
gtaaaacagattttccaagt

SEQ ID NO: 81288 - DNA, 20 bp, Artificial sequence
  SiRNA target sequence
taaaacagattttccaagtg

SEQ ID NO: 81289 - DNA, 20 bp, Artificial sequence
  SiRNA target sequence
aaaacagattttccaagtga

SEQ ID NO: 81290 - DNA, 20 bp, Artificial sequence
  SiRNA target sequence
aaacagattttccaagtgag

SEQ ID NO: 81291 - DNA, 20 bp, Artificial sequence
  SiRNA target sequence
aacagattttccaagtgagt

SEQ ID NO: 81292 - DNA, 20 bp, Artificial sequence
  SiRNA target sequence
acagattttccaagtgagtt

SEQ ID NO: 81293 - DNA, 20 bp, Artificial sequence
  SiRNA target sequence
cagattttccaagtgagttg

SEQ ID NO: 81294 - DNA, 20 bp, Artificial sequence
  SiRNA target sequence
agattttccaagtgagttgt

SEQ ID NO: 81295 - DNA, 20 bp, Artificial sequence
  SiRNA target sequence
gattttccaagtgagttgtc

SEQ ID NO: 81296 - DNA, 20 bp, Artificial sequence
  SiRNA target sequence
attttccaagtgagttgtct

SEQ ID NO: 81297 - DNA, 20 bp, Artificial sequence
  SiRNA target sequence
ttttccaagtgagttgtctg

SEQ ID NO: 81298 - DNA, 20 bp, Artificial sequence
  SiRNA target sequence
tttccaagtgagttgtctgc

SEQ ID NO: 81299 - DNA, 20 bp, Artificial sequence
  SiRNA target sequence
ttccaagtgagttgtctgca

SEQ ID NO: 81300 - DNA, 20 bp, Artificial sequence
  SiRNA target sequence
tccaagtgagttgtctgcat

SEQ ID NO: 81301 - DNA, 20 bp, Artificial sequence
  SiRNA target sequence
ccaagtgagttgtctgcatg

SEQ ID NO: 81302 - DNA, 20 bp, Artificial sequence
  SiRNA target sequence
caagtgagttgtctgcatgt

SEQ ID NO: 81303 - DNA, 20 bp, Artificial sequence
  SiRNA target sequence
aagtgagttgtctgcatgtg

SEQ ID NO: 81304 - DNA, 20 bp, Artificial sequence
  SiRNA target sequence
agtgagttgtctgcatgtgt

SEQ ID NO: 81305 - DNA, 20 bp, Artificial sequence
  SiRNA target sequence
gtgagttgtctgcatgtgta

SEQ ID NO: 81306 - DNA, 20 bp, Artificial sequence
  SiRNA target sequence
tgagttgtctgcatgtgtat

SEQ ID NO: 81307 - DNA, 20 bp, Artificial sequence
  SiRNA target sequence
gagttgtctgcatgtgtatg

SEQ ID NO: 81308 - DNA, 20 bp, Artificial sequence
  SiRNA target sequence
agttgtctgcatgtgtatgc

SEQ ID NO: 81309 - DNA, 20 bp, Artificial sequence
  SiRNA target sequence
gttgtctgcatgtgtatgcg

SEQ ID NO: 81310 - DNA, 20 bp, Artificial sequence
  SiRNA target sequence
ttgtctgcatgtgtatgcgg

SEQ ID NO: 81311 - DNA, 20 bp, Artificial sequence
  SiRNA target sequence
tgtctgcatgtgtatgcggg

SEQ ID NO: 81312 - DNA, 20 bp, Artificial sequence
  SiRNA target sequence
gtctgcatgtgtatgcggga

SEQ ID NO: 81313 - DNA, 20 bp, Artificial sequence
  SiRNA target sequence
tctgcatgtgtatgcgggaa

SEQ ID NO: 81314 - DNA, 20 bp, Artificial sequence
  SiRNA target sequence
ctgcatgtgtatgcgggaaa

SEQ ID NO: 81315 - DNA, 20 bp, Artificial sequence
  SiRNA target sequence
tgcatgtgtatgcgggaaaa

SEQ ID NO: 81316 - DNA, 20 bp, Artificial sequence
  SiRNA target sequence
gcatgtgtatgcgggaaaaa

SEQ ID NO: 81317 - DNA, 20 bp, Artificial sequence
  SiRNA target sequence
catgtgtatgcgggaaaaaa

SEQ ID NO: 81318 - DNA, 20 bp, Artificial sequence
  SiRNA target sequence
atgtgtatgcgggaaaaaat

SEQ ID NO: 81319 - DNA, 20 bp, Artificial sequence
  SiRNA target sequence
tgtgtatgcgggaaaaaatg

SEQ ID NO: 81320 - DNA, 20 bp, Artificial sequence
  SiRNA target sequence
gtgtatgcgggaaaaaatgc

SEQ ID NO: 81321 - DNA, 20 bp, Artificial sequence
  SiRNA target sequence
tgtatgcgggaaaaaatgct

SEQ ID NO: 81322 - DNA, 20 bp, Artificial sequence
  SiRNA target sequence
gtatgcgggaaaaaatgctg

SEQ ID NO: 81323 - DNA, 20 bp, Artificial sequence
  SiRNA target sequence
tatgcgggaaaaaatgctgt

SEQ ID NO: 81324 - DNA, 20 bp, Artificial sequence
  SiRNA target sequence
atgcgggaaaaaatgctgtt

SEQ ID NO: 81325 - DNA, 20 bp, Artificial sequence
  SiRNA target sequence
tgcgggaaaaaatgctgttt

SEQ ID NO: 81326 - DNA, 20 bp, Artificial sequence
  SiRNA target sequence
gcgggaaaaaatgctgtttt

SEQ ID NO: 81327 - DNA, 20 bp, Artificial sequence
  SiRNA target sequence
cgggaaaaaatgctgttttg

SEQ ID NO: 81328 - DNA, 20 bp, Artificial sequence
  SiRNA target sequence
gggaaaaaatgctgttttgc

SEQ ID NO: 81329 - DNA, 20 bp, Artificial sequence
  SiRNA target sequence
ggaaaaaatgctgttttgct

SEQ ID NO: 81330 - DNA, 20 bp, Artificial sequence
  SiRNA target sequence
gaaaaaatgctgttttgcta

SEQ ID NO: 81331 - DNA, 20 bp, Artificial sequence
  SiRNA target sequence
aaaaaatgctgttttgctaa

SEQ ID NO: 81332 - DNA, 20 bp, Artificial sequence
  SiRNA target sequence
aaaaatgctgttttgctaaa

SEQ ID NO: 81333 - DNA, 20 bp, Artificial sequence
  SiRNA target sequence
aaaatgctgttttgctaaat

SEQ ID NO: 81334 - DNA, 20 bp, Artificial sequence
  SiRNA target sequence
aaatgctgttttgctaaata

SEQ ID NO: 81335 - DNA, 20 bp, Artificial sequence
  SiRNA target sequence
aatgctgttttgctaaataa

SEQ ID NO: 81336 - DNA, 20 bp, Artificial sequence
  SiRNA target sequence
atgctgttttgctaaataaa

SEQ ID NO: 81337 - DNA, 20 bp, Artificial sequence
  SiRNA target sequence
tgctgttttgctaaataaac

SEQ ID NO: 81338 - DNA, 20 bp, Artificial sequence
  SiRNA target sequence
gctgttttgctaaataaaca

SEQ ID NO: 81339 - DNA, 20 bp, Artificial sequence
  SiRNA target sequence
ctgttttgctaaataaacaa

SEQ ID NO: 81340 - DNA, 20 bp, Artificial sequence
  SiRNA target sequence
tgttttgctaaataaacaat

SEQ ID NO: 81341 - DNA, 20 bp, Artificial sequence
  SiRNA target sequence
gttttgctaaataaacaatc

SEQ ID NO: 81342 - DNA, 20 bp, Artificial sequence
  SiRNA target sequence
ttttgctaaataaacaatcc

SEQ ID NO: 81343 - DNA, 20 bp, Artificial sequence
  SiRNA target sequence
tttgctaaataaacaatcca

SEQ ID NO: 81344 - DNA, 20 bp, Artificial sequence
  SiRNA target sequence
ttgctaaataaacaatccat

SEQ ID NO: 81345 - DNA, 20 bp, Artificial sequence
  SiRNA target sequence
tgctaaataaacaatccata

SEQ ID NO: 81346 - DNA, 20 bp, Artificial sequence
  SiRNA target sequence
gctaaataaacaatccatac

SEQ ID NO: 81347 - DNA, 20 bp, Artificial sequence
  SiRNA target sequence
ctaaataaacaatccataca

SEQ ID NO: 81348 - DNA, 20 bp, Artificial sequence
  SiRNA target sequence
taaataaacaatccatacac

SEQ ID NO: 81349 - DNA, 20 bp, Artificial sequence
  SiRNA target sequence
aaataaacaatccatacacc

SEQ ID NO: 81350 - DNA, 20 bp, Artificial sequence
  SiRNA target sequence
aataaacaatccatacaccc

SEQ ID NO: 81351 - DNA, 20 bp, Artificial sequence
  SiRNA target sequence
ataaacaatccatacaccca

SEQ ID NO: 81352 - DNA, 20 bp, Artificial sequence
  SiRNA target sequence
taaacaatccatacacccaa

SEQ ID NO: 81353 - DNA, 20 bp, Artificial sequence
  SiRNA target sequence
aaacaatccatacacccaat

SEQ ID NO: 81354 - DNA, 20 bp, Artificial sequence
  SiRNA target sequence
aacaatccatacacccaata

SEQ ID NO: 81355 - DNA, 20 bp, Artificial sequence
  SiRNA target sequence
acaatccatacacccaataa

SEQ ID NO: 81356 - DNA, 20 bp, Artificial sequence
  SiRNA target sequence
caatccatacacccaataag

SEQ ID NO: 81357 - DNA, 20 bp, Artificial sequence
  SiRNA target sequence
aatccatacacccaataaga

SEQ ID NO: 81358 - DNA, 20 bp, Artificial sequence
  SiRNA target sequence
atccatacacccaataagat

SEQ ID NO: 81359 - DNA, 20 bp, Artificial sequence
  SiRNA target sequence
tccatacacccaataagata

SEQ ID NO: 81360 - DNA, 20 bp, Artificial sequence
  SiRNA target sequence
ccatacacccaataagataa

SEQ ID NO: 81361 - DNA, 20 bp, Artificial sequence
  SiRNA target sequence
catacacccaataagataat

SEQ ID NO: 81362 - DNA, 20 bp, Artificial sequence
  SiRNA target sequence
atacacccaataagataata

SEQ ID NO: 81363 - DNA, 20 bp, Artificial sequence
  SiRNA target sequence
tacacccaataagataataa

SEQ ID NO: 81364 - DNA, 20 bp, Artificial sequence
  SiRNA target sequence
acacccaataagataataag

SEQ ID NO: 81365 - DNA, 20 bp, Artificial sequence
  SiRNA target sequence
cacccaataagataataagt

SEQ ID NO: 81366 - DNA, 20 bp, Artificial sequence
  SiRNA target sequence
acccaataagataataagtc

SEQ ID NO: 81367 - DNA, 20 bp, Artificial sequence
  SiRNA target sequence
cccaataagataataagtcc

SEQ ID NO: 81368 - DNA, 20 bp, Artificial sequence
  SiRNA target sequence
ccaataagataataagtcct

SEQ ID NO: 81369 - DNA, 20 bp, Artificial sequence
  SiRNA target sequence
caataagataataagtcctc

SEQ ID NO: 81370 - DNA, 20 bp, Artificial sequence
  SiRNA target sequence
aataagataataagtcctct

SEQ ID NO: 81371 - DNA, 20 bp, Artificial sequence
  SiRNA target sequence
ataagataataagtcctctt

SEQ ID NO: 81372 - DNA, 20 bp, Artificial sequence
  SiRNA target sequence
taagataataagtcctctta

SEQ ID NO: 81373 - DNA, 20 bp, Artificial sequence
  SiRNA target sequence
aagataataagtcctcttaa

SEQ ID NO: 81374 - DNA, 20 bp, Artificial sequence
  SiRNA target sequence
agataataagtcctcttaat

SEQ ID NO: 81375 - DNA, 20 bp, Artificial sequence
  SiRNA target sequence
gataataagtcctcttaata

SEQ ID NO: 81376 - DNA, 20 bp, Artificial sequence
  SiRNA target sequence
ataataagtcctcttaatac

SEQ ID NO: 81377 - DNA, 20 bp, Artificial sequence
  SiRNA target sequence
taataagtcctcttaatact

SEQ ID NO: 81378 - DNA, 20 bp, Artificial sequence
  SiRNA target sequence
aataagtcctcttaatactt

SEQ ID NO: 81379 - DNA, 20 bp, Artificial sequence
  SiRNA target sequence
ataagtcctcttaatacttt

SEQ ID NO: 81380 - DNA, 20 bp, Artificial sequence
  SiRNA target sequence
taagtcctcttaatactttc

SEQ ID NO: 81381 - DNA, 20 bp, Artificial sequence
  SiRNA target sequence
aagtcctcttaatactttct

SEQ ID NO: 81382 - DNA, 20 bp, Artificial sequence
  SiRNA target sequence
agtcctcttaatactttctg

SEQ ID NO: 81383 - DNA, 20 bp, Artificial sequence
  SiRNA target sequence
gtcctcttaatactttctgc

SEQ ID NO: 81384 - DNA, 20 bp, Artificial sequence
  SiRNA target sequence
tcctcttaatactttctgct

SEQ ID NO: 81385 - DNA, 20 bp, Artificial sequence
  SiRNA target sequence
cctcttaatactttctgctc

SEQ ID NO: 81386 - DNA, 20 bp, Artificial sequence
  SiRNA target sequence
ctcttaatactttctgctct

SEQ ID NO: 81387 - DNA, 20 bp, Artificial sequence
  SiRNA target sequence
tcttaatactttctgctctt

SEQ ID NO: 81388 - DNA, 20 bp, Artificial sequence
  SiRNA target sequence
cttaatactttctgctcttt

SEQ ID NO: 81389 - DNA, 20 bp, Artificial sequence
  SiRNA target sequence
ttaatactttctgctctttg

SEQ ID NO: 81390 - DNA, 20 bp, Artificial sequence
  SiRNA target sequence
taatactttctgctctttgt

SEQ ID NO: 81391 - DNA, 20 bp, Artificial sequence
  SiRNA target sequence
aatactttctgctctttgtt

SEQ ID NO: 81392 - DNA, 20 bp, Artificial sequence
  SiRNA target sequence
atactttctgctctttgttc

SEQ ID NO: 81393 - DNA, 20 bp, Artificial sequence
  SiRNA target sequence
tactttctgctctttgttca

SEQ ID NO: 81394 - DNA, 20 bp, Artificial sequence
  SiRNA target sequence
actttctgctctttgttcat

SEQ ID NO: 81395 - DNA, 21 bp, Artificial sequence
  SiRNA target sequence
ttattctggttcacaaccaca

SEQ ID NO: 81396 - DNA, 21 bp, Artificial sequence
  SiRNA target sequence
tattctggttcacaaccacaa

SEQ ID NO: 81397 - DNA, 21 bp, Artificial sequence
  SiRNA target sequence
attctggttcacaaccacaac

SEQ ID NO: 81398 - DNA, 21 bp, Artificial sequence
  SiRNA target sequence
ttctggttcacaaccacaact

SEQ ID NO: 81399 - DNA, 21 bp, Artificial sequence
  SiRNA target sequence
tctggttcacaaccacaactc

SEQ ID NO: 81400 - DNA, 21 bp, Artificial sequence
  SiRNA target sequence
ctggttcacaaccacaactcc

SEQ ID NO: 81401 - DNA, 21 bp, Artificial sequence
  SiRNA target sequence
tggttcacaaccacaactcca

SEQ ID NO: 81402 - DNA, 21 bp, Artificial sequence
  SiRNA target sequence
ggttcacaaccacaactccaa

SEQ ID NO: 81403 - DNA, 21 bp, Artificial sequence
  SiRNA target sequence
gttcacaaccacaactccaaa

SEQ ID NO: 81404 - DNA, 21 bp, Artificial sequence
  SiRNA target sequence
ttcacaaccacaactccaaac

SEQ ID NO: 81405 - DNA, 21 bp, Artificial sequence
  SiRNA target sequence
tcacaaccacaactccaaaca

SEQ ID NO: 81406 - DNA, 21 bp, Artificial sequence
  SiRNA target sequence
cacaaccacaactccaaacac

SEQ ID NO: 81407 - DNA, 21 bp, Artificial sequence
  SiRNA target sequence
acaaccacaactccaaacacc

SEQ ID NO: 81408 - DNA, 21 bp, Artificial sequence
  SiRNA target sequence
caaccacaactccaaacacct

SEQ ID NO: 81409 - DNA, 21 bp, Artificial sequence
  SiRNA target sequence
aaccacaactccaaacacctt

SEQ ID NO: 81410 - DNA, 21 bp, Artificial sequence
  SiRNA target sequence
accacaactccaaacaccttc

SEQ ID NO: 81411 - DNA, 21 bp, Artificial sequence
  SiRNA target sequence
ccacaactccaaacaccttct

SEQ ID NO: 81412 - DNA, 21 bp, Artificial sequence
  SiRNA target sequence
cacaactccaaacaccttcta

SEQ ID NO: 81413 - DNA, 21 bp, Artificial sequence
  SiRNA target sequence
acaactccaaacaccttctac

SEQ ID NO: 81414 - DNA, 21 bp, Artificial sequence
  SiRNA target sequence
caactccaaacaccttctacc

SEQ ID NO: 81415 - DNA, 21 bp, Artificial sequence
  SiRNA target sequence
aactccaaacaccttctacct

SEQ ID NO: 81416 - DNA, 21 bp, Artificial sequence
  SiRNA target sequence
actccaaacaccttctacctt

SEQ ID NO: 81417 - DNA, 21 bp, Artificial sequence
  SiRNA target sequence
ctccaaacaccttctaccttt

SEQ ID NO: 81418 - DNA, 21 bp, Artificial sequence
  SiRNA target sequence
tccaaacaccttctacctttt

SEQ ID NO: 81419 - DNA, 21 bp, Artificial sequence
  SiRNA target sequence
ccaaacaccttctaccttttt

SEQ ID NO: 81420 - DNA, 21 bp, Artificial sequence
  SiRNA target sequence
caaacaccttctaccttttta

SEQ ID NO: 81421 - DNA, 21 bp, Artificial sequence
  SiRNA target sequence
aaacaccttctacctttttac

SEQ ID NO: 81422 - DNA, 21 bp, Artificial sequence
  SiRNA target sequence
aacaccttctacctttttaca

SEQ ID NO: 81423 - DNA, 21 bp, Artificial sequence
  SiRNA target sequence
acaccttctacctttttacag

SEQ ID NO: 81424 - DNA, 21 bp, Artificial sequence
  SiRNA target sequence
caccttctacctttttacagt

SEQ ID NO: 81425 - DNA, 21 bp, Artificial sequence
  SiRNA target sequence
accttctacctttttacagtc

SEQ ID NO: 81426 - DNA, 21 bp, Artificial sequence
  SiRNA target sequence
ccttctacctttttacagtcc

SEQ ID NO: 81427 - DNA, 21 bp, Artificial sequence
  SiRNA target sequence
cttctacctttttacagtcca

SEQ ID NO: 81428 - DNA, 21 bp, Artificial sequence
  SiRNA target sequence
ttctacctttttacagtccat

SEQ ID NO: 81429 - DNA, 21 bp, Artificial sequence
  SiRNA target sequence
tctacctttttacagtccata

SEQ ID NO: 81430 - DNA, 21 bp, Artificial sequence
  SiRNA target sequence
ctacctttttacagtccataa

SEQ ID NO: 81431 - DNA, 21 bp, Artificial sequence
  SiRNA target sequence
tacctttttacagtccataat

SEQ ID NO: 81432 - DNA, 21 bp, Artificial sequence
  SiRNA target sequence
acctttttacagtccataatg

SEQ ID NO: 81433 - DNA, 21 bp, Artificial sequence
  SiRNA target sequence
cctttttacagtccataatgg

SEQ ID NO: 81434 - DNA, 21 bp, Artificial sequence
  SiRNA target sequence
ctttttacagtccataatggg

SEQ ID NO: 81435 - DNA, 21 bp, Artificial sequence
  SiRNA target sequence
tttttacagtccataatgggc

SEQ ID NO: 81436 - DNA, 21 bp, Artificial sequence
  SiRNA target sequence
ttttacagtccataatgggct

SEQ ID NO: 81437 - DNA, 21 bp, Artificial sequence
  SiRNA target sequence
tttacagtccataatgggctt

SEQ ID NO: 81438 - DNA, 21 bp, Artificial sequence
  SiRNA target sequence
ttacagtccataatgggcttt

SEQ ID NO: 81439 - DNA, 21 bp, Artificial sequence
  SiRNA target sequence
tacagtccataatgggctttc

SEQ ID NO: 81440 - DNA, 21 bp, Artificial sequence
  SiRNA target sequence
acagtccataatgggctttcc

SEQ ID NO: 81441 - DNA, 21 bp, Artificial sequence
  SiRNA target sequence
cagtccataatgggctttcct

SEQ ID NO: 81442 - DNA, 21 bp, Artificial sequence
  SiRNA target sequence
agtccataatgggctttccta

SEQ ID NO: 81443 - DNA, 21 bp, Artificial sequence
  SiRNA target sequence
gtccataatgggctttcctaa

SEQ ID NO: 81444 - DNA, 21 bp, Artificial sequence
  SiRNA target sequence
tccataatgggctttcctaat

SEQ ID NO: 81445 - DNA, 21 bp, Artificial sequence
  SiRNA target sequence
ccataatgggctttcctaatc

SEQ ID NO: 81446 - DNA, 21 bp, Artificial sequence
  SiRNA target sequence
cataatgggctttcctaatct

SEQ ID NO: 81447 - DNA, 21 bp, Artificial sequence
  SiRNA target sequence
ataatgggctttcctaatctt

SEQ ID NO: 81448 - DNA, 21 bp, Artificial sequence
  SiRNA target sequence
taatgggctttcctaatcttt

SEQ ID NO: 81449 - DNA, 21 bp, Artificial sequence
  SiRNA target sequence
aatgggctttcctaatctttt

SEQ ID NO: 81450 - DNA, 21 bp, Artificial sequence
  SiRNA target sequence
atgggctttcctaatctttta

SEQ ID NO: 81451 - DNA, 21 bp, Artificial sequence
  SiRNA target sequence
tgggctttcctaatcttttat

SEQ ID NO: 81452 - DNA, 21 bp, Artificial sequence
  SiRNA target sequence
gggctttcctaatcttttatt

SEQ ID NO: 81453 - DNA, 21 bp, Artificial sequence
  SiRNA target sequence
ggctttcctaatcttttatta

SEQ ID NO: 81454 - DNA, 21 bp, Artificial sequence
  SiRNA target sequence
gctttcctaatcttttattaa

SEQ ID NO: 81455 - DNA, 21 bp, Artificial sequence
  SiRNA target sequence
ctttcctaatcttttattaac

SEQ ID NO: 81456 - DNA, 21 bp, Artificial sequence
  SiRNA target sequence
tttcctaatcttttattaact

SEQ ID NO: 81457 - DNA, 21 bp, Artificial sequence
  SiRNA target sequence
ttcctaatcttttattaacta

SEQ ID NO: 81458 - DNA, 21 bp, Artificial sequence
  SiRNA target sequence
tcctaatcttttattaactat

SEQ ID NO: 81459 - DNA, 21 bp, Artificial sequence
  SiRNA target sequence
cctaatcttttattaactatg

SEQ ID NO: 81460 - DNA, 21 bp, Artificial sequence
  SiRNA target sequence
ctaatcttttattaactatgt

SEQ ID NO: 81461 - DNA, 21 bp, Artificial sequence
  SiRNA target sequence
taatcttttattaactatgtt

SEQ ID NO: 81462 - DNA, 21 bp, Artificial sequence
  SiRNA target sequence
aatcttttattaactatgtta

SEQ ID NO: 81463 - DNA, 21 bp, Artificial sequence
  SiRNA target sequence
atcttttattaactatgttat

SEQ ID NO: 81464 - DNA, 21 bp, Artificial sequence
  SiRNA target sequence
tcttttattaactatgttatg

SEQ ID NO: 81465 - DNA, 21 bp, Artificial sequence
  SiRNA target sequence
cttttattaactatgttatgt

SEQ ID NO: 81466 - DNA, 21 bp, Artificial sequence
  SiRNA target sequence
ttttattaactatgttatgtg

SEQ ID NO: 81467 - DNA, 21 bp, Artificial sequence
  SiRNA target sequence
tttattaactatgttatgtgc

SEQ ID NO: 81468 - DNA, 21 bp, Artificial sequence
  SiRNA target sequence
ttattaactatgttatgtgct

SEQ ID NO: 81469 - DNA, 21 bp, Artificial sequence
  SiRNA target sequence
tattaactatgttatgtgctt

SEQ ID NO: 81470 - DNA, 21 bp, Artificial sequence
  SiRNA target sequence
attaactatgttatgtgcttt

SEQ ID NO: 81471 - DNA, 21 bp, Artificial sequence
  SiRNA target sequence
ttaactatgttatgtgcttta

SEQ ID NO: 81472 - DNA, 21 bp, Artificial sequence
  SiRNA target sequence
taactatgttatgtgctttac

SEQ ID NO: 81473 - DNA, 21 bp, Artificial sequence
  SiRNA target sequence
aactatgttatgtgctttaca

SEQ ID NO: 81474 - DNA, 21 bp, Artificial sequence
  SiRNA target sequence
actatgttatgtgctttacat

SEQ ID NO: 81475 - DNA, 21 bp, Artificial sequence
  SiRNA target sequence
ctatgttatgtgctttacata

SEQ ID NO: 81476 - DNA, 21 bp, Artificial sequence
  SiRNA target sequence
tatgttatgtgctttacatag

SEQ ID NO: 81477 - DNA, 21 bp, Artificial sequence
  SiRNA target sequence
atgttatgtgctttacatagc

SEQ ID NO: 81478 - DNA, 21 bp, Artificial sequence
  SiRNA target sequence
tgttatgtgctttacatagcc

SEQ ID NO: 81479 - DNA, 21 bp, Artificial sequence
  SiRNA target sequence
gttatgtgctttacatagcca

SEQ ID NO: 81480 - DNA, 21 bp, Artificial sequence
  SiRNA target sequence
ttatgtgctttacatagccac

SEQ ID NO: 81481 - DNA, 21 bp, Artificial sequence
  SiRNA target sequence
tatgtgctttacatagccact

SEQ ID NO: 81482 - DNA, 21 bp, Artificial sequence
  SiRNA target sequence
atgtgctttacatagccactg

SEQ ID NO: 81483 - DNA, 21 bp, Artificial sequence
  SiRNA target sequence
tgtgctttacatagccactgg

SEQ ID NO: 81484 - DNA, 21 bp, Artificial sequence
  SiRNA target sequence
gtgctttacatagccactgga

SEQ ID NO: 81485 - DNA, 21 bp, Artificial sequence
  SiRNA target sequence
tgctttacatagccactggac

SEQ ID NO: 81486 - DNA, 21 bp, Artificial sequence
  SiRNA target sequence
gctttacatagccactggaca

SEQ ID NO: 81487 - DNA, 21 bp, Artificial sequence
  SiRNA target sequence
ctttacatagccactggacaa

SEQ ID NO: 81488 - DNA, 21 bp, Artificial sequence
  SiRNA target sequence
tttacatagccactggacaaa

SEQ ID NO: 81489 - DNA, 21 bp, Artificial sequence
  SiRNA target sequence
ttacatagccactggacaaat

SEQ ID NO: 81490 - DNA, 21 bp, Artificial sequence
  SiRNA target sequence
tacatagccactggacaaatt

SEQ ID NO: 81491 - DNA, 21 bp, Artificial sequence
  SiRNA target sequence
acatagccactggacaaattc

SEQ ID NO: 81492 - DNA, 21 bp, Artificial sequence
  SiRNA target sequence
catagccactggacaaattcg

SEQ ID NO: 81493 - DNA, 21 bp, Artificial sequence
  SiRNA target sequence
atagccactggacaaattcgt

SEQ ID NO: 81494 - DNA, 21 bp, Artificial sequence
  SiRNA target sequence
tagccactggacaaattcgtc

SEQ ID NO: 81495 - DNA, 21 bp, Artificial sequence
  SiRNA target sequence
agccactggacaaattcgtca

SEQ ID NO: 81496 - DNA, 21 bp, Artificial sequence
  SiRNA target sequence
gccactggacaaattcgtcat

SEQ ID NO: 81497 - DNA, 21 bp, Artificial sequence
  SiRNA target sequence
ccactggacaaattcgtcatg

SEQ ID NO: 81498 - DNA, 21 bp, Artificial sequence
  SiRNA target sequence
cactggacaaattcgtcatgt

SEQ ID NO: 81499 - DNA, 21 bp, Artificial sequence
  SiRNA target sequence
actggacaaattcgtcatgtg

SEQ ID NO: 81500 - DNA, 21 bp, Artificial sequence
  SiRNA target sequence
ctggacaaattcgtcatgtgt

SEQ ID NO: 81501 - DNA, 21 bp, Artificial sequence
  SiRNA target sequence
tggacaaattcgtcatgtgtg

SEQ ID NO: 81502 - DNA, 21 bp, Artificial sequence
  SiRNA target sequence
ggacaaattcgtcatgtgtgg

SEQ ID NO: 81503 - DNA, 21 bp, Artificial sequence
  SiRNA target sequence
gacaaattcgtcatgtgtggc

SEQ ID NO: 81504 - DNA, 21 bp, Artificial sequence
  SiRNA target sequence
acaaattcgtcatgtgtggca

SEQ ID NO: 81505 - DNA, 21 bp, Artificial sequence
  SiRNA target sequence
caaattcgtcatgtgtggcaa

SEQ ID NO: 81506 - DNA, 21 bp, Artificial sequence
  SiRNA target sequence
aaattcgtcatgtgtggcaac

SEQ ID NO: 81507 - DNA, 21 bp, Artificial sequence
  SiRNA target sequence
aattcgtcatgtgtggcaact

SEQ ID NO: 81508 - DNA, 21 bp, Artificial sequence
  SiRNA target sequence
attcgtcatgtgtggcaactt

SEQ ID NO: 81509 - DNA, 21 bp, Artificial sequence
  SiRNA target sequence
ttcgtcatgtgtggcaacttg

SEQ ID NO: 81510 - DNA, 21 bp, Artificial sequence
  SiRNA target sequence
tcgtcatgtgtggcaacttgt

SEQ ID NO: 81511 - DNA, 21 bp, Artificial sequence
  SiRNA target sequence
cgtcatgtgtggcaacttgtg

SEQ ID NO: 81512 - DNA, 21 bp, Artificial sequence
  SiRNA target sequence
gtcatgtgtggcaacttgtgg

SEQ ID NO: 81513 - DNA, 21 bp, Artificial sequence
  SiRNA target sequence
tcatgtgtggcaacttgtgga

SEQ ID NO: 81514 - DNA, 21 bp, Artificial sequence
  SiRNA target sequence
catgtgtggcaacttgtggag

SEQ ID NO: 81515 - DNA, 21 bp, Artificial sequence
  SiRNA target sequence
atgtgtggcaacttgtggagg

SEQ ID NO: 81516 - DNA, 21 bp, Artificial sequence
  SiRNA target sequence
tgtgtggcaacttgtggagga

SEQ ID NO: 81517 - DNA, 21 bp, Artificial sequence
  SiRNA target sequence
gtgtggcaacttgtggaggat

SEQ ID NO: 81518 - DNA, 21 bp, Artificial sequence
  SiRNA target sequence
tgtggcaacttgtggaggatt

SEQ ID NO: 81519 - DNA, 21 bp, Artificial sequence
  SiRNA target sequence
gtggcaacttgtggaggattt

SEQ ID NO: 81520 - DNA, 21 bp, Artificial sequence
  SiRNA target sequence
tggcaacttgtggaggattta

SEQ ID NO: 81521 - DNA, 21 bp, Artificial sequence
  SiRNA target sequence
ggcaacttgtggaggatttaa

SEQ ID NO: 81522 - DNA, 21 bp, Artificial sequence
  SiRNA target sequence
gcaacttgtggaggatttaag

SEQ ID NO: 81523 - DNA, 21 bp, Artificial sequence
  SiRNA target sequence
caacttgtggaggatttaagc

SEQ ID NO: 81524 - DNA, 21 bp, Artificial sequence
  SiRNA target sequence
aacttgtggaggatttaagct

SEQ ID NO: 81525 - DNA, 21 bp, Artificial sequence
  SiRNA target sequence
acttgtggaggatttaagctt

SEQ ID NO: 81526 - DNA, 21 bp, Artificial sequence
  SiRNA target sequence
cttgtggaggatttaagctta

SEQ ID NO: 81527 - DNA, 21 bp, Artificial sequence
  SiRNA target sequence
ttgtggaggatttaagcttaa

SEQ ID NO: 81528 - DNA, 21 bp, Artificial sequence
  SiRNA target sequence
tgtggaggatttaagcttaac

SEQ ID NO: 81529 - DNA, 21 bp, Artificial sequence
  SiRNA target sequence
gtggaggatttaagcttaaca

SEQ ID NO: 81530 - DNA, 21 bp, Artificial sequence
  SiRNA target sequence
tggaggatttaagcttaacag

SEQ ID NO: 81531 - DNA, 21 bp, Artificial sequence
  SiRNA target sequence
ggaggatttaagcttaacagt

SEQ ID NO: 81532 - DNA, 21 bp, Artificial sequence
  SiRNA target sequence
gaggatttaagcttaacagtc

SEQ ID NO: 81533 - DNA, 21 bp, Artificial sequence
  SiRNA target sequence
aggatttaagcttaacagtct

SEQ ID NO: 81534 - DNA, 21 bp, Artificial sequence
  SiRNA target sequence
ggatttaagcttaacagtctt

SEQ ID NO: 81535 - DNA, 21 bp, Artificial sequence
  SiRNA target sequence
gatttaagcttaacagtcttt

SEQ ID NO: 81536 - DNA, 21 bp, Artificial sequence
  SiRNA target sequence
atttaagcttaacagtctttg

SEQ ID NO: 81537 - DNA, 21 bp, Artificial sequence
  SiRNA target sequence
tttaagcttaacagtctttga

SEQ ID NO: 81538 - DNA, 21 bp, Artificial sequence
  SiRNA target sequence
ttaagcttaacagtctttgaa

SEQ ID NO: 81539 - DNA, 21 bp, Artificial sequence
  SiRNA target sequence
taagcttaacagtctttgaaa

SEQ ID NO: 81540 - DNA, 21 bp, Artificial sequence
  SiRNA target sequence
aagcttaacagtctttgaaaa

SEQ ID NO: 81541 - DNA, 21 bp, Artificial sequence
  SiRNA target sequence
agcttaacagtctttgaaaat

SEQ ID NO: 81542 - DNA, 21 bp, Artificial sequence
  SiRNA target sequence
gcttaacagtctttgaaaatg

SEQ ID NO: 81543 - DNA, 21 bp, Artificial sequence
  SiRNA target sequence
cttaacagtctttgaaaatgt

SEQ ID NO: 81544 - DNA, 21 bp, Artificial sequence
  SiRNA target sequence
ttaacagtctttgaaaatgtc

SEQ ID NO: 81545 - DNA, 21 bp, Artificial sequence
  SiRNA target sequence
taacagtctttgaaaatgtcc

SEQ ID NO: 81546 - DNA, 21 bp, Artificial sequence
  SiRNA target sequence
aacagtctttgaaaatgtcca

SEQ ID NO: 81547 - DNA, 21 bp, Artificial sequence
  SiRNA target sequence
acagtctttgaaaatgtccac

SEQ ID NO: 81548 - DNA, 21 bp, Artificial sequence
  SiRNA target sequence
cagtctttgaaaatgtccaca

SEQ ID NO: 81549 - DNA, 21 bp, Artificial sequence
  SiRNA target sequence
agtctttgaaaatgtccacaa

SEQ ID NO: 81550 - DNA, 21 bp, Artificial sequence
  SiRNA target sequence
gtctttgaaaatgtccacaac

SEQ ID NO: 81551 - DNA, 21 bp, Artificial sequence
  SiRNA target sequence
tctttgaaaatgtccacaaca

SEQ ID NO: 81552 - DNA, 21 bp, Artificial sequence
  SiRNA target sequence
ctttgaaaatgtccacaacat

SEQ ID NO: 81553 - DNA, 21 bp, Artificial sequence
  SiRNA target sequence
tttgaaaatgtccacaacatt

SEQ ID NO: 81554 - DNA, 21 bp, Artificial sequence
  SiRNA target sequence
ttgaaaatgtccacaacattc

SEQ ID NO: 81555 - DNA, 21 bp, Artificial sequence
  SiRNA target sequence
tgaaaatgtccacaacattct

SEQ ID NO: 81556 - DNA, 21 bp, Artificial sequence
  SiRNA target sequence
gaaaatgtccacaacattctg

SEQ ID NO: 81557 - DNA, 21 bp, Artificial sequence
  SiRNA target sequence
aaaatgtccacaacattctgc

SEQ ID NO: 81558 - DNA, 21 bp, Artificial sequence
  SiRNA target sequence
aaatgtccacaacattctgca

SEQ ID NO: 81559 - DNA, 21 bp, Artificial sequence
  SiRNA target sequence
aatgtccacaacattctgcac

SEQ ID NO: 81560 - DNA, 21 bp, Artificial sequence
  SiRNA target sequence
atgtccacaacattctgcaca

SEQ ID NO: 81561 - DNA, 21 bp, Artificial sequence
  SiRNA target sequence
tgtccacaacattctgcacag

SEQ ID NO: 81562 - DNA, 21 bp, Artificial sequence
  SiRNA target sequence
gtccacaacattctgcacagg

SEQ ID NO: 81563 - DNA, 21 bp, Artificial sequence
  SiRNA target sequence
tccacaacattctgcacaggg

SEQ ID NO: 81564 - DNA, 21 bp, Artificial sequence
  SiRNA target sequence
ccacaacattctgcacagggg

SEQ ID NO: 81565 - DNA, 21 bp, Artificial sequence
  SiRNA target sequence
cacaacattctgcacagggga

SEQ ID NO: 81566 - DNA, 21 bp, Artificial sequence
  SiRNA target sequence
acaacattctgcacaggggaa

SEQ ID NO: 81567 - DNA, 21 bp, Artificial sequence
  SiRNA target sequence
caacattctgcacaggggaaa

SEQ ID NO: 81568 - DNA, 21 bp, Artificial sequence
  SiRNA target sequence
aacattctgcacaggggaaaa

SEQ ID NO: 81569 - DNA, 21 bp, Artificial sequence
  SiRNA target sequence
acattctgcacaggggaaaag

SEQ ID NO: 81570 - DNA, 21 bp, Artificial sequence
  SiRNA target sequence
cattctgcacaggggaaaaga

SEQ ID NO: 81571 - DNA, 21 bp, Artificial sequence
  SiRNA target sequence
attctgcacaggggaaaagag

SEQ ID NO: 81572 - DNA, 21 bp, Artificial sequence
  SiRNA target sequence
ttctgcacaggggaaaagaga

SEQ ID NO: 81573 - DNA, 21 bp, Artificial sequence
  SiRNA target sequence
tctgcacaggggaaaagagat

SEQ ID NO: 81574 - DNA, 21 bp, Artificial sequence
  SiRNA target sequence
ctgcacaggggaaaagagatg

SEQ ID NO: 81575 - DNA, 21 bp, Artificial sequence
  SiRNA target sequence
tgcacaggggaaaagagatga

SEQ ID NO: 81576 - DNA, 21 bp, Artificial sequence
  SiRNA target sequence
gcacaggggaaaagagatgat

SEQ ID NO: 81577 - DNA, 21 bp, Artificial sequence
  SiRNA target sequence
cacaggggaaaagagatgata

SEQ ID NO: 81578 - DNA, 21 bp, Artificial sequence
  SiRNA target sequence
acaggggaaaagagatgataa

SEQ ID NO: 81579 - DNA, 21 bp, Artificial sequence
  SiRNA target sequence
caggggaaaagagatgataaa

SEQ ID NO: 81580 - DNA, 21 bp, Artificial sequence
  SiRNA target sequence
aggggaaaagagatgataaaa

SEQ ID NO: 81581 - DNA, 21 bp, Artificial sequence
  SiRNA target sequence
ggggaaaagagatgataaaag

SEQ ID NO: 81582 - DNA, 21 bp, Artificial sequence
  SiRNA target sequence
gggaaaagagatgataaaagg

SEQ ID NO: 81583 - DNA, 21 bp, Artificial sequence
  SiRNA target sequence
ggaaaagagatgataaaaggt

SEQ ID NO: 81584 - DNA, 21 bp, Artificial sequence
  SiRNA target sequence
gaaaagagatgataaaaggta

SEQ ID NO: 81585 - DNA, 21 bp, Artificial sequence
  SiRNA target sequence
aaaagagatgataaaaggtaa

SEQ ID NO: 81586 - DNA, 21 bp, Artificial sequence
  SiRNA target sequence
aaagagatgataaaaggtaaa

SEQ ID NO: 81587 - DNA, 21 bp, Artificial sequence
  SiRNA target sequence
aagagatgataaaaggtaaat

SEQ ID NO: 81588 - DNA, 21 bp, Artificial sequence
  SiRNA target sequence
agagatgataaaaggtaaata

SEQ ID NO: 81589 - DNA, 21 bp, Artificial sequence
  SiRNA target sequence
gagatgataaaaggtaaataa

SEQ ID NO: 81590 - DNA, 21 bp, Artificial sequence
  SiRNA target sequence
agatgataaaaggtaaataaa

SEQ ID NO: 81591 - DNA, 21 bp, Artificial sequence
  SiRNA target sequence
gatgataaaaggtaaataaat

SEQ ID NO: 81592 - DNA, 21 bp, Artificial sequence
  SiRNA target sequence
atgataaaaggtaaataaatt

SEQ ID NO: 81593 - DNA, 21 bp, Artificial sequence
  SiRNA target sequence
tgataaaaggtaaataaattg

SEQ ID NO: 81594 - DNA, 21 bp, Artificial sequence
  SiRNA target sequence
gataaaaggtaaataaattga

SEQ ID NO: 81595 - DNA, 21 bp, Artificial sequence
  SiRNA target sequence
ataaaaggtaaataaattgaa

SEQ ID NO: 81596 - DNA, 21 bp, Artificial sequence
  SiRNA target sequence
taaaaggtaaataaattgaag

SEQ ID NO: 81597 - DNA, 21 bp, Artificial sequence
  SiRNA target sequence
aaaaggtaaataaattgaagt

SEQ ID NO: 81598 - DNA, 21 bp, Artificial sequence
  SiRNA target sequence
aaaggtaaataaattgaagtg

SEQ ID NO: 81599 - DNA, 21 bp, Artificial sequence
  SiRNA target sequence
aaggtaaataaattgaagtgt

SEQ ID NO: 81600 - DNA, 21 bp, Artificial sequence
  SiRNA target sequence
aggtaaataaattgaagtgta

SEQ ID NO: 81601 - DNA, 21 bp, Artificial sequence
  SiRNA target sequence
ggtaaataaattgaagtgtat

SEQ ID NO: 81602 - DNA, 21 bp, Artificial sequence
  SiRNA target sequence
gtaaataaattgaagtgtatc

SEQ ID NO: 81603 - DNA, 21 bp, Artificial sequence
  SiRNA target sequence
taaataaattgaagtgtatct

SEQ ID NO: 81604 - DNA, 21 bp, Artificial sequence
  SiRNA target sequence
aaataaattgaagtgtatctt

SEQ ID NO: 81605 - DNA, 21 bp, Artificial sequence
  SiRNA target sequence
aataaattgaagtgtatcttt

SEQ ID NO: 81606 - DNA, 21 bp, Artificial sequence
  SiRNA target sequence
ataaattgaagtgtatctttt

SEQ ID NO: 81607 - DNA, 21 bp, Artificial sequence
  SiRNA target sequence
taaattgaagtgtatcttttt

SEQ ID NO: 81608 - DNA, 21 bp, Artificial sequence
  SiRNA target sequence
aaattgaagtgtatctttttt

SEQ ID NO: 81609 - DNA, 21 bp, Artificial sequence
  SiRNA target sequence
aattgaagtgtatctttttta

SEQ ID NO: 81610 - DNA, 21 bp, Artificial sequence
  SiRNA target sequence
attgaagtgtatcttttttat

SEQ ID NO: 81611 - DNA, 21 bp, Artificial sequence
  SiRNA target sequence
ttgaagtgtatcttttttatg

SEQ ID NO: 81612 - DNA, 21 bp, Artificial sequence
  SiRNA target sequence
tgaagtgtatcttttttatgt

SEQ ID NO: 81613 - DNA, 21 bp, Artificial sequence
  SiRNA target sequence
gaagtgtatcttttttatgtt

SEQ ID NO: 81614 - DNA, 21 bp, Artificial sequence
  SiRNA target sequence
aagtgtatcttttttatgttg

SEQ ID NO: 81615 - DNA, 21 bp, Artificial sequence
  SiRNA target sequence
agtgtatcttttttatgttgt

SEQ ID NO: 81616 - DNA, 21 bp, Artificial sequence
  SiRNA target sequence
gtgtatcttttttatgttgta

SEQ ID NO: 81617 - DNA, 21 bp, Artificial sequence
  SiRNA target sequence
tgtatcttttttatgttgtac

SEQ ID NO: 81618 - DNA, 21 bp, Artificial sequence
  SiRNA target sequence
gtatcttttttatgttgtact

SEQ ID NO: 81619 - DNA, 21 bp, Artificial sequence
  SiRNA target sequence
tatcttttttatgttgtactg

SEQ ID NO: 81620 - DNA, 21 bp, Artificial sequence
  SiRNA target sequence
atcttttttatgttgtactgt

SEQ ID NO: 81621 - DNA, 21 bp, Artificial sequence
  SiRNA target sequence
tcttttttatgttgtactgta

SEQ ID NO: 81622 - DNA, 21 bp, Artificial sequence
  SiRNA target sequence
cttttttatgttgtactgtag

SEQ ID NO: 81623 - DNA, 21 bp, Artificial sequence
  SiRNA target sequence
ttttttatgttgtactgtagg

SEQ ID NO: 81624 - DNA, 21 bp, Artificial sequence
  SiRNA target sequence
tttttatgttgtactgtagga

SEQ ID NO: 81625 - DNA, 21 bp, Artificial sequence
  SiRNA target sequence
ttttatgttgtactgtaggaa

SEQ ID NO: 81626 - DNA, 21 bp, Artificial sequence
  SiRNA target sequence
tttatgttgtactgtaggaaa

SEQ ID NO: 81627 - DNA, 21 bp, Artificial sequence
  SiRNA target sequence
ttatgttgtactgtaggaaat

SEQ ID NO: 81628 - DNA, 21 bp, Artificial sequence
  SiRNA target sequence
tatgttgtactgtaggaaatg

SEQ ID NO: 81629 - DNA, 21 bp, Artificial sequence
  SiRNA target sequence
atgttgtactgtaggaaatgc

SEQ ID NO: 81630 - DNA, 21 bp, Artificial sequence
  SiRNA target sequence
tgttgtactgtaggaaatgca

SEQ ID NO: 81631 - DNA, 21 bp, Artificial sequence
  SiRNA target sequence
gttgtactgtaggaaatgcag

SEQ ID NO: 81632 - DNA, 21 bp, Artificial sequence
  SiRNA target sequence
ttgtactgtaggaaatgcagg

SEQ ID NO: 81633 - DNA, 21 bp, Artificial sequence
  SiRNA target sequence
tgtactgtaggaaatgcagga

SEQ ID NO: 81634 - DNA, 21 bp, Artificial sequence
  SiRNA target sequence
gtactgtaggaaatgcaggat

SEQ ID NO: 81635 - DNA, 21 bp, Artificial sequence
  SiRNA target sequence
tactgtaggaaatgcaggata

SEQ ID NO: 81636 - DNA, 21 bp, Artificial sequence
  SiRNA target sequence
actgtaggaaatgcaggataa

SEQ ID NO: 81637 - DNA, 21 bp, Artificial sequence
  SiRNA target sequence
ctgtaggaaatgcaggataaa

SEQ ID NO: 81638 - DNA, 21 bp, Artificial sequence
  SiRNA target sequence
tgtaggaaatgcaggataaac

SEQ ID NO: 81639 - DNA, 21 bp, Artificial sequence
  SiRNA target sequence
gtaggaaatgcaggataaaca

SEQ ID NO: 81640 - DNA, 21 bp, Artificial sequence
  SiRNA target sequence
taggaaatgcaggataaacag

SEQ ID NO: 81641 - DNA, 21 bp, Artificial sequence
  SiRNA target sequence
aggaaatgcaggataaacagc

SEQ ID NO: 81642 - DNA, 21 bp, Artificial sequence
  SiRNA target sequence
ggaaatgcaggataaacagct

SEQ ID NO: 81643 - DNA, 21 bp, Artificial sequence
  SiRNA target sequence
gaaatgcaggataaacagctg

SEQ ID NO: 81644 - DNA, 21 bp, Artificial sequence
  SiRNA target sequence
aaatgcaggataaacagctgc

SEQ ID NO: 81645 - DNA, 21 bp, Artificial sequence
  SiRNA target sequence
aatgcaggataaacagctgcc

SEQ ID NO: 81646 - DNA, 21 bp, Artificial sequence
  SiRNA target sequence
atgcaggataaacagctgcca

SEQ ID NO: 81647 - DNA, 21 bp, Artificial sequence
  SiRNA target sequence
tgcaggataaacagctgccat

SEQ ID NO: 81648 - DNA, 21 bp, Artificial sequence
  SiRNA target sequence
gcaggataaacagctgccatg

SEQ ID NO: 81649 - DNA, 21 bp, Artificial sequence
  SiRNA target sequence
caggataaacagctgccatgg

SEQ ID NO: 81650 - DNA, 21 bp, Artificial sequence
  SiRNA target sequence
aggataaacagctgccatggt

SEQ ID NO: 81651 - DNA, 21 bp, Artificial sequence
  SiRNA target sequence
ggataaacagctgccatggta

SEQ ID NO: 81652 - DNA, 21 bp, Artificial sequence
  SiRNA target sequence
gataaacagctgccatggtat

SEQ ID NO: 81653 - DNA, 21 bp, Artificial sequence
  SiRNA target sequence
ataaacagctgccatggtatg

SEQ ID NO: 81654 - DNA, 21 bp, Artificial sequence
  SiRNA target sequence
taaacagctgccatggtatgt

SEQ ID NO: 81655 - DNA, 21 bp, Artificial sequence
  SiRNA target sequence
aaacagctgccatggtatgta

SEQ ID NO: 81656 - DNA, 21 bp, Artificial sequence
  SiRNA target sequence
aacagctgccatggtatgtaa

SEQ ID NO: 81657 - DNA, 21 bp, Artificial sequence
  SiRNA target sequence
acagctgccatggtatgtaaa

SEQ ID NO: 81658 - DNA, 21 bp, Artificial sequence
  SiRNA target sequence
cagctgccatggtatgtaaaa

SEQ ID NO: 81659 - DNA, 21 bp, Artificial sequence
  SiRNA target sequence
agctgccatggtatgtaaaag

SEQ ID NO: 81660 - DNA, 21 bp, Artificial sequence
  SiRNA target sequence
gctgccatggtatgtaaaagt

SEQ ID NO: 81661 - DNA, 21 bp, Artificial sequence
  SiRNA target sequence
ctgccatggtatgtaaaagtg

SEQ ID NO: 81662 - DNA, 21 bp, Artificial sequence
  SiRNA target sequence
tgccatggtatgtaaaagtgt

SEQ ID NO: 81663 - DNA, 21 bp, Artificial sequence
  SiRNA target sequence
gccatggtatgtaaaagtgtc

SEQ ID NO: 81664 - DNA, 21 bp, Artificial sequence
  SiRNA target sequence
ccatggtatgtaaaagtgtcc

SEQ ID NO: 81665 - DNA, 21 bp, Artificial sequence
  SiRNA target sequence
catggtatgtaaaagtgtcca

SEQ ID NO: 81666 - DNA, 21 bp, Artificial sequence
  SiRNA target sequence
atggtatgtaaaagtgtccat

SEQ ID NO: 81667 - DNA, 21 bp, Artificial sequence
  SiRNA target sequence
tggtatgtaaaagtgtccatg

SEQ ID NO: 81668 - DNA, 21 bp, Artificial sequence
  SiRNA target sequence
ggtatgtaaaagtgtccatgt

SEQ ID NO: 81669 - DNA, 21 bp, Artificial sequence
  SiRNA target sequence
gtatgtaaaagtgtccatgtt

SEQ ID NO: 81670 - DNA, 21 bp, Artificial sequence
  SiRNA target sequence
tatgtaaaagtgtccatgttg

SEQ ID NO: 81671 - DNA, 21 bp, Artificial sequence
  SiRNA target sequence
atgtaaaagtgtccatgttgc

SEQ ID NO: 81672 - DNA, 21 bp, Artificial sequence
  SiRNA target sequence
tgtaaaagtgtccatgttgct

SEQ ID NO: 81673 - DNA, 21 bp, Artificial sequence
  SiRNA target sequence
gtaaaagtgtccatgttgctc

SEQ ID NO: 81674 - DNA, 21 bp, Artificial sequence
  SiRNA target sequence
taaaagtgtccatgttgctct

SEQ ID NO: 81675 - DNA, 21 bp, Artificial sequence
  SiRNA target sequence
aaaagtgtccatgttgctctc

SEQ ID NO: 81676 - DNA, 21 bp, Artificial sequence
  SiRNA target sequence
aaagtgtccatgttgctctcc

SEQ ID NO: 81677 - DNA, 21 bp, Artificial sequence
  SiRNA target sequence
aagtgtccatgttgctctccc

SEQ ID NO: 81678 - DNA, 21 bp, Artificial sequence
  SiRNA target sequence
agtgtccatgttgctctcccc

SEQ ID NO: 81679 - DNA, 21 bp, Artificial sequence
  SiRNA target sequence
gtgtccatgttgctctcccca

SEQ ID NO: 81680 - DNA, 21 bp, Artificial sequence
  SiRNA target sequence
tgtccatgttgctctccccaa

SEQ ID NO: 81681 - DNA, 21 bp, Artificial sequence
  SiRNA target sequence
gtccatgttgctctccccaat

SEQ ID NO: 81682 - DNA, 21 bp, Artificial sequence
  SiRNA target sequence
tccatgttgctctccccaatc

SEQ ID NO: 81683 - DNA, 21 bp, Artificial sequence
  SiRNA target sequence
ccatgttgctctccccaatct

SEQ ID NO: 81684 - DNA, 21 bp, Artificial sequence
  SiRNA target sequence
catgttgctctccccaatcta

SEQ ID NO: 81685 - DNA, 21 bp, Artificial sequence
  SiRNA target sequence
atgttgctctccccaatctat

SEQ ID NO: 81686 - DNA, 21 bp, Artificial sequence
  SiRNA target sequence
tgttgctctccccaatctatc

SEQ ID NO: 81687 - DNA, 21 bp, Artificial sequence
  SiRNA target sequence
gttgctctccccaatctatct

SEQ ID NO: 81688 - DNA, 21 bp, Artificial sequence
  SiRNA target sequence
ttgctctccccaatctatctt

SEQ ID NO: 81689 - DNA, 21 bp, Artificial sequence
  SiRNA target sequence
tgctctccccaatctatcttt

SEQ ID NO: 81690 - DNA, 21 bp, Artificial sequence
  SiRNA target sequence
gctctccccaatctatcttta

SEQ ID NO: 81691 - DNA, 21 bp, Artificial sequence
  SiRNA target sequence
ctctccccaatctatctttaa

SEQ ID NO: 81692 - DNA, 21 bp, Artificial sequence
  SiRNA target sequence
tctccccaatctatctttaac

SEQ ID NO: 81693 - DNA, 21 bp, Artificial sequence
  SiRNA target sequence
ctccccaatctatctttaact

SEQ ID NO: 81694 - DNA, 21 bp, Artificial sequence
  SiRNA target sequence
tccccaatctatctttaactt

SEQ ID NO: 81695 - DNA, 21 bp, Artificial sequence
  SiRNA target sequence
ccccaatctatctttaacttc

SEQ ID NO: 81696 - DNA, 21 bp, Artificial sequence
  SiRNA target sequence
cccaatctatctttaacttcc

SEQ ID NO: 81697 - DNA, 21 bp, Artificial sequence
  SiRNA target sequence
ccaatctatctttaacttcct

SEQ ID NO: 81698 - DNA, 21 bp, Artificial sequence
  SiRNA target sequence
caatctatctttaacttcctt

SEQ ID NO: 81699 - DNA, 21 bp, Artificial sequence
  SiRNA target sequence
aatctatctttaacttcctta

SEQ ID NO: 81700 - DNA, 21 bp, Artificial sequence
  SiRNA target sequence
atctatctttaacttccttat

SEQ ID NO: 81701 - DNA, 21 bp, Artificial sequence
  SiRNA target sequence
tctatctttaacttccttatt

SEQ ID NO: 81702 - DNA, 21 bp, Artificial sequence
  SiRNA target sequence
ctatctttaacttccttattt

SEQ ID NO: 81703 - DNA, 21 bp, Artificial sequence
  SiRNA target sequence
tatctttaacttccttatttg

SEQ ID NO: 81704 - DNA, 21 bp, Artificial sequence
  SiRNA target sequence
atctttaacttccttatttgt

SEQ ID NO: 81705 - DNA, 21 bp, Artificial sequence
  SiRNA target sequence
tctttaacttccttatttgtt

SEQ ID NO: 81706 - DNA, 21 bp, Artificial sequence
  SiRNA target sequence
ctttaacttccttatttgtta

SEQ ID NO: 81707 - DNA, 21 bp, Artificial sequence
  SiRNA target sequence
tttaacttccttatttgttaa

SEQ ID NO: 81708 - DNA, 21 bp, Artificial sequence
  SiRNA target sequence
ttaacttccttatttgttaat

SEQ ID NO: 81709 - DNA, 21 bp, Artificial sequence
  SiRNA target sequence
taacttccttatttgttaatt

SEQ ID NO: 81710 - DNA, 21 bp, Artificial sequence
  SiRNA target sequence
aacttccttatttgttaattt

SEQ ID NO: 81711 - DNA, 21 bp, Artificial sequence
  SiRNA target sequence
acttccttatttgttaatttt

SEQ ID NO: 81712 - DNA, 21 bp, Artificial sequence
  SiRNA target sequence
cttccttatttgttaattttt

SEQ ID NO: 81713 - DNA, 21 bp, Artificial sequence
  SiRNA target sequence
ttccttatttgttaatttttg

SEQ ID NO: 81714 - DNA, 21 bp, Artificial sequence
  SiRNA target sequence
tccttatttgttaatttttga

SEQ ID NO: 81715 - DNA, 21 bp, Artificial sequence
  SiRNA target sequence
ccttatttgttaatttttgat

SEQ ID NO: 81716 - DNA, 21 bp, Artificial sequence
  SiRNA target sequence
cttatttgttaatttttgatt

SEQ ID NO: 81717 - DNA, 21 bp, Artificial sequence
  SiRNA target sequence
ttatttgttaatttttgatta

SEQ ID NO: 81718 - DNA, 21 bp, Artificial sequence
  SiRNA target sequence
tatttgttaatttttgattat

SEQ ID NO: 81719 - DNA, 21 bp, Artificial sequence
  SiRNA target sequence
atttgttaatttttgattatg

SEQ ID NO: 81720 - DNA, 21 bp, Artificial sequence
  SiRNA target sequence
tttgttaatttttgattatga

SEQ ID NO: 81721 - DNA, 21 bp, Artificial sequence
  SiRNA target sequence
ttgttaatttttgattatgaa

SEQ ID NO: 81722 - DNA, 21 bp, Artificial sequence
  SiRNA target sequence
tgttaatttttgattatgaat

SEQ ID NO: 81723 - DNA, 21 bp, Artificial sequence
  SiRNA target sequence
gttaatttttgattatgaatt

SEQ ID NO: 81724 - DNA, 21 bp, Artificial sequence
  SiRNA target sequence
ttaatttttgattatgaatta

SEQ ID NO: 81725 - DNA, 21 bp, Artificial sequence
  SiRNA target sequence
taatttttgattatgaattag

SEQ ID NO: 81726 - DNA, 21 bp, Artificial sequence
  SiRNA target sequence
aatttttgattatgaattaga

SEQ ID NO: 81727 - DNA, 21 bp, Artificial sequence
  SiRNA target sequence
atttttgattatgaattagac

SEQ ID NO: 81728 - DNA, 21 bp, Artificial sequence
  SiRNA target sequence
tttttgattatgaattagacc

SEQ ID NO: 81729 - DNA, 21 bp, Artificial sequence
  SiRNA target sequence
ttttgattatgaattagacct

SEQ ID NO: 81730 - DNA, 21 bp, Artificial sequence
  SiRNA target sequence
tttgattatgaattagaccta

SEQ ID NO: 81731 - DNA, 21 bp, Artificial sequence
  SiRNA target sequence
ttgattatgaattagacctaa

SEQ ID NO: 81732 - DNA, 21 bp, Artificial sequence
  SiRNA target sequence
tgattatgaattagacctaat

SEQ ID NO: 81733 - DNA, 21 bp, Artificial sequence
  SiRNA target sequence
gattatgaattagacctaatt

SEQ ID NO: 81734 - DNA, 21 bp, Artificial sequence
  SiRNA target sequence
attatgaattagacctaattc

SEQ ID NO: 81735 - DNA, 21 bp, Artificial sequence
  SiRNA target sequence
ttatgaattagacctaattca

SEQ ID NO: 81736 - DNA, 21 bp, Artificial sequence
  SiRNA target sequence
tatgaattagacctaattcac

SEQ ID NO: 81737 - DNA, 21 bp, Artificial sequence
  SiRNA target sequence
atgaattagacctaattcacc

SEQ ID NO: 81738 - DNA, 21 bp, Artificial sequence
  SiRNA target sequence
tgaattagacctaattcacct

SEQ ID NO: 81739 - DNA, 21 bp, Artificial sequence
  SiRNA target sequence
gaattagacctaattcaccta

SEQ ID NO: 81740 - DNA, 21 bp, Artificial sequence
  SiRNA target sequence
aattagacctaattcacctac

SEQ ID NO: 81741 - DNA, 21 bp, Artificial sequence
  SiRNA target sequence
attagacctaattcacctact

SEQ ID NO: 81742 - DNA, 21 bp, Artificial sequence
  SiRNA target sequence
ttagacctaattcacctactt

SEQ ID NO: 81743 - DNA, 21 bp, Artificial sequence
  SiRNA target sequence
tagacctaattcacctacttt

SEQ ID NO: 81744 - DNA, 21 bp, Artificial sequence
  SiRNA target sequence
agacctaattcacctactttt

SEQ ID NO: 81745 - DNA, 21 bp, Artificial sequence
  SiRNA target sequence
gacctaattcacctacttttg

SEQ ID NO: 81746 - DNA, 21 bp, Artificial sequence
  SiRNA target sequence
acctaattcacctacttttgg

SEQ ID NO: 81747 - DNA, 21 bp, Artificial sequence
  SiRNA target sequence
cctaattcacctacttttggt

SEQ ID NO: 81748 - DNA, 21 bp, Artificial sequence
  SiRNA target sequence
ctaattcacctacttttggtg

SEQ ID NO: 81749 - DNA, 21 bp, Artificial sequence
  SiRNA target sequence
taattcacctacttttggtga

SEQ ID NO: 81750 - DNA, 21 bp, Artificial sequence
  SiRNA target sequence
aattcacctacttttggtgaa

SEQ ID NO: 81751 - DNA, 21 bp, Artificial sequence
  SiRNA target sequence
attcacctacttttggtgaaa

SEQ ID NO: 81752 - DNA, 21 bp, Artificial sequence
  SiRNA target sequence
ttcacctacttttggtgaaat

SEQ ID NO: 81753 - DNA, 21 bp, Artificial sequence
  SiRNA target sequence
tcacctacttttggtgaaata

SEQ ID NO: 81754 - DNA, 21 bp, Artificial sequence
  SiRNA target sequence
cacctacttttggtgaaatag

SEQ ID NO: 81755 - DNA, 21 bp, Artificial sequence
  SiRNA target sequence
acctacttttggtgaaataga

SEQ ID NO: 81756 - DNA, 21 bp, Artificial sequence
  SiRNA target sequence
cctacttttggtgaaatagat

SEQ ID NO: 81757 - DNA, 21 bp, Artificial sequence
  SiRNA target sequence
ctacttttggtgaaatagatt

SEQ ID NO: 81758 - DNA, 21 bp, Artificial sequence
  SiRNA target sequence
tacttttggtgaaatagattg

SEQ ID NO: 81759 - DNA, 21 bp, Artificial sequence
  SiRNA target sequence
acttttggtgaaatagattgt

SEQ ID NO: 81760 - DNA, 21 bp, Artificial sequence
  SiRNA target sequence
cttttggtgaaatagattgta

SEQ ID NO: 81761 - DNA, 21 bp, Artificial sequence
  SiRNA target sequence
ttttggtgaaatagattgtaa

SEQ ID NO: 81762 - DNA, 21 bp, Artificial sequence
  SiRNA target sequence
tttggtgaaatagattgtaaa

SEQ ID NO: 81763 - DNA, 21 bp, Artificial sequence
  SiRNA target sequence
ttggtgaaatagattgtaaaa

SEQ ID NO: 81764 - DNA, 21 bp, Artificial sequence
  SiRNA target sequence
tggtgaaatagattgtaaaac

SEQ ID NO: 81765 - DNA, 21 bp, Artificial sequence
  SiRNA target sequence
ggtgaaatagattgtaaaaca

SEQ ID NO: 81766 - DNA, 21 bp, Artificial sequence
  SiRNA target sequence
gtgaaatagattgtaaaacag

SEQ ID NO: 81767 - DNA, 21 bp, Artificial sequence
  SiRNA target sequence
tgaaatagattgtaaaacaga

SEQ ID NO: 81768 - DNA, 21 bp, Artificial sequence
  SiRNA target sequence
gaaatagattgtaaaacagat

SEQ ID NO: 81769 - DNA, 21 bp, Artificial sequence
  SiRNA target sequence
aaatagattgtaaaacagatt

SEQ ID NO: 81770 - DNA, 21 bp, Artificial sequence
  SiRNA target sequence
aatagattgtaaaacagattt

SEQ ID NO: 81771 - DNA, 21 bp, Artificial sequence
  SiRNA target sequence
atagattgtaaaacagatttt

SEQ ID NO: 81772 - DNA, 21 bp, Artificial sequence
  SiRNA target sequence
tagattgtaaaacagattttc

SEQ ID NO: 81773 - DNA, 21 bp, Artificial sequence
  SiRNA target sequence
agattgtaaaacagattttcc

SEQ ID NO: 81774 - DNA, 21 bp, Artificial sequence
  SiRNA target sequence
gattgtaaaacagattttcca

SEQ ID NO: 81775 - DNA, 21 bp, Artificial sequence
  SiRNA target sequence
attgtaaaacagattttccaa

SEQ ID NO: 81776 - DNA, 21 bp, Artificial sequence
  SiRNA target sequence
ttgtaaaacagattttccaag

SEQ ID NO: 81777 - DNA, 21 bp, Artificial sequence
  SiRNA target sequence
tgtaaaacagattttccaagt

SEQ ID NO: 81778 - DNA, 21 bp, Artificial sequence
  SiRNA target sequence
gtaaaacagattttccaagtg

SEQ ID NO: 81779 - DNA, 21 bp, Artificial sequence
  SiRNA target sequence
taaaacagattttccaagtga

SEQ ID NO: 81780 - DNA, 21 bp, Artificial sequence
  SiRNA target sequence
aaaacagattttccaagtgag

SEQ ID NO: 81781 - DNA, 21 bp, Artificial sequence
  SiRNA target sequence
aaacagattttccaagtgagt

SEQ ID NO: 81782 - DNA, 21 bp, Artificial sequence
  SiRNA target sequence
aacagattttccaagtgagtt

SEQ ID NO: 81783 - DNA, 21 bp, Artificial sequence
  SiRNA target sequence
acagattttccaagtgagttg

SEQ ID NO: 81784 - DNA, 21 bp, Artificial sequence
  SiRNA target sequence
cagattttccaagtgagttgt

SEQ ID NO: 81785 - DNA, 21 bp, Artificial sequence
  SiRNA target sequence
agattttccaagtgagttgtc

SEQ ID NO: 81786 - DNA, 21 bp, Artificial sequence
  SiRNA target sequence
gattttccaagtgagttgtct

SEQ ID NO: 81787 - DNA, 21 bp, Artificial sequence
  SiRNA target sequence
attttccaagtgagttgtctg

SEQ ID NO: 81788 - DNA, 21 bp, Artificial sequence
  SiRNA target sequence
ttttccaagtgagttgtctgc

SEQ ID NO: 81789 - DNA, 21 bp, Artificial sequence
  SiRNA target sequence
tttccaagtgagttgtctgca

SEQ ID NO: 81790 - DNA, 21 bp, Artificial sequence
  SiRNA target sequence
ttccaagtgagttgtctgcat

SEQ ID NO: 81791 - DNA, 21 bp, Artificial sequence
  SiRNA target sequence
tccaagtgagttgtctgcatg

SEQ ID NO: 81792 - DNA, 21 bp, Artificial sequence
  SiRNA target sequence
ccaagtgagttgtctgcatgt

SEQ ID NO: 81793 - DNA, 21 bp, Artificial sequence
  SiRNA target sequence
caagtgagttgtctgcatgtg

SEQ ID NO: 81794 - DNA, 21 bp, Artificial sequence
  SiRNA target sequence
aagtgagttgtctgcatgtgt

SEQ ID NO: 81795 - DNA, 21 bp, Artificial sequence
  SiRNA target sequence
agtgagttgtctgcatgtgta

SEQ ID NO: 81796 - DNA, 21 bp, Artificial sequence
  SiRNA target sequence
gtgagttgtctgcatgtgtat

SEQ ID NO: 81797 - DNA, 21 bp, Artificial sequence
  SiRNA target sequence
tgagttgtctgcatgtgtatg

SEQ ID NO: 81798 - DNA, 21 bp, Artificial sequence
  SiRNA target sequence
gagttgtctgcatgtgtatgc

SEQ ID NO: 81799 - DNA, 21 bp, Artificial sequence
  SiRNA target sequence
agttgtctgcatgtgtatgcg

SEQ ID NO: 81800 - DNA, 21 bp, Artificial sequence
  SiRNA target sequence
gttgtctgcatgtgtatgcgg

SEQ ID NO: 81801 - DNA, 21 bp, Artificial sequence
  SiRNA target sequence
ttgtctgcatgtgtatgcggg

SEQ ID NO: 81802 - DNA, 21 bp, Artificial sequence
  SiRNA target sequence
tgtctgcatgtgtatgcggga

SEQ ID NO: 81803 - DNA, 21 bp, Artificial sequence
  SiRNA target sequence
gtctgcatgtgtatgcgggaa

SEQ ID NO: 81804 - DNA, 21 bp, Artificial sequence
  SiRNA target sequence
tctgcatgtgtatgcgggaaa

SEQ ID NO: 81805 - DNA, 21 bp, Artificial sequence
  SiRNA target sequence
ctgcatgtgtatgcgggaaaa

SEQ ID NO: 81806 - DNA, 21 bp, Artificial sequence
  SiRNA target sequence
tgcatgtgtatgcgggaaaaa

SEQ ID NO: 81807 - DNA, 21 bp, Artificial sequence
  SiRNA target sequence
gcatgtgtatgcgggaaaaaa

SEQ ID NO: 81808 - DNA, 21 bp, Artificial sequence
  SiRNA target sequence
catgtgtatgcgggaaaaaat

SEQ ID NO: 81809 - DNA, 21 bp, Artificial sequence
  SiRNA target sequence
atgtgtatgcgggaaaaaatg

SEQ ID NO: 81810 - DNA, 21 bp, Artificial sequence
  SiRNA target sequence
tgtgtatgcgggaaaaaatgc

SEQ ID NO: 81811 - DNA, 21 bp, Artificial sequence
  SiRNA target sequence
gtgtatgcgggaaaaaatgct

SEQ ID NO: 81812 - DNA, 21 bp, Artificial sequence
  SiRNA target sequence
tgtatgcgggaaaaaatgctg

SEQ ID NO: 81813 - DNA, 21 bp, Artificial sequence
  SiRNA target sequence
gtatgcgggaaaaaatgctgt

SEQ ID NO: 81814 - DNA, 21 bp, Artificial sequence
  SiRNA target sequence
tatgcgggaaaaaatgctgtt

SEQ ID NO: 81815 - DNA, 21 bp, Artificial sequence
  SiRNA target sequence
atgcgggaaaaaatgctgttt

SEQ ID NO: 81816 - DNA, 21 bp, Artificial sequence
  SiRNA target sequence
tgcgggaaaaaatgctgtttt

SEQ ID NO: 81817 - DNA, 21 bp, Artificial sequence
  SiRNA target sequence
gcgggaaaaaatgctgttttg

SEQ ID NO: 81818 - DNA, 21 bp, Artificial sequence
  SiRNA target sequence
cgggaaaaaatgctgttttgc

SEQ ID NO: 81819 - DNA, 21 bp, Artificial sequence
  SiRNA target sequence
gggaaaaaatgctgttttgct

SEQ ID NO: 81820 - DNA, 21 bp, Artificial sequence
  SiRNA target sequence
ggaaaaaatgctgttttgcta

SEQ ID NO: 81821 - DNA, 21 bp, Artificial sequence
  SiRNA target sequence
gaaaaaatgctgttttgctaa

SEQ ID NO: 81822 - DNA, 21 bp, Artificial sequence
  SiRNA target sequence
aaaaaatgctgttttgctaaa

SEQ ID NO: 81823 - DNA, 21 bp, Artificial sequence
  SiRNA target sequence
aaaaatgctgttttgctaaat

SEQ ID NO: 81824 - DNA, 21 bp, Artificial sequence
  SiRNA target sequence
aaaatgctgttttgctaaata

SEQ ID NO: 81825 - DNA, 21 bp, Artificial sequence
  SiRNA target sequence
aaatgctgttttgctaaataa

SEQ ID NO: 81826 - DNA, 21 bp, Artificial sequence
  SiRNA target sequence
aatgctgttttgctaaataaa

SEQ ID NO: 81827 - DNA, 21 bp, Artificial sequence
  SiRNA target sequence
atgctgttttgctaaataaac

SEQ ID NO: 81828 - DNA, 21 bp, Artificial sequence
  SiRNA target sequence
tgctgttttgctaaataaaca

SEQ ID NO: 81829 - DNA, 21 bp, Artificial sequence
  SiRNA target sequence
gctgttttgctaaataaacaa

SEQ ID NO: 81830 - DNA, 21 bp, Artificial sequence
  SiRNA target sequence
ctgttttgctaaataaacaat

SEQ ID NO: 81831 - DNA, 21 bp, Artificial sequence
  SiRNA target sequence
tgttttgctaaataaacaatc

SEQ ID NO: 81832 - DNA, 21 bp, Artificial sequence
  SiRNA target sequence
gttttgctaaataaacaatcc

SEQ ID NO: 81833 - DNA, 21 bp, Artificial sequence
  SiRNA target sequence
ttttgctaaataaacaatcca

SEQ ID NO: 81834 - DNA, 21 bp, Artificial sequence
  SiRNA target sequence
tttgctaaataaacaatccat

SEQ ID NO: 81835 - DNA, 21 bp, Artificial sequence
  SiRNA target sequence
ttgctaaataaacaatccata

SEQ ID NO: 81836 - DNA, 21 bp, Artificial sequence
  SiRNA target sequence
tgctaaataaacaatccatac

SEQ ID NO: 81837 - DNA, 21 bp, Artificial sequence
  SiRNA target sequence
gctaaataaacaatccataca

SEQ ID NO: 81838 - DNA, 21 bp, Artificial sequence
  SiRNA target sequence
ctaaataaacaatccatacac

SEQ ID NO: 81839 - DNA, 21 bp, Artificial sequence
  SiRNA target sequence
taaataaacaatccatacacc

SEQ ID NO: 81840 - DNA, 21 bp, Artificial sequence
  SiRNA target sequence
aaataaacaatccatacaccc

SEQ ID NO: 81841 - DNA, 21 bp, Artificial sequence
  SiRNA target sequence
aataaacaatccatacaccca

SEQ ID NO: 81842 - DNA, 21 bp, Artificial sequence
  SiRNA target sequence
ataaacaatccatacacccaa

SEQ ID NO: 81843 - DNA, 21 bp, Artificial sequence
  SiRNA target sequence
taaacaatccatacacccaat

SEQ ID NO: 81844 - DNA, 21 bp, Artificial sequence
  SiRNA target sequence
aaacaatccatacacccaata

SEQ ID NO: 81845 - DNA, 21 bp, Artificial sequence
  SiRNA target sequence
aacaatccatacacccaataa

SEQ ID NO: 81846 - DNA, 21 bp, Artificial sequence
  SiRNA target sequence
acaatccatacacccaataag

SEQ ID NO: 81847 - DNA, 21 bp, Artificial sequence
  SiRNA target sequence
caatccatacacccaataaga

SEQ ID NO: 81848 - DNA, 21 bp, Artificial sequence
  SiRNA target sequence
aatccatacacccaataagat

SEQ ID NO: 81849 - DNA, 21 bp, Artificial sequence
  SiRNA target sequence
atccatacacccaataagata

SEQ ID NO: 81850 - DNA, 21 bp, Artificial sequence
  SiRNA target sequence
tccatacacccaataagataa

SEQ ID NO: 81851 - DNA, 21 bp, Artificial sequence
  SiRNA target sequence
ccatacacccaataagataat

SEQ ID NO: 81852 - DNA, 21 bp, Artificial sequence
  SiRNA target sequence
catacacccaataagataata

SEQ ID NO: 81853 - DNA, 21 bp, Artificial sequence
  SiRNA target sequence
atacacccaataagataataa

SEQ ID NO: 81854 - DNA, 21 bp, Artificial sequence
  SiRNA target sequence
tacacccaataagataataag

SEQ ID NO: 81855 - DNA, 21 bp, Artificial sequence
  SiRNA target sequence
acacccaataagataataagt

SEQ ID NO: 81856 - DNA, 21 bp, Artificial sequence
  SiRNA target sequence
cacccaataagataataagtc

SEQ ID NO: 81857 - DNA, 21 bp, Artificial sequence
  SiRNA target sequence
acccaataagataataagtcc

SEQ ID NO: 81858 - DNA, 21 bp, Artificial sequence
  SiRNA target sequence
cccaataagataataagtcct

SEQ ID NO: 81859 - DNA, 21 bp, Artificial sequence
  SiRNA target sequence
ccaataagataataagtcctc

SEQ ID NO: 81860 - DNA, 21 bp, Artificial sequence
  SiRNA target sequence
caataagataataagtcctct

SEQ ID NO: 81861 - DNA, 21 bp, Artificial sequence
  SiRNA target sequence
aataagataataagtcctctt

SEQ ID NO: 81862 - DNA, 21 bp, Artificial sequence
  SiRNA target sequence
ataagataataagtcctctta

SEQ ID NO: 81863 - DNA, 21 bp, Artificial sequence
  SiRNA target sequence
taagataataagtcctcttaa

SEQ ID NO: 81864 - DNA, 21 bp, Artificial sequence
  SiRNA target sequence
aagataataagtcctcttaat

SEQ ID NO: 81865 - DNA, 21 bp, Artificial sequence
  SiRNA target sequence
agataataagtcctcttaata

SEQ ID NO: 81866 - DNA, 21 bp, Artificial sequence
  SiRNA target sequence
gataataagtcctcttaatac

SEQ ID NO: 81867 - DNA, 21 bp, Artificial sequence
  SiRNA target sequence
ataataagtcctcttaatact

SEQ ID NO: 81868 - DNA, 21 bp, Artificial sequence
  SiRNA target sequence
taataagtcctcttaatactt

SEQ ID NO: 81869 - DNA, 21 bp, Artificial sequence
  SiRNA target sequence
aataagtcctcttaatacttt

SEQ ID NO: 81870 - DNA, 21 bp, Artificial sequence
  SiRNA target sequence
ataagtcctcttaatactttc

SEQ ID NO: 81871 - DNA, 21 bp, Artificial sequence
  SiRNA target sequence
taagtcctcttaatactttct

SEQ ID NO: 81872 - DNA, 21 bp, Artificial sequence
  SiRNA target sequence
aagtcctcttaatactttctg

SEQ ID NO: 81873 - DNA, 21 bp, Artificial sequence
  SiRNA target sequence
agtcctcttaatactttctgc

SEQ ID NO: 81874 - DNA, 21 bp, Artificial sequence
  SiRNA target sequence
gtcctcttaatactttctgct

SEQ ID NO: 81875 - DNA, 21 bp, Artificial sequence
  SiRNA target sequence
tcctcttaatactttctgctc

SEQ ID NO: 81876 - DNA, 21 bp, Artificial sequence
  SiRNA target sequence
cctcttaatactttctgctct

SEQ ID NO: 81877 - DNA, 21 bp, Artificial sequence
  SiRNA target sequence
ctcttaatactttctgctctt

SEQ ID NO: 81878 - DNA, 21 bp, Artificial sequence
  SiRNA target sequence
tcttaatactttctgctcttt

SEQ ID NO: 81879 - DNA, 21 bp, Artificial sequence
  SiRNA target sequence
cttaatactttctgctctttg

SEQ ID NO: 81880 - DNA, 21 bp, Artificial sequence
  SiRNA target sequence
ttaatactttctgctctttgt

SEQ ID NO: 81881 - DNA, 21 bp, Artificial sequence
  SiRNA target sequence
taatactttctgctctttgtt

SEQ ID NO: 81882 - DNA, 21 bp, Artificial sequence
  SiRNA target sequence
aatactttctgctctttgttc

SEQ ID NO: 81883 - DNA, 21 bp, Artificial sequence
  SiRNA target sequence
atactttctgctctttgttca

SEQ ID NO: 81884 - DNA, 21 bp, Artificial sequence
  SiRNA target sequence
tactttctgctctttgttcat

SEQ ID NO: 81885 - DNA, 22 bp, Artificial sequence
  SiRNA target sequence
ttattctggttcacaaccacaa

SEQ ID NO: 81886 - DNA, 22 bp, Artificial sequence
  SiRNA target sequence
tattctggttcacaaccacaac

SEQ ID NO: 81887 - DNA, 22 bp, Artificial sequence
  SiRNA target sequence
attctggttcacaaccacaact

SEQ ID NO: 81888 - DNA, 22 bp, Artificial sequence
  SiRNA target sequence
ttctggttcacaaccacaactc

SEQ ID NO: 81889 - DNA, 22 bp, Artificial sequence
  SiRNA target sequence
tctggttcacaaccacaactcc

SEQ ID NO: 81890 - DNA, 22 bp, Artificial sequence
  SiRNA target sequence
ctggttcacaaccacaactcca

SEQ ID NO: 81891 - DNA, 22 bp, Artificial sequence
  SiRNA target sequence
tggttcacaaccacaactccaa

SEQ ID NO: 81892 - DNA, 22 bp, Artificial sequence
  SiRNA target sequence
ggttcacaaccacaactccaaa

SEQ ID NO: 81893 - DNA, 22 bp, Artificial sequence
  SiRNA target sequence
gttcacaaccacaactccaaac

SEQ ID NO: 81894 - DNA, 22 bp, Artificial sequence
  SiRNA target sequence
ttcacaaccacaactccaaaca

SEQ ID NO: 81895 - DNA, 22 bp, Artificial sequence
  SiRNA target sequence
tcacaaccacaactccaaacac

SEQ ID NO: 81896 - DNA, 22 bp, Artificial sequence
  SiRNA target sequence
cacaaccacaactccaaacacc

SEQ ID NO: 81897 - DNA, 22 bp, Artificial sequence
  SiRNA target sequence
acaaccacaactccaaacacct

SEQ ID NO: 81898 - DNA, 22 bp, Artificial sequence
  SiRNA target sequence
caaccacaactccaaacacctt

SEQ ID NO: 81899 - DNA, 22 bp, Artificial sequence
  SiRNA target sequence
aaccacaactccaaacaccttc

SEQ ID NO: 81900 - DNA, 22 bp, Artificial sequence
  SiRNA target sequence
accacaactccaaacaccttct

SEQ ID NO: 81901 - DNA, 22 bp, Artificial sequence
  SiRNA target sequence
ccacaactccaaacaccttcta

SEQ ID NO: 81902 - DNA, 22 bp, Artificial sequence
  SiRNA target sequence
cacaactccaaacaccttctac

SEQ ID NO: 81903 - DNA, 22 bp, Artificial sequence
  SiRNA target sequence
acaactccaaacaccttctacc

SEQ ID NO: 81904 - DNA, 22 bp, Artificial sequence
  SiRNA target sequence
caactccaaacaccttctacct

SEQ ID NO: 81905 - DNA, 22 bp, Artificial sequence
  SiRNA target sequence
aactccaaacaccttctacctt

SEQ ID NO: 81906 - DNA, 22 bp, Artificial sequence
  SiRNA target sequence
actccaaacaccttctaccttt

SEQ ID NO: 81907 - DNA, 22 bp, Artificial sequence
  SiRNA target sequence
ctccaaacaccttctacctttt

SEQ ID NO: 81908 - DNA, 22 bp, Artificial sequence
  SiRNA target sequence
tccaaacaccttctaccttttt

SEQ ID NO: 81909 - DNA, 22 bp, Artificial sequence
  SiRNA target sequence
ccaaacaccttctaccttttta

SEQ ID NO: 81910 - DNA, 22 bp, Artificial sequence
  SiRNA target sequence
caaacaccttctacctttttac

SEQ ID NO: 81911 - DNA, 22 bp, Artificial sequence
  SiRNA target sequence
aaacaccttctacctttttaca

SEQ ID NO: 81912 - DNA, 22 bp, Artificial sequence
  SiRNA target sequence
aacaccttctacctttttacag

SEQ ID NO: 81913 - DNA, 22 bp, Artificial sequence
  SiRNA target sequence
acaccttctacctttttacagt

SEQ ID NO: 81914 - DNA, 22 bp, Artificial sequence
  SiRNA target sequence
caccttctacctttttacagtc

SEQ ID NO: 81915 - DNA, 22 bp, Artificial sequence
  SiRNA target sequence
accttctacctttttacagtcc

SEQ ID NO: 81916 - DNA, 22 bp, Artificial sequence
  SiRNA target sequence
ccttctacctttttacagtcca

SEQ ID NO: 81917 - DNA, 22 bp, Artificial sequence
  SiRNA target sequence
cttctacctttttacagtccat

SEQ ID NO: 81918 - DNA, 22 bp, Artificial sequence
  SiRNA target sequence
ttctacctttttacagtccata

SEQ ID NO: 81919 - DNA, 22 bp, Artificial sequence
  SiRNA target sequence
tctacctttttacagtccataa

SEQ ID NO: 81920 - DNA, 22 bp, Artificial sequence
  SiRNA target sequence
ctacctttttacagtccataat

SEQ ID NO: 81921 - DNA, 22 bp, Artificial sequence
  SiRNA target sequence
tacctttttacagtccataatg

SEQ ID NO: 81922 - DNA, 22 bp, Artificial sequence
  SiRNA target sequence
acctttttacagtccataatgg

SEQ ID NO: 81923 - DNA, 22 bp, Artificial sequence
  SiRNA target sequence
cctttttacagtccataatggg

SEQ ID NO: 81924 - DNA, 22 bp, Artificial sequence
  SiRNA target sequence
ctttttacagtccataatgggc

SEQ ID NO: 81925 - DNA, 22 bp, Artificial sequence
  SiRNA target sequence
tttttacagtccataatgggct

SEQ ID NO: 81926 - DNA, 22 bp, Artificial sequence
  SiRNA target sequence
ttttacagtccataatgggctt

SEQ ID NO: 81927 - DNA, 22 bp, Artificial sequence
  SiRNA target sequence
tttacagtccataatgggcttt

SEQ ID NO: 81928 - DNA, 22 bp, Artificial sequence
  SiRNA target sequence
ttacagtccataatgggctttc

SEQ ID NO: 81929 - DNA, 22 bp, Artificial sequence
  SiRNA target sequence
tacagtccataatgggctttcc

SEQ ID NO: 81930 - DNA, 22 bp, Artificial sequence
  SiRNA target sequence
acagtccataatgggctttcct

SEQ ID NO: 81931 - DNA, 22 bp, Artificial sequence
  SiRNA target sequence
cagtccataatgggctttccta

SEQ ID NO: 81932 - DNA, 22 bp, Artificial sequence
  SiRNA target sequence
agtccataatgggctttcctaa

SEQ ID NO: 81933 - DNA, 22 bp, Artificial sequence
  SiRNA target sequence
gtccataatgggctttcctaat

SEQ ID NO: 81934 - DNA, 22 bp, Artificial sequence
  SiRNA target sequence
tccataatgggctttcctaatc

SEQ ID NO: 81935 - DNA, 22 bp, Artificial sequence
  SiRNA target sequence
ccataatgggctttcctaatct

SEQ ID NO: 81936 - DNA, 22 bp, Artificial sequence
  SiRNA target sequence
cataatgggctttcctaatctt

SEQ ID NO: 81937 - DNA, 22 bp, Artificial sequence
  SiRNA target sequence
ataatgggctttcctaatcttt

SEQ ID NO: 81938 - DNA, 22 bp, Artificial sequence
  SiRNA target sequence
taatgggctttcctaatctttt

SEQ ID NO: 81939 - DNA, 22 bp, Artificial sequence
  SiRNA target sequence
aatgggctttcctaatctttta

SEQ ID NO: 81940 - DNA, 22 bp, Artificial sequence
  SiRNA target sequence
atgggctttcctaatcttttat

SEQ ID NO: 81941 - DNA, 22 bp, Artificial sequence
  SiRNA target sequence
tgggctttcctaatcttttatt

SEQ ID NO: 81942 - DNA, 22 bp, Artificial sequence
  SiRNA target sequence
gggctttcctaatcttttatta

SEQ ID NO: 81943 - DNA, 22 bp, Artificial sequence
  SiRNA target sequence
ggctttcctaatcttttattaa

SEQ ID NO: 81944 - DNA, 22 bp, Artificial sequence
  SiRNA target sequence
gctttcctaatcttttattaac

SEQ ID NO: 81945 - DNA, 22 bp, Artificial sequence
  SiRNA target sequence
ctttcctaatcttttattaact

SEQ ID NO: 81946 - DNA, 22 bp, Artificial sequence
  SiRNA target sequence
tttcctaatcttttattaacta

SEQ ID NO: 81947 - DNA, 22 bp, Artificial sequence
  SiRNA target sequence
ttcctaatcttttattaactat

SEQ ID NO: 81948 - DNA, 22 bp, Artificial sequence
  SiRNA target sequence
tcctaatcttttattaactatg

SEQ ID NO: 81949 - DNA, 22 bp, Artificial sequence
  SiRNA target sequence
cctaatcttttattaactatgt

SEQ ID NO: 81950 - DNA, 22 bp, Artificial sequence
  SiRNA target sequence
ctaatcttttattaactatgtt

SEQ ID NO: 81951 - DNA, 22 bp, Artificial sequence
  SiRNA target sequence
taatcttttattaactatgtta

SEQ ID NO: 81952 - DNA, 22 bp, Artificial sequence
  SiRNA target sequence
aatcttttattaactatgttat

SEQ ID NO: 81953 - DNA, 22 bp, Artificial sequence
  SiRNA target sequence
atcttttattaactatgttatg

SEQ ID NO: 81954 - DNA, 22 bp, Artificial sequence
  SiRNA target sequence
tcttttattaactatgttatgt

SEQ ID NO: 81955 - DNA, 22 bp, Artificial sequence
  SiRNA target sequence
cttttattaactatgttatgtg

SEQ ID NO: 81956 - DNA, 22 bp, Artificial sequence
  SiRNA target sequence
ttttattaactatgttatgtgc

SEQ ID NO: 81957 - DNA, 22 bp, Artificial sequence
  SiRNA target sequence
tttattaactatgttatgtgct

SEQ ID NO: 81958 - DNA, 22 bp, Artificial sequence
  SiRNA target sequence
ttattaactatgttatgtgctt

SEQ ID NO: 81959 - DNA, 22 bp, Artificial sequence
  SiRNA target sequence
tattaactatgttatgtgcttt

SEQ ID NO: 81960 - DNA, 22 bp, Artificial sequence
  SiRNA target sequence
attaactatgttatgtgcttta

SEQ ID NO: 81961 - DNA, 22 bp, Artificial sequence
  SiRNA target sequence
ttaactatgttatgtgctttac

SEQ ID NO: 81962 - DNA, 22 bp, Artificial sequence
  SiRNA target sequence
taactatgttatgtgctttaca

SEQ ID NO: 81963 - DNA, 22 bp, Artificial sequence
  SiRNA target sequence
aactatgttatgtgctttacat

SEQ ID NO: 81964 - DNA, 22 bp, Artificial sequence
  SiRNA target sequence
actatgttatgtgctttacata

SEQ ID NO: 81965 - DNA, 22 bp, Artificial sequence
  SiRNA target sequence
ctatgttatgtgctttacatag

SEQ ID NO: 81966 - DNA, 22 bp, Artificial sequence
  SiRNA target sequence
tatgttatgtgctttacatagc

SEQ ID NO: 81967 - DNA, 22 bp, Artificial sequence
  SiRNA target sequence
atgttatgtgctttacatagcc

SEQ ID NO: 81968 - DNA, 22 bp, Artificial sequence
  SiRNA target sequence
tgttatgtgctttacatagcca

SEQ ID NO: 81969 - DNA, 22 bp, Artificial sequence
  SiRNA target sequence
gttatgtgctttacatagccac

SEQ ID NO: 81970 - DNA, 22 bp, Artificial sequence
  SiRNA target sequence
ttatgtgctttacatagccact

SEQ ID NO: 81971 - DNA, 22 bp, Artificial sequence
  SiRNA target sequence
tatgtgctttacatagccactg

SEQ ID NO: 81972 - DNA, 22 bp, Artificial sequence
  SiRNA target sequence
atgtgctttacatagccactgg

SEQ ID NO: 81973 - DNA, 22 bp, Artificial sequence
  SiRNA target sequence
tgtgctttacatagccactgga

SEQ ID NO: 81974 - DNA, 22 bp, Artificial sequence
  SiRNA target sequence
gtgctttacatagccactggac

SEQ ID NO: 81975 - DNA, 22 bp, Artificial sequence
  SiRNA target sequence
tgctttacatagccactggaca

SEQ ID NO: 81976 - DNA, 22 bp, Artificial sequence
  SiRNA target sequence
gctttacatagccactggacaa

SEQ ID NO: 81977 - DNA, 22 bp, Artificial sequence
  SiRNA target sequence
ctttacatagccactggacaaa

SEQ ID NO: 81978 - DNA, 22 bp, Artificial sequence
  SiRNA target sequence
tttacatagccactggacaaat

SEQ ID NO: 81979 - DNA, 22 bp, Artificial sequence
  SiRNA target sequence
ttacatagccactggacaaatt

SEQ ID NO: 81980 - DNA, 22 bp, Artificial sequence
  SiRNA target sequence
tacatagccactggacaaattc

SEQ ID NO: 81981 - DNA, 22 bp, Artificial sequence
  SiRNA target sequence
acatagccactggacaaattcg

SEQ ID NO: 81982 - DNA, 22 bp, Artificial sequence
  SiRNA target sequence
catagccactggacaaattcgt

SEQ ID NO: 81983 - DNA, 22 bp, Artificial sequence
  SiRNA target sequence
atagccactggacaaattcgtc

SEQ ID NO: 81984 - DNA, 22 bp, Artificial sequence
  SiRNA target sequence
tagccactggacaaattcgtca

SEQ ID NO: 81985 - DNA, 22 bp, Artificial sequence
  SiRNA target sequence
agccactggacaaattcgtcat

SEQ ID NO: 81986 - DNA, 22 bp, Artificial sequence
  SiRNA target sequence
gccactggacaaattcgtcatg

SEQ ID NO: 81987 - DNA, 22 bp, Artificial sequence
  SiRNA target sequence
ccactggacaaattcgtcatgt

SEQ ID NO: 81988 - DNA, 22 bp, Artificial sequence
  SiRNA target sequence
cactggacaaattcgtcatgtg

SEQ ID NO: 81989 - DNA, 22 bp, Artificial sequence
  SiRNA target sequence
actggacaaattcgtcatgtgt

SEQ ID NO: 81990 - DNA, 22 bp, Artificial sequence
  SiRNA target sequence
ctggacaaattcgtcatgtgtg

SEQ ID NO: 81991 - DNA, 22 bp, Artificial sequence
  SiRNA target sequence
tggacaaattcgtcatgtgtgg

SEQ ID NO: 81992 - DNA, 22 bp, Artificial sequence
  SiRNA target sequence
ggacaaattcgtcatgtgtggc

SEQ ID NO: 81993 - DNA, 22 bp, Artificial sequence
  SiRNA target sequence
gacaaattcgtcatgtgtggca

SEQ ID NO: 81994 - DNA, 22 bp, Artificial sequence
  SiRNA target sequence
acaaattcgtcatgtgtggcaa

SEQ ID NO: 81995 - DNA, 22 bp, Artificial sequence
  SiRNA target sequence
caaattcgtcatgtgtggcaac

SEQ ID NO: 81996 - DNA, 22 bp, Artificial sequence
  SiRNA target sequence
aaattcgtcatgtgtggcaact

SEQ ID NO: 81997 - DNA, 22 bp, Artificial sequence
  SiRNA target sequence
aattcgtcatgtgtggcaactt

SEQ ID NO: 81998 - DNA, 22 bp, Artificial sequence
  SiRNA target sequence
attcgtcatgtgtggcaacttg

SEQ ID NO: 81999 - DNA, 22 bp, Artificial sequence
  SiRNA target sequence
ttcgtcatgtgtggcaacttgt

SEQ ID NO: 82000 - DNA, 22 bp, Artificial sequence
  SiRNA target sequence
tcgtcatgtgtggcaacttgtg

SEQ ID NO: 82001 - DNA, 22 bp, Artificial sequence
  SiRNA target sequence
cgtcatgtgtggcaacttgtgg

SEQ ID NO: 82002 - DNA, 22 bp, Artificial sequence
  SiRNA target sequence
gtcatgtgtggcaacttgtgga

SEQ ID NO: 82003 - DNA, 22 bp, Artificial sequence
  SiRNA target sequence
tcatgtgtggcaacttgtggag

SEQ ID NO: 82004 - DNA, 22 bp, Artificial sequence
  SiRNA target sequence
catgtgtggcaacttgtggagg

SEQ ID NO: 82005 - DNA, 22 bp, Artificial sequence
  SiRNA target sequence
atgtgtggcaacttgtggagga

SEQ ID NO: 82006 - DNA, 22 bp, Artificial sequence
  SiRNA target sequence
tgtgtggcaacttgtggaggat

SEQ ID NO: 82007 - DNA, 22 bp, Artificial sequence
  SiRNA target sequence
gtgtggcaacttgtggaggatt

SEQ ID NO: 82008 - DNA, 22 bp, Artificial sequence
  SiRNA target sequence
tgtggcaacttgtggaggattt

SEQ ID NO: 82009 - DNA, 22 bp, Artificial sequence
  SiRNA target sequence
gtggcaacttgtggaggattta

SEQ ID NO: 82010 - DNA, 22 bp, Artificial sequence
  SiRNA target sequence
tggcaacttgtggaggatttaa

SEQ ID NO: 82011 - DNA, 22 bp, Artificial sequence
  SiRNA target sequence
ggcaacttgtggaggatttaag

SEQ ID NO: 82012 - DNA, 22 bp, Artificial sequence
  SiRNA target sequence
gcaacttgtggaggatttaagc

SEQ ID NO: 82013 - DNA, 22 bp, Artificial sequence
  SiRNA target sequence
caacttgtggaggatttaagct

SEQ ID NO: 82014 - DNA, 22 bp, Artificial sequence
  SiRNA target sequence
aacttgtggaggatttaagctt

SEQ ID NO: 82015 - DNA, 22 bp, Artificial sequence
  SiRNA target sequence
acttgtggaggatttaagctta

SEQ ID NO: 82016 - DNA, 22 bp, Artificial sequence
  SiRNA target sequence
cttgtggaggatttaagcttaa

SEQ ID NO: 82017 - DNA, 22 bp, Artificial sequence
  SiRNA target sequence
ttgtggaggatttaagcttaac

SEQ ID NO: 82018 - DNA, 22 bp, Artificial sequence
  SiRNA target sequence
tgtggaggatttaagcttaaca

SEQ ID NO: 82019 - DNA, 22 bp, Artificial sequence
  SiRNA target sequence
gtggaggatttaagcttaacag

SEQ ID NO: 82020 - DNA, 22 bp, Artificial sequence
  SiRNA target sequence
tggaggatttaagcttaacagt

SEQ ID NO: 82021 - DNA, 22 bp, Artificial sequence
  SiRNA target sequence
ggaggatttaagcttaacagtc

SEQ ID NO: 82022 - DNA, 22 bp, Artificial sequence
  SiRNA target sequence
gaggatttaagcttaacagtct

SEQ ID NO: 82023 - DNA, 22 bp, Artificial sequence
  SiRNA target sequence
aggatttaagcttaacagtctt

SEQ ID NO: 82024 - DNA, 22 bp, Artificial sequence
  SiRNA target sequence
ggatttaagcttaacagtcttt

SEQ ID NO: 82025 - DNA, 22 bp, Artificial sequence
  SiRNA target sequence
gatttaagcttaacagtctttg

SEQ ID NO: 82026 - DNA, 22 bp, Artificial sequence
  SiRNA target sequence
atttaagcttaacagtctttga

SEQ ID NO: 82027 - DNA, 22 bp, Artificial sequence
  SiRNA target sequence
tttaagcttaacagtctttgaa

SEQ ID NO: 82028 - DNA, 22 bp, Artificial sequence
  SiRNA target sequence
ttaagcttaacagtctttgaaa

SEQ ID NO: 82029 - DNA, 22 bp, Artificial sequence
  SiRNA target sequence
taagcttaacagtctttgaaaa

SEQ ID NO: 82030 - DNA, 22 bp, Artificial sequence
  SiRNA target sequence
aagcttaacagtctttgaaaat

SEQ ID NO: 82031 - DNA, 22 bp, Artificial sequence
  SiRNA target sequence
agcttaacagtctttgaaaatg

SEQ ID NO: 82032 - DNA, 22 bp, Artificial sequence
  SiRNA target sequence
gcttaacagtctttgaaaatgt

SEQ ID NO: 82033 - DNA, 22 bp, Artificial sequence
  SiRNA target sequence
cttaacagtctttgaaaatgtc

SEQ ID NO: 82034 - DNA, 22 bp, Artificial sequence
  SiRNA target sequence
ttaacagtctttgaaaatgtcc

SEQ ID NO: 82035 - DNA, 22 bp, Artificial sequence
  SiRNA target sequence
taacagtctttgaaaatgtcca

SEQ ID NO: 82036 - DNA, 22 bp, Artificial sequence
  SiRNA target sequence
aacagtctttgaaaatgtccac

SEQ ID NO: 82037 - DNA, 22 bp, Artificial sequence
  SiRNA target sequence
acagtctttgaaaatgtccaca

SEQ ID NO: 82038 - DNA, 22 bp, Artificial sequence
  SiRNA target sequence
cagtctttgaaaatgtccacaa

SEQ ID NO: 82039 - DNA, 22 bp, Artificial sequence
  SiRNA target sequence
agtctttgaaaatgtccacaac

SEQ ID NO: 82040 - DNA, 22 bp, Artificial sequence
  SiRNA target sequence
gtctttgaaaatgtccacaaca

SEQ ID NO: 82041 - DNA, 22 bp, Artificial sequence
  SiRNA target sequence
tctttgaaaatgtccacaacat

SEQ ID NO: 82042 - DNA, 22 bp, Artificial sequence
  SiRNA target sequence
ctttgaaaatgtccacaacatt

SEQ ID NO: 82043 - DNA, 22 bp, Artificial sequence
  SiRNA target sequence
tttgaaaatgtccacaacattc

SEQ ID NO: 82044 - DNA, 22 bp, Artificial sequence
  SiRNA target sequence
ttgaaaatgtccacaacattct

SEQ ID NO: 82045 - DNA, 22 bp, Artificial sequence
  SiRNA target sequence
tgaaaatgtccacaacattctg

SEQ ID NO: 82046 - DNA, 22 bp, Artificial sequence
  SiRNA target sequence
gaaaatgtccacaacattctgc

SEQ ID NO: 82047 - DNA, 22 bp, Artificial sequence
  SiRNA target sequence
aaaatgtccacaacattctgca

SEQ ID NO: 82048 - DNA, 22 bp, Artificial sequence
  SiRNA target sequence
aaatgtccacaacattctgcac

SEQ ID NO: 82049 - DNA, 22 bp, Artificial sequence
  SiRNA target sequence
aatgtccacaacattctgcaca

SEQ ID NO: 82050 - DNA, 22 bp, Artificial sequence
  SiRNA target sequence
atgtccacaacattctgcacag

SEQ ID NO: 82051 - DNA, 22 bp, Artificial sequence
  SiRNA target sequence
tgtccacaacattctgcacagg

SEQ ID NO: 82052 - DNA, 22 bp, Artificial sequence
  SiRNA target sequence
gtccacaacattctgcacaggg

SEQ ID NO: 82053 - DNA, 22 bp, Artificial sequence
  SiRNA target sequence
tccacaacattctgcacagggg

SEQ ID NO: 82054 - DNA, 22 bp, Artificial sequence
  SiRNA target sequence
ccacaacattctgcacagggga

SEQ ID NO: 82055 - DNA, 22 bp, Artificial sequence
  SiRNA target sequence
cacaacattctgcacaggggaa

SEQ ID NO: 82056 - DNA, 22 bp, Artificial sequence
  SiRNA target sequence
acaacattctgcacaggggaaa

SEQ ID NO: 82057 - DNA, 22 bp, Artificial sequence
  SiRNA target sequence
caacattctgcacaggggaaaa

SEQ ID NO: 82058 - DNA, 22 bp, Artificial sequence
  SiRNA target sequence
aacattctgcacaggggaaaag

SEQ ID NO: 82059 - DNA, 22 bp, Artificial sequence
  SiRNA target sequence
acattctgcacaggggaaaaga

SEQ ID NO: 82060 - DNA, 22 bp, Artificial sequence
  SiRNA target sequence
cattctgcacaggggaaaagag

SEQ ID NO: 82061 - DNA, 22 bp, Artificial sequence
  SiRNA target sequence
attctgcacaggggaaaagaga

SEQ ID NO: 82062 - DNA, 22 bp, Artificial sequence
  SiRNA target sequence
ttctgcacaggggaaaagagat

SEQ ID NO: 82063 - DNA, 22 bp, Artificial sequence
  SiRNA target sequence
tctgcacaggggaaaagagatg

SEQ ID NO: 82064 - DNA, 22 bp, Artificial sequence
  SiRNA target sequence
ctgcacaggggaaaagagatga

SEQ ID NO: 82065 - DNA, 22 bp, Artificial sequence
  SiRNA target sequence
tgcacaggggaaaagagatgat

SEQ ID NO: 82066 - DNA, 22 bp, Artificial sequence
  SiRNA target sequence
gcacaggggaaaagagatgata

SEQ ID NO: 82067 - DNA, 22 bp, Artificial sequence
  SiRNA target sequence
cacaggggaaaagagatgataa

SEQ ID NO: 82068 - DNA, 22 bp, Artificial sequence
  SiRNA target sequence
acaggggaaaagagatgataaa

SEQ ID NO: 82069 - DNA, 22 bp, Artificial sequence
  SiRNA target sequence
caggggaaaagagatgataaaa

SEQ ID NO: 82070 - DNA, 22 bp, Artificial sequence
  SiRNA target sequence
aggggaaaagagatgataaaag

SEQ ID NO: 82071 - DNA, 22 bp, Artificial sequence
  SiRNA target sequence
ggggaaaagagatgataaaagg

SEQ ID NO: 82072 - DNA, 22 bp, Artificial sequence
  SiRNA target sequence
gggaaaagagatgataaaaggt

SEQ ID NO: 82073 - DNA, 22 bp, Artificial sequence
  SiRNA target sequence
ggaaaagagatgataaaaggta

SEQ ID NO: 82074 - DNA, 22 bp, Artificial sequence
  SiRNA target sequence
gaaaagagatgataaaaggtaa

SEQ ID NO: 82075 - DNA, 22 bp, Artificial sequence
  SiRNA target sequence
aaaagagatgataaaaggtaaa

SEQ ID NO: 82076 - DNA, 22 bp, Artificial sequence
  SiRNA target sequence
aaagagatgataaaaggtaaat

SEQ ID NO: 82077 - DNA, 22 bp, Artificial sequence
  SiRNA target sequence
aagagatgataaaaggtaaata

SEQ ID NO: 82078 - DNA, 22 bp, Artificial sequence
  SiRNA target sequence
agagatgataaaaggtaaataa

SEQ ID NO: 82079 - DNA, 22 bp, Artificial sequence
  SiRNA target sequence
gagatgataaaaggtaaataaa

SEQ ID NO: 82080 - DNA, 22 bp, Artificial sequence
  SiRNA target sequence
agatgataaaaggtaaataaat

SEQ ID NO: 82081 - DNA, 22 bp, Artificial sequence
  SiRNA target sequence
gatgataaaaggtaaataaatt

SEQ ID NO: 82082 - DNA, 22 bp, Artificial sequence
  SiRNA target sequence
atgataaaaggtaaataaattg

SEQ ID NO: 82083 - DNA, 22 bp, Artificial sequence
  SiRNA target sequence
tgataaaaggtaaataaattga

SEQ ID NO: 82084 - DNA, 22 bp, Artificial sequence
  SiRNA target sequence
gataaaaggtaaataaattgaa

SEQ ID NO: 82085 - DNA, 22 bp, Artificial sequence
  SiRNA target sequence
ataaaaggtaaataaattgaag

SEQ ID NO: 82086 - DNA, 22 bp, Artificial sequence
  SiRNA target sequence
taaaaggtaaataaattgaagt

SEQ ID NO: 82087 - DNA, 22 bp, Artificial sequence
  SiRNA target sequence
aaaaggtaaataaattgaagtg

SEQ ID NO: 82088 - DNA, 22 bp, Artificial sequence
  SiRNA target sequence
aaaggtaaataaattgaagtgt

SEQ ID NO: 82089 - DNA, 22 bp, Artificial sequence
  SiRNA target sequence
aaggtaaataaattgaagtgta

SEQ ID NO: 82090 - DNA, 22 bp, Artificial sequence
  SiRNA target sequence
aggtaaataaattgaagtgtat

SEQ ID NO: 82091 - DNA, 22 bp, Artificial sequence
  SiRNA target sequence
ggtaaataaattgaagtgtatc

SEQ ID NO: 82092 - DNA, 22 bp, Artificial sequence
  SiRNA target sequence
gtaaataaattgaagtgtatct

SEQ ID NO: 82093 - DNA, 22 bp, Artificial sequence
  SiRNA target sequence
taaataaattgaagtgtatctt

SEQ ID NO: 82094 - DNA, 22 bp, Artificial sequence
  SiRNA target sequence
aaataaattgaagtgtatcttt

SEQ ID NO: 82095 - DNA, 22 bp, Artificial sequence
  SiRNA target sequence
aataaattgaagtgtatctttt

SEQ ID NO: 82096 - DNA, 22 bp, Artificial sequence
  SiRNA target sequence
ataaattgaagtgtatcttttt

SEQ ID NO: 82097 - DNA, 22 bp, Artificial sequence
  SiRNA target sequence
taaattgaagtgtatctttttt

SEQ ID NO: 82098 - DNA, 22 bp, Artificial sequence
  SiRNA target sequence
aaattgaagtgtatctttttta

SEQ ID NO: 82099 - DNA, 22 bp, Artificial sequence
  SiRNA target sequence
aattgaagtgtatcttttttat

SEQ ID NO: 82100 - DNA, 22 bp, Artificial sequence
  SiRNA target sequence
attgaagtgtatcttttttatg

SEQ ID NO: 82101 - DNA, 22 bp, Artificial sequence
  SiRNA target sequence
ttgaagtgtatcttttttatgt

SEQ ID NO: 82102 - DNA, 22 bp, Artificial sequence
  SiRNA target sequence
tgaagtgtatcttttttatgtt

SEQ ID NO: 82103 - DNA, 22 bp, Artificial sequence
  SiRNA target sequence
gaagtgtatcttttttatgttg

SEQ ID NO: 82104 - DNA, 22 bp, Artificial sequence
  SiRNA target sequence
aagtgtatcttttttatgttgt

SEQ ID NO: 82105 - DNA, 22 bp, Artificial sequence
  SiRNA target sequence
agtgtatcttttttatgttgta

SEQ ID NO: 82106 - DNA, 22 bp, Artificial sequence
  SiRNA target sequence
gtgtatcttttttatgttgtac

SEQ ID NO: 82107 - DNA, 22 bp, Artificial sequence
  SiRNA target sequence
tgtatcttttttatgttgtact

SEQ ID NO: 82108 - DNA, 22 bp, Artificial sequence
  SiRNA target sequence
gtatcttttttatgttgtactg

SEQ ID NO: 82109 - DNA, 22 bp, Artificial sequence
  SiRNA target sequence
tatcttttttatgttgtactgt

SEQ ID NO: 82110 - DNA, 22 bp, Artificial sequence
  SiRNA target sequence
atcttttttatgttgtactgta

SEQ ID NO: 82111 - DNA, 22 bp, Artificial sequence
  SiRNA target sequence
tcttttttatgttgtactgtag

SEQ ID NO: 82112 - DNA, 22 bp, Artificial sequence
  SiRNA target sequence
cttttttatgttgtactgtagg

SEQ ID NO: 82113 - DNA, 22 bp, Artificial sequence
  SiRNA target sequence
ttttttatgttgtactgtagga

SEQ ID NO: 82114 - DNA, 22 bp, Artificial sequence
  SiRNA target sequence
tttttatgttgtactgtaggaa

SEQ ID NO: 82115 - DNA, 22 bp, Artificial sequence
  SiRNA target sequence
ttttatgttgtactgtaggaaa

SEQ ID NO: 82116 - DNA, 22 bp, Artificial sequence
  SiRNA target sequence
tttatgttgtactgtaggaaat

SEQ ID NO: 82117 - DNA, 22 bp, Artificial sequence
  SiRNA target sequence
ttatgttgtactgtaggaaatg

SEQ ID NO: 82118 - DNA, 22 bp, Artificial sequence
  SiRNA target sequence
tatgttgtactgtaggaaatgc

SEQ ID NO: 82119 - DNA, 22 bp, Artificial sequence
  SiRNA target sequence
atgttgtactgtaggaaatgca

SEQ ID NO: 82120 - DNA, 22 bp, Artificial sequence
  SiRNA target sequence
tgttgtactgtaggaaatgcag

SEQ ID NO: 82121 - DNA, 22 bp, Artificial sequence
  SiRNA target sequence
gttgtactgtaggaaatgcagg

SEQ ID NO: 82122 - DNA, 22 bp, Artificial sequence
  SiRNA target sequence
ttgtactgtaggaaatgcagga

SEQ ID NO: 82123 - DNA, 22 bp, Artificial sequence
  SiRNA target sequence
tgtactgtaggaaatgcaggat

SEQ ID NO: 82124 - DNA, 22 bp, Artificial sequence
  SiRNA target sequence
gtactgtaggaaatgcaggata

SEQ ID NO: 82125 - DNA, 22 bp, Artificial sequence
  SiRNA target sequence
tactgtaggaaatgcaggataa

SEQ ID NO: 82126 - DNA, 22 bp, Artificial sequence
  SiRNA target sequence
actgtaggaaatgcaggataaa

SEQ ID NO: 82127 - DNA, 22 bp, Artificial sequence
  SiRNA target sequence
ctgtaggaaatgcaggataaac

SEQ ID NO: 82128 - DNA, 22 bp, Artificial sequence
  SiRNA target sequence
tgtaggaaatgcaggataaaca

SEQ ID NO: 82129 - DNA, 22 bp, Artificial sequence
  SiRNA target sequence
gtaggaaatgcaggataaacag

SEQ ID NO: 82130 - DNA, 22 bp, Artificial sequence
  SiRNA target sequence
taggaaatgcaggataaacagc

SEQ ID NO: 82131 - DNA, 22 bp, Artificial sequence
  SiRNA target sequence
aggaaatgcaggataaacagct

SEQ ID NO: 82132 - DNA, 22 bp, Artificial sequence
  SiRNA target sequence
ggaaatgcaggataaacagctg

SEQ ID NO: 82133 - DNA, 22 bp, Artificial sequence
  SiRNA target sequence
gaaatgcaggataaacagctgc

SEQ ID NO: 82134 - DNA, 22 bp, Artificial sequence
  SiRNA target sequence
aaatgcaggataaacagctgcc

SEQ ID NO: 82135 - DNA, 22 bp, Artificial sequence
  SiRNA target sequence
aatgcaggataaacagctgcca

SEQ ID NO: 82136 - DNA, 22 bp, Artificial sequence
  SiRNA target sequence
atgcaggataaacagctgccat

SEQ ID NO: 82137 - DNA, 22 bp, Artificial sequence
  SiRNA target sequence
tgcaggataaacagctgccatg

SEQ ID NO: 82138 - DNA, 22 bp, Artificial sequence
  SiRNA target sequence
gcaggataaacagctgccatgg

SEQ ID NO: 82139 - DNA, 22 bp, Artificial sequence
  SiRNA target sequence
caggataaacagctgccatggt

SEQ ID NO: 82140 - DNA, 22 bp, Artificial sequence
  SiRNA target sequence
aggataaacagctgccatggta

SEQ ID NO: 82141 - DNA, 22 bp, Artificial sequence
  SiRNA target sequence
ggataaacagctgccatggtat

SEQ ID NO: 82142 - DNA, 22 bp, Artificial sequence
  SiRNA target sequence
gataaacagctgccatggtatg

SEQ ID NO: 82143 - DNA, 22 bp, Artificial sequence
  SiRNA target sequence
ataaacagctgccatggtatgt

SEQ ID NO: 82144 - DNA, 22 bp, Artificial sequence
  SiRNA target sequence
taaacagctgccatggtatgta

SEQ ID NO: 82145 - DNA, 22 bp, Artificial sequence
  SiRNA target sequence
aaacagctgccatggtatgtaa

SEQ ID NO: 82146 - DNA, 22 bp, Artificial sequence
  SiRNA target sequence
aacagctgccatggtatgtaaa

SEQ ID NO: 82147 - DNA, 22 bp, Artificial sequence
  SiRNA target sequence
acagctgccatggtatgtaaaa

SEQ ID NO: 82148 - DNA, 22 bp, Artificial sequence
  SiRNA target sequence
cagctgccatggtatgtaaaag

SEQ ID NO: 82149 - DNA, 22 bp, Artificial sequence
  SiRNA target sequence
agctgccatggtatgtaaaagt

SEQ ID NO: 82150 - DNA, 22 bp, Artificial sequence
  SiRNA target sequence
gctgccatggtatgtaaaagtg

SEQ ID NO: 82151 - DNA, 22 bp, Artificial sequence
  SiRNA target sequence
ctgccatggtatgtaaaagtgt

SEQ ID NO: 82152 - DNA, 22 bp, Artificial sequence
  SiRNA target sequence
tgccatggtatgtaaaagtgtc

SEQ ID NO: 82153 - DNA, 22 bp, Artificial sequence
  SiRNA target sequence
gccatggtatgtaaaagtgtcc

SEQ ID NO: 82154 - DNA, 22 bp, Artificial sequence
  SiRNA target sequence
ccatggtatgtaaaagtgtcca

SEQ ID NO: 82155 - DNA, 22 bp, Artificial sequence
  SiRNA target sequence
catggtatgtaaaagtgtccat

SEQ ID NO: 82156 - DNA, 22 bp, Artificial sequence
  SiRNA target sequence
atggtatgtaaaagtgtccatg

SEQ ID NO: 82157 - DNA, 22 bp, Artificial sequence
  SiRNA target sequence
tggtatgtaaaagtgtccatgt

SEQ ID NO: 82158 - DNA, 22 bp, Artificial sequence
  SiRNA target sequence
ggtatgtaaaagtgtccatgtt

SEQ ID NO: 82159 - DNA, 22 bp, Artificial sequence
  SiRNA target sequence
gtatgtaaaagtgtccatgttg

SEQ ID NO: 82160 - DNA, 22 bp, Artificial sequence
  SiRNA target sequence
tatgtaaaagtgtccatgttgc

SEQ ID NO: 82161 - DNA, 22 bp, Artificial sequence
  SiRNA target sequence
atgtaaaagtgtccatgttgct

SEQ ID NO: 82162 - DNA, 22 bp, Artificial sequence
  SiRNA target sequence
tgtaaaagtgtccatgttgctc

SEQ ID NO: 82163 - DNA, 22 bp, Artificial sequence
  SiRNA target sequence
gtaaaagtgtccatgttgctct

SEQ ID NO: 82164 - DNA, 22 bp, Artificial sequence
  SiRNA target sequence
taaaagtgtccatgttgctctc

SEQ ID NO: 82165 - DNA, 22 bp, Artificial sequence
  SiRNA target sequence
aaaagtgtccatgttgctctcc

SEQ ID NO: 82166 - DNA, 22 bp, Artificial sequence
  SiRNA target sequence
aaagtgtccatgttgctctccc

SEQ ID NO: 82167 - DNA, 22 bp, Artificial sequence
  SiRNA target sequence
aagtgtccatgttgctctcccc

SEQ ID NO: 82168 - DNA, 22 bp, Artificial sequence
  SiRNA target sequence
agtgtccatgttgctctcccca

SEQ ID NO: 82169 - DNA, 22 bp, Artificial sequence
  SiRNA target sequence
gtgtccatgttgctctccccaa

SEQ ID NO: 82170 - DNA, 22 bp, Artificial sequence
  SiRNA target sequence
tgtccatgttgctctccccaat

SEQ ID NO: 82171 - DNA, 22 bp, Artificial sequence
  SiRNA target sequence
gtccatgttgctctccccaatc

SEQ ID NO: 82172 - DNA, 22 bp, Artificial sequence
  SiRNA target sequence
tccatgttgctctccccaatct

SEQ ID NO: 82173 - DNA, 22 bp, Artificial sequence
  SiRNA target sequence
ccatgttgctctccccaatcta

SEQ ID NO: 82174 - DNA, 22 bp, Artificial sequence
  SiRNA target sequence
catgttgctctccccaatctat

SEQ ID NO: 82175 - DNA, 22 bp, Artificial sequence
  SiRNA target sequence
atgttgctctccccaatctatc

SEQ ID NO: 82176 - DNA, 22 bp, Artificial sequence
  SiRNA target sequence
tgttgctctccccaatctatct

SEQ ID NO: 82177 - DNA, 22 bp, Artificial sequence
  SiRNA target sequence
gttgctctccccaatctatctt

SEQ ID NO: 82178 - DNA, 22 bp, Artificial sequence
  SiRNA target sequence
ttgctctccccaatctatcttt

SEQ ID NO: 82179 - DNA, 22 bp, Artificial sequence
  SiRNA target sequence
tgctctccccaatctatcttta

SEQ ID NO: 82180 - DNA, 22 bp, Artificial sequence
  SiRNA target sequence
gctctccccaatctatctttaa

SEQ ID NO: 82181 - DNA, 22 bp, Artificial sequence
  SiRNA target sequence
ctctccccaatctatctttaac

SEQ ID NO: 82182 - DNA, 22 bp, Artificial sequence
  SiRNA target sequence
tctccccaatctatctttaact

SEQ ID NO: 82183 - DNA, 22 bp, Artificial sequence
  SiRNA target sequence
ctccccaatctatctttaactt

SEQ ID NO: 82184 - DNA, 22 bp, Artificial sequence
  SiRNA target sequence
tccccaatctatctttaacttc

SEQ ID NO: 82185 - DNA, 22 bp, Artificial sequence
  SiRNA target sequence
ccccaatctatctttaacttcc

SEQ ID NO: 82186 - DNA, 22 bp, Artificial sequence
  SiRNA target sequence
cccaatctatctttaacttcct

SEQ ID NO: 82187 - DNA, 22 bp, Artificial sequence
  SiRNA target sequence
ccaatctatctttaacttcctt

SEQ ID NO: 82188 - DNA, 22 bp, Artificial sequence
  SiRNA target sequence
caatctatctttaacttcctta

SEQ ID NO: 82189 - DNA, 22 bp, Artificial sequence
  SiRNA target sequence
aatctatctttaacttccttat

SEQ ID NO: 82190 - DNA, 22 bp, Artificial sequence
  SiRNA target sequence
atctatctttaacttccttatt

SEQ ID NO: 82191 - DNA, 22 bp, Artificial sequence
  SiRNA target sequence
tctatctttaacttccttattt

SEQ ID NO: 82192 - DNA, 22 bp, Artificial sequence
  SiRNA target sequence
ctatctttaacttccttatttg

SEQ ID NO: 82193 - DNA, 22 bp, Artificial sequence
  SiRNA target sequence
tatctttaacttccttatttgt

SEQ ID NO: 82194 - DNA, 22 bp, Artificial sequence
  SiRNA target sequence
atctttaacttccttatttgtt

SEQ ID NO: 82195 - DNA, 22 bp, Artificial sequence
  SiRNA target sequence
tctttaacttccttatttgtta

SEQ ID NO: 82196 - DNA, 22 bp, Artificial sequence
  SiRNA target sequence
ctttaacttccttatttgttaa

SEQ ID NO: 82197 - DNA, 22 bp, Artificial sequence
  SiRNA target sequence
tttaacttccttatttgttaat

SEQ ID NO: 82198 - DNA, 22 bp, Artificial sequence
  SiRNA target sequence
ttaacttccttatttgttaatt

SEQ ID NO: 82199 - DNA, 22 bp, Artificial sequence
  SiRNA target sequence
taacttccttatttgttaattt

SEQ ID NO: 82200 - DNA, 22 bp, Artificial sequence
  SiRNA target sequence
aacttccttatttgttaatttt

SEQ ID NO: 82201 - DNA, 22 bp, Artificial sequence
  SiRNA target sequence
acttccttatttgttaattttt

SEQ ID NO: 82202 - DNA, 22 bp, Artificial sequence
  SiRNA target sequence
cttccttatttgttaatttttg

SEQ ID NO: 82203 - DNA, 22 bp, Artificial sequence
  SiRNA target sequence
ttccttatttgttaatttttga

SEQ ID NO: 82204 - DNA, 22 bp, Artificial sequence
  SiRNA target sequence
tccttatttgttaatttttgat

SEQ ID NO: 82205 - DNA, 22 bp, Artificial sequence
  SiRNA target sequence
ccttatttgttaatttttgatt

SEQ ID NO: 82206 - DNA, 22 bp, Artificial sequence
  SiRNA target sequence
cttatttgttaatttttgatta

SEQ ID NO: 82207 - DNA, 22 bp, Artificial sequence
  SiRNA target sequence
ttatttgttaatttttgattat

SEQ ID NO: 82208 - DNA, 22 bp, Artificial sequence
  SiRNA target sequence
tatttgttaatttttgattatg

SEQ ID NO: 82209 - DNA, 22 bp, Artificial sequence
  SiRNA target sequence
atttgttaatttttgattatga

SEQ ID NO: 82210 - DNA, 22 bp, Artificial sequence
  SiRNA target sequence
tttgttaatttttgattatgaa

SEQ ID NO: 82211 - DNA, 22 bp, Artificial sequence
  SiRNA target sequence
ttgttaatttttgattatgaat

SEQ ID NO: 82212 - DNA, 22 bp, Artificial sequence
  SiRNA target sequence
tgttaatttttgattatgaatt

SEQ ID NO: 82213 - DNA, 22 bp, Artificial sequence
  SiRNA target sequence
gttaatttttgattatgaatta

SEQ ID NO: 82214 - DNA, 22 bp, Artificial sequence
  SiRNA target sequence
ttaatttttgattatgaattag

SEQ ID NO: 82215 - DNA, 22 bp, Artificial sequence
  SiRNA target sequence
taatttttgattatgaattaga

SEQ ID NO: 82216 - DNA, 22 bp, Artificial sequence
  SiRNA target sequence
aatttttgattatgaattagac

SEQ ID NO: 82217 - DNA, 22 bp, Artificial sequence
  SiRNA target sequence
atttttgattatgaattagacc

SEQ ID NO: 82218 - DNA, 22 bp, Artificial sequence
  SiRNA target sequence
tttttgattatgaattagacct

SEQ ID NO: 82219 - DNA, 22 bp, Artificial sequence
  SiRNA target sequence
ttttgattatgaattagaccta

SEQ ID NO: 82220 - DNA, 22 bp, Artificial sequence
  SiRNA target sequence
tttgattatgaattagacctaa

SEQ ID NO: 82221 - DNA, 22 bp, Artificial sequence
  SiRNA target sequence
ttgattatgaattagacctaat

SEQ ID NO: 82222 - DNA, 22 bp, Artificial sequence
  SiRNA target sequence
tgattatgaattagacctaatt

SEQ ID NO: 82223 - DNA, 22 bp, Artificial sequence
  SiRNA target sequence
gattatgaattagacctaattc

SEQ ID NO: 82224 - DNA, 22 bp, Artificial sequence
  SiRNA target sequence
attatgaattagacctaattca

SEQ ID NO: 82225 - DNA, 22 bp, Artificial sequence
  SiRNA target sequence
ttatgaattagacctaattcac

SEQ ID NO: 82226 - DNA, 22 bp, Artificial sequence
  SiRNA target sequence
tatgaattagacctaattcacc

SEQ ID NO: 82227 - DNA, 22 bp, Artificial sequence
  SiRNA target sequence
atgaattagacctaattcacct

SEQ ID NO: 82228 - DNA, 22 bp, Artificial sequence
  SiRNA target sequence
tgaattagacctaattcaccta

SEQ ID NO: 82229 - DNA, 22 bp, Artificial sequence
  SiRNA target sequence
gaattagacctaattcacctac

SEQ ID NO: 82230 - DNA, 22 bp, Artificial sequence
  SiRNA target sequence
aattagacctaattcacctact

SEQ ID NO: 82231 - DNA, 22 bp, Artificial sequence
  SiRNA target sequence
attagacctaattcacctactt

SEQ ID NO: 82232 - DNA, 22 bp, Artificial sequence
  SiRNA target sequence
ttagacctaattcacctacttt

SEQ ID NO: 82233 - DNA, 22 bp, Artificial sequence
  SiRNA target sequence
tagacctaattcacctactttt

SEQ ID NO: 82234 - DNA, 22 bp, Artificial sequence
  SiRNA target sequence
agacctaattcacctacttttg

SEQ ID NO: 82235 - DNA, 22 bp, Artificial sequence
  SiRNA target sequence
gacctaattcacctacttttgg

SEQ ID NO: 82236 - DNA, 22 bp, Artificial sequence
  SiRNA target sequence
acctaattcacctacttttggt

SEQ ID NO: 82237 - DNA, 22 bp, Artificial sequence
  SiRNA target sequence
cctaattcacctacttttggtg

SEQ ID NO: 82238 - DNA, 22 bp, Artificial sequence
  SiRNA target sequence
ctaattcacctacttttggtga

SEQ ID NO: 82239 - DNA, 22 bp, Artificial sequence
  SiRNA target sequence
taattcacctacttttggtgaa

SEQ ID NO: 82240 - DNA, 22 bp, Artificial sequence
  SiRNA target sequence
aattcacctacttttggtgaaa

SEQ ID NO: 82241 - DNA, 22 bp, Artificial sequence
  SiRNA target sequence
attcacctacttttggtgaaat

SEQ ID NO: 82242 - DNA, 22 bp, Artificial sequence
  SiRNA target sequence
ttcacctacttttggtgaaata

SEQ ID NO: 82243 - DNA, 22 bp, Artificial sequence
  SiRNA target sequence
tcacctacttttggtgaaatag

SEQ ID NO: 82244 - DNA, 22 bp, Artificial sequence
  SiRNA target sequence
cacctacttttggtgaaataga

SEQ ID NO: 82245 - DNA, 22 bp, Artificial sequence
  SiRNA target sequence
acctacttttggtgaaatagat

SEQ ID NO: 82246 - DNA, 22 bp, Artificial sequence
  SiRNA target sequence
cctacttttggtgaaatagatt

SEQ ID NO: 82247 - DNA, 22 bp, Artificial sequence
  SiRNA target sequence
ctacttttggtgaaatagattg

SEQ ID NO: 82248 - DNA, 22 bp, Artificial sequence
  SiRNA target sequence
tacttttggtgaaatagattgt

SEQ ID NO: 82249 - DNA, 22 bp, Artificial sequence
  SiRNA target sequence
acttttggtgaaatagattgta

SEQ ID NO: 82250 - DNA, 22 bp, Artificial sequence
  SiRNA target sequence
cttttggtgaaatagattgtaa

SEQ ID NO: 82251 - DNA, 22 bp, Artificial sequence
  SiRNA target sequence
ttttggtgaaatagattgtaaa

SEQ ID NO: 82252 - DNA, 22 bp, Artificial sequence
  SiRNA target sequence
tttggtgaaatagattgtaaaa

SEQ ID NO: 82253 - DNA, 22 bp, Artificial sequence
  SiRNA target sequence
ttggtgaaatagattgtaaaac

SEQ ID NO: 82254 - DNA, 22 bp, Artificial sequence
  SiRNA target sequence
tggtgaaatagattgtaaaaca

SEQ ID NO: 82255 - DNA, 22 bp, Artificial sequence
  SiRNA target sequence
ggtgaaatagattgtaaaacag

SEQ ID NO: 82256 - DNA, 22 bp, Artificial sequence
  SiRNA target sequence
gtgaaatagattgtaaaacaga

SEQ ID NO: 82257 - DNA, 22 bp, Artificial sequence
  SiRNA target sequence
tgaaatagattgtaaaacagat

SEQ ID NO: 82258 - DNA, 22 bp, Artificial sequence
  SiRNA target sequence
gaaatagattgtaaaacagatt

SEQ ID NO: 82259 - DNA, 22 bp, Artificial sequence
  SiRNA target sequence
aaatagattgtaaaacagattt

SEQ ID NO: 82260 - DNA, 22 bp, Artificial sequence
  SiRNA target sequence
aatagattgtaaaacagatttt

SEQ ID NO: 82261 - DNA, 22 bp, Artificial sequence
  SiRNA target sequence
atagattgtaaaacagattttc

SEQ ID NO: 82262 - DNA, 22 bp, Artificial sequence
  SiRNA target sequence
tagattgtaaaacagattttcc

SEQ ID NO: 82263 - DNA, 22 bp, Artificial sequence
  SiRNA target sequence
agattgtaaaacagattttcca

SEQ ID NO: 82264 - DNA, 22 bp, Artificial sequence
  SiRNA target sequence
gattgtaaaacagattttccaa

SEQ ID NO: 82265 - DNA, 22 bp, Artificial sequence
  SiRNA target sequence
attgtaaaacagattttccaag

SEQ ID NO: 82266 - DNA, 22 bp, Artificial sequence
  SiRNA target sequence
ttgtaaaacagattttccaagt

SEQ ID NO: 82267 - DNA, 22 bp, Artificial sequence
  SiRNA target sequence
tgtaaaacagattttccaagtg

SEQ ID NO: 82268 - DNA, 22 bp, Artificial sequence
  SiRNA target sequence
gtaaaacagattttccaagtga

SEQ ID NO: 82269 - DNA, 22 bp, Artificial sequence
  SiRNA target sequence
taaaacagattttccaagtgag

SEQ ID NO: 82270 - DNA, 22 bp, Artificial sequence
  SiRNA target sequence
aaaacagattttccaagtgagt

SEQ ID NO: 82271 - DNA, 22 bp, Artificial sequence
  SiRNA target sequence
aaacagattttccaagtgagtt

SEQ ID NO: 82272 - DNA, 22 bp, Artificial sequence
  SiRNA target sequence
aacagattttccaagtgagttg

SEQ ID NO: 82273 - DNA, 22 bp, Artificial sequence
  SiRNA target sequence
acagattttccaagtgagttgt

SEQ ID NO: 82274 - DNA, 22 bp, Artificial sequence
  SiRNA target sequence
cagattttccaagtgagttgtc

SEQ ID NO: 82275 - DNA, 22 bp, Artificial sequence
  SiRNA target sequence
agattttccaagtgagttgtct

SEQ ID NO: 82276 - DNA, 22 bp, Artificial sequence
  SiRNA target sequence
gattttccaagtgagttgtctg

SEQ ID NO: 82277 - DNA, 22 bp, Artificial sequence
  SiRNA target sequence
attttccaagtgagttgtctgc

SEQ ID NO: 82278 - DNA, 22 bp, Artificial sequence
  SiRNA target sequence
ttttccaagtgagttgtctgca

SEQ ID NO: 82279 - DNA, 22 bp, Artificial sequence
  SiRNA target sequence
tttccaagtgagttgtctgcat

SEQ ID NO: 82280 - DNA, 22 bp, Artificial sequence
  SiRNA target sequence
ttccaagtgagttgtctgcatg

SEQ ID NO: 82281 - DNA, 22 bp, Artificial sequence
  SiRNA target sequence
tccaagtgagttgtctgcatgt

SEQ ID NO: 82282 - DNA, 22 bp, Artificial sequence
  SiRNA target sequence
ccaagtgagttgtctgcatgtg

SEQ ID NO: 82283 - DNA, 22 bp, Artificial sequence
  SiRNA target sequence
caagtgagttgtctgcatgtgt

SEQ ID NO: 82284 - DNA, 22 bp, Artificial sequence
  SiRNA target sequence
aagtgagttgtctgcatgtgta

SEQ ID NO: 82285 - DNA, 22 bp, Artificial sequence
  SiRNA target sequence
agtgagttgtctgcatgtgtat

SEQ ID NO: 82286 - DNA, 22 bp, Artificial sequence
  SiRNA target sequence
gtgagttgtctgcatgtgtatg

SEQ ID NO: 82287 - DNA, 22 bp, Artificial sequence
  SiRNA target sequence
tgagttgtctgcatgtgtatgc

SEQ ID NO: 82288 - DNA, 22 bp, Artificial sequence
  SiRNA target sequence
gagttgtctgcatgtgtatgcg

SEQ ID NO: 82289 - DNA, 22 bp, Artificial sequence
  SiRNA target sequence
agttgtctgcatgtgtatgcgg

SEQ ID NO: 82290 - DNA, 22 bp, Artificial sequence
  SiRNA target sequence
gttgtctgcatgtgtatgcggg

SEQ ID NO: 82291 - DNA, 22 bp, Artificial sequence
  SiRNA target sequence
ttgtctgcatgtgtatgcggga

SEQ ID NO: 82292 - DNA, 22 bp, Artificial sequence
  SiRNA target sequence
tgtctgcatgtgtatgcgggaa

SEQ ID NO: 82293 - DNA, 22 bp, Artificial sequence
  SiRNA target sequence
gtctgcatgtgtatgcgggaaa

SEQ ID NO: 82294 - DNA, 22 bp, Artificial sequence
  SiRNA target sequence
tctgcatgtgtatgcgggaaaa

SEQ ID NO: 82295 - DNA, 22 bp, Artificial sequence
  SiRNA target sequence
ctgcatgtgtatgcgggaaaaa

SEQ ID NO: 82296 - DNA, 22 bp, Artificial sequence
  SiRNA target sequence
tgcatgtgtatgcgggaaaaaa

SEQ ID NO: 82297 - DNA, 22 bp, Artificial sequence
  SiRNA target sequence
gcatgtgtatgcgggaaaaaat

SEQ ID NO: 82298 - DNA, 22 bp, Artificial sequence
  SiRNA target sequence
catgtgtatgcgggaaaaaatg

SEQ ID NO: 82299 - DNA, 22 bp, Artificial sequence
  SiRNA target sequence
atgtgtatgcgggaaaaaatgc

SEQ ID NO: 82300 - DNA, 22 bp, Artificial sequence
  SiRNA target sequence
tgtgtatgcgggaaaaaatgct

SEQ ID NO: 82301 - DNA, 22 bp, Artificial sequence
  SiRNA target sequence
gtgtatgcgggaaaaaatgctg

SEQ ID NO: 82302 - DNA, 22 bp, Artificial sequence
  SiRNA target sequence
tgtatgcgggaaaaaatgctgt

SEQ ID NO: 82303 - DNA, 22 bp, Artificial sequence
  SiRNA target sequence
gtatgcgggaaaaaatgctgtt

SEQ ID NO: 82304 - DNA, 22 bp, Artificial sequence
  SiRNA target sequence
tatgcgggaaaaaatgctgttt

SEQ ID NO: 82305 - DNA, 22 bp, Artificial sequence
  SiRNA target sequence
atgcgggaaaaaatgctgtttt

SEQ ID NO: 82306 - DNA, 22 bp, Artificial sequence
  SiRNA target sequence
tgcgggaaaaaatgctgttttg

SEQ ID NO: 82307 - DNA, 22 bp, Artificial sequence
  SiRNA target sequence
gcgggaaaaaatgctgttttgc

SEQ ID NO: 82308 - DNA, 22 bp, Artificial sequence
  SiRNA target sequence
cgggaaaaaatgctgttttgct

SEQ ID NO: 82309 - DNA, 22 bp, Artificial sequence
  SiRNA target sequence
gggaaaaaatgctgttttgcta

SEQ ID NO: 82310 - DNA, 22 bp, Artificial sequence
  SiRNA target sequence
ggaaaaaatgctgttttgctaa

SEQ ID NO: 82311 - DNA, 22 bp, Artificial sequence
  SiRNA target sequence
gaaaaaatgctgttttgctaaa

SEQ ID NO: 82312 - DNA, 22 bp, Artificial sequence
  SiRNA target sequence
aaaaaatgctgttttgctaaat

SEQ ID NO: 82313 - DNA, 22 bp, Artificial sequence
  SiRNA target sequence
aaaaatgctgttttgctaaata

SEQ ID NO: 82314 - DNA, 22 bp, Artificial sequence
  SiRNA target sequence
aaaatgctgttttgctaaataa

SEQ ID NO: 82315 - DNA, 22 bp, Artificial sequence
  SiRNA target sequence
aaatgctgttttgctaaataaa

SEQ ID NO: 82316 - DNA, 22 bp, Artificial sequence
  SiRNA target sequence
aatgctgttttgctaaataaac

SEQ ID NO: 82317 - DNA, 22 bp, Artificial sequence
  SiRNA target sequence
atgctgttttgctaaataaaca

SEQ ID NO: 82318 - DNA, 22 bp, Artificial sequence
  SiRNA target sequence
tgctgttttgctaaataaacaa

SEQ ID NO: 82319 - DNA, 22 bp, Artificial sequence
  SiRNA target sequence
gctgttttgctaaataaacaat

SEQ ID NO: 82320 - DNA, 22 bp, Artificial sequence
  SiRNA target sequence
ctgttttgctaaataaacaatc

SEQ ID NO: 82321 - DNA, 22 bp, Artificial sequence
  SiRNA target sequence
tgttttgctaaataaacaatcc

SEQ ID NO: 82322 - DNA, 22 bp, Artificial sequence
  SiRNA target sequence
gttttgctaaataaacaatcca

SEQ ID NO: 82323 - DNA, 22 bp, Artificial sequence
  SiRNA target sequence
ttttgctaaataaacaatccat

SEQ ID NO: 82324 - DNA, 22 bp, Artificial sequence
  SiRNA target sequence
tttgctaaataaacaatccata

SEQ ID NO: 82325 - DNA, 22 bp, Artificial sequence
  SiRNA target sequence
ttgctaaataaacaatccatac

SEQ ID NO: 82326 - DNA, 22 bp, Artificial sequence
  SiRNA target sequence
tgctaaataaacaatccataca

SEQ ID NO: 82327 - DNA, 22 bp, Artificial sequence
  SiRNA target sequence
gctaaataaacaatccatacac

SEQ ID NO: 82328 - DNA, 22 bp, Artificial sequence
  SiRNA target sequence
ctaaataaacaatccatacacc

SEQ ID NO: 82329 - DNA, 22 bp, Artificial sequence
  SiRNA target sequence
taaataaacaatccatacaccc

SEQ ID NO: 82330 - DNA, 22 bp, Artificial sequence
  SiRNA target sequence
aaataaacaatccatacaccca

SEQ ID NO: 82331 - DNA, 22 bp, Artificial sequence
  SiRNA target sequence
aataaacaatccatacacccaa

SEQ ID NO: 82332 - DNA, 22 bp, Artificial sequence
  SiRNA target sequence
ataaacaatccatacacccaat

SEQ ID NO: 82333 - DNA, 22 bp, Artificial sequence
  SiRNA target sequence
taaacaatccatacacccaata

SEQ ID NO: 82334 - DNA, 22 bp, Artificial sequence
  SiRNA target sequence
aaacaatccatacacccaataa

SEQ ID NO: 82335 - DNA, 22 bp, Artificial sequence
  SiRNA target sequence
aacaatccatacacccaataag

SEQ ID NO: 82336 - DNA, 22 bp, Artificial sequence
  SiRNA target sequence
acaatccatacacccaataaga

SEQ ID NO: 82337 - DNA, 22 bp, Artificial sequence
  SiRNA target sequence
caatccatacacccaataagat

SEQ ID NO: 82338 - DNA, 22 bp, Artificial sequence
  SiRNA target sequence
aatccatacacccaataagata

SEQ ID NO: 82339 - DNA, 22 bp, Artificial sequence
  SiRNA target sequence
atccatacacccaataagataa

SEQ ID NO: 82340 - DNA, 22 bp, Artificial sequence
  SiRNA target sequence
tccatacacccaataagataat

SEQ ID NO: 82341 - DNA, 22 bp, Artificial sequence
  SiRNA target sequence
ccatacacccaataagataata

SEQ ID NO: 82342 - DNA, 22 bp, Artificial sequence
  SiRNA target sequence
catacacccaataagataataa

SEQ ID NO: 82343 - DNA, 22 bp, Artificial sequence
  SiRNA target sequence
atacacccaataagataataag

SEQ ID NO: 82344 - DNA, 22 bp, Artificial sequence
  SiRNA target sequence
tacacccaataagataataagt

SEQ ID NO: 82345 - DNA, 22 bp, Artificial sequence
  SiRNA target sequence
acacccaataagataataagtc

SEQ ID NO: 82346 - DNA, 22 bp, Artificial sequence
  SiRNA target sequence
cacccaataagataataagtcc

SEQ ID NO: 82347 - DNA, 22 bp, Artificial sequence
  SiRNA target sequence
acccaataagataataagtcct

SEQ ID NO: 82348 - DNA, 22 bp, Artificial sequence
  SiRNA target sequence
cccaataagataataagtcctc

SEQ ID NO: 82349 - DNA, 22 bp, Artificial sequence
  SiRNA target sequence
ccaataagataataagtcctct

SEQ ID NO: 82350 - DNA, 22 bp, Artificial sequence
  SiRNA target sequence
caataagataataagtcctctt

SEQ ID NO: 82351 - DNA, 22 bp, Artificial sequence
  SiRNA target sequence
aataagataataagtcctctta

SEQ ID NO: 82352 - DNA, 22 bp, Artificial sequence
  SiRNA target sequence
ataagataataagtcctcttaa

SEQ ID NO: 82353 - DNA, 22 bp, Artificial sequence
  SiRNA target sequence
taagataataagtcctcttaat

SEQ ID NO: 82354 - DNA, 22 bp, Artificial sequence
  SiRNA target sequence
aagataataagtcctcttaata

SEQ ID NO: 82355 - DNA, 22 bp, Artificial sequence
  SiRNA target sequence
agataataagtcctcttaatac

SEQ ID NO: 82356 - DNA, 22 bp, Artificial sequence
  SiRNA target sequence
gataataagtcctcttaatact

SEQ ID NO: 82357 - DNA, 22 bp, Artificial sequence
  SiRNA target sequence
ataataagtcctcttaatactt

SEQ ID NO: 82358 - DNA, 22 bp, Artificial sequence
  SiRNA target sequence
taataagtcctcttaatacttt

SEQ ID NO: 82359 - DNA, 22 bp, Artificial sequence
  SiRNA target sequence
aataagtcctcttaatactttc

SEQ ID NO: 82360 - DNA, 22 bp, Artificial sequence
  SiRNA target sequence
ataagtcctcttaatactttct

SEQ ID NO: 82361 - DNA, 22 bp, Artificial sequence
  SiRNA target sequence
taagtcctcttaatactttctg

SEQ ID NO: 82362 - DNA, 22 bp, Artificial sequence
  SiRNA target sequence
aagtcctcttaatactttctgc

SEQ ID NO: 82363 - DNA, 22 bp, Artificial sequence
  SiRNA target sequence
agtcctcttaatactttctgct

SEQ ID NO: 82364 - DNA, 22 bp, Artificial sequence
  SiRNA target sequence
gtcctcttaatactttctgctc

SEQ ID NO: 82365 - DNA, 22 bp, Artificial sequence
  SiRNA target sequence
tcctcttaatactttctgctct

SEQ ID NO: 82366 - DNA, 22 bp, Artificial sequence
  SiRNA target sequence
cctcttaatactttctgctctt

SEQ ID NO: 82367 - DNA, 22 bp, Artificial sequence
  SiRNA target sequence
ctcttaatactttctgctcttt

SEQ ID NO: 82368 - DNA, 22 bp, Artificial sequence
  SiRNA target sequence
tcttaatactttctgctctttg

SEQ ID NO: 82369 - DNA, 22 bp, Artificial sequence
  SiRNA target sequence
cttaatactttctgctctttgt

SEQ ID NO: 82370 - DNA, 22 bp, Artificial sequence
  SiRNA target sequence
ttaatactttctgctctttgtt

SEQ ID NO: 82371 - DNA, 22 bp, Artificial sequence
  SiRNA target sequence
taatactttctgctctttgttc

SEQ ID NO: 82372 - DNA, 22 bp, Artificial sequence
  SiRNA target sequence
aatactttctgctctttgttca

SEQ ID NO: 82373 - DNA, 22 bp, Artificial sequence
  SiRNA target sequence
atactttctgctctttgttcat

SEQ ID NO: 82374 - DNA, 23 bp, Artificial sequence
  SiRNA target sequence
ttattctggttcacaaccacaac

SEQ ID NO: 82375 - DNA, 23 bp, Artificial sequence
  SiRNA target sequence
tattctggttcacaaccacaact

SEQ ID NO: 82376 - DNA, 23 bp, Artificial sequence
  SiRNA target sequence
attctggttcacaaccacaactc

SEQ ID NO: 82377 - DNA, 23 bp, Artificial sequence
  SiRNA target sequence
ttctggttcacaaccacaactcc

SEQ ID NO: 82378 - DNA, 23 bp, Artificial sequence
  SiRNA target sequence
tctggttcacaaccacaactcca

SEQ ID NO: 82379 - DNA, 23 bp, Artificial sequence
  SiRNA target sequence
ctggttcacaaccacaactccaa

SEQ ID NO: 82380 - DNA, 23 bp, Artificial sequence
  SiRNA target sequence
tggttcacaaccacaactccaaa

SEQ ID NO: 82381 - DNA, 23 bp, Artificial sequence
  SiRNA target sequence
ggttcacaaccacaactccaaac

SEQ ID NO: 82382 - DNA, 23 bp, Artificial sequence
  SiRNA target sequence
gttcacaaccacaactccaaaca

SEQ ID NO: 82383 - DNA, 23 bp, Artificial sequence
  SiRNA target sequence
ttcacaaccacaactccaaacac

SEQ ID NO: 82384 - DNA, 23 bp, Artificial sequence
  SiRNA target sequence
tcacaaccacaactccaaacacc

SEQ ID NO: 82385 - DNA, 23 bp, Artificial sequence
  SiRNA target sequence
cacaaccacaactccaaacacct

SEQ ID NO: 82386 - DNA, 23 bp, Artificial sequence
  SiRNA target sequence
acaaccacaactccaaacacctt

SEQ ID NO: 82387 - DNA, 23 bp, Artificial sequence
  SiRNA target sequence
caaccacaactccaaacaccttc

SEQ ID NO: 82388 - DNA, 23 bp, Artificial sequence
  SiRNA target sequence
aaccacaactccaaacaccttct

SEQ ID NO: 82389 - DNA, 23 bp, Artificial sequence
  SiRNA target sequence
accacaactccaaacaccttcta

SEQ ID NO: 82390 - DNA, 23 bp, Artificial sequence
  SiRNA target sequence
ccacaactccaaacaccttctac

SEQ ID NO: 82391 - DNA, 23 bp, Artificial sequence
  SiRNA target sequence
cacaactccaaacaccttctacc

SEQ ID NO: 82392 - DNA, 23 bp, Artificial sequence
  SiRNA target sequence
acaactccaaacaccttctacct

SEQ ID NO: 82393 - DNA, 23 bp, Artificial sequence
  SiRNA target sequence
caactccaaacaccttctacctt

SEQ ID NO: 82394 - DNA, 23 bp, Artificial sequence
  SiRNA target sequence
aactccaaacaccttctaccttt

SEQ ID NO: 82395 - DNA, 23 bp, Artificial sequence
  SiRNA target sequence
actccaaacaccttctacctttt

SEQ ID NO: 82396 - DNA, 23 bp, Artificial sequence
  SiRNA target sequence
ctccaaacaccttctaccttttt

SEQ ID NO: 82397 - DNA, 23 bp, Artificial sequence
  SiRNA target sequence
tccaaacaccttctaccttttta

SEQ ID NO: 82398 - DNA, 23 bp, Artificial sequence
  SiRNA target sequence
ccaaacaccttctacctttttac

SEQ ID NO: 82399 - DNA, 23 bp, Artificial sequence
  SiRNA target sequence
caaacaccttctacctttttaca

SEQ ID NO: 82400 - DNA, 23 bp, Artificial sequence
  SiRNA target sequence
aaacaccttctacctttttacag

SEQ ID NO: 82401 - DNA, 23 bp, Artificial sequence
  SiRNA target sequence
aacaccttctacctttttacagt

SEQ ID NO: 82402 - DNA, 23 bp, Artificial sequence
  SiRNA target sequence
acaccttctacctttttacagtc

SEQ ID NO: 82403 - DNA, 23 bp, Artificial sequence
  SiRNA target sequence
caccttctacctttttacagtcc

SEQ ID NO: 82404 - DNA, 23 bp, Artificial sequence
  SiRNA target sequence
accttctacctttttacagtcca

SEQ ID NO: 82405 - DNA, 23 bp, Artificial sequence
  SiRNA target sequence
ccttctacctttttacagtccat

SEQ ID NO: 82406 - DNA, 23 bp, Artificial sequence
  SiRNA target sequence
cttctacctttttacagtccata

SEQ ID NO: 82407 - DNA, 23 bp, Artificial sequence
  SiRNA target sequence
ttctacctttttacagtccataa

SEQ ID NO: 82408 - DNA, 23 bp, Artificial sequence
  SiRNA target sequence
tctacctttttacagtccataat

SEQ ID NO: 82409 - DNA, 23 bp, Artificial sequence
  SiRNA target sequence
ctacctttttacagtccataatg

SEQ ID NO: 82410 - DNA, 23 bp, Artificial sequence
  SiRNA target sequence
tacctttttacagtccataatgg

SEQ ID NO: 82411 - DNA, 23 bp, Artificial sequence
  SiRNA target sequence
acctttttacagtccataatggg

SEQ ID NO: 82412 - DNA, 23 bp, Artificial sequence
  SiRNA target sequence
cctttttacagtccataatgggc

SEQ ID NO: 82413 - DNA, 23 bp, Artificial sequence
  SiRNA target sequence
ctttttacagtccataatgggct

SEQ ID NO: 82414 - DNA, 23 bp, Artificial sequence
  SiRNA target sequence
tttttacagtccataatgggctt

SEQ ID NO: 82415 - DNA, 23 bp, Artificial sequence
  SiRNA target sequence
ttttacagtccataatgggcttt

SEQ ID NO: 82416 - DNA, 23 bp, Artificial sequence
  SiRNA target sequence
tttacagtccataatgggctttc

SEQ ID NO: 82417 - DNA, 23 bp, Artificial sequence
  SiRNA target sequence
ttacagtccataatgggctttcc

SEQ ID NO: 82418 - DNA, 23 bp, Artificial sequence
  SiRNA target sequence
tacagtccataatgggctttcct

SEQ ID NO: 82419 - DNA, 23 bp, Artificial sequence
  SiRNA target sequence
acagtccataatgggctttccta

SEQ ID NO: 82420 - DNA, 23 bp, Artificial sequence
  SiRNA target sequence
cagtccataatgggctttcctaa

SEQ ID NO: 82421 - DNA, 23 bp, Artificial sequence
  SiRNA target sequence
agtccataatgggctttcctaat

SEQ ID NO: 82422 - DNA, 23 bp, Artificial sequence
  SiRNA target sequence
gtccataatgggctttcctaatc

SEQ ID NO: 82423 - DNA, 23 bp, Artificial sequence
  SiRNA target sequence
tccataatgggctttcctaatct

SEQ ID NO: 82424 - DNA, 23 bp, Artificial sequence
  SiRNA target sequence
ccataatgggctttcctaatctt

SEQ ID NO: 82425 - DNA, 23 bp, Artificial sequence
  SiRNA target sequence
cataatgggctttcctaatcttt

SEQ ID NO: 82426 - DNA, 23 bp, Artificial sequence
  SiRNA target sequence
ataatgggctttcctaatctttt

SEQ ID NO: 82427 - DNA, 23 bp, Artificial sequence
  SiRNA target sequence
taatgggctttcctaatctttta

SEQ ID NO: 82428 - DNA, 23 bp, Artificial sequence
  SiRNA target sequence
aatgggctttcctaatcttttat

SEQ ID NO: 82429 - DNA, 23 bp, Artificial sequence
  SiRNA target sequence
atgggctttcctaatcttttatt

SEQ ID NO: 82430 - DNA, 23 bp, Artificial sequence
  SiRNA target sequence
tgggctttcctaatcttttatta

SEQ ID NO: 82431 - DNA, 23 bp, Artificial sequence
  SiRNA target sequence
gggctttcctaatcttttattaa

SEQ ID NO: 82432 - DNA, 23 bp, Artificial sequence
  SiRNA target sequence
ggctttcctaatcttttattaac

SEQ ID NO: 82433 - DNA, 23 bp, Artificial sequence
  SiRNA target sequence
gctttcctaatcttttattaact

SEQ ID NO: 82434 - DNA, 23 bp, Artificial sequence
  SiRNA target sequence
ctttcctaatcttttattaacta

SEQ ID NO: 82435 - DNA, 23 bp, Artificial sequence
  SiRNA target sequence
tttcctaatcttttattaactat

SEQ ID NO: 82436 - DNA, 23 bp, Artificial sequence
  SiRNA target sequence
ttcctaatcttttattaactatg

SEQ ID NO: 82437 - DNA, 23 bp, Artificial sequence
  SiRNA target sequence
tcctaatcttttattaactatgt

SEQ ID NO: 82438 - DNA, 23 bp, Artificial sequence
  SiRNA target sequence
cctaatcttttattaactatgtt

SEQ ID NO: 82439 - DNA, 23 bp, Artificial sequence
  SiRNA target sequence
ctaatcttttattaactatgtta

SEQ ID NO: 82440 - DNA, 23 bp, Artificial sequence
  SiRNA target sequence
taatcttttattaactatgttat

SEQ ID NO: 82441 - DNA, 23 bp, Artificial sequence
  SiRNA target sequence
aatcttttattaactatgttatg

SEQ ID NO: 82442 - DNA, 23 bp, Artificial sequence
  SiRNA target sequence
atcttttattaactatgttatgt

SEQ ID NO: 82443 - DNA, 23 bp, Artificial sequence
  SiRNA target sequence
tcttttattaactatgttatgtg

SEQ ID NO: 82444 - DNA, 23 bp, Artificial sequence
  SiRNA target sequence
cttttattaactatgttatgtgc

SEQ ID NO: 82445 - DNA, 23 bp, Artificial sequence
  SiRNA target sequence
ttttattaactatgttatgtgct

SEQ ID NO: 82446 - DNA, 23 bp, Artificial sequence
  SiRNA target sequence
tttattaactatgttatgtgctt

SEQ ID NO: 82447 - DNA, 23 bp, Artificial sequence
  SiRNA target sequence
ttattaactatgttatgtgcttt

SEQ ID NO: 82448 - DNA, 23 bp, Artificial sequence
  SiRNA target sequence
tattaactatgttatgtgcttta

SEQ ID NO: 82449 - DNA, 23 bp, Artificial sequence
  SiRNA target sequence
attaactatgttatgtgctttac

SEQ ID NO: 82450 - DNA, 23 bp, Artificial sequence
  SiRNA target sequence
ttaactatgttatgtgctttaca

SEQ ID NO: 82451 - DNA, 23 bp, Artificial sequence
  SiRNA target sequence
taactatgttatgtgctttacat

SEQ ID NO: 82452 - DNA, 23 bp, Artificial sequence
  SiRNA target sequence
aactatgttatgtgctttacata

SEQ ID NO: 82453 - DNA, 23 bp, Artificial sequence
  SiRNA target sequence
actatgttatgtgctttacatag

SEQ ID NO: 82454 - DNA, 23 bp, Artificial sequence
  SiRNA target sequence
ctatgttatgtgctttacatagc

SEQ ID NO: 82455 - DNA, 23 bp, Artificial sequence
  SiRNA target sequence
tatgttatgtgctttacatagcc

SEQ ID NO: 82456 - DNA, 23 bp, Artificial sequence
  SiRNA target sequence
atgttatgtgctttacatagcca

SEQ ID NO: 82457 - DNA, 23 bp, Artificial sequence
  SiRNA target sequence
tgttatgtgctttacatagccac

SEQ ID NO: 82458 - DNA, 23 bp, Artificial sequence
  SiRNA target sequence
gttatgtgctttacatagccact

SEQ ID NO: 82459 - DNA, 23 bp, Artificial sequence
  SiRNA target sequence
ttatgtgctttacatagccactg

SEQ ID NO: 82460 - DNA, 23 bp, Artificial sequence
  SiRNA target sequence
tatgtgctttacatagccactgg

SEQ ID NO: 82461 - DNA, 23 bp, Artificial sequence
  SiRNA target sequence
atgtgctttacatagccactgga

SEQ ID NO: 82462 - DNA, 23 bp, Artificial sequence
  SiRNA target sequence
tgtgctttacatagccactggac

SEQ ID NO: 82463 - DNA, 23 bp, Artificial sequence
  SiRNA target sequence
gtgctttacatagccactggaca

SEQ ID NO: 82464 - DNA, 23 bp, Artificial sequence
  SiRNA target sequence
tgctttacatagccactggacaa

SEQ ID NO: 82465 - DNA, 23 bp, Artificial sequence
  SiRNA target sequence
gctttacatagccactggacaaa

SEQ ID NO: 82466 - DNA, 23 bp, Artificial sequence
  SiRNA target sequence
ctttacatagccactggacaaat

SEQ ID NO: 82467 - DNA, 23 bp, Artificial sequence
  SiRNA target sequence
tttacatagccactggacaaatt

SEQ ID NO: 82468 - DNA, 23 bp, Artificial sequence
  SiRNA target sequence
ttacatagccactggacaaattc

SEQ ID NO: 82469 - DNA, 23 bp, Artificial sequence
  SiRNA target sequence
tacatagccactggacaaattcg

SEQ ID NO: 82470 - DNA, 23 bp, Artificial sequence
  SiRNA target sequence
acatagccactggacaaattcgt

SEQ ID NO: 82471 - DNA, 23 bp, Artificial sequence
  SiRNA target sequence
catagccactggacaaattcgtc

SEQ ID NO: 82472 - DNA, 23 bp, Artificial sequence
  SiRNA target sequence
atagccactggacaaattcgtca

SEQ ID NO: 82473 - DNA, 23 bp, Artificial sequence
  SiRNA target sequence
tagccactggacaaattcgtcat

SEQ ID NO: 82474 - DNA, 23 bp, Artificial sequence
  SiRNA target sequence
agccactggacaaattcgtcatg

SEQ ID NO: 82475 - DNA, 23 bp, Artificial sequence
  SiRNA target sequence
gccactggacaaattcgtcatgt

SEQ ID NO: 82476 - DNA, 23 bp, Artificial sequence
  SiRNA target sequence
ccactggacaaattcgtcatgtg

SEQ ID NO: 82477 - DNA, 23 bp, Artificial sequence
  SiRNA target sequence
cactggacaaattcgtcatgtgt

SEQ ID NO: 82478 - DNA, 23 bp, Artificial sequence
  SiRNA target sequence
actggacaaattcgtcatgtgtg

SEQ ID NO: 82479 - DNA, 23 bp, Artificial sequence
  SiRNA target sequence
ctggacaaattcgtcatgtgtgg

SEQ ID NO: 82480 - DNA, 23 bp, Artificial sequence
  SiRNA target sequence
tggacaaattcgtcatgtgtggc

SEQ ID NO: 82481 - DNA, 23 bp, Artificial sequence
  SiRNA target sequence
ggacaaattcgtcatgtgtggca

SEQ ID NO: 82482 - DNA, 23 bp, Artificial sequence
  SiRNA target sequence
gacaaattcgtcatgtgtggcaa

SEQ ID NO: 82483 - DNA, 23 bp, Artificial sequence
  SiRNA target sequence
acaaattcgtcatgtgtggcaac

SEQ ID NO: 82484 - DNA, 23 bp, Artificial sequence
  SiRNA target sequence
caaattcgtcatgtgtggcaact

SEQ ID NO: 82485 - DNA, 23 bp, Artificial sequence
  SiRNA target sequence
aaattcgtcatgtgtggcaactt

SEQ ID NO: 82486 - DNA, 23 bp, Artificial sequence
  SiRNA target sequence
aattcgtcatgtgtggcaacttg

SEQ ID NO: 82487 - DNA, 23 bp, Artificial sequence
  SiRNA target sequence
attcgtcatgtgtggcaacttgt

SEQ ID NO: 82488 - DNA, 23 bp, Artificial sequence
  SiRNA target sequence
ttcgtcatgtgtggcaacttgtg

SEQ ID NO: 82489 - DNA, 23 bp, Artificial sequence
  SiRNA target sequence
tcgtcatgtgtggcaacttgtgg

SEQ ID NO: 82490 - DNA, 23 bp, Artificial sequence
  SiRNA target sequence
cgtcatgtgtggcaacttgtgga

SEQ ID NO: 82491 - DNA, 23 bp, Artificial sequence
  SiRNA target sequence
gtcatgtgtggcaacttgtggag

SEQ ID NO: 82492 - DNA, 23 bp, Artificial sequence
  SiRNA target sequence
tcatgtgtggcaacttgtggagg

SEQ ID NO: 82493 - DNA, 23 bp, Artificial sequence
  SiRNA target sequence
catgtgtggcaacttgtggagga

SEQ ID NO: 82494 - DNA, 23 bp, Artificial sequence
  SiRNA target sequence
atgtgtggcaacttgtggaggat

SEQ ID NO: 82495 - DNA, 23 bp, Artificial sequence
  SiRNA target sequence
tgtgtggcaacttgtggaggatt

SEQ ID NO: 82496 - DNA, 23 bp, Artificial sequence
  SiRNA target sequence
gtgtggcaacttgtggaggattt

SEQ ID NO: 82497 - DNA, 23 bp, Artificial sequence
  SiRNA target sequence
tgtggcaacttgtggaggattta

SEQ ID NO: 82498 - DNA, 23 bp, Artificial sequence
  SiRNA target sequence
gtggcaacttgtggaggatttaa

SEQ ID NO: 82499 - DNA, 23 bp, Artificial sequence
  SiRNA target sequence
tggcaacttgtggaggatttaag

SEQ ID NO: 82500 - DNA, 23 bp, Artificial sequence
  SiRNA target sequence
ggcaacttgtggaggatttaagc

SEQ ID NO: 82501 - DNA, 23 bp, Artificial sequence
  SiRNA target sequence
gcaacttgtggaggatttaagct

SEQ ID NO: 82502 - DNA, 23 bp, Artificial sequence
  SiRNA target sequence
caacttgtggaggatttaagctt

SEQ ID NO: 82503 - DNA, 23 bp, Artificial sequence
  SiRNA target sequence
aacttgtggaggatttaagctta

SEQ ID NO: 82504 - DNA, 23 bp, Artificial sequence
  SiRNA target sequence
acttgtggaggatttaagcttaa

SEQ ID NO: 82505 - DNA, 23 bp, Artificial sequence
  SiRNA target sequence
cttgtggaggatttaagcttaac

SEQ ID NO: 82506 - DNA, 23 bp, Artificial sequence
  SiRNA target sequence
ttgtggaggatttaagcttaaca

SEQ ID NO: 82507 - DNA, 23 bp, Artificial sequence
  SiRNA target sequence
tgtggaggatttaagcttaacag

SEQ ID NO: 82508 - DNA, 23 bp, Artificial sequence
  SiRNA target sequence
gtggaggatttaagcttaacagt

SEQ ID NO: 82509 - DNA, 23 bp, Artificial sequence
  SiRNA target sequence
tggaggatttaagcttaacagtc

SEQ ID NO: 82510 - DNA, 23 bp, Artificial sequence
  SiRNA target sequence
ggaggatttaagcttaacagtct

SEQ ID NO: 82511 - DNA, 23 bp, Artificial sequence
  SiRNA target sequence
gaggatttaagcttaacagtctt

SEQ ID NO: 82512 - DNA, 23 bp, Artificial sequence
  SiRNA target sequence
aggatttaagcttaacagtcttt

SEQ ID NO: 82513 - DNA, 23 bp, Artificial sequence
  SiRNA target sequence
ggatttaagcttaacagtctttg

SEQ ID NO: 82514 - DNA, 23 bp, Artificial sequence
  SiRNA target sequence
gatttaagcttaacagtctttga

SEQ ID NO: 82515 - DNA, 23 bp, Artificial sequence
  SiRNA target sequence
atttaagcttaacagtctttgaa

SEQ ID NO: 82516 - DNA, 23 bp, Artificial sequence
  SiRNA target sequence
tttaagcttaacagtctttgaaa

SEQ ID NO: 82517 - DNA, 23 bp, Artificial sequence
  SiRNA target sequence
ttaagcttaacagtctttgaaaa

SEQ ID NO: 82518 - DNA, 23 bp, Artificial sequence
  SiRNA target sequence
taagcttaacagtctttgaaaat

SEQ ID NO: 82519 - DNA, 23 bp, Artificial sequence
  SiRNA target sequence
aagcttaacagtctttgaaaatg

SEQ ID NO: 82520 - DNA, 23 bp, Artificial sequence
  SiRNA target sequence
agcttaacagtctttgaaaatgt

SEQ ID NO: 82521 - DNA, 23 bp, Artificial sequence
  SiRNA target sequence
gcttaacagtctttgaaaatgtc

SEQ ID NO: 82522 - DNA, 23 bp, Artificial sequence
  SiRNA target sequence
cttaacagtctttgaaaatgtcc

SEQ ID NO: 82523 - DNA, 23 bp, Artificial sequence
  SiRNA target sequence
ttaacagtctttgaaaatgtcca

SEQ ID NO: 82524 - DNA, 23 bp, Artificial sequence
  SiRNA target sequence
taacagtctttgaaaatgtccac

SEQ ID NO: 82525 - DNA, 23 bp, Artificial sequence
  SiRNA target sequence
aacagtctttgaaaatgtccaca

SEQ ID NO: 82526 - DNA, 23 bp, Artificial sequence
  SiRNA target sequence
acagtctttgaaaatgtccacaa

SEQ ID NO: 82527 - DNA, 23 bp, Artificial sequence
  SiRNA target sequence
cagtctttgaaaatgtccacaac

SEQ ID NO: 82528 - DNA, 23 bp, Artificial sequence
  SiRNA target sequence
agtctttgaaaatgtccacaaca

SEQ ID NO: 82529 - DNA, 23 bp, Artificial sequence
  SiRNA target sequence
gtctttgaaaatgtccacaacat

SEQ ID NO: 82530 - DNA, 23 bp, Artificial sequence
  SiRNA target sequence
tctttgaaaatgtccacaacatt

SEQ ID NO: 82531 - DNA, 23 bp, Artificial sequence
  SiRNA target sequence
ctttgaaaatgtccacaacattc

SEQ ID NO: 82532 - DNA, 23 bp, Artificial sequence
  SiRNA target sequence
tttgaaaatgtccacaacattct

SEQ ID NO: 82533 - DNA, 23 bp, Artificial sequence
  SiRNA target sequence
ttgaaaatgtccacaacattctg

SEQ ID NO: 82534 - DNA, 23 bp, Artificial sequence
  SiRNA target sequence
tgaaaatgtccacaacattctgc

SEQ ID NO: 82535 - DNA, 23 bp, Artificial sequence
  SiRNA target sequence
gaaaatgtccacaacattctgca

SEQ ID NO: 82536 - DNA, 23 bp, Artificial sequence
  SiRNA target sequence
aaaatgtccacaacattctgcac

SEQ ID NO: 82537 - DNA, 23 bp, Artificial sequence
  SiRNA target sequence
aaatgtccacaacattctgcaca

SEQ ID NO: 82538 - DNA, 23 bp, Artificial sequence
  SiRNA target sequence
aatgtccacaacattctgcacag

SEQ ID NO: 82539 - DNA, 23 bp, Artificial sequence
  SiRNA target sequence
atgtccacaacattctgcacagg

SEQ ID NO: 82540 - DNA, 23 bp, Artificial sequence
  SiRNA target sequence
tgtccacaacattctgcacaggg

SEQ ID NO: 82541 - DNA, 23 bp, Artificial sequence
  SiRNA target sequence
gtccacaacattctgcacagggg

SEQ ID NO: 82542 - DNA, 23 bp, Artificial sequence
  SiRNA target sequence
tccacaacattctgcacagggga

SEQ ID NO: 82543 - DNA, 23 bp, Artificial sequence
  SiRNA target sequence
ccacaacattctgcacaggggaa

SEQ ID NO: 82544 - DNA, 23 bp, Artificial sequence
  SiRNA target sequence
cacaacattctgcacaggggaaa

SEQ ID NO: 82545 - DNA, 23 bp, Artificial sequence
  SiRNA target sequence
acaacattctgcacaggggaaaa

SEQ ID NO: 82546 - DNA, 23 bp, Artificial sequence
  SiRNA target sequence
caacattctgcacaggggaaaag

SEQ ID NO: 82547 - DNA, 23 bp, Artificial sequence
  SiRNA target sequence
aacattctgcacaggggaaaaga

SEQ ID NO: 82548 - DNA, 23 bp, Artificial sequence
  SiRNA target sequence
acattctgcacaggggaaaagag

SEQ ID NO: 82549 - DNA, 23 bp, Artificial sequence
  SiRNA target sequence
cattctgcacaggggaaaagaga

SEQ ID NO: 82550 - DNA, 23 bp, Artificial sequence
  SiRNA target sequence
attctgcacaggggaaaagagat

SEQ ID NO: 82551 - DNA, 23 bp, Artificial sequence
  SiRNA target sequence
ttctgcacaggggaaaagagatg

SEQ ID NO: 82552 - DNA, 23 bp, Artificial sequence
  SiRNA target sequence
tctgcacaggggaaaagagatga

SEQ ID NO: 82553 - DNA, 23 bp, Artificial sequence
  SiRNA target sequence
ctgcacaggggaaaagagatgat

SEQ ID NO: 82554 - DNA, 23 bp, Artificial sequence
  SiRNA target sequence
tgcacaggggaaaagagatgata

SEQ ID NO: 82555 - DNA, 23 bp, Artificial sequence
  SiRNA target sequence
gcacaggggaaaagagatgataa

SEQ ID NO: 82556 - DNA, 23 bp, Artificial sequence
  SiRNA target sequence
cacaggggaaaagagatgataaa

SEQ ID NO: 82557 - DNA, 23 bp, Artificial sequence
  SiRNA target sequence
acaggggaaaagagatgataaaa

SEQ ID NO: 82558 - DNA, 23 bp, Artificial sequence
  SiRNA target sequence
caggggaaaagagatgataaaag

SEQ ID NO: 82559 - DNA, 23 bp, Artificial sequence
  SiRNA target sequence
aggggaaaagagatgataaaagg

SEQ ID NO: 82560 - DNA, 23 bp, Artificial sequence
  SiRNA target sequence
ggggaaaagagatgataaaaggt

SEQ ID NO: 82561 - DNA, 23 bp, Artificial sequence
  SiRNA target sequence
gggaaaagagatgataaaaggta

SEQ ID NO: 82562 - DNA, 23 bp, Artificial sequence
  SiRNA target sequence
ggaaaagagatgataaaaggtaa

SEQ ID NO: 82563 - DNA, 23 bp, Artificial sequence
  SiRNA target sequence
gaaaagagatgataaaaggtaaa

SEQ ID NO: 82564 - DNA, 23 bp, Artificial sequence
  SiRNA target sequence
aaaagagatgataaaaggtaaat

SEQ ID NO: 82565 - DNA, 23 bp, Artificial sequence
  SiRNA target sequence
aaagagatgataaaaggtaaata

SEQ ID NO: 82566 - DNA, 23 bp, Artificial sequence
  SiRNA target sequence
aagagatgataaaaggtaaataa

SEQ ID NO: 82567 - DNA, 23 bp, Artificial sequence
  SiRNA target sequence
agagatgataaaaggtaaataaa

SEQ ID NO: 82568 - DNA, 23 bp, Artificial sequence
  SiRNA target sequence
gagatgataaaaggtaaataaat

SEQ ID NO: 82569 - DNA, 23 bp, Artificial sequence
  SiRNA target sequence
agatgataaaaggtaaataaatt

SEQ ID NO: 82570 - DNA, 23 bp, Artificial sequence
  SiRNA target sequence
gatgataaaaggtaaataaattg

SEQ ID NO: 82571 - DNA, 23 bp, Artificial sequence
  SiRNA target sequence
atgataaaaggtaaataaattga

SEQ ID NO: 82572 - DNA, 23 bp, Artificial sequence
  SiRNA target sequence
tgataaaaggtaaataaattgaa

SEQ ID NO: 82573 - DNA, 23 bp, Artificial sequence
  SiRNA target sequence
gataaaaggtaaataaattgaag

SEQ ID NO: 82574 - DNA, 23 bp, Artificial sequence
  SiRNA target sequence
ataaaaggtaaataaattgaagt

SEQ ID NO: 82575 - DNA, 23 bp, Artificial sequence
  SiRNA target sequence
taaaaggtaaataaattgaagtg

SEQ ID NO: 82576 - DNA, 23 bp, Artificial sequence
  SiRNA target sequence
aaaaggtaaataaattgaagtgt

SEQ ID NO: 82577 - DNA, 23 bp, Artificial sequence
  SiRNA target sequence
aaaggtaaataaattgaagtgta

SEQ ID NO: 82578 - DNA, 23 bp, Artificial sequence
  SiRNA target sequence
aaggtaaataaattgaagtgtat

SEQ ID NO: 82579 - DNA, 23 bp, Artificial sequence
  SiRNA target sequence
aggtaaataaattgaagtgtatc

SEQ ID NO: 82580 - DNA, 23 bp, Artificial sequence
  SiRNA target sequence
ggtaaataaattgaagtgtatct

SEQ ID NO: 82581 - DNA, 23 bp, Artificial sequence
  SiRNA target sequence
gtaaataaattgaagtgtatctt

SEQ ID NO: 82582 - DNA, 23 bp, Artificial sequence
  SiRNA target sequence
taaataaattgaagtgtatcttt

SEQ ID NO: 82583 - DNA, 23 bp, Artificial sequence
  SiRNA target sequence
aaataaattgaagtgtatctttt

SEQ ID NO: 82584 - DNA, 23 bp, Artificial sequence
  SiRNA target sequence
aataaattgaagtgtatcttttt

SEQ ID NO: 82585 - DNA, 23 bp, Artificial sequence
  SiRNA target sequence
ataaattgaagtgtatctttttt

SEQ ID NO: 82586 - DNA, 23 bp, Artificial sequence
  SiRNA target sequence
taaattgaagtgtatctttttta

SEQ ID NO: 82587 - DNA, 23 bp, Artificial sequence
  SiRNA target sequence
aaattgaagtgtatcttttttat

SEQ ID NO: 82588 - DNA, 23 bp, Artificial sequence
  SiRNA target sequence
aattgaagtgtatcttttttatg

SEQ ID NO: 82589 - DNA, 23 bp, Artificial sequence
  SiRNA target sequence
attgaagtgtatcttttttatgt

SEQ ID NO: 82590 - DNA, 23 bp, Artificial sequence
  SiRNA target sequence
ttgaagtgtatcttttttatgtt

SEQ ID NO: 82591 - DNA, 23 bp, Artificial sequence
  SiRNA target sequence
tgaagtgtatcttttttatgttg

SEQ ID NO: 82592 - DNA, 23 bp, Artificial sequence
  SiRNA target sequence
gaagtgtatcttttttatgttgt

SEQ ID NO: 82593 - DNA, 23 bp, Artificial sequence
  SiRNA target sequence
aagtgtatcttttttatgttgta

SEQ ID NO: 82594 - DNA, 23 bp, Artificial sequence
  SiRNA target sequence
agtgtatcttttttatgttgtac

SEQ ID NO: 82595 - DNA, 23 bp, Artificial sequence
  SiRNA target sequence
gtgtatcttttttatgttgtact

SEQ ID NO: 82596 - DNA, 23 bp, Artificial sequence
  SiRNA target sequence
tgtatcttttttatgttgtactg

SEQ ID NO: 82597 - DNA, 23 bp, Artificial sequence
  SiRNA target sequence
gtatcttttttatgttgtactgt

SEQ ID NO: 82598 - DNA, 23 bp, Artificial sequence
  SiRNA target sequence
tatcttttttatgttgtactgta

SEQ ID NO: 82599 - DNA, 23 bp, Artificial sequence
  SiRNA target sequence
atcttttttatgttgtactgtag

SEQ ID NO: 82600 - DNA, 23 bp, Artificial sequence
  SiRNA target sequence
tcttttttatgttgtactgtagg

SEQ ID NO: 82601 - DNA, 23 bp, Artificial sequence
  SiRNA target sequence
cttttttatgttgtactgtagga

SEQ ID NO: 82602 - DNA, 23 bp, Artificial sequence
  SiRNA target sequence
ttttttatgttgtactgtaggaa

SEQ ID NO: 82603 - DNA, 23 bp, Artificial sequence
  SiRNA target sequence
tttttatgttgtactgtaggaaa

SEQ ID NO: 82604 - DNA, 23 bp, Artificial sequence
  SiRNA target sequence
ttttatgttgtactgtaggaaat

SEQ ID NO: 82605 - DNA, 23 bp, Artificial sequence
  SiRNA target sequence
tttatgttgtactgtaggaaatg

SEQ ID NO: 82606 - DNA, 23 bp, Artificial sequence
  SiRNA target sequence
ttatgttgtactgtaggaaatgc

SEQ ID NO: 82607 - DNA, 23 bp, Artificial sequence
  SiRNA target sequence
tatgttgtactgtaggaaatgca

SEQ ID NO: 82608 - DNA, 23 bp, Artificial sequence
  SiRNA target sequence
atgttgtactgtaggaaatgcag

SEQ ID NO: 82609 - DNA, 23 bp, Artificial sequence
  SiRNA target sequence
tgttgtactgtaggaaatgcagg

SEQ ID NO: 82610 - DNA, 23 bp, Artificial sequence
  SiRNA target sequence
gttgtactgtaggaaatgcagga

SEQ ID NO: 82611 - DNA, 23 bp, Artificial sequence
  SiRNA target sequence
ttgtactgtaggaaatgcaggat

SEQ ID NO: 82612 - DNA, 23 bp, Artificial sequence
  SiRNA target sequence
tgtactgtaggaaatgcaggata

SEQ ID NO: 82613 - DNA, 23 bp, Artificial sequence
  SiRNA target sequence
gtactgtaggaaatgcaggataa

SEQ ID NO: 82614 - DNA, 23 bp, Artificial sequence
  SiRNA target sequence
tactgtaggaaatgcaggataaa

SEQ ID NO: 82615 - DNA, 23 bp, Artificial sequence
  SiRNA target sequence
actgtaggaaatgcaggataaac

SEQ ID NO: 82616 - DNA, 23 bp, Artificial sequence
  SiRNA target sequence
ctgtaggaaatgcaggataaaca

SEQ ID NO: 82617 - DNA, 23 bp, Artificial sequence
  SiRNA target sequence
tgtaggaaatgcaggataaacag

SEQ ID NO: 82618 - DNA, 23 bp, Artificial sequence
  SiRNA target sequence
gtaggaaatgcaggataaacagc

SEQ ID NO: 82619 - DNA, 23 bp, Artificial sequence
  SiRNA target sequence
taggaaatgcaggataaacagct

SEQ ID NO: 82620 - DNA, 23 bp, Artificial sequence
  SiRNA target sequence
aggaaatgcaggataaacagctg

SEQ ID NO: 82621 - DNA, 23 bp, Artificial sequence
  SiRNA target sequence
ggaaatgcaggataaacagctgc

SEQ ID NO: 82622 - DNA, 23 bp, Artificial sequence
  SiRNA target sequence
gaaatgcaggataaacagctgcc

SEQ ID NO: 82623 - DNA, 23 bp, Artificial sequence
  SiRNA target sequence
aaatgcaggataaacagctgcca

SEQ ID NO: 82624 - DNA, 23 bp, Artificial sequence
  SiRNA target sequence
aatgcaggataaacagctgccat

SEQ ID NO: 82625 - DNA, 23 bp, Artificial sequence
  SiRNA target sequence
atgcaggataaacagctgccatg

SEQ ID NO: 82626 - DNA, 23 bp, Artificial sequence
  SiRNA target sequence
tgcaggataaacagctgccatgg

SEQ ID NO: 82627 - DNA, 23 bp, Artificial sequence
  SiRNA target sequence
gcaggataaacagctgccatggt

SEQ ID NO: 82628 - DNA, 23 bp, Artificial sequence
  SiRNA target sequence
caggataaacagctgccatggta

SEQ ID NO: 82629 - DNA, 23 bp, Artificial sequence
  SiRNA target sequence
aggataaacagctgccatggtat

SEQ ID NO: 82630 - DNA, 23 bp, Artificial sequence
  SiRNA target sequence
ggataaacagctgccatggtatg

SEQ ID NO: 82631 - DNA, 23 bp, Artificial sequence
  SiRNA target sequence
gataaacagctgccatggtatgt

SEQ ID NO: 82632 - DNA, 23 bp, Artificial sequence
  SiRNA target sequence
ataaacagctgccatggtatgta

SEQ ID NO: 82633 - DNA, 23 bp, Artificial sequence
  SiRNA target sequence
taaacagctgccatggtatgtaa

SEQ ID NO: 82634 - DNA, 23 bp, Artificial sequence
  SiRNA target sequence
aaacagctgccatggtatgtaaa

SEQ ID NO: 82635 - DNA, 23 bp, Artificial sequence
  SiRNA target sequence
aacagctgccatggtatgtaaaa

SEQ ID NO: 82636 - DNA, 23 bp, Artificial sequence
  SiRNA target sequence
acagctgccatggtatgtaaaag

SEQ ID NO: 82637 - DNA, 23 bp, Artificial sequence
  SiRNA target sequence
cagctgccatggtatgtaaaagt

SEQ ID NO: 82638 - DNA, 23 bp, Artificial sequence
  SiRNA target sequence
agctgccatggtatgtaaaagtg

SEQ ID NO: 82639 - DNA, 23 bp, Artificial sequence
  SiRNA target sequence
gctgccatggtatgtaaaagtgt

SEQ ID NO: 82640 - DNA, 23 bp, Artificial sequence
  SiRNA target sequence
ctgccatggtatgtaaaagtgtc

SEQ ID NO: 82641 - DNA, 23 bp, Artificial sequence
  SiRNA target sequence
tgccatggtatgtaaaagtgtcc

SEQ ID NO: 82642 - DNA, 23 bp, Artificial sequence
  SiRNA target sequence
gccatggtatgtaaaagtgtcca

SEQ ID NO: 82643 - DNA, 23 bp, Artificial sequence
  SiRNA target sequence
ccatggtatgtaaaagtgtccat

SEQ ID NO: 82644 - DNA, 23 bp, Artificial sequence
  SiRNA target sequence
catggtatgtaaaagtgtccatg

SEQ ID NO: 82645 - DNA, 23 bp, Artificial sequence
  SiRNA target sequence
atggtatgtaaaagtgtccatgt

SEQ ID NO: 82646 - DNA, 23 bp, Artificial sequence
  SiRNA target sequence
tggtatgtaaaagtgtccatgtt

SEQ ID NO: 82647 - DNA, 23 bp, Artificial sequence
  SiRNA target sequence
ggtatgtaaaagtgtccatgttg

SEQ ID NO: 82648 - DNA, 23 bp, Artificial sequence
  SiRNA target sequence
gtatgtaaaagtgtccatgttgc

SEQ ID NO: 82649 - DNA, 23 bp, Artificial sequence
  SiRNA target sequence
tatgtaaaagtgtccatgttgct

SEQ ID NO: 82650 - DNA, 23 bp, Artificial sequence
  SiRNA target sequence
atgtaaaagtgtccatgttgctc

SEQ ID NO: 82651 - DNA, 23 bp, Artificial sequence
  SiRNA target sequence
tgtaaaagtgtccatgttgctct

SEQ ID NO: 82652 - DNA, 23 bp, Artificial sequence
  SiRNA target sequence
gtaaaagtgtccatgttgctctc

SEQ ID NO: 82653 - DNA, 23 bp, Artificial sequence
  SiRNA target sequence
taaaagtgtccatgttgctctcc

SEQ ID NO: 82654 - DNA, 23 bp, Artificial sequence
  SiRNA target sequence
aaaagtgtccatgttgctctccc

SEQ ID NO: 82655 - DNA, 23 bp, Artificial sequence
  SiRNA target sequence
aaagtgtccatgttgctctcccc

SEQ ID NO: 82656 - DNA, 23 bp, Artificial sequence
  SiRNA target sequence
aagtgtccatgttgctctcccca

SEQ ID NO: 82657 - DNA, 23 bp, Artificial sequence
  SiRNA target sequence
agtgtccatgttgctctccccaa

SEQ ID NO: 82658 - DNA, 23 bp, Artificial sequence
  SiRNA target sequence
gtgtccatgttgctctccccaat

SEQ ID NO: 82659 - DNA, 23 bp, Artificial sequence
  SiRNA target sequence
tgtccatgttgctctccccaatc

SEQ ID NO: 82660 - DNA, 23 bp, Artificial sequence
  SiRNA target sequence
gtccatgttgctctccccaatct

SEQ ID NO: 82661 - DNA, 23 bp, Artificial sequence
  SiRNA target sequence
tccatgttgctctccccaatcta

SEQ ID NO: 82662 - DNA, 23 bp, Artificial sequence
  SiRNA target sequence
ccatgttgctctccccaatctat

SEQ ID NO: 82663 - DNA, 23 bp, Artificial sequence
  SiRNA target sequence
catgttgctctccccaatctatc

SEQ ID NO: 82664 - DNA, 23 bp, Artificial sequence
  SiRNA target sequence
atgttgctctccccaatctatct

SEQ ID NO: 82665 - DNA, 23 bp, Artificial sequence
  SiRNA target sequence
tgttgctctccccaatctatctt

SEQ ID NO: 82666 - DNA, 23 bp, Artificial sequence
  SiRNA target sequence
gttgctctccccaatctatcttt

SEQ ID NO: 82667 - DNA, 23 bp, Artificial sequence
  SiRNA target sequence
ttgctctccccaatctatcttta

SEQ ID NO: 82668 - DNA, 23 bp, Artificial sequence
  SiRNA target sequence
tgctctccccaatctatctttaa

SEQ ID NO: 82669 - DNA, 23 bp, Artificial sequence
  SiRNA target sequence
gctctccccaatctatctttaac

SEQ ID NO: 82670 - DNA, 23 bp, Artificial sequence
  SiRNA target sequence
ctctccccaatctatctttaact

SEQ ID NO: 82671 - DNA, 23 bp, Artificial sequence
  SiRNA target sequence
tctccccaatctatctttaactt

SEQ ID NO: 82672 - DNA, 23 bp, Artificial sequence
  SiRNA target sequence
ctccccaatctatctttaacttc

SEQ ID NO: 82673 - DNA, 23 bp, Artificial sequence
  SiRNA target sequence
tccccaatctatctttaacttcc

SEQ ID NO: 82674 - DNA, 23 bp, Artificial sequence
  SiRNA target sequence
ccccaatctatctttaacttcct

SEQ ID NO: 82675 - DNA, 23 bp, Artificial sequence
  SiRNA target sequence
cccaatctatctttaacttcctt

SEQ ID NO: 82676 - DNA, 23 bp, Artificial sequence
  SiRNA target sequence
ccaatctatctttaacttcctta

SEQ ID NO: 82677 - DNA, 23 bp, Artificial sequence
  SiRNA target sequence
caatctatctttaacttccttat

SEQ ID NO: 82678 - DNA, 23 bp, Artificial sequence
  SiRNA target sequence
aatctatctttaacttccttatt

SEQ ID NO: 82679 - DNA, 23 bp, Artificial sequence
  SiRNA target sequence
atctatctttaacttccttattt

SEQ ID NO: 82680 - DNA, 23 bp, Artificial sequence
  SiRNA target sequence
tctatctttaacttccttatttg

SEQ ID NO: 82681 - DNA, 23 bp, Artificial sequence
  SiRNA target sequence
ctatctttaacttccttatttgt

SEQ ID NO: 82682 - DNA, 23 bp, Artificial sequence
  SiRNA target sequence
tatctttaacttccttatttgtt

SEQ ID NO: 82683 - DNA, 23 bp, Artificial sequence
  SiRNA target sequence
atctttaacttccttatttgtta

SEQ ID NO: 82684 - DNA, 23 bp, Artificial sequence
  SiRNA target sequence
tctttaacttccttatttgttaa

SEQ ID NO: 82685 - DNA, 23 bp, Artificial sequence
  SiRNA target sequence
ctttaacttccttatttgttaat

SEQ ID NO: 82686 - DNA, 23 bp, Artificial sequence
  SiRNA target sequence
tttaacttccttatttgttaatt

SEQ ID NO: 82687 - DNA, 23 bp, Artificial sequence
  SiRNA target sequence
ttaacttccttatttgttaattt

SEQ ID NO: 82688 - DNA, 23 bp, Artificial sequence
  SiRNA target sequence
taacttccttatttgttaatttt

SEQ ID NO: 82689 - DNA, 23 bp, Artificial sequence
  SiRNA target sequence
aacttccttatttgttaattttt

SEQ ID NO: 82690 - DNA, 23 bp, Artificial sequence
  SiRNA target sequence
acttccttatttgttaatttttg

SEQ ID NO: 82691 - DNA, 23 bp, Artificial sequence
  SiRNA target sequence
cttccttatttgttaatttttga

SEQ ID NO: 82692 - DNA, 23 bp, Artificial sequence
  SiRNA target sequence
ttccttatttgttaatttttgat

SEQ ID NO: 82693 - DNA, 23 bp, Artificial sequence
  SiRNA target sequence
tccttatttgttaatttttgatt

SEQ ID NO: 82694 - DNA, 23 bp, Artificial sequence
  SiRNA target sequence
ccttatttgttaatttttgatta

SEQ ID NO: 82695 - DNA, 23 bp, Artificial sequence
  SiRNA target sequence
cttatttgttaatttttgattat

SEQ ID NO: 82696 - DNA, 23 bp, Artificial sequence
  SiRNA target sequence
ttatttgttaatttttgattatg

SEQ ID NO: 82697 - DNA, 23 bp, Artificial sequence
  SiRNA target sequence
tatttgttaatttttgattatga

SEQ ID NO: 82698 - DNA, 23 bp, Artificial sequence
  SiRNA target sequence
atttgttaatttttgattatgaa

SEQ ID NO: 82699 - DNA, 23 bp, Artificial sequence
  SiRNA target sequence
tttgttaatttttgattatgaat

SEQ ID NO: 82700 - DNA, 23 bp, Artificial sequence
  SiRNA target sequence
ttgttaatttttgattatgaatt

SEQ ID NO: 82701 - DNA, 23 bp, Artificial sequence
  SiRNA target sequence
tgttaatttttgattatgaatta

SEQ ID NO: 82702 - DNA, 23 bp, Artificial sequence
  SiRNA target sequence
gttaatttttgattatgaattag

SEQ ID NO: 82703 - DNA, 23 bp, Artificial sequence
  SiRNA target sequence
ttaatttttgattatgaattaga

SEQ ID NO: 82704 - DNA, 23 bp, Artificial sequence
  SiRNA target sequence
taatttttgattatgaattagac

SEQ ID NO: 82705 - DNA, 23 bp, Artificial sequence
  SiRNA target sequence
aatttttgattatgaattagacc

SEQ ID NO: 82706 - DNA, 23 bp, Artificial sequence
  SiRNA target sequence
atttttgattatgaattagacct

SEQ ID NO: 82707 - DNA, 23 bp, Artificial sequence
  SiRNA target sequence
tttttgattatgaattagaccta

SEQ ID NO: 82708 - DNA, 23 bp, Artificial sequence
  SiRNA target sequence
ttttgattatgaattagacctaa

SEQ ID NO: 82709 - DNA, 23 bp, Artificial sequence
  SiRNA target sequence
tttgattatgaattagacctaat

SEQ ID NO: 82710 - DNA, 23 bp, Artificial sequence
  SiRNA target sequence
ttgattatgaattagacctaatt

SEQ ID NO: 82711 - DNA, 23 bp, Artificial sequence
  SiRNA target sequence
tgattatgaattagacctaattc

SEQ ID NO: 82712 - DNA, 23 bp, Artificial sequence
  SiRNA target sequence
gattatgaattagacctaattca

SEQ ID NO: 82713 - DNA, 23 bp, Artificial sequence
  SiRNA target sequence
attatgaattagacctaattcac

SEQ ID NO: 82714 - DNA, 23 bp, Artificial sequence
  SiRNA target sequence
ttatgaattagacctaattcacc

SEQ ID NO: 82715 - DNA, 23 bp, Artificial sequence
  SiRNA target sequence
tatgaattagacctaattcacct

SEQ ID NO: 82716 - DNA, 23 bp, Artificial sequence
  SiRNA target sequence
atgaattagacctaattcaccta

SEQ ID NO: 82717 - DNA, 23 bp, Artificial sequence
  SiRNA target sequence
tgaattagacctaattcacctac

SEQ ID NO: 82718 - DNA, 23 bp, Artificial sequence
  SiRNA target sequence
gaattagacctaattcacctact

SEQ ID NO: 82719 - DNA, 23 bp, Artificial sequence
  SiRNA target sequence
aattagacctaattcacctactt

SEQ ID NO: 82720 - DNA, 23 bp, Artificial sequence
  SiRNA target sequence
attagacctaattcacctacttt

SEQ ID NO: 82721 - DNA, 23 bp, Artificial sequence
  SiRNA target sequence
ttagacctaattcacctactttt

SEQ ID NO: 82722 - DNA, 23 bp, Artificial sequence
  SiRNA target sequence
tagacctaattcacctacttttg

SEQ ID NO: 82723 - DNA, 23 bp, Artificial sequence
  SiRNA target sequence
agacctaattcacctacttttgg

SEQ ID NO: 82724 - DNA, 23 bp, Artificial sequence
  SiRNA target sequence
gacctaattcacctacttttggt

SEQ ID NO: 82725 - DNA, 23 bp, Artificial sequence
  SiRNA target sequence
acctaattcacctacttttggtg

SEQ ID NO: 82726 - DNA, 23 bp, Artificial sequence
  SiRNA target sequence
cctaattcacctacttttggtga

SEQ ID NO: 82727 - DNA, 23 bp, Artificial sequence
  SiRNA target sequence
ctaattcacctacttttggtgaa

SEQ ID NO: 82728 - DNA, 23 bp, Artificial sequence
  SiRNA target sequence
taattcacctacttttggtgaaa

SEQ ID NO: 82729 - DNA, 23 bp, Artificial sequence
  SiRNA target sequence
aattcacctacttttggtgaaat

SEQ ID NO: 82730 - DNA, 23 bp, Artificial sequence
  SiRNA target sequence
attcacctacttttggtgaaata

SEQ ID NO: 82731 - DNA, 23 bp, Artificial sequence
  SiRNA target sequence
ttcacctacttttggtgaaatag

SEQ ID NO: 82732 - DNA, 23 bp, Artificial sequence
  SiRNA target sequence
tcacctacttttggtgaaataga

SEQ ID NO: 82733 - DNA, 23 bp, Artificial sequence
  SiRNA target sequence
cacctacttttggtgaaatagat

SEQ ID NO: 82734 - DNA, 23 bp, Artificial sequence
  SiRNA target sequence
acctacttttggtgaaatagatt

SEQ ID NO: 82735 - DNA, 23 bp, Artificial sequence
  SiRNA target sequence
cctacttttggtgaaatagattg

SEQ ID NO: 82736 - DNA, 23 bp, Artificial sequence
  SiRNA target sequence
ctacttttggtgaaatagattgt

SEQ ID NO: 82737 - DNA, 23 bp, Artificial sequence
  SiRNA target sequence
tacttttggtgaaatagattgta

SEQ ID NO: 82738 - DNA, 23 bp, Artificial sequence
  SiRNA target sequence
acttttggtgaaatagattgtaa

SEQ ID NO: 82739 - DNA, 23 bp, Artificial sequence
  SiRNA target sequence
cttttggtgaaatagattgtaaa

SEQ ID NO: 82740 - DNA, 23 bp, Artificial sequence
  SiRNA target sequence
ttttggtgaaatagattgtaaaa

SEQ ID NO: 82741 - DNA, 23 bp, Artificial sequence
  SiRNA target sequence
tttggtgaaatagattgtaaaac

SEQ ID NO: 82742 - DNA, 23 bp, Artificial sequence
  SiRNA target sequence
ttggtgaaatagattgtaaaaca

SEQ ID NO: 82743 - DNA, 23 bp, Artificial sequence
  SiRNA target sequence
tggtgaaatagattgtaaaacag

SEQ ID NO: 82744 - DNA, 23 bp, Artificial sequence
  SiRNA target sequence
ggtgaaatagattgtaaaacaga

SEQ ID NO: 82745 - DNA, 23 bp, Artificial sequence
  SiRNA target sequence
gtgaaatagattgtaaaacagat

SEQ ID NO: 82746 - DNA, 23 bp, Artificial sequence
  SiRNA target sequence
tgaaatagattgtaaaacagatt

SEQ ID NO: 82747 - DNA, 23 bp, Artificial sequence
  SiRNA target sequence
gaaatagattgtaaaacagattt

SEQ ID NO: 82748 - DNA, 23 bp, Artificial sequence
  SiRNA target sequence
aaatagattgtaaaacagatttt

SEQ ID NO: 82749 - DNA, 23 bp, Artificial sequence
  SiRNA target sequence
aatagattgtaaaacagattttc

SEQ ID NO: 82750 - DNA, 23 bp, Artificial sequence
  SiRNA target sequence
atagattgtaaaacagattttcc

SEQ ID NO: 82751 - DNA, 23 bp, Artificial sequence
  SiRNA target sequence
tagattgtaaaacagattttcca

SEQ ID NO: 82752 - DNA, 23 bp, Artificial sequence
  SiRNA target sequence
agattgtaaaacagattttccaa

SEQ ID NO: 82753 - DNA, 23 bp, Artificial sequence
  SiRNA target sequence
gattgtaaaacagattttccaag

SEQ ID NO: 82754 - DNA, 23 bp, Artificial sequence
  SiRNA target sequence
attgtaaaacagattttccaagt

SEQ ID NO: 82755 - DNA, 23 bp, Artificial sequence
  SiRNA target sequence
ttgtaaaacagattttccaagtg

SEQ ID NO: 82756 - DNA, 23 bp, Artificial sequence
  SiRNA target sequence
tgtaaaacagattttccaagtga

SEQ ID NO: 82757 - DNA, 23 bp, Artificial sequence
  SiRNA target sequence
gtaaaacagattttccaagtgag

SEQ ID NO: 82758 - DNA, 23 bp, Artificial sequence
  SiRNA target sequence
taaaacagattttccaagtgagt

SEQ ID NO: 82759 - DNA, 23 bp, Artificial sequence
  SiRNA target sequence
aaaacagattttccaagtgagtt

SEQ ID NO: 82760 - DNA, 23 bp, Artificial sequence
  SiRNA target sequence
aaacagattttccaagtgagttg

SEQ ID NO: 82761 - DNA, 23 bp, Artificial sequence
  SiRNA target sequence
aacagattttccaagtgagttgt

SEQ ID NO: 82762 - DNA, 23 bp, Artificial sequence
  SiRNA target sequence
acagattttccaagtgagttgtc

SEQ ID NO: 82763 - DNA, 23 bp, Artificial sequence
  SiRNA target sequence
cagattttccaagtgagttgtct

SEQ ID NO: 82764 - DNA, 23 bp, Artificial sequence
  SiRNA target sequence
agattttccaagtgagttgtctg

SEQ ID NO: 82765 - DNA, 23 bp, Artificial sequence
  SiRNA target sequence
gattttccaagtgagttgtctgc

SEQ ID NO: 82766 - DNA, 23 bp, Artificial sequence
  SiRNA target sequence
attttccaagtgagttgtctgca

SEQ ID NO: 82767 - DNA, 23 bp, Artificial sequence
  SiRNA target sequence
ttttccaagtgagttgtctgcat

SEQ ID NO: 82768 - DNA, 23 bp, Artificial sequence
  SiRNA target sequence
tttccaagtgagttgtctgcatg

SEQ ID NO: 82769 - DNA, 23 bp, Artificial sequence
  SiRNA target sequence
ttccaagtgagttgtctgcatgt

SEQ ID NO: 82770 - DNA, 23 bp, Artificial sequence
  SiRNA target sequence
tccaagtgagttgtctgcatgtg

SEQ ID NO: 82771 - DNA, 23 bp, Artificial sequence
  SiRNA target sequence
ccaagtgagttgtctgcatgtgt

SEQ ID NO: 82772 - DNA, 23 bp, Artificial sequence
  SiRNA target sequence
caagtgagttgtctgcatgtgta

SEQ ID NO: 82773 - DNA, 23 bp, Artificial sequence
  SiRNA target sequence
aagtgagttgtctgcatgtgtat

SEQ ID NO: 82774 - DNA, 23 bp, Artificial sequence
  SiRNA target sequence
agtgagttgtctgcatgtgtatg

SEQ ID NO: 82775 - DNA, 23 bp, Artificial sequence
  SiRNA target sequence
gtgagttgtctgcatgtgtatgc

SEQ ID NO: 82776 - DNA, 23 bp, Artificial sequence
  SiRNA target sequence
tgagttgtctgcatgtgtatgcg

SEQ ID NO: 82777 - DNA, 23 bp, Artificial sequence
  SiRNA target sequence
gagttgtctgcatgtgtatgcgg

SEQ ID NO: 82778 - DNA, 23 bp, Artificial sequence
  SiRNA target sequence
agttgtctgcatgtgtatgcggg

SEQ ID NO: 82779 - DNA, 23 bp, Artificial sequence
  SiRNA target sequence
gttgtctgcatgtgtatgcggga

SEQ ID NO: 82780 - DNA, 23 bp, Artificial sequence
  SiRNA target sequence
ttgtctgcatgtgtatgcgggaa

SEQ ID NO: 82781 - DNA, 23 bp, Artificial sequence
  SiRNA target sequence
tgtctgcatgtgtatgcgggaaa

SEQ ID NO: 82782 - DNA, 23 bp, Artificial sequence
  SiRNA target sequence
gtctgcatgtgtatgcgggaaaa

SEQ ID NO: 82783 - DNA, 23 bp, Artificial sequence
  SiRNA target sequence
tctgcatgtgtatgcgggaaaaa

SEQ ID NO: 82784 - DNA, 23 bp, Artificial sequence
  SiRNA target sequence
ctgcatgtgtatgcgggaaaaaa

SEQ ID NO: 82785 - DNA, 23 bp, Artificial sequence
  SiRNA target sequence
tgcatgtgtatgcgggaaaaaat

SEQ ID NO: 82786 - DNA, 23 bp, Artificial sequence
  SiRNA target sequence
gcatgtgtatgcgggaaaaaatg

SEQ ID NO: 82787 - DNA, 23 bp, Artificial sequence
  SiRNA target sequence
catgtgtatgcgggaaaaaatgc

SEQ ID NO: 82788 - DNA, 23 bp, Artificial sequence
  SiRNA target sequence
atgtgtatgcgggaaaaaatgct

SEQ ID NO: 82789 - DNA, 23 bp, Artificial sequence
  SiRNA target sequence
tgtgtatgcgggaaaaaatgctg

SEQ ID NO: 82790 - DNA, 23 bp, Artificial sequence
  SiRNA target sequence
gtgtatgcgggaaaaaatgctgt

SEQ ID NO: 82791 - DNA, 23 bp, Artificial sequence
  SiRNA target sequence
tgtatgcgggaaaaaatgctgtt

SEQ ID NO: 82792 - DNA, 23 bp, Artificial sequence
  SiRNA target sequence
gtatgcgggaaaaaatgctgttt

SEQ ID NO: 82793 - DNA, 23 bp, Artificial sequence
  SiRNA target sequence
tatgcgggaaaaaatgctgtttt

SEQ ID NO: 82794 - DNA, 23 bp, Artificial sequence
  SiRNA target sequence
atgcgggaaaaaatgctgttttg

SEQ ID NO: 82795 - DNA, 23 bp, Artificial sequence
  SiRNA target sequence
tgcgggaaaaaatgctgttttgc

SEQ ID NO: 82796 - DNA, 23 bp, Artificial sequence
  SiRNA target sequence
gcgggaaaaaatgctgttttgct

SEQ ID NO: 82797 - DNA, 23 bp, Artificial sequence
  SiRNA target sequence
cgggaaaaaatgctgttttgcta

SEQ ID NO: 82798 - DNA, 23 bp, Artificial sequence
  SiRNA target sequence
gggaaaaaatgctgttttgctaa

SEQ ID NO: 82799 - DNA, 23 bp, Artificial sequence
  SiRNA target sequence
ggaaaaaatgctgttttgctaaa

SEQ ID NO: 82800 - DNA, 23 bp, Artificial sequence
  SiRNA target sequence
gaaaaaatgctgttttgctaaat

SEQ ID NO: 82801 - DNA, 23 bp, Artificial sequence
  SiRNA target sequence
aaaaaatgctgttttgctaaata

SEQ ID NO: 82802 - DNA, 23 bp, Artificial sequence
  SiRNA target sequence
aaaaatgctgttttgctaaataa

SEQ ID NO: 82803 - DNA, 23 bp, Artificial sequence
  SiRNA target sequence
aaaatgctgttttgctaaataaa

SEQ ID NO: 82804 - DNA, 23 bp, Artificial sequence
  SiRNA target sequence
aaatgctgttttgctaaataaac

SEQ ID NO: 82805 - DNA, 23 bp, Artificial sequence
  SiRNA target sequence
aatgctgttttgctaaataaaca

SEQ ID NO: 82806 - DNA, 23 bp, Artificial sequence
  SiRNA target sequence
atgctgttttgctaaataaacaa

SEQ ID NO: 82807 - DNA, 23 bp, Artificial sequence
  SiRNA target sequence
tgctgttttgctaaataaacaat

SEQ ID NO: 82808 - DNA, 23 bp, Artificial sequence
  SiRNA target sequence
gctgttttgctaaataaacaatc

SEQ ID NO: 82809 - DNA, 23 bp, Artificial sequence
  SiRNA target sequence
ctgttttgctaaataaacaatcc

SEQ ID NO: 82810 - DNA, 23 bp, Artificial sequence
  SiRNA target sequence
tgttttgctaaataaacaatcca

SEQ ID NO: 82811 - DNA, 23 bp, Artificial sequence
  SiRNA target sequence
gttttgctaaataaacaatccat

SEQ ID NO: 82812 - DNA, 23 bp, Artificial sequence
  SiRNA target sequence
ttttgctaaataaacaatccata

SEQ ID NO: 82813 - DNA, 23 bp, Artificial sequence
  SiRNA target sequence
tttgctaaataaacaatccatac

SEQ ID NO: 82814 - DNA, 23 bp, Artificial sequence
  SiRNA target sequence
ttgctaaataaacaatccataca

SEQ ID NO: 82815 - DNA, 23 bp, Artificial sequence
  SiRNA target sequence
tgctaaataaacaatccatacac

SEQ ID NO: 82816 - DNA, 23 bp, Artificial sequence
  SiRNA target sequence
gctaaataaacaatccatacacc

SEQ ID NO: 82817 - DNA, 23 bp, Artificial sequence
  SiRNA target sequence
ctaaataaacaatccatacaccc

SEQ ID NO: 82818 - DNA, 23 bp, Artificial sequence
  SiRNA target sequence
taaataaacaatccatacaccca

SEQ ID NO: 82819 - DNA, 23 bp, Artificial sequence
  SiRNA target sequence
aaataaacaatccatacacccaa

SEQ ID NO: 82820 - DNA, 23 bp, Artificial sequence
  SiRNA target sequence
aataaacaatccatacacccaat

SEQ ID NO: 82821 - DNA, 23 bp, Artificial sequence
  SiRNA target sequence
ataaacaatccatacacccaata

SEQ ID NO: 82822 - DNA, 23 bp, Artificial sequence
  SiRNA target sequence
taaacaatccatacacccaataa

SEQ ID NO: 82823 - DNA, 23 bp, Artificial sequence
  SiRNA target sequence
aaacaatccatacacccaataag

SEQ ID NO: 82824 - DNA, 23 bp, Artificial sequence
  SiRNA target sequence
aacaatccatacacccaataaga

SEQ ID NO: 82825 - DNA, 23 bp, Artificial sequence
  SiRNA target sequence
acaatccatacacccaataagat

SEQ ID NO: 82826 - DNA, 23 bp, Artificial sequence
  SiRNA target sequence
caatccatacacccaataagata

SEQ ID NO: 82827 - DNA, 23 bp, Artificial sequence
  SiRNA target sequence
aatccatacacccaataagataa

SEQ ID NO: 82828 - DNA, 23 bp, Artificial sequence
  SiRNA target sequence
atccatacacccaataagataat

SEQ ID NO: 82829 - DNA, 23 bp, Artificial sequence
  SiRNA target sequence
tccatacacccaataagataata

SEQ ID NO: 82830 - DNA, 23 bp, Artificial sequence
  SiRNA target sequence
ccatacacccaataagataataa

SEQ ID NO: 82831 - DNA, 23 bp, Artificial sequence
  SiRNA target sequence
catacacccaataagataataag

SEQ ID NO: 82832 - DNA, 23 bp, Artificial sequence
  SiRNA target sequence
atacacccaataagataataagt

SEQ ID NO: 82833 - DNA, 23 bp, Artificial sequence
  SiRNA target sequence
tacacccaataagataataagtc

SEQ ID NO: 82834 - DNA, 23 bp, Artificial sequence
  SiRNA target sequence
acacccaataagataataagtcc

SEQ ID NO: 82835 - DNA, 23 bp, Artificial sequence
  SiRNA target sequence
cacccaataagataataagtcct

SEQ ID NO: 82836 - DNA, 23 bp, Artificial sequence
  SiRNA target sequence
acccaataagataataagtcctc

SEQ ID NO: 82837 - DNA, 23 bp, Artificial sequence
  SiRNA target sequence
cccaataagataataagtcctct

SEQ ID NO: 82838 - DNA, 23 bp, Artificial sequence
  SiRNA target sequence
ccaataagataataagtcctctt

SEQ ID NO: 82839 - DNA, 23 bp, Artificial sequence
  SiRNA target sequence
caataagataataagtcctctta

SEQ ID NO: 82840 - DNA, 23 bp, Artificial sequence
  SiRNA target sequence
aataagataataagtcctcttaa

SEQ ID NO: 82841 - DNA, 23 bp, Artificial sequence
  SiRNA target sequence
ataagataataagtcctcttaat

SEQ ID NO: 82842 - DNA, 23 bp, Artificial sequence
  SiRNA target sequence
taagataataagtcctcttaata

SEQ ID NO: 82843 - DNA, 23 bp, Artificial sequence
  SiRNA target sequence
aagataataagtcctcttaatac

SEQ ID NO: 82844 - DNA, 23 bp, Artificial sequence
  SiRNA target sequence
agataataagtcctcttaatact

SEQ ID NO: 82845 - DNA, 23 bp, Artificial sequence
  SiRNA target sequence
gataataagtcctcttaatactt

SEQ ID NO: 82846 - DNA, 23 bp, Artificial sequence
  SiRNA target sequence
ataataagtcctcttaatacttt

SEQ ID NO: 82847 - DNA, 23 bp, Artificial sequence
  SiRNA target sequence
taataagtcctcttaatactttc

SEQ ID NO: 82848 - DNA, 23 bp, Artificial sequence
  SiRNA target sequence
aataagtcctcttaatactttct

SEQ ID NO: 82849 - DNA, 23 bp, Artificial sequence
  SiRNA target sequence
ataagtcctcttaatactttctg

SEQ ID NO: 82850 - DNA, 23 bp, Artificial sequence
  SiRNA target sequence
taagtcctcttaatactttctgc

SEQ ID NO: 82851 - DNA, 23 bp, Artificial sequence
  SiRNA target sequence
aagtcctcttaatactttctgct

SEQ ID NO: 82852 - DNA, 23 bp, Artificial sequence
  SiRNA target sequence
agtcctcttaatactttctgctc

SEQ ID NO: 82853 - DNA, 23 bp, Artificial sequence
  SiRNA target sequence
gtcctcttaatactttctgctct

SEQ ID NO: 82854 - DNA, 23 bp, Artificial sequence
  SiRNA target sequence
tcctcttaatactttctgctctt

SEQ ID NO: 82855 - DNA, 23 bp, Artificial sequence
  SiRNA target sequence
cctcttaatactttctgctcttt

SEQ ID NO: 82856 - DNA, 23 bp, Artificial sequence
  SiRNA target sequence
ctcttaatactttctgctctttg

SEQ ID NO: 82857 - DNA, 23 bp, Artificial sequence
  SiRNA target sequence
tcttaatactttctgctctttgt

SEQ ID NO: 82858 - DNA, 23 bp, Artificial sequence
  SiRNA target sequence
cttaatactttctgctctttgtt

SEQ ID NO: 82859 - DNA, 23 bp, Artificial sequence
  SiRNA target sequence
ttaatactttctgctctttgttc

SEQ ID NO: 82860 - DNA, 23 bp, Artificial sequence
  SiRNA target sequence
taatactttctgctctttgttca

SEQ ID NO: 82861 - DNA, 23 bp, Artificial sequence
  SiRNA target sequence
aatactttctgctctttgttcat

SEQ ID NO: 82862 - DNA, 24 bp, Artificial sequence
  SiRNA target sequence
ttattctggttcacaaccacaact

SEQ ID NO: 82863 - DNA, 24 bp, Artificial sequence
  SiRNA target sequence
tattctggttcacaaccacaactc

SEQ ID NO: 82864 - DNA, 24 bp, Artificial sequence
  SiRNA target sequence
attctggttcacaaccacaactcc

SEQ ID NO: 82865 - DNA, 24 bp, Artificial sequence
  SiRNA target sequence
ttctggttcacaaccacaactcca

SEQ ID NO: 82866 - DNA, 24 bp, Artificial sequence
  SiRNA target sequence
tctggttcacaaccacaactccaa

SEQ ID NO: 82867 - DNA, 24 bp, Artificial sequence
  SiRNA target sequence
ctggttcacaaccacaactccaaa

SEQ ID NO: 82868 - DNA, 24 bp, Artificial sequence
  SiRNA target sequence
tggttcacaaccacaactccaaac

SEQ ID NO: 82869 - DNA, 24 bp, Artificial sequence
  SiRNA target sequence
ggttcacaaccacaactccaaaca

SEQ ID NO: 82870 - DNA, 24 bp, Artificial sequence
  SiRNA target sequence
gttcacaaccacaactccaaacac

SEQ ID NO: 82871 - DNA, 24 bp, Artificial sequence
  SiRNA target sequence
ttcacaaccacaactccaaacacc

SEQ ID NO: 82872 - DNA, 24 bp, Artificial sequence
  SiRNA target sequence
tcacaaccacaactccaaacacct

SEQ ID NO: 82873 - DNA, 24 bp, Artificial sequence
  SiRNA target sequence
cacaaccacaactccaaacacctt

SEQ ID NO: 82874 - DNA, 24 bp, Artificial sequence
  SiRNA target sequence
acaaccacaactccaaacaccttc

SEQ ID NO: 82875 - DNA, 24 bp, Artificial sequence
  SiRNA target sequence
caaccacaactccaaacaccttct

SEQ ID NO: 82876 - DNA, 24 bp, Artificial sequence
  SiRNA target sequence
aaccacaactccaaacaccttcta

SEQ ID NO: 82877 - DNA, 24 bp, Artificial sequence
  SiRNA target sequence
accacaactccaaacaccttctac

SEQ ID NO: 82878 - DNA, 24 bp, Artificial sequence
  SiRNA target sequence
ccacaactccaaacaccttctacc

SEQ ID NO: 82879 - DNA, 24 bp, Artificial sequence
  SiRNA target sequence
cacaactccaaacaccttctacct

SEQ ID NO: 82880 - DNA, 24 bp, Artificial sequence
  SiRNA target sequence
acaactccaaacaccttctacctt

SEQ ID NO: 82881 - DNA, 24 bp, Artificial sequence
  SiRNA target sequence
caactccaaacaccttctaccttt

SEQ ID NO: 82882 - DNA, 24 bp, Artificial sequence
  SiRNA target sequence
aactccaaacaccttctacctttt

SEQ ID NO: 82883 - DNA, 24 bp, Artificial sequence
  SiRNA target sequence
actccaaacaccttctaccttttt

SEQ ID NO: 82884 - DNA, 24 bp, Artificial sequence
  SiRNA target sequence
ctccaaacaccttctaccttttta

SEQ ID NO: 82885 - DNA, 24 bp, Artificial sequence
  SiRNA target sequence
tccaaacaccttctacctttttac

SEQ ID NO: 82886 - DNA, 24 bp, Artificial sequence
  SiRNA target sequence
ccaaacaccttctacctttttaca

SEQ ID NO: 82887 - DNA, 24 bp, Artificial sequence
  SiRNA target sequence
caaacaccttctacctttttacag

SEQ ID NO: 82888 - DNA, 24 bp, Artificial sequence
  SiRNA target sequence
aaacaccttctacctttttacagt

SEQ ID NO: 82889 - DNA, 24 bp, Artificial sequence
  SiRNA target sequence
aacaccttctacctttttacagtc

SEQ ID NO: 82890 - DNA, 24 bp, Artificial sequence
  SiRNA target sequence
acaccttctacctttttacagtcc

SEQ ID NO: 82891 - DNA, 24 bp, Artificial sequence
  SiRNA target sequence
caccttctacctttttacagtcca

SEQ ID NO: 82892 - DNA, 24 bp, Artificial sequence
  SiRNA target sequence
accttctacctttttacagtccat

SEQ ID NO: 82893 - DNA, 24 bp, Artificial sequence
  SiRNA target sequence
ccttctacctttttacagtccata

SEQ ID NO: 82894 - DNA, 24 bp, Artificial sequence
  SiRNA target sequence
cttctacctttttacagtccataa

SEQ ID NO: 82895 - DNA, 24 bp, Artificial sequence
  SiRNA target sequence
ttctacctttttacagtccataat

SEQ ID NO: 82896 - DNA, 24 bp, Artificial sequence
  SiRNA target sequence
tctacctttttacagtccataatg

SEQ ID NO: 82897 - DNA, 24 bp, Artificial sequence
  SiRNA target sequence
ctacctttttacagtccataatgg

SEQ ID NO: 82898 - DNA, 24 bp, Artificial sequence
  SiRNA target sequence
tacctttttacagtccataatggg

SEQ ID NO: 82899 - DNA, 24 bp, Artificial sequence
  SiRNA target sequence
acctttttacagtccataatgggc

SEQ ID NO: 82900 - DNA, 24 bp, Artificial sequence
  SiRNA target sequence
cctttttacagtccataatgggct

SEQ ID NO: 82901 - DNA, 24 bp, Artificial sequence
  SiRNA target sequence
ctttttacagtccataatgggctt

SEQ ID NO: 82902 - DNA, 24 bp, Artificial sequence
  SiRNA target sequence
tttttacagtccataatgggcttt

SEQ ID NO: 82903 - DNA, 24 bp, Artificial sequence
  SiRNA target sequence
ttttacagtccataatgggctttc

SEQ ID NO: 82904 - DNA, 24 bp, Artificial sequence
  SiRNA target sequence
tttacagtccataatgggctttcc

SEQ ID NO: 82905 - DNA, 24 bp, Artificial sequence
  SiRNA target sequence
ttacagtccataatgggctttcct

SEQ ID NO: 82906 - DNA, 24 bp, Artificial sequence
  SiRNA target sequence
tacagtccataatgggctttccta

SEQ ID NO: 82907 - DNA, 24 bp, Artificial sequence
  SiRNA target sequence
acagtccataatgggctttcctaa

SEQ ID NO: 82908 - DNA, 24 bp, Artificial sequence
  SiRNA target sequence
cagtccataatgggctttcctaat

SEQ ID NO: 82909 - DNA, 24 bp, Artificial sequence
  SiRNA target sequence
agtccataatgggctttcctaatc

SEQ ID NO: 82910 - DNA, 24 bp, Artificial sequence
  SiRNA target sequence
gtccataatgggctttcctaatct

SEQ ID NO: 82911 - DNA, 24 bp, Artificial sequence
  SiRNA target sequence
tccataatgggctttcctaatctt

SEQ ID NO: 82912 - DNA, 24 bp, Artificial sequence
  SiRNA target sequence
ccataatgggctttcctaatcttt

SEQ ID NO: 82913 - DNA, 24 bp, Artificial sequence
  SiRNA target sequence
cataatgggctttcctaatctttt

SEQ ID NO: 82914 - DNA, 24 bp, Artificial sequence
  SiRNA target sequence
ataatgggctttcctaatctttta

SEQ ID NO: 82915 - DNA, 24 bp, Artificial sequence
  SiRNA target sequence
taatgggctttcctaatcttttat

SEQ ID NO: 82916 - DNA, 24 bp, Artificial sequence
  SiRNA target sequence
aatgggctttcctaatcttttatt

SEQ ID NO: 82917 - DNA, 24 bp, Artificial sequence
  SiRNA target sequence
atgggctttcctaatcttttatta

SEQ ID NO: 82918 - DNA, 24 bp, Artificial sequence
  SiRNA target sequence
tgggctttcctaatcttttattaa

SEQ ID NO: 82919 - DNA, 24 bp, Artificial sequence
  SiRNA target sequence
gggctttcctaatcttttattaac

SEQ ID NO: 82920 - DNA, 24 bp, Artificial sequence
  SiRNA target sequence
ggctttcctaatcttttattaact

SEQ ID NO: 82921 - DNA, 24 bp, Artificial sequence
  SiRNA target sequence
gctttcctaatcttttattaacta

SEQ ID NO: 82922 - DNA, 24 bp, Artificial sequence
  SiRNA target sequence
ctttcctaatcttttattaactat

SEQ ID NO: 82923 - DNA, 24 bp, Artificial sequence
  SiRNA target sequence
tttcctaatcttttattaactatg

SEQ ID NO: 82924 - DNA, 24 bp, Artificial sequence
  SiRNA target sequence
ttcctaatcttttattaactatgt

SEQ ID NO: 82925 - DNA, 24 bp, Artificial sequence
  SiRNA target sequence
tcctaatcttttattaactatgtt

SEQ ID NO: 82926 - DNA, 24 bp, Artificial sequence
  SiRNA target sequence
cctaatcttttattaactatgtta

SEQ ID NO: 82927 - DNA, 24 bp, Artificial sequence
  SiRNA target sequence
ctaatcttttattaactatgttat

SEQ ID NO: 82928 - DNA, 24 bp, Artificial sequence
  SiRNA target sequence
taatcttttattaactatgttatg

SEQ ID NO: 82929 - DNA, 24 bp, Artificial sequence
  SiRNA target sequence
aatcttttattaactatgttatgt

SEQ ID NO: 82930 - DNA, 24 bp, Artificial sequence
  SiRNA target sequence
atcttttattaactatgttatgtg

SEQ ID NO: 82931 - DNA, 24 bp, Artificial sequence
  SiRNA target sequence
tcttttattaactatgttatgtgc

SEQ ID NO: 82932 - DNA, 24 bp, Artificial sequence
  SiRNA target sequence
cttttattaactatgttatgtgct

SEQ ID NO: 82933 - DNA, 24 bp, Artificial sequence
  SiRNA target sequence
ttttattaactatgttatgtgctt

SEQ ID NO: 82934 - DNA, 24 bp, Artificial sequence
  SiRNA target sequence
tttattaactatgttatgtgcttt

SEQ ID NO: 82935 - DNA, 24 bp, Artificial sequence
  SiRNA target sequence
ttattaactatgttatgtgcttta

SEQ ID NO: 82936 - DNA, 24 bp, Artificial sequence
  SiRNA target sequence
tattaactatgttatgtgctttac

SEQ ID NO: 82937 - DNA, 24 bp, Artificial sequence
  SiRNA target sequence
attaactatgttatgtgctttaca

SEQ ID NO: 82938 - DNA, 24 bp, Artificial sequence
  SiRNA target sequence
ttaactatgttatgtgctttacat

SEQ ID NO: 82939 - DNA, 24 bp, Artificial sequence
  SiRNA target sequence
taactatgttatgtgctttacata

SEQ ID NO: 82940 - DNA, 24 bp, Artificial sequence
  SiRNA target sequence
aactatgttatgtgctttacatag

SEQ ID NO: 82941 - DNA, 24 bp, Artificial sequence
  SiRNA target sequence
actatgttatgtgctttacatagc

SEQ ID NO: 82942 - DNA, 24 bp, Artificial sequence
  SiRNA target sequence
ctatgttatgtgctttacatagcc

SEQ ID NO: 82943 - DNA, 24 bp, Artificial sequence
  SiRNA target sequence
tatgttatgtgctttacatagcca

SEQ ID NO: 82944 - DNA, 24 bp, Artificial sequence
  SiRNA target sequence
atgttatgtgctttacatagccac

SEQ ID NO: 82945 - DNA, 24 bp, Artificial sequence
  SiRNA target sequence
tgttatgtgctttacatagccact

SEQ ID NO: 82946 - DNA, 24 bp, Artificial sequence
  SiRNA target sequence
gttatgtgctttacatagccactg

SEQ ID NO: 82947 - DNA, 24 bp, Artificial sequence
  SiRNA target sequence
ttatgtgctttacatagccactgg

SEQ ID NO: 82948 - DNA, 24 bp, Artificial sequence
  SiRNA target sequence
tatgtgctttacatagccactgga

SEQ ID NO: 82949 - DNA, 24 bp, Artificial sequence
  SiRNA target sequence
atgtgctttacatagccactggac

SEQ ID NO: 82950 - DNA, 24 bp, Artificial sequence
  SiRNA target sequence
tgtgctttacatagccactggaca

SEQ ID NO: 82951 - DNA, 24 bp, Artificial sequence
  SiRNA target sequence
gtgctttacatagccactggacaa

SEQ ID NO: 82952 - DNA, 24 bp, Artificial sequence
  SiRNA target sequence
tgctttacatagccactggacaaa

SEQ ID NO: 82953 - DNA, 24 bp, Artificial sequence
  SiRNA target sequence
gctttacatagccactggacaaat

SEQ ID NO: 82954 - DNA, 24 bp, Artificial sequence
  SiRNA target sequence
ctttacatagccactggacaaatt

SEQ ID NO: 82955 - DNA, 24 bp, Artificial sequence
  SiRNA target sequence
tttacatagccactggacaaattc

SEQ ID NO: 82956 - DNA, 24 bp, Artificial sequence
  SiRNA target sequence
ttacatagccactggacaaattcg

SEQ ID NO: 82957 - DNA, 24 bp, Artificial sequence
  SiRNA target sequence
tacatagccactggacaaattcgt

SEQ ID NO: 82958 - DNA, 24 bp, Artificial sequence
  SiRNA target sequence
acatagccactggacaaattcgtc

SEQ ID NO: 82959 - DNA, 24 bp, Artificial sequence
  SiRNA target sequence
catagccactggacaaattcgtca

SEQ ID NO: 82960 - DNA, 24 bp, Artificial sequence
  SiRNA target sequence
atagccactggacaaattcgtcat

SEQ ID NO: 82961 - DNA, 24 bp, Artificial sequence
  SiRNA target sequence
tagccactggacaaattcgtcatg

SEQ ID NO: 82962 - DNA, 24 bp, Artificial sequence
  SiRNA target sequence
agccactggacaaattcgtcatgt

SEQ ID NO: 82963 - DNA, 24 bp, Artificial sequence
  SiRNA target sequence
gccactggacaaattcgtcatgtg

SEQ ID NO: 82964 - DNA, 24 bp, Artificial sequence
  SiRNA target sequence
ccactggacaaattcgtcatgtgt

SEQ ID NO: 82965 - DNA, 24 bp, Artificial sequence
  SiRNA target sequence
cactggacaaattcgtcatgtgtg

SEQ ID NO: 82966 - DNA, 24 bp, Artificial sequence
  SiRNA target sequence
actggacaaattcgtcatgtgtgg

SEQ ID NO: 82967 - DNA, 24 bp, Artificial sequence
  SiRNA target sequence
ctggacaaattcgtcatgtgtggc

SEQ ID NO: 82968 - DNA, 24 bp, Artificial sequence
  SiRNA target sequence
tggacaaattcgtcatgtgtggca

SEQ ID NO: 82969 - DNA, 24 bp, Artificial sequence
  SiRNA target sequence
ggacaaattcgtcatgtgtggcaa

SEQ ID NO: 82970 - DNA, 24 bp, Artificial sequence
  SiRNA target sequence
gacaaattcgtcatgtgtggcaac

SEQ ID NO: 82971 - DNA, 24 bp, Artificial sequence
  SiRNA target sequence
acaaattcgtcatgtgtggcaact

SEQ ID NO: 82972 - DNA, 24 bp, Artificial sequence
  SiRNA target sequence
caaattcgtcatgtgtggcaactt

SEQ ID NO: 82973 - DNA, 24 bp, Artificial sequence
  SiRNA target sequence
aaattcgtcatgtgtggcaacttg

SEQ ID NO: 82974 - DNA, 24 bp, Artificial sequence
  SiRNA target sequence
aattcgtcatgtgtggcaacttgt

SEQ ID NO: 82975 - DNA, 24 bp, Artificial sequence
  SiRNA target sequence
attcgtcatgtgtggcaacttgtg

SEQ ID NO: 82976 - DNA, 24 bp, Artificial sequence
  SiRNA target sequence
ttcgtcatgtgtggcaacttgtgg

SEQ ID NO: 82977 - DNA, 24 bp, Artificial sequence
  SiRNA target sequence
tcgtcatgtgtggcaacttgtgga

SEQ ID NO: 82978 - DNA, 24 bp, Artificial sequence
  SiRNA target sequence
cgtcatgtgtggcaacttgtggag

SEQ ID NO: 82979 - DNA, 24 bp, Artificial sequence
  SiRNA target sequence
gtcatgtgtggcaacttgtggagg

SEQ ID NO: 82980 - DNA, 24 bp, Artificial sequence
  SiRNA target sequence
tcatgtgtggcaacttgtggagga

SEQ ID NO: 82981 - DNA, 24 bp, Artificial sequence
  SiRNA target sequence
catgtgtggcaacttgtggaggat

SEQ ID NO: 82982 - DNA, 24 bp, Artificial sequence
  SiRNA target sequence
atgtgtggcaacttgtggaggatt

SEQ ID NO: 82983 - DNA, 24 bp, Artificial sequence
  SiRNA target sequence
tgtgtggcaacttgtggaggattt

SEQ ID NO: 82984 - DNA, 24 bp, Artificial sequence
  SiRNA target sequence
gtgtggcaacttgtggaggattta

SEQ ID NO: 82985 - DNA, 24 bp, Artificial sequence
  SiRNA target sequence
tgtggcaacttgtggaggatttaa

SEQ ID NO: 82986 - DNA, 24 bp, Artificial sequence
  SiRNA target sequence
gtggcaacttgtggaggatttaag

SEQ ID NO: 82987 - DNA, 24 bp, Artificial sequence
  SiRNA target sequence
tggcaacttgtggaggatttaagc

SEQ ID NO: 82988 - DNA, 24 bp, Artificial sequence
  SiRNA target sequence
ggcaacttgtggaggatttaagct

SEQ ID NO: 82989 - DNA, 24 bp, Artificial sequence
  SiRNA target sequence
gcaacttgtggaggatttaagctt

SEQ ID NO: 82990 - DNA, 24 bp, Artificial sequence
  SiRNA target sequence
caacttgtggaggatttaagctta

SEQ ID NO: 82991 - DNA, 24 bp, Artificial sequence
  SiRNA target sequence
aacttgtggaggatttaagcttaa

SEQ ID NO: 82992 - DNA, 24 bp, Artificial sequence
  SiRNA target sequence
acttgtggaggatttaagcttaac

SEQ ID NO: 82993 - DNA, 24 bp, Artificial sequence
  SiRNA target sequence
cttgtggaggatttaagcttaaca

SEQ ID NO: 82994 - DNA, 24 bp, Artificial sequence
  SiRNA target sequence
ttgtggaggatttaagcttaacag

SEQ ID NO: 82995 - DNA, 24 bp, Artificial sequence
  SiRNA target sequence
tgtggaggatttaagcttaacagt

SEQ ID NO: 82996 - DNA, 24 bp, Artificial sequence
  SiRNA target sequence
gtggaggatttaagcttaacagtc

SEQ ID NO: 82997 - DNA, 24 bp, Artificial sequence
  SiRNA target sequence
tggaggatttaagcttaacagtct

SEQ ID NO: 82998 - DNA, 24 bp, Artificial sequence
  SiRNA target sequence
ggaggatttaagcttaacagtctt

SEQ ID NO: 82999 - DNA, 24 bp, Artificial sequence
  SiRNA target sequence
gaggatttaagcttaacagtcttt

SEQ ID NO: 83000 - DNA, 24 bp, Artificial sequence
  SiRNA target sequence
aggatttaagcttaacagtctttg

SEQ ID NO: 83001 - DNA, 24 bp, Artificial sequence
  SiRNA target sequence
ggatttaagcttaacagtctttga

SEQ ID NO: 83002 - DNA, 24 bp, Artificial sequence
  SiRNA target sequence
gatttaagcttaacagtctttgaa

SEQ ID NO: 83003 - DNA, 24 bp, Artificial sequence
  SiRNA target sequence
atttaagcttaacagtctttgaaa

SEQ ID NO: 83004 - DNA, 24 bp, Artificial sequence
  SiRNA target sequence
tttaagcttaacagtctttgaaaa

SEQ ID NO: 83005 - DNA, 24 bp, Artificial sequence
  SiRNA target sequence
ttaagcttaacagtctttgaaaat

SEQ ID NO: 83006 - DNA, 24 bp, Artificial sequence
  SiRNA target sequence
taagcttaacagtctttgaaaatg

SEQ ID NO: 83007 - DNA, 24 bp, Artificial sequence
  SiRNA target sequence
aagcttaacagtctttgaaaatgt

SEQ ID NO: 83008 - DNA, 24 bp, Artificial sequence
  SiRNA target sequence
agcttaacagtctttgaaaatgtc

SEQ ID NO: 83009 - DNA, 24 bp, Artificial sequence
  SiRNA target sequence
gcttaacagtctttgaaaatgtcc

SEQ ID NO: 83010 - DNA, 24 bp, Artificial sequence
  SiRNA target sequence
cttaacagtctttgaaaatgtcca

SEQ ID NO: 83011 - DNA, 24 bp, Artificial sequence
  SiRNA target sequence
ttaacagtctttgaaaatgtccac

SEQ ID NO: 83012 - DNA, 24 bp, Artificial sequence
  SiRNA target sequence
taacagtctttgaaaatgtccaca

SEQ ID NO: 83013 - DNA, 24 bp, Artificial sequence
  SiRNA target sequence
aacagtctttgaaaatgtccacaa

SEQ ID NO: 83014 - DNA, 24 bp, Artificial sequence
  SiRNA target sequence
acagtctttgaaaatgtccacaac

SEQ ID NO: 83015 - DNA, 24 bp, Artificial sequence
  SiRNA target sequence
cagtctttgaaaatgtccacaaca

SEQ ID NO: 83016 - DNA, 24 bp, Artificial sequence
  SiRNA target sequence
agtctttgaaaatgtccacaacat

SEQ ID NO: 83017 - DNA, 24 bp, Artificial sequence
  SiRNA target sequence
gtctttgaaaatgtccacaacatt

SEQ ID NO: 83018 - DNA, 24 bp, Artificial sequence
  SiRNA target sequence
tctttgaaaatgtccacaacattc

SEQ ID NO: 83019 - DNA, 24 bp, Artificial sequence
  SiRNA target sequence
ctttgaaaatgtccacaacattct

SEQ ID NO: 83020 - DNA, 24 bp, Artificial sequence
  SiRNA target sequence
tttgaaaatgtccacaacattctg

SEQ ID NO: 83021 - DNA, 24 bp, Artificial sequence
  SiRNA target sequence
ttgaaaatgtccacaacattctgc

SEQ ID NO: 83022 - DNA, 24 bp, Artificial sequence
  SiRNA target sequence
tgaaaatgtccacaacattctgca

SEQ ID NO: 83023 - DNA, 24 bp, Artificial sequence
  SiRNA target sequence
gaaaatgtccacaacattctgcac

SEQ ID NO: 83024 - DNA, 24 bp, Artificial sequence
  SiRNA target sequence
aaaatgtccacaacattctgcaca

SEQ ID NO: 83025 - DNA, 24 bp, Artificial sequence
  SiRNA target sequence
aaatgtccacaacattctgcacag

SEQ ID NO: 83026 - DNA, 24 bp, Artificial sequence
  SiRNA target sequence
aatgtccacaacattctgcacagg

SEQ ID NO: 83027 - DNA, 24 bp, Artificial sequence
  SiRNA target sequence
atgtccacaacattctgcacaggg

SEQ ID NO: 83028 - DNA, 24 bp, Artificial sequence
  SiRNA target sequence
tgtccacaacattctgcacagggg

SEQ ID NO: 83029 - DNA, 24 bp, Artificial sequence
  SiRNA target sequence
gtccacaacattctgcacagggga

SEQ ID NO: 83030 - DNA, 24 bp, Artificial sequence
  SiRNA target sequence
tccacaacattctgcacaggggaa

SEQ ID NO: 83031 - DNA, 24 bp, Artificial sequence
  SiRNA target sequence
ccacaacattctgcacaggggaaa

SEQ ID NO: 83032 - DNA, 24 bp, Artificial sequence
  SiRNA target sequence
cacaacattctgcacaggggaaaa

SEQ ID NO: 83033 - DNA, 24 bp, Artificial sequence
  SiRNA target sequence
acaacattctgcacaggggaaaag

SEQ ID NO: 83034 - DNA, 24 bp, Artificial sequence
  SiRNA target sequence
caacattctgcacaggggaaaaga

SEQ ID NO: 83035 - DNA, 24 bp, Artificial sequence
  SiRNA target sequence
aacattctgcacaggggaaaagag

SEQ ID NO: 83036 - DNA, 24 bp, Artificial sequence
  SiRNA target sequence
acattctgcacaggggaaaagaga

SEQ ID NO: 83037 - DNA, 24 bp, Artificial sequence
  SiRNA target sequence
cattctgcacaggggaaaagagat

SEQ ID NO: 83038 - DNA, 24 bp, Artificial sequence
  SiRNA target sequence
attctgcacaggggaaaagagatg

SEQ ID NO: 83039 - DNA, 24 bp, Artificial sequence
  SiRNA target sequence
ttctgcacaggggaaaagagatga

SEQ ID NO: 83040 - DNA, 24 bp, Artificial sequence
  SiRNA target sequence
tctgcacaggggaaaagagatgat

SEQ ID NO: 83041 - DNA, 24 bp, Artificial sequence
  SiRNA target sequence
ctgcacaggggaaaagagatgata

SEQ ID NO: 83042 - DNA, 24 bp, Artificial sequence
  SiRNA target sequence
tgcacaggggaaaagagatgataa

SEQ ID NO: 83043 - DNA, 24 bp, Artificial sequence
  SiRNA target sequence
gcacaggggaaaagagatgataaa

SEQ ID NO: 83044 - DNA, 24 bp, Artificial sequence
  SiRNA target sequence
cacaggggaaaagagatgataaaa

SEQ ID NO: 83045 - DNA, 24 bp, Artificial sequence
  SiRNA target sequence
acaggggaaaagagatgataaaag

SEQ ID NO: 83046 - DNA, 24 bp, Artificial sequence
  SiRNA target sequence
caggggaaaagagatgataaaagg

SEQ ID NO: 83047 - DNA, 24 bp, Artificial sequence
  SiRNA target sequence
aggggaaaagagatgataaaaggt

SEQ ID NO: 83048 - DNA, 24 bp, Artificial sequence
  SiRNA target sequence
ggggaaaagagatgataaaaggta

SEQ ID NO: 83049 - DNA, 24 bp, Artificial sequence
  SiRNA target sequence
gggaaaagagatgataaaaggtaa

SEQ ID NO: 83050 - DNA, 24 bp, Artificial sequence
  SiRNA target sequence
ggaaaagagatgataaaaggtaaa

SEQ ID NO: 83051 - DNA, 24 bp, Artificial sequence
  SiRNA target sequence
gaaaagagatgataaaaggtaaat

SEQ ID NO: 83052 - DNA, 24 bp, Artificial sequence
  SiRNA target sequence
aaaagagatgataaaaggtaaata

SEQ ID NO: 83053 - DNA, 24 bp, Artificial sequence
  SiRNA target sequence
aaagagatgataaaaggtaaataa

SEQ ID NO: 83054 - DNA, 24 bp, Artificial sequence
  SiRNA target sequence
aagagatgataaaaggtaaataaa

SEQ ID NO: 83055 - DNA, 24 bp, Artificial sequence
  SiRNA target sequence
agagatgataaaaggtaaataaat

SEQ ID NO: 83056 - DNA, 24 bp, Artificial sequence
  SiRNA target sequence
gagatgataaaaggtaaataaatt

SEQ ID NO: 83057 - DNA, 24 bp, Artificial sequence
  SiRNA target sequence
agatgataaaaggtaaataaattg

SEQ ID NO: 83058 - DNA, 24 bp, Artificial sequence
  SiRNA target sequence
gatgataaaaggtaaataaattga

SEQ ID NO: 83059 - DNA, 24 bp, Artificial sequence
  SiRNA target sequence
atgataaaaggtaaataaattgaa

SEQ ID NO: 83060 - DNA, 24 bp, Artificial sequence
  SiRNA target sequence
tgataaaaggtaaataaattgaag

SEQ ID NO: 83061 - DNA, 24 bp, Artificial sequence
  SiRNA target sequence
gataaaaggtaaataaattgaagt

SEQ ID NO: 83062 - DNA, 24 bp, Artificial sequence
  SiRNA target sequence
ataaaaggtaaataaattgaagtg

SEQ ID NO: 83063 - DNA, 24 bp, Artificial sequence
  SiRNA target sequence
taaaaggtaaataaattgaagtgt

SEQ ID NO: 83064 - DNA, 24 bp, Artificial sequence
  SiRNA target sequence
aaaaggtaaataaattgaagtgta

SEQ ID NO: 83065 - DNA, 24 bp, Artificial sequence
  SiRNA target sequence
aaaggtaaataaattgaagtgtat

SEQ ID NO: 83066 - DNA, 24 bp, Artificial sequence
  SiRNA target sequence
aaggtaaataaattgaagtgtatc

SEQ ID NO: 83067 - DNA, 24 bp, Artificial sequence
  SiRNA target sequence
aggtaaataaattgaagtgtatct

SEQ ID NO: 83068 - DNA, 24 bp, Artificial sequence
  SiRNA target sequence
ggtaaataaattgaagtgtatctt

SEQ ID NO: 83069 - DNA, 24 bp, Artificial sequence
  SiRNA target sequence
gtaaataaattgaagtgtatcttt

SEQ ID NO: 83070 - DNA, 24 bp, Artificial sequence
  SiRNA target sequence
taaataaattgaagtgtatctttt

SEQ ID NO: 83071 - DNA, 24 bp, Artificial sequence
  SiRNA target sequence
aaataaattgaagtgtatcttttt

SEQ ID NO: 83072 - DNA, 24 bp, Artificial sequence
  SiRNA target sequence
aataaattgaagtgtatctttttt

SEQ ID NO: 83073 - DNA, 24 bp, Artificial sequence
  SiRNA target sequence
ataaattgaagtgtatctttttta

SEQ ID NO: 83074 - DNA, 24 bp, Artificial sequence
  SiRNA target sequence
taaattgaagtgtatcttttttat

SEQ ID NO: 83075 - DNA, 24 bp, Artificial sequence
  SiRNA target sequence
aaattgaagtgtatcttttttatg

SEQ ID NO: 83076 - DNA, 24 bp, Artificial sequence
  SiRNA target sequence
aattgaagtgtatcttttttatgt

SEQ ID NO: 83077 - DNA, 24 bp, Artificial sequence
  SiRNA target sequence
attgaagtgtatcttttttatgtt

SEQ ID NO: 83078 - DNA, 24 bp, Artificial sequence
  SiRNA target sequence
ttgaagtgtatcttttttatgttg

SEQ ID NO: 83079 - DNA, 24 bp, Artificial sequence
  SiRNA target sequence
tgaagtgtatcttttttatgttgt

SEQ ID NO: 83080 - DNA, 24 bp, Artificial sequence
  SiRNA target sequence
gaagtgtatcttttttatgttgta

SEQ ID NO: 83081 - DNA, 24 bp, Artificial sequence
  SiRNA target sequence
aagtgtatcttttttatgttgtac

SEQ ID NO: 83082 - DNA, 24 bp, Artificial sequence
  SiRNA target sequence
agtgtatcttttttatgttgtact

SEQ ID NO: 83083 - DNA, 24 bp, Artificial sequence
  SiRNA target sequence
gtgtatcttttttatgttgtactg

SEQ ID NO: 83084 - DNA, 24 bp, Artificial sequence
  SiRNA target sequence
tgtatcttttttatgttgtactgt

SEQ ID NO: 83085 - DNA, 24 bp, Artificial sequence
  SiRNA target sequence
gtatcttttttatgttgtactgta

SEQ ID NO: 83086 - DNA, 24 bp, Artificial sequence
  SiRNA target sequence
tatcttttttatgttgtactgtag

SEQ ID NO: 83087 - DNA, 24 bp, Artificial sequence
  SiRNA target sequence
atcttttttatgttgtactgtagg

SEQ ID NO: 83088 - DNA, 24 bp, Artificial sequence
  SiRNA target sequence
tcttttttatgttgtactgtagga

SEQ ID NO: 83089 - DNA, 24 bp, Artificial sequence
  SiRNA target sequence
cttttttatgttgtactgtaggaa

SEQ ID NO: 83090 - DNA, 24 bp, Artificial sequence
  SiRNA target sequence
ttttttatgttgtactgtaggaaa

SEQ ID NO: 83091 - DNA, 24 bp, Artificial sequence
  SiRNA target sequence
tttttatgttgtactgtaggaaat

SEQ ID NO: 83092 - DNA, 24 bp, Artificial sequence
  SiRNA target sequence
ttttatgttgtactgtaggaaatg

SEQ ID NO: 83093 - DNA, 24 bp, Artificial sequence
  SiRNA target sequence
tttatgttgtactgtaggaaatgc

SEQ ID NO: 83094 - DNA, 24 bp, Artificial sequence
  SiRNA target sequence
ttatgttgtactgtaggaaatgca

SEQ ID NO: 83095 - DNA, 24 bp, Artificial sequence
  SiRNA target sequence
tatgttgtactgtaggaaatgcag

SEQ ID NO: 83096 - DNA, 24 bp, Artificial sequence
  SiRNA target sequence
atgttgtactgtaggaaatgcagg

SEQ ID NO: 83097 - DNA, 24 bp, Artificial sequence
  SiRNA target sequence
tgttgtactgtaggaaatgcagga

SEQ ID NO: 83098 - DNA, 24 bp, Artificial sequence
  SiRNA target sequence
gttgtactgtaggaaatgcaggat

SEQ ID NO: 83099 - DNA, 24 bp, Artificial sequence
  SiRNA target sequence
ttgtactgtaggaaatgcaggata

SEQ ID NO: 83100 - DNA, 24 bp, Artificial sequence
  SiRNA target sequence
tgtactgtaggaaatgcaggataa

SEQ ID NO: 83101 - DNA, 24 bp, Artificial sequence
  SiRNA target sequence
gtactgtaggaaatgcaggataaa

SEQ ID NO: 83102 - DNA, 24 bp, Artificial sequence
  SiRNA target sequence
tactgtaggaaatgcaggataaac

SEQ ID NO: 83103 - DNA, 24 bp, Artificial sequence
  SiRNA target sequence
actgtaggaaatgcaggataaaca

SEQ ID NO: 83104 - DNA, 24 bp, Artificial sequence
  SiRNA target sequence
ctgtaggaaatgcaggataaacag

SEQ ID NO: 83105 - DNA, 24 bp, Artificial sequence
  SiRNA target sequence
tgtaggaaatgcaggataaacagc

SEQ ID NO: 83106 - DNA, 24 bp, Artificial sequence
  SiRNA target sequence
gtaggaaatgcaggataaacagct

SEQ ID NO: 83107 - DNA, 24 bp, Artificial sequence
  SiRNA target sequence
taggaaatgcaggataaacagctg

SEQ ID NO: 83108 - DNA, 24 bp, Artificial sequence
  SiRNA target sequence
aggaaatgcaggataaacagctgc

SEQ ID NO: 83109 - DNA, 24 bp, Artificial sequence
  SiRNA target sequence
ggaaatgcaggataaacagctgcc

SEQ ID NO: 83110 - DNA, 24 bp, Artificial sequence
  SiRNA target sequence
gaaatgcaggataaacagctgcca

SEQ ID NO: 83111 - DNA, 24 bp, Artificial sequence
  SiRNA target sequence
aaatgcaggataaacagctgccat

SEQ ID NO: 83112 - DNA, 24 bp, Artificial sequence
  SiRNA target sequence
aatgcaggataaacagctgccatg

SEQ ID NO: 83113 - DNA, 24 bp, Artificial sequence
  SiRNA target sequence
atgcaggataaacagctgccatgg

SEQ ID NO: 83114 - DNA, 24 bp, Artificial sequence
  SiRNA target sequence
tgcaggataaacagctgccatggt

SEQ ID NO: 83115 - DNA, 24 bp, Artificial sequence
  SiRNA target sequence
gcaggataaacagctgccatggta

SEQ ID NO: 83116 - DNA, 24 bp, Artificial sequence
  SiRNA target sequence
caggataaacagctgccatggtat

SEQ ID NO: 83117 - DNA, 24 bp, Artificial sequence
  SiRNA target sequence
aggataaacagctgccatggtatg

SEQ ID NO: 83118 - DNA, 24 bp, Artificial sequence
  SiRNA target sequence
ggataaacagctgccatggtatgt

SEQ ID NO: 83119 - DNA, 24 bp, Artificial sequence
  SiRNA target sequence
gataaacagctgccatggtatgta

SEQ ID NO: 83120 - DNA, 24 bp, Artificial sequence
  SiRNA target sequence
ataaacagctgccatggtatgtaa

SEQ ID NO: 83121 - DNA, 24 bp, Artificial sequence
  SiRNA target sequence
taaacagctgccatggtatgtaaa

SEQ ID NO: 83122 - DNA, 24 bp, Artificial sequence
  SiRNA target sequence
aaacagctgccatggtatgtaaaa

SEQ ID NO: 83123 - DNA, 24 bp, Artificial sequence
  SiRNA target sequence
aacagctgccatggtatgtaaaag

SEQ ID NO: 83124 - DNA, 24 bp, Artificial sequence
  SiRNA target sequence
acagctgccatggtatgtaaaagt

SEQ ID NO: 83125 - DNA, 24 bp, Artificial sequence
  SiRNA target sequence
cagctgccatggtatgtaaaagtg

SEQ ID NO: 83126 - DNA, 24 bp, Artificial sequence
  SiRNA target sequence
agctgccatggtatgtaaaagtgt

SEQ ID NO: 83127 - DNA, 24 bp, Artificial sequence
  SiRNA target sequence
gctgccatggtatgtaaaagtgtc

SEQ ID NO: 83128 - DNA, 24 bp, Artificial sequence
  SiRNA target sequence
ctgccatggtatgtaaaagtgtcc

SEQ ID NO: 83129 - DNA, 24 bp, Artificial sequence
  SiRNA target sequence
tgccatggtatgtaaaagtgtcca

SEQ ID NO: 83130 - DNA, 24 bp, Artificial sequence
  SiRNA target sequence
gccatggtatgtaaaagtgtccat

SEQ ID NO: 83131 - DNA, 24 bp, Artificial sequence
  SiRNA target sequence
ccatggtatgtaaaagtgtccatg

SEQ ID NO: 83132 - DNA, 24 bp, Artificial sequence
  SiRNA target sequence
catggtatgtaaaagtgtccatgt

SEQ ID NO: 83133 - DNA, 24 bp, Artificial sequence
  SiRNA target sequence
atggtatgtaaaagtgtccatgtt

SEQ ID NO: 83134 - DNA, 24 bp, Artificial sequence
  SiRNA target sequence
tggtatgtaaaagtgtccatgttg

SEQ ID NO: 83135 - DNA, 24 bp, Artificial sequence
  SiRNA target sequence
ggtatgtaaaagtgtccatgttgc

SEQ ID NO: 83136 - DNA, 24 bp, Artificial sequence
  SiRNA target sequence
gtatgtaaaagtgtccatgttgct

SEQ ID NO: 83137 - DNA, 24 bp, Artificial sequence
  SiRNA target sequence
tatgtaaaagtgtccatgttgctc

SEQ ID NO: 83138 - DNA, 24 bp, Artificial sequence
  SiRNA target sequence
atgtaaaagtgtccatgttgctct

SEQ ID NO: 83139 - DNA, 24 bp, Artificial sequence
  SiRNA target sequence
tgtaaaagtgtccatgttgctctc

SEQ ID NO: 83140 - DNA, 24 bp, Artificial sequence
  SiRNA target sequence
gtaaaagtgtccatgttgctctcc

SEQ ID NO: 83141 - DNA, 24 bp, Artificial sequence
  SiRNA target sequence
taaaagtgtccatgttgctctccc

SEQ ID NO: 83142 - DNA, 24 bp, Artificial sequence
  SiRNA target sequence
aaaagtgtccatgttgctctcccc

SEQ ID NO: 83143 - DNA, 24 bp, Artificial sequence
  SiRNA target sequence
aaagtgtccatgttgctctcccca

SEQ ID NO: 83144 - DNA, 24 bp, Artificial sequence
  SiRNA target sequence
aagtgtccatgttgctctccccaa

SEQ ID NO: 83145 - DNA, 24 bp, Artificial sequence
  SiRNA target sequence
agtgtccatgttgctctccccaat

SEQ ID NO: 83146 - DNA, 24 bp, Artificial sequence
  SiRNA target sequence
gtgtccatgttgctctccccaatc

SEQ ID NO: 83147 - DNA, 24 bp, Artificial sequence
  SiRNA target sequence
tgtccatgttgctctccccaatct

SEQ ID NO: 83148 - DNA, 24 bp, Artificial sequence
  SiRNA target sequence
gtccatgttgctctccccaatcta

SEQ ID NO: 83149 - DNA, 24 bp, Artificial sequence
  SiRNA target sequence
tccatgttgctctccccaatctat

SEQ ID NO: 83150 - DNA, 24 bp, Artificial sequence
  SiRNA target sequence
ccatgttgctctccccaatctatc

SEQ ID NO: 83151 - DNA, 24 bp, Artificial sequence
  SiRNA target sequence
catgttgctctccccaatctatct

SEQ ID NO: 83152 - DNA, 24 bp, Artificial sequence
  SiRNA target sequence
atgttgctctccccaatctatctt

SEQ ID NO: 83153 - DNA, 24 bp, Artificial sequence
  SiRNA target sequence
tgttgctctccccaatctatcttt

SEQ ID NO: 83154 - DNA, 24 bp, Artificial sequence
  SiRNA target sequence
gttgctctccccaatctatcttta

SEQ ID NO: 83155 - DNA, 24 bp, Artificial sequence
  SiRNA target sequence
ttgctctccccaatctatctttaa

SEQ ID NO: 83156 - DNA, 24 bp, Artificial sequence
  SiRNA target sequence
tgctctccccaatctatctttaac

SEQ ID NO: 83157 - DNA, 24 bp, Artificial sequence
  SiRNA target sequence
gctctccccaatctatctttaact

SEQ ID NO: 83158 - DNA, 24 bp, Artificial sequence
  SiRNA target sequence
ctctccccaatctatctttaactt

SEQ ID NO: 83159 - DNA, 24 bp, Artificial sequence
  SiRNA target sequence
tctccccaatctatctttaacttc

SEQ ID NO: 83160 - DNA, 24 bp, Artificial sequence
  SiRNA target sequence
ctccccaatctatctttaacttcc

SEQ ID NO: 83161 - DNA, 24 bp, Artificial sequence
  SiRNA target sequence
tccccaatctatctttaacttcct

SEQ ID NO: 83162 - DNA, 24 bp, Artificial sequence
  SiRNA target sequence
ccccaatctatctttaacttcctt

SEQ ID NO: 83163 - DNA, 24 bp, Artificial sequence
  SiRNA target sequence
cccaatctatctttaacttcctta

SEQ ID NO: 83164 - DNA, 24 bp, Artificial sequence
  SiRNA target sequence
ccaatctatctttaacttccttat

SEQ ID NO: 83165 - DNA, 24 bp, Artificial sequence
  SiRNA target sequence
caatctatctttaacttccttatt

SEQ ID NO: 83166 - DNA, 24 bp, Artificial sequence
  SiRNA target sequence
aatctatctttaacttccttattt

SEQ ID NO: 83167 - DNA, 24 bp, Artificial sequence
  SiRNA target sequence
atctatctttaacttccttatttg

SEQ ID NO: 83168 - DNA, 24 bp, Artificial sequence
  SiRNA target sequence
tctatctttaacttccttatttgt

SEQ ID NO: 83169 - DNA, 24 bp, Artificial sequence
  SiRNA target sequence
ctatctttaacttccttatttgtt

SEQ ID NO: 83170 - DNA, 24 bp, Artificial sequence
  SiRNA target sequence
tatctttaacttccttatttgtta

SEQ ID NO: 83171 - DNA, 24 bp, Artificial sequence
  SiRNA target sequence
atctttaacttccttatttgttaa

SEQ ID NO: 83172 - DNA, 24 bp, Artificial sequence
  SiRNA target sequence
tctttaacttccttatttgttaat

SEQ ID NO: 83173 - DNA, 24 bp, Artificial sequence
  SiRNA target sequence
ctttaacttccttatttgttaatt

SEQ ID NO: 83174 - DNA, 24 bp, Artificial sequence
  SiRNA target sequence
tttaacttccttatttgttaattt

SEQ ID NO: 83175 - DNA, 24 bp, Artificial sequence
  SiRNA target sequence
ttaacttccttatttgttaatttt

SEQ ID NO: 83176 - DNA, 24 bp, Artificial sequence
  SiRNA target sequence
taacttccttatttgttaattttt

SEQ ID NO: 83177 - DNA, 24 bp, Artificial sequence
  SiRNA target sequence
aacttccttatttgttaatttttg

SEQ ID NO: 83178 - DNA, 24 bp, Artificial sequence
  SiRNA target sequence
acttccttatttgttaatttttga

SEQ ID NO: 83179 - DNA, 24 bp, Artificial sequence
  SiRNA target sequence
cttccttatttgttaatttttgat

SEQ ID NO: 83180 - DNA, 24 bp, Artificial sequence
  SiRNA target sequence
ttccttatttgttaatttttgatt

SEQ ID NO: 83181 - DNA, 24 bp, Artificial sequence
  SiRNA target sequence
tccttatttgttaatttttgatta

SEQ ID NO: 83182 - DNA, 24 bp, Artificial sequence
  SiRNA target sequence
ccttatttgttaatttttgattat

SEQ ID NO: 83183 - DNA, 24 bp, Artificial sequence
  SiRNA target sequence
cttatttgttaatttttgattatg

SEQ ID NO: 83184 - DNA, 24 bp, Artificial sequence
  SiRNA target sequence
ttatttgttaatttttgattatga

SEQ ID NO: 83185 - DNA, 24 bp, Artificial sequence
  SiRNA target sequence
tatttgttaatttttgattatgaa

SEQ ID NO: 83186 - DNA, 24 bp, Artificial sequence
  SiRNA target sequence
atttgttaatttttgattatgaat

SEQ ID NO: 83187 - DNA, 24 bp, Artificial sequence
  SiRNA target sequence
tttgttaatttttgattatgaatt

SEQ ID NO: 83188 - DNA, 24 bp, Artificial sequence
  SiRNA target sequence
ttgttaatttttgattatgaatta

SEQ ID NO: 83189 - DNA, 24 bp, Artificial sequence
  SiRNA target sequence
tgttaatttttgattatgaattag

SEQ ID NO: 83190 - DNA, 24 bp, Artificial sequence
  SiRNA target sequence
gttaatttttgattatgaattaga

SEQ ID NO: 83191 - DNA, 24 bp, Artificial sequence
  SiRNA target sequence
ttaatttttgattatgaattagac

SEQ ID NO: 83192 - DNA, 24 bp, Artificial sequence
  SiRNA target sequence
taatttttgattatgaattagacc

SEQ ID NO: 83193 - DNA, 24 bp, Artificial sequence
  SiRNA target sequence
aatttttgattatgaattagacct

SEQ ID NO: 83194 - DNA, 24 bp, Artificial sequence
  SiRNA target sequence
atttttgattatgaattagaccta

SEQ ID NO: 83195 - DNA, 24 bp, Artificial sequence
  SiRNA target sequence
tttttgattatgaattagacctaa

SEQ ID NO: 83196 - DNA, 24 bp, Artificial sequence
  SiRNA target sequence
ttttgattatgaattagacctaat

SEQ ID NO: 83197 - DNA, 24 bp, Artificial sequence
  SiRNA target sequence
tttgattatgaattagacctaatt

SEQ ID NO: 83198 - DNA, 24 bp, Artificial sequence
  SiRNA target sequence
ttgattatgaattagacctaattc

SEQ ID NO: 83199 - DNA, 24 bp, Artificial sequence
  SiRNA target sequence
tgattatgaattagacctaattca

SEQ ID NO: 83200 - DNA, 24 bp, Artificial sequence
  SiRNA target sequence
gattatgaattagacctaattcac

SEQ ID NO: 83201 - DNA, 24 bp, Artificial sequence
  SiRNA target sequence
attatgaattagacctaattcacc

SEQ ID NO: 83202 - DNA, 24 bp, Artificial sequence
  SiRNA target sequence
ttatgaattagacctaattcacct

SEQ ID NO: 83203 - DNA, 24 bp, Artificial sequence
  SiRNA target sequence
tatgaattagacctaattcaccta

SEQ ID NO: 83204 - DNA, 24 bp, Artificial sequence
  SiRNA target sequence
atgaattagacctaattcacctac

SEQ ID NO: 83205 - DNA, 24 bp, Artificial sequence
  SiRNA target sequence
tgaattagacctaattcacctact

SEQ ID NO: 83206 - DNA, 24 bp, Artificial sequence
  SiRNA target sequence
gaattagacctaattcacctactt

SEQ ID NO: 83207 - DNA, 24 bp, Artificial sequence
  SiRNA target sequence
aattagacctaattcacctacttt

SEQ ID NO: 83208 - DNA, 24 bp, Artificial sequence
  SiRNA target sequence
attagacctaattcacctactttt

SEQ ID NO: 83209 - DNA, 24 bp, Artificial sequence
  SiRNA target sequence
ttagacctaattcacctacttttg

SEQ ID NO: 83210 - DNA, 24 bp, Artificial sequence
  SiRNA target sequence
tagacctaattcacctacttttgg

SEQ ID NO: 83211 - DNA, 24 bp, Artificial sequence
  SiRNA target sequence
agacctaattcacctacttttggt

SEQ ID NO: 83212 - DNA, 24 bp, Artificial sequence
  SiRNA target sequence
gacctaattcacctacttttggtg

SEQ ID NO: 83213 - DNA, 24 bp, Artificial sequence
  SiRNA target sequence
acctaattcacctacttttggtga

SEQ ID NO: 83214 - DNA, 24 bp, Artificial sequence
  SiRNA target sequence
cctaattcacctacttttggtgaa

SEQ ID NO: 83215 - DNA, 24 bp, Artificial sequence
  SiRNA target sequence
ctaattcacctacttttggtgaaa

SEQ ID NO: 83216 - DNA, 24 bp, Artificial sequence
  SiRNA target sequence
taattcacctacttttggtgaaat

SEQ ID NO: 83217 - DNA, 24 bp, Artificial sequence
  SiRNA target sequence
aattcacctacttttggtgaaata

SEQ ID NO: 83218 - DNA, 24 bp, Artificial sequence
  SiRNA target sequence
attcacctacttttggtgaaatag

SEQ ID NO: 83219 - DNA, 24 bp, Artificial sequence
  SiRNA target sequence
ttcacctacttttggtgaaataga

SEQ ID NO: 83220 - DNA, 24 bp, Artificial sequence
  SiRNA target sequence
tcacctacttttggtgaaatagat

SEQ ID NO: 83221 - DNA, 24 bp, Artificial sequence
  SiRNA target sequence
cacctacttttggtgaaatagatt

SEQ ID NO: 83222 - DNA, 24 bp, Artificial sequence
  SiRNA target sequence
acctacttttggtgaaatagattg

SEQ ID NO: 83223 - DNA, 24 bp, Artificial sequence
  SiRNA target sequence
cctacttttggtgaaatagattgt

SEQ ID NO: 83224 - DNA, 24 bp, Artificial sequence
  SiRNA target sequence
ctacttttggtgaaatagattgta

SEQ ID NO: 83225 - DNA, 24 bp, Artificial sequence
  SiRNA target sequence
tacttttggtgaaatagattgtaa

SEQ ID NO: 83226 - DNA, 24 bp, Artificial sequence
  SiRNA target sequence
acttttggtgaaatagattgtaaa

SEQ ID NO: 83227 - DNA, 24 bp, Artificial sequence
  SiRNA target sequence
cttttggtgaaatagattgtaaaa

SEQ ID NO: 83228 - DNA, 24 bp, Artificial sequence
  SiRNA target sequence
ttttggtgaaatagattgtaaaac

SEQ ID NO: 83229 - DNA, 24 bp, Artificial sequence
  SiRNA target sequence
tttggtgaaatagattgtaaaaca

SEQ ID NO: 83230 - DNA, 24 bp, Artificial sequence
  SiRNA target sequence
ttggtgaaatagattgtaaaacag

SEQ ID NO: 83231 - DNA, 24 bp, Artificial sequence
  SiRNA target sequence
tggtgaaatagattgtaaaacaga

SEQ ID NO: 83232 - DNA, 24 bp, Artificial sequence
  SiRNA target sequence
ggtgaaatagattgtaaaacagat

SEQ ID NO: 83233 - DNA, 24 bp, Artificial sequence
  SiRNA target sequence
gtgaaatagattgtaaaacagatt

SEQ ID NO: 83234 - DNA, 24 bp, Artificial sequence
  SiRNA target sequence
tgaaatagattgtaaaacagattt

SEQ ID NO: 83235 - DNA, 24 bp, Artificial sequence
  SiRNA target sequence
gaaatagattgtaaaacagatttt

SEQ ID NO: 83236 - DNA, 24 bp, Artificial sequence
  SiRNA target sequence
aaatagattgtaaaacagattttc

SEQ ID NO: 83237 - DNA, 24 bp, Artificial sequence
  SiRNA target sequence
aatagattgtaaaacagattttcc

SEQ ID NO: 83238 - DNA, 24 bp, Artificial sequence
  SiRNA target sequence
atagattgtaaaacagattttcca

SEQ ID NO: 83239 - DNA, 24 bp, Artificial sequence
  SiRNA target sequence
tagattgtaaaacagattttccaa

SEQ ID NO: 83240 - DNA, 24 bp, Artificial sequence
  SiRNA target sequence
agattgtaaaacagattttccaag

SEQ ID NO: 83241 - DNA, 24 bp, Artificial sequence
  SiRNA target sequence
gattgtaaaacagattttccaagt

SEQ ID NO: 83242 - DNA, 24 bp, Artificial sequence
  SiRNA target sequence
attgtaaaacagattttccaagtg

SEQ ID NO: 83243 - DNA, 24 bp, Artificial sequence
  SiRNA target sequence
ttgtaaaacagattttccaagtga

SEQ ID NO: 83244 - DNA, 24 bp, Artificial sequence
  SiRNA target sequence
tgtaaaacagattttccaagtgag

SEQ ID NO: 83245 - DNA, 24 bp, Artificial sequence
  SiRNA target sequence
gtaaaacagattttccaagtgagt

SEQ ID NO: 83246 - DNA, 24 bp, Artificial sequence
  SiRNA target sequence
taaaacagattttccaagtgagtt

SEQ ID NO: 83247 - DNA, 24 bp, Artificial sequence
  SiRNA target sequence
aaaacagattttccaagtgagttg

SEQ ID NO: 83248 - DNA, 24 bp, Artificial sequence
  SiRNA target sequence
aaacagattttccaagtgagttgt

SEQ ID NO: 83249 - DNA, 24 bp, Artificial sequence
  SiRNA target sequence
aacagattttccaagtgagttgtc

SEQ ID NO: 83250 - DNA, 24 bp, Artificial sequence
  SiRNA target sequence
acagattttccaagtgagttgtct

SEQ ID NO: 83251 - DNA, 24 bp, Artificial sequence
  SiRNA target sequence
cagattttccaagtgagttgtctg

SEQ ID NO: 83252 - DNA, 24 bp, Artificial sequence
  SiRNA target sequence
agattttccaagtgagttgtctgc

SEQ ID NO: 83253 - DNA, 24 bp, Artificial sequence
  SiRNA target sequence
gattttccaagtgagttgtctgca

SEQ ID NO: 83254 - DNA, 24 bp, Artificial sequence
  SiRNA target sequence
attttccaagtgagttgtctgcat

SEQ ID NO: 83255 - DNA, 24 bp, Artificial sequence
  SiRNA target sequence
ttttccaagtgagttgtctgcatg

SEQ ID NO: 83256 - DNA, 24 bp, Artificial sequence
  SiRNA target sequence
tttccaagtgagttgtctgcatgt

SEQ ID NO: 83257 - DNA, 24 bp, Artificial sequence
  SiRNA target sequence
ttccaagtgagttgtctgcatgtg

SEQ ID NO: 83258 - DNA, 24 bp, Artificial sequence
  SiRNA target sequence
tccaagtgagttgtctgcatgtgt

SEQ ID NO: 83259 - DNA, 24 bp, Artificial sequence
  SiRNA target sequence
ccaagtgagttgtctgcatgtgta

SEQ ID NO: 83260 - DNA, 24 bp, Artificial sequence
  SiRNA target sequence
caagtgagttgtctgcatgtgtat

SEQ ID NO: 83261 - DNA, 24 bp, Artificial sequence
  SiRNA target sequence
aagtgagttgtctgcatgtgtatg

SEQ ID NO: 83262 - DNA, 24 bp, Artificial sequence
  SiRNA target sequence
agtgagttgtctgcatgtgtatgc

SEQ ID NO: 83263 - DNA, 24 bp, Artificial sequence
  SiRNA target sequence
gtgagttgtctgcatgtgtatgcg

SEQ ID NO: 83264 - DNA, 24 bp, Artificial sequence
  SiRNA target sequence
tgagttgtctgcatgtgtatgcgg

SEQ ID NO: 83265 - DNA, 24 bp, Artificial sequence
  SiRNA target sequence
gagttgtctgcatgtgtatgcggg

SEQ ID NO: 83266 - DNA, 24 bp, Artificial sequence
  SiRNA target sequence
agttgtctgcatgtgtatgcggga

SEQ ID NO: 83267 - DNA, 24 bp, Artificial sequence
  SiRNA target sequence
gttgtctgcatgtgtatgcgggaa

SEQ ID NO: 83268 - DNA, 24 bp, Artificial sequence
  SiRNA target sequence
ttgtctgcatgtgtatgcgggaaa

SEQ ID NO: 83269 - DNA, 24 bp, Artificial sequence
  SiRNA target sequence
tgtctgcatgtgtatgcgggaaaa

SEQ ID NO: 83270 - DNA, 24 bp, Artificial sequence
  SiRNA target sequence
gtctgcatgtgtatgcgggaaaaa

SEQ ID NO: 83271 - DNA, 24 bp, Artificial sequence
  SiRNA target sequence
tctgcatgtgtatgcgggaaaaaa

SEQ ID NO: 83272 - DNA, 24 bp, Artificial sequence
  SiRNA target sequence
ctgcatgtgtatgcgggaaaaaat

SEQ ID NO: 83273 - DNA, 24 bp, Artificial sequence
  SiRNA target sequence
tgcatgtgtatgcgggaaaaaatg

SEQ ID NO: 83274 - DNA, 24 bp, Artificial sequence
  SiRNA target sequence
gcatgtgtatgcgggaaaaaatgc

SEQ ID NO: 83275 - DNA, 24 bp, Artificial sequence
  SiRNA target sequence
catgtgtatgcgggaaaaaatgct

SEQ ID NO: 83276 - DNA, 24 bp, Artificial sequence
  SiRNA target sequence
atgtgtatgcgggaaaaaatgctg

SEQ ID NO: 83277 - DNA, 24 bp, Artificial sequence
  SiRNA target sequence
tgtgtatgcgggaaaaaatgctgt

SEQ ID NO: 83278 - DNA, 24 bp, Artificial sequence
  SiRNA target sequence
gtgtatgcgggaaaaaatgctgtt

SEQ ID NO: 83279 - DNA, 24 bp, Artificial sequence
  SiRNA target sequence
tgtatgcgggaaaaaatgctgttt

SEQ ID NO: 83280 - DNA, 24 bp, Artificial sequence
  SiRNA target sequence
gtatgcgggaaaaaatgctgtttt

SEQ ID NO: 83281 - DNA, 24 bp, Artificial sequence
  SiRNA target sequence
tatgcgggaaaaaatgctgttttg

SEQ ID NO: 83282 - DNA, 24 bp, Artificial sequence
  SiRNA target sequence
atgcgggaaaaaatgctgttttgc

SEQ ID NO: 83283 - DNA, 24 bp, Artificial sequence
  SiRNA target sequence
tgcgggaaaaaatgctgttttgct

SEQ ID NO: 83284 - DNA, 24 bp, Artificial sequence
  SiRNA target sequence
gcgggaaaaaatgctgttttgcta

SEQ ID NO: 83285 - DNA, 24 bp, Artificial sequence
  SiRNA target sequence
cgggaaaaaatgctgttttgctaa

SEQ ID NO: 83286 - DNA, 24 bp, Artificial sequence
  SiRNA target sequence
gggaaaaaatgctgttttgctaaa

SEQ ID NO: 83287 - DNA, 24 bp, Artificial sequence
  SiRNA target sequence
ggaaaaaatgctgttttgctaaat

SEQ ID NO: 83288 - DNA, 24 bp, Artificial sequence
  SiRNA target sequence
gaaaaaatgctgttttgctaaata

SEQ ID NO: 83289 - DNA, 24 bp, Artificial sequence
  SiRNA target sequence
aaaaaatgctgttttgctaaataa

SEQ ID NO: 83290 - DNA, 24 bp, Artificial sequence
  SiRNA target sequence
aaaaatgctgttttgctaaataaa

SEQ ID NO: 83291 - DNA, 24 bp, Artificial sequence
  SiRNA target sequence
aaaatgctgttttgctaaataaac

SEQ ID NO: 83292 - DNA, 24 bp, Artificial sequence
  SiRNA target sequence
aaatgctgttttgctaaataaaca

SEQ ID NO: 83293 - DNA, 24 bp, Artificial sequence
  SiRNA target sequence
aatgctgttttgctaaataaacaa

SEQ ID NO: 83294 - DNA, 24 bp, Artificial sequence
  SiRNA target sequence
atgctgttttgctaaataaacaat

SEQ ID NO: 83295 - DNA, 24 bp, Artificial sequence
  SiRNA target sequence
tgctgttttgctaaataaacaatc

SEQ ID NO: 83296 - DNA, 24 bp, Artificial sequence
  SiRNA target sequence
gctgttttgctaaataaacaatcc

SEQ ID NO: 83297 - DNA, 24 bp, Artificial sequence
  SiRNA target sequence
ctgttttgctaaataaacaatcca

SEQ ID NO: 83298 - DNA, 24 bp, Artificial sequence
  SiRNA target sequence
tgttttgctaaataaacaatccat

SEQ ID NO: 83299 - DNA, 24 bp, Artificial sequence
  SiRNA target sequence
gttttgctaaataaacaatccata

SEQ ID NO: 83300 - DNA, 24 bp, Artificial sequence
  SiRNA target sequence
ttttgctaaataaacaatccatac

SEQ ID NO: 83301 - DNA, 24 bp, Artificial sequence
  SiRNA target sequence
tttgctaaataaacaatccataca

SEQ ID NO: 83302 - DNA, 24 bp, Artificial sequence
  SiRNA target sequence
ttgctaaataaacaatccatacac

SEQ ID NO: 83303 - DNA, 24 bp, Artificial sequence
  SiRNA target sequence
tgctaaataaacaatccatacacc

SEQ ID NO: 83304 - DNA, 24 bp, Artificial sequence
  SiRNA target sequence
gctaaataaacaatccatacaccc

SEQ ID NO: 83305 - DNA, 24 bp, Artificial sequence
  SiRNA target sequence
ctaaataaacaatccatacaccca

SEQ ID NO: 83306 - DNA, 24 bp, Artificial sequence
  SiRNA target sequence
taaataaacaatccatacacccaa

SEQ ID NO: 83307 - DNA, 24 bp, Artificial sequence
  SiRNA target sequence
aaataaacaatccatacacccaat

SEQ ID NO: 83308 - DNA, 24 bp, Artificial sequence
  SiRNA target sequence
aataaacaatccatacacccaata

SEQ ID NO: 83309 - DNA, 24 bp, Artificial sequence
  SiRNA target sequence
ataaacaatccatacacccaataa

SEQ ID NO: 83310 - DNA, 24 bp, Artificial sequence
  SiRNA target sequence
taaacaatccatacacccaataag

SEQ ID NO: 83311 - DNA, 24 bp, Artificial sequence
  SiRNA target sequence
aaacaatccatacacccaataaga

SEQ ID NO: 83312 - DNA, 24 bp, Artificial sequence
  SiRNA target sequence
aacaatccatacacccaataagat

SEQ ID NO: 83313 - DNA, 24 bp, Artificial sequence
  SiRNA target sequence
acaatccatacacccaataagata

SEQ ID NO: 83314 - DNA, 24 bp, Artificial sequence
  SiRNA target sequence
caatccatacacccaataagataa

SEQ ID NO: 83315 - DNA, 24 bp, Artificial sequence
  SiRNA target sequence
aatccatacacccaataagataat

SEQ ID NO: 83316 - DNA, 24 bp, Artificial sequence
  SiRNA target sequence
atccatacacccaataagataata

SEQ ID NO: 83317 - DNA, 24 bp, Artificial sequence
  SiRNA target sequence
tccatacacccaataagataataa

SEQ ID NO: 83318 - DNA, 24 bp, Artificial sequence
  SiRNA target sequence
ccatacacccaataagataataag

SEQ ID NO: 83319 - DNA, 24 bp, Artificial sequence
  SiRNA target sequence
catacacccaataagataataagt

SEQ ID NO: 83320 - DNA, 24 bp, Artificial sequence
  SiRNA target sequence
atacacccaataagataataagtc

SEQ ID NO: 83321 - DNA, 24 bp, Artificial sequence
  SiRNA target sequence
tacacccaataagataataagtcc

SEQ ID NO: 83322 - DNA, 24 bp, Artificial sequence
  SiRNA target sequence
acacccaataagataataagtcct

SEQ ID NO: 83323 - DNA, 24 bp, Artificial sequence
  SiRNA target sequence
cacccaataagataataagtcctc

SEQ ID NO: 83324 - DNA, 24 bp, Artificial sequence
  SiRNA target sequence
acccaataagataataagtcctct

SEQ ID NO: 83325 - DNA, 24 bp, Artificial sequence
  SiRNA target sequence
cccaataagataataagtcctctt

SEQ ID NO: 83326 - DNA, 24 bp, Artificial sequence
  SiRNA target sequence
ccaataagataataagtcctctta

SEQ ID NO: 83327 - DNA, 24 bp, Artificial sequence
  SiRNA target sequence
caataagataataagtcctcttaa

SEQ ID NO: 83328 - DNA, 24 bp, Artificial sequence
  SiRNA target sequence
aataagataataagtcctcttaat

SEQ ID NO: 83329 - DNA, 24 bp, Artificial sequence
  SiRNA target sequence
ataagataataagtcctcttaata

SEQ ID NO: 83330 - DNA, 24 bp, Artificial sequence
  SiRNA target sequence
taagataataagtcctcttaatac

SEQ ID NO: 83331 - DNA, 24 bp, Artificial sequence
  SiRNA target sequence
aagataataagtcctcttaatact

SEQ ID NO: 83332 - DNA, 24 bp, Artificial sequence
  SiRNA target sequence
agataataagtcctcttaatactt

SEQ ID NO: 83333 - DNA, 24 bp, Artificial sequence
  SiRNA target sequence
gataataagtcctcttaatacttt

SEQ ID NO: 83334 - DNA, 24 bp, Artificial sequence
  SiRNA target sequence
ataataagtcctcttaatactttc

SEQ ID NO: 83335 - DNA, 24 bp, Artificial sequence
  SiRNA target sequence
taataagtcctcttaatactttct

SEQ ID NO: 83336 - DNA, 24 bp, Artificial sequence
  SiRNA target sequence
aataagtcctcttaatactttctg

SEQ ID NO: 83337 - DNA, 24 bp, Artificial sequence
  SiRNA target sequence
ataagtcctcttaatactttctgc

SEQ ID NO: 83338 - DNA, 24 bp, Artificial sequence
  SiRNA target sequence
taagtcctcttaatactttctgct

SEQ ID NO: 83339 - DNA, 24 bp, Artificial sequence
  SiRNA target sequence
aagtcctcttaatactttctgctc

SEQ ID NO: 83340 - DNA, 24 bp, Artificial sequence
  SiRNA target sequence
agtcctcttaatactttctgctct

SEQ ID NO: 83341 - DNA, 24 bp, Artificial sequence
  SiRNA target sequence
gtcctcttaatactttctgctctt

SEQ ID NO: 83342 - DNA, 24 bp, Artificial sequence
  SiRNA target sequence
tcctcttaatactttctgctcttt

SEQ ID NO: 83343 - DNA, 24 bp, Artificial sequence
  SiRNA target sequence
cctcttaatactttctgctctttg

SEQ ID NO: 83344 - DNA, 24 bp, Artificial sequence
  SiRNA target sequence
ctcttaatactttctgctctttgt

SEQ ID NO: 83345 - DNA, 24 bp, Artificial sequence
  SiRNA target sequence
tcttaatactttctgctctttgtt

SEQ ID NO: 83346 - DNA, 24 bp, Artificial sequence
  SiRNA target sequence
cttaatactttctgctctttgttc

SEQ ID NO: 83347 - DNA, 24 bp, Artificial sequence
  SiRNA target sequence
ttaatactttctgctctttgttca

SEQ ID NO: 83348 - DNA, 24 bp, Artificial sequence
  SiRNA target sequence
taatactttctgctctttgttcat

SEQ ID NO: 83349 - DNA, 25 bp, Artificial sequence
  SiRNA target sequence
ttattctggttcacaaccacaactc

SEQ ID NO: 83350 - DNA, 25 bp, Artificial sequence
  SiRNA target sequence
tattctggttcacaaccacaactcc

SEQ ID NO: 83351 - DNA, 25 bp, Artificial sequence
  SiRNA target sequence
attctggttcacaaccacaactcca

SEQ ID NO: 83352 - DNA, 25 bp, Artificial sequence
  SiRNA target sequence
ttctggttcacaaccacaactccaa

SEQ ID NO: 83353 - DNA, 25 bp, Artificial sequence
  SiRNA target sequence
tctggttcacaaccacaactccaaa

SEQ ID NO: 83354 - DNA, 25 bp, Artificial sequence
  SiRNA target sequence
ctggttcacaaccacaactccaaac

SEQ ID NO: 83355 - DNA, 25 bp, Artificial sequence
  SiRNA target sequence
tggttcacaaccacaactccaaaca

SEQ ID NO: 83356 - DNA, 25 bp, Artificial sequence
  SiRNA target sequence
ggttcacaaccacaactccaaacac

SEQ ID NO: 83357 - DNA, 25 bp, Artificial sequence
  SiRNA target sequence
gttcacaaccacaactccaaacacc

SEQ ID NO: 83358 - DNA, 25 bp, Artificial sequence
  SiRNA target sequence
ttcacaaccacaactccaaacacct

SEQ ID NO: 83359 - DNA, 25 bp, Artificial sequence
  SiRNA target sequence
tcacaaccacaactccaaacacctt

SEQ ID NO: 83360 - DNA, 25 bp, Artificial sequence
  SiRNA target sequence
cacaaccacaactccaaacaccttc

SEQ ID NO: 83361 - DNA, 25 bp, Artificial sequence
  SiRNA target sequence
acaaccacaactccaaacaccttct

SEQ ID NO: 83362 - DNA, 25 bp, Artificial sequence
  SiRNA target sequence
caaccacaactccaaacaccttcta

SEQ ID NO: 83363 - DNA, 25 bp, Artificial sequence
  SiRNA target sequence
aaccacaactccaaacaccttctac

SEQ ID NO: 83364 - DNA, 25 bp, Artificial sequence
  SiRNA target sequence
accacaactccaaacaccttctacc

SEQ ID NO: 83365 - DNA, 25 bp, Artificial sequence
  SiRNA target sequence
ccacaactccaaacaccttctacct

SEQ ID NO: 83366 - DNA, 25 bp, Artificial sequence
  SiRNA target sequence
cacaactccaaacaccttctacctt

SEQ ID NO: 83367 - DNA, 25 bp, Artificial sequence
  SiRNA target sequence
acaactccaaacaccttctaccttt

SEQ ID NO: 83368 - DNA, 25 bp, Artificial sequence
  SiRNA target sequence
caactccaaacaccttctacctttt

SEQ ID NO: 83369 - DNA, 25 bp, Artificial sequence
  SiRNA target sequence
aactccaaacaccttctaccttttt

SEQ ID NO: 83370 - DNA, 25 bp, Artificial sequence
  SiRNA target sequence
actccaaacaccttctaccttttta

SEQ ID NO: 83371 - DNA, 25 bp, Artificial sequence
  SiRNA target sequence
ctccaaacaccttctacctttttac

SEQ ID NO: 83372 - DNA, 25 bp, Artificial sequence
  SiRNA target sequence
tccaaacaccttctacctttttaca

SEQ ID NO: 83373 - DNA, 25 bp, Artificial sequence
  SiRNA target sequence
ccaaacaccttctacctttttacag

SEQ ID NO: 83374 - DNA, 25 bp, Artificial sequence
  SiRNA target sequence
caaacaccttctacctttttacagt

SEQ ID NO: 83375 - DNA, 25 bp, Artificial sequence
  SiRNA target sequence
aaacaccttctacctttttacagtc

SEQ ID NO: 83376 - DNA, 25 bp, Artificial sequence
  SiRNA target sequence
aacaccttctacctttttacagtcc

SEQ ID NO: 83377 - DNA, 25 bp, Artificial sequence
  SiRNA target sequence
acaccttctacctttttacagtcca

SEQ ID NO: 83378 - DNA, 25 bp, Artificial sequence
  SiRNA target sequence
caccttctacctttttacagtccat

SEQ ID NO: 83379 - DNA, 25 bp, Artificial sequence
  SiRNA target sequence
accttctacctttttacagtccata

SEQ ID NO: 83380 - DNA, 25 bp, Artificial sequence
  SiRNA target sequence
ccttctacctttttacagtccataa

SEQ ID NO: 83381 - DNA, 25 bp, Artificial sequence
  SiRNA target sequence
cttctacctttttacagtccataat

SEQ ID NO: 83382 - DNA, 25 bp, Artificial sequence
  SiRNA target sequence
ttctacctttttacagtccataatg

SEQ ID NO: 83383 - DNA, 25 bp, Artificial sequence
  SiRNA target sequence
tctacctttttacagtccataatgg

SEQ ID NO: 83384 - DNA, 25 bp, Artificial sequence
  SiRNA target sequence
ctacctttttacagtccataatggg

SEQ ID NO: 83385 - DNA, 25 bp, Artificial sequence
  SiRNA target sequence
tacctttttacagtccataatgggc

SEQ ID NO: 83386 - DNA, 25 bp, Artificial sequence
  SiRNA target sequence
acctttttacagtccataatgggct

SEQ ID NO: 83387 - DNA, 25 bp, Artificial sequence
  SiRNA target sequence
cctttttacagtccataatgggctt

SEQ ID NO: 83388 - DNA, 25 bp, Artificial sequence
  SiRNA target sequence
ctttttacagtccataatgggcttt

SEQ ID NO: 83389 - DNA, 25 bp, Artificial sequence
  SiRNA target sequence
tttttacagtccataatgggctttc

SEQ ID NO: 83390 - DNA, 25 bp, Artificial sequence
  SiRNA target sequence
ttttacagtccataatgggctttcc

SEQ ID NO: 83391 - DNA, 25 bp, Artificial sequence
  SiRNA target sequence
tttacagtccataatgggctttcct

SEQ ID NO: 83392 - DNA, 25 bp, Artificial sequence
  SiRNA target sequence
ttacagtccataatgggctttccta

SEQ ID NO: 83393 - DNA, 25 bp, Artificial sequence
  SiRNA target sequence
tacagtccataatgggctttcctaa

SEQ ID NO: 83394 - DNA, 25 bp, Artificial sequence
  SiRNA target sequence
acagtccataatgggctttcctaat

SEQ ID NO: 83395 - DNA, 25 bp, Artificial sequence
  SiRNA target sequence
cagtccataatgggctttcctaatc

SEQ ID NO: 83396 - DNA, 25 bp, Artificial sequence
  SiRNA target sequence
agtccataatgggctttcctaatct

SEQ ID NO: 83397 - DNA, 25 bp, Artificial sequence
  SiRNA target sequence
gtccataatgggctttcctaatctt

SEQ ID NO: 83398 - DNA, 25 bp, Artificial sequence
  SiRNA target sequence
tccataatgggctttcctaatcttt

SEQ ID NO: 83399 - DNA, 25 bp, Artificial sequence
  SiRNA target sequence
ccataatgggctttcctaatctttt

SEQ ID NO: 83400 - DNA, 25 bp, Artificial sequence
  SiRNA target sequence
cataatgggctttcctaatctttta

SEQ ID NO: 83401 - DNA, 25 bp, Artificial sequence
  SiRNA target sequence
ataatgggctttcctaatcttttat

SEQ ID NO: 83402 - DNA, 25 bp, Artificial sequence
  SiRNA target sequence
taatgggctttcctaatcttttatt

SEQ ID NO: 83403 - DNA, 25 bp, Artificial sequence
  SiRNA target sequence
aatgggctttcctaatcttttatta

SEQ ID NO: 83404 - DNA, 25 bp, Artificial sequence
  SiRNA target sequence
atgggctttcctaatcttttattaa

SEQ ID NO: 83405 - DNA, 25 bp, Artificial sequence
  SiRNA target sequence
tgggctttcctaatcttttattaac

SEQ ID NO: 83406 - DNA, 25 bp, Artificial sequence
  SiRNA target sequence
gggctttcctaatcttttattaact

SEQ ID NO: 83407 - DNA, 25 bp, Artificial sequence
  SiRNA target sequence
ggctttcctaatcttttattaacta

SEQ ID NO: 83408 - DNA, 25 bp, Artificial sequence
  SiRNA target sequence
gctttcctaatcttttattaactat

SEQ ID NO: 83409 - DNA, 25 bp, Artificial sequence
  SiRNA target sequence
ctttcctaatcttttattaactatg

SEQ ID NO: 83410 - DNA, 25 bp, Artificial sequence
  SiRNA target sequence
tttcctaatcttttattaactatgt

SEQ ID NO: 83411 - DNA, 25 bp, Artificial sequence
  SiRNA target sequence
ttcctaatcttttattaactatgtt

SEQ ID NO: 83412 - DNA, 25 bp, Artificial sequence
  SiRNA target sequence
tcctaatcttttattaactatgtta

SEQ ID NO: 83413 - DNA, 25 bp, Artificial sequence
  SiRNA target sequence
cctaatcttttattaactatgttat

SEQ ID NO: 83414 - DNA, 25 bp, Artificial sequence
  SiRNA target sequence
ctaatcttttattaactatgttatg

SEQ ID NO: 83415 - DNA, 25 bp, Artificial sequence
  SiRNA target sequence
taatcttttattaactatgttatgt

SEQ ID NO: 83416 - DNA, 25 bp, Artificial sequence
  SiRNA target sequence
aatcttttattaactatgttatgtg

SEQ ID NO: 83417 - DNA, 25 bp, Artificial sequence
  SiRNA target sequence
atcttttattaactatgttatgtgc

SEQ ID NO: 83418 - DNA, 25 bp, Artificial sequence
  SiRNA target sequence
tcttttattaactatgttatgtgct

SEQ ID NO: 83419 - DNA, 25 bp, Artificial sequence
  SiRNA target sequence
cttttattaactatgttatgtgctt

SEQ ID NO: 83420 - DNA, 25 bp, Artificial sequence
  SiRNA target sequence
ttttattaactatgttatgtgcttt

SEQ ID NO: 83421 - DNA, 25 bp, Artificial sequence
  SiRNA target sequence
tttattaactatgttatgtgcttta

SEQ ID NO: 83422 - DNA, 25 bp, Artificial sequence
  SiRNA target sequence
ttattaactatgttatgtgctttac

SEQ ID NO: 83423 - DNA, 25 bp, Artificial sequence
  SiRNA target sequence
tattaactatgttatgtgctttaca

SEQ ID NO: 83424 - DNA, 25 bp, Artificial sequence
  SiRNA target sequence
attaactatgttatgtgctttacat

SEQ ID NO: 83425 - DNA, 25 bp, Artificial sequence
  SiRNA target sequence
ttaactatgttatgtgctttacata

SEQ ID NO: 83426 - DNA, 25 bp, Artificial sequence
  SiRNA target sequence
taactatgttatgtgctttacatag

SEQ ID NO: 83427 - DNA, 25 bp, Artificial sequence
  SiRNA target sequence
aactatgttatgtgctttacatagc

SEQ ID NO: 83428 - DNA, 25 bp, Artificial sequence
  SiRNA target sequence
actatgttatgtgctttacatagcc

SEQ ID NO: 83429 - DNA, 25 bp, Artificial sequence
  SiRNA target sequence
ctatgttatgtgctttacatagcca

SEQ ID NO: 83430 - DNA, 25 bp, Artificial sequence
  SiRNA target sequence
tatgttatgtgctttacatagccac

SEQ ID NO: 83431 - DNA, 25 bp, Artificial sequence
  SiRNA target sequence
atgttatgtgctttacatagccact

SEQ ID NO: 83432 - DNA, 25 bp, Artificial sequence
  SiRNA target sequence
tgttatgtgctttacatagccactg

SEQ ID NO: 83433 - DNA, 25 bp, Artificial sequence
  SiRNA target sequence
gttatgtgctttacatagccactgg

SEQ ID NO: 83434 - DNA, 25 bp, Artificial sequence
  SiRNA target sequence
ttatgtgctttacatagccactgga

SEQ ID NO: 83435 - DNA, 25 bp, Artificial sequence
  SiRNA target sequence
tatgtgctttacatagccactggac

SEQ ID NO: 83436 - DNA, 25 bp, Artificial sequence
  SiRNA target sequence
atgtgctttacatagccactggaca

SEQ ID NO: 83437 - DNA, 25 bp, Artificial sequence
  SiRNA target sequence
tgtgctttacatagccactggacaa

SEQ ID NO: 83438 - DNA, 25 bp, Artificial sequence
  SiRNA target sequence
gtgctttacatagccactggacaaa

SEQ ID NO: 83439 - DNA, 25 bp, Artificial sequence
  SiRNA target sequence
tgctttacatagccactggacaaat

SEQ ID NO: 83440 - DNA, 25 bp, Artificial sequence
  SiRNA target sequence
gctttacatagccactggacaaatt

SEQ ID NO: 83441 - DNA, 25 bp, Artificial sequence
  SiRNA target sequence
ctttacatagccactggacaaattc

SEQ ID NO: 83442 - DNA, 25 bp, Artificial sequence
  SiRNA target sequence
tttacatagccactggacaaattcg

SEQ ID NO: 83443 - DNA, 25 bp, Artificial sequence
  SiRNA target sequence
ttacatagccactggacaaattcgt

SEQ ID NO: 83444 - DNA, 25 bp, Artificial sequence
  SiRNA target sequence
tacatagccactggacaaattcgtc

SEQ ID NO: 83445 - DNA, 25 bp, Artificial sequence
  SiRNA target sequence
acatagccactggacaaattcgtca

SEQ ID NO: 83446 - DNA, 25 bp, Artificial sequence
  SiRNA target sequence
catagccactggacaaattcgtcat

SEQ ID NO: 83447 - DNA, 25 bp, Artificial sequence
  SiRNA target sequence
atagccactggacaaattcgtcatg

SEQ ID NO: 83448 - DNA, 25 bp, Artificial sequence
  SiRNA target sequence
tagccactggacaaattcgtcatgt

SEQ ID NO: 83449 - DNA, 25 bp, Artificial sequence
  SiRNA target sequence
agccactggacaaattcgtcatgtg

SEQ ID NO: 83450 - DNA, 25 bp, Artificial sequence
  SiRNA target sequence
gccactggacaaattcgtcatgtgt

SEQ ID NO: 83451 - DNA, 25 bp, Artificial sequence
  SiRNA target sequence
ccactggacaaattcgtcatgtgtg

SEQ ID NO: 83452 - DNA, 25 bp, Artificial sequence
  SiRNA target sequence
cactggacaaattcgtcatgtgtgg

SEQ ID NO: 83453 - DNA, 25 bp, Artificial sequence
  SiRNA target sequence
actggacaaattcgtcatgtgtggc

SEQ ID NO: 83454 - DNA, 25 bp, Artificial sequence
  SiRNA target sequence
ctggacaaattcgtcatgtgtggca

SEQ ID NO: 83455 - DNA, 25 bp, Artificial sequence
  SiRNA target sequence
tggacaaattcgtcatgtgtggcaa

SEQ ID NO: 83456 - DNA, 25 bp, Artificial sequence
  SiRNA target sequence
ggacaaattcgtcatgtgtggcaac

SEQ ID NO: 83457 - DNA, 25 bp, Artificial sequence
  SiRNA target sequence
gacaaattcgtcatgtgtggcaact

SEQ ID NO: 83458 - DNA, 25 bp, Artificial sequence
  SiRNA target sequence
acaaattcgtcatgtgtggcaactt

SEQ ID NO: 83459 - DNA, 25 bp, Artificial sequence
  SiRNA target sequence
caaattcgtcatgtgtggcaacttg

SEQ ID NO: 83460 - DNA, 25 bp, Artificial sequence
  SiRNA target sequence
aaattcgtcatgtgtggcaacttgt

SEQ ID NO: 83461 - DNA, 25 bp, Artificial sequence
  SiRNA target sequence
aattcgtcatgtgtggcaacttgtg

SEQ ID NO: 83462 - DNA, 25 bp, Artificial sequence
  SiRNA target sequence
attcgtcatgtgtggcaacttgtgg

SEQ ID NO: 83463 - DNA, 25 bp, Artificial sequence
  SiRNA target sequence
ttcgtcatgtgtggcaacttgtgga

SEQ ID NO: 83464 - DNA, 25 bp, Artificial sequence
  SiRNA target sequence
tcgtcatgtgtggcaacttgtggag

SEQ ID NO: 83465 - DNA, 25 bp, Artificial sequence
  SiRNA target sequence
cgtcatgtgtggcaacttgtggagg

SEQ ID NO: 83466 - DNA, 25 bp, Artificial sequence
  SiRNA target sequence
gtcatgtgtggcaacttgtggagga

SEQ ID NO: 83467 - DNA, 25 bp, Artificial sequence
  SiRNA target sequence
tcatgtgtggcaacttgtggaggat

SEQ ID NO: 83468 - DNA, 25 bp, Artificial sequence
  SiRNA target sequence
catgtgtggcaacttgtggaggatt

SEQ ID NO: 83469 - DNA, 25 bp, Artificial sequence
  SiRNA target sequence
atgtgtggcaacttgtggaggattt

SEQ ID NO: 83470 - DNA, 25 bp, Artificial sequence
  SiRNA target sequence
tgtgtggcaacttgtggaggattta

SEQ ID NO: 83471 - DNA, 25 bp, Artificial sequence
  SiRNA target sequence
gtgtggcaacttgtggaggatttaa

SEQ ID NO: 83472 - DNA, 25 bp, Artificial sequence
  SiRNA target sequence
tgtggcaacttgtggaggatttaag

SEQ ID NO: 83473 - DNA, 25 bp, Artificial sequence
  SiRNA target sequence
gtggcaacttgtggaggatttaagc

SEQ ID NO: 83474 - DNA, 25 bp, Artificial sequence
  SiRNA target sequence
tggcaacttgtggaggatttaagct

SEQ ID NO: 83475 - DNA, 25 bp, Artificial sequence
  SiRNA target sequence
ggcaacttgtggaggatttaagctt

SEQ ID NO: 83476 - DNA, 25 bp, Artificial sequence
  SiRNA target sequence
gcaacttgtggaggatttaagctta

SEQ ID NO: 83477 - DNA, 25 bp, Artificial sequence
  SiRNA target sequence
caacttgtggaggatttaagcttaa

SEQ ID NO: 83478 - DNA, 25 bp, Artificial sequence
  SiRNA target sequence
aacttgtggaggatttaagcttaac

SEQ ID NO: 83479 - DNA, 25 bp, Artificial sequence
  SiRNA target sequence
acttgtggaggatttaagcttaaca

SEQ ID NO: 83480 - DNA, 25 bp, Artificial sequence
  SiRNA target sequence
cttgtggaggatttaagcttaacag

SEQ ID NO: 83481 - DNA, 25 bp, Artificial sequence
  SiRNA target sequence
ttgtggaggatttaagcttaacagt

SEQ ID NO: 83482 - DNA, 25 bp, Artificial sequence
  SiRNA target sequence
tgtggaggatttaagcttaacagtc

SEQ ID NO: 83483 - DNA, 25 bp, Artificial sequence
  SiRNA target sequence
gtggaggatttaagcttaacagtct

SEQ ID NO: 83484 - DNA, 25 bp, Artificial sequence
  SiRNA target sequence
tggaggatttaagcttaacagtctt

SEQ ID NO: 83485 - DNA, 25 bp, Artificial sequence
  SiRNA target sequence
ggaggatttaagcttaacagtcttt

SEQ ID NO: 83486 - DNA, 25 bp, Artificial sequence
  SiRNA target sequence
gaggatttaagcttaacagtctttg

SEQ ID NO: 83487 - DNA, 25 bp, Artificial sequence
  SiRNA target sequence
aggatttaagcttaacagtctttga

SEQ ID NO: 83488 - DNA, 25 bp, Artificial sequence
  SiRNA target sequence
ggatttaagcttaacagtctttgaa

SEQ ID NO: 83489 - DNA, 25 bp, Artificial sequence
  SiRNA target sequence
gatttaagcttaacagtctttgaaa

SEQ ID NO: 83490 - DNA, 25 bp, Artificial sequence
  SiRNA target sequence
atttaagcttaacagtctttgaaaa

SEQ ID NO: 83491 - DNA, 25 bp, Artificial sequence
  SiRNA target sequence
tttaagcttaacagtctttgaaaat

SEQ ID NO: 83492 - DNA, 25 bp, Artificial sequence
  SiRNA target sequence
ttaagcttaacagtctttgaaaatg

SEQ ID NO: 83493 - DNA, 25 bp, Artificial sequence
  SiRNA target sequence
taagcttaacagtctttgaaaatgt

SEQ ID NO: 83494 - DNA, 25 bp, Artificial sequence
  SiRNA target sequence
aagcttaacagtctttgaaaatgtc

SEQ ID NO: 83495 - DNA, 25 bp, Artificial sequence
  SiRNA target sequence
agcttaacagtctttgaaaatgtcc

SEQ ID NO: 83496 - DNA, 25 bp, Artificial sequence
  SiRNA target sequence
gcttaacagtctttgaaaatgtcca

SEQ ID NO: 83497 - DNA, 25 bp, Artificial sequence
  SiRNA target sequence
cttaacagtctttgaaaatgtccac

SEQ ID NO: 83498 - DNA, 25 bp, Artificial sequence
  SiRNA target sequence
ttaacagtctttgaaaatgtccaca

SEQ ID NO: 83499 - DNA, 25 bp, Artificial sequence
  SiRNA target sequence
taacagtctttgaaaatgtccacaa

SEQ ID NO: 83500 - DNA, 25 bp, Artificial sequence
  SiRNA target sequence
aacagtctttgaaaatgtccacaac

SEQ ID NO: 83501 - DNA, 25 bp, Artificial sequence
  SiRNA target sequence
acagtctttgaaaatgtccacaaca

SEQ ID NO: 83502 - DNA, 25 bp, Artificial sequence
  SiRNA target sequence
cagtctttgaaaatgtccacaacat

SEQ ID NO: 83503 - DNA, 25 bp, Artificial sequence
  SiRNA target sequence
agtctttgaaaatgtccacaacatt

SEQ ID NO: 83504 - DNA, 25 bp, Artificial sequence
  SiRNA target sequence
gtctttgaaaatgtccacaacattc

SEQ ID NO: 83505 - DNA, 25 bp, Artificial sequence
  SiRNA target sequence
tctttgaaaatgtccacaacattct

SEQ ID NO: 83506 - DNA, 25 bp, Artificial sequence
  SiRNA target sequence
ctttgaaaatgtccacaacattctg

SEQ ID NO: 83507 - DNA, 25 bp, Artificial sequence
  SiRNA target sequence
tttgaaaatgtccacaacattctgc

SEQ ID NO: 83508 - DNA, 25 bp, Artificial sequence
  SiRNA target sequence
ttgaaaatgtccacaacattctgca

SEQ ID NO: 83509 - DNA, 25 bp, Artificial sequence
  SiRNA target sequence
tgaaaatgtccacaacattctgcac

SEQ ID NO: 83510 - DNA, 25 bp, Artificial sequence
  SiRNA target sequence
gaaaatgtccacaacattctgcaca

SEQ ID NO: 83511 - DNA, 25 bp, Artificial sequence
  SiRNA target sequence
aaaatgtccacaacattctgcacag

SEQ ID NO: 83512 - DNA, 25 bp, Artificial sequence
  SiRNA target sequence
aaatgtccacaacattctgcacagg

SEQ ID NO: 83513 - DNA, 25 bp, Artificial sequence
  SiRNA target sequence
aatgtccacaacattctgcacaggg

SEQ ID NO: 83514 - DNA, 25 bp, Artificial sequence
  SiRNA target sequence
atgtccacaacattctgcacagggg

SEQ ID NO: 83515 - DNA, 25 bp, Artificial sequence
  SiRNA target sequence
tgtccacaacattctgcacagggga

SEQ ID NO: 83516 - DNA, 25 bp, Artificial sequence
  SiRNA target sequence
gtccacaacattctgcacaggggaa

SEQ ID NO: 83517 - DNA, 25 bp, Artificial sequence
  SiRNA target sequence
tccacaacattctgcacaggggaaa

SEQ ID NO: 83518 - DNA, 25 bp, Artificial sequence
  SiRNA target sequence
ccacaacattctgcacaggggaaaa

SEQ ID NO: 83519 - DNA, 25 bp, Artificial sequence
  SiRNA target sequence
cacaacattctgcacaggggaaaag

SEQ ID NO: 83520 - DNA, 25 bp, Artificial sequence
  SiRNA target sequence
acaacattctgcacaggggaaaaga

SEQ ID NO: 83521 - DNA, 25 bp, Artificial sequence
  SiRNA target sequence
caacattctgcacaggggaaaagag

SEQ ID NO: 83522 - DNA, 25 bp, Artificial sequence
  SiRNA target sequence
aacattctgcacaggggaaaagaga

SEQ ID NO: 83523 - DNA, 25 bp, Artificial sequence
  SiRNA target sequence
acattctgcacaggggaaaagagat

SEQ ID NO: 83524 - DNA, 25 bp, Artificial sequence
  SiRNA target sequence
cattctgcacaggggaaaagagatg

SEQ ID NO: 83525 - DNA, 25 bp, Artificial sequence
  SiRNA target sequence
attctgcacaggggaaaagagatga

SEQ ID NO: 83526 - DNA, 25 bp, Artificial sequence
  SiRNA target sequence
ttctgcacaggggaaaagagatgat

SEQ ID NO: 83527 - DNA, 25 bp, Artificial sequence
  SiRNA target sequence
tctgcacaggggaaaagagatgata

SEQ ID NO: 83528 - DNA, 25 bp, Artificial sequence
  SiRNA target sequence
ctgcacaggggaaaagagatgataa

SEQ ID NO: 83529 - DNA, 25 bp, Artificial sequence
  SiRNA target sequence
tgcacaggggaaaagagatgataaa

SEQ ID NO: 83530 - DNA, 25 bp, Artificial sequence
  SiRNA target sequence
gcacaggggaaaagagatgataaaa

SEQ ID NO: 83531 - DNA, 25 bp, Artificial sequence
  SiRNA target sequence
cacaggggaaaagagatgataaaag

SEQ ID NO: 83532 - DNA, 25 bp, Artificial sequence
  SiRNA target sequence
acaggggaaaagagatgataaaagg

SEQ ID NO: 83533 - DNA, 25 bp, Artificial sequence
  SiRNA target sequence
caggggaaaagagatgataaaaggt

SEQ ID NO: 83534 - DNA, 25 bp, Artificial sequence
  SiRNA target sequence
aggggaaaagagatgataaaaggta

SEQ ID NO: 83535 - DNA, 25 bp, Artificial sequence
  SiRNA target sequence
ggggaaaagagatgataaaaggtaa

SEQ ID NO: 83536 - DNA, 25 bp, Artificial sequence
  SiRNA target sequence
gggaaaagagatgataaaaggtaaa

SEQ ID NO: 83537 - DNA, 25 bp, Artificial sequence
  SiRNA target sequence
ggaaaagagatgataaaaggtaaat

SEQ ID NO: 83538 - DNA, 25 bp, Artificial sequence
  SiRNA target sequence
gaaaagagatgataaaaggtaaata

SEQ ID NO: 83539 - DNA, 25 bp, Artificial sequence
  SiRNA target sequence
aaaagagatgataaaaggtaaataa

SEQ ID NO: 83540 - DNA, 25 bp, Artificial sequence
  SiRNA target sequence
aaagagatgataaaaggtaaataaa

SEQ ID NO: 83541 - DNA, 25 bp, Artificial sequence
  SiRNA target sequence
aagagatgataaaaggtaaataaat

SEQ ID NO: 83542 - DNA, 25 bp, Artificial sequence
  SiRNA target sequence
agagatgataaaaggtaaataaatt

SEQ ID NO: 83543 - DNA, 25 bp, Artificial sequence
  SiRNA target sequence
gagatgataaaaggtaaataaattg

SEQ ID NO: 83544 - DNA, 25 bp, Artificial sequence
  SiRNA target sequence
agatgataaaaggtaaataaattga

SEQ ID NO: 83545 - DNA, 25 bp, Artificial sequence
  SiRNA target sequence
gatgataaaaggtaaataaattgaa

SEQ ID NO: 83546 - DNA, 25 bp, Artificial sequence
  SiRNA target sequence
atgataaaaggtaaataaattgaag

SEQ ID NO: 83547 - DNA, 25 bp, Artificial sequence
  SiRNA target sequence
tgataaaaggtaaataaattgaagt

SEQ ID NO: 83548 - DNA, 25 bp, Artificial sequence
  SiRNA target sequence
gataaaaggtaaataaattgaagtg

SEQ ID NO: 83549 - DNA, 25 bp, Artificial sequence
  SiRNA target sequence
ataaaaggtaaataaattgaagtgt

SEQ ID NO: 83550 - DNA, 25 bp, Artificial sequence
  SiRNA target sequence
taaaaggtaaataaattgaagtgta

SEQ ID NO: 83551 - DNA, 25 bp, Artificial sequence
  SiRNA target sequence
aaaaggtaaataaattgaagtgtat

SEQ ID NO: 83552 - DNA, 25 bp, Artificial sequence
  SiRNA target sequence
aaaggtaaataaattgaagtgtatc

SEQ ID NO: 83553 - DNA, 25 bp, Artificial sequence
  SiRNA target sequence
aaggtaaataaattgaagtgtatct

SEQ ID NO: 83554 - DNA, 25 bp, Artificial sequence
  SiRNA target sequence
aggtaaataaattgaagtgtatctt

SEQ ID NO: 83555 - DNA, 25 bp, Artificial sequence
  SiRNA target sequence
ggtaaataaattgaagtgtatcttt

SEQ ID NO: 83556 - DNA, 25 bp, Artificial sequence
  SiRNA target sequence
gtaaataaattgaagtgtatctttt

SEQ ID NO: 83557 - DNA, 25 bp, Artificial sequence
  SiRNA target sequence
taaataaattgaagtgtatcttttt

SEQ ID NO: 83558 - DNA, 25 bp, Artificial sequence
  SiRNA target sequence
aaataaattgaagtgtatctttttt

SEQ ID NO: 83559 - DNA, 25 bp, Artificial sequence
  SiRNA target sequence
aataaattgaagtgtatctttttta

SEQ ID NO: 83560 - DNA, 25 bp, Artificial sequence
  SiRNA target sequence
ataaattgaagtgtatcttttttat

SEQ ID NO: 83561 - DNA, 25 bp, Artificial sequence
  SiRNA target sequence
taaattgaagtgtatcttttttatg

SEQ ID NO: 83562 - DNA, 25 bp, Artificial sequence
  SiRNA target sequence
aaattgaagtgtatcttttttatgt

SEQ ID NO: 83563 - DNA, 25 bp, Artificial sequence
  SiRNA target sequence
aattgaagtgtatcttttttatgtt

SEQ ID NO: 83564 - DNA, 25 bp, Artificial sequence
  SiRNA target sequence
attgaagtgtatcttttttatgttg

SEQ ID NO: 83565 - DNA, 25 bp, Artificial sequence
  SiRNA target sequence
ttgaagtgtatcttttttatgttgt

SEQ ID NO: 83566 - DNA, 25 bp, Artificial sequence
  SiRNA target sequence
tgaagtgtatcttttttatgttgta

SEQ ID NO: 83567 - DNA, 25 bp, Artificial sequence
  SiRNA target sequence
gaagtgtatcttttttatgttgtac

SEQ ID NO: 83568 - DNA, 25 bp, Artificial sequence
  SiRNA target sequence
aagtgtatcttttttatgttgtact

SEQ ID NO: 83569 - DNA, 25 bp, Artificial sequence
  SiRNA target sequence
agtgtatcttttttatgttgtactg

SEQ ID NO: 83570 - DNA, 25 bp, Artificial sequence
  SiRNA target sequence
gtgtatcttttttatgttgtactgt

SEQ ID NO: 83571 - DNA, 25 bp, Artificial sequence
  SiRNA target sequence
tgtatcttttttatgttgtactgta

SEQ ID NO: 83572 - DNA, 25 bp, Artificial sequence
  SiRNA target sequence
gtatcttttttatgttgtactgtag

SEQ ID NO: 83573 - DNA, 25 bp, Artificial sequence
  SiRNA target sequence
tatcttttttatgttgtactgtagg

SEQ ID NO: 83574 - DNA, 25 bp, Artificial sequence
  SiRNA target sequence
atcttttttatgttgtactgtagga

SEQ ID NO: 83575 - DNA, 25 bp, Artificial sequence
  SiRNA target sequence
tcttttttatgttgtactgtaggaa

SEQ ID NO: 83576 - DNA, 25 bp, Artificial sequence
  SiRNA target sequence
cttttttatgttgtactgtaggaaa

SEQ ID NO: 83577 - DNA, 25 bp, Artificial sequence
  SiRNA target sequence
ttttttatgttgtactgtaggaaat

SEQ ID NO: 83578 - DNA, 25 bp, Artificial sequence
  SiRNA target sequence
tttttatgttgtactgtaggaaatg

SEQ ID NO: 83579 - DNA, 25 bp, Artificial sequence
  SiRNA target sequence
ttttatgttgtactgtaggaaatgc

SEQ ID NO: 83580 - DNA, 25 bp, Artificial sequence
  SiRNA target sequence
tttatgttgtactgtaggaaatgca

SEQ ID NO: 83581 - DNA, 25 bp, Artificial sequence
  SiRNA target sequence
ttatgttgtactgtaggaaatgcag

SEQ ID NO: 83582 - DNA, 25 bp, Artificial sequence
  SiRNA target sequence
tatgttgtactgtaggaaatgcagg

SEQ ID NO: 83583 - DNA, 25 bp, Artificial sequence
  SiRNA target sequence
atgttgtactgtaggaaatgcagga

SEQ ID NO: 83584 - DNA, 25 bp, Artificial sequence
  SiRNA target sequence
tgttgtactgtaggaaatgcaggat

SEQ ID NO: 83585 - DNA, 25 bp, Artificial sequence
  SiRNA target sequence
gttgtactgtaggaaatgcaggata

SEQ ID NO: 83586 - DNA, 25 bp, Artificial sequence
  SiRNA target sequence
ttgtactgtaggaaatgcaggataa

SEQ ID NO: 83587 - DNA, 25 bp, Artificial sequence
  SiRNA target sequence
tgtactgtaggaaatgcaggataaa

SEQ ID NO: 83588 - DNA, 25 bp, Artificial sequence
  SiRNA target sequence
gtactgtaggaaatgcaggataaac

SEQ ID NO: 83589 - DNA, 25 bp, Artificial sequence
  SiRNA target sequence
tactgtaggaaatgcaggataaaca

SEQ ID NO: 83590 - DNA, 25 bp, Artificial sequence
  SiRNA target sequence
actgtaggaaatgcaggataaacag

SEQ ID NO: 83591 - DNA, 25 bp, Artificial sequence
  SiRNA target sequence
ctgtaggaaatgcaggataaacagc

SEQ ID NO: 83592 - DNA, 25 bp, Artificial sequence
  SiRNA target sequence
tgtaggaaatgcaggataaacagct

SEQ ID NO: 83593 - DNA, 25 bp, Artificial sequence
  SiRNA target sequence
gtaggaaatgcaggataaacagctg

SEQ ID NO: 83594 - DNA, 25 bp, Artificial sequence
  SiRNA target sequence
taggaaatgcaggataaacagctgc

SEQ ID NO: 83595 - DNA, 25 bp, Artificial sequence
  SiRNA target sequence
aggaaatgcaggataaacagctgcc

SEQ ID NO: 83596 - DNA, 25 bp, Artificial sequence
  SiRNA target sequence
ggaaatgcaggataaacagctgcca

SEQ ID NO: 83597 - DNA, 25 bp, Artificial sequence
  SiRNA target sequence
gaaatgcaggataaacagctgccat

SEQ ID NO: 83598 - DNA, 25 bp, Artificial sequence
  SiRNA target sequence
aaatgcaggataaacagctgccatg

SEQ ID NO: 83599 - DNA, 25 bp, Artificial sequence
  SiRNA target sequence
aatgcaggataaacagctgccatgg

SEQ ID NO: 83600 - DNA, 25 bp, Artificial sequence
  SiRNA target sequence
atgcaggataaacagctgccatggt

SEQ ID NO: 83601 - DNA, 25 bp, Artificial sequence
  SiRNA target sequence
tgcaggataaacagctgccatggta

SEQ ID NO: 83602 - DNA, 25 bp, Artificial sequence
  SiRNA target sequence
gcaggataaacagctgccatggtat

SEQ ID NO: 83603 - DNA, 25 bp, Artificial sequence
  SiRNA target sequence
caggataaacagctgccatggtatg

SEQ ID NO: 83604 - DNA, 25 bp, Artificial sequence
  SiRNA target sequence
aggataaacagctgccatggtatgt

SEQ ID NO: 83605 - DNA, 25 bp, Artificial sequence
  SiRNA target sequence
ggataaacagctgccatggtatgta

SEQ ID NO: 83606 - DNA, 25 bp, Artificial sequence
  SiRNA target sequence
gataaacagctgccatggtatgtaa

SEQ ID NO: 83607 - DNA, 25 bp, Artificial sequence
  SiRNA target sequence
ataaacagctgccatggtatgtaaa

SEQ ID NO: 83608 - DNA, 25 bp, Artificial sequence
  SiRNA target sequence
taaacagctgccatggtatgtaaaa

SEQ ID NO: 83609 - DNA, 25 bp, Artificial sequence
  SiRNA target sequence
aaacagctgccatggtatgtaaaag

SEQ ID NO: 83610 - DNA, 25 bp, Artificial sequence
  SiRNA target sequence
aacagctgccatggtatgtaaaagt

SEQ ID NO: 83611 - DNA, 25 bp, Artificial sequence
  SiRNA target sequence
acagctgccatggtatgtaaaagtg

SEQ ID NO: 83612 - DNA, 25 bp, Artificial sequence
  SiRNA target sequence
cagctgccatggtatgtaaaagtgt

SEQ ID NO: 83613 - DNA, 25 bp, Artificial sequence
  SiRNA target sequence
agctgccatggtatgtaaaagtgtc

SEQ ID NO: 83614 - DNA, 25 bp, Artificial sequence
  SiRNA target sequence
gctgccatggtatgtaaaagtgtcc

SEQ ID NO: 83615 - DNA, 25 bp, Artificial sequence
  SiRNA target sequence
ctgccatggtatgtaaaagtgtcca

SEQ ID NO: 83616 - DNA, 25 bp, Artificial sequence
  SiRNA target sequence
tgccatggtatgtaaaagtgtccat

SEQ ID NO: 83617 - DNA, 25 bp, Artificial sequence
  SiRNA target sequence
gccatggtatgtaaaagtgtccatg

SEQ ID NO: 83618 - DNA, 25 bp, Artificial sequence
  SiRNA target sequence
ccatggtatgtaaaagtgtccatgt

SEQ ID NO: 83619 - DNA, 25 bp, Artificial sequence
  SiRNA target sequence
catggtatgtaaaagtgtccatgtt

SEQ ID NO: 83620 - DNA, 25 bp, Artificial sequence
  SiRNA target sequence
atggtatgtaaaagtgtccatgttg

SEQ ID NO: 83621 - DNA, 25 bp, Artificial sequence
  SiRNA target sequence
tggtatgtaaaagtgtccatgttgc

SEQ ID NO: 83622 - DNA, 25 bp, Artificial sequence
  SiRNA target sequence
ggtatgtaaaagtgtccatgttgct

SEQ ID NO: 83623 - DNA, 25 bp, Artificial sequence
  SiRNA target sequence
gtatgtaaaagtgtccatgttgctc

SEQ ID NO: 83624 - DNA, 25 bp, Artificial sequence
  SiRNA target sequence
tatgtaaaagtgtccatgttgctct

SEQ ID NO: 83625 - DNA, 25 bp, Artificial sequence
  SiRNA target sequence
atgtaaaagtgtccatgttgctctc

SEQ ID NO: 83626 - DNA, 25 bp, Artificial sequence
  SiRNA target sequence
tgtaaaagtgtccatgttgctctcc

SEQ ID NO: 83627 - DNA, 25 bp, Artificial sequence
  SiRNA target sequence
gtaaaagtgtccatgttgctctccc

SEQ ID NO: 83628 - DNA, 25 bp, Artificial sequence
  SiRNA target sequence
taaaagtgtccatgttgctctcccc

SEQ ID NO: 83629 - DNA, 25 bp, Artificial sequence
  SiRNA target sequence
aaaagtgtccatgttgctctcccca

SEQ ID NO: 83630 - DNA, 25 bp, Artificial sequence
  SiRNA target sequence
aaagtgtccatgttgctctccccaa

SEQ ID NO: 83631 - DNA, 25 bp, Artificial sequence
  SiRNA target sequence
aagtgtccatgttgctctccccaat

SEQ ID NO: 83632 - DNA, 25 bp, Artificial sequence
  SiRNA target sequence
agtgtccatgttgctctccccaatc

SEQ ID NO: 83633 - DNA, 25 bp, Artificial sequence
  SiRNA target sequence
gtgtccatgttgctctccccaatct

SEQ ID NO: 83634 - DNA, 25 bp, Artificial sequence
  SiRNA target sequence
tgtccatgttgctctccccaatcta

SEQ ID NO: 83635 - DNA, 25 bp, Artificial sequence
  SiRNA target sequence
gtccatgttgctctccccaatctat

SEQ ID NO: 83636 - DNA, 25 bp, Artificial sequence
  SiRNA target sequence
tccatgttgctctccccaatctatc

SEQ ID NO: 83637 - DNA, 25 bp, Artificial sequence
  SiRNA target sequence
ccatgttgctctccccaatctatct

SEQ ID NO: 83638 - DNA, 25 bp, Artificial sequence
  SiRNA target sequence
catgttgctctccccaatctatctt

SEQ ID NO: 83639 - DNA, 25 bp, Artificial sequence
  SiRNA target sequence
atgttgctctccccaatctatcttt

SEQ ID NO: 83640 - DNA, 25 bp, Artificial sequence
  SiRNA target sequence
tgttgctctccccaatctatcttta

SEQ ID NO: 83641 - DNA, 25 bp, Artificial sequence
  SiRNA target sequence
gttgctctccccaatctatctttaa

SEQ ID NO: 83642 - DNA, 25 bp, Artificial sequence
  SiRNA target sequence
ttgctctccccaatctatctttaac

SEQ ID NO: 83643 - DNA, 25 bp, Artificial sequence
  SiRNA target sequence
tgctctccccaatctatctttaact

SEQ ID NO: 83644 - DNA, 25 bp, Artificial sequence
  SiRNA target sequence
gctctccccaatctatctttaactt

SEQ ID NO: 83645 - DNA, 25 bp, Artificial sequence
  SiRNA target sequence
ctctccccaatctatctttaacttc

SEQ ID NO: 83646 - DNA, 25 bp, Artificial sequence
  SiRNA target sequence
tctccccaatctatctttaacttcc

SEQ ID NO: 83647 - DNA, 25 bp, Artificial sequence
  SiRNA target sequence
ctccccaatctatctttaacttcct

SEQ ID NO: 83648 - DNA, 25 bp, Artificial sequence
  SiRNA target sequence
tccccaatctatctttaacttcctt

SEQ ID NO: 83649 - DNA, 25 bp, Artificial sequence
  SiRNA target sequence
ccccaatctatctttaacttcctta

SEQ ID NO: 83650 - DNA, 25 bp, Artificial sequence
  SiRNA target sequence
cccaatctatctttaacttccttat

SEQ ID NO: 83651 - DNA, 25 bp, Artificial sequence
  SiRNA target sequence
ccaatctatctttaacttccttatt

SEQ ID NO: 83652 - DNA, 25 bp, Artificial sequence
  SiRNA target sequence
caatctatctttaacttccttattt

SEQ ID NO: 83653 - DNA, 25 bp, Artificial sequence
  SiRNA target sequence
aatctatctttaacttccttatttg

SEQ ID NO: 83654 - DNA, 25 bp, Artificial sequence
  SiRNA target sequence
atctatctttaacttccttatttgt

SEQ ID NO: 83655 - DNA, 25 bp, Artificial sequence
  SiRNA target sequence
tctatctttaacttccttatttgtt

SEQ ID NO: 83656 - DNA, 25 bp, Artificial sequence
  SiRNA target sequence
ctatctttaacttccttatttgtta

SEQ ID NO: 83657 - DNA, 25 bp, Artificial sequence
  SiRNA target sequence
tatctttaacttccttatttgttaa

SEQ ID NO: 83658 - DNA, 25 bp, Artificial sequence
  SiRNA target sequence
atctttaacttccttatttgttaat

SEQ ID NO: 83659 - DNA, 25 bp, Artificial sequence
  SiRNA target sequence
tctttaacttccttatttgttaatt

SEQ ID NO: 83660 - DNA, 25 bp, Artificial sequence
  SiRNA target sequence
ctttaacttccttatttgttaattt

SEQ ID NO: 83661 - DNA, 25 bp, Artificial sequence
  SiRNA target sequence
tttaacttccttatttgttaatttt

SEQ ID NO: 83662 - DNA, 25 bp, Artificial sequence
  SiRNA target sequence
ttaacttccttatttgttaattttt

SEQ ID NO: 83663 - DNA, 25 bp, Artificial sequence
  SiRNA target sequence
taacttccttatttgttaatttttg

SEQ ID NO: 83664 - DNA, 25 bp, Artificial sequence
  SiRNA target sequence
aacttccttatttgttaatttttga

SEQ ID NO: 83665 - DNA, 25 bp, Artificial sequence
  SiRNA target sequence
acttccttatttgttaatttttgat

SEQ ID NO: 83666 - DNA, 25 bp, Artificial sequence
  SiRNA target sequence
cttccttatttgttaatttttgatt

SEQ ID NO: 83667 - DNA, 25 bp, Artificial sequence
  SiRNA target sequence
ttccttatttgttaatttttgatta

SEQ ID NO: 83668 - DNA, 25 bp, Artificial sequence
  SiRNA target sequence
tccttatttgttaatttttgattat

SEQ ID NO: 83669 - DNA, 25 bp, Artificial sequence
  SiRNA target sequence
ccttatttgttaatttttgattatg

SEQ ID NO: 83670 - DNA, 25 bp, Artificial sequence
  SiRNA target sequence
cttatttgttaatttttgattatga

SEQ ID NO: 83671 - DNA, 25 bp, Artificial sequence
  SiRNA target sequence
ttatttgttaatttttgattatgaa

SEQ ID NO: 83672 - DNA, 25 bp, Artificial sequence
  SiRNA target sequence
tatttgttaatttttgattatgaat

SEQ ID NO: 83673 - DNA, 25 bp, Artificial sequence
  SiRNA target sequence
atttgttaatttttgattatgaatt

SEQ ID NO: 83674 - DNA, 25 bp, Artificial sequence
  SiRNA target sequence
tttgttaatttttgattatgaatta

SEQ ID NO: 83675 - DNA, 25 bp, Artificial sequence
  SiRNA target sequence
ttgttaatttttgattatgaattag

SEQ ID NO: 83676 - DNA, 25 bp, Artificial sequence
  SiRNA target sequence
tgttaatttttgattatgaattaga

SEQ ID NO: 83677 - DNA, 25 bp, Artificial sequence
  SiRNA target sequence
gttaatttttgattatgaattagac

SEQ ID NO: 83678 - DNA, 25 bp, Artificial sequence
  SiRNA target sequence
ttaatttttgattatgaattagacc

SEQ ID NO: 83679 - DNA, 25 bp, Artificial sequence
  SiRNA target sequence
taatttttgattatgaattagacct

SEQ ID NO: 83680 - DNA, 25 bp, Artificial sequence
  SiRNA target sequence
aatttttgattatgaattagaccta

SEQ ID NO: 83681 - DNA, 25 bp, Artificial sequence
  SiRNA target sequence
atttttgattatgaattagacctaa

SEQ ID NO: 83682 - DNA, 25 bp, Artificial sequence
  SiRNA target sequence
tttttgattatgaattagacctaat

SEQ ID NO: 83683 - DNA, 25 bp, Artificial sequence
  SiRNA target sequence
ttttgattatgaattagacctaatt

SEQ ID NO: 83684 - DNA, 25 bp, Artificial sequence
  SiRNA target sequence
tttgattatgaattagacctaattc

SEQ ID NO: 83685 - DNA, 25 bp, Artificial sequence
  SiRNA target sequence
ttgattatgaattagacctaattca

SEQ ID NO: 83686 - DNA, 25 bp, Artificial sequence
  SiRNA target sequence
tgattatgaattagacctaattcac

SEQ ID NO: 83687 - DNA, 25 bp, Artificial sequence
  SiRNA target sequence
gattatgaattagacctaattcacc

SEQ ID NO: 83688 - DNA, 25 bp, Artificial sequence
  SiRNA target sequence
attatgaattagacctaattcacct

SEQ ID NO: 83689 - DNA, 25 bp, Artificial sequence
  SiRNA target sequence
ttatgaattagacctaattcaccta

SEQ ID NO: 83690 - DNA, 25 bp, Artificial sequence
  SiRNA target sequence
tatgaattagacctaattcacctac

SEQ ID NO: 83691 - DNA, 25 bp, Artificial sequence
  SiRNA target sequence
atgaattagacctaattcacctact

SEQ ID NO: 83692 - DNA, 25 bp, Artificial sequence
  SiRNA target sequence
tgaattagacctaattcacctactt

SEQ ID NO: 83693 - DNA, 25 bp, Artificial sequence
  SiRNA target sequence
gaattagacctaattcacctacttt

SEQ ID NO: 83694 - DNA, 25 bp, Artificial sequence
  SiRNA target sequence
aattagacctaattcacctactttt

SEQ ID NO: 83695 - DNA, 25 bp, Artificial sequence
  SiRNA target sequence
attagacctaattcacctacttttg

SEQ ID NO: 83696 - DNA, 25 bp, Artificial sequence
  SiRNA target sequence
ttagacctaattcacctacttttgg

SEQ ID NO: 83697 - DNA, 25 bp, Artificial sequence
  SiRNA target sequence
tagacctaattcacctacttttggt

SEQ ID NO: 83698 - DNA, 25 bp, Artificial sequence
  SiRNA target sequence
agacctaattcacctacttttggtg

SEQ ID NO: 83699 - DNA, 25 bp, Artificial sequence
  SiRNA target sequence
gacctaattcacctacttttggtga

SEQ ID NO: 83700 - DNA, 25 bp, Artificial sequence
  SiRNA target sequence
acctaattcacctacttttggtgaa

SEQ ID NO: 83701 - DNA, 25 bp, Artificial sequence
  SiRNA target sequence
cctaattcacctacttttggtgaaa

SEQ ID NO: 83702 - DNA, 25 bp, Artificial sequence
  SiRNA target sequence
ctaattcacctacttttggtgaaat

SEQ ID NO: 83703 - DNA, 25 bp, Artificial sequence
  SiRNA target sequence
taattcacctacttttggtgaaata

SEQ ID NO: 83704 - DNA, 25 bp, Artificial sequence
  SiRNA target sequence
aattcacctacttttggtgaaatag

SEQ ID NO: 83705 - DNA, 25 bp, Artificial sequence
  SiRNA target sequence
attcacctacttttggtgaaataga

SEQ ID NO: 83706 - DNA, 25 bp, Artificial sequence
  SiRNA target sequence
ttcacctacttttggtgaaatagat

SEQ ID NO: 83707 - DNA, 25 bp, Artificial sequence
  SiRNA target sequence
tcacctacttttggtgaaatagatt

SEQ ID NO: 83708 - DNA, 25 bp, Artificial sequence
  SiRNA target sequence
cacctacttttggtgaaatagattg

SEQ ID NO: 83709 - DNA, 25 bp, Artificial sequence
  SiRNA target sequence
acctacttttggtgaaatagattgt

SEQ ID NO: 83710 - DNA, 25 bp, Artificial sequence
  SiRNA target sequence
cctacttttggtgaaatagattgta

SEQ ID NO: 83711 - DNA, 25 bp, Artificial sequence
  SiRNA target sequence
ctacttttggtgaaatagattgtaa

SEQ ID NO: 83712 - DNA, 25 bp, Artificial sequence
  SiRNA target sequence
tacttttggtgaaatagattgtaaa

SEQ ID NO: 83713 - DNA, 25 bp, Artificial sequence
  SiRNA target sequence
acttttggtgaaatagattgtaaaa

SEQ ID NO: 83714 - DNA, 25 bp, Artificial sequence
  SiRNA target sequence
cttttggtgaaatagattgtaaaac

SEQ ID NO: 83715 - DNA, 25 bp, Artificial sequence
  SiRNA target sequence
ttttggtgaaatagattgtaaaaca

SEQ ID NO: 83716 - DNA, 25 bp, Artificial sequence
  SiRNA target sequence
tttggtgaaatagattgtaaaacag

SEQ ID NO: 83717 - DNA, 25 bp, Artificial sequence
  SiRNA target sequence
ttggtgaaatagattgtaaaacaga

SEQ ID NO: 83718 - DNA, 25 bp, Artificial sequence
  SiRNA target sequence
tggtgaaatagattgtaaaacagat

SEQ ID NO: 83719 - DNA, 25 bp, Artificial sequence
  SiRNA target sequence
ggtgaaatagattgtaaaacagatt

SEQ ID NO: 83720 - DNA, 25 bp, Artificial sequence
  SiRNA target sequence
gtgaaatagattgtaaaacagattt

SEQ ID NO: 83721 - DNA, 25 bp, Artificial sequence
  SiRNA target sequence
tgaaatagattgtaaaacagatttt

SEQ ID NO: 83722 - DNA, 25 bp, Artificial sequence
  SiRNA target sequence
gaaatagattgtaaaacagattttc

SEQ ID NO: 83723 - DNA, 25 bp, Artificial sequence
  SiRNA target sequence
aaatagattgtaaaacagattttcc

SEQ ID NO: 83724 - DNA, 25 bp, Artificial sequence
  SiRNA target sequence
aatagattgtaaaacagattttcca

SEQ ID NO: 83725 - DNA, 25 bp, Artificial sequence
  SiRNA target sequence
atagattgtaaaacagattttccaa

SEQ ID NO: 83726 - DNA, 25 bp, Artificial sequence
  SiRNA target sequence
tagattgtaaaacagattttccaag

SEQ ID NO: 83727 - DNA, 25 bp, Artificial sequence
  SiRNA target sequence
agattgtaaaacagattttccaagt

SEQ ID NO: 83728 - DNA, 25 bp, Artificial sequence
  SiRNA target sequence
gattgtaaaacagattttccaagtg

SEQ ID NO: 83729 - DNA, 25 bp, Artificial sequence
  SiRNA target sequence
attgtaaaacagattttccaagtga

SEQ ID NO: 83730 - DNA, 25 bp, Artificial sequence
  SiRNA target sequence
ttgtaaaacagattttccaagtgag

SEQ ID NO: 83731 - DNA, 25 bp, Artificial sequence
  SiRNA target sequence
tgtaaaacagattttccaagtgagt

SEQ ID NO: 83732 - DNA, 25 bp, Artificial sequence
  SiRNA target sequence
gtaaaacagattttccaagtgagtt

SEQ ID NO: 83733 - DNA, 25 bp, Artificial sequence
  SiRNA target sequence
taaaacagattttccaagtgagttg

SEQ ID NO: 83734 - DNA, 25 bp, Artificial sequence
  SiRNA target sequence
aaaacagattttccaagtgagttgt

SEQ ID NO: 83735 - DNA, 25 bp, Artificial sequence
  SiRNA target sequence
aaacagattttccaagtgagttgtc

SEQ ID NO: 83736 - DNA, 25 bp, Artificial sequence
  SiRNA target sequence
aacagattttccaagtgagttgtct

SEQ ID NO: 83737 - DNA, 25 bp, Artificial sequence
  SiRNA target sequence
acagattttccaagtgagttgtctg

SEQ ID NO: 83738 - DNA, 25 bp, Artificial sequence
  SiRNA target sequence
cagattttccaagtgagttgtctgc

SEQ ID NO: 83739 - DNA, 25 bp, Artificial sequence
  SiRNA target sequence
agattttccaagtgagttgtctgca

SEQ ID NO: 83740 - DNA, 25 bp, Artificial sequence
  SiRNA target sequence
gattttccaagtgagttgtctgcat

SEQ ID NO: 83741 - DNA, 25 bp, Artificial sequence
  SiRNA target sequence
attttccaagtgagttgtctgcatg

SEQ ID NO: 83742 - DNA, 25 bp, Artificial sequence
  SiRNA target sequence
ttttccaagtgagttgtctgcatgt

SEQ ID NO: 83743 - DNA, 25 bp, Artificial sequence
  SiRNA target sequence
tttccaagtgagttgtctgcatgtg

SEQ ID NO: 83744 - DNA, 25 bp, Artificial sequence
  SiRNA target sequence
ttccaagtgagttgtctgcatgtgt

SEQ ID NO: 83745 - DNA, 25 bp, Artificial sequence
  SiRNA target sequence
tccaagtgagttgtctgcatgtgta

SEQ ID NO: 83746 - DNA, 25 bp, Artificial sequence
  SiRNA target sequence
ccaagtgagttgtctgcatgtgtat

SEQ ID NO: 83747 - DNA, 25 bp, Artificial sequence
  SiRNA target sequence
caagtgagttgtctgcatgtgtatg

SEQ ID NO: 83748 - DNA, 25 bp, Artificial sequence
  SiRNA target sequence
aagtgagttgtctgcatgtgtatgc

SEQ ID NO: 83749 - DNA, 25 bp, Artificial sequence
  SiRNA target sequence
agtgagttgtctgcatgtgtatgcg

SEQ ID NO: 83750 - DNA, 25 bp, Artificial sequence
  SiRNA target sequence
gtgagttgtctgcatgtgtatgcgg

SEQ ID NO: 83751 - DNA, 25 bp, Artificial sequence
  SiRNA target sequence
tgagttgtctgcatgtgtatgcggg

SEQ ID NO: 83752 - DNA, 25 bp, Artificial sequence
  SiRNA target sequence
gagttgtctgcatgtgtatgcggga

SEQ ID NO: 83753 - DNA, 25 bp, Artificial sequence
  SiRNA target sequence
agttgtctgcatgtgtatgcgggaa

SEQ ID NO: 83754 - DNA, 25 bp, Artificial sequence
  SiRNA target sequence
gttgtctgcatgtgtatgcgggaaa

SEQ ID NO: 83755 - DNA, 25 bp, Artificial sequence
  SiRNA target sequence
ttgtctgcatgtgtatgcgggaaaa

SEQ ID NO: 83756 - DNA, 25 bp, Artificial sequence
  SiRNA target sequence
tgtctgcatgtgtatgcgggaaaaa

SEQ ID NO: 83757 - DNA, 25 bp, Artificial sequence
  SiRNA target sequence
gtctgcatgtgtatgcgggaaaaaa

SEQ ID NO: 83758 - DNA, 25 bp, Artificial sequence
  SiRNA target sequence
tctgcatgtgtatgcgggaaaaaat

SEQ ID NO: 83759 - DNA, 25 bp, Artificial sequence
  SiRNA target sequence
ctgcatgtgtatgcgggaaaaaatg

SEQ ID NO: 83760 - DNA, 25 bp, Artificial sequence
  SiRNA target sequence
tgcatgtgtatgcgggaaaaaatgc

SEQ ID NO: 83761 - DNA, 25 bp, Artificial sequence
  SiRNA target sequence
gcatgtgtatgcgggaaaaaatgct

SEQ ID NO: 83762 - DNA, 25 bp, Artificial sequence
  SiRNA target sequence
catgtgtatgcgggaaaaaatgctg

SEQ ID NO: 83763 - DNA, 25 bp, Artificial sequence
  SiRNA target sequence
atgtgtatgcgggaaaaaatgctgt

SEQ ID NO: 83764 - DNA, 25 bp, Artificial sequence
  SiRNA target sequence
tgtgtatgcgggaaaaaatgctgtt

SEQ ID NO: 83765 - DNA, 25 bp, Artificial sequence
  SiRNA target sequence
gtgtatgcgggaaaaaatgctgttt

SEQ ID NO: 83766 - DNA, 25 bp, Artificial sequence
  SiRNA target sequence
tgtatgcgggaaaaaatgctgtttt

SEQ ID NO: 83767 - DNA, 25 bp, Artificial sequence
  SiRNA target sequence
gtatgcgggaaaaaatgctgttttg

SEQ ID NO: 83768 - DNA, 25 bp, Artificial sequence
  SiRNA target sequence
tatgcgggaaaaaatgctgttttgc

SEQ ID NO: 83769 - DNA, 25 bp, Artificial sequence
  SiRNA target sequence
atgcgggaaaaaatgctgttttgct

SEQ ID NO: 83770 - DNA, 25 bp, Artificial sequence
  SiRNA target sequence
tgcgggaaaaaatgctgttttgcta

SEQ ID NO: 83771 - DNA, 25 bp, Artificial sequence
  SiRNA target sequence
gcgggaaaaaatgctgttttgctaa

SEQ ID NO: 83772 - DNA, 25 bp, Artificial sequence
  SiRNA target sequence
cgggaaaaaatgctgttttgctaaa

SEQ ID NO: 83773 - DNA, 25 bp, Artificial sequence
  SiRNA target sequence
gggaaaaaatgctgttttgctaaat

SEQ ID NO: 83774 - DNA, 25 bp, Artificial sequence
  SiRNA target sequence
ggaaaaaatgctgttttgctaaata

SEQ ID NO: 83775 - DNA, 25 bp, Artificial sequence
  SiRNA target sequence
gaaaaaatgctgttttgctaaataa

SEQ ID NO: 83776 - DNA, 25 bp, Artificial sequence
  SiRNA target sequence
aaaaaatgctgttttgctaaataaa

SEQ ID NO: 83777 - DNA, 25 bp, Artificial sequence
  SiRNA target sequence
aaaaatgctgttttgctaaataaac

SEQ ID NO: 83778 - DNA, 25 bp, Artificial sequence
  SiRNA target sequence
aaaatgctgttttgctaaataaaca

SEQ ID NO: 83779 - DNA, 25 bp, Artificial sequence
  SiRNA target sequence
aaatgctgttttgctaaataaacaa

SEQ ID NO: 83780 - DNA, 25 bp, Artificial sequence
  SiRNA target sequence
aatgctgttttgctaaataaacaat

SEQ ID NO: 83781 - DNA, 25 bp, Artificial sequence
  SiRNA target sequence
atgctgttttgctaaataaacaatc

SEQ ID NO: 83782 - DNA, 25 bp, Artificial sequence
  SiRNA target sequence
tgctgttttgctaaataaacaatcc

SEQ ID NO: 83783 - DNA, 25 bp, Artificial sequence
  SiRNA target sequence
gctgttttgctaaataaacaatcca

SEQ ID NO: 83784 - DNA, 25 bp, Artificial sequence
  SiRNA target sequence
ctgttttgctaaataaacaatccat

SEQ ID NO: 83785 - DNA, 25 bp, Artificial sequence
  SiRNA target sequence
tgttttgctaaataaacaatccata

SEQ ID NO: 83786 - DNA, 25 bp, Artificial sequence
  SiRNA target sequence
gttttgctaaataaacaatccatac

SEQ ID NO: 83787 - DNA, 25 bp, Artificial sequence
  SiRNA target sequence
ttttgctaaataaacaatccataca

SEQ ID NO: 83788 - DNA, 25 bp, Artificial sequence
  SiRNA target sequence
tttgctaaataaacaatccatacac

SEQ ID NO: 83789 - DNA, 25 bp, Artificial sequence
  SiRNA target sequence
ttgctaaataaacaatccatacacc

SEQ ID NO: 83790 - DNA, 25 bp, Artificial sequence
  SiRNA target sequence
tgctaaataaacaatccatacaccc

SEQ ID NO: 83791 - DNA, 25 bp, Artificial sequence
  SiRNA target sequence
gctaaataaacaatccatacaccca

SEQ ID NO: 83792 - DNA, 25 bp, Artificial sequence
  SiRNA target sequence
ctaaataaacaatccatacacccaa

SEQ ID NO: 83793 - DNA, 25 bp, Artificial sequence
  SiRNA target sequence
taaataaacaatccatacacccaat

SEQ ID NO: 83794 - DNA, 25 bp, Artificial sequence
  SiRNA target sequence
aaataaacaatccatacacccaata

SEQ ID NO: 83795 - DNA, 25 bp, Artificial sequence
  SiRNA target sequence
aataaacaatccatacacccaataa

SEQ ID NO: 83796 - DNA, 25 bp, Artificial sequence
  SiRNA target sequence
ataaacaatccatacacccaataag

SEQ ID NO: 83797 - DNA, 25 bp, Artificial sequence
  SiRNA target sequence
taaacaatccatacacccaataaga

SEQ ID NO: 83798 - DNA, 25 bp, Artificial sequence
  SiRNA target sequence
aaacaatccatacacccaataagat

SEQ ID NO: 83799 - DNA, 25 bp, Artificial sequence
  SiRNA target sequence
aacaatccatacacccaataagata

SEQ ID NO: 83800 - DNA, 25 bp, Artificial sequence
  SiRNA target sequence
acaatccatacacccaataagataa

SEQ ID NO: 83801 - DNA, 25 bp, Artificial sequence
  SiRNA target sequence
caatccatacacccaataagataat

SEQ ID NO: 83802 - DNA, 25 bp, Artificial sequence
  SiRNA target sequence
aatccatacacccaataagataata

SEQ ID NO: 83803 - DNA, 25 bp, Artificial sequence
  SiRNA target sequence
atccatacacccaataagataataa

SEQ ID NO: 83804 - DNA, 25 bp, Artificial sequence
  SiRNA target sequence
tccatacacccaataagataataag

SEQ ID NO: 83805 - DNA, 25 bp, Artificial sequence
  SiRNA target sequence
ccatacacccaataagataataagt

SEQ ID NO: 83806 - DNA, 25 bp, Artificial sequence
  SiRNA target sequence
catacacccaataagataataagtc

SEQ ID NO: 83807 - DNA, 25 bp, Artificial sequence
  SiRNA target sequence
atacacccaataagataataagtcc

SEQ ID NO: 83808 - DNA, 25 bp, Artificial sequence
  SiRNA target sequence
tacacccaataagataataagtcct

SEQ ID NO: 83809 - DNA, 25 bp, Artificial sequence
  SiRNA target sequence
acacccaataagataataagtcctc

SEQ ID NO: 83810 - DNA, 25 bp, Artificial sequence
  SiRNA target sequence
cacccaataagataataagtcctct

SEQ ID NO: 83811 - DNA, 25 bp, Artificial sequence
  SiRNA target sequence
acccaataagataataagtcctctt

SEQ ID NO: 83812 - DNA, 25 bp, Artificial sequence
  SiRNA target sequence
cccaataagataataagtcctctta

SEQ ID NO: 83813 - DNA, 25 bp, Artificial sequence
  SiRNA target sequence
ccaataagataataagtcctcttaa

SEQ ID NO: 83814 - DNA, 25 bp, Artificial sequence
  SiRNA target sequence
caataagataataagtcctcttaat

SEQ ID NO: 83815 - DNA, 25 bp, Artificial sequence
  SiRNA target sequence
aataagataataagtcctcttaata

SEQ ID NO: 83816 - DNA, 25 bp, Artificial sequence
  SiRNA target sequence
ataagataataagtcctcttaatac

SEQ ID NO: 83817 - DNA, 25 bp, Artificial sequence
  SiRNA target sequence
taagataataagtcctcttaatact

SEQ ID NO: 83818 - DNA, 25 bp, Artificial sequence
  SiRNA target sequence
aagataataagtcctcttaatactt

SEQ ID NO: 83819 - DNA, 25 bp, Artificial sequence
  SiRNA target sequence
agataataagtcctcttaatacttt

SEQ ID NO: 83820 - DNA, 25 bp, Artificial sequence
  SiRNA target sequence
gataataagtcctcttaatactttc

SEQ ID NO: 83821 - DNA, 25 bp, Artificial sequence
  SiRNA target sequence
ataataagtcctcttaatactttct

SEQ ID NO: 83822 - DNA, 25 bp, Artificial sequence
  SiRNA target sequence
taataagtcctcttaatactttctg

SEQ ID NO: 83823 - DNA, 25 bp, Artificial sequence
  SiRNA target sequence
aataagtcctcttaatactttctgc

SEQ ID NO: 83824 - DNA, 25 bp, Artificial sequence
  SiRNA target sequence
ataagtcctcttaatactttctgct

SEQ ID NO: 83825 - DNA, 25 bp, Artificial sequence
  SiRNA target sequence
taagtcctcttaatactttctgctc

SEQ ID NO: 83826 - DNA, 25 bp, Artificial sequence
  SiRNA target sequence
aagtcctcttaatactttctgctct

SEQ ID NO: 83827 - DNA, 25 bp, Artificial sequence
  SiRNA target sequence
agtcctcttaatactttctgctctt

SEQ ID NO: 83828 - DNA, 25 bp, Artificial sequence
  SiRNA target sequence
gtcctcttaatactttctgctcttt

SEQ ID NO: 83829 - DNA, 25 bp, Artificial sequence
  SiRNA target sequence
tcctcttaatactttctgctctttg

SEQ ID NO: 83830 - DNA, 25 bp, Artificial sequence
  SiRNA target sequence
cctcttaatactttctgctctttgt

SEQ ID NO: 83831 - DNA, 25 bp, Artificial sequence
  SiRNA target sequence
ctcttaatactttctgctctttgtt

SEQ ID NO: 83832 - DNA, 25 bp, Artificial sequence
  SiRNA target sequence
tcttaatactttctgctctttgttc

SEQ ID NO: 83833 - DNA, 25 bp, Artificial sequence
  SiRNA target sequence
cttaatactttctgctctttgttca

SEQ ID NO: 83834 - DNA, 25 bp, Artificial sequence
  SiRNA target sequence
ttaatactttctgctctttgttcat

SEQ ID NO: 83835 - DNA, 26 bp, Artificial sequence
  SiRNA target sequence
ttattctggttcacaaccacaactcc

SEQ ID NO: 83836 - DNA, 26 bp, Artificial sequence
  SiRNA target sequence
tattctggttcacaaccacaactcca

SEQ ID NO: 83837 - DNA, 26 bp, Artificial sequence
  SiRNA target sequence
attctggttcacaaccacaactccaa

SEQ ID NO: 83838 - DNA, 26 bp, Artificial sequence
  SiRNA target sequence
ttctggttcacaaccacaactccaaa

SEQ ID NO: 83839 - DNA, 26 bp, Artificial sequence
  SiRNA target sequence
tctggttcacaaccacaactccaaac

SEQ ID NO: 83840 - DNA, 26 bp, Artificial sequence
  SiRNA target sequence
ctggttcacaaccacaactccaaaca

SEQ ID NO: 83841 - DNA, 26 bp, Artificial sequence
  SiRNA target sequence
tggttcacaaccacaactccaaacac

SEQ ID NO: 83842 - DNA, 26 bp, Artificial sequence
  SiRNA target sequence
ggttcacaaccacaactccaaacacc

SEQ ID NO: 83843 - DNA, 26 bp, Artificial sequence
  SiRNA target sequence
gttcacaaccacaactccaaacacct

SEQ ID NO: 83844 - DNA, 26 bp, Artificial sequence
  SiRNA target sequence
ttcacaaccacaactccaaacacctt

SEQ ID NO: 83845 - DNA, 26 bp, Artificial sequence
  SiRNA target sequence
tcacaaccacaactccaaacaccttc

SEQ ID NO: 83846 - DNA, 26 bp, Artificial sequence
  SiRNA target sequence
cacaaccacaactccaaacaccttct

SEQ ID NO: 83847 - DNA, 26 bp, Artificial sequence
  SiRNA target sequence
acaaccacaactccaaacaccttcta

SEQ ID NO: 83848 - DNA, 26 bp, Artificial sequence
  SiRNA target sequence
caaccacaactccaaacaccttctac

SEQ ID NO: 83849 - DNA, 26 bp, Artificial sequence
  SiRNA target sequence
aaccacaactccaaacaccttctacc

SEQ ID NO: 83850 - DNA, 26 bp, Artificial sequence
  SiRNA target sequence
accacaactccaaacaccttctacct

SEQ ID NO: 83851 - DNA, 26 bp, Artificial sequence
  SiRNA target sequence
ccacaactccaaacaccttctacctt

SEQ ID NO: 83852 - DNA, 26 bp, Artificial sequence
  SiRNA target sequence
cacaactccaaacaccttctaccttt

SEQ ID NO: 83853 - DNA, 26 bp, Artificial sequence
  SiRNA target sequence
acaactccaaacaccttctacctttt

SEQ ID NO: 83854 - DNA, 26 bp, Artificial sequence
  SiRNA target sequence
caactccaaacaccttctaccttttt

SEQ ID NO: 83855 - DNA, 26 bp, Artificial sequence
  SiRNA target sequence
aactccaaacaccttctaccttttta

SEQ ID NO: 83856 - DNA, 26 bp, Artificial sequence
  SiRNA target sequence
actccaaacaccttctacctttttac

SEQ ID NO: 83857 - DNA, 26 bp, Artificial sequence
  SiRNA target sequence
ctccaaacaccttctacctttttaca

SEQ ID NO: 83858 - DNA, 26 bp, Artificial sequence
  SiRNA target sequence
tccaaacaccttctacctttttacag

SEQ ID NO: 83859 - DNA, 26 bp, Artificial sequence
  SiRNA target sequence
ccaaacaccttctacctttttacagt

SEQ ID NO: 83860 - DNA, 26 bp, Artificial sequence
  SiRNA target sequence
caaacaccttctacctttttacagtc

SEQ ID NO: 83861 - DNA, 26 bp, Artificial sequence
  SiRNA target sequence
aaacaccttctacctttttacagtcc

SEQ ID NO: 83862 - DNA, 26 bp, Artificial sequence
  SiRNA target sequence
aacaccttctacctttttacagtcca

SEQ ID NO: 83863 - DNA, 26 bp, Artificial sequence
  SiRNA target sequence
acaccttctacctttttacagtccat

SEQ ID NO: 83864 - DNA, 26 bp, Artificial sequence
  SiRNA target sequence
caccttctacctttttacagtccata

SEQ ID NO: 83865 - DNA, 26 bp, Artificial sequence
  SiRNA target sequence
accttctacctttttacagtccataa

SEQ ID NO: 83866 - DNA, 26 bp, Artificial sequence
  SiRNA target sequence
ccttctacctttttacagtccataat

SEQ ID NO: 83867 - DNA, 26 bp, Artificial sequence
  SiRNA target sequence
cttctacctttttacagtccataatg

SEQ ID NO: 83868 - DNA, 26 bp, Artificial sequence
  SiRNA target sequence
ttctacctttttacagtccataatgg

SEQ ID NO: 83869 - DNA, 26 bp, Artificial sequence
  SiRNA target sequence
tctacctttttacagtccataatggg

SEQ ID NO: 83870 - DNA, 26 bp, Artificial sequence
  SiRNA target sequence
ctacctttttacagtccataatgggc

SEQ ID NO: 83871 - DNA, 26 bp, Artificial sequence
  SiRNA target sequence
tacctttttacagtccataatgggct

SEQ ID NO: 83872 - DNA, 26 bp, Artificial sequence
  SiRNA target sequence
acctttttacagtccataatgggctt

SEQ ID NO: 83873 - DNA, 26 bp, Artificial sequence
  SiRNA target sequence
cctttttacagtccataatgggcttt

SEQ ID NO: 83874 - DNA, 26 bp, Artificial sequence
  SiRNA target sequence
ctttttacagtccataatgggctttc

SEQ ID NO: 83875 - DNA, 26 bp, Artificial sequence
  SiRNA target sequence
tttttacagtccataatgggctttcc

SEQ ID NO: 83876 - DNA, 26 bp, Artificial sequence
  SiRNA target sequence
ttttacagtccataatgggctttcct

SEQ ID NO: 83877 - DNA, 26 bp, Artificial sequence
  SiRNA target sequence
tttacagtccataatgggctttccta

SEQ ID NO: 83878 - DNA, 26 bp, Artificial sequence
  SiRNA target sequence
ttacagtccataatgggctttcctaa

SEQ ID NO: 83879 - DNA, 26 bp, Artificial sequence
  SiRNA target sequence
tacagtccataatgggctttcctaat

SEQ ID NO: 83880 - DNA, 26 bp, Artificial sequence
  SiRNA target sequence
acagtccataatgggctttcctaatc

SEQ ID NO: 83881 - DNA, 26 bp, Artificial sequence
  SiRNA target sequence
cagtccataatgggctttcctaatct

SEQ ID NO: 83882 - DNA, 26 bp, Artificial sequence
  SiRNA target sequence
agtccataatgggctttcctaatctt

SEQ ID NO: 83883 - DNA, 26 bp, Artificial sequence
  SiRNA target sequence
gtccataatgggctttcctaatcttt

SEQ ID NO: 83884 - DNA, 26 bp, Artificial sequence
  SiRNA target sequence
tccataatgggctttcctaatctttt

SEQ ID NO: 83885 - DNA, 26 bp, Artificial sequence
  SiRNA target sequence
ccataatgggctttcctaatctttta

SEQ ID NO: 83886 - DNA, 26 bp, Artificial sequence
  SiRNA target sequence
cataatgggctttcctaatcttttat

SEQ ID NO: 83887 - DNA, 26 bp, Artificial sequence
  SiRNA target sequence
ataatgggctttcctaatcttttatt

SEQ ID NO: 83888 - DNA, 26 bp, Artificial sequence
  SiRNA target sequence
taatgggctttcctaatcttttatta

SEQ ID NO: 83889 - DNA, 26 bp, Artificial sequence
  SiRNA target sequence
aatgggctttcctaatcttttattaa

SEQ ID NO: 83890 - DNA, 26 bp, Artificial sequence
  SiRNA target sequence
atgggctttcctaatcttttattaac

SEQ ID NO: 83891 - DNA, 26 bp, Artificial sequence
  SiRNA target sequence
tgggctttcctaatcttttattaact

SEQ ID NO: 83892 - DNA, 26 bp, Artificial sequence
  SiRNA target sequence
gggctttcctaatcttttattaacta

SEQ ID NO: 83893 - DNA, 26 bp, Artificial sequence
  SiRNA target sequence
ggctttcctaatcttttattaactat

SEQ ID NO: 83894 - DNA, 26 bp, Artificial sequence
  SiRNA target sequence
gctttcctaatcttttattaactatg

SEQ ID NO: 83895 - DNA, 26 bp, Artificial sequence
  SiRNA target sequence
ctttcctaatcttttattaactatgt

SEQ ID NO: 83896 - DNA, 26 bp, Artificial sequence
  SiRNA target sequence
tttcctaatcttttattaactatgtt

SEQ ID NO: 83897 - DNA, 26 bp, Artificial sequence
  SiRNA target sequence
ttcctaatcttttattaactatgtta

SEQ ID NO: 83898 - DNA, 26 bp, Artificial sequence
  SiRNA target sequence
tcctaatcttttattaactatgttat

SEQ ID NO: 83899 - DNA, 26 bp, Artificial sequence
  SiRNA target sequence
cctaatcttttattaactatgttatg

SEQ ID NO: 83900 - DNA, 26 bp, Artificial sequence
  SiRNA target sequence
ctaatcttttattaactatgttatgt

SEQ ID NO: 83901 - DNA, 26 bp, Artificial sequence
  SiRNA target sequence
taatcttttattaactatgttatgtg

SEQ ID NO: 83902 - DNA, 26 bp, Artificial sequence
  SiRNA target sequence
aatcttttattaactatgttatgtgc

SEQ ID NO: 83903 - DNA, 26 bp, Artificial sequence
  SiRNA target sequence
atcttttattaactatgttatgtgct

SEQ ID NO: 83904 - DNA, 26 bp, Artificial sequence
  SiRNA target sequence
tcttttattaactatgttatgtgctt

SEQ ID NO: 83905 - DNA, 26 bp, Artificial sequence
  SiRNA target sequence
cttttattaactatgttatgtgcttt

SEQ ID NO: 83906 - DNA, 26 bp, Artificial sequence
  SiRNA target sequence
ttttattaactatgttatgtgcttta

SEQ ID NO: 83907 - DNA, 26 bp, Artificial sequence
  SiRNA target sequence
tttattaactatgttatgtgctttac

SEQ ID NO: 83908 - DNA, 26 bp, Artificial sequence
  SiRNA target sequence
ttattaactatgttatgtgctttaca

SEQ ID NO: 83909 - DNA, 26 bp, Artificial sequence
  SiRNA target sequence
tattaactatgttatgtgctttacat

SEQ ID NO: 83910 - DNA, 26 bp, Artificial sequence
  SiRNA target sequence
attaactatgttatgtgctttacata

SEQ ID NO: 83911 - DNA, 26 bp, Artificial sequence
  SiRNA target sequence
ttaactatgttatgtgctttacatag

SEQ ID NO: 83912 - DNA, 26 bp, Artificial sequence
  SiRNA target sequence
taactatgttatgtgctttacatagc

SEQ ID NO: 83913 - DNA, 26 bp, Artificial sequence
  SiRNA target sequence
aactatgttatgtgctttacatagcc

SEQ ID NO: 83914 - DNA, 26 bp, Artificial sequence
  SiRNA target sequence
actatgttatgtgctttacatagcca

SEQ ID NO: 83915 - DNA, 26 bp, Artificial sequence
  SiRNA target sequence
ctatgttatgtgctttacatagccac

SEQ ID NO: 83916 - DNA, 26 bp, Artificial sequence
  SiRNA target sequence
tatgttatgtgctttacatagccact

SEQ ID NO: 83917 - DNA, 26 bp, Artificial sequence
  SiRNA target sequence
atgttatgtgctttacatagccactg

SEQ ID NO: 83918 - DNA, 26 bp, Artificial sequence
  SiRNA target sequence
tgttatgtgctttacatagccactgg

SEQ ID NO: 83919 - DNA, 26 bp, Artificial sequence
  SiRNA target sequence
gttatgtgctttacatagccactgga

SEQ ID NO: 83920 - DNA, 26 bp, Artificial sequence
  SiRNA target sequence
ttatgtgctttacatagccactggac

SEQ ID NO: 83921 - DNA, 26 bp, Artificial sequence
  SiRNA target sequence
tatgtgctttacatagccactggaca

SEQ ID NO: 83922 - DNA, 26 bp, Artificial sequence
  SiRNA target sequence
atgtgctttacatagccactggacaa

SEQ ID NO: 83923 - DNA, 26 bp, Artificial sequence
  SiRNA target sequence
tgtgctttacatagccactggacaaa

SEQ ID NO: 83924 - DNA, 26 bp, Artificial sequence
  SiRNA target sequence
gtgctttacatagccactggacaaat

SEQ ID NO: 83925 - DNA, 26 bp, Artificial sequence
  SiRNA target sequence
tgctttacatagccactggacaaatt

SEQ ID NO: 83926 - DNA, 26 bp, Artificial sequence
  SiRNA target sequence
gctttacatagccactggacaaattc

SEQ ID NO: 83927 - DNA, 26 bp, Artificial sequence
  SiRNA target sequence
ctttacatagccactggacaaattcg

SEQ ID NO: 83928 - DNA, 26 bp, Artificial sequence
  SiRNA target sequence
tttacatagccactggacaaattcgt

SEQ ID NO: 83929 - DNA, 26 bp, Artificial sequence
  SiRNA target sequence
ttacatagccactggacaaattcgtc

SEQ ID NO: 83930 - DNA, 26 bp, Artificial sequence
  SiRNA target sequence
tacatagccactggacaaattcgtca

SEQ ID NO: 83931 - DNA, 26 bp, Artificial sequence
  SiRNA target sequence
acatagccactggacaaattcgtcat

SEQ ID NO: 83932 - DNA, 26 bp, Artificial sequence
  SiRNA target sequence
catagccactggacaaattcgtcatg

SEQ ID NO: 83933 - DNA, 26 bp, Artificial sequence
  SiRNA target sequence
atagccactggacaaattcgtcatgt

SEQ ID NO: 83934 - DNA, 26 bp, Artificial sequence
  SiRNA target sequence
tagccactggacaaattcgtcatgtg

SEQ ID NO: 83935 - DNA, 26 bp, Artificial sequence
  SiRNA target sequence
agccactggacaaattcgtcatgtgt

SEQ ID NO: 83936 - DNA, 26 bp, Artificial sequence
  SiRNA target sequence
gccactggacaaattcgtcatgtgtg

SEQ ID NO: 83937 - DNA, 26 bp, Artificial sequence
  SiRNA target sequence
ccactggacaaattcgtcatgtgtgg

SEQ ID NO: 83938 - DNA, 26 bp, Artificial sequence
  SiRNA target sequence
cactggacaaattcgtcatgtgtggc

SEQ ID NO: 83939 - DNA, 26 bp, Artificial sequence
  SiRNA target sequence
actggacaaattcgtcatgtgtggca

SEQ ID NO: 83940 - DNA, 26 bp, Artificial sequence
  SiRNA target sequence
ctggacaaattcgtcatgtgtggcaa

SEQ ID NO: 83941 - DNA, 26 bp, Artificial sequence
  SiRNA target sequence
tggacaaattcgtcatgtgtggcaac

SEQ ID NO: 83942 - DNA, 26 bp, Artificial sequence
  SiRNA target sequence
ggacaaattcgtcatgtgtggcaact

SEQ ID NO: 83943 - DNA, 26 bp, Artificial sequence
  SiRNA target sequence
gacaaattcgtcatgtgtggcaactt

SEQ ID NO: 83944 - DNA, 26 bp, Artificial sequence
  SiRNA target sequence
acaaattcgtcatgtgtggcaacttg

SEQ ID NO: 83945 - DNA, 26 bp, Artificial sequence
  SiRNA target sequence
caaattcgtcatgtgtggcaacttgt

SEQ ID NO: 83946 - DNA, 26 bp, Artificial sequence
  SiRNA target sequence
aaattcgtcatgtgtggcaacttgtg

SEQ ID NO: 83947 - DNA, 26 bp, Artificial sequence
  SiRNA target sequence
aattcgtcatgtgtggcaacttgtgg

SEQ ID NO: 83948 - DNA, 26 bp, Artificial sequence
  SiRNA target sequence
attcgtcatgtgtggcaacttgtgga

SEQ ID NO: 83949 - DNA, 26 bp, Artificial sequence
  SiRNA target sequence
ttcgtcatgtgtggcaacttgtggag

SEQ ID NO: 83950 - DNA, 26 bp, Artificial sequence
  SiRNA target sequence
tcgtcatgtgtggcaacttgtggagg

SEQ ID NO: 83951 - DNA, 26 bp, Artificial sequence
  SiRNA target sequence
cgtcatgtgtggcaacttgtggagga

SEQ ID NO: 83952 - DNA, 26 bp, Artificial sequence
  SiRNA target sequence
gtcatgtgtggcaacttgtggaggat

SEQ ID NO: 83953 - DNA, 26 bp, Artificial sequence
  SiRNA target sequence
tcatgtgtggcaacttgtggaggatt

SEQ ID NO: 83954 - DNA, 26 bp, Artificial sequence
  SiRNA target sequence
catgtgtggcaacttgtggaggattt

SEQ ID NO: 83955 - DNA, 26 bp, Artificial sequence
  SiRNA target sequence
atgtgtggcaacttgtggaggattta

SEQ ID NO: 83956 - DNA, 26 bp, Artificial sequence
  SiRNA target sequence
tgtgtggcaacttgtggaggatttaa

SEQ ID NO: 83957 - DNA, 26 bp, Artificial sequence
  SiRNA target sequence
gtgtggcaacttgtggaggatttaag

SEQ ID NO: 83958 - DNA, 26 bp, Artificial sequence
  SiRNA target sequence
tgtggcaacttgtggaggatttaagc

SEQ ID NO: 83959 - DNA, 26 bp, Artificial sequence
  SiRNA target sequence
gtggcaacttgtggaggatttaagct

SEQ ID NO: 83960 - DNA, 26 bp, Artificial sequence
  SiRNA target sequence
tggcaacttgtggaggatttaagctt

SEQ ID NO: 83961 - DNA, 26 bp, Artificial sequence
  SiRNA target sequence
ggcaacttgtggaggatttaagctta

SEQ ID NO: 83962 - DNA, 26 bp, Artificial sequence
  SiRNA target sequence
gcaacttgtggaggatttaagcttaa

SEQ ID NO: 83963 - DNA, 26 bp, Artificial sequence
  SiRNA target sequence
caacttgtggaggatttaagcttaac

SEQ ID NO: 83964 - DNA, 26 bp, Artificial sequence
  SiRNA target sequence
aacttgtggaggatttaagcttaaca

SEQ ID NO: 83965 - DNA, 26 bp, Artificial sequence
  SiRNA target sequence
acttgtggaggatttaagcttaacag

SEQ ID NO: 83966 - DNA, 26 bp, Artificial sequence
  SiRNA target sequence
cttgtggaggatttaagcttaacagt

SEQ ID NO: 83967 - DNA, 26 bp, Artificial sequence
  SiRNA target sequence
ttgtggaggatttaagcttaacagtc

SEQ ID NO: 83968 - DNA, 26 bp, Artificial sequence
  SiRNA target sequence
tgtggaggatttaagcttaacagtct

SEQ ID NO: 83969 - DNA, 26 bp, Artificial sequence
  SiRNA target sequence
gtggaggatttaagcttaacagtctt

SEQ ID NO: 83970 - DNA, 26 bp, Artificial sequence
  SiRNA target sequence
tggaggatttaagcttaacagtcttt

SEQ ID NO: 83971 - DNA, 26 bp, Artificial sequence
  SiRNA target sequence
ggaggatttaagcttaacagtctttg

SEQ ID NO: 83972 - DNA, 26 bp, Artificial sequence
  SiRNA target sequence
gaggatttaagcttaacagtctttga

SEQ ID NO: 83973 - DNA, 26 bp, Artificial sequence
  SiRNA target sequence
aggatttaagcttaacagtctttgaa

SEQ ID NO: 83974 - DNA, 26 bp, Artificial sequence
  SiRNA target sequence
ggatttaagcttaacagtctttgaaa

SEQ ID NO: 83975 - DNA, 26 bp, Artificial sequence
  SiRNA target sequence
gatttaagcttaacagtctttgaaaa

SEQ ID NO: 83976 - DNA, 26 bp, Artificial sequence
  SiRNA target sequence
atttaagcttaacagtctttgaaaat

SEQ ID NO: 83977 - DNA, 26 bp, Artificial sequence
  SiRNA target sequence
tttaagcttaacagtctttgaaaatg

SEQ ID NO: 83978 - DNA, 26 bp, Artificial sequence
  SiRNA target sequence
ttaagcttaacagtctttgaaaatgt

SEQ ID NO: 83979 - DNA, 26 bp, Artificial sequence
  SiRNA target sequence
taagcttaacagtctttgaaaatgtc

SEQ ID NO: 83980 - DNA, 26 bp, Artificial sequence
  SiRNA target sequence
aagcttaacagtctttgaaaatgtcc

SEQ ID NO: 83981 - DNA, 26 bp, Artificial sequence
  SiRNA target sequence
agcttaacagtctttgaaaatgtcca

SEQ ID NO: 83982 - DNA, 26 bp, Artificial sequence
  SiRNA target sequence
gcttaacagtctttgaaaatgtccac

SEQ ID NO: 83983 - DNA, 26 bp, Artificial sequence
  SiRNA target sequence
cttaacagtctttgaaaatgtccaca

SEQ ID NO: 83984 - DNA, 26 bp, Artificial sequence
  SiRNA target sequence
ttaacagtctttgaaaatgtccacaa

SEQ ID NO: 83985 - DNA, 26 bp, Artificial sequence
  SiRNA target sequence
taacagtctttgaaaatgtccacaac

SEQ ID NO: 83986 - DNA, 26 bp, Artificial sequence
  SiRNA target sequence
aacagtctttgaaaatgtccacaaca

SEQ ID NO: 83987 - DNA, 26 bp, Artificial sequence
  SiRNA target sequence
acagtctttgaaaatgtccacaacat

SEQ ID NO: 83988 - DNA, 26 bp, Artificial sequence
  SiRNA target sequence
cagtctttgaaaatgtccacaacatt

SEQ ID NO: 83989 - DNA, 26 bp, Artificial sequence
  SiRNA target sequence
agtctttgaaaatgtccacaacattc

SEQ ID NO: 83990 - DNA, 26 bp, Artificial sequence
  SiRNA target sequence
gtctttgaaaatgtccacaacattct

SEQ ID NO: 83991 - DNA, 26 bp, Artificial sequence
  SiRNA target sequence
tctttgaaaatgtccacaacattctg

SEQ ID NO: 83992 - DNA, 26 bp, Artificial sequence
  SiRNA target sequence
ctttgaaaatgtccacaacattctgc

SEQ ID NO: 83993 - DNA, 26 bp, Artificial sequence
  SiRNA target sequence
tttgaaaatgtccacaacattctgca

SEQ ID NO: 83994 - DNA, 26 bp, Artificial sequence
  SiRNA target sequence
ttgaaaatgtccacaacattctgcac

SEQ ID NO: 83995 - DNA, 26 bp, Artificial sequence
  SiRNA target sequence
tgaaaatgtccacaacattctgcaca

SEQ ID NO: 83996 - DNA, 26 bp, Artificial sequence
  SiRNA target sequence
gaaaatgtccacaacattctgcacag

SEQ ID NO: 83997 - DNA, 26 bp, Artificial sequence
  SiRNA target sequence
aaaatgtccacaacattctgcacagg

SEQ ID NO: 83998 - DNA, 26 bp, Artificial sequence
  SiRNA target sequence
aaatgtccacaacattctgcacaggg

SEQ ID NO: 83999 - DNA, 26 bp, Artificial sequence
  SiRNA target sequence
aatgtccacaacattctgcacagggg

SEQ ID NO: 84000 - DNA, 26 bp, Artificial sequence
  SiRNA target sequence
atgtccacaacattctgcacagggga

SEQ ID NO: 84001 - DNA, 26 bp, Artificial sequence
  SiRNA target sequence
tgtccacaacattctgcacaggggaa

SEQ ID NO: 84002 - DNA, 26 bp, Artificial sequence
  SiRNA target sequence
gtccacaacattctgcacaggggaaa

SEQ ID NO: 84003 - DNA, 26 bp, Artificial sequence
  SiRNA target sequence
tccacaacattctgcacaggggaaaa

SEQ ID NO: 84004 - DNA, 26 bp, Artificial sequence
  SiRNA target sequence
ccacaacattctgcacaggggaaaag

SEQ ID NO: 84005 - DNA, 26 bp, Artificial sequence
  SiRNA target sequence
cacaacattctgcacaggggaaaaga

SEQ ID NO: 84006 - DNA, 26 bp, Artificial sequence
  SiRNA target sequence
acaacattctgcacaggggaaaagag

SEQ ID NO: 84007 - DNA, 26 bp, Artificial sequence
  SiRNA target sequence
caacattctgcacaggggaaaagaga

SEQ ID NO: 84008 - DNA, 26 bp, Artificial sequence
  SiRNA target sequence
aacattctgcacaggggaaaagagat

SEQ ID NO: 84009 - DNA, 26 bp, Artificial sequence
  SiRNA target sequence
acattctgcacaggggaaaagagatg

SEQ ID NO: 84010 - DNA, 26 bp, Artificial sequence
  SiRNA target sequence
cattctgcacaggggaaaagagatga

SEQ ID NO: 84011 - DNA, 26 bp, Artificial sequence
  SiRNA target sequence
attctgcacaggggaaaagagatgat

SEQ ID NO: 84012 - DNA, 26 bp, Artificial sequence
  SiRNA target sequence
ttctgcacaggggaaaagagatgata

SEQ ID NO: 84013 - DNA, 26 bp, Artificial sequence
  SiRNA target sequence
tctgcacaggggaaaagagatgataa

SEQ ID NO: 84014 - DNA, 26 bp, Artificial sequence
  SiRNA target sequence
ctgcacaggggaaaagagatgataaa

SEQ ID NO: 84015 - DNA, 26 bp, Artificial sequence
  SiRNA target sequence
tgcacaggggaaaagagatgataaaa

SEQ ID NO: 84016 - DNA, 26 bp, Artificial sequence
  SiRNA target sequence
gcacaggggaaaagagatgataaaag

SEQ ID NO: 84017 - DNA, 26 bp, Artificial sequence
  SiRNA target sequence
cacaggggaaaagagatgataaaagg

SEQ ID NO: 84018 - DNA, 26 bp, Artificial sequence
  SiRNA target sequence
acaggggaaaagagatgataaaaggt

SEQ ID NO: 84019 - DNA, 26 bp, Artificial sequence
  SiRNA target sequence
caggggaaaagagatgataaaaggta

SEQ ID NO: 84020 - DNA, 26 bp, Artificial sequence
  SiRNA target sequence
aggggaaaagagatgataaaaggtaa

SEQ ID NO: 84021 - DNA, 26 bp, Artificial sequence
  SiRNA target sequence
ggggaaaagagatgataaaaggtaaa

SEQ ID NO: 84022 - DNA, 26 bp, Artificial sequence
  SiRNA target sequence
gggaaaagagatgataaaaggtaaat

SEQ ID NO: 84023 - DNA, 26 bp, Artificial sequence
  SiRNA target sequence
ggaaaagagatgataaaaggtaaata

SEQ ID NO: 84024 - DNA, 26 bp, Artificial sequence
  SiRNA target sequence
gaaaagagatgataaaaggtaaataa

SEQ ID NO: 84025 - DNA, 26 bp, Artificial sequence
  SiRNA target sequence
aaaagagatgataaaaggtaaataaa

SEQ ID NO: 84026 - DNA, 26 bp, Artificial sequence
  SiRNA target sequence
aaagagatgataaaaggtaaataaat

SEQ ID NO: 84027 - DNA, 26 bp, Artificial sequence
  SiRNA target sequence
aagagatgataaaaggtaaataaatt

SEQ ID NO: 84028 - DNA, 26 bp, Artificial sequence
  SiRNA target sequence
agagatgataaaaggtaaataaattg

SEQ ID NO: 84029 - DNA, 26 bp, Artificial sequence
  SiRNA target sequence
gagatgataaaaggtaaataaattga

SEQ ID NO: 84030 - DNA, 26 bp, Artificial sequence
  SiRNA target sequence
agatgataaaaggtaaataaattgaa

SEQ ID NO: 84031 - DNA, 26 bp, Artificial sequence
  SiRNA target sequence
gatgataaaaggtaaataaattgaag

SEQ ID NO: 84032 - DNA, 26 bp, Artificial sequence
  SiRNA target sequence
atgataaaaggtaaataaattgaagt

SEQ ID NO: 84033 - DNA, 26 bp, Artificial sequence
  SiRNA target sequence
tgataaaaggtaaataaattgaagtg

SEQ ID NO: 84034 - DNA, 26 bp, Artificial sequence
  SiRNA target sequence
gataaaaggtaaataaattgaagtgt

SEQ ID NO: 84035 - DNA, 26 bp, Artificial sequence
  SiRNA target sequence
ataaaaggtaaataaattgaagtgta

SEQ ID NO: 84036 - DNA, 26 bp, Artificial sequence
  SiRNA target sequence
taaaaggtaaataaattgaagtgtat

SEQ ID NO: 84037 - DNA, 26 bp, Artificial sequence
  SiRNA target sequence
aaaaggtaaataaattgaagtgtatc

SEQ ID NO: 84038 - DNA, 26 bp, Artificial sequence
  SiRNA target sequence
aaaggtaaataaattgaagtgtatct

SEQ ID NO: 84039 - DNA, 26 bp, Artificial sequence
  SiRNA target sequence
aaggtaaataaattgaagtgtatctt

SEQ ID NO: 84040 - DNA, 26 bp, Artificial sequence
  SiRNA target sequence
aggtaaataaattgaagtgtatcttt

SEQ ID NO: 84041 - DNA, 26 bp, Artificial sequence
  SiRNA target sequence
ggtaaataaattgaagtgtatctttt

SEQ ID NO: 84042 - DNA, 26 bp, Artificial sequence
  SiRNA target sequence
gtaaataaattgaagtgtatcttttt

SEQ ID NO: 84043 - DNA, 26 bp, Artificial sequence
  SiRNA target sequence
taaataaattgaagtgtatctttttt

SEQ ID NO: 84044 - DNA, 26 bp, Artificial sequence
  SiRNA target sequence
aaataaattgaagtgtatctttttta

SEQ ID NO: 84045 - DNA, 26 bp, Artificial sequence
  SiRNA target sequence
aataaattgaagtgtatcttttttat

SEQ ID NO: 84046 - DNA, 26 bp, Artificial sequence
  SiRNA target sequence
ataaattgaagtgtatcttttttatg

SEQ ID NO: 84047 - DNA, 26 bp, Artificial sequence
  SiRNA target sequence
taaattgaagtgtatcttttttatgt

SEQ ID NO: 84048 - DNA, 26 bp, Artificial sequence
  SiRNA target sequence
aaattgaagtgtatcttttttatgtt

SEQ ID NO: 84049 - DNA, 26 bp, Artificial sequence
  SiRNA target sequence
aattgaagtgtatcttttttatgttg

SEQ ID NO: 84050 - DNA, 26 bp, Artificial sequence
  SiRNA target sequence
attgaagtgtatcttttttatgttgt

SEQ ID NO: 84051 - DNA, 26 bp, Artificial sequence
  SiRNA target sequence
ttgaagtgtatcttttttatgttgta

SEQ ID NO: 84052 - DNA, 26 bp, Artificial sequence
  SiRNA target sequence
tgaagtgtatcttttttatgttgtac

SEQ ID NO: 84053 - DNA, 26 bp, Artificial sequence
  SiRNA target sequence
gaagtgtatcttttttatgttgtact

SEQ ID NO: 84054 - DNA, 26 bp, Artificial sequence
  SiRNA target sequence
aagtgtatcttttttatgttgtactg

SEQ ID NO: 84055 - DNA, 26 bp, Artificial sequence
  SiRNA target sequence
agtgtatcttttttatgttgtactgt

SEQ ID NO: 84056 - DNA, 26 bp, Artificial sequence
  SiRNA target sequence
gtgtatcttttttatgttgtactgta

SEQ ID NO: 84057 - DNA, 26 bp, Artificial sequence
  SiRNA target sequence
tgtatcttttttatgttgtactgtag

SEQ ID NO: 84058 - DNA, 26 bp, Artificial sequence
  SiRNA target sequence
gtatcttttttatgttgtactgtagg

SEQ ID NO: 84059 - DNA, 26 bp, Artificial sequence
  SiRNA target sequence
tatcttttttatgttgtactgtagga

SEQ ID NO: 84060 - DNA, 26 bp, Artificial sequence
  SiRNA target sequence
atcttttttatgttgtactgtaggaa

SEQ ID NO: 84061 - DNA, 26 bp, Artificial sequence
  SiRNA target sequence
tcttttttatgttgtactgtaggaaa

SEQ ID NO: 84062 - DNA, 26 bp, Artificial sequence
  SiRNA target sequence
cttttttatgttgtactgtaggaaat

SEQ ID NO: 84063 - DNA, 26 bp, Artificial sequence
  SiRNA target sequence
ttttttatgttgtactgtaggaaatg

SEQ ID NO: 84064 - DNA, 26 bp, Artificial sequence
  SiRNA target sequence
tttttatgttgtactgtaggaaatgc

SEQ ID NO: 84065 - DNA, 26 bp, Artificial sequence
  SiRNA target sequence
ttttatgttgtactgtaggaaatgca

SEQ ID NO: 84066 - DNA, 26 bp, Artificial sequence
  SiRNA target sequence
tttatgttgtactgtaggaaatgcag

SEQ ID NO: 84067 - DNA, 26 bp, Artificial sequence
  SiRNA target sequence
ttatgttgtactgtaggaaatgcagg

SEQ ID NO: 84068 - DNA, 26 bp, Artificial sequence
  SiRNA target sequence
tatgttgtactgtaggaaatgcagga

SEQ ID NO: 84069 - DNA, 26 bp, Artificial sequence
  SiRNA target sequence
atgttgtactgtaggaaatgcaggat

SEQ ID NO: 84070 - DNA, 26 bp, Artificial sequence
  SiRNA target sequence
tgttgtactgtaggaaatgcaggata

SEQ ID NO: 84071 - DNA, 26 bp, Artificial sequence
  SiRNA target sequence
gttgtactgtaggaaatgcaggataa

SEQ ID NO: 84072 - DNA, 26 bp, Artificial sequence
  SiRNA target sequence
ttgtactgtaggaaatgcaggataaa

SEQ ID NO: 84073 - DNA, 26 bp, Artificial sequence
  SiRNA target sequence
tgtactgtaggaaatgcaggataaac

SEQ ID NO: 84074 - DNA, 26 bp, Artificial sequence
  SiRNA target sequence
gtactgtaggaaatgcaggataaaca

SEQ ID NO: 84075 - DNA, 26 bp, Artificial sequence
  SiRNA target sequence
tactgtaggaaatgcaggataaacag

SEQ ID NO: 84076 - DNA, 26 bp, Artificial sequence
  SiRNA target sequence
actgtaggaaatgcaggataaacagc

SEQ ID NO: 84077 - DNA, 26 bp, Artificial sequence
  SiRNA target sequence
ctgtaggaaatgcaggataaacagct

SEQ ID NO: 84078 - DNA, 26 bp, Artificial sequence
  SiRNA target sequence
tgtaggaaatgcaggataaacagctg

SEQ ID NO: 84079 - DNA, 26 bp, Artificial sequence
  SiRNA target sequence
gtaggaaatgcaggataaacagctgc

SEQ ID NO: 84080 - DNA, 26 bp, Artificial sequence
  SiRNA target sequence
taggaaatgcaggataaacagctgcc

SEQ ID NO: 84081 - DNA, 26 bp, Artificial sequence
  SiRNA target sequence
aggaaatgcaggataaacagctgcca

SEQ ID NO: 84082 - DNA, 26 bp, Artificial sequence
  SiRNA target sequence
ggaaatgcaggataaacagctgccat

SEQ ID NO: 84083 - DNA, 26 bp, Artificial sequence
  SiRNA target sequence
gaaatgcaggataaacagctgccatg

SEQ ID NO: 84084 - DNA, 26 bp, Artificial sequence
  SiRNA target sequence
aaatgcaggataaacagctgccatgg

SEQ ID NO: 84085 - DNA, 26 bp, Artificial sequence
  SiRNA target sequence
aatgcaggataaacagctgccatggt

SEQ ID NO: 84086 - DNA, 26 bp, Artificial sequence
  SiRNA target sequence
atgcaggataaacagctgccatggta

SEQ ID NO: 84087 - DNA, 26 bp, Artificial sequence
  SiRNA target sequence
tgcaggataaacagctgccatggtat

SEQ ID NO: 84088 - DNA, 26 bp, Artificial sequence
  SiRNA target sequence
gcaggataaacagctgccatggtatg

SEQ ID NO: 84089 - DNA, 26 bp, Artificial sequence
  SiRNA target sequence
caggataaacagctgccatggtatgt

SEQ ID NO: 84090 - DNA, 26 bp, Artificial sequence
  SiRNA target sequence
aggataaacagctgccatggtatgta

SEQ ID NO: 84091 - DNA, 26 bp, Artificial sequence
  SiRNA target sequence
ggataaacagctgccatggtatgtaa

SEQ ID NO: 84092 - DNA, 26 bp, Artificial sequence
  SiRNA target sequence
gataaacagctgccatggtatgtaaa

SEQ ID NO: 84093 - DNA, 26 bp, Artificial sequence
  SiRNA target sequence
ataaacagctgccatggtatgtaaaa

SEQ ID NO: 84094 - DNA, 26 bp, Artificial sequence
  SiRNA target sequence
taaacagctgccatggtatgtaaaag

SEQ ID NO: 84095 - DNA, 26 bp, Artificial sequence
  SiRNA target sequence
aaacagctgccatggtatgtaaaagt

SEQ ID NO: 84096 - DNA, 26 bp, Artificial sequence
  SiRNA target sequence
aacagctgccatggtatgtaaaagtg

SEQ ID NO: 84097 - DNA, 26 bp, Artificial sequence
  SiRNA target sequence
acagctgccatggtatgtaaaagtgt

SEQ ID NO: 84098 - DNA, 26 bp, Artificial sequence
  SiRNA target sequence
cagctgccatggtatgtaaaagtgtc

SEQ ID NO: 84099 - DNA, 26 bp, Artificial sequence
  SiRNA target sequence
agctgccatggtatgtaaaagtgtcc

SEQ ID NO: 84100 - DNA, 26 bp, Artificial sequence
  SiRNA target sequence
gctgccatggtatgtaaaagtgtcca

SEQ ID NO: 84101 - DNA, 26 bp, Artificial sequence
  SiRNA target sequence
ctgccatggtatgtaaaagtgtccat

SEQ ID NO: 84102 - DNA, 26 bp, Artificial sequence
  SiRNA target sequence
tgccatggtatgtaaaagtgtccatg

SEQ ID NO: 84103 - DNA, 26 bp, Artificial sequence
  SiRNA target sequence
gccatggtatgtaaaagtgtccatgt

SEQ ID NO: 84104 - DNA, 26 bp, Artificial sequence
  SiRNA target sequence
ccatggtatgtaaaagtgtccatgtt

SEQ ID NO: 84105 - DNA, 26 bp, Artificial sequence
  SiRNA target sequence
catggtatgtaaaagtgtccatgttg

SEQ ID NO: 84106 - DNA, 26 bp, Artificial sequence
  SiRNA target sequence
atggtatgtaaaagtgtccatgttgc

SEQ ID NO: 84107 - DNA, 26 bp, Artificial sequence
  SiRNA target sequence
tggtatgtaaaagtgtccatgttgct

SEQ ID NO: 84108 - DNA, 26 bp, Artificial sequence
  SiRNA target sequence
ggtatgtaaaagtgtccatgttgctc

SEQ ID NO: 84109 - DNA, 26 bp, Artificial sequence
  SiRNA target sequence
gtatgtaaaagtgtccatgttgctct

SEQ ID NO: 84110 - DNA, 26 bp, Artificial sequence
  SiRNA target sequence
tatgtaaaagtgtccatgttgctctc

SEQ ID NO: 84111 - DNA, 26 bp, Artificial sequence
  SiRNA target sequence
atgtaaaagtgtccatgttgctctcc

SEQ ID NO: 84112 - DNA, 26 bp, Artificial sequence
  SiRNA target sequence
tgtaaaagtgtccatgttgctctccc

SEQ ID NO: 84113 - DNA, 26 bp, Artificial sequence
  SiRNA target sequence
gtaaaagtgtccatgttgctctcccc

SEQ ID NO: 84114 - DNA, 26 bp, Artificial sequence
  SiRNA target sequence
taaaagtgtccatgttgctctcccca

SEQ ID NO: 84115 - DNA, 26 bp, Artificial sequence
  SiRNA target sequence
aaaagtgtccatgttgctctccccaa

SEQ ID NO: 84116 - DNA, 26 bp, Artificial sequence
  SiRNA target sequence
aaagtgtccatgttgctctccccaat

SEQ ID NO: 84117 - DNA, 26 bp, Artificial sequence
  SiRNA target sequence
aagtgtccatgttgctctccccaatc

SEQ ID NO: 84118 - DNA, 26 bp, Artificial sequence
  SiRNA target sequence
agtgtccatgttgctctccccaatct

SEQ ID NO: 84119 - DNA, 26 bp, Artificial sequence
  SiRNA target sequence
gtgtccatgttgctctccccaatcta

SEQ ID NO: 84120 - DNA, 26 bp, Artificial sequence
  SiRNA target sequence
tgtccatgttgctctccccaatctat

SEQ ID NO: 84121 - DNA, 26 bp, Artificial sequence
  SiRNA target sequence
gtccatgttgctctccccaatctatc

SEQ ID NO: 84122 - DNA, 26 bp, Artificial sequence
  SiRNA target sequence
tccatgttgctctccccaatctatct

SEQ ID NO: 84123 - DNA, 26 bp, Artificial sequence
  SiRNA target sequence
ccatgttgctctccccaatctatctt

SEQ ID NO: 84124 - DNA, 26 bp, Artificial sequence
  SiRNA target sequence
catgttgctctccccaatctatcttt

SEQ ID NO: 84125 - DNA, 26 bp, Artificial sequence
  SiRNA target sequence
atgttgctctccccaatctatcttta

SEQ ID NO: 84126 - DNA, 26 bp, Artificial sequence
  SiRNA target sequence
tgttgctctccccaatctatctttaa

SEQ ID NO: 84127 - DNA, 26 bp, Artificial sequence
  SiRNA target sequence
gttgctctccccaatctatctttaac

SEQ ID NO: 84128 - DNA, 26 bp, Artificial sequence
  SiRNA target sequence
ttgctctccccaatctatctttaact

SEQ ID NO: 84129 - DNA, 26 bp, Artificial sequence
  SiRNA target sequence
tgctctccccaatctatctttaactt

SEQ ID NO: 84130 - DNA, 26 bp, Artificial sequence
  SiRNA target sequence
gctctccccaatctatctttaacttc

SEQ ID NO: 84131 - DNA, 26 bp, Artificial sequence
  SiRNA target sequence
ctctccccaatctatctttaacttcc

SEQ ID NO: 84132 - DNA, 26 bp, Artificial sequence
  SiRNA target sequence
tctccccaatctatctttaacttcct

SEQ ID NO: 84133 - DNA, 26 bp, Artificial sequence
  SiRNA target sequence
ctccccaatctatctttaacttcctt

SEQ ID NO: 84134 - DNA, 26 bp, Artificial sequence
  SiRNA target sequence
tccccaatctatctttaacttcctta

SEQ ID NO: 84135 - DNA, 26 bp, Artificial sequence
  SiRNA target sequence
ccccaatctatctttaacttccttat

SEQ ID NO: 84136 - DNA, 26 bp, Artificial sequence
  SiRNA target sequence
cccaatctatctttaacttccttatt

SEQ ID NO: 84137 - DNA, 26 bp, Artificial sequence
  SiRNA target sequence
ccaatctatctttaacttccttattt

SEQ ID NO: 84138 - DNA, 26 bp, Artificial sequence
  SiRNA target sequence
caatctatctttaacttccttatttg

SEQ ID NO: 84139 - DNA, 26 bp, Artificial sequence
  SiRNA target sequence
aatctatctttaacttccttatttgt

SEQ ID NO: 84140 - DNA, 26 bp, Artificial sequence
  SiRNA target sequence
atctatctttaacttccttatttgtt

SEQ ID NO: 84141 - DNA, 26 bp, Artificial sequence
  SiRNA target sequence
tctatctttaacttccttatttgtta

SEQ ID NO: 84142 - DNA, 26 bp, Artificial sequence
  SiRNA target sequence
ctatctttaacttccttatttgttaa

SEQ ID NO: 84143 - DNA, 26 bp, Artificial sequence
  SiRNA target sequence
tatctttaacttccttatttgttaat

SEQ ID NO: 84144 - DNA, 26 bp, Artificial sequence
  SiRNA target sequence
atctttaacttccttatttgttaatt

SEQ ID NO: 84145 - DNA, 26 bp, Artificial sequence
  SiRNA target sequence
tctttaacttccttatttgttaattt

SEQ ID NO: 84146 - DNA, 26 bp, Artificial sequence
  SiRNA target sequence
ctttaacttccttatttgttaatttt

SEQ ID NO: 84147 - DNA, 26 bp, Artificial sequence
  SiRNA target sequence
tttaacttccttatttgttaattttt

SEQ ID NO: 84148 - DNA, 26 bp, Artificial sequence
  SiRNA target sequence
ttaacttccttatttgttaatttttg

SEQ ID NO: 84149 - DNA, 26 bp, Artificial sequence
  SiRNA target sequence
taacttccttatttgttaatttttga

SEQ ID NO: 84150 - DNA, 26 bp, Artificial sequence
  SiRNA target sequence
aacttccttatttgttaatttttgat

SEQ ID NO: 84151 - DNA, 26 bp, Artificial sequence
  SiRNA target sequence
acttccttatttgttaatttttgatt

SEQ ID NO: 84152 - DNA, 26 bp, Artificial sequence
  SiRNA target sequence
cttccttatttgttaatttttgatta

SEQ ID NO: 84153 - DNA, 26 bp, Artificial sequence
  SiRNA target sequence
ttccttatttgttaatttttgattat

SEQ ID NO: 84154 - DNA, 26 bp, Artificial sequence
  SiRNA target sequence
tccttatttgttaatttttgattatg

SEQ ID NO: 84155 - DNA, 26 bp, Artificial sequence
  SiRNA target sequence
ccttatttgttaatttttgattatga

SEQ ID NO: 84156 - DNA, 26 bp, Artificial sequence
  SiRNA target sequence
cttatttgttaatttttgattatgaa

SEQ ID NO: 84157 - DNA, 26 bp, Artificial sequence
  SiRNA target sequence
ttatttgttaatttttgattatgaat

SEQ ID NO: 84158 - DNA, 26 bp, Artificial sequence
  SiRNA target sequence
tatttgttaatttttgattatgaatt

SEQ ID NO: 84159 - DNA, 26 bp, Artificial sequence
  SiRNA target sequence
atttgttaatttttgattatgaatta

SEQ ID NO: 84160 - DNA, 26 bp, Artificial sequence
  SiRNA target sequence
tttgttaatttttgattatgaattag

SEQ ID NO: 84161 - DNA, 26 bp, Artificial sequence
  SiRNA target sequence
ttgttaatttttgattatgaattaga

SEQ ID NO: 84162 - DNA, 26 bp, Artificial sequence
  SiRNA target sequence
tgttaatttttgattatgaattagac

SEQ ID NO: 84163 - DNA, 26 bp, Artificial sequence
  SiRNA target sequence
gttaatttttgattatgaattagacc

SEQ ID NO: 84164 - DNA, 26 bp, Artificial sequence
  SiRNA target sequence
ttaatttttgattatgaattagacct

SEQ ID NO: 84165 - DNA, 26 bp, Artificial sequence
  SiRNA target sequence
taatttttgattatgaattagaccta

SEQ ID NO: 84166 - DNA, 26 bp, Artificial sequence
  SiRNA target sequence
aatttttgattatgaattagacctaa

SEQ ID NO: 84167 - DNA, 26 bp, Artificial sequence
  SiRNA target sequence
atttttgattatgaattagacctaat

SEQ ID NO: 84168 - DNA, 26 bp, Artificial sequence
  SiRNA target sequence
tttttgattatgaattagacctaatt

SEQ ID NO: 84169 - DNA, 26 bp, Artificial sequence
  SiRNA target sequence
ttttgattatgaattagacctaattc

SEQ ID NO: 84170 - DNA, 26 bp, Artificial sequence
  SiRNA target sequence
tttgattatgaattagacctaattca

SEQ ID NO: 84171 - DNA, 26 bp, Artificial sequence
  SiRNA target sequence
ttgattatgaattagacctaattcac

SEQ ID NO: 84172 - DNA, 26 bp, Artificial sequence
  SiRNA target sequence
tgattatgaattagacctaattcacc

SEQ ID NO: 84173 - DNA, 26 bp, Artificial sequence
  SiRNA target sequence
gattatgaattagacctaattcacct

SEQ ID NO: 84174 - DNA, 26 bp, Artificial sequence
  SiRNA target sequence
attatgaattagacctaattcaccta

SEQ ID NO: 84175 - DNA, 26 bp, Artificial sequence
  SiRNA target sequence
ttatgaattagacctaattcacctac

SEQ ID NO: 84176 - DNA, 26 bp, Artificial sequence
  SiRNA target sequence
tatgaattagacctaattcacctact

SEQ ID NO: 84177 - DNA, 26 bp, Artificial sequence
  SiRNA target sequence
atgaattagacctaattcacctactt

SEQ ID NO: 84178 - DNA, 26 bp, Artificial sequence
  SiRNA target sequence
tgaattagacctaattcacctacttt

SEQ ID NO: 84179 - DNA, 26 bp, Artificial sequence
  SiRNA target sequence
gaattagacctaattcacctactttt

SEQ ID NO: 84180 - DNA, 26 bp, Artificial sequence
  SiRNA target sequence
aattagacctaattcacctacttttg

SEQ ID NO: 84181 - DNA, 26 bp, Artificial sequence
  SiRNA target sequence
attagacctaattcacctacttttgg

SEQ ID NO: 84182 - DNA, 26 bp, Artificial sequence
  SiRNA target sequence
ttagacctaattcacctacttttggt

SEQ ID NO: 84183 - DNA, 26 bp, Artificial sequence
  SiRNA target sequence
tagacctaattcacctacttttggtg

SEQ ID NO: 84184 - DNA, 26 bp, Artificial sequence
  SiRNA target sequence
agacctaattcacctacttttggtga

SEQ ID NO: 84185 - DNA, 26 bp, Artificial sequence
  SiRNA target sequence
gacctaattcacctacttttggtgaa

SEQ ID NO: 84186 - DNA, 26 bp, Artificial sequence
  SiRNA target sequence
acctaattcacctacttttggtgaaa

SEQ ID NO: 84187 - DNA, 26 bp, Artificial sequence
  SiRNA target sequence
cctaattcacctacttttggtgaaat

SEQ ID NO: 84188 - DNA, 26 bp, Artificial sequence
  SiRNA target sequence
ctaattcacctacttttggtgaaata

SEQ ID NO: 84189 - DNA, 26 bp, Artificial sequence
  SiRNA target sequence
taattcacctacttttggtgaaatag

SEQ ID NO: 84190 - DNA, 26 bp, Artificial sequence
  SiRNA target sequence
aattcacctacttttggtgaaataga

SEQ ID NO: 84191 - DNA, 26 bp, Artificial sequence
  SiRNA target sequence
attcacctacttttggtgaaatagat

SEQ ID NO: 84192 - DNA, 26 bp, Artificial sequence
  SiRNA target sequence
ttcacctacttttggtgaaatagatt

SEQ ID NO: 84193 - DNA, 26 bp, Artificial sequence
  SiRNA target sequence
tcacctacttttggtgaaatagattg

SEQ ID NO: 84194 - DNA, 26 bp, Artificial sequence
  SiRNA target sequence
cacctacttttggtgaaatagattgt

SEQ ID NO: 84195 - DNA, 26 bp, Artificial sequence
  SiRNA target sequence
acctacttttggtgaaatagattgta

SEQ ID NO: 84196 - DNA, 26 bp, Artificial sequence
  SiRNA target sequence
cctacttttggtgaaatagattgtaa

SEQ ID NO: 84197 - DNA, 26 bp, Artificial sequence
  SiRNA target sequence
ctacttttggtgaaatagattgtaaa

SEQ ID NO: 84198 - DNA, 26 bp, Artificial sequence
  SiRNA target sequence
tacttttggtgaaatagattgtaaaa

SEQ ID NO: 84199 - DNA, 26 bp, Artificial sequence
  SiRNA target sequence
acttttggtgaaatagattgtaaaac

SEQ ID NO: 84200 - DNA, 26 bp, Artificial sequence
  SiRNA target sequence
cttttggtgaaatagattgtaaaaca

SEQ ID NO: 84201 - DNA, 26 bp, Artificial sequence
  SiRNA target sequence
ttttggtgaaatagattgtaaaacag

SEQ ID NO: 84202 - DNA, 26 bp, Artificial sequence
  SiRNA target sequence
tttggtgaaatagattgtaaaacaga

SEQ ID NO: 84203 - DNA, 26 bp, Artificial sequence
  SiRNA target sequence
ttggtgaaatagattgtaaaacagat

SEQ ID NO: 84204 - DNA, 26 bp, Artificial sequence
  SiRNA target sequence
tggtgaaatagattgtaaaacagatt

SEQ ID NO: 84205 - DNA, 26 bp, Artificial sequence
  SiRNA target sequence
ggtgaaatagattgtaaaacagattt

SEQ ID NO: 84206 - DNA, 26 bp, Artificial sequence
  SiRNA target sequence
gtgaaatagattgtaaaacagatttt

SEQ ID NO: 84207 - DNA, 26 bp, Artificial sequence
  SiRNA target sequence
tgaaatagattgtaaaacagattttc

SEQ ID NO: 84208 - DNA, 26 bp, Artificial sequence
  SiRNA target sequence
gaaatagattgtaaaacagattttcc

SEQ ID NO: 84209 - DNA, 26 bp, Artificial sequence
  SiRNA target sequence
aaatagattgtaaaacagattttcca

SEQ ID NO: 84210 - DNA, 26 bp, Artificial sequence
  SiRNA target sequence
aatagattgtaaaacagattttccaa

SEQ ID NO: 84211 - DNA, 26 bp, Artificial sequence
  SiRNA target sequence
atagattgtaaaacagattttccaag

SEQ ID NO: 84212 - DNA, 26 bp, Artificial sequence
  SiRNA target sequence
tagattgtaaaacagattttccaagt

SEQ ID NO: 84213 - DNA, 26 bp, Artificial sequence
  SiRNA target sequence
agattgtaaaacagattttccaagtg

SEQ ID NO: 84214 - DNA, 26 bp, Artificial sequence
  SiRNA target sequence
gattgtaaaacagattttccaagtga

SEQ ID NO: 84215 - DNA, 26 bp, Artificial sequence
  SiRNA target sequence
attgtaaaacagattttccaagtgag

SEQ ID NO: 84216 - DNA, 26 bp, Artificial sequence
  SiRNA target sequence
ttgtaaaacagattttccaagtgagt

SEQ ID NO: 84217 - DNA, 26 bp, Artificial sequence
  SiRNA target sequence
tgtaaaacagattttccaagtgagtt

SEQ ID NO: 84218 - DNA, 26 bp, Artificial sequence
  SiRNA target sequence
gtaaaacagattttccaagtgagttg

SEQ ID NO: 84219 - DNA, 26 bp, Artificial sequence
  SiRNA target sequence
taaaacagattttccaagtgagttgt

SEQ ID NO: 84220 - DNA, 26 bp, Artificial sequence
  SiRNA target sequence
aaaacagattttccaagtgagttgtc

SEQ ID NO: 84221 - DNA, 26 bp, Artificial sequence
  SiRNA target sequence
aaacagattttccaagtgagttgtct

SEQ ID NO: 84222 - DNA, 26 bp, Artificial sequence
  SiRNA target sequence
aacagattttccaagtgagttgtctg

SEQ ID NO: 84223 - DNA, 26 bp, Artificial sequence
  SiRNA target sequence
acagattttccaagtgagttgtctgc

SEQ ID NO: 84224 - DNA, 26 bp, Artificial sequence
  SiRNA target sequence
cagattttccaagtgagttgtctgca

SEQ ID NO: 84225 - DNA, 26 bp, Artificial sequence
  SiRNA target sequence
agattttccaagtgagttgtctgcat

SEQ ID NO: 84226 - DNA, 26 bp, Artificial sequence
  SiRNA target sequence
gattttccaagtgagttgtctgcatg

SEQ ID NO: 84227 - DNA, 26 bp, Artificial sequence
  SiRNA target sequence
attttccaagtgagttgtctgcatgt

SEQ ID NO: 84228 - DNA, 26 bp, Artificial sequence
  SiRNA target sequence
ttttccaagtgagttgtctgcatgtg

SEQ ID NO: 84229 - DNA, 26 bp, Artificial sequence
  SiRNA target sequence
tttccaagtgagttgtctgcatgtgt

SEQ ID NO: 84230 - DNA, 26 bp, Artificial sequence
  SiRNA target sequence
ttccaagtgagttgtctgcatgtgta

SEQ ID NO: 84231 - DNA, 26 bp, Artificial sequence
  SiRNA target sequence
tccaagtgagttgtctgcatgtgtat

SEQ ID NO: 84232 - DNA, 26 bp, Artificial sequence
  SiRNA target sequence
ccaagtgagttgtctgcatgtgtatg

SEQ ID NO: 84233 - DNA, 26 bp, Artificial sequence
  SiRNA target sequence
caagtgagttgtctgcatgtgtatgc

SEQ ID NO: 84234 - DNA, 26 bp, Artificial sequence
  SiRNA target sequence
aagtgagttgtctgcatgtgtatgcg

SEQ ID NO: 84235 - DNA, 26 bp, Artificial sequence
  SiRNA target sequence
agtgagttgtctgcatgtgtatgcgg

SEQ ID NO: 84236 - DNA, 26 bp, Artificial sequence
  SiRNA target sequence
gtgagttgtctgcatgtgtatgcggg

SEQ ID NO: 84237 - DNA, 26 bp, Artificial sequence
  SiRNA target sequence
tgagttgtctgcatgtgtatgcggga

SEQ ID NO: 84238 - DNA, 26 bp, Artificial sequence
  SiRNA target sequence
gagttgtctgcatgtgtatgcgggaa

SEQ ID NO: 84239 - DNA, 26 bp, Artificial sequence
  SiRNA target sequence
agttgtctgcatgtgtatgcgggaaa

SEQ ID NO: 84240 - DNA, 26 bp, Artificial sequence
  SiRNA target sequence
gttgtctgcatgtgtatgcgggaaaa

SEQ ID NO: 84241 - DNA, 26 bp, Artificial sequence
  SiRNA target sequence
ttgtctgcatgtgtatgcgggaaaaa

SEQ ID NO: 84242 - DNA, 26 bp, Artificial sequence
  SiRNA target sequence
tgtctgcatgtgtatgcgggaaaaaa

SEQ ID NO: 84243 - DNA, 26 bp, Artificial sequence
  SiRNA target sequence
gtctgcatgtgtatgcgggaaaaaat

SEQ ID NO: 84244 - DNA, 26 bp, Artificial sequence
  SiRNA target sequence
tctgcatgtgtatgcgggaaaaaatg

SEQ ID NO: 84245 - DNA, 26 bp, Artificial sequence
  SiRNA target sequence
ctgcatgtgtatgcgggaaaaaatgc

SEQ ID NO: 84246 - DNA, 26 bp, Artificial sequence
  SiRNA target sequence
tgcatgtgtatgcgggaaaaaatgct

SEQ ID NO: 84247 - DNA, 26 bp, Artificial sequence
  SiRNA target sequence
gcatgtgtatgcgggaaaaaatgctg

SEQ ID NO: 84248 - DNA, 26 bp, Artificial sequence
  SiRNA target sequence
catgtgtatgcgggaaaaaatgctgt

SEQ ID NO: 84249 - DNA, 26 bp, Artificial sequence
  SiRNA target sequence
atgtgtatgcgggaaaaaatgctgtt

SEQ ID NO: 84250 - DNA, 26 bp, Artificial sequence
  SiRNA target sequence
tgtgtatgcgggaaaaaatgctgttt

SEQ ID NO: 84251 - DNA, 26 bp, Artificial sequence
  SiRNA target sequence
gtgtatgcgggaaaaaatgctgtttt

SEQ ID NO: 84252 - DNA, 26 bp, Artificial sequence
  SiRNA target sequence
tgtatgcgggaaaaaatgctgttttg

SEQ ID NO: 84253 - DNA, 26 bp, Artificial sequence
  SiRNA target sequence
gtatgcgggaaaaaatgctgttttgc

SEQ ID NO: 84254 - DNA, 26 bp, Artificial sequence
  SiRNA target sequence
tatgcgggaaaaaatgctgttttgct

SEQ ID NO: 84255 - DNA, 26 bp, Artificial sequence
  SiRNA target sequence
atgcgggaaaaaatgctgttttgcta

SEQ ID NO: 84256 - DNA, 26 bp, Artificial sequence
  SiRNA target sequence
tgcgggaaaaaatgctgttttgctaa

SEQ ID NO: 84257 - DNA, 26 bp, Artificial sequence
  SiRNA target sequence
gcgggaaaaaatgctgttttgctaaa

SEQ ID NO: 84258 - DNA, 26 bp, Artificial sequence
  SiRNA target sequence
cgggaaaaaatgctgttttgctaaat

SEQ ID NO: 84259 - DNA, 26 bp, Artificial sequence
  SiRNA target sequence
gggaaaaaatgctgttttgctaaata

SEQ ID NO: 84260 - DNA, 26 bp, Artificial sequence
  SiRNA target sequence
ggaaaaaatgctgttttgctaaataa

SEQ ID NO: 84261 - DNA, 26 bp, Artificial sequence
  SiRNA target sequence
gaaaaaatgctgttttgctaaataaa

SEQ ID NO: 84262 - DNA, 26 bp, Artificial sequence
  SiRNA target sequence
aaaaaatgctgttttgctaaataaac

SEQ ID NO: 84263 - DNA, 26 bp, Artificial sequence
  SiRNA target sequence
aaaaatgctgttttgctaaataaaca

SEQ ID NO: 84264 - DNA, 26 bp, Artificial sequence
  SiRNA target sequence
aaaatgctgttttgctaaataaacaa

SEQ ID NO: 84265 - DNA, 26 bp, Artificial sequence
  SiRNA target sequence
aaatgctgttttgctaaataaacaat

SEQ ID NO: 84266 - DNA, 26 bp, Artificial sequence
  SiRNA target sequence
aatgctgttttgctaaataaacaatc

SEQ ID NO: 84267 - DNA, 26 bp, Artificial sequence
  SiRNA target sequence
atgctgttttgctaaataaacaatcc

SEQ ID NO: 84268 - DNA, 26 bp, Artificial sequence
  SiRNA target sequence
tgctgttttgctaaataaacaatcca

SEQ ID NO: 84269 - DNA, 26 bp, Artificial sequence
  SiRNA target sequence
gctgttttgctaaataaacaatccat

SEQ ID NO: 84270 - DNA, 26 bp, Artificial sequence
  SiRNA target sequence
ctgttttgctaaataaacaatccata

SEQ ID NO: 84271 - DNA, 26 bp, Artificial sequence
  SiRNA target sequence
tgttttgctaaataaacaatccatac

SEQ ID NO: 84272 - DNA, 26 bp, Artificial sequence
  SiRNA target sequence
gttttgctaaataaacaatccataca

SEQ ID NO: 84273 - DNA, 26 bp, Artificial sequence
  SiRNA target sequence
ttttgctaaataaacaatccatacac

SEQ ID NO: 84274 - DNA, 26 bp, Artificial sequence
  SiRNA target sequence
tttgctaaataaacaatccatacacc

SEQ ID NO: 84275 - DNA, 26 bp, Artificial sequence
  SiRNA target sequence
ttgctaaataaacaatccatacaccc

SEQ ID NO: 84276 - DNA, 26 bp, Artificial sequence
  SiRNA target sequence
tgctaaataaacaatccatacaccca

SEQ ID NO: 84277 - DNA, 26 bp, Artificial sequence
  SiRNA target sequence
gctaaataaacaatccatacacccaa

SEQ ID NO: 84278 - DNA, 26 bp, Artificial sequence
  SiRNA target sequence
ctaaataaacaatccatacacccaat

SEQ ID NO: 84279 - DNA, 26 bp, Artificial sequence
  SiRNA target sequence
taaataaacaatccatacacccaata

SEQ ID NO: 84280 - DNA, 26 bp, Artificial sequence
  SiRNA target sequence
aaataaacaatccatacacccaataa

SEQ ID NO: 84281 - DNA, 26 bp, Artificial sequence
  SiRNA target sequence
aataaacaatccatacacccaataag

SEQ ID NO: 84282 - DNA, 26 bp, Artificial sequence
  SiRNA target sequence
ataaacaatccatacacccaataaga

SEQ ID NO: 84283 - DNA, 26 bp, Artificial sequence
  SiRNA target sequence
taaacaatccatacacccaataagat

SEQ ID NO: 84284 - DNA, 26 bp, Artificial sequence
  SiRNA target sequence
aaacaatccatacacccaataagata

SEQ ID NO: 84285 - DNA, 26 bp, Artificial sequence
  SiRNA target sequence
aacaatccatacacccaataagataa

SEQ ID NO: 84286 - DNA, 26 bp, Artificial sequence
  SiRNA target sequence
acaatccatacacccaataagataat

SEQ ID NO: 84287 - DNA, 26 bp, Artificial sequence
  SiRNA target sequence
caatccatacacccaataagataata

SEQ ID NO: 84288 - DNA, 26 bp, Artificial sequence
  SiRNA target sequence
aatccatacacccaataagataataa

SEQ ID NO: 84289 - DNA, 26 bp, Artificial sequence
  SiRNA target sequence
atccatacacccaataagataataag

SEQ ID NO: 84290 - DNA, 26 bp, Artificial sequence
  SiRNA target sequence
tccatacacccaataagataataagt

SEQ ID NO: 84291 - DNA, 26 bp, Artificial sequence
  SiRNA target sequence
ccatacacccaataagataataagtc

SEQ ID NO: 84292 - DNA, 26 bp, Artificial sequence
  SiRNA target sequence
catacacccaataagataataagtcc

SEQ ID NO: 84293 - DNA, 26 bp, Artificial sequence
  SiRNA target sequence
atacacccaataagataataagtcct

SEQ ID NO: 84294 - DNA, 26 bp, Artificial sequence
  SiRNA target sequence
tacacccaataagataataagtcctc

SEQ ID NO: 84295 - DNA, 26 bp, Artificial sequence
  SiRNA target sequence
acacccaataagataataagtcctct

SEQ ID NO: 84296 - DNA, 26 bp, Artificial sequence
  SiRNA target sequence
cacccaataagataataagtcctctt

SEQ ID NO: 84297 - DNA, 26 bp, Artificial sequence
  SiRNA target sequence
acccaataagataataagtcctctta

SEQ ID NO: 84298 - DNA, 26 bp, Artificial sequence
  SiRNA target sequence
cccaataagataataagtcctcttaa

SEQ ID NO: 84299 - DNA, 26 bp, Artificial sequence
  SiRNA target sequence
ccaataagataataagtcctcttaat

SEQ ID NO: 84300 - DNA, 26 bp, Artificial sequence
  SiRNA target sequence
caataagataataagtcctcttaata

SEQ ID NO: 84301 - DNA, 26 bp, Artificial sequence
  SiRNA target sequence
aataagataataagtcctcttaatac

SEQ ID NO: 84302 - DNA, 26 bp, Artificial sequence
  SiRNA target sequence
ataagataataagtcctcttaatact

SEQ ID NO: 84303 - DNA, 26 bp, Artificial sequence
  SiRNA target sequence
taagataataagtcctcttaatactt

SEQ ID NO: 84304 - DNA, 26 bp, Artificial sequence
  SiRNA target sequence
aagataataagtcctcttaatacttt

SEQ ID NO: 84305 - DNA, 26 bp, Artificial sequence
  SiRNA target sequence
agataataagtcctcttaatactttc

SEQ ID NO: 84306 - DNA, 26 bp, Artificial sequence
  SiRNA target sequence
gataataagtcctcttaatactttct

SEQ ID NO: 84307 - DNA, 26 bp, Artificial sequence
  SiRNA target sequence
ataataagtcctcttaatactttctg

SEQ ID NO: 84308 - DNA, 26 bp, Artificial sequence
  SiRNA target sequence
taataagtcctcttaatactttctgc

SEQ ID NO: 84309 - DNA, 26 bp, Artificial sequence
  SiRNA target sequence
aataagtcctcttaatactttctgct

SEQ ID NO: 84310 - DNA, 26 bp, Artificial sequence
  SiRNA target sequence
ataagtcctcttaatactttctgctc

SEQ ID NO: 84311 - DNA, 26 bp, Artificial sequence
  SiRNA target sequence
taagtcctcttaatactttctgctct

SEQ ID NO: 84312 - DNA, 26 bp, Artificial sequence
  SiRNA target sequence
aagtcctcttaatactttctgctctt

SEQ ID NO: 84313 - DNA, 26 bp, Artificial sequence
  SiRNA target sequence
agtcctcttaatactttctgctcttt

SEQ ID NO: 84314 - DNA, 26 bp, Artificial sequence
  SiRNA target sequence
gtcctcttaatactttctgctctttg

SEQ ID NO: 84315 - DNA, 26 bp, Artificial sequence
  SiRNA target sequence
tcctcttaatactttctgctctttgt

SEQ ID NO: 84316 - DNA, 26 bp, Artificial sequence
  SiRNA target sequence
cctcttaatactttctgctctttgtt

SEQ ID NO: 84317 - DNA, 26 bp, Artificial sequence
  SiRNA target sequence
ctcttaatactttctgctctttgttc

SEQ ID NO: 84318 - DNA, 26 bp, Artificial sequence
  SiRNA target sequence
tcttaatactttctgctctttgttca

SEQ ID NO: 84319 - DNA, 26 bp, Artificial sequence
  SiRNA target sequence
cttaatactttctgctctttgttcat

SEQ ID NO: 84320 - DNA, 27 bp, Artificial sequence
  SiRNA target sequence
ttattctggttcacaaccacaactcca

SEQ ID NO: 84321 - DNA, 27 bp, Artificial sequence
  SiRNA target sequence
tattctggttcacaaccacaactccaa

SEQ ID NO: 84322 - DNA, 27 bp, Artificial sequence
  SiRNA target sequence
attctggttcacaaccacaactccaaa

SEQ ID NO: 84323 - DNA, 27 bp, Artificial sequence
  SiRNA target sequence
ttctggttcacaaccacaactccaaac

SEQ ID NO: 84324 - DNA, 27 bp, Artificial sequence
  SiRNA target sequence
tctggttcacaaccacaactccaaaca

SEQ ID NO: 84325 - DNA, 27 bp, Artificial sequence
  SiRNA target sequence
ctggttcacaaccacaactccaaacac

SEQ ID NO: 84326 - DNA, 27 bp, Artificial sequence
  SiRNA target sequence
tggttcacaaccacaactccaaacacc

SEQ ID NO: 84327 - DNA, 27 bp, Artificial sequence
  SiRNA target sequence
ggttcacaaccacaactccaaacacct

SEQ ID NO: 84328 - DNA, 27 bp, Artificial sequence
  SiRNA target sequence
gttcacaaccacaactccaaacacctt

SEQ ID NO: 84329 - DNA, 27 bp, Artificial sequence
  SiRNA target sequence
ttcacaaccacaactccaaacaccttc

SEQ ID NO: 84330 - DNA, 27 bp, Artificial sequence
  SiRNA target sequence
tcacaaccacaactccaaacaccttct

SEQ ID NO: 84331 - DNA, 27 bp, Artificial sequence
  SiRNA target sequence
cacaaccacaactccaaacaccttcta

SEQ ID NO: 84332 - DNA, 27 bp, Artificial sequence
  SiRNA target sequence
acaaccacaactccaaacaccttctac

SEQ ID NO: 84333 - DNA, 27 bp, Artificial sequence
  SiRNA target sequence
caaccacaactccaaacaccttctacc

SEQ ID NO: 84334 - DNA, 27 bp, Artificial sequence
  SiRNA target sequence
aaccacaactccaaacaccttctacct

SEQ ID NO: 84335 - DNA, 27 bp, Artificial sequence
  SiRNA target sequence
accacaactccaaacaccttctacctt

SEQ ID NO: 84336 - DNA, 27 bp, Artificial sequence
  SiRNA target sequence
ccacaactccaaacaccttctaccttt

SEQ ID NO: 84337 - DNA, 27 bp, Artificial sequence
  SiRNA target sequence
cacaactccaaacaccttctacctttt

SEQ ID NO: 84338 - DNA, 27 bp, Artificial sequence
  SiRNA target sequence
acaactccaaacaccttctaccttttt

SEQ ID NO: 84339 - DNA, 27 bp, Artificial sequence
  SiRNA target sequence
caactccaaacaccttctaccttttta

SEQ ID NO: 84340 - DNA, 27 bp, Artificial sequence
  SiRNA target sequence
aactccaaacaccttctacctttttac

SEQ ID NO: 84341 - DNA, 27 bp, Artificial sequence
  SiRNA target sequence
actccaaacaccttctacctttttaca

SEQ ID NO: 84342 - DNA, 27 bp, Artificial sequence
  SiRNA target sequence
ctccaaacaccttctacctttttacag

SEQ ID NO: 84343 - DNA, 27 bp, Artificial sequence
  SiRNA target sequence
tccaaacaccttctacctttttacagt

SEQ ID NO: 84344 - DNA, 27 bp, Artificial sequence
  SiRNA target sequence
ccaaacaccttctacctttttacagtc

SEQ ID NO: 84345 - DNA, 27 bp, Artificial sequence
  SiRNA target sequence
caaacaccttctacctttttacagtcc

SEQ ID NO: 84346 - DNA, 27 bp, Artificial sequence
  SiRNA target sequence
aaacaccttctacctttttacagtcca

SEQ ID NO: 84347 - DNA, 27 bp, Artificial sequence
  SiRNA target sequence
aacaccttctacctttttacagtccat

SEQ ID NO: 84348 - DNA, 27 bp, Artificial sequence
  SiRNA target sequence
acaccttctacctttttacagtccata

SEQ ID NO: 84349 - DNA, 27 bp, Artificial sequence
  SiRNA target sequence
caccttctacctttttacagtccataa

SEQ ID NO: 84350 - DNA, 27 bp, Artificial sequence
  SiRNA target sequence
accttctacctttttacagtccataat

SEQ ID NO: 84351 - DNA, 27 bp, Artificial sequence
  SiRNA target sequence
ccttctacctttttacagtccataatg

SEQ ID NO: 84352 - DNA, 27 bp, Artificial sequence
  SiRNA target sequence
cttctacctttttacagtccataatgg

SEQ ID NO: 84353 - DNA, 27 bp, Artificial sequence
  SiRNA target sequence
ttctacctttttacagtccataatggg

SEQ ID NO: 84354 - DNA, 27 bp, Artificial sequence
  SiRNA target sequence
tctacctttttacagtccataatgggc

SEQ ID NO: 84355 - DNA, 27 bp, Artificial sequence
  SiRNA target sequence
ctacctttttacagtccataatgggct

SEQ ID NO: 84356 - DNA, 27 bp, Artificial sequence
  SiRNA target sequence
tacctttttacagtccataatgggctt

SEQ ID NO: 84357 - DNA, 27 bp, Artificial sequence
  SiRNA target sequence
acctttttacagtccataatgggcttt

SEQ ID NO: 84358 - DNA, 27 bp, Artificial sequence
  SiRNA target sequence
cctttttacagtccataatgggctttc

SEQ ID NO: 84359 - DNA, 27 bp, Artificial sequence
  SiRNA target sequence
ctttttacagtccataatgggctttcc

SEQ ID NO: 84360 - DNA, 27 bp, Artificial sequence
  SiRNA target sequence
tttttacagtccataatgggctttcct

SEQ ID NO: 84361 - DNA, 27 bp, Artificial sequence
  SiRNA target sequence
ttttacagtccataatgggctttccta

SEQ ID NO: 84362 - DNA, 27 bp, Artificial sequence
  SiRNA target sequence
tttacagtccataatgggctttcctaa

SEQ ID NO: 84363 - DNA, 27 bp, Artificial sequence
  SiRNA target sequence
ttacagtccataatgggctttcctaat

SEQ ID NO: 84364 - DNA, 27 bp, Artificial sequence
  SiRNA target sequence
tacagtccataatgggctttcctaatc

SEQ ID NO: 84365 - DNA, 27 bp, Artificial sequence
  SiRNA target sequence
acagtccataatgggctttcctaatct

SEQ ID NO: 84366 - DNA, 27 bp, Artificial sequence
  SiRNA target sequence
cagtccataatgggctttcctaatctt

SEQ ID NO: 84367 - DNA, 27 bp, Artificial sequence
  SiRNA target sequence
agtccataatgggctttcctaatcttt

SEQ ID NO: 84368 - DNA, 27 bp, Artificial sequence
  SiRNA target sequence
gtccataatgggctttcctaatctttt

SEQ ID NO: 84369 - DNA, 27 bp, Artificial sequence
  SiRNA target sequence
tccataatgggctttcctaatctttta

SEQ ID NO: 84370 - DNA, 27 bp, Artificial sequence
  SiRNA target sequence
ccataatgggctttcctaatcttttat

SEQ ID NO: 84371 - DNA, 27 bp, Artificial sequence
  SiRNA target sequence
cataatgggctttcctaatcttttatt

SEQ ID NO: 84372 - DNA, 27 bp, Artificial sequence
  SiRNA target sequence
ataatgggctttcctaatcttttatta

SEQ ID NO: 84373 - DNA, 27 bp, Artificial sequence
  SiRNA target sequence
taatgggctttcctaatcttttattaa

SEQ ID NO: 84374 - DNA, 27 bp, Artificial sequence
  SiRNA target sequence
aatgggctttcctaatcttttattaac

SEQ ID NO: 84375 - DNA, 27 bp, Artificial sequence
  SiRNA target sequence
atgggctttcctaatcttttattaact

SEQ ID NO: 84376 - DNA, 27 bp, Artificial sequence
  SiRNA target sequence
tgggctttcctaatcttttattaacta

SEQ ID NO: 84377 - DNA, 27 bp, Artificial sequence
  SiRNA target sequence
gggctttcctaatcttttattaactat

SEQ ID NO: 84378 - DNA, 27 bp, Artificial sequence
  SiRNA target sequence
ggctttcctaatcttttattaactatg

SEQ ID NO: 84379 - DNA, 27 bp, Artificial sequence
  SiRNA target sequence
gctttcctaatcttttattaactatgt

SEQ ID NO: 84380 - DNA, 27 bp, Artificial sequence
  SiRNA target sequence
ctttcctaatcttttattaactatgtt

SEQ ID NO: 84381 - DNA, 27 bp, Artificial sequence
  SiRNA target sequence
tttcctaatcttttattaactatgtta

SEQ ID NO: 84382 - DNA, 27 bp, Artificial sequence
  SiRNA target sequence
ttcctaatcttttattaactatgttat

SEQ ID NO: 84383 - DNA, 27 bp, Artificial sequence
  SiRNA target sequence
tcctaatcttttattaactatgttatg

SEQ ID NO: 84384 - DNA, 27 bp, Artificial sequence
  SiRNA target sequence
cctaatcttttattaactatgttatgt

SEQ ID NO: 84385 - DNA, 27 bp, Artificial sequence
  SiRNA target sequence
ctaatcttttattaactatgttatgtg

SEQ ID NO: 84386 - DNA, 27 bp, Artificial sequence
  SiRNA target sequence
taatcttttattaactatgttatgtgc

SEQ ID NO: 84387 - DNA, 27 bp, Artificial sequence
  SiRNA target sequence
aatcttttattaactatgttatgtgct

SEQ ID NO: 84388 - DNA, 27 bp, Artificial sequence
  SiRNA target sequence
atcttttattaactatgttatgtgctt

SEQ ID NO: 84389 - DNA, 27 bp, Artificial sequence
  SiRNA target sequence
tcttttattaactatgttatgtgcttt

SEQ ID NO: 84390 - DNA, 27 bp, Artificial sequence
  SiRNA target sequence
cttttattaactatgttatgtgcttta

SEQ ID NO: 84391 - DNA, 27 bp, Artificial sequence
  SiRNA target sequence
ttttattaactatgttatgtgctttac

SEQ ID NO: 84392 - DNA, 27 bp, Artificial sequence
  SiRNA target sequence
tttattaactatgttatgtgctttaca

SEQ ID NO: 84393 - DNA, 27 bp, Artificial sequence
  SiRNA target sequence
ttattaactatgttatgtgctttacat

SEQ ID NO: 84394 - DNA, 27 bp, Artificial sequence
  SiRNA target sequence
tattaactatgttatgtgctttacata

SEQ ID NO: 84395 - DNA, 27 bp, Artificial sequence
  SiRNA target sequence
attaactatgttatgtgctttacatag

SEQ ID NO: 84396 - DNA, 27 bp, Artificial sequence
  SiRNA target sequence
ttaactatgttatgtgctttacatagc

SEQ ID NO: 84397 - DNA, 27 bp, Artificial sequence
  SiRNA target sequence
taactatgttatgtgctttacatagcc

SEQ ID NO: 84398 - DNA, 27 bp, Artificial sequence
  SiRNA target sequence
aactatgttatgtgctttacatagcca

SEQ ID NO: 84399 - DNA, 27 bp, Artificial sequence
  SiRNA target sequence
actatgttatgtgctttacatagccac

SEQ ID NO: 84400 - DNA, 27 bp, Artificial sequence
  SiRNA target sequence
ctatgttatgtgctttacatagccact

SEQ ID NO: 84401 - DNA, 27 bp, Artificial sequence
  SiRNA target sequence
tatgttatgtgctttacatagccactg

SEQ ID NO: 84402 - DNA, 27 bp, Artificial sequence
  SiRNA target sequence
atgttatgtgctttacatagccactgg

SEQ ID NO: 84403 - DNA, 27 bp, Artificial sequence
  SiRNA target sequence
tgttatgtgctttacatagccactgga

SEQ ID NO: 84404 - DNA, 27 bp, Artificial sequence
  SiRNA target sequence
gttatgtgctttacatagccactggac

SEQ ID NO: 84405 - DNA, 27 bp, Artificial sequence
  SiRNA target sequence
ttatgtgctttacatagccactggaca

SEQ ID NO: 84406 - DNA, 27 bp, Artificial sequence
  SiRNA target sequence
tatgtgctttacatagccactggacaa

SEQ ID NO: 84407 - DNA, 27 bp, Artificial sequence
  SiRNA target sequence
atgtgctttacatagccactggacaaa

SEQ ID NO: 84408 - DNA, 27 bp, Artificial sequence
  SiRNA target sequence
tgtgctttacatagccactggacaaat

SEQ ID NO: 84409 - DNA, 27 bp, Artificial sequence
  SiRNA target sequence
gtgctttacatagccactggacaaatt

SEQ ID NO: 84410 - DNA, 27 bp, Artificial sequence
  SiRNA target sequence
tgctttacatagccactggacaaattc

SEQ ID NO: 84411 - DNA, 27 bp, Artificial sequence
  SiRNA target sequence
gctttacatagccactggacaaattcg

SEQ ID NO: 84412 - DNA, 27 bp, Artificial sequence
  SiRNA target sequence
ctttacatagccactggacaaattcgt

SEQ ID NO: 84413 - DNA, 27 bp, Artificial sequence
  SiRNA target sequence
tttacatagccactggacaaattcgtc

SEQ ID NO: 84414 - DNA, 27 bp, Artificial sequence
  SiRNA target sequence
ttacatagccactggacaaattcgtca

SEQ ID NO: 84415 - DNA, 27 bp, Artificial sequence
  SiRNA target sequence
tacatagccactggacaaattcgtcat

SEQ ID NO: 84416 - DNA, 27 bp, Artificial sequence
  SiRNA target sequence
acatagccactggacaaattcgtcatg

SEQ ID NO: 84417 - DNA, 27 bp, Artificial sequence
  SiRNA target sequence
catagccactggacaaattcgtcatgt

SEQ ID NO: 84418 - DNA, 27 bp, Artificial sequence
  SiRNA target sequence
atagccactggacaaattcgtcatgtg

SEQ ID NO: 84419 - DNA, 27 bp, Artificial sequence
  SiRNA target sequence
tagccactggacaaattcgtcatgtgt

SEQ ID NO: 84420 - DNA, 27 bp, Artificial sequence
  SiRNA target sequence
agccactggacaaattcgtcatgtgtg

SEQ ID NO: 84421 - DNA, 27 bp, Artificial sequence
  SiRNA target sequence
gccactggacaaattcgtcatgtgtgg

SEQ ID NO: 84422 - DNA, 27 bp, Artificial sequence
  SiRNA target sequence
ccactggacaaattcgtcatgtgtggc

SEQ ID NO: 84423 - DNA, 27 bp, Artificial sequence
  SiRNA target sequence
cactggacaaattcgtcatgtgtggca

SEQ ID NO: 84424 - DNA, 27 bp, Artificial sequence
  SiRNA target sequence
actggacaaattcgtcatgtgtggcaa

SEQ ID NO: 84425 - DNA, 27 bp, Artificial sequence
  SiRNA target sequence
ctggacaaattcgtcatgtgtggcaac

SEQ ID NO: 84426 - DNA, 27 bp, Artificial sequence
  SiRNA target sequence
tggacaaattcgtcatgtgtggcaact

SEQ ID NO: 84427 - DNA, 27 bp, Artificial sequence
  SiRNA target sequence
ggacaaattcgtcatgtgtggcaactt

SEQ ID NO: 84428 - DNA, 27 bp, Artificial sequence
  SiRNA target sequence
gacaaattcgtcatgtgtggcaacttg

SEQ ID NO: 84429 - DNA, 27 bp, Artificial sequence
  SiRNA target sequence
acaaattcgtcatgtgtggcaacttgt

SEQ ID NO: 84430 - DNA, 27 bp, Artificial sequence
  SiRNA target sequence
caaattcgtcatgtgtggcaacttgtg

SEQ ID NO: 84431 - DNA, 27 bp, Artificial sequence
  SiRNA target sequence
aaattcgtcatgtgtggcaacttgtgg

SEQ ID NO: 84432 - DNA, 27 bp, Artificial sequence
  SiRNA target sequence
aattcgtcatgtgtggcaacttgtgga

SEQ ID NO: 84433 - DNA, 27 bp, Artificial sequence
  SiRNA target sequence
attcgtcatgtgtggcaacttgtggag

SEQ ID NO: 84434 - DNA, 27 bp, Artificial sequence
  SiRNA target sequence
ttcgtcatgtgtggcaacttgtggagg

SEQ ID NO: 84435 - DNA, 27 bp, Artificial sequence
  SiRNA target sequence
tcgtcatgtgtggcaacttgtggagga

SEQ ID NO: 84436 - DNA, 27 bp, Artificial sequence
  SiRNA target sequence
cgtcatgtgtggcaacttgtggaggat

SEQ ID NO: 84437 - DNA, 27 bp, Artificial sequence
  SiRNA target sequence
gtcatgtgtggcaacttgtggaggatt

SEQ ID NO: 84438 - DNA, 27 bp, Artificial sequence
  SiRNA target sequence
tcatgtgtggcaacttgtggaggattt

SEQ ID NO: 84439 - DNA, 27 bp, Artificial sequence
  SiRNA target sequence
catgtgtggcaacttgtggaggattta

SEQ ID NO: 84440 - DNA, 27 bp, Artificial sequence
  SiRNA target sequence
atgtgtggcaacttgtggaggatttaa

SEQ ID NO: 84441 - DNA, 27 bp, Artificial sequence
  SiRNA target sequence
tgtgtggcaacttgtggaggatttaag

SEQ ID NO: 84442 - DNA, 27 bp, Artificial sequence
  SiRNA target sequence
gtgtggcaacttgtggaggatttaagc

SEQ ID NO: 84443 - DNA, 27 bp, Artificial sequence
  SiRNA target sequence
tgtggcaacttgtggaggatttaagct

SEQ ID NO: 84444 - DNA, 27 bp, Artificial sequence
  SiRNA target sequence
gtggcaacttgtggaggatttaagctt

SEQ ID NO: 84445 - DNA, 27 bp, Artificial sequence
  SiRNA target sequence
tggcaacttgtggaggatttaagctta

SEQ ID NO: 84446 - DNA, 27 bp, Artificial sequence
  SiRNA target sequence
ggcaacttgtggaggatttaagcttaa

SEQ ID NO: 84447 - DNA, 27 bp, Artificial sequence
  SiRNA target sequence
gcaacttgtggaggatttaagcttaac

SEQ ID NO: 84448 - DNA, 27 bp, Artificial sequence
  SiRNA target sequence
caacttgtggaggatttaagcttaaca

SEQ ID NO: 84449 - DNA, 27 bp, Artificial sequence
  SiRNA target sequence
aacttgtggaggatttaagcttaacag

SEQ ID NO: 84450 - DNA, 27 bp, Artificial sequence
  SiRNA target sequence
acttgtggaggatttaagcttaacagt

SEQ ID NO: 84451 - DNA, 27 bp, Artificial sequence
  SiRNA target sequence
cttgtggaggatttaagcttaacagtc

SEQ ID NO: 84452 - DNA, 27 bp, Artificial sequence
  SiRNA target sequence
ttgtggaggatttaagcttaacagtct

SEQ ID NO: 84453 - DNA, 27 bp, Artificial sequence
  SiRNA target sequence
tgtggaggatttaagcttaacagtctt

SEQ ID NO: 84454 - DNA, 27 bp, Artificial sequence
  SiRNA target sequence
gtggaggatttaagcttaacagtcttt

SEQ ID NO: 84455 - DNA, 27 bp, Artificial sequence
  SiRNA target sequence
tggaggatttaagcttaacagtctttg

SEQ ID NO: 84456 - DNA, 27 bp, Artificial sequence
  SiRNA target sequence
ggaggatttaagcttaacagtctttga

SEQ ID NO: 84457 - DNA, 27 bp, Artificial sequence
  SiRNA target sequence
gaggatttaagcttaacagtctttgaa

SEQ ID NO: 84458 - DNA, 27 bp, Artificial sequence
  SiRNA target sequence
aggatttaagcttaacagtctttgaaa

SEQ ID NO: 84459 - DNA, 27 bp, Artificial sequence
  SiRNA target sequence
ggatttaagcttaacagtctttgaaaa

SEQ ID NO: 84460 - DNA, 27 bp, Artificial sequence
  SiRNA target sequence
gatttaagcttaacagtctttgaaaat

SEQ ID NO: 84461 - DNA, 27 bp, Artificial sequence
  SiRNA target sequence
atttaagcttaacagtctttgaaaatg

SEQ ID NO: 84462 - DNA, 27 bp, Artificial sequence
  SiRNA target sequence
tttaagcttaacagtctttgaaaatgt

SEQ ID NO: 84463 - DNA, 27 bp, Artificial sequence
  SiRNA target sequence
ttaagcttaacagtctttgaaaatgtc

SEQ ID NO: 84464 - DNA, 27 bp, Artificial sequence
  SiRNA target sequence
taagcttaacagtctttgaaaatgtcc

SEQ ID NO: 84465 - DNA, 27 bp, Artificial sequence
  SiRNA target sequence
aagcttaacagtctttgaaaatgtcca

SEQ ID NO: 84466 - DNA, 27 bp, Artificial sequence
  SiRNA target sequence
agcttaacagtctttgaaaatgtccac

SEQ ID NO: 84467 - DNA, 27 bp, Artificial sequence
  SiRNA target sequence
gcttaacagtctttgaaaatgtccaca

SEQ ID NO: 84468 - DNA, 27 bp, Artificial sequence
  SiRNA target sequence
cttaacagtctttgaaaatgtccacaa

SEQ ID NO: 84469 - DNA, 27 bp, Artificial sequence
  SiRNA target sequence
ttaacagtctttgaaaatgtccacaac

SEQ ID NO: 84470 - DNA, 27 bp, Artificial sequence
  SiRNA target sequence
taacagtctttgaaaatgtccacaaca

SEQ ID NO: 84471 - DNA, 27 bp, Artificial sequence
  SiRNA target sequence
aacagtctttgaaaatgtccacaacat

SEQ ID NO: 84472 - DNA, 27 bp, Artificial sequence
  SiRNA target sequence
acagtctttgaaaatgtccacaacatt

SEQ ID NO: 84473 - DNA, 27 bp, Artificial sequence
  SiRNA target sequence
cagtctttgaaaatgtccacaacattc

SEQ ID NO: 84474 - DNA, 27 bp, Artificial sequence
  SiRNA target sequence
agtctttgaaaatgtccacaacattct

SEQ ID NO: 84475 - DNA, 27 bp, Artificial sequence
  SiRNA target sequence
gtctttgaaaatgtccacaacattctg

SEQ ID NO: 84476 - DNA, 27 bp, Artificial sequence
  SiRNA target sequence
tctttgaaaatgtccacaacattctgc

SEQ ID NO: 84477 - DNA, 27 bp, Artificial sequence
  SiRNA target sequence
ctttgaaaatgtccacaacattctgca

SEQ ID NO: 84478 - DNA, 27 bp, Artificial sequence
  SiRNA target sequence
tttgaaaatgtccacaacattctgcac

SEQ ID NO: 84479 - DNA, 27 bp, Artificial sequence
  SiRNA target sequence
ttgaaaatgtccacaacattctgcaca

SEQ ID NO: 84480 - DNA, 27 bp, Artificial sequence
  SiRNA target sequence
tgaaaatgtccacaacattctgcacag

SEQ ID NO: 84481 - DNA, 27 bp, Artificial sequence
  SiRNA target sequence
gaaaatgtccacaacattctgcacagg

SEQ ID NO: 84482 - DNA, 27 bp, Artificial sequence
  SiRNA target sequence
aaaatgtccacaacattctgcacaggg

SEQ ID NO: 84483 - DNA, 27 bp, Artificial sequence
  SiRNA target sequence
aaatgtccacaacattctgcacagggg

SEQ ID NO: 84484 - DNA, 27 bp, Artificial sequence
  SiRNA target sequence
aatgtccacaacattctgcacagggga

SEQ ID NO: 84485 - DNA, 27 bp, Artificial sequence
  SiRNA target sequence
atgtccacaacattctgcacaggggaa

SEQ ID NO: 84486 - DNA, 27 bp, Artificial sequence
  SiRNA target sequence
tgtccacaacattctgcacaggggaaa

SEQ ID NO: 84487 - DNA, 27 bp, Artificial sequence
  SiRNA target sequence
gtccacaacattctgcacaggggaaaa

SEQ ID NO: 84488 - DNA, 27 bp, Artificial sequence
  SiRNA target sequence
tccacaacattctgcacaggggaaaag

SEQ ID NO: 84489 - DNA, 27 bp, Artificial sequence
  SiRNA target sequence
ccacaacattctgcacaggggaaaaga

SEQ ID NO: 84490 - DNA, 27 bp, Artificial sequence
  SiRNA target sequence
cacaacattctgcacaggggaaaagag

SEQ ID NO: 84491 - DNA, 27 bp, Artificial sequence
  SiRNA target sequence
acaacattctgcacaggggaaaagaga

SEQ ID NO: 84492 - DNA, 27 bp, Artificial sequence
  SiRNA target sequence
caacattctgcacaggggaaaagagat

SEQ ID NO: 84493 - DNA, 27 bp, Artificial sequence
  SiRNA target sequence
aacattctgcacaggggaaaagagatg

SEQ ID NO: 84494 - DNA, 27 bp, Artificial sequence
  SiRNA target sequence
acattctgcacaggggaaaagagatga

SEQ ID NO: 84495 - DNA, 27 bp, Artificial sequence
  SiRNA target sequence
cattctgcacaggggaaaagagatgat

SEQ ID NO: 84496 - DNA, 27 bp, Artificial sequence
  SiRNA target sequence
attctgcacaggggaaaagagatgata

SEQ ID NO: 84497 - DNA, 27 bp, Artificial sequence
  SiRNA target sequence
ttctgcacaggggaaaagagatgataa

SEQ ID NO: 84498 - DNA, 27 bp, Artificial sequence
  SiRNA target sequence
tctgcacaggggaaaagagatgataaa

SEQ ID NO: 84499 - DNA, 27 bp, Artificial sequence
  SiRNA target sequence
ctgcacaggggaaaagagatgataaaa

SEQ ID NO: 84500 - DNA, 27 bp, Artificial sequence
  SiRNA target sequence
tgcacaggggaaaagagatgataaaag

SEQ ID NO: 84501 - DNA, 27 bp, Artificial sequence
  SiRNA target sequence
gcacaggggaaaagagatgataaaagg

SEQ ID NO: 84502 - DNA, 27 bp, Artificial sequence
  SiRNA target sequence
cacaggggaaaagagatgataaaaggt

SEQ ID NO: 84503 - DNA, 27 bp, Artificial sequence
  SiRNA target sequence
acaggggaaaagagatgataaaaggta

SEQ ID NO: 84504 - DNA, 27 bp, Artificial sequence
  SiRNA target sequence
caggggaaaagagatgataaaaggtaa

SEQ ID NO: 84505 - DNA, 27 bp, Artificial sequence
  SiRNA target sequence
aggggaaaagagatgataaaaggtaaa

SEQ ID NO: 84506 - DNA, 27 bp, Artificial sequence
  SiRNA target sequence
ggggaaaagagatgataaaaggtaaat

SEQ ID NO: 84507 - DNA, 27 bp, Artificial sequence
  SiRNA target sequence
gggaaaagagatgataaaaggtaaata

SEQ ID NO: 84508 - DNA, 27 bp, Artificial sequence
  SiRNA target sequence
ggaaaagagatgataaaaggtaaataa

SEQ ID NO: 84509 - DNA, 27 bp, Artificial sequence
  SiRNA target sequence
gaaaagagatgataaaaggtaaataaa

SEQ ID NO: 84510 - DNA, 27 bp, Artificial sequence
  SiRNA target sequence
aaaagagatgataaaaggtaaataaat

SEQ ID NO: 84511 - DNA, 27 bp, Artificial sequence
  SiRNA target sequence
aaagagatgataaaaggtaaataaatt

SEQ ID NO: 84512 - DNA, 27 bp, Artificial sequence
  SiRNA target sequence
aagagatgataaaaggtaaataaattg

SEQ ID NO: 84513 - DNA, 27 bp, Artificial sequence
  SiRNA target sequence
agagatgataaaaggtaaataaattga

SEQ ID NO: 84514 - DNA, 27 bp, Artificial sequence
  SiRNA target sequence
gagatgataaaaggtaaataaattgaa

SEQ ID NO: 84515 - DNA, 27 bp, Artificial sequence
  SiRNA target sequence
agatgataaaaggtaaataaattgaag

SEQ ID NO: 84516 - DNA, 27 bp, Artificial sequence
  SiRNA target sequence
gatgataaaaggtaaataaattgaagt

SEQ ID NO: 84517 - DNA, 27 bp, Artificial sequence
  SiRNA target sequence
atgataaaaggtaaataaattgaagtg

SEQ ID NO: 84518 - DNA, 27 bp, Artificial sequence
  SiRNA target sequence
tgataaaaggtaaataaattgaagtgt

SEQ ID NO: 84519 - DNA, 27 bp, Artificial sequence
  SiRNA target sequence
gataaaaggtaaataaattgaagtgta

SEQ ID NO: 84520 - DNA, 27 bp, Artificial sequence
  SiRNA target sequence
ataaaaggtaaataaattgaagtgtat

SEQ ID NO: 84521 - DNA, 27 bp, Artificial sequence
  SiRNA target sequence
taaaaggtaaataaattgaagtgtatc

SEQ ID NO: 84522 - DNA, 27 bp, Artificial sequence
  SiRNA target sequence
aaaaggtaaataaattgaagtgtatct

SEQ ID NO: 84523 - DNA, 27 bp, Artificial sequence
  SiRNA target sequence
aaaggtaaataaattgaagtgtatctt

SEQ ID NO: 84524 - DNA, 27 bp, Artificial sequence
  SiRNA target sequence
aaggtaaataaattgaagtgtatcttt

SEQ ID NO: 84525 - DNA, 27 bp, Artificial sequence
  SiRNA target sequence
aggtaaataaattgaagtgtatctttt

SEQ ID NO: 84526 - DNA, 27 bp, Artificial sequence
  SiRNA target sequence
ggtaaataaattgaagtgtatcttttt

SEQ ID NO: 84527 - DNA, 27 bp, Artificial sequence
  SiRNA target sequence
gtaaataaattgaagtgtatctttttt

SEQ ID NO: 84528 - DNA, 27 bp, Artificial sequence
  SiRNA target sequence
taaataaattgaagtgtatctttttta

SEQ ID NO: 84529 - DNA, 27 bp, Artificial sequence
  SiRNA target sequence
aaataaattgaagtgtatcttttttat

SEQ ID NO: 84530 - DNA, 27 bp, Artificial sequence
  SiRNA target sequence
aataaattgaagtgtatcttttttatg

SEQ ID NO: 84531 - DNA, 27 bp, Artificial sequence
  SiRNA target sequence
ataaattgaagtgtatcttttttatgt

SEQ ID NO: 84532 - DNA, 27 bp, Artificial sequence
  SiRNA target sequence
taaattgaagtgtatcttttttatgtt

SEQ ID NO: 84533 - DNA, 27 bp, Artificial sequence
  SiRNA target sequence
aaattgaagtgtatcttttttatgttg

SEQ ID NO: 84534 - DNA, 27 bp, Artificial sequence
  SiRNA target sequence
aattgaagtgtatcttttttatgttgt

SEQ ID NO: 84535 - DNA, 27 bp, Artificial sequence
  SiRNA target sequence
attgaagtgtatcttttttatgttgta

SEQ ID NO: 84536 - DNA, 27 bp, Artificial sequence
  SiRNA target sequence
ttgaagtgtatcttttttatgttgtac

SEQ ID NO: 84537 - DNA, 27 bp, Artificial sequence
  SiRNA target sequence
tgaagtgtatcttttttatgttgtact

SEQ ID NO: 84538 - DNA, 27 bp, Artificial sequence
  SiRNA target sequence
gaagtgtatcttttttatgttgtactg

SEQ ID NO: 84539 - DNA, 27 bp, Artificial sequence
  SiRNA target sequence
aagtgtatcttttttatgttgtactgt

SEQ ID NO: 84540 - DNA, 27 bp, Artificial sequence
  SiRNA target sequence
agtgtatcttttttatgttgtactgta

SEQ ID NO: 84541 - DNA, 27 bp, Artificial sequence
  SiRNA target sequence
gtgtatcttttttatgttgtactgtag

SEQ ID NO: 84542 - DNA, 27 bp, Artificial sequence
  SiRNA target sequence
tgtatcttttttatgttgtactgtagg

SEQ ID NO: 84543 - DNA, 27 bp, Artificial sequence
  SiRNA target sequence
gtatcttttttatgttgtactgtagga

SEQ ID NO: 84544 - DNA, 27 bp, Artificial sequence
  SiRNA target sequence
tatcttttttatgttgtactgtaggaa

SEQ ID NO: 84545 - DNA, 27 bp, Artificial sequence
  SiRNA target sequence
atcttttttatgttgtactgtaggaaa

SEQ ID NO: 84546 - DNA, 27 bp, Artificial sequence
  SiRNA target sequence
tcttttttatgttgtactgtaggaaat

SEQ ID NO: 84547 - DNA, 27 bp, Artificial sequence
  SiRNA target sequence
cttttttatgttgtactgtaggaaatg

SEQ ID NO: 84548 - DNA, 27 bp, Artificial sequence
  SiRNA target sequence
ttttttatgttgtactgtaggaaatgc

SEQ ID NO: 84549 - DNA, 27 bp, Artificial sequence
  SiRNA target sequence
tttttatgttgtactgtaggaaatgca

SEQ ID NO: 84550 - DNA, 27 bp, Artificial sequence
  SiRNA target sequence
ttttatgttgtactgtaggaaatgcag

SEQ ID NO: 84551 - DNA, 27 bp, Artificial sequence
  SiRNA target sequence
tttatgttgtactgtaggaaatgcagg

SEQ ID NO: 84552 - DNA, 27 bp, Artificial sequence
  SiRNA target sequence
ttatgttgtactgtaggaaatgcagga

SEQ ID NO: 84553 - DNA, 27 bp, Artificial sequence
  SiRNA target sequence
tatgttgtactgtaggaaatgcaggat

SEQ ID NO: 84554 - DNA, 27 bp, Artificial sequence
  SiRNA target sequence
atgttgtactgtaggaaatgcaggata

SEQ ID NO: 84555 - DNA, 27 bp, Artificial sequence
  SiRNA target sequence
tgttgtactgtaggaaatgcaggataa

SEQ ID NO: 84556 - DNA, 27 bp, Artificial sequence
  SiRNA target sequence
gttgtactgtaggaaatgcaggataaa

SEQ ID NO: 84557 - DNA, 27 bp, Artificial sequence
  SiRNA target sequence
ttgtactgtaggaaatgcaggataaac

SEQ ID NO: 84558 - DNA, 27 bp, Artificial sequence
  SiRNA target sequence
tgtactgtaggaaatgcaggataaaca

SEQ ID NO: 84559 - DNA, 27 bp, Artificial sequence
  SiRNA target sequence
gtactgtaggaaatgcaggataaacag

SEQ ID NO: 84560 - DNA, 27 bp, Artificial sequence
  SiRNA target sequence
tactgtaggaaatgcaggataaacagc

SEQ ID NO: 84561 - DNA, 27 bp, Artificial sequence
  SiRNA target sequence
actgtaggaaatgcaggataaacagct

SEQ ID NO: 84562 - DNA, 27 bp, Artificial sequence
  SiRNA target sequence
ctgtaggaaatgcaggataaacagctg

SEQ ID NO: 84563 - DNA, 27 bp, Artificial sequence
  SiRNA target sequence
tgtaggaaatgcaggataaacagctgc

SEQ ID NO: 84564 - DNA, 27 bp, Artificial sequence
  SiRNA target sequence
gtaggaaatgcaggataaacagctgcc

SEQ ID NO: 84565 - DNA, 27 bp, Artificial sequence
  SiRNA target sequence
taggaaatgcaggataaacagctgcca

SEQ ID NO: 84566 - DNA, 27 bp, Artificial sequence
  SiRNA target sequence
aggaaatgcaggataaacagctgccat

SEQ ID NO: 84567 - DNA, 27 bp, Artificial sequence
  SiRNA target sequence
ggaaatgcaggataaacagctgccatg

SEQ ID NO: 84568 - DNA, 27 bp, Artificial sequence
  SiRNA target sequence
gaaatgcaggataaacagctgccatgg

SEQ ID NO: 84569 - DNA, 27 bp, Artificial sequence
  SiRNA target sequence
aaatgcaggataaacagctgccatggt

SEQ ID NO: 84570 - DNA, 27 bp, Artificial sequence
  SiRNA target sequence
aatgcaggataaacagctgccatggta

SEQ ID NO: 84571 - DNA, 27 bp, Artificial sequence
  SiRNA target sequence
atgcaggataaacagctgccatggtat

SEQ ID NO: 84572 - DNA, 27 bp, Artificial sequence
  SiRNA target sequence
tgcaggataaacagctgccatggtatg

SEQ ID NO: 84573 - DNA, 27 bp, Artificial sequence
  SiRNA target sequence
gcaggataaacagctgccatggtatgt

SEQ ID NO: 84574 - DNA, 27 bp, Artificial sequence
  SiRNA target sequence
caggataaacagctgccatggtatgta

SEQ ID NO: 84575 - DNA, 27 bp, Artificial sequence
  SiRNA target sequence
aggataaacagctgccatggtatgtaa

SEQ ID NO: 84576 - DNA, 27 bp, Artificial sequence
  SiRNA target sequence
ggataaacagctgccatggtatgtaaa

SEQ ID NO: 84577 - DNA, 27 bp, Artificial sequence
  SiRNA target sequence
gataaacagctgccatggtatgtaaaa

SEQ ID NO: 84578 - DNA, 27 bp, Artificial sequence
  SiRNA target sequence
ataaacagctgccatggtatgtaaaag

SEQ ID NO: 84579 - DNA, 27 bp, Artificial sequence
  SiRNA target sequence
taaacagctgccatggtatgtaaaagt

SEQ ID NO: 84580 - DNA, 27 bp, Artificial sequence
  SiRNA target sequence
aaacagctgccatggtatgtaaaagtg

SEQ ID NO: 84581 - DNA, 27 bp, Artificial sequence
  SiRNA target sequence
aacagctgccatggtatgtaaaagtgt

SEQ ID NO: 84582 - DNA, 27 bp, Artificial sequence
  SiRNA target sequence
acagctgccatggtatgtaaaagtgtc

SEQ ID NO: 84583 - DNA, 27 bp, Artificial sequence
  SiRNA target sequence
cagctgccatggtatgtaaaagtgtcc

SEQ ID NO: 84584 - DNA, 27 bp, Artificial sequence
  SiRNA target sequence
agctgccatggtatgtaaaagtgtcca

SEQ ID NO: 84585 - DNA, 27 bp, Artificial sequence
  SiRNA target sequence
gctgccatggtatgtaaaagtgtccat

SEQ ID NO: 84586 - DNA, 27 bp, Artificial sequence
  SiRNA target sequence
ctgccatggtatgtaaaagtgtccatg

SEQ ID NO: 84587 - DNA, 27 bp, Artificial sequence
  SiRNA target sequence
tgccatggtatgtaaaagtgtccatgt

SEQ ID NO: 84588 - DNA, 27 bp, Artificial sequence
  SiRNA target sequence
gccatggtatgtaaaagtgtccatgtt

SEQ ID NO: 84589 - DNA, 27 bp, Artificial sequence
  SiRNA target sequence
ccatggtatgtaaaagtgtccatgttg

SEQ ID NO: 84590 - DNA, 27 bp, Artificial sequence
  SiRNA target sequence
catggtatgtaaaagtgtccatgttgc

SEQ ID NO: 84591 - DNA, 27 bp, Artificial sequence
  SiRNA target sequence
atggtatgtaaaagtgtccatgttgct

SEQ ID NO: 84592 - DNA, 27 bp, Artificial sequence
  SiRNA target sequence
tggtatgtaaaagtgtccatgttgctc

SEQ ID NO: 84593 - DNA, 27 bp, Artificial sequence
  SiRNA target sequence
ggtatgtaaaagtgtccatgttgctct

SEQ ID NO: 84594 - DNA, 27 bp, Artificial sequence
  SiRNA target sequence
gtatgtaaaagtgtccatgttgctctc

SEQ ID NO: 84595 - DNA, 27 bp, Artificial sequence
  SiRNA target sequence
tatgtaaaagtgtccatgttgctctcc

SEQ ID NO: 84596 - DNA, 27 bp, Artificial sequence
  SiRNA target sequence
atgtaaaagtgtccatgttgctctccc

SEQ ID NO: 84597 - DNA, 27 bp, Artificial sequence
  SiRNA target sequence
tgtaaaagtgtccatgttgctctcccc

SEQ ID NO: 84598 - DNA, 27 bp, Artificial sequence
  SiRNA target sequence
gtaaaagtgtccatgttgctctcccca

SEQ ID NO: 84599 - DNA, 27 bp, Artificial sequence
  SiRNA target sequence
taaaagtgtccatgttgctctccccaa

SEQ ID NO: 84600 - DNA, 27 bp, Artificial sequence
  SiRNA target sequence
aaaagtgtccatgttgctctccccaat

SEQ ID NO: 84601 - DNA, 27 bp, Artificial sequence
  SiRNA target sequence
aaagtgtccatgttgctctccccaatc

SEQ ID NO: 84602 - DNA, 27 bp, Artificial sequence
  SiRNA target sequence
aagtgtccatgttgctctccccaatct

SEQ ID NO: 84603 - DNA, 27 bp, Artificial sequence
  SiRNA target sequence
agtgtccatgttgctctccccaatcta

SEQ ID NO: 84604 - DNA, 27 bp, Artificial sequence
  SiRNA target sequence
gtgtccatgttgctctccccaatctat

SEQ ID NO: 84605 - DNA, 27 bp, Artificial sequence
  SiRNA target sequence
tgtccatgttgctctccccaatctatc

SEQ ID NO: 84606 - DNA, 27 bp, Artificial sequence
  SiRNA target sequence
gtccatgttgctctccccaatctatct

SEQ ID NO: 84607 - DNA, 27 bp, Artificial sequence
  SiRNA target sequence
tccatgttgctctccccaatctatctt

SEQ ID NO: 84608 - DNA, 27 bp, Artificial sequence
  SiRNA target sequence
ccatgttgctctccccaatctatcttt

SEQ ID NO: 84609 - DNA, 27 bp, Artificial sequence
  SiRNA target sequence
catgttgctctccccaatctatcttta

SEQ ID NO: 84610 - DNA, 27 bp, Artificial sequence
  SiRNA target sequence
atgttgctctccccaatctatctttaa

SEQ ID NO: 84611 - DNA, 27 bp, Artificial sequence
  SiRNA target sequence
tgttgctctccccaatctatctttaac

SEQ ID NO: 84612 - DNA, 27 bp, Artificial sequence
  SiRNA target sequence
gttgctctccccaatctatctttaact

SEQ ID NO: 84613 - DNA, 27 bp, Artificial sequence
  SiRNA target sequence
ttgctctccccaatctatctttaactt

SEQ ID NO: 84614 - DNA, 27 bp, Artificial sequence
  SiRNA target sequence
tgctctccccaatctatctttaacttc

SEQ ID NO: 84615 - DNA, 27 bp, Artificial sequence
  SiRNA target sequence
gctctccccaatctatctttaacttcc

SEQ ID NO: 84616 - DNA, 27 bp, Artificial sequence
  SiRNA target sequence
ctctccccaatctatctttaacttcct

SEQ ID NO: 84617 - DNA, 27 bp, Artificial sequence
  SiRNA target sequence
tctccccaatctatctttaacttcctt

SEQ ID NO: 84618 - DNA, 27 bp, Artificial sequence
  SiRNA target sequence
ctccccaatctatctttaacttcctta

SEQ ID NO: 84619 - DNA, 27 bp, Artificial sequence
  SiRNA target sequence
tccccaatctatctttaacttccttat

SEQ ID NO: 84620 - DNA, 27 bp, Artificial sequence
  SiRNA target sequence
ccccaatctatctttaacttccttatt

SEQ ID NO: 84621 - DNA, 27 bp, Artificial sequence
  SiRNA target sequence
cccaatctatctttaacttccttattt

SEQ ID NO: 84622 - DNA, 27 bp, Artificial sequence
  SiRNA target sequence
ccaatctatctttaacttccttatttg

SEQ ID NO: 84623 - DNA, 27 bp, Artificial sequence
  SiRNA target sequence
caatctatctttaacttccttatttgt

SEQ ID NO: 84624 - DNA, 27 bp, Artificial sequence
  SiRNA target sequence
aatctatctttaacttccttatttgtt

SEQ ID NO: 84625 - DNA, 27 bp, Artificial sequence
  SiRNA target sequence
atctatctttaacttccttatttgtta

SEQ ID NO: 84626 - DNA, 27 bp, Artificial sequence
  SiRNA target sequence
tctatctttaacttccttatttgttaa

SEQ ID NO: 84627 - DNA, 27 bp, Artificial sequence
  SiRNA target sequence
ctatctttaacttccttatttgttaat

SEQ ID NO: 84628 - DNA, 27 bp, Artificial sequence
  SiRNA target sequence
tatctttaacttccttatttgttaatt

SEQ ID NO: 84629 - DNA, 27 bp, Artificial sequence
  SiRNA target sequence
atctttaacttccttatttgttaattt

SEQ ID NO: 84630 - DNA, 27 bp, Artificial sequence
  SiRNA target sequence
tctttaacttccttatttgttaatttt

SEQ ID NO: 84631 - DNA, 27 bp, Artificial sequence
  SiRNA target sequence
ctttaacttccttatttgttaattttt

SEQ ID NO: 84632 - DNA, 27 bp, Artificial sequence
  SiRNA target sequence
tttaacttccttatttgttaatttttg

SEQ ID NO: 84633 - DNA, 27 bp, Artificial sequence
  SiRNA target sequence
ttaacttccttatttgttaatttttga

SEQ ID NO: 84634 - DNA, 27 bp, Artificial sequence
  SiRNA target sequence
taacttccttatttgttaatttttgat

SEQ ID NO: 84635 - DNA, 27 bp, Artificial sequence
  SiRNA target sequence
aacttccttatttgttaatttttgatt

SEQ ID NO: 84636 - DNA, 27 bp, Artificial sequence
  SiRNA target sequence
acttccttatttgttaatttttgatta

SEQ ID NO: 84637 - DNA, 27 bp, Artificial sequence
  SiRNA target sequence
cttccttatttgttaatttttgattat

SEQ ID NO: 84638 - DNA, 27 bp, Artificial sequence
  SiRNA target sequence
ttccttatttgttaatttttgattatg

SEQ ID NO: 84639 - DNA, 27 bp, Artificial sequence
  SiRNA target sequence
tccttatttgttaatttttgattatga

SEQ ID NO: 84640 - DNA, 27 bp, Artificial sequence
  SiRNA target sequence
ccttatttgttaatttttgattatgaa

SEQ ID NO: 84641 - DNA, 27 bp, Artificial sequence
  SiRNA target sequence
cttatttgttaatttttgattatgaat

SEQ ID NO: 84642 - DNA, 27 bp, Artificial sequence
  SiRNA target sequence
ttatttgttaatttttgattatgaatt

SEQ ID NO: 84643 - DNA, 27 bp, Artificial sequence
  SiRNA target sequence
tatttgttaatttttgattatgaatta

SEQ ID NO: 84644 - DNA, 27 bp, Artificial sequence
  SiRNA target sequence
atttgttaatttttgattatgaattag

SEQ ID NO: 84645 - DNA, 27 bp, Artificial sequence
  SiRNA target sequence
tttgttaatttttgattatgaattaga

SEQ ID NO: 84646 - DNA, 27 bp, Artificial sequence
  SiRNA target sequence
ttgttaatttttgattatgaattagac

SEQ ID NO: 84647 - DNA, 27 bp, Artificial sequence
  SiRNA target sequence
tgttaatttttgattatgaattagacc

SEQ ID NO: 84648 - DNA, 27 bp, Artificial sequence
  SiRNA target sequence
gttaatttttgattatgaattagacct

SEQ ID NO: 84649 - DNA, 27 bp, Artificial sequence
  SiRNA target sequence
ttaatttttgattatgaattagaccta

SEQ ID NO: 84650 - DNA, 27 bp, Artificial sequence
  SiRNA target sequence
taatttttgattatgaattagacctaa

SEQ ID NO: 84651 - DNA, 27 bp, Artificial sequence
  SiRNA target sequence
aatttttgattatgaattagacctaat

SEQ ID NO: 84652 - DNA, 27 bp, Artificial sequence
  SiRNA target sequence
atttttgattatgaattagacctaatt

SEQ ID NO: 84653 - DNA, 27 bp, Artificial sequence
  SiRNA target sequence
tttttgattatgaattagacctaattc

SEQ ID NO: 84654 - DNA, 27 bp, Artificial sequence
  SiRNA target sequence
ttttgattatgaattagacctaattca

SEQ ID NO: 84655 - DNA, 27 bp, Artificial sequence
  SiRNA target sequence
tttgattatgaattagacctaattcac

SEQ ID NO: 84656 - DNA, 27 bp, Artificial sequence
  SiRNA target sequence
ttgattatgaattagacctaattcacc

SEQ ID NO: 84657 - DNA, 27 bp, Artificial sequence
  SiRNA target sequence
tgattatgaattagacctaattcacct

SEQ ID NO: 84658 - DNA, 27 bp, Artificial sequence
  SiRNA target sequence
gattatgaattagacctaattcaccta

SEQ ID NO: 84659 - DNA, 27 bp, Artificial sequence
  SiRNA target sequence
attatgaattagacctaattcacctac

SEQ ID NO: 84660 - DNA, 27 bp, Artificial sequence
  SiRNA target sequence
ttatgaattagacctaattcacctact

SEQ ID NO: 84661 - DNA, 27 bp, Artificial sequence
  SiRNA target sequence
tatgaattagacctaattcacctactt

SEQ ID NO: 84662 - DNA, 27 bp, Artificial sequence
  SiRNA target sequence
atgaattagacctaattcacctacttt

SEQ ID NO: 84663 - DNA, 27 bp, Artificial sequence
  SiRNA target sequence
tgaattagacctaattcacctactttt

SEQ ID NO: 84664 - DNA, 27 bp, Artificial sequence
  SiRNA target sequence
gaattagacctaattcacctacttttg

SEQ ID NO: 84665 - DNA, 27 bp, Artificial sequence
  SiRNA target sequence
aattagacctaattcacctacttttgg

SEQ ID NO: 84666 - DNA, 27 bp, Artificial sequence
  SiRNA target sequence
attagacctaattcacctacttttggt

SEQ ID NO: 84667 - DNA, 27 bp, Artificial sequence
  SiRNA target sequence
ttagacctaattcacctacttttggtg

SEQ ID NO: 84668 - DNA, 27 bp, Artificial sequence
  SiRNA target sequence
tagacctaattcacctacttttggtga

SEQ ID NO: 84669 - DNA, 27 bp, Artificial sequence
  SiRNA target sequence
agacctaattcacctacttttggtgaa

SEQ ID NO: 84670 - DNA, 27 bp, Artificial sequence
  SiRNA target sequence
gacctaattcacctacttttggtgaaa

SEQ ID NO: 84671 - DNA, 27 bp, Artificial sequence
  SiRNA target sequence
acctaattcacctacttttggtgaaat

SEQ ID NO: 84672 - DNA, 27 bp, Artificial sequence
  SiRNA target sequence
cctaattcacctacttttggtgaaata

SEQ ID NO: 84673 - DNA, 27 bp, Artificial sequence
  SiRNA target sequence
ctaattcacctacttttggtgaaatag

SEQ ID NO: 84674 - DNA, 27 bp, Artificial sequence
  SiRNA target sequence
taattcacctacttttggtgaaataga

SEQ ID NO: 84675 - DNA, 27 bp, Artificial sequence
  SiRNA target sequence
aattcacctacttttggtgaaatagat

SEQ ID NO: 84676 - DNA, 27 bp, Artificial sequence
  SiRNA target sequence
attcacctacttttggtgaaatagatt

SEQ ID NO: 84677 - DNA, 27 bp, Artificial sequence
  SiRNA target sequence
ttcacctacttttggtgaaatagattg

SEQ ID NO: 84678 - DNA, 27 bp, Artificial sequence
  SiRNA target sequence
tcacctacttttggtgaaatagattgt

SEQ ID NO: 84679 - DNA, 27 bp, Artificial sequence
  SiRNA target sequence
cacctacttttggtgaaatagattgta

SEQ ID NO: 84680 - DNA, 27 bp, Artificial sequence
  SiRNA target sequence
acctacttttggtgaaatagattgtaa

SEQ ID NO: 84681 - DNA, 27 bp, Artificial sequence
  SiRNA target sequence
cctacttttggtgaaatagattgtaaa

SEQ ID NO: 84682 - DNA, 27 bp, Artificial sequence
  SiRNA target sequence
ctacttttggtgaaatagattgtaaaa

SEQ ID NO: 84683 - DNA, 27 bp, Artificial sequence
  SiRNA target sequence
tacttttggtgaaatagattgtaaaac

SEQ ID NO: 84684 - DNA, 27 bp, Artificial sequence
  SiRNA target sequence
acttttggtgaaatagattgtaaaaca

SEQ ID NO: 84685 - DNA, 27 bp, Artificial sequence
  SiRNA target sequence
cttttggtgaaatagattgtaaaacag

SEQ ID NO: 84686 - DNA, 27 bp, Artificial sequence
  SiRNA target sequence
ttttggtgaaatagattgtaaaacaga

SEQ ID NO: 84687 - DNA, 27 bp, Artificial sequence
  SiRNA target sequence
tttggtgaaatagattgtaaaacagat

SEQ ID NO: 84688 - DNA, 27 bp, Artificial sequence
  SiRNA target sequence
ttggtgaaatagattgtaaaacagatt

SEQ ID NO: 84689 - DNA, 27 bp, Artificial sequence
  SiRNA target sequence
tggtgaaatagattgtaaaacagattt

SEQ ID NO: 84690 - DNA, 27 bp, Artificial sequence
  SiRNA target sequence
ggtgaaatagattgtaaaacagatttt

SEQ ID NO: 84691 - DNA, 27 bp, Artificial sequence
  SiRNA target sequence
gtgaaatagattgtaaaacagattttc

SEQ ID NO: 84692 - DNA, 27 bp, Artificial sequence
  SiRNA target sequence
tgaaatagattgtaaaacagattttcc

SEQ ID NO: 84693 - DNA, 27 bp, Artificial sequence
  SiRNA target sequence
gaaatagattgtaaaacagattttcca

SEQ ID NO: 84694 - DNA, 27 bp, Artificial sequence
  SiRNA target sequence
aaatagattgtaaaacagattttccaa

SEQ ID NO: 84695 - DNA, 27 bp, Artificial sequence
  SiRNA target sequence
aatagattgtaaaacagattttccaag

SEQ ID NO: 84696 - DNA, 27 bp, Artificial sequence
  SiRNA target sequence
atagattgtaaaacagattttccaagt

SEQ ID NO: 84697 - DNA, 27 bp, Artificial sequence
  SiRNA target sequence
tagattgtaaaacagattttccaagtg

SEQ ID NO: 84698 - DNA, 27 bp, Artificial sequence
  SiRNA target sequence
agattgtaaaacagattttccaagtga

SEQ ID NO: 84699 - DNA, 27 bp, Artificial sequence
  SiRNA target sequence
gattgtaaaacagattttccaagtgag

SEQ ID NO: 84700 - DNA, 27 bp, Artificial sequence
  SiRNA target sequence
attgtaaaacagattttccaagtgagt

SEQ ID NO: 84701 - DNA, 27 bp, Artificial sequence
  SiRNA target sequence
ttgtaaaacagattttccaagtgagtt

SEQ ID NO: 84702 - DNA, 27 bp, Artificial sequence
  SiRNA target sequence
tgtaaaacagattttccaagtgagttg

SEQ ID NO: 84703 - DNA, 27 bp, Artificial sequence
  SiRNA target sequence
gtaaaacagattttccaagtgagttgt

SEQ ID NO: 84704 - DNA, 27 bp, Artificial sequence
  SiRNA target sequence
taaaacagattttccaagtgagttgtc

SEQ ID NO: 84705 - DNA, 27 bp, Artificial sequence
  SiRNA target sequence
aaaacagattttccaagtgagttgtct

SEQ ID NO: 84706 - DNA, 27 bp, Artificial sequence
  SiRNA target sequence
aaacagattttccaagtgagttgtctg

SEQ ID NO: 84707 - DNA, 27 bp, Artificial sequence
  SiRNA target sequence
aacagattttccaagtgagttgtctgc

SEQ ID NO: 84708 - DNA, 27 bp, Artificial sequence
  SiRNA target sequence
acagattttccaagtgagttgtctgca

SEQ ID NO: 84709 - DNA, 27 bp, Artificial sequence
  SiRNA target sequence
cagattttccaagtgagttgtctgcat

SEQ ID NO: 84710 - DNA, 27 bp, Artificial sequence
  SiRNA target sequence
agattttccaagtgagttgtctgcatg

SEQ ID NO: 84711 - DNA, 27 bp, Artificial sequence
  SiRNA target sequence
gattttccaagtgagttgtctgcatgt

SEQ ID NO: 84712 - DNA, 27 bp, Artificial sequence
  SiRNA target sequence
attttccaagtgagttgtctgcatgtg

SEQ ID NO: 84713 - DNA, 27 bp, Artificial sequence
  SiRNA target sequence
ttttccaagtgagttgtctgcatgtgt

SEQ ID NO: 84714 - DNA, 27 bp, Artificial sequence
  SiRNA target sequence
tttccaagtgagttgtctgcatgtgta

SEQ ID NO: 84715 - DNA, 27 bp, Artificial sequence
  SiRNA target sequence
ttccaagtgagttgtctgcatgtgtat

SEQ ID NO: 84716 - DNA, 27 bp, Artificial sequence
  SiRNA target sequence
tccaagtgagttgtctgcatgtgtatg

SEQ ID NO: 84717 - DNA, 27 bp, Artificial sequence
  SiRNA target sequence
ccaagtgagttgtctgcatgtgtatgc

SEQ ID NO: 84718 - DNA, 27 bp, Artificial sequence
  SiRNA target sequence
caagtgagttgtctgcatgtgtatgcg

SEQ ID NO: 84719 - DNA, 27 bp, Artificial sequence
  SiRNA target sequence
aagtgagttgtctgcatgtgtatgcgg

SEQ ID NO: 84720 - DNA, 27 bp, Artificial sequence
  SiRNA target sequence
agtgagttgtctgcatgtgtatgcggg

SEQ ID NO: 84721 - DNA, 27 bp, Artificial sequence
  SiRNA target sequence
gtgagttgtctgcatgtgtatgcggga

SEQ ID NO: 84722 - DNA, 27 bp, Artificial sequence
  SiRNA target sequence
tgagttgtctgcatgtgtatgcgggaa

SEQ ID NO: 84723 - DNA, 27 bp, Artificial sequence
  SiRNA target sequence
gagttgtctgcatgtgtatgcgggaaa

SEQ ID NO: 84724 - DNA, 27 bp, Artificial sequence
  SiRNA target sequence
agttgtctgcatgtgtatgcgggaaaa

SEQ ID NO: 84725 - DNA, 27 bp, Artificial sequence
  SiRNA target sequence
gttgtctgcatgtgtatgcgggaaaaa

SEQ ID NO: 84726 - DNA, 27 bp, Artificial sequence
  SiRNA target sequence
ttgtctgcatgtgtatgcgggaaaaaa

SEQ ID NO: 84727 - DNA, 27 bp, Artificial sequence
  SiRNA target sequence
tgtctgcatgtgtatgcgggaaaaaat

SEQ ID NO: 84728 - DNA, 27 bp, Artificial sequence
  SiRNA target sequence
gtctgcatgtgtatgcgggaaaaaatg

SEQ ID NO: 84729 - DNA, 27 bp, Artificial sequence
  SiRNA target sequence
tctgcatgtgtatgcgggaaaaaatgc

SEQ ID NO: 84730 - DNA, 27 bp, Artificial sequence
  SiRNA target sequence
ctgcatgtgtatgcgggaaaaaatgct

SEQ ID NO: 84731 - DNA, 27 bp, Artificial sequence
  SiRNA target sequence
tgcatgtgtatgcgggaaaaaatgctg

SEQ ID NO: 84732 - DNA, 27 bp, Artificial sequence
  SiRNA target sequence
gcatgtgtatgcgggaaaaaatgctgt

SEQ ID NO: 84733 - DNA, 27 bp, Artificial sequence
  SiRNA target sequence
catgtgtatgcgggaaaaaatgctgtt

SEQ ID NO: 84734 - DNA, 27 bp, Artificial sequence
  SiRNA target sequence
atgtgtatgcgggaaaaaatgctgttt

SEQ ID NO: 84735 - DNA, 27 bp, Artificial sequence
  SiRNA target sequence
tgtgtatgcgggaaaaaatgctgtttt

SEQ ID NO: 84736 - DNA, 27 bp, Artificial sequence
  SiRNA target sequence
gtgtatgcgggaaaaaatgctgttttg

SEQ ID NO: 84737 - DNA, 27 bp, Artificial sequence
  SiRNA target sequence
tgtatgcgggaaaaaatgctgttttgc

SEQ ID NO: 84738 - DNA, 27 bp, Artificial sequence
  SiRNA target sequence
gtatgcgggaaaaaatgctgttttgct

SEQ ID NO: 84739 - DNA, 27 bp, Artificial sequence
  SiRNA target sequence
tatgcgggaaaaaatgctgttttgcta

SEQ ID NO: 84740 - DNA, 27 bp, Artificial sequence
  SiRNA target sequence
atgcgggaaaaaatgctgttttgctaa

SEQ ID NO: 84741 - DNA, 27 bp, Artificial sequence
  SiRNA target sequence
tgcgggaaaaaatgctgttttgctaaa

SEQ ID NO: 84742 - DNA, 27 bp, Artificial sequence
  SiRNA target sequence
gcgggaaaaaatgctgttttgctaaat

SEQ ID NO: 84743 - DNA, 27 bp, Artificial sequence
  SiRNA target sequence
cgggaaaaaatgctgttttgctaaata

SEQ ID NO: 84744 - DNA, 27 bp, Artificial sequence
  SiRNA target sequence
gggaaaaaatgctgttttgctaaataa

SEQ ID NO: 84745 - DNA, 27 bp, Artificial sequence
  SiRNA target sequence
ggaaaaaatgctgttttgctaaataaa

SEQ ID NO: 84746 - DNA, 27 bp, Artificial sequence
  SiRNA target sequence
gaaaaaatgctgttttgctaaataaac

SEQ ID NO: 84747 - DNA, 27 bp, Artificial sequence
  SiRNA target sequence
aaaaaatgctgttttgctaaataaaca

SEQ ID NO: 84748 - DNA, 27 bp, Artificial sequence
  SiRNA target sequence
aaaaatgctgttttgctaaataaacaa

SEQ ID NO: 84749 - DNA, 27 bp, Artificial sequence
  SiRNA target sequence
aaaatgctgttttgctaaataaacaat

SEQ ID NO: 84750 - DNA, 27 bp, Artificial sequence
  SiRNA target sequence
aaatgctgttttgctaaataaacaatc

SEQ ID NO: 84751 - DNA, 27 bp, Artificial sequence
  SiRNA target sequence
aatgctgttttgctaaataaacaatcc

SEQ ID NO: 84752 - DNA, 27 bp, Artificial sequence
  SiRNA target sequence
atgctgttttgctaaataaacaatcca

SEQ ID NO: 84753 - DNA, 27 bp, Artificial sequence
  SiRNA target sequence
tgctgttttgctaaataaacaatccat

SEQ ID NO: 84754 - DNA, 27 bp, Artificial sequence
  SiRNA target sequence
gctgttttgctaaataaacaatccata

SEQ ID NO: 84755 - DNA, 27 bp, Artificial sequence
  SiRNA target sequence
ctgttttgctaaataaacaatccatac

SEQ ID NO: 84756 - DNA, 27 bp, Artificial sequence
  SiRNA target sequence
tgttttgctaaataaacaatccataca

SEQ ID NO: 84757 - DNA, 27 bp, Artificial sequence
  SiRNA target sequence
gttttgctaaataaacaatccatacac

SEQ ID NO: 84758 - DNA, 27 bp, Artificial sequence
  SiRNA target sequence
ttttgctaaataaacaatccatacacc

SEQ ID NO: 84759 - DNA, 27 bp, Artificial sequence
  SiRNA target sequence
tttgctaaataaacaatccatacaccc

SEQ ID NO: 84760 - DNA, 27 bp, Artificial sequence
  SiRNA target sequence
ttgctaaataaacaatccatacaccca

SEQ ID NO: 84761 - DNA, 27 bp, Artificial sequence
  SiRNA target sequence
tgctaaataaacaatccatacacccaa

SEQ ID NO: 84762 - DNA, 27 bp, Artificial sequence
  SiRNA target sequence
gctaaataaacaatccatacacccaat

SEQ ID NO: 84763 - DNA, 27 bp, Artificial sequence
  SiRNA target sequence
ctaaataaacaatccatacacccaata

SEQ ID NO: 84764 - DNA, 27 bp, Artificial sequence
  SiRNA target sequence
taaataaacaatccatacacccaataa

SEQ ID NO: 84765 - DNA, 27 bp, Artificial sequence
  SiRNA target sequence
aaataaacaatccatacacccaataag

SEQ ID NO: 84766 - DNA, 27 bp, Artificial sequence
  SiRNA target sequence
aataaacaatccatacacccaataaga

SEQ ID NO: 84767 - DNA, 27 bp, Artificial sequence
  SiRNA target sequence
ataaacaatccatacacccaataagat

SEQ ID NO: 84768 - DNA, 27 bp, Artificial sequence
  SiRNA target sequence
taaacaatccatacacccaataagata

SEQ ID NO: 84769 - DNA, 27 bp, Artificial sequence
  SiRNA target sequence
aaacaatccatacacccaataagataa

SEQ ID NO: 84770 - DNA, 27 bp, Artificial sequence
  SiRNA target sequence
aacaatccatacacccaataagataat

SEQ ID NO: 84771 - DNA, 27 bp, Artificial sequence
  SiRNA target sequence
acaatccatacacccaataagataata

SEQ ID NO: 84772 - DNA, 27 bp, Artificial sequence
  SiRNA target sequence
caatccatacacccaataagataataa

SEQ ID NO: 84773 - DNA, 27 bp, Artificial sequence
  SiRNA target sequence
aatccatacacccaataagataataag

SEQ ID NO: 84774 - DNA, 27 bp, Artificial sequence
  SiRNA target sequence
atccatacacccaataagataataagt

SEQ ID NO: 84775 - DNA, 27 bp, Artificial sequence
  SiRNA target sequence
tccatacacccaataagataataagtc

SEQ ID NO: 84776 - DNA, 27 bp, Artificial sequence
  SiRNA target sequence
ccatacacccaataagataataagtcc

SEQ ID NO: 84777 - DNA, 27 bp, Artificial sequence
  SiRNA target sequence
catacacccaataagataataagtcct

SEQ ID NO: 84778 - DNA, 27 bp, Artificial sequence
  SiRNA target sequence
atacacccaataagataataagtcctc

SEQ ID NO: 84779 - DNA, 27 bp, Artificial sequence
  SiRNA target sequence
tacacccaataagataataagtcctct

SEQ ID NO: 84780 - DNA, 27 bp, Artificial sequence
  SiRNA target sequence
acacccaataagataataagtcctctt

SEQ ID NO: 84781 - DNA, 27 bp, Artificial sequence
  SiRNA target sequence
cacccaataagataataagtcctctta

SEQ ID NO: 84782 - DNA, 27 bp, Artificial sequence
  SiRNA target sequence
acccaataagataataagtcctcttaa

SEQ ID NO: 84783 - DNA, 27 bp, Artificial sequence
  SiRNA target sequence
cccaataagataataagtcctcttaat

SEQ ID NO: 84784 - DNA, 27 bp, Artificial sequence
  SiRNA target sequence
ccaataagataataagtcctcttaata

SEQ ID NO: 84785 - DNA, 27 bp, Artificial sequence
  SiRNA target sequence
caataagataataagtcctcttaatac

SEQ ID NO: 84786 - DNA, 27 bp, Artificial sequence
  SiRNA target sequence
aataagataataagtcctcttaatact

SEQ ID NO: 84787 - DNA, 27 bp, Artificial sequence
  SiRNA target sequence
ataagataataagtcctcttaatactt

SEQ ID NO: 84788 - DNA, 27 bp, Artificial sequence
  SiRNA target sequence
taagataataagtcctcttaatacttt

SEQ ID NO: 84789 - DNA, 27 bp, Artificial sequence
  SiRNA target sequence
aagataataagtcctcttaatactttc

SEQ ID NO: 84790 - DNA, 27 bp, Artificial sequence
  SiRNA target sequence
agataataagtcctcttaatactttct

SEQ ID NO: 84791 - DNA, 27 bp, Artificial sequence
  SiRNA target sequence
gataataagtcctcttaatactttctg

SEQ ID NO: 84792 - DNA, 27 bp, Artificial sequence
  SiRNA target sequence
ataataagtcctcttaatactttctgc

SEQ ID NO: 84793 - DNA, 27 bp, Artificial sequence
  SiRNA target sequence
taataagtcctcttaatactttctgct

SEQ ID NO: 84794 - DNA, 27 bp, Artificial sequence
  SiRNA target sequence
aataagtcctcttaatactttctgctc

SEQ ID NO: 84795 - DNA, 27 bp, Artificial sequence
  SiRNA target sequence
ataagtcctcttaatactttctgctct

SEQ ID NO: 84796 - DNA, 27 bp, Artificial sequence
  SiRNA target sequence
taagtcctcttaatactttctgctctt

SEQ ID NO: 84797 - DNA, 27 bp, Artificial sequence
  SiRNA target sequence
aagtcctcttaatactttctgctcttt

SEQ ID NO: 84798 - DNA, 27 bp, Artificial sequence
  SiRNA target sequence
agtcctcttaatactttctgctctttg

SEQ ID NO: 84799 - DNA, 27 bp, Artificial sequence
  SiRNA target sequence
gtcctcttaatactttctgctctttgt

SEQ ID NO: 84800 - DNA, 27 bp, Artificial sequence
  SiRNA target sequence
tcctcttaatactttctgctctttgtt

SEQ ID NO: 84801 - DNA, 27 bp, Artificial sequence
  SiRNA target sequence
cctcttaatactttctgctctttgttc

SEQ ID NO: 84802 - DNA, 27 bp, Artificial sequence
  SiRNA target sequence
ctcttaatactttctgctctttgttca

SEQ ID NO: 84803 - DNA, 27 bp, Artificial sequence
  SiRNA target sequence
tcttaatactttctgctctttgttcat

SEQ ID NO: 84804 - DNA, 19 bp, Artificial sequence
  SiRNA target sequence
ttatatccaactatcaaaa

SEQ ID NO: 84805 - DNA, 19 bp, Artificial sequence
  SiRNA target sequence
tatatccaactatcaaaaa

SEQ ID NO: 84806 - DNA, 19 bp, Artificial sequence
  SiRNA target sequence
atatccaactatcaaaaaa

SEQ ID NO: 84807 - DNA, 19 bp, Artificial sequence
  SiRNA target sequence
tatccaactatcaaaaaat

SEQ ID NO: 84808 - DNA, 19 bp, Artificial sequence
  SiRNA target sequence
atccaactatcaaaaaata

SEQ ID NO: 84809 - DNA, 19 bp, Artificial sequence
  SiRNA target sequence
tccaactatcaaaaaatag

SEQ ID NO: 84810 - DNA, 19 bp, Artificial sequence
  SiRNA target sequence
ccaactatcaaaaaatagc

SEQ ID NO: 84811 - DNA, 19 bp, Artificial sequence
  SiRNA target sequence
caactatcaaaaaatagcc

SEQ ID NO: 84812 - DNA, 19 bp, Artificial sequence
  SiRNA target sequence
aactatcaaaaaatagcct

SEQ ID NO: 84813 - DNA, 19 bp, Artificial sequence
  SiRNA target sequence
actatcaaaaaatagcctc

SEQ ID NO: 84814 - DNA, 19 bp, Artificial sequence
  SiRNA target sequence
ctatcaaaaaatagcctct

SEQ ID NO: 84815 - DNA, 19 bp, Artificial sequence
  SiRNA target sequence
tatcaaaaaatagcctctt

SEQ ID NO: 84816 - DNA, 19 bp, Artificial sequence
  SiRNA target sequence
atcaaaaaatagcctcttt

SEQ ID NO: 84817 - DNA, 19 bp, Artificial sequence
  SiRNA target sequence
tcaaaaaatagcctctttt

SEQ ID NO: 84818 - DNA, 19 bp, Artificial sequence
  SiRNA target sequence
caaaaaatagcctcttttc

SEQ ID NO: 84819 - DNA, 19 bp, Artificial sequence
  SiRNA target sequence
aaaaaatagcctcttttct

SEQ ID NO: 84820 - DNA, 19 bp, Artificial sequence
  SiRNA target sequence
aaaaatagcctcttttctt

SEQ ID NO: 84821 - DNA, 19 bp, Artificial sequence
  SiRNA target sequence
aaaatagcctcttttcttt

SEQ ID NO: 84822 - DNA, 19 bp, Artificial sequence
  SiRNA target sequence
aaatagcctcttttctttc

SEQ ID NO: 84823 - DNA, 19 bp, Artificial sequence
  SiRNA target sequence
aatagcctcttttctttca

SEQ ID NO: 84824 - DNA, 19 bp, Artificial sequence
  SiRNA target sequence
atagcctcttttctttcac

SEQ ID NO: 84825 - DNA, 19 bp, Artificial sequence
  SiRNA target sequence
tagcctcttttctttcaca

SEQ ID NO: 84826 - DNA, 19 bp, Artificial sequence
  SiRNA target sequence
agcctcttttctttcacaa

SEQ ID NO: 84827 - DNA, 19 bp, Artificial sequence
  SiRNA target sequence
gcctcttttctttcacaat

SEQ ID NO: 84828 - DNA, 19 bp, Artificial sequence
  SiRNA target sequence
cctcttttctttcacaatt

SEQ ID NO: 84829 - DNA, 19 bp, Artificial sequence
  SiRNA target sequence
ctcttttctttcacaattt

SEQ ID NO: 84830 - DNA, 19 bp, Artificial sequence
  SiRNA target sequence
tcttttctttcacaatttc

SEQ ID NO: 84831 - DNA, 19 bp, Artificial sequence
  SiRNA target sequence
cttttctttcacaatttca

SEQ ID NO: 84832 - DNA, 19 bp, Artificial sequence
  SiRNA target sequence
ttttctttcacaatttcag

SEQ ID NO: 84833 - DNA, 19 bp, Artificial sequence
  SiRNA target sequence
tttctttcacaatttcaga

SEQ ID NO: 84834 - DNA, 19 bp, Artificial sequence
  SiRNA target sequence
ttctttcacaatttcagaa

SEQ ID NO: 84835 - DNA, 19 bp, Artificial sequence
  SiRNA target sequence
tctttcacaatttcagaaa

SEQ ID NO: 84836 - DNA, 19 bp, Artificial sequence
  SiRNA target sequence
ctttcacaatttcagaaaa

SEQ ID NO: 84837 - DNA, 19 bp, Artificial sequence
  SiRNA target sequence
tttcacaatttcagaaaaa

SEQ ID NO: 84838 - DNA, 19 bp, Artificial sequence
  SiRNA target sequence
ttcacaatttcagaaaaat

SEQ ID NO: 84839 - DNA, 19 bp, Artificial sequence
  SiRNA target sequence
tcacaatttcagaaaaatt

SEQ ID NO: 84840 - DNA, 19 bp, Artificial sequence
  SiRNA target sequence
cacaatttcagaaaaattt

SEQ ID NO: 84841 - DNA, 19 bp, Artificial sequence
  SiRNA target sequence
acaatttcagaaaaatttt

SEQ ID NO: 84842 - DNA, 19 bp, Artificial sequence
  SiRNA target sequence
caatttcagaaaaattttc

SEQ ID NO: 84843 - DNA, 19 bp, Artificial sequence
  SiRNA target sequence
aatttcagaaaaattttca

SEQ ID NO: 84844 - DNA, 19 bp, Artificial sequence
  SiRNA target sequence
atttcagaaaaattttcat

SEQ ID NO: 84845 - DNA, 19 bp, Artificial sequence
  SiRNA target sequence
tttcagaaaaattttcatt

SEQ ID NO: 84846 - DNA, 19 bp, Artificial sequence
  SiRNA target sequence
ttcagaaaaattttcatta

SEQ ID NO: 84847 - DNA, 19 bp, Artificial sequence
  SiRNA target sequence
tcagaaaaattttcattaa

SEQ ID NO: 84848 - DNA, 19 bp, Artificial sequence
  SiRNA target sequence
cagaaaaattttcattaaa

SEQ ID NO: 84849 - DNA, 19 bp, Artificial sequence
  SiRNA target sequence
agaaaaattttcattaaaa

SEQ ID NO: 84850 - DNA, 19 bp, Artificial sequence
  SiRNA target sequence
gaaaaattttcattaaaaa

SEQ ID NO: 84851 - DNA, 19 bp, Artificial sequence
  SiRNA target sequence
aaaaattttcattaaaaat

SEQ ID NO: 84852 - DNA, 19 bp, Artificial sequence
  SiRNA target sequence
aaaattttcattaaaaatg

SEQ ID NO: 84853 - DNA, 19 bp, Artificial sequence
  SiRNA target sequence
aaattttcattaaaaatgc

SEQ ID NO: 84854 - DNA, 19 bp, Artificial sequence
  SiRNA target sequence
aattttcattaaaaatgct

SEQ ID NO: 84855 - DNA, 19 bp, Artificial sequence
  SiRNA target sequence
attttcattaaaaatgcta

SEQ ID NO: 84856 - DNA, 19 bp, Artificial sequence
  SiRNA target sequence
ttttcattaaaaatgctat

SEQ ID NO: 84857 - DNA, 19 bp, Artificial sequence
  SiRNA target sequence
tttcattaaaaatgctata

SEQ ID NO: 84858 - DNA, 19 bp, Artificial sequence
  SiRNA target sequence
ttcattaaaaatgctataa

SEQ ID NO: 84859 - DNA, 19 bp, Artificial sequence
  SiRNA target sequence
tcattaaaaatgctataaa

SEQ ID NO: 84860 - DNA, 19 bp, Artificial sequence
  SiRNA target sequence
cattaaaaatgctataaat

SEQ ID NO: 84861 - DNA, 19 bp, Artificial sequence
  SiRNA target sequence
attaaaaatgctataaata

SEQ ID NO: 84862 - DNA, 19 bp, Artificial sequence
  SiRNA target sequence
ttaaaaatgctataaatag

SEQ ID NO: 84863 - DNA, 19 bp, Artificial sequence
  SiRNA target sequence
taaaaatgctataaatagt

SEQ ID NO: 84864 - DNA, 19 bp, Artificial sequence
  SiRNA target sequence
aaaaatgctataaatagtt

SEQ ID NO: 84865 - DNA, 19 bp, Artificial sequence
  SiRNA target sequence
aaaatgctataaatagttt

SEQ ID NO: 84866 - DNA, 19 bp, Artificial sequence
  SiRNA target sequence
aaatgctataaatagtttt

SEQ ID NO: 84867 - DNA, 19 bp, Artificial sequence
  SiRNA target sequence
aatgctataaatagttttt

SEQ ID NO: 84868 - DNA, 19 bp, Artificial sequence
  SiRNA target sequence
atgctataaatagtttttt

SEQ ID NO: 84869 - DNA, 19 bp, Artificial sequence
  SiRNA target sequence
tgctataaatagttttttg

SEQ ID NO: 84870 - DNA, 19 bp, Artificial sequence
  SiRNA target sequence
gctataaatagttttttgc

SEQ ID NO: 84871 - DNA, 19 bp, Artificial sequence
  SiRNA target sequence
ctataaatagttttttgca

SEQ ID NO: 84872 - DNA, 19 bp, Artificial sequence
  SiRNA target sequence
tataaatagttttttgcat

SEQ ID NO: 84873 - DNA, 19 bp, Artificial sequence
  SiRNA target sequence
ataaatagttttttgcata

SEQ ID NO: 84874 - DNA, 19 bp, Artificial sequence
  SiRNA target sequence
taaatagttttttgcatat

SEQ ID NO: 84875 - DNA, 19 bp, Artificial sequence
  SiRNA target sequence
aaatagttttttgcatatc

SEQ ID NO: 84876 - DNA, 19 bp, Artificial sequence
  SiRNA target sequence
aatagttttttgcatatca

SEQ ID NO: 84877 - DNA, 19 bp, Artificial sequence
  SiRNA target sequence
atagttttttgcatatcag

SEQ ID NO: 84878 - DNA, 19 bp, Artificial sequence
  SiRNA target sequence
tagttttttgcatatcagg

SEQ ID NO: 84879 - DNA, 19 bp, Artificial sequence
  SiRNA target sequence
agttttttgcatatcaggt

SEQ ID NO: 84880 - DNA, 19 bp, Artificial sequence
  SiRNA target sequence
gttttttgcatatcaggtc

SEQ ID NO: 84881 - DNA, 19 bp, Artificial sequence
  SiRNA target sequence
ttttttgcatatcaggtcg

SEQ ID NO: 84882 - DNA, 19 bp, Artificial sequence
  SiRNA target sequence
tttttgcatatcaggtcgg

SEQ ID NO: 84883 - DNA, 19 bp, Artificial sequence
  SiRNA target sequence
ttttgcatatcaggtcggc

SEQ ID NO: 84884 - DNA, 19 bp, Artificial sequence
  SiRNA target sequence
tttgcatatcaggtcggcc

SEQ ID NO: 84885 - DNA, 19 bp, Artificial sequence
  SiRNA target sequence
ttgcatatcaggtcggcca

SEQ ID NO: 84886 - DNA, 19 bp, Artificial sequence
  SiRNA target sequence
tgcatatcaggtcggccac

SEQ ID NO: 84887 - DNA, 19 bp, Artificial sequence
  SiRNA target sequence
gcatatcaggtcggccaca

SEQ ID NO: 84888 - DNA, 19 bp, Artificial sequence
  SiRNA target sequence
catatcaggtcggccacaa

SEQ ID NO: 84889 - DNA, 19 bp, Artificial sequence
  SiRNA target sequence
atatcaggtcggccacaaa

SEQ ID NO: 84890 - DNA, 19 bp, Artificial sequence
  SiRNA target sequence
tatcaggtcggccacaaac

SEQ ID NO: 84891 - DNA, 19 bp, Artificial sequence
  SiRNA target sequence
atcaggtcggccacaaaca

SEQ ID NO: 84892 - DNA, 19 bp, Artificial sequence
  SiRNA target sequence
tcaggtcggccacaaacat

SEQ ID NO: 84893 - DNA, 19 bp, Artificial sequence
  SiRNA target sequence
caggtcggccacaaacata

SEQ ID NO: 84894 - DNA, 19 bp, Artificial sequence
  SiRNA target sequence
aggtcggccacaaacataa

SEQ ID NO: 84895 - DNA, 19 bp, Artificial sequence
  SiRNA target sequence
ggtcggccacaaacataaa

SEQ ID NO: 84896 - DNA, 19 bp, Artificial sequence
  SiRNA target sequence
gtcggccacaaacataaac

SEQ ID NO: 84897 - DNA, 19 bp, Artificial sequence
  SiRNA target sequence
tcggccacaaacataaacc

SEQ ID NO: 84898 - DNA, 19 bp, Artificial sequence
  SiRNA target sequence
cggccacaaacataaacca

SEQ ID NO: 84899 - DNA, 19 bp, Artificial sequence
  SiRNA target sequence
ggccacaaacataaaccaa

SEQ ID NO: 84900 - DNA, 19 bp, Artificial sequence
  SiRNA target sequence
gccacaaacataaaccaaa

SEQ ID NO: 84901 - DNA, 19 bp, Artificial sequence
  SiRNA target sequence
ccacaaacataaaccaaac

SEQ ID NO: 84902 - DNA, 19 bp, Artificial sequence
  SiRNA target sequence
cacaaacataaaccaaaca

SEQ ID NO: 84903 - DNA, 19 bp, Artificial sequence
  SiRNA target sequence
acaaacataaaccaaacat

SEQ ID NO: 84904 - DNA, 19 bp, Artificial sequence
  SiRNA target sequence
caaacataaaccaaacatc

SEQ ID NO: 84905 - DNA, 19 bp, Artificial sequence
  SiRNA target sequence
aaacataaaccaaacatcc

SEQ ID NO: 84906 - DNA, 19 bp, Artificial sequence
  SiRNA target sequence
aacataaaccaaacatccg

SEQ ID NO: 84907 - DNA, 19 bp, Artificial sequence
  SiRNA target sequence
acataaaccaaacatccgt

SEQ ID NO: 84908 - DNA, 19 bp, Artificial sequence
  SiRNA target sequence
cataaaccaaacatccgtc

SEQ ID NO: 84909 - DNA, 19 bp, Artificial sequence
  SiRNA target sequence
ataaaccaaacatccgtct

SEQ ID NO: 84910 - DNA, 19 bp, Artificial sequence
  SiRNA target sequence
taaaccaaacatccgtctt

SEQ ID NO: 84911 - DNA, 19 bp, Artificial sequence
  SiRNA target sequence
aaaccaaacatccgtcttt

SEQ ID NO: 84912 - DNA, 19 bp, Artificial sequence
  SiRNA target sequence
aaccaaacatccgtcttta

SEQ ID NO: 84913 - DNA, 19 bp, Artificial sequence
  SiRNA target sequence
accaaacatccgtctttaa

SEQ ID NO: 84914 - DNA, 19 bp, Artificial sequence
  SiRNA target sequence
ccaaacatccgtctttaat

SEQ ID NO: 84915 - DNA, 19 bp, Artificial sequence
  SiRNA target sequence
caaacatccgtctttaatg

SEQ ID NO: 84916 - DNA, 19 bp, Artificial sequence
  SiRNA target sequence
aaacatccgtctttaatgt

SEQ ID NO: 84917 - DNA, 19 bp, Artificial sequence
  SiRNA target sequence
aacatccgtctttaatgta

SEQ ID NO: 84918 - DNA, 19 bp, Artificial sequence
  SiRNA target sequence
acatccgtctttaatgtat

SEQ ID NO: 84919 - DNA, 19 bp, Artificial sequence
  SiRNA target sequence
catccgtctttaatgtatg

SEQ ID NO: 84920 - DNA, 19 bp, Artificial sequence
  SiRNA target sequence
atccgtctttaatgtatgt

SEQ ID NO: 84921 - DNA, 19 bp, Artificial sequence
  SiRNA target sequence
tccgtctttaatgtatgtt

SEQ ID NO: 84922 - DNA, 19 bp, Artificial sequence
  SiRNA target sequence
ccgtctttaatgtatgttt

SEQ ID NO: 84923 - DNA, 19 bp, Artificial sequence
  SiRNA target sequence
cgtctttaatgtatgtttt

SEQ ID NO: 84924 - DNA, 19 bp, Artificial sequence
  SiRNA target sequence
gtctttaatgtatgttttt

SEQ ID NO: 84925 - DNA, 19 bp, Artificial sequence
  SiRNA target sequence
tctttaatgtatgttttta

SEQ ID NO: 84926 - DNA, 19 bp, Artificial sequence
  SiRNA target sequence
ctttaatgtatgtttttat

SEQ ID NO: 84927 - DNA, 19 bp, Artificial sequence
  SiRNA target sequence
tttaatgtatgtttttatc

SEQ ID NO: 84928 - DNA, 19 bp, Artificial sequence
  SiRNA target sequence
ttaatgtatgtttttatct

SEQ ID NO: 84929 - DNA, 19 bp, Artificial sequence
  SiRNA target sequence
taatgtatgtttttatctc

SEQ ID NO: 84930 - DNA, 19 bp, Artificial sequence
  SiRNA target sequence
aatgtatgtttttatctca

SEQ ID NO: 84931 - DNA, 19 bp, Artificial sequence
  SiRNA target sequence
atgtatgtttttatctcat

SEQ ID NO: 84932 - DNA, 19 bp, Artificial sequence
  SiRNA target sequence
tgtatgtttttatctcatt

SEQ ID NO: 84933 - DNA, 19 bp, Artificial sequence
  SiRNA target sequence
gtatgtttttatctcattt

SEQ ID NO: 84934 - DNA, 19 bp, Artificial sequence
  SiRNA target sequence
tatgtttttatctcattta

SEQ ID NO: 84935 - DNA, 19 bp, Artificial sequence
  SiRNA target sequence
atgtttttatctcatttaa

SEQ ID NO: 84936 - DNA, 19 bp, Artificial sequence
  SiRNA target sequence
tgtttttatctcatttaaa

SEQ ID NO: 84937 - DNA, 19 bp, Artificial sequence
  SiRNA target sequence
gtttttatctcatttaaat

SEQ ID NO: 84938 - DNA, 19 bp, Artificial sequence
  SiRNA target sequence
tttttatctcatttaaatt

SEQ ID NO: 84939 - DNA, 19 bp, Artificial sequence
  SiRNA target sequence
ttttatctcatttaaattt

SEQ ID NO: 84940 - DNA, 19 bp, Artificial sequence
  SiRNA target sequence
tttatctcatttaaatttt

SEQ ID NO: 84941 - DNA, 19 bp, Artificial sequence
  SiRNA target sequence
ttatctcatttaaattttg

SEQ ID NO: 84942 - DNA, 19 bp, Artificial sequence
  SiRNA target sequence
tatctcatttaaattttgt

SEQ ID NO: 84943 - DNA, 19 bp, Artificial sequence
  SiRNA target sequence
atctcatttaaattttgta

SEQ ID NO: 84944 - DNA, 19 bp, Artificial sequence
  SiRNA target sequence
tctcatttaaattttgtaa

SEQ ID NO: 84945 - DNA, 19 bp, Artificial sequence
  SiRNA target sequence
ctcatttaaattttgtaat

SEQ ID NO: 84946 - DNA, 19 bp, Artificial sequence
  SiRNA target sequence
tcatttaaattttgtaata

SEQ ID NO: 84947 - DNA, 19 bp, Artificial sequence
  SiRNA target sequence
catttaaattttgtaataa

SEQ ID NO: 84948 - DNA, 19 bp, Artificial sequence
  SiRNA target sequence
atttaaattttgtaataaa

SEQ ID NO: 84949 - DNA, 19 bp, Artificial sequence
  SiRNA target sequence
tttaaattttgtaataaat

SEQ ID NO: 84950 - DNA, 19 bp, Artificial sequence
  SiRNA target sequence
ttaaattttgtaataaata

SEQ ID NO: 84951 - DNA, 19 bp, Artificial sequence
  SiRNA target sequence
taaattttgtaataaataa

SEQ ID NO: 84952 - DNA, 19 bp, Artificial sequence
  SiRNA target sequence
aaattttgtaataaataat

SEQ ID NO: 84953 - DNA, 19 bp, Artificial sequence
  SiRNA target sequence
aattttgtaataaataatc

SEQ ID NO: 84954 - DNA, 19 bp, Artificial sequence
  SiRNA target sequence
attttgtaataaataatca

SEQ ID NO: 84955 - DNA, 19 bp, Artificial sequence
  SiRNA target sequence
ttttgtaataaataatcag

SEQ ID NO: 84956 - DNA, 19 bp, Artificial sequence
  SiRNA target sequence
tttgtaataaataatcagt

SEQ ID NO: 84957 - DNA, 19 bp, Artificial sequence
  SiRNA target sequence
ttgtaataaataatcagta

SEQ ID NO: 84958 - DNA, 19 bp, Artificial sequence
  SiRNA target sequence
tgtaataaataatcagtaa

SEQ ID NO: 84959 - DNA, 19 bp, Artificial sequence
  SiRNA target sequence
gtaataaataatcagtaac

SEQ ID NO: 84960 - DNA, 19 bp, Artificial sequence
  SiRNA target sequence
taataaataatcagtaaca

SEQ ID NO: 84961 - DNA, 19 bp, Artificial sequence
  SiRNA target sequence
aataaataatcagtaacat

SEQ ID NO: 84962 - DNA, 19 bp, Artificial sequence
  SiRNA target sequence
ataaataatcagtaacata

SEQ ID NO: 84963 - DNA, 19 bp, Artificial sequence
  SiRNA target sequence
taaataatcagtaacataa

SEQ ID NO: 84964 - DNA, 19 bp, Artificial sequence
  SiRNA target sequence
aaataatcagtaacataaa

SEQ ID NO: 84965 - DNA, 19 bp, Artificial sequence
  SiRNA target sequence
aataatcagtaacataaat

SEQ ID NO: 84966 - DNA, 19 bp, Artificial sequence
  SiRNA target sequence
ataatcagtaacataaatt

SEQ ID NO: 84967 - DNA, 19 bp, Artificial sequence
  SiRNA target sequence
taatcagtaacataaattt

SEQ ID NO: 84968 - DNA, 19 bp, Artificial sequence
  SiRNA target sequence
aatcagtaacataaatttt

SEQ ID NO: 84969 - DNA, 19 bp, Artificial sequence
  SiRNA target sequence
atcagtaacataaatttta

SEQ ID NO: 84970 - DNA, 19 bp, Artificial sequence
  SiRNA target sequence
tcagtaacataaattttat

SEQ ID NO: 84971 - DNA, 19 bp, Artificial sequence
  SiRNA target sequence
cagtaacataaattttatt

SEQ ID NO: 84972 - DNA, 19 bp, Artificial sequence
  SiRNA target sequence
agtaacataaattttatta

SEQ ID NO: 84973 - DNA, 19 bp, Artificial sequence
  SiRNA target sequence
gtaacataaattttattac

SEQ ID NO: 84974 - DNA, 19 bp, Artificial sequence
  SiRNA target sequence
taacataaattttattaca

SEQ ID NO: 84975 - DNA, 19 bp, Artificial sequence
  SiRNA target sequence
aacataaattttattacaa

SEQ ID NO: 84976 - DNA, 19 bp, Artificial sequence
  SiRNA target sequence
acataaattttattacaag

SEQ ID NO: 84977 - DNA, 19 bp, Artificial sequence
  SiRNA target sequence
cataaattttattacaaga

SEQ ID NO: 84978 - DNA, 19 bp, Artificial sequence
  SiRNA target sequence
ataaattttattacaagat

SEQ ID NO: 84979 - DNA, 19 bp, Artificial sequence
  SiRNA target sequence
taaattttattacaagata

SEQ ID NO: 84980 - DNA, 19 bp, Artificial sequence
  SiRNA target sequence
aaattttattacaagataa

SEQ ID NO: 84981 - DNA, 19 bp, Artificial sequence
  SiRNA target sequence
aattttattacaagataaa

SEQ ID NO: 84982 - DNA, 19 bp, Artificial sequence
  SiRNA target sequence
attttattacaagataaaa

SEQ ID NO: 84983 - DNA, 19 bp, Artificial sequence
  SiRNA target sequence
ttttattacaagataaaat

SEQ ID NO: 84984 - DNA, 19 bp, Artificial sequence
  SiRNA target sequence
tttattacaagataaaatt

SEQ ID NO: 84985 - DNA, 19 bp, Artificial sequence
  SiRNA target sequence
ttattacaagataaaattt

SEQ ID NO: 84986 - DNA, 19 bp, Artificial sequence
  SiRNA target sequence
tattacaagataaaatttt

SEQ ID NO: 84987 - DNA, 19 bp, Artificial sequence
  SiRNA target sequence
attacaagataaaatttta

SEQ ID NO: 84988 - DNA, 19 bp, Artificial sequence
  SiRNA target sequence
ttacaagataaaattttaa

SEQ ID NO: 84989 - DNA, 19 bp, Artificial sequence
  SiRNA target sequence
tacaagataaaattttaat

SEQ ID NO: 84990 - DNA, 19 bp, Artificial sequence
  SiRNA target sequence
acaagataaaattttaata

SEQ ID NO: 84991 - DNA, 19 bp, Artificial sequence
  SiRNA target sequence
caagataaaattttaataa

SEQ ID NO: 84992 - DNA, 19 bp, Artificial sequence
  SiRNA target sequence
aagataaaattttaataat

SEQ ID NO: 84993 - DNA, 19 bp, Artificial sequence
  SiRNA target sequence
agataaaattttaataatt

SEQ ID NO: 84994 - DNA, 19 bp, Artificial sequence
  SiRNA target sequence
gataaaattttaataattt

SEQ ID NO: 84995 - DNA, 19 bp, Artificial sequence
  SiRNA target sequence
ataaaattttaataatttc

SEQ ID NO: 84996 - DNA, 19 bp, Artificial sequence
  SiRNA target sequence
taaaattttaataatttct

SEQ ID NO: 84997 - DNA, 19 bp, Artificial sequence
  SiRNA target sequence
aaaattttaataatttctg

SEQ ID NO: 84998 - DNA, 19 bp, Artificial sequence
  SiRNA target sequence
aaattttaataatttctgt

SEQ ID NO: 84999 - DNA, 19 bp, Artificial sequence
  SiRNA target sequence
aattttaataatttctgtg

SEQ ID NO: 85000 - DNA, 19 bp, Artificial sequence
  SiRNA target sequence
attttaataatttctgtgt

SEQ ID NO: 85001 - DNA, 19 bp, Artificial sequence
  SiRNA target sequence
ttttaataatttctgtgtt

SEQ ID NO: 85002 - DNA, 19 bp, Artificial sequence
  SiRNA target sequence
tttaataatttctgtgttt

SEQ ID NO: 85003 - DNA, 19 bp, Artificial sequence
  SiRNA target sequence
ttaataatttctgtgtttt

SEQ ID NO: 85004 - DNA, 19 bp, Artificial sequence
  SiRNA target sequence
taataatttctgtgttttt

SEQ ID NO: 85005 - DNA, 19 bp, Artificial sequence
  SiRNA target sequence
aataatttctgtgttttta

SEQ ID NO: 85006 - DNA, 19 bp, Artificial sequence
  SiRNA target sequence
ataatttctgtgtttttat

SEQ ID NO: 85007 - DNA, 19 bp, Artificial sequence
  SiRNA target sequence
taatttctgtgtttttata

SEQ ID NO: 85008 - DNA, 19 bp, Artificial sequence
  SiRNA target sequence
aatttctgtgtttttatat

SEQ ID NO: 85009 - DNA, 19 bp, Artificial sequence
  SiRNA target sequence
atttctgtgtttttatatt

SEQ ID NO: 85010 - DNA, 19 bp, Artificial sequence
  SiRNA target sequence
tttctgtgtttttatattt

SEQ ID NO: 85011 - DNA, 19 bp, Artificial sequence
  SiRNA target sequence
ttctgtgtttttatatttt

SEQ ID NO: 85012 - DNA, 19 bp, Artificial sequence
  SiRNA target sequence
tctgtgtttttatattttg

SEQ ID NO: 85013 - DNA, 19 bp, Artificial sequence
  SiRNA target sequence
ctgtgtttttatattttgc

SEQ ID NO: 85014 - DNA, 19 bp, Artificial sequence
  SiRNA target sequence
tgtgtttttatattttgca

SEQ ID NO: 85015 - DNA, 19 bp, Artificial sequence
  SiRNA target sequence
gtgtttttatattttgcat

SEQ ID NO: 85016 - DNA, 19 bp, Artificial sequence
  SiRNA target sequence
tgtttttatattttgcatc

SEQ ID NO: 85017 - DNA, 19 bp, Artificial sequence
  SiRNA target sequence
gtttttatattttgcatct

SEQ ID NO: 85018 - DNA, 19 bp, Artificial sequence
  SiRNA target sequence
tttttatattttgcatctt

SEQ ID NO: 85019 - DNA, 19 bp, Artificial sequence
  SiRNA target sequence
ttttatattttgcatcttt

SEQ ID NO: 85020 - DNA, 19 bp, Artificial sequence
  SiRNA target sequence
tttatattttgcatcttta

SEQ ID NO: 85021 - DNA, 19 bp, Artificial sequence
  SiRNA target sequence
ttatattttgcatctttaa

SEQ ID NO: 85022 - DNA, 19 bp, Artificial sequence
  SiRNA target sequence
tatattttgcatctttaat

SEQ ID NO: 85023 - DNA, 19 bp, Artificial sequence
  SiRNA target sequence
atattttgcatctttaata

SEQ ID NO: 85024 - DNA, 19 bp, Artificial sequence
  SiRNA target sequence
tattttgcatctttaataa

SEQ ID NO: 85025 - DNA, 19 bp, Artificial sequence
  SiRNA target sequence
attttgcatctttaataag

SEQ ID NO: 85026 - DNA, 19 bp, Artificial sequence
  SiRNA target sequence
ttttgcatctttaataaga

SEQ ID NO: 85027 - DNA, 19 bp, Artificial sequence
  SiRNA target sequence
tttgcatctttaataagat

SEQ ID NO: 85028 - DNA, 19 bp, Artificial sequence
  SiRNA target sequence
ttgcatctttaataagatc

SEQ ID NO: 85029 - DNA, 19 bp, Artificial sequence
  SiRNA target sequence
tgcatctttaataagatca

SEQ ID NO: 85030 - DNA, 19 bp, Artificial sequence
  SiRNA target sequence
gcatctttaataagatcat

SEQ ID NO: 85031 - DNA, 19 bp, Artificial sequence
  SiRNA target sequence
catctttaataagatcatc

SEQ ID NO: 85032 - DNA, 19 bp, Artificial sequence
  SiRNA target sequence
atctttaataagatcatct

SEQ ID NO: 85033 - DNA, 19 bp, Artificial sequence
  SiRNA target sequence
tctttaataagatcatctt

SEQ ID NO: 85034 - DNA, 19 bp, Artificial sequence
  SiRNA target sequence
ctttaataagatcatcttc

SEQ ID NO: 85035 - DNA, 19 bp, Artificial sequence
  SiRNA target sequence
tttaataagatcatcttct

SEQ ID NO: 85036 - DNA, 19 bp, Artificial sequence
  SiRNA target sequence
ttaataagatcatcttctt

SEQ ID NO: 85037 - DNA, 19 bp, Artificial sequence
  SiRNA target sequence
taataagatcatcttcttg

SEQ ID NO: 85038 - DNA, 19 bp, Artificial sequence
  SiRNA target sequence
aataagatcatcttcttga

SEQ ID NO: 85039 - DNA, 19 bp, Artificial sequence
  SiRNA target sequence
ataagatcatcttcttgat

SEQ ID NO: 85040 - DNA, 19 bp, Artificial sequence
  SiRNA target sequence
taagatcatcttcttgatt

SEQ ID NO: 85041 - DNA, 19 bp, Artificial sequence
  SiRNA target sequence
aagatcatcttcttgattt

SEQ ID NO: 85042 - DNA, 19 bp, Artificial sequence
  SiRNA target sequence
agatcatcttcttgatttc

SEQ ID NO: 85043 - DNA, 19 bp, Artificial sequence
  SiRNA target sequence
gatcatcttcttgatttct

SEQ ID NO: 85044 - DNA, 19 bp, Artificial sequence
  SiRNA target sequence
atcatcttcttgatttcta

SEQ ID NO: 85045 - DNA, 19 bp, Artificial sequence
  SiRNA target sequence
tcatcttcttgatttctaa

SEQ ID NO: 85046 - DNA, 19 bp, Artificial sequence
  SiRNA target sequence
catcttcttgatttctaaa

SEQ ID NO: 85047 - DNA, 19 bp, Artificial sequence
  SiRNA target sequence
atcttcttgatttctaaat

SEQ ID NO: 85048 - DNA, 19 bp, Artificial sequence
  SiRNA target sequence
tcttcttgatttctaaatc

SEQ ID NO: 85049 - DNA, 19 bp, Artificial sequence
  SiRNA target sequence
cttcttgatttctaaatcc

SEQ ID NO: 85050 - DNA, 19 bp, Artificial sequence
  SiRNA target sequence
ttcttgatttctaaatcca

SEQ ID NO: 85051 - DNA, 19 bp, Artificial sequence
  SiRNA target sequence
tcttgatttctaaatccat

SEQ ID NO: 85052 - DNA, 19 bp, Artificial sequence
  SiRNA target sequence
cttgatttctaaatccata

SEQ ID NO: 85053 - DNA, 19 bp, Artificial sequence
  SiRNA target sequence
ttgatttctaaatccatat

SEQ ID NO: 85054 - DNA, 19 bp, Artificial sequence
  SiRNA target sequence
tgatttctaaatccatata

SEQ ID NO: 85055 - DNA, 19 bp, Artificial sequence
  SiRNA target sequence
gatttctaaatccatatat

SEQ ID NO: 85056 - DNA, 19 bp, Artificial sequence
  SiRNA target sequence
atttctaaatccatatatt

SEQ ID NO: 85057 - DNA, 19 bp, Artificial sequence
  SiRNA target sequence
tttctaaatccatatatta

SEQ ID NO: 85058 - DNA, 19 bp, Artificial sequence
  SiRNA target sequence
ttctaaatccatatattag

SEQ ID NO: 85059 - DNA, 19 bp, Artificial sequence
  SiRNA target sequence
tctaaatccatatattagt

SEQ ID NO: 85060 - DNA, 19 bp, Artificial sequence
  SiRNA target sequence
ctaaatccatatattagtt

SEQ ID NO: 85061 - DNA, 19 bp, Artificial sequence
  SiRNA target sequence
taaatccatatattagttt

SEQ ID NO: 85062 - DNA, 19 bp, Artificial sequence
  SiRNA target sequence
aaatccatatattagtttg

SEQ ID NO: 85063 - DNA, 19 bp, Artificial sequence
  SiRNA target sequence
aatccatatattagtttga

SEQ ID NO: 85064 - DNA, 19 bp, Artificial sequence
  SiRNA target sequence
atccatatattagtttgat

SEQ ID NO: 85065 - DNA, 19 bp, Artificial sequence
  SiRNA target sequence
tccatatattagtttgata

SEQ ID NO: 85066 - DNA, 19 bp, Artificial sequence
  SiRNA target sequence
ccatatattagtttgatat

SEQ ID NO: 85067 - DNA, 19 bp, Artificial sequence
  SiRNA target sequence
catatattagtttgatata

SEQ ID NO: 85068 - DNA, 19 bp, Artificial sequence
  SiRNA target sequence
atatattagtttgatatat

SEQ ID NO: 85069 - DNA, 19 bp, Artificial sequence
  SiRNA target sequence
tatattagtttgatatatt

SEQ ID NO: 85070 - DNA, 19 bp, Artificial sequence
  SiRNA target sequence
atattagtttgatatattg

SEQ ID NO: 85071 - DNA, 19 bp, Artificial sequence
  SiRNA target sequence
tattagtttgatatattga

SEQ ID NO: 85072 - DNA, 19 bp, Artificial sequence
  SiRNA target sequence
attagtttgatatattgat

SEQ ID NO: 85073 - DNA, 19 bp, Artificial sequence
  SiRNA target sequence
ttagtttgatatattgatc

SEQ ID NO: 85074 - DNA, 19 bp, Artificial sequence
  SiRNA target sequence
tagtttgatatattgatcg

SEQ ID NO: 85075 - DNA, 19 bp, Artificial sequence
  SiRNA target sequence
agtttgatatattgatcgt

SEQ ID NO: 85076 - DNA, 19 bp, Artificial sequence
  SiRNA target sequence
gtttgatatattgatcgtc

SEQ ID NO: 85077 - DNA, 19 bp, Artificial sequence
  SiRNA target sequence
tttgatatattgatcgtct

SEQ ID NO: 85078 - DNA, 19 bp, Artificial sequence
  SiRNA target sequence
ttgatatattgatcgtctt

SEQ ID NO: 85079 - DNA, 19 bp, Artificial sequence
  SiRNA target sequence
tgatatattgatcgtcttc

SEQ ID NO: 85080 - DNA, 19 bp, Artificial sequence
  SiRNA target sequence
gatatattgatcgtcttct

SEQ ID NO: 85081 - DNA, 19 bp, Artificial sequence
  SiRNA target sequence
atatattgatcgtcttctt

SEQ ID NO: 85082 - DNA, 19 bp, Artificial sequence
  SiRNA target sequence
tatattgatcgtcttcttt

SEQ ID NO: 85083 - DNA, 19 bp, Artificial sequence
  SiRNA target sequence
atattgatcgtcttcttta

SEQ ID NO: 85084 - DNA, 19 bp, Artificial sequence
  SiRNA target sequence
tattgatcgtcttctttat

SEQ ID NO: 85085 - DNA, 19 bp, Artificial sequence
  SiRNA target sequence
attgatcgtcttctttatt

SEQ ID NO: 85086 - DNA, 19 bp, Artificial sequence
  SiRNA target sequence
ttgatcgtcttctttattt

SEQ ID NO: 85087 - DNA, 19 bp, Artificial sequence
  SiRNA target sequence
tgatcgtcttctttatttt

SEQ ID NO: 85088 - DNA, 19 bp, Artificial sequence
  SiRNA target sequence
gatcgtcttctttattttt

SEQ ID NO: 85089 - DNA, 19 bp, Artificial sequence
  SiRNA target sequence
atcgtcttctttatttttc

SEQ ID NO: 85090 - DNA, 19 bp, Artificial sequence
  SiRNA target sequence
tcgtcttctttatttttca

SEQ ID NO: 85091 - DNA, 19 bp, Artificial sequence
  SiRNA target sequence
cgtcttctttatttttcaa

SEQ ID NO: 85092 - DNA, 19 bp, Artificial sequence
  SiRNA target sequence
gtcttctttatttttcaaa

SEQ ID NO: 85093 - DNA, 19 bp, Artificial sequence
  SiRNA target sequence
tcttctttatttttcaaaa

SEQ ID NO: 85094 - DNA, 19 bp, Artificial sequence
  SiRNA target sequence
cttctttatttttcaaaaa

SEQ ID NO: 85095 - DNA, 19 bp, Artificial sequence
  SiRNA target sequence
ttctttatttttcaaaaac

SEQ ID NO: 85096 - DNA, 19 bp, Artificial sequence
  SiRNA target sequence
tctttatttttcaaaaacg

SEQ ID NO: 85097 - DNA, 19 bp, Artificial sequence
  SiRNA target sequence
ctttatttttcaaaaacga

SEQ ID NO: 85098 - DNA, 19 bp, Artificial sequence
  SiRNA target sequence
tttatttttcaaaaacgaa

SEQ ID NO: 85099 - DNA, 19 bp, Artificial sequence
  SiRNA target sequence
ttatttttcaaaaacgaaa

SEQ ID NO: 85100 - DNA, 19 bp, Artificial sequence
  SiRNA target sequence
tatttttcaaaaacgaaaa

SEQ ID NO: 85101 - DNA, 19 bp, Artificial sequence
  SiRNA target sequence
atttttcaaaaacgaaaaa

SEQ ID NO: 85102 - DNA, 19 bp, Artificial sequence
  SiRNA target sequence
tttttcaaaaacgaaaaaa

SEQ ID NO: 85103 - DNA, 19 bp, Artificial sequence
  SiRNA target sequence
ttttcaaaaacgaaaaaaa

SEQ ID NO: 85104 - DNA, 19 bp, Artificial sequence
  SiRNA target sequence
tttcaaaaacgaaaaaaat

SEQ ID NO: 85105 - DNA, 19 bp, Artificial sequence
  SiRNA target sequence
ttcaaaaacgaaaaaaatg

SEQ ID NO: 85106 - DNA, 19 bp, Artificial sequence
  SiRNA target sequence
tcaaaaacgaaaaaaatgg

SEQ ID NO: 85107 - DNA, 19 bp, Artificial sequence
  SiRNA target sequence
caaaaacgaaaaaaatgga

SEQ ID NO: 85108 - DNA, 19 bp, Artificial sequence
  SiRNA target sequence
aaaaacgaaaaaaatggag

SEQ ID NO: 85109 - DNA, 19 bp, Artificial sequence
  SiRNA target sequence
aaaacgaaaaaaatggagc

SEQ ID NO: 85110 - DNA, 19 bp, Artificial sequence
  SiRNA target sequence
aaacgaaaaaaatggagca

SEQ ID NO: 85111 - DNA, 19 bp, Artificial sequence
  SiRNA target sequence
aacgaaaaaaatggagcaa

SEQ ID NO: 85112 - DNA, 19 bp, Artificial sequence
  SiRNA target sequence
acgaaaaaaatggagcaat

SEQ ID NO: 85113 - DNA, 19 bp, Artificial sequence
  SiRNA target sequence
cgaaaaaaatggagcaatg

SEQ ID NO: 85114 - DNA, 19 bp, Artificial sequence
  SiRNA target sequence
gaaaaaaatggagcaatgc

SEQ ID NO: 85115 - DNA, 19 bp, Artificial sequence
  SiRNA target sequence
aaaaaaatggagcaatgcc

SEQ ID NO: 85116 - DNA, 19 bp, Artificial sequence
  SiRNA target sequence
aaaaaatggagcaatgcca

SEQ ID NO: 85117 - DNA, 19 bp, Artificial sequence
  SiRNA target sequence
aaaaatggagcaatgccag

SEQ ID NO: 85118 - DNA, 19 bp, Artificial sequence
  SiRNA target sequence
aaaatggagcaatgccagt

SEQ ID NO: 85119 - DNA, 19 bp, Artificial sequence
  SiRNA target sequence
aaatggagcaatgccagtt

SEQ ID NO: 85120 - DNA, 19 bp, Artificial sequence
  SiRNA target sequence
aatggagcaatgccagttc

SEQ ID NO: 85121 - DNA, 19 bp, Artificial sequence
  SiRNA target sequence
atggagcaatgccagttcc

SEQ ID NO: 85122 - DNA, 19 bp, Artificial sequence
  SiRNA target sequence
tggagcaatgccagttcca

SEQ ID NO: 85123 - DNA, 19 bp, Artificial sequence
  SiRNA target sequence
ggagcaatgccagttccag

SEQ ID NO: 85124 - DNA, 19 bp, Artificial sequence
  SiRNA target sequence
gagcaatgccagttccagt

SEQ ID NO: 85125 - DNA, 19 bp, Artificial sequence
  SiRNA target sequence
agcaatgccagttccagta

SEQ ID NO: 85126 - DNA, 19 bp, Artificial sequence
  SiRNA target sequence
gcaatgccagttccagtac

SEQ ID NO: 85127 - DNA, 19 bp, Artificial sequence
  SiRNA target sequence
caatgccagttccagtaca

SEQ ID NO: 85128 - DNA, 19 bp, Artificial sequence
  SiRNA target sequence
aatgccagttccagtacaa

SEQ ID NO: 85129 - DNA, 19 bp, Artificial sequence
  SiRNA target sequence
atgccagttccagtacaaa

SEQ ID NO: 85130 - DNA, 19 bp, Artificial sequence
  SiRNA target sequence
tgccagttccagtacaaat

SEQ ID NO: 85131 - DNA, 19 bp, Artificial sequence
  SiRNA target sequence
gccagttccagtacaaata

SEQ ID NO: 85132 - DNA, 19 bp, Artificial sequence
  SiRNA target sequence
ccagttccagtacaaatac

SEQ ID NO: 85133 - DNA, 19 bp, Artificial sequence
  SiRNA target sequence
cagttccagtacaaatacc

SEQ ID NO: 85134 - DNA, 19 bp, Artificial sequence
  SiRNA target sequence
agttccagtacaaataccc

SEQ ID NO: 85135 - DNA, 19 bp, Artificial sequence
  SiRNA target sequence
gttccagtacaaataccca

SEQ ID NO: 85136 - DNA, 19 bp, Artificial sequence
  SiRNA target sequence
ttccagtacaaatacccaa

SEQ ID NO: 85137 - DNA, 19 bp, Artificial sequence
  SiRNA target sequence
tccagtacaaatacccaac

SEQ ID NO: 85138 - DNA, 19 bp, Artificial sequence
  SiRNA target sequence
ccagtacaaatacccaaca

SEQ ID NO: 85139 - DNA, 19 bp, Artificial sequence
  SiRNA target sequence
cagtacaaatacccaacac

SEQ ID NO: 85140 - DNA, 19 bp, Artificial sequence
  SiRNA target sequence
agtacaaatacccaacact

SEQ ID NO: 85141 - DNA, 19 bp, Artificial sequence
  SiRNA target sequence
gtacaaatacccaacactt

SEQ ID NO: 85142 - DNA, 19 bp, Artificial sequence
  SiRNA target sequence
tacaaatacccaacacttt

SEQ ID NO: 85143 - DNA, 19 bp, Artificial sequence
  SiRNA target sequence
acaaatacccaacactttt

SEQ ID NO: 85144 - DNA, 19 bp, Artificial sequence
  SiRNA target sequence
caaatacccaacacttttt

SEQ ID NO: 85145 - DNA, 19 bp, Artificial sequence
  SiRNA target sequence
aaatacccaacactttttt

SEQ ID NO: 85146 - DNA, 19 bp, Artificial sequence
  SiRNA target sequence
aatacccaacactttttta

SEQ ID NO: 85147 - DNA, 19 bp, Artificial sequence
  SiRNA target sequence
atacccaacacttttttac

SEQ ID NO: 85148 - DNA, 19 bp, Artificial sequence
  SiRNA target sequence
tacccaacacttttttaca

SEQ ID NO: 85149 - DNA, 19 bp, Artificial sequence
  SiRNA target sequence
acccaacacttttttacaa

SEQ ID NO: 85150 - DNA, 19 bp, Artificial sequence
  SiRNA target sequence
cccaacacttttttacaaa

SEQ ID NO: 85151 - DNA, 19 bp, Artificial sequence
  SiRNA target sequence
ccaacacttttttacaaaa

SEQ ID NO: 85152 - DNA, 19 bp, Artificial sequence
  SiRNA target sequence
caacacttttttacaaaaa

SEQ ID NO: 85153 - DNA, 19 bp, Artificial sequence
  SiRNA target sequence
aacacttttttacaaaaat

SEQ ID NO: 85154 - DNA, 19 bp, Artificial sequence
  SiRNA target sequence
acacttttttacaaaaatt

SEQ ID NO: 85155 - DNA, 19 bp, Artificial sequence
  SiRNA target sequence
cacttttttacaaaaattt

SEQ ID NO: 85156 - DNA, 19 bp, Artificial sequence
  SiRNA target sequence
acttttttacaaaaattta

SEQ ID NO: 85157 - DNA, 19 bp, Artificial sequence
  SiRNA target sequence
cttttttacaaaaatttaa

SEQ ID NO: 85158 - DNA, 19 bp, Artificial sequence
  SiRNA target sequence
ttttttacaaaaatttaat

SEQ ID NO: 85159 - DNA, 19 bp, Artificial sequence
  SiRNA target sequence
tttttacaaaaatttaatc

SEQ ID NO: 85160 - DNA, 19 bp, Artificial sequence
  SiRNA target sequence
ttttacaaaaatttaatct

SEQ ID NO: 85161 - DNA, 19 bp, Artificial sequence
  SiRNA target sequence
tttacaaaaatttaatcta

SEQ ID NO: 85162 - DNA, 19 bp, Artificial sequence
  SiRNA target sequence
ttacaaaaatttaatctaa

SEQ ID NO: 85163 - DNA, 19 bp, Artificial sequence
  SiRNA target sequence
tacaaaaatttaatctaaa

SEQ ID NO: 85164 - DNA, 19 bp, Artificial sequence
  SiRNA target sequence
acaaaaatttaatctaaat

SEQ ID NO: 85165 - DNA, 19 bp, Artificial sequence
  SiRNA target sequence
caaaaatttaatctaaata

SEQ ID NO: 85166 - DNA, 19 bp, Artificial sequence
  SiRNA target sequence
aaaaatttaatctaaataa

SEQ ID NO: 85167 - DNA, 19 bp, Artificial sequence
  SiRNA target sequence
aaaatttaatctaaataat

SEQ ID NO: 85168 - DNA, 19 bp, Artificial sequence
  SiRNA target sequence
aaatttaatctaaataatt

SEQ ID NO: 85169 - DNA, 19 bp, Artificial sequence
  SiRNA target sequence
aatttaatctaaataattt

SEQ ID NO: 85170 - DNA, 19 bp, Artificial sequence
  SiRNA target sequence
atttaatctaaataattta

SEQ ID NO: 85171 - DNA, 19 bp, Artificial sequence
  SiRNA target sequence
tttaatctaaataatttac

SEQ ID NO: 85172 - DNA, 19 bp, Artificial sequence
  SiRNA target sequence
ttaatctaaataatttact

SEQ ID NO: 85173 - DNA, 19 bp, Artificial sequence
  SiRNA target sequence
taatctaaataatttactc

SEQ ID NO: 85174 - DNA, 19 bp, Artificial sequence
  SiRNA target sequence
aatctaaataatttactcg

SEQ ID NO: 85175 - DNA, 19 bp, Artificial sequence
  SiRNA target sequence
atctaaataatttactcgg

SEQ ID NO: 85176 - DNA, 19 bp, Artificial sequence
  SiRNA target sequence
tctaaataatttactcggt

SEQ ID NO: 85177 - DNA, 19 bp, Artificial sequence
  SiRNA target sequence
ctaaataatttactcggtc

SEQ ID NO: 85178 - DNA, 19 bp, Artificial sequence
  SiRNA target sequence
taaataatttactcggtct

SEQ ID NO: 85179 - DNA, 19 bp, Artificial sequence
  SiRNA target sequence
aaataatttactcggtctg

SEQ ID NO: 85180 - DNA, 19 bp, Artificial sequence
  SiRNA target sequence
aataatttactcggtctgt

SEQ ID NO: 85181 - DNA, 19 bp, Artificial sequence
  SiRNA target sequence
ataatttactcggtctgtg

SEQ ID NO: 85182 - DNA, 19 bp, Artificial sequence
  SiRNA target sequence
taatttactcggtctgtga

SEQ ID NO: 85183 - DNA, 19 bp, Artificial sequence
  SiRNA target sequence
aatttactcggtctgtgac

SEQ ID NO: 85184 - DNA, 19 bp, Artificial sequence
  SiRNA target sequence
atttactcggtctgtgaca

SEQ ID NO: 85185 - DNA, 19 bp, Artificial sequence
  SiRNA target sequence
tttactcggtctgtgacag

SEQ ID NO: 85186 - DNA, 19 bp, Artificial sequence
  SiRNA target sequence
ttactcggtctgtgacaga

SEQ ID NO: 85187 - DNA, 19 bp, Artificial sequence
  SiRNA target sequence
tactcggtctgtgacagat

SEQ ID NO: 85188 - DNA, 19 bp, Artificial sequence
  SiRNA target sequence
actcggtctgtgacagatc

SEQ ID NO: 85189 - DNA, 19 bp, Artificial sequence
  SiRNA target sequence
ctcggtctgtgacagatct

SEQ ID NO: 85190 - DNA, 19 bp, Artificial sequence
  SiRNA target sequence
tcggtctgtgacagatctt

SEQ ID NO: 85191 - DNA, 19 bp, Artificial sequence
  SiRNA target sequence
cggtctgtgacagatcttt

SEQ ID NO: 85192 - DNA, 19 bp, Artificial sequence
  SiRNA target sequence
ggtctgtgacagatcttta

SEQ ID NO: 85193 - DNA, 19 bp, Artificial sequence
  SiRNA target sequence
gtctgtgacagatctttaa

SEQ ID NO: 85194 - DNA, 19 bp, Artificial sequence
  SiRNA target sequence
tctgtgacagatctttaaa

SEQ ID NO: 85195 - DNA, 19 bp, Artificial sequence
  SiRNA target sequence
ctgtgacagatctttaaat

SEQ ID NO: 85196 - DNA, 19 bp, Artificial sequence
  SiRNA target sequence
tgtgacagatctttaaatt

SEQ ID NO: 85197 - DNA, 19 bp, Artificial sequence
  SiRNA target sequence
gtgacagatctttaaatta

SEQ ID NO: 85198 - DNA, 19 bp, Artificial sequence
  SiRNA target sequence
tgacagatctttaaattat

SEQ ID NO: 85199 - DNA, 19 bp, Artificial sequence
  SiRNA target sequence
gacagatctttaaattatt

SEQ ID NO: 85200 - DNA, 19 bp, Artificial sequence
  SiRNA target sequence
acagatctttaaattatta

SEQ ID NO: 85201 - DNA, 19 bp, Artificial sequence
  SiRNA target sequence
cagatctttaaattattat

SEQ ID NO: 85202 - DNA, 19 bp, Artificial sequence
  SiRNA target sequence
agatctttaaattattata

SEQ ID NO: 85203 - DNA, 19 bp, Artificial sequence
  SiRNA target sequence
gatctttaaattattataa

SEQ ID NO: 85204 - DNA, 19 bp, Artificial sequence
  SiRNA target sequence
atctttaaattattataat

SEQ ID NO: 85205 - DNA, 19 bp, Artificial sequence
  SiRNA target sequence
tctttaaattattataatt

SEQ ID NO: 85206 - DNA, 19 bp, Artificial sequence
  SiRNA target sequence
ctttaaattattataattt

SEQ ID NO: 85207 - DNA, 19 bp, Artificial sequence
  SiRNA target sequence
tttaaattattataatttt

SEQ ID NO: 85208 - DNA, 19 bp, Artificial sequence
  SiRNA target sequence
ttaaattattataattttg

SEQ ID NO: 85209 - DNA, 19 bp, Artificial sequence
  SiRNA target sequence
taaattattataattttgc

SEQ ID NO: 85210 - DNA, 19 bp, Artificial sequence
  SiRNA target sequence
aaattattataattttgca

SEQ ID NO: 85211 - DNA, 19 bp, Artificial sequence
  SiRNA target sequence
aattattataattttgcat

SEQ ID NO: 85212 - DNA, 19 bp, Artificial sequence
  SiRNA target sequence
attattataattttgcata

SEQ ID NO: 85213 - DNA, 19 bp, Artificial sequence
  SiRNA target sequence
ttattataattttgcatat

SEQ ID NO: 85214 - DNA, 19 bp, Artificial sequence
  SiRNA target sequence
tattataattttgcatatc

SEQ ID NO: 85215 - DNA, 19 bp, Artificial sequence
  SiRNA target sequence
attataattttgcatatct

SEQ ID NO: 85216 - DNA, 19 bp, Artificial sequence
  SiRNA target sequence
ttataattttgcatatcta

SEQ ID NO: 85217 - DNA, 19 bp, Artificial sequence
  SiRNA target sequence
tataattttgcatatctat

SEQ ID NO: 85218 - DNA, 19 bp, Artificial sequence
  SiRNA target sequence
ataattttgcatatctatg

SEQ ID NO: 85219 - DNA, 19 bp, Artificial sequence
  SiRNA target sequence
taattttgcatatctatga

SEQ ID NO: 85220 - DNA, 19 bp, Artificial sequence
  SiRNA target sequence
aattttgcatatctatgaa

SEQ ID NO: 85221 - DNA, 19 bp, Artificial sequence
  SiRNA target sequence
attttgcatatctatgaaa

SEQ ID NO: 85222 - DNA, 19 bp, Artificial sequence
  SiRNA target sequence
ttttgcatatctatgaaat

SEQ ID NO: 85223 - DNA, 19 bp, Artificial sequence
  SiRNA target sequence
tttgcatatctatgaaatt

SEQ ID NO: 85224 - DNA, 19 bp, Artificial sequence
  SiRNA target sequence
ttgcatatctatgaaattg

SEQ ID NO: 85225 - DNA, 19 bp, Artificial sequence
  SiRNA target sequence
tgcatatctatgaaattgg

SEQ ID NO: 85226 - DNA, 19 bp, Artificial sequence
  SiRNA target sequence
gcatatctatgaaattgga

SEQ ID NO: 85227 - DNA, 19 bp, Artificial sequence
  SiRNA target sequence
catatctatgaaattggaa

SEQ ID NO: 85228 - DNA, 19 bp, Artificial sequence
  SiRNA target sequence
atatctatgaaattggaaa

SEQ ID NO: 85229 - DNA, 19 bp, Artificial sequence
  SiRNA target sequence
tatctatgaaattggaaac

SEQ ID NO: 85230 - DNA, 19 bp, Artificial sequence
  SiRNA target sequence
atctatgaaattggaaaca

SEQ ID NO: 85231 - DNA, 19 bp, Artificial sequence
  SiRNA target sequence
tctatgaaattggaaacat

SEQ ID NO: 85232 - DNA, 19 bp, Artificial sequence
  SiRNA target sequence
ctatgaaattggaaacatg

SEQ ID NO: 85233 - DNA, 19 bp, Artificial sequence
  SiRNA target sequence
tatgaaattggaaacatgt

SEQ ID NO: 85234 - DNA, 19 bp, Artificial sequence
  SiRNA target sequence
atgaaattggaaacatgtc

SEQ ID NO: 85235 - DNA, 19 bp, Artificial sequence
  SiRNA target sequence
tgaaattggaaacatgtcc

SEQ ID NO: 85236 - DNA, 19 bp, Artificial sequence
  SiRNA target sequence
gaaattggaaacatgtcca

SEQ ID NO: 85237 - DNA, 19 bp, Artificial sequence
  SiRNA target sequence
aaattggaaacatgtccat

SEQ ID NO: 85238 - DNA, 19 bp, Artificial sequence
  SiRNA target sequence
aattggaaacatgtccata

SEQ ID NO: 85239 - DNA, 19 bp, Artificial sequence
  SiRNA target sequence
attggaaacatgtccatat

SEQ ID NO: 85240 - DNA, 19 bp, Artificial sequence
  SiRNA target sequence
ttggaaacatgtccatatc

SEQ ID NO: 85241 - DNA, 19 bp, Artificial sequence
  SiRNA target sequence
tggaaacatgtccatatct

SEQ ID NO: 85242 - DNA, 19 bp, Artificial sequence
  SiRNA target sequence
ggaaacatgtccatatcta

SEQ ID NO: 85243 - DNA, 19 bp, Artificial sequence
  SiRNA target sequence
gaaacatgtccatatctat

SEQ ID NO: 85244 - DNA, 19 bp, Artificial sequence
  SiRNA target sequence
aaacatgtccatatctatc

SEQ ID NO: 85245 - DNA, 19 bp, Artificial sequence
  SiRNA target sequence
aacatgtccatatctatcg

SEQ ID NO: 85246 - DNA, 19 bp, Artificial sequence
  SiRNA target sequence
acatgtccatatctatcgc

SEQ ID NO: 85247 - DNA, 19 bp, Artificial sequence
  SiRNA target sequence
catgtccatatctatcgcc

SEQ ID NO: 85248 - DNA, 19 bp, Artificial sequence
  SiRNA target sequence
atgtccatatctatcgcct

SEQ ID NO: 85249 - DNA, 19 bp, Artificial sequence
  SiRNA target sequence
tgtccatatctatcgcctt

SEQ ID NO: 85250 - DNA, 19 bp, Artificial sequence
  SiRNA target sequence
gtccatatctatcgccttt

SEQ ID NO: 85251 - DNA, 19 bp, Artificial sequence
  SiRNA target sequence
tccatatctatcgcctttt

SEQ ID NO: 85252 - DNA, 19 bp, Artificial sequence
  SiRNA target sequence
ccatatctatcgccttttt

SEQ ID NO: 85253 - DNA, 19 bp, Artificial sequence
  SiRNA target sequence
catatctatcgcctttttt

SEQ ID NO: 85254 - DNA, 19 bp, Artificial sequence
  SiRNA target sequence
atatctatcgcctttttta

SEQ ID NO: 85255 - DNA, 19 bp, Artificial sequence
  SiRNA target sequence
tatctatcgccttttttaa

SEQ ID NO: 85256 - DNA, 19 bp, Artificial sequence
  SiRNA target sequence
atctatcgccttttttaat

SEQ ID NO: 85257 - DNA, 19 bp, Artificial sequence
  SiRNA target sequence
tctatcgccttttttaata

SEQ ID NO: 85258 - DNA, 19 bp, Artificial sequence
  SiRNA target sequence
ctatcgccttttttaataa

SEQ ID NO: 85259 - DNA, 19 bp, Artificial sequence
  SiRNA target sequence
tatcgccttttttaataat

SEQ ID NO: 85260 - DNA, 19 bp, Artificial sequence
  SiRNA target sequence
atcgccttttttaataatt

SEQ ID NO: 85261 - DNA, 19 bp, Artificial sequence
  SiRNA target sequence
tcgccttttttaataattg

SEQ ID NO: 85262 - DNA, 19 bp, Artificial sequence
  SiRNA target sequence
cgccttttttaataattgc

SEQ ID NO: 85263 - DNA, 19 bp, Artificial sequence
  SiRNA target sequence
gccttttttaataattgct

SEQ ID NO: 85264 - DNA, 19 bp, Artificial sequence
  SiRNA target sequence
ccttttttaataattgcta

SEQ ID NO: 85265 - DNA, 19 bp, Artificial sequence
  SiRNA target sequence
cttttttaataattgctac

SEQ ID NO: 85266 - DNA, 19 bp, Artificial sequence
  SiRNA target sequence
ttttttaataattgctact

SEQ ID NO: 85267 - DNA, 19 bp, Artificial sequence
  SiRNA target sequence
tttttaataattgctacta

SEQ ID NO: 85268 - DNA, 19 bp, Artificial sequence
  SiRNA target sequence
ttttaataattgctactaa

SEQ ID NO: 85269 - DNA, 19 bp, Artificial sequence
  SiRNA target sequence
tttaataattgctactaaa

SEQ ID NO: 85270 - DNA, 19 bp, Artificial sequence
  SiRNA target sequence
ttaataattgctactaaaa

SEQ ID NO: 85271 - DNA, 19 bp, Artificial sequence
  SiRNA target sequence
taataattgctactaaaat

SEQ ID NO: 85272 - DNA, 19 bp, Artificial sequence
  SiRNA target sequence
aataattgctactaaaatt

SEQ ID NO: 85273 - DNA, 19 bp, Artificial sequence
  SiRNA target sequence
ataattgctactaaaattt

SEQ ID NO: 85274 - DNA, 19 bp, Artificial sequence
  SiRNA target sequence
taattgctactaaaatttc

SEQ ID NO: 85275 - DNA, 19 bp, Artificial sequence
  SiRNA target sequence
aattgctactaaaatttca

SEQ ID NO: 85276 - DNA, 19 bp, Artificial sequence
  SiRNA target sequence
attgctactaaaatttcac

SEQ ID NO: 85277 - DNA, 19 bp, Artificial sequence
  SiRNA target sequence
ttgctactaaaatttcaca

SEQ ID NO: 85278 - DNA, 19 bp, Artificial sequence
  SiRNA target sequence
tgctactaaaatttcacat

SEQ ID NO: 85279 - DNA, 19 bp, Artificial sequence
  SiRNA target sequence
gctactaaaatttcacatt

SEQ ID NO: 85280 - DNA, 19 bp, Artificial sequence
  SiRNA target sequence
ctactaaaatttcacattt

SEQ ID NO: 85281 - DNA, 19 bp, Artificial sequence
  SiRNA target sequence
tactaaaatttcacatttt

SEQ ID NO: 85282 - DNA, 19 bp, Artificial sequence
  SiRNA target sequence
actaaaatttcacattttt

SEQ ID NO: 85283 - DNA, 19 bp, Artificial sequence
  SiRNA target sequence
ctaaaatttcacatttttc

SEQ ID NO: 85284 - DNA, 19 bp, Artificial sequence
  SiRNA target sequence
taaaatttcacatttttca

SEQ ID NO: 85285 - DNA, 19 bp, Artificial sequence
  SiRNA target sequence
aaaatttcacatttttcat

SEQ ID NO: 85286 - DNA, 19 bp, Artificial sequence
  SiRNA target sequence
aaatttcacatttttcatt

SEQ ID NO: 85287 - DNA, 19 bp, Artificial sequence
  SiRNA target sequence
aatttcacatttttcattt

SEQ ID NO: 85288 - DNA, 19 bp, Artificial sequence
  SiRNA target sequence
atttcacatttttcattta

SEQ ID NO: 85289 - DNA, 19 bp, Artificial sequence
  SiRNA target sequence
tttcacatttttcatttac

SEQ ID NO: 85290 - DNA, 19 bp, Artificial sequence
  SiRNA target sequence
ttcacatttttcatttacg

SEQ ID NO: 85291 - DNA, 19 bp, Artificial sequence
  SiRNA target sequence
tcacatttttcatttacgt

SEQ ID NO: 85292 - DNA, 19 bp, Artificial sequence
  SiRNA target sequence
cacatttttcatttacgtg

SEQ ID NO: 85293 - DNA, 19 bp, Artificial sequence
  SiRNA target sequence
acatttttcatttacgtgg

SEQ ID NO: 85294 - DNA, 19 bp, Artificial sequence
  SiRNA target sequence
catttttcatttacgtggt

SEQ ID NO: 85295 - DNA, 19 bp, Artificial sequence
  SiRNA target sequence
atttttcatttacgtggtt

SEQ ID NO: 85296 - DNA, 19 bp, Artificial sequence
  SiRNA target sequence
tttttcatttacgtggtta

SEQ ID NO: 85297 - DNA, 19 bp, Artificial sequence
  SiRNA target sequence
ttttcatttacgtggttag

SEQ ID NO: 85298 - DNA, 19 bp, Artificial sequence
  SiRNA target sequence
tttcatttacgtggttagt

SEQ ID NO: 85299 - DNA, 19 bp, Artificial sequence
  SiRNA target sequence
ttcatttacgtggttagta

SEQ ID NO: 85300 - DNA, 19 bp, Artificial sequence
  SiRNA target sequence
tcatttacgtggttagtaa

SEQ ID NO: 85301 - DNA, 19 bp, Artificial sequence
  SiRNA target sequence
catttacgtggttagtaag

SEQ ID NO: 85302 - DNA, 19 bp, Artificial sequence
  SiRNA target sequence
atttacgtggttagtaagt

SEQ ID NO: 85303 - DNA, 19 bp, Artificial sequence
  SiRNA target sequence
tttacgtggttagtaagtg

SEQ ID NO: 85304 - DNA, 19 bp, Artificial sequence
  SiRNA target sequence
ttacgtggttagtaagtga

SEQ ID NO: 85305 - DNA, 19 bp, Artificial sequence
  SiRNA target sequence
tacgtggttagtaagtgaa

SEQ ID NO: 85306 - DNA, 19 bp, Artificial sequence
  SiRNA target sequence
acgtggttagtaagtgaat

SEQ ID NO: 85307 - DNA, 19 bp, Artificial sequence
  SiRNA target sequence
cgtggttagtaagtgaata

SEQ ID NO: 85308 - DNA, 19 bp, Artificial sequence
  SiRNA target sequence
gtggttagtaagtgaataa

SEQ ID NO: 85309 - DNA, 19 bp, Artificial sequence
  SiRNA target sequence
tggttagtaagtgaataat

SEQ ID NO: 85310 - DNA, 19 bp, Artificial sequence
  SiRNA target sequence
ggttagtaagtgaataata

SEQ ID NO: 85311 - DNA, 19 bp, Artificial sequence
  SiRNA target sequence
gttagtaagtgaataatat

SEQ ID NO: 85312 - DNA, 19 bp, Artificial sequence
  SiRNA target sequence
ttagtaagtgaataatatc

SEQ ID NO: 85313 - DNA, 19 bp, Artificial sequence
  SiRNA target sequence
tagtaagtgaataatatct

SEQ ID NO: 85314 - DNA, 19 bp, Artificial sequence
  SiRNA target sequence
agtaagtgaataatatctt

SEQ ID NO: 85315 - DNA, 19 bp, Artificial sequence
  SiRNA target sequence
gtaagtgaataatatcttg

SEQ ID NO: 85316 - DNA, 19 bp, Artificial sequence
  SiRNA target sequence
taagtgaataatatcttgg

SEQ ID NO: 85317 - DNA, 19 bp, Artificial sequence
  SiRNA target sequence
aagtgaataatatcttggc

SEQ ID NO: 85318 - DNA, 19 bp, Artificial sequence
  SiRNA target sequence
agtgaataatatcttggct

SEQ ID NO: 85319 - DNA, 19 bp, Artificial sequence
  SiRNA target sequence
gtgaataatatcttggctt

SEQ ID NO: 85320 - DNA, 19 bp, Artificial sequence
  SiRNA target sequence
tgaataatatcttggctta

SEQ ID NO: 85321 - DNA, 19 bp, Artificial sequence
  SiRNA target sequence
gaataatatcttggcttaa

SEQ ID NO: 85322 - DNA, 19 bp, Artificial sequence
  SiRNA target sequence
aataatatcttggcttaat

SEQ ID NO: 85323 - DNA, 19 bp, Artificial sequence
  SiRNA target sequence
ataatatcttggcttaatt

SEQ ID NO: 85324 - DNA, 19 bp, Artificial sequence
  SiRNA target sequence
taatatcttggcttaattg

SEQ ID NO: 85325 - DNA, 19 bp, Artificial sequence
  SiRNA target sequence
aatatcttggcttaattgt

SEQ ID NO: 85326 - DNA, 19 bp, Artificial sequence
  SiRNA target sequence
atatcttggcttaattgtt

SEQ ID NO: 85327 - DNA, 19 bp, Artificial sequence
  SiRNA target sequence
tatcttggcttaattgttt

SEQ ID NO: 85328 - DNA, 19 bp, Artificial sequence
  SiRNA target sequence
atcttggcttaattgtttg

SEQ ID NO: 85329 - DNA, 19 bp, Artificial sequence
  SiRNA target sequence
tcttggcttaattgtttga

SEQ ID NO: 85330 - DNA, 19 bp, Artificial sequence
  SiRNA target sequence
cttggcttaattgtttgac

SEQ ID NO: 85331 - DNA, 19 bp, Artificial sequence
  SiRNA target sequence
ttggcttaattgtttgaca

SEQ ID NO: 85332 - DNA, 19 bp, Artificial sequence
  SiRNA target sequence
tggcttaattgtttgacaa

SEQ ID NO: 85333 - DNA, 19 bp, Artificial sequence
  SiRNA target sequence
ggcttaattgtttgacaat

SEQ ID NO: 85334 - DNA, 19 bp, Artificial sequence
  SiRNA target sequence
gcttaattgtttgacaatt

SEQ ID NO: 85335 - DNA, 19 bp, Artificial sequence
  SiRNA target sequence
cttaattgtttgacaattc

SEQ ID NO: 85336 - DNA, 19 bp, Artificial sequence
  SiRNA target sequence
ttaattgtttgacaattca

SEQ ID NO: 85337 - DNA, 19 bp, Artificial sequence
  SiRNA target sequence
taattgtttgacaattcat

SEQ ID NO: 85338 - DNA, 19 bp, Artificial sequence
  SiRNA target sequence
aattgtttgacaattcata

SEQ ID NO: 85339 - DNA, 19 bp, Artificial sequence
  SiRNA target sequence
attgtttgacaattcataa

SEQ ID NO: 85340 - DNA, 19 bp, Artificial sequence
  SiRNA target sequence
ttgtttgacaattcataat

SEQ ID NO: 85341 - DNA, 19 bp, Artificial sequence
  SiRNA target sequence
tgtttgacaattcataata

SEQ ID NO: 85342 - DNA, 19 bp, Artificial sequence
  SiRNA target sequence
gtttgacaattcataataa

SEQ ID NO: 85343 - DNA, 19 bp, Artificial sequence
  SiRNA target sequence
tttgacaattcataataag

SEQ ID NO: 85344 - DNA, 19 bp, Artificial sequence
  SiRNA target sequence
ttgacaattcataataaga

SEQ ID NO: 85345 - DNA, 19 bp, Artificial sequence
  SiRNA target sequence
tgacaattcataataagat

SEQ ID NO: 85346 - DNA, 19 bp, Artificial sequence
  SiRNA target sequence
gacaattcataataagatc

SEQ ID NO: 85347 - DNA, 19 bp, Artificial sequence
  SiRNA target sequence
acaattcataataagatcc

SEQ ID NO: 85348 - DNA, 19 bp, Artificial sequence
  SiRNA target sequence
caattcataataagatcct

SEQ ID NO: 85349 - DNA, 19 bp, Artificial sequence
  SiRNA target sequence
aattcataataagatcctc

SEQ ID NO: 85350 - DNA, 19 bp, Artificial sequence
  SiRNA target sequence
attcataataagatcctct

SEQ ID NO: 85351 - DNA, 19 bp, Artificial sequence
  SiRNA target sequence
ttcataataagatcctcta

SEQ ID NO: 85352 - DNA, 19 bp, Artificial sequence
  SiRNA target sequence
tcataataagatcctctaa

SEQ ID NO: 85353 - DNA, 19 bp, Artificial sequence
  SiRNA target sequence
cataataagatcctctaaa

SEQ ID NO: 85354 - DNA, 19 bp, Artificial sequence
  SiRNA target sequence
ataataagatcctctaaac

SEQ ID NO: 85355 - DNA, 19 bp, Artificial sequence
  SiRNA target sequence
taataagatcctctaaact

SEQ ID NO: 85356 - DNA, 19 bp, Artificial sequence
  SiRNA target sequence
aataagatcctctaaactt

SEQ ID NO: 85357 - DNA, 19 bp, Artificial sequence
  SiRNA target sequence
ataagatcctctaaacttg

SEQ ID NO: 85358 - DNA, 19 bp, Artificial sequence
  SiRNA target sequence
taagatcctctaaacttgg

SEQ ID NO: 85359 - DNA, 19 bp, Artificial sequence
  SiRNA target sequence
aagatcctctaaacttggt

SEQ ID NO: 85360 - DNA, 19 bp, Artificial sequence
  SiRNA target sequence
agatcctctaaacttggtt

SEQ ID NO: 85361 - DNA, 19 bp, Artificial sequence
  SiRNA target sequence
gatcctctaaacttggttt

SEQ ID NO: 85362 - DNA, 19 bp, Artificial sequence
  SiRNA target sequence
atcctctaaacttggttta

SEQ ID NO: 85363 - DNA, 19 bp, Artificial sequence
  SiRNA target sequence
tcctctaaacttggtttac

SEQ ID NO: 85364 - DNA, 19 bp, Artificial sequence
  SiRNA target sequence
cctctaaacttggtttaca

SEQ ID NO: 85365 - DNA, 19 bp, Artificial sequence
  SiRNA target sequence
ctctaaacttggtttacat

SEQ ID NO: 85366 - DNA, 19 bp, Artificial sequence
  SiRNA target sequence
tctaaacttggtttacatt

SEQ ID NO: 85367 - DNA, 19 bp, Artificial sequence
  SiRNA target sequence
ctaaacttggtttacattg

SEQ ID NO: 85368 - DNA, 19 bp, Artificial sequence
  SiRNA target sequence
taaacttggtttacattga

SEQ ID NO: 85369 - DNA, 19 bp, Artificial sequence
  SiRNA target sequence
aaacttggtttacattgaa

SEQ ID NO: 85370 - DNA, 19 bp, Artificial sequence
  SiRNA target sequence
aacttggtttacattgaaa

SEQ ID NO: 85371 - DNA, 19 bp, Artificial sequence
  SiRNA target sequence
acttggtttacattgaaat

SEQ ID NO: 85372 - DNA, 19 bp, Artificial sequence
  SiRNA target sequence
cttggtttacattgaaatg

SEQ ID NO: 85373 - DNA, 19 bp, Artificial sequence
  SiRNA target sequence
ttggtttacattgaaatgt

SEQ ID NO: 85374 - DNA, 19 bp, Artificial sequence
  SiRNA target sequence
tggtttacattgaaatgta

SEQ ID NO: 85375 - DNA, 19 bp, Artificial sequence
  SiRNA target sequence
ggtttacattgaaatgtat

SEQ ID NO: 85376 - DNA, 19 bp, Artificial sequence
  SiRNA target sequence
gtttacattgaaatgtata

SEQ ID NO: 85377 - DNA, 19 bp, Artificial sequence
  SiRNA target sequence
tttacattgaaatgtatat

SEQ ID NO: 85378 - DNA, 19 bp, Artificial sequence
  SiRNA target sequence
ttacattgaaatgtatata

SEQ ID NO: 85379 - DNA, 19 bp, Artificial sequence
  SiRNA target sequence
tacattgaaatgtatatat

SEQ ID NO: 85380 - DNA, 19 bp, Artificial sequence
  SiRNA target sequence
acattgaaatgtatatata

SEQ ID NO: 85381 - DNA, 19 bp, Artificial sequence
  SiRNA target sequence
cattgaaatgtatatataa

SEQ ID NO: 85382 - DNA, 19 bp, Artificial sequence
  SiRNA target sequence
attgaaatgtatatataat

SEQ ID NO: 85383 - DNA, 19 bp, Artificial sequence
  SiRNA target sequence
ttgaaatgtatatataatg

SEQ ID NO: 85384 - DNA, 19 bp, Artificial sequence
  SiRNA target sequence
tgaaatgtatatataatgt

SEQ ID NO: 85385 - DNA, 19 bp, Artificial sequence
  SiRNA target sequence
gaaatgtatatataatgtc

SEQ ID NO: 85386 - DNA, 19 bp, Artificial sequence
  SiRNA target sequence
aaatgtatatataatgtca

SEQ ID NO: 85387 - DNA, 19 bp, Artificial sequence
  SiRNA target sequence
aatgtatatataatgtcaa

SEQ ID NO: 85388 - DNA, 19 bp, Artificial sequence
  SiRNA target sequence
atgtatatataatgtcaag

SEQ ID NO: 85389 - DNA, 19 bp, Artificial sequence
  SiRNA target sequence
tgtatatataatgtcaagc

SEQ ID NO: 85390 - DNA, 19 bp, Artificial sequence
  SiRNA target sequence
gtatatataatgtcaagca

SEQ ID NO: 85391 - DNA, 19 bp, Artificial sequence
  SiRNA target sequence
tatatataatgtcaagcac

SEQ ID NO: 85392 - DNA, 19 bp, Artificial sequence
  SiRNA target sequence
atatataatgtcaagcaca

SEQ ID NO: 85393 - DNA, 19 bp, Artificial sequence
  SiRNA target sequence
tatataatgtcaagcacat

SEQ ID NO: 85394 - DNA, 19 bp, Artificial sequence
  SiRNA target sequence
atataatgtcaagcacatt

SEQ ID NO: 85395 - DNA, 19 bp, Artificial sequence
  SiRNA target sequence
tataatgtcaagcacatta

SEQ ID NO: 85396 - DNA, 19 bp, Artificial sequence
  SiRNA target sequence
ataatgtcaagcacattat

SEQ ID NO: 85397 - DNA, 19 bp, Artificial sequence
  SiRNA target sequence
taatgtcaagcacattatt

SEQ ID NO: 85398 - DNA, 19 bp, Artificial sequence
  SiRNA target sequence
aatgtcaagcacattattc

SEQ ID NO: 85399 - DNA, 19 bp, Artificial sequence
  SiRNA target sequence
atgtcaagcacattattcc

SEQ ID NO: 85400 - DNA, 19 bp, Artificial sequence
  SiRNA target sequence
tgtcaagcacattattcca

SEQ ID NO: 85401 - DNA, 19 bp, Artificial sequence
  SiRNA target sequence
gtcaagcacattattccag

SEQ ID NO: 85402 - DNA, 19 bp, Artificial sequence
  SiRNA target sequence
tcaagcacattattccagt

SEQ ID NO: 85403 - DNA, 19 bp, Artificial sequence
  SiRNA target sequence
caagcacattattccagtt

SEQ ID NO: 85404 - DNA, 19 bp, Artificial sequence
  SiRNA target sequence
aagcacattattccagttc

SEQ ID NO: 85405 - DNA, 19 bp, Artificial sequence
  SiRNA target sequence
agcacattattccagttct

SEQ ID NO: 85406 - DNA, 19 bp, Artificial sequence
  SiRNA target sequence
gcacattattccagttctt

SEQ ID NO: 85407 - DNA, 19 bp, Artificial sequence
  SiRNA target sequence
cacattattccagttctta

SEQ ID NO: 85408 - DNA, 19 bp, Artificial sequence
  SiRNA target sequence
acattattccagttcttaa

SEQ ID NO: 85409 - DNA, 19 bp, Artificial sequence
  SiRNA target sequence
cattattccagttcttaat

SEQ ID NO: 85410 - DNA, 19 bp, Artificial sequence
  SiRNA target sequence
attattccagttcttaatg

SEQ ID NO: 85411 - DNA, 19 bp, Artificial sequence
  SiRNA target sequence
ttattccagttcttaatga

SEQ ID NO: 85412 - DNA, 19 bp, Artificial sequence
  SiRNA target sequence
tattccagttcttaatgat

SEQ ID NO: 85413 - DNA, 19 bp, Artificial sequence
  SiRNA target sequence
attccagttcttaatgatg

SEQ ID NO: 85414 - DNA, 19 bp, Artificial sequence
  SiRNA target sequence
ttccagttcttaatgatgc

SEQ ID NO: 85415 - DNA, 19 bp, Artificial sequence
  SiRNA target sequence
tccagttcttaatgatgct

SEQ ID NO: 85416 - DNA, 19 bp, Artificial sequence
  SiRNA target sequence
ccagttcttaatgatgctt

SEQ ID NO: 85417 - DNA, 19 bp, Artificial sequence
  SiRNA target sequence
cagttcttaatgatgctta

SEQ ID NO: 85418 - DNA, 19 bp, Artificial sequence
  SiRNA target sequence
agttcttaatgatgcttaa

SEQ ID NO: 85419 - DNA, 19 bp, Artificial sequence
  SiRNA target sequence
gttcttaatgatgcttaaa

SEQ ID NO: 85420 - DNA, 19 bp, Artificial sequence
  SiRNA target sequence
ttcttaatgatgcttaaat

SEQ ID NO: 85421 - DNA, 19 bp, Artificial sequence
  SiRNA target sequence
tcttaatgatgcttaaata

SEQ ID NO: 85422 - DNA, 19 bp, Artificial sequence
  SiRNA target sequence
cttaatgatgcttaaataa

SEQ ID NO: 85423 - DNA, 19 bp, Artificial sequence
  SiRNA target sequence
ttaatgatgcttaaataat

SEQ ID NO: 85424 - DNA, 19 bp, Artificial sequence
  SiRNA target sequence
taatgatgcttaaataatc

SEQ ID NO: 85425 - DNA, 19 bp, Artificial sequence
  SiRNA target sequence
aatgatgcttaaataatct

SEQ ID NO: 85426 - DNA, 19 bp, Artificial sequence
  SiRNA target sequence
atgatgcttaaataatctt

SEQ ID NO: 85427 - DNA, 19 bp, Artificial sequence
  SiRNA target sequence
tgatgcttaaataatcttt

SEQ ID NO: 85428 - DNA, 19 bp, Artificial sequence
  SiRNA target sequence
gatgcttaaataatctttt

SEQ ID NO: 85429 - DNA, 19 bp, Artificial sequence
  SiRNA target sequence
atgcttaaataatctttta

SEQ ID NO: 85430 - DNA, 19 bp, Artificial sequence
  SiRNA target sequence
tgcttaaataatcttttac

SEQ ID NO: 85431 - DNA, 19 bp, Artificial sequence
  SiRNA target sequence
gcttaaataatcttttact

SEQ ID NO: 85432 - DNA, 19 bp, Artificial sequence
  SiRNA target sequence
cttaaataatcttttactc

SEQ ID NO: 85433 - DNA, 19 bp, Artificial sequence
  SiRNA target sequence
ttaaataatcttttactcc

SEQ ID NO: 85434 - DNA, 19 bp, Artificial sequence
  SiRNA target sequence
taaataatcttttactcct

SEQ ID NO: 85435 - DNA, 19 bp, Artificial sequence
  SiRNA target sequence
aaataatcttttactcctt

SEQ ID NO: 85436 - DNA, 19 bp, Artificial sequence
  SiRNA target sequence
aataatcttttactccttc

SEQ ID NO: 85437 - DNA, 19 bp, Artificial sequence
  SiRNA target sequence
ataatcttttactccttct

SEQ ID NO: 85438 - DNA, 19 bp, Artificial sequence
  SiRNA target sequence
taatcttttactccttctt

SEQ ID NO: 85439 - DNA, 19 bp, Artificial sequence
  SiRNA target sequence
aatcttttactccttcttt

SEQ ID NO: 85440 - DNA, 19 bp, Artificial sequence
  SiRNA target sequence
atcttttactccttcttta

SEQ ID NO: 85441 - DNA, 19 bp, Artificial sequence
  SiRNA target sequence
tcttttactccttctttag

SEQ ID NO: 85442 - DNA, 19 bp, Artificial sequence
  SiRNA target sequence
cttttactccttctttaga

SEQ ID NO: 85443 - DNA, 19 bp, Artificial sequence
  SiRNA target sequence
ttttactccttctttagaa

SEQ ID NO: 85444 - DNA, 19 bp, Artificial sequence
  SiRNA target sequence
tttactccttctttagaac

SEQ ID NO: 85445 - DNA, 19 bp, Artificial sequence
  SiRNA target sequence
ttactccttctttagaaca

SEQ ID NO: 85446 - DNA, 19 bp, Artificial sequence
  SiRNA target sequence
tactccttctttagaacac

SEQ ID NO: 85447 - DNA, 19 bp, Artificial sequence
  SiRNA target sequence
actccttctttagaacaca

SEQ ID NO: 85448 - DNA, 19 bp, Artificial sequence
  SiRNA target sequence
ctccttctttagaacacag

SEQ ID NO: 85449 - DNA, 19 bp, Artificial sequence
  SiRNA target sequence
tccttctttagaacacaga

SEQ ID NO: 85450 - DNA, 19 bp, Artificial sequence
  SiRNA target sequence
ccttctttagaacacagat

SEQ ID NO: 85451 - DNA, 19 bp, Artificial sequence
  SiRNA target sequence
cttctttagaacacagata

SEQ ID NO: 85452 - DNA, 19 bp, Artificial sequence
  SiRNA target sequence
ttctttagaacacagatat

SEQ ID NO: 85453 - DNA, 19 bp, Artificial sequence
  SiRNA target sequence
tctttagaacacagatatt

SEQ ID NO: 85454 - DNA, 19 bp, Artificial sequence
  SiRNA target sequence
ctttagaacacagatattc

SEQ ID NO: 85455 - DNA, 19 bp, Artificial sequence
  SiRNA target sequence
tttagaacacagatattca

SEQ ID NO: 85456 - DNA, 19 bp, Artificial sequence
  SiRNA target sequence
ttagaacacagatattcaa

SEQ ID NO: 85457 - DNA, 19 bp, Artificial sequence
  SiRNA target sequence
tagaacacagatattcaat

SEQ ID NO: 85458 - DNA, 19 bp, Artificial sequence
  SiRNA target sequence
agaacacagatattcaata

SEQ ID NO: 85459 - DNA, 19 bp, Artificial sequence
  SiRNA target sequence
gaacacagatattcaatat

SEQ ID NO: 85460 - DNA, 19 bp, Artificial sequence
  SiRNA target sequence
aacacagatattcaatatc

SEQ ID NO: 85461 - DNA, 19 bp, Artificial sequence
  SiRNA target sequence
acacagatattcaatatca

SEQ ID NO: 85462 - DNA, 19 bp, Artificial sequence
  SiRNA target sequence
cacagatattcaatatcat

SEQ ID NO: 85463 - DNA, 19 bp, Artificial sequence
  SiRNA target sequence
acagatattcaatatcatg

SEQ ID NO: 85464 - DNA, 19 bp, Artificial sequence
  SiRNA target sequence
cagatattcaatatcatgc

SEQ ID NO: 85465 - DNA, 19 bp, Artificial sequence
  SiRNA target sequence
agatattcaatatcatgct

SEQ ID NO: 85466 - DNA, 19 bp, Artificial sequence
  SiRNA target sequence
gatattcaatatcatgctt

SEQ ID NO: 85467 - DNA, 19 bp, Artificial sequence
  SiRNA target sequence
atattcaatatcatgctta

SEQ ID NO: 85468 - DNA, 19 bp, Artificial sequence
  SiRNA target sequence
tattcaatatcatgcttat

SEQ ID NO: 85469 - DNA, 19 bp, Artificial sequence
  SiRNA target sequence
attcaatatcatgcttatt

SEQ ID NO: 85470 - DNA, 19 bp, Artificial sequence
  SiRNA target sequence
ttcaatatcatgcttattt

SEQ ID NO: 85471 - DNA, 19 bp, Artificial sequence
  SiRNA target sequence
tcaatatcatgcttatttt

SEQ ID NO: 85472 - DNA, 19 bp, Artificial sequence
  SiRNA target sequence
caatatcatgcttattttt

SEQ ID NO: 85473 - DNA, 19 bp, Artificial sequence
  SiRNA target sequence
aatatcatgcttattttta

SEQ ID NO: 85474 - DNA, 19 bp, Artificial sequence
  SiRNA target sequence
atatcatgcttatttttag

SEQ ID NO: 85475 - DNA, 19 bp, Artificial sequence
  SiRNA target sequence
tatcatgcttatttttaga

SEQ ID NO: 85476 - DNA, 19 bp, Artificial sequence
  SiRNA target sequence
atcatgcttatttttagag

SEQ ID NO: 85477 - DNA, 19 bp, Artificial sequence
  SiRNA target sequence
tcatgcttatttttagagg

SEQ ID NO: 85478 - DNA, 19 bp, Artificial sequence
  SiRNA target sequence
catgcttatttttagaggt

SEQ ID NO: 85479 - DNA, 19 bp, Artificial sequence
  SiRNA target sequence
atgcttatttttagaggtt

SEQ ID NO: 85480 - DNA, 19 bp, Artificial sequence
  SiRNA target sequence
tgcttatttttagaggttt

SEQ ID NO: 85481 - DNA, 19 bp, Artificial sequence
  SiRNA target sequence
gcttatttttagaggtttt

SEQ ID NO: 85482 - DNA, 19 bp, Artificial sequence
  SiRNA target sequence
cttatttttagaggtttta

SEQ ID NO: 85483 - DNA, 19 bp, Artificial sequence
  SiRNA target sequence
ttatttttagaggttttag

SEQ ID NO: 85484 - DNA, 19 bp, Artificial sequence
  SiRNA target sequence
tatttttagaggttttaga

SEQ ID NO: 85485 - DNA, 19 bp, Artificial sequence
  SiRNA target sequence
atttttagaggttttagaa

SEQ ID NO: 85486 - DNA, 19 bp, Artificial sequence
  SiRNA target sequence
tttttagaggttttagaaa

SEQ ID NO: 85487 - DNA, 19 bp, Artificial sequence
  SiRNA target sequence
ttttagaggttttagaaat

SEQ ID NO: 85488 - DNA, 19 bp, Artificial sequence
  SiRNA target sequence
tttagaggttttagaaata

SEQ ID NO: 85489 - DNA, 19 bp, Artificial sequence
  SiRNA target sequence
ttagaggttttagaaatat

SEQ ID NO: 85490 - DNA, 19 bp, Artificial sequence
  SiRNA target sequence
tagaggttttagaaatatc

SEQ ID NO: 85491 - DNA, 19 bp, Artificial sequence
  SiRNA target sequence
agaggttttagaaatatcc

SEQ ID NO: 85492 - DNA, 19 bp, Artificial sequence
  SiRNA target sequence
gaggttttagaaatatcca

SEQ ID NO: 85493 - DNA, 19 bp, Artificial sequence
  SiRNA target sequence
aggttttagaaatatccat

SEQ ID NO: 85494 - DNA, 19 bp, Artificial sequence
  SiRNA target sequence
ggttttagaaatatccata

SEQ ID NO: 85495 - DNA, 19 bp, Artificial sequence
  SiRNA target sequence
gttttagaaatatccataa

SEQ ID NO: 85496 - DNA, 19 bp, Artificial sequence
  SiRNA target sequence
ttttagaaatatccataag

SEQ ID NO: 85497 - DNA, 19 bp, Artificial sequence
  SiRNA target sequence
tttagaaatatccataagc

SEQ ID NO: 85498 - DNA, 19 bp, Artificial sequence
  SiRNA target sequence
ttagaaatatccataagcc

SEQ ID NO: 85499 - DNA, 19 bp, Artificial sequence
  SiRNA target sequence
tagaaatatccataagcca

SEQ ID NO: 85500 - DNA, 19 bp, Artificial sequence
  SiRNA target sequence
agaaatatccataagccat

SEQ ID NO: 85501 - DNA, 19 bp, Artificial sequence
  SiRNA target sequence
gaaatatccataagccatg

SEQ ID NO: 85502 - DNA, 19 bp, Artificial sequence
  SiRNA target sequence
aaatatccataagccatgc

SEQ ID NO: 85503 - DNA, 19 bp, Artificial sequence
  SiRNA target sequence
aatatccataagccatgct

SEQ ID NO: 85504 - DNA, 19 bp, Artificial sequence
  SiRNA target sequence
atatccataagccatgctt

SEQ ID NO: 85505 - DNA, 19 bp, Artificial sequence
  SiRNA target sequence
tatccataagccatgcttt

SEQ ID NO: 85506 - DNA, 19 bp, Artificial sequence
  SiRNA target sequence
atccataagccatgctttt

SEQ ID NO: 85507 - DNA, 19 bp, Artificial sequence
  SiRNA target sequence
tccataagccatgcttttt

SEQ ID NO: 85508 - DNA, 19 bp, Artificial sequence
  SiRNA target sequence
ccataagccatgctttttt

SEQ ID NO: 85509 - DNA, 19 bp, Artificial sequence
  SiRNA target sequence
cataagccatgctttttta

SEQ ID NO: 85510 - DNA, 19 bp, Artificial sequence
  SiRNA target sequence
ataagccatgcttttttag

SEQ ID NO: 85511 - DNA, 19 bp, Artificial sequence
  SiRNA target sequence
taagccatgcttttttagg

SEQ ID NO: 85512 - DNA, 19 bp, Artificial sequence
  SiRNA target sequence
aagccatgcttttttaggc

SEQ ID NO: 85513 - DNA, 19 bp, Artificial sequence
  SiRNA target sequence
agccatgcttttttaggca

SEQ ID NO: 85514 - DNA, 19 bp, Artificial sequence
  SiRNA target sequence
gccatgcttttttaggcaa

SEQ ID NO: 85515 - DNA, 19 bp, Artificial sequence
  SiRNA target sequence
ccatgcttttttaggcaat

SEQ ID NO: 85516 - DNA, 19 bp, Artificial sequence
  SiRNA target sequence
catgcttttttaggcaatg

SEQ ID NO: 85517 - DNA, 19 bp, Artificial sequence
  SiRNA target sequence
atgcttttttaggcaatga

SEQ ID NO: 85518 - DNA, 19 bp, Artificial sequence
  SiRNA target sequence
tgcttttttaggcaatgaa

SEQ ID NO: 85519 - DNA, 19 bp, Artificial sequence
  SiRNA target sequence
gcttttttaggcaatgaag

SEQ ID NO: 85520 - DNA, 19 bp, Artificial sequence
  SiRNA target sequence
cttttttaggcaatgaagt

SEQ ID NO: 85521 - DNA, 19 bp, Artificial sequence
  SiRNA target sequence
ttttttaggcaatgaagta

SEQ ID NO: 85522 - DNA, 19 bp, Artificial sequence
  SiRNA target sequence
tttttaggcaatgaagtaa

SEQ ID NO: 85523 - DNA, 19 bp, Artificial sequence
  SiRNA target sequence
ttttaggcaatgaagtaaa

SEQ ID NO: 85524 - DNA, 19 bp, Artificial sequence
  SiRNA target sequence
tttaggcaatgaagtaaaa

SEQ ID NO: 85525 - DNA, 19 bp, Artificial sequence
  SiRNA target sequence
ttaggcaatgaagtaaaat

SEQ ID NO: 85526 - DNA, 19 bp, Artificial sequence
  SiRNA target sequence
taggcaatgaagtaaaatc

SEQ ID NO: 85527 - DNA, 19 bp, Artificial sequence
  SiRNA target sequence
aggcaatgaagtaaaatca

SEQ ID NO: 85528 - DNA, 19 bp, Artificial sequence
  SiRNA target sequence
ggcaatgaagtaaaatcaa

SEQ ID NO: 85529 - DNA, 19 bp, Artificial sequence
  SiRNA target sequence
gcaatgaagtaaaatcaaa

SEQ ID NO: 85530 - DNA, 19 bp, Artificial sequence
  SiRNA target sequence
caatgaagtaaaatcaaaa

SEQ ID NO: 85531 - DNA, 19 bp, Artificial sequence
  SiRNA target sequence
aatgaagtaaaatcaaaaa

SEQ ID NO: 85532 - DNA, 19 bp, Artificial sequence
  SiRNA target sequence
atgaagtaaaatcaaaaat

SEQ ID NO: 85533 - DNA, 19 bp, Artificial sequence
  SiRNA target sequence
tgaagtaaaatcaaaaata

SEQ ID NO: 85534 - DNA, 19 bp, Artificial sequence
  SiRNA target sequence
gaagtaaaatcaaaaatat

SEQ ID NO: 85535 - DNA, 19 bp, Artificial sequence
  SiRNA target sequence
aagtaaaatcaaaaatata

SEQ ID NO: 85536 - DNA, 19 bp, Artificial sequence
  SiRNA target sequence
agtaaaatcaaaaatatac

SEQ ID NO: 85537 - DNA, 19 bp, Artificial sequence
  SiRNA target sequence
gtaaaatcaaaaatatact

SEQ ID NO: 85538 - DNA, 19 bp, Artificial sequence
  SiRNA target sequence
taaaatcaaaaatatactt

SEQ ID NO: 85539 - DNA, 19 bp, Artificial sequence
  SiRNA target sequence
aaaatcaaaaatatacttg

SEQ ID NO: 85540 - DNA, 19 bp, Artificial sequence
  SiRNA target sequence
aaatcaaaaatatacttga

SEQ ID NO: 85541 - DNA, 19 bp, Artificial sequence
  SiRNA target sequence
aatcaaaaatatacttgaa

SEQ ID NO: 85542 - DNA, 19 bp, Artificial sequence
  SiRNA target sequence
atcaaaaatatacttgaaa

SEQ ID NO: 85543 - DNA, 19 bp, Artificial sequence
  SiRNA target sequence
tcaaaaatatacttgaaaa

SEQ ID NO: 85544 - DNA, 19 bp, Artificial sequence
  SiRNA target sequence
caaaaatatacttgaaaaa

SEQ ID NO: 85545 - DNA, 19 bp, Artificial sequence
  SiRNA target sequence
aaaaatatacttgaaaaag

SEQ ID NO: 85546 - DNA, 19 bp, Artificial sequence
  SiRNA target sequence
aaaatatacttgaaaaagt

SEQ ID NO: 85547 - DNA, 19 bp, Artificial sequence
  SiRNA target sequence
aaatatacttgaaaaagtc

SEQ ID NO: 85548 - DNA, 19 bp, Artificial sequence
  SiRNA target sequence
aatatacttgaaaaagtca

SEQ ID NO: 85549 - DNA, 19 bp, Artificial sequence
  SiRNA target sequence
atatacttgaaaaagtcac

SEQ ID NO: 85550 - DNA, 19 bp, Artificial sequence
  SiRNA target sequence
tatacttgaaaaagtcacg

SEQ ID NO: 85551 - DNA, 19 bp, Artificial sequence
  SiRNA target sequence
atacttgaaaaagtcacgc

SEQ ID NO: 85552 - DNA, 19 bp, Artificial sequence
  SiRNA target sequence
tacttgaaaaagtcacgca

SEQ ID NO: 85553 - DNA, 19 bp, Artificial sequence
  SiRNA target sequence
acttgaaaaagtcacgcaa

SEQ ID NO: 85554 - DNA, 19 bp, Artificial sequence
  SiRNA target sequence
cttgaaaaagtcacgcaaa

SEQ ID NO: 85555 - DNA, 19 bp, Artificial sequence
  SiRNA target sequence
ttgaaaaagtcacgcaaag

SEQ ID NO: 85556 - DNA, 19 bp, Artificial sequence
  SiRNA target sequence
tgaaaaagtcacgcaaaga

SEQ ID NO: 85557 - DNA, 19 bp, Artificial sequence
  SiRNA target sequence
gaaaaagtcacgcaaagat

SEQ ID NO: 85558 - DNA, 19 bp, Artificial sequence
  SiRNA target sequence
aaaaagtcacgcaaagatc

SEQ ID NO: 85559 - DNA, 19 bp, Artificial sequence
  SiRNA target sequence
aaaagtcacgcaaagatcc

SEQ ID NO: 85560 - DNA, 19 bp, Artificial sequence
  SiRNA target sequence
aaagtcacgcaaagatcct

SEQ ID NO: 85561 - DNA, 19 bp, Artificial sequence
  SiRNA target sequence
aagtcacgcaaagatcctt

SEQ ID NO: 85562 - DNA, 19 bp, Artificial sequence
  SiRNA target sequence
agtcacgcaaagatccttc

SEQ ID NO: 85563 - DNA, 19 bp, Artificial sequence
  SiRNA target sequence
gtcacgcaaagatccttcg

SEQ ID NO: 85564 - DNA, 19 bp, Artificial sequence
  SiRNA target sequence
tcacgcaaagatccttcga

SEQ ID NO: 85565 - DNA, 19 bp, Artificial sequence
  SiRNA target sequence
cacgcaaagatccttcgaa

SEQ ID NO: 85566 - DNA, 19 bp, Artificial sequence
  SiRNA target sequence
acgcaaagatccttcgaat

SEQ ID NO: 85567 - DNA, 19 bp, Artificial sequence
  SiRNA target sequence
cgcaaagatccttcgaatt

SEQ ID NO: 85568 - DNA, 19 bp, Artificial sequence
  SiRNA target sequence
gcaaagatccttcgaattg

SEQ ID NO: 85569 - DNA, 19 bp, Artificial sequence
  SiRNA target sequence
caaagatccttcgaattga

SEQ ID NO: 85570 - DNA, 19 bp, Artificial sequence
  SiRNA target sequence
aaagatccttcgaattgaa

SEQ ID NO: 85571 - DNA, 19 bp, Artificial sequence
  SiRNA target sequence
aagatccttcgaattgaaa

SEQ ID NO: 85572 - DNA, 19 bp, Artificial sequence
  SiRNA target sequence
agatccttcgaattgaaac

SEQ ID NO: 85573 - DNA, 19 bp, Artificial sequence
  SiRNA target sequence
gatccttcgaattgaaacc

SEQ ID NO: 85574 - DNA, 19 bp, Artificial sequence
  SiRNA target sequence
atccttcgaattgaaaccc

SEQ ID NO: 85575 - DNA, 19 bp, Artificial sequence
  SiRNA target sequence
tccttcgaattgaaacccc

SEQ ID NO: 85576 - DNA, 19 bp, Artificial sequence
  SiRNA target sequence
ccttcgaattgaaaccccg

SEQ ID NO: 85577 - DNA, 19 bp, Artificial sequence
  SiRNA target sequence
cttcgaattgaaaccccgt

SEQ ID NO: 85578 - DNA, 19 bp, Artificial sequence
  SiRNA target sequence
ttcgaattgaaaccccgtt

SEQ ID NO: 85579 - DNA, 19 bp, Artificial sequence
  SiRNA target sequence
tcgaattgaaaccccgttt

SEQ ID NO: 85580 - DNA, 19 bp, Artificial sequence
  SiRNA target sequence
cgaattgaaaccccgtttt

SEQ ID NO: 85581 - DNA, 19 bp, Artificial sequence
  SiRNA target sequence
gaattgaaaccccgttttt

SEQ ID NO: 85582 - DNA, 19 bp, Artificial sequence
  SiRNA target sequence
aattgaaaccccgtttttc

SEQ ID NO: 85583 - DNA, 19 bp, Artificial sequence
  SiRNA target sequence
attgaaaccccgtttttcc

SEQ ID NO: 85584 - DNA, 19 bp, Artificial sequence
  SiRNA target sequence
ttgaaaccccgtttttcca

SEQ ID NO: 85585 - DNA, 19 bp, Artificial sequence
  SiRNA target sequence
tgaaaccccgtttttccaa

SEQ ID NO: 85586 - DNA, 19 bp, Artificial sequence
  SiRNA target sequence
gaaaccccgtttttccaac

SEQ ID NO: 85587 - DNA, 19 bp, Artificial sequence
  SiRNA target sequence
aaaccccgtttttccaact

SEQ ID NO: 85588 - DNA, 19 bp, Artificial sequence
  SiRNA target sequence
aaccccgtttttccaactt

SEQ ID NO: 85589 - DNA, 19 bp, Artificial sequence
  SiRNA target sequence
accccgtttttccaacttg

SEQ ID NO: 85590 - DNA, 19 bp, Artificial sequence
  SiRNA target sequence
ccccgtttttccaacttgc

SEQ ID NO: 85591 - DNA, 19 bp, Artificial sequence
  SiRNA target sequence
cccgtttttccaacttgct

SEQ ID NO: 85592 - DNA, 19 bp, Artificial sequence
  SiRNA target sequence
ccgtttttccaacttgctc

SEQ ID NO: 85593 - DNA, 19 bp, Artificial sequence
  SiRNA target sequence
cgtttttccaacttgctca

SEQ ID NO: 85594 - DNA, 19 bp, Artificial sequence
  SiRNA target sequence
gtttttccaacttgctcaa

SEQ ID NO: 85595 - DNA, 19 bp, Artificial sequence
  SiRNA target sequence
tttttccaacttgctcaat

SEQ ID NO: 85596 - DNA, 19 bp, Artificial sequence
  SiRNA target sequence
ttttccaacttgctcaata

SEQ ID NO: 85597 - DNA, 19 bp, Artificial sequence
  SiRNA target sequence
tttccaacttgctcaatat

SEQ ID NO: 85598 - DNA, 19 bp, Artificial sequence
  SiRNA target sequence
ttccaacttgctcaatata

SEQ ID NO: 85599 - DNA, 19 bp, Artificial sequence
  SiRNA target sequence
tccaacttgctcaatatat

SEQ ID NO: 85600 - DNA, 19 bp, Artificial sequence
  SiRNA target sequence
ccaacttgctcaatatata

SEQ ID NO: 85601 - DNA, 19 bp, Artificial sequence
  SiRNA target sequence
caacttgctcaatatataa

SEQ ID NO: 85602 - DNA, 19 bp, Artificial sequence
  SiRNA target sequence
aacttgctcaatatataat

SEQ ID NO: 85603 - DNA, 19 bp, Artificial sequence
  SiRNA target sequence
acttgctcaatatataata

SEQ ID NO: 85604 - DNA, 19 bp, Artificial sequence
  SiRNA target sequence
cttgctcaatatataataa

SEQ ID NO: 85605 - DNA, 19 bp, Artificial sequence
  SiRNA target sequence
ttgctcaatatataataat

SEQ ID NO: 85606 - DNA, 19 bp, Artificial sequence
  SiRNA target sequence
tgctcaatatataataatg

SEQ ID NO: 85607 - DNA, 19 bp, Artificial sequence
  SiRNA target sequence
gctcaatatataataatgt

SEQ ID NO: 85608 - DNA, 19 bp, Artificial sequence
  SiRNA target sequence
ctcaatatataataatgta

SEQ ID NO: 85609 - DNA, 19 bp, Artificial sequence
  SiRNA target sequence
tcaatatataataatgtat

SEQ ID NO: 85610 - DNA, 19 bp, Artificial sequence
  SiRNA target sequence
caatatataataatgtatc

SEQ ID NO: 85611 - DNA, 19 bp, Artificial sequence
  SiRNA target sequence
aatatataataatgtatca

SEQ ID NO: 85612 - DNA, 19 bp, Artificial sequence
  SiRNA target sequence
atatataataatgtatcac

SEQ ID NO: 85613 - DNA, 19 bp, Artificial sequence
  SiRNA target sequence
tatataataatgtatcacc

SEQ ID NO: 85614 - DNA, 19 bp, Artificial sequence
  SiRNA target sequence
atataataatgtatcacca

SEQ ID NO: 85615 - DNA, 19 bp, Artificial sequence
  SiRNA target sequence
tataataatgtatcaccag

SEQ ID NO: 85616 - DNA, 19 bp, Artificial sequence
  SiRNA target sequence
ataataatgtatcaccaga

SEQ ID NO: 85617 - DNA, 19 bp, Artificial sequence
  SiRNA target sequence
taataatgtatcaccagac

SEQ ID NO: 85618 - DNA, 19 bp, Artificial sequence
  SiRNA target sequence
aataatgtatcaccagaca

SEQ ID NO: 85619 - DNA, 19 bp, Artificial sequence
  SiRNA target sequence
ataatgtatcaccagacat

SEQ ID NO: 85620 - DNA, 19 bp, Artificial sequence
  SiRNA target sequence
taatgtatcaccagacatt

SEQ ID NO: 85621 - DNA, 19 bp, Artificial sequence
  SiRNA target sequence
aatgtatcaccagacattt

SEQ ID NO: 85622 - DNA, 19 bp, Artificial sequence
  SiRNA target sequence
atgtatcaccagacatttc

SEQ ID NO: 85623 - DNA, 19 bp, Artificial sequence
  SiRNA target sequence
tgtatcaccagacatttct

SEQ ID NO: 85624 - DNA, 19 bp, Artificial sequence
  SiRNA target sequence
gtatcaccagacatttcta

SEQ ID NO: 85625 - DNA, 19 bp, Artificial sequence
  SiRNA target sequence
tatcaccagacatttctag

SEQ ID NO: 85626 - DNA, 19 bp, Artificial sequence
  SiRNA target sequence
atcaccagacatttctagt

SEQ ID NO: 85627 - DNA, 19 bp, Artificial sequence
  SiRNA target sequence
tcaccagacatttctagta

SEQ ID NO: 85628 - DNA, 19 bp, Artificial sequence
  SiRNA target sequence
caccagacatttctagtaa

SEQ ID NO: 85629 - DNA, 19 bp, Artificial sequence
  SiRNA target sequence
accagacatttctagtaaa

SEQ ID NO: 85630 - DNA, 19 bp, Artificial sequence
  SiRNA target sequence
ccagacatttctagtaaac

SEQ ID NO: 85631 - DNA, 19 bp, Artificial sequence
  SiRNA target sequence
cagacatttctagtaaact

SEQ ID NO: 85632 - DNA, 19 bp, Artificial sequence
  SiRNA target sequence
agacatttctagtaaactt

SEQ ID NO: 85633 - DNA, 19 bp, Artificial sequence
  SiRNA target sequence
gacatttctagtaaactta

SEQ ID NO: 85634 - DNA, 19 bp, Artificial sequence
  SiRNA target sequence
acatttctagtaaacttaa

SEQ ID NO: 85635 - DNA, 19 bp, Artificial sequence
  SiRNA target sequence
catttctagtaaacttaac

SEQ ID NO: 85636 - DNA, 19 bp, Artificial sequence
  SiRNA target sequence
atttctagtaaacttaaca

SEQ ID NO: 85637 - DNA, 19 bp, Artificial sequence
  SiRNA target sequence
tttctagtaaacttaacat

SEQ ID NO: 85638 - DNA, 19 bp, Artificial sequence
  SiRNA target sequence
ttctagtaaacttaacatt

SEQ ID NO: 85639 - DNA, 19 bp, Artificial sequence
  SiRNA target sequence
tctagtaaacttaacattt

SEQ ID NO: 85640 - DNA, 19 bp, Artificial sequence
  SiRNA target sequence
ctagtaaacttaacatttc

SEQ ID NO: 85641 - DNA, 19 bp, Artificial sequence
  SiRNA target sequence
tagtaaacttaacatttca

SEQ ID NO: 85642 - DNA, 19 bp, Artificial sequence
  SiRNA target sequence
agtaaacttaacatttcat

SEQ ID NO: 85643 - DNA, 19 bp, Artificial sequence
  SiRNA target sequence
gtaaacttaacatttcatt

SEQ ID NO: 85644 - DNA, 19 bp, Artificial sequence
  SiRNA target sequence
taaacttaacatttcatta

SEQ ID NO: 85645 - DNA, 19 bp, Artificial sequence
  SiRNA target sequence
aaacttaacatttcattaa

SEQ ID NO: 85646 - DNA, 19 bp, Artificial sequence
  SiRNA target sequence
aacttaacatttcattaac

SEQ ID NO: 85647 - DNA, 19 bp, Artificial sequence
  SiRNA target sequence
acttaacatttcattaaca

SEQ ID NO: 85648 - DNA, 19 bp, Artificial sequence
  SiRNA target sequence
cttaacatttcattaacaa

SEQ ID NO: 85649 - DNA, 19 bp, Artificial sequence
  SiRNA target sequence
ttaacatttcattaacaag

SEQ ID NO: 85650 - DNA, 19 bp, Artificial sequence
  SiRNA target sequence
taacatttcattaacaagc

SEQ ID NO: 85651 - DNA, 19 bp, Artificial sequence
  SiRNA target sequence
aacatttcattaacaagca

SEQ ID NO: 85652 - DNA, 19 bp, Artificial sequence
  SiRNA target sequence
acatttcattaacaagcaa

SEQ ID NO: 85653 - DNA, 19 bp, Artificial sequence
  SiRNA target sequence
catttcattaacaagcaaa

SEQ ID NO: 85654 - DNA, 19 bp, Artificial sequence
  SiRNA target sequence
atttcattaacaagcaaat

SEQ ID NO: 85655 - DNA, 19 bp, Artificial sequence
  SiRNA target sequence
tttcattaacaagcaaatc

SEQ ID NO: 85656 - DNA, 19 bp, Artificial sequence
  SiRNA target sequence
ttcattaacaagcaaatca

SEQ ID NO: 85657 - DNA, 19 bp, Artificial sequence
  SiRNA target sequence
tcattaacaagcaaatcat

SEQ ID NO: 85658 - DNA, 19 bp, Artificial sequence
  SiRNA target sequence
cattaacaagcaaatcatt

SEQ ID NO: 85659 - DNA, 19 bp, Artificial sequence
  SiRNA target sequence
attaacaagcaaatcatta

SEQ ID NO: 85660 - DNA, 19 bp, Artificial sequence
  SiRNA target sequence
ttaacaagcaaatcattat

SEQ ID NO: 85661 - DNA, 19 bp, Artificial sequence
  SiRNA target sequence
taacaagcaaatcattatt

SEQ ID NO: 85662 - DNA, 19 bp, Artificial sequence
  SiRNA target sequence
aacaagcaaatcattattt

SEQ ID NO: 85663 - DNA, 19 bp, Artificial sequence
  SiRNA target sequence
acaagcaaatcattatttg

SEQ ID NO: 85664 - DNA, 19 bp, Artificial sequence
  SiRNA target sequence
caagcaaatcattatttga

SEQ ID NO: 85665 - DNA, 19 bp, Artificial sequence
  SiRNA target sequence
aagcaaatcattatttgaa

SEQ ID NO: 85666 - DNA, 19 bp, Artificial sequence
  SiRNA target sequence
agcaaatcattatttgaac

SEQ ID NO: 85667 - DNA, 19 bp, Artificial sequence
  SiRNA target sequence
gcaaatcattatttgaaca

SEQ ID NO: 85668 - DNA, 19 bp, Artificial sequence
  SiRNA target sequence
caaatcattatttgaacaa

SEQ ID NO: 85669 - DNA, 19 bp, Artificial sequence
  SiRNA target sequence
aaatcattatttgaacaaa

SEQ ID NO: 85670 - DNA, 19 bp, Artificial sequence
  SiRNA target sequence
aatcattatttgaacaaag

SEQ ID NO: 85671 - DNA, 19 bp, Artificial sequence
  SiRNA target sequence
atcattatttgaacaaagt

SEQ ID NO: 85672 - DNA, 19 bp, Artificial sequence
  SiRNA target sequence
tcattatttgaacaaagta

SEQ ID NO: 85673 - DNA, 19 bp, Artificial sequence
  SiRNA target sequence
cattatttgaacaaagtag

SEQ ID NO: 85674 - DNA, 19 bp, Artificial sequence
  SiRNA target sequence
attatttgaacaaagtaga

SEQ ID NO: 85675 - DNA, 19 bp, Artificial sequence
  SiRNA target sequence
ttatttgaacaaagtagac

SEQ ID NO: 85676 - DNA, 19 bp, Artificial sequence
  SiRNA target sequence
tatttgaacaaagtagacc

SEQ ID NO: 85677 - DNA, 19 bp, Artificial sequence
  SiRNA target sequence
atttgaacaaagtagacca

SEQ ID NO: 85678 - DNA, 19 bp, Artificial sequence
  SiRNA target sequence
tttgaacaaagtagaccaa

SEQ ID NO: 85679 - DNA, 19 bp, Artificial sequence
  SiRNA target sequence
ttgaacaaagtagaccaat

SEQ ID NO: 85680 - DNA, 19 bp, Artificial sequence
  SiRNA target sequence
tgaacaaagtagaccaata

SEQ ID NO: 85681 - DNA, 19 bp, Artificial sequence
  SiRNA target sequence
gaacaaagtagaccaatac

SEQ ID NO: 85682 - DNA, 19 bp, Artificial sequence
  SiRNA target sequence
aacaaagtagaccaatact

SEQ ID NO: 85683 - DNA, 19 bp, Artificial sequence
  SiRNA target sequence
acaaagtagaccaatacta

SEQ ID NO: 85684 - DNA, 19 bp, Artificial sequence
  SiRNA target sequence
caaagtagaccaatactat

SEQ ID NO: 85685 - DNA, 19 bp, Artificial sequence
  SiRNA target sequence
aaagtagaccaatactatc

SEQ ID NO: 85686 - DNA, 19 bp, Artificial sequence
  SiRNA target sequence
aagtagaccaatactatca

SEQ ID NO: 85687 - DNA, 19 bp, Artificial sequence
  SiRNA target sequence
agtagaccaatactatcac

SEQ ID NO: 85688 - DNA, 19 bp, Artificial sequence
  SiRNA target sequence
gtagaccaatactatcacc

SEQ ID NO: 85689 - DNA, 19 bp, Artificial sequence
  SiRNA target sequence
tagaccaatactatcacca

SEQ ID NO: 85690 - DNA, 19 bp, Artificial sequence
  SiRNA target sequence
agaccaatactatcaccag

SEQ ID NO: 85691 - DNA, 19 bp, Artificial sequence
  SiRNA target sequence
gaccaatactatcaccagg

SEQ ID NO: 85692 - DNA, 19 bp, Artificial sequence
  SiRNA target sequence
accaatactatcaccagga

SEQ ID NO: 85693 - DNA, 19 bp, Artificial sequence
  SiRNA target sequence
ccaatactatcaccaggaa

SEQ ID NO: 85694 - DNA, 19 bp, Artificial sequence
  SiRNA target sequence
caatactatcaccaggaac

SEQ ID NO: 85695 - DNA, 19 bp, Artificial sequence
  SiRNA target sequence
aatactatcaccaggaaca

SEQ ID NO: 85696 - DNA, 19 bp, Artificial sequence
  SiRNA target sequence
atactatcaccaggaacaa

SEQ ID NO: 85697 - DNA, 19 bp, Artificial sequence
  SiRNA target sequence
tactatcaccaggaacaaa

SEQ ID NO: 85698 - DNA, 19 bp, Artificial sequence
  SiRNA target sequence
actatcaccaggaacaaaa

SEQ ID NO: 85699 - DNA, 19 bp, Artificial sequence
  SiRNA target sequence
ctatcaccaggaacaaaat

SEQ ID NO: 85700 - DNA, 19 bp, Artificial sequence
  SiRNA target sequence
tatcaccaggaacaaaatc

SEQ ID NO: 85701 - DNA, 19 bp, Artificial sequence
  SiRNA target sequence
atcaccaggaacaaaatct

SEQ ID NO: 85702 - DNA, 19 bp, Artificial sequence
  SiRNA target sequence
tcaccaggaacaaaatcta

SEQ ID NO: 85703 - DNA, 19 bp, Artificial sequence
  SiRNA target sequence
caccaggaacaaaatctaa

SEQ ID NO: 85704 - DNA, 19 bp, Artificial sequence
  SiRNA target sequence
accaggaacaaaatctaat

SEQ ID NO: 85705 - DNA, 19 bp, Artificial sequence
  SiRNA target sequence
ccaggaacaaaatctaatg

SEQ ID NO: 85706 - DNA, 19 bp, Artificial sequence
  SiRNA target sequence
caggaacaaaatctaatgt

SEQ ID NO: 85707 - DNA, 19 bp, Artificial sequence
  SiRNA target sequence
aggaacaaaatctaatgta

SEQ ID NO: 85708 - DNA, 19 bp, Artificial sequence
  SiRNA target sequence
ggaacaaaatctaatgtat

SEQ ID NO: 85709 - DNA, 19 bp, Artificial sequence
  SiRNA target sequence
gaacaaaatctaatgtata

SEQ ID NO: 85710 - DNA, 19 bp, Artificial sequence
  SiRNA target sequence
aacaaaatctaatgtataa

SEQ ID NO: 85711 - DNA, 19 bp, Artificial sequence
  SiRNA target sequence
acaaaatctaatgtataat

SEQ ID NO: 85712 - DNA, 19 bp, Artificial sequence
  SiRNA target sequence
caaaatctaatgtataatt

SEQ ID NO: 85713 - DNA, 19 bp, Artificial sequence
  SiRNA target sequence
aaaatctaatgtataatta

SEQ ID NO: 85714 - DNA, 19 bp, Artificial sequence
  SiRNA target sequence
aaatctaatgtataattaa

SEQ ID NO: 85715 - DNA, 19 bp, Artificial sequence
  SiRNA target sequence
aatctaatgtataattaag

SEQ ID NO: 85716 - DNA, 19 bp, Artificial sequence
  SiRNA target sequence
atctaatgtataattaagt

SEQ ID NO: 85717 - DNA, 19 bp, Artificial sequence
  SiRNA target sequence
tctaatgtataattaagtt

SEQ ID NO: 85718 - DNA, 19 bp, Artificial sequence
  SiRNA target sequence
ctaatgtataattaagttg

SEQ ID NO: 85719 - DNA, 19 bp, Artificial sequence
  SiRNA target sequence
taatgtataattaagttga

SEQ ID NO: 85720 - DNA, 19 bp, Artificial sequence
  SiRNA target sequence
aatgtataattaagttgaa

SEQ ID NO: 85721 - DNA, 19 bp, Artificial sequence
  SiRNA target sequence
atgtataattaagttgaac

SEQ ID NO: 85722 - DNA, 19 bp, Artificial sequence
  SiRNA target sequence
tgtataattaagttgaacc

SEQ ID NO: 85723 - DNA, 19 bp, Artificial sequence
  SiRNA target sequence
gtataattaagttgaacct

SEQ ID NO: 85724 - DNA, 19 bp, Artificial sequence
  SiRNA target sequence
tataattaagttgaacctt

SEQ ID NO: 85725 - DNA, 19 bp, Artificial sequence
  SiRNA target sequence
ataattaagttgaacctta

SEQ ID NO: 85726 - DNA, 19 bp, Artificial sequence
  SiRNA target sequence
taattaagttgaaccttat

SEQ ID NO: 85727 - DNA, 19 bp, Artificial sequence
  SiRNA target sequence
aattaagttgaaccttata

SEQ ID NO: 85728 - DNA, 19 bp, Artificial sequence
  SiRNA target sequence
attaagttgaaccttatat

SEQ ID NO: 85729 - DNA, 19 bp, Artificial sequence
  SiRNA target sequence
ttaagttgaaccttatata

SEQ ID NO: 85730 - DNA, 19 bp, Artificial sequence
  SiRNA target sequence
taagttgaaccttatatac

SEQ ID NO: 85731 - DNA, 19 bp, Artificial sequence
  SiRNA target sequence
aagttgaaccttatatacc

SEQ ID NO: 85732 - DNA, 19 bp, Artificial sequence
  SiRNA target sequence
agttgaaccttatatacct

SEQ ID NO: 85733 - DNA, 19 bp, Artificial sequence
  SiRNA target sequence
gttgaaccttatatacctt

SEQ ID NO: 85734 - DNA, 19 bp, Artificial sequence
  SiRNA target sequence
ttgaaccttatataccttt

SEQ ID NO: 85735 - DNA, 19 bp, Artificial sequence
  SiRNA target sequence
tgaaccttatatacctttt

SEQ ID NO: 85736 - DNA, 19 bp, Artificial sequence
  SiRNA target sequence
gaaccttatataccttttt

SEQ ID NO: 85737 - DNA, 19 bp, Artificial sequence
  SiRNA target sequence
aaccttatatacctttttc

SEQ ID NO: 85738 - DNA, 19 bp, Artificial sequence
  SiRNA target sequence
accttatatacctttttcc

SEQ ID NO: 85739 - DNA, 19 bp, Artificial sequence
  SiRNA target sequence
ccttatatacctttttcca

SEQ ID NO: 85740 - DNA, 19 bp, Artificial sequence
  SiRNA target sequence
cttatatacctttttccat

SEQ ID NO: 85741 - DNA, 19 bp, Artificial sequence
  SiRNA target sequence
ttatatacctttttccatg

SEQ ID NO: 85742 - DNA, 19 bp, Artificial sequence
  SiRNA target sequence
tatatacctttttccatgt

SEQ ID NO: 85743 - DNA, 19 bp, Artificial sequence
  SiRNA target sequence
atatacctttttccatgta

SEQ ID NO: 85744 - DNA, 19 bp, Artificial sequence
  SiRNA target sequence
tatacctttttccatgtac

SEQ ID NO: 85745 - DNA, 19 bp, Artificial sequence
  SiRNA target sequence
atacctttttccatgtaca

SEQ ID NO: 85746 - DNA, 19 bp, Artificial sequence
  SiRNA target sequence
tacctttttccatgtacag

SEQ ID NO: 85747 - DNA, 19 bp, Artificial sequence
  SiRNA target sequence
acctttttccatgtacagg

SEQ ID NO: 85748 - DNA, 19 bp, Artificial sequence
  SiRNA target sequence
cctttttccatgtacagga

SEQ ID NO: 85749 - DNA, 19 bp, Artificial sequence
  SiRNA target sequence
ctttttccatgtacaggaa

SEQ ID NO: 85750 - DNA, 19 bp, Artificial sequence
  SiRNA target sequence
tttttccatgtacaggaaa

SEQ ID NO: 85751 - DNA, 19 bp, Artificial sequence
  SiRNA target sequence
ttttccatgtacaggaaag

SEQ ID NO: 85752 - DNA, 19 bp, Artificial sequence
  SiRNA target sequence
tttccatgtacaggaaagg

SEQ ID NO: 85753 - DNA, 19 bp, Artificial sequence
  SiRNA target sequence
ttccatgtacaggaaaggt

SEQ ID NO: 85754 - DNA, 19 bp, Artificial sequence
  SiRNA target sequence
tccatgtacaggaaaggtt

SEQ ID NO: 85755 - DNA, 19 bp, Artificial sequence
  SiRNA target sequence
ccatgtacaggaaaggttt

SEQ ID NO: 85756 - DNA, 19 bp, Artificial sequence
  SiRNA target sequence
catgtacaggaaaggtttt

SEQ ID NO: 85757 - DNA, 19 bp, Artificial sequence
  SiRNA target sequence
atgtacaggaaaggttttc

SEQ ID NO: 85758 - DNA, 19 bp, Artificial sequence
  SiRNA target sequence
tgtacaggaaaggttttca

SEQ ID NO: 85759 - DNA, 19 bp, Artificial sequence
  SiRNA target sequence
gtacaggaaaggttttcaa

SEQ ID NO: 85760 - DNA, 19 bp, Artificial sequence
  SiRNA target sequence
tacaggaaaggttttcaat

SEQ ID NO: 85761 - DNA, 19 bp, Artificial sequence
  SiRNA target sequence
acaggaaaggttttcaata

SEQ ID NO: 85762 - DNA, 19 bp, Artificial sequence
  SiRNA target sequence
caggaaaggttttcaatat

SEQ ID NO: 85763 - DNA, 19 bp, Artificial sequence
  SiRNA target sequence
aggaaaggttttcaatatt

SEQ ID NO: 85764 - DNA, 19 bp, Artificial sequence
  SiRNA target sequence
ggaaaggttttcaatattt

SEQ ID NO: 85765 - DNA, 19 bp, Artificial sequence
  SiRNA target sequence
gaaaggttttcaatattta

SEQ ID NO: 85766 - DNA, 19 bp, Artificial sequence
  SiRNA target sequence
aaaggttttcaatatttag

SEQ ID NO: 85767 - DNA, 19 bp, Artificial sequence
  SiRNA target sequence
aaggttttcaatatttagt

SEQ ID NO: 85768 - DNA, 19 bp, Artificial sequence
  SiRNA target sequence
aggttttcaatatttagta

SEQ ID NO: 85769 - DNA, 19 bp, Artificial sequence
  SiRNA target sequence
ggttttcaatatttagtat

SEQ ID NO: 85770 - DNA, 19 bp, Artificial sequence
  SiRNA target sequence
gttttcaatatttagtata

SEQ ID NO: 85771 - DNA, 19 bp, Artificial sequence
  SiRNA target sequence
ttttcaatatttagtatat

SEQ ID NO: 85772 - DNA, 19 bp, Artificial sequence
  SiRNA target sequence
tttcaatatttagtatatt

SEQ ID NO: 85773 - DNA, 19 bp, Artificial sequence
  SiRNA target sequence
ttcaatatttagtatattt

SEQ ID NO: 85774 - DNA, 19 bp, Artificial sequence
  SiRNA target sequence
tcaatatttagtatatttg

SEQ ID NO: 85775 - DNA, 19 bp, Artificial sequence
  SiRNA target sequence
caatatttagtatatttgt

SEQ ID NO: 85776 - DNA, 19 bp, Artificial sequence
  SiRNA target sequence
aatatttagtatatttgta

SEQ ID NO: 85777 - DNA, 19 bp, Artificial sequence
  SiRNA target sequence
atatttagtatatttgtat

SEQ ID NO: 85778 - DNA, 19 bp, Artificial sequence
  SiRNA target sequence
tatttagtatatttgtatc

SEQ ID NO: 85779 - DNA, 19 bp, Artificial sequence
  SiRNA target sequence
atttagtatatttgtatct

SEQ ID NO: 85780 - DNA, 19 bp, Artificial sequence
  SiRNA target sequence
tttagtatatttgtatcta

SEQ ID NO: 85781 - DNA, 19 bp, Artificial sequence
  SiRNA target sequence
ttagtatatttgtatctat

SEQ ID NO: 85782 - DNA, 19 bp, Artificial sequence
  SiRNA target sequence
tagtatatttgtatctatc

SEQ ID NO: 85783 - DNA, 19 bp, Artificial sequence
  SiRNA target sequence
agtatatttgtatctatca

SEQ ID NO: 85784 - DNA, 19 bp, Artificial sequence
  SiRNA target sequence
gtatatttgtatctatcaa

SEQ ID NO: 85785 - DNA, 19 bp, Artificial sequence
  SiRNA target sequence
tatatttgtatctatcaaa

SEQ ID NO: 85786 - DNA, 19 bp, Artificial sequence
  SiRNA target sequence
atatttgtatctatcaaat

SEQ ID NO: 85787 - DNA, 19 bp, Artificial sequence
  SiRNA target sequence
tatttgtatctatcaaatt

SEQ ID NO: 85788 - DNA, 19 bp, Artificial sequence
  SiRNA target sequence
atttgtatctatcaaattt

SEQ ID NO: 85789 - DNA, 19 bp, Artificial sequence
  SiRNA target sequence
tttgtatctatcaaattta

SEQ ID NO: 85790 - DNA, 19 bp, Artificial sequence
  SiRNA target sequence
ttgtatctatcaaatttat

SEQ ID NO: 85791 - DNA, 19 bp, Artificial sequence
  SiRNA target sequence
tgtatctatcaaatttata

SEQ ID NO: 85792 - DNA, 19 bp, Artificial sequence
  SiRNA target sequence
gtatctatcaaatttatat

SEQ ID NO: 85793 - DNA, 19 bp, Artificial sequence
  SiRNA target sequence
tatctatcaaatttatatt

SEQ ID NO: 85794 - DNA, 19 bp, Artificial sequence
  SiRNA target sequence
atctatcaaatttatattc

SEQ ID NO: 85795 - DNA, 19 bp, Artificial sequence
  SiRNA target sequence
tctatcaaatttatattct

SEQ ID NO: 85796 - DNA, 19 bp, Artificial sequence
  SiRNA target sequence
ctatcaaatttatattctc

SEQ ID NO: 85797 - DNA, 19 bp, Artificial sequence
  SiRNA target sequence
tatcaaatttatattctcg

SEQ ID NO: 85798 - DNA, 19 bp, Artificial sequence
  SiRNA target sequence
atcaaatttatattctcgt

SEQ ID NO: 85799 - DNA, 19 bp, Artificial sequence
  SiRNA target sequence
tcaaatttatattctcgtt

SEQ ID NO: 85800 - DNA, 19 bp, Artificial sequence
  SiRNA target sequence
caaatttatattctcgttt

SEQ ID NO: 85801 - DNA, 19 bp, Artificial sequence
  SiRNA target sequence
aaatttatattctcgtttg

SEQ ID NO: 85802 - DNA, 19 bp, Artificial sequence
  SiRNA target sequence
aatttatattctcgtttgt

SEQ ID NO: 85803 - DNA, 19 bp, Artificial sequence
  SiRNA target sequence
atttatattctcgtttgtc

SEQ ID NO: 85804 - DNA, 19 bp, Artificial sequence
  SiRNA target sequence
tttatattctcgtttgtct

SEQ ID NO: 85805 - DNA, 19 bp, Artificial sequence
  SiRNA target sequence
ttatattctcgtttgtctt

SEQ ID NO: 85806 - DNA, 19 bp, Artificial sequence
  SiRNA target sequence
tatattctcgtttgtcttt

SEQ ID NO: 85807 - DNA, 19 bp, Artificial sequence
  SiRNA target sequence
atattctcgtttgtcttta

SEQ ID NO: 85808 - DNA, 19 bp, Artificial sequence
  SiRNA target sequence
tattctcgtttgtctttat

SEQ ID NO: 85809 - DNA, 19 bp, Artificial sequence
  SiRNA target sequence
attctcgtttgtctttatt

SEQ ID NO: 85810 - DNA, 19 bp, Artificial sequence
  SiRNA target sequence
ttctcgtttgtctttattt

SEQ ID NO: 85811 - DNA, 19 bp, Artificial sequence
  SiRNA target sequence
tctcgtttgtctttatttt

SEQ ID NO: 85812 - DNA, 19 bp, Artificial sequence
  SiRNA target sequence
ctcgtttgtctttatttta

SEQ ID NO: 85813 - DNA, 19 bp, Artificial sequence
  SiRNA target sequence
tcgtttgtctttattttat

SEQ ID NO: 85814 - DNA, 19 bp, Artificial sequence
  SiRNA target sequence
cgtttgtctttattttata

SEQ ID NO: 85815 - DNA, 19 bp, Artificial sequence
  SiRNA target sequence
gtttgtctttattttataa

SEQ ID NO: 85816 - DNA, 19 bp, Artificial sequence
  SiRNA target sequence
tttgtctttattttataag

SEQ ID NO: 85817 - DNA, 19 bp, Artificial sequence
  SiRNA target sequence
ttgtctttattttataaga

SEQ ID NO: 85818 - DNA, 19 bp, Artificial sequence
  SiRNA target sequence
tgtctttattttataagaa

SEQ ID NO: 85819 - DNA, 19 bp, Artificial sequence
  SiRNA target sequence
gtctttattttataagaac

SEQ ID NO: 85820 - DNA, 19 bp, Artificial sequence
  SiRNA target sequence
tctttattttataagaacc

SEQ ID NO: 85821 - DNA, 19 bp, Artificial sequence
  SiRNA target sequence
ctttattttataagaacct

SEQ ID NO: 85822 - DNA, 19 bp, Artificial sequence
  SiRNA target sequence
tttattttataagaacctg

SEQ ID NO: 85823 - DNA, 19 bp, Artificial sequence
  SiRNA target sequence
ttattttataagaacctgt

SEQ ID NO: 85824 - DNA, 19 bp, Artificial sequence
  SiRNA target sequence
tattttataagaacctgta

SEQ ID NO: 85825 - DNA, 19 bp, Artificial sequence
  SiRNA target sequence
attttataagaacctgtat

SEQ ID NO: 85826 - DNA, 19 bp, Artificial sequence
  SiRNA target sequence
ttttataagaacctgtata

SEQ ID NO: 85827 - DNA, 19 bp, Artificial sequence
  SiRNA target sequence
tttataagaacctgtatag

SEQ ID NO: 85828 - DNA, 19 bp, Artificial sequence
  SiRNA target sequence
ttataagaacctgtatagt

SEQ ID NO: 85829 - DNA, 19 bp, Artificial sequence
  SiRNA target sequence
tataagaacctgtatagtt

SEQ ID NO: 85830 - DNA, 19 bp, Artificial sequence
  SiRNA target sequence
ataagaacctgtatagttg

SEQ ID NO: 85831 - DNA, 19 bp, Artificial sequence
  SiRNA target sequence
taagaacctgtatagttgg

SEQ ID NO: 85832 - DNA, 19 bp, Artificial sequence
  SiRNA target sequence
aagaacctgtatagttggt

SEQ ID NO: 85833 - DNA, 19 bp, Artificial sequence
  SiRNA target sequence
agaacctgtatagttggtc

SEQ ID NO: 85834 - DNA, 19 bp, Artificial sequence
  SiRNA target sequence
gaacctgtatagttggtct

SEQ ID NO: 85835 - DNA, 19 bp, Artificial sequence
  SiRNA target sequence
aacctgtatagttggtctt

SEQ ID NO: 85836 - DNA, 19 bp, Artificial sequence
  SiRNA target sequence
acctgtatagttggtcttt

SEQ ID NO: 85837 - DNA, 19 bp, Artificial sequence
  SiRNA target sequence
cctgtatagttggtctttt

SEQ ID NO: 85838 - DNA, 19 bp, Artificial sequence
  SiRNA target sequence
ctgtatagttggtcttttt

SEQ ID NO: 85839 - DNA, 19 bp, Artificial sequence
  SiRNA target sequence
tgtatagttggtcttttta

SEQ ID NO: 85840 - DNA, 19 bp, Artificial sequence
  SiRNA target sequence
gtatagttggtctttttaa

SEQ ID NO: 85841 - DNA, 19 bp, Artificial sequence
  SiRNA target sequence
tatagttggtctttttaat

SEQ ID NO: 85842 - DNA, 19 bp, Artificial sequence
  SiRNA target sequence
atagttggtctttttaatt

SEQ ID NO: 85843 - DNA, 19 bp, Artificial sequence
  SiRNA target sequence
tagttggtctttttaatta

SEQ ID NO: 85844 - DNA, 19 bp, Artificial sequence
  SiRNA target sequence
agttggtctttttaattat

SEQ ID NO: 85845 - DNA, 19 bp, Artificial sequence
  SiRNA target sequence
gttggtctttttaattata

SEQ ID NO: 85846 - DNA, 19 bp, Artificial sequence
  SiRNA target sequence
ttggtctttttaattataa

SEQ ID NO: 85847 - DNA, 19 bp, Artificial sequence
  SiRNA target sequence
tggtctttttaattataag

SEQ ID NO: 85848 - DNA, 19 bp, Artificial sequence
  SiRNA target sequence
ggtctttttaattataagc

SEQ ID NO: 85849 - DNA, 19 bp, Artificial sequence
  SiRNA target sequence
gtctttttaattataagct

SEQ ID NO: 85850 - DNA, 19 bp, Artificial sequence
  SiRNA target sequence
tctttttaattataagctt

SEQ ID NO: 85851 - DNA, 19 bp, Artificial sequence
  SiRNA target sequence
ctttttaattataagctta

SEQ ID NO: 85852 - DNA, 19 bp, Artificial sequence
  SiRNA target sequence
tttttaattataagcttat

SEQ ID NO: 85853 - DNA, 19 bp, Artificial sequence
  SiRNA target sequence
ttttaattataagcttatt

SEQ ID NO: 85854 - DNA, 19 bp, Artificial sequence
  SiRNA target sequence
tttaattataagcttattg

SEQ ID NO: 85855 - DNA, 19 bp, Artificial sequence
  SiRNA target sequence
ttaattataagcttattga

SEQ ID NO: 85856 - DNA, 19 bp, Artificial sequence
  SiRNA target sequence
taattataagcttattgaa

SEQ ID NO: 85857 - DNA, 19 bp, Artificial sequence
  SiRNA target sequence
aattataagcttattgaaa

SEQ ID NO: 85858 - DNA, 19 bp, Artificial sequence
  SiRNA target sequence
attataagcttattgaaat

SEQ ID NO: 85859 - DNA, 19 bp, Artificial sequence
  SiRNA target sequence
ttataagcttattgaaatt

SEQ ID NO: 85860 - DNA, 19 bp, Artificial sequence
  SiRNA target sequence
tataagcttattgaaattt

SEQ ID NO: 85861 - DNA, 19 bp, Artificial sequence
  SiRNA target sequence
ataagcttattgaaatttc

SEQ ID NO: 85862 - DNA, 19 bp, Artificial sequence
  SiRNA target sequence
taagcttattgaaatttct

SEQ ID NO: 85863 - DNA, 19 bp, Artificial sequence
  SiRNA target sequence
aagcttattgaaatttcta

SEQ ID NO: 85864 - DNA, 19 bp, Artificial sequence
  SiRNA target sequence
agcttattgaaatttctaa

SEQ ID NO: 85865 - DNA, 19 bp, Artificial sequence
  SiRNA target sequence
gcttattgaaatttctaat

SEQ ID NO: 85866 - DNA, 19 bp, Artificial sequence
  SiRNA target sequence
cttattgaaatttctaata

SEQ ID NO: 85867 - DNA, 19 bp, Artificial sequence
  SiRNA target sequence
ttattgaaatttctaatat

SEQ ID NO: 85868 - DNA, 19 bp, Artificial sequence
  SiRNA target sequence
tattgaaatttctaatatt

SEQ ID NO: 85869 - DNA, 19 bp, Artificial sequence
  SiRNA target sequence
attgaaatttctaatattt

SEQ ID NO: 85870 - DNA, 19 bp, Artificial sequence
  SiRNA target sequence
ttgaaatttctaatattta

SEQ ID NO: 85871 - DNA, 19 bp, Artificial sequence
  SiRNA target sequence
tgaaatttctaatatttaa

SEQ ID NO: 85872 - DNA, 19 bp, Artificial sequence
  SiRNA target sequence
gaaatttctaatatttaaa

SEQ ID NO: 85873 - DNA, 19 bp, Artificial sequence
  SiRNA target sequence
aaatttctaatatttaaag

SEQ ID NO: 85874 - DNA, 19 bp, Artificial sequence
  SiRNA target sequence
aatttctaatatttaaagg

SEQ ID NO: 85875 - DNA, 19 bp, Artificial sequence
  SiRNA target sequence
atttctaatatttaaagga

SEQ ID NO: 85876 - DNA, 19 bp, Artificial sequence
  SiRNA target sequence
tttctaatatttaaaggaa

SEQ ID NO: 85877 - DNA, 19 bp, Artificial sequence
  SiRNA target sequence
ttctaatatttaaaggaac

SEQ ID NO: 85878 - DNA, 19 bp, Artificial sequence
  SiRNA target sequence
tctaatatttaaaggaaca

SEQ ID NO: 85879 - DNA, 19 bp, Artificial sequence
  SiRNA target sequence
ctaatatttaaaggaacaa

SEQ ID NO: 85880 - DNA, 19 bp, Artificial sequence
  SiRNA target sequence
taatatttaaaggaacaaa

SEQ ID NO: 85881 - DNA, 19 bp, Artificial sequence
  SiRNA target sequence
aatatttaaaggaacaaaa

SEQ ID NO: 85882 - DNA, 19 bp, Artificial sequence
  SiRNA target sequence
atatttaaaggaacaaaat

SEQ ID NO: 85883 - DNA, 19 bp, Artificial sequence
  SiRNA target sequence
tatttaaaggaacaaaatc

SEQ ID NO: 85884 - DNA, 19 bp, Artificial sequence
  SiRNA target sequence
atttaaaggaacaaaatct

SEQ ID NO: 85885 - DNA, 19 bp, Artificial sequence
  SiRNA target sequence
tttaaaggaacaaaatcta

SEQ ID NO: 85886 - DNA, 19 bp, Artificial sequence
  SiRNA target sequence
ttaaaggaacaaaatctac

SEQ ID NO: 85887 - DNA, 19 bp, Artificial sequence
  SiRNA target sequence
taaaggaacaaaatctaca

SEQ ID NO: 85888 - DNA, 19 bp, Artificial sequence
  SiRNA target sequence
aaaggaacaaaatctacat

SEQ ID NO: 85889 - DNA, 19 bp, Artificial sequence
  SiRNA target sequence
aaggaacaaaatctacatt

SEQ ID NO: 85890 - DNA, 19 bp, Artificial sequence
  SiRNA target sequence
aggaacaaaatctacattt

SEQ ID NO: 85891 - DNA, 19 bp, Artificial sequence
  SiRNA target sequence
ggaacaaaatctacattta

SEQ ID NO: 85892 - DNA, 19 bp, Artificial sequence
  SiRNA target sequence
gaacaaaatctacatttag

SEQ ID NO: 85893 - DNA, 19 bp, Artificial sequence
  SiRNA target sequence
aacaaaatctacatttaga

SEQ ID NO: 85894 - DNA, 19 bp, Artificial sequence
  SiRNA target sequence
acaaaatctacatttagat

SEQ ID NO: 85895 - DNA, 19 bp, Artificial sequence
  SiRNA target sequence
caaaatctacatttagatt

SEQ ID NO: 85896 - DNA, 19 bp, Artificial sequence
  SiRNA target sequence
aaaatctacatttagatta

SEQ ID NO: 85897 - DNA, 19 bp, Artificial sequence
  SiRNA target sequence
aaatctacatttagattat

SEQ ID NO: 85898 - DNA, 19 bp, Artificial sequence
  SiRNA target sequence
aatctacatttagattata

SEQ ID NO: 85899 - DNA, 19 bp, Artificial sequence
  SiRNA target sequence
atctacatttagattatat

SEQ ID NO: 85900 - DNA, 19 bp, Artificial sequence
  SiRNA target sequence
tctacatttagattatatt

SEQ ID NO: 85901 - DNA, 19 bp, Artificial sequence
  SiRNA target sequence
ctacatttagattatattc

SEQ ID NO: 85902 - DNA, 19 bp, Artificial sequence
  SiRNA target sequence
tacatttagattatattct

SEQ ID NO: 85903 - DNA, 19 bp, Artificial sequence
  SiRNA target sequence
acatttagattatattcta

SEQ ID NO: 85904 - DNA, 19 bp, Artificial sequence
  SiRNA target sequence
catttagattatattctaa

SEQ ID NO: 85905 - DNA, 19 bp, Artificial sequence
  SiRNA target sequence
atttagattatattctaat

SEQ ID NO: 85906 - DNA, 19 bp, Artificial sequence
  SiRNA target sequence
tttagattatattctaatt

SEQ ID NO: 85907 - DNA, 19 bp, Artificial sequence
  SiRNA target sequence
ttagattatattctaattt

SEQ ID NO: 85908 - DNA, 19 bp, Artificial sequence
  SiRNA target sequence
tagattatattctaattta

SEQ ID NO: 85909 - DNA, 19 bp, Artificial sequence
  SiRNA target sequence
agattatattctaatttat

SEQ ID NO: 85910 - DNA, 19 bp, Artificial sequence
  SiRNA target sequence
gattatattctaatttatt

SEQ ID NO: 85911 - DNA, 19 bp, Artificial sequence
  SiRNA target sequence
attatattctaatttattg

SEQ ID NO: 85912 - DNA, 19 bp, Artificial sequence
  SiRNA target sequence
ttatattctaatttattga

SEQ ID NO: 85913 - DNA, 19 bp, Artificial sequence
  SiRNA target sequence
tatattctaatttattgaa

SEQ ID NO: 85914 - DNA, 19 bp, Artificial sequence
  SiRNA target sequence
atattctaatttattgaat

SEQ ID NO: 85915 - DNA, 19 bp, Artificial sequence
  SiRNA target sequence
tattctaatttattgaatt

SEQ ID NO: 85916 - DNA, 19 bp, Artificial sequence
  SiRNA target sequence
attctaatttattgaattt

SEQ ID NO: 85917 - DNA, 19 bp, Artificial sequence
  SiRNA target sequence
ttctaatttattgaatttc

SEQ ID NO: 85918 - DNA, 19 bp, Artificial sequence
  SiRNA target sequence
tctaatttattgaatttca

SEQ ID NO: 85919 - DNA, 19 bp, Artificial sequence
  SiRNA target sequence
ctaatttattgaatttcat

SEQ ID NO: 85920 - DNA, 20 bp, Artificial sequence
  SiRNA target sequence
ttatatccaactatcaaaaa

SEQ ID NO: 85921 - DNA, 20 bp, Artificial sequence
  SiRNA target sequence
tatatccaactatcaaaaaa

SEQ ID NO: 85922 - DNA, 20 bp, Artificial sequence
  SiRNA target sequence
atatccaactatcaaaaaat

SEQ ID NO: 85923 - DNA, 20 bp, Artificial sequence
  SiRNA target sequence
tatccaactatcaaaaaata

SEQ ID NO: 85924 - DNA, 20 bp, Artificial sequence
  SiRNA target sequence
atccaactatcaaaaaatag

SEQ ID NO: 85925 - DNA, 20 bp, Artificial sequence
  SiRNA target sequence
tccaactatcaaaaaatagc

SEQ ID NO: 85926 - DNA, 20 bp, Artificial sequence
  SiRNA target sequence
ccaactatcaaaaaatagcc

SEQ ID NO: 85927 - DNA, 20 bp, Artificial sequence
  SiRNA target sequence
caactatcaaaaaatagcct

SEQ ID NO: 85928 - DNA, 20 bp, Artificial sequence
  SiRNA target sequence
aactatcaaaaaatagcctc

SEQ ID NO: 85929 - DNA, 20 bp, Artificial sequence
  SiRNA target sequence
actatcaaaaaatagcctct

SEQ ID NO: 85930 - DNA, 20 bp, Artificial sequence
  SiRNA target sequence
ctatcaaaaaatagcctctt

SEQ ID NO: 85931 - DNA, 20 bp, Artificial sequence
  SiRNA target sequence
tatcaaaaaatagcctcttt

SEQ ID NO: 85932 - DNA, 20 bp, Artificial sequence
  SiRNA target sequence
atcaaaaaatagcctctttt

SEQ ID NO: 85933 - DNA, 20 bp, Artificial sequence
  SiRNA target sequence
tcaaaaaatagcctcttttc

SEQ ID NO: 85934 - DNA, 20 bp, Artificial sequence
  SiRNA target sequence
caaaaaatagcctcttttct

SEQ ID NO: 85935 - DNA, 20 bp, Artificial sequence
  SiRNA target sequence
aaaaaatagcctcttttctt

SEQ ID NO: 85936 - DNA, 20 bp, Artificial sequence
  SiRNA target sequence
aaaaatagcctcttttcttt

SEQ ID NO: 85937 - DNA, 20 bp, Artificial sequence
  SiRNA target sequence
aaaatagcctcttttctttc

SEQ ID NO: 85938 - DNA, 20 bp, Artificial sequence
  SiRNA target sequence
aaatagcctcttttctttca

SEQ ID NO: 85939 - DNA, 20 bp, Artificial sequence
  SiRNA target sequence
aatagcctcttttctttcac

SEQ ID NO: 85940 - DNA, 20 bp, Artificial sequence
  SiRNA target sequence
atagcctcttttctttcaca

SEQ ID NO: 85941 - DNA, 20 bp, Artificial sequence
  SiRNA target sequence
tagcctcttttctttcacaa

SEQ ID NO: 85942 - DNA, 20 bp, Artificial sequence
  SiRNA target sequence
agcctcttttctttcacaat

SEQ ID NO: 85943 - DNA, 20 bp, Artificial sequence
  SiRNA target sequence
gcctcttttctttcacaatt

SEQ ID NO: 85944 - DNA, 20 bp, Artificial sequence
  SiRNA target sequence
cctcttttctttcacaattt

SEQ ID NO: 85945 - DNA, 20 bp, Artificial sequence
  SiRNA target sequence
ctcttttctttcacaatttc

SEQ ID NO: 85946 - DNA, 20 bp, Artificial sequence
  SiRNA target sequence
tcttttctttcacaatttca

SEQ ID NO: 85947 - DNA, 20 bp, Artificial sequence
  SiRNA target sequence
cttttctttcacaatttcag

SEQ ID NO: 85948 - DNA, 20 bp, Artificial sequence
  SiRNA target sequence
ttttctttcacaatttcaga

SEQ ID NO: 85949 - DNA, 20 bp, Artificial sequence
  SiRNA target sequence
tttctttcacaatttcagaa

SEQ ID NO: 85950 - DNA, 20 bp, Artificial sequence
  SiRNA target sequence
ttctttcacaatttcagaaa

SEQ ID NO: 85951 - DNA, 20 bp, Artificial sequence
  SiRNA target sequence
tctttcacaatttcagaaaa

SEQ ID NO: 85952 - DNA, 20 bp, Artificial sequence
  SiRNA target sequence
ctttcacaatttcagaaaaa

SEQ ID NO: 85953 - DNA, 20 bp, Artificial sequence
  SiRNA target sequence
tttcacaatttcagaaaaat

SEQ ID NO: 85954 - DNA, 20 bp, Artificial sequence
  SiRNA target sequence
ttcacaatttcagaaaaatt

SEQ ID NO: 85955 - DNA, 20 bp, Artificial sequence
  SiRNA target sequence
tcacaatttcagaaaaattt

SEQ ID NO: 85956 - DNA, 20 bp, Artificial sequence
  SiRNA target sequence
cacaatttcagaaaaatttt

SEQ ID NO: 85957 - DNA, 20 bp, Artificial sequence
  SiRNA target sequence
acaatttcagaaaaattttc

SEQ ID NO: 85958 - DNA, 20 bp, Artificial sequence
  SiRNA target sequence
caatttcagaaaaattttca

SEQ ID NO: 85959 - DNA, 20 bp, Artificial sequence
  SiRNA target sequence
aatttcagaaaaattttcat

SEQ ID NO: 85960 - DNA, 20 bp, Artificial sequence
  SiRNA target sequence
atttcagaaaaattttcatt

SEQ ID NO: 85961 - DNA, 20 bp, Artificial sequence
  SiRNA target sequence
tttcagaaaaattttcatta

SEQ ID NO: 85962 - DNA, 20 bp, Artificial sequence
  SiRNA target sequence
ttcagaaaaattttcattaa

SEQ ID NO: 85963 - DNA, 20 bp, Artificial sequence
  SiRNA target sequence
tcagaaaaattttcattaaa

SEQ ID NO: 85964 - DNA, 20 bp, Artificial sequence
  SiRNA target sequence
cagaaaaattttcattaaaa

SEQ ID NO: 85965 - DNA, 20 bp, Artificial sequence
  SiRNA target sequence
agaaaaattttcattaaaaa

SEQ ID NO: 85966 - DNA, 20 bp, Artificial sequence
  SiRNA target sequence
gaaaaattttcattaaaaat

SEQ ID NO: 85967 - DNA, 20 bp, Artificial sequence
  SiRNA target sequence
aaaaattttcattaaaaatg

SEQ ID NO: 85968 - DNA, 20 bp, Artificial sequence
  SiRNA target sequence
aaaattttcattaaaaatgc

SEQ ID NO: 85969 - DNA, 20 bp, Artificial sequence
  SiRNA target sequence
aaattttcattaaaaatgct

SEQ ID NO: 85970 - DNA, 20 bp, Artificial sequence
  SiRNA target sequence
aattttcattaaaaatgcta

SEQ ID NO: 85971 - DNA, 20 bp, Artificial sequence
  SiRNA target sequence
attttcattaaaaatgctat

SEQ ID NO: 85972 - DNA, 20 bp, Artificial sequence
  SiRNA target sequence
ttttcattaaaaatgctata

SEQ ID NO: 85973 - DNA, 20 bp, Artificial sequence
  SiRNA target sequence
tttcattaaaaatgctataa

SEQ ID NO: 85974 - DNA, 20 bp, Artificial sequence
  SiRNA target sequence
ttcattaaaaatgctataaa

SEQ ID NO: 85975 - DNA, 20 bp, Artificial sequence
  SiRNA target sequence
tcattaaaaatgctataaat

SEQ ID NO: 85976 - DNA, 20 bp, Artificial sequence
  SiRNA target sequence
cattaaaaatgctataaata

SEQ ID NO: 85977 - DNA, 20 bp, Artificial sequence
  SiRNA target sequence
attaaaaatgctataaatag

SEQ ID NO: 85978 - DNA, 20 bp, Artificial sequence
  SiRNA target sequence
ttaaaaatgctataaatagt

SEQ ID NO: 85979 - DNA, 20 bp, Artificial sequence
  SiRNA target sequence
taaaaatgctataaatagtt

SEQ ID NO: 85980 - DNA, 20 bp, Artificial sequence
  SiRNA target sequence
aaaaatgctataaatagttt

SEQ ID NO: 85981 - DNA, 20 bp, Artificial sequence
  SiRNA target sequence
aaaatgctataaatagtttt

SEQ ID NO: 85982 - DNA, 20 bp, Artificial sequence
  SiRNA target sequence
aaatgctataaatagttttt

SEQ ID NO: 85983 - DNA, 20 bp, Artificial sequence
  SiRNA target sequence
aatgctataaatagtttttt

SEQ ID NO: 85984 - DNA, 20 bp, Artificial sequence
  SiRNA target sequence
atgctataaatagttttttg

SEQ ID NO: 85985 - DNA, 20 bp, Artificial sequence
  SiRNA target sequence
tgctataaatagttttttgc

SEQ ID NO: 85986 - DNA, 20 bp, Artificial sequence
  SiRNA target sequence
gctataaatagttttttgca

SEQ ID NO: 85987 - DNA, 20 bp, Artificial sequence
  SiRNA target sequence
ctataaatagttttttgcat

SEQ ID NO: 85988 - DNA, 20 bp, Artificial sequence
  SiRNA target sequence
tataaatagttttttgcata

SEQ ID NO: 85989 - DNA, 20 bp, Artificial sequence
  SiRNA target sequence
ataaatagttttttgcatat

SEQ ID NO: 85990 - DNA, 20 bp, Artificial sequence
  SiRNA target sequence
taaatagttttttgcatatc

SEQ ID NO: 85991 - DNA, 20 bp, Artificial sequence
  SiRNA target sequence
aaatagttttttgcatatca

SEQ ID NO: 85992 - DNA, 20 bp, Artificial sequence
  SiRNA target sequence
aatagttttttgcatatcag

SEQ ID NO: 85993 - DNA, 20 bp, Artificial sequence
  SiRNA target sequence
atagttttttgcatatcagg

SEQ ID NO: 85994 - DNA, 20 bp, Artificial sequence
  SiRNA target sequence
tagttttttgcatatcaggt

SEQ ID NO: 85995 - DNA, 20 bp, Artificial sequence
  SiRNA target sequence
agttttttgcatatcaggtc

SEQ ID NO: 85996 - DNA, 20 bp, Artificial sequence
  SiRNA target sequence
gttttttgcatatcaggtcg

SEQ ID NO: 85997 - DNA, 20 bp, Artificial sequence
  SiRNA target sequence
ttttttgcatatcaggtcgg

SEQ ID NO: 85998 - DNA, 20 bp, Artificial sequence
  SiRNA target sequence
tttttgcatatcaggtcggc

SEQ ID NO: 85999 - DNA, 20 bp, Artificial sequence
  SiRNA target sequence
ttttgcatatcaggtcggcc

SEQ ID NO: 86000 - DNA, 20 bp, Artificial sequence
  SiRNA target sequence
tttgcatatcaggtcggcca

SEQ ID NO: 86001 - DNA, 20 bp, Artificial sequence
  SiRNA target sequence
ttgcatatcaggtcggccac

SEQ ID NO: 86002 - DNA, 20 bp, Artificial sequence
  SiRNA target sequence
tgcatatcaggtcggccaca

SEQ ID NO: 86003 - DNA, 20 bp, Artificial sequence
  SiRNA target sequence
gcatatcaggtcggccacaa

SEQ ID NO: 86004 - DNA, 20 bp, Artificial sequence
  SiRNA target sequence
catatcaggtcggccacaaa

SEQ ID NO: 86005 - DNA, 20 bp, Artificial sequence
  SiRNA target sequence
atatcaggtcggccacaaac

SEQ ID NO: 86006 - DNA, 20 bp, Artificial sequence
  SiRNA target sequence
tatcaggtcggccacaaaca

SEQ ID NO: 86007 - DNA, 20 bp, Artificial sequence
  SiRNA target sequence
atcaggtcggccacaaacat

SEQ ID NO: 86008 - DNA, 20 bp, Artificial sequence
  SiRNA target sequence
tcaggtcggccacaaacata

SEQ ID NO: 86009 - DNA, 20 bp, Artificial sequence
  SiRNA target sequence
caggtcggccacaaacataa

SEQ ID NO: 86010 - DNA, 20 bp, Artificial sequence
  SiRNA target sequence
aggtcggccacaaacataaa

SEQ ID NO: 86011 - DNA, 20 bp, Artificial sequence
  SiRNA target sequence
ggtcggccacaaacataaac

SEQ ID NO: 86012 - DNA, 20 bp, Artificial sequence
  SiRNA target sequence
gtcggccacaaacataaacc

SEQ ID NO: 86013 - DNA, 20 bp, Artificial sequence
  SiRNA target sequence
tcggccacaaacataaacca

SEQ ID NO: 86014 - DNA, 20 bp, Artificial sequence
  SiRNA target sequence
cggccacaaacataaaccaa

SEQ ID NO: 86015 - DNA, 20 bp, Artificial sequence
  SiRNA target sequence
ggccacaaacataaaccaaa

SEQ ID NO: 86016 - DNA, 20 bp, Artificial sequence
  SiRNA target sequence
gccacaaacataaaccaaac

SEQ ID NO: 86017 - DNA, 20 bp, Artificial sequence
  SiRNA target sequence
ccacaaacataaaccaaaca

SEQ ID NO: 86018 - DNA, 20 bp, Artificial sequence
  SiRNA target sequence
cacaaacataaaccaaacat

SEQ ID NO: 86019 - DNA, 20 bp, Artificial sequence
  SiRNA target sequence
acaaacataaaccaaacatc

SEQ ID NO: 86020 - DNA, 20 bp, Artificial sequence
  SiRNA target sequence
caaacataaaccaaacatcc

SEQ ID NO: 86021 - DNA, 20 bp, Artificial sequence
  SiRNA target sequence
aaacataaaccaaacatccg

SEQ ID NO: 86022 - DNA, 20 bp, Artificial sequence
  SiRNA target sequence
aacataaaccaaacatccgt

SEQ ID NO: 86023 - DNA, 20 bp, Artificial sequence
  SiRNA target sequence
acataaaccaaacatccgtc

SEQ ID NO: 86024 - DNA, 20 bp, Artificial sequence
  SiRNA target sequence
cataaaccaaacatccgtct

SEQ ID NO: 86025 - DNA, 20 bp, Artificial sequence
  SiRNA target sequence
ataaaccaaacatccgtctt

SEQ ID NO: 86026 - DNA, 20 bp, Artificial sequence
  SiRNA target sequence
taaaccaaacatccgtcttt

SEQ ID NO: 86027 - DNA, 20 bp, Artificial sequence
  SiRNA target sequence
aaaccaaacatccgtcttta

SEQ ID NO: 86028 - DNA, 20 bp, Artificial sequence
  SiRNA target sequence
aaccaaacatccgtctttaa

SEQ ID NO: 86029 - DNA, 20 bp, Artificial sequence
  SiRNA target sequence
accaaacatccgtctttaat

SEQ ID NO: 86030 - DNA, 20 bp, Artificial sequence
  SiRNA target sequence
ccaaacatccgtctttaatg

SEQ ID NO: 86031 - DNA, 20 bp, Artificial sequence
  SiRNA target sequence
caaacatccgtctttaatgt

SEQ ID NO: 86032 - DNA, 20 bp, Artificial sequence
  SiRNA target sequence
aaacatccgtctttaatgta

SEQ ID NO: 86033 - DNA, 20 bp, Artificial sequence
  SiRNA target sequence
aacatccgtctttaatgtat

SEQ ID NO: 86034 - DNA, 20 bp, Artificial sequence
  SiRNA target sequence
acatccgtctttaatgtatg

SEQ ID NO: 86035 - DNA, 20 bp, Artificial sequence
  SiRNA target sequence
catccgtctttaatgtatgt

SEQ ID NO: 86036 - DNA, 20 bp, Artificial sequence
  SiRNA target sequence
atccgtctttaatgtatgtt

SEQ ID NO: 86037 - DNA, 20 bp, Artificial sequence
  SiRNA target sequence
tccgtctttaatgtatgttt

SEQ ID NO: 86038 - DNA, 20 bp, Artificial sequence
  SiRNA target sequence
ccgtctttaatgtatgtttt

SEQ ID NO: 86039 - DNA, 20 bp, Artificial sequence
  SiRNA target sequence
cgtctttaatgtatgttttt

SEQ ID NO: 86040 - DNA, 20 bp, Artificial sequence
  SiRNA target sequence
gtctttaatgtatgttttta

SEQ ID NO: 86041 - DNA, 20 bp, Artificial sequence
  SiRNA target sequence
tctttaatgtatgtttttat

SEQ ID NO: 86042 - DNA, 20 bp, Artificial sequence
  SiRNA target sequence
ctttaatgtatgtttttatc

SEQ ID NO: 86043 - DNA, 20 bp, Artificial sequence
  SiRNA target sequence
tttaatgtatgtttttatct

SEQ ID NO: 86044 - DNA, 20 bp, Artificial sequence
  SiRNA target sequence
ttaatgtatgtttttatctc

SEQ ID NO: 86045 - DNA, 20 bp, Artificial sequence
  SiRNA target sequence
taatgtatgtttttatctca

SEQ ID NO: 86046 - DNA, 20 bp, Artificial sequence
  SiRNA target sequence
aatgtatgtttttatctcat

SEQ ID NO: 86047 - DNA, 20 bp, Artificial sequence
  SiRNA target sequence
atgtatgtttttatctcatt

SEQ ID NO: 86048 - DNA, 20 bp, Artificial sequence
  SiRNA target sequence
tgtatgtttttatctcattt

SEQ ID NO: 86049 - DNA, 20 bp, Artificial sequence
  SiRNA target sequence
gtatgtttttatctcattta

SEQ ID NO: 86050 - DNA, 20 bp, Artificial sequence
  SiRNA target sequence
tatgtttttatctcatttaa

SEQ ID NO: 86051 - DNA, 20 bp, Artificial sequence
  SiRNA target sequence
atgtttttatctcatttaaa

SEQ ID NO: 86052 - DNA, 20 bp, Artificial sequence
  SiRNA target sequence
tgtttttatctcatttaaat

SEQ ID NO: 86053 - DNA, 20 bp, Artificial sequence
  SiRNA target sequence
gtttttatctcatttaaatt

SEQ ID NO: 86054 - DNA, 20 bp, Artificial sequence
  SiRNA target sequence
tttttatctcatttaaattt

SEQ ID NO: 86055 - DNA, 20 bp, Artificial sequence
  SiRNA target sequence
ttttatctcatttaaatttt

SEQ ID NO: 86056 - DNA, 20 bp, Artificial sequence
  SiRNA target sequence
tttatctcatttaaattttg

SEQ ID NO: 86057 - DNA, 20 bp, Artificial sequence
  SiRNA target sequence
ttatctcatttaaattttgt

SEQ ID NO: 86058 - DNA, 20 bp, Artificial sequence
  SiRNA target sequence
tatctcatttaaattttgta

SEQ ID NO: 86059 - DNA, 20 bp, Artificial sequence
  SiRNA target sequence
atctcatttaaattttgtaa

SEQ ID NO: 86060 - DNA, 20 bp, Artificial sequence
  SiRNA target sequence
tctcatttaaattttgtaat

SEQ ID NO: 86061 - DNA, 20 bp, Artificial sequence
  SiRNA target sequence
ctcatttaaattttgtaata

SEQ ID NO: 86062 - DNA, 20 bp, Artificial sequence
  SiRNA target sequence
tcatttaaattttgtaataa

SEQ ID NO: 86063 - DNA, 20 bp, Artificial sequence
  SiRNA target sequence
catttaaattttgtaataaa

SEQ ID NO: 86064 - DNA, 20 bp, Artificial sequence
  SiRNA target sequence
atttaaattttgtaataaat

SEQ ID NO: 86065 - DNA, 20 bp, Artificial sequence
  SiRNA target sequence
tttaaattttgtaataaata

SEQ ID NO: 86066 - DNA, 20 bp, Artificial sequence
  SiRNA target sequence
ttaaattttgtaataaataa

SEQ ID NO: 86067 - DNA, 20 bp, Artificial sequence
  SiRNA target sequence
taaattttgtaataaataat

SEQ ID NO: 86068 - DNA, 20 bp, Artificial sequence
  SiRNA target sequence
aaattttgtaataaataatc

SEQ ID NO: 86069 - DNA, 20 bp, Artificial sequence
  SiRNA target sequence
aattttgtaataaataatca

SEQ ID NO: 86070 - DNA, 20 bp, Artificial sequence
  SiRNA target sequence
attttgtaataaataatcag

SEQ ID NO: 86071 - DNA, 20 bp, Artificial sequence
  SiRNA target sequence
ttttgtaataaataatcagt

SEQ ID NO: 86072 - DNA, 20 bp, Artificial sequence
  SiRNA target sequence
tttgtaataaataatcagta

SEQ ID NO: 86073 - DNA, 20 bp, Artificial sequence
  SiRNA target sequence
ttgtaataaataatcagtaa

SEQ ID NO: 86074 - DNA, 20 bp, Artificial sequence
  SiRNA target sequence
tgtaataaataatcagtaac

SEQ ID NO: 86075 - DNA, 20 bp, Artificial sequence
  SiRNA target sequence
gtaataaataatcagtaaca

SEQ ID NO: 86076 - DNA, 20 bp, Artificial sequence
  SiRNA target sequence
taataaataatcagtaacat

SEQ ID NO: 86077 - DNA, 20 bp, Artificial sequence
  SiRNA target sequence
aataaataatcagtaacata

SEQ ID NO: 86078 - DNA, 20 bp, Artificial sequence
  SiRNA target sequence
ataaataatcagtaacataa

SEQ ID NO: 86079 - DNA, 20 bp, Artificial sequence
  SiRNA target sequence
taaataatcagtaacataaa

SEQ ID NO: 86080 - DNA, 20 bp, Artificial sequence
  SiRNA target sequence
aaataatcagtaacataaat

SEQ ID NO: 86081 - DNA, 20 bp, Artificial sequence
  SiRNA target sequence
aataatcagtaacataaatt

SEQ ID NO: 86082 - DNA, 20 bp, Artificial sequence
  SiRNA target sequence
ataatcagtaacataaattt

SEQ ID NO: 86083 - DNA, 20 bp, Artificial sequence
  SiRNA target sequence
taatcagtaacataaatttt

SEQ ID NO: 86084 - DNA, 20 bp, Artificial sequence
  SiRNA target sequence
aatcagtaacataaatttta

SEQ ID NO: 86085 - DNA, 20 bp, Artificial sequence
  SiRNA target sequence
atcagtaacataaattttat

SEQ ID NO: 86086 - DNA, 20 bp, Artificial sequence
  SiRNA target sequence
tcagtaacataaattttatt

SEQ ID NO: 86087 - DNA, 20 bp, Artificial sequence
  SiRNA target sequence
cagtaacataaattttatta

SEQ ID NO: 86088 - DNA, 20 bp, Artificial sequence
  SiRNA target sequence
agtaacataaattttattac

SEQ ID NO: 86089 - DNA, 20 bp, Artificial sequence
  SiRNA target sequence
gtaacataaattttattaca

SEQ ID NO: 86090 - DNA, 20 bp, Artificial sequence
  SiRNA target sequence
taacataaattttattacaa

SEQ ID NO: 86091 - DNA, 20 bp, Artificial sequence
  SiRNA target sequence
aacataaattttattacaag

SEQ ID NO: 86092 - DNA, 20 bp, Artificial sequence
  SiRNA target sequence
acataaattttattacaaga

SEQ ID NO: 86093 - DNA, 20 bp, Artificial sequence
  SiRNA target sequence
cataaattttattacaagat

SEQ ID NO: 86094 - DNA, 20 bp, Artificial sequence
  SiRNA target sequence
ataaattttattacaagata

SEQ ID NO: 86095 - DNA, 20 bp, Artificial sequence
  SiRNA target sequence
taaattttattacaagataa

SEQ ID NO: 86096 - DNA, 20 bp, Artificial sequence
  SiRNA target sequence
aaattttattacaagataaa

SEQ ID NO: 86097 - DNA, 20 bp, Artificial sequence
  SiRNA target sequence
aattttattacaagataaaa

SEQ ID NO: 86098 - DNA, 20 bp, Artificial sequence
  SiRNA target sequence
attttattacaagataaaat

SEQ ID NO: 86099 - DNA, 20 bp, Artificial sequence
  SiRNA target sequence
ttttattacaagataaaatt

SEQ ID NO: 86100 - DNA, 20 bp, Artificial sequence
  SiRNA target sequence
tttattacaagataaaattt

SEQ ID NO: 86101 - DNA, 20 bp, Artificial sequence
  SiRNA target sequence
ttattacaagataaaatttt

SEQ ID NO: 86102 - DNA, 20 bp, Artificial sequence
  SiRNA target sequence
tattacaagataaaatttta

SEQ ID NO: 86103 - DNA, 20 bp, Artificial sequence
  SiRNA target sequence
attacaagataaaattttaa

SEQ ID NO: 86104 - DNA, 20 bp, Artificial sequence
  SiRNA target sequence
ttacaagataaaattttaat

SEQ ID NO: 86105 - DNA, 20 bp, Artificial sequence
  SiRNA target sequence
tacaagataaaattttaata

SEQ ID NO: 86106 - DNA, 20 bp, Artificial sequence
  SiRNA target sequence
acaagataaaattttaataa

SEQ ID NO: 86107 - DNA, 20 bp, Artificial sequence
  SiRNA target sequence
caagataaaattttaataat

SEQ ID NO: 86108 - DNA, 20 bp, Artificial sequence
  SiRNA target sequence
aagataaaattttaataatt

SEQ ID NO: 86109 - DNA, 20 bp, Artificial sequence
  SiRNA target sequence
agataaaattttaataattt

SEQ ID NO: 86110 - DNA, 20 bp, Artificial sequence
  SiRNA target sequence
gataaaattttaataatttc

SEQ ID NO: 86111 - DNA, 20 bp, Artificial sequence
  SiRNA target sequence
ataaaattttaataatttct

SEQ ID NO: 86112 - DNA, 20 bp, Artificial sequence
  SiRNA target sequence
taaaattttaataatttctg

SEQ ID NO: 86113 - DNA, 20 bp, Artificial sequence
  SiRNA target sequence
aaaattttaataatttctgt

SEQ ID NO: 86114 - DNA, 20 bp, Artificial sequence
  SiRNA target sequence
aaattttaataatttctgtg

SEQ ID NO: 86115 - DNA, 20 bp, Artificial sequence
  SiRNA target sequence
aattttaataatttctgtgt

SEQ ID NO: 86116 - DNA, 20 bp, Artificial sequence
  SiRNA target sequence
attttaataatttctgtgtt

SEQ ID NO: 86117 - DNA, 20 bp, Artificial sequence
  SiRNA target sequence
ttttaataatttctgtgttt

SEQ ID NO: 86118 - DNA, 20 bp, Artificial sequence
  SiRNA target sequence
tttaataatttctgtgtttt

SEQ ID NO: 86119 - DNA, 20 bp, Artificial sequence
  SiRNA target sequence
ttaataatttctgtgttttt

SEQ ID NO: 86120 - DNA, 20 bp, Artificial sequence
  SiRNA target sequence
taataatttctgtgttttta

SEQ ID NO: 86121 - DNA, 20 bp, Artificial sequence
  SiRNA target sequence
aataatttctgtgtttttat

SEQ ID NO: 86122 - DNA, 20 bp, Artificial sequence
  SiRNA target sequence
ataatttctgtgtttttata

SEQ ID NO: 86123 - DNA, 20 bp, Artificial sequence
  SiRNA target sequence
taatttctgtgtttttatat

SEQ ID NO: 86124 - DNA, 20 bp, Artificial sequence
  SiRNA target sequence
aatttctgtgtttttatatt

SEQ ID NO: 86125 - DNA, 20 bp, Artificial sequence
  SiRNA target sequence
atttctgtgtttttatattt

SEQ ID NO: 86126 - DNA, 20 bp, Artificial sequence
  SiRNA target sequence
tttctgtgtttttatatttt

SEQ ID NO: 86127 - DNA, 20 bp, Artificial sequence
  SiRNA target sequence
ttctgtgtttttatattttg

SEQ ID NO: 86128 - DNA, 20 bp, Artificial sequence
  SiRNA target sequence
tctgtgtttttatattttgc

SEQ ID NO: 86129 - DNA, 20 bp, Artificial sequence
  SiRNA target sequence
ctgtgtttttatattttgca

SEQ ID NO: 86130 - DNA, 20 bp, Artificial sequence
  SiRNA target sequence
tgtgtttttatattttgcat

SEQ ID NO: 86131 - DNA, 20 bp, Artificial sequence
  SiRNA target sequence
gtgtttttatattttgcatc

SEQ ID NO: 86132 - DNA, 20 bp, Artificial sequence
  SiRNA target sequence
tgtttttatattttgcatct

SEQ ID NO: 86133 - DNA, 20 bp, Artificial sequence
  SiRNA target sequence
gtttttatattttgcatctt

SEQ ID NO: 86134 - DNA, 20 bp, Artificial sequence
  SiRNA target sequence
tttttatattttgcatcttt

SEQ ID NO: 86135 - DNA, 20 bp, Artificial sequence
  SiRNA target sequence
ttttatattttgcatcttta

SEQ ID NO: 86136 - DNA, 20 bp, Artificial sequence
  SiRNA target sequence
tttatattttgcatctttaa

SEQ ID NO: 86137 - DNA, 20 bp, Artificial sequence
  SiRNA target sequence
ttatattttgcatctttaat

SEQ ID NO: 86138 - DNA, 20 bp, Artificial sequence
  SiRNA target sequence
tatattttgcatctttaata

SEQ ID NO: 86139 - DNA, 20 bp, Artificial sequence
  SiRNA target sequence
atattttgcatctttaataa

SEQ ID NO: 86140 - DNA, 20 bp, Artificial sequence
  SiRNA target sequence
tattttgcatctttaataag

SEQ ID NO: 86141 - DNA, 20 bp, Artificial sequence
  SiRNA target sequence
attttgcatctttaataaga

SEQ ID NO: 86142 - DNA, 20 bp, Artificial sequence
  SiRNA target sequence
ttttgcatctttaataagat

SEQ ID NO: 86143 - DNA, 20 bp, Artificial sequence
  SiRNA target sequence
tttgcatctttaataagatc

SEQ ID NO: 86144 - DNA, 20 bp, Artificial sequence
  SiRNA target sequence
ttgcatctttaataagatca

SEQ ID NO: 86145 - DNA, 20 bp, Artificial sequence
  SiRNA target sequence
tgcatctttaataagatcat

SEQ ID NO: 86146 - DNA, 20 bp, Artificial sequence
  SiRNA target sequence
gcatctttaataagatcatc

SEQ ID NO: 86147 - DNA, 20 bp, Artificial sequence
  SiRNA target sequence
catctttaataagatcatct

SEQ ID NO: 86148 - DNA, 20 bp, Artificial sequence
  SiRNA target sequence
atctttaataagatcatctt

SEQ ID NO: 86149 - DNA, 20 bp, Artificial sequence
  SiRNA target sequence
tctttaataagatcatcttc

SEQ ID NO: 86150 - DNA, 20 bp, Artificial sequence
  SiRNA target sequence
ctttaataagatcatcttct

SEQ ID NO: 86151 - DNA, 20 bp, Artificial sequence
  SiRNA target sequence
tttaataagatcatcttctt

SEQ ID NO: 86152 - DNA, 20 bp, Artificial sequence
  SiRNA target sequence
ttaataagatcatcttcttg

SEQ ID NO: 86153 - DNA, 20 bp, Artificial sequence
  SiRNA target sequence
taataagatcatcttcttga

SEQ ID NO: 86154 - DNA, 20 bp, Artificial sequence
  SiRNA target sequence
aataagatcatcttcttgat

SEQ ID NO: 86155 - DNA, 20 bp, Artificial sequence
  SiRNA target sequence
ataagatcatcttcttgatt

SEQ ID NO: 86156 - DNA, 20 bp, Artificial sequence
  SiRNA target sequence
taagatcatcttcttgattt

SEQ ID NO: 86157 - DNA, 20 bp, Artificial sequence
  SiRNA target sequence
aagatcatcttcttgatttc

SEQ ID NO: 86158 - DNA, 20 bp, Artificial sequence
  SiRNA target sequence
agatcatcttcttgatttct

SEQ ID NO: 86159 - DNA, 20 bp, Artificial sequence
  SiRNA target sequence
gatcatcttcttgatttcta

SEQ ID NO: 86160 - DNA, 20 bp, Artificial sequence
  SiRNA target sequence
atcatcttcttgatttctaa

SEQ ID NO: 86161 - DNA, 20 bp, Artificial sequence
  SiRNA target sequence
tcatcttcttgatttctaaa

SEQ ID NO: 86162 - DNA, 20 bp, Artificial sequence
  SiRNA target sequence
catcttcttgatttctaaat

SEQ ID NO: 86163 - DNA, 20 bp, Artificial sequence
  SiRNA target sequence
atcttcttgatttctaaatc

SEQ ID NO: 86164 - DNA, 20 bp, Artificial sequence
  SiRNA target sequence
tcttcttgatttctaaatcc

SEQ ID NO: 86165 - DNA, 20 bp, Artificial sequence
  SiRNA target sequence
cttcttgatttctaaatcca

SEQ ID NO: 86166 - DNA, 20 bp, Artificial sequence
  SiRNA target sequence
ttcttgatttctaaatccat

SEQ ID NO: 86167 - DNA, 20 bp, Artificial sequence
  SiRNA target sequence
tcttgatttctaaatccata

SEQ ID NO: 86168 - DNA, 20 bp, Artificial sequence
  SiRNA target sequence
cttgatttctaaatccatat

SEQ ID NO: 86169 - DNA, 20 bp, Artificial sequence
  SiRNA target sequence
ttgatttctaaatccatata

SEQ ID NO: 86170 - DNA, 20 bp, Artificial sequence
  SiRNA target sequence
tgatttctaaatccatatat

SEQ ID NO: 86171 - DNA, 20 bp, Artificial sequence
  SiRNA target sequence
gatttctaaatccatatatt

SEQ ID NO: 86172 - DNA, 20 bp, Artificial sequence
  SiRNA target sequence
atttctaaatccatatatta

SEQ ID NO: 86173 - DNA, 20 bp, Artificial sequence
  SiRNA target sequence
tttctaaatccatatattag

SEQ ID NO: 86174 - DNA, 20 bp, Artificial sequence
  SiRNA target sequence
ttctaaatccatatattagt

SEQ ID NO: 86175 - DNA, 20 bp, Artificial sequence
  SiRNA target sequence
tctaaatccatatattagtt

SEQ ID NO: 86176 - DNA, 20 bp, Artificial sequence
  SiRNA target sequence
ctaaatccatatattagttt

SEQ ID NO: 86177 - DNA, 20 bp, Artificial sequence
  SiRNA target sequence
taaatccatatattagtttg

SEQ ID NO: 86178 - DNA, 20 bp, Artificial sequence
  SiRNA target sequence
aaatccatatattagtttga

SEQ ID NO: 86179 - DNA, 20 bp, Artificial sequence
  SiRNA target sequence
aatccatatattagtttgat

SEQ ID NO: 86180 - DNA, 20 bp, Artificial sequence
  SiRNA target sequence
atccatatattagtttgata

SEQ ID NO: 86181 - DNA, 20 bp, Artificial sequence
  SiRNA target sequence
tccatatattagtttgatat

SEQ ID NO: 86182 - DNA, 20 bp, Artificial sequence
  SiRNA target sequence
ccatatattagtttgatata

SEQ ID NO: 86183 - DNA, 20 bp, Artificial sequence
  SiRNA target sequence
catatattagtttgatatat

SEQ ID NO: 86184 - DNA, 20 bp, Artificial sequence
  SiRNA target sequence
atatattagtttgatatatt

SEQ ID NO: 86185 - DNA, 20 bp, Artificial sequence
  SiRNA target sequence
tatattagtttgatatattg

SEQ ID NO: 86186 - DNA, 20 bp, Artificial sequence
  SiRNA target sequence
atattagtttgatatattga

SEQ ID NO: 86187 - DNA, 20 bp, Artificial sequence
  SiRNA target sequence
tattagtttgatatattgat

SEQ ID NO: 86188 - DNA, 20 bp, Artificial sequence
  SiRNA target sequence
attagtttgatatattgatc

SEQ ID NO: 86189 - DNA, 20 bp, Artificial sequence
  SiRNA target sequence
ttagtttgatatattgatcg

SEQ ID NO: 86190 - DNA, 20 bp, Artificial sequence
  SiRNA target sequence
tagtttgatatattgatcgt

SEQ ID NO: 86191 - DNA, 20 bp, Artificial sequence
  SiRNA target sequence
agtttgatatattgatcgtc

SEQ ID NO: 86192 - DNA, 20 bp, Artificial sequence
  SiRNA target sequence
gtttgatatattgatcgtct

SEQ ID NO: 86193 - DNA, 20 bp, Artificial sequence
  SiRNA target sequence
tttgatatattgatcgtctt

SEQ ID NO: 86194 - DNA, 20 bp, Artificial sequence
  SiRNA target sequence
ttgatatattgatcgtcttc

SEQ ID NO: 86195 - DNA, 20 bp, Artificial sequence
  SiRNA target sequence
tgatatattgatcgtcttct

SEQ ID NO: 86196 - DNA, 20 bp, Artificial sequence
  SiRNA target sequence
gatatattgatcgtcttctt

SEQ ID NO: 86197 - DNA, 20 bp, Artificial sequence
  SiRNA target sequence
atatattgatcgtcttcttt

SEQ ID NO: 86198 - DNA, 20 bp, Artificial sequence
  SiRNA target sequence
tatattgatcgtcttcttta

SEQ ID NO: 86199 - DNA, 20 bp, Artificial sequence
  SiRNA target sequence
atattgatcgtcttctttat

SEQ ID NO: 86200 - DNA, 20 bp, Artificial sequence
  SiRNA target sequence
tattgatcgtcttctttatt

SEQ ID NO: 86201 - DNA, 20 bp, Artificial sequence
  SiRNA target sequence
attgatcgtcttctttattt

SEQ ID NO: 86202 - DNA, 20 bp, Artificial sequence
  SiRNA target sequence
ttgatcgtcttctttatttt

SEQ ID NO: 86203 - DNA, 20 bp, Artificial sequence
  SiRNA target sequence
tgatcgtcttctttattttt

SEQ ID NO: 86204 - DNA, 20 bp, Artificial sequence
  SiRNA target sequence
gatcgtcttctttatttttc

SEQ ID NO: 86205 - DNA, 20 bp, Artificial sequence
  SiRNA target sequence
atcgtcttctttatttttca

SEQ ID NO: 86206 - DNA, 20 bp, Artificial sequence
  SiRNA target sequence
tcgtcttctttatttttcaa

SEQ ID NO: 86207 - DNA, 20 bp, Artificial sequence
  SiRNA target sequence
cgtcttctttatttttcaaa

SEQ ID NO: 86208 - DNA, 20 bp, Artificial sequence
  SiRNA target sequence
gtcttctttatttttcaaaa

SEQ ID NO: 86209 - DNA, 20 bp, Artificial sequence
  SiRNA target sequence
tcttctttatttttcaaaaa

SEQ ID NO: 86210 - DNA, 20 bp, Artificial sequence
  SiRNA target sequence
cttctttatttttcaaaaac

SEQ ID NO: 86211 - DNA, 20 bp, Artificial sequence
  SiRNA target sequence
ttctttatttttcaaaaacg

SEQ ID NO: 86212 - DNA, 20 bp, Artificial sequence
  SiRNA target sequence
tctttatttttcaaaaacga

SEQ ID NO: 86213 - DNA, 20 bp, Artificial sequence
  SiRNA target sequence
ctttatttttcaaaaacgaa

SEQ ID NO: 86214 - DNA, 20 bp, Artificial sequence
  SiRNA target sequence
tttatttttcaaaaacgaaa

SEQ ID NO: 86215 - DNA, 20 bp, Artificial sequence
  SiRNA target sequence
ttatttttcaaaaacgaaaa

SEQ ID NO: 86216 - DNA, 20 bp, Artificial sequence
  SiRNA target sequence
tatttttcaaaaacgaaaaa

SEQ ID NO: 86217 - DNA, 20 bp, Artificial sequence
  SiRNA target sequence
atttttcaaaaacgaaaaaa

SEQ ID NO: 86218 - DNA, 20 bp, Artificial sequence
  SiRNA target sequence
tttttcaaaaacgaaaaaaa

SEQ ID NO: 86219 - DNA, 20 bp, Artificial sequence
  SiRNA target sequence
ttttcaaaaacgaaaaaaat

SEQ ID NO: 86220 - DNA, 20 bp, Artificial sequence
  SiRNA target sequence
tttcaaaaacgaaaaaaatg

SEQ ID NO: 86221 - DNA, 20 bp, Artificial sequence
  SiRNA target sequence
ttcaaaaacgaaaaaaatgg

SEQ ID NO: 86222 - DNA, 20 bp, Artificial sequence
  SiRNA target sequence
tcaaaaacgaaaaaaatgga

SEQ ID NO: 86223 - DNA, 20 bp, Artificial sequence
  SiRNA target sequence
caaaaacgaaaaaaatggag

SEQ ID NO: 86224 - DNA, 20 bp, Artificial sequence
  SiRNA target sequence
aaaaacgaaaaaaatggagc

SEQ ID NO: 86225 - DNA, 20 bp, Artificial sequence
  SiRNA target sequence
aaaacgaaaaaaatggagca

SEQ ID NO: 86226 - DNA, 20 bp, Artificial sequence
  SiRNA target sequence
aaacgaaaaaaatggagcaa

SEQ ID NO: 86227 - DNA, 20 bp, Artificial sequence
  SiRNA target sequence
aacgaaaaaaatggagcaat

SEQ ID NO: 86228 - DNA, 20 bp, Artificial sequence
  SiRNA target sequence
acgaaaaaaatggagcaatg

SEQ ID NO: 86229 - DNA, 20 bp, Artificial sequence
  SiRNA target sequence
cgaaaaaaatggagcaatgc

SEQ ID NO: 86230 - DNA, 20 bp, Artificial sequence
  SiRNA target sequence
gaaaaaaatggagcaatgcc

SEQ ID NO: 86231 - DNA, 20 bp, Artificial sequence
  SiRNA target sequence
aaaaaaatggagcaatgcca

SEQ ID NO: 86232 - DNA, 20 bp, Artificial sequence
  SiRNA target sequence
aaaaaatggagcaatgccag

SEQ ID NO: 86233 - DNA, 20 bp, Artificial sequence
  SiRNA target sequence
aaaaatggagcaatgccagt

SEQ ID NO: 86234 - DNA, 20 bp, Artificial sequence
  SiRNA target sequence
aaaatggagcaatgccagtt

SEQ ID NO: 86235 - DNA, 20 bp, Artificial sequence
  SiRNA target sequence
aaatggagcaatgccagttc

SEQ ID NO: 86236 - DNA, 20 bp, Artificial sequence
  SiRNA target sequence
aatggagcaatgccagttcc

SEQ ID NO: 86237 - DNA, 20 bp, Artificial sequence
  SiRNA target sequence
atggagcaatgccagttcca

SEQ ID NO: 86238 - DNA, 20 bp, Artificial sequence
  SiRNA target sequence
tggagcaatgccagttccag

SEQ ID NO: 86239 - DNA, 20 bp, Artificial sequence
  SiRNA target sequence
ggagcaatgccagttccagt

SEQ ID NO: 86240 - DNA, 20 bp, Artificial sequence
  SiRNA target sequence
gagcaatgccagttccagta

SEQ ID NO: 86241 - DNA, 20 bp, Artificial sequence
  SiRNA target sequence
agcaatgccagttccagtac

SEQ ID NO: 86242 - DNA, 20 bp, Artificial sequence
  SiRNA target sequence
gcaatgccagttccagtaca

SEQ ID NO: 86243 - DNA, 20 bp, Artificial sequence
  SiRNA target sequence
caatgccagttccagtacaa

SEQ ID NO: 86244 - DNA, 20 bp, Artificial sequence
  SiRNA target sequence
aatgccagttccagtacaaa

SEQ ID NO: 86245 - DNA, 20 bp, Artificial sequence
  SiRNA target sequence
atgccagttccagtacaaat

SEQ ID NO: 86246 - DNA, 20 bp, Artificial sequence
  SiRNA target sequence
tgccagttccagtacaaata

SEQ ID NO: 86247 - DNA, 20 bp, Artificial sequence
  SiRNA target sequence
gccagttccagtacaaatac

SEQ ID NO: 86248 - DNA, 20 bp, Artificial sequence
  SiRNA target sequence
ccagttccagtacaaatacc

SEQ ID NO: 86249 - DNA, 20 bp, Artificial sequence
  SiRNA target sequence
cagttccagtacaaataccc

SEQ ID NO: 86250 - DNA, 20 bp, Artificial sequence
  SiRNA target sequence
agttccagtacaaataccca

SEQ ID NO: 86251 - DNA, 20 bp, Artificial sequence
  SiRNA target sequence
gttccagtacaaatacccaa

SEQ ID NO: 86252 - DNA, 20 bp, Artificial sequence
  SiRNA target sequence
ttccagtacaaatacccaac

SEQ ID NO: 86253 - DNA, 20 bp, Artificial sequence
  SiRNA target sequence
tccagtacaaatacccaaca

SEQ ID NO: 86254 - DNA, 20 bp, Artificial sequence
  SiRNA target sequence
ccagtacaaatacccaacac

SEQ ID NO: 86255 - DNA, 20 bp, Artificial sequence
  SiRNA target sequence
cagtacaaatacccaacact

SEQ ID NO: 86256 - DNA, 20 bp, Artificial sequence
  SiRNA target sequence
agtacaaatacccaacactt

SEQ ID NO: 86257 - DNA, 20 bp, Artificial sequence
  SiRNA target sequence
gtacaaatacccaacacttt

SEQ ID NO: 86258 - DNA, 20 bp, Artificial sequence
  SiRNA target sequence
tacaaatacccaacactttt

SEQ ID NO: 86259 - DNA, 20 bp, Artificial sequence
  SiRNA target sequence
acaaatacccaacacttttt

SEQ ID NO: 86260 - DNA, 20 bp, Artificial sequence
  SiRNA target sequence
caaatacccaacactttttt

SEQ ID NO: 86261 - DNA, 20 bp, Artificial sequence
  SiRNA target sequence
aaatacccaacactttttta

SEQ ID NO: 86262 - DNA, 20 bp, Artificial sequence
  SiRNA target sequence
aatacccaacacttttttac

SEQ ID NO: 86263 - DNA, 20 bp, Artificial sequence
  SiRNA target sequence
atacccaacacttttttaca

SEQ ID NO: 86264 - DNA, 20 bp, Artificial sequence
  SiRNA target sequence
tacccaacacttttttacaa

SEQ ID NO: 86265 - DNA, 20 bp, Artificial sequence
  SiRNA target sequence
acccaacacttttttacaaa

SEQ ID NO: 86266 - DNA, 20 bp, Artificial sequence
  SiRNA target sequence
cccaacacttttttacaaaa

SEQ ID NO: 86267 - DNA, 20 bp, Artificial sequence
  SiRNA target sequence
ccaacacttttttacaaaaa

SEQ ID NO: 86268 - DNA, 20 bp, Artificial sequence
  SiRNA target sequence
caacacttttttacaaaaat

SEQ ID NO: 86269 - DNA, 20 bp, Artificial sequence
  SiRNA target sequence
aacacttttttacaaaaatt

SEQ ID NO: 86270 - DNA, 20 bp, Artificial sequence
  SiRNA target sequence
acacttttttacaaaaattt

SEQ ID NO: 86271 - DNA, 20 bp, Artificial sequence
  SiRNA target sequence
cacttttttacaaaaattta

SEQ ID NO: 86272 - DNA, 20 bp, Artificial sequence
  SiRNA target sequence
acttttttacaaaaatttaa

SEQ ID NO: 86273 - DNA, 20 bp, Artificial sequence
  SiRNA target sequence
cttttttacaaaaatttaat

SEQ ID NO: 86274 - DNA, 20 bp, Artificial sequence
  SiRNA target sequence
ttttttacaaaaatttaatc

SEQ ID NO: 86275 - DNA, 20 bp, Artificial sequence
  SiRNA target sequence
tttttacaaaaatttaatct

SEQ ID NO: 86276 - DNA, 20 bp, Artificial sequence
  SiRNA target sequence
ttttacaaaaatttaatcta

SEQ ID NO: 86277 - DNA, 20 bp, Artificial sequence
  SiRNA target sequence
tttacaaaaatttaatctaa

SEQ ID NO: 86278 - DNA, 20 bp, Artificial sequence
  SiRNA target sequence
ttacaaaaatttaatctaaa

SEQ ID NO: 86279 - DNA, 20 bp, Artificial sequence
  SiRNA target sequence
tacaaaaatttaatctaaat

SEQ ID NO: 86280 - DNA, 20 bp, Artificial sequence
  SiRNA target sequence
acaaaaatttaatctaaata

SEQ ID NO: 86281 - DNA, 20 bp, Artificial sequence
  SiRNA target sequence
caaaaatttaatctaaataa

SEQ ID NO: 86282 - DNA, 20 bp, Artificial sequence
  SiRNA target sequence
aaaaatttaatctaaataat

SEQ ID NO: 86283 - DNA, 20 bp, Artificial sequence
  SiRNA target sequence
aaaatttaatctaaataatt

SEQ ID NO: 86284 - DNA, 20 bp, Artificial sequence
  SiRNA target sequence
aaatttaatctaaataattt

SEQ ID NO: 86285 - DNA, 20 bp, Artificial sequence
  SiRNA target sequence
aatttaatctaaataattta

SEQ ID NO: 86286 - DNA, 20 bp, Artificial sequence
  SiRNA target sequence
atttaatctaaataatttac

SEQ ID NO: 86287 - DNA, 20 bp, Artificial sequence
  SiRNA target sequence
tttaatctaaataatttact

SEQ ID NO: 86288 - DNA, 20 bp, Artificial sequence
  SiRNA target sequence
ttaatctaaataatttactc

SEQ ID NO: 86289 - DNA, 20 bp, Artificial sequence
  SiRNA target sequence
taatctaaataatttactcg

SEQ ID NO: 86290 - DNA, 20 bp, Artificial sequence
  SiRNA target sequence
aatctaaataatttactcgg

SEQ ID NO: 86291 - DNA, 20 bp, Artificial sequence
  SiRNA target sequence
atctaaataatttactcggt

SEQ ID NO: 86292 - DNA, 20 bp, Artificial sequence
  SiRNA target sequence
tctaaataatttactcggtc

SEQ ID NO: 86293 - DNA, 20 bp, Artificial sequence
  SiRNA target sequence
ctaaataatttactcggtct

SEQ ID NO: 86294 - DNA, 20 bp, Artificial sequence
  SiRNA target sequence
taaataatttactcggtctg

SEQ ID NO: 86295 - DNA, 20 bp, Artificial sequence
  SiRNA target sequence
aaataatttactcggtctgt

SEQ ID NO: 86296 - DNA, 20 bp, Artificial sequence
  SiRNA target sequence
aataatttactcggtctgtg

SEQ ID NO: 86297 - DNA, 20 bp, Artificial sequence
  SiRNA target sequence
ataatttactcggtctgtga

SEQ ID NO: 86298 - DNA, 20 bp, Artificial sequence
  SiRNA target sequence
taatttactcggtctgtgac

SEQ ID NO: 86299 - DNA, 20 bp, Artificial sequence
  SiRNA target sequence
aatttactcggtctgtgaca

SEQ ID NO: 86300 - DNA, 20 bp, Artificial sequence
  SiRNA target sequence
atttactcggtctgtgacag

SEQ ID NO: 86301 - DNA, 20 bp, Artificial sequence
  SiRNA target sequence
tttactcggtctgtgacaga

SEQ ID NO: 86302 - DNA, 20 bp, Artificial sequence
  SiRNA target sequence
ttactcggtctgtgacagat

SEQ ID NO: 86303 - DNA, 20 bp, Artificial sequence
  SiRNA target sequence
tactcggtctgtgacagatc

SEQ ID NO: 86304 - DNA, 20 bp, Artificial sequence
  SiRNA target sequence
actcggtctgtgacagatct

SEQ ID NO: 86305 - DNA, 20 bp, Artificial sequence
  SiRNA target sequence
ctcggtctgtgacagatctt

SEQ ID NO: 86306 - DNA, 20 bp, Artificial sequence
  SiRNA target sequence
tcggtctgtgacagatcttt

SEQ ID NO: 86307 - DNA, 20 bp, Artificial sequence
  SiRNA target sequence
cggtctgtgacagatcttta

SEQ ID NO: 86308 - DNA, 20 bp, Artificial sequence
  SiRNA target sequence
ggtctgtgacagatctttaa

SEQ ID NO: 86309 - DNA, 20 bp, Artificial sequence
  SiRNA target sequence
gtctgtgacagatctttaaa

SEQ ID NO: 86310 - DNA, 20 bp, Artificial sequence
  SiRNA target sequence
tctgtgacagatctttaaat

SEQ ID NO: 86311 - DNA, 20 bp, Artificial sequence
  SiRNA target sequence
ctgtgacagatctttaaatt

SEQ ID NO: 86312 - DNA, 20 bp, Artificial sequence
  SiRNA target sequence
tgtgacagatctttaaatta

SEQ ID NO: 86313 - DNA, 20 bp, Artificial sequence
  SiRNA target sequence
gtgacagatctttaaattat

SEQ ID NO: 86314 - DNA, 20 bp, Artificial sequence
  SiRNA target sequence
tgacagatctttaaattatt

SEQ ID NO: 86315 - DNA, 20 bp, Artificial sequence
  SiRNA target sequence
gacagatctttaaattatta

SEQ ID NO: 86316 - DNA, 20 bp, Artificial sequence
  SiRNA target sequence
acagatctttaaattattat

SEQ ID NO: 86317 - DNA, 20 bp, Artificial sequence
  SiRNA target sequence
cagatctttaaattattata

SEQ ID NO: 86318 - DNA, 20 bp, Artificial sequence
  SiRNA target sequence
agatctttaaattattataa

SEQ ID NO: 86319 - DNA, 20 bp, Artificial sequence
  SiRNA target sequence
gatctttaaattattataat

SEQ ID NO: 86320 - DNA, 20 bp, Artificial sequence
  SiRNA target sequence
atctttaaattattataatt

SEQ ID NO: 86321 - DNA, 20 bp, Artificial sequence
  SiRNA target sequence
tctttaaattattataattt

SEQ ID NO: 86322 - DNA, 20 bp, Artificial sequence
  SiRNA target sequence
ctttaaattattataatttt

SEQ ID NO: 86323 - DNA, 20 bp, Artificial sequence
  SiRNA target sequence
tttaaattattataattttg

SEQ ID NO: 86324 - DNA, 20 bp, Artificial sequence
  SiRNA target sequence
ttaaattattataattttgc

SEQ ID NO: 86325 - DNA, 20 bp, Artificial sequence
  SiRNA target sequence
taaattattataattttgca

SEQ ID NO: 86326 - DNA, 20 bp, Artificial sequence
  SiRNA target sequence
aaattattataattttgcat

SEQ ID NO: 86327 - DNA, 20 bp, Artificial sequence
  SiRNA target sequence
aattattataattttgcata

SEQ ID NO: 86328 - DNA, 20 bp, Artificial sequence
  SiRNA target sequence
attattataattttgcatat

SEQ ID NO: 86329 - DNA, 20 bp, Artificial sequence
  SiRNA target sequence
ttattataattttgcatatc

SEQ ID NO: 86330 - DNA, 20 bp, Artificial sequence
  SiRNA target sequence
tattataattttgcatatct

SEQ ID NO: 86331 - DNA, 20 bp, Artificial sequence
  SiRNA target sequence
attataattttgcatatcta

SEQ ID NO: 86332 - DNA, 20 bp, Artificial sequence
  SiRNA target sequence
ttataattttgcatatctat

SEQ ID NO: 86333 - DNA, 20 bp, Artificial sequence
  SiRNA target sequence
tataattttgcatatctatg

SEQ ID NO: 86334 - DNA, 20 bp, Artificial sequence
  SiRNA target sequence
ataattttgcatatctatga

SEQ ID NO: 86335 - DNA, 20 bp, Artificial sequence
  SiRNA target sequence
taattttgcatatctatgaa

SEQ ID NO: 86336 - DNA, 20 bp, Artificial sequence
  SiRNA target sequence
aattttgcatatctatgaaa

SEQ ID NO: 86337 - DNA, 20 bp, Artificial sequence
  SiRNA target sequence
attttgcatatctatgaaat

SEQ ID NO: 86338 - DNA, 20 bp, Artificial sequence
  SiRNA target sequence
ttttgcatatctatgaaatt

SEQ ID NO: 86339 - DNA, 20 bp, Artificial sequence
  SiRNA target sequence
tttgcatatctatgaaattg

SEQ ID NO: 86340 - DNA, 20 bp, Artificial sequence
  SiRNA target sequence
ttgcatatctatgaaattgg

SEQ ID NO: 86341 - DNA, 20 bp, Artificial sequence
  SiRNA target sequence
tgcatatctatgaaattgga

SEQ ID NO: 86342 - DNA, 20 bp, Artificial sequence
  SiRNA target sequence
gcatatctatgaaattggaa

SEQ ID NO: 86343 - DNA, 20 bp, Artificial sequence
  SiRNA target sequence
catatctatgaaattggaaa

SEQ ID NO: 86344 - DNA, 20 bp, Artificial sequence
  SiRNA target sequence
atatctatgaaattggaaac

SEQ ID NO: 86345 - DNA, 20 bp, Artificial sequence
  SiRNA target sequence
tatctatgaaattggaaaca

SEQ ID NO: 86346 - DNA, 20 bp, Artificial sequence
  SiRNA target sequence
atctatgaaattggaaacat

SEQ ID NO: 86347 - DNA, 20 bp, Artificial sequence
  SiRNA target sequence
tctatgaaattggaaacatg

SEQ ID NO: 86348 - DNA, 20 bp, Artificial sequence
  SiRNA target sequence
ctatgaaattggaaacatgt

SEQ ID NO: 86349 - DNA, 20 bp, Artificial sequence
  SiRNA target sequence
tatgaaattggaaacatgtc

SEQ ID NO: 86350 - DNA, 20 bp, Artificial sequence
  SiRNA target sequence
atgaaattggaaacatgtcc

SEQ ID NO: 86351 - DNA, 20 bp, Artificial sequence
  SiRNA target sequence
tgaaattggaaacatgtcca

SEQ ID NO: 86352 - DNA, 20 bp, Artificial sequence
  SiRNA target sequence
gaaattggaaacatgtccat

SEQ ID NO: 86353 - DNA, 20 bp, Artificial sequence
  SiRNA target sequence
aaattggaaacatgtccata

SEQ ID NO: 86354 - DNA, 20 bp, Artificial sequence
  SiRNA target sequence
aattggaaacatgtccatat

SEQ ID NO: 86355 - DNA, 20 bp, Artificial sequence
  SiRNA target sequence
attggaaacatgtccatatc

SEQ ID NO: 86356 - DNA, 20 bp, Artificial sequence
  SiRNA target sequence
ttggaaacatgtccatatct

SEQ ID NO: 86357 - DNA, 20 bp, Artificial sequence
  SiRNA target sequence
tggaaacatgtccatatcta

SEQ ID NO: 86358 - DNA, 20 bp, Artificial sequence
  SiRNA target sequence
ggaaacatgtccatatctat

SEQ ID NO: 86359 - DNA, 20 bp, Artificial sequence
  SiRNA target sequence
gaaacatgtccatatctatc

SEQ ID NO: 86360 - DNA, 20 bp, Artificial sequence
  SiRNA target sequence
aaacatgtccatatctatcg

SEQ ID NO: 86361 - DNA, 20 bp, Artificial sequence
  SiRNA target sequence
aacatgtccatatctatcgc

SEQ ID NO: 86362 - DNA, 20 bp, Artificial sequence
  SiRNA target sequence
acatgtccatatctatcgcc

SEQ ID NO: 86363 - DNA, 20 bp, Artificial sequence
  SiRNA target sequence
catgtccatatctatcgcct

SEQ ID NO: 86364 - DNA, 20 bp, Artificial sequence
  SiRNA target sequence
atgtccatatctatcgcctt

SEQ ID NO: 86365 - DNA, 20 bp, Artificial sequence
  SiRNA target sequence
tgtccatatctatcgccttt

SEQ ID NO: 86366 - DNA, 20 bp, Artificial sequence
  SiRNA target sequence
gtccatatctatcgcctttt

SEQ ID NO: 86367 - DNA, 20 bp, Artificial sequence
  SiRNA target sequence
tccatatctatcgccttttt

SEQ ID NO: 86368 - DNA, 20 bp, Artificial sequence
  SiRNA target sequence
ccatatctatcgcctttttt

SEQ ID NO: 86369 - DNA, 20 bp, Artificial sequence
  SiRNA target sequence
catatctatcgcctttttta

SEQ ID NO: 86370 - DNA, 20 bp, Artificial sequence
  SiRNA target sequence
atatctatcgccttttttaa

SEQ ID NO: 86371 - DNA, 20 bp, Artificial sequence
  SiRNA target sequence
tatctatcgccttttttaat

SEQ ID NO: 86372 - DNA, 20 bp, Artificial sequence
  SiRNA target sequence
atctatcgccttttttaata

SEQ ID NO: 86373 - DNA, 20 bp, Artificial sequence
  SiRNA target sequence
tctatcgccttttttaataa

SEQ ID NO: 86374 - DNA, 20 bp, Artificial sequence
  SiRNA target sequence
ctatcgccttttttaataat

SEQ ID NO: 86375 - DNA, 20 bp, Artificial sequence
  SiRNA target sequence
tatcgccttttttaataatt

SEQ ID NO: 86376 - DNA, 20 bp, Artificial sequence
  SiRNA target sequence
atcgccttttttaataattg

SEQ ID NO: 86377 - DNA, 20 bp, Artificial sequence
  SiRNA target sequence
tcgccttttttaataattgc

SEQ ID NO: 86378 - DNA, 20 bp, Artificial sequence
  SiRNA target sequence
cgccttttttaataattgct

SEQ ID NO: 86379 - DNA, 20 bp, Artificial sequence
  SiRNA target sequence
gccttttttaataattgcta

SEQ ID NO: 86380 - DNA, 20 bp, Artificial sequence
  SiRNA target sequence
ccttttttaataattgctac

SEQ ID NO: 86381 - DNA, 20 bp, Artificial sequence
  SiRNA target sequence
cttttttaataattgctact

SEQ ID NO: 86382 - DNA, 20 bp, Artificial sequence
  SiRNA target sequence
ttttttaataattgctacta

SEQ ID NO: 86383 - DNA, 20 bp, Artificial sequence
  SiRNA target sequence
tttttaataattgctactaa

SEQ ID NO: 86384 - DNA, 20 bp, Artificial sequence
  SiRNA target sequence
ttttaataattgctactaaa

SEQ ID NO: 86385 - DNA, 20 bp, Artificial sequence
  SiRNA target sequence
tttaataattgctactaaaa

SEQ ID NO: 86386 - DNA, 20 bp, Artificial sequence
  SiRNA target sequence
ttaataattgctactaaaat

SEQ ID NO: 86387 - DNA, 20 bp, Artificial sequence
  SiRNA target sequence
taataattgctactaaaatt

SEQ ID NO: 86388 - DNA, 20 bp, Artificial sequence
  SiRNA target sequence
aataattgctactaaaattt

SEQ ID NO: 86389 - DNA, 20 bp, Artificial sequence
  SiRNA target sequence
ataattgctactaaaatttc

SEQ ID NO: 86390 - DNA, 20 bp, Artificial sequence
  SiRNA target sequence
taattgctactaaaatttca

SEQ ID NO: 86391 - DNA, 20 bp, Artificial sequence
  SiRNA target sequence
aattgctactaaaatttcac

SEQ ID NO: 86392 - DNA, 20 bp, Artificial sequence
  SiRNA target sequence
attgctactaaaatttcaca

SEQ ID NO: 86393 - DNA, 20 bp, Artificial sequence
  SiRNA target sequence
ttgctactaaaatttcacat

SEQ ID NO: 86394 - DNA, 20 bp, Artificial sequence
  SiRNA target sequence
tgctactaaaatttcacatt

SEQ ID NO: 86395 - DNA, 20 bp, Artificial sequence
  SiRNA target sequence
gctactaaaatttcacattt

SEQ ID NO: 86396 - DNA, 20 bp, Artificial sequence
  SiRNA target sequence
ctactaaaatttcacatttt

SEQ ID NO: 86397 - DNA, 20 bp, Artificial sequence
  SiRNA target sequence
tactaaaatttcacattttt

SEQ ID NO: 86398 - DNA, 20 bp, Artificial sequence
  SiRNA target sequence
actaaaatttcacatttttc

SEQ ID NO: 86399 - DNA, 20 bp, Artificial sequence
  SiRNA target sequence
ctaaaatttcacatttttca

SEQ ID NO: 86400 - DNA, 20 bp, Artificial sequence
  SiRNA target sequence
taaaatttcacatttttcat

SEQ ID NO: 86401 - DNA, 20 bp, Artificial sequence
  SiRNA target sequence
aaaatttcacatttttcatt

SEQ ID NO: 86402 - DNA, 20 bp, Artificial sequence
  SiRNA target sequence
aaatttcacatttttcattt

SEQ ID NO: 86403 - DNA, 20 bp, Artificial sequence
  SiRNA target sequence
aatttcacatttttcattta

SEQ ID NO: 86404 - DNA, 20 bp, Artificial sequence
  SiRNA target sequence
atttcacatttttcatttac

SEQ ID NO: 86405 - DNA, 20 bp, Artificial sequence
  SiRNA target sequence
tttcacatttttcatttacg

SEQ ID NO: 86406 - DNA, 20 bp, Artificial sequence
  SiRNA target sequence
ttcacatttttcatttacgt

SEQ ID NO: 86407 - DNA, 20 bp, Artificial sequence
  SiRNA target sequence
tcacatttttcatttacgtg

SEQ ID NO: 86408 - DNA, 20 bp, Artificial sequence
  SiRNA target sequence
cacatttttcatttacgtgg

SEQ ID NO: 86409 - DNA, 20 bp, Artificial sequence
  SiRNA target sequence
acatttttcatttacgtggt

SEQ ID NO: 86410 - DNA, 20 bp, Artificial sequence
  SiRNA target sequence
catttttcatttacgtggtt

SEQ ID NO: 86411 - DNA, 20 bp, Artificial sequence
  SiRNA target sequence
atttttcatttacgtggtta

SEQ ID NO: 86412 - DNA, 20 bp, Artificial sequence
  SiRNA target sequence
tttttcatttacgtggttag

SEQ ID NO: 86413 - DNA, 20 bp, Artificial sequence
  SiRNA target sequence
ttttcatttacgtggttagt

SEQ ID NO: 86414 - DNA, 20 bp, Artificial sequence
  SiRNA target sequence
tttcatttacgtggttagta

SEQ ID NO: 86415 - DNA, 20 bp, Artificial sequence
  SiRNA target sequence
ttcatttacgtggttagtaa

SEQ ID NO: 86416 - DNA, 20 bp, Artificial sequence
  SiRNA target sequence
tcatttacgtggttagtaag

SEQ ID NO: 86417 - DNA, 20 bp, Artificial sequence
  SiRNA target sequence
catttacgtggttagtaagt

SEQ ID NO: 86418 - DNA, 20 bp, Artificial sequence
  SiRNA target sequence
atttacgtggttagtaagtg

SEQ ID NO: 86419 - DNA, 20 bp, Artificial sequence
  SiRNA target sequence
tttacgtggttagtaagtga

SEQ ID NO: 86420 - DNA, 20 bp, Artificial sequence
  SiRNA target sequence
ttacgtggttagtaagtgaa

SEQ ID NO: 86421 - DNA, 20 bp, Artificial sequence
  SiRNA target sequence
tacgtggttagtaagtgaat

SEQ ID NO: 86422 - DNA, 20 bp, Artificial sequence
  SiRNA target sequence
acgtggttagtaagtgaata

SEQ ID NO: 86423 - DNA, 20 bp, Artificial sequence
  SiRNA target sequence
cgtggttagtaagtgaataa

SEQ ID NO: 86424 - DNA, 20 bp, Artificial sequence
  SiRNA target sequence
gtggttagtaagtgaataat

SEQ ID NO: 86425 - DNA, 20 bp, Artificial sequence
  SiRNA target sequence
tggttagtaagtgaataata

SEQ ID NO: 86426 - DNA, 20 bp, Artificial sequence
  SiRNA target sequence
ggttagtaagtgaataatat

SEQ ID NO: 86427 - DNA, 20 bp, Artificial sequence
  SiRNA target sequence
gttagtaagtgaataatatc

SEQ ID NO: 86428 - DNA, 20 bp, Artificial sequence
  SiRNA target sequence
ttagtaagtgaataatatct

SEQ ID NO: 86429 - DNA, 20 bp, Artificial sequence
  SiRNA target sequence
tagtaagtgaataatatctt

SEQ ID NO: 86430 - DNA, 20 bp, Artificial sequence
  SiRNA target sequence
agtaagtgaataatatcttg

SEQ ID NO: 86431 - DNA, 20 bp, Artificial sequence
  SiRNA target sequence
gtaagtgaataatatcttgg

SEQ ID NO: 86432 - DNA, 20 bp, Artificial sequence
  SiRNA target sequence
taagtgaataatatcttggc

SEQ ID NO: 86433 - DNA, 20 bp, Artificial sequence
  SiRNA target sequence
aagtgaataatatcttggct

SEQ ID NO: 86434 - DNA, 20 bp, Artificial sequence
  SiRNA target sequence
agtgaataatatcttggctt

SEQ ID NO: 86435 - DNA, 20 bp, Artificial sequence
  SiRNA target sequence
gtgaataatatcttggctta

SEQ ID NO: 86436 - DNA, 20 bp, Artificial sequence
  SiRNA target sequence
tgaataatatcttggcttaa

SEQ ID NO: 86437 - DNA, 20 bp, Artificial sequence
  SiRNA target sequence
gaataatatcttggcttaat

SEQ ID NO: 86438 - DNA, 20 bp, Artificial sequence
  SiRNA target sequence
aataatatcttggcttaatt

SEQ ID NO: 86439 - DNA, 20 bp, Artificial sequence
  SiRNA target sequence
ataatatcttggcttaattg

SEQ ID NO: 86440 - DNA, 20 bp, Artificial sequence
  SiRNA target sequence
taatatcttggcttaattgt

SEQ ID NO: 86441 - DNA, 20 bp, Artificial sequence
  SiRNA target sequence
aatatcttggcttaattgtt

SEQ ID NO: 86442 - DNA, 20 bp, Artificial sequence
  SiRNA target sequence
atatcttggcttaattgttt

SEQ ID NO: 86443 - DNA, 20 bp, Artificial sequence
  SiRNA target sequence
tatcttggcttaattgtttg

SEQ ID NO: 86444 - DNA, 20 bp, Artificial sequence
  SiRNA target sequence
atcttggcttaattgtttga

SEQ ID NO: 86445 - DNA, 20 bp, Artificial sequence
  SiRNA target sequence
tcttggcttaattgtttgac

SEQ ID NO: 86446 - DNA, 20 bp, Artificial sequence
  SiRNA target sequence
cttggcttaattgtttgaca

SEQ ID NO: 86447 - DNA, 20 bp, Artificial sequence
  SiRNA target sequence
ttggcttaattgtttgacaa

SEQ ID NO: 86448 - DNA, 20 bp, Artificial sequence
  SiRNA target sequence
tggcttaattgtttgacaat

SEQ ID NO: 86449 - DNA, 20 bp, Artificial sequence
  SiRNA target sequence
ggcttaattgtttgacaatt

SEQ ID NO: 86450 - DNA, 20 bp, Artificial sequence
  SiRNA target sequence
gcttaattgtttgacaattc

SEQ ID NO: 86451 - DNA, 20 bp, Artificial sequence
  SiRNA target sequence
cttaattgtttgacaattca

SEQ ID NO: 86452 - DNA, 20 bp, Artificial sequence
  SiRNA target sequence
ttaattgtttgacaattcat

SEQ ID NO: 86453 - DNA, 20 bp, Artificial sequence
  SiRNA target sequence
taattgtttgacaattcata

SEQ ID NO: 86454 - DNA, 20 bp, Artificial sequence
  SiRNA target sequence
aattgtttgacaattcataa

SEQ ID NO: 86455 - DNA, 20 bp, Artificial sequence
  SiRNA target sequence
attgtttgacaattcataat

SEQ ID NO: 86456 - DNA, 20 bp, Artificial sequence
  SiRNA target sequence
ttgtttgacaattcataata

SEQ ID NO: 86457 - DNA, 20 bp, Artificial sequence
  SiRNA target sequence
tgtttgacaattcataataa

SEQ ID NO: 86458 - DNA, 20 bp, Artificial sequence
  SiRNA target sequence
gtttgacaattcataataag

SEQ ID NO: 86459 - DNA, 20 bp, Artificial sequence
  SiRNA target sequence
tttgacaattcataataaga

SEQ ID NO: 86460 - DNA, 20 bp, Artificial sequence
  SiRNA target sequence
ttgacaattcataataagat

SEQ ID NO: 86461 - DNA, 20 bp, Artificial sequence
  SiRNA target sequence
tgacaattcataataagatc

SEQ ID NO: 86462 - DNA, 20 bp, Artificial sequence
  SiRNA target sequence
gacaattcataataagatcc

SEQ ID NO: 86463 - DNA, 20 bp, Artificial sequence
  SiRNA target sequence
acaattcataataagatcct

SEQ ID NO: 86464 - DNA, 20 bp, Artificial sequence
  SiRNA target sequence
caattcataataagatcctc

SEQ ID NO: 86465 - DNA, 20 bp, Artificial sequence
  SiRNA target sequence
aattcataataagatcctct

SEQ ID NO: 86466 - DNA, 20 bp, Artificial sequence
  SiRNA target sequence
attcataataagatcctcta

SEQ ID NO: 86467 - DNA, 20 bp, Artificial sequence
  SiRNA target sequence
ttcataataagatcctctaa

SEQ ID NO: 86468 - DNA, 20 bp, Artificial sequence
  SiRNA target sequence
tcataataagatcctctaaa

SEQ ID NO: 86469 - DNA, 20 bp, Artificial sequence
  SiRNA target sequence
cataataagatcctctaaac

SEQ ID NO: 86470 - DNA, 20 bp, Artificial sequence
  SiRNA target sequence
ataataagatcctctaaact

SEQ ID NO: 86471 - DNA, 20 bp, Artificial sequence
  SiRNA target sequence
taataagatcctctaaactt

SEQ ID NO: 86472 - DNA, 20 bp, Artificial sequence
  SiRNA target sequence
aataagatcctctaaacttg

SEQ ID NO: 86473 - DNA, 20 bp, Artificial sequence
  SiRNA target sequence
ataagatcctctaaacttgg

SEQ ID NO: 86474 - DNA, 20 bp, Artificial sequence
  SiRNA target sequence
taagatcctctaaacttggt

SEQ ID NO: 86475 - DNA, 20 bp, Artificial sequence
  SiRNA target sequence
aagatcctctaaacttggtt

SEQ ID NO: 86476 - DNA, 20 bp, Artificial sequence
  SiRNA target sequence
agatcctctaaacttggttt

SEQ ID NO: 86477 - DNA, 20 bp, Artificial sequence
  SiRNA target sequence
gatcctctaaacttggttta

SEQ ID NO: 86478 - DNA, 20 bp, Artificial sequence
  SiRNA target sequence
atcctctaaacttggtttac

SEQ ID NO: 86479 - DNA, 20 bp, Artificial sequence
  SiRNA target sequence
tcctctaaacttggtttaca

SEQ ID NO: 86480 - DNA, 20 bp, Artificial sequence
  SiRNA target sequence
cctctaaacttggtttacat

SEQ ID NO: 86481 - DNA, 20 bp, Artificial sequence
  SiRNA target sequence
ctctaaacttggtttacatt

SEQ ID NO: 86482 - DNA, 20 bp, Artificial sequence
  SiRNA target sequence
tctaaacttggtttacattg

SEQ ID NO: 86483 - DNA, 20 bp, Artificial sequence
  SiRNA target sequence
ctaaacttggtttacattga

SEQ ID NO: 86484 - DNA, 20 bp, Artificial sequence
  SiRNA target sequence
taaacttggtttacattgaa

SEQ ID NO: 86485 - DNA, 20 bp, Artificial sequence
  SiRNA target sequence
aaacttggtttacattgaaa

SEQ ID NO: 86486 - DNA, 20 bp, Artificial sequence
  SiRNA target sequence
aacttggtttacattgaaat

SEQ ID NO: 86487 - DNA, 20 bp, Artificial sequence
  SiRNA target sequence
acttggtttacattgaaatg

SEQ ID NO: 86488 - DNA, 20 bp, Artificial sequence
  SiRNA target sequence
cttggtttacattgaaatgt

SEQ ID NO: 86489 - DNA, 20 bp, Artificial sequence
  SiRNA target sequence
ttggtttacattgaaatgta

SEQ ID NO: 86490 - DNA, 20 bp, Artificial sequence
  SiRNA target sequence
tggtttacattgaaatgtat

SEQ ID NO: 86491 - DNA, 20 bp, Artificial sequence
  SiRNA target sequence
ggtttacattgaaatgtata

SEQ ID NO: 86492 - DNA, 20 bp, Artificial sequence
  SiRNA target sequence
gtttacattgaaatgtatat

SEQ ID NO: 86493 - DNA, 20 bp, Artificial sequence
  SiRNA target sequence
tttacattgaaatgtatata

SEQ ID NO: 86494 - DNA, 20 bp, Artificial sequence
  SiRNA target sequence
ttacattgaaatgtatatat

SEQ ID NO: 86495 - DNA, 20 bp, Artificial sequence
  SiRNA target sequence
tacattgaaatgtatatata

SEQ ID NO: 86496 - DNA, 20 bp, Artificial sequence
  SiRNA target sequence
acattgaaatgtatatataa

SEQ ID NO: 86497 - DNA, 20 bp, Artificial sequence
  SiRNA target sequence
cattgaaatgtatatataat

SEQ ID NO: 86498 - DNA, 20 bp, Artificial sequence
  SiRNA target sequence
attgaaatgtatatataatg

SEQ ID NO: 86499 - DNA, 20 bp, Artificial sequence
  SiRNA target sequence
ttgaaatgtatatataatgt

SEQ ID NO: 86500 - DNA, 20 bp, Artificial sequence
  SiRNA target sequence
tgaaatgtatatataatgtc

SEQ ID NO: 86501 - DNA, 20 bp, Artificial sequence
  SiRNA target sequence
gaaatgtatatataatgtca

SEQ ID NO: 86502 - DNA, 20 bp, Artificial sequence
  SiRNA target sequence
aaatgtatatataatgtcaa

SEQ ID NO: 86503 - DNA, 20 bp, Artificial sequence
  SiRNA target sequence
aatgtatatataatgtcaag

SEQ ID NO: 86504 - DNA, 20 bp, Artificial sequence
  SiRNA target sequence
atgtatatataatgtcaagc

SEQ ID NO: 86505 - DNA, 20 bp, Artificial sequence
  SiRNA target sequence
tgtatatataatgtcaagca

SEQ ID NO: 86506 - DNA, 20 bp, Artificial sequence
  SiRNA target sequence
gtatatataatgtcaagcac

SEQ ID NO: 86507 - DNA, 20 bp, Artificial sequence
  SiRNA target sequence
tatatataatgtcaagcaca

SEQ ID NO: 86508 - DNA, 20 bp, Artificial sequence
  SiRNA target sequence
atatataatgtcaagcacat

SEQ ID NO: 86509 - DNA, 20 bp, Artificial sequence
  SiRNA target sequence
tatataatgtcaagcacatt

SEQ ID NO: 86510 - DNA, 20 bp, Artificial sequence
  SiRNA target sequence
atataatgtcaagcacatta

SEQ ID NO: 86511 - DNA, 20 bp, Artificial sequence
  SiRNA target sequence
tataatgtcaagcacattat

SEQ ID NO: 86512 - DNA, 20 bp, Artificial sequence
  SiRNA target sequence
ataatgtcaagcacattatt

SEQ ID NO: 86513 - DNA, 20 bp, Artificial sequence
  SiRNA target sequence
taatgtcaagcacattattc

SEQ ID NO: 86514 - DNA, 20 bp, Artificial sequence
  SiRNA target sequence
aatgtcaagcacattattcc

SEQ ID NO: 86515 - DNA, 20 bp, Artificial sequence
  SiRNA target sequence
atgtcaagcacattattcca

SEQ ID NO: 86516 - DNA, 20 bp, Artificial sequence
  SiRNA target sequence
tgtcaagcacattattccag

SEQ ID NO: 86517 - DNA, 20 bp, Artificial sequence
  SiRNA target sequence
gtcaagcacattattccagt

SEQ ID NO: 86518 - DNA, 20 bp, Artificial sequence
  SiRNA target sequence
tcaagcacattattccagtt

SEQ ID NO: 86519 - DNA, 20 bp, Artificial sequence
  SiRNA target sequence
caagcacattattccagttc

SEQ ID NO: 86520 - DNA, 20 bp, Artificial sequence
  SiRNA target sequence
aagcacattattccagttct

SEQ ID NO: 86521 - DNA, 20 bp, Artificial sequence
  SiRNA target sequence
agcacattattccagttctt

SEQ ID NO: 86522 - DNA, 20 bp, Artificial sequence
  SiRNA target sequence
gcacattattccagttctta

SEQ ID NO: 86523 - DNA, 20 bp, Artificial sequence
  SiRNA target sequence
cacattattccagttcttaa

SEQ ID NO: 86524 - DNA, 20 bp, Artificial sequence
  SiRNA target sequence
acattattccagttcttaat

SEQ ID NO: 86525 - DNA, 20 bp, Artificial sequence
  SiRNA target sequence
cattattccagttcttaatg

SEQ ID NO: 86526 - DNA, 20 bp, Artificial sequence
  SiRNA target sequence
attattccagttcttaatga

SEQ ID NO: 86527 - DNA, 20 bp, Artificial sequence
  SiRNA target sequence
ttattccagttcttaatgat

SEQ ID NO: 86528 - DNA, 20 bp, Artificial sequence
  SiRNA target sequence
tattccagttcttaatgatg

SEQ ID NO: 86529 - DNA, 20 bp, Artificial sequence
  SiRNA target sequence
attccagttcttaatgatgc

SEQ ID NO: 86530 - DNA, 20 bp, Artificial sequence
  SiRNA target sequence
ttccagttcttaatgatgct

SEQ ID NO: 86531 - DNA, 20 bp, Artificial sequence
  SiRNA target sequence
tccagttcttaatgatgctt

SEQ ID NO: 86532 - DNA, 20 bp, Artificial sequence
  SiRNA target sequence
ccagttcttaatgatgctta

SEQ ID NO: 86533 - DNA, 20 bp, Artificial sequence
  SiRNA target sequence
cagttcttaatgatgcttaa

SEQ ID NO: 86534 - DNA, 20 bp, Artificial sequence
  SiRNA target sequence
agttcttaatgatgcttaaa

SEQ ID NO: 86535 - DNA, 20 bp, Artificial sequence
  SiRNA target sequence
gttcttaatgatgcttaaat

SEQ ID NO: 86536 - DNA, 20 bp, Artificial sequence
  SiRNA target sequence
ttcttaatgatgcttaaata

SEQ ID NO: 86537 - DNA, 20 bp, Artificial sequence
  SiRNA target sequence
tcttaatgatgcttaaataa

SEQ ID NO: 86538 - DNA, 20 bp, Artificial sequence
  SiRNA target sequence
cttaatgatgcttaaataat

SEQ ID NO: 86539 - DNA, 20 bp, Artificial sequence
  SiRNA target sequence
ttaatgatgcttaaataatc

SEQ ID NO: 86540 - DNA, 20 bp, Artificial sequence
  SiRNA target sequence
taatgatgcttaaataatct

SEQ ID NO: 86541 - DNA, 20 bp, Artificial sequence
  SiRNA target sequence
aatgatgcttaaataatctt

SEQ ID NO: 86542 - DNA, 20 bp, Artificial sequence
  SiRNA target sequence
atgatgcttaaataatcttt

SEQ ID NO: 86543 - DNA, 20 bp, Artificial sequence
  SiRNA target sequence
tgatgcttaaataatctttt

SEQ ID NO: 86544 - DNA, 20 bp, Artificial sequence
  SiRNA target sequence
gatgcttaaataatctttta

SEQ ID NO: 86545 - DNA, 20 bp, Artificial sequence
  SiRNA target sequence
atgcttaaataatcttttac

SEQ ID NO: 86546 - DNA, 20 bp, Artificial sequence
  SiRNA target sequence
tgcttaaataatcttttact

SEQ ID NO: 86547 - DNA, 20 bp, Artificial sequence
  SiRNA target sequence
gcttaaataatcttttactc

SEQ ID NO: 86548 - DNA, 20 bp, Artificial sequence
  SiRNA target sequence
cttaaataatcttttactcc

SEQ ID NO: 86549 - DNA, 20 bp, Artificial sequence
  SiRNA target sequence
ttaaataatcttttactcct

SEQ ID NO: 86550 - DNA, 20 bp, Artificial sequence
  SiRNA target sequence
taaataatcttttactcctt

SEQ ID NO: 86551 - DNA, 20 bp, Artificial sequence
  SiRNA target sequence
aaataatcttttactccttc

SEQ ID NO: 86552 - DNA, 20 bp, Artificial sequence
  SiRNA target sequence
aataatcttttactccttct

SEQ ID NO: 86553 - DNA, 20 bp, Artificial sequence
  SiRNA target sequence
ataatcttttactccttctt

SEQ ID NO: 86554 - DNA, 20 bp, Artificial sequence
  SiRNA target sequence
taatcttttactccttcttt

SEQ ID NO: 86555 - DNA, 20 bp, Artificial sequence
  SiRNA target sequence
aatcttttactccttcttta

SEQ ID NO: 86556 - DNA, 20 bp, Artificial sequence
  SiRNA target sequence
atcttttactccttctttag

SEQ ID NO: 86557 - DNA, 20 bp, Artificial sequence
  SiRNA target sequence
tcttttactccttctttaga

SEQ ID NO: 86558 - DNA, 20 bp, Artificial sequence
  SiRNA target sequence
cttttactccttctttagaa

SEQ ID NO: 86559 - DNA, 20 bp, Artificial sequence
  SiRNA target sequence
ttttactccttctttagaac

SEQ ID NO: 86560 - DNA, 20 bp, Artificial sequence
  SiRNA target sequence
tttactccttctttagaaca

SEQ ID NO: 86561 - DNA, 20 bp, Artificial sequence
  SiRNA target sequence
ttactccttctttagaacac

SEQ ID NO: 86562 - DNA, 20 bp, Artificial sequence
  SiRNA target sequence
tactccttctttagaacaca

SEQ ID NO: 86563 - DNA, 20 bp, Artificial sequence
  SiRNA target sequence
actccttctttagaacacag

SEQ ID NO: 86564 - DNA, 20 bp, Artificial sequence
  SiRNA target sequence
ctccttctttagaacacaga

SEQ ID NO: 86565 - DNA, 20 bp, Artificial sequence
  SiRNA target sequence
tccttctttagaacacagat

SEQ ID NO: 86566 - DNA, 20 bp, Artificial sequence
  SiRNA target sequence
ccttctttagaacacagata

SEQ ID NO: 86567 - DNA, 20 bp, Artificial sequence
  SiRNA target sequence
cttctttagaacacagatat

SEQ ID NO: 86568 - DNA, 20 bp, Artificial sequence
  SiRNA target sequence
ttctttagaacacagatatt

SEQ ID NO: 86569 - DNA, 20 bp, Artificial sequence
  SiRNA target sequence
tctttagaacacagatattc

SEQ ID NO: 86570 - DNA, 20 bp, Artificial sequence
  SiRNA target sequence
ctttagaacacagatattca

SEQ ID NO: 86571 - DNA, 20 bp, Artificial sequence
  SiRNA target sequence
tttagaacacagatattcaa

SEQ ID NO: 86572 - DNA, 20 bp, Artificial sequence
  SiRNA target sequence
ttagaacacagatattcaat

SEQ ID NO: 86573 - DNA, 20 bp, Artificial sequence
  SiRNA target sequence
tagaacacagatattcaata

SEQ ID NO: 86574 - DNA, 20 bp, Artificial sequence
  SiRNA target sequence
agaacacagatattcaatat

SEQ ID NO: 86575 - DNA, 20 bp, Artificial sequence
  SiRNA target sequence
gaacacagatattcaatatc

SEQ ID NO: 86576 - DNA, 20 bp, Artificial sequence
  SiRNA target sequence
aacacagatattcaatatca

SEQ ID NO: 86577 - DNA, 20 bp, Artificial sequence
  SiRNA target sequence
acacagatattcaatatcat

SEQ ID NO: 86578 - DNA, 20 bp, Artificial sequence
  SiRNA target sequence
cacagatattcaatatcatg

SEQ ID NO: 86579 - DNA, 20 bp, Artificial sequence
  SiRNA target sequence
acagatattcaatatcatgc

SEQ ID NO: 86580 - DNA, 20 bp, Artificial sequence
  SiRNA target sequence
cagatattcaatatcatgct

SEQ ID NO: 86581 - DNA, 20 bp, Artificial sequence
  SiRNA target sequence
agatattcaatatcatgctt

SEQ ID NO: 86582 - DNA, 20 bp, Artificial sequence
  SiRNA target sequence
gatattcaatatcatgctta

SEQ ID NO: 86583 - DNA, 20 bp, Artificial sequence
  SiRNA target sequence
atattcaatatcatgcttat

SEQ ID NO: 86584 - DNA, 20 bp, Artificial sequence
  SiRNA target sequence
tattcaatatcatgcttatt

SEQ ID NO: 86585 - DNA, 20 bp, Artificial sequence
  SiRNA target sequence
attcaatatcatgcttattt

SEQ ID NO: 86586 - DNA, 20 bp, Artificial sequence
  SiRNA target sequence
ttcaatatcatgcttatttt

SEQ ID NO: 86587 - DNA, 20 bp, Artificial sequence
  SiRNA target sequence
tcaatatcatgcttattttt

SEQ ID NO: 86588 - DNA, 20 bp, Artificial sequence
  SiRNA target sequence
caatatcatgcttattttta

SEQ ID NO: 86589 - DNA, 20 bp, Artificial sequence
  SiRNA target sequence
aatatcatgcttatttttag

SEQ ID NO: 86590 - DNA, 20 bp, Artificial sequence
  SiRNA target sequence
atatcatgcttatttttaga

SEQ ID NO: 86591 - DNA, 20 bp, Artificial sequence
  SiRNA target sequence
tatcatgcttatttttagag

SEQ ID NO: 86592 - DNA, 20 bp, Artificial sequence
  SiRNA target sequence
atcatgcttatttttagagg

SEQ ID NO: 86593 - DNA, 20 bp, Artificial sequence
  SiRNA target sequence
tcatgcttatttttagaggt

SEQ ID NO: 86594 - DNA, 20 bp, Artificial sequence
  SiRNA target sequence
catgcttatttttagaggtt

SEQ ID NO: 86595 - DNA, 20 bp, Artificial sequence
  SiRNA target sequence
atgcttatttttagaggttt

SEQ ID NO: 86596 - DNA, 20 bp, Artificial sequence
  SiRNA target sequence
tgcttatttttagaggtttt

SEQ ID NO: 86597 - DNA, 20 bp, Artificial sequence
  SiRNA target sequence
gcttatttttagaggtttta

SEQ ID NO: 86598 - DNA, 20 bp, Artificial sequence
  SiRNA target sequence
cttatttttagaggttttag

SEQ ID NO: 86599 - DNA, 20 bp, Artificial sequence
  SiRNA target sequence
ttatttttagaggttttaga

SEQ ID NO: 86600 - DNA, 20 bp, Artificial sequence
  SiRNA target sequence
tatttttagaggttttagaa

SEQ ID NO: 86601 - DNA, 20 bp, Artificial sequence
  SiRNA target sequence
atttttagaggttttagaaa

SEQ ID NO: 86602 - DNA, 20 bp, Artificial sequence
  SiRNA target sequence
tttttagaggttttagaaat

SEQ ID NO: 86603 - DNA, 20 bp, Artificial sequence
  SiRNA target sequence
ttttagaggttttagaaata

SEQ ID NO: 86604 - DNA, 20 bp, Artificial sequence
  SiRNA target sequence
tttagaggttttagaaatat

SEQ ID NO: 86605 - DNA, 20 bp, Artificial sequence
  SiRNA target sequence
ttagaggttttagaaatatc

SEQ ID NO: 86606 - DNA, 20 bp, Artificial sequence
  SiRNA target sequence
tagaggttttagaaatatcc

SEQ ID NO: 86607 - DNA, 20 bp, Artificial sequence
  SiRNA target sequence
agaggttttagaaatatcca

SEQ ID NO: 86608 - DNA, 20 bp, Artificial sequence
  SiRNA target sequence
gaggttttagaaatatccat

SEQ ID NO: 86609 - DNA, 20 bp, Artificial sequence
  SiRNA target sequence
aggttttagaaatatccata

SEQ ID NO: 86610 - DNA, 20 bp, Artificial sequence
  SiRNA target sequence
ggttttagaaatatccataa

SEQ ID NO: 86611 - DNA, 20 bp, Artificial sequence
  SiRNA target sequence
gttttagaaatatccataag

SEQ ID NO: 86612 - DNA, 20 bp, Artificial sequence
  SiRNA target sequence
ttttagaaatatccataagc

SEQ ID NO: 86613 - DNA, 20 bp, Artificial sequence
  SiRNA target sequence
tttagaaatatccataagcc

SEQ ID NO: 86614 - DNA, 20 bp, Artificial sequence
  SiRNA target sequence
ttagaaatatccataagcca

SEQ ID NO: 86615 - DNA, 20 bp, Artificial sequence
  SiRNA target sequence
tagaaatatccataagccat

SEQ ID NO: 86616 - DNA, 20 bp, Artificial sequence
  SiRNA target sequence
agaaatatccataagccatg

SEQ ID NO: 86617 - DNA, 20 bp, Artificial sequence
  SiRNA target sequence
gaaatatccataagccatgc

SEQ ID NO: 86618 - DNA, 20 bp, Artificial sequence
  SiRNA target sequence
aaatatccataagccatgct

SEQ ID NO: 86619 - DNA, 20 bp, Artificial sequence
  SiRNA target sequence
aatatccataagccatgctt

SEQ ID NO: 86620 - DNA, 20 bp, Artificial sequence
  SiRNA target sequence
atatccataagccatgcttt

SEQ ID NO: 86621 - DNA, 20 bp, Artificial sequence
  SiRNA target sequence
tatccataagccatgctttt

SEQ ID NO: 86622 - DNA, 20 bp, Artificial sequence
  SiRNA target sequence
atccataagccatgcttttt

SEQ ID NO: 86623 - DNA, 20 bp, Artificial sequence
  SiRNA target sequence
tccataagccatgctttttt

SEQ ID NO: 86624 - DNA, 20 bp, Artificial sequence
  SiRNA target sequence
ccataagccatgctttttta

SEQ ID NO: 86625 - DNA, 20 bp, Artificial sequence
  SiRNA target sequence
cataagccatgcttttttag

SEQ ID NO: 86626 - DNA, 20 bp, Artificial sequence
  SiRNA target sequence
ataagccatgcttttttagg

SEQ ID NO: 86627 - DNA, 20 bp, Artificial sequence
  SiRNA target sequence
taagccatgcttttttaggc

SEQ ID NO: 86628 - DNA, 20 bp, Artificial sequence
  SiRNA target sequence
aagccatgcttttttaggca

SEQ ID NO: 86629 - DNA, 20 bp, Artificial sequence
  SiRNA target sequence
agccatgcttttttaggcaa

SEQ ID NO: 86630 - DNA, 20 bp, Artificial sequence
  SiRNA target sequence
gccatgcttttttaggcaat

SEQ ID NO: 86631 - DNA, 20 bp, Artificial sequence
  SiRNA target sequence
ccatgcttttttaggcaatg

SEQ ID NO: 86632 - DNA, 20 bp, Artificial sequence
  SiRNA target sequence
catgcttttttaggcaatga

SEQ ID NO: 86633 - DNA, 20 bp, Artificial sequence
  SiRNA target sequence
atgcttttttaggcaatgaa

SEQ ID NO: 86634 - DNA, 20 bp, Artificial sequence
  SiRNA target sequence
tgcttttttaggcaatgaag

SEQ ID NO: 86635 - DNA, 20 bp, Artificial sequence
  SiRNA target sequence
gcttttttaggcaatgaagt

SEQ ID NO: 86636 - DNA, 20 bp, Artificial sequence
  SiRNA target sequence
cttttttaggcaatgaagta

SEQ ID NO: 86637 - DNA, 20 bp, Artificial sequence
  SiRNA target sequence
ttttttaggcaatgaagtaa

SEQ ID NO: 86638 - DNA, 20 bp, Artificial sequence
  SiRNA target sequence
tttttaggcaatgaagtaaa

SEQ ID NO: 86639 - DNA, 20 bp, Artificial sequence
  SiRNA target sequence
ttttaggcaatgaagtaaaa

SEQ ID NO: 86640 - DNA, 20 bp, Artificial sequence
  SiRNA target sequence
tttaggcaatgaagtaaaat

SEQ ID NO: 86641 - DNA, 20 bp, Artificial sequence
  SiRNA target sequence
ttaggcaatgaagtaaaatc

SEQ ID NO: 86642 - DNA, 20 bp, Artificial sequence
  SiRNA target sequence
taggcaatgaagtaaaatca

SEQ ID NO: 86643 - DNA, 20 bp, Artificial sequence
  SiRNA target sequence
aggcaatgaagtaaaatcaa

SEQ ID NO: 86644 - DNA, 20 bp, Artificial sequence
  SiRNA target sequence
ggcaatgaagtaaaatcaaa

SEQ ID NO: 86645 - DNA, 20 bp, Artificial sequence
  SiRNA target sequence
gcaatgaagtaaaatcaaaa

SEQ ID NO: 86646 - DNA, 20 bp, Artificial sequence
  SiRNA target sequence
caatgaagtaaaatcaaaaa

SEQ ID NO: 86647 - DNA, 20 bp, Artificial sequence
  SiRNA target sequence
aatgaagtaaaatcaaaaat

SEQ ID NO: 86648 - DNA, 20 bp, Artificial sequence
  SiRNA target sequence
atgaagtaaaatcaaaaata

SEQ ID NO: 86649 - DNA, 20 bp, Artificial sequence
  SiRNA target sequence
tgaagtaaaatcaaaaatat

SEQ ID NO: 86650 - DNA, 20 bp, Artificial sequence
  SiRNA target sequence
gaagtaaaatcaaaaatata

SEQ ID NO: 86651 - DNA, 20 bp, Artificial sequence
  SiRNA target sequence
aagtaaaatcaaaaatatac

SEQ ID NO: 86652 - DNA, 20 bp, Artificial sequence
  SiRNA target sequence
agtaaaatcaaaaatatact

SEQ ID NO: 86653 - DNA, 20 bp, Artificial sequence
  SiRNA target sequence
gtaaaatcaaaaatatactt

SEQ ID NO: 86654 - DNA, 20 bp, Artificial sequence
  SiRNA target sequence
taaaatcaaaaatatacttg

SEQ ID NO: 86655 - DNA, 20 bp, Artificial sequence
  SiRNA target sequence
aaaatcaaaaatatacttga

SEQ ID NO: 86656 - DNA, 20 bp, Artificial sequence
  SiRNA target sequence
aaatcaaaaatatacttgaa

SEQ ID NO: 86657 - DNA, 20 bp, Artificial sequence
  SiRNA target sequence
aatcaaaaatatacttgaaa

SEQ ID NO: 86658 - DNA, 20 bp, Artificial sequence
  SiRNA target sequence
atcaaaaatatacttgaaaa

SEQ ID NO: 86659 - DNA, 20 bp, Artificial sequence
  SiRNA target sequence
tcaaaaatatacttgaaaaa

SEQ ID NO: 86660 - DNA, 20 bp, Artificial sequence
  SiRNA target sequence
caaaaatatacttgaaaaag

SEQ ID NO: 86661 - DNA, 20 bp, Artificial sequence
  SiRNA target sequence
aaaaatatacttgaaaaagt

SEQ ID NO: 86662 - DNA, 20 bp, Artificial sequence
  SiRNA target sequence
aaaatatacttgaaaaagtc

SEQ ID NO: 86663 - DNA, 20 bp, Artificial sequence
  SiRNA target sequence
aaatatacttgaaaaagtca

SEQ ID NO: 86664 - DNA, 20 bp, Artificial sequence
  SiRNA target sequence
aatatacttgaaaaagtcac

SEQ ID NO: 86665 - DNA, 20 bp, Artificial sequence
  SiRNA target sequence
atatacttgaaaaagtcacg

SEQ ID NO: 86666 - DNA, 20 bp, Artificial sequence
  SiRNA target sequence
tatacttgaaaaagtcacgc

SEQ ID NO: 86667 - DNA, 20 bp, Artificial sequence
  SiRNA target sequence
atacttgaaaaagtcacgca

SEQ ID NO: 86668 - DNA, 20 bp, Artificial sequence
  SiRNA target sequence
tacttgaaaaagtcacgcaa

SEQ ID NO: 86669 - DNA, 20 bp, Artificial sequence
  SiRNA target sequence
acttgaaaaagtcacgcaaa

SEQ ID NO: 86670 - DNA, 20 bp, Artificial sequence
  SiRNA target sequence
cttgaaaaagtcacgcaaag

SEQ ID NO: 86671 - DNA, 20 bp, Artificial sequence
  SiRNA target sequence
ttgaaaaagtcacgcaaaga

SEQ ID NO: 86672 - DNA, 20 bp, Artificial sequence
  SiRNA target sequence
tgaaaaagtcacgcaaagat

SEQ ID NO: 86673 - DNA, 20 bp, Artificial sequence
  SiRNA target sequence
gaaaaagtcacgcaaagatc

SEQ ID NO: 86674 - DNA, 20 bp, Artificial sequence
  SiRNA target sequence
aaaaagtcacgcaaagatcc

SEQ ID NO: 86675 - DNA, 20 bp, Artificial sequence
  SiRNA target sequence
aaaagtcacgcaaagatcct

SEQ ID NO: 86676 - DNA, 20 bp, Artificial sequence
  SiRNA target sequence
aaagtcacgcaaagatcctt

SEQ ID NO: 86677 - DNA, 20 bp, Artificial sequence
  SiRNA target sequence
aagtcacgcaaagatccttc

SEQ ID NO: 86678 - DNA, 20 bp, Artificial sequence
  SiRNA target sequence
agtcacgcaaagatccttcg

SEQ ID NO: 86679 - DNA, 20 bp, Artificial sequence
  SiRNA target sequence
gtcacgcaaagatccttcga

SEQ ID NO: 86680 - DNA, 20 bp, Artificial sequence
  SiRNA target sequence
tcacgcaaagatccttcgaa

SEQ ID NO: 86681 - DNA, 20 bp, Artificial sequence
  SiRNA target sequence
cacgcaaagatccttcgaat

SEQ ID NO: 86682 - DNA, 20 bp, Artificial sequence
  SiRNA target sequence
acgcaaagatccttcgaatt

SEQ ID NO: 86683 - DNA, 20 bp, Artificial sequence
  SiRNA target sequence
cgcaaagatccttcgaattg

SEQ ID NO: 86684 - DNA, 20 bp, Artificial sequence
  SiRNA target sequence
gcaaagatccttcgaattga

SEQ ID NO: 86685 - DNA, 20 bp, Artificial sequence
  SiRNA target sequence
caaagatccttcgaattgaa

SEQ ID NO: 86686 - DNA, 20 bp, Artificial sequence
  SiRNA target sequence
aaagatccttcgaattgaaa

SEQ ID NO: 86687 - DNA, 20 bp, Artificial sequence
  SiRNA target sequence
aagatccttcgaattgaaac

SEQ ID NO: 86688 - DNA, 20 bp, Artificial sequence
  SiRNA target sequence
agatccttcgaattgaaacc

SEQ ID NO: 86689 - DNA, 20 bp, Artificial sequence
  SiRNA target sequence
gatccttcgaattgaaaccc

SEQ ID NO: 86690 - DNA, 20 bp, Artificial sequence
  SiRNA target sequence
atccttcgaattgaaacccc

SEQ ID NO: 86691 - DNA, 20 bp, Artificial sequence
  SiRNA target sequence
tccttcgaattgaaaccccg

SEQ ID NO: 86692 - DNA, 20 bp, Artificial sequence
  SiRNA target sequence
ccttcgaattgaaaccccgt

SEQ ID NO: 86693 - DNA, 20 bp, Artificial sequence
  SiRNA target sequence
cttcgaattgaaaccccgtt

SEQ ID NO: 86694 - DNA, 20 bp, Artificial sequence
  SiRNA target sequence
ttcgaattgaaaccccgttt

SEQ ID NO: 86695 - DNA, 20 bp, Artificial sequence
  SiRNA target sequence
tcgaattgaaaccccgtttt

SEQ ID NO: 86696 - DNA, 20 bp, Artificial sequence
  SiRNA target sequence
cgaattgaaaccccgttttt

SEQ ID NO: 86697 - DNA, 20 bp, Artificial sequence
  SiRNA target sequence
gaattgaaaccccgtttttc

SEQ ID NO: 86698 - DNA, 20 bp, Artificial sequence
  SiRNA target sequence
aattgaaaccccgtttttcc

SEQ ID NO: 86699 - DNA, 20 bp, Artificial sequence
  SiRNA target sequence
attgaaaccccgtttttcca

SEQ ID NO: 86700 - DNA, 20 bp, Artificial sequence
  SiRNA target sequence
ttgaaaccccgtttttccaa

SEQ ID NO: 86701 - DNA, 20 bp, Artificial sequence
  SiRNA target sequence
tgaaaccccgtttttccaac

SEQ ID NO: 86702 - DNA, 20 bp, Artificial sequence
  SiRNA target sequence
gaaaccccgtttttccaact

SEQ ID NO: 86703 - DNA, 20 bp, Artificial sequence
  SiRNA target sequence
aaaccccgtttttccaactt

SEQ ID NO: 86704 - DNA, 20 bp, Artificial sequence
  SiRNA target sequence
aaccccgtttttccaacttg

SEQ ID NO: 86705 - DNA, 20 bp, Artificial sequence
  SiRNA target sequence
accccgtttttccaacttgc

SEQ ID NO: 86706 - DNA, 20 bp, Artificial sequence
  SiRNA target sequence
ccccgtttttccaacttgct

SEQ ID NO: 86707 - DNA, 20 bp, Artificial sequence
  SiRNA target sequence
cccgtttttccaacttgctc

SEQ ID NO: 86708 - DNA, 20 bp, Artificial sequence
  SiRNA target sequence
ccgtttttccaacttgctca

SEQ ID NO: 86709 - DNA, 20 bp, Artificial sequence
  SiRNA target sequence
cgtttttccaacttgctcaa

SEQ ID NO: 86710 - DNA, 20 bp, Artificial sequence
  SiRNA target sequence
gtttttccaacttgctcaat

SEQ ID NO: 86711 - DNA, 20 bp, Artificial sequence
  SiRNA target sequence
tttttccaacttgctcaata

SEQ ID NO: 86712 - DNA, 20 bp, Artificial sequence
  SiRNA target sequence
ttttccaacttgctcaatat

SEQ ID NO: 86713 - DNA, 20 bp, Artificial sequence
  SiRNA target sequence
tttccaacttgctcaatata

SEQ ID NO: 86714 - DNA, 20 bp, Artificial sequence
  SiRNA target sequence
ttccaacttgctcaatatat

SEQ ID NO: 86715 - DNA, 20 bp, Artificial sequence
  SiRNA target sequence
tccaacttgctcaatatata

SEQ ID NO: 86716 - DNA, 20 bp, Artificial sequence
  SiRNA target sequence
ccaacttgctcaatatataa

SEQ ID NO: 86717 - DNA, 20 bp, Artificial sequence
  SiRNA target sequence
caacttgctcaatatataat

SEQ ID NO: 86718 - DNA, 20 bp, Artificial sequence
  SiRNA target sequence
aacttgctcaatatataata

SEQ ID NO: 86719 - DNA, 20 bp, Artificial sequence
  SiRNA target sequence
acttgctcaatatataataa

SEQ ID NO: 86720 - DNA, 20 bp, Artificial sequence
  SiRNA target sequence
cttgctcaatatataataat

SEQ ID NO: 86721 - DNA, 20 bp, Artificial sequence
  SiRNA target sequence
ttgctcaatatataataatg

SEQ ID NO: 86722 - DNA, 20 bp, Artificial sequence
  SiRNA target sequence
tgctcaatatataataatgt

SEQ ID NO: 86723 - DNA, 20 bp, Artificial sequence
  SiRNA target sequence
gctcaatatataataatgta

SEQ ID NO: 86724 - DNA, 20 bp, Artificial sequence
  SiRNA target sequence
ctcaatatataataatgtat

SEQ ID NO: 86725 - DNA, 20 bp, Artificial sequence
  SiRNA target sequence
tcaatatataataatgtatc

SEQ ID NO: 86726 - DNA, 20 bp, Artificial sequence
  SiRNA target sequence
caatatataataatgtatca

SEQ ID NO: 86727 - DNA, 20 bp, Artificial sequence
  SiRNA target sequence
aatatataataatgtatcac

SEQ ID NO: 86728 - DNA, 20 bp, Artificial sequence
  SiRNA target sequence
atatataataatgtatcacc

SEQ ID NO: 86729 - DNA, 20 bp, Artificial sequence
  SiRNA target sequence
tatataataatgtatcacca

SEQ ID NO: 86730 - DNA, 20 bp, Artificial sequence
  SiRNA target sequence
atataataatgtatcaccag

SEQ ID NO: 86731 - DNA, 20 bp, Artificial sequence
  SiRNA target sequence
tataataatgtatcaccaga

SEQ ID NO: 86732 - DNA, 20 bp, Artificial sequence
  SiRNA target sequence
ataataatgtatcaccagac

SEQ ID NO: 86733 - DNA, 20 bp, Artificial sequence
  SiRNA target sequence
taataatgtatcaccagaca

SEQ ID NO: 86734 - DNA, 20 bp, Artificial sequence
  SiRNA target sequence
aataatgtatcaccagacat

SEQ ID NO: 86735 - DNA, 20 bp, Artificial sequence
  SiRNA target sequence
ataatgtatcaccagacatt

SEQ ID NO: 86736 - DNA, 20 bp, Artificial sequence
  SiRNA target sequence
taatgtatcaccagacattt

SEQ ID NO: 86737 - DNA, 20 bp, Artificial sequence
  SiRNA target sequence
aatgtatcaccagacatttc

SEQ ID NO: 86738 - DNA, 20 bp, Artificial sequence
  SiRNA target sequence
atgtatcaccagacatttct

SEQ ID NO: 86739 - DNA, 20 bp, Artificial sequence
  SiRNA target sequence
tgtatcaccagacatttcta

SEQ ID NO: 86740 - DNA, 20 bp, Artificial sequence
  SiRNA target sequence
gtatcaccagacatttctag

SEQ ID NO: 86741 - DNA, 20 bp, Artificial sequence
  SiRNA target sequence
tatcaccagacatttctagt

SEQ ID NO: 86742 - DNA, 20 bp, Artificial sequence
  SiRNA target sequence
atcaccagacatttctagta

SEQ ID NO: 86743 - DNA, 20 bp, Artificial sequence
  SiRNA target sequence
tcaccagacatttctagtaa

SEQ ID NO: 86744 - DNA, 20 bp, Artificial sequence
  SiRNA target sequence
caccagacatttctagtaaa

SEQ ID NO: 86745 - DNA, 20 bp, Artificial sequence
  SiRNA target sequence
accagacatttctagtaaac

SEQ ID NO: 86746 - DNA, 20 bp, Artificial sequence
  SiRNA target sequence
ccagacatttctagtaaact

SEQ ID NO: 86747 - DNA, 20 bp, Artificial sequence
  SiRNA target sequence
cagacatttctagtaaactt

SEQ ID NO: 86748 - DNA, 20 bp, Artificial sequence
  SiRNA target sequence
agacatttctagtaaactta

SEQ ID NO: 86749 - DNA, 20 bp, Artificial sequence
  SiRNA target sequence
gacatttctagtaaacttaa

SEQ ID NO: 86750 - DNA, 20 bp, Artificial sequence
  SiRNA target sequence
acatttctagtaaacttaac

SEQ ID NO: 86751 - DNA, 20 bp, Artificial sequence
  SiRNA target sequence
catttctagtaaacttaaca

SEQ ID NO: 86752 - DNA, 20 bp, Artificial sequence
  SiRNA target sequence
atttctagtaaacttaacat

SEQ ID NO: 86753 - DNA, 20 bp, Artificial sequence
  SiRNA target sequence
tttctagtaaacttaacatt

SEQ ID NO: 86754 - DNA, 20 bp, Artificial sequence
  SiRNA target sequence
ttctagtaaacttaacattt

SEQ ID NO: 86755 - DNA, 20 bp, Artificial sequence
  SiRNA target sequence
tctagtaaacttaacatttc

SEQ ID NO: 86756 - DNA, 20 bp, Artificial sequence
  SiRNA target sequence
ctagtaaacttaacatttca

SEQ ID NO: 86757 - DNA, 20 bp, Artificial sequence
  SiRNA target sequence
tagtaaacttaacatttcat

SEQ ID NO: 86758 - DNA, 20 bp, Artificial sequence
  SiRNA target sequence
agtaaacttaacatttcatt

SEQ ID NO: 86759 - DNA, 20 bp, Artificial sequence
  SiRNA target sequence
gtaaacttaacatttcatta

SEQ ID NO: 86760 - DNA, 20 bp, Artificial sequence
  SiRNA target sequence
taaacttaacatttcattaa

SEQ ID NO: 86761 - DNA, 20 bp, Artificial sequence
  SiRNA target sequence
aaacttaacatttcattaac

SEQ ID NO: 86762 - DNA, 20 bp, Artificial sequence
  SiRNA target sequence
aacttaacatttcattaaca

SEQ ID NO: 86763 - DNA, 20 bp, Artificial sequence
  SiRNA target sequence
acttaacatttcattaacaa

SEQ ID NO: 86764 - DNA, 20 bp, Artificial sequence
  SiRNA target sequence
cttaacatttcattaacaag

SEQ ID NO: 86765 - DNA, 20 bp, Artificial sequence
  SiRNA target sequence
ttaacatttcattaacaagc

SEQ ID NO: 86766 - DNA, 20 bp, Artificial sequence
  SiRNA target sequence
taacatttcattaacaagca

SEQ ID NO: 86767 - DNA, 20 bp, Artificial sequence
  SiRNA target sequence
aacatttcattaacaagcaa

SEQ ID NO: 86768 - DNA, 20 bp, Artificial sequence
  SiRNA target sequence
acatttcattaacaagcaaa

SEQ ID NO: 86769 - DNA, 20 bp, Artificial sequence
  SiRNA target sequence
catttcattaacaagcaaat

SEQ ID NO: 86770 - DNA, 20 bp, Artificial sequence
  SiRNA target sequence
atttcattaacaagcaaatc

SEQ ID NO: 86771 - DNA, 20 bp, Artificial sequence
  SiRNA target sequence
tttcattaacaagcaaatca

SEQ ID NO: 86772 - DNA, 20 bp, Artificial sequence
  SiRNA target sequence
ttcattaacaagcaaatcat

SEQ ID NO: 86773 - DNA, 20 bp, Artificial sequence
  SiRNA target sequence
tcattaacaagcaaatcatt

SEQ ID NO: 86774 - DNA, 20 bp, Artificial sequence
  SiRNA target sequence
cattaacaagcaaatcatta

SEQ ID NO: 86775 - DNA, 20 bp, Artificial sequence
  SiRNA target sequence
attaacaagcaaatcattat

SEQ ID NO: 86776 - DNA, 20 bp, Artificial sequence
  SiRNA target sequence
ttaacaagcaaatcattatt

SEQ ID NO: 86777 - DNA, 20 bp, Artificial sequence
  SiRNA target sequence
taacaagcaaatcattattt

SEQ ID NO: 86778 - DNA, 20 bp, Artificial sequence
  SiRNA target sequence
aacaagcaaatcattatttg

SEQ ID NO: 86779 - DNA, 20 bp, Artificial sequence
  SiRNA target sequence
acaagcaaatcattatttga

SEQ ID NO: 86780 - DNA, 20 bp, Artificial sequence
  SiRNA target sequence
caagcaaatcattatttgaa

SEQ ID NO: 86781 - DNA, 20 bp, Artificial sequence
  SiRNA target sequence
aagcaaatcattatttgaac

SEQ ID NO: 86782 - DNA, 20 bp, Artificial sequence
  SiRNA target sequence
agcaaatcattatttgaaca

SEQ ID NO: 86783 - DNA, 20 bp, Artificial sequence
  SiRNA target sequence
gcaaatcattatttgaacaa

SEQ ID NO: 86784 - DNA, 20 bp, Artificial sequence
  SiRNA target sequence
caaatcattatttgaacaaa

SEQ ID NO: 86785 - DNA, 20 bp, Artificial sequence
  SiRNA target sequence
aaatcattatttgaacaaag

SEQ ID NO: 86786 - DNA, 20 bp, Artificial sequence
  SiRNA target sequence
aatcattatttgaacaaagt

SEQ ID NO: 86787 - DNA, 20 bp, Artificial sequence
  SiRNA target sequence
atcattatttgaacaaagta

SEQ ID NO: 86788 - DNA, 20 bp, Artificial sequence
  SiRNA target sequence
tcattatttgaacaaagtag

SEQ ID NO: 86789 - DNA, 20 bp, Artificial sequence
  SiRNA target sequence
cattatttgaacaaagtaga

SEQ ID NO: 86790 - DNA, 20 bp, Artificial sequence
  SiRNA target sequence
attatttgaacaaagtagac

SEQ ID NO: 86791 - DNA, 20 bp, Artificial sequence
  SiRNA target sequence
ttatttgaacaaagtagacc

SEQ ID NO: 86792 - DNA, 20 bp, Artificial sequence
  SiRNA target sequence
tatttgaacaaagtagacca

SEQ ID NO: 86793 - DNA, 20 bp, Artificial sequence
  SiRNA target sequence
atttgaacaaagtagaccaa

SEQ ID NO: 86794 - DNA, 20 bp, Artificial sequence
  SiRNA target sequence
tttgaacaaagtagaccaat

SEQ ID NO: 86795 - DNA, 20 bp, Artificial sequence
  SiRNA target sequence
ttgaacaaagtagaccaata

SEQ ID NO: 86796 - DNA, 20 bp, Artificial sequence
  SiRNA target sequence
tgaacaaagtagaccaatac

SEQ ID NO: 86797 - DNA, 20 bp, Artificial sequence
  SiRNA target sequence
gaacaaagtagaccaatact

SEQ ID NO: 86798 - DNA, 20 bp, Artificial sequence
  SiRNA target sequence
aacaaagtagaccaatacta

SEQ ID NO: 86799 - DNA, 20 bp, Artificial sequence
  SiRNA target sequence
acaaagtagaccaatactat

SEQ ID NO: 86800 - DNA, 20 bp, Artificial sequence
  SiRNA target sequence
caaagtagaccaatactatc

SEQ ID NO: 86801 - DNA, 20 bp, Artificial sequence
  SiRNA target sequence
aaagtagaccaatactatca

SEQ ID NO: 86802 - DNA, 20 bp, Artificial sequence
  SiRNA target sequence
aagtagaccaatactatcac

SEQ ID NO: 86803 - DNA, 20 bp, Artificial sequence
  SiRNA target sequence
agtagaccaatactatcacc

SEQ ID NO: 86804 - DNA, 20 bp, Artificial sequence
  SiRNA target sequence
gtagaccaatactatcacca

SEQ ID NO: 86805 - DNA, 20 bp, Artificial sequence
  SiRNA target sequence
tagaccaatactatcaccag

SEQ ID NO: 86806 - DNA, 20 bp, Artificial sequence
  SiRNA target sequence
agaccaatactatcaccagg

SEQ ID NO: 86807 - DNA, 20 bp, Artificial sequence
  SiRNA target sequence
gaccaatactatcaccagga

SEQ ID NO: 86808 - DNA, 20 bp, Artificial sequence
  SiRNA target sequence
accaatactatcaccaggaa

SEQ ID NO: 86809 - DNA, 20 bp, Artificial sequence
  SiRNA target sequence
ccaatactatcaccaggaac

SEQ ID NO: 86810 - DNA, 20 bp, Artificial sequence
  SiRNA target sequence
caatactatcaccaggaaca

SEQ ID NO: 86811 - DNA, 20 bp, Artificial sequence
  SiRNA target sequence
aatactatcaccaggaacaa

SEQ ID NO: 86812 - DNA, 20 bp, Artificial sequence
  SiRNA target sequence
atactatcaccaggaacaaa

SEQ ID NO: 86813 - DNA, 20 bp, Artificial sequence
  SiRNA target sequence
tactatcaccaggaacaaaa

SEQ ID NO: 86814 - DNA, 20 bp, Artificial sequence
  SiRNA target sequence
actatcaccaggaacaaaat

SEQ ID NO: 86815 - DNA, 20 bp, Artificial sequence
  SiRNA target sequence
ctatcaccaggaacaaaatc

SEQ ID NO: 86816 - DNA, 20 bp, Artificial sequence
  SiRNA target sequence
tatcaccaggaacaaaatct

SEQ ID NO: 86817 - DNA, 20 bp, Artificial sequence
  SiRNA target sequence
atcaccaggaacaaaatcta

SEQ ID NO: 86818 - DNA, 20 bp, Artificial sequence
  SiRNA target sequence
tcaccaggaacaaaatctaa

SEQ ID NO: 86819 - DNA, 20 bp, Artificial sequence
  SiRNA target sequence
caccaggaacaaaatctaat

SEQ ID NO: 86820 - DNA, 20 bp, Artificial sequence
  SiRNA target sequence
accaggaacaaaatctaatg

SEQ ID NO: 86821 - DNA, 20 bp, Artificial sequence
  SiRNA target sequence
ccaggaacaaaatctaatgt

SEQ ID NO: 86822 - DNA, 20 bp, Artificial sequence
  SiRNA target sequence
caggaacaaaatctaatgta

SEQ ID NO: 86823 - DNA, 20 bp, Artificial sequence
  SiRNA target sequence
aggaacaaaatctaatgtat

SEQ ID NO: 86824 - DNA, 20 bp, Artificial sequence
  SiRNA target sequence
ggaacaaaatctaatgtata

SEQ ID NO: 86825 - DNA, 20 bp, Artificial sequence
  SiRNA target sequence
gaacaaaatctaatgtataa

SEQ ID NO: 86826 - DNA, 20 bp, Artificial sequence
  SiRNA target sequence
aacaaaatctaatgtataat

SEQ ID NO: 86827 - DNA, 20 bp, Artificial sequence
  SiRNA target sequence
acaaaatctaatgtataatt

SEQ ID NO: 86828 - DNA, 20 bp, Artificial sequence
  SiRNA target sequence
caaaatctaatgtataatta

SEQ ID NO: 86829 - DNA, 20 bp, Artificial sequence
  SiRNA target sequence
aaaatctaatgtataattaa

SEQ ID NO: 86830 - DNA, 20 bp, Artificial sequence
  SiRNA target sequence
aaatctaatgtataattaag

SEQ ID NO: 86831 - DNA, 20 bp, Artificial sequence
  SiRNA target sequence
aatctaatgtataattaagt

SEQ ID NO: 86832 - DNA, 20 bp, Artificial sequence
  SiRNA target sequence
atctaatgtataattaagtt

SEQ ID NO: 86833 - DNA, 20 bp, Artificial sequence
  SiRNA target sequence
tctaatgtataattaagttg

SEQ ID NO: 86834 - DNA, 20 bp, Artificial sequence
  SiRNA target sequence
ctaatgtataattaagttga

SEQ ID NO: 86835 - DNA, 20 bp, Artificial sequence
  SiRNA target sequence
taatgtataattaagttgaa

SEQ ID NO: 86836 - DNA, 20 bp, Artificial sequence
  SiRNA target sequence
aatgtataattaagttgaac

SEQ ID NO: 86837 - DNA, 20 bp, Artificial sequence
  SiRNA target sequence
atgtataattaagttgaacc

SEQ ID NO: 86838 - DNA, 20 bp, Artificial sequence
  SiRNA target sequence
tgtataattaagttgaacct

SEQ ID NO: 86839 - DNA, 20 bp, Artificial sequence
  SiRNA target sequence
gtataattaagttgaacctt

SEQ ID NO: 86840 - DNA, 20 bp, Artificial sequence
  SiRNA target sequence
tataattaagttgaacctta

SEQ ID NO: 86841 - DNA, 20 bp, Artificial sequence
  SiRNA target sequence
ataattaagttgaaccttat

SEQ ID NO: 86842 - DNA, 20 bp, Artificial sequence
  SiRNA target sequence
taattaagttgaaccttata

SEQ ID NO: 86843 - DNA, 20 bp, Artificial sequence
  SiRNA target sequence
aattaagttgaaccttatat

SEQ ID NO: 86844 - DNA, 20 bp, Artificial sequence
  SiRNA target sequence
attaagttgaaccttatata

SEQ ID NO: 86845 - DNA, 20 bp, Artificial sequence
  SiRNA target sequence
ttaagttgaaccttatatac

SEQ ID NO: 86846 - DNA, 20 bp, Artificial sequence
  SiRNA target sequence
taagttgaaccttatatacc

SEQ ID NO: 86847 - DNA, 20 bp, Artificial sequence
  SiRNA target sequence
aagttgaaccttatatacct

SEQ ID NO: 86848 - DNA, 20 bp, Artificial sequence
  SiRNA target sequence
agttgaaccttatatacctt

SEQ ID NO: 86849 - DNA, 20 bp, Artificial sequence
  SiRNA target sequence
gttgaaccttatataccttt

SEQ ID NO: 86850 - DNA, 20 bp, Artificial sequence
  SiRNA target sequence
ttgaaccttatatacctttt

SEQ ID NO: 86851 - DNA, 20 bp, Artificial sequence
  SiRNA target sequence
tgaaccttatataccttttt

SEQ ID NO: 86852 - DNA, 20 bp, Artificial sequence
  SiRNA target sequence
gaaccttatatacctttttc

SEQ ID NO: 86853 - DNA, 20 bp, Artificial sequence
  SiRNA target sequence
aaccttatatacctttttcc

SEQ ID NO: 86854 - DNA, 20 bp, Artificial sequence
  SiRNA target sequence
accttatatacctttttcca

SEQ ID NO: 86855 - DNA, 20 bp, Artificial sequence
  SiRNA target sequence
ccttatatacctttttccat

SEQ ID NO: 86856 - DNA, 20 bp, Artificial sequence
  SiRNA target sequence
cttatatacctttttccatg

SEQ ID NO: 86857 - DNA, 20 bp, Artificial sequence
  SiRNA target sequence
ttatatacctttttccatgt

SEQ ID NO: 86858 - DNA, 20 bp, Artificial sequence
  SiRNA target sequence
tatatacctttttccatgta

SEQ ID NO: 86859 - DNA, 20 bp, Artificial sequence
  SiRNA target sequence
atatacctttttccatgtac

SEQ ID NO: 86860 - DNA, 20 bp, Artificial sequence
  SiRNA target sequence
tatacctttttccatgtaca

SEQ ID NO: 86861 - DNA, 20 bp, Artificial sequence
  SiRNA target sequence
atacctttttccatgtacag

SEQ ID NO: 86862 - DNA, 20 bp, Artificial sequence
  SiRNA target sequence
tacctttttccatgtacagg

SEQ ID NO: 86863 - DNA, 20 bp, Artificial sequence
  SiRNA target sequence
acctttttccatgtacagga

SEQ ID NO: 86864 - DNA, 20 bp, Artificial sequence
  SiRNA target sequence
cctttttccatgtacaggaa

SEQ ID NO: 86865 - DNA, 20 bp, Artificial sequence
  SiRNA target sequence
ctttttccatgtacaggaaa

SEQ ID NO: 86866 - DNA, 20 bp, Artificial sequence
  SiRNA target sequence
tttttccatgtacaggaaag

SEQ ID NO: 86867 - DNA, 20 bp, Artificial sequence
  SiRNA target sequence
ttttccatgtacaggaaagg

SEQ ID NO: 86868 - DNA, 20 bp, Artificial sequence
  SiRNA target sequence
tttccatgtacaggaaaggt

SEQ ID NO: 86869 - DNA, 20 bp, Artificial sequence
  SiRNA target sequence
ttccatgtacaggaaaggtt

SEQ ID NO: 86870 - DNA, 20 bp, Artificial sequence
  SiRNA target sequence
tccatgtacaggaaaggttt

SEQ ID NO: 86871 - DNA, 20 bp, Artificial sequence
  SiRNA target sequence
ccatgtacaggaaaggtttt

SEQ ID NO: 86872 - DNA, 20 bp, Artificial sequence
  SiRNA target sequence
catgtacaggaaaggttttc

SEQ ID NO: 86873 - DNA, 20 bp, Artificial sequence
  SiRNA target sequence
atgtacaggaaaggttttca

SEQ ID NO: 86874 - DNA, 20 bp, Artificial sequence
  SiRNA target sequence
tgtacaggaaaggttttcaa

SEQ ID NO: 86875 - DNA, 20 bp, Artificial sequence
  SiRNA target sequence
gtacaggaaaggttttcaat

SEQ ID NO: 86876 - DNA, 20 bp, Artificial sequence
  SiRNA target sequence
tacaggaaaggttttcaata

SEQ ID NO: 86877 - DNA, 20 bp, Artificial sequence
  SiRNA target sequence
acaggaaaggttttcaatat

SEQ ID NO: 86878 - DNA, 20 bp, Artificial sequence
  SiRNA target sequence
caggaaaggttttcaatatt

SEQ ID NO: 86879 - DNA, 20 bp, Artificial sequence
  SiRNA target sequence
aggaaaggttttcaatattt

SEQ ID NO: 86880 - DNA, 20 bp, Artificial sequence
  SiRNA target sequence
ggaaaggttttcaatattta

SEQ ID NO: 86881 - DNA, 20 bp, Artificial sequence
  SiRNA target sequence
gaaaggttttcaatatttag

SEQ ID NO: 86882 - DNA, 20 bp, Artificial sequence
  SiRNA target sequence
aaaggttttcaatatttagt

SEQ ID NO: 86883 - DNA, 20 bp, Artificial sequence
  SiRNA target sequence
aaggttttcaatatttagta

SEQ ID NO: 86884 - DNA, 20 bp, Artificial sequence
  SiRNA target sequence
aggttttcaatatttagtat

SEQ ID NO: 86885 - DNA, 20 bp, Artificial sequence
  SiRNA target sequence
ggttttcaatatttagtata

SEQ ID NO: 86886 - DNA, 20 bp, Artificial sequence
  SiRNA target sequence
gttttcaatatttagtatat

SEQ ID NO: 86887 - DNA, 20 bp, Artificial sequence
  SiRNA target sequence
ttttcaatatttagtatatt

SEQ ID NO: 86888 - DNA, 20 bp, Artificial sequence
  SiRNA target sequence
tttcaatatttagtatattt

SEQ ID NO: 86889 - DNA, 20 bp, Artificial sequence
  SiRNA target sequence
ttcaatatttagtatatttg

SEQ ID NO: 86890 - DNA, 20 bp, Artificial sequence
  SiRNA target sequence
tcaatatttagtatatttgt

SEQ ID NO: 86891 - DNA, 20 bp, Artificial sequence
  SiRNA target sequence
caatatttagtatatttgta

SEQ ID NO: 86892 - DNA, 20 bp, Artificial sequence
  SiRNA target sequence
aatatttagtatatttgtat

SEQ ID NO: 86893 - DNA, 20 bp, Artificial sequence
  SiRNA target sequence
atatttagtatatttgtatc

SEQ ID NO: 86894 - DNA, 20 bp, Artificial sequence
  SiRNA target sequence
tatttagtatatttgtatct

SEQ ID NO: 86895 - DNA, 20 bp, Artificial sequence
  SiRNA target sequence
atttagtatatttgtatcta

SEQ ID NO: 86896 - DNA, 20 bp, Artificial sequence
  SiRNA target sequence
tttagtatatttgtatctat

SEQ ID NO: 86897 - DNA, 20 bp, Artificial sequence
  SiRNA target sequence
ttagtatatttgtatctatc

SEQ ID NO: 86898 - DNA, 20 bp, Artificial sequence
  SiRNA target sequence
tagtatatttgtatctatca

SEQ ID NO: 86899 - DNA, 20 bp, Artificial sequence
  SiRNA target sequence
agtatatttgtatctatcaa

SEQ ID NO: 86900 - DNA, 20 bp, Artificial sequence
  SiRNA target sequence
gtatatttgtatctatcaaa

SEQ ID NO: 86901 - DNA, 20 bp, Artificial sequence
  SiRNA target sequence
tatatttgtatctatcaaat

SEQ ID NO: 86902 - DNA, 20 bp, Artificial sequence
  SiRNA target sequence
atatttgtatctatcaaatt

SEQ ID NO: 86903 - DNA, 20 bp, Artificial sequence
  SiRNA target sequence
tatttgtatctatcaaattt

SEQ ID NO: 86904 - DNA, 20 bp, Artificial sequence
  SiRNA target sequence
atttgtatctatcaaattta

SEQ ID NO: 86905 - DNA, 20 bp, Artificial sequence
  SiRNA target sequence
tttgtatctatcaaatttat

SEQ ID NO: 86906 - DNA, 20 bp, Artificial sequence
  SiRNA target sequence
ttgtatctatcaaatttata

SEQ ID NO: 86907 - DNA, 20 bp, Artificial sequence
  SiRNA target sequence
tgtatctatcaaatttatat

SEQ ID NO: 86908 - DNA, 20 bp, Artificial sequence
  SiRNA target sequence
gtatctatcaaatttatatt

SEQ ID NO: 86909 - DNA, 20 bp, Artificial sequence
  SiRNA target sequence
tatctatcaaatttatattc

SEQ ID NO: 86910 - DNA, 20 bp, Artificial sequence
  SiRNA target sequence
atctatcaaatttatattct

SEQ ID NO: 86911 - DNA, 20 bp, Artificial sequence
  SiRNA target sequence
tctatcaaatttatattctc

SEQ ID NO: 86912 - DNA, 20 bp, Artificial sequence
  SiRNA target sequence
ctatcaaatttatattctcg

SEQ ID NO: 86913 - DNA, 20 bp, Artificial sequence
  SiRNA target sequence
tatcaaatttatattctcgt

SEQ ID NO: 86914 - DNA, 20 bp, Artificial sequence
  SiRNA target sequence
atcaaatttatattctcgtt

SEQ ID NO: 86915 - DNA, 20 bp, Artificial sequence
  SiRNA target sequence
tcaaatttatattctcgttt

SEQ ID NO: 86916 - DNA, 20 bp, Artificial sequence
  SiRNA target sequence
caaatttatattctcgtttg

SEQ ID NO: 86917 - DNA, 20 bp, Artificial sequence
  SiRNA target sequence
aaatttatattctcgtttgt

SEQ ID NO: 86918 - DNA, 20 bp, Artificial sequence
  SiRNA target sequence
aatttatattctcgtttgtc

SEQ ID NO: 86919 - DNA, 20 bp, Artificial sequence
  SiRNA target sequence
atttatattctcgtttgtct

SEQ ID NO: 86920 - DNA, 20 bp, Artificial sequence
  SiRNA target sequence
tttatattctcgtttgtctt

SEQ ID NO: 86921 - DNA, 20 bp, Artificial sequence
  SiRNA target sequence
ttatattctcgtttgtcttt

SEQ ID NO: 86922 - DNA, 20 bp, Artificial sequence
  SiRNA target sequence
tatattctcgtttgtcttta

SEQ ID NO: 86923 - DNA, 20 bp, Artificial sequence
  SiRNA target sequence
atattctcgtttgtctttat

SEQ ID NO: 86924 - DNA, 20 bp, Artificial sequence
  SiRNA target sequence
tattctcgtttgtctttatt

SEQ ID NO: 86925 - DNA, 20 bp, Artificial sequence
  SiRNA target sequence
attctcgtttgtctttattt

SEQ ID NO: 86926 - DNA, 20 bp, Artificial sequence
  SiRNA target sequence
ttctcgtttgtctttatttt

SEQ ID NO: 86927 - DNA, 20 bp, Artificial sequence
  SiRNA target sequence
tctcgtttgtctttatttta

SEQ ID NO: 86928 - DNA, 20 bp, Artificial sequence
  SiRNA target sequence
ctcgtttgtctttattttat

SEQ ID NO: 86929 - DNA, 20 bp, Artificial sequence
  SiRNA target sequence
tcgtttgtctttattttata

SEQ ID NO: 86930 - DNA, 20 bp, Artificial sequence
  SiRNA target sequence
cgtttgtctttattttataa

SEQ ID NO: 86931 - DNA, 20 bp, Artificial sequence
  SiRNA target sequence
gtttgtctttattttataag

SEQ ID NO: 86932 - DNA, 20 bp, Artificial sequence
  SiRNA target sequence
tttgtctttattttataaga

SEQ ID NO: 86933 - DNA, 20 bp, Artificial sequence
  SiRNA target sequence
ttgtctttattttataagaa

SEQ ID NO: 86934 - DNA, 20 bp, Artificial sequence
  SiRNA target sequence
tgtctttattttataagaac

SEQ ID NO: 86935 - DNA, 20 bp, Artificial sequence
  SiRNA target sequence
gtctttattttataagaacc

SEQ ID NO: 86936 - DNA, 20 bp, Artificial sequence
  SiRNA target sequence
tctttattttataagaacct

SEQ ID NO: 86937 - DNA, 20 bp, Artificial sequence
  SiRNA target sequence
ctttattttataagaacctg

SEQ ID NO: 86938 - DNA, 20 bp, Artificial sequence
  SiRNA target sequence
tttattttataagaacctgt

SEQ ID NO: 86939 - DNA, 20 bp, Artificial sequence
  SiRNA target sequence
ttattttataagaacctgta

SEQ ID NO: 86940 - DNA, 20 bp, Artificial sequence
  SiRNA target sequence
tattttataagaacctgtat

SEQ ID NO: 86941 - DNA, 20 bp, Artificial sequence
  SiRNA target sequence
attttataagaacctgtata

SEQ ID NO: 86942 - DNA, 20 bp, Artificial sequence
  SiRNA target sequence
ttttataagaacctgtatag

SEQ ID NO: 86943 - DNA, 20 bp, Artificial sequence
  SiRNA target sequence
tttataagaacctgtatagt

SEQ ID NO: 86944 - DNA, 20 bp, Artificial sequence
  SiRNA target sequence
ttataagaacctgtatagtt

SEQ ID NO: 86945 - DNA, 20 bp, Artificial sequence
  SiRNA target sequence
tataagaacctgtatagttg

SEQ ID NO: 86946 - DNA, 20 bp, Artificial sequence
  SiRNA target sequence
ataagaacctgtatagttgg

SEQ ID NO: 86947 - DNA, 20 bp, Artificial sequence
  SiRNA target sequence
taagaacctgtatagttggt

SEQ ID NO: 86948 - DNA, 20 bp, Artificial sequence
  SiRNA target sequence
aagaacctgtatagttggtc

SEQ ID NO: 86949 - DNA, 20 bp, Artificial sequence
  SiRNA target sequence
agaacctgtatagttggtct

SEQ ID NO: 86950 - DNA, 20 bp, Artificial sequence
  SiRNA target sequence
gaacctgtatagttggtctt

SEQ ID NO: 86951 - DNA, 20 bp, Artificial sequence
  SiRNA target sequence
aacctgtatagttggtcttt

SEQ ID NO: 86952 - DNA, 20 bp, Artificial sequence
  SiRNA target sequence
acctgtatagttggtctttt

SEQ ID NO: 86953 - DNA, 20 bp, Artificial sequence
  SiRNA target sequence
cctgtatagttggtcttttt

SEQ ID NO: 86954 - DNA, 20 bp, Artificial sequence
  SiRNA target sequence
ctgtatagttggtcttttta

SEQ ID NO: 86955 - DNA, 20 bp, Artificial sequence
  SiRNA target sequence
tgtatagttggtctttttaa

SEQ ID NO: 86956 - DNA, 20 bp, Artificial sequence
  SiRNA target sequence
gtatagttggtctttttaat

SEQ ID NO: 86957 - DNA, 20 bp, Artificial sequence
  SiRNA target sequence
tatagttggtctttttaatt

SEQ ID NO: 86958 - DNA, 20 bp, Artificial sequence
  SiRNA target sequence
atagttggtctttttaatta

SEQ ID NO: 86959 - DNA, 20 bp, Artificial sequence
  SiRNA target sequence
tagttggtctttttaattat

SEQ ID NO: 86960 - DNA, 20 bp, Artificial sequence
  SiRNA target sequence
agttggtctttttaattata

SEQ ID NO: 86961 - DNA, 20 bp, Artificial sequence
  SiRNA target sequence
gttggtctttttaattataa

SEQ ID NO: 86962 - DNA, 20 bp, Artificial sequence
  SiRNA target sequence
ttggtctttttaattataag

SEQ ID NO: 86963 - DNA, 20 bp, Artificial sequence
  SiRNA target sequence
tggtctttttaattataagc

SEQ ID NO: 86964 - DNA, 20 bp, Artificial sequence
  SiRNA target sequence
ggtctttttaattataagct

SEQ ID NO: 86965 - DNA, 20 bp, Artificial sequence
  SiRNA target sequence
gtctttttaattataagctt

SEQ ID NO: 86966 - DNA, 20 bp, Artificial sequence
  SiRNA target sequence
tctttttaattataagctta

SEQ ID NO: 86967 - DNA, 20 bp, Artificial sequence
  SiRNA target sequence
ctttttaattataagcttat

SEQ ID NO: 86968 - DNA, 20 bp, Artificial sequence
  SiRNA target sequence
tttttaattataagcttatt

SEQ ID NO: 86969 - DNA, 20 bp, Artificial sequence
  SiRNA target sequence
ttttaattataagcttattg

SEQ ID NO: 86970 - DNA, 20 bp, Artificial sequence
  SiRNA target sequence
tttaattataagcttattga

SEQ ID NO: 86971 - DNA, 20 bp, Artificial sequence
  SiRNA target sequence
ttaattataagcttattgaa

SEQ ID NO: 86972 - DNA, 20 bp, Artificial sequence
  SiRNA target sequence
taattataagcttattgaaa

SEQ ID NO: 86973 - DNA, 20 bp, Artificial sequence
  SiRNA target sequence
aattataagcttattgaaat

SEQ ID NO: 86974 - DNA, 20 bp, Artificial sequence
  SiRNA target sequence
attataagcttattgaaatt

SEQ ID NO: 86975 - DNA, 20 bp, Artificial sequence
  SiRNA target sequence
ttataagcttattgaaattt

SEQ ID NO: 86976 - DNA, 20 bp, Artificial sequence
  SiRNA target sequence
tataagcttattgaaatttc

SEQ ID NO: 86977 - DNA, 20 bp, Artificial sequence
  SiRNA target sequence
ataagcttattgaaatttct

SEQ ID NO: 86978 - DNA, 20 bp, Artificial sequence
  SiRNA target sequence
taagcttattgaaatttcta

SEQ ID NO: 86979 - DNA, 20 bp, Artificial sequence
  SiRNA target sequence
aagcttattgaaatttctaa

SEQ ID NO: 86980 - DNA, 20 bp, Artificial sequence
  SiRNA target sequence
agcttattgaaatttctaat

SEQ ID NO: 86981 - DNA, 20 bp, Artificial sequence
  SiRNA target sequence
gcttattgaaatttctaata

SEQ ID NO: 86982 - DNA, 20 bp, Artificial sequence
  SiRNA target sequence
cttattgaaatttctaatat

SEQ ID NO: 86983 - DNA, 20 bp, Artificial sequence
  SiRNA target sequence
ttattgaaatttctaatatt

SEQ ID NO: 86984 - DNA, 20 bp, Artificial sequence
  SiRNA target sequence
tattgaaatttctaatattt

SEQ ID NO: 86985 - DNA, 20 bp, Artificial sequence
  SiRNA target sequence
attgaaatttctaatattta

SEQ ID NO: 86986 - DNA, 20 bp, Artificial sequence
  SiRNA target sequence
ttgaaatttctaatatttaa

SEQ ID NO: 86987 - DNA, 20 bp, Artificial sequence
  SiRNA target sequence
tgaaatttctaatatttaaa

SEQ ID NO: 86988 - DNA, 20 bp, Artificial sequence
  SiRNA target sequence
gaaatttctaatatttaaag

SEQ ID NO: 86989 - DNA, 20 bp, Artificial sequence
  SiRNA target sequence
aaatttctaatatttaaagg

SEQ ID NO: 86990 - DNA, 20 bp, Artificial sequence
  SiRNA target sequence
aatttctaatatttaaagga

SEQ ID NO: 86991 - DNA, 20 bp, Artificial sequence
  SiRNA target sequence
atttctaatatttaaaggaa

SEQ ID NO: 86992 - DNA, 20 bp, Artificial sequence
  SiRNA target sequence
tttctaatatttaaaggaac

SEQ ID NO: 86993 - DNA, 20 bp, Artificial sequence
  SiRNA target sequence
ttctaatatttaaaggaaca

SEQ ID NO: 86994 - DNA, 20 bp, Artificial sequence
  SiRNA target sequence
tctaatatttaaaggaacaa

SEQ ID NO: 86995 - DNA, 20 bp, Artificial sequence
  SiRNA target sequence
ctaatatttaaaggaacaaa

SEQ ID NO: 86996 - DNA, 20 bp, Artificial sequence
  SiRNA target sequence
taatatttaaaggaacaaaa

SEQ ID NO: 86997 - DNA, 20 bp, Artificial sequence
  SiRNA target sequence
aatatttaaaggaacaaaat

SEQ ID NO: 86998 - DNA, 20 bp, Artificial sequence
  SiRNA target sequence
atatttaaaggaacaaaatc

SEQ ID NO: 86999 - DNA, 20 bp, Artificial sequence
  SiRNA target sequence
tatttaaaggaacaaaatct

SEQ ID NO: 87000 - DNA, 20 bp, Artificial sequence
  SiRNA target sequence
atttaaaggaacaaaatcta

SEQ ID NO: 87001 - DNA, 20 bp, Artificial sequence
  SiRNA target sequence
tttaaaggaacaaaatctac

SEQ ID NO: 87002 - DNA, 20 bp, Artificial sequence
  SiRNA target sequence
ttaaaggaacaaaatctaca

SEQ ID NO: 87003 - DNA, 20 bp, Artificial sequence
  SiRNA target sequence
taaaggaacaaaatctacat

SEQ ID NO: 87004 - DNA, 20 bp, Artificial sequence
  SiRNA target sequence
aaaggaacaaaatctacatt

SEQ ID NO: 87005 - DNA, 20 bp, Artificial sequence
  SiRNA target sequence
aaggaacaaaatctacattt

SEQ ID NO: 87006 - DNA, 20 bp, Artificial sequence
  SiRNA target sequence
aggaacaaaatctacattta

SEQ ID NO: 87007 - DNA, 20 bp, Artificial sequence
  SiRNA target sequence
ggaacaaaatctacatttag

SEQ ID NO: 87008 - DNA, 20 bp, Artificial sequence
  SiRNA target sequence
gaacaaaatctacatttaga

SEQ ID NO: 87009 - DNA, 20 bp, Artificial sequence
  SiRNA target sequence
aacaaaatctacatttagat

SEQ ID NO: 87010 - DNA, 20 bp, Artificial sequence
  SiRNA target sequence
acaaaatctacatttagatt

SEQ ID NO: 87011 - DNA, 20 bp, Artificial sequence
  SiRNA target sequence
caaaatctacatttagatta

SEQ ID NO: 87012 - DNA, 20 bp, Artificial sequence
  SiRNA target sequence
aaaatctacatttagattat

SEQ ID NO: 87013 - DNA, 20 bp, Artificial sequence
  SiRNA target sequence
aaatctacatttagattata

SEQ ID NO: 87014 - DNA, 20 bp, Artificial sequence
  SiRNA target sequence
aatctacatttagattatat

SEQ ID NO: 87015 - DNA, 20 bp, Artificial sequence
  SiRNA target sequence
atctacatttagattatatt

SEQ ID NO: 87016 - DNA, 20 bp, Artificial sequence
  SiRNA target sequence
tctacatttagattatattc

SEQ ID NO: 87017 - DNA, 20 bp, Artificial sequence
  SiRNA target sequence
ctacatttagattatattct

SEQ ID NO: 87018 - DNA, 20 bp, Artificial sequence
  SiRNA target sequence
tacatttagattatattcta

SEQ ID NO: 87019 - DNA, 20 bp, Artificial sequence
  SiRNA target sequence
acatttagattatattctaa

SEQ ID NO: 87020 - DNA, 20 bp, Artificial sequence
  SiRNA target sequence
catttagattatattctaat

SEQ ID NO: 87021 - DNA, 20 bp, Artificial sequence
  SiRNA target sequence
atttagattatattctaatt

SEQ ID NO: 87022 - DNA, 20 bp, Artificial sequence
  SiRNA target sequence
tttagattatattctaattt

SEQ ID NO: 87023 - DNA, 20 bp, Artificial sequence
  SiRNA target sequence
ttagattatattctaattta

SEQ ID NO: 87024 - DNA, 20 bp, Artificial sequence
  SiRNA target sequence
tagattatattctaatttat

SEQ ID NO: 87025 - DNA, 20 bp, Artificial sequence
  SiRNA target sequence
agattatattctaatttatt

SEQ ID NO: 87026 - DNA, 20 bp, Artificial sequence
  SiRNA target sequence
gattatattctaatttattg

SEQ ID NO: 87027 - DNA, 20 bp, Artificial sequence
  SiRNA target sequence
attatattctaatttattga

SEQ ID NO: 87028 - DNA, 20 bp, Artificial sequence
  SiRNA target sequence
ttatattctaatttattgaa

SEQ ID NO: 87029 - DNA, 20 bp, Artificial sequence
  SiRNA target sequence
tatattctaatttattgaat

SEQ ID NO: 87030 - DNA, 20 bp, Artificial sequence
  SiRNA target sequence
atattctaatttattgaatt

SEQ ID NO: 87031 - DNA, 20 bp, Artificial sequence
  SiRNA target sequence
tattctaatttattgaattt

SEQ ID NO: 87032 - DNA, 20 bp, Artificial sequence
  SiRNA target sequence
attctaatttattgaatttc

SEQ ID NO: 87033 - DNA, 20 bp, Artificial sequence
  SiRNA target sequence
ttctaatttattgaatttca

SEQ ID NO: 87034 - DNA, 20 bp, Artificial sequence
  SiRNA target sequence
tctaatttattgaatttcat

SEQ ID NO: 87035 - DNA, 21 bp, Artificial sequence
  SiRNA target sequence
ttatatccaactatcaaaaaa

SEQ ID NO: 87036 - DNA, 21 bp, Artificial sequence
  SiRNA target sequence
tatatccaactatcaaaaaat

SEQ ID NO: 87037 - DNA, 21 bp, Artificial sequence
  SiRNA target sequence
atatccaactatcaaaaaata

SEQ ID NO: 87038 - DNA, 21 bp, Artificial sequence
  SiRNA target sequence
tatccaactatcaaaaaatag

SEQ ID NO: 87039 - DNA, 21 bp, Artificial sequence
  SiRNA target sequence
atccaactatcaaaaaatagc

SEQ ID NO: 87040 - DNA, 21 bp, Artificial sequence
  SiRNA target sequence
tccaactatcaaaaaatagcc

SEQ ID NO: 87041 - DNA, 21 bp, Artificial sequence
  SiRNA target sequence
ccaactatcaaaaaatagcct

SEQ ID NO: 87042 - DNA, 21 bp, Artificial sequence
  SiRNA target sequence
caactatcaaaaaatagcctc

SEQ ID NO: 87043 - DNA, 21 bp, Artificial sequence
  SiRNA target sequence
aactatcaaaaaatagcctct

SEQ ID NO: 87044 - DNA, 21 bp, Artificial sequence
  SiRNA target sequence
actatcaaaaaatagcctctt

SEQ ID NO: 87045 - DNA, 21 bp, Artificial sequence
  SiRNA target sequence
ctatcaaaaaatagcctcttt

SEQ ID NO: 87046 - DNA, 21 bp, Artificial sequence
  SiRNA target sequence
tatcaaaaaatagcctctttt

SEQ ID NO: 87047 - DNA, 21 bp, Artificial sequence
  SiRNA target sequence
atcaaaaaatagcctcttttc

SEQ ID NO: 87048 - DNA, 21 bp, Artificial sequence
  SiRNA target sequence
tcaaaaaatagcctcttttct

SEQ ID NO: 87049 - DNA, 21 bp, Artificial sequence
  SiRNA target sequence
caaaaaatagcctcttttctt

SEQ ID NO: 87050 - DNA, 21 bp, Artificial sequence
  SiRNA target sequence
aaaaaatagcctcttttcttt

SEQ ID NO: 87051 - DNA, 21 bp, Artificial sequence
  SiRNA target sequence
aaaaatagcctcttttctttc

SEQ ID NO: 87052 - DNA, 21 bp, Artificial sequence
  SiRNA target sequence
aaaatagcctcttttctttca

SEQ ID NO: 87053 - DNA, 21 bp, Artificial sequence
  SiRNA target sequence
aaatagcctcttttctttcac

SEQ ID NO: 87054 - DNA, 21 bp, Artificial sequence
  SiRNA target sequence
aatagcctcttttctttcaca

SEQ ID NO: 87055 - DNA, 21 bp, Artificial sequence
  SiRNA target sequence
atagcctcttttctttcacaa

SEQ ID NO: 87056 - DNA, 21 bp, Artificial sequence
  SiRNA target sequence
tagcctcttttctttcacaat

SEQ ID NO: 87057 - DNA, 21 bp, Artificial sequence
  SiRNA target sequence
agcctcttttctttcacaatt

SEQ ID NO: 87058 - DNA, 21 bp, Artificial sequence
  SiRNA target sequence
gcctcttttctttcacaattt

SEQ ID NO: 87059 - DNA, 21 bp, Artificial sequence
  SiRNA target sequence
cctcttttctttcacaatttc

SEQ ID NO: 87060 - DNA, 21 bp, Artificial sequence
  SiRNA target sequence
ctcttttctttcacaatttca

SEQ ID NO: 87061 - DNA, 21 bp, Artificial sequence
  SiRNA target sequence
tcttttctttcacaatttcag

SEQ ID NO: 87062 - DNA, 21 bp, Artificial sequence
  SiRNA target sequence
cttttctttcacaatttcaga

SEQ ID NO: 87063 - DNA, 21 bp, Artificial sequence
  SiRNA target sequence
ttttctttcacaatttcagaa

SEQ ID NO: 87064 - DNA, 21 bp, Artificial sequence
  SiRNA target sequence
tttctttcacaatttcagaaa

SEQ ID NO: 87065 - DNA, 21 bp, Artificial sequence
  SiRNA target sequence
ttctttcacaatttcagaaaa

SEQ ID NO: 87066 - DNA, 21 bp, Artificial sequence
  SiRNA target sequence
tctttcacaatttcagaaaaa

SEQ ID NO: 87067 - DNA, 21 bp, Artificial sequence
  SiRNA target sequence
ctttcacaatttcagaaaaat

SEQ ID NO: 87068 - DNA, 21 bp, Artificial sequence
  SiRNA target sequence
tttcacaatttcagaaaaatt

SEQ ID NO: 87069 - DNA, 21 bp, Artificial sequence
  SiRNA target sequence
ttcacaatttcagaaaaattt

SEQ ID NO: 87070 - DNA, 21 bp, Artificial sequence
  SiRNA target sequence
tcacaatttcagaaaaatttt

SEQ ID NO: 87071 - DNA, 21 bp, Artificial sequence
  SiRNA target sequence
cacaatttcagaaaaattttc

SEQ ID NO: 87072 - DNA, 21 bp, Artificial sequence
  SiRNA target sequence
acaatttcagaaaaattttca

SEQ ID NO: 87073 - DNA, 21 bp, Artificial sequence
  SiRNA target sequence
caatttcagaaaaattttcat

SEQ ID NO: 87074 - DNA, 21 bp, Artificial sequence
  SiRNA target sequence
aatttcagaaaaattttcatt

SEQ ID NO: 87075 - DNA, 21 bp, Artificial sequence
  SiRNA target sequence
atttcagaaaaattttcatta

SEQ ID NO: 87076 - DNA, 21 bp, Artificial sequence
  SiRNA target sequence
tttcagaaaaattttcattaa

SEQ ID NO: 87077 - DNA, 21 bp, Artificial sequence
  SiRNA target sequence
ttcagaaaaattttcattaaa

SEQ ID NO: 87078 - DNA, 21 bp, Artificial sequence
  SiRNA target sequence
tcagaaaaattttcattaaaa

SEQ ID NO: 87079 - DNA, 21 bp, Artificial sequence
  SiRNA target sequence
cagaaaaattttcattaaaaa

SEQ ID NO: 87080 - DNA, 21 bp, Artificial sequence
  SiRNA target sequence
agaaaaattttcattaaaaat

SEQ ID NO: 87081 - DNA, 21 bp, Artificial sequence
  SiRNA target sequence
gaaaaattttcattaaaaatg

SEQ ID NO: 87082 - DNA, 21 bp, Artificial sequence
  SiRNA target sequence
aaaaattttcattaaaaatgc

SEQ ID NO: 87083 - DNA, 21 bp, Artificial sequence
  SiRNA target sequence
aaaattttcattaaaaatgct

SEQ ID NO: 87084 - DNA, 21 bp, Artificial sequence
  SiRNA target sequence
aaattttcattaaaaatgcta

SEQ ID NO: 87085 - DNA, 21 bp, Artificial sequence
  SiRNA target sequence
aattttcattaaaaatgctat

SEQ ID NO: 87086 - DNA, 21 bp, Artificial sequence
  SiRNA target sequence
attttcattaaaaatgctata

SEQ ID NO: 87087 - DNA, 21 bp, Artificial sequence
  SiRNA target sequence
ttttcattaaaaatgctataa

SEQ ID NO: 87088 - DNA, 21 bp, Artificial sequence
  SiRNA target sequence
tttcattaaaaatgctataaa

SEQ ID NO: 87089 - DNA, 21 bp, Artificial sequence
  SiRNA target sequence
ttcattaaaaatgctataaat

SEQ ID NO: 87090 - DNA, 21 bp, Artificial sequence
  SiRNA target sequence
tcattaaaaatgctataaata

SEQ ID NO: 87091 - DNA, 21 bp, Artificial sequence
  SiRNA target sequence
cattaaaaatgctataaatag

SEQ ID NO: 87092 - DNA, 21 bp, Artificial sequence
  SiRNA target sequence
attaaaaatgctataaatagt

SEQ ID NO: 87093 - DNA, 21 bp, Artificial sequence
  SiRNA target sequence
ttaaaaatgctataaatagtt

SEQ ID NO: 87094 - DNA, 21 bp, Artificial sequence
  SiRNA target sequence
taaaaatgctataaatagttt

SEQ ID NO: 87095 - DNA, 21 bp, Artificial sequence
  SiRNA target sequence
aaaaatgctataaatagtttt

SEQ ID NO: 87096 - DNA, 21 bp, Artificial sequence
  SiRNA target sequence
aaaatgctataaatagttttt

SEQ ID NO: 87097 - DNA, 21 bp, Artificial sequence
  SiRNA target sequence
aaatgctataaatagtttttt

SEQ ID NO: 87098 - DNA, 21 bp, Artificial sequence
  SiRNA target sequence
aatgctataaatagttttttg

SEQ ID NO: 87099 - DNA, 21 bp, Artificial sequence
  SiRNA target sequence
atgctataaatagttttttgc

SEQ ID NO: 87100 - DNA, 21 bp, Artificial sequence
  SiRNA target sequence
tgctataaatagttttttgca

SEQ ID NO: 87101 - DNA, 21 bp, Artificial sequence
  SiRNA target sequence
gctataaatagttttttgcat

SEQ ID NO: 87102 - DNA, 21 bp, Artificial sequence
  SiRNA target sequence
ctataaatagttttttgcata

SEQ ID NO: 87103 - DNA, 21 bp, Artificial sequence
  SiRNA target sequence
tataaatagttttttgcatat

SEQ ID NO: 87104 - DNA, 21 bp, Artificial sequence
  SiRNA target sequence
ataaatagttttttgcatatc

SEQ ID NO: 87105 - DNA, 21 bp, Artificial sequence
  SiRNA target sequence
taaatagttttttgcatatca

SEQ ID NO: 87106 - DNA, 21 bp, Artificial sequence
  SiRNA target sequence
aaatagttttttgcatatcag

SEQ ID NO: 87107 - DNA, 21 bp, Artificial sequence
  SiRNA target sequence
aatagttttttgcatatcagg

SEQ ID NO: 87108 - DNA, 21 bp, Artificial sequence
  SiRNA target sequence
atagttttttgcatatcaggt

SEQ ID NO: 87109 - DNA, 21 bp, Artificial sequence
  SiRNA target sequence
tagttttttgcatatcaggtc

SEQ ID NO: 87110 - DNA, 21 bp, Artificial sequence
  SiRNA target sequence
agttttttgcatatcaggtcg

SEQ ID NO: 87111 - DNA, 21 bp, Artificial sequence
  SiRNA target sequence
gttttttgcatatcaggtcgg

SEQ ID NO: 87112 - DNA, 21 bp, Artificial sequence
  SiRNA target sequence
ttttttgcatatcaggtcggc

SEQ ID NO: 87113 - DNA, 21 bp, Artificial sequence
  SiRNA target sequence
tttttgcatatcaggtcggcc

SEQ ID NO: 87114 - DNA, 21 bp, Artificial sequence
  SiRNA target sequence
ttttgcatatcaggtcggcca

SEQ ID NO: 87115 - DNA, 21 bp, Artificial sequence
  SiRNA target sequence
tttgcatatcaggtcggccac

SEQ ID NO: 87116 - DNA, 21 bp, Artificial sequence
  SiRNA target sequence
ttgcatatcaggtcggccaca

SEQ ID NO: 87117 - DNA, 21 bp, Artificial sequence
  SiRNA target sequence
tgcatatcaggtcggccacaa

SEQ ID NO: 87118 - DNA, 21 bp, Artificial sequence
  SiRNA target sequence
gcatatcaggtcggccacaaa

SEQ ID NO: 87119 - DNA, 21 bp, Artificial sequence
  SiRNA target sequence
catatcaggtcggccacaaac

SEQ ID NO: 87120 - DNA, 21 bp, Artificial sequence
  SiRNA target sequence
atatcaggtcggccacaaaca

SEQ ID NO: 87121 - DNA, 21 bp, Artificial sequence
  SiRNA target sequence
tatcaggtcggccacaaacat

SEQ ID NO: 87122 - DNA, 21 bp, Artificial sequence
  SiRNA target sequence
atcaggtcggccacaaacata

SEQ ID NO: 87123 - DNA, 21 bp, Artificial sequence
  SiRNA target sequence
tcaggtcggccacaaacataa

SEQ ID NO: 87124 - DNA, 21 bp, Artificial sequence
  SiRNA target sequence
caggtcggccacaaacataaa

SEQ ID NO: 87125 - DNA, 21 bp, Artificial sequence
  SiRNA target sequence
aggtcggccacaaacataaac

SEQ ID NO: 87126 - DNA, 21 bp, Artificial sequence
  SiRNA target sequence
ggtcggccacaaacataaacc

SEQ ID NO: 87127 - DNA, 21 bp, Artificial sequence
  SiRNA target sequence
gtcggccacaaacataaacca

SEQ ID NO: 87128 - DNA, 21 bp, Artificial sequence
  SiRNA target sequence
tcggccacaaacataaaccaa

SEQ ID NO: 87129 - DNA, 21 bp, Artificial sequence
  SiRNA target sequence
cggccacaaacataaaccaaa

SEQ ID NO: 87130 - DNA, 21 bp, Artificial sequence
  SiRNA target sequence
ggccacaaacataaaccaaac

SEQ ID NO: 87131 - DNA, 21 bp, Artificial sequence
  SiRNA target sequence
gccacaaacataaaccaaaca

SEQ ID NO: 87132 - DNA, 21 bp, Artificial sequence
  SiRNA target sequence
ccacaaacataaaccaaacat

SEQ ID NO: 87133 - DNA, 21 bp, Artificial sequence
  SiRNA target sequence
cacaaacataaaccaaacatc

SEQ ID NO: 87134 - DNA, 21 bp, Artificial sequence
  SiRNA target sequence
acaaacataaaccaaacatcc

SEQ ID NO: 87135 - DNA, 21 bp, Artificial sequence
  SiRNA target sequence
caaacataaaccaaacatccg

SEQ ID NO: 87136 - DNA, 21 bp, Artificial sequence
  SiRNA target sequence
aaacataaaccaaacatccgt

SEQ ID NO: 87137 - DNA, 21 bp, Artificial sequence
  SiRNA target sequence
aacataaaccaaacatccgtc

SEQ ID NO: 87138 - DNA, 21 bp, Artificial sequence
  SiRNA target sequence
acataaaccaaacatccgtct

SEQ ID NO: 87139 - DNA, 21 bp, Artificial sequence
  SiRNA target sequence
cataaaccaaacatccgtctt

SEQ ID NO: 87140 - DNA, 21 bp, Artificial sequence
  SiRNA target sequence
ataaaccaaacatccgtcttt

SEQ ID NO: 87141 - DNA, 21 bp, Artificial sequence
  SiRNA target sequence
taaaccaaacatccgtcttta

SEQ ID NO: 87142 - DNA, 21 bp, Artificial sequence
  SiRNA target sequence
aaaccaaacatccgtctttaa

SEQ ID NO: 87143 - DNA, 21 bp, Artificial sequence
  SiRNA target sequence
aaccaaacatccgtctttaat

SEQ ID NO: 87144 - DNA, 21 bp, Artificial sequence
  SiRNA target sequence
accaaacatccgtctttaatg

SEQ ID NO: 87145 - DNA, 21 bp, Artificial sequence
  SiRNA target sequence
ccaaacatccgtctttaatgt

SEQ ID NO: 87146 - DNA, 21 bp, Artificial sequence
  SiRNA target sequence
caaacatccgtctttaatgta

SEQ ID NO: 87147 - DNA, 21 bp, Artificial sequence
  SiRNA target sequence
aaacatccgtctttaatgtat

SEQ ID NO: 87148 - DNA, 21 bp, Artificial sequence
  SiRNA target sequence
aacatccgtctttaatgtatg

SEQ ID NO: 87149 - DNA, 21 bp, Artificial sequence
  SiRNA target sequence
acatccgtctttaatgtatgt

SEQ ID NO: 87150 - DNA, 21 bp, Artificial sequence
  SiRNA target sequence
catccgtctttaatgtatgtt

SEQ ID NO: 87151 - DNA, 21 bp, Artificial sequence
  SiRNA target sequence
atccgtctttaatgtatgttt

SEQ ID NO: 87152 - DNA, 21 bp, Artificial sequence
  SiRNA target sequence
tccgtctttaatgtatgtttt

SEQ ID NO: 87153 - DNA, 21 bp, Artificial sequence
  SiRNA target sequence
ccgtctttaatgtatgttttt

SEQ ID NO: 87154 - DNA, 21 bp, Artificial sequence
  SiRNA target sequence
cgtctttaatgtatgttttta

SEQ ID NO: 87155 - DNA, 21 bp, Artificial sequence
  SiRNA target sequence
gtctttaatgtatgtttttat

SEQ ID NO: 87156 - DNA, 21 bp, Artificial sequence
  SiRNA target sequence
tctttaatgtatgtttttatc

SEQ ID NO: 87157 - DNA, 21 bp, Artificial sequence
  SiRNA target sequence
ctttaatgtatgtttttatct

SEQ ID NO: 87158 - DNA, 21 bp, Artificial sequence
  SiRNA target sequence
tttaatgtatgtttttatctc

SEQ ID NO: 87159 - DNA, 21 bp, Artificial sequence
  SiRNA target sequence
ttaatgtatgtttttatctca

SEQ ID NO: 87160 - DNA, 21 bp, Artificial sequence
  SiRNA target sequence
taatgtatgtttttatctcat

SEQ ID NO: 87161 - DNA, 21 bp, Artificial sequence
  SiRNA target sequence
aatgtatgtttttatctcatt

SEQ ID NO: 87162 - DNA, 21 bp, Artificial sequence
  SiRNA target sequence
atgtatgtttttatctcattt

SEQ ID NO: 87163 - DNA, 21 bp, Artificial sequence
  SiRNA target sequence
tgtatgtttttatctcattta

SEQ ID NO: 87164 - DNA, 21 bp, Artificial sequence
  SiRNA target sequence
gtatgtttttatctcatttaa

SEQ ID NO: 87165 - DNA, 21 bp, Artificial sequence
  SiRNA target sequence
tatgtttttatctcatttaaa

SEQ ID NO: 87166 - DNA, 21 bp, Artificial sequence
  SiRNA target sequence
atgtttttatctcatttaaat

SEQ ID NO: 87167 - DNA, 21 bp, Artificial sequence
  SiRNA target sequence
tgtttttatctcatttaaatt

SEQ ID NO: 87168 - DNA, 21 bp, Artificial sequence
  SiRNA target sequence
gtttttatctcatttaaattt

SEQ ID NO: 87169 - DNA, 21 bp, Artificial sequence
  SiRNA target sequence
tttttatctcatttaaatttt

SEQ ID NO: 87170 - DNA, 21 bp, Artificial sequence
  SiRNA target sequence
ttttatctcatttaaattttg

SEQ ID NO: 87171 - DNA, 21 bp, Artificial sequence
  SiRNA target sequence
tttatctcatttaaattttgt

SEQ ID NO: 87172 - DNA, 21 bp, Artificial sequence
  SiRNA target sequence
ttatctcatttaaattttgta

SEQ ID NO: 87173 - DNA, 21 bp, Artificial sequence
  SiRNA target sequence
tatctcatttaaattttgtaa

SEQ ID NO: 87174 - DNA, 21 bp, Artificial sequence
  SiRNA target sequence
atctcatttaaattttgtaat

SEQ ID NO: 87175 - DNA, 21 bp, Artificial sequence
  SiRNA target sequence
tctcatttaaattttgtaata

SEQ ID NO: 87176 - DNA, 21 bp, Artificial sequence
  SiRNA target sequence
ctcatttaaattttgtaataa

SEQ ID NO: 87177 - DNA, 21 bp, Artificial sequence
  SiRNA target sequence
tcatttaaattttgtaataaa

SEQ ID NO: 87178 - DNA, 21 bp, Artificial sequence
  SiRNA target sequence
catttaaattttgtaataaat

SEQ ID NO: 87179 - DNA, 21 bp, Artificial sequence
  SiRNA target sequence
atttaaattttgtaataaata

SEQ ID NO: 87180 - DNA, 21 bp, Artificial sequence
  SiRNA target sequence
tttaaattttgtaataaataa

SEQ ID NO: 87181 - DNA, 21 bp, Artificial sequence
  SiRNA target sequence
ttaaattttgtaataaataat

SEQ ID NO: 87182 - DNA, 21 bp, Artificial sequence
  SiRNA target sequence
taaattttgtaataaataatc

SEQ ID NO: 87183 - DNA, 21 bp, Artificial sequence
  SiRNA target sequence
aaattttgtaataaataatca

SEQ ID NO: 87184 - DNA, 21 bp, Artificial sequence
  SiRNA target sequence
aattttgtaataaataatcag

SEQ ID NO: 87185 - DNA, 21 bp, Artificial sequence
  SiRNA target sequence
attttgtaataaataatcagt

SEQ ID NO: 87186 - DNA, 21 bp, Artificial sequence
  SiRNA target sequence
ttttgtaataaataatcagta

SEQ ID NO: 87187 - DNA, 21 bp, Artificial sequence
  SiRNA target sequence
tttgtaataaataatcagtaa

SEQ ID NO: 87188 - DNA, 21 bp, Artificial sequence
  SiRNA target sequence
ttgtaataaataatcagtaac

SEQ ID NO: 87189 - DNA, 21 bp, Artificial sequence
  SiRNA target sequence
tgtaataaataatcagtaaca

SEQ ID NO: 87190 - DNA, 21 bp, Artificial sequence
  SiRNA target sequence
gtaataaataatcagtaacat

SEQ ID NO: 87191 - DNA, 21 bp, Artificial sequence
  SiRNA target sequence
taataaataatcagtaacata

SEQ ID NO: 87192 - DNA, 21 bp, Artificial sequence
  SiRNA target sequence
aataaataatcagtaacataa

SEQ ID NO: 87193 - DNA, 21 bp, Artificial sequence
  SiRNA target sequence
ataaataatcagtaacataaa

SEQ ID NO: 87194 - DNA, 21 bp, Artificial sequence
  SiRNA target sequence
taaataatcagtaacataaat

SEQ ID NO: 87195 - DNA, 21 bp, Artificial sequence
  SiRNA target sequence
aaataatcagtaacataaatt

SEQ ID NO: 87196 - DNA, 21 bp, Artificial sequence
  SiRNA target sequence
aataatcagtaacataaattt

SEQ ID NO: 87197 - DNA, 21 bp, Artificial sequence
  SiRNA target sequence
ataatcagtaacataaatttt

SEQ ID NO: 87198 - DNA, 21 bp, Artificial sequence
  SiRNA target sequence
taatcagtaacataaatttta

SEQ ID NO: 87199 - DNA, 21 bp, Artificial sequence
  SiRNA target sequence
aatcagtaacataaattttat

SEQ ID NO: 87200 - DNA, 21 bp, Artificial sequence
  SiRNA target sequence
atcagtaacataaattttatt

SEQ ID NO: 87201 - DNA, 21 bp, Artificial sequence
  SiRNA target sequence
tcagtaacataaattttatta

SEQ ID NO: 87202 - DNA, 21 bp, Artificial sequence
  SiRNA target sequence
cagtaacataaattttattac

SEQ ID NO: 87203 - DNA, 21 bp, Artificial sequence
  SiRNA target sequence
agtaacataaattttattaca

SEQ ID NO: 87204 - DNA, 21 bp, Artificial sequence
  SiRNA target sequence
gtaacataaattttattacaa

SEQ ID NO: 87205 - DNA, 21 bp, Artificial sequence
  SiRNA target sequence
taacataaattttattacaag

SEQ ID NO: 87206 - DNA, 21 bp, Artificial sequence
  SiRNA target sequence
aacataaattttattacaaga

SEQ ID NO: 87207 - DNA, 21 bp, Artificial sequence
  SiRNA target sequence
acataaattttattacaagat

SEQ ID NO: 87208 - DNA, 21 bp, Artificial sequence
  SiRNA target sequence
cataaattttattacaagata

SEQ ID NO: 87209 - DNA, 21 bp, Artificial sequence
  SiRNA target sequence
ataaattttattacaagataa

SEQ ID NO: 87210 - DNA, 21 bp, Artificial sequence
  SiRNA target sequence
taaattttattacaagataaa

SEQ ID NO: 87211 - DNA, 21 bp, Artificial sequence
  SiRNA target sequence
aaattttattacaagataaaa

SEQ ID NO: 87212 - DNA, 21 bp, Artificial sequence
  SiRNA target sequence
aattttattacaagataaaat

SEQ ID NO: 87213 - DNA, 21 bp, Artificial sequence
  SiRNA target sequence
attttattacaagataaaatt

SEQ ID NO: 87214 - DNA, 21 bp, Artificial sequence
  SiRNA target sequence
ttttattacaagataaaattt

SEQ ID NO: 87215 - DNA, 21 bp, Artificial sequence
  SiRNA target sequence
tttattacaagataaaatttt

SEQ ID NO: 87216 - DNA, 21 bp, Artificial sequence
  SiRNA target sequence
ttattacaagataaaatttta

SEQ ID NO: 87217 - DNA, 21 bp, Artificial sequence
  SiRNA target sequence
tattacaagataaaattttaa

SEQ ID NO: 87218 - DNA, 21 bp, Artificial sequence
  SiRNA target sequence
attacaagataaaattttaat

SEQ ID NO: 87219 - DNA, 21 bp, Artificial sequence
  SiRNA target sequence
ttacaagataaaattttaata

SEQ ID NO: 87220 - DNA, 21 bp, Artificial sequence
  SiRNA target sequence
tacaagataaaattttaataa

SEQ ID NO: 87221 - DNA, 21 bp, Artificial sequence
  SiRNA target sequence
acaagataaaattttaataat

SEQ ID NO: 87222 - DNA, 21 bp, Artificial sequence
  SiRNA target sequence
caagataaaattttaataatt

SEQ ID NO: 87223 - DNA, 21 bp, Artificial sequence
  SiRNA target sequence
aagataaaattttaataattt

SEQ ID NO: 87224 - DNA, 21 bp, Artificial sequence
  SiRNA target sequence
agataaaattttaataatttc

SEQ ID NO: 87225 - DNA, 21 bp, Artificial sequence
  SiRNA target sequence
gataaaattttaataatttct

SEQ ID NO: 87226 - DNA, 21 bp, Artificial sequence
  SiRNA target sequence
ataaaattttaataatttctg

SEQ ID NO: 87227 - DNA, 21 bp, Artificial sequence
  SiRNA target sequence
taaaattttaataatttctgt

SEQ ID NO: 87228 - DNA, 21 bp, Artificial sequence
  SiRNA target sequence
aaaattttaataatttctgtg

SEQ ID NO: 87229 - DNA, 21 bp, Artificial sequence
  SiRNA target sequence
aaattttaataatttctgtgt

SEQ ID NO: 87230 - DNA, 21 bp, Artificial sequence
  SiRNA target sequence
aattttaataatttctgtgtt

SEQ ID NO: 87231 - DNA, 21 bp, Artificial sequence
  SiRNA target sequence
attttaataatttctgtgttt

SEQ ID NO: 87232 - DNA, 21 bp, Artificial sequence
  SiRNA target sequence
ttttaataatttctgtgtttt

SEQ ID NO: 87233 - DNA, 21 bp, Artificial sequence
  SiRNA target sequence
tttaataatttctgtgttttt

SEQ ID NO: 87234 - DNA, 21 bp, Artificial sequence
  SiRNA target sequence
ttaataatttctgtgttttta

SEQ ID NO: 87235 - DNA, 21 bp, Artificial sequence
  SiRNA target sequence
taataatttctgtgtttttat

SEQ ID NO: 87236 - DNA, 21 bp, Artificial sequence
  SiRNA target sequence
aataatttctgtgtttttata

SEQ ID NO: 87237 - DNA, 21 bp, Artificial sequence
  SiRNA target sequence
ataatttctgtgtttttatat

SEQ ID NO: 87238 - DNA, 21 bp, Artificial sequence
  SiRNA target sequence
taatttctgtgtttttatatt

SEQ ID NO: 87239 - DNA, 21 bp, Artificial sequence
  SiRNA target sequence
aatttctgtgtttttatattt

SEQ ID NO: 87240 - DNA, 21 bp, Artificial sequence
  SiRNA target sequence
atttctgtgtttttatatttt

SEQ ID NO: 87241 - DNA, 21 bp, Artificial sequence
  SiRNA target sequence
tttctgtgtttttatattttg

SEQ ID NO: 87242 - DNA, 21 bp, Artificial sequence
  SiRNA target sequence
ttctgtgtttttatattttgc

SEQ ID NO: 87243 - DNA, 21 bp, Artificial sequence
  SiRNA target sequence
tctgtgtttttatattttgca

SEQ ID NO: 87244 - DNA, 21 bp, Artificial sequence
  SiRNA target sequence
ctgtgtttttatattttgcat

SEQ ID NO: 87245 - DNA, 21 bp, Artificial sequence
  SiRNA target sequence
tgtgtttttatattttgcatc

SEQ ID NO: 87246 - DNA, 21 bp, Artificial sequence
  SiRNA target sequence
gtgtttttatattttgcatct

SEQ ID NO: 87247 - DNA, 21 bp, Artificial sequence
  SiRNA target sequence
tgtttttatattttgcatctt

SEQ ID NO: 87248 - DNA, 21 bp, Artificial sequence
  SiRNA target sequence
gtttttatattttgcatcttt

SEQ ID NO: 87249 - DNA, 21 bp, Artificial sequence
  SiRNA target sequence
tttttatattttgcatcttta

SEQ ID NO: 87250 - DNA, 21 bp, Artificial sequence
  SiRNA target sequence
ttttatattttgcatctttaa

SEQ ID NO: 87251 - DNA, 21 bp, Artificial sequence
  SiRNA target sequence
tttatattttgcatctttaat

SEQ ID NO: 87252 - DNA, 21 bp, Artificial sequence
  SiRNA target sequence
ttatattttgcatctttaata

SEQ ID NO: 87253 - DNA, 21 bp, Artificial sequence
  SiRNA target sequence
tatattttgcatctttaataa

SEQ ID NO: 87254 - DNA, 21 bp, Artificial sequence
  SiRNA target sequence
atattttgcatctttaataag

SEQ ID NO: 87255 - DNA, 21 bp, Artificial sequence
  SiRNA target sequence
tattttgcatctttaataaga

SEQ ID NO: 87256 - DNA, 21 bp, Artificial sequence
  SiRNA target sequence
attttgcatctttaataagat

SEQ ID NO: 87257 - DNA, 21 bp, Artificial sequence
  SiRNA target sequence
ttttgcatctttaataagatc

SEQ ID NO: 87258 - DNA, 21 bp, Artificial sequence
  SiRNA target sequence
tttgcatctttaataagatca

SEQ ID NO: 87259 - DNA, 21 bp, Artificial sequence
  SiRNA target sequence
ttgcatctttaataagatcat

SEQ ID NO: 87260 - DNA, 21 bp, Artificial sequence
  SiRNA target sequence
tgcatctttaataagatcatc

SEQ ID NO: 87261 - DNA, 21 bp, Artificial sequence
  SiRNA target sequence
gcatctttaataagatcatct

SEQ ID NO: 87262 - DNA, 21 bp, Artificial sequence
  SiRNA target sequence
catctttaataagatcatctt

SEQ ID NO: 87263 - DNA, 21 bp, Artificial sequence
  SiRNA target sequence
atctttaataagatcatcttc

SEQ ID NO: 87264 - DNA, 21 bp, Artificial sequence
  SiRNA target sequence
tctttaataagatcatcttct

SEQ ID NO: 87265 - DNA, 21 bp, Artificial sequence
  SiRNA target sequence
ctttaataagatcatcttctt

SEQ ID NO: 87266 - DNA, 21 bp, Artificial sequence
  SiRNA target sequence
tttaataagatcatcttcttg

SEQ ID NO: 87267 - DNA, 21 bp, Artificial sequence
  SiRNA target sequence
ttaataagatcatcttcttga

SEQ ID NO: 87268 - DNA, 21 bp, Artificial sequence
  SiRNA target sequence
taataagatcatcttcttgat

SEQ ID NO: 87269 - DNA, 21 bp, Artificial sequence
  SiRNA target sequence
aataagatcatcttcttgatt

SEQ ID NO: 87270 - DNA, 21 bp, Artificial sequence
  SiRNA target sequence
ataagatcatcttcttgattt

SEQ ID NO: 87271 - DNA, 21 bp, Artificial sequence
  SiRNA target sequence
taagatcatcttcttgatttc

SEQ ID NO: 87272 - DNA, 21 bp, Artificial sequence
  SiRNA target sequence
aagatcatcttcttgatttct

SEQ ID NO: 87273 - DNA, 21 bp, Artificial sequence
  SiRNA target sequence
agatcatcttcttgatttcta

SEQ ID NO: 87274 - DNA, 21 bp, Artificial sequence
  SiRNA target sequence
gatcatcttcttgatttctaa

SEQ ID NO: 87275 - DNA, 21 bp, Artificial sequence
  SiRNA target sequence
atcatcttcttgatttctaaa

SEQ ID NO: 87276 - DNA, 21 bp, Artificial sequence
  SiRNA target sequence
tcatcttcttgatttctaaat

SEQ ID NO: 87277 - DNA, 21 bp, Artificial sequence
  SiRNA target sequence
catcttcttgatttctaaatc

SEQ ID NO: 87278 - DNA, 21 bp, Artificial sequence
  SiRNA target sequence
atcttcttgatttctaaatcc

SEQ ID NO: 87279 - DNA, 21 bp, Artificial sequence
  SiRNA target sequence
tcttcttgatttctaaatcca

SEQ ID NO: 87280 - DNA, 21 bp, Artificial sequence
  SiRNA target sequence
cttcttgatttctaaatccat

SEQ ID NO: 87281 - DNA, 21 bp, Artificial sequence
  SiRNA target sequence
ttcttgatttctaaatccata

SEQ ID NO: 87282 - DNA, 21 bp, Artificial sequence
  SiRNA target sequence
tcttgatttctaaatccatat

SEQ ID NO: 87283 - DNA, 21 bp, Artificial sequence
  SiRNA target sequence
cttgatttctaaatccatata

SEQ ID NO: 87284 - DNA, 21 bp, Artificial sequence
  SiRNA target sequence
ttgatttctaaatccatatat

SEQ ID NO: 87285 - DNA, 21 bp, Artificial sequence
  SiRNA target sequence
tgatttctaaatccatatatt

SEQ ID NO: 87286 - DNA, 21 bp, Artificial sequence
  SiRNA target sequence
gatttctaaatccatatatta

SEQ ID NO: 87287 - DNA, 21 bp, Artificial sequence
  SiRNA target sequence
atttctaaatccatatattag

SEQ ID NO: 87288 - DNA, 21 bp, Artificial sequence
  SiRNA target sequence
tttctaaatccatatattagt

SEQ ID NO: 87289 - DNA, 21 bp, Artificial sequence
  SiRNA target sequence
ttctaaatccatatattagtt

SEQ ID NO: 87290 - DNA, 21 bp, Artificial sequence
  SiRNA target sequence
tctaaatccatatattagttt

SEQ ID NO: 87291 - DNA, 21 bp, Artificial sequence
  SiRNA target sequence
ctaaatccatatattagtttg

SEQ ID NO: 87292 - DNA, 21 bp, Artificial sequence
  SiRNA target sequence
taaatccatatattagtttga

SEQ ID NO: 87293 - DNA, 21 bp, Artificial sequence
  SiRNA target sequence
aaatccatatattagtttgat

SEQ ID NO: 87294 - DNA, 21 bp, Artificial sequence
  SiRNA target sequence
aatccatatattagtttgata

SEQ ID NO: 87295 - DNA, 21 bp, Artificial sequence
  SiRNA target sequence
atccatatattagtttgatat

SEQ ID NO: 87296 - DNA, 21 bp, Artificial sequence
  SiRNA target sequence
tccatatattagtttgatata

SEQ ID NO: 87297 - DNA, 21 bp, Artificial sequence
  SiRNA target sequence
ccatatattagtttgatatat

SEQ ID NO: 87298 - DNA, 21 bp, Artificial sequence
  SiRNA target sequence
catatattagtttgatatatt

SEQ ID NO: 87299 - DNA, 21 bp, Artificial sequence
  SiRNA target sequence
atatattagtttgatatattg

SEQ ID NO: 87300 - DNA, 21 bp, Artificial sequence
  SiRNA target sequence
tatattagtttgatatattga

SEQ ID NO: 87301 - DNA, 21 bp, Artificial sequence
  SiRNA target sequence
atattagtttgatatattgat

SEQ ID NO: 87302 - DNA, 21 bp, Artificial sequence
  SiRNA target sequence
tattagtttgatatattgatc

SEQ ID NO: 87303 - DNA, 21 bp, Artificial sequence
  SiRNA target sequence
attagtttgatatattgatcg

SEQ ID NO: 87304 - DNA, 21 bp, Artificial sequence
  SiRNA target sequence
ttagtttgatatattgatcgt

SEQ ID NO: 87305 - DNA, 21 bp, Artificial sequence
  SiRNA target sequence
tagtttgatatattgatcgtc

SEQ ID NO: 87306 - DNA, 21 bp, Artificial sequence
  SiRNA target sequence
agtttgatatattgatcgtct

SEQ ID NO: 87307 - DNA, 21 bp, Artificial sequence
  SiRNA target sequence
gtttgatatattgatcgtctt

SEQ ID NO: 87308 - DNA, 21 bp, Artificial sequence
  SiRNA target sequence
tttgatatattgatcgtcttc

SEQ ID NO: 87309 - DNA, 21 bp, Artificial sequence
  SiRNA target sequence
ttgatatattgatcgtcttct

SEQ ID NO: 87310 - DNA, 21 bp, Artificial sequence
  SiRNA target sequence
tgatatattgatcgtcttctt

SEQ ID NO: 87311 - DNA, 21 bp, Artificial sequence
  SiRNA target sequence
gatatattgatcgtcttcttt

SEQ ID NO: 87312 - DNA, 21 bp, Artificial sequence
  SiRNA target sequence
atatattgatcgtcttcttta

SEQ ID NO: 87313 - DNA, 21 bp, Artificial sequence
  SiRNA target sequence
tatattgatcgtcttctttat

SEQ ID NO: 87314 - DNA, 21 bp, Artificial sequence
  SiRNA target sequence
atattgatcgtcttctttatt

SEQ ID NO: 87315 - DNA, 21 bp, Artificial sequence
  SiRNA target sequence
tattgatcgtcttctttattt

SEQ ID NO: 87316 - DNA, 21 bp, Artificial sequence
  SiRNA target sequence
attgatcgtcttctttatttt

SEQ ID NO: 87317 - DNA, 21 bp, Artificial sequence
  SiRNA target sequence
ttgatcgtcttctttattttt

SEQ ID NO: 87318 - DNA, 21 bp, Artificial sequence
  SiRNA target sequence
tgatcgtcttctttatttttc

SEQ ID NO: 87319 - DNA, 21 bp, Artificial sequence
  SiRNA target sequence
gatcgtcttctttatttttca

SEQ ID NO: 87320 - DNA, 21 bp, Artificial sequence
  SiRNA target sequence
atcgtcttctttatttttcaa

SEQ ID NO: 87321 - DNA, 21 bp, Artificial sequence
  SiRNA target sequence
tcgtcttctttatttttcaaa

SEQ ID NO: 87322 - DNA, 21 bp, Artificial sequence
  SiRNA target sequence
cgtcttctttatttttcaaaa

SEQ ID NO: 87323 - DNA, 21 bp, Artificial sequence
  SiRNA target sequence
gtcttctttatttttcaaaaa

SEQ ID NO: 87324 - DNA, 21 bp, Artificial sequence
  SiRNA target sequence
tcttctttatttttcaaaaac

SEQ ID NO: 87325 - DNA, 21 bp, Artificial sequence
  SiRNA target sequence
cttctttatttttcaaaaacg

SEQ ID NO: 87326 - DNA, 21 bp, Artificial sequence
  SiRNA target sequence
ttctttatttttcaaaaacga

SEQ ID NO: 87327 - DNA, 21 bp, Artificial sequence
  SiRNA target sequence
tctttatttttcaaaaacgaa

SEQ ID NO: 87328 - DNA, 21 bp, Artificial sequence
  SiRNA target sequence
ctttatttttcaaaaacgaaa

SEQ ID NO: 87329 - DNA, 21 bp, Artificial sequence
  SiRNA target sequence
tttatttttcaaaaacgaaaa

SEQ ID NO: 87330 - DNA, 21 bp, Artificial sequence
  SiRNA target sequence
ttatttttcaaaaacgaaaaa

SEQ ID NO: 87331 - DNA, 21 bp, Artificial sequence
  SiRNA target sequence
tatttttcaaaaacgaaaaaa

SEQ ID NO: 87332 - DNA, 21 bp, Artificial sequence
  SiRNA target sequence
atttttcaaaaacgaaaaaaa

SEQ ID NO: 87333 - DNA, 21 bp, Artificial sequence
  SiRNA target sequence
tttttcaaaaacgaaaaaaat

SEQ ID NO: 87334 - DNA, 21 bp, Artificial sequence
  SiRNA target sequence
ttttcaaaaacgaaaaaaatg

SEQ ID NO: 87335 - DNA, 21 bp, Artificial sequence
  SiRNA target sequence
tttcaaaaacgaaaaaaatgg

SEQ ID NO: 87336 - DNA, 21 bp, Artificial sequence
  SiRNA target sequence
ttcaaaaacgaaaaaaatgga

SEQ ID NO: 87337 - DNA, 21 bp, Artificial sequence
  SiRNA target sequence
tcaaaaacgaaaaaaatggag

SEQ ID NO: 87338 - DNA, 21 bp, Artificial sequence
  SiRNA target sequence
caaaaacgaaaaaaatggagc

SEQ ID NO: 87339 - DNA, 21 bp, Artificial sequence
  SiRNA target sequence
aaaaacgaaaaaaatggagca

SEQ ID NO: 87340 - DNA, 21 bp, Artificial sequence
  SiRNA target sequence
aaaacgaaaaaaatggagcaa

SEQ ID NO: 87341 - DNA, 21 bp, Artificial sequence
  SiRNA target sequence
aaacgaaaaaaatggagcaat

SEQ ID NO: 87342 - DNA, 21 bp, Artificial sequence
  SiRNA target sequence
aacgaaaaaaatggagcaatg

SEQ ID NO: 87343 - DNA, 21 bp, Artificial sequence
  SiRNA target sequence
acgaaaaaaatggagcaatgc

SEQ ID NO: 87344 - DNA, 21 bp, Artificial sequence
  SiRNA target sequence
cgaaaaaaatggagcaatgcc

SEQ ID NO: 87345 - DNA, 21 bp, Artificial sequence
  SiRNA target sequence
gaaaaaaatggagcaatgcca

SEQ ID NO: 87346 - DNA, 21 bp, Artificial sequence
  SiRNA target sequence
aaaaaaatggagcaatgccag

SEQ ID NO: 87347 - DNA, 21 bp, Artificial sequence
  SiRNA target sequence
aaaaaatggagcaatgccagt

SEQ ID NO: 87348 - DNA, 21 bp, Artificial sequence
  SiRNA target sequence
aaaaatggagcaatgccagtt

SEQ ID NO: 87349 - DNA, 21 bp, Artificial sequence
  SiRNA target sequence
aaaatggagcaatgccagttc

SEQ ID NO: 87350 - DNA, 21 bp, Artificial sequence
  SiRNA target sequence
aaatggagcaatgccagttcc

SEQ ID NO: 87351 - DNA, 21 bp, Artificial sequence
  SiRNA target sequence
aatggagcaatgccagttcca

SEQ ID NO: 87352 - DNA, 21 bp, Artificial sequence
  SiRNA target sequence
atggagcaatgccagttccag

SEQ ID NO: 87353 - DNA, 21 bp, Artificial sequence
  SiRNA target sequence
tggagcaatgccagttccagt

SEQ ID NO: 87354 - DNA, 21 bp, Artificial sequence
  SiRNA target sequence
ggagcaatgccagttccagta

SEQ ID NO: 87355 - DNA, 21 bp, Artificial sequence
  SiRNA target sequence
gagcaatgccagttccagtac

SEQ ID NO: 87356 - DNA, 21 bp, Artificial sequence
  SiRNA target sequence
agcaatgccagttccagtaca

SEQ ID NO: 87357 - DNA, 21 bp, Artificial sequence
  SiRNA target sequence
gcaatgccagttccagtacaa

SEQ ID NO: 87358 - DNA, 21 bp, Artificial sequence
  SiRNA target sequence
caatgccagttccagtacaaa

SEQ ID NO: 87359 - DNA, 21 bp, Artificial sequence
  SiRNA target sequence
aatgccagttccagtacaaat

SEQ ID NO: 87360 - DNA, 21 bp, Artificial sequence
  SiRNA target sequence
atgccagttccagtacaaata

SEQ ID NO: 87361 - DNA, 21 bp, Artificial sequence
  SiRNA target sequence
tgccagttccagtacaaatac

SEQ ID NO: 87362 - DNA, 21 bp, Artificial sequence
  SiRNA target sequence
gccagttccagtacaaatacc

SEQ ID NO: 87363 - DNA, 21 bp, Artificial sequence
  SiRNA target sequence
ccagttccagtacaaataccc

SEQ ID NO: 87364 - DNA, 21 bp, Artificial sequence
  SiRNA target sequence
cagttccagtacaaataccca

SEQ ID NO: 87365 - DNA, 21 bp, Artificial sequence
  SiRNA target sequence
agttccagtacaaatacccaa

SEQ ID NO: 87366 - DNA, 21 bp, Artificial sequence
  SiRNA target sequence
gttccagtacaaatacccaac

SEQ ID NO: 87367 - DNA, 21 bp, Artificial sequence
  SiRNA target sequence
ttccagtacaaatacccaaca

SEQ ID NO: 87368 - DNA, 21 bp, Artificial sequence
  SiRNA target sequence
tccagtacaaatacccaacac

SEQ ID NO: 87369 - DNA, 21 bp, Artificial sequence
  SiRNA target sequence
ccagtacaaatacccaacact

SEQ ID NO: 87370 - DNA, 21 bp, Artificial sequence
  SiRNA target sequence
cagtacaaatacccaacactt

SEQ ID NO: 87371 - DNA, 21 bp, Artificial sequence
  SiRNA target sequence
agtacaaatacccaacacttt

SEQ ID NO: 87372 - DNA, 21 bp, Artificial sequence
  SiRNA target sequence
gtacaaatacccaacactttt

SEQ ID NO: 87373 - DNA, 21 bp, Artificial sequence
  SiRNA target sequence
tacaaatacccaacacttttt

SEQ ID NO: 87374 - DNA, 21 bp, Artificial sequence
  SiRNA target sequence
acaaatacccaacactttttt

SEQ ID NO: 87375 - DNA, 21 bp, Artificial sequence
  SiRNA target sequence
caaatacccaacactttttta

SEQ ID NO: 87376 - DNA, 21 bp, Artificial sequence
  SiRNA target sequence
aaatacccaacacttttttac

SEQ ID NO: 87377 - DNA, 21 bp, Artificial sequence
  SiRNA target sequence
aatacccaacacttttttaca

SEQ ID NO: 87378 - DNA, 21 bp, Artificial sequence
  SiRNA target sequence
atacccaacacttttttacaa

SEQ ID NO: 87379 - DNA, 21 bp, Artificial sequence
  SiRNA target sequence
tacccaacacttttttacaaa

SEQ ID NO: 87380 - DNA, 21 bp, Artificial sequence
  SiRNA target sequence
acccaacacttttttacaaaa

SEQ ID NO: 87381 - DNA, 21 bp, Artificial sequence
  SiRNA target sequence
cccaacacttttttacaaaaa

SEQ ID NO: 87382 - DNA, 21 bp, Artificial sequence
  SiRNA target sequence
ccaacacttttttacaaaaat

SEQ ID NO: 87383 - DNA, 21 bp, Artificial sequence
  SiRNA target sequence
caacacttttttacaaaaatt

SEQ ID NO: 87384 - DNA, 21 bp, Artificial sequence
  SiRNA target sequence
aacacttttttacaaaaattt

SEQ ID NO: 87385 - DNA, 21 bp, Artificial sequence
  SiRNA target sequence
acacttttttacaaaaattta

SEQ ID NO: 87386 - DNA, 21 bp, Artificial sequence
  SiRNA target sequence
cacttttttacaaaaatttaa

SEQ ID NO: 87387 - DNA, 21 bp, Artificial sequence
  SiRNA target sequence
acttttttacaaaaatttaat

SEQ ID NO: 87388 - DNA, 21 bp, Artificial sequence
  SiRNA target sequence
cttttttacaaaaatttaatc

SEQ ID NO: 87389 - DNA, 21 bp, Artificial sequence
  SiRNA target sequence
ttttttacaaaaatttaatct

SEQ ID NO: 87390 - DNA, 21 bp, Artificial sequence
  SiRNA target sequence
tttttacaaaaatttaatcta

SEQ ID NO: 87391 - DNA, 21 bp, Artificial sequence
  SiRNA target sequence
ttttacaaaaatttaatctaa

SEQ ID NO: 87392 - DNA, 21 bp, Artificial sequence
  SiRNA target sequence
tttacaaaaatttaatctaaa

SEQ ID NO: 87393 - DNA, 21 bp, Artificial sequence
  SiRNA target sequence
ttacaaaaatttaatctaaat

SEQ ID NO: 87394 - DNA, 21 bp, Artificial sequence
  SiRNA target sequence
tacaaaaatttaatctaaata

SEQ ID NO: 87395 - DNA, 21 bp, Artificial sequence
  SiRNA target sequence
acaaaaatttaatctaaataa

SEQ ID NO: 87396 - DNA, 21 bp, Artificial sequence
  SiRNA target sequence
caaaaatttaatctaaataat

SEQ ID NO: 87397 - DNA, 21 bp, Artificial sequence
  SiRNA target sequence
aaaaatttaatctaaataatt

SEQ ID NO: 87398 - DNA, 21 bp, Artificial sequence
  SiRNA target sequence
aaaatttaatctaaataattt

SEQ ID NO: 87399 - DNA, 21 bp, Artificial sequence
  SiRNA target sequence
aaatttaatctaaataattta

SEQ ID NO: 87400 - DNA, 21 bp, Artificial sequence
  SiRNA target sequence
aatttaatctaaataatttac

SEQ ID NO: 87401 - DNA, 21 bp, Artificial sequence
  SiRNA target sequence
atttaatctaaataatttact

SEQ ID NO: 87402 - DNA, 21 bp, Artificial sequence
  SiRNA target sequence
tttaatctaaataatttactc

SEQ ID NO: 87403 - DNA, 21 bp, Artificial sequence
  SiRNA target sequence
ttaatctaaataatttactcg

SEQ ID NO: 87404 - DNA, 21 bp, Artificial sequence
  SiRNA target sequence
taatctaaataatttactcgg

SEQ ID NO: 87405 - DNA, 21 bp, Artificial sequence
  SiRNA target sequence
aatctaaataatttactcggt

SEQ ID NO: 87406 - DNA, 21 bp, Artificial sequence
  SiRNA target sequence
atctaaataatttactcggtc

SEQ ID NO: 87407 - DNA, 21 bp, Artificial sequence
  SiRNA target sequence
tctaaataatttactcggtct

SEQ ID NO: 87408 - DNA, 21 bp, Artificial sequence
  SiRNA target sequence
ctaaataatttactcggtctg

SEQ ID NO: 87409 - DNA, 21 bp, Artificial sequence
  SiRNA target sequence
taaataatttactcggtctgt

SEQ ID NO: 87410 - DNA, 21 bp, Artificial sequence
  SiRNA target sequence
aaataatttactcggtctgtg

SEQ ID NO: 87411 - DNA, 21 bp, Artificial sequence
  SiRNA target sequence
aataatttactcggtctgtga

SEQ ID NO: 87412 - DNA, 21 bp, Artificial sequence
  SiRNA target sequence
ataatttactcggtctgtgac

SEQ ID NO: 87413 - DNA, 21 bp, Artificial sequence
  SiRNA target sequence
taatttactcggtctgtgaca

SEQ ID NO: 87414 - DNA, 21 bp, Artificial sequence
  SiRNA target sequence
aatttactcggtctgtgacag

SEQ ID NO: 87415 - DNA, 21 bp, Artificial sequence
  SiRNA target sequence
atttactcggtctgtgacaga

SEQ ID NO: 87416 - DNA, 21 bp, Artificial sequence
  SiRNA target sequence
tttactcggtctgtgacagat

SEQ ID NO: 87417 - DNA, 21 bp, Artificial sequence
  SiRNA target sequence
ttactcggtctgtgacagatc

SEQ ID NO: 87418 - DNA, 21 bp, Artificial sequence
  SiRNA target sequence
tactcggtctgtgacagatct

SEQ ID NO: 87419 - DNA, 21 bp, Artificial sequence
  SiRNA target sequence
actcggtctgtgacagatctt

SEQ ID NO: 87420 - DNA, 21 bp, Artificial sequence
  SiRNA target sequence
ctcggtctgtgacagatcttt

SEQ ID NO: 87421 - DNA, 21 bp, Artificial sequence
  SiRNA target sequence
tcggtctgtgacagatcttta

SEQ ID NO: 87422 - DNA, 21 bp, Artificial sequence
  SiRNA target sequence
cggtctgtgacagatctttaa

SEQ ID NO: 87423 - DNA, 21 bp, Artificial sequence
  SiRNA target sequence
ggtctgtgacagatctttaaa

SEQ ID NO: 87424 - DNA, 21 bp, Artificial sequence
  SiRNA target sequence
gtctgtgacagatctttaaat

SEQ ID NO: 87425 - DNA, 21 bp, Artificial sequence
  SiRNA target sequence
tctgtgacagatctttaaatt

SEQ ID NO: 87426 - DNA, 21 bp, Artificial sequence
  SiRNA target sequence
ctgtgacagatctttaaatta

SEQ ID NO: 87427 - DNA, 21 bp, Artificial sequence
  SiRNA target sequence
tgtgacagatctttaaattat

SEQ ID NO: 87428 - DNA, 21 bp, Artificial sequence
  SiRNA target sequence
gtgacagatctttaaattatt

SEQ ID NO: 87429 - DNA, 21 bp, Artificial sequence
  SiRNA target sequence
tgacagatctttaaattatta

SEQ ID NO: 87430 - DNA, 21 bp, Artificial sequence
  SiRNA target sequence
gacagatctttaaattattat

SEQ ID NO: 87431 - DNA, 21 bp, Artificial sequence
  SiRNA target sequence
acagatctttaaattattata

SEQ ID NO: 87432 - DNA, 21 bp, Artificial sequence
  SiRNA target sequence
cagatctttaaattattataa

SEQ ID NO: 87433 - DNA, 21 bp, Artificial sequence
  SiRNA target sequence
agatctttaaattattataat

SEQ ID NO: 87434 - DNA, 21 bp, Artificial sequence
  SiRNA target sequence
gatctttaaattattataatt

SEQ ID NO: 87435 - DNA, 21 bp, Artificial sequence
  SiRNA target sequence
atctttaaattattataattt

SEQ ID NO: 87436 - DNA, 21 bp, Artificial sequence
  SiRNA target sequence
tctttaaattattataatttt

SEQ ID NO: 87437 - DNA, 21 bp, Artificial sequence
  SiRNA target sequence
ctttaaattattataattttg

SEQ ID NO: 87438 - DNA, 21 bp, Artificial sequence
  SiRNA target sequence
tttaaattattataattttgc

SEQ ID NO: 87439 - DNA, 21 bp, Artificial sequence
  SiRNA target sequence
ttaaattattataattttgca

SEQ ID NO: 87440 - DNA, 21 bp, Artificial sequence
  SiRNA target sequence
taaattattataattttgcat

SEQ ID NO: 87441 - DNA, 21 bp, Artificial sequence
  SiRNA target sequence
aaattattataattttgcata

SEQ ID NO: 87442 - DNA, 21 bp, Artificial sequence
  SiRNA target sequence
aattattataattttgcatat

SEQ ID NO: 87443 - DNA, 21 bp, Artificial sequence
  SiRNA target sequence
attattataattttgcatatc

SEQ ID NO: 87444 - DNA, 21 bp, Artificial sequence
  SiRNA target sequence
ttattataattttgcatatct

SEQ ID NO: 87445 - DNA, 21 bp, Artificial sequence
  SiRNA target sequence
tattataattttgcatatcta

SEQ ID NO: 87446 - DNA, 21 bp, Artificial sequence
  SiRNA target sequence
attataattttgcatatctat

SEQ ID NO: 87447 - DNA, 21 bp, Artificial sequence
  SiRNA target sequence
ttataattttgcatatctatg

SEQ ID NO: 87448 - DNA, 21 bp, Artificial sequence
  SiRNA target sequence
tataattttgcatatctatga

SEQ ID NO: 87449 - DNA, 21 bp, Artificial sequence
  SiRNA target sequence
ataattttgcatatctatgaa

SEQ ID NO: 87450 - DNA, 21 bp, Artificial sequence
  SiRNA target sequence
taattttgcatatctatgaaa

SEQ ID NO: 87451 - DNA, 21 bp, Artificial sequence
  SiRNA target sequence
aattttgcatatctatgaaat

SEQ ID NO: 87452 - DNA, 21 bp, Artificial sequence
  SiRNA target sequence
attttgcatatctatgaaatt

SEQ ID NO: 87453 - DNA, 21 bp, Artificial sequence
  SiRNA target sequence
ttttgcatatctatgaaattg

SEQ ID NO: 87454 - DNA, 21 bp, Artificial sequence
  SiRNA target sequence
tttgcatatctatgaaattgg

SEQ ID NO: 87455 - DNA, 21 bp, Artificial sequence
  SiRNA target sequence
ttgcatatctatgaaattgga

SEQ ID NO: 87456 - DNA, 21 bp, Artificial sequence
  SiRNA target sequence
tgcatatctatgaaattggaa

SEQ ID NO: 87457 - DNA, 21 bp, Artificial sequence
  SiRNA target sequence
gcatatctatgaaattggaaa

SEQ ID NO: 87458 - DNA, 21 bp, Artificial sequence
  SiRNA target sequence
catatctatgaaattggaaac

SEQ ID NO: 87459 - DNA, 21 bp, Artificial sequence
  SiRNA target sequence
atatctatgaaattggaaaca

SEQ ID NO: 87460 - DNA, 21 bp, Artificial sequence
  SiRNA target sequence
tatctatgaaattggaaacat

SEQ ID NO: 87461 - DNA, 21 bp, Artificial sequence
  SiRNA target sequence
atctatgaaattggaaacatg

SEQ ID NO: 87462 - DNA, 21 bp, Artificial sequence
  SiRNA target sequence
tctatgaaattggaaacatgt

SEQ ID NO: 87463 - DNA, 21 bp, Artificial sequence
  SiRNA target sequence
ctatgaaattggaaacatgtc

SEQ ID NO: 87464 - DNA, 21 bp, Artificial sequence
  SiRNA target sequence
tatgaaattggaaacatgtcc

SEQ ID NO: 87465 - DNA, 21 bp, Artificial sequence
  SiRNA target sequence
atgaaattggaaacatgtcca

SEQ ID NO: 87466 - DNA, 21 bp, Artificial sequence
  SiRNA target sequence
tgaaattggaaacatgtccat

SEQ ID NO: 87467 - DNA, 21 bp, Artificial sequence
  SiRNA target sequence
gaaattggaaacatgtccata

SEQ ID NO: 87468 - DNA, 21 bp, Artificial sequence
  SiRNA target sequence
aaattggaaacatgtccatat

SEQ ID NO: 87469 - DNA, 21 bp, Artificial sequence
  SiRNA target sequence
aattggaaacatgtccatatc

SEQ ID NO: 87470 - DNA, 21 bp, Artificial sequence
  SiRNA target sequence
attggaaacatgtccatatct

SEQ ID NO: 87471 - DNA, 21 bp, Artificial sequence
  SiRNA target sequence
ttggaaacatgtccatatcta

SEQ ID NO: 87472 - DNA, 21 bp, Artificial sequence
  SiRNA target sequence
tggaaacatgtccatatctat

SEQ ID NO: 87473 - DNA, 21 bp, Artificial sequence
  SiRNA target sequence
ggaaacatgtccatatctatc

SEQ ID NO: 87474 - DNA, 21 bp, Artificial sequence
  SiRNA target sequence
gaaacatgtccatatctatcg

SEQ ID NO: 87475 - DNA, 21 bp, Artificial sequence
  SiRNA target sequence
aaacatgtccatatctatcgc

SEQ ID NO: 87476 - DNA, 21 bp, Artificial sequence
  SiRNA target sequence
aacatgtccatatctatcgcc

SEQ ID NO: 87477 - DNA, 21 bp, Artificial sequence
  SiRNA target sequence
acatgtccatatctatcgcct

SEQ ID NO: 87478 - DNA, 21 bp, Artificial sequence
  SiRNA target sequence
catgtccatatctatcgcctt

SEQ ID NO: 87479 - DNA, 21 bp, Artificial sequence
  SiRNA target sequence
atgtccatatctatcgccttt

SEQ ID NO: 87480 - DNA, 21 bp, Artificial sequence
  SiRNA target sequence
tgtccatatctatcgcctttt

SEQ ID NO: 87481 - DNA, 21 bp, Artificial sequence
  SiRNA target sequence
gtccatatctatcgccttttt

SEQ ID NO: 87482 - DNA, 21 bp, Artificial sequence
  SiRNA target sequence
tccatatctatcgcctttttt

SEQ ID NO: 87483 - DNA, 21 bp, Artificial sequence
  SiRNA target sequence
ccatatctatcgcctttttta

SEQ ID NO: 87484 - DNA, 21 bp, Artificial sequence
  SiRNA target sequence
catatctatcgccttttttaa

SEQ ID NO: 87485 - DNA, 21 bp, Artificial sequence
  SiRNA target sequence
atatctatcgccttttttaat

SEQ ID NO: 87486 - DNA, 21 bp, Artificial sequence
  SiRNA target sequence
tatctatcgccttttttaata

SEQ ID NO: 87487 - DNA, 21 bp, Artificial sequence
  SiRNA target sequence
atctatcgccttttttaataa

SEQ ID NO: 87488 - DNA, 21 bp, Artificial sequence
  SiRNA target sequence
tctatcgccttttttaataat

SEQ ID NO: 87489 - DNA, 21 bp, Artificial sequence
  SiRNA target sequence
ctatcgccttttttaataatt

SEQ ID NO: 87490 - DNA, 21 bp, Artificial sequence
  SiRNA target sequence
tatcgccttttttaataattg

SEQ ID NO: 87491 - DNA, 21 bp, Artificial sequence
  SiRNA target sequence
atcgccttttttaataattgc

SEQ ID NO: 87492 - DNA, 21 bp, Artificial sequence
  SiRNA target sequence
tcgccttttttaataattgct

SEQ ID NO: 87493 - DNA, 21 bp, Artificial sequence
  SiRNA target sequence
cgccttttttaataattgcta

SEQ ID NO: 87494 - DNA, 21 bp, Artificial sequence
  SiRNA target sequence
gccttttttaataattgctac

SEQ ID NO: 87495 - DNA, 21 bp, Artificial sequence
  SiRNA target sequence
ccttttttaataattgctact

SEQ ID NO: 87496 - DNA, 21 bp, Artificial sequence
  SiRNA target sequence
cttttttaataattgctacta

SEQ ID NO: 87497 - DNA, 21 bp, Artificial sequence
  SiRNA target sequence
ttttttaataattgctactaa

SEQ ID NO: 87498 - DNA, 21 bp, Artificial sequence
  SiRNA target sequence
tttttaataattgctactaaa

SEQ ID NO: 87499 - DNA, 21 bp, Artificial sequence
  SiRNA target sequence
ttttaataattgctactaaaa

SEQ ID NO: 87500 - DNA, 21 bp, Artificial sequence
  SiRNA target sequence
tttaataattgctactaaaat

SEQ ID NO: 87501 - DNA, 21 bp, Artificial sequence
  SiRNA target sequence
ttaataattgctactaaaatt

SEQ ID NO: 87502 - DNA, 21 bp, Artificial sequence
  SiRNA target sequence
taataattgctactaaaattt

SEQ ID NO: 87503 - DNA, 21 bp, Artificial sequence
  SiRNA target sequence
aataattgctactaaaatttc

SEQ ID NO: 87504 - DNA, 21 bp, Artificial sequence
  SiRNA target sequence
ataattgctactaaaatttca

SEQ ID NO: 87505 - DNA, 21 bp, Artificial sequence
  SiRNA target sequence
taattgctactaaaatttcac

SEQ ID NO: 87506 - DNA, 21 bp, Artificial sequence
  SiRNA target sequence
aattgctactaaaatttcaca

SEQ ID NO: 87507 - DNA, 21 bp, Artificial sequence
  SiRNA target sequence
attgctactaaaatttcacat

SEQ ID NO: 87508 - DNA, 21 bp, Artificial sequence
  SiRNA target sequence
ttgctactaaaatttcacatt

SEQ ID NO: 87509 - DNA, 21 bp, Artificial sequence
  SiRNA target sequence
tgctactaaaatttcacattt

SEQ ID NO: 87510 - DNA, 21 bp, Artificial sequence
  SiRNA target sequence
gctactaaaatttcacatttt

SEQ ID NO: 87511 - DNA, 21 bp, Artificial sequence
  SiRNA target sequence
ctactaaaatttcacattttt

SEQ ID NO: 87512 - DNA, 21 bp, Artificial sequence
  SiRNA target sequence
tactaaaatttcacatttttc

SEQ ID NO: 87513 - DNA, 21 bp, Artificial sequence
  SiRNA target sequence
actaaaatttcacatttttca

SEQ ID NO: 87514 - DNA, 21 bp, Artificial sequence
  SiRNA target sequence
ctaaaatttcacatttttcat

SEQ ID NO: 87515 - DNA, 21 bp, Artificial sequence
  SiRNA target sequence
taaaatttcacatttttcatt

SEQ ID NO: 87516 - DNA, 21 bp, Artificial sequence
  SiRNA target sequence
aaaatttcacatttttcattt

SEQ ID NO: 87517 - DNA, 21 bp, Artificial sequence
  SiRNA target sequence
aaatttcacatttttcattta

SEQ ID NO: 87518 - DNA, 21 bp, Artificial sequence
  SiRNA target sequence
aatttcacatttttcatttac

SEQ ID NO: 87519 - DNA, 21 bp, Artificial sequence
  SiRNA target sequence
atttcacatttttcatttacg

SEQ ID NO: 87520 - DNA, 21 bp, Artificial sequence
  SiRNA target sequence
tttcacatttttcatttacgt

SEQ ID NO: 87521 - DNA, 21 bp, Artificial sequence
  SiRNA target sequence
ttcacatttttcatttacgtg

SEQ ID NO: 87522 - DNA, 21 bp, Artificial sequence
  SiRNA target sequence
tcacatttttcatttacgtgg

SEQ ID NO: 87523 - DNA, 21 bp, Artificial sequence
  SiRNA target sequence
cacatttttcatttacgtggt

SEQ ID NO: 87524 - DNA, 21 bp, Artificial sequence
  SiRNA target sequence
acatttttcatttacgtggtt

SEQ ID NO: 87525 - DNA, 21 bp, Artificial sequence
  SiRNA target sequence
catttttcatttacgtggtta

SEQ ID NO: 87526 - DNA, 21 bp, Artificial sequence
  SiRNA target sequence
atttttcatttacgtggttag

SEQ ID NO: 87527 - DNA, 21 bp, Artificial sequence
  SiRNA target sequence
tttttcatttacgtggttagt

SEQ ID NO: 87528 - DNA, 21 bp, Artificial sequence
  SiRNA target sequence
ttttcatttacgtggttagta

SEQ ID NO: 87529 - DNA, 21 bp, Artificial sequence
  SiRNA target sequence
tttcatttacgtggttagtaa

SEQ ID NO: 87530 - DNA, 21 bp, Artificial sequence
  SiRNA target sequence
ttcatttacgtggttagtaag

SEQ ID NO: 87531 - DNA, 21 bp, Artificial sequence
  SiRNA target sequence
tcatttacgtggttagtaagt

SEQ ID NO: 87532 - DNA, 21 bp, Artificial sequence
  SiRNA target sequence
catttacgtggttagtaagtg

SEQ ID NO: 87533 - DNA, 21 bp, Artificial sequence
  SiRNA target sequence
atttacgtggttagtaagtga

SEQ ID NO: 87534 - DNA, 21 bp, Artificial sequence
  SiRNA target sequence
tttacgtggttagtaagtgaa

SEQ ID NO: 87535 - DNA, 21 bp, Artificial sequence
  SiRNA target sequence
ttacgtggttagtaagtgaat

SEQ ID NO: 87536 - DNA, 21 bp, Artificial sequence
  SiRNA target sequence
tacgtggttagtaagtgaata

SEQ ID NO: 87537 - DNA, 21 bp, Artificial sequence
  SiRNA target sequence
acgtggttagtaagtgaataa

SEQ ID NO: 87538 - DNA, 21 bp, Artificial sequence
  SiRNA target sequence
cgtggttagtaagtgaataat

SEQ ID NO: 87539 - DNA, 21 bp, Artificial sequence
  SiRNA target sequence
gtggttagtaagtgaataata

SEQ ID NO: 87540 - DNA, 21 bp, Artificial sequence
  SiRNA target sequence
tggttagtaagtgaataatat

SEQ ID NO: 87541 - DNA, 21 bp, Artificial sequence
  SiRNA target sequence
ggttagtaagtgaataatatc

SEQ ID NO: 87542 - DNA, 21 bp, Artificial sequence
  SiRNA target sequence
gttagtaagtgaataatatct

SEQ ID NO: 87543 - DNA, 21 bp, Artificial sequence
  SiRNA target sequence
ttagtaagtgaataatatctt

SEQ ID NO: 87544 - DNA, 21 bp, Artificial sequence
  SiRNA target sequence
tagtaagtgaataatatcttg

SEQ ID NO: 87545 - DNA, 21 bp, Artificial sequence
  SiRNA target sequence
agtaagtgaataatatcttgg

SEQ ID NO: 87546 - DNA, 21 bp, Artificial sequence
  SiRNA target sequence
gtaagtgaataatatcttggc

SEQ ID NO: 87547 - DNA, 21 bp, Artificial sequence
  SiRNA target sequence
taagtgaataatatcttggct

SEQ ID NO: 87548 - DNA, 21 bp, Artificial sequence
  SiRNA target sequence
aagtgaataatatcttggctt

SEQ ID NO: 87549 - DNA, 21 bp, Artificial sequence
  SiRNA target sequence
agtgaataatatcttggctta

SEQ ID NO: 87550 - DNA, 21 bp, Artificial sequence
  SiRNA target sequence
gtgaataatatcttggcttaa

SEQ ID NO: 87551 - DNA, 21 bp, Artificial sequence
  SiRNA target sequence
tgaataatatcttggcttaat

SEQ ID NO: 87552 - DNA, 21 bp, Artificial sequence
  SiRNA target sequence
gaataatatcttggcttaatt

SEQ ID NO: 87553 - DNA, 21 bp, Artificial sequence
  SiRNA target sequence
aataatatcttggcttaattg

SEQ ID NO: 87554 - DNA, 21 bp, Artificial sequence
  SiRNA target sequence
ataatatcttggcttaattgt

SEQ ID NO: 87555 - DNA, 21 bp, Artificial sequence
  SiRNA target sequence
taatatcttggcttaattgtt

SEQ ID NO: 87556 - DNA, 21 bp, Artificial sequence
  SiRNA target sequence
aatatcttggcttaattgttt

SEQ ID NO: 87557 - DNA, 21 bp, Artificial sequence
  SiRNA target sequence
atatcttggcttaattgtttg

SEQ ID NO: 87558 - DNA, 21 bp, Artificial sequence
  SiRNA target sequence
tatcttggcttaattgtttga

SEQ ID NO: 87559 - DNA, 21 bp, Artificial sequence
  SiRNA target sequence
atcttggcttaattgtttgac

SEQ ID NO: 87560 - DNA, 21 bp, Artificial sequence
  SiRNA target sequence
tcttggcttaattgtttgaca

SEQ ID NO: 87561 - DNA, 21 bp, Artificial sequence
  SiRNA target sequence
cttggcttaattgtttgacaa

SEQ ID NO: 87562 - DNA, 21 bp, Artificial sequence
  SiRNA target sequence
ttggcttaattgtttgacaat

SEQ ID NO: 87563 - DNA, 21 bp, Artificial sequence
  SiRNA target sequence
tggcttaattgtttgacaatt

SEQ ID NO: 87564 - DNA, 21 bp, Artificial sequence
  SiRNA target sequence
ggcttaattgtttgacaattc

SEQ ID NO: 87565 - DNA, 21 bp, Artificial sequence
  SiRNA target sequence
gcttaattgtttgacaattca

SEQ ID NO: 87566 - DNA, 21 bp, Artificial sequence
  SiRNA target sequence
cttaattgtttgacaattcat

SEQ ID NO: 87567 - DNA, 21 bp, Artificial sequence
  SiRNA target sequence
ttaattgtttgacaattcata

SEQ ID NO: 87568 - DNA, 21 bp, Artificial sequence
  SiRNA target sequence
taattgtttgacaattcataa

SEQ ID NO: 87569 - DNA, 21 bp, Artificial sequence
  SiRNA target sequence
aattgtttgacaattcataat

SEQ ID NO: 87570 - DNA, 21 bp, Artificial sequence
  SiRNA target sequence
attgtttgacaattcataata

SEQ ID NO: 87571 - DNA, 21 bp, Artificial sequence
  SiRNA target sequence
ttgtttgacaattcataataa

SEQ ID NO: 87572 - DNA, 21 bp, Artificial sequence
  SiRNA target sequence
tgtttgacaattcataataag

SEQ ID NO: 87573 - DNA, 21 bp, Artificial sequence
  SiRNA target sequence
gtttgacaattcataataaga

SEQ ID NO: 87574 - DNA, 21 bp, Artificial sequence
  SiRNA target sequence
tttgacaattcataataagat

SEQ ID NO: 87575 - DNA, 21 bp, Artificial sequence
  SiRNA target sequence
ttgacaattcataataagatc

SEQ ID NO: 87576 - DNA, 21 bp, Artificial sequence
  SiRNA target sequence
tgacaattcataataagatcc

SEQ ID NO: 87577 - DNA, 21 bp, Artificial sequence
  SiRNA target sequence
gacaattcataataagatcct

SEQ ID NO: 87578 - DNA, 21 bp, Artificial sequence
  SiRNA target sequence
acaattcataataagatcctc

SEQ ID NO: 87579 - DNA, 21 bp, Artificial sequence
  SiRNA target sequence
caattcataataagatcctct

SEQ ID NO: 87580 - DNA, 21 bp, Artificial sequence
  SiRNA target sequence
aattcataataagatcctcta

SEQ ID NO: 87581 - DNA, 21 bp, Artificial sequence
  SiRNA target sequence
attcataataagatcctctaa

SEQ ID NO: 87582 - DNA, 21 bp, Artificial sequence
  SiRNA target sequence
ttcataataagatcctctaaa

SEQ ID NO: 87583 - DNA, 21 bp, Artificial sequence
  SiRNA target sequence
tcataataagatcctctaaac

SEQ ID NO: 87584 - DNA, 21 bp, Artificial sequence
  SiRNA target sequence
cataataagatcctctaaact

SEQ ID NO: 87585 - DNA, 21 bp, Artificial sequence
  SiRNA target sequence
ataataagatcctctaaactt

SEQ ID NO: 87586 - DNA, 21 bp, Artificial sequence
  SiRNA target sequence
taataagatcctctaaacttg

SEQ ID NO: 87587 - DNA, 21 bp, Artificial sequence
  SiRNA target sequence
aataagatcctctaaacttgg

SEQ ID NO: 87588 - DNA, 21 bp, Artificial sequence
  SiRNA target sequence
ataagatcctctaaacttggt

SEQ ID NO: 87589 - DNA, 21 bp, Artificial sequence
  SiRNA target sequence
taagatcctctaaacttggtt

SEQ ID NO: 87590 - DNA, 21 bp, Artificial sequence
  SiRNA target sequence
aagatcctctaaacttggttt

SEQ ID NO: 87591 - DNA, 21 bp, Artificial sequence
  SiRNA target sequence
agatcctctaaacttggttta

SEQ ID NO: 87592 - DNA, 21 bp, Artificial sequence
  SiRNA target sequence
gatcctctaaacttggtttac

SEQ ID NO: 87593 - DNA, 21 bp, Artificial sequence
  SiRNA target sequence
atcctctaaacttggtttaca

SEQ ID NO: 87594 - DNA, 21 bp, Artificial sequence
  SiRNA target sequence
tcctctaaacttggtttacat

SEQ ID NO: 87595 - DNA, 21 bp, Artificial sequence
  SiRNA target sequence
cctctaaacttggtttacatt

SEQ ID NO: 87596 - DNA, 21 bp, Artificial sequence
  SiRNA target sequence
ctctaaacttggtttacattg

SEQ ID NO: 87597 - DNA, 21 bp, Artificial sequence
  SiRNA target sequence
tctaaacttggtttacattga

SEQ ID NO: 87598 - DNA, 21 bp, Artificial sequence
  SiRNA target sequence
ctaaacttggtttacattgaa

SEQ ID NO: 87599 - DNA, 21 bp, Artificial sequence
  SiRNA target sequence
taaacttggtttacattgaaa

SEQ ID NO: 87600 - DNA, 21 bp, Artificial sequence
  SiRNA target sequence
aaacttggtttacattgaaat

SEQ ID NO: 87601 - DNA, 21 bp, Artificial sequence
  SiRNA target sequence
aacttggtttacattgaaatg

SEQ ID NO: 87602 - DNA, 21 bp, Artificial sequence
  SiRNA target sequence
acttggtttacattgaaatgt

SEQ ID NO: 87603 - DNA, 21 bp, Artificial sequence
  SiRNA target sequence
cttggtttacattgaaatgta

SEQ ID NO: 87604 - DNA, 21 bp, Artificial sequence
  SiRNA target sequence
ttggtttacattgaaatgtat

SEQ ID NO: 87605 - DNA, 21 bp, Artificial sequence
  SiRNA target sequence
tggtttacattgaaatgtata

SEQ ID NO: 87606 - DNA, 21 bp, Artificial sequence
  SiRNA target sequence
ggtttacattgaaatgtatat

SEQ ID NO: 87607 - DNA, 21 bp, Artificial sequence
  SiRNA target sequence
gtttacattgaaatgtatata

SEQ ID NO: 87608 - DNA, 21 bp, Artificial sequence
  SiRNA target sequence
tttacattgaaatgtatatat

SEQ ID NO: 87609 - DNA, 21 bp, Artificial sequence
  SiRNA target sequence
ttacattgaaatgtatatata

SEQ ID NO: 87610 - DNA, 21 bp, Artificial sequence
  SiRNA target sequence
tacattgaaatgtatatataa

SEQ ID NO: 87611 - DNA, 21 bp, Artificial sequence
  SiRNA target sequence
acattgaaatgtatatataat

SEQ ID NO: 87612 - DNA, 21 bp, Artificial sequence
  SiRNA target sequence
cattgaaatgtatatataatg

SEQ ID NO: 87613 - DNA, 21 bp, Artificial sequence
  SiRNA target sequence
attgaaatgtatatataatgt

SEQ ID NO: 87614 - DNA, 21 bp, Artificial sequence
  SiRNA target sequence
ttgaaatgtatatataatgtc

SEQ ID NO: 87615 - DNA, 21 bp, Artificial sequence
  SiRNA target sequence
tgaaatgtatatataatgtca

SEQ ID NO: 87616 - DNA, 21 bp, Artificial sequence
  SiRNA target sequence
gaaatgtatatataatgtcaa

SEQ ID NO: 87617 - DNA, 21 bp, Artificial sequence
  SiRNA target sequence
aaatgtatatataatgtcaag

SEQ ID NO: 87618 - DNA, 21 bp, Artificial sequence
  SiRNA target sequence
aatgtatatataatgtcaagc

SEQ ID NO: 87619 - DNA, 21 bp, Artificial sequence
  SiRNA target sequence
atgtatatataatgtcaagca

SEQ ID NO: 87620 - DNA, 21 bp, Artificial sequence
  SiRNA target sequence
tgtatatataatgtcaagcac

SEQ ID NO: 87621 - DNA, 21 bp, Artificial sequence
  SiRNA target sequence
gtatatataatgtcaagcaca

SEQ ID NO: 87622 - DNA, 21 bp, Artificial sequence
  SiRNA target sequence
tatatataatgtcaagcacat

SEQ ID NO: 87623 - DNA, 21 bp, Artificial sequence
  SiRNA target sequence
atatataatgtcaagcacatt

SEQ ID NO: 87624 - DNA, 21 bp, Artificial sequence
  SiRNA target sequence
tatataatgtcaagcacatta

SEQ ID NO: 87625 - DNA, 21 bp, Artificial sequence
  SiRNA target sequence
atataatgtcaagcacattat

SEQ ID NO: 87626 - DNA, 21 bp, Artificial sequence
  SiRNA target sequence
tataatgtcaagcacattatt

SEQ ID NO: 87627 - DNA, 21 bp, Artificial sequence
  SiRNA target sequence
ataatgtcaagcacattattc

SEQ ID NO: 87628 - DNA, 21 bp, Artificial sequence
  SiRNA target sequence
taatgtcaagcacattattcc

SEQ ID NO: 87629 - DNA, 21 bp, Artificial sequence
  SiRNA target sequence
aatgtcaagcacattattcca

SEQ ID NO: 87630 - DNA, 21 bp, Artificial sequence
  SiRNA target sequence
atgtcaagcacattattccag

SEQ ID NO: 87631 - DNA, 21 bp, Artificial sequence
  SiRNA target sequence
tgtcaagcacattattccagt

SEQ ID NO: 87632 - DNA, 21 bp, Artificial sequence
  SiRNA target sequence
gtcaagcacattattccagtt

SEQ ID NO: 87633 - DNA, 21 bp, Artificial sequence
  SiRNA target sequence
tcaagcacattattccagttc

SEQ ID NO: 87634 - DNA, 21 bp, Artificial sequence
  SiRNA target sequence
caagcacattattccagttct

SEQ ID NO: 87635 - DNA, 21 bp, Artificial sequence
  SiRNA target sequence
aagcacattattccagttctt

SEQ ID NO: 87636 - DNA, 21 bp, Artificial sequence
  SiRNA target sequence
agcacattattccagttctta

SEQ ID NO: 87637 - DNA, 21 bp, Artificial sequence
  SiRNA target sequence
gcacattattccagttcttaa

SEQ ID NO: 87638 - DNA, 21 bp, Artificial sequence
  SiRNA target sequence
cacattattccagttcttaat

SEQ ID NO: 87639 - DNA, 21 bp, Artificial sequence
  SiRNA target sequence
acattattccagttcttaatg

SEQ ID NO: 87640 - DNA, 21 bp, Artificial sequence
  SiRNA target sequence
cattattccagttcttaatga

SEQ ID NO: 87641 - DNA, 21 bp, Artificial sequence
  SiRNA target sequence
attattccagttcttaatgat

SEQ ID NO: 87642 - DNA, 21 bp, Artificial sequence
  SiRNA target sequence
ttattccagttcttaatgatg

SEQ ID NO: 87643 - DNA, 21 bp, Artificial sequence
  SiRNA target sequence
tattccagttcttaatgatgc

SEQ ID NO: 87644 - DNA, 21 bp, Artificial sequence
  SiRNA target sequence
attccagttcttaatgatgct

SEQ ID NO: 87645 - DNA, 21 bp, Artificial sequence
  SiRNA target sequence
ttccagttcttaatgatgctt

SEQ ID NO: 87646 - DNA, 21 bp, Artificial sequence
  SiRNA target sequence
tccagttcttaatgatgctta

SEQ ID NO: 87647 - DNA, 21 bp, Artificial sequence
  SiRNA target sequence
ccagttcttaatgatgcttaa

SEQ ID NO: 87648 - DNA, 21 bp, Artificial sequence
  SiRNA target sequence
cagttcttaatgatgcttaaa

SEQ ID NO: 87649 - DNA, 21 bp, Artificial sequence
  SiRNA target sequence
agttcttaatgatgcttaaat

SEQ ID NO: 87650 - DNA, 21 bp, Artificial sequence
  SiRNA target sequence
gttcttaatgatgcttaaata

SEQ ID NO: 87651 - DNA, 21 bp, Artificial sequence
  SiRNA target sequence
ttcttaatgatgcttaaataa

SEQ ID NO: 87652 - DNA, 21 bp, Artificial sequence
  SiRNA target sequence
tcttaatgatgcttaaataat

SEQ ID NO: 87653 - DNA, 21 bp, Artificial sequence
  SiRNA target sequence
cttaatgatgcttaaataatc

SEQ ID NO: 87654 - DNA, 21 bp, Artificial sequence
  SiRNA target sequence
ttaatgatgcttaaataatct

SEQ ID NO: 87655 - DNA, 21 bp, Artificial sequence
  SiRNA target sequence
taatgatgcttaaataatctt

SEQ ID NO: 87656 - DNA, 21 bp, Artificial sequence
  SiRNA target sequence
aatgatgcttaaataatcttt

SEQ ID NO: 87657 - DNA, 21 bp, Artificial sequence
  SiRNA target sequence
atgatgcttaaataatctttt

SEQ ID NO: 87658 - DNA, 21 bp, Artificial sequence
  SiRNA target sequence
tgatgcttaaataatctttta

SEQ ID NO: 87659 - DNA, 21 bp, Artificial sequence
  SiRNA target sequence
gatgcttaaataatcttttac

SEQ ID NO: 87660 - DNA, 21 bp, Artificial sequence
  SiRNA target sequence
atgcttaaataatcttttact

SEQ ID NO: 87661 - DNA, 21 bp, Artificial sequence
  SiRNA target sequence
tgcttaaataatcttttactc

SEQ ID NO: 87662 - DNA, 21 bp, Artificial sequence
  SiRNA target sequence
gcttaaataatcttttactcc

SEQ ID NO: 87663 - DNA, 21 bp, Artificial sequence
  SiRNA target sequence
cttaaataatcttttactcct

SEQ ID NO: 87664 - DNA, 21 bp, Artificial sequence
  SiRNA target sequence
ttaaataatcttttactcctt

SEQ ID NO: 87665 - DNA, 21 bp, Artificial sequence
  SiRNA target sequence
taaataatcttttactccttc

SEQ ID NO: 87666 - DNA, 21 bp, Artificial sequence
  SiRNA target sequence
aaataatcttttactccttct

SEQ ID NO: 87667 - DNA, 21 bp, Artificial sequence
  SiRNA target sequence
aataatcttttactccttctt

SEQ ID NO: 87668 - DNA, 21 bp, Artificial sequence
  SiRNA target sequence
ataatcttttactccttcttt

SEQ ID NO: 87669 - DNA, 21 bp, Artificial sequence
  SiRNA target sequence
taatcttttactccttcttta

SEQ ID NO: 87670 - DNA, 21 bp, Artificial sequence
  SiRNA target sequence
aatcttttactccttctttag

SEQ ID NO: 87671 - DNA, 21 bp, Artificial sequence
  SiRNA target sequence
atcttttactccttctttaga

SEQ ID NO: 87672 - DNA, 21 bp, Artificial sequence
  SiRNA target sequence
tcttttactccttctttagaa

SEQ ID NO: 87673 - DNA, 21 bp, Artificial sequence
  SiRNA target sequence
cttttactccttctttagaac

SEQ ID NO: 87674 - DNA, 21 bp, Artificial sequence
  SiRNA target sequence
ttttactccttctttagaaca

SEQ ID NO: 87675 - DNA, 21 bp, Artificial sequence
  SiRNA target sequence
tttactccttctttagaacac

SEQ ID NO: 87676 - DNA, 21 bp, Artificial sequence
  SiRNA target sequence
ttactccttctttagaacaca

SEQ ID NO: 87677 - DNA, 21 bp, Artificial sequence
  SiRNA target sequence
tactccttctttagaacacag

SEQ ID NO: 87678 - DNA, 21 bp, Artificial sequence
  SiRNA target sequence
actccttctttagaacacaga

SEQ ID NO: 87679 - DNA, 21 bp, Artificial sequence
  SiRNA target sequence
ctccttctttagaacacagat

SEQ ID NO: 87680 - DNA, 21 bp, Artificial sequence
  SiRNA target sequence
tccttctttagaacacagata

SEQ ID NO: 87681 - DNA, 21 bp, Artificial sequence
  SiRNA target sequence
ccttctttagaacacagatat

SEQ ID NO: 87682 - DNA, 21 bp, Artificial sequence
  SiRNA target sequence
cttctttagaacacagatatt

SEQ ID NO: 87683 - DNA, 21 bp, Artificial sequence
  SiRNA target sequence
ttctttagaacacagatattc

SEQ ID NO: 87684 - DNA, 21 bp, Artificial sequence
  SiRNA target sequence
tctttagaacacagatattca

SEQ ID NO: 87685 - DNA, 21 bp, Artificial sequence
  SiRNA target sequence
ctttagaacacagatattcaa

SEQ ID NO: 87686 - DNA, 21 bp, Artificial sequence
  SiRNA target sequence
tttagaacacagatattcaat

SEQ ID NO: 87687 - DNA, 21 bp, Artificial sequence
  SiRNA target sequence
ttagaacacagatattcaata

SEQ ID NO: 87688 - DNA, 21 bp, Artificial sequence
  SiRNA target sequence
tagaacacagatattcaatat

SEQ ID NO: 87689 - DNA, 21 bp, Artificial sequence
  SiRNA target sequence
agaacacagatattcaatatc

SEQ ID NO: 87690 - DNA, 21 bp, Artificial sequence
  SiRNA target sequence
gaacacagatattcaatatca

SEQ ID NO: 87691 - DNA, 21 bp, Artificial sequence
  SiRNA target sequence
aacacagatattcaatatcat

SEQ ID NO: 87692 - DNA, 21 bp, Artificial sequence
  SiRNA target sequence
acacagatattcaatatcatg

SEQ ID NO: 87693 - DNA, 21 bp, Artificial sequence
  SiRNA target sequence
cacagatattcaatatcatgc

SEQ ID NO: 87694 - DNA, 21 bp, Artificial sequence
  SiRNA target sequence
acagatattcaatatcatgct

SEQ ID NO: 87695 - DNA, 21 bp, Artificial sequence
  SiRNA target sequence
cagatattcaatatcatgctt

SEQ ID NO: 87696 - DNA, 21 bp, Artificial sequence
  SiRNA target sequence
agatattcaatatcatgctta

SEQ ID NO: 87697 - DNA, 21 bp, Artificial sequence
  SiRNA target sequence
gatattcaatatcatgcttat

SEQ ID NO: 87698 - DNA, 21 bp, Artificial sequence
  SiRNA target sequence
atattcaatatcatgcttatt

SEQ ID NO: 87699 - DNA, 21 bp, Artificial sequence
  SiRNA target sequence
tattcaatatcatgcttattt

SEQ ID NO: 87700 - DNA, 21 bp, Artificial sequence
  SiRNA target sequence
attcaatatcatgcttatttt

SEQ ID NO: 87701 - DNA, 21 bp, Artificial sequence
  SiRNA target sequence
ttcaatatcatgcttattttt

SEQ ID NO: 87702 - DNA, 21 bp, Artificial sequence
  SiRNA target sequence
tcaatatcatgcttattttta

SEQ ID NO: 87703 - DNA, 21 bp, Artificial sequence
  SiRNA target sequence
caatatcatgcttatttttag

SEQ ID NO: 87704 - DNA, 21 bp, Artificial sequence
  SiRNA target sequence
aatatcatgcttatttttaga

SEQ ID NO: 87705 - DNA, 21 bp, Artificial sequence
  SiRNA target sequence
atatcatgcttatttttagag

SEQ ID NO: 87706 - DNA, 21 bp, Artificial sequence
  SiRNA target sequence
tatcatgcttatttttagagg

SEQ ID NO: 87707 - DNA, 21 bp, Artificial sequence
  SiRNA target sequence
atcatgcttatttttagaggt

SEQ ID NO: 87708 - DNA, 21 bp, Artificial sequence
  SiRNA target sequence
tcatgcttatttttagaggtt

SEQ ID NO: 87709 - DNA, 21 bp, Artificial sequence
  SiRNA target sequence
catgcttatttttagaggttt

SEQ ID NO: 87710 - DNA, 21 bp, Artificial sequence
  SiRNA target sequence
atgcttatttttagaggtttt

SEQ ID NO: 87711 - DNA, 21 bp, Artificial sequence
  SiRNA target sequence
tgcttatttttagaggtttta

SEQ ID NO: 87712 - DNA, 21 bp, Artificial sequence
  SiRNA target sequence
gcttatttttagaggttttag

SEQ ID NO: 87713 - DNA, 21 bp, Artificial sequence
  SiRNA target sequence
cttatttttagaggttttaga

SEQ ID NO: 87714 - DNA, 21 bp, Artificial sequence
  SiRNA target sequence
ttatttttagaggttttagaa

SEQ ID NO: 87715 - DNA, 21 bp, Artificial sequence
  SiRNA target sequence
tatttttagaggttttagaaa

SEQ ID NO: 87716 - DNA, 21 bp, Artificial sequence
  SiRNA target sequence
atttttagaggttttagaaat

SEQ ID NO: 87717 - DNA, 21 bp, Artificial sequence
  SiRNA target sequence
tttttagaggttttagaaata

SEQ ID NO: 87718 - DNA, 21 bp, Artificial sequence
  SiRNA target sequence
ttttagaggttttagaaatat

SEQ ID NO: 87719 - DNA, 21 bp, Artificial sequence
  SiRNA target sequence
tttagaggttttagaaatatc

SEQ ID NO: 87720 - DNA, 21 bp, Artificial sequence
  SiRNA target sequence
ttagaggttttagaaatatcc

SEQ ID NO: 87721 - DNA, 21 bp, Artificial sequence
  SiRNA target sequence
tagaggttttagaaatatcca

SEQ ID NO: 87722 - DNA, 21 bp, Artificial sequence
  SiRNA target sequence
agaggttttagaaatatccat

SEQ ID NO: 87723 - DNA, 21 bp, Artificial sequence
  SiRNA target sequence
gaggttttagaaatatccata

SEQ ID NO: 87724 - DNA, 21 bp, Artificial sequence
  SiRNA target sequence
aggttttagaaatatccataa

SEQ ID NO: 87725 - DNA, 21 bp, Artificial sequence
  SiRNA target sequence
ggttttagaaatatccataag

SEQ ID NO: 87726 - DNA, 21 bp, Artificial sequence
  SiRNA target sequence
gttttagaaatatccataagc

SEQ ID NO: 87727 - DNA, 21 bp, Artificial sequence
  SiRNA target sequence
ttttagaaatatccataagcc

SEQ ID NO: 87728 - DNA, 21 bp, Artificial sequence
  SiRNA target sequence
tttagaaatatccataagcca

SEQ ID NO: 87729 - DNA, 21 bp, Artificial sequence
  SiRNA target sequence
ttagaaatatccataagccat

SEQ ID NO: 87730 - DNA, 21 bp, Artificial sequence
  SiRNA target sequence
tagaaatatccataagccatg

SEQ ID NO: 87731 - DNA, 21 bp, Artificial sequence
  SiRNA target sequence
agaaatatccataagccatgc

SEQ ID NO: 87732 - DNA, 21 bp, Artificial sequence
  SiRNA target sequence
gaaatatccataagccatgct

SEQ ID NO: 87733 - DNA, 21 bp, Artificial sequence
  SiRNA target sequence
aaatatccataagccatgctt

SEQ ID NO: 87734 - DNA, 21 bp, Artificial sequence
  SiRNA target sequence
aatatccataagccatgcttt

SEQ ID NO: 87735 - DNA, 21 bp, Artificial sequence
  SiRNA target sequence
atatccataagccatgctttt

SEQ ID NO: 87736 - DNA, 21 bp, Artificial sequence
  SiRNA target sequence
tatccataagccatgcttttt

SEQ ID NO: 87737 - DNA, 21 bp, Artificial sequence
  SiRNA target sequence
atccataagccatgctttttt

SEQ ID NO: 87738 - DNA, 21 bp, Artificial sequence
  SiRNA target sequence
tccataagccatgctttttta

SEQ ID NO: 87739 - DNA, 21 bp, Artificial sequence
  SiRNA target sequence
ccataagccatgcttttttag

SEQ ID NO: 87740 - DNA, 21 bp, Artificial sequence
  SiRNA target sequence
cataagccatgcttttttagg

SEQ ID NO: 87741 - DNA, 21 bp, Artificial sequence
  SiRNA target sequence
ataagccatgcttttttaggc

SEQ ID NO: 87742 - DNA, 21 bp, Artificial sequence
  SiRNA target sequence
taagccatgcttttttaggca

SEQ ID NO: 87743 - DNA, 21 bp, Artificial sequence
  SiRNA target sequence
aagccatgcttttttaggcaa

SEQ ID NO: 87744 - DNA, 21 bp, Artificial sequence
  SiRNA target sequence
agccatgcttttttaggcaat

SEQ ID NO: 87745 - DNA, 21 bp, Artificial sequence
  SiRNA target sequence
gccatgcttttttaggcaatg

SEQ ID NO: 87746 - DNA, 21 bp, Artificial sequence
  SiRNA target sequence
ccatgcttttttaggcaatga

SEQ ID NO: 87747 - DNA, 21 bp, Artificial sequence
  SiRNA target sequence
catgcttttttaggcaatgaa

SEQ ID NO: 87748 - DNA, 21 bp, Artificial sequence
  SiRNA target sequence
atgcttttttaggcaatgaag

SEQ ID NO: 87749 - DNA, 21 bp, Artificial sequence
  SiRNA target sequence
tgcttttttaggcaatgaagt

SEQ ID NO: 87750 - DNA, 21 bp, Artificial sequence
  SiRNA target sequence
gcttttttaggcaatgaagta

SEQ ID NO: 87751 - DNA, 21 bp, Artificial sequence
  SiRNA target sequence
cttttttaggcaatgaagtaa

SEQ ID NO: 87752 - DNA, 21 bp, Artificial sequence
  SiRNA target sequence
ttttttaggcaatgaagtaaa

SEQ ID NO: 87753 - DNA, 21 bp, Artificial sequence
  SiRNA target sequence
tttttaggcaatgaagtaaaa

SEQ ID NO: 87754 - DNA, 21 bp, Artificial sequence
  SiRNA target sequence
ttttaggcaatgaagtaaaat

SEQ ID NO: 87755 - DNA, 21 bp, Artificial sequence
  SiRNA target sequence
tttaggcaatgaagtaaaatc

SEQ ID NO: 87756 - DNA, 21 bp, Artificial sequence
  SiRNA target sequence
ttaggcaatgaagtaaaatca

SEQ ID NO: 87757 - DNA, 21 bp, Artificial sequence
  SiRNA target sequence
taggcaatgaagtaaaatcaa

SEQ ID NO: 87758 - DNA, 21 bp, Artificial sequence
  SiRNA target sequence
aggcaatgaagtaaaatcaaa

SEQ ID NO: 87759 - DNA, 21 bp, Artificial sequence
  SiRNA target sequence
ggcaatgaagtaaaatcaaaa

SEQ ID NO: 87760 - DNA, 21 bp, Artificial sequence
  SiRNA target sequence
gcaatgaagtaaaatcaaaaa

SEQ ID NO: 87761 - DNA, 21 bp, Artificial sequence
  SiRNA target sequence
caatgaagtaaaatcaaaaat

SEQ ID NO: 87762 - DNA, 21 bp, Artificial sequence
  SiRNA target sequence
aatgaagtaaaatcaaaaata

SEQ ID NO: 87763 - DNA, 21 bp, Artificial sequence
  SiRNA target sequence
atgaagtaaaatcaaaaatat

SEQ ID NO: 87764 - DNA, 21 bp, Artificial sequence
  SiRNA target sequence
tgaagtaaaatcaaaaatata

SEQ ID NO: 87765 - DNA, 21 bp, Artificial sequence
  SiRNA target sequence
gaagtaaaatcaaaaatatac

SEQ ID NO: 87766 - DNA, 21 bp, Artificial sequence
  SiRNA target sequence
aagtaaaatcaaaaatatact

SEQ ID NO: 87767 - DNA, 21 bp, Artificial sequence
  SiRNA target sequence
agtaaaatcaaaaatatactt

SEQ ID NO: 87768 - DNA, 21 bp, Artificial sequence
  SiRNA target sequence
gtaaaatcaaaaatatacttg

SEQ ID NO: 87769 - DNA, 21 bp, Artificial sequence
  SiRNA target sequence
taaaatcaaaaatatacttga

SEQ ID NO: 87770 - DNA, 21 bp, Artificial sequence
  SiRNA target sequence
aaaatcaaaaatatacttgaa

SEQ ID NO: 87771 - DNA, 21 bp, Artificial sequence
  SiRNA target sequence
aaatcaaaaatatacttgaaa

SEQ ID NO: 87772 - DNA, 21 bp, Artificial sequence
  SiRNA target sequence
aatcaaaaatatacttgaaaa

SEQ ID NO: 87773 - DNA, 21 bp, Artificial sequence
  SiRNA target sequence
atcaaaaatatacttgaaaaa

SEQ ID NO: 87774 - DNA, 21 bp, Artificial sequence
  SiRNA target sequence
tcaaaaatatacttgaaaaag

SEQ ID NO: 87775 - DNA, 21 bp, Artificial sequence
  SiRNA target sequence
caaaaatatacttgaaaaagt

SEQ ID NO: 87776 - DNA, 21 bp, Artificial sequence
  SiRNA target sequence
aaaaatatacttgaaaaagtc

SEQ ID NO: 87777 - DNA, 21 bp, Artificial sequence
  SiRNA target sequence
aaaatatacttgaaaaagtca

SEQ ID NO: 87778 - DNA, 21 bp, Artificial sequence
  SiRNA target sequence
aaatatacttgaaaaagtcac

SEQ ID NO: 87779 - DNA, 21 bp, Artificial sequence
  SiRNA target sequence
aatatacttgaaaaagtcacg

SEQ ID NO: 87780 - DNA, 21 bp, Artificial sequence
  SiRNA target sequence
atatacttgaaaaagtcacgc

SEQ ID NO: 87781 - DNA, 21 bp, Artificial sequence
  SiRNA target sequence
tatacttgaaaaagtcacgca

SEQ ID NO: 87782 - DNA, 21 bp, Artificial sequence
  SiRNA target sequence
atacttgaaaaagtcacgcaa

SEQ ID NO: 87783 - DNA, 21 bp, Artificial sequence
  SiRNA target sequence
tacttgaaaaagtcacgcaaa

SEQ ID NO: 87784 - DNA, 21 bp, Artificial sequence
  SiRNA target sequence
acttgaaaaagtcacgcaaag

SEQ ID NO: 87785 - DNA, 21 bp, Artificial sequence
  SiRNA target sequence
cttgaaaaagtcacgcaaaga

SEQ ID NO: 87786 - DNA, 21 bp, Artificial sequence
  SiRNA target sequence
ttgaaaaagtcacgcaaagat

SEQ ID NO: 87787 - DNA, 21 bp, Artificial sequence
  SiRNA target sequence
tgaaaaagtcacgcaaagatc

SEQ ID NO: 87788 - DNA, 21 bp, Artificial sequence
  SiRNA target sequence
gaaaaagtcacgcaaagatcc

SEQ ID NO: 87789 - DNA, 21 bp, Artificial sequence
  SiRNA target sequence
aaaaagtcacgcaaagatcct

SEQ ID NO: 87790 - DNA, 21 bp, Artificial sequence
  SiRNA target sequence
aaaagtcacgcaaagatcctt

SEQ ID NO: 87791 - DNA, 21 bp, Artificial sequence
  SiRNA target sequence
aaagtcacgcaaagatccttc

SEQ ID NO: 87792 - DNA, 21 bp, Artificial sequence
  SiRNA target sequence
aagtcacgcaaagatccttcg

SEQ ID NO: 87793 - DNA, 21 bp, Artificial sequence
  SiRNA target sequence
agtcacgcaaagatccttcga

SEQ ID NO: 87794 - DNA, 21 bp, Artificial sequence
  SiRNA target sequence
gtcacgcaaagatccttcgaa

SEQ ID NO: 87795 - DNA, 21 bp, Artificial sequence
  SiRNA target sequence
tcacgcaaagatccttcgaat

SEQ ID NO: 87796 - DNA, 21 bp, Artificial sequence
  SiRNA target sequence
cacgcaaagatccttcgaatt

SEQ ID NO: 87797 - DNA, 21 bp, Artificial sequence
  SiRNA target sequence
acgcaaagatccttcgaattg

SEQ ID NO: 87798 - DNA, 21 bp, Artificial sequence
  SiRNA target sequence
cgcaaagatccttcgaattga

SEQ ID NO: 87799 - DNA, 21 bp, Artificial sequence
  SiRNA target sequence
gcaaagatccttcgaattgaa

SEQ ID NO: 87800 - DNA, 21 bp, Artificial sequence
  SiRNA target sequence
caaagatccttcgaattgaaa

SEQ ID NO: 87801 - DNA, 21 bp, Artificial sequence
  SiRNA target sequence
aaagatccttcgaattgaaac

SEQ ID NO: 87802 - DNA, 21 bp, Artificial sequence
  SiRNA target sequence
aagatccttcgaattgaaacc

SEQ ID NO: 87803 - DNA, 21 bp, Artificial sequence
  SiRNA target sequence
agatccttcgaattgaaaccc

SEQ ID NO: 87804 - DNA, 21 bp, Artificial sequence
  SiRNA target sequence
gatccttcgaattgaaacccc

SEQ ID NO: 87805 - DNA, 21 bp, Artificial sequence
  SiRNA target sequence
atccttcgaattgaaaccccg

SEQ ID NO: 87806 - DNA, 21 bp, Artificial sequence
  SiRNA target sequence
tccttcgaattgaaaccccgt

SEQ ID NO: 87807 - DNA, 21 bp, Artificial sequence
  SiRNA target sequence
ccttcgaattgaaaccccgtt

SEQ ID NO: 87808 - DNA, 21 bp, Artificial sequence
  SiRNA target sequence
cttcgaattgaaaccccgttt

SEQ ID NO: 87809 - DNA, 21 bp, Artificial sequence
  SiRNA target sequence
ttcgaattgaaaccccgtttt

SEQ ID NO: 87810 - DNA, 21 bp, Artificial sequence
  SiRNA target sequence
tcgaattgaaaccccgttttt

SEQ ID NO: 87811 - DNA, 21 bp, Artificial sequence
  SiRNA target sequence
cgaattgaaaccccgtttttc

SEQ ID NO: 87812 - DNA, 21 bp, Artificial sequence
  SiRNA target sequence
gaattgaaaccccgtttttcc

SEQ ID NO: 87813 - DNA, 21 bp, Artificial sequence
  SiRNA target sequence
aattgaaaccccgtttttcca

SEQ ID NO: 87814 - DNA, 21 bp, Artificial sequence
  SiRNA target sequence
attgaaaccccgtttttccaa

SEQ ID NO: 87815 - DNA, 21 bp, Artificial sequence
  SiRNA target sequence
ttgaaaccccgtttttccaac

SEQ ID NO: 87816 - DNA, 21 bp, Artificial sequence
  SiRNA target sequence
tgaaaccccgtttttccaact

SEQ ID NO: 87817 - DNA, 21 bp, Artificial sequence
  SiRNA target sequence
gaaaccccgtttttccaactt

SEQ ID NO: 87818 - DNA, 21 bp, Artificial sequence
  SiRNA target sequence
aaaccccgtttttccaacttg

SEQ ID NO: 87819 - DNA, 21 bp, Artificial sequence
  SiRNA target sequence
aaccccgtttttccaacttgc

SEQ ID NO: 87820 - DNA, 21 bp, Artificial sequence
  SiRNA target sequence
accccgtttttccaacttgct

SEQ ID NO: 87821 - DNA, 21 bp, Artificial sequence
  SiRNA target sequence
ccccgtttttccaacttgctc

SEQ ID NO: 87822 - DNA, 21 bp, Artificial sequence
  SiRNA target sequence
cccgtttttccaacttgctca

SEQ ID NO: 87823 - DNA, 21 bp, Artificial sequence
  SiRNA target sequence
ccgtttttccaacttgctcaa

SEQ ID NO: 87824 - DNA, 21 bp, Artificial sequence
  SiRNA target sequence
cgtttttccaacttgctcaat

SEQ ID NO: 87825 - DNA, 21 bp, Artificial sequence
  SiRNA target sequence
gtttttccaacttgctcaata

SEQ ID NO: 87826 - DNA, 21 bp, Artificial sequence
  SiRNA target sequence
tttttccaacttgctcaatat

SEQ ID NO: 87827 - DNA, 21 bp, Artificial sequence
  SiRNA target sequence
ttttccaacttgctcaatata

SEQ ID NO: 87828 - DNA, 21 bp, Artificial sequence
  SiRNA target sequence
tttccaacttgctcaatatat

SEQ ID NO: 87829 - DNA, 21 bp, Artificial sequence
  SiRNA target sequence
ttccaacttgctcaatatata

SEQ ID NO: 87830 - DNA, 21 bp, Artificial sequence
  SiRNA target sequence
tccaacttgctcaatatataa

SEQ ID NO: 87831 - DNA, 21 bp, Artificial sequence
  SiRNA target sequence
ccaacttgctcaatatataat

SEQ ID NO: 87832 - DNA, 21 bp, Artificial sequence
  SiRNA target sequence
caacttgctcaatatataata

SEQ ID NO: 87833 - DNA, 21 bp, Artificial sequence
  SiRNA target sequence
aacttgctcaatatataataa

SEQ ID NO: 87834 - DNA, 21 bp, Artificial sequence
  SiRNA target sequence
acttgctcaatatataataat

SEQ ID NO: 87835 - DNA, 21 bp, Artificial sequence
  SiRNA target sequence
cttgctcaatatataataatg

SEQ ID NO: 87836 - DNA, 21 bp, Artificial sequence
  SiRNA target sequence
ttgctcaatatataataatgt

SEQ ID NO: 87837 - DNA, 21 bp, Artificial sequence
  SiRNA target sequence
tgctcaatatataataatgta

SEQ ID NO: 87838 - DNA, 21 bp, Artificial sequence
  SiRNA target sequence
gctcaatatataataatgtat

SEQ ID NO: 87839 - DNA, 21 bp, Artificial sequence
  SiRNA target sequence
ctcaatatataataatgtatc

SEQ ID NO: 87840 - DNA, 21 bp, Artificial sequence
  SiRNA target sequence
tcaatatataataatgtatca

SEQ ID NO: 87841 - DNA, 21 bp, Artificial sequence
  SiRNA target sequence
caatatataataatgtatcac

SEQ ID NO: 87842 - DNA, 21 bp, Artificial sequence
  SiRNA target sequence
aatatataataatgtatcacc

SEQ ID NO: 87843 - DNA, 21 bp, Artificial sequence
  SiRNA target sequence
atatataataatgtatcacca

SEQ ID NO: 87844 - DNA, 21 bp, Artificial sequence
  SiRNA target sequence
tatataataatgtatcaccag

SEQ ID NO: 87845 - DNA, 21 bp, Artificial sequence
  SiRNA target sequence
atataataatgtatcaccaga

SEQ ID NO: 87846 - DNA, 21 bp, Artificial sequence
  SiRNA target sequence
tataataatgtatcaccagac

SEQ ID NO: 87847 - DNA, 21 bp, Artificial sequence
  SiRNA target sequence
ataataatgtatcaccagaca

SEQ ID NO: 87848 - DNA, 21 bp, Artificial sequence
  SiRNA target sequence
taataatgtatcaccagacat

SEQ ID NO: 87849 - DNA, 21 bp, Artificial sequence
  SiRNA target sequence
aataatgtatcaccagacatt

SEQ ID NO: 87850 - DNA, 21 bp, Artificial sequence
  SiRNA target sequence
ataatgtatcaccagacattt

SEQ ID NO: 87851 - DNA, 21 bp, Artificial sequence
  SiRNA target sequence
taatgtatcaccagacatttc

SEQ ID NO: 87852 - DNA, 21 bp, Artificial sequence
  SiRNA target sequence
aatgtatcaccagacatttct

SEQ ID NO: 87853 - DNA, 21 bp, Artificial sequence
  SiRNA target sequence
atgtatcaccagacatttcta

SEQ ID NO: 87854 - DNA, 21 bp, Artificial sequence
  SiRNA target sequence
tgtatcaccagacatttctag

SEQ ID NO: 87855 - DNA, 21 bp, Artificial sequence
  SiRNA target sequence
gtatcaccagacatttctagt

SEQ ID NO: 87856 - DNA, 21 bp, Artificial sequence
  SiRNA target sequence
tatcaccagacatttctagta

SEQ ID NO: 87857 - DNA, 21 bp, Artificial sequence
  SiRNA target sequence
atcaccagacatttctagtaa

SEQ ID NO: 87858 - DNA, 21 bp, Artificial sequence
  SiRNA target sequence
tcaccagacatttctagtaaa

SEQ ID NO: 87859 - DNA, 21 bp, Artificial sequence
  SiRNA target sequence
caccagacatttctagtaaac

SEQ ID NO: 87860 - DNA, 21 bp, Artificial sequence
  SiRNA target sequence
accagacatttctagtaaact

SEQ ID NO: 87861 - DNA, 21 bp, Artificial sequence
  SiRNA target sequence
ccagacatttctagtaaactt

SEQ ID NO: 87862 - DNA, 21 bp, Artificial sequence
  SiRNA target sequence
cagacatttctagtaaactta

SEQ ID NO: 87863 - DNA, 21 bp, Artificial sequence
  SiRNA target sequence
agacatttctagtaaacttaa

SEQ ID NO: 87864 - DNA, 21 bp, Artificial sequence
  SiRNA target sequence
gacatttctagtaaacttaac

SEQ ID NO: 87865 - DNA, 21 bp, Artificial sequence
  SiRNA target sequence
acatttctagtaaacttaaca

SEQ ID NO: 87866 - DNA, 21 bp, Artificial sequence
  SiRNA target sequence
catttctagtaaacttaacat

SEQ ID NO: 87867 - DNA, 21 bp, Artificial sequence
  SiRNA target sequence
atttctagtaaacttaacatt

SEQ ID NO: 87868 - DNA, 21 bp, Artificial sequence
  SiRNA target sequence
tttctagtaaacttaacattt

SEQ ID NO: 87869 - DNA, 21 bp, Artificial sequence
  SiRNA target sequence
ttctagtaaacttaacatttc

SEQ ID NO: 87870 - DNA, 21 bp, Artificial sequence
  SiRNA target sequence
tctagtaaacttaacatttca

SEQ ID NO: 87871 - DNA, 21 bp, Artificial sequence
  SiRNA target sequence
ctagtaaacttaacatttcat

SEQ ID NO: 87872 - DNA, 21 bp, Artificial sequence
  SiRNA target sequence
tagtaaacttaacatttcatt

SEQ ID NO: 87873 - DNA, 21 bp, Artificial sequence
  SiRNA target sequence
agtaaacttaacatttcatta

SEQ ID NO: 87874 - DNA, 21 bp, Artificial sequence
  SiRNA target sequence
gtaaacttaacatttcattaa

SEQ ID NO: 87875 - DNA, 21 bp, Artificial sequence
  SiRNA target sequence
taaacttaacatttcattaac

SEQ ID NO: 87876 - DNA, 21 bp, Artificial sequence
  SiRNA target sequence
aaacttaacatttcattaaca

SEQ ID NO: 87877 - DNA, 21 bp, Artificial sequence
  SiRNA target sequence
aacttaacatttcattaacaa

SEQ ID NO: 87878 - DNA, 21 bp, Artificial sequence
  SiRNA target sequence
acttaacatttcattaacaag

SEQ ID NO: 87879 - DNA, 21 bp, Artificial sequence
  SiRNA target sequence
cttaacatttcattaacaagc

SEQ ID NO: 87880 - DNA, 21 bp, Artificial sequence
  SiRNA target sequence
ttaacatttcattaacaagca

SEQ ID NO: 87881 - DNA, 21 bp, Artificial sequence
  SiRNA target sequence
taacatttcattaacaagcaa

SEQ ID NO: 87882 - DNA, 21 bp, Artificial sequence
  SiRNA target sequence
aacatttcattaacaagcaaa

SEQ ID NO: 87883 - DNA, 21 bp, Artificial sequence
  SiRNA target sequence
acatttcattaacaagcaaat

SEQ ID NO: 87884 - DNA, 21 bp, Artificial sequence
  SiRNA target sequence
catttcattaacaagcaaatc

SEQ ID NO: 87885 - DNA, 21 bp, Artificial sequence
  SiRNA target sequence
atttcattaacaagcaaatca

SEQ ID NO: 87886 - DNA, 21 bp, Artificial sequence
  SiRNA target sequence
tttcattaacaagcaaatcat

SEQ ID NO: 87887 - DNA, 21 bp, Artificial sequence
  SiRNA target sequence
ttcattaacaagcaaatcatt

SEQ ID NO: 87888 - DNA, 21 bp, Artificial sequence
  SiRNA target sequence
tcattaacaagcaaatcatta

SEQ ID NO: 87889 - DNA, 21 bp, Artificial sequence
  SiRNA target sequence
cattaacaagcaaatcattat

SEQ ID NO: 87890 - DNA, 21 bp, Artificial sequence
  SiRNA target sequence
attaacaagcaaatcattatt

SEQ ID NO: 87891 - DNA, 21 bp, Artificial sequence
  SiRNA target sequence
ttaacaagcaaatcattattt

SEQ ID NO: 87892 - DNA, 21 bp, Artificial sequence
  SiRNA target sequence
taacaagcaaatcattatttg

SEQ ID NO: 87893 - DNA, 21 bp, Artificial sequence
  SiRNA target sequence
aacaagcaaatcattatttga

SEQ ID NO: 87894 - DNA, 21 bp, Artificial sequence
  SiRNA target sequence
acaagcaaatcattatttgaa

SEQ ID NO: 87895 - DNA, 21 bp, Artificial sequence
  SiRNA target sequence
caagcaaatcattatttgaac

SEQ ID NO: 87896 - DNA, 21 bp, Artificial sequence
  SiRNA target sequence
aagcaaatcattatttgaaca

SEQ ID NO: 87897 - DNA, 21 bp, Artificial sequence
  SiRNA target sequence
agcaaatcattatttgaacaa

SEQ ID NO: 87898 - DNA, 21 bp, Artificial sequence
  SiRNA target sequence
gcaaatcattatttgaacaaa

SEQ ID NO: 87899 - DNA, 21 bp, Artificial sequence
  SiRNA target sequence
caaatcattatttgaacaaag

SEQ ID NO: 87900 - DNA, 21 bp, Artificial sequence
  SiRNA target sequence
aaatcattatttgaacaaagt

SEQ ID NO: 87901 - DNA, 21 bp, Artificial sequence
  SiRNA target sequence
aatcattatttgaacaaagta

SEQ ID NO: 87902 - DNA, 21 bp, Artificial sequence
  SiRNA target sequence
atcattatttgaacaaagtag

SEQ ID NO: 87903 - DNA, 21 bp, Artificial sequence
  SiRNA target sequence
tcattatttgaacaaagtaga

SEQ ID NO: 87904 - DNA, 21 bp, Artificial sequence
  SiRNA target sequence
cattatttgaacaaagtagac

SEQ ID NO: 87905 - DNA, 21 bp, Artificial sequence
  SiRNA target sequence
attatttgaacaaagtagacc

SEQ ID NO: 87906 - DNA, 21 bp, Artificial sequence
  SiRNA target sequence
ttatttgaacaaagtagacca

SEQ ID NO: 87907 - DNA, 21 bp, Artificial sequence
  SiRNA target sequence
tatttgaacaaagtagaccaa

SEQ ID NO: 87908 - DNA, 21 bp, Artificial sequence
  SiRNA target sequence
atttgaacaaagtagaccaat

SEQ ID NO: 87909 - DNA, 21 bp, Artificial sequence
  SiRNA target sequence
tttgaacaaagtagaccaata

SEQ ID NO: 87910 - DNA, 21 bp, Artificial sequence
  SiRNA target sequence
ttgaacaaagtagaccaatac

SEQ ID NO: 87911 - DNA, 21 bp, Artificial sequence
  SiRNA target sequence
tgaacaaagtagaccaatact

SEQ ID NO: 87912 - DNA, 21 bp, Artificial sequence
  SiRNA target sequence
gaacaaagtagaccaatacta

SEQ ID NO: 87913 - DNA, 21 bp, Artificial sequence
  SiRNA target sequence
aacaaagtagaccaatactat

SEQ ID NO: 87914 - DNA, 21 bp, Artificial sequence
  SiRNA target sequence
acaaagtagaccaatactatc

SEQ ID NO: 87915 - DNA, 21 bp, Artificial sequence
  SiRNA target sequence
caaagtagaccaatactatca

SEQ ID NO: 87916 - DNA, 21 bp, Artificial sequence
  SiRNA target sequence
aaagtagaccaatactatcac

SEQ ID NO: 87917 - DNA, 21 bp, Artificial sequence
  SiRNA target sequence
aagtagaccaatactatcacc

SEQ ID NO: 87918 - DNA, 21 bp, Artificial sequence
  SiRNA target sequence
agtagaccaatactatcacca

SEQ ID NO: 87919 - DNA, 21 bp, Artificial sequence
  SiRNA target sequence
gtagaccaatactatcaccag

SEQ ID NO: 87920 - DNA, 21 bp, Artificial sequence
  SiRNA target sequence
tagaccaatactatcaccagg

SEQ ID NO: 87921 - DNA, 21 bp, Artificial sequence
  SiRNA target sequence
agaccaatactatcaccagga

SEQ ID NO: 87922 - DNA, 21 bp, Artificial sequence
  SiRNA target sequence
gaccaatactatcaccaggaa

SEQ ID NO: 87923 - DNA, 21 bp, Artificial sequence
  SiRNA target sequence
accaatactatcaccaggaac

SEQ ID NO: 87924 - DNA, 21 bp, Artificial sequence
  SiRNA target sequence
ccaatactatcaccaggaaca

SEQ ID NO: 87925 - DNA, 21 bp, Artificial sequence
  SiRNA target sequence
caatactatcaccaggaacaa

SEQ ID NO: 87926 - DNA, 21 bp, Artificial sequence
  SiRNA target sequence
aatactatcaccaggaacaaa

SEQ ID NO: 87927 - DNA, 21 bp, Artificial sequence
  SiRNA target sequence
atactatcaccaggaacaaaa

SEQ ID NO: 87928 - DNA, 21 bp, Artificial sequence
  SiRNA target sequence
tactatcaccaggaacaaaat

SEQ ID NO: 87929 - DNA, 21 bp, Artificial sequence
  SiRNA target sequence
actatcaccaggaacaaaatc

SEQ ID NO: 87930 - DNA, 21 bp, Artificial sequence
  SiRNA target sequence
ctatcaccaggaacaaaatct

SEQ ID NO: 87931 - DNA, 21 bp, Artificial sequence
  SiRNA target sequence
tatcaccaggaacaaaatcta

SEQ ID NO: 87932 - DNA, 21 bp, Artificial sequence
  SiRNA target sequence
atcaccaggaacaaaatctaa

SEQ ID NO: 87933 - DNA, 21 bp, Artificial sequence
  SiRNA target sequence
tcaccaggaacaaaatctaat

SEQ ID NO: 87934 - DNA, 21 bp, Artificial sequence
  SiRNA target sequence
caccaggaacaaaatctaatg

SEQ ID NO: 87935 - DNA, 21 bp, Artificial sequence
  SiRNA target sequence
accaggaacaaaatctaatgt

SEQ ID NO: 87936 - DNA, 21 bp, Artificial sequence
  SiRNA target sequence
ccaggaacaaaatctaatgta

SEQ ID NO: 87937 - DNA, 21 bp, Artificial sequence
  SiRNA target sequence
caggaacaaaatctaatgtat

SEQ ID NO: 87938 - DNA, 21 bp, Artificial sequence
  SiRNA target sequence
aggaacaaaatctaatgtata

SEQ ID NO: 87939 - DNA, 21 bp, Artificial sequence
  SiRNA target sequence
ggaacaaaatctaatgtataa

SEQ ID NO: 87940 - DNA, 21 bp, Artificial sequence
  SiRNA target sequence
gaacaaaatctaatgtataat

SEQ ID NO: 87941 - DNA, 21 bp, Artificial sequence
  SiRNA target sequence
aacaaaatctaatgtataatt

SEQ ID NO: 87942 - DNA, 21 bp, Artificial sequence
  SiRNA target sequence
acaaaatctaatgtataatta

SEQ ID NO: 87943 - DNA, 21 bp, Artificial sequence
  SiRNA target sequence
caaaatctaatgtataattaa

SEQ ID NO: 87944 - DNA, 21 bp, Artificial sequence
  SiRNA target sequence
aaaatctaatgtataattaag

SEQ ID NO: 87945 - DNA, 21 bp, Artificial sequence
  SiRNA target sequence
aaatctaatgtataattaagt

SEQ ID NO: 87946 - DNA, 21 bp, Artificial sequence
  SiRNA target sequence
aatctaatgtataattaagtt

SEQ ID NO: 87947 - DNA, 21 bp, Artificial sequence
  SiRNA target sequence
atctaatgtataattaagttg

SEQ ID NO: 87948 - DNA, 21 bp, Artificial sequence
  SiRNA target sequence
tctaatgtataattaagttga

SEQ ID NO: 87949 - DNA, 21 bp, Artificial sequence
  SiRNA target sequence
ctaatgtataattaagttgaa

SEQ ID NO: 87950 - DNA, 21 bp, Artificial sequence
  SiRNA target sequence
taatgtataattaagttgaac

SEQ ID NO: 87951 - DNA, 21 bp, Artificial sequence
  SiRNA target sequence
aatgtataattaagttgaacc

SEQ ID NO: 87952 - DNA, 21 bp, Artificial sequence
  SiRNA target sequence
atgtataattaagttgaacct

SEQ ID NO: 87953 - DNA, 21 bp, Artificial sequence
  SiRNA target sequence
tgtataattaagttgaacctt

SEQ ID NO: 87954 - DNA, 21 bp, Artificial sequence
  SiRNA target sequence
gtataattaagttgaacctta

SEQ ID NO: 87955 - DNA, 21 bp, Artificial sequence
  SiRNA target sequence
tataattaagttgaaccttat

SEQ ID NO: 87956 - DNA, 21 bp, Artificial sequence
  SiRNA target sequence
ataattaagttgaaccttata

SEQ ID NO: 87957 - DNA, 21 bp, Artificial sequence
  SiRNA target sequence
taattaagttgaaccttatat

SEQ ID NO: 87958 - DNA, 21 bp, Artificial sequence
  SiRNA target sequence
aattaagttgaaccttatata

SEQ ID NO: 87959 - DNA, 21 bp, Artificial sequence
  SiRNA target sequence
attaagttgaaccttatatac

SEQ ID NO: 87960 - DNA, 21 bp, Artificial sequence
  SiRNA target sequence
ttaagttgaaccttatatacc

SEQ ID NO: 87961 - DNA, 21 bp, Artificial sequence
  SiRNA target sequence
taagttgaaccttatatacct

SEQ ID NO: 87962 - DNA, 21 bp, Artificial sequence
  SiRNA target sequence
aagttgaaccttatatacctt

SEQ ID NO: 87963 - DNA, 21 bp, Artificial sequence
  SiRNA target sequence
agttgaaccttatataccttt

SEQ ID NO: 87964 - DNA, 21 bp, Artificial sequence
  SiRNA target sequence
gttgaaccttatatacctttt

SEQ ID NO: 87965 - DNA, 21 bp, Artificial sequence
  SiRNA target sequence
ttgaaccttatataccttttt

SEQ ID NO: 87966 - DNA, 21 bp, Artificial sequence
  SiRNA target sequence
tgaaccttatatacctttttc

SEQ ID NO: 87967 - DNA, 21 bp, Artificial sequence
  SiRNA target sequence
gaaccttatatacctttttcc

SEQ ID NO: 87968 - DNA, 21 bp, Artificial sequence
  SiRNA target sequence
aaccttatatacctttttcca

SEQ ID NO: 87969 - DNA, 21 bp, Artificial sequence
  SiRNA target sequence
accttatatacctttttccat

SEQ ID NO: 87970 - DNA, 21 bp, Artificial sequence
  SiRNA target sequence
ccttatatacctttttccatg

SEQ ID NO: 87971 - DNA, 21 bp, Artificial sequence
  SiRNA target sequence
cttatatacctttttccatgt

SEQ ID NO: 87972 - DNA, 21 bp, Artificial sequence
  SiRNA target sequence
ttatatacctttttccatgta

SEQ ID NO: 87973 - DNA, 21 bp, Artificial sequence
  SiRNA target sequence
tatatacctttttccatgtac

SEQ ID NO: 87974 - DNA, 21 bp, Artificial sequence
  SiRNA target sequence
atatacctttttccatgtaca

SEQ ID NO: 87975 - DNA, 21 bp, Artificial sequence
  SiRNA target sequence
tatacctttttccatgtacag

SEQ ID NO: 87976 - DNA, 21 bp, Artificial sequence
  SiRNA target sequence
atacctttttccatgtacagg

SEQ ID NO: 87977 - DNA, 21 bp, Artificial sequence
  SiRNA target sequence
tacctttttccatgtacagga

SEQ ID NO: 87978 - DNA, 21 bp, Artificial sequence
  SiRNA target sequence
acctttttccatgtacaggaa

SEQ ID NO: 87979 - DNA, 21 bp, Artificial sequence
  SiRNA target sequence
cctttttccatgtacaggaaa

SEQ ID NO: 87980 - DNA, 21 bp, Artificial sequence
  SiRNA target sequence
ctttttccatgtacaggaaag

SEQ ID NO: 87981 - DNA, 21 bp, Artificial sequence
  SiRNA target sequence
tttttccatgtacaggaaagg

SEQ ID NO: 87982 - DNA, 21 bp, Artificial sequence
  SiRNA target sequence
ttttccatgtacaggaaaggt

SEQ ID NO: 87983 - DNA, 21 bp, Artificial sequence
  SiRNA target sequence
tttccatgtacaggaaaggtt

SEQ ID NO: 87984 - DNA, 21 bp, Artificial sequence
  SiRNA target sequence
ttccatgtacaggaaaggttt

SEQ ID NO: 87985 - DNA, 21 bp, Artificial sequence
  SiRNA target sequence
tccatgtacaggaaaggtttt

SEQ ID NO: 87986 - DNA, 21 bp, Artificial sequence
  SiRNA target sequence
ccatgtacaggaaaggttttc

SEQ ID NO: 87987 - DNA, 21 bp, Artificial sequence
  SiRNA target sequence
catgtacaggaaaggttttca

SEQ ID NO: 87988 - DNA, 21 bp, Artificial sequence
  SiRNA target sequence
atgtacaggaaaggttttcaa

SEQ ID NO: 87989 - DNA, 21 bp, Artificial sequence
  SiRNA target sequence
tgtacaggaaaggttttcaat

SEQ ID NO: 87990 - DNA, 21 bp, Artificial sequence
  SiRNA target sequence
gtacaggaaaggttttcaata

SEQ ID NO: 87991 - DNA, 21 bp, Artificial sequence
  SiRNA target sequence
tacaggaaaggttttcaatat

SEQ ID NO: 87992 - DNA, 21 bp, Artificial sequence
  SiRNA target sequence
acaggaaaggttttcaatatt

SEQ ID NO: 87993 - DNA, 21 bp, Artificial sequence
  SiRNA target sequence
caggaaaggttttcaatattt

SEQ ID NO: 87994 - DNA, 21 bp, Artificial sequence
  SiRNA target sequence
aggaaaggttttcaatattta

SEQ ID NO: 87995 - DNA, 21 bp, Artificial sequence
  SiRNA target sequence
ggaaaggttttcaatatttag

SEQ ID NO: 87996 - DNA, 21 bp, Artificial sequence
  SiRNA target sequence
gaaaggttttcaatatttagt

SEQ ID NO: 87997 - DNA, 21 bp, Artificial sequence
  SiRNA target sequence
aaaggttttcaatatttagta

SEQ ID NO: 87998 - DNA, 21 bp, Artificial sequence
  SiRNA target sequence
aaggttttcaatatttagtat

SEQ ID NO: 87999 - DNA, 21 bp, Artificial sequence
  SiRNA target sequence
aggttttcaatatttagtata

SEQ ID NO: 88000 - DNA, 21 bp, Artificial sequence
  SiRNA target sequence
ggttttcaatatttagtatat

SEQ ID NO: 88001 - DNA, 21 bp, Artificial sequence
  SiRNA target sequence
gttttcaatatttagtatatt

SEQ ID NO: 88002 - DNA, 21 bp, Artificial sequence
  SiRNA target sequence
ttttcaatatttagtatattt

SEQ ID NO: 88003 - DNA, 21 bp, Artificial sequence
  SiRNA target sequence
tttcaatatttagtatatttg

SEQ ID NO: 88004 - DNA, 21 bp, Artificial sequence
  SiRNA target sequence
ttcaatatttagtatatttgt

SEQ ID NO: 88005 - DNA, 21 bp, Artificial sequence
  SiRNA target sequence
tcaatatttagtatatttgta

SEQ ID NO: 88006 - DNA, 21 bp, Artificial sequence
  SiRNA target sequence
caatatttagtatatttgtat

SEQ ID NO: 88007 - DNA, 21 bp, Artificial sequence
  SiRNA target sequence
aatatttagtatatttgtatc

SEQ ID NO: 88008 - DNA, 21 bp, Artificial sequence
  SiRNA target sequence
atatttagtatatttgtatct

SEQ ID NO: 88009 - DNA, 21 bp, Artificial sequence
  SiRNA target sequence
tatttagtatatttgtatcta

SEQ ID NO: 88010 - DNA, 21 bp, Artificial sequence
  SiRNA target sequence
atttagtatatttgtatctat

SEQ ID NO: 88011 - DNA, 21 bp, Artificial sequence
  SiRNA target sequence
tttagtatatttgtatctatc

SEQ ID NO: 88012 - DNA, 21 bp, Artificial sequence
  SiRNA target sequence
ttagtatatttgtatctatca

SEQ ID NO: 88013 - DNA, 21 bp, Artificial sequence
  SiRNA target sequence
tagtatatttgtatctatcaa

SEQ ID NO: 88014 - DNA, 21 bp, Artificial sequence
  SiRNA target sequence
agtatatttgtatctatcaaa

SEQ ID NO: 88015 - DNA, 21 bp, Artificial sequence
  SiRNA target sequence
gtatatttgtatctatcaaat

SEQ ID NO: 88016 - DNA, 21 bp, Artificial sequence
  SiRNA target sequence
tatatttgtatctatcaaatt

SEQ ID NO: 88017 - DNA, 21 bp, Artificial sequence
  SiRNA target sequence
atatttgtatctatcaaattt

SEQ ID NO: 88018 - DNA, 21 bp, Artificial sequence
  SiRNA target sequence
tatttgtatctatcaaattta

SEQ ID NO: 88019 - DNA, 21 bp, Artificial sequence
  SiRNA target sequence
atttgtatctatcaaatttat

SEQ ID NO: 88020 - DNA, 21 bp, Artificial sequence
  SiRNA target sequence
tttgtatctatcaaatttata

SEQ ID NO: 88021 - DNA, 21 bp, Artificial sequence
  SiRNA target sequence
ttgtatctatcaaatttatat

SEQ ID NO: 88022 - DNA, 21 bp, Artificial sequence
  SiRNA target sequence
tgtatctatcaaatttatatt

SEQ ID NO: 88023 - DNA, 21 bp, Artificial sequence
  SiRNA target sequence
gtatctatcaaatttatattc

SEQ ID NO: 88024 - DNA, 21 bp, Artificial sequence
  SiRNA target sequence
tatctatcaaatttatattct

SEQ ID NO: 88025 - DNA, 21 bp, Artificial sequence
  SiRNA target sequence
atctatcaaatttatattctc

SEQ ID NO: 88026 - DNA, 21 bp, Artificial sequence
  SiRNA target sequence
tctatcaaatttatattctcg

SEQ ID NO: 88027 - DNA, 21 bp, Artificial sequence
  SiRNA target sequence
ctatcaaatttatattctcgt

SEQ ID NO: 88028 - DNA, 21 bp, Artificial sequence
  SiRNA target sequence
tatcaaatttatattctcgtt

SEQ ID NO: 88029 - DNA, 21 bp, Artificial sequence
  SiRNA target sequence
atcaaatttatattctcgttt

SEQ ID NO: 88030 - DNA, 21 bp, Artificial sequence
  SiRNA target sequence
tcaaatttatattctcgtttg

SEQ ID NO: 88031 - DNA, 21 bp, Artificial sequence
  SiRNA target sequence
caaatttatattctcgtttgt

SEQ ID NO: 88032 - DNA, 21 bp, Artificial sequence
  SiRNA target sequence
aaatttatattctcgtttgtc

SEQ ID NO: 88033 - DNA, 21 bp, Artificial sequence
  SiRNA target sequence
aatttatattctcgtttgtct

SEQ ID NO: 88034 - DNA, 21 bp, Artificial sequence
  SiRNA target sequence
atttatattctcgtttgtctt

SEQ ID NO: 88035 - DNA, 21 bp, Artificial sequence
  SiRNA target sequence
tttatattctcgtttgtcttt

SEQ ID NO: 88036 - DNA, 21 bp, Artificial sequence
  SiRNA target sequence
ttatattctcgtttgtcttta

SEQ ID NO: 88037 - DNA, 21 bp, Artificial sequence
  SiRNA target sequence
tatattctcgtttgtctttat

SEQ ID NO: 88038 - DNA, 21 bp, Artificial sequence
  SiRNA target sequence
atattctcgtttgtctttatt

SEQ ID NO: 88039 - DNA, 21 bp, Artificial sequence
  SiRNA target sequence
tattctcgtttgtctttattt

SEQ ID NO: 88040 - DNA, 21 bp, Artificial sequence
  SiRNA target sequence
attctcgtttgtctttatttt

SEQ ID NO: 88041 - DNA, 21 bp, Artificial sequence
  SiRNA target sequence
ttctcgtttgtctttatttta

SEQ ID NO: 88042 - DNA, 21 bp, Artificial sequence
  SiRNA target sequence
tctcgtttgtctttattttat

SEQ ID NO: 88043 - DNA, 21 bp, Artificial sequence
  SiRNA target sequence
ctcgtttgtctttattttata

SEQ ID NO: 88044 - DNA, 21 bp, Artificial sequence
  SiRNA target sequence
tcgtttgtctttattttataa

SEQ ID NO: 88045 - DNA, 21 bp, Artificial sequence
  SiRNA target sequence
cgtttgtctttattttataag

SEQ ID NO: 88046 - DNA, 21 bp, Artificial sequence
  SiRNA target sequence
gtttgtctttattttataaga

SEQ ID NO: 88047 - DNA, 21 bp, Artificial sequence
  SiRNA target sequence
tttgtctttattttataagaa

SEQ ID NO: 88048 - DNA, 21 bp, Artificial sequence
  SiRNA target sequence
ttgtctttattttataagaac

SEQ ID NO: 88049 - DNA, 21 bp, Artificial sequence
  SiRNA target sequence
tgtctttattttataagaacc

SEQ ID NO: 88050 - DNA, 21 bp, Artificial sequence
  SiRNA target sequence
gtctttattttataagaacct

SEQ ID NO: 88051 - DNA, 21 bp, Artificial sequence
  SiRNA target sequence
tctttattttataagaacctg

SEQ ID NO: 88052 - DNA, 21 bp, Artificial sequence
  SiRNA target sequence
ctttattttataagaacctgt

SEQ ID NO: 88053 - DNA, 21 bp, Artificial sequence
  SiRNA target sequence
tttattttataagaacctgta

SEQ ID NO: 88054 - DNA, 21 bp, Artificial sequence
  SiRNA target sequence
ttattttataagaacctgtat

SEQ ID NO: 88055 - DNA, 21 bp, Artificial sequence
  SiRNA target sequence
tattttataagaacctgtata

SEQ ID NO: 88056 - DNA, 21 bp, Artificial sequence
  SiRNA target sequence
attttataagaacctgtatag

SEQ ID NO: 88057 - DNA, 21 bp, Artificial sequence
  SiRNA target sequence
ttttataagaacctgtatagt

SEQ ID NO: 88058 - DNA, 21 bp, Artificial sequence
  SiRNA target sequence
tttataagaacctgtatagtt

SEQ ID NO: 88059 - DNA, 21 bp, Artificial sequence
  SiRNA target sequence
ttataagaacctgtatagttg

SEQ ID NO: 88060 - DNA, 21 bp, Artificial sequence
  SiRNA target sequence
tataagaacctgtatagttgg

SEQ ID NO: 88061 - DNA, 21 bp, Artificial sequence
  SiRNA target sequence
ataagaacctgtatagttggt

SEQ ID NO: 88062 - DNA, 21 bp, Artificial sequence
  SiRNA target sequence
taagaacctgtatagttggtc

SEQ ID NO: 88063 - DNA, 21 bp, Artificial sequence
  SiRNA target sequence
aagaacctgtatagttggtct

SEQ ID NO: 88064 - DNA, 21 bp, Artificial sequence
  SiRNA target sequence
agaacctgtatagttggtctt

SEQ ID NO: 88065 - DNA, 21 bp, Artificial sequence
  SiRNA target sequence
gaacctgtatagttggtcttt

SEQ ID NO: 88066 - DNA, 21 bp, Artificial sequence
  SiRNA target sequence
aacctgtatagttggtctttt

SEQ ID NO: 88067 - DNA, 21 bp, Artificial sequence
  SiRNA target sequence
acctgtatagttggtcttttt

SEQ ID NO: 88068 - DNA, 21 bp, Artificial sequence
  SiRNA target sequence
cctgtatagttggtcttttta

SEQ ID NO: 88069 - DNA, 21 bp, Artificial sequence
  SiRNA target sequence
ctgtatagttggtctttttaa

SEQ ID NO: 88070 - DNA, 21 bp, Artificial sequence
  SiRNA target sequence
tgtatagttggtctttttaat

SEQ ID NO: 88071 - DNA, 21 bp, Artificial sequence
  SiRNA target sequence
gtatagttggtctttttaatt

SEQ ID NO: 88072 - DNA, 21 bp, Artificial sequence
  SiRNA target sequence
tatagttggtctttttaatta

SEQ ID NO: 88073 - DNA, 21 bp, Artificial sequence
  SiRNA target sequence
atagttggtctttttaattat

SEQ ID NO: 88074 - DNA, 21 bp, Artificial sequence
  SiRNA target sequence
tagttggtctttttaattata

SEQ ID NO: 88075 - DNA, 21 bp, Artificial sequence
  SiRNA target sequence
agttggtctttttaattataa

SEQ ID NO: 88076 - DNA, 21 bp, Artificial sequence
  SiRNA target sequence
gttggtctttttaattataag

SEQ ID NO: 88077 - DNA, 21 bp, Artificial sequence
  SiRNA target sequence
ttggtctttttaattataagc

SEQ ID NO: 88078 - DNA, 21 bp, Artificial sequence
  SiRNA target sequence
tggtctttttaattataagct

SEQ ID NO: 88079 - DNA, 21 bp, Artificial sequence
  SiRNA target sequence
ggtctttttaattataagctt

SEQ ID NO: 88080 - DNA, 21 bp, Artificial sequence
  SiRNA target sequence
gtctttttaattataagctta

SEQ ID NO: 88081 - DNA, 21 bp, Artificial sequence
  SiRNA target sequence
tctttttaattataagcttat

SEQ ID NO: 88082 - DNA, 21 bp, Artificial sequence
  SiRNA target sequence
ctttttaattataagcttatt

SEQ ID NO: 88083 - DNA, 21 bp, Artificial sequence
  SiRNA target sequence
tttttaattataagcttattg

SEQ ID NO: 88084 - DNA, 21 bp, Artificial sequence
  SiRNA target sequence
ttttaattataagcttattga

SEQ ID NO: 88085 - DNA, 21 bp, Artificial sequence
  SiRNA target sequence
tttaattataagcttattgaa

SEQ ID NO: 88086 - DNA, 21 bp, Artificial sequence
  SiRNA target sequence
ttaattataagcttattgaaa

SEQ ID NO: 88087 - DNA, 21 bp, Artificial sequence
  SiRNA target sequence
taattataagcttattgaaat

SEQ ID NO: 88088 - DNA, 21 bp, Artificial sequence
  SiRNA target sequence
aattataagcttattgaaatt

SEQ ID NO: 88089 - DNA, 21 bp, Artificial sequence
  SiRNA target sequence
attataagcttattgaaattt

SEQ ID NO: 88090 - DNA, 21 bp, Artificial sequence
  SiRNA target sequence
ttataagcttattgaaatttc

SEQ ID NO: 88091 - DNA, 21 bp, Artificial sequence
  SiRNA target sequence
tataagcttattgaaatttct

SEQ ID NO: 88092 - DNA, 21 bp, Artificial sequence
  SiRNA target sequence
ataagcttattgaaatttcta

SEQ ID NO: 88093 - DNA, 21 bp, Artificial sequence
  SiRNA target sequence
taagcttattgaaatttctaa

SEQ ID NO: 88094 - DNA, 21 bp, Artificial sequence
  SiRNA target sequence
aagcttattgaaatttctaat

SEQ ID NO: 88095 - DNA, 21 bp, Artificial sequence
  SiRNA target sequence
agcttattgaaatttctaata

SEQ ID NO: 88096 - DNA, 21 bp, Artificial sequence
  SiRNA target sequence
gcttattgaaatttctaatat

SEQ ID NO: 88097 - DNA, 21 bp, Artificial sequence
  SiRNA target sequence
cttattgaaatttctaatatt

SEQ ID NO: 88098 - DNA, 21 bp, Artificial sequence
  SiRNA target sequence
ttattgaaatttctaatattt

SEQ ID NO: 88099 - DNA, 21 bp, Artificial sequence
  SiRNA target sequence
tattgaaatttctaatattta

SEQ ID NO: 88100 - DNA, 21 bp, Artificial sequence
  SiRNA target sequence
attgaaatttctaatatttaa

SEQ ID NO: 88101 - DNA, 21 bp, Artificial sequence
  SiRNA target sequence
ttgaaatttctaatatttaaa

SEQ ID NO: 88102 - DNA, 21 bp, Artificial sequence
  SiRNA target sequence
tgaaatttctaatatttaaag

SEQ ID NO: 88103 - DNA, 21 bp, Artificial sequence
  SiRNA target sequence
gaaatttctaatatttaaagg

SEQ ID NO: 88104 - DNA, 21 bp, Artificial sequence
  SiRNA target sequence
aaatttctaatatttaaagga

SEQ ID NO: 88105 - DNA, 21 bp, Artificial sequence
  SiRNA target sequence
aatttctaatatttaaaggaa

SEQ ID NO: 88106 - DNA, 21 bp, Artificial sequence
  SiRNA target sequence
atttctaatatttaaaggaac

SEQ ID NO: 88107 - DNA, 21 bp, Artificial sequence
  SiRNA target sequence
tttctaatatttaaaggaaca

SEQ ID NO: 88108 - DNA, 21 bp, Artificial sequence
  SiRNA target sequence
ttctaatatttaaaggaacaa

SEQ ID NO: 88109 - DNA, 21 bp, Artificial sequence
  SiRNA target sequence
tctaatatttaaaggaacaaa

SEQ ID NO: 88110 - DNA, 21 bp, Artificial sequence
  SiRNA target sequence
ctaatatttaaaggaacaaaa

SEQ ID NO: 88111 - DNA, 21 bp, Artificial sequence
  SiRNA target sequence
taatatttaaaggaacaaaat

SEQ ID NO: 88112 - DNA, 21 bp, Artificial sequence
  SiRNA target sequence
aatatttaaaggaacaaaatc

SEQ ID NO: 88113 - DNA, 21 bp, Artificial sequence
  SiRNA target sequence
atatttaaaggaacaaaatct

SEQ ID NO: 88114 - DNA, 21 bp, Artificial sequence
  SiRNA target sequence
tatttaaaggaacaaaatcta

SEQ ID NO: 88115 - DNA, 21 bp, Artificial sequence
  SiRNA target sequence
atttaaaggaacaaaatctac

SEQ ID NO: 88116 - DNA, 21 bp, Artificial sequence
  SiRNA target sequence
tttaaaggaacaaaatctaca

SEQ ID NO: 88117 - DNA, 21 bp, Artificial sequence
  SiRNA target sequence
ttaaaggaacaaaatctacat

SEQ ID NO: 88118 - DNA, 21 bp, Artificial sequence
  SiRNA target sequence
taaaggaacaaaatctacatt

SEQ ID NO: 88119 - DNA, 21 bp, Artificial sequence
  SiRNA target sequence
aaaggaacaaaatctacattt

SEQ ID NO: 88120 - DNA, 21 bp, Artificial sequence
  SiRNA target sequence
aaggaacaaaatctacattta

SEQ ID NO: 88121 - DNA, 21 bp, Artificial sequence
  SiRNA target sequence
aggaacaaaatctacatttag

SEQ ID NO: 88122 - DNA, 21 bp, Artificial sequence
  SiRNA target sequence
ggaacaaaatctacatttaga

SEQ ID NO: 88123 - DNA, 21 bp, Artificial sequence
  SiRNA target sequence
gaacaaaatctacatttagat

SEQ ID NO: 88124 - DNA, 21 bp, Artificial sequence
  SiRNA target sequence
aacaaaatctacatttagatt

SEQ ID NO: 88125 - DNA, 21 bp, Artificial sequence
  SiRNA target sequence
acaaaatctacatttagatta

SEQ ID NO: 88126 - DNA, 21 bp, Artificial sequence
  SiRNA target sequence
caaaatctacatttagattat

SEQ ID NO: 88127 - DNA, 21 bp, Artificial sequence
  SiRNA target sequence
aaaatctacatttagattata

SEQ ID NO: 88128 - DNA, 21 bp, Artificial sequence
  SiRNA target sequence
aaatctacatttagattatat

SEQ ID NO: 88129 - DNA, 21 bp, Artificial sequence
  SiRNA target sequence
aatctacatttagattatatt

SEQ ID NO: 88130 - DNA, 21 bp, Artificial sequence
  SiRNA target sequence
atctacatttagattatattc

SEQ ID NO: 88131 - DNA, 21 bp, Artificial sequence
  SiRNA target sequence
tctacatttagattatattct

SEQ ID NO: 88132 - DNA, 21 bp, Artificial sequence
  SiRNA target sequence
ctacatttagattatattcta

SEQ ID NO: 88133 - DNA, 21 bp, Artificial sequence
  SiRNA target sequence
tacatttagattatattctaa

SEQ ID NO: 88134 - DNA, 21 bp, Artificial sequence
  SiRNA target sequence
acatttagattatattctaat

SEQ ID NO: 88135 - DNA, 21 bp, Artificial sequence
  SiRNA target sequence
catttagattatattctaatt

SEQ ID NO: 88136 - DNA, 21 bp, Artificial sequence
  SiRNA target sequence
atttagattatattctaattt

SEQ ID NO: 88137 - DNA, 21 bp, Artificial sequence
  SiRNA target sequence
tttagattatattctaattta

SEQ ID NO: 88138 - DNA, 21 bp, Artificial sequence
  SiRNA target sequence
ttagattatattctaatttat

SEQ ID NO: 88139 - DNA, 21 bp, Artificial sequence
  SiRNA target sequence
tagattatattctaatttatt

SEQ ID NO: 88140 - DNA, 21 bp, Artificial sequence
  SiRNA target sequence
agattatattctaatttattg

SEQ ID NO: 88141 - DNA, 21 bp, Artificial sequence
  SiRNA target sequence
gattatattctaatttattga

SEQ ID NO: 88142 - DNA, 21 bp, Artificial sequence
  SiRNA target sequence
attatattctaatttattgaa

SEQ ID NO: 88143 - DNA, 21 bp, Artificial sequence
  SiRNA target sequence
ttatattctaatttattgaat

SEQ ID NO: 88144 - DNA, 21 bp, Artificial sequence
  SiRNA target sequence
tatattctaatttattgaatt

SEQ ID NO: 88145 - DNA, 21 bp, Artificial sequence
  SiRNA target sequence
atattctaatttattgaattt

SEQ ID NO: 88146 - DNA, 21 bp, Artificial sequence
  SiRNA target sequence
tattctaatttattgaatttc

SEQ ID NO: 88147 - DNA, 21 bp, Artificial sequence
  SiRNA target sequence
attctaatttattgaatttca

SEQ ID NO: 88148 - DNA, 21 bp, Artificial sequence
  SiRNA target sequence
ttctaatttattgaatttcat

SEQ ID NO: 88149 - DNA, 22 bp, Artificial sequence
  SiRNA target sequence
ttatatccaactatcaaaaaat

SEQ ID NO: 88150 - DNA, 22 bp, Artificial sequence
  SiRNA target sequence
tatatccaactatcaaaaaata

SEQ ID NO: 88151 - DNA, 22 bp, Artificial sequence
  SiRNA target sequence
atatccaactatcaaaaaatag

SEQ ID NO: 88152 - DNA, 22 bp, Artificial sequence
  SiRNA target sequence
tatccaactatcaaaaaatagc

SEQ ID NO: 88153 - DNA, 22 bp, Artificial sequence
  SiRNA target sequence
atccaactatcaaaaaatagcc

SEQ ID NO: 88154 - DNA, 22 bp, Artificial sequence
  SiRNA target sequence
tccaactatcaaaaaatagcct

SEQ ID NO: 88155 - DNA, 22 bp, Artificial sequence
  SiRNA target sequence
ccaactatcaaaaaatagcctc

SEQ ID NO: 88156 - DNA, 22 bp, Artificial sequence
  SiRNA target sequence
caactatcaaaaaatagcctct

SEQ ID NO: 88157 - DNA, 22 bp, Artificial sequence
  SiRNA target sequence
aactatcaaaaaatagcctctt

SEQ ID NO: 88158 - DNA, 22 bp, Artificial sequence
  SiRNA target sequence
actatcaaaaaatagcctcttt

SEQ ID NO: 88159 - DNA, 22 bp, Artificial sequence
  SiRNA target sequence
ctatcaaaaaatagcctctttt

SEQ ID NO: 88160 - DNA, 22 bp, Artificial sequence
  SiRNA target sequence
tatcaaaaaatagcctcttttc

SEQ ID NO: 88161 - DNA, 22 bp, Artificial sequence
  SiRNA target sequence
atcaaaaaatagcctcttttct

SEQ ID NO: 88162 - DNA, 22 bp, Artificial sequence
  SiRNA target sequence
tcaaaaaatagcctcttttctt

SEQ ID NO: 88163 - DNA, 22 bp, Artificial sequence
  SiRNA target sequence
caaaaaatagcctcttttcttt

SEQ ID NO: 88164 - DNA, 22 bp, Artificial sequence
  SiRNA target sequence
aaaaaatagcctcttttctttc

SEQ ID NO: 88165 - DNA, 22 bp, Artificial sequence
  SiRNA target sequence
aaaaatagcctcttttctttca

SEQ ID NO: 88166 - DNA, 22 bp, Artificial sequence
  SiRNA target sequence
aaaatagcctcttttctttcac

SEQ ID NO: 88167 - DNA, 22 bp, Artificial sequence
  SiRNA target sequence
aaatagcctcttttctttcaca

SEQ ID NO: 88168 - DNA, 22 bp, Artificial sequence
  SiRNA target sequence
aatagcctcttttctttcacaa

SEQ ID NO: 88169 - DNA, 22 bp, Artificial sequence
  SiRNA target sequence
atagcctcttttctttcacaat

SEQ ID NO: 88170 - DNA, 22 bp, Artificial sequence
  SiRNA target sequence
tagcctcttttctttcacaatt

SEQ ID NO: 88171 - DNA, 22 bp, Artificial sequence
  SiRNA target sequence
agcctcttttctttcacaattt

SEQ ID NO: 88172 - DNA, 22 bp, Artificial sequence
  SiRNA target sequence
gcctcttttctttcacaatttc

SEQ ID NO: 88173 - DNA, 22 bp, Artificial sequence
  SiRNA target sequence
cctcttttctttcacaatttca

SEQ ID NO: 88174 - DNA, 22 bp, Artificial sequence
  SiRNA target sequence
ctcttttctttcacaatttcag

SEQ ID NO: 88175 - DNA, 22 bp, Artificial sequence
  SiRNA target sequence
tcttttctttcacaatttcaga

SEQ ID NO: 88176 - DNA, 22 bp, Artificial sequence
  SiRNA target sequence
cttttctttcacaatttcagaa

SEQ ID NO: 88177 - DNA, 22 bp, Artificial sequence
  SiRNA target sequence
ttttctttcacaatttcagaaa

SEQ ID NO: 88178 - DNA, 22 bp, Artificial sequence
  SiRNA target sequence
tttctttcacaatttcagaaaa

SEQ ID NO: 88179 - DNA, 22 bp, Artificial sequence
  SiRNA target sequence
ttctttcacaatttcagaaaaa

SEQ ID NO: 88180 - DNA, 22 bp, Artificial sequence
  SiRNA target sequence
tctttcacaatttcagaaaaat

SEQ ID NO: 88181 - DNA, 22 bp, Artificial sequence
  SiRNA target sequence
ctttcacaatttcagaaaaatt

SEQ ID NO: 88182 - DNA, 22 bp, Artificial sequence
  SiRNA target sequence
tttcacaatttcagaaaaattt

SEQ ID NO: 88183 - DNA, 22 bp, Artificial sequence
  SiRNA target sequence
ttcacaatttcagaaaaatttt

SEQ ID NO: 88184 - DNA, 22 bp, Artificial sequence
  SiRNA target sequence
tcacaatttcagaaaaattttc

SEQ ID NO: 88185 - DNA, 22 bp, Artificial sequence
  SiRNA target sequence
cacaatttcagaaaaattttca

SEQ ID NO: 88186 - DNA, 22 bp, Artificial sequence
  SiRNA target sequence
acaatttcagaaaaattttcat

SEQ ID NO: 88187 - DNA, 22 bp, Artificial sequence
  SiRNA target sequence
caatttcagaaaaattttcatt

SEQ ID NO: 88188 - DNA, 22 bp, Artificial sequence
  SiRNA target sequence
aatttcagaaaaattttcatta

SEQ ID NO: 88189 - DNA, 22 bp, Artificial sequence
  SiRNA target sequence
atttcagaaaaattttcattaa

SEQ ID NO: 88190 - DNA, 22 bp, Artificial sequence
  SiRNA target sequence
tttcagaaaaattttcattaaa

SEQ ID NO: 88191 - DNA, 22 bp, Artificial sequence
  SiRNA target sequence
ttcagaaaaattttcattaaaa

SEQ ID NO: 88192 - DNA, 22 bp, Artificial sequence
  SiRNA target sequence
tcagaaaaattttcattaaaaa

SEQ ID NO: 88193 - DNA, 22 bp, Artificial sequence
  SiRNA target sequence
cagaaaaattttcattaaaaat

SEQ ID NO: 88194 - DNA, 22 bp, Artificial sequence
  SiRNA target sequence
agaaaaattttcattaaaaatg

SEQ ID NO: 88195 - DNA, 22 bp, Artificial sequence
  SiRNA target sequence
gaaaaattttcattaaaaatgc

SEQ ID NO: 88196 - DNA, 22 bp, Artificial sequence
  SiRNA target sequence
aaaaattttcattaaaaatgct

SEQ ID NO: 88197 - DNA, 22 bp, Artificial sequence
  SiRNA target sequence
aaaattttcattaaaaatgcta

SEQ ID NO: 88198 - DNA, 22 bp, Artificial sequence
  SiRNA target sequence
aaattttcattaaaaatgctat

SEQ ID NO: 88199 - DNA, 22 bp, Artificial sequence
  SiRNA target sequence
aattttcattaaaaatgctata

SEQ ID NO: 88200 - DNA, 22 bp, Artificial sequence
  SiRNA target sequence
attttcattaaaaatgctataa

SEQ ID NO: 88201 - DNA, 22 bp, Artificial sequence
  SiRNA target sequence
ttttcattaaaaatgctataaa

SEQ ID NO: 88202 - DNA, 22 bp, Artificial sequence
  SiRNA target sequence
tttcattaaaaatgctataaat

SEQ ID NO: 88203 - DNA, 22 bp, Artificial sequence
  SiRNA target sequence
ttcattaaaaatgctataaata

SEQ ID NO: 88204 - DNA, 22 bp, Artificial sequence
  SiRNA target sequence
tcattaaaaatgctataaatag

SEQ ID NO: 88205 - DNA, 22 bp, Artificial sequence
  SiRNA target sequence
cattaaaaatgctataaatagt

SEQ ID NO: 88206 - DNA, 22 bp, Artificial sequence
  SiRNA target sequence
attaaaaatgctataaatagtt

SEQ ID NO: 88207 - DNA, 22 bp, Artificial sequence
  SiRNA target sequence
ttaaaaatgctataaatagttt

SEQ ID NO: 88208 - DNA, 22 bp, Artificial sequence
  SiRNA target sequence
taaaaatgctataaatagtttt

SEQ ID NO: 88209 - DNA, 22 bp, Artificial sequence
  SiRNA target sequence
aaaaatgctataaatagttttt

SEQ ID NO: 88210 - DNA, 22 bp, Artificial sequence
  SiRNA target sequence
aaaatgctataaatagtttttt

SEQ ID NO: 88211 - DNA, 22 bp, Artificial sequence
  SiRNA target sequence
aaatgctataaatagttttttg

SEQ ID NO: 88212 - DNA, 22 bp, Artificial sequence
  SiRNA target sequence
aatgctataaatagttttttgc

SEQ ID NO: 88213 - DNA, 22 bp, Artificial sequence
  SiRNA target sequence
atgctataaatagttttttgca

SEQ ID NO: 88214 - DNA, 22 bp, Artificial sequence
  SiRNA target sequence
tgctataaatagttttttgcat

SEQ ID NO: 88215 - DNA, 22 bp, Artificial sequence
  SiRNA target sequence
gctataaatagttttttgcata

SEQ ID NO: 88216 - DNA, 22 bp, Artificial sequence
  SiRNA target sequence
ctataaatagttttttgcatat

SEQ ID NO: 88217 - DNA, 22 bp, Artificial sequence
  SiRNA target sequence
tataaatagttttttgcatatc

SEQ ID NO: 88218 - DNA, 22 bp, Artificial sequence
  SiRNA target sequence
ataaatagttttttgcatatca

SEQ ID NO: 88219 - DNA, 22 bp, Artificial sequence
  SiRNA target sequence
taaatagttttttgcatatcag

SEQ ID NO: 88220 - DNA, 22 bp, Artificial sequence
  SiRNA target sequence
aaatagttttttgcatatcagg

SEQ ID NO: 88221 - DNA, 22 bp, Artificial sequence
  SiRNA target sequence
aatagttttttgcatatcaggt

SEQ ID NO: 88222 - DNA, 22 bp, Artificial sequence
  SiRNA target sequence
atagttttttgcatatcaggtc

SEQ ID NO: 88223 - DNA, 22 bp, Artificial sequence
  SiRNA target sequence
tagttttttgcatatcaggtcg

SEQ ID NO: 88224 - DNA, 22 bp, Artificial sequence
  SiRNA target sequence
agttttttgcatatcaggtcgg

SEQ ID NO: 88225 - DNA, 22 bp, Artificial sequence
  SiRNA target sequence
gttttttgcatatcaggtcggc

SEQ ID NO: 88226 - DNA, 22 bp, Artificial sequence
  SiRNA target sequence
ttttttgcatatcaggtcggcc

SEQ ID NO: 88227 - DNA, 22 bp, Artificial sequence
  SiRNA target sequence
tttttgcatatcaggtcggcca

SEQ ID NO: 88228 - DNA, 22 bp, Artificial sequence
  SiRNA target sequence
ttttgcatatcaggtcggccac

SEQ ID NO: 88229 - DNA, 22 bp, Artificial sequence
  SiRNA target sequence
tttgcatatcaggtcggccaca

SEQ ID NO: 88230 - DNA, 22 bp, Artificial sequence
  SiRNA target sequence
ttgcatatcaggtcggccacaa

SEQ ID NO: 88231 - DNA, 22 bp, Artificial sequence
  SiRNA target sequence
tgcatatcaggtcggccacaaa

SEQ ID NO: 88232 - DNA, 22 bp, Artificial sequence
  SiRNA target sequence
gcatatcaggtcggccacaaac

SEQ ID NO: 88233 - DNA, 22 bp, Artificial sequence
  SiRNA target sequence
catatcaggtcggccacaaaca

SEQ ID NO: 88234 - DNA, 22 bp, Artificial sequence
  SiRNA target sequence
atatcaggtcggccacaaacat

SEQ ID NO: 88235 - DNA, 22 bp, Artificial sequence
  SiRNA target sequence
tatcaggtcggccacaaacata

SEQ ID NO: 88236 - DNA, 22 bp, Artificial sequence
  SiRNA target sequence
atcaggtcggccacaaacataa

SEQ ID NO: 88237 - DNA, 22 bp, Artificial sequence
  SiRNA target sequence
tcaggtcggccacaaacataaa

SEQ ID NO: 88238 - DNA, 22 bp, Artificial sequence
  SiRNA target sequence
caggtcggccacaaacataaac

SEQ ID NO: 88239 - DNA, 22 bp, Artificial sequence
  SiRNA target sequence
aggtcggccacaaacataaacc

SEQ ID NO: 88240 - DNA, 22 bp, Artificial sequence
  SiRNA target sequence
ggtcggccacaaacataaacca

SEQ ID NO: 88241 - DNA, 22 bp, Artificial sequence
  SiRNA target sequence
gtcggccacaaacataaaccaa

SEQ ID NO: 88242 - DNA, 22 bp, Artificial sequence
  SiRNA target sequence
tcggccacaaacataaaccaaa

SEQ ID NO: 88243 - DNA, 22 bp, Artificial sequence
  SiRNA target sequence
cggccacaaacataaaccaaac

SEQ ID NO: 88244 - DNA, 22 bp, Artificial sequence
  SiRNA target sequence
ggccacaaacataaaccaaaca

SEQ ID NO: 88245 - DNA, 22 bp, Artificial sequence
  SiRNA target sequence
gccacaaacataaaccaaacat

SEQ ID NO: 88246 - DNA, 22 bp, Artificial sequence
  SiRNA target sequence
ccacaaacataaaccaaacatc

SEQ ID NO: 88247 - DNA, 22 bp, Artificial sequence
  SiRNA target sequence
cacaaacataaaccaaacatcc

SEQ ID NO: 88248 - DNA, 22 bp, Artificial sequence
  SiRNA target sequence
acaaacataaaccaaacatccg

SEQ ID NO: 88249 - DNA, 22 bp, Artificial sequence
  SiRNA target sequence
caaacataaaccaaacatccgt

SEQ ID NO: 88250 - DNA, 22 bp, Artificial sequence
  SiRNA target sequence
aaacataaaccaaacatccgtc

SEQ ID NO: 88251 - DNA, 22 bp, Artificial sequence
  SiRNA target sequence
aacataaaccaaacatccgtct

SEQ ID NO: 88252 - DNA, 22 bp, Artificial sequence
  SiRNA target sequence
acataaaccaaacatccgtctt

SEQ ID NO: 88253 - DNA, 22 bp, Artificial sequence
  SiRNA target sequence
cataaaccaaacatccgtcttt

SEQ ID NO: 88254 - DNA, 22 bp, Artificial sequence
  SiRNA target sequence
ataaaccaaacatccgtcttta

SEQ ID NO: 88255 - DNA, 22 bp, Artificial sequence
  SiRNA target sequence
taaaccaaacatccgtctttaa

SEQ ID NO: 88256 - DNA, 22 bp, Artificial sequence
  SiRNA target sequence
aaaccaaacatccgtctttaat

SEQ ID NO: 88257 - DNA, 22 bp, Artificial sequence
  SiRNA target sequence
aaccaaacatccgtctttaatg

SEQ ID NO: 88258 - DNA, 22 bp, Artificial sequence
  SiRNA target sequence
accaaacatccgtctttaatgt

SEQ ID NO: 88259 - DNA, 22 bp, Artificial sequence
  SiRNA target sequence
ccaaacatccgtctttaatgta

SEQ ID NO: 88260 - DNA, 22 bp, Artificial sequence
  SiRNA target sequence
caaacatccgtctttaatgtat

SEQ ID NO: 88261 - DNA, 22 bp, Artificial sequence
  SiRNA target sequence
aaacatccgtctttaatgtatg

SEQ ID NO: 88262 - DNA, 22 bp, Artificial sequence
  SiRNA target sequence
aacatccgtctttaatgtatgt

SEQ ID NO: 88263 - DNA, 22 bp, Artificial sequence
  SiRNA target sequence
acatccgtctttaatgtatgtt

SEQ ID NO: 88264 - DNA, 22 bp, Artificial sequence
  SiRNA target sequence
catccgtctttaatgtatgttt

SEQ ID NO: 88265 - DNA, 22 bp, Artificial sequence
  SiRNA target sequence
atccgtctttaatgtatgtttt

SEQ ID NO: 88266 - DNA, 22 bp, Artificial sequence
  SiRNA target sequence
tccgtctttaatgtatgttttt

SEQ ID NO: 88267 - DNA, 22 bp, Artificial sequence
  SiRNA target sequence
ccgtctttaatgtatgttttta

SEQ ID NO: 88268 - DNA, 22 bp, Artificial sequence
  SiRNA target sequence
cgtctttaatgtatgtttttat

SEQ ID NO: 88269 - DNA, 22 bp, Artificial sequence
  SiRNA target sequence
gtctttaatgtatgtttttatc

SEQ ID NO: 88270 - DNA, 22 bp, Artificial sequence
  SiRNA target sequence
tctttaatgtatgtttttatct

SEQ ID NO: 88271 - DNA, 22 bp, Artificial sequence
  SiRNA target sequence
ctttaatgtatgtttttatctc

SEQ ID NO: 88272 - DNA, 22 bp, Artificial sequence
  SiRNA target sequence
tttaatgtatgtttttatctca

SEQ ID NO: 88273 - DNA, 22 bp, Artificial sequence
  SiRNA target sequence
ttaatgtatgtttttatctcat

SEQ ID NO: 88274 - DNA, 22 bp, Artificial sequence
  SiRNA target sequence
taatgtatgtttttatctcatt

SEQ ID NO: 88275 - DNA, 22 bp, Artificial sequence
  SiRNA target sequence
aatgtatgtttttatctcattt

SEQ ID NO: 88276 - DNA, 22 bp, Artificial sequence
  SiRNA target sequence
atgtatgtttttatctcattta

SEQ ID NO: 88277 - DNA, 22 bp, Artificial sequence
  SiRNA target sequence
tgtatgtttttatctcatttaa

SEQ ID NO: 88278 - DNA, 22 bp, Artificial sequence
  SiRNA target sequence
gtatgtttttatctcatttaaa

SEQ ID NO: 88279 - DNA, 22 bp, Artificial sequence
  SiRNA target sequence
tatgtttttatctcatttaaat

SEQ ID NO: 88280 - DNA, 22 bp, Artificial sequence
  SiRNA target sequence
atgtttttatctcatttaaatt

SEQ ID NO: 88281 - DNA, 22 bp, Artificial sequence
  SiRNA target sequence
tgtttttatctcatttaaattt

SEQ ID NO: 88282 - DNA, 22 bp, Artificial sequence
  SiRNA target sequence
gtttttatctcatttaaatttt

SEQ ID NO: 88283 - DNA, 22 bp, Artificial sequence
  SiRNA target sequence
tttttatctcatttaaattttg

SEQ ID NO: 88284 - DNA, 22 bp, Artificial sequence
  SiRNA target sequence
ttttatctcatttaaattttgt

SEQ ID NO: 88285 - DNA, 22 bp, Artificial sequence
  SiRNA target sequence
tttatctcatttaaattttgta

SEQ ID NO: 88286 - DNA, 22 bp, Artificial sequence
  SiRNA target sequence
ttatctcatttaaattttgtaa

SEQ ID NO: 88287 - DNA, 22 bp, Artificial sequence
  SiRNA target sequence
tatctcatttaaattttgtaat

SEQ ID NO: 88288 - DNA, 22 bp, Artificial sequence
  SiRNA target sequence
atctcatttaaattttgtaata

SEQ ID NO: 88289 - DNA, 22 bp, Artificial sequence
  SiRNA target sequence
tctcatttaaattttgtaataa

SEQ ID NO: 88290 - DNA, 22 bp, Artificial sequence
  SiRNA target sequence
ctcatttaaattttgtaataaa

SEQ ID NO: 88291 - DNA, 22 bp, Artificial sequence
  SiRNA target sequence
tcatttaaattttgtaataaat

SEQ ID NO: 88292 - DNA, 22 bp, Artificial sequence
  SiRNA target sequence
catttaaattttgtaataaata

SEQ ID NO: 88293 - DNA, 22 bp, Artificial sequence
  SiRNA target sequence
atttaaattttgtaataaataa

SEQ ID NO: 88294 - DNA, 22 bp, Artificial sequence
  SiRNA target sequence
tttaaattttgtaataaataat

SEQ ID NO: 88295 - DNA, 22 bp, Artificial sequence
  SiRNA target sequence
ttaaattttgtaataaataatc

SEQ ID NO: 88296 - DNA, 22 bp, Artificial sequence
  SiRNA target sequence
taaattttgtaataaataatca

SEQ ID NO: 88297 - DNA, 22 bp, Artificial sequence
  SiRNA target sequence
aaattttgtaataaataatcag

SEQ ID NO: 88298 - DNA, 22 bp, Artificial sequence
  SiRNA target sequence
aattttgtaataaataatcagt

SEQ ID NO: 88299 - DNA, 22 bp, Artificial sequence
  SiRNA target sequence
attttgtaataaataatcagta

SEQ ID NO: 88300 - DNA, 22 bp, Artificial sequence
  SiRNA target sequence
ttttgtaataaataatcagtaa

SEQ ID NO: 88301 - DNA, 22 bp, Artificial sequence
  SiRNA target sequence
tttgtaataaataatcagtaac

SEQ ID NO: 88302 - DNA, 22 bp, Artificial sequence
  SiRNA target sequence
ttgtaataaataatcagtaaca

SEQ ID NO: 88303 - DNA, 22 bp, Artificial sequence
  SiRNA target sequence
tgtaataaataatcagtaacat

SEQ ID NO: 88304 - DNA, 22 bp, Artificial sequence
  SiRNA target sequence
gtaataaataatcagtaacata

SEQ ID NO: 88305 - DNA, 22 bp, Artificial sequence
  SiRNA target sequence
taataaataatcagtaacataa

SEQ ID NO: 88306 - DNA, 22 bp, Artificial sequence
  SiRNA target sequence
aataaataatcagtaacataaa

SEQ ID NO: 88307 - DNA, 22 bp, Artificial sequence
  SiRNA target sequence
ataaataatcagtaacataaat

SEQ ID NO: 88308 - DNA, 22 bp, Artificial sequence
  SiRNA target sequence
taaataatcagtaacataaatt

SEQ ID NO: 88309 - DNA, 22 bp, Artificial sequence
  SiRNA target sequence
aaataatcagtaacataaattt

SEQ ID NO: 88310 - DNA, 22 bp, Artificial sequence
  SiRNA target sequence
aataatcagtaacataaatttt

SEQ ID NO: 88311 - DNA, 22 bp, Artificial sequence
  SiRNA target sequence
ataatcagtaacataaatttta

SEQ ID NO: 88312 - DNA, 22 bp, Artificial sequence
  SiRNA target sequence
taatcagtaacataaattttat

SEQ ID NO: 88313 - DNA, 22 bp, Artificial sequence
  SiRNA target sequence
aatcagtaacataaattttatt

SEQ ID NO: 88314 - DNA, 22 bp, Artificial sequence
  SiRNA target sequence
atcagtaacataaattttatta

SEQ ID NO: 88315 - DNA, 22 bp, Artificial sequence
  SiRNA target sequence
tcagtaacataaattttattac

SEQ ID NO: 88316 - DNA, 22 bp, Artificial sequence
  SiRNA target sequence
cagtaacataaattttattaca

SEQ ID NO: 88317 - DNA, 22 bp, Artificial sequence
  SiRNA target sequence
agtaacataaattttattacaa

SEQ ID NO: 88318 - DNA, 22 bp, Artificial sequence
  SiRNA target sequence
gtaacataaattttattacaag

SEQ ID NO: 88319 - DNA, 22 bp, Artificial sequence
  SiRNA target sequence
taacataaattttattacaaga

SEQ ID NO: 88320 - DNA, 22 bp, Artificial sequence
  SiRNA target sequence
aacataaattttattacaagat

SEQ ID NO: 88321 - DNA, 22 bp, Artificial sequence
  SiRNA target sequence
acataaattttattacaagata

SEQ ID NO: 88322 - DNA, 22 bp, Artificial sequence
  SiRNA target sequence
cataaattttattacaagataa

SEQ ID NO: 88323 - DNA, 22 bp, Artificial sequence
  SiRNA target sequence
ataaattttattacaagataaa

SEQ ID NO: 88324 - DNA, 22 bp, Artificial sequence
  SiRNA target sequence
taaattttattacaagataaaa

SEQ ID NO: 88325 - DNA, 22 bp, Artificial sequence
  SiRNA target sequence
aaattttattacaagataaaat

SEQ ID NO: 88326 - DNA, 22 bp, Artificial sequence
  SiRNA target sequence
aattttattacaagataaaatt

SEQ ID NO: 88327 - DNA, 22 bp, Artificial sequence
  SiRNA target sequence
attttattacaagataaaattt

SEQ ID NO: 88328 - DNA, 22 bp, Artificial sequence
  SiRNA target sequence
ttttattacaagataaaatttt

SEQ ID NO: 88329 - DNA, 22 bp, Artificial sequence
  SiRNA target sequence
tttattacaagataaaatttta

SEQ ID NO: 88330 - DNA, 22 bp, Artificial sequence
  SiRNA target sequence
ttattacaagataaaattttaa

SEQ ID NO: 88331 - DNA, 22 bp, Artificial sequence
  SiRNA target sequence
tattacaagataaaattttaat

SEQ ID NO: 88332 - DNA, 22 bp, Artificial sequence
  SiRNA target sequence
attacaagataaaattttaata

SEQ ID NO: 88333 - DNA, 22 bp, Artificial sequence
  SiRNA target sequence
ttacaagataaaattttaataa

SEQ ID NO: 88334 - DNA, 22 bp, Artificial sequence
  SiRNA target sequence
tacaagataaaattttaataat

SEQ ID NO: 88335 - DNA, 22 bp, Artificial sequence
  SiRNA target sequence
acaagataaaattttaataatt

SEQ ID NO: 88336 - DNA, 22 bp, Artificial sequence
  SiRNA target sequence
caagataaaattttaataattt

SEQ ID NO: 88337 - DNA, 22 bp, Artificial sequence
  SiRNA target sequence
aagataaaattttaataatttc

SEQ ID NO: 88338 - DNA, 22 bp, Artificial sequence
  SiRNA target sequence
agataaaattttaataatttct

SEQ ID NO: 88339 - DNA, 22 bp, Artificial sequence
  SiRNA target sequence
gataaaattttaataatttctg

SEQ ID NO: 88340 - DNA, 22 bp, Artificial sequence
  SiRNA target sequence
ataaaattttaataatttctgt

SEQ ID NO: 88341 - DNA, 22 bp, Artificial sequence
  SiRNA target sequence
taaaattttaataatttctgtg

SEQ ID NO: 88342 - DNA, 22 bp, Artificial sequence
  SiRNA target sequence
aaaattttaataatttctgtgt

SEQ ID NO: 88343 - DNA, 22 bp, Artificial sequence
  SiRNA target sequence
aaattttaataatttctgtgtt

SEQ ID NO: 88344 - DNA, 22 bp, Artificial sequence
  SiRNA target sequence
aattttaataatttctgtgttt

SEQ ID NO: 88345 - DNA, 22 bp, Artificial sequence
  SiRNA target sequence
attttaataatttctgtgtttt

SEQ ID NO: 88346 - DNA, 22 bp, Artificial sequence
  SiRNA target sequence
ttttaataatttctgtgttttt

SEQ ID NO: 88347 - DNA, 22 bp, Artificial sequence
  SiRNA target sequence
tttaataatttctgtgttttta

SEQ ID NO: 88348 - DNA, 22 bp, Artificial sequence
  SiRNA target sequence
ttaataatttctgtgtttttat

SEQ ID NO: 88349 - DNA, 22 bp, Artificial sequence
  SiRNA target sequence
taataatttctgtgtttttata

SEQ ID NO: 88350 - DNA, 22 bp, Artificial sequence
  SiRNA target sequence
aataatttctgtgtttttatat

SEQ ID NO: 88351 - DNA, 22 bp, Artificial sequence
  SiRNA target sequence
ataatttctgtgtttttatatt

SEQ ID NO: 88352 - DNA, 22 bp, Artificial sequence
  SiRNA target sequence
taatttctgtgtttttatattt

SEQ ID NO: 88353 - DNA, 22 bp, Artificial sequence
  SiRNA target sequence
aatttctgtgtttttatatttt

SEQ ID NO: 88354 - DNA, 22 bp, Artificial sequence
  SiRNA target sequence
atttctgtgtttttatattttg

SEQ ID NO: 88355 - DNA, 22 bp, Artificial sequence
  SiRNA target sequence
tttctgtgtttttatattttgc

SEQ ID NO: 88356 - DNA, 22 bp, Artificial sequence
  SiRNA target sequence
ttctgtgtttttatattttgca

SEQ ID NO: 88357 - DNA, 22 bp, Artificial sequence
  SiRNA target sequence
tctgtgtttttatattttgcat

SEQ ID NO: 88358 - DNA, 22 bp, Artificial sequence
  SiRNA target sequence
ctgtgtttttatattttgcatc

SEQ ID NO: 88359 - DNA, 22 bp, Artificial sequence
  SiRNA target sequence
tgtgtttttatattttgcatct

SEQ ID NO: 88360 - DNA, 22 bp, Artificial sequence
  SiRNA target sequence
gtgtttttatattttgcatctt

SEQ ID NO: 88361 - DNA, 22 bp, Artificial sequence
  SiRNA target sequence
tgtttttatattttgcatcttt

SEQ ID NO: 88362 - DNA, 22 bp, Artificial sequence
  SiRNA target sequence
gtttttatattttgcatcttta

SEQ ID NO: 88363 - DNA, 22 bp, Artificial sequence
  SiRNA target sequence
tttttatattttgcatctttaa

SEQ ID NO: 88364 - DNA, 22 bp, Artificial sequence
  SiRNA target sequence
ttttatattttgcatctttaat

SEQ ID NO: 88365 - DNA, 22 bp, Artificial sequence
  SiRNA target sequence
tttatattttgcatctttaata

SEQ ID NO: 88366 - DNA, 22 bp, Artificial sequence
  SiRNA target sequence
ttatattttgcatctttaataa

SEQ ID NO: 88367 - DNA, 22 bp, Artificial sequence
  SiRNA target sequence
tatattttgcatctttaataag

SEQ ID NO: 88368 - DNA, 22 bp, Artificial sequence
  SiRNA target sequence
atattttgcatctttaataaga

SEQ ID NO: 88369 - DNA, 22 bp, Artificial sequence
  SiRNA target sequence
tattttgcatctttaataagat

SEQ ID NO: 88370 - DNA, 22 bp, Artificial sequence
  SiRNA target sequence
attttgcatctttaataagatc

SEQ ID NO: 88371 - DNA, 22 bp, Artificial sequence
  SiRNA target sequence
ttttgcatctttaataagatca

SEQ ID NO: 88372 - DNA, 22 bp, Artificial sequence
  SiRNA target sequence
tttgcatctttaataagatcat

SEQ ID NO: 88373 - DNA, 22 bp, Artificial sequence
  SiRNA target sequence
ttgcatctttaataagatcatc

SEQ ID NO: 88374 - DNA, 22 bp, Artificial sequence
  SiRNA target sequence
tgcatctttaataagatcatct

SEQ ID NO: 88375 - DNA, 22 bp, Artificial sequence
  SiRNA target sequence
gcatctttaataagatcatctt

SEQ ID NO: 88376 - DNA, 22 bp, Artificial sequence
  SiRNA target sequence
catctttaataagatcatcttc

SEQ ID NO: 88377 - DNA, 22 bp, Artificial sequence
  SiRNA target sequence
atctttaataagatcatcttct

SEQ ID NO: 88378 - DNA, 22 bp, Artificial sequence
  SiRNA target sequence
tctttaataagatcatcttctt

SEQ ID NO: 88379 - DNA, 22 bp, Artificial sequence
  SiRNA target sequence
ctttaataagatcatcttcttg

SEQ ID NO: 88380 - DNA, 22 bp, Artificial sequence
  SiRNA target sequence
tttaataagatcatcttcttga

SEQ ID NO: 88381 - DNA, 22 bp, Artificial sequence
  SiRNA target sequence
ttaataagatcatcttcttgat

SEQ ID NO: 88382 - DNA, 22 bp, Artificial sequence
  SiRNA target sequence
taataagatcatcttcttgatt

SEQ ID NO: 88383 - DNA, 22 bp, Artificial sequence
  SiRNA target sequence
aataagatcatcttcttgattt

SEQ ID NO: 88384 - DNA, 22 bp, Artificial sequence
  SiRNA target sequence
ataagatcatcttcttgatttc

SEQ ID NO: 88385 - DNA, 22 bp, Artificial sequence
  SiRNA target sequence
taagatcatcttcttgatttct

SEQ ID NO: 88386 - DNA, 22 bp, Artificial sequence
  SiRNA target sequence
aagatcatcttcttgatttcta

SEQ ID NO: 88387 - DNA, 22 bp, Artificial sequence
  SiRNA target sequence
agatcatcttcttgatttctaa

SEQ ID NO: 88388 - DNA, 22 bp, Artificial sequence
  SiRNA target sequence
gatcatcttcttgatttctaaa

SEQ ID NO: 88389 - DNA, 22 bp, Artificial sequence
  SiRNA target sequence
atcatcttcttgatttctaaat

SEQ ID NO: 88390 - DNA, 22 bp, Artificial sequence
  SiRNA target sequence
tcatcttcttgatttctaaatc

SEQ ID NO: 88391 - DNA, 22 bp, Artificial sequence
  SiRNA target sequence
catcttcttgatttctaaatcc

SEQ ID NO: 88392 - DNA, 22 bp, Artificial sequence
  SiRNA target sequence
atcttcttgatttctaaatcca

SEQ ID NO: 88393 - DNA, 22 bp, Artificial sequence
  SiRNA target sequence
tcttcttgatttctaaatccat

SEQ ID NO: 88394 - DNA, 22 bp, Artificial sequence
  SiRNA target sequence
cttcttgatttctaaatccata

SEQ ID NO: 88395 - DNA, 22 bp, Artificial sequence
  SiRNA target sequence
ttcttgatttctaaatccatat

SEQ ID NO: 88396 - DNA, 22 bp, Artificial sequence
  SiRNA target sequence
tcttgatttctaaatccatata

SEQ ID NO: 88397 - DNA, 22 bp, Artificial sequence
  SiRNA target sequence
cttgatttctaaatccatatat

SEQ ID NO: 88398 - DNA, 22 bp, Artificial sequence
  SiRNA target sequence
ttgatttctaaatccatatatt

SEQ ID NO: 88399 - DNA, 22 bp, Artificial sequence
  SiRNA target sequence
tgatttctaaatccatatatta

SEQ ID NO: 88400 - DNA, 22 bp, Artificial sequence
  SiRNA target sequence
gatttctaaatccatatattag

SEQ ID NO: 88401 - DNA, 22 bp, Artificial sequence
  SiRNA target sequence
atttctaaatccatatattagt

SEQ ID NO: 88402 - DNA, 22 bp, Artificial sequence
  SiRNA target sequence
tttctaaatccatatattagtt

SEQ ID NO: 88403 - DNA, 22 bp, Artificial sequence
  SiRNA target sequence
ttctaaatccatatattagttt

SEQ ID NO: 88404 - DNA, 22 bp, Artificial sequence
  SiRNA target sequence
tctaaatccatatattagtttg

SEQ ID NO: 88405 - DNA, 22 bp, Artificial sequence
  SiRNA target sequence
ctaaatccatatattagtttga

SEQ ID NO: 88406 - DNA, 22 bp, Artificial sequence
  SiRNA target sequence
taaatccatatattagtttgat

SEQ ID NO: 88407 - DNA, 22 bp, Artificial sequence
  SiRNA target sequence
aaatccatatattagtttgata

SEQ ID NO: 88408 - DNA, 22 bp, Artificial sequence
  SiRNA target sequence
aatccatatattagtttgatat

SEQ ID NO: 88409 - DNA, 22 bp, Artificial sequence
  SiRNA target sequence
atccatatattagtttgatata

SEQ ID NO: 88410 - DNA, 22 bp, Artificial sequence
  SiRNA target sequence
tccatatattagtttgatatat

SEQ ID NO: 88411 - DNA, 22 bp, Artificial sequence
  SiRNA target sequence
ccatatattagtttgatatatt

SEQ ID NO: 88412 - DNA, 22 bp, Artificial sequence
  SiRNA target sequence
catatattagtttgatatattg

SEQ ID NO: 88413 - DNA, 22 bp, Artificial sequence
  SiRNA target sequence
atatattagtttgatatattga

SEQ ID NO: 88414 - DNA, 22 bp, Artificial sequence
  SiRNA target sequence
tatattagtttgatatattgat

SEQ ID NO: 88415 - DNA, 22 bp, Artificial sequence
  SiRNA target sequence
atattagtttgatatattgatc

SEQ ID NO: 88416 - DNA, 22 bp, Artificial sequence
  SiRNA target sequence
tattagtttgatatattgatcg

SEQ ID NO: 88417 - DNA, 22 bp, Artificial sequence
  SiRNA target sequence
attagtttgatatattgatcgt

SEQ ID NO: 88418 - DNA, 22 bp, Artificial sequence
  SiRNA target sequence
ttagtttgatatattgatcgtc

SEQ ID NO: 88419 - DNA, 22 bp, Artificial sequence
  SiRNA target sequence
tagtttgatatattgatcgtct

SEQ ID NO: 88420 - DNA, 22 bp, Artificial sequence
  SiRNA target sequence
agtttgatatattgatcgtctt

SEQ ID NO: 88421 - DNA, 22 bp, Artificial sequence
  SiRNA target sequence
gtttgatatattgatcgtcttc

SEQ ID NO: 88422 - DNA, 22 bp, Artificial sequence
  SiRNA target sequence
tttgatatattgatcgtcttct

SEQ ID NO: 88423 - DNA, 22 bp, Artificial sequence
  SiRNA target sequence
ttgatatattgatcgtcttctt

SEQ ID NO: 88424 - DNA, 22 bp, Artificial sequence
  SiRNA target sequence
tgatatattgatcgtcttcttt

SEQ ID NO: 88425 - DNA, 22 bp, Artificial sequence
  SiRNA target sequence
gatatattgatcgtcttcttta

SEQ ID NO: 88426 - DNA, 22 bp, Artificial sequence
  SiRNA target sequence
atatattgatcgtcttctttat

SEQ ID NO: 88427 - DNA, 22 bp, Artificial sequence
  SiRNA target sequence
tatattgatcgtcttctttatt

SEQ ID NO: 88428 - DNA, 22 bp, Artificial sequence
  SiRNA target sequence
atattgatcgtcttctttattt

SEQ ID NO: 88429 - DNA, 22 bp, Artificial sequence
  SiRNA target sequence
tattgatcgtcttctttatttt

SEQ ID NO: 88430 - DNA, 22 bp, Artificial sequence
  SiRNA target sequence
attgatcgtcttctttattttt

SEQ ID NO: 88431 - DNA, 22 bp, Artificial sequence
  SiRNA target sequence
ttgatcgtcttctttatttttc

SEQ ID NO: 88432 - DNA, 22 bp, Artificial sequence
  SiRNA target sequence
tgatcgtcttctttatttttca

SEQ ID NO: 88433 - DNA, 22 bp, Artificial sequence
  SiRNA target sequence
gatcgtcttctttatttttcaa

SEQ ID NO: 88434 - DNA, 22 bp, Artificial sequence
  SiRNA target sequence
atcgtcttctttatttttcaaa

SEQ ID NO: 88435 - DNA, 22 bp, Artificial sequence
  SiRNA target sequence
tcgtcttctttatttttcaaaa

SEQ ID NO: 88436 - DNA, 22 bp, Artificial sequence
  SiRNA target sequence
cgtcttctttatttttcaaaaa

SEQ ID NO: 88437 - DNA, 22 bp, Artificial sequence
  SiRNA target sequence
gtcttctttatttttcaaaaac

SEQ ID NO: 88438 - DNA, 22 bp, Artificial sequence
  SiRNA target sequence
tcttctttatttttcaaaaacg

SEQ ID NO: 88439 - DNA, 22 bp, Artificial sequence
  SiRNA target sequence
cttctttatttttcaaaaacga

SEQ ID NO: 88440 - DNA, 22 bp, Artificial sequence
  SiRNA target sequence
ttctttatttttcaaaaacgaa

SEQ ID NO: 88441 - DNA, 22 bp, Artificial sequence
  SiRNA target sequence
tctttatttttcaaaaacgaaa

SEQ ID NO: 88442 - DNA, 22 bp, Artificial sequence
  SiRNA target sequence
ctttatttttcaaaaacgaaaa

SEQ ID NO: 88443 - DNA, 22 bp, Artificial sequence
  SiRNA target sequence
tttatttttcaaaaacgaaaaa

SEQ ID NO: 88444 - DNA, 22 bp, Artificial sequence
  SiRNA target sequence
ttatttttcaaaaacgaaaaaa

SEQ ID NO: 88445 - DNA, 22 bp, Artificial sequence
  SiRNA target sequence
tatttttcaaaaacgaaaaaaa

SEQ ID NO: 88446 - DNA, 22 bp, Artificial sequence
  SiRNA target sequence
atttttcaaaaacgaaaaaaat

SEQ ID NO: 88447 - DNA, 22 bp, Artificial sequence
  SiRNA target sequence
tttttcaaaaacgaaaaaaatg

SEQ ID NO: 88448 - DNA, 22 bp, Artificial sequence
  SiRNA target sequence
ttttcaaaaacgaaaaaaatgg

SEQ ID NO: 88449 - DNA, 22 bp, Artificial sequence
  SiRNA target sequence
tttcaaaaacgaaaaaaatgga

SEQ ID NO: 88450 - DNA, 22 bp, Artificial sequence
  SiRNA target sequence
ttcaaaaacgaaaaaaatggag

SEQ ID NO: 88451 - DNA, 22 bp, Artificial sequence
  SiRNA target sequence
tcaaaaacgaaaaaaatggagc

SEQ ID NO: 88452 - DNA, 22 bp, Artificial sequence
  SiRNA target sequence
caaaaacgaaaaaaatggagca

SEQ ID NO: 88453 - DNA, 22 bp, Artificial sequence
  SiRNA target sequence
aaaaacgaaaaaaatggagcaa

SEQ ID NO: 88454 - DNA, 22 bp, Artificial sequence
  SiRNA target sequence
aaaacgaaaaaaatggagcaat

SEQ ID NO: 88455 - DNA, 22 bp, Artificial sequence
  SiRNA target sequence
aaacgaaaaaaatggagcaatg

SEQ ID NO: 88456 - DNA, 22 bp, Artificial sequence
  SiRNA target sequence
aacgaaaaaaatggagcaatgc

SEQ ID NO: 88457 - DNA, 22 bp, Artificial sequence
  SiRNA target sequence
acgaaaaaaatggagcaatgcc

SEQ ID NO: 88458 - DNA, 22 bp, Artificial sequence
  SiRNA target sequence
cgaaaaaaatggagcaatgcca

SEQ ID NO: 88459 - DNA, 22 bp, Artificial sequence
  SiRNA target sequence
gaaaaaaatggagcaatgccag

SEQ ID NO: 88460 - DNA, 22 bp, Artificial sequence
  SiRNA target sequence
aaaaaaatggagcaatgccagt

SEQ ID NO: 88461 - DNA, 22 bp, Artificial sequence
  SiRNA target sequence
aaaaaatggagcaatgccagtt

SEQ ID NO: 88462 - DNA, 22 bp, Artificial sequence
  SiRNA target sequence
aaaaatggagcaatgccagttc

SEQ ID NO: 88463 - DNA, 22 bp, Artificial sequence
  SiRNA target sequence
aaaatggagcaatgccagttcc

SEQ ID NO: 88464 - DNA, 22 bp, Artificial sequence
  SiRNA target sequence
aaatggagcaatgccagttcca

SEQ ID NO: 88465 - DNA, 22 bp, Artificial sequence
  SiRNA target sequence
aatggagcaatgccagttccag

SEQ ID NO: 88466 - DNA, 22 bp, Artificial sequence
  SiRNA target sequence
atggagcaatgccagttccagt

SEQ ID NO: 88467 - DNA, 22 bp, Artificial sequence
  SiRNA target sequence
tggagcaatgccagttccagta

SEQ ID NO: 88468 - DNA, 22 bp, Artificial sequence
  SiRNA target sequence
ggagcaatgccagttccagtac

SEQ ID NO: 88469 - DNA, 22 bp, Artificial sequence
  SiRNA target sequence
gagcaatgccagttccagtaca

SEQ ID NO: 88470 - DNA, 22 bp, Artificial sequence
  SiRNA target sequence
agcaatgccagttccagtacaa

SEQ ID NO: 88471 - DNA, 22 bp, Artificial sequence
  SiRNA target sequence
gcaatgccagttccagtacaaa

SEQ ID NO: 88472 - DNA, 22 bp, Artificial sequence
  SiRNA target sequence
caatgccagttccagtacaaat

SEQ ID NO: 88473 - DNA, 22 bp, Artificial sequence
  SiRNA target sequence
aatgccagttccagtacaaata

SEQ ID NO: 88474 - DNA, 22 bp, Artificial sequence
  SiRNA target sequence
atgccagttccagtacaaatac

SEQ ID NO: 88475 - DNA, 22 bp, Artificial sequence
  SiRNA target sequence
tgccagttccagtacaaatacc

SEQ ID NO: 88476 - DNA, 22 bp, Artificial sequence
  SiRNA target sequence
gccagttccagtacaaataccc

SEQ ID NO: 88477 - DNA, 22 bp, Artificial sequence
  SiRNA target sequence
ccagttccagtacaaataccca

SEQ ID NO: 88478 - DNA, 22 bp, Artificial sequence
  SiRNA target sequence
cagttccagtacaaatacccaa

SEQ ID NO: 88479 - DNA, 22 bp, Artificial sequence
  SiRNA target sequence
agttccagtacaaatacccaac

SEQ ID NO: 88480 - DNA, 22 bp, Artificial sequence
  SiRNA target sequence
gttccagtacaaatacccaaca

SEQ ID NO: 88481 - DNA, 22 bp, Artificial sequence
  SiRNA target sequence
ttccagtacaaatacccaacac

SEQ ID NO: 88482 - DNA, 22 bp, Artificial sequence
  SiRNA target sequence
tccagtacaaatacccaacact

SEQ ID NO: 88483 - DNA, 22 bp, Artificial sequence
  SiRNA target sequence
ccagtacaaatacccaacactt

SEQ ID NO: 88484 - DNA, 22 bp, Artificial sequence
  SiRNA target sequence
cagtacaaatacccaacacttt

SEQ ID NO: 88485 - DNA, 22 bp, Artificial sequence
  SiRNA target sequence
agtacaaatacccaacactttt

SEQ ID NO: 88486 - DNA, 22 bp, Artificial sequence
  SiRNA target sequence
gtacaaatacccaacacttttt

SEQ ID NO: 88487 - DNA, 22 bp, Artificial sequence
  SiRNA target sequence
tacaaatacccaacactttttt

SEQ ID NO: 88488 - DNA, 22 bp, Artificial sequence
  SiRNA target sequence
acaaatacccaacactttttta

SEQ ID NO: 88489 - DNA, 22 bp, Artificial sequence
  SiRNA target sequence
caaatacccaacacttttttac

SEQ ID NO: 88490 - DNA, 22 bp, Artificial sequence
  SiRNA target sequence
aaatacccaacacttttttaca

SEQ ID NO: 88491 - DNA, 22 bp, Artificial sequence
  SiRNA target sequence
aatacccaacacttttttacaa

SEQ ID NO: 88492 - DNA, 22 bp, Artificial sequence
  SiRNA target sequence
atacccaacacttttttacaaa

SEQ ID NO: 88493 - DNA, 22 bp, Artificial sequence
  SiRNA target sequence
tacccaacacttttttacaaaa

SEQ ID NO: 88494 - DNA, 22 bp, Artificial sequence
  SiRNA target sequence
acccaacacttttttacaaaaa

SEQ ID NO: 88495 - DNA, 22 bp, Artificial sequence
  SiRNA target sequence
cccaacacttttttacaaaaat

SEQ ID NO: 88496 - DNA, 22 bp, Artificial sequence
  SiRNA target sequence
ccaacacttttttacaaaaatt

SEQ ID NO: 88497 - DNA, 22 bp, Artificial sequence
  SiRNA target sequence
caacacttttttacaaaaattt

SEQ ID NO: 88498 - DNA, 22 bp, Artificial sequence
  SiRNA target sequence
aacacttttttacaaaaattta

SEQ ID NO: 88499 - DNA, 22 bp, Artificial sequence
  SiRNA target sequence
acacttttttacaaaaatttaa

SEQ ID NO: 88500 - DNA, 22 bp, Artificial sequence
  SiRNA target sequence
cacttttttacaaaaatttaat

SEQ ID NO: 88501 - DNA, 22 bp, Artificial sequence
  SiRNA target sequence
acttttttacaaaaatttaatc

SEQ ID NO: 88502 - DNA, 22 bp, Artificial sequence
  SiRNA target sequence
cttttttacaaaaatttaatct

SEQ ID NO: 88503 - DNA, 22 bp, Artificial sequence
  SiRNA target sequence
ttttttacaaaaatttaatcta

SEQ ID NO: 88504 - DNA, 22 bp, Artificial sequence
  SiRNA target sequence
tttttacaaaaatttaatctaa

SEQ ID NO: 88505 - DNA, 22 bp, Artificial sequence
  SiRNA target sequence
ttttacaaaaatttaatctaaa

SEQ ID NO: 88506 - DNA, 22 bp, Artificial sequence
  SiRNA target sequence
tttacaaaaatttaatctaaat

SEQ ID NO: 88507 - DNA, 22 bp, Artificial sequence
  SiRNA target sequence
ttacaaaaatttaatctaaata

SEQ ID NO: 88508 - DNA, 22 bp, Artificial sequence
  SiRNA target sequence
tacaaaaatttaatctaaataa

SEQ ID NO: 88509 - DNA, 22 bp, Artificial sequence
  SiRNA target sequence
acaaaaatttaatctaaataat

SEQ ID NO: 88510 - DNA, 22 bp, Artificial sequence
  SiRNA target sequence
caaaaatttaatctaaataatt

SEQ ID NO: 88511 - DNA, 22 bp, Artificial sequence
  SiRNA target sequence
aaaaatttaatctaaataattt

SEQ ID NO: 88512 - DNA, 22 bp, Artificial sequence
  SiRNA target sequence
aaaatttaatctaaataattta

SEQ ID NO: 88513 - DNA, 22 bp, Artificial sequence
  SiRNA target sequence
aaatttaatctaaataatttac

SEQ ID NO: 88514 - DNA, 22 bp, Artificial sequence
  SiRNA target sequence
aatttaatctaaataatttact

SEQ ID NO: 88515 - DNA, 22 bp, Artificial sequence
  SiRNA target sequence
atttaatctaaataatttactc

SEQ ID NO: 88516 - DNA, 22 bp, Artificial sequence
  SiRNA target sequence
tttaatctaaataatttactcg

SEQ ID NO: 88517 - DNA, 22 bp, Artificial sequence
  SiRNA target sequence
ttaatctaaataatttactcgg

SEQ ID NO: 88518 - DNA, 22 bp, Artificial sequence
  SiRNA target sequence
taatctaaataatttactcggt

SEQ ID NO: 88519 - DNA, 22 bp, Artificial sequence
  SiRNA target sequence
aatctaaataatttactcggtc

SEQ ID NO: 88520 - DNA, 22 bp, Artificial sequence
  SiRNA target sequence
atctaaataatttactcggtct

SEQ ID NO: 88521 - DNA, 22 bp, Artificial sequence
  SiRNA target sequence
tctaaataatttactcggtctg

SEQ ID NO: 88522 - DNA, 22 bp, Artificial sequence
  SiRNA target sequence
ctaaataatttactcggtctgt

SEQ ID NO: 88523 - DNA, 22 bp, Artificial sequence
  SiRNA target sequence
taaataatttactcggtctgtg

SEQ ID NO: 88524 - DNA, 22 bp, Artificial sequence
  SiRNA target sequence
aaataatttactcggtctgtga

SEQ ID NO: 88525 - DNA, 22 bp, Artificial sequence
  SiRNA target sequence
aataatttactcggtctgtgac

SEQ ID NO: 88526 - DNA, 22 bp, Artificial sequence
  SiRNA target sequence
ataatttactcggtctgtgaca

SEQ ID NO: 88527 - DNA, 22 bp, Artificial sequence
  SiRNA target sequence
taatttactcggtctgtgacag

SEQ ID NO: 88528 - DNA, 22 bp, Artificial sequence
  SiRNA target sequence
aatttactcggtctgtgacaga

SEQ ID NO: 88529 - DNA, 22 bp, Artificial sequence
  SiRNA target sequence
atttactcggtctgtgacagat

SEQ ID NO: 88530 - DNA, 22 bp, Artificial sequence
  SiRNA target sequence
tttactcggtctgtgacagatc

SEQ ID NO: 88531 - DNA, 22 bp, Artificial sequence
  SiRNA target sequence
ttactcggtctgtgacagatct

SEQ ID NO: 88532 - DNA, 22 bp, Artificial sequence
  SiRNA target sequence
tactcggtctgtgacagatctt

SEQ ID NO: 88533 - DNA, 22 bp, Artificial sequence
  SiRNA target sequence
actcggtctgtgacagatcttt

SEQ ID NO: 88534 - DNA, 22 bp, Artificial sequence
  SiRNA target sequence
ctcggtctgtgacagatcttta

SEQ ID NO: 88535 - DNA, 22 bp, Artificial sequence
  SiRNA target sequence
tcggtctgtgacagatctttaa

SEQ ID NO: 88536 - DNA, 22 bp, Artificial sequence
  SiRNA target sequence
cggtctgtgacagatctttaaa

SEQ ID NO: 88537 - DNA, 22 bp, Artificial sequence
  SiRNA target sequence
ggtctgtgacagatctttaaat

SEQ ID NO: 88538 - DNA, 22 bp, Artificial sequence
  SiRNA target sequence
gtctgtgacagatctttaaatt

SEQ ID NO: 88539 - DNA, 22 bp, Artificial sequence
  SiRNA target sequence
tctgtgacagatctttaaatta

SEQ ID NO: 88540 - DNA, 22 bp, Artificial sequence
  SiRNA target sequence
ctgtgacagatctttaaattat

SEQ ID NO: 88541 - DNA, 22 bp, Artificial sequence
  SiRNA target sequence
tgtgacagatctttaaattatt

SEQ ID NO: 88542 - DNA, 22 bp, Artificial sequence
  SiRNA target sequence
gtgacagatctttaaattatta

SEQ ID NO: 88543 - DNA, 22 bp, Artificial sequence
  SiRNA target sequence
tgacagatctttaaattattat

SEQ ID NO: 88544 - DNA, 22 bp, Artificial sequence
  SiRNA target sequence
gacagatctttaaattattata

SEQ ID NO: 88545 - DNA, 22 bp, Artificial sequence
  SiRNA target sequence
acagatctttaaattattataa

SEQ ID NO: 88546 - DNA, 22 bp, Artificial sequence
  SiRNA target sequence
cagatctttaaattattataat

SEQ ID NO: 88547 - DNA, 22 bp, Artificial sequence
  SiRNA target sequence
agatctttaaattattataatt

SEQ ID NO: 88548 - DNA, 22 bp, Artificial sequence
  SiRNA target sequence
gatctttaaattattataattt

SEQ ID NO: 88549 - DNA, 22 bp, Artificial sequence
  SiRNA target sequence
atctttaaattattataatttt

SEQ ID NO: 88550 - DNA, 22 bp, Artificial sequence
  SiRNA target sequence
tctttaaattattataattttg

SEQ ID NO: 88551 - DNA, 22 bp, Artificial sequence
  SiRNA target sequence
ctttaaattattataattttgc

SEQ ID NO: 88552 - DNA, 22 bp, Artificial sequence
  SiRNA target sequence
tttaaattattataattttgca

SEQ ID NO: 88553 - DNA, 22 bp, Artificial sequence
  SiRNA target sequence
ttaaattattataattttgcat

SEQ ID NO: 88554 - DNA, 22 bp, Artificial sequence
  SiRNA target sequence
taaattattataattttgcata

SEQ ID NO: 88555 - DNA, 22 bp, Artificial sequence
  SiRNA target sequence
aaattattataattttgcatat

SEQ ID NO: 88556 - DNA, 22 bp, Artificial sequence
  SiRNA target sequence
aattattataattttgcatatc

SEQ ID NO: 88557 - DNA, 22 bp, Artificial sequence
  SiRNA target sequence
attattataattttgcatatct

SEQ ID NO: 88558 - DNA, 22 bp, Artificial sequence
  SiRNA target sequence
ttattataattttgcatatcta

SEQ ID NO: 88559 - DNA, 22 bp, Artificial sequence
  SiRNA target sequence
tattataattttgcatatctat

SEQ ID NO: 88560 - DNA, 22 bp, Artificial sequence
  SiRNA target sequence
attataattttgcatatctatg

SEQ ID NO: 88561 - DNA, 22 bp, Artificial sequence
  SiRNA target sequence
ttataattttgcatatctatga

SEQ ID NO: 88562 - DNA, 22 bp, Artificial sequence
  SiRNA target sequence
tataattttgcatatctatgaa

SEQ ID NO: 88563 - DNA, 22 bp, Artificial sequence
  SiRNA target sequence
ataattttgcatatctatgaaa

SEQ ID NO: 88564 - DNA, 22 bp, Artificial sequence
  SiRNA target sequence
taattttgcatatctatgaaat

SEQ ID NO: 88565 - DNA, 22 bp, Artificial sequence
  SiRNA target sequence
aattttgcatatctatgaaatt

SEQ ID NO: 88566 - DNA, 22 bp, Artificial sequence
  SiRNA target sequence
attttgcatatctatgaaattg

SEQ ID NO: 88567 - DNA, 22 bp, Artificial sequence
  SiRNA target sequence
ttttgcatatctatgaaattgg

SEQ ID NO: 88568 - DNA, 22 bp, Artificial sequence
  SiRNA target sequence
tttgcatatctatgaaattgga

SEQ ID NO: 88569 - DNA, 22 bp, Artificial sequence
  SiRNA target sequence
ttgcatatctatgaaattggaa

SEQ ID NO: 88570 - DNA, 22 bp, Artificial sequence
  SiRNA target sequence
tgcatatctatgaaattggaaa

SEQ ID NO: 88571 - DNA, 22 bp, Artificial sequence
  SiRNA target sequence
gcatatctatgaaattggaaac

SEQ ID NO: 88572 - DNA, 22 bp, Artificial sequence
  SiRNA target sequence
catatctatgaaattggaaaca

SEQ ID NO: 88573 - DNA, 22 bp, Artificial sequence
  SiRNA target sequence
atatctatgaaattggaaacat

SEQ ID NO: 88574 - DNA, 22 bp, Artificial sequence
  SiRNA target sequence
tatctatgaaattggaaacatg

SEQ ID NO: 88575 - DNA, 22 bp, Artificial sequence
  SiRNA target sequence
atctatgaaattggaaacatgt

SEQ ID NO: 88576 - DNA, 22 bp, Artificial sequence
  SiRNA target sequence
tctatgaaattggaaacatgtc

SEQ ID NO: 88577 - DNA, 22 bp, Artificial sequence
  SiRNA target sequence
ctatgaaattggaaacatgtcc

SEQ ID NO: 88578 - DNA, 22 bp, Artificial sequence
  SiRNA target sequence
tatgaaattggaaacatgtcca

SEQ ID NO: 88579 - DNA, 22 bp, Artificial sequence
  SiRNA target sequence
atgaaattggaaacatgtccat

SEQ ID NO: 88580 - DNA, 22 bp, Artificial sequence
  SiRNA target sequence
tgaaattggaaacatgtccata

SEQ ID NO: 88581 - DNA, 22 bp, Artificial sequence
  SiRNA target sequence
gaaattggaaacatgtccatat

SEQ ID NO: 88582 - DNA, 22 bp, Artificial sequence
  SiRNA target sequence
aaattggaaacatgtccatatc

SEQ ID NO: 88583 - DNA, 22 bp, Artificial sequence
  SiRNA target sequence
aattggaaacatgtccatatct

SEQ ID NO: 88584 - DNA, 22 bp, Artificial sequence
  SiRNA target sequence
attggaaacatgtccatatcta

SEQ ID NO: 88585 - DNA, 22 bp, Artificial sequence
  SiRNA target sequence
ttggaaacatgtccatatctat

SEQ ID NO: 88586 - DNA, 22 bp, Artificial sequence
  SiRNA target sequence
tggaaacatgtccatatctatc

SEQ ID NO: 88587 - DNA, 22 bp, Artificial sequence
  SiRNA target sequence
ggaaacatgtccatatctatcg

SEQ ID NO: 88588 - DNA, 22 bp, Artificial sequence
  SiRNA target sequence
gaaacatgtccatatctatcgc

SEQ ID NO: 88589 - DNA, 22 bp, Artificial sequence
  SiRNA target sequence
aaacatgtccatatctatcgcc

SEQ ID NO: 88590 - DNA, 22 bp, Artificial sequence
  SiRNA target sequence
aacatgtccatatctatcgcct

SEQ ID NO: 88591 - DNA, 22 bp, Artificial sequence
  SiRNA target sequence
acatgtccatatctatcgcctt

SEQ ID NO: 88592 - DNA, 22 bp, Artificial sequence
  SiRNA target sequence
catgtccatatctatcgccttt

SEQ ID NO: 88593 - DNA, 22 bp, Artificial sequence
  SiRNA target sequence
atgtccatatctatcgcctttt

SEQ ID NO: 88594 - DNA, 22 bp, Artificial sequence
  SiRNA target sequence
tgtccatatctatcgccttttt

SEQ ID NO: 88595 - DNA, 22 bp, Artificial sequence
  SiRNA target sequence
gtccatatctatcgcctttttt

SEQ ID NO: 88596 - DNA, 22 bp, Artificial sequence
  SiRNA target sequence
tccatatctatcgcctttttta

SEQ ID NO: 88597 - DNA, 22 bp, Artificial sequence
  SiRNA target sequence
ccatatctatcgccttttttaa

SEQ ID NO: 88598 - DNA, 22 bp, Artificial sequence
  SiRNA target sequence
catatctatcgccttttttaat

SEQ ID NO: 88599 - DNA, 22 bp, Artificial sequence
  SiRNA target sequence
atatctatcgccttttttaata

SEQ ID NO: 88600 - DNA, 22 bp, Artificial sequence
  SiRNA target sequence
tatctatcgccttttttaataa

SEQ ID NO: 88601 - DNA, 22 bp, Artificial sequence
  SiRNA target sequence
atctatcgccttttttaataat

SEQ ID NO: 88602 - DNA, 22 bp, Artificial sequence
  SiRNA target sequence
tctatcgccttttttaataatt

SEQ ID NO: 88603 - DNA, 22 bp, Artificial sequence
  SiRNA target sequence
ctatcgccttttttaataattg

SEQ ID NO: 88604 - DNA, 22 bp, Artificial sequence
  SiRNA target sequence
tatcgccttttttaataattgc

SEQ ID NO: 88605 - DNA, 22 bp, Artificial sequence
  SiRNA target sequence
atcgccttttttaataattgct

SEQ ID NO: 88606 - DNA, 22 bp, Artificial sequence
  SiRNA target sequence
tcgccttttttaataattgcta

SEQ ID NO: 88607 - DNA, 22 bp, Artificial sequence
  SiRNA target sequence
cgccttttttaataattgctac

SEQ ID NO: 88608 - DNA, 22 bp, Artificial sequence
  SiRNA target sequence
gccttttttaataattgctact

SEQ ID NO: 88609 - DNA, 22 bp, Artificial sequence
  SiRNA target sequence
ccttttttaataattgctacta

SEQ ID NO: 88610 - DNA, 22 bp, Artificial sequence
  SiRNA target sequence
cttttttaataattgctactaa

SEQ ID NO: 88611 - DNA, 22 bp, Artificial sequence
  SiRNA target sequence
ttttttaataattgctactaaa

SEQ ID NO: 88612 - DNA, 22 bp, Artificial sequence
  SiRNA target sequence
tttttaataattgctactaaaa

SEQ ID NO: 88613 - DNA, 22 bp, Artificial sequence
  SiRNA target sequence
ttttaataattgctactaaaat

SEQ ID NO: 88614 - DNA, 22 bp, Artificial sequence
  SiRNA target sequence
tttaataattgctactaaaatt

SEQ ID NO: 88615 - DNA, 22 bp, Artificial sequence
  SiRNA target sequence
ttaataattgctactaaaattt

SEQ ID NO: 88616 - DNA, 22 bp, Artificial sequence
  SiRNA target sequence
taataattgctactaaaatttc

SEQ ID NO: 88617 - DNA, 22 bp, Artificial sequence
  SiRNA target sequence
aataattgctactaaaatttca

SEQ ID NO: 88618 - DNA, 22 bp, Artificial sequence
  SiRNA target sequence
ataattgctactaaaatttcac

SEQ ID NO: 88619 - DNA, 22 bp, Artificial sequence
  SiRNA target sequence
taattgctactaaaatttcaca

SEQ ID NO: 88620 - DNA, 22 bp, Artificial sequence
  SiRNA target sequence
aattgctactaaaatttcacat

SEQ ID NO: 88621 - DNA, 22 bp, Artificial sequence
  SiRNA target sequence
attgctactaaaatttcacatt

SEQ ID NO: 88622 - DNA, 22 bp, Artificial sequence
  SiRNA target sequence
ttgctactaaaatttcacattt

SEQ ID NO: 88623 - DNA, 22 bp, Artificial sequence
  SiRNA target sequence
tgctactaaaatttcacatttt

SEQ ID NO: 88624 - DNA, 22 bp, Artificial sequence
  SiRNA target sequence
gctactaaaatttcacattttt

SEQ ID NO: 88625 - DNA, 22 bp, Artificial sequence
  SiRNA target sequence
ctactaaaatttcacatttttc

SEQ ID NO: 88626 - DNA, 22 bp, Artificial sequence
  SiRNA target sequence
tactaaaatttcacatttttca

SEQ ID NO: 88627 - DNA, 22 bp, Artificial sequence
  SiRNA target sequence
actaaaatttcacatttttcat

SEQ ID NO: 88628 - DNA, 22 bp, Artificial sequence
  SiRNA target sequence
ctaaaatttcacatttttcatt

SEQ ID NO: 88629 - DNA, 22 bp, Artificial sequence
  SiRNA target sequence
taaaatttcacatttttcattt

SEQ ID NO: 88630 - DNA, 22 bp, Artificial sequence
  SiRNA target sequence
aaaatttcacatttttcattta

SEQ ID NO: 88631 - DNA, 22 bp, Artificial sequence
  SiRNA target sequence
aaatttcacatttttcatttac

SEQ ID NO: 88632 - DNA, 22 bp, Artificial sequence
  SiRNA target sequence
aatttcacatttttcatttacg

SEQ ID NO: 88633 - DNA, 22 bp, Artificial sequence
  SiRNA target sequence
atttcacatttttcatttacgt

SEQ ID NO: 88634 - DNA, 22 bp, Artificial sequence
  SiRNA target sequence
tttcacatttttcatttacgtg

SEQ ID NO: 88635 - DNA, 22 bp, Artificial sequence
  SiRNA target sequence
ttcacatttttcatttacgtgg

SEQ ID NO: 88636 - DNA, 22 bp, Artificial sequence
  SiRNA target sequence
tcacatttttcatttacgtggt

SEQ ID NO: 88637 - DNA, 22 bp, Artificial sequence
  SiRNA target sequence
cacatttttcatttacgtggtt

SEQ ID NO: 88638 - DNA, 22 bp, Artificial sequence
  SiRNA target sequence
acatttttcatttacgtggtta

SEQ ID NO: 88639 - DNA, 22 bp, Artificial sequence
  SiRNA target sequence
catttttcatttacgtggttag

SEQ ID NO: 88640 - DNA, 22 bp, Artificial sequence
  SiRNA target sequence
atttttcatttacgtggttagt

SEQ ID NO: 88641 - DNA, 22 bp, Artificial sequence
  SiRNA target sequence
tttttcatttacgtggttagta

SEQ ID NO: 88642 - DNA, 22 bp, Artificial sequence
  SiRNA target sequence
ttttcatttacgtggttagtaa

SEQ ID NO: 88643 - DNA, 22 bp, Artificial sequence
  SiRNA target sequence
tttcatttacgtggttagtaag

SEQ ID NO: 88644 - DNA, 22 bp, Artificial sequence
  SiRNA target sequence
ttcatttacgtggttagtaagt

SEQ ID NO: 88645 - DNA, 22 bp, Artificial sequence
  SiRNA target sequence
tcatttacgtggttagtaagtg

SEQ ID NO: 88646 - DNA, 22 bp, Artificial sequence
  SiRNA target sequence
catttacgtggttagtaagtga

SEQ ID NO: 88647 - DNA, 22 bp, Artificial sequence
  SiRNA target sequence
atttacgtggttagtaagtgaa

SEQ ID NO: 88648 - DNA, 22 bp, Artificial sequence
  SiRNA target sequence
tttacgtggttagtaagtgaat

SEQ ID NO: 88649 - DNA, 22 bp, Artificial sequence
  SiRNA target sequence
ttacgtggttagtaagtgaata

SEQ ID NO: 88650 - DNA, 22 bp, Artificial sequence
  SiRNA target sequence
tacgtggttagtaagtgaataa

SEQ ID NO: 88651 - DNA, 22 bp, Artificial sequence
  SiRNA target sequence
acgtggttagtaagtgaataat

SEQ ID NO: 88652 - DNA, 22 bp, Artificial sequence
  SiRNA target sequence
cgtggttagtaagtgaataata

SEQ ID NO: 88653 - DNA, 22 bp, Artificial sequence
  SiRNA target sequence
gtggttagtaagtgaataatat

SEQ ID NO: 88654 - DNA, 22 bp, Artificial sequence
  SiRNA target sequence
tggttagtaagtgaataatatc

SEQ ID NO: 88655 - DNA, 22 bp, Artificial sequence
  SiRNA target sequence
ggttagtaagtgaataatatct

SEQ ID NO: 88656 - DNA, 22 bp, Artificial sequence
  SiRNA target sequence
gttagtaagtgaataatatctt

SEQ ID NO: 88657 - DNA, 22 bp, Artificial sequence
  SiRNA target sequence
ttagtaagtgaataatatcttg

SEQ ID NO: 88658 - DNA, 22 bp, Artificial sequence
  SiRNA target sequence
tagtaagtgaataatatcttgg

SEQ ID NO: 88659 - DNA, 22 bp, Artificial sequence
  SiRNA target sequence
agtaagtgaataatatcttggc

SEQ ID NO: 88660 - DNA, 22 bp, Artificial sequence
  SiRNA target sequence
gtaagtgaataatatcttggct

SEQ ID NO: 88661 - DNA, 22 bp, Artificial sequence
  SiRNA target sequence
taagtgaataatatcttggctt

SEQ ID NO: 88662 - DNA, 22 bp, Artificial sequence
  SiRNA target sequence
aagtgaataatatcttggctta

SEQ ID NO: 88663 - DNA, 22 bp, Artificial sequence
  SiRNA target sequence
agtgaataatatcttggcttaa

SEQ ID NO: 88664 - DNA, 22 bp, Artificial sequence
  SiRNA target sequence
gtgaataatatcttggcttaat

SEQ ID NO: 88665 - DNA, 22 bp, Artificial sequence
  SiRNA target sequence
tgaataatatcttggcttaatt

SEQ ID NO: 88666 - DNA, 22 bp, Artificial sequence
  SiRNA target sequence
gaataatatcttggcttaattg

SEQ ID NO: 88667 - DNA, 22 bp, Artificial sequence
  SiRNA target sequence
aataatatcttggcttaattgt

SEQ ID NO: 88668 - DNA, 22 bp, Artificial sequence
  SiRNA target sequence
ataatatcttggcttaattgtt

SEQ ID NO: 88669 - DNA, 22 bp, Artificial sequence
  SiRNA target sequence
taatatcttggcttaattgttt

SEQ ID NO: 88670 - DNA, 22 bp, Artificial sequence
  SiRNA target sequence
aatatcttggcttaattgtttg

SEQ ID NO: 88671 - DNA, 22 bp, Artificial sequence
  SiRNA target sequence
atatcttggcttaattgtttga

SEQ ID NO: 88672 - DNA, 22 bp, Artificial sequence
  SiRNA target sequence
tatcttggcttaattgtttgac

SEQ ID NO: 88673 - DNA, 22 bp, Artificial sequence
  SiRNA target sequence
atcttggcttaattgtttgaca

SEQ ID NO: 88674 - DNA, 22 bp, Artificial sequence
  SiRNA target sequence
tcttggcttaattgtttgacaa

SEQ ID NO: 88675 - DNA, 22 bp, Artificial sequence
  SiRNA target sequence
cttggcttaattgtttgacaat

SEQ ID NO: 88676 - DNA, 22 bp, Artificial sequence
  SiRNA target sequence
ttggcttaattgtttgacaatt

SEQ ID NO: 88677 - DNA, 22 bp, Artificial sequence
  SiRNA target sequence
tggcttaattgtttgacaattc

SEQ ID NO: 88678 - DNA, 22 bp, Artificial sequence
  SiRNA target sequence
ggcttaattgtttgacaattca

SEQ ID NO: 88679 - DNA, 22 bp, Artificial sequence
  SiRNA target sequence
gcttaattgtttgacaattcat

SEQ ID NO: 88680 - DNA, 22 bp, Artificial sequence
  SiRNA target sequence
cttaattgtttgacaattcata

SEQ ID NO: 88681 - DNA, 22 bp, Artificial sequence
  SiRNA target sequence
ttaattgtttgacaattcataa

SEQ ID NO: 88682 - DNA, 22 bp, Artificial sequence
  SiRNA target sequence
taattgtttgacaattcataat

SEQ ID NO: 88683 - DNA, 22 bp, Artificial sequence
  SiRNA target sequence
aattgtttgacaattcataata

SEQ ID NO: 88684 - DNA, 22 bp, Artificial sequence
  SiRNA target sequence
attgtttgacaattcataataa

SEQ ID NO: 88685 - DNA, 22 bp, Artificial sequence
  SiRNA target sequence
ttgtttgacaattcataataag

SEQ ID NO: 88686 - DNA, 22 bp, Artificial sequence
  SiRNA target sequence
tgtttgacaattcataataaga

SEQ ID NO: 88687 - DNA, 22 bp, Artificial sequence
  SiRNA target sequence
gtttgacaattcataataagat

SEQ ID NO: 88688 - DNA, 22 bp, Artificial sequence
  SiRNA target sequence
tttgacaattcataataagatc

SEQ ID NO: 88689 - DNA, 22 bp, Artificial sequence
  SiRNA target sequence
ttgacaattcataataagatcc

SEQ ID NO: 88690 - DNA, 22 bp, Artificial sequence
  SiRNA target sequence
tgacaattcataataagatcct

SEQ ID NO: 88691 - DNA, 22 bp, Artificial sequence
  SiRNA target sequence
gacaattcataataagatcctc

SEQ ID NO: 88692 - DNA, 22 bp, Artificial sequence
  SiRNA target sequence
acaattcataataagatcctct

SEQ ID NO: 88693 - DNA, 22 bp, Artificial sequence
  SiRNA target sequence
caattcataataagatcctcta

SEQ ID NO: 88694 - DNA, 22 bp, Artificial sequence
  SiRNA target sequence
aattcataataagatcctctaa

SEQ ID NO: 88695 - DNA, 22 bp, Artificial sequence
  SiRNA target sequence
attcataataagatcctctaaa

SEQ ID NO: 88696 - DNA, 22 bp, Artificial sequence
  SiRNA target sequence
ttcataataagatcctctaaac

SEQ ID NO: 88697 - DNA, 22 bp, Artificial sequence
  SiRNA target sequence
tcataataagatcctctaaact

SEQ ID NO: 88698 - DNA, 22 bp, Artificial sequence
  SiRNA target sequence
cataataagatcctctaaactt

SEQ ID NO: 88699 - DNA, 22 bp, Artificial sequence
  SiRNA target sequence
ataataagatcctctaaacttg

SEQ ID NO: 88700 - DNA, 22 bp, Artificial sequence
  SiRNA target sequence
taataagatcctctaaacttgg

SEQ ID NO: 88701 - DNA, 22 bp, Artificial sequence
  SiRNA target sequence
aataagatcctctaaacttggt

SEQ ID NO: 88702 - DNA, 22 bp, Artificial sequence
  SiRNA target sequence
ataagatcctctaaacttggtt

SEQ ID NO: 88703 - DNA, 22 bp, Artificial sequence
  SiRNA target sequence
taagatcctctaaacttggttt

SEQ ID NO: 88704 - DNA, 22 bp, Artificial sequence
  SiRNA target sequence
aagatcctctaaacttggttta

SEQ ID NO: 88705 - DNA, 22 bp, Artificial sequence
  SiRNA target sequence
agatcctctaaacttggtttac

SEQ ID NO: 88706 - DNA, 22 bp, Artificial sequence
  SiRNA target sequence
gatcctctaaacttggtttaca

SEQ ID NO: 88707 - DNA, 22 bp, Artificial sequence
  SiRNA target sequence
atcctctaaacttggtttacat

SEQ ID NO: 88708 - DNA, 22 bp, Artificial sequence
  SiRNA target sequence
tcctctaaacttggtttacatt

SEQ ID NO: 88709 - DNA, 22 bp, Artificial sequence
  SiRNA target sequence
cctctaaacttggtttacattg

SEQ ID NO: 88710 - DNA, 22 bp, Artificial sequence
  SiRNA target sequence
ctctaaacttggtttacattga

SEQ ID NO: 88711 - DNA, 22 bp, Artificial sequence
  SiRNA target sequence
tctaaacttggtttacattgaa

SEQ ID NO: 88712 - DNA, 22 bp, Artificial sequence
  SiRNA target sequence
ctaaacttggtttacattgaaa

SEQ ID NO: 88713 - DNA, 22 bp, Artificial sequence
  SiRNA target sequence
taaacttggtttacattgaaat

SEQ ID NO: 88714 - DNA, 22 bp, Artificial sequence
  SiRNA target sequence
aaacttggtttacattgaaatg

SEQ ID NO: 88715 - DNA, 22 bp, Artificial sequence
  SiRNA target sequence
aacttggtttacattgaaatgt

SEQ ID NO: 88716 - DNA, 22 bp, Artificial sequence
  SiRNA target sequence
acttggtttacattgaaatgta

SEQ ID NO: 88717 - DNA, 22 bp, Artificial sequence
  SiRNA target sequence
cttggtttacattgaaatgtat

SEQ ID NO: 88718 - DNA, 22 bp, Artificial sequence
  SiRNA target sequence
ttggtttacattgaaatgtata

SEQ ID NO: 88719 - DNA, 22 bp, Artificial sequence
  SiRNA target sequence
tggtttacattgaaatgtatat

SEQ ID NO: 88720 - DNA, 22 bp, Artificial sequence
  SiRNA target sequence
ggtttacattgaaatgtatata

SEQ ID NO: 88721 - DNA, 22 bp, Artificial sequence
  SiRNA target sequence
gtttacattgaaatgtatatat

SEQ ID NO: 88722 - DNA, 22 bp, Artificial sequence
  SiRNA target sequence
tttacattgaaatgtatatata

SEQ ID NO: 88723 - DNA, 22 bp, Artificial sequence
  SiRNA target sequence
ttacattgaaatgtatatataa

SEQ ID NO: 88724 - DNA, 22 bp, Artificial sequence
  SiRNA target sequence
tacattgaaatgtatatataat

SEQ ID NO: 88725 - DNA, 22 bp, Artificial sequence
  SiRNA target sequence
acattgaaatgtatatataatg

SEQ ID NO: 88726 - DNA, 22 bp, Artificial sequence
  SiRNA target sequence
cattgaaatgtatatataatgt

SEQ ID NO: 88727 - DNA, 22 bp, Artificial sequence
  SiRNA target sequence
attgaaatgtatatataatgtc

SEQ ID NO: 88728 - DNA, 22 bp, Artificial sequence
  SiRNA target sequence
ttgaaatgtatatataatgtca

SEQ ID NO: 88729 - DNA, 22 bp, Artificial sequence
  SiRNA target sequence
tgaaatgtatatataatgtcaa

SEQ ID NO: 88730 - DNA, 22 bp, Artificial sequence
  SiRNA target sequence
gaaatgtatatataatgtcaag

SEQ ID NO: 88731 - DNA, 22 bp, Artificial sequence
  SiRNA target sequence
aaatgtatatataatgtcaagc

SEQ ID NO: 88732 - DNA, 22 bp, Artificial sequence
  SiRNA target sequence
aatgtatatataatgtcaagca

SEQ ID NO: 88733 - DNA, 22 bp, Artificial sequence
  SiRNA target sequence
atgtatatataatgtcaagcac

SEQ ID NO: 88734 - DNA, 22 bp, Artificial sequence
  SiRNA target sequence
tgtatatataatgtcaagcaca

SEQ ID NO: 88735 - DNA, 22 bp, Artificial sequence
  SiRNA target sequence
gtatatataatgtcaagcacat

SEQ ID NO: 88736 - DNA, 22 bp, Artificial sequence
  SiRNA target sequence
tatatataatgtcaagcacatt

SEQ ID NO: 88737 - DNA, 22 bp, Artificial sequence
  SiRNA target sequence
atatataatgtcaagcacatta

SEQ ID NO: 88738 - DNA, 22 bp, Artificial sequence
  SiRNA target sequence
tatataatgtcaagcacattat

SEQ ID NO: 88739 - DNA, 22 bp, Artificial sequence
  SiRNA target sequence
atataatgtcaagcacattatt

SEQ ID NO: 88740 - DNA, 22 bp, Artificial sequence
  SiRNA target sequence
tataatgtcaagcacattattc

SEQ ID NO: 88741 - DNA, 22 bp, Artificial sequence
  SiRNA target sequence
ataatgtcaagcacattattcc

SEQ ID NO: 88742 - DNA, 22 bp, Artificial sequence
  SiRNA target sequence
taatgtcaagcacattattcca

SEQ ID NO: 88743 - DNA, 22 bp, Artificial sequence
  SiRNA target sequence
aatgtcaagcacattattccag

SEQ ID NO: 88744 - DNA, 22 bp, Artificial sequence
  SiRNA target sequence
atgtcaagcacattattccagt

SEQ ID NO: 88745 - DNA, 22 bp, Artificial sequence
  SiRNA target sequence
tgtcaagcacattattccagtt

SEQ ID NO: 88746 - DNA, 22 bp, Artificial sequence
  SiRNA target sequence
gtcaagcacattattccagttc

SEQ ID NO: 88747 - DNA, 22 bp, Artificial sequence
  SiRNA target sequence
tcaagcacattattccagttct

SEQ ID NO: 88748 - DNA, 22 bp, Artificial sequence
  SiRNA target sequence
caagcacattattccagttctt

SEQ ID NO: 88749 - DNA, 22 bp, Artificial sequence
  SiRNA target sequence
aagcacattattccagttctta

SEQ ID NO: 88750 - DNA, 22 bp, Artificial sequence
  SiRNA target sequence
agcacattattccagttcttaa

SEQ ID NO: 88751 - DNA, 22 bp, Artificial sequence
  SiRNA target sequence
gcacattattccagttcttaat

SEQ ID NO: 88752 - DNA, 22 bp, Artificial sequence
  SiRNA target sequence
cacattattccagttcttaatg

SEQ ID NO: 88753 - DNA, 22 bp, Artificial sequence
  SiRNA target sequence
acattattccagttcttaatga

SEQ ID NO: 88754 - DNA, 22 bp, Artificial sequence
  SiRNA target sequence
cattattccagttcttaatgat

SEQ ID NO: 88755 - DNA, 22 bp, Artificial sequence
  SiRNA target sequence
attattccagttcttaatgatg

SEQ ID NO: 88756 - DNA, 22 bp, Artificial sequence
  SiRNA target sequence
ttattccagttcttaatgatgc

SEQ ID NO: 88757 - DNA, 22 bp, Artificial sequence
  SiRNA target sequence
tattccagttcttaatgatgct

SEQ ID NO: 88758 - DNA, 22 bp, Artificial sequence
  SiRNA target sequence
attccagttcttaatgatgctt

SEQ ID NO: 88759 - DNA, 22 bp, Artificial sequence
  SiRNA target sequence
ttccagttcttaatgatgctta

SEQ ID NO: 88760 - DNA, 22 bp, Artificial sequence
  SiRNA target sequence
tccagttcttaatgatgcttaa

SEQ ID NO: 88761 - DNA, 22 bp, Artificial sequence
  SiRNA target sequence
ccagttcttaatgatgcttaaa

SEQ ID NO: 88762 - DNA, 22 bp, Artificial sequence
  SiRNA target sequence
cagttcttaatgatgcttaaat

SEQ ID NO: 88763 - DNA, 22 bp, Artificial sequence
  SiRNA target sequence
agttcttaatgatgcttaaata

SEQ ID NO: 88764 - DNA, 22 bp, Artificial sequence
  SiRNA target sequence
gttcttaatgatgcttaaataa

SEQ ID NO: 88765 - DNA, 22 bp, Artificial sequence
  SiRNA target sequence
ttcttaatgatgcttaaataat

SEQ ID NO: 88766 - DNA, 22 bp, Artificial sequence
  SiRNA target sequence
tcttaatgatgcttaaataatc

SEQ ID NO: 88767 - DNA, 22 bp, Artificial sequence
  SiRNA target sequence
cttaatgatgcttaaataatct

SEQ ID NO: 88768 - DNA, 22 bp, Artificial sequence
  SiRNA target sequence
ttaatgatgcttaaataatctt

SEQ ID NO: 88769 - DNA, 22 bp, Artificial sequence
  SiRNA target sequence
taatgatgcttaaataatcttt

SEQ ID NO: 88770 - DNA, 22 bp, Artificial sequence
  SiRNA target sequence
aatgatgcttaaataatctttt

SEQ ID NO: 88771 - DNA, 22 bp, Artificial sequence
  SiRNA target sequence
atgatgcttaaataatctttta

SEQ ID NO: 88772 - DNA, 22 bp, Artificial sequence
  SiRNA target sequence
tgatgcttaaataatcttttac

SEQ ID NO: 88773 - DNA, 22 bp, Artificial sequence
  SiRNA target sequence
gatgcttaaataatcttttact

SEQ ID NO: 88774 - DNA, 22 bp, Artificial sequence
  SiRNA target sequence
atgcttaaataatcttttactc

SEQ ID NO: 88775 - DNA, 22 bp, Artificial sequence
  SiRNA target sequence
tgcttaaataatcttttactcc

SEQ ID NO: 88776 - DNA, 22 bp, Artificial sequence
  SiRNA target sequence
gcttaaataatcttttactcct

SEQ ID NO: 88777 - DNA, 22 bp, Artificial sequence
  SiRNA target sequence
cttaaataatcttttactcctt

SEQ ID NO: 88778 - DNA, 22 bp, Artificial sequence
  SiRNA target sequence
ttaaataatcttttactccttc

SEQ ID NO: 88779 - DNA, 22 bp, Artificial sequence
  SiRNA target sequence
taaataatcttttactccttct

SEQ ID NO: 88780 - DNA, 22 bp, Artificial sequence
  SiRNA target sequence
aaataatcttttactccttctt

SEQ ID NO: 88781 - DNA, 22 bp, Artificial sequence
  SiRNA target sequence
aataatcttttactccttcttt

SEQ ID NO: 88782 - DNA, 22 bp, Artificial sequence
  SiRNA target sequence
ataatcttttactccttcttta

SEQ ID NO: 88783 - DNA, 22 bp, Artificial sequence
  SiRNA target sequence
taatcttttactccttctttag

SEQ ID NO: 88784 - DNA, 22 bp, Artificial sequence
  SiRNA target sequence
aatcttttactccttctttaga

SEQ ID NO: 88785 - DNA, 22 bp, Artificial sequence
  SiRNA target sequence
atcttttactccttctttagaa

SEQ ID NO: 88786 - DNA, 22 bp, Artificial sequence
  SiRNA target sequence
tcttttactccttctttagaac

SEQ ID NO: 88787 - DNA, 22 bp, Artificial sequence
  SiRNA target sequence
cttttactccttctttagaaca

SEQ ID NO: 88788 - DNA, 22 bp, Artificial sequence
  SiRNA target sequence
ttttactccttctttagaacac

SEQ ID NO: 88789 - DNA, 22 bp, Artificial sequence
  SiRNA target sequence
tttactccttctttagaacaca

SEQ ID NO: 88790 - DNA, 22 bp, Artificial sequence
  SiRNA target sequence
ttactccttctttagaacacag

SEQ ID NO: 88791 - DNA, 22 bp, Artificial sequence
  SiRNA target sequence
tactccttctttagaacacaga

SEQ ID NO: 88792 - DNA, 22 bp, Artificial sequence
  SiRNA target sequence
actccttctttagaacacagat

SEQ ID NO: 88793 - DNA, 22 bp, Artificial sequence
  SiRNA target sequence
ctccttctttagaacacagata

SEQ ID NO: 88794 - DNA, 22 bp, Artificial sequence
  SiRNA target sequence
tccttctttagaacacagatat

SEQ ID NO: 88795 - DNA, 22 bp, Artificial sequence
  SiRNA target sequence
ccttctttagaacacagatatt

SEQ ID NO: 88796 - DNA, 22 bp, Artificial sequence
  SiRNA target sequence
cttctttagaacacagatattc

SEQ ID NO: 88797 - DNA, 22 bp, Artificial sequence
  SiRNA target sequence
ttctttagaacacagatattca

SEQ ID NO: 88798 - DNA, 22 bp, Artificial sequence
  SiRNA target sequence
tctttagaacacagatattcaa

SEQ ID NO: 88799 - DNA, 22 bp, Artificial sequence
  SiRNA target sequence
ctttagaacacagatattcaat

SEQ ID NO: 88800 - DNA, 22 bp, Artificial sequence
  SiRNA target sequence
tttagaacacagatattcaata

SEQ ID NO: 88801 - DNA, 22 bp, Artificial sequence
  SiRNA target sequence
ttagaacacagatattcaatat

SEQ ID NO: 88802 - DNA, 22 bp, Artificial sequence
  SiRNA target sequence
tagaacacagatattcaatatc

SEQ ID NO: 88803 - DNA, 22 bp, Artificial sequence
  SiRNA target sequence
agaacacagatattcaatatca

SEQ ID NO: 88804 - DNA, 22 bp, Artificial sequence
  SiRNA target sequence
gaacacagatattcaatatcat

SEQ ID NO: 88805 - DNA, 22 bp, Artificial sequence
  SiRNA target sequence
aacacagatattcaatatcatg

SEQ ID NO: 88806 - DNA, 22 bp, Artificial sequence
  SiRNA target sequence
acacagatattcaatatcatgc

SEQ ID NO: 88807 - DNA, 22 bp, Artificial sequence
  SiRNA target sequence
cacagatattcaatatcatgct

SEQ ID NO: 88808 - DNA, 22 bp, Artificial sequence
  SiRNA target sequence
acagatattcaatatcatgctt

SEQ ID NO: 88809 - DNA, 22 bp, Artificial sequence
  SiRNA target sequence
cagatattcaatatcatgctta

SEQ ID NO: 88810 - DNA, 22 bp, Artificial sequence
  SiRNA target sequence
agatattcaatatcatgcttat

SEQ ID NO: 88811 - DNA, 22 bp, Artificial sequence
  SiRNA target sequence
gatattcaatatcatgcttatt

SEQ ID NO: 88812 - DNA, 22 bp, Artificial sequence
  SiRNA target sequence
atattcaatatcatgcttattt

SEQ ID NO: 88813 - DNA, 22 bp, Artificial sequence
  SiRNA target sequence
tattcaatatcatgcttatttt

SEQ ID NO: 88814 - DNA, 22 bp, Artificial sequence
  SiRNA target sequence
attcaatatcatgcttattttt

SEQ ID NO: 88815 - DNA, 22 bp, Artificial sequence
  SiRNA target sequence
ttcaatatcatgcttattttta

SEQ ID NO: 88816 - DNA, 22 bp, Artificial sequence
  SiRNA target sequence
tcaatatcatgcttatttttag

SEQ ID NO: 88817 - DNA, 22 bp, Artificial sequence
  SiRNA target sequence
caatatcatgcttatttttaga

SEQ ID NO: 88818 - DNA, 22 bp, Artificial sequence
  SiRNA target sequence
aatatcatgcttatttttagag

SEQ ID NO: 88819 - DNA, 22 bp, Artificial sequence
  SiRNA target sequence
atatcatgcttatttttagagg

SEQ ID NO: 88820 - DNA, 22 bp, Artificial sequence
  SiRNA target sequence
tatcatgcttatttttagaggt

SEQ ID NO: 88821 - DNA, 22 bp, Artificial sequence
  SiRNA target sequence
atcatgcttatttttagaggtt

SEQ ID NO: 88822 - DNA, 22 bp, Artificial sequence
  SiRNA target sequence
tcatgcttatttttagaggttt

SEQ ID NO: 88823 - DNA, 22 bp, Artificial sequence
  SiRNA target sequence
catgcttatttttagaggtttt

SEQ ID NO: 88824 - DNA, 22 bp, Artificial sequence
  SiRNA target sequence
atgcttatttttagaggtttta

SEQ ID NO: 88825 - DNA, 22 bp, Artificial sequence
  SiRNA target sequence
tgcttatttttagaggttttag

SEQ ID NO: 88826 - DNA, 22 bp, Artificial sequence
  SiRNA target sequence
gcttatttttagaggttttaga

SEQ ID NO: 88827 - DNA, 22 bp, Artificial sequence
  SiRNA target sequence
cttatttttagaggttttagaa

SEQ ID NO: 88828 - DNA, 22 bp, Artificial sequence
  SiRNA target sequence
ttatttttagaggttttagaaa

SEQ ID NO: 88829 - DNA, 22 bp, Artificial sequence
  SiRNA target sequence
tatttttagaggttttagaaat

SEQ ID NO: 88830 - DNA, 22 bp, Artificial sequence
  SiRNA target sequence
atttttagaggttttagaaata

SEQ ID NO: 88831 - DNA, 22 bp, Artificial sequence
  SiRNA target sequence
tttttagaggttttagaaatat

SEQ ID NO: 88832 - DNA, 22 bp, Artificial sequence
  SiRNA target sequence
ttttagaggttttagaaatatc

SEQ ID NO: 88833 - DNA, 22 bp, Artificial sequence
  SiRNA target sequence
tttagaggttttagaaatatcc

SEQ ID NO: 88834 - DNA, 22 bp, Artificial sequence
  SiRNA target sequence
ttagaggttttagaaatatcca

SEQ ID NO: 88835 - DNA, 22 bp, Artificial sequence
  SiRNA target sequence
tagaggttttagaaatatccat

SEQ ID NO: 88836 - DNA, 22 bp, Artificial sequence
  SiRNA target sequence
agaggttttagaaatatccata

SEQ ID NO: 88837 - DNA, 22 bp, Artificial sequence
  SiRNA target sequence
gaggttttagaaatatccataa

SEQ ID NO: 88838 - DNA, 22 bp, Artificial sequence
  SiRNA target sequence
aggttttagaaatatccataag

SEQ ID NO: 88839 - DNA, 22 bp, Artificial sequence
  SiRNA target sequence
ggttttagaaatatccataagc

SEQ ID NO: 88840 - DNA, 22 bp, Artificial sequence
  SiRNA target sequence
gttttagaaatatccataagcc

SEQ ID NO: 88841 - DNA, 22 bp, Artificial sequence
  SiRNA target sequence
ttttagaaatatccataagcca

SEQ ID NO: 88842 - DNA, 22 bp, Artificial sequence
  SiRNA target sequence
tttagaaatatccataagccat

SEQ ID NO: 88843 - DNA, 22 bp, Artificial sequence
  SiRNA target sequence
ttagaaatatccataagccatg

SEQ ID NO: 88844 - DNA, 22 bp, Artificial sequence
  SiRNA target sequence
tagaaatatccataagccatgc

SEQ ID NO: 88845 - DNA, 22 bp, Artificial sequence
  SiRNA target sequence
agaaatatccataagccatgct

SEQ ID NO: 88846 - DNA, 22 bp, Artificial sequence
  SiRNA target sequence
gaaatatccataagccatgctt

SEQ ID NO: 88847 - DNA, 22 bp, Artificial sequence
  SiRNA target sequence
aaatatccataagccatgcttt

SEQ ID NO: 88848 - DNA, 22 bp, Artificial sequence
  SiRNA target sequence
aatatccataagccatgctttt

SEQ ID NO: 88849 - DNA, 22 bp, Artificial sequence
  SiRNA target sequence
atatccataagccatgcttttt

SEQ ID NO: 88850 - DNA, 22 bp, Artificial sequence
  SiRNA target sequence
tatccataagccatgctttttt

SEQ ID NO: 88851 - DNA, 22 bp, Artificial sequence
  SiRNA target sequence
atccataagccatgctttttta

SEQ ID NO: 88852 - DNA, 22 bp, Artificial sequence
  SiRNA target sequence
tccataagccatgcttttttag

SEQ ID NO: 88853 - DNA, 22 bp, Artificial sequence
  SiRNA target sequence
ccataagccatgcttttttagg

SEQ ID NO: 88854 - DNA, 22 bp, Artificial sequence
  SiRNA target sequence
cataagccatgcttttttaggc

SEQ ID NO: 88855 - DNA, 22 bp, Artificial sequence
  SiRNA target sequence
ataagccatgcttttttaggca

SEQ ID NO: 88856 - DNA, 22 bp, Artificial sequence
  SiRNA target sequence
taagccatgcttttttaggcaa

SEQ ID NO: 88857 - DNA, 22 bp, Artificial sequence
  SiRNA target sequence
aagccatgcttttttaggcaat

SEQ ID NO: 88858 - DNA, 22 bp, Artificial sequence
  SiRNA target sequence
agccatgcttttttaggcaatg

SEQ ID NO: 88859 - DNA, 22 bp, Artificial sequence
  SiRNA target sequence
gccatgcttttttaggcaatga

SEQ ID NO: 88860 - DNA, 22 bp, Artificial sequence
  SiRNA target sequence
ccatgcttttttaggcaatgaa

SEQ ID NO: 88861 - DNA, 22 bp, Artificial sequence
  SiRNA target sequence
catgcttttttaggcaatgaag

SEQ ID NO: 88862 - DNA, 22 bp, Artificial sequence
  SiRNA target sequence
atgcttttttaggcaatgaagt

SEQ ID NO: 88863 - DNA, 22 bp, Artificial sequence
  SiRNA target sequence
tgcttttttaggcaatgaagta

SEQ ID NO: 88864 - DNA, 22 bp, Artificial sequence
  SiRNA target sequence
gcttttttaggcaatgaagtaa

SEQ ID NO: 88865 - DNA, 22 bp, Artificial sequence
  SiRNA target sequence
cttttttaggcaatgaagtaaa

SEQ ID NO: 88866 - DNA, 22 bp, Artificial sequence
  SiRNA target sequence
ttttttaggcaatgaagtaaaa

SEQ ID NO: 88867 - DNA, 22 bp, Artificial sequence
  SiRNA target sequence
tttttaggcaatgaagtaaaat

SEQ ID NO: 88868 - DNA, 22 bp, Artificial sequence
  SiRNA target sequence
ttttaggcaatgaagtaaaatc

SEQ ID NO: 88869 - DNA, 22 bp, Artificial sequence
  SiRNA target sequence
tttaggcaatgaagtaaaatca

SEQ ID NO: 88870 - DNA, 22 bp, Artificial sequence
  SiRNA target sequence
ttaggcaatgaagtaaaatcaa

SEQ ID NO: 88871 - DNA, 22 bp, Artificial sequence
  SiRNA target sequence
taggcaatgaagtaaaatcaaa

SEQ ID NO: 88872 - DNA, 22 bp, Artificial sequence
  SiRNA target sequence
aggcaatgaagtaaaatcaaaa

SEQ ID NO: 88873 - DNA, 22 bp, Artificial sequence
  SiRNA target sequence
ggcaatgaagtaaaatcaaaaa

SEQ ID NO: 88874 - DNA, 22 bp, Artificial sequence
  SiRNA target sequence
gcaatgaagtaaaatcaaaaat

SEQ ID NO: 88875 - DNA, 22 bp, Artificial sequence
  SiRNA target sequence
caatgaagtaaaatcaaaaata

SEQ ID NO: 88876 - DNA, 22 bp, Artificial sequence
  SiRNA target sequence
aatgaagtaaaatcaaaaatat

SEQ ID NO: 88877 - DNA, 22 bp, Artificial sequence
  SiRNA target sequence
atgaagtaaaatcaaaaatata

SEQ ID NO: 88878 - DNA, 22 bp, Artificial sequence
  SiRNA target sequence
tgaagtaaaatcaaaaatatac

SEQ ID NO: 88879 - DNA, 22 bp, Artificial sequence
  SiRNA target sequence
gaagtaaaatcaaaaatatact

SEQ ID NO: 88880 - DNA, 22 bp, Artificial sequence
  SiRNA target sequence
aagtaaaatcaaaaatatactt

SEQ ID NO: 88881 - DNA, 22 bp, Artificial sequence
  SiRNA target sequence
agtaaaatcaaaaatatacttg

SEQ ID NO: 88882 - DNA, 22 bp, Artificial sequence
  SiRNA target sequence
gtaaaatcaaaaatatacttga

SEQ ID NO: 88883 - DNA, 22 bp, Artificial sequence
  SiRNA target sequence
taaaatcaaaaatatacttgaa

SEQ ID NO: 88884 - DNA, 22 bp, Artificial sequence
  SiRNA target sequence
aaaatcaaaaatatacttgaaa

SEQ ID NO: 88885 - DNA, 22 bp, Artificial sequence
  SiRNA target sequence
aaatcaaaaatatacttgaaaa

SEQ ID NO: 88886 - DNA, 22 bp, Artificial sequence
  SiRNA target sequence
aatcaaaaatatacttgaaaaa

SEQ ID NO: 88887 - DNA, 22 bp, Artificial sequence
  SiRNA target sequence
atcaaaaatatacttgaaaaag

SEQ ID NO: 88888 - DNA, 22 bp, Artificial sequence
  SiRNA target sequence
tcaaaaatatacttgaaaaagt

SEQ ID NO: 88889 - DNA, 22 bp, Artificial sequence
  SiRNA target sequence
caaaaatatacttgaaaaagtc

SEQ ID NO: 88890 - DNA, 22 bp, Artificial sequence
  SiRNA target sequence
aaaaatatacttgaaaaagtca

SEQ ID NO: 88891 - DNA, 22 bp, Artificial sequence
  SiRNA target sequence
aaaatatacttgaaaaagtcac

SEQ ID NO: 88892 - DNA, 22 bp, Artificial sequence
  SiRNA target sequence
aaatatacttgaaaaagtcacg

SEQ ID NO: 88893 - DNA, 22 bp, Artificial sequence
  SiRNA target sequence
aatatacttgaaaaagtcacgc

SEQ ID NO: 88894 - DNA, 22 bp, Artificial sequence
  SiRNA target sequence
atatacttgaaaaagtcacgca

SEQ ID NO: 88895 - DNA, 22 bp, Artificial sequence
  SiRNA target sequence
tatacttgaaaaagtcacgcaa

SEQ ID NO: 88896 - DNA, 22 bp, Artificial sequence
  SiRNA target sequence
atacttgaaaaagtcacgcaaa

SEQ ID NO: 88897 - DNA, 22 bp, Artificial sequence
  SiRNA target sequence
tacttgaaaaagtcacgcaaag

SEQ ID NO: 88898 - DNA, 22 bp, Artificial sequence
  SiRNA target sequence
acttgaaaaagtcacgcaaaga

SEQ ID NO: 88899 - DNA, 22 bp, Artificial sequence
  SiRNA target sequence
cttgaaaaagtcacgcaaagat

SEQ ID NO: 88900 - DNA, 22 bp, Artificial sequence
  SiRNA target sequence
ttgaaaaagtcacgcaaagatc

SEQ ID NO: 88901 - DNA, 22 bp, Artificial sequence
  SiRNA target sequence
tgaaaaagtcacgcaaagatcc

SEQ ID NO: 88902 - DNA, 22 bp, Artificial sequence
  SiRNA target sequence
gaaaaagtcacgcaaagatcct

SEQ ID NO: 88903 - DNA, 22 bp, Artificial sequence
  SiRNA target sequence
aaaaagtcacgcaaagatcctt

SEQ ID NO: 88904 - DNA, 22 bp, Artificial sequence
  SiRNA target sequence
aaaagtcacgcaaagatccttc

SEQ ID NO: 88905 - DNA, 22 bp, Artificial sequence
  SiRNA target sequence
aaagtcacgcaaagatccttcg

SEQ ID NO: 88906 - DNA, 22 bp, Artificial sequence
  SiRNA target sequence
aagtcacgcaaagatccttcga

SEQ ID NO: 88907 - DNA, 22 bp, Artificial sequence
  SiRNA target sequence
agtcacgcaaagatccttcgaa

SEQ ID NO: 88908 - DNA, 22 bp, Artificial sequence
  SiRNA target sequence
gtcacgcaaagatccttcgaat

SEQ ID NO: 88909 - DNA, 22 bp, Artificial sequence
  SiRNA target sequence
tcacgcaaagatccttcgaatt

SEQ ID NO: 88910 - DNA, 22 bp, Artificial sequence
  SiRNA target sequence
cacgcaaagatccttcgaattg

SEQ ID NO: 88911 - DNA, 22 bp, Artificial sequence
  SiRNA target sequence
acgcaaagatccttcgaattga

SEQ ID NO: 88912 - DNA, 22 bp, Artificial sequence
  SiRNA target sequence
cgcaaagatccttcgaattgaa

SEQ ID NO: 88913 - DNA, 22 bp, Artificial sequence
  SiRNA target sequence
gcaaagatccttcgaattgaaa

SEQ ID NO: 88914 - DNA, 22 bp, Artificial sequence
  SiRNA target sequence
caaagatccttcgaattgaaac

SEQ ID NO: 88915 - DNA, 22 bp, Artificial sequence
  SiRNA target sequence
aaagatccttcgaattgaaacc

SEQ ID NO: 88916 - DNA, 22 bp, Artificial sequence
  SiRNA target sequence
aagatccttcgaattgaaaccc

SEQ ID NO: 88917 - DNA, 22 bp, Artificial sequence
  SiRNA target sequence
agatccttcgaattgaaacccc

SEQ ID NO: 88918 - DNA, 22 bp, Artificial sequence
  SiRNA target sequence
gatccttcgaattgaaaccccg

SEQ ID NO: 88919 - DNA, 22 bp, Artificial sequence
  SiRNA target sequence
atccttcgaattgaaaccccgt

SEQ ID NO: 88920 - DNA, 22 bp, Artificial sequence
  SiRNA target sequence
tccttcgaattgaaaccccgtt

SEQ ID NO: 88921 - DNA, 22 bp, Artificial sequence
  SiRNA target sequence
ccttcgaattgaaaccccgttt

SEQ ID NO: 88922 - DNA, 22 bp, Artificial sequence
  SiRNA target sequence
cttcgaattgaaaccccgtttt

SEQ ID NO: 88923 - DNA, 22 bp, Artificial sequence
  SiRNA target sequence
ttcgaattgaaaccccgttttt

SEQ ID NO: 88924 - DNA, 22 bp, Artificial sequence
  SiRNA target sequence
tcgaattgaaaccccgtttttc

SEQ ID NO: 88925 - DNA, 22 bp, Artificial sequence
  SiRNA target sequence
cgaattgaaaccccgtttttcc

SEQ ID NO: 88926 - DNA, 22 bp, Artificial sequence
  SiRNA target sequence
gaattgaaaccccgtttttcca

SEQ ID NO: 88927 - DNA, 22 bp, Artificial sequence
  SiRNA target sequence
aattgaaaccccgtttttccaa

SEQ ID NO: 88928 - DNA, 22 bp, Artificial sequence
  SiRNA target sequence
attgaaaccccgtttttccaac

SEQ ID NO: 88929 - DNA, 22 bp, Artificial sequence
  SiRNA target sequence
ttgaaaccccgtttttccaact

SEQ ID NO: 88930 - DNA, 22 bp, Artificial sequence
  SiRNA target sequence
tgaaaccccgtttttccaactt

SEQ ID NO: 88931 - DNA, 22 bp, Artificial sequence
  SiRNA target sequence
gaaaccccgtttttccaacttg

SEQ ID NO: 88932 - DNA, 22 bp, Artificial sequence
  SiRNA target sequence
aaaccccgtttttccaacttgc

SEQ ID NO: 88933 - DNA, 22 bp, Artificial sequence
  SiRNA target sequence
aaccccgtttttccaacttgct

SEQ ID NO: 88934 - DNA, 22 bp, Artificial sequence
  SiRNA target sequence
accccgtttttccaacttgctc

SEQ ID NO: 88935 - DNA, 22 bp, Artificial sequence
  SiRNA target sequence
ccccgtttttccaacttgctca

SEQ ID NO: 88936 - DNA, 22 bp, Artificial sequence
  SiRNA target sequence
cccgtttttccaacttgctcaa

SEQ ID NO: 88937 - DNA, 22 bp, Artificial sequence
  SiRNA target sequence
ccgtttttccaacttgctcaat

SEQ ID NO: 88938 - DNA, 22 bp, Artificial sequence
  SiRNA target sequence
cgtttttccaacttgctcaata

SEQ ID NO: 88939 - DNA, 22 bp, Artificial sequence
  SiRNA target sequence
gtttttccaacttgctcaatat

SEQ ID NO: 88940 - DNA, 22 bp, Artificial sequence
  SiRNA target sequence
tttttccaacttgctcaatata

SEQ ID NO: 88941 - DNA, 22 bp, Artificial sequence
  SiRNA target sequence
ttttccaacttgctcaatatat

SEQ ID NO: 88942 - DNA, 22 bp, Artificial sequence
  SiRNA target sequence
tttccaacttgctcaatatata

SEQ ID NO: 88943 - DNA, 22 bp, Artificial sequence
  SiRNA target sequence
ttccaacttgctcaatatataa

SEQ ID NO: 88944 - DNA, 22 bp, Artificial sequence
  SiRNA target sequence
tccaacttgctcaatatataat

SEQ ID NO: 88945 - DNA, 22 bp, Artificial sequence
  SiRNA target sequence
ccaacttgctcaatatataata

SEQ ID NO: 88946 - DNA, 22 bp, Artificial sequence
  SiRNA target sequence
caacttgctcaatatataataa

SEQ ID NO: 88947 - DNA, 22 bp, Artificial sequence
  SiRNA target sequence
aacttgctcaatatataataat

SEQ ID NO: 88948 - DNA, 22 bp, Artificial sequence
  SiRNA target sequence
acttgctcaatatataataatg

SEQ ID NO: 88949 - DNA, 22 bp, Artificial sequence
  SiRNA target sequence
cttgctcaatatataataatgt

SEQ ID NO: 88950 - DNA, 22 bp, Artificial sequence
  SiRNA target sequence
ttgctcaatatataataatgta

SEQ ID NO: 88951 - DNA, 22 bp, Artificial sequence
  SiRNA target sequence
tgctcaatatataataatgtat

SEQ ID NO: 88952 - DNA, 22 bp, Artificial sequence
  SiRNA target sequence
gctcaatatataataatgtatc

SEQ ID NO: 88953 - DNA, 22 bp, Artificial sequence
  SiRNA target sequence
ctcaatatataataatgtatca

SEQ ID NO: 88954 - DNA, 22 bp, Artificial sequence
  SiRNA target sequence
tcaatatataataatgtatcac

SEQ ID NO: 88955 - DNA, 22 bp, Artificial sequence
  SiRNA target sequence
caatatataataatgtatcacc

SEQ ID NO: 88956 - DNA, 22 bp, Artificial sequence
  SiRNA target sequence
aatatataataatgtatcacca

SEQ ID NO: 88957 - DNA, 22 bp, Artificial sequence
  SiRNA target sequence
atatataataatgtatcaccag

SEQ ID NO: 88958 - DNA, 22 bp, Artificial sequence
  SiRNA target sequence
tatataataatgtatcaccaga

SEQ ID NO: 88959 - DNA, 22 bp, Artificial sequence
  SiRNA target sequence
atataataatgtatcaccagac

SEQ ID NO: 88960 - DNA, 22 bp, Artificial sequence
  SiRNA target sequence
tataataatgtatcaccagaca

SEQ ID NO: 88961 - DNA, 22 bp, Artificial sequence
  SiRNA target sequence
ataataatgtatcaccagacat

SEQ ID NO: 88962 - DNA, 22 bp, Artificial sequence
  SiRNA target sequence
taataatgtatcaccagacatt

SEQ ID NO: 88963 - DNA, 22 bp, Artificial sequence
  SiRNA target sequence
aataatgtatcaccagacattt

SEQ ID NO: 88964 - DNA, 22 bp, Artificial sequence
  SiRNA target sequence
ataatgtatcaccagacatttc

SEQ ID NO: 88965 - DNA, 22 bp, Artificial sequence
  SiRNA target sequence
taatgtatcaccagacatttct

SEQ ID NO: 88966 - DNA, 22 bp, Artificial sequence
  SiRNA target sequence
aatgtatcaccagacatttcta

SEQ ID NO: 88967 - DNA, 22 bp, Artificial sequence
  SiRNA target sequence
atgtatcaccagacatttctag

SEQ ID NO: 88968 - DNA, 22 bp, Artificial sequence
  SiRNA target sequence
tgtatcaccagacatttctagt

SEQ ID NO: 88969 - DNA, 22 bp, Artificial sequence
  SiRNA target sequence
gtatcaccagacatttctagta

SEQ ID NO: 88970 - DNA, 22 bp, Artificial sequence
  SiRNA target sequence
tatcaccagacatttctagtaa

SEQ ID NO: 88971 - DNA, 22 bp, Artificial sequence
  SiRNA target sequence
atcaccagacatttctagtaaa

SEQ ID NO: 88972 - DNA, 22 bp, Artificial sequence
  SiRNA target sequence
tcaccagacatttctagtaaac

SEQ ID NO: 88973 - DNA, 22 bp, Artificial sequence
  SiRNA target sequence
caccagacatttctagtaaact

SEQ ID NO: 88974 - DNA, 22 bp, Artificial sequence
  SiRNA target sequence
accagacatttctagtaaactt

SEQ ID NO: 88975 - DNA, 22 bp, Artificial sequence
  SiRNA target sequence
ccagacatttctagtaaactta

SEQ ID NO: 88976 - DNA, 22 bp, Artificial sequence
  SiRNA target sequence
cagacatttctagtaaacttaa

SEQ ID NO: 88977 - DNA, 22 bp, Artificial sequence
  SiRNA target sequence
agacatttctagtaaacttaac

SEQ ID NO: 88978 - DNA, 22 bp, Artificial sequence
  SiRNA target sequence
gacatttctagtaaacttaaca

SEQ ID NO: 88979 - DNA, 22 bp, Artificial sequence
  SiRNA target sequence
acatttctagtaaacttaacat

SEQ ID NO: 88980 - DNA, 22 bp, Artificial sequence
  SiRNA target sequence
catttctagtaaacttaacatt

SEQ ID NO: 88981 - DNA, 22 bp, Artificial sequence
  SiRNA target sequence
atttctagtaaacttaacattt

SEQ ID NO: 88982 - DNA, 22 bp, Artificial sequence
  SiRNA target sequence
tttctagtaaacttaacatttc

SEQ ID NO: 88983 - DNA, 22 bp, Artificial sequence
  SiRNA target sequence
ttctagtaaacttaacatttca

SEQ ID NO: 88984 - DNA, 22 bp, Artificial sequence
  SiRNA target sequence
tctagtaaacttaacatttcat

SEQ ID NO: 88985 - DNA, 22 bp, Artificial sequence
  SiRNA target sequence
ctagtaaacttaacatttcatt

SEQ ID NO: 88986 - DNA, 22 bp, Artificial sequence
  SiRNA target sequence
tagtaaacttaacatttcatta

SEQ ID NO: 88987 - DNA, 22 bp, Artificial sequence
  SiRNA target sequence
agtaaacttaacatttcattaa

SEQ ID NO: 88988 - DNA, 22 bp, Artificial sequence
  SiRNA target sequence
gtaaacttaacatttcattaac

SEQ ID NO: 88989 - DNA, 22 bp, Artificial sequence
  SiRNA target sequence
taaacttaacatttcattaaca

SEQ ID NO: 88990 - DNA, 22 bp, Artificial sequence
  SiRNA target sequence
aaacttaacatttcattaacaa

SEQ ID NO: 88991 - DNA, 22 bp, Artificial sequence
  SiRNA target sequence
aacttaacatttcattaacaag

SEQ ID NO: 88992 - DNA, 22 bp, Artificial sequence
  SiRNA target sequence
acttaacatttcattaacaagc

SEQ ID NO: 88993 - DNA, 22 bp, Artificial sequence
  SiRNA target sequence
cttaacatttcattaacaagca

SEQ ID NO: 88994 - DNA, 22 bp, Artificial sequence
  SiRNA target sequence
ttaacatttcattaacaagcaa

SEQ ID NO: 88995 - DNA, 22 bp, Artificial sequence
  SiRNA target sequence
taacatttcattaacaagcaaa

SEQ ID NO: 88996 - DNA, 22 bp, Artificial sequence
  SiRNA target sequence
aacatttcattaacaagcaaat

SEQ ID NO: 88997 - DNA, 22 bp, Artificial sequence
  SiRNA target sequence
acatttcattaacaagcaaatc

SEQ ID NO: 88998 - DNA, 22 bp, Artificial sequence
  SiRNA target sequence
catttcattaacaagcaaatca

SEQ ID NO: 88999 - DNA, 22 bp, Artificial sequence
  SiRNA target sequence
atttcattaacaagcaaatcat

SEQ ID NO: 89000 - DNA, 22 bp, Artificial sequence
  SiRNA target sequence
tttcattaacaagcaaatcatt

SEQ ID NO: 89001 - DNA, 22 bp, Artificial sequence
  SiRNA target sequence
ttcattaacaagcaaatcatta

SEQ ID NO: 89002 - DNA, 22 bp, Artificial sequence
  SiRNA target sequence
tcattaacaagcaaatcattat

SEQ ID NO: 89003 - DNA, 22 bp, Artificial sequence
  SiRNA target sequence
cattaacaagcaaatcattatt

SEQ ID NO: 89004 - DNA, 22 bp, Artificial sequence
  SiRNA target sequence
attaacaagcaaatcattattt

SEQ ID NO: 89005 - DNA, 22 bp, Artificial sequence
  SiRNA target sequence
ttaacaagcaaatcattatttg

SEQ ID NO: 89006 - DNA, 22 bp, Artificial sequence
  SiRNA target sequence
taacaagcaaatcattatttga

SEQ ID NO: 89007 - DNA, 22 bp, Artificial sequence
  SiRNA target sequence
aacaagcaaatcattatttgaa

SEQ ID NO: 89008 - DNA, 22 bp, Artificial sequence
  SiRNA target sequence
acaagcaaatcattatttgaac

SEQ ID NO: 89009 - DNA, 22 bp, Artificial sequence
  SiRNA target sequence
caagcaaatcattatttgaaca

SEQ ID NO: 89010 - DNA, 22 bp, Artificial sequence
  SiRNA target sequence
aagcaaatcattatttgaacaa

SEQ ID NO: 89011 - DNA, 22 bp, Artificial sequence
  SiRNA target sequence
agcaaatcattatttgaacaaa

SEQ ID NO: 89012 - DNA, 22 bp, Artificial sequence
  SiRNA target sequence
gcaaatcattatttgaacaaag

SEQ ID NO: 89013 - DNA, 22 bp, Artificial sequence
  SiRNA target sequence
caaatcattatttgaacaaagt

SEQ ID NO: 89014 - DNA, 22 bp, Artificial sequence
  SiRNA target sequence
aaatcattatttgaacaaagta

SEQ ID NO: 89015 - DNA, 22 bp, Artificial sequence
  SiRNA target sequence
aatcattatttgaacaaagtag

SEQ ID NO: 89016 - DNA, 22 bp, Artificial sequence
  SiRNA target sequence
atcattatttgaacaaagtaga

SEQ ID NO: 89017 - DNA, 22 bp, Artificial sequence
  SiRNA target sequence
tcattatttgaacaaagtagac

SEQ ID NO: 89018 - DNA, 22 bp, Artificial sequence
  SiRNA target sequence
cattatttgaacaaagtagacc

SEQ ID NO: 89019 - DNA, 22 bp, Artificial sequence
  SiRNA target sequence
attatttgaacaaagtagacca

SEQ ID NO: 89020 - DNA, 22 bp, Artificial sequence
  SiRNA target sequence
ttatttgaacaaagtagaccaa

SEQ ID NO: 89021 - DNA, 22 bp, Artificial sequence
  SiRNA target sequence
tatttgaacaaagtagaccaat

SEQ ID NO: 89022 - DNA, 22 bp, Artificial sequence
  SiRNA target sequence
atttgaacaaagtagaccaata

SEQ ID NO: 89023 - DNA, 22 bp, Artificial sequence
  SiRNA target sequence
tttgaacaaagtagaccaatac

SEQ ID NO: 89024 - DNA, 22 bp, Artificial sequence
  SiRNA target sequence
ttgaacaaagtagaccaatact

SEQ ID NO: 89025 - DNA, 22 bp, Artificial sequence
  SiRNA target sequence
tgaacaaagtagaccaatacta

SEQ ID NO: 89026 - DNA, 22 bp, Artificial sequence
  SiRNA target sequence
gaacaaagtagaccaatactat

SEQ ID NO: 89027 - DNA, 22 bp, Artificial sequence
  SiRNA target sequence
aacaaagtagaccaatactatc

SEQ ID NO: 89028 - DNA, 22 bp, Artificial sequence
  SiRNA target sequence
acaaagtagaccaatactatca

SEQ ID NO: 89029 - DNA, 22 bp, Artificial sequence
  SiRNA target sequence
caaagtagaccaatactatcac

SEQ ID NO: 89030 - DNA, 22 bp, Artificial sequence
  SiRNA target sequence
aaagtagaccaatactatcacc

SEQ ID NO: 89031 - DNA, 22 bp, Artificial sequence
  SiRNA target sequence
aagtagaccaatactatcacca

SEQ ID NO: 89032 - DNA, 22 bp, Artificial sequence
  SiRNA target sequence
agtagaccaatactatcaccag

SEQ ID NO: 89033 - DNA, 22 bp, Artificial sequence
  SiRNA target sequence
gtagaccaatactatcaccagg

SEQ ID NO: 89034 - DNA, 22 bp, Artificial sequence
  SiRNA target sequence
tagaccaatactatcaccagga

SEQ ID NO: 89035 - DNA, 22 bp, Artificial sequence
  SiRNA target sequence
agaccaatactatcaccaggaa

SEQ ID NO: 89036 - DNA, 22 bp, Artificial sequence
  SiRNA target sequence
gaccaatactatcaccaggaac

SEQ ID NO: 89037 - DNA, 22 bp, Artificial sequence
  SiRNA target sequence
accaatactatcaccaggaaca

SEQ ID NO: 89038 - DNA, 22 bp, Artificial sequence
  SiRNA target sequence
ccaatactatcaccaggaacaa

SEQ ID NO: 89039 - DNA, 22 bp, Artificial sequence
  SiRNA target sequence
caatactatcaccaggaacaaa

SEQ ID NO: 89040 - DNA, 22 bp, Artificial sequence
  SiRNA target sequence
aatactatcaccaggaacaaaa

SEQ ID NO: 89041 - DNA, 22 bp, Artificial sequence
  SiRNA target sequence
atactatcaccaggaacaaaat

SEQ ID NO: 89042 - DNA, 22 bp, Artificial sequence
  SiRNA target sequence
tactatcaccaggaacaaaatc

SEQ ID NO: 89043 - DNA, 22 bp, Artificial sequence
  SiRNA target sequence
actatcaccaggaacaaaatct

SEQ ID NO: 89044 - DNA, 22 bp, Artificial sequence
  SiRNA target sequence
ctatcaccaggaacaaaatcta

SEQ ID NO: 89045 - DNA, 22 bp, Artificial sequence
  SiRNA target sequence
tatcaccaggaacaaaatctaa

SEQ ID NO: 89046 - DNA, 22 bp, Artificial sequence
  SiRNA target sequence
atcaccaggaacaaaatctaat

SEQ ID NO: 89047 - DNA, 22 bp, Artificial sequence
  SiRNA target sequence
tcaccaggaacaaaatctaatg

SEQ ID NO: 89048 - DNA, 22 bp, Artificial sequence
  SiRNA target sequence
caccaggaacaaaatctaatgt

SEQ ID NO: 89049 - DNA, 22 bp, Artificial sequence
  SiRNA target sequence
accaggaacaaaatctaatgta

SEQ ID NO: 89050 - DNA, 22 bp, Artificial sequence
  SiRNA target sequence
ccaggaacaaaatctaatgtat

SEQ ID NO: 89051 - DNA, 22 bp, Artificial sequence
  SiRNA target sequence
caggaacaaaatctaatgtata

SEQ ID NO: 89052 - DNA, 22 bp, Artificial sequence
  SiRNA target sequence
aggaacaaaatctaatgtataa

SEQ ID NO: 89053 - DNA, 22 bp, Artificial sequence
  SiRNA target sequence
ggaacaaaatctaatgtataat

SEQ ID NO: 89054 - DNA, 22 bp, Artificial sequence
  SiRNA target sequence
gaacaaaatctaatgtataatt

SEQ ID NO: 89055 - DNA, 22 bp, Artificial sequence
  SiRNA target sequence
aacaaaatctaatgtataatta

SEQ ID NO: 89056 - DNA, 22 bp, Artificial sequence
  SiRNA target sequence
acaaaatctaatgtataattaa

SEQ ID NO: 89057 - DNA, 22 bp, Artificial sequence
  SiRNA target sequence
caaaatctaatgtataattaag

SEQ ID NO: 89058 - DNA, 22 bp, Artificial sequence
  SiRNA target sequence
aaaatctaatgtataattaagt

SEQ ID NO: 89059 - DNA, 22 bp, Artificial sequence
  SiRNA target sequence
aaatctaatgtataattaagtt

SEQ ID NO: 89060 - DNA, 22 bp, Artificial sequence
  SiRNA target sequence
aatctaatgtataattaagttg

SEQ ID NO: 89061 - DNA, 22 bp, Artificial sequence
  SiRNA target sequence
atctaatgtataattaagttga

SEQ ID NO: 89062 - DNA, 22 bp, Artificial sequence
  SiRNA target sequence
tctaatgtataattaagttgaa

SEQ ID NO: 89063 - DNA, 22 bp, Artificial sequence
  SiRNA target sequence
ctaatgtataattaagttgaac

SEQ ID NO: 89064 - DNA, 22 bp, Artificial sequence
  SiRNA target sequence
taatgtataattaagttgaacc

SEQ ID NO: 89065 - DNA, 22 bp, Artificial sequence
  SiRNA target sequence
aatgtataattaagttgaacct

SEQ ID NO: 89066 - DNA, 22 bp, Artificial sequence
  SiRNA target sequence
atgtataattaagttgaacctt

SEQ ID NO: 89067 - DNA, 22 bp, Artificial sequence
  SiRNA target sequence
tgtataattaagttgaacctta

SEQ ID NO: 89068 - DNA, 22 bp, Artificial sequence
  SiRNA target sequence
gtataattaagttgaaccttat

SEQ ID NO: 89069 - DNA, 22 bp, Artificial sequence
  SiRNA target sequence
tataattaagttgaaccttata

SEQ ID NO: 89070 - DNA, 22 bp, Artificial sequence
  SiRNA target sequence
ataattaagttgaaccttatat

SEQ ID NO: 89071 - DNA, 22 bp, Artificial sequence
  SiRNA target sequence
taattaagttgaaccttatata

SEQ ID NO: 89072 - DNA, 22 bp, Artificial sequence
  SiRNA target sequence
aattaagttgaaccttatatac

SEQ ID NO: 89073 - DNA, 22 bp, Artificial sequence
  SiRNA target sequence
attaagttgaaccttatatacc

SEQ ID NO: 89074 - DNA, 22 bp, Artificial sequence
  SiRNA target sequence
ttaagttgaaccttatatacct

SEQ ID NO: 89075 - DNA, 22 bp, Artificial sequence
  SiRNA target sequence
taagttgaaccttatatacctt

SEQ ID NO: 89076 - DNA, 22 bp, Artificial sequence
  SiRNA target sequence
aagttgaaccttatataccttt

SEQ ID NO: 89077 - DNA, 22 bp, Artificial sequence
  SiRNA target sequence
agttgaaccttatatacctttt

SEQ ID NO: 89078 - DNA, 22 bp, Artificial sequence
  SiRNA target sequence
gttgaaccttatataccttttt

SEQ ID NO: 89079 - DNA, 22 bp, Artificial sequence
  SiRNA target sequence
ttgaaccttatatacctttttc

SEQ ID NO: 89080 - DNA, 22 bp, Artificial sequence
  SiRNA target sequence
tgaaccttatatacctttttcc

SEQ ID NO: 89081 - DNA, 22 bp, Artificial sequence
  SiRNA target sequence
gaaccttatatacctttttcca

SEQ ID NO: 89082 - DNA, 22 bp, Artificial sequence
  SiRNA target sequence
aaccttatatacctttttccat

SEQ ID NO: 89083 - DNA, 22 bp, Artificial sequence
  SiRNA target sequence
accttatatacctttttccatg

SEQ ID NO: 89084 - DNA, 22 bp, Artificial sequence
  SiRNA target sequence
ccttatatacctttttccatgt

SEQ ID NO: 89085 - DNA, 22 bp, Artificial sequence
  SiRNA target sequence
cttatatacctttttccatgta

SEQ ID NO: 89086 - DNA, 22 bp, Artificial sequence
  SiRNA target sequence
ttatatacctttttccatgtac

SEQ ID NO: 89087 - DNA, 22 bp, Artificial sequence
  SiRNA target sequence
tatatacctttttccatgtaca

SEQ ID NO: 89088 - DNA, 22 bp, Artificial sequence
  SiRNA target sequence
atatacctttttccatgtacag

SEQ ID NO: 89089 - DNA, 22 bp, Artificial sequence
  SiRNA target sequence
tatacctttttccatgtacagg

SEQ ID NO: 89090 - DNA, 22 bp, Artificial sequence
  SiRNA target sequence
atacctttttccatgtacagga

SEQ ID NO: 89091 - DNA, 22 bp, Artificial sequence
  SiRNA target sequence
tacctttttccatgtacaggaa

SEQ ID NO: 89092 - DNA, 22 bp, Artificial sequence
  SiRNA target sequence
acctttttccatgtacaggaaa

SEQ ID NO: 89093 - DNA, 22 bp, Artificial sequence
  SiRNA target sequence
cctttttccatgtacaggaaag

SEQ ID NO: 89094 - DNA, 22 bp, Artificial sequence
  SiRNA target sequence
ctttttccatgtacaggaaagg

SEQ ID NO: 89095 - DNA, 22 bp, Artificial sequence
  SiRNA target sequence
tttttccatgtacaggaaaggt

SEQ ID NO: 89096 - DNA, 22 bp, Artificial sequence
  SiRNA target sequence
ttttccatgtacaggaaaggtt

SEQ ID NO: 89097 - DNA, 22 bp, Artificial sequence
  SiRNA target sequence
tttccatgtacaggaaaggttt

SEQ ID NO: 89098 - DNA, 22 bp, Artificial sequence
  SiRNA target sequence
ttccatgtacaggaaaggtttt

SEQ ID NO: 89099 - DNA, 22 bp, Artificial sequence
  SiRNA target sequence
tccatgtacaggaaaggttttc

SEQ ID NO: 89100 - DNA, 22 bp, Artificial sequence
  SiRNA target sequence
ccatgtacaggaaaggttttca

SEQ ID NO: 89101 - DNA, 22 bp, Artificial sequence
  SiRNA target sequence
catgtacaggaaaggttttcaa

SEQ ID NO: 89102 - DNA, 22 bp, Artificial sequence
  SiRNA target sequence
atgtacaggaaaggttttcaat

SEQ ID NO: 89103 - DNA, 22 bp, Artificial sequence
  SiRNA target sequence
tgtacaggaaaggttttcaata

SEQ ID NO: 89104 - DNA, 22 bp, Artificial sequence
  SiRNA target sequence
gtacaggaaaggttttcaatat

SEQ ID NO: 89105 - DNA, 22 bp, Artificial sequence
  SiRNA target sequence
tacaggaaaggttttcaatatt

SEQ ID NO: 89106 - DNA, 22 bp, Artificial sequence
  SiRNA target sequence
acaggaaaggttttcaatattt

SEQ ID NO: 89107 - DNA, 22 bp, Artificial sequence
  SiRNA target sequence
caggaaaggttttcaatattta

SEQ ID NO: 89108 - DNA, 22 bp, Artificial sequence
  SiRNA target sequence
aggaaaggttttcaatatttag

SEQ ID NO: 89109 - DNA, 22 bp, Artificial sequence
  SiRNA target sequence
ggaaaggttttcaatatttagt

SEQ ID NO: 89110 - DNA, 22 bp, Artificial sequence
  SiRNA target sequence
gaaaggttttcaatatttagta

SEQ ID NO: 89111 - DNA, 22 bp, Artificial sequence
  SiRNA target sequence
aaaggttttcaatatttagtat

SEQ ID NO: 89112 - DNA, 22 bp, Artificial sequence
  SiRNA target sequence
aaggttttcaatatttagtata

SEQ ID NO: 89113 - DNA, 22 bp, Artificial sequence
  SiRNA target sequence
aggttttcaatatttagtatat

SEQ ID NO: 89114 - DNA, 22 bp, Artificial sequence
  SiRNA target sequence
ggttttcaatatttagtatatt

SEQ ID NO: 89115 - DNA, 22 bp, Artificial sequence
  SiRNA target sequence
gttttcaatatttagtatattt

SEQ ID NO: 89116 - DNA, 22 bp, Artificial sequence
  SiRNA target sequence
ttttcaatatttagtatatttg

SEQ ID NO: 89117 - DNA, 22 bp, Artificial sequence
  SiRNA target sequence
tttcaatatttagtatatttgt

SEQ ID NO: 89118 - DNA, 22 bp, Artificial sequence
  SiRNA target sequence
ttcaatatttagtatatttgta

SEQ ID NO: 89119 - DNA, 22 bp, Artificial sequence
  SiRNA target sequence
tcaatatttagtatatttgtat

SEQ ID NO: 89120 - DNA, 22 bp, Artificial sequence
  SiRNA target sequence
caatatttagtatatttgtatc

SEQ ID NO: 89121 - DNA, 22 bp, Artificial sequence
  SiRNA target sequence
aatatttagtatatttgtatct

SEQ ID NO: 89122 - DNA, 22 bp, Artificial sequence
  SiRNA target sequence
atatttagtatatttgtatcta

SEQ ID NO: 89123 - DNA, 22 bp, Artificial sequence
  SiRNA target sequence
tatttagtatatttgtatctat

SEQ ID NO: 89124 - DNA, 22 bp, Artificial sequence
  SiRNA target sequence
atttagtatatttgtatctatc

SEQ ID NO: 89125 - DNA, 22 bp, Artificial sequence
  SiRNA target sequence
tttagtatatttgtatctatca

SEQ ID NO: 89126 - DNA, 22 bp, Artificial sequence
  SiRNA target sequence
ttagtatatttgtatctatcaa

SEQ ID NO: 89127 - DNA, 22 bp, Artificial sequence
  SiRNA target sequence
tagtatatttgtatctatcaaa

SEQ ID NO: 89128 - DNA, 22 bp, Artificial sequence
  SiRNA target sequence
agtatatttgtatctatcaaat

SEQ ID NO: 89129 - DNA, 22 bp, Artificial sequence
  SiRNA target sequence
gtatatttgtatctatcaaatt

SEQ ID NO: 89130 - DNA, 22 bp, Artificial sequence
  SiRNA target sequence
tatatttgtatctatcaaattt

SEQ ID NO: 89131 - DNA, 22 bp, Artificial sequence
  SiRNA target sequence
atatttgtatctatcaaattta

SEQ ID NO: 89132 - DNA, 22 bp, Artificial sequence
  SiRNA target sequence
tatttgtatctatcaaatttat

SEQ ID NO: 89133 - DNA, 22 bp, Artificial sequence
  SiRNA target sequence
atttgtatctatcaaatttata

SEQ ID NO: 89134 - DNA, 22 bp, Artificial sequence
  SiRNA target sequence
tttgtatctatcaaatttatat

SEQ ID NO: 89135 - DNA, 22 bp, Artificial sequence
  SiRNA target sequence
ttgtatctatcaaatttatatt

SEQ ID NO: 89136 - DNA, 22 bp, Artificial sequence
  SiRNA target sequence
tgtatctatcaaatttatattc

SEQ ID NO: 89137 - DNA, 22 bp, Artificial sequence
  SiRNA target sequence
gtatctatcaaatttatattct

SEQ ID NO: 89138 - DNA, 22 bp, Artificial sequence
  SiRNA target sequence
tatctatcaaatttatattctc

SEQ ID NO: 89139 - DNA, 22 bp, Artificial sequence
  SiRNA target sequence
atctatcaaatttatattctcg

SEQ ID NO: 89140 - DNA, 22 bp, Artificial sequence
  SiRNA target sequence
tctatcaaatttatattctcgt

SEQ ID NO: 89141 - DNA, 22 bp, Artificial sequence
  SiRNA target sequence
ctatcaaatttatattctcgtt

SEQ ID NO: 89142 - DNA, 22 bp, Artificial sequence
  SiRNA target sequence
tatcaaatttatattctcgttt

SEQ ID NO: 89143 - DNA, 22 bp, Artificial sequence
  SiRNA target sequence
atcaaatttatattctcgtttg

SEQ ID NO: 89144 - DNA, 22 bp, Artificial sequence
  SiRNA target sequence
tcaaatttatattctcgtttgt

SEQ ID NO: 89145 - DNA, 22 bp, Artificial sequence
  SiRNA target sequence
caaatttatattctcgtttgtc

SEQ ID NO: 89146 - DNA, 22 bp, Artificial sequence
  SiRNA target sequence
aaatttatattctcgtttgtct

SEQ ID NO: 89147 - DNA, 22 bp, Artificial sequence
  SiRNA target sequence
aatttatattctcgtttgtctt

SEQ ID NO: 89148 - DNA, 22 bp, Artificial sequence
  SiRNA target sequence
atttatattctcgtttgtcttt

SEQ ID NO: 89149 - DNA, 22 bp, Artificial sequence
  SiRNA target sequence
tttatattctcgtttgtcttta

SEQ ID NO: 89150 - DNA, 22 bp, Artificial sequence
  SiRNA target sequence
ttatattctcgtttgtctttat

SEQ ID NO: 89151 - DNA, 22 bp, Artificial sequence
  SiRNA target sequence
tatattctcgtttgtctttatt

SEQ ID NO: 89152 - DNA, 22 bp, Artificial sequence
  SiRNA target sequence
atattctcgtttgtctttattt

SEQ ID NO: 89153 - DNA, 22 bp, Artificial sequence
  SiRNA target sequence
tattctcgtttgtctttatttt

SEQ ID NO: 89154 - DNA, 22 bp, Artificial sequence
  SiRNA target sequence
attctcgtttgtctttatttta

SEQ ID NO: 89155 - DNA, 22 bp, Artificial sequence
  SiRNA target sequence
ttctcgtttgtctttattttat

SEQ ID NO: 89156 - DNA, 22 bp, Artificial sequence
  SiRNA target sequence
tctcgtttgtctttattttata

SEQ ID NO: 89157 - DNA, 22 bp, Artificial sequence
  SiRNA target sequence
ctcgtttgtctttattttataa

SEQ ID NO: 89158 - DNA, 22 bp, Artificial sequence
  SiRNA target sequence
tcgtttgtctttattttataag

SEQ ID NO: 89159 - DNA, 22 bp, Artificial sequence
  SiRNA target sequence
cgtttgtctttattttataaga

SEQ ID NO: 89160 - DNA, 22 bp, Artificial sequence
  SiRNA target sequence
gtttgtctttattttataagaa

SEQ ID NO: 89161 - DNA, 22 bp, Artificial sequence
  SiRNA target sequence
tttgtctttattttataagaac

SEQ ID NO: 89162 - DNA, 22 bp, Artificial sequence
  SiRNA target sequence
ttgtctttattttataagaacc

SEQ ID NO: 89163 - DNA, 22 bp, Artificial sequence
  SiRNA target sequence
tgtctttattttataagaacct

SEQ ID NO: 89164 - DNA, 22 bp, Artificial sequence
  SiRNA target sequence
gtctttattttataagaacctg

SEQ ID NO: 89165 - DNA, 22 bp, Artificial sequence
  SiRNA target sequence
tctttattttataagaacctgt

SEQ ID NO: 89166 - DNA, 22 bp, Artificial sequence
  SiRNA target sequence
ctttattttataagaacctgta

SEQ ID NO: 89167 - DNA, 22 bp, Artificial sequence
  SiRNA target sequence
tttattttataagaacctgtat

SEQ ID NO: 89168 - DNA, 22 bp, Artificial sequence
  SiRNA target sequence
ttattttataagaacctgtata

SEQ ID NO: 89169 - DNA, 22 bp, Artificial sequence
  SiRNA target sequence
tattttataagaacctgtatag

SEQ ID NO: 89170 - DNA, 22 bp, Artificial sequence
  SiRNA target sequence
attttataagaacctgtatagt

SEQ ID NO: 89171 - DNA, 22 bp, Artificial sequence
  SiRNA target sequence
ttttataagaacctgtatagtt

SEQ ID NO: 89172 - DNA, 22 bp, Artificial sequence
  SiRNA target sequence
tttataagaacctgtatagttg

SEQ ID NO: 89173 - DNA, 22 bp, Artificial sequence
  SiRNA target sequence
ttataagaacctgtatagttgg

SEQ ID NO: 89174 - DNA, 22 bp, Artificial sequence
  SiRNA target sequence
tataagaacctgtatagttggt

SEQ ID NO: 89175 - DNA, 22 bp, Artificial sequence
  SiRNA target sequence
ataagaacctgtatagttggtc

SEQ ID NO: 89176 - DNA, 22 bp, Artificial sequence
  SiRNA target sequence
taagaacctgtatagttggtct

SEQ ID NO: 89177 - DNA, 22 bp, Artificial sequence
  SiRNA target sequence
aagaacctgtatagttggtctt

SEQ ID NO: 89178 - DNA, 22 bp, Artificial sequence
  SiRNA target sequence
agaacctgtatagttggtcttt

SEQ ID NO: 89179 - DNA, 22 bp, Artificial sequence
  SiRNA target sequence
gaacctgtatagttggtctttt

SEQ ID NO: 89180 - DNA, 22 bp, Artificial sequence
  SiRNA target sequence
aacctgtatagttggtcttttt

SEQ ID NO: 89181 - DNA, 22 bp, Artificial sequence
  SiRNA target sequence
acctgtatagttggtcttttta

SEQ ID NO: 89182 - DNA, 22 bp, Artificial sequence
  SiRNA target sequence
cctgtatagttggtctttttaa

SEQ ID NO: 89183 - DNA, 22 bp, Artificial sequence
  SiRNA target sequence
ctgtatagttggtctttttaat

SEQ ID NO: 89184 - DNA, 22 bp, Artificial sequence
  SiRNA target sequence
tgtatagttggtctttttaatt

SEQ ID NO: 89185 - DNA, 22 bp, Artificial sequence
  SiRNA target sequence
gtatagttggtctttttaatta

SEQ ID NO: 89186 - DNA, 22 bp, Artificial sequence
  SiRNA target sequence
tatagttggtctttttaattat

SEQ ID NO: 89187 - DNA, 22 bp, Artificial sequence
  SiRNA target sequence
atagttggtctttttaattata

SEQ ID NO: 89188 - DNA, 22 bp, Artificial sequence
  SiRNA target sequence
tagttggtctttttaattataa

SEQ ID NO: 89189 - DNA, 22 bp, Artificial sequence
  SiRNA target sequence
agttggtctttttaattataag

SEQ ID NO: 89190 - DNA, 22 bp, Artificial sequence
  SiRNA target sequence
gttggtctttttaattataagc

SEQ ID NO: 89191 - DNA, 22 bp, Artificial sequence
  SiRNA target sequence
ttggtctttttaattataagct

SEQ ID NO: 89192 - DNA, 22 bp, Artificial sequence
  SiRNA target sequence
tggtctttttaattataagctt

SEQ ID NO: 89193 - DNA, 22 bp, Artificial sequence
  SiRNA target sequence
ggtctttttaattataagctta

SEQ ID NO: 89194 - DNA, 22 bp, Artificial sequence
  SiRNA target sequence
gtctttttaattataagcttat

SEQ ID NO: 89195 - DNA, 22 bp, Artificial sequence
  SiRNA target sequence
tctttttaattataagcttatt

SEQ ID NO: 89196 - DNA, 22 bp, Artificial sequence
  SiRNA target sequence
ctttttaattataagcttattg

SEQ ID NO: 89197 - DNA, 22 bp, Artificial sequence
  SiRNA target sequence
tttttaattataagcttattga

SEQ ID NO: 89198 - DNA, 22 bp, Artificial sequence
  SiRNA target sequence
ttttaattataagcttattgaa

SEQ ID NO: 89199 - DNA, 22 bp, Artificial sequence
  SiRNA target sequence
tttaattataagcttattgaaa

SEQ ID NO: 89200 - DNA, 22 bp, Artificial sequence
  SiRNA target sequence
ttaattataagcttattgaaat

SEQ ID NO: 89201 - DNA, 22 bp, Artificial sequence
  SiRNA target sequence
taattataagcttattgaaatt

SEQ ID NO: 89202 - DNA, 22 bp, Artificial sequence
  SiRNA target sequence
aattataagcttattgaaattt

SEQ ID NO: 89203 - DNA, 22 bp, Artificial sequence
  SiRNA target sequence
attataagcttattgaaatttc

SEQ ID NO: 89204 - DNA, 22 bp, Artificial sequence
  SiRNA target sequence
ttataagcttattgaaatttct

SEQ ID NO: 89205 - DNA, 22 bp, Artificial sequence
  SiRNA target sequence
tataagcttattgaaatttcta

SEQ ID NO: 89206 - DNA, 22 bp, Artificial sequence
  SiRNA target sequence
ataagcttattgaaatttctaa

SEQ ID NO: 89207 - DNA, 22 bp, Artificial sequence
  SiRNA target sequence
taagcttattgaaatttctaat

SEQ ID NO: 89208 - DNA, 22 bp, Artificial sequence
  SiRNA target sequence
aagcttattgaaatttctaata

SEQ ID NO: 89209 - DNA, 22 bp, Artificial sequence
  SiRNA target sequence
agcttattgaaatttctaatat

SEQ ID NO: 89210 - DNA, 22 bp, Artificial sequence
  SiRNA target sequence
gcttattgaaatttctaatatt

SEQ ID NO: 89211 - DNA, 22 bp, Artificial sequence
  SiRNA target sequence
cttattgaaatttctaatattt

SEQ ID NO: 89212 - DNA, 22 bp, Artificial sequence
  SiRNA target sequence
ttattgaaatttctaatattta

SEQ ID NO: 89213 - DNA, 22 bp, Artificial sequence
  SiRNA target sequence
tattgaaatttctaatatttaa

SEQ ID NO: 89214 - DNA, 22 bp, Artificial sequence
  SiRNA target sequence
attgaaatttctaatatttaaa

SEQ ID NO: 89215 - DNA, 22 bp, Artificial sequence
  SiRNA target sequence
ttgaaatttctaatatttaaag

SEQ ID NO: 89216 - DNA, 22 bp, Artificial sequence
  SiRNA target sequence
tgaaatttctaatatttaaagg

SEQ ID NO: 89217 - DNA, 22 bp, Artificial sequence
  SiRNA target sequence
gaaatttctaatatttaaagga

SEQ ID NO: 89218 - DNA, 22 bp, Artificial sequence
  SiRNA target sequence
aaatttctaatatttaaaggaa

SEQ ID NO: 89219 - DNA, 22 bp, Artificial sequence
  SiRNA target sequence
aatttctaatatttaaaggaac

SEQ ID NO: 89220 - DNA, 22 bp, Artificial sequence
  SiRNA target sequence
atttctaatatttaaaggaaca

SEQ ID NO: 89221 - DNA, 22 bp, Artificial sequence
  SiRNA target sequence
tttctaatatttaaaggaacaa

SEQ ID NO: 89222 - DNA, 22 bp, Artificial sequence
  SiRNA target sequence
ttctaatatttaaaggaacaaa

SEQ ID NO: 89223 - DNA, 22 bp, Artificial sequence
  SiRNA target sequence
tctaatatttaaaggaacaaaa

SEQ ID NO: 89224 - DNA, 22 bp, Artificial sequence
  SiRNA target sequence
ctaatatttaaaggaacaaaat

SEQ ID NO: 89225 - DNA, 22 bp, Artificial sequence
  SiRNA target sequence
taatatttaaaggaacaaaatc

SEQ ID NO: 89226 - DNA, 22 bp, Artificial sequence
  SiRNA target sequence
aatatttaaaggaacaaaatct

SEQ ID NO: 89227 - DNA, 22 bp, Artificial sequence
  SiRNA target sequence
atatttaaaggaacaaaatcta

SEQ ID NO: 89228 - DNA, 22 bp, Artificial sequence
  SiRNA target sequence
tatttaaaggaacaaaatctac

SEQ ID NO: 89229 - DNA, 22 bp, Artificial sequence
  SiRNA target sequence
atttaaaggaacaaaatctaca

SEQ ID NO: 89230 - DNA, 22 bp, Artificial sequence
  SiRNA target sequence
tttaaaggaacaaaatctacat

SEQ ID NO: 89231 - DNA, 22 bp, Artificial sequence
  SiRNA target sequence
ttaaaggaacaaaatctacatt

SEQ ID NO: 89232 - DNA, 22 bp, Artificial sequence
  SiRNA target sequence
taaaggaacaaaatctacattt

SEQ ID NO: 89233 - DNA, 22 bp, Artificial sequence
  SiRNA target sequence
aaaggaacaaaatctacattta

SEQ ID NO: 89234 - DNA, 22 bp, Artificial sequence
  SiRNA target sequence
aaggaacaaaatctacatttag

SEQ ID NO: 89235 - DNA, 22 bp, Artificial sequence
  SiRNA target sequence
aggaacaaaatctacatttaga

SEQ ID NO: 89236 - DNA, 22 bp, Artificial sequence
  SiRNA target sequence
ggaacaaaatctacatttagat

SEQ ID NO: 89237 - DNA, 22 bp, Artificial sequence
  SiRNA target sequence
gaacaaaatctacatttagatt

SEQ ID NO: 89238 - DNA, 22 bp, Artificial sequence
  SiRNA target sequence
aacaaaatctacatttagatta

SEQ ID NO: 89239 - DNA, 22 bp, Artificial sequence
  SiRNA target sequence
acaaaatctacatttagattat

SEQ ID NO: 89240 - DNA, 22 bp, Artificial sequence
  SiRNA target sequence
caaaatctacatttagattata

SEQ ID NO: 89241 - DNA, 22 bp, Artificial sequence
  SiRNA target sequence
aaaatctacatttagattatat

SEQ ID NO: 89242 - DNA, 22 bp, Artificial sequence
  SiRNA target sequence
aaatctacatttagattatatt

SEQ ID NO: 89243 - DNA, 22 bp, Artificial sequence
  SiRNA target sequence
aatctacatttagattatattc

SEQ ID NO: 89244 - DNA, 22 bp, Artificial sequence
  SiRNA target sequence
atctacatttagattatattct

SEQ ID NO: 89245 - DNA, 22 bp, Artificial sequence
  SiRNA target sequence
tctacatttagattatattcta

SEQ ID NO: 89246 - DNA, 22 bp, Artificial sequence
  SiRNA target sequence
ctacatttagattatattctaa

SEQ ID NO: 89247 - DNA, 22 bp, Artificial sequence
  SiRNA target sequence
tacatttagattatattctaat

SEQ ID NO: 89248 - DNA, 22 bp, Artificial sequence
  SiRNA target sequence
acatttagattatattctaatt

SEQ ID NO: 89249 - DNA, 22 bp, Artificial sequence
  SiRNA target sequence
catttagattatattctaattt

SEQ ID NO: 89250 - DNA, 22 bp, Artificial sequence
  SiRNA target sequence
atttagattatattctaattta

SEQ ID NO: 89251 - DNA, 22 bp, Artificial sequence
  SiRNA target sequence
tttagattatattctaatttat

SEQ ID NO: 89252 - DNA, 22 bp, Artificial sequence
  SiRNA target sequence
ttagattatattctaatttatt

SEQ ID NO: 89253 - DNA, 22 bp, Artificial sequence
  SiRNA target sequence
tagattatattctaatttattg

SEQ ID NO: 89254 - DNA, 22 bp, Artificial sequence
  SiRNA target sequence
agattatattctaatttattga

SEQ ID NO: 89255 - DNA, 22 bp, Artificial sequence
  SiRNA target sequence
gattatattctaatttattgaa

SEQ ID NO: 89256 - DNA, 22 bp, Artificial sequence
  SiRNA target sequence
attatattctaatttattgaat

SEQ ID NO: 89257 - DNA, 22 bp, Artificial sequence
  SiRNA target sequence
ttatattctaatttattgaatt

SEQ ID NO: 89258 - DNA, 22 bp, Artificial sequence
  SiRNA target sequence
tatattctaatttattgaattt

SEQ ID NO: 89259 - DNA, 22 bp, Artificial sequence
  SiRNA target sequence
atattctaatttattgaatttc

SEQ ID NO: 89260 - DNA, 22 bp, Artificial sequence
  SiRNA target sequence
tattctaatttattgaatttca

SEQ ID NO: 89261 - DNA, 22 bp, Artificial sequence
  SiRNA target sequence
attctaatttattgaatttcat

SEQ ID NO: 89262 - DNA, 23 bp, Artificial sequence
  SiRNA target sequence
ttatatccaactatcaaaaaata

SEQ ID NO: 89263 - DNA, 23 bp, Artificial sequence
  SiRNA target sequence
tatatccaactatcaaaaaatag

SEQ ID NO: 89264 - DNA, 23 bp, Artificial sequence
  SiRNA target sequence
atatccaactatcaaaaaatagc

SEQ ID NO: 89265 - DNA, 23 bp, Artificial sequence
  SiRNA target sequence
tatccaactatcaaaaaatagcc

SEQ ID NO: 89266 - DNA, 23 bp, Artificial sequence
  SiRNA target sequence
atccaactatcaaaaaatagcct

SEQ ID NO: 89267 - DNA, 23 bp, Artificial sequence
  SiRNA target sequence
tccaactatcaaaaaatagcctc

SEQ ID NO: 89268 - DNA, 23 bp, Artificial sequence
  SiRNA target sequence
ccaactatcaaaaaatagcctct

SEQ ID NO: 89269 - DNA, 23 bp, Artificial sequence
  SiRNA target sequence
caactatcaaaaaatagcctctt

SEQ ID NO: 89270 - DNA, 23 bp, Artificial sequence
  SiRNA target sequence
aactatcaaaaaatagcctcttt

SEQ ID NO: 89271 - DNA, 23 bp, Artificial sequence
  SiRNA target sequence
actatcaaaaaatagcctctttt

SEQ ID NO: 89272 - DNA, 23 bp, Artificial sequence
  SiRNA target sequence
ctatcaaaaaatagcctcttttc

SEQ ID NO: 89273 - DNA, 23 bp, Artificial sequence
  SiRNA target sequence
tatcaaaaaatagcctcttttct

SEQ ID NO: 89274 - DNA, 23 bp, Artificial sequence
  SiRNA target sequence
atcaaaaaatagcctcttttctt

SEQ ID NO: 89275 - DNA, 23 bp, Artificial sequence
  SiRNA target sequence
tcaaaaaatagcctcttttcttt

SEQ ID NO: 89276 - DNA, 23 bp, Artificial sequence
  SiRNA target sequence
caaaaaatagcctcttttctttc

SEQ ID NO: 89277 - DNA, 23 bp, Artificial sequence
  SiRNA target sequence
aaaaaatagcctcttttctttca

SEQ ID NO: 89278 - DNA, 23 bp, Artificial sequence
  SiRNA target sequence
aaaaatagcctcttttctttcac

SEQ ID NO: 89279 - DNA, 23 bp, Artificial sequence
  SiRNA target sequence
aaaatagcctcttttctttcaca

SEQ ID NO: 89280 - DNA, 23 bp, Artificial sequence
  SiRNA target sequence
aaatagcctcttttctttcacaa

SEQ ID NO: 89281 - DNA, 23 bp, Artificial sequence
  SiRNA target sequence
aatagcctcttttctttcacaat

SEQ ID NO: 89282 - DNA, 23 bp, Artificial sequence
  SiRNA target sequence
atagcctcttttctttcacaatt

SEQ ID NO: 89283 - DNA, 23 bp, Artificial sequence
  SiRNA target sequence
tagcctcttttctttcacaattt

SEQ ID NO: 89284 - DNA, 23 bp, Artificial sequence
  SiRNA target sequence
agcctcttttctttcacaatttc

SEQ ID NO: 89285 - DNA, 23 bp, Artificial sequence
  SiRNA target sequence
gcctcttttctttcacaatttca

SEQ ID NO: 89286 - DNA, 23 bp, Artificial sequence
  SiRNA target sequence
cctcttttctttcacaatttcag

SEQ ID NO: 89287 - DNA, 23 bp, Artificial sequence
  SiRNA target sequence
ctcttttctttcacaatttcaga

SEQ ID NO: 89288 - DNA, 23 bp, Artificial sequence
  SiRNA target sequence
tcttttctttcacaatttcagaa

SEQ ID NO: 89289 - DNA, 23 bp, Artificial sequence
  SiRNA target sequence
cttttctttcacaatttcagaaa

SEQ ID NO: 89290 - DNA, 23 bp, Artificial sequence
  SiRNA target sequence
ttttctttcacaatttcagaaaa

SEQ ID NO: 89291 - DNA, 23 bp, Artificial sequence
  SiRNA target sequence
tttctttcacaatttcagaaaaa

SEQ ID NO: 89292 - DNA, 23 bp, Artificial sequence
  SiRNA target sequence
ttctttcacaatttcagaaaaat

SEQ ID NO: 89293 - DNA, 23 bp, Artificial sequence
  SiRNA target sequence
tctttcacaatttcagaaaaatt

SEQ ID NO: 89294 - DNA, 23 bp, Artificial sequence
  SiRNA target sequence
ctttcacaatttcagaaaaattt

SEQ ID NO: 89295 - DNA, 23 bp, Artificial sequence
  SiRNA target sequence
tttcacaatttcagaaaaatttt

SEQ ID NO: 89296 - DNA, 23 bp, Artificial sequence
  SiRNA target sequence
ttcacaatttcagaaaaattttc

SEQ ID NO: 89297 - DNA, 23 bp, Artificial sequence
  SiRNA target sequence
tcacaatttcagaaaaattttca

SEQ ID NO: 89298 - DNA, 23 bp, Artificial sequence
  SiRNA target sequence
cacaatttcagaaaaattttcat

SEQ ID NO: 89299 - DNA, 23 bp, Artificial sequence
  SiRNA target sequence
acaatttcagaaaaattttcatt

SEQ ID NO: 89300 - DNA, 23 bp, Artificial sequence
  SiRNA target sequence
caatttcagaaaaattttcatta

SEQ ID NO: 89301 - DNA, 23 bp, Artificial sequence
  SiRNA target sequence
aatttcagaaaaattttcattaa

SEQ ID NO: 89302 - DNA, 23 bp, Artificial sequence
  SiRNA target sequence
atttcagaaaaattttcattaaa

SEQ ID NO: 89303 - DNA, 23 bp, Artificial sequence
  SiRNA target sequence
tttcagaaaaattttcattaaaa

SEQ ID NO: 89304 - DNA, 23 bp, Artificial sequence
  SiRNA target sequence
ttcagaaaaattttcattaaaaa

SEQ ID NO: 89305 - DNA, 23 bp, Artificial sequence
  SiRNA target sequence
tcagaaaaattttcattaaaaat

SEQ ID NO: 89306 - DNA, 23 bp, Artificial sequence
  SiRNA target sequence
cagaaaaattttcattaaaaatg

SEQ ID NO: 89307 - DNA, 23 bp, Artificial sequence
  SiRNA target sequence
agaaaaattttcattaaaaatgc

SEQ ID NO: 89308 - DNA, 23 bp, Artificial sequence
  SiRNA target sequence
gaaaaattttcattaaaaatgct

SEQ ID NO: 89309 - DNA, 23 bp, Artificial sequence
  SiRNA target sequence
aaaaattttcattaaaaatgcta

SEQ ID NO: 89310 - DNA, 23 bp, Artificial sequence
  SiRNA target sequence
aaaattttcattaaaaatgctat

SEQ ID NO: 89311 - DNA, 23 bp, Artificial sequence
  SiRNA target sequence
aaattttcattaaaaatgctata

SEQ ID NO: 89312 - DNA, 23 bp, Artificial sequence
  SiRNA target sequence
aattttcattaaaaatgctataa

SEQ ID NO: 89313 - DNA, 23 bp, Artificial sequence
  SiRNA target sequence
attttcattaaaaatgctataaa

SEQ ID NO: 89314 - DNA, 23 bp, Artificial sequence
  SiRNA target sequence
ttttcattaaaaatgctataaat

SEQ ID NO: 89315 - DNA, 23 bp, Artificial sequence
  SiRNA target sequence
tttcattaaaaatgctataaata

SEQ ID NO: 89316 - DNA, 23 bp, Artificial sequence
  SiRNA target sequence
ttcattaaaaatgctataaatag

SEQ ID NO: 89317 - DNA, 23 bp, Artificial sequence
  SiRNA target sequence
tcattaaaaatgctataaatagt

SEQ ID NO: 89318 - DNA, 23 bp, Artificial sequence
  SiRNA target sequence
cattaaaaatgctataaatagtt

SEQ ID NO: 89319 - DNA, 23 bp, Artificial sequence
  SiRNA target sequence
attaaaaatgctataaatagttt

SEQ ID NO: 89320 - DNA, 23 bp, Artificial sequence
  SiRNA target sequence
ttaaaaatgctataaatagtttt

SEQ ID NO: 89321 - DNA, 23 bp, Artificial sequence
  SiRNA target sequence
taaaaatgctataaatagttttt

SEQ ID NO: 89322 - DNA, 23 bp, Artificial sequence
  SiRNA target sequence
aaaaatgctataaatagtttttt

SEQ ID NO: 89323 - DNA, 23 bp, Artificial sequence
  SiRNA target sequence
aaaatgctataaatagttttttg

SEQ ID NO: 89324 - DNA, 23 bp, Artificial sequence
  SiRNA target sequence
aaatgctataaatagttttttgc

SEQ ID NO: 89325 - DNA, 23 bp, Artificial sequence
  SiRNA target sequence
aatgctataaatagttttttgca

SEQ ID NO: 89326 - DNA, 23 bp, Artificial sequence
  SiRNA target sequence
atgctataaatagttttttgcat

SEQ ID NO: 89327 - DNA, 23 bp, Artificial sequence
  SiRNA target sequence
tgctataaatagttttttgcata

SEQ ID NO: 89328 - DNA, 23 bp, Artificial sequence
  SiRNA target sequence
gctataaatagttttttgcatat

SEQ ID NO: 89329 - DNA, 23 bp, Artificial sequence
  SiRNA target sequence
ctataaatagttttttgcatatc

SEQ ID NO: 89330 - DNA, 23 bp, Artificial sequence
  SiRNA target sequence
tataaatagttttttgcatatca

SEQ ID NO: 89331 - DNA, 23 bp, Artificial sequence
  SiRNA target sequence
ataaatagttttttgcatatcag

SEQ ID NO: 89332 - DNA, 23 bp, Artificial sequence
  SiRNA target sequence
taaatagttttttgcatatcagg

SEQ ID NO: 89333 - DNA, 23 bp, Artificial sequence
  SiRNA target sequence
aaatagttttttgcatatcaggt

SEQ ID NO: 89334 - DNA, 23 bp, Artificial sequence
  SiRNA target sequence
aatagttttttgcatatcaggtc

SEQ ID NO: 89335 - DNA, 23 bp, Artificial sequence
  SiRNA target sequence
atagttttttgcatatcaggtcg

SEQ ID NO: 89336 - DNA, 23 bp, Artificial sequence
  SiRNA target sequence
tagttttttgcatatcaggtcgg

SEQ ID NO: 89337 - DNA, 23 bp, Artificial sequence
  SiRNA target sequence
agttttttgcatatcaggtcggc

SEQ ID NO: 89338 - DNA, 23 bp, Artificial sequence
  SiRNA target sequence
gttttttgcatatcaggtcggcc

SEQ ID NO: 89339 - DNA, 23 bp, Artificial sequence
  SiRNA target sequence
ttttttgcatatcaggtcggcca

SEQ ID NO: 89340 - DNA, 23 bp, Artificial sequence
  SiRNA target sequence
tttttgcatatcaggtcggccac

SEQ ID NO: 89341 - DNA, 23 bp, Artificial sequence
  SiRNA target sequence
ttttgcatatcaggtcggccaca

SEQ ID NO: 89342 - DNA, 23 bp, Artificial sequence
  SiRNA target sequence
tttgcatatcaggtcggccacaa

SEQ ID NO: 89343 - DNA, 23 bp, Artificial sequence
  SiRNA target sequence
ttgcatatcaggtcggccacaaa

SEQ ID NO: 89344 - DNA, 23 bp, Artificial sequence
  SiRNA target sequence
tgcatatcaggtcggccacaaac

SEQ ID NO: 89345 - DNA, 23 bp, Artificial sequence
  SiRNA target sequence
gcatatcaggtcggccacaaaca

SEQ ID NO: 89346 - DNA, 23 bp, Artificial sequence
  SiRNA target sequence
catatcaggtcggccacaaacat

SEQ ID NO: 89347 - DNA, 23 bp, Artificial sequence
  SiRNA target sequence
atatcaggtcggccacaaacata

SEQ ID NO: 89348 - DNA, 23 bp, Artificial sequence
  SiRNA target sequence
tatcaggtcggccacaaacataa

SEQ ID NO: 89349 - DNA, 23 bp, Artificial sequence
  SiRNA target sequence
atcaggtcggccacaaacataaa

SEQ ID NO: 89350 - DNA, 23 bp, Artificial sequence
  SiRNA target sequence
tcaggtcggccacaaacataaac

SEQ ID NO: 89351 - DNA, 23 bp, Artificial sequence
  SiRNA target sequence
caggtcggccacaaacataaacc

SEQ ID NO: 89352 - DNA, 23 bp, Artificial sequence
  SiRNA target sequence
aggtcggccacaaacataaacca

SEQ ID NO: 89353 - DNA, 23 bp, Artificial sequence
  SiRNA target sequence
ggtcggccacaaacataaaccaa

SEQ ID NO: 89354 - DNA, 23 bp, Artificial sequence
  SiRNA target sequence
gtcggccacaaacataaaccaaa

SEQ ID NO: 89355 - DNA, 23 bp, Artificial sequence
  SiRNA target sequence
tcggccacaaacataaaccaaac

SEQ ID NO: 89356 - DNA, 23 bp, Artificial sequence
  SiRNA target sequence
cggccacaaacataaaccaaaca

SEQ ID NO: 89357 - DNA, 23 bp, Artificial sequence
  SiRNA target sequence
ggccacaaacataaaccaaacat

SEQ ID NO: 89358 - DNA, 23 bp, Artificial sequence
  SiRNA target sequence
gccacaaacataaaccaaacatc

SEQ ID NO: 89359 - DNA, 23 bp, Artificial sequence
  SiRNA target sequence
ccacaaacataaaccaaacatcc

SEQ ID NO: 89360 - DNA, 23 bp, Artificial sequence
  SiRNA target sequence
cacaaacataaaccaaacatccg

SEQ ID NO: 89361 - DNA, 23 bp, Artificial sequence
  SiRNA target sequence
acaaacataaaccaaacatccgt

SEQ ID NO: 89362 - DNA, 23 bp, Artificial sequence
  SiRNA target sequence
caaacataaaccaaacatccgtc

SEQ ID NO: 89363 - DNA, 23 bp, Artificial sequence
  SiRNA target sequence
aaacataaaccaaacatccgtct

SEQ ID NO: 89364 - DNA, 23 bp, Artificial sequence
  SiRNA target sequence
aacataaaccaaacatccgtctt

SEQ ID NO: 89365 - DNA, 23 bp, Artificial sequence
  SiRNA target sequence
acataaaccaaacatccgtcttt

SEQ ID NO: 89366 - DNA, 23 bp, Artificial sequence
  SiRNA target sequence
cataaaccaaacatccgtcttta

SEQ ID NO: 89367 - DNA, 23 bp, Artificial sequence
  SiRNA target sequence
ataaaccaaacatccgtctttaa

SEQ ID NO: 89368 - DNA, 23 bp, Artificial sequence
  SiRNA target sequence
taaaccaaacatccgtctttaat

SEQ ID NO: 89369 - DNA, 23 bp, Artificial sequence
  SiRNA target sequence
aaaccaaacatccgtctttaatg

SEQ ID NO: 89370 - DNA, 23 bp, Artificial sequence
  SiRNA target sequence
aaccaaacatccgtctttaatgt

SEQ ID NO: 89371 - DNA, 23 bp, Artificial sequence
  SiRNA target sequence
accaaacatccgtctttaatgta

SEQ ID NO: 89372 - DNA, 23 bp, Artificial sequence
  SiRNA target sequence
ccaaacatccgtctttaatgtat

SEQ ID NO: 89373 - DNA, 23 bp, Artificial sequence
  SiRNA target sequence
caaacatccgtctttaatgtatg

SEQ ID NO: 89374 - DNA, 23 bp, Artificial sequence
  SiRNA target sequence
aaacatccgtctttaatgtatgt

SEQ ID NO: 89375 - DNA, 23 bp, Artificial sequence
  SiRNA target sequence
aacatccgtctttaatgtatgtt

SEQ ID NO: 89376 - DNA, 23 bp, Artificial sequence
  SiRNA target sequence
acatccgtctttaatgtatgttt

SEQ ID NO: 89377 - DNA, 23 bp, Artificial sequence
  SiRNA target sequence
catccgtctttaatgtatgtttt

SEQ ID NO: 89378 - DNA, 23 bp, Artificial sequence
  SiRNA target sequence
atccgtctttaatgtatgttttt

SEQ ID NO: 89379 - DNA, 23 bp, Artificial sequence
  SiRNA target sequence
tccgtctttaatgtatgttttta

SEQ ID NO: 89380 - DNA, 23 bp, Artificial sequence
  SiRNA target sequence
ccgtctttaatgtatgtttttat

SEQ ID NO: 89381 - DNA, 23 bp, Artificial sequence
  SiRNA target sequence
cgtctttaatgtatgtttttatc

SEQ ID NO: 89382 - DNA, 23 bp, Artificial sequence
  SiRNA target sequence
gtctttaatgtatgtttttatct

SEQ ID NO: 89383 - DNA, 23 bp, Artificial sequence
  SiRNA target sequence
tctttaatgtatgtttttatctc

SEQ ID NO: 89384 - DNA, 23 bp, Artificial sequence
  SiRNA target sequence
ctttaatgtatgtttttatctca

SEQ ID NO: 89385 - DNA, 23 bp, Artificial sequence
  SiRNA target sequence
tttaatgtatgtttttatctcat

SEQ ID NO: 89386 - DNA, 23 bp, Artificial sequence
  SiRNA target sequence
ttaatgtatgtttttatctcatt

SEQ ID NO: 89387 - DNA, 23 bp, Artificial sequence
  SiRNA target sequence
taatgtatgtttttatctcattt

SEQ ID NO: 89388 - DNA, 23 bp, Artificial sequence
  SiRNA target sequence
aatgtatgtttttatctcattta

SEQ ID NO: 89389 - DNA, 23 bp, Artificial sequence
  SiRNA target sequence
atgtatgtttttatctcatttaa

SEQ ID NO: 89390 - DNA, 23 bp, Artificial sequence
  SiRNA target sequence
tgtatgtttttatctcatttaaa

SEQ ID NO: 89391 - DNA, 23 bp, Artificial sequence
  SiRNA target sequence
gtatgtttttatctcatttaaat

SEQ ID NO: 89392 - DNA, 23 bp, Artificial sequence
  SiRNA target sequence
tatgtttttatctcatttaaatt

SEQ ID NO: 89393 - DNA, 23 bp, Artificial sequence
  SiRNA target sequence
atgtttttatctcatttaaattt

SEQ ID NO: 89394 - DNA, 23 bp, Artificial sequence
  SiRNA target sequence
tgtttttatctcatttaaatttt

SEQ ID NO: 89395 - DNA, 23 bp, Artificial sequence
  SiRNA target sequence
gtttttatctcatttaaattttg

SEQ ID NO: 89396 - DNA, 23 bp, Artificial sequence
  SiRNA target sequence
tttttatctcatttaaattttgt

SEQ ID NO: 89397 - DNA, 23 bp, Artificial sequence
  SiRNA target sequence
ttttatctcatttaaattttgta

SEQ ID NO: 89398 - DNA, 23 bp, Artificial sequence
  SiRNA target sequence
tttatctcatttaaattttgtaa

SEQ ID NO: 89399 - DNA, 23 bp, Artificial sequence
  SiRNA target sequence
ttatctcatttaaattttgtaat

SEQ ID NO: 89400 - DNA, 23 bp, Artificial sequence
  SiRNA target sequence
tatctcatttaaattttgtaata

SEQ ID NO: 89401 - DNA, 23 bp, Artificial sequence
  SiRNA target sequence
atctcatttaaattttgtaataa

SEQ ID NO: 89402 - DNA, 23 bp, Artificial sequence
  SiRNA target sequence
tctcatttaaattttgtaataaa

SEQ ID NO: 89403 - DNA, 23 bp, Artificial sequence
  SiRNA target sequence
ctcatttaaattttgtaataaat

SEQ ID NO: 89404 - DNA, 23 bp, Artificial sequence
  SiRNA target sequence
tcatttaaattttgtaataaata

SEQ ID NO: 89405 - DNA, 23 bp, Artificial sequence
  SiRNA target sequence
catttaaattttgtaataaataa

SEQ ID NO: 89406 - DNA, 23 bp, Artificial sequence
  SiRNA target sequence
atttaaattttgtaataaataat

SEQ ID NO: 89407 - DNA, 23 bp, Artificial sequence
  SiRNA target sequence
tttaaattttgtaataaataatc

SEQ ID NO: 89408 - DNA, 23 bp, Artificial sequence
  SiRNA target sequence
ttaaattttgtaataaataatca

SEQ ID NO: 89409 - DNA, 23 bp, Artificial sequence
  SiRNA target sequence
taaattttgtaataaataatcag

SEQ ID NO: 89410 - DNA, 23 bp, Artificial sequence
  SiRNA target sequence
aaattttgtaataaataatcagt

SEQ ID NO: 89411 - DNA, 23 bp, Artificial sequence
  SiRNA target sequence
aattttgtaataaataatcagta

SEQ ID NO: 89412 - DNA, 23 bp, Artificial sequence
  SiRNA target sequence
attttgtaataaataatcagtaa

SEQ ID NO: 89413 - DNA, 23 bp, Artificial sequence
  SiRNA target sequence
ttttgtaataaataatcagtaac

SEQ ID NO: 89414 - DNA, 23 bp, Artificial sequence
  SiRNA target sequence
tttgtaataaataatcagtaaca

SEQ ID NO: 89415 - DNA, 23 bp, Artificial sequence
  SiRNA target sequence
ttgtaataaataatcagtaacat

SEQ ID NO: 89416 - DNA, 23 bp, Artificial sequence
  SiRNA target sequence
tgtaataaataatcagtaacata

SEQ ID NO: 89417 - DNA, 23 bp, Artificial sequence
  SiRNA target sequence
gtaataaataatcagtaacataa

SEQ ID NO: 89418 - DNA, 23 bp, Artificial sequence
  SiRNA target sequence
taataaataatcagtaacataaa

SEQ ID NO: 89419 - DNA, 23 bp, Artificial sequence
  SiRNA target sequence
aataaataatcagtaacataaat

SEQ ID NO: 89420 - DNA, 23 bp, Artificial sequence
  SiRNA target sequence
ataaataatcagtaacataaatt

SEQ ID NO: 89421 - DNA, 23 bp, Artificial sequence
  SiRNA target sequence
taaataatcagtaacataaattt

SEQ ID NO: 89422 - DNA, 23 bp, Artificial sequence
  SiRNA target sequence
aaataatcagtaacataaatttt

SEQ ID NO: 89423 - DNA, 23 bp, Artificial sequence
  SiRNA target sequence
aataatcagtaacataaatttta

SEQ ID NO: 89424 - DNA, 23 bp, Artificial sequence
  SiRNA target sequence
ataatcagtaacataaattttat

SEQ ID NO: 89425 - DNA, 23 bp, Artificial sequence
  SiRNA target sequence
taatcagtaacataaattttatt

SEQ ID NO: 89426 - DNA, 23 bp, Artificial sequence
  SiRNA target sequence
aatcagtaacataaattttatta

SEQ ID NO: 89427 - DNA, 23 bp, Artificial sequence
  SiRNA target sequence
atcagtaacataaattttattac

SEQ ID NO: 89428 - DNA, 23 bp, Artificial sequence
  SiRNA target sequence
tcagtaacataaattttattaca

SEQ ID NO: 89429 - DNA, 23 bp, Artificial sequence
  SiRNA target sequence
cagtaacataaattttattacaa

SEQ ID NO: 89430 - DNA, 23 bp, Artificial sequence
  SiRNA target sequence
agtaacataaattttattacaag

SEQ ID NO: 89431 - DNA, 23 bp, Artificial sequence
  SiRNA target sequence
gtaacataaattttattacaaga

SEQ ID NO: 89432 - DNA, 23 bp, Artificial sequence
  SiRNA target sequence
taacataaattttattacaagat

SEQ ID NO: 89433 - DNA, 23 bp, Artificial sequence
  SiRNA target sequence
aacataaattttattacaagata

SEQ ID NO: 89434 - DNA, 23 bp, Artificial sequence
  SiRNA target sequence
acataaattttattacaagataa

SEQ ID NO: 89435 - DNA, 23 bp, Artificial sequence
  SiRNA target sequence
cataaattttattacaagataaa

SEQ ID NO: 89436 - DNA, 23 bp, Artificial sequence
  SiRNA target sequence
ataaattttattacaagataaaa

SEQ ID NO: 89437 - DNA, 23 bp, Artificial sequence
  SiRNA target sequence
taaattttattacaagataaaat

SEQ ID NO: 89438 - DNA, 23 bp, Artificial sequence
  SiRNA target sequence
aaattttattacaagataaaatt

SEQ ID NO: 89439 - DNA, 23 bp, Artificial sequence
  SiRNA target sequence
aattttattacaagataaaattt

SEQ ID NO: 89440 - DNA, 23 bp, Artificial sequence
  SiRNA target sequence
attttattacaagataaaatttt

SEQ ID NO: 89441 - DNA, 23 bp, Artificial sequence
  SiRNA target sequence
ttttattacaagataaaatttta

SEQ ID NO: 89442 - DNA, 23 bp, Artificial sequence
  SiRNA target sequence
tttattacaagataaaattttaa

SEQ ID NO: 89443 - DNA, 23 bp, Artificial sequence
  SiRNA target sequence
ttattacaagataaaattttaat

SEQ ID NO: 89444 - DNA, 23 bp, Artificial sequence
  SiRNA target sequence
tattacaagataaaattttaata

SEQ ID NO: 89445 - DNA, 23 bp, Artificial sequence
  SiRNA target sequence
attacaagataaaattttaataa

SEQ ID NO: 89446 - DNA, 23 bp, Artificial sequence
  SiRNA target sequence
ttacaagataaaattttaataat

SEQ ID NO: 89447 - DNA, 23 bp, Artificial sequence
  SiRNA target sequence
tacaagataaaattttaataatt

SEQ ID NO: 89448 - DNA, 23 bp, Artificial sequence
  SiRNA target sequence
acaagataaaattttaataattt

SEQ ID NO: 89449 - DNA, 23 bp, Artificial sequence
  SiRNA target sequence
caagataaaattttaataatttc

SEQ ID NO: 89450 - DNA, 23 bp, Artificial sequence
  SiRNA target sequence
aagataaaattttaataatttct

SEQ ID NO: 89451 - DNA, 23 bp, Artificial sequence
  SiRNA target sequence
agataaaattttaataatttctg

SEQ ID NO: 89452 - DNA, 23 bp, Artificial sequence
  SiRNA target sequence
gataaaattttaataatttctgt

SEQ ID NO: 89453 - DNA, 23 bp, Artificial sequence
  SiRNA target sequence
ataaaattttaataatttctgtg

SEQ ID NO: 89454 - DNA, 23 bp, Artificial sequence
  SiRNA target sequence
taaaattttaataatttctgtgt

SEQ ID NO: 89455 - DNA, 23 bp, Artificial sequence
  SiRNA target sequence
aaaattttaataatttctgtgtt

SEQ ID NO: 89456 - DNA, 23 bp, Artificial sequence
  SiRNA target sequence
aaattttaataatttctgtgttt

SEQ ID NO: 89457 - DNA, 23 bp, Artificial sequence
  SiRNA target sequence
aattttaataatttctgtgtttt

SEQ ID NO: 89458 - DNA, 23 bp, Artificial sequence
  SiRNA target sequence
attttaataatttctgtgttttt

SEQ ID NO: 89459 - DNA, 23 bp, Artificial sequence
  SiRNA target sequence
ttttaataatttctgtgttttta

SEQ ID NO: 89460 - DNA, 23 bp, Artificial sequence
  SiRNA target sequence
tttaataatttctgtgtttttat

SEQ ID NO: 89461 - DNA, 23 bp, Artificial sequence
  SiRNA target sequence
ttaataatttctgtgtttttata

SEQ ID NO: 89462 - DNA, 23 bp, Artificial sequence
  SiRNA target sequence
taataatttctgtgtttttatat

SEQ ID NO: 89463 - DNA, 23 bp, Artificial sequence
  SiRNA target sequence
aataatttctgtgtttttatatt

SEQ ID NO: 89464 - DNA, 23 bp, Artificial sequence
  SiRNA target sequence
ataatttctgtgtttttatattt

SEQ ID NO: 89465 - DNA, 23 bp, Artificial sequence
  SiRNA target sequence
taatttctgtgtttttatatttt

SEQ ID NO: 89466 - DNA, 23 bp, Artificial sequence
  SiRNA target sequence
aatttctgtgtttttatattttg

SEQ ID NO: 89467 - DNA, 23 bp, Artificial sequence
  SiRNA target sequence
atttctgtgtttttatattttgc

SEQ ID NO: 89468 - DNA, 23 bp, Artificial sequence
  SiRNA target sequence
tttctgtgtttttatattttgca

SEQ ID NO: 89469 - DNA, 23 bp, Artificial sequence
  SiRNA target sequence
ttctgtgtttttatattttgcat

SEQ ID NO: 89470 - DNA, 23 bp, Artificial sequence
  SiRNA target sequence
tctgtgtttttatattttgcatc

SEQ ID NO: 89471 - DNA, 23 bp, Artificial sequence
  SiRNA target sequence
ctgtgtttttatattttgcatct

SEQ ID NO: 89472 - DNA, 23 bp, Artificial sequence
  SiRNA target sequence
tgtgtttttatattttgcatctt

SEQ ID NO: 89473 - DNA, 23 bp, Artificial sequence
  SiRNA target sequence
gtgtttttatattttgcatcttt

SEQ ID NO: 89474 - DNA, 23 bp, Artificial sequence
  SiRNA target sequence
tgtttttatattttgcatcttta

SEQ ID NO: 89475 - DNA, 23 bp, Artificial sequence
  SiRNA target sequence
gtttttatattttgcatctttaa

SEQ ID NO: 89476 - DNA, 23 bp, Artificial sequence
  SiRNA target sequence
tttttatattttgcatctttaat

SEQ ID NO: 89477 - DNA, 23 bp, Artificial sequence
  SiRNA target sequence
ttttatattttgcatctttaata

SEQ ID NO: 89478 - DNA, 23 bp, Artificial sequence
  SiRNA target sequence
tttatattttgcatctttaataa

SEQ ID NO: 89479 - DNA, 23 bp, Artificial sequence
  SiRNA target sequence
ttatattttgcatctttaataag

SEQ ID NO: 89480 - DNA, 23 bp, Artificial sequence
  SiRNA target sequence
tatattttgcatctttaataaga

SEQ ID NO: 89481 - DNA, 23 bp, Artificial sequence
  SiRNA target sequence
atattttgcatctttaataagat

SEQ ID NO: 89482 - DNA, 23 bp, Artificial sequence
  SiRNA target sequence
tattttgcatctttaataagatc

SEQ ID NO: 89483 - DNA, 23 bp, Artificial sequence
  SiRNA target sequence
attttgcatctttaataagatca

SEQ ID NO: 89484 - DNA, 23 bp, Artificial sequence
  SiRNA target sequence
ttttgcatctttaataagatcat

SEQ ID NO: 89485 - DNA, 23 bp, Artificial sequence
  SiRNA target sequence
tttgcatctttaataagatcatc

SEQ ID NO: 89486 - DNA, 23 bp, Artificial sequence
  SiRNA target sequence
ttgcatctttaataagatcatct

SEQ ID NO: 89487 - DNA, 23 bp, Artificial sequence
  SiRNA target sequence
tgcatctttaataagatcatctt

SEQ ID NO: 89488 - DNA, 23 bp, Artificial sequence
  SiRNA target sequence
gcatctttaataagatcatcttc

SEQ ID NO: 89489 - DNA, 23 bp, Artificial sequence
  SiRNA target sequence
catctttaataagatcatcttct

SEQ ID NO: 89490 - DNA, 23 bp, Artificial sequence
  SiRNA target sequence
atctttaataagatcatcttctt

SEQ ID NO: 89491 - DNA, 23 bp, Artificial sequence
  SiRNA target sequence
tctttaataagatcatcttcttg

SEQ ID NO: 89492 - DNA, 23 bp, Artificial sequence
  SiRNA target sequence
ctttaataagatcatcttcttga

SEQ ID NO: 89493 - DNA, 23 bp, Artificial sequence
  SiRNA target sequence
tttaataagatcatcttcttgat

SEQ ID NO: 89494 - DNA, 23 bp, Artificial sequence
  SiRNA target sequence
ttaataagatcatcttcttgatt

SEQ ID NO: 89495 - DNA, 23 bp, Artificial sequence
  SiRNA target sequence
taataagatcatcttcttgattt

SEQ ID NO: 89496 - DNA, 23 bp, Artificial sequence
  SiRNA target sequence
aataagatcatcttcttgatttc

SEQ ID NO: 89497 - DNA, 23 bp, Artificial sequence
  SiRNA target sequence
ataagatcatcttcttgatttct

SEQ ID NO: 89498 - DNA, 23 bp, Artificial sequence
  SiRNA target sequence
taagatcatcttcttgatttcta

SEQ ID NO: 89499 - DNA, 23 bp, Artificial sequence
  SiRNA target sequence
aagatcatcttcttgatttctaa

SEQ ID NO: 89500 - DNA, 23 bp, Artificial sequence
  SiRNA target sequence
agatcatcttcttgatttctaaa

SEQ ID NO: 89501 - DNA, 23 bp, Artificial sequence
  SiRNA target sequence
gatcatcttcttgatttctaaat

SEQ ID NO: 89502 - DNA, 23 bp, Artificial sequence
  SiRNA target sequence
atcatcttcttgatttctaaatc

SEQ ID NO: 89503 - DNA, 23 bp, Artificial sequence
  SiRNA target sequence
tcatcttcttgatttctaaatcc

SEQ ID NO: 89504 - DNA, 23 bp, Artificial sequence
  SiRNA target sequence
catcttcttgatttctaaatcca

SEQ ID NO: 89505 - DNA, 23 bp, Artificial sequence
  SiRNA target sequence
atcttcttgatttctaaatccat

SEQ ID NO: 89506 - DNA, 23 bp, Artificial sequence
  SiRNA target sequence
tcttcttgatttctaaatccata

SEQ ID NO: 89507 - DNA, 23 bp, Artificial sequence
  SiRNA target sequence
cttcttgatttctaaatccatat

SEQ ID NO: 89508 - DNA, 23 bp, Artificial sequence
  SiRNA target sequence
ttcttgatttctaaatccatata

SEQ ID NO: 89509 - DNA, 23 bp, Artificial sequence
  SiRNA target sequence
tcttgatttctaaatccatatat

SEQ ID NO: 89510 - DNA, 23 bp, Artificial sequence
  SiRNA target sequence
cttgatttctaaatccatatatt

SEQ ID NO: 89511 - DNA, 23 bp, Artificial sequence
  SiRNA target sequence
ttgatttctaaatccatatatta

SEQ ID NO: 89512 - DNA, 23 bp, Artificial sequence
  SiRNA target sequence
tgatttctaaatccatatattag

SEQ ID NO: 89513 - DNA, 23 bp, Artificial sequence
  SiRNA target sequence
gatttctaaatccatatattagt

SEQ ID NO: 89514 - DNA, 23 bp, Artificial sequence
  SiRNA target sequence
atttctaaatccatatattagtt

SEQ ID NO: 89515 - DNA, 23 bp, Artificial sequence
  SiRNA target sequence
tttctaaatccatatattagttt

SEQ ID NO: 89516 - DNA, 23 bp, Artificial sequence
  SiRNA target sequence
ttctaaatccatatattagtttg

SEQ ID NO: 89517 - DNA, 23 bp, Artificial sequence
  SiRNA target sequence
tctaaatccatatattagtttga

SEQ ID NO: 89518 - DNA, 23 bp, Artificial sequence
  SiRNA target sequence
ctaaatccatatattagtttgat

SEQ ID NO: 89519 - DNA, 23 bp, Artificial sequence
  SiRNA target sequence
taaatccatatattagtttgata

SEQ ID NO: 89520 - DNA, 23 bp, Artificial sequence
  SiRNA target sequence
aaatccatatattagtttgatat

SEQ ID NO: 89521 - DNA, 23 bp, Artificial sequence
  SiRNA target sequence
aatccatatattagtttgatata

SEQ ID NO: 89522 - DNA, 23 bp, Artificial sequence
  SiRNA target sequence
atccatatattagtttgatatat

SEQ ID NO: 89523 - DNA, 23 bp, Artificial sequence
  SiRNA target sequence
tccatatattagtttgatatatt

SEQ ID NO: 89524 - DNA, 23 bp, Artificial sequence
  SiRNA target sequence
ccatatattagtttgatatattg

SEQ ID NO: 89525 - DNA, 23 bp, Artificial sequence
  SiRNA target sequence
catatattagtttgatatattga

SEQ ID NO: 89526 - DNA, 23 bp, Artificial sequence
  SiRNA target sequence
atatattagtttgatatattgat

SEQ ID NO: 89527 - DNA, 23 bp, Artificial sequence
  SiRNA target sequence
tatattagtttgatatattgatc

SEQ ID NO: 89528 - DNA, 23 bp, Artificial sequence
  SiRNA target sequence
atattagtttgatatattgatcg

SEQ ID NO: 89529 - DNA, 23 bp, Artificial sequence
  SiRNA target sequence
tattagtttgatatattgatcgt

SEQ ID NO: 89530 - DNA, 23 bp, Artificial sequence
  SiRNA target sequence
attagtttgatatattgatcgtc

SEQ ID NO: 89531 - DNA, 23 bp, Artificial sequence
  SiRNA target sequence
ttagtttgatatattgatcgtct

SEQ ID NO: 89532 - DNA, 23 bp, Artificial sequence
  SiRNA target sequence
tagtttgatatattgatcgtctt

SEQ ID NO: 89533 - DNA, 23 bp, Artificial sequence
  SiRNA target sequence
agtttgatatattgatcgtcttc

SEQ ID NO: 89534 - DNA, 23 bp, Artificial sequence
  SiRNA target sequence
gtttgatatattgatcgtcttct

SEQ ID NO: 89535 - DNA, 23 bp, Artificial sequence
  SiRNA target sequence
tttgatatattgatcgtcttctt

SEQ ID NO: 89536 - DNA, 23 bp, Artificial sequence
  SiRNA target sequence
ttgatatattgatcgtcttcttt

SEQ ID NO: 89537 - DNA, 23 bp, Artificial sequence
  SiRNA target sequence
tgatatattgatcgtcttcttta

SEQ ID NO: 89538 - DNA, 23 bp, Artificial sequence
  SiRNA target sequence
gatatattgatcgtcttctttat

SEQ ID NO: 89539 - DNA, 23 bp, Artificial sequence
  SiRNA target sequence
atatattgatcgtcttctttatt

SEQ ID NO: 89540 - DNA, 23 bp, Artificial sequence
  SiRNA target sequence
tatattgatcgtcttctttattt

SEQ ID NO: 89541 - DNA, 23 bp, Artificial sequence
  SiRNA target sequence
atattgatcgtcttctttatttt

SEQ ID NO: 89542 - DNA, 23 bp, Artificial sequence
  SiRNA target sequence
tattgatcgtcttctttattttt

SEQ ID NO: 89543 - DNA, 23 bp, Artificial sequence
  SiRNA target sequence
attgatcgtcttctttatttttc

SEQ ID NO: 89544 - DNA, 23 bp, Artificial sequence
  SiRNA target sequence
ttgatcgtcttctttatttttca

SEQ ID NO: 89545 - DNA, 23 bp, Artificial sequence
  SiRNA target sequence
tgatcgtcttctttatttttcaa

SEQ ID NO: 89546 - DNA, 23 bp, Artificial sequence
  SiRNA target sequence
gatcgtcttctttatttttcaaa

SEQ ID NO: 89547 - DNA, 23 bp, Artificial sequence
  SiRNA target sequence
atcgtcttctttatttttcaaaa

SEQ ID NO: 89548 - DNA, 23 bp, Artificial sequence
  SiRNA target sequence
tcgtcttctttatttttcaaaaa

SEQ ID NO: 89549 - DNA, 23 bp, Artificial sequence
  SiRNA target sequence
cgtcttctttatttttcaaaaac

SEQ ID NO: 89550 - DNA, 23 bp, Artificial sequence
  SiRNA target sequence
gtcttctttatttttcaaaaacg

SEQ ID NO: 89551 - DNA, 23 bp, Artificial sequence
  SiRNA target sequence
tcttctttatttttcaaaaacga

SEQ ID NO: 89552 - DNA, 23 bp, Artificial sequence
  SiRNA target sequence
cttctttatttttcaaaaacgaa

SEQ ID NO: 89553 - DNA, 23 bp, Artificial sequence
  SiRNA target sequence
ttctttatttttcaaaaacgaaa

SEQ ID NO: 89554 - DNA, 23 bp, Artificial sequence
  SiRNA target sequence
tctttatttttcaaaaacgaaaa

SEQ ID NO: 89555 - DNA, 23 bp, Artificial sequence
  SiRNA target sequence
ctttatttttcaaaaacgaaaaa

SEQ ID NO: 89556 - DNA, 23 bp, Artificial sequence
  SiRNA target sequence
tttatttttcaaaaacgaaaaaa

SEQ ID NO: 89557 - DNA, 23 bp, Artificial sequence
  SiRNA target sequence
ttatttttcaaaaacgaaaaaaa

SEQ ID NO: 89558 - DNA, 23 bp, Artificial sequence
  SiRNA target sequence
tatttttcaaaaacgaaaaaaat

SEQ ID NO: 89559 - DNA, 23 bp, Artificial sequence
  SiRNA target sequence
atttttcaaaaacgaaaaaaatg

SEQ ID NO: 89560 - DNA, 23 bp, Artificial sequence
  SiRNA target sequence
tttttcaaaaacgaaaaaaatgg

SEQ ID NO: 89561 - DNA, 23 bp, Artificial sequence
  SiRNA target sequence
ttttcaaaaacgaaaaaaatgga

SEQ ID NO: 89562 - DNA, 23 bp, Artificial sequence
  SiRNA target sequence
tttcaaaaacgaaaaaaatggag

SEQ ID NO: 89563 - DNA, 23 bp, Artificial sequence
  SiRNA target sequence
ttcaaaaacgaaaaaaatggagc

SEQ ID NO: 89564 - DNA, 23 bp, Artificial sequence
  SiRNA target sequence
tcaaaaacgaaaaaaatggagca

SEQ ID NO: 89565 - DNA, 23 bp, Artificial sequence
  SiRNA target sequence
caaaaacgaaaaaaatggagcaa

SEQ ID NO: 89566 - DNA, 23 bp, Artificial sequence
  SiRNA target sequence
aaaaacgaaaaaaatggagcaat

SEQ ID NO: 89567 - DNA, 23 bp, Artificial sequence
  SiRNA target sequence
aaaacgaaaaaaatggagcaatg

SEQ ID NO: 89568 - DNA, 23 bp, Artificial sequence
  SiRNA target sequence
aaacgaaaaaaatggagcaatgc

SEQ ID NO: 89569 - DNA, 23 bp, Artificial sequence
  SiRNA target sequence
aacgaaaaaaatggagcaatgcc

SEQ ID NO: 89570 - DNA, 23 bp, Artificial sequence
  SiRNA target sequence
acgaaaaaaatggagcaatgcca

SEQ ID NO: 89571 - DNA, 23 bp, Artificial sequence
  SiRNA target sequence
cgaaaaaaatggagcaatgccag

SEQ ID NO: 89572 - DNA, 23 bp, Artificial sequence
  SiRNA target sequence
gaaaaaaatggagcaatgccagt

SEQ ID NO: 89573 - DNA, 23 bp, Artificial sequence
  SiRNA target sequence
aaaaaaatggagcaatgccagtt

SEQ ID NO: 89574 - DNA, 23 bp, Artificial sequence
  SiRNA target sequence
aaaaaatggagcaatgccagttc

SEQ ID NO: 89575 - DNA, 23 bp, Artificial sequence
  SiRNA target sequence
aaaaatggagcaatgccagttcc

SEQ ID NO: 89576 - DNA, 23 bp, Artificial sequence
  SiRNA target sequence
aaaatggagcaatgccagttcca

SEQ ID NO: 89577 - DNA, 23 bp, Artificial sequence
  SiRNA target sequence
aaatggagcaatgccagttccag

SEQ ID NO: 89578 - DNA, 23 bp, Artificial sequence
  SiRNA target sequence
aatggagcaatgccagttccagt

SEQ ID NO: 89579 - DNA, 23 bp, Artificial sequence
  SiRNA target sequence
atggagcaatgccagttccagta

SEQ ID NO: 89580 - DNA, 23 bp, Artificial sequence
  SiRNA target sequence
tggagcaatgccagttccagtac

SEQ ID NO: 89581 - DNA, 23 bp, Artificial sequence
  SiRNA target sequence
ggagcaatgccagttccagtaca

SEQ ID NO: 89582 - DNA, 23 bp, Artificial sequence
  SiRNA target sequence
gagcaatgccagttccagtacaa

SEQ ID NO: 89583 - DNA, 23 bp, Artificial sequence
  SiRNA target sequence
agcaatgccagttccagtacaaa

SEQ ID NO: 89584 - DNA, 23 bp, Artificial sequence
  SiRNA target sequence
gcaatgccagttccagtacaaat

SEQ ID NO: 89585 - DNA, 23 bp, Artificial sequence
  SiRNA target sequence
caatgccagttccagtacaaata

SEQ ID NO: 89586 - DNA, 23 bp, Artificial sequence
  SiRNA target sequence
aatgccagttccagtacaaatac

SEQ ID NO: 89587 - DNA, 23 bp, Artificial sequence
  SiRNA target sequence
atgccagttccagtacaaatacc

SEQ ID NO: 89588 - DNA, 23 bp, Artificial sequence
  SiRNA target sequence
tgccagttccagtacaaataccc

SEQ ID NO: 89589 - DNA, 23 bp, Artificial sequence
  SiRNA target sequence
gccagttccagtacaaataccca

SEQ ID NO: 89590 - DNA, 23 bp, Artificial sequence
  SiRNA target sequence
ccagttccagtacaaatacccaa

SEQ ID NO: 89591 - DNA, 23 bp, Artificial sequence
  SiRNA target sequence
cagttccagtacaaatacccaac

SEQ ID NO: 89592 - DNA, 23 bp, Artificial sequence
  SiRNA target sequence
agttccagtacaaatacccaaca

SEQ ID NO: 89593 - DNA, 23 bp, Artificial sequence
  SiRNA target sequence
gttccagtacaaatacccaacac

SEQ ID NO: 89594 - DNA, 23 bp, Artificial sequence
  SiRNA target sequence
ttccagtacaaatacccaacact

SEQ ID NO: 89595 - DNA, 23 bp, Artificial sequence
  SiRNA target sequence
tccagtacaaatacccaacactt

SEQ ID NO: 89596 - DNA, 23 bp, Artificial sequence
  SiRNA target sequence
ccagtacaaatacccaacacttt

SEQ ID NO: 89597 - DNA, 23 bp, Artificial sequence
  SiRNA target sequence
cagtacaaatacccaacactttt

SEQ ID NO: 89598 - DNA, 23 bp, Artificial sequence
  SiRNA target sequence
agtacaaatacccaacacttttt

SEQ ID NO: 89599 - DNA, 23 bp, Artificial sequence
  SiRNA target sequence
gtacaaatacccaacactttttt

SEQ ID NO: 89600 - DNA, 23 bp, Artificial sequence
  SiRNA target sequence
tacaaatacccaacactttttta

SEQ ID NO: 89601 - DNA, 23 bp, Artificial sequence
  SiRNA target sequence
acaaatacccaacacttttttac

SEQ ID NO: 89602 - DNA, 23 bp, Artificial sequence
  SiRNA target sequence
caaatacccaacacttttttaca

SEQ ID NO: 89603 - DNA, 23 bp, Artificial sequence
  SiRNA target sequence
aaatacccaacacttttttacaa

SEQ ID NO: 89604 - DNA, 23 bp, Artificial sequence
  SiRNA target sequence
aatacccaacacttttttacaaa

SEQ ID NO: 89605 - DNA, 23 bp, Artificial sequence
  SiRNA target sequence
atacccaacacttttttacaaaa

SEQ ID NO: 89606 - DNA, 23 bp, Artificial sequence
  SiRNA target sequence
tacccaacacttttttacaaaaa

SEQ ID NO: 89607 - DNA, 23 bp, Artificial sequence
  SiRNA target sequence
acccaacacttttttacaaaaat

SEQ ID NO: 89608 - DNA, 23 bp, Artificial sequence
  SiRNA target sequence
cccaacacttttttacaaaaatt

SEQ ID NO: 89609 - DNA, 23 bp, Artificial sequence
  SiRNA target sequence
ccaacacttttttacaaaaattt

SEQ ID NO: 89610 - DNA, 23 bp, Artificial sequence
  SiRNA target sequence
caacacttttttacaaaaattta

SEQ ID NO: 89611 - DNA, 23 bp, Artificial sequence
  SiRNA target sequence
aacacttttttacaaaaatttaa

SEQ ID NO: 89612 - DNA, 23 bp, Artificial sequence
  SiRNA target sequence
acacttttttacaaaaatttaat

SEQ ID NO: 89613 - DNA, 23 bp, Artificial sequence
  SiRNA target sequence
cacttttttacaaaaatttaatc

SEQ ID NO: 89614 - DNA, 23 bp, Artificial sequence
  SiRNA target sequence
acttttttacaaaaatttaatct

SEQ ID NO: 89615 - DNA, 23 bp, Artificial sequence
  SiRNA target sequence
cttttttacaaaaatttaatcta

SEQ ID NO: 89616 - DNA, 23 bp, Artificial sequence
  SiRNA target sequence
ttttttacaaaaatttaatctaa

SEQ ID NO: 89617 - DNA, 23 bp, Artificial sequence
  SiRNA target sequence
tttttacaaaaatttaatctaaa

SEQ ID NO: 89618 - DNA, 23 bp, Artificial sequence
  SiRNA target sequence
ttttacaaaaatttaatctaaat

SEQ ID NO: 89619 - DNA, 23 bp, Artificial sequence
  SiRNA target sequence
tttacaaaaatttaatctaaata

SEQ ID NO: 89620 - DNA, 23 bp, Artificial sequence
  SiRNA target sequence
ttacaaaaatttaatctaaataa

SEQ ID NO: 89621 - DNA, 23 bp, Artificial sequence
  SiRNA target sequence
tacaaaaatttaatctaaataat

SEQ ID NO: 89622 - DNA, 23 bp, Artificial sequence
  SiRNA target sequence
acaaaaatttaatctaaataatt

SEQ ID NO: 89623 - DNA, 23 bp, Artificial sequence
  SiRNA target sequence
caaaaatttaatctaaataattt

SEQ ID NO: 89624 - DNA, 23 bp, Artificial sequence
  SiRNA target sequence
aaaaatttaatctaaataattta

SEQ ID NO: 89625 - DNA, 23 bp, Artificial sequence
  SiRNA target sequence
aaaatttaatctaaataatttac

SEQ ID NO: 89626 - DNA, 23 bp, Artificial sequence
  SiRNA target sequence
aaatttaatctaaataatttact

SEQ ID NO: 89627 - DNA, 23 bp, Artificial sequence
  SiRNA target sequence
aatttaatctaaataatttactc

SEQ ID NO: 89628 - DNA, 23 bp, Artificial sequence
  SiRNA target sequence
atttaatctaaataatttactcg

SEQ ID NO: 89629 - DNA, 23 bp, Artificial sequence
  SiRNA target sequence
tttaatctaaataatttactcgg

SEQ ID NO: 89630 - DNA, 23 bp, Artificial sequence
  SiRNA target sequence
ttaatctaaataatttactcggt

SEQ ID NO: 89631 - DNA, 23 bp, Artificial sequence
  SiRNA target sequence
taatctaaataatttactcggtc

SEQ ID NO: 89632 - DNA, 23 bp, Artificial sequence
  SiRNA target sequence
aatctaaataatttactcggtct

SEQ ID NO: 89633 - DNA, 23 bp, Artificial sequence
  SiRNA target sequence
atctaaataatttactcggtctg

SEQ ID NO: 89634 - DNA, 23 bp, Artificial sequence
  SiRNA target sequence
tctaaataatttactcggtctgt

SEQ ID NO: 89635 - DNA, 23 bp, Artificial sequence
  SiRNA target sequence
ctaaataatttactcggtctgtg

SEQ ID NO: 89636 - DNA, 23 bp, Artificial sequence
  SiRNA target sequence
taaataatttactcggtctgtga

SEQ ID NO: 89637 - DNA, 23 bp, Artificial sequence
  SiRNA target sequence
aaataatttactcggtctgtgac

SEQ ID NO: 89638 - DNA, 23 bp, Artificial sequence
  SiRNA target sequence
aataatttactcggtctgtgaca

SEQ ID NO: 89639 - DNA, 23 bp, Artificial sequence
  SiRNA target sequence
ataatttactcggtctgtgacag

SEQ ID NO: 89640 - DNA, 23 bp, Artificial sequence
  SiRNA target sequence
taatttactcggtctgtgacaga

SEQ ID NO: 89641 - DNA, 23 bp, Artificial sequence
  SiRNA target sequence
aatttactcggtctgtgacagat

SEQ ID NO: 89642 - DNA, 23 bp, Artificial sequence
  SiRNA target sequence
atttactcggtctgtgacagatc

SEQ ID NO: 89643 - DNA, 23 bp, Artificial sequence
  SiRNA target sequence
tttactcggtctgtgacagatct

SEQ ID NO: 89644 - DNA, 23 bp, Artificial sequence
  SiRNA target sequence
ttactcggtctgtgacagatctt

SEQ ID NO: 89645 - DNA, 23 bp, Artificial sequence
  SiRNA target sequence
tactcggtctgtgacagatcttt

SEQ ID NO: 89646 - DNA, 23 bp, Artificial sequence
  SiRNA target sequence
actcggtctgtgacagatcttta

SEQ ID NO: 89647 - DNA, 23 bp, Artificial sequence
  SiRNA target sequence
ctcggtctgtgacagatctttaa

SEQ ID NO: 89648 - DNA, 23 bp, Artificial sequence
  SiRNA target sequence
tcggtctgtgacagatctttaaa

SEQ ID NO: 89649 - DNA, 23 bp, Artificial sequence
  SiRNA target sequence
cggtctgtgacagatctttaaat

SEQ ID NO: 89650 - DNA, 23 bp, Artificial sequence
  SiRNA target sequence
ggtctgtgacagatctttaaatt

SEQ ID NO: 89651 - DNA, 23 bp, Artificial sequence
  SiRNA target sequence
gtctgtgacagatctttaaatta

SEQ ID NO: 89652 - DNA, 23 bp, Artificial sequence
  SiRNA target sequence
tctgtgacagatctttaaattat

SEQ ID NO: 89653 - DNA, 23 bp, Artificial sequence
  SiRNA target sequence
ctgtgacagatctttaaattatt

SEQ ID NO: 89654 - DNA, 23 bp, Artificial sequence
  SiRNA target sequence
tgtgacagatctttaaattatta

SEQ ID NO: 89655 - DNA, 23 bp, Artificial sequence
  SiRNA target sequence
gtgacagatctttaaattattat

SEQ ID NO: 89656 - DNA, 23 bp, Artificial sequence
  SiRNA target sequence
tgacagatctttaaattattata

SEQ ID NO: 89657 - DNA, 23 bp, Artificial sequence
  SiRNA target sequence
gacagatctttaaattattataa

SEQ ID NO: 89658 - DNA, 23 bp, Artificial sequence
  SiRNA target sequence
acagatctttaaattattataat

SEQ ID NO: 89659 - DNA, 23 bp, Artificial sequence
  SiRNA target sequence
cagatctttaaattattataatt

SEQ ID NO: 89660 - DNA, 23 bp, Artificial sequence
  SiRNA target sequence
agatctttaaattattataattt

SEQ ID NO: 89661 - DNA, 23 bp, Artificial sequence
  SiRNA target sequence
gatctttaaattattataatttt

SEQ ID NO: 89662 - DNA, 23 bp, Artificial sequence
  SiRNA target sequence
atctttaaattattataattttg

SEQ ID NO: 89663 - DNA, 23 bp, Artificial sequence
  SiRNA target sequence
tctttaaattattataattttgc

SEQ ID NO: 89664 - DNA, 23 bp, Artificial sequence
  SiRNA target sequence
ctttaaattattataattttgca

SEQ ID NO: 89665 - DNA, 23 bp, Artificial sequence
  SiRNA target sequence
tttaaattattataattttgcat

SEQ ID NO: 89666 - DNA, 23 bp, Artificial sequence
  SiRNA target sequence
ttaaattattataattttgcata

SEQ ID NO: 89667 - DNA, 23 bp, Artificial sequence
  SiRNA target sequence
taaattattataattttgcatat

SEQ ID NO: 89668 - DNA, 23 bp, Artificial sequence
  SiRNA target sequence
aaattattataattttgcatatc

SEQ ID NO: 89669 - DNA, 23 bp, Artificial sequence
  SiRNA target sequence
aattattataattttgcatatct

SEQ ID NO: 89670 - DNA, 23 bp, Artificial sequence
  SiRNA target sequence
attattataattttgcatatcta

SEQ ID NO: 89671 - DNA, 23 bp, Artificial sequence
  SiRNA target sequence
ttattataattttgcatatctat

SEQ ID NO: 89672 - DNA, 23 bp, Artificial sequence
  SiRNA target sequence
tattataattttgcatatctatg

SEQ ID NO: 89673 - DNA, 23 bp, Artificial sequence
  SiRNA target sequence
attataattttgcatatctatga

SEQ ID NO: 89674 - DNA, 23 bp, Artificial sequence
  SiRNA target sequence
ttataattttgcatatctatgaa

SEQ ID NO: 89675 - DNA, 23 bp, Artificial sequence
  SiRNA target sequence
tataattttgcatatctatgaaa

SEQ ID NO: 89676 - DNA, 23 bp, Artificial sequence
  SiRNA target sequence
ataattttgcatatctatgaaat

SEQ ID NO: 89677 - DNA, 23 bp, Artificial sequence
  SiRNA target sequence
taattttgcatatctatgaaatt

SEQ ID NO: 89678 - DNA, 23 bp, Artificial sequence
  SiRNA target sequence
aattttgcatatctatgaaattg

SEQ ID NO: 89679 - DNA, 23 bp, Artificial sequence
  SiRNA target sequence
attttgcatatctatgaaattgg

SEQ ID NO: 89680 - DNA, 23 bp, Artificial sequence
  SiRNA target sequence
ttttgcatatctatgaaattgga

SEQ ID NO: 89681 - DNA, 23 bp, Artificial sequence
  SiRNA target sequence
tttgcatatctatgaaattggaa

SEQ ID NO: 89682 - DNA, 23 bp, Artificial sequence
  SiRNA target sequence
ttgcatatctatgaaattggaaa

SEQ ID NO: 89683 - DNA, 23 bp, Artificial sequence
  SiRNA target sequence
tgcatatctatgaaattggaaac

SEQ ID NO: 89684 - DNA, 23 bp, Artificial sequence
  SiRNA target sequence
gcatatctatgaaattggaaaca

SEQ ID NO: 89685 - DNA, 23 bp, Artificial sequence
  SiRNA target sequence
catatctatgaaattggaaacat

SEQ ID NO: 89686 - DNA, 23 bp, Artificial sequence
  SiRNA target sequence
atatctatgaaattggaaacatg

SEQ ID NO: 89687 - DNA, 23 bp, Artificial sequence
  SiRNA target sequence
tatctatgaaattggaaacatgt

SEQ ID NO: 89688 - DNA, 23 bp, Artificial sequence
  SiRNA target sequence
atctatgaaattggaaacatgtc

SEQ ID NO: 89689 - DNA, 23 bp, Artificial sequence
  SiRNA target sequence
tctatgaaattggaaacatgtcc

SEQ ID NO: 89690 - DNA, 23 bp, Artificial sequence
  SiRNA target sequence
ctatgaaattggaaacatgtcca

SEQ ID NO: 89691 - DNA, 23 bp, Artificial sequence
  SiRNA target sequence
tatgaaattggaaacatgtccat

SEQ ID NO: 89692 - DNA, 23 bp, Artificial sequence
  SiRNA target sequence
atgaaattggaaacatgtccata

SEQ ID NO: 89693 - DNA, 23 bp, Artificial sequence
  SiRNA target sequence
tgaaattggaaacatgtccatat

SEQ ID NO: 89694 - DNA, 23 bp, Artificial sequence
  SiRNA target sequence
gaaattggaaacatgtccatatc

SEQ ID NO: 89695 - DNA, 23 bp, Artificial sequence
  SiRNA target sequence
aaattggaaacatgtccatatct

SEQ ID NO: 89696 - DNA, 23 bp, Artificial sequence
  SiRNA target sequence
aattggaaacatgtccatatcta

SEQ ID NO: 89697 - DNA, 23 bp, Artificial sequence
  SiRNA target sequence
attggaaacatgtccatatctat

SEQ ID NO: 89698 - DNA, 23 bp, Artificial sequence
  SiRNA target sequence
ttggaaacatgtccatatctatc

SEQ ID NO: 89699 - DNA, 23 bp, Artificial sequence
  SiRNA target sequence
tggaaacatgtccatatctatcg

SEQ ID NO: 89700 - DNA, 23 bp, Artificial sequence
  SiRNA target sequence
ggaaacatgtccatatctatcgc

SEQ ID NO: 89701 - DNA, 23 bp, Artificial sequence
  SiRNA target sequence
gaaacatgtccatatctatcgcc

SEQ ID NO: 89702 - DNA, 23 bp, Artificial sequence
  SiRNA target sequence
aaacatgtccatatctatcgcct

SEQ ID NO: 89703 - DNA, 23 bp, Artificial sequence
  SiRNA target sequence
aacatgtccatatctatcgcctt

SEQ ID NO: 89704 - DNA, 23 bp, Artificial sequence
  SiRNA target sequence
acatgtccatatctatcgccttt

SEQ ID NO: 89705 - DNA, 23 bp, Artificial sequence
  SiRNA target sequence
catgtccatatctatcgcctttt

SEQ ID NO: 89706 - DNA, 23 bp, Artificial sequence
  SiRNA target sequence
atgtccatatctatcgccttttt

SEQ ID NO: 89707 - DNA, 23 bp, Artificial sequence
  SiRNA target sequence
tgtccatatctatcgcctttttt

SEQ ID NO: 89708 - DNA, 23 bp, Artificial sequence
  SiRNA target sequence
gtccatatctatcgcctttttta

SEQ ID NO: 89709 - DNA, 23 bp, Artificial sequence
  SiRNA target sequence
tccatatctatcgccttttttaa

SEQ ID NO: 89710 - DNA, 23 bp, Artificial sequence
  SiRNA target sequence
ccatatctatcgccttttttaat

SEQ ID NO: 89711 - DNA, 23 bp, Artificial sequence
  SiRNA target sequence
catatctatcgccttttttaata

SEQ ID NO: 89712 - DNA, 23 bp, Artificial sequence
  SiRNA target sequence
atatctatcgccttttttaataa

SEQ ID NO: 89713 - DNA, 23 bp, Artificial sequence
  SiRNA target sequence
tatctatcgccttttttaataat

SEQ ID NO: 89714 - DNA, 23 bp, Artificial sequence
  SiRNA target sequence
atctatcgccttttttaataatt

SEQ ID NO: 89715 - DNA, 23 bp, Artificial sequence
  SiRNA target sequence
tctatcgccttttttaataattg

SEQ ID NO: 89716 - DNA, 23 bp, Artificial sequence
  SiRNA target sequence
ctatcgccttttttaataattgc

SEQ ID NO: 89717 - DNA, 23 bp, Artificial sequence
  SiRNA target sequence
tatcgccttttttaataattgct

SEQ ID NO: 89718 - DNA, 23 bp, Artificial sequence
  SiRNA target sequence
atcgccttttttaataattgcta

SEQ ID NO: 89719 - DNA, 23 bp, Artificial sequence
  SiRNA target sequence
tcgccttttttaataattgctac

SEQ ID NO: 89720 - DNA, 23 bp, Artificial sequence
  SiRNA target sequence
cgccttttttaataattgctact

SEQ ID NO: 89721 - DNA, 23 bp, Artificial sequence
  SiRNA target sequence
gccttttttaataattgctacta

SEQ ID NO: 89722 - DNA, 23 bp, Artificial sequence
  SiRNA target sequence
ccttttttaataattgctactaa

SEQ ID NO: 89723 - DNA, 23 bp, Artificial sequence
  SiRNA target sequence
cttttttaataattgctactaaa

SEQ ID NO: 89724 - DNA, 23 bp, Artificial sequence
  SiRNA target sequence
ttttttaataattgctactaaaa

SEQ ID NO: 89725 - DNA, 23 bp, Artificial sequence
  SiRNA target sequence
tttttaataattgctactaaaat

SEQ ID NO: 89726 - DNA, 23 bp, Artificial sequence
  SiRNA target sequence
ttttaataattgctactaaaatt

SEQ ID NO: 89727 - DNA, 23 bp, Artificial sequence
  SiRNA target sequence
tttaataattgctactaaaattt

SEQ ID NO: 89728 - DNA, 23 bp, Artificial sequence
  SiRNA target sequence
ttaataattgctactaaaatttc

SEQ ID NO: 89729 - DNA, 23 bp, Artificial sequence
  SiRNA target sequence
taataattgctactaaaatttca

SEQ ID NO: 89730 - DNA, 23 bp, Artificial sequence
  SiRNA target sequence
aataattgctactaaaatttcac

SEQ ID NO: 89731 - DNA, 23 bp, Artificial sequence
  SiRNA target sequence
ataattgctactaaaatttcaca

SEQ ID NO: 89732 - DNA, 23 bp, Artificial sequence
  SiRNA target sequence
taattgctactaaaatttcacat

SEQ ID NO: 89733 - DNA, 23 bp, Artificial sequence
  SiRNA target sequence
aattgctactaaaatttcacatt

SEQ ID NO: 89734 - DNA, 23 bp, Artificial sequence
  SiRNA target sequence
attgctactaaaatttcacattt

SEQ ID NO: 89735 - DNA, 23 bp, Artificial sequence
  SiRNA target sequence
ttgctactaaaatttcacatttt

SEQ ID NO: 89736 - DNA, 23 bp, Artificial sequence
  SiRNA target sequence
tgctactaaaatttcacattttt

SEQ ID NO: 89737 - DNA, 23 bp, Artificial sequence
  SiRNA target sequence
gctactaaaatttcacatttttc

SEQ ID NO: 89738 - DNA, 23 bp, Artificial sequence
  SiRNA target sequence
ctactaaaatttcacatttttca

SEQ ID NO: 89739 - DNA, 23 bp, Artificial sequence
  SiRNA target sequence
tactaaaatttcacatttttcat

SEQ ID NO: 89740 - DNA, 23 bp, Artificial sequence
  SiRNA target sequence
actaaaatttcacatttttcatt

SEQ ID NO: 89741 - DNA, 23 bp, Artificial sequence
  SiRNA target sequence
ctaaaatttcacatttttcattt

SEQ ID NO: 89742 - DNA, 23 bp, Artificial sequence
  SiRNA target sequence
taaaatttcacatttttcattta

SEQ ID NO: 89743 - DNA, 23 bp, Artificial sequence
  SiRNA target sequence
aaaatttcacatttttcatttac

SEQ ID NO: 89744 - DNA, 23 bp, Artificial sequence
  SiRNA target sequence
aaatttcacatttttcatttacg

SEQ ID NO: 89745 - DNA, 23 bp, Artificial sequence
  SiRNA target sequence
aatttcacatttttcatttacgt

SEQ ID NO: 89746 - DNA, 23 bp, Artificial sequence
  SiRNA target sequence
atttcacatttttcatttacgtg

SEQ ID NO: 89747 - DNA, 23 bp, Artificial sequence
  SiRNA target sequence
tttcacatttttcatttacgtgg

SEQ ID NO: 89748 - DNA, 23 bp, Artificial sequence
  SiRNA target sequence
ttcacatttttcatttacgtggt

SEQ ID NO: 89749 - DNA, 23 bp, Artificial sequence
  SiRNA target sequence
tcacatttttcatttacgtggtt

SEQ ID NO: 89750 - DNA, 23 bp, Artificial sequence
  SiRNA target sequence
cacatttttcatttacgtggtta

SEQ ID NO: 89751 - DNA, 23 bp, Artificial sequence
  SiRNA target sequence
acatttttcatttacgtggttag

SEQ ID NO: 89752 - DNA, 23 bp, Artificial sequence
  SiRNA target sequence
catttttcatttacgtggttagt

SEQ ID NO: 89753 - DNA, 23 bp, Artificial sequence
  SiRNA target sequence
atttttcatttacgtggttagta

SEQ ID NO: 89754 - DNA, 23 bp, Artificial sequence
  SiRNA target sequence
tttttcatttacgtggttagtaa

SEQ ID NO: 89755 - DNA, 23 bp, Artificial sequence
  SiRNA target sequence
ttttcatttacgtggttagtaag

SEQ ID NO: 89756 - DNA, 23 bp, Artificial sequence
  SiRNA target sequence
tttcatttacgtggttagtaagt

SEQ ID NO: 89757 - DNA, 23 bp, Artificial sequence
  SiRNA target sequence
ttcatttacgtggttagtaagtg

SEQ ID NO: 89758 - DNA, 23 bp, Artificial sequence
  SiRNA target sequence
tcatttacgtggttagtaagtga

SEQ ID NO: 89759 - DNA, 23 bp, Artificial sequence
  SiRNA target sequence
catttacgtggttagtaagtgaa

SEQ ID NO: 89760 - DNA, 23 bp, Artificial sequence
  SiRNA target sequence
atttacgtggttagtaagtgaat

SEQ ID NO: 89761 - DNA, 23 bp, Artificial sequence
  SiRNA target sequence
tttacgtggttagtaagtgaata

SEQ ID NO: 89762 - DNA, 23 bp, Artificial sequence
  SiRNA target sequence
ttacgtggttagtaagtgaataa

SEQ ID NO: 89763 - DNA, 23 bp, Artificial sequence
  SiRNA target sequence
tacgtggttagtaagtgaataat

SEQ ID NO: 89764 - DNA, 23 bp, Artificial sequence
  SiRNA target sequence
acgtggttagtaagtgaataata

SEQ ID NO: 89765 - DNA, 23 bp, Artificial sequence
  SiRNA target sequence
cgtggttagtaagtgaataatat

SEQ ID NO: 89766 - DNA, 23 bp, Artificial sequence
  SiRNA target sequence
gtggttagtaagtgaataatatc

SEQ ID NO: 89767 - DNA, 23 bp, Artificial sequence
  SiRNA target sequence
tggttagtaagtgaataatatct

SEQ ID NO: 89768 - DNA, 23 bp, Artificial sequence
  SiRNA target sequence
ggttagtaagtgaataatatctt

SEQ ID NO: 89769 - DNA, 23 bp, Artificial sequence
  SiRNA target sequence
gttagtaagtgaataatatcttg

SEQ ID NO: 89770 - DNA, 23 bp, Artificial sequence
  SiRNA target sequence
ttagtaagtgaataatatcttgg

SEQ ID NO: 89771 - DNA, 23 bp, Artificial sequence
  SiRNA target sequence
tagtaagtgaataatatcttggc

SEQ ID NO: 89772 - DNA, 23 bp, Artificial sequence
  SiRNA target sequence
agtaagtgaataatatcttggct

SEQ ID NO: 89773 - DNA, 23 bp, Artificial sequence
  SiRNA target sequence
gtaagtgaataatatcttggctt

SEQ ID NO: 89774 - DNA, 23 bp, Artificial sequence
  SiRNA target sequence
taagtgaataatatcttggctta

SEQ ID NO: 89775 - DNA, 23 bp, Artificial sequence
  SiRNA target sequence
aagtgaataatatcttggcttaa

SEQ ID NO: 89776 - DNA, 23 bp, Artificial sequence
  SiRNA target sequence
agtgaataatatcttggcttaat

SEQ ID NO: 89777 - DNA, 23 bp, Artificial sequence
  SiRNA target sequence
gtgaataatatcttggcttaatt

SEQ ID NO: 89778 - DNA, 23 bp, Artificial sequence
  SiRNA target sequence
tgaataatatcttggcttaattg

SEQ ID NO: 89779 - DNA, 23 bp, Artificial sequence
  SiRNA target sequence
gaataatatcttggcttaattgt

SEQ ID NO: 89780 - DNA, 23 bp, Artificial sequence
  SiRNA target sequence
aataatatcttggcttaattgtt

SEQ ID NO: 89781 - DNA, 23 bp, Artificial sequence
  SiRNA target sequence
ataatatcttggcttaattgttt

SEQ ID NO: 89782 - DNA, 23 bp, Artificial sequence
  SiRNA target sequence
taatatcttggcttaattgtttg

SEQ ID NO: 89783 - DNA, 23 bp, Artificial sequence
  SiRNA target sequence
aatatcttggcttaattgtttga

SEQ ID NO: 89784 - DNA, 23 bp, Artificial sequence
  SiRNA target sequence
atatcttggcttaattgtttgac

SEQ ID NO: 89785 - DNA, 23 bp, Artificial sequence
  SiRNA target sequence
tatcttggcttaattgtttgaca

SEQ ID NO: 89786 - DNA, 23 bp, Artificial sequence
  SiRNA target sequence
atcttggcttaattgtttgacaa

SEQ ID NO: 89787 - DNA, 23 bp, Artificial sequence
  SiRNA target sequence
tcttggcttaattgtttgacaat

SEQ ID NO: 89788 - DNA, 23 bp, Artificial sequence
  SiRNA target sequence
cttggcttaattgtttgacaatt

SEQ ID NO: 89789 - DNA, 23 bp, Artificial sequence
  SiRNA target sequence
ttggcttaattgtttgacaattc

SEQ ID NO: 89790 - DNA, 23 bp, Artificial sequence
  SiRNA target sequence
tggcttaattgtttgacaattca

SEQ ID NO: 89791 - DNA, 23 bp, Artificial sequence
  SiRNA target sequence
ggcttaattgtttgacaattcat

SEQ ID NO: 89792 - DNA, 23 bp, Artificial sequence
  SiRNA target sequence
gcttaattgtttgacaattcata

SEQ ID NO: 89793 - DNA, 23 bp, Artificial sequence
  SiRNA target sequence
cttaattgtttgacaattcataa

SEQ ID NO: 89794 - DNA, 23 bp, Artificial sequence
  SiRNA target sequence
ttaattgtttgacaattcataat

SEQ ID NO: 89795 - DNA, 23 bp, Artificial sequence
  SiRNA target sequence
taattgtttgacaattcataata

SEQ ID NO: 89796 - DNA, 23 bp, Artificial sequence
  SiRNA target sequence
aattgtttgacaattcataataa

SEQ ID NO: 89797 - DNA, 23 bp, Artificial sequence
  SiRNA target sequence
attgtttgacaattcataataag

SEQ ID NO: 89798 - DNA, 23 bp, Artificial sequence
  SiRNA target sequence
ttgtttgacaattcataataaga

SEQ ID NO: 89799 - DNA, 23 bp, Artificial sequence
  SiRNA target sequence
tgtttgacaattcataataagat

SEQ ID NO: 89800 - DNA, 23 bp, Artificial sequence
  SiRNA target sequence
gtttgacaattcataataagatc

SEQ ID NO: 89801 - DNA, 23 bp, Artificial sequence
  SiRNA target sequence
tttgacaattcataataagatcc

SEQ ID NO: 89802 - DNA, 23 bp, Artificial sequence
  SiRNA target sequence
ttgacaattcataataagatcct

SEQ ID NO: 89803 - DNA, 23 bp, Artificial sequence
  SiRNA target sequence
tgacaattcataataagatcctc

SEQ ID NO: 89804 - DNA, 23 bp, Artificial sequence
  SiRNA target sequence
gacaattcataataagatcctct

SEQ ID NO: 89805 - DNA, 23 bp, Artificial sequence
  SiRNA target sequence
acaattcataataagatcctcta

SEQ ID NO: 89806 - DNA, 23 bp, Artificial sequence
  SiRNA target sequence
caattcataataagatcctctaa

SEQ ID NO: 89807 - DNA, 23 bp, Artificial sequence
  SiRNA target sequence
aattcataataagatcctctaaa

SEQ ID NO: 89808 - DNA, 23 bp, Artificial sequence
  SiRNA target sequence
attcataataagatcctctaaac

SEQ ID NO: 89809 - DNA, 23 bp, Artificial sequence
  SiRNA target sequence
ttcataataagatcctctaaact

SEQ ID NO: 89810 - DNA, 23 bp, Artificial sequence
  SiRNA target sequence
tcataataagatcctctaaactt

SEQ ID NO: 89811 - DNA, 23 bp, Artificial sequence
  SiRNA target sequence
cataataagatcctctaaacttg

SEQ ID NO: 89812 - DNA, 23 bp, Artificial sequence
  SiRNA target sequence
ataataagatcctctaaacttgg

SEQ ID NO: 89813 - DNA, 23 bp, Artificial sequence
  SiRNA target sequence
taataagatcctctaaacttggt

SEQ ID NO: 89814 - DNA, 23 bp, Artificial sequence
  SiRNA target sequence
aataagatcctctaaacttggtt

SEQ ID NO: 89815 - DNA, 23 bp, Artificial sequence
  SiRNA target sequence
ataagatcctctaaacttggttt

SEQ ID NO: 89816 - DNA, 23 bp, Artificial sequence
  SiRNA target sequence
taagatcctctaaacttggttta

SEQ ID NO: 89817 - DNA, 23 bp, Artificial sequence
  SiRNA target sequence
aagatcctctaaacttggtttac

SEQ ID NO: 89818 - DNA, 23 bp, Artificial sequence
  SiRNA target sequence
agatcctctaaacttggtttaca

SEQ ID NO: 89819 - DNA, 23 bp, Artificial sequence
  SiRNA target sequence
gatcctctaaacttggtttacat

SEQ ID NO: 89820 - DNA, 23 bp, Artificial sequence
  SiRNA target sequence
atcctctaaacttggtttacatt

SEQ ID NO: 89821 - DNA, 23 bp, Artificial sequence
  SiRNA target sequence
tcctctaaacttggtttacattg

SEQ ID NO: 89822 - DNA, 23 bp, Artificial sequence
  SiRNA target sequence
cctctaaacttggtttacattga

SEQ ID NO: 89823 - DNA, 23 bp, Artificial sequence
  SiRNA target sequence
ctctaaacttggtttacattgaa

SEQ ID NO: 89824 - DNA, 23 bp, Artificial sequence
  SiRNA target sequence
tctaaacttggtttacattgaaa

SEQ ID NO: 89825 - DNA, 23 bp, Artificial sequence
  SiRNA target sequence
ctaaacttggtttacattgaaat

SEQ ID NO: 89826 - DNA, 23 bp, Artificial sequence
  SiRNA target sequence
taaacttggtttacattgaaatg

SEQ ID NO: 89827 - DNA, 23 bp, Artificial sequence
  SiRNA target sequence
aaacttggtttacattgaaatgt

SEQ ID NO: 89828 - DNA, 23 bp, Artificial sequence
  SiRNA target sequence
aacttggtttacattgaaatgta

SEQ ID NO: 89829 - DNA, 23 bp, Artificial sequence
  SiRNA target sequence
acttggtttacattgaaatgtat

SEQ ID NO: 89830 - DNA, 23 bp, Artificial sequence
  SiRNA target sequence
cttggtttacattgaaatgtata

SEQ ID NO: 89831 - DNA, 23 bp, Artificial sequence
  SiRNA target sequence
ttggtttacattgaaatgtatat

SEQ ID NO: 89832 - DNA, 23 bp, Artificial sequence
  SiRNA target sequence
tggtttacattgaaatgtatata

SEQ ID NO: 89833 - DNA, 23 bp, Artificial sequence
  SiRNA target sequence
ggtttacattgaaatgtatatat

SEQ ID NO: 89834 - DNA, 23 bp, Artificial sequence
  SiRNA target sequence
gtttacattgaaatgtatatata

SEQ ID NO: 89835 - DNA, 23 bp, Artificial sequence
  SiRNA target sequence
tttacattgaaatgtatatataa

SEQ ID NO: 89836 - DNA, 23 bp, Artificial sequence
  SiRNA target sequence
ttacattgaaatgtatatataat

SEQ ID NO: 89837 - DNA, 23 bp, Artificial sequence
  SiRNA target sequence
tacattgaaatgtatatataatg

SEQ ID NO: 89838 - DNA, 23 bp, Artificial sequence
  SiRNA target sequence
acattgaaatgtatatataatgt

SEQ ID NO: 89839 - DNA, 23 bp, Artificial sequence
  SiRNA target sequence
cattgaaatgtatatataatgtc

SEQ ID NO: 89840 - DNA, 23 bp, Artificial sequence
  SiRNA target sequence
attgaaatgtatatataatgtca

SEQ ID NO: 89841 - DNA, 23 bp, Artificial sequence
  SiRNA target sequence
ttgaaatgtatatataatgtcaa

SEQ ID NO: 89842 - DNA, 23 bp, Artificial sequence
  SiRNA target sequence
tgaaatgtatatataatgtcaag

SEQ ID NO: 89843 - DNA, 23 bp, Artificial sequence
  SiRNA target sequence
gaaatgtatatataatgtcaagc

SEQ ID NO: 89844 - DNA, 23 bp, Artificial sequence
  SiRNA target sequence
aaatgtatatataatgtcaagca

SEQ ID NO: 89845 - DNA, 23 bp, Artificial sequence
  SiRNA target sequence
aatgtatatataatgtcaagcac

SEQ ID NO: 89846 - DNA, 23 bp, Artificial sequence
  SiRNA target sequence
atgtatatataatgtcaagcaca

SEQ ID NO: 89847 - DNA, 23 bp, Artificial sequence
  SiRNA target sequence
tgtatatataatgtcaagcacat

SEQ ID NO: 89848 - DNA, 23 bp, Artificial sequence
  SiRNA target sequence
gtatatataatgtcaagcacatt

SEQ ID NO: 89849 - DNA, 23 bp, Artificial sequence
  SiRNA target sequence
tatatataatgtcaagcacatta

SEQ ID NO: 89850 - DNA, 23 bp, Artificial sequence
  SiRNA target sequence
atatataatgtcaagcacattat

SEQ ID NO: 89851 - DNA, 23 bp, Artificial sequence
  SiRNA target sequence
tatataatgtcaagcacattatt

SEQ ID NO: 89852 - DNA, 23 bp, Artificial sequence
  SiRNA target sequence
atataatgtcaagcacattattc

SEQ ID NO: 89853 - DNA, 23 bp, Artificial sequence
  SiRNA target sequence
tataatgtcaagcacattattcc

SEQ ID NO: 89854 - DNA, 23 bp, Artificial sequence
  SiRNA target sequence
ataatgtcaagcacattattcca

SEQ ID NO: 89855 - DNA, 23 bp, Artificial sequence
  SiRNA target sequence
taatgtcaagcacattattccag

SEQ ID NO: 89856 - DNA, 23 bp, Artificial sequence
  SiRNA target sequence
aatgtcaagcacattattccagt

SEQ ID NO: 89857 - DNA, 23 bp, Artificial sequence
  SiRNA target sequence
atgtcaagcacattattccagtt

SEQ ID NO: 89858 - DNA, 23 bp, Artificial sequence
  SiRNA target sequence
tgtcaagcacattattccagttc

SEQ ID NO: 89859 - DNA, 23 bp, Artificial sequence
  SiRNA target sequence
gtcaagcacattattccagttct

SEQ ID NO: 89860 - DNA, 23 bp, Artificial sequence
  SiRNA target sequence
tcaagcacattattccagttctt

SEQ ID NO: 89861 - DNA, 23 bp, Artificial sequence
  SiRNA target sequence
caagcacattattccagttctta

SEQ ID NO: 89862 - DNA, 23 bp, Artificial sequence
  SiRNA target sequence
aagcacattattccagttcttaa

SEQ ID NO: 89863 - DNA, 23 bp, Artificial sequence
  SiRNA target sequence
agcacattattccagttcttaat

SEQ ID NO: 89864 - DNA, 23 bp, Artificial sequence
  SiRNA target sequence
gcacattattccagttcttaatg

SEQ ID NO: 89865 - DNA, 23 bp, Artificial sequence
  SiRNA target sequence
cacattattccagttcttaatga

SEQ ID NO: 89866 - DNA, 23 bp, Artificial sequence
  SiRNA target sequence
acattattccagttcttaatgat

SEQ ID NO: 89867 - DNA, 23 bp, Artificial sequence
  SiRNA target sequence
cattattccagttcttaatgatg

SEQ ID NO: 89868 - DNA, 23 bp, Artificial sequence
  SiRNA target sequence
attattccagttcttaatgatgc

SEQ ID NO: 89869 - DNA, 23 bp, Artificial sequence
  SiRNA target sequence
ttattccagttcttaatgatgct

SEQ ID NO: 89870 - DNA, 23 bp, Artificial sequence
  SiRNA target sequence
tattccagttcttaatgatgctt

SEQ ID NO: 89871 - DNA, 23 bp, Artificial sequence
  SiRNA target sequence
attccagttcttaatgatgctta

SEQ ID NO: 89872 - DNA, 23 bp, Artificial sequence
  SiRNA target sequence
ttccagttcttaatgatgcttaa

SEQ ID NO: 89873 - DNA, 23 bp, Artificial sequence
  SiRNA target sequence
tccagttcttaatgatgcttaaa

SEQ ID NO: 89874 - DNA, 23 bp, Artificial sequence
  SiRNA target sequence
ccagttcttaatgatgcttaaat

SEQ ID NO: 89875 - DNA, 23 bp, Artificial sequence
  SiRNA target sequence
cagttcttaatgatgcttaaata

SEQ ID NO: 89876 - DNA, 23 bp, Artificial sequence
  SiRNA target sequence
agttcttaatgatgcttaaataa

SEQ ID NO: 89877 - DNA, 23 bp, Artificial sequence
  SiRNA target sequence
gttcttaatgatgcttaaataat

SEQ ID NO: 89878 - DNA, 23 bp, Artificial sequence
  SiRNA target sequence
ttcttaatgatgcttaaataatc

SEQ ID NO: 89879 - DNA, 23 bp, Artificial sequence
  SiRNA target sequence
tcttaatgatgcttaaataatct

SEQ ID NO: 89880 - DNA, 23 bp, Artificial sequence
  SiRNA target sequence
cttaatgatgcttaaataatctt

SEQ ID NO: 89881 - DNA, 23 bp, Artificial sequence
  SiRNA target sequence
ttaatgatgcttaaataatcttt

SEQ ID NO: 89882 - DNA, 23 bp, Artificial sequence
  SiRNA target sequence
taatgatgcttaaataatctttt

SEQ ID NO: 89883 - DNA, 23 bp, Artificial sequence
  SiRNA target sequence
aatgatgcttaaataatctttta

SEQ ID NO: 89884 - DNA, 23 bp, Artificial sequence
  SiRNA target sequence
atgatgcttaaataatcttttac

SEQ ID NO: 89885 - DNA, 23 bp, Artificial sequence
  SiRNA target sequence
tgatgcttaaataatcttttact

SEQ ID NO: 89886 - DNA, 23 bp, Artificial sequence
  SiRNA target sequence
gatgcttaaataatcttttactc

SEQ ID NO: 89887 - DNA, 23 bp, Artificial sequence
  SiRNA target sequence
atgcttaaataatcttttactcc

SEQ ID NO: 89888 - DNA, 23 bp, Artificial sequence
  SiRNA target sequence
tgcttaaataatcttttactcct

SEQ ID NO: 89889 - DNA, 23 bp, Artificial sequence
  SiRNA target sequence
gcttaaataatcttttactcctt

SEQ ID NO: 89890 - DNA, 23 bp, Artificial sequence
  SiRNA target sequence
cttaaataatcttttactccttc

SEQ ID NO: 89891 - DNA, 23 bp, Artificial sequence
  SiRNA target sequence
ttaaataatcttttactccttct

SEQ ID NO: 89892 - DNA, 23 bp, Artificial sequence
  SiRNA target sequence
taaataatcttttactccttctt

SEQ ID NO: 89893 - DNA, 23 bp, Artificial sequence
  SiRNA target sequence
aaataatcttttactccttcttt

SEQ ID NO: 89894 - DNA, 23 bp, Artificial sequence
  SiRNA target sequence
aataatcttttactccttcttta

SEQ ID NO: 89895 - DNA, 23 bp, Artificial sequence
  SiRNA target sequence
ataatcttttactccttctttag

SEQ ID NO: 89896 - DNA, 23 bp, Artificial sequence
  SiRNA target sequence
taatcttttactccttctttaga

SEQ ID NO: 89897 - DNA, 23 bp, Artificial sequence
  SiRNA target sequence
aatcttttactccttctttagaa

SEQ ID NO: 89898 - DNA, 23 bp, Artificial sequence
  SiRNA target sequence
atcttttactccttctttagaac

SEQ ID NO: 89899 - DNA, 23 bp, Artificial sequence
  SiRNA target sequence
tcttttactccttctttagaaca

SEQ ID NO: 89900 - DNA, 23 bp, Artificial sequence
  SiRNA target sequence
cttttactccttctttagaacac

SEQ ID NO: 89901 - DNA, 23 bp, Artificial sequence
  SiRNA target sequence
ttttactccttctttagaacaca

SEQ ID NO: 89902 - DNA, 23 bp, Artificial sequence
  SiRNA target sequence
tttactccttctttagaacacag

SEQ ID NO: 89903 - DNA, 23 bp, Artificial sequence
  SiRNA target sequence
ttactccttctttagaacacaga

SEQ ID NO: 89904 - DNA, 23 bp, Artificial sequence
  SiRNA target sequence
tactccttctttagaacacagat

SEQ ID NO: 89905 - DNA, 23 bp, Artificial sequence
  SiRNA target sequence
actccttctttagaacacagata

SEQ ID NO: 89906 - DNA, 23 bp, Artificial sequence
  SiRNA target sequence
ctccttctttagaacacagatat

SEQ ID NO: 89907 - DNA, 23 bp, Artificial sequence
  SiRNA target sequence
tccttctttagaacacagatatt

SEQ ID NO: 89908 - DNA, 23 bp, Artificial sequence
  SiRNA target sequence
ccttctttagaacacagatattc

SEQ ID NO: 89909 - DNA, 23 bp, Artificial sequence
  SiRNA target sequence
cttctttagaacacagatattca

SEQ ID NO: 89910 - DNA, 23 bp, Artificial sequence
  SiRNA target sequence
ttctttagaacacagatattcaa

SEQ ID NO: 89911 - DNA, 23 bp, Artificial sequence
  SiRNA target sequence
tctttagaacacagatattcaat

SEQ ID NO: 89912 - DNA, 23 bp, Artificial sequence
  SiRNA target sequence
ctttagaacacagatattcaata

SEQ ID NO: 89913 - DNA, 23 bp, Artificial sequence
  SiRNA target sequence
tttagaacacagatattcaatat

SEQ ID NO: 89914 - DNA, 23 bp, Artificial sequence
  SiRNA target sequence
ttagaacacagatattcaatatc

SEQ ID NO: 89915 - DNA, 23 bp, Artificial sequence
  SiRNA target sequence
tagaacacagatattcaatatca

SEQ ID NO: 89916 - DNA, 23 bp, Artificial sequence
  SiRNA target sequence
agaacacagatattcaatatcat

SEQ ID NO: 89917 - DNA, 23 bp, Artificial sequence
  SiRNA target sequence
gaacacagatattcaatatcatg

SEQ ID NO: 89918 - DNA, 23 bp, Artificial sequence
  SiRNA target sequence
aacacagatattcaatatcatgc

SEQ ID NO: 89919 - DNA, 23 bp, Artificial sequence
  SiRNA target sequence
acacagatattcaatatcatgct

SEQ ID NO: 89920 - DNA, 23 bp, Artificial sequence
  SiRNA target sequence
cacagatattcaatatcatgctt

SEQ ID NO: 89921 - DNA, 23 bp, Artificial sequence
  SiRNA target sequence
acagatattcaatatcatgctta

SEQ ID NO: 89922 - DNA, 23 bp, Artificial sequence
  SiRNA target sequence
cagatattcaatatcatgcttat

SEQ ID NO: 89923 - DNA, 23 bp, Artificial sequence
  SiRNA target sequence
agatattcaatatcatgcttatt

SEQ ID NO: 89924 - DNA, 23 bp, Artificial sequence
  SiRNA target sequence
gatattcaatatcatgcttattt

SEQ ID NO: 89925 - DNA, 23 bp, Artificial sequence
  SiRNA target sequence
atattcaatatcatgcttatttt

SEQ ID NO: 89926 - DNA, 23 bp, Artificial sequence
  SiRNA target sequence
tattcaatatcatgcttattttt

SEQ ID NO: 89927 - DNA, 23 bp, Artificial sequence
  SiRNA target sequence
attcaatatcatgcttattttta

SEQ ID NO: 89928 - DNA, 23 bp, Artificial sequence
  SiRNA target sequence
ttcaatatcatgcttatttttag

SEQ ID NO: 89929 - DNA, 23 bp, Artificial sequence
  SiRNA target sequence
tcaatatcatgcttatttttaga

SEQ ID NO: 89930 - DNA, 23 bp, Artificial sequence
  SiRNA target sequence
caatatcatgcttatttttagag

SEQ ID NO: 89931 - DNA, 23 bp, Artificial sequence
  SiRNA target sequence
aatatcatgcttatttttagagg

SEQ ID NO: 89932 - DNA, 23 bp, Artificial sequence
  SiRNA target sequence
atatcatgcttatttttagaggt

SEQ ID NO: 89933 - DNA, 23 bp, Artificial sequence
  SiRNA target sequence
tatcatgcttatttttagaggtt

SEQ ID NO: 89934 - DNA, 23 bp, Artificial sequence
  SiRNA target sequence
atcatgcttatttttagaggttt

SEQ ID NO: 89935 - DNA, 23 bp, Artificial sequence
  SiRNA target sequence
tcatgcttatttttagaggtttt

SEQ ID NO: 89936 - DNA, 23 bp, Artificial sequence
  SiRNA target sequence
catgcttatttttagaggtttta

SEQ ID NO: 89937 - DNA, 23 bp, Artificial sequence
  SiRNA target sequence
atgcttatttttagaggttttag

SEQ ID NO: 89938 - DNA, 23 bp, Artificial sequence
  SiRNA target sequence
tgcttatttttagaggttttaga

SEQ ID NO: 89939 - DNA, 23 bp, Artificial sequence
  SiRNA target sequence
gcttatttttagaggttttagaa

SEQ ID NO: 89940 - DNA, 23 bp, Artificial sequence
  SiRNA target sequence
cttatttttagaggttttagaaa

SEQ ID NO: 89941 - DNA, 23 bp, Artificial sequence
  SiRNA target sequence
ttatttttagaggttttagaaat

SEQ ID NO: 89942 - DNA, 23 bp, Artificial sequence
  SiRNA target sequence
tatttttagaggttttagaaata

SEQ ID NO: 89943 - DNA, 23 bp, Artificial sequence
  SiRNA target sequence
atttttagaggttttagaaatat

SEQ ID NO: 89944 - DNA, 23 bp, Artificial sequence
  SiRNA target sequence
tttttagaggttttagaaatatc

SEQ ID NO: 89945 - DNA, 23 bp, Artificial sequence
  SiRNA target sequence
ttttagaggttttagaaatatcc

SEQ ID NO: 89946 - DNA, 23 bp, Artificial sequence
  SiRNA target sequence
tttagaggttttagaaatatcca

SEQ ID NO: 89947 - DNA, 23 bp, Artificial sequence
  SiRNA target sequence
ttagaggttttagaaatatccat

SEQ ID NO: 89948 - DNA, 23 bp, Artificial sequence
  SiRNA target sequence
tagaggttttagaaatatccata

SEQ ID NO: 89949 - DNA, 23 bp, Artificial sequence
  SiRNA target sequence
agaggttttagaaatatccataa

SEQ ID NO: 89950 - DNA, 23 bp, Artificial sequence
  SiRNA target sequence
gaggttttagaaatatccataag

SEQ ID NO: 89951 - DNA, 23 bp, Artificial sequence
  SiRNA target sequence
aggttttagaaatatccataagc

SEQ ID NO: 89952 - DNA, 23 bp, Artificial sequence
  SiRNA target sequence
ggttttagaaatatccataagcc

SEQ ID NO: 89953 - DNA, 23 bp, Artificial sequence
  SiRNA target sequence
gttttagaaatatccataagcca

SEQ ID NO: 89954 - DNA, 23 bp, Artificial sequence
  SiRNA target sequence
ttttagaaatatccataagccat

SEQ ID NO: 89955 - DNA, 23 bp, Artificial sequence
  SiRNA target sequence
tttagaaatatccataagccatg

SEQ ID NO: 89956 - DNA, 23 bp, Artificial sequence
  SiRNA target sequence
ttagaaatatccataagccatgc

SEQ ID NO: 89957 - DNA, 23 bp, Artificial sequence
  SiRNA target sequence
tagaaatatccataagccatgct

SEQ ID NO: 89958 - DNA, 23 bp, Artificial sequence
  SiRNA target sequence
agaaatatccataagccatgctt

SEQ ID NO: 89959 - DNA, 23 bp, Artificial sequence
  SiRNA target sequence
gaaatatccataagccatgcttt

SEQ ID NO: 89960 - DNA, 23 bp, Artificial sequence
  SiRNA target sequence
aaatatccataagccatgctttt

SEQ ID NO: 89961 - DNA, 23 bp, Artificial sequence
  SiRNA target sequence
aatatccataagccatgcttttt

SEQ ID NO: 89962 - DNA, 23 bp, Artificial sequence
  SiRNA target sequence
atatccataagccatgctttttt

SEQ ID NO: 89963 - DNA, 23 bp, Artificial sequence
  SiRNA target sequence
tatccataagccatgctttttta

SEQ ID NO: 89964 - DNA, 23 bp, Artificial sequence
  SiRNA target sequence
atccataagccatgcttttttag

SEQ ID NO: 89965 - DNA, 23 bp, Artificial sequence
  SiRNA target sequence
tccataagccatgcttttttagg

SEQ ID NO: 89966 - DNA, 23 bp, Artificial sequence
  SiRNA target sequence
ccataagccatgcttttttaggc

SEQ ID NO: 89967 - DNA, 23 bp, Artificial sequence
  SiRNA target sequence
cataagccatgcttttttaggca

SEQ ID NO: 89968 - DNA, 23 bp, Artificial sequence
  SiRNA target sequence
ataagccatgcttttttaggcaa

SEQ ID NO: 89969 - DNA, 23 bp, Artificial sequence
  SiRNA target sequence
taagccatgcttttttaggcaat

SEQ ID NO: 89970 - DNA, 23 bp, Artificial sequence
  SiRNA target sequence
aagccatgcttttttaggcaatg

SEQ ID NO: 89971 - DNA, 23 bp, Artificial sequence
  SiRNA target sequence
agccatgcttttttaggcaatga

SEQ ID NO: 89972 - DNA, 23 bp, Artificial sequence
  SiRNA target sequence
gccatgcttttttaggcaatgaa

SEQ ID NO: 89973 - DNA, 23 bp, Artificial sequence
  SiRNA target sequence
ccatgcttttttaggcaatgaag

SEQ ID NO: 89974 - DNA, 23 bp, Artificial sequence
  SiRNA target sequence
catgcttttttaggcaatgaagt

SEQ ID NO: 89975 - DNA, 23 bp, Artificial sequence
  SiRNA target sequence
atgcttttttaggcaatgaagta

SEQ ID NO: 89976 - DNA, 23 bp, Artificial sequence
  SiRNA target sequence
tgcttttttaggcaatgaagtaa

SEQ ID NO: 89977 - DNA, 23 bp, Artificial sequence
  SiRNA target sequence
gcttttttaggcaatgaagtaaa

SEQ ID NO: 89978 - DNA, 23 bp, Artificial sequence
  SiRNA target sequence
cttttttaggcaatgaagtaaaa

SEQ ID NO: 89979 - DNA, 23 bp, Artificial sequence
  SiRNA target sequence
ttttttaggcaatgaagtaaaat

SEQ ID NO: 89980 - DNA, 23 bp, Artificial sequence
  SiRNA target sequence
tttttaggcaatgaagtaaaatc

SEQ ID NO: 89981 - DNA, 23 bp, Artificial sequence
  SiRNA target sequence
ttttaggcaatgaagtaaaatca

SEQ ID NO: 89982 - DNA, 23 bp, Artificial sequence
  SiRNA target sequence
tttaggcaatgaagtaaaatcaa

SEQ ID NO: 89983 - DNA, 23 bp, Artificial sequence
  SiRNA target sequence
ttaggcaatgaagtaaaatcaaa

SEQ ID NO: 89984 - DNA, 23 bp, Artificial sequence
  SiRNA target sequence
taggcaatgaagtaaaatcaaaa

SEQ ID NO: 89985 - DNA, 23 bp, Artificial sequence
  SiRNA target sequence
aggcaatgaagtaaaatcaaaaa

SEQ ID NO: 89986 - DNA, 23 bp, Artificial sequence
  SiRNA target sequence
ggcaatgaagtaaaatcaaaaat

SEQ ID NO: 89987 - DNA, 23 bp, Artificial sequence
  SiRNA target sequence
gcaatgaagtaaaatcaaaaata

SEQ ID NO: 89988 - DNA, 23 bp, Artificial sequence
  SiRNA target sequence
caatgaagtaaaatcaaaaatat

SEQ ID NO: 89989 - DNA, 23 bp, Artificial sequence
  SiRNA target sequence
aatgaagtaaaatcaaaaatata

SEQ ID NO: 89990 - DNA, 23 bp, Artificial sequence
  SiRNA target sequence
atgaagtaaaatcaaaaatatac

SEQ ID NO: 89991 - DNA, 23 bp, Artificial sequence
  SiRNA target sequence
tgaagtaaaatcaaaaatatact

SEQ ID NO: 89992 - DNA, 23 bp, Artificial sequence
  SiRNA target sequence
gaagtaaaatcaaaaatatactt

SEQ ID NO: 89993 - DNA, 23 bp, Artificial sequence
  SiRNA target sequence
aagtaaaatcaaaaatatacttg

SEQ ID NO: 89994 - DNA, 23 bp, Artificial sequence
  SiRNA target sequence
agtaaaatcaaaaatatacttga

SEQ ID NO: 89995 - DNA, 23 bp, Artificial sequence
  SiRNA target sequence
gtaaaatcaaaaatatacttgaa

SEQ ID NO: 89996 - DNA, 23 bp, Artificial sequence
  SiRNA target sequence
taaaatcaaaaatatacttgaaa

SEQ ID NO: 89997 - DNA, 23 bp, Artificial sequence
  SiRNA target sequence
aaaatcaaaaatatacttgaaaa

SEQ ID NO: 89998 - DNA, 23 bp, Artificial sequence
  SiRNA target sequence
aaatcaaaaatatacttgaaaaa

SEQ ID NO: 89999 - DNA, 23 bp, Artificial sequence
  SiRNA target sequence
aatcaaaaatatacttgaaaaag

SEQ ID NO: 90000 - DNA, 23 bp, Artificial sequence
  SiRNA target sequence
atcaaaaatatacttgaaaaagt

SEQ ID NO: 90001 - DNA, 23 bp, Artificial sequence
  SiRNA target sequence
tcaaaaatatacttgaaaaagtc

SEQ ID NO: 90002 - DNA, 23 bp, Artificial sequence
  SiRNA target sequence
caaaaatatacttgaaaaagtca

SEQ ID NO: 90003 - DNA, 23 bp, Artificial sequence
  SiRNA target sequence
aaaaatatacttgaaaaagtcac

SEQ ID NO: 90004 - DNA, 23 bp, Artificial sequence
  SiRNA target sequence
aaaatatacttgaaaaagtcacg

SEQ ID NO: 90005 - DNA, 23 bp, Artificial sequence
  SiRNA target sequence
aaatatacttgaaaaagtcacgc

SEQ ID NO: 90006 - DNA, 23 bp, Artificial sequence
  SiRNA target sequence
aatatacttgaaaaagtcacgca

SEQ ID NO: 90007 - DNA, 23 bp, Artificial sequence
  SiRNA target sequence
atatacttgaaaaagtcacgcaa

SEQ ID NO: 90008 - DNA, 23 bp, Artificial sequence
  SiRNA target sequence
tatacttgaaaaagtcacgcaaa

SEQ ID NO: 90009 - DNA, 23 bp, Artificial sequence
  SiRNA target sequence
atacttgaaaaagtcacgcaaag

SEQ ID NO: 90010 - DNA, 23 bp, Artificial sequence
  SiRNA target sequence
tacttgaaaaagtcacgcaaaga

SEQ ID NO: 90011 - DNA, 23 bp, Artificial sequence
  SiRNA target sequence
acttgaaaaagtcacgcaaagat

SEQ ID NO: 90012 - DNA, 23 bp, Artificial sequence
  SiRNA target sequence
cttgaaaaagtcacgcaaagatc

SEQ ID NO: 90013 - DNA, 23 bp, Artificial sequence
  SiRNA target sequence
ttgaaaaagtcacgcaaagatcc

SEQ ID NO: 90014 - DNA, 23 bp, Artificial sequence
  SiRNA target sequence
tgaaaaagtcacgcaaagatcct

SEQ ID NO: 90015 - DNA, 23 bp, Artificial sequence
  SiRNA target sequence
gaaaaagtcacgcaaagatcctt

SEQ ID NO: 90016 - DNA, 23 bp, Artificial sequence
  SiRNA target sequence
aaaaagtcacgcaaagatccttc

SEQ ID NO: 90017 - DNA, 23 bp, Artificial sequence
  SiRNA target sequence
aaaagtcacgcaaagatccttcg

SEQ ID NO: 90018 - DNA, 23 bp, Artificial sequence
  SiRNA target sequence
aaagtcacgcaaagatccttcga

SEQ ID NO: 90019 - DNA, 23 bp, Artificial sequence
  SiRNA target sequence
aagtcacgcaaagatccttcgaa

SEQ ID NO: 90020 - DNA, 23 bp, Artificial sequence
  SiRNA target sequence
agtcacgcaaagatccttcgaat

SEQ ID NO: 90021 - DNA, 23 bp, Artificial sequence
  SiRNA target sequence
gtcacgcaaagatccttcgaatt

SEQ ID NO: 90022 - DNA, 23 bp, Artificial sequence
  SiRNA target sequence
tcacgcaaagatccttcgaattg

SEQ ID NO: 90023 - DNA, 23 bp, Artificial sequence
  SiRNA target sequence
cacgcaaagatccttcgaattga

SEQ ID NO: 90024 - DNA, 23 bp, Artificial sequence
  SiRNA target sequence
acgcaaagatccttcgaattgaa

SEQ ID NO: 90025 - DNA, 23 bp, Artificial sequence
  SiRNA target sequence
cgcaaagatccttcgaattgaaa

SEQ ID NO: 90026 - DNA, 23 bp, Artificial sequence
  SiRNA target sequence
gcaaagatccttcgaattgaaac

SEQ ID NO: 90027 - DNA, 23 bp, Artificial sequence
  SiRNA target sequence
caaagatccttcgaattgaaacc

SEQ ID NO: 90028 - DNA, 23 bp, Artificial sequence
  SiRNA target sequence
aaagatccttcgaattgaaaccc

SEQ ID NO: 90029 - DNA, 23 bp, Artificial sequence
  SiRNA target sequence
aagatccttcgaattgaaacccc

SEQ ID NO: 90030 - DNA, 23 bp, Artificial sequence
  SiRNA target sequence
agatccttcgaattgaaaccccg

SEQ ID NO: 90031 - DNA, 23 bp, Artificial sequence
  SiRNA target sequence
gatccttcgaattgaaaccccgt

SEQ ID NO: 90032 - DNA, 23 bp, Artificial sequence
  SiRNA target sequence
atccttcgaattgaaaccccgtt

SEQ ID NO: 90033 - DNA, 23 bp, Artificial sequence
  SiRNA target sequence
tccttcgaattgaaaccccgttt

SEQ ID NO: 90034 - DNA, 23 bp, Artificial sequence
  SiRNA target sequence
ccttcgaattgaaaccccgtttt

SEQ ID NO: 90035 - DNA, 23 bp, Artificial sequence
  SiRNA target sequence
cttcgaattgaaaccccgttttt

SEQ ID NO: 90036 - DNA, 23 bp, Artificial sequence
  SiRNA target sequence
ttcgaattgaaaccccgtttttc

SEQ ID NO: 90037 - DNA, 23 bp, Artificial sequence
  SiRNA target sequence
tcgaattgaaaccccgtttttcc

SEQ ID NO: 90038 - DNA, 23 bp, Artificial sequence
  SiRNA target sequence
cgaattgaaaccccgtttttcca

SEQ ID NO: 90039 - DNA, 23 bp, Artificial sequence
  SiRNA target sequence
gaattgaaaccccgtttttccaa

SEQ ID NO: 90040 - DNA, 23 bp, Artificial sequence
  SiRNA target sequence
aattgaaaccccgtttttccaac

SEQ ID NO: 90041 - DNA, 23 bp, Artificial sequence
  SiRNA target sequence
attgaaaccccgtttttccaact

SEQ ID NO: 90042 - DNA, 23 bp, Artificial sequence
  SiRNA target sequence
ttgaaaccccgtttttccaactt

SEQ ID NO: 90043 - DNA, 23 bp, Artificial sequence
  SiRNA target sequence
tgaaaccccgtttttccaacttg

SEQ ID NO: 90044 - DNA, 23 bp, Artificial sequence
  SiRNA target sequence
gaaaccccgtttttccaacttgc

SEQ ID NO: 90045 - DNA, 23 bp, Artificial sequence
  SiRNA target sequence
aaaccccgtttttccaacttgct

SEQ ID NO: 90046 - DNA, 23 bp, Artificial sequence
  SiRNA target sequence
aaccccgtttttccaacttgctc

SEQ ID NO: 90047 - DNA, 23 bp, Artificial sequence
  SiRNA target sequence
accccgtttttccaacttgctca

SEQ ID NO: 90048 - DNA, 23 bp, Artificial sequence
  SiRNA target sequence
ccccgtttttccaacttgctcaa

SEQ ID NO: 90049 - DNA, 23 bp, Artificial sequence
  SiRNA target sequence
cccgtttttccaacttgctcaat

SEQ ID NO: 90050 - DNA, 23 bp, Artificial sequence
  SiRNA target sequence
ccgtttttccaacttgctcaata

SEQ ID NO: 90051 - DNA, 23 bp, Artificial sequence
  SiRNA target sequence
cgtttttccaacttgctcaatat

SEQ ID NO: 90052 - DNA, 23 bp, Artificial sequence
  SiRNA target sequence
gtttttccaacttgctcaatata

SEQ ID NO: 90053 - DNA, 23 bp, Artificial sequence
  SiRNA target sequence
tttttccaacttgctcaatatat

SEQ ID NO: 90054 - DNA, 23 bp, Artificial sequence
  SiRNA target sequence
ttttccaacttgctcaatatata

SEQ ID NO: 90055 - DNA, 23 bp, Artificial sequence
  SiRNA target sequence
tttccaacttgctcaatatataa

SEQ ID NO: 90056 - DNA, 23 bp, Artificial sequence
  SiRNA target sequence
ttccaacttgctcaatatataat

SEQ ID NO: 90057 - DNA, 23 bp, Artificial sequence
  SiRNA target sequence
tccaacttgctcaatatataata

SEQ ID NO: 90058 - DNA, 23 bp, Artificial sequence
  SiRNA target sequence
ccaacttgctcaatatataataa

SEQ ID NO: 90059 - DNA, 23 bp, Artificial sequence
  SiRNA target sequence
caacttgctcaatatataataat

SEQ ID NO: 90060 - DNA, 23 bp, Artificial sequence
  SiRNA target sequence
aacttgctcaatatataataatg

SEQ ID NO: 90061 - DNA, 23 bp, Artificial sequence
  SiRNA target sequence
acttgctcaatatataataatgt

SEQ ID NO: 90062 - DNA, 23 bp, Artificial sequence
  SiRNA target sequence
cttgctcaatatataataatgta

SEQ ID NO: 90063 - DNA, 23 bp, Artificial sequence
  SiRNA target sequence
ttgctcaatatataataatgtat

SEQ ID NO: 90064 - DNA, 23 bp, Artificial sequence
  SiRNA target sequence
tgctcaatatataataatgtatc

SEQ ID NO: 90065 - DNA, 23 bp, Artificial sequence
  SiRNA target sequence
gctcaatatataataatgtatca

SEQ ID NO: 90066 - DNA, 23 bp, Artificial sequence
  SiRNA target sequence
ctcaatatataataatgtatcac

SEQ ID NO: 90067 - DNA, 23 bp, Artificial sequence
  SiRNA target sequence
tcaatatataataatgtatcacc

SEQ ID NO: 90068 - DNA, 23 bp, Artificial sequence
  SiRNA target sequence
caatatataataatgtatcacca

SEQ ID NO: 90069 - DNA, 23 bp, Artificial sequence
  SiRNA target sequence
aatatataataatgtatcaccag

SEQ ID NO: 90070 - DNA, 23 bp, Artificial sequence
  SiRNA target sequence
atatataataatgtatcaccaga

SEQ ID NO: 90071 - DNA, 23 bp, Artificial sequence
  SiRNA target sequence
tatataataatgtatcaccagac

SEQ ID NO: 90072 - DNA, 23 bp, Artificial sequence
  SiRNA target sequence
atataataatgtatcaccagaca

SEQ ID NO: 90073 - DNA, 23 bp, Artificial sequence
  SiRNA target sequence
tataataatgtatcaccagacat

SEQ ID NO: 90074 - DNA, 23 bp, Artificial sequence
  SiRNA target sequence
ataataatgtatcaccagacatt

SEQ ID NO: 90075 - DNA, 23 bp, Artificial sequence
  SiRNA target sequence
taataatgtatcaccagacattt

SEQ ID NO: 90076 - DNA, 23 bp, Artificial sequence
  SiRNA target sequence
aataatgtatcaccagacatttc

SEQ ID NO: 90077 - DNA, 23 bp, Artificial sequence
  SiRNA target sequence
ataatgtatcaccagacatttct

SEQ ID NO: 90078 - DNA, 23 bp, Artificial sequence
  SiRNA target sequence
taatgtatcaccagacatttcta

SEQ ID NO: 90079 - DNA, 23 bp, Artificial sequence
  SiRNA target sequence
aatgtatcaccagacatttctag

SEQ ID NO: 90080 - DNA, 23 bp, Artificial sequence
  SiRNA target sequence
atgtatcaccagacatttctagt

SEQ ID NO: 90081 - DNA, 23 bp, Artificial sequence
  SiRNA target sequence
tgtatcaccagacatttctagta

SEQ ID NO: 90082 - DNA, 23 bp, Artificial sequence
  SiRNA target sequence
gtatcaccagacatttctagtaa

SEQ ID NO: 90083 - DNA, 23 bp, Artificial sequence
  SiRNA target sequence
tatcaccagacatttctagtaaa

SEQ ID NO: 90084 - DNA, 23 bp, Artificial sequence
  SiRNA target sequence
atcaccagacatttctagtaaac

SEQ ID NO: 90085 - DNA, 23 bp, Artificial sequence
  SiRNA target sequence
tcaccagacatttctagtaaact

SEQ ID NO: 90086 - DNA, 23 bp, Artificial sequence
  SiRNA target sequence
caccagacatttctagtaaactt

SEQ ID NO: 90087 - DNA, 23 bp, Artificial sequence
  SiRNA target sequence
accagacatttctagtaaactta

SEQ ID NO: 90088 - DNA, 23 bp, Artificial sequence
  SiRNA target sequence
ccagacatttctagtaaacttaa

SEQ ID NO: 90089 - DNA, 23 bp, Artificial sequence
  SiRNA target sequence
cagacatttctagtaaacttaac

SEQ ID NO: 90090 - DNA, 23 bp, Artificial sequence
  SiRNA target sequence
agacatttctagtaaacttaaca

SEQ ID NO: 90091 - DNA, 23 bp, Artificial sequence
  SiRNA target sequence
gacatttctagtaaacttaacat

SEQ ID NO: 90092 - DNA, 23 bp, Artificial sequence
  SiRNA target sequence
acatttctagtaaacttaacatt

SEQ ID NO: 90093 - DNA, 23 bp, Artificial sequence
  SiRNA target sequence
catttctagtaaacttaacattt

SEQ ID NO: 90094 - DNA, 23 bp, Artificial sequence
  SiRNA target sequence
atttctagtaaacttaacatttc

SEQ ID NO: 90095 - DNA, 23 bp, Artificial sequence
  SiRNA target sequence
tttctagtaaacttaacatttca

SEQ ID NO: 90096 - DNA, 23 bp, Artificial sequence
  SiRNA target sequence
ttctagtaaacttaacatttcat

SEQ ID NO: 90097 - DNA, 23 bp, Artificial sequence
  SiRNA target sequence
tctagtaaacttaacatttcatt

SEQ ID NO: 90098 - DNA, 23 bp, Artificial sequence
  SiRNA target sequence
ctagtaaacttaacatttcatta

SEQ ID NO: 90099 - DNA, 23 bp, Artificial sequence
  SiRNA target sequence
tagtaaacttaacatttcattaa

SEQ ID NO: 90100 - DNA, 23 bp, Artificial sequence
  SiRNA target sequence
agtaaacttaacatttcattaac

SEQ ID NO: 90101 - DNA, 23 bp, Artificial sequence
  SiRNA target sequence
gtaaacttaacatttcattaaca

SEQ ID NO: 90102 - DNA, 23 bp, Artificial sequence
  SiRNA target sequence
taaacttaacatttcattaacaa

SEQ ID NO: 90103 - DNA, 23 bp, Artificial sequence
  SiRNA target sequence
aaacttaacatttcattaacaag

SEQ ID NO: 90104 - DNA, 23 bp, Artificial sequence
  SiRNA target sequence
aacttaacatttcattaacaagc

SEQ ID NO: 90105 - DNA, 23 bp, Artificial sequence
  SiRNA target sequence
acttaacatttcattaacaagca

SEQ ID NO: 90106 - DNA, 23 bp, Artificial sequence
  SiRNA target sequence
cttaacatttcattaacaagcaa

SEQ ID NO: 90107 - DNA, 23 bp, Artificial sequence
  SiRNA target sequence
ttaacatttcattaacaagcaaa

SEQ ID NO: 90108 - DNA, 23 bp, Artificial sequence
  SiRNA target sequence
taacatttcattaacaagcaaat

SEQ ID NO: 90109 - DNA, 23 bp, Artificial sequence
  SiRNA target sequence
aacatttcattaacaagcaaatc

SEQ ID NO: 90110 - DNA, 23 bp, Artificial sequence
  SiRNA target sequence
acatttcattaacaagcaaatca

SEQ ID NO: 90111 - DNA, 23 bp, Artificial sequence
  SiRNA target sequence
catttcattaacaagcaaatcat

SEQ ID NO: 90112 - DNA, 23 bp, Artificial sequence
  SiRNA target sequence
atttcattaacaagcaaatcatt

SEQ ID NO: 90113 - DNA, 23 bp, Artificial sequence
  SiRNA target sequence
tttcattaacaagcaaatcatta

SEQ ID NO: 90114 - DNA, 23 bp, Artificial sequence
  SiRNA target sequence
ttcattaacaagcaaatcattat

SEQ ID NO: 90115 - DNA, 23 bp, Artificial sequence
  SiRNA target sequence
tcattaacaagcaaatcattatt

SEQ ID NO: 90116 - DNA, 23 bp, Artificial sequence
  SiRNA target sequence
cattaacaagcaaatcattattt

SEQ ID NO: 90117 - DNA, 23 bp, Artificial sequence
  SiRNA target sequence
attaacaagcaaatcattatttg

SEQ ID NO: 90118 - DNA, 23 bp, Artificial sequence
  SiRNA target sequence
ttaacaagcaaatcattatttga

SEQ ID NO: 90119 - DNA, 23 bp, Artificial sequence
  SiRNA target sequence
taacaagcaaatcattatttgaa

SEQ ID NO: 90120 - DNA, 23 bp, Artificial sequence
  SiRNA target sequence
aacaagcaaatcattatttgaac

SEQ ID NO: 90121 - DNA, 23 bp, Artificial sequence
  SiRNA target sequence
acaagcaaatcattatttgaaca

SEQ ID NO: 90122 - DNA, 23 bp, Artificial sequence
  SiRNA target sequence
caagcaaatcattatttgaacaa

SEQ ID NO: 90123 - DNA, 23 bp, Artificial sequence
  SiRNA target sequence
aagcaaatcattatttgaacaaa

SEQ ID NO: 90124 - DNA, 23 bp, Artificial sequence
  SiRNA target sequence
agcaaatcattatttgaacaaag

SEQ ID NO: 90125 - DNA, 23 bp, Artificial sequence
  SiRNA target sequence
gcaaatcattatttgaacaaagt

SEQ ID NO: 90126 - DNA, 23 bp, Artificial sequence
  SiRNA target sequence
caaatcattatttgaacaaagta

SEQ ID NO: 90127 - DNA, 23 bp, Artificial sequence
  SiRNA target sequence
aaatcattatttgaacaaagtag

SEQ ID NO: 90128 - DNA, 23 bp, Artificial sequence
  SiRNA target sequence
aatcattatttgaacaaagtaga

SEQ ID NO: 90129 - DNA, 23 bp, Artificial sequence
  SiRNA target sequence
atcattatttgaacaaagtagac

SEQ ID NO: 90130 - DNA, 23 bp, Artificial sequence
  SiRNA target sequence
tcattatttgaacaaagtagacc

SEQ ID NO: 90131 - DNA, 23 bp, Artificial sequence
  SiRNA target sequence
cattatttgaacaaagtagacca

SEQ ID NO: 90132 - DNA, 23 bp, Artificial sequence
  SiRNA target sequence
attatttgaacaaagtagaccaa

SEQ ID NO: 90133 - DNA, 23 bp, Artificial sequence
  SiRNA target sequence
ttatttgaacaaagtagaccaat

SEQ ID NO: 90134 - DNA, 23 bp, Artificial sequence
  SiRNA target sequence
tatttgaacaaagtagaccaata

SEQ ID NO: 90135 - DNA, 23 bp, Artificial sequence
  SiRNA target sequence
atttgaacaaagtagaccaatac

SEQ ID NO: 90136 - DNA, 23 bp, Artificial sequence
  SiRNA target sequence
tttgaacaaagtagaccaatact

SEQ ID NO: 90137 - DNA, 23 bp, Artificial sequence
  SiRNA target sequence
ttgaacaaagtagaccaatacta

SEQ ID NO: 90138 - DNA, 23 bp, Artificial sequence
  SiRNA target sequence
tgaacaaagtagaccaatactat

SEQ ID NO: 90139 - DNA, 23 bp, Artificial sequence
  SiRNA target sequence
gaacaaagtagaccaatactatc

SEQ ID NO: 90140 - DNA, 23 bp, Artificial sequence
  SiRNA target sequence
aacaaagtagaccaatactatca

SEQ ID NO: 90141 - DNA, 23 bp, Artificial sequence
  SiRNA target sequence
acaaagtagaccaatactatcac

SEQ ID NO: 90142 - DNA, 23 bp, Artificial sequence
  SiRNA target sequence
caaagtagaccaatactatcacc

SEQ ID NO: 90143 - DNA, 23 bp, Artificial sequence
  SiRNA target sequence
aaagtagaccaatactatcacca

SEQ ID NO: 90144 - DNA, 23 bp, Artificial sequence
  SiRNA target sequence
aagtagaccaatactatcaccag

SEQ ID NO: 90145 - DNA, 23 bp, Artificial sequence
  SiRNA target sequence
agtagaccaatactatcaccagg

SEQ ID NO: 90146 - DNA, 23 bp, Artificial sequence
  SiRNA target sequence
gtagaccaatactatcaccagga

SEQ ID NO: 90147 - DNA, 23 bp, Artificial sequence
  SiRNA target sequence
tagaccaatactatcaccaggaa

SEQ ID NO: 90148 - DNA, 23 bp, Artificial sequence
  SiRNA target sequence
agaccaatactatcaccaggaac

SEQ ID NO: 90149 - DNA, 23 bp, Artificial sequence
  SiRNA target sequence
gaccaatactatcaccaggaaca

SEQ ID NO: 90150 - DNA, 23 bp, Artificial sequence
  SiRNA target sequence
accaatactatcaccaggaacaa

SEQ ID NO: 90151 - DNA, 23 bp, Artificial sequence
  SiRNA target sequence
ccaatactatcaccaggaacaaa

SEQ ID NO: 90152 - DNA, 23 bp, Artificial sequence
  SiRNA target sequence
caatactatcaccaggaacaaaa

SEQ ID NO: 90153 - DNA, 23 bp, Artificial sequence
  SiRNA target sequence
aatactatcaccaggaacaaaat

SEQ ID NO: 90154 - DNA, 23 bp, Artificial sequence
  SiRNA target sequence
atactatcaccaggaacaaaatc

SEQ ID NO: 90155 - DNA, 23 bp, Artificial sequence
  SiRNA target sequence
tactatcaccaggaacaaaatct

SEQ ID NO: 90156 - DNA, 23 bp, Artificial sequence
  SiRNA target sequence
actatcaccaggaacaaaatcta

SEQ ID NO: 90157 - DNA, 23 bp, Artificial sequence
  SiRNA target sequence
ctatcaccaggaacaaaatctaa

SEQ ID NO: 90158 - DNA, 23 bp, Artificial sequence
  SiRNA target sequence
tatcaccaggaacaaaatctaat

SEQ ID NO: 90159 - DNA, 23 bp, Artificial sequence
  SiRNA target sequence
atcaccaggaacaaaatctaatg

SEQ ID NO: 90160 - DNA, 23 bp, Artificial sequence
  SiRNA target sequence
tcaccaggaacaaaatctaatgt

SEQ ID NO: 90161 - DNA, 23 bp, Artificial sequence
  SiRNA target sequence
caccaggaacaaaatctaatgta

SEQ ID NO: 90162 - DNA, 23 bp, Artificial sequence
  SiRNA target sequence
accaggaacaaaatctaatgtat

SEQ ID NO: 90163 - DNA, 23 bp, Artificial sequence
  SiRNA target sequence
ccaggaacaaaatctaatgtata

SEQ ID NO: 90164 - DNA, 23 bp, Artificial sequence
  SiRNA target sequence
caggaacaaaatctaatgtataa

SEQ ID NO: 90165 - DNA, 23 bp, Artificial sequence
  SiRNA target sequence
aggaacaaaatctaatgtataat

SEQ ID NO: 90166 - DNA, 23 bp, Artificial sequence
  SiRNA target sequence
ggaacaaaatctaatgtataatt

SEQ ID NO: 90167 - DNA, 23 bp, Artificial sequence
  SiRNA target sequence
gaacaaaatctaatgtataatta

SEQ ID NO: 90168 - DNA, 23 bp, Artificial sequence
  SiRNA target sequence
aacaaaatctaatgtataattaa

SEQ ID NO: 90169 - DNA, 23 bp, Artificial sequence
  SiRNA target sequence
acaaaatctaatgtataattaag

SEQ ID NO: 90170 - DNA, 23 bp, Artificial sequence
  SiRNA target sequence
caaaatctaatgtataattaagt

SEQ ID NO: 90171 - DNA, 23 bp, Artificial sequence
  SiRNA target sequence
aaaatctaatgtataattaagtt

SEQ ID NO: 90172 - DNA, 23 bp, Artificial sequence
  SiRNA target sequence
aaatctaatgtataattaagttg

SEQ ID NO: 90173 - DNA, 23 bp, Artificial sequence
  SiRNA target sequence
aatctaatgtataattaagttga

SEQ ID NO: 90174 - DNA, 23 bp, Artificial sequence
  SiRNA target sequence
atctaatgtataattaagttgaa

SEQ ID NO: 90175 - DNA, 23 bp, Artificial sequence
  SiRNA target sequence
tctaatgtataattaagttgaac

SEQ ID NO: 90176 - DNA, 23 bp, Artificial sequence
  SiRNA target sequence
ctaatgtataattaagttgaacc

SEQ ID NO: 90177 - DNA, 23 bp, Artificial sequence
  SiRNA target sequence
taatgtataattaagttgaacct

SEQ ID NO: 90178 - DNA, 23 bp, Artificial sequence
  SiRNA target sequence
aatgtataattaagttgaacctt

SEQ ID NO: 90179 - DNA, 23 bp, Artificial sequence
  SiRNA target sequence
atgtataattaagttgaacctta

SEQ ID NO: 90180 - DNA, 23 bp, Artificial sequence
  SiRNA target sequence
tgtataattaagttgaaccttat

SEQ ID NO: 90181 - DNA, 23 bp, Artificial sequence
  SiRNA target sequence
gtataattaagttgaaccttata

SEQ ID NO: 90182 - DNA, 23 bp, Artificial sequence
  SiRNA target sequence
tataattaagttgaaccttatat

SEQ ID NO: 90183 - DNA, 23 bp, Artificial sequence
  SiRNA target sequence
ataattaagttgaaccttatata

SEQ ID NO: 90184 - DNA, 23 bp, Artificial sequence
  SiRNA target sequence
taattaagttgaaccttatatac

SEQ ID NO: 90185 - DNA, 23 bp, Artificial sequence
  SiRNA target sequence
aattaagttgaaccttatatacc

SEQ ID NO: 90186 - DNA, 23 bp, Artificial sequence
  SiRNA target sequence
attaagttgaaccttatatacct

SEQ ID NO: 90187 - DNA, 23 bp, Artificial sequence
  SiRNA target sequence
ttaagttgaaccttatatacctt

SEQ ID NO: 90188 - DNA, 23 bp, Artificial sequence
  SiRNA target sequence
taagttgaaccttatataccttt

SEQ ID NO: 90189 - DNA, 23 bp, Artificial sequence
  SiRNA target sequence
aagttgaaccttatatacctttt

SEQ ID NO: 90190 - DNA, 23 bp, Artificial sequence
  SiRNA target sequence
agttgaaccttatataccttttt

SEQ ID NO: 90191 - DNA, 23 bp, Artificial sequence
  SiRNA target sequence
gttgaaccttatatacctttttc

SEQ ID NO: 90192 - DNA, 23 bp, Artificial sequence
  SiRNA target sequence
ttgaaccttatatacctttttcc

SEQ ID NO: 90193 - DNA, 23 bp, Artificial sequence
  SiRNA target sequence
tgaaccttatatacctttttcca

SEQ ID NO: 90194 - DNA, 23 bp, Artificial sequence
  SiRNA target sequence
gaaccttatatacctttttccat

SEQ ID NO: 90195 - DNA, 23 bp, Artificial sequence
  SiRNA target sequence
aaccttatatacctttttccatg

SEQ ID NO: 90196 - DNA, 23 bp, Artificial sequence
  SiRNA target sequence
accttatatacctttttccatgt

SEQ ID NO: 90197 - DNA, 23 bp, Artificial sequence
  SiRNA target sequence
ccttatatacctttttccatgta

SEQ ID NO: 90198 - DNA, 23 bp, Artificial sequence
  SiRNA target sequence
cttatatacctttttccatgtac

SEQ ID NO: 90199 - DNA, 23 bp, Artificial sequence
  SiRNA target sequence
ttatatacctttttccatgtaca

SEQ ID NO: 90200 - DNA, 23 bp, Artificial sequence
  SiRNA target sequence
tatatacctttttccatgtacag

SEQ ID NO: 90201 - DNA, 23 bp, Artificial sequence
  SiRNA target sequence
atatacctttttccatgtacagg

SEQ ID NO: 90202 - DNA, 23 bp, Artificial sequence
  SiRNA target sequence
tatacctttttccatgtacagga

SEQ ID NO: 90203 - DNA, 23 bp, Artificial sequence
  SiRNA target sequence
atacctttttccatgtacaggaa

SEQ ID NO: 90204 - DNA, 23 bp, Artificial sequence
  SiRNA target sequence
tacctttttccatgtacaggaaa

SEQ ID NO: 90205 - DNA, 23 bp, Artificial sequence
  SiRNA target sequence
acctttttccatgtacaggaaag

SEQ ID NO: 90206 - DNA, 23 bp, Artificial sequence
  SiRNA target sequence
cctttttccatgtacaggaaagg

SEQ ID NO: 90207 - DNA, 23 bp, Artificial sequence
  SiRNA target sequence
ctttttccatgtacaggaaaggt

SEQ ID NO: 90208 - DNA, 23 bp, Artificial sequence
  SiRNA target sequence
tttttccatgtacaggaaaggtt

SEQ ID NO: 90209 - DNA, 23 bp, Artificial sequence
  SiRNA target sequence
ttttccatgtacaggaaaggttt

SEQ ID NO: 90210 - DNA, 23 bp, Artificial sequence
  SiRNA target sequence
tttccatgtacaggaaaggtttt

SEQ ID NO: 90211 - DNA, 23 bp, Artificial sequence
  SiRNA target sequence
ttccatgtacaggaaaggttttc

SEQ ID NO: 90212 - DNA, 23 bp, Artificial sequence
  SiRNA target sequence
tccatgtacaggaaaggttttca

SEQ ID NO: 90213 - DNA, 23 bp, Artificial sequence
  SiRNA target sequence
ccatgtacaggaaaggttttcaa

SEQ ID NO: 90214 - DNA, 23 bp, Artificial sequence
  SiRNA target sequence
catgtacaggaaaggttttcaat

SEQ ID NO: 90215 - DNA, 23 bp, Artificial sequence
  SiRNA target sequence
atgtacaggaaaggttttcaata

SEQ ID NO: 90216 - DNA, 23 bp, Artificial sequence
  SiRNA target sequence
tgtacaggaaaggttttcaatat

SEQ ID NO: 90217 - DNA, 23 bp, Artificial sequence
  SiRNA target sequence
gtacaggaaaggttttcaatatt

SEQ ID NO: 90218 - DNA, 23 bp, Artificial sequence
  SiRNA target sequence
tacaggaaaggttttcaatattt

SEQ ID NO: 90219 - DNA, 23 bp, Artificial sequence
  SiRNA target sequence
acaggaaaggttttcaatattta

SEQ ID NO: 90220 - DNA, 23 bp, Artificial sequence
  SiRNA target sequence
caggaaaggttttcaatatttag

SEQ ID NO: 90221 - DNA, 23 bp, Artificial sequence
  SiRNA target sequence
aggaaaggttttcaatatttagt

SEQ ID NO: 90222 - DNA, 23 bp, Artificial sequence
  SiRNA target sequence
ggaaaggttttcaatatttagta

SEQ ID NO: 90223 - DNA, 23 bp, Artificial sequence
  SiRNA target sequence
gaaaggttttcaatatttagtat

SEQ ID NO: 90224 - DNA, 23 bp, Artificial sequence
  SiRNA target sequence
aaaggttttcaatatttagtata

SEQ ID NO: 90225 - DNA, 23 bp, Artificial sequence
  SiRNA target sequence
aaggttttcaatatttagtatat

SEQ ID NO: 90226 - DNA, 23 bp, Artificial sequence
  SiRNA target sequence
aggttttcaatatttagtatatt

SEQ ID NO: 90227 - DNA, 23 bp, Artificial sequence
  SiRNA target sequence
ggttttcaatatttagtatattt

SEQ ID NO: 90228 - DNA, 23 bp, Artificial sequence
  SiRNA target sequence
gttttcaatatttagtatatttg

SEQ ID NO: 90229 - DNA, 23 bp, Artificial sequence
  SiRNA target sequence
ttttcaatatttagtatatttgt

SEQ ID NO: 90230 - DNA, 23 bp, Artificial sequence
  SiRNA target sequence
tttcaatatttagtatatttgta

SEQ ID NO: 90231 - DNA, 23 bp, Artificial sequence
  SiRNA target sequence
ttcaatatttagtatatttgtat

SEQ ID NO: 90232 - DNA, 23 bp, Artificial sequence
  SiRNA target sequence
tcaatatttagtatatttgtatc

SEQ ID NO: 90233 - DNA, 23 bp, Artificial sequence
  SiRNA target sequence
caatatttagtatatttgtatct

SEQ ID NO: 90234 - DNA, 23 bp, Artificial sequence
  SiRNA target sequence
aatatttagtatatttgtatcta

SEQ ID NO: 90235 - DNA, 23 bp, Artificial sequence
  SiRNA target sequence
atatttagtatatttgtatctat

SEQ ID NO: 90236 - DNA, 23 bp, Artificial sequence
  SiRNA target sequence
tatttagtatatttgtatctatc

SEQ ID NO: 90237 - DNA, 23 bp, Artificial sequence
  SiRNA target sequence
atttagtatatttgtatctatca

SEQ ID NO: 90238 - DNA, 23 bp, Artificial sequence
  SiRNA target sequence
tttagtatatttgtatctatcaa

SEQ ID NO: 90239 - DNA, 23 bp, Artificial sequence
  SiRNA target sequence
ttagtatatttgtatctatcaaa

SEQ ID NO: 90240 - DNA, 23 bp, Artificial sequence
  SiRNA target sequence
tagtatatttgtatctatcaaat

SEQ ID NO: 90241 - DNA, 23 bp, Artificial sequence
  SiRNA target sequence
agtatatttgtatctatcaaatt

SEQ ID NO: 90242 - DNA, 23 bp, Artificial sequence
  SiRNA target sequence
gtatatttgtatctatcaaattt

SEQ ID NO: 90243 - DNA, 23 bp, Artificial sequence
  SiRNA target sequence
tatatttgtatctatcaaattta

SEQ ID NO: 90244 - DNA, 23 bp, Artificial sequence
  SiRNA target sequence
atatttgtatctatcaaatttat

SEQ ID NO: 90245 - DNA, 23 bp, Artificial sequence
  SiRNA target sequence
tatttgtatctatcaaatttata

SEQ ID NO: 90246 - DNA, 23 bp, Artificial sequence
  SiRNA target sequence
atttgtatctatcaaatttatat

SEQ ID NO: 90247 - DNA, 23 bp, Artificial sequence
  SiRNA target sequence
tttgtatctatcaaatttatatt

SEQ ID NO: 90248 - DNA, 23 bp, Artificial sequence
  SiRNA target sequence
ttgtatctatcaaatttatattc

SEQ ID NO: 90249 - DNA, 23 bp, Artificial sequence
  SiRNA target sequence
tgtatctatcaaatttatattct

SEQ ID NO: 90250 - DNA, 23 bp, Artificial sequence
  SiRNA target sequence
gtatctatcaaatttatattctc

SEQ ID NO: 90251 - DNA, 23 bp, Artificial sequence
  SiRNA target sequence
tatctatcaaatttatattctcg

SEQ ID NO: 90252 - DNA, 23 bp, Artificial sequence
  SiRNA target sequence
atctatcaaatttatattctcgt

SEQ ID NO: 90253 - DNA, 23 bp, Artificial sequence
  SiRNA target sequence
tctatcaaatttatattctcgtt

SEQ ID NO: 90254 - DNA, 23 bp, Artificial sequence
  SiRNA target sequence
ctatcaaatttatattctcgttt

SEQ ID NO: 90255 - DNA, 23 bp, Artificial sequence
  SiRNA target sequence
tatcaaatttatattctcgtttg

SEQ ID NO: 90256 - DNA, 23 bp, Artificial sequence
  SiRNA target sequence
atcaaatttatattctcgtttgt

SEQ ID NO: 90257 - DNA, 23 bp, Artificial sequence
  SiRNA target sequence
tcaaatttatattctcgtttgtc

SEQ ID NO: 90258 - DNA, 23 bp, Artificial sequence
  SiRNA target sequence
caaatttatattctcgtttgtct

SEQ ID NO: 90259 - DNA, 23 bp, Artificial sequence
  SiRNA target sequence
aaatttatattctcgtttgtctt

SEQ ID NO: 90260 - DNA, 23 bp, Artificial sequence
  SiRNA target sequence
aatttatattctcgtttgtcttt

SEQ ID NO: 90261 - DNA, 23 bp, Artificial sequence
  SiRNA target sequence
atttatattctcgtttgtcttta

SEQ ID NO: 90262 - DNA, 23 bp, Artificial sequence
  SiRNA target sequence
tttatattctcgtttgtctttat

SEQ ID NO: 90263 - DNA, 23 bp, Artificial sequence
  SiRNA target sequence
ttatattctcgtttgtctttatt

SEQ ID NO: 90264 - DNA, 23 bp, Artificial sequence
  SiRNA target sequence
tatattctcgtttgtctttattt

SEQ ID NO: 90265 - DNA, 23 bp, Artificial sequence
  SiRNA target sequence
atattctcgtttgtctttatttt

SEQ ID NO: 90266 - DNA, 23 bp, Artificial sequence
  SiRNA target sequence
tattctcgtttgtctttatttta

SEQ ID NO: 90267 - DNA, 23 bp, Artificial sequence
  SiRNA target sequence
attctcgtttgtctttattttat

SEQ ID NO: 90268 - DNA, 23 bp, Artificial sequence
  SiRNA target sequence
ttctcgtttgtctttattttata

SEQ ID NO: 90269 - DNA, 23 bp, Artificial sequence
  SiRNA target sequence
tctcgtttgtctttattttataa

SEQ ID NO: 90270 - DNA, 23 bp, Artificial sequence
  SiRNA target sequence
ctcgtttgtctttattttataag

SEQ ID NO: 90271 - DNA, 23 bp, Artificial sequence
  SiRNA target sequence
tcgtttgtctttattttataaga

SEQ ID NO: 90272 - DNA, 23 bp, Artificial sequence
  SiRNA target sequence
cgtttgtctttattttataagaa

SEQ ID NO: 90273 - DNA, 23 bp, Artificial sequence
  SiRNA target sequence
gtttgtctttattttataagaac

SEQ ID NO: 90274 - DNA, 23 bp, Artificial sequence
  SiRNA target sequence
tttgtctttattttataagaacc

SEQ ID NO: 90275 - DNA, 23 bp, Artificial sequence
  SiRNA target sequence
ttgtctttattttataagaacct

SEQ ID NO: 90276 - DNA, 23 bp, Artificial sequence
  SiRNA target sequence
tgtctttattttataagaacctg

SEQ ID NO: 90277 - DNA, 23 bp, Artificial sequence
  SiRNA target sequence
gtctttattttataagaacctgt

SEQ ID NO: 90278 - DNA, 23 bp, Artificial sequence
  SiRNA target sequence
tctttattttataagaacctgta

SEQ ID NO: 90279 - DNA, 23 bp, Artificial sequence
  SiRNA target sequence
ctttattttataagaacctgtat

SEQ ID NO: 90280 - DNA, 23 bp, Artificial sequence
  SiRNA target sequence
tttattttataagaacctgtata

SEQ ID NO: 90281 - DNA, 23 bp, Artificial sequence
  SiRNA target sequence
ttattttataagaacctgtatag

SEQ ID NO: 90282 - DNA, 23 bp, Artificial sequence
  SiRNA target sequence
tattttataagaacctgtatagt

SEQ ID NO: 90283 - DNA, 23 bp, Artificial sequence
  SiRNA target sequence
attttataagaacctgtatagtt

SEQ ID NO: 90284 - DNA, 23 bp, Artificial sequence
  SiRNA target sequence
ttttataagaacctgtatagttg

SEQ ID NO: 90285 - DNA, 23 bp, Artificial sequence
  SiRNA target sequence
tttataagaacctgtatagttgg

SEQ ID NO: 90286 - DNA, 23 bp, Artificial sequence
  SiRNA target sequence
ttataagaacctgtatagttggt

SEQ ID NO: 90287 - DNA, 23 bp, Artificial sequence
  SiRNA target sequence
tataagaacctgtatagttggtc

SEQ ID NO: 90288 - DNA, 23 bp, Artificial sequence
  SiRNA target sequence
ataagaacctgtatagttggtct

SEQ ID NO: 90289 - DNA, 23 bp, Artificial sequence
  SiRNA target sequence
taagaacctgtatagttggtctt

SEQ ID NO: 90290 - DNA, 23 bp, Artificial sequence
  SiRNA target sequence
aagaacctgtatagttggtcttt

SEQ ID NO: 90291 - DNA, 23 bp, Artificial sequence
  SiRNA target sequence
agaacctgtatagttggtctttt

SEQ ID NO: 90292 - DNA, 23 bp, Artificial sequence
  SiRNA target sequence
gaacctgtatagttggtcttttt

SEQ ID NO: 90293 - DNA, 23 bp, Artificial sequence
  SiRNA target sequence
aacctgtatagttggtcttttta

SEQ ID NO: 90294 - DNA, 23 bp, Artificial sequence
  SiRNA target sequence
acctgtatagttggtctttttaa

SEQ ID NO: 90295 - DNA, 23 bp, Artificial sequence
  SiRNA target sequence
cctgtatagttggtctttttaat

SEQ ID NO: 90296 - DNA, 23 bp, Artificial sequence
  SiRNA target sequence
ctgtatagttggtctttttaatt

SEQ ID NO: 90297 - DNA, 23 bp, Artificial sequence
  SiRNA target sequence
tgtatagttggtctttttaatta

SEQ ID NO: 90298 - DNA, 23 bp, Artificial sequence
  SiRNA target sequence
gtatagttggtctttttaattat

SEQ ID NO: 90299 - DNA, 23 bp, Artificial sequence
  SiRNA target sequence
tatagttggtctttttaattata

SEQ ID NO: 90300 - DNA, 23 bp, Artificial sequence
  SiRNA target sequence
atagttggtctttttaattataa

SEQ ID NO: 90301 - DNA, 23 bp, Artificial sequence
  SiRNA target sequence
tagttggtctttttaattataag

SEQ ID NO: 90302 - DNA, 23 bp, Artificial sequence
  SiRNA target sequence
agttggtctttttaattataagc

SEQ ID NO: 90303 - DNA, 23 bp, Artificial sequence
  SiRNA target sequence
gttggtctttttaattataagct

SEQ ID NO: 90304 - DNA, 23 bp, Artificial sequence
  SiRNA target sequence
ttggtctttttaattataagctt

SEQ ID NO: 90305 - DNA, 23 bp, Artificial sequence
  SiRNA target sequence
tggtctttttaattataagctta

SEQ ID NO: 90306 - DNA, 23 bp, Artificial sequence
  SiRNA target sequence
ggtctttttaattataagcttat

SEQ ID NO: 90307 - DNA, 23 bp, Artificial sequence
  SiRNA target sequence
gtctttttaattataagcttatt

SEQ ID NO: 90308 - DNA, 23 bp, Artificial sequence
  SiRNA target sequence
tctttttaattataagcttattg

SEQ ID NO: 90309 - DNA, 23 bp, Artificial sequence
  SiRNA target sequence
ctttttaattataagcttattga

SEQ ID NO: 90310 - DNA, 23 bp, Artificial sequence
  SiRNA target sequence
tttttaattataagcttattgaa

SEQ ID NO: 90311 - DNA, 23 bp, Artificial sequence
  SiRNA target sequence
ttttaattataagcttattgaaa

SEQ ID NO: 90312 - DNA, 23 bp, Artificial sequence
  SiRNA target sequence
tttaattataagcttattgaaat

SEQ ID NO: 90313 - DNA, 23 bp, Artificial sequence
  SiRNA target sequence
ttaattataagcttattgaaatt

SEQ ID NO: 90314 - DNA, 23 bp, Artificial sequence
  SiRNA target sequence
taattataagcttattgaaattt

SEQ ID NO: 90315 - DNA, 23 bp, Artificial sequence
  SiRNA target sequence
aattataagcttattgaaatttc

SEQ ID NO: 90316 - DNA, 23 bp, Artificial sequence
  SiRNA target sequence
attataagcttattgaaatttct

SEQ ID NO: 90317 - DNA, 23 bp, Artificial sequence
  SiRNA target sequence
ttataagcttattgaaatttcta

SEQ ID NO: 90318 - DNA, 23 bp, Artificial sequence
  SiRNA target sequence
tataagcttattgaaatttctaa

SEQ ID NO: 90319 - DNA, 23 bp, Artificial sequence
  SiRNA target sequence
ataagcttattgaaatttctaat

SEQ ID NO: 90320 - DNA, 23 bp, Artificial sequence
  SiRNA target sequence
taagcttattgaaatttctaata

SEQ ID NO: 90321 - DNA, 23 bp, Artificial sequence
  SiRNA target sequence
aagcttattgaaatttctaatat

SEQ ID NO: 90322 - DNA, 23 bp, Artificial sequence
  SiRNA target sequence
agcttattgaaatttctaatatt

SEQ ID NO: 90323 - DNA, 23 bp, Artificial sequence
  SiRNA target sequence
gcttattgaaatttctaatattt

SEQ ID NO: 90324 - DNA, 23 bp, Artificial sequence
  SiRNA target sequence
cttattgaaatttctaatattta

SEQ ID NO: 90325 - DNA, 23 bp, Artificial sequence
  SiRNA target sequence
ttattgaaatttctaatatttaa

SEQ ID NO: 90326 - DNA, 23 bp, Artificial sequence
  SiRNA target sequence
tattgaaatttctaatatttaaa

SEQ ID NO: 90327 - DNA, 23 bp, Artificial sequence
  SiRNA target sequence
attgaaatttctaatatttaaag

SEQ ID NO: 90328 - DNA, 23 bp, Artificial sequence
  SiRNA target sequence
ttgaaatttctaatatttaaagg

SEQ ID NO: 90329 - DNA, 23 bp, Artificial sequence
  SiRNA target sequence
tgaaatttctaatatttaaagga

SEQ ID NO: 90330 - DNA, 23 bp, Artificial sequence
  SiRNA target sequence
gaaatttctaatatttaaaggaa

SEQ ID NO: 90331 - DNA, 23 bp, Artificial sequence
  SiRNA target sequence
aaatttctaatatttaaaggaac

SEQ ID NO: 90332 - DNA, 23 bp, Artificial sequence
  SiRNA target sequence
aatttctaatatttaaaggaaca

SEQ ID NO: 90333 - DNA, 23 bp, Artificial sequence
  SiRNA target sequence
atttctaatatttaaaggaacaa

SEQ ID NO: 90334 - DNA, 23 bp, Artificial sequence
  SiRNA target sequence
tttctaatatttaaaggaacaaa

SEQ ID NO: 90335 - DNA, 23 bp, Artificial sequence
  SiRNA target sequence
ttctaatatttaaaggaacaaaa

SEQ ID NO: 90336 - DNA, 23 bp, Artificial sequence
  SiRNA target sequence
tctaatatttaaaggaacaaaat

SEQ ID NO: 90337 - DNA, 23 bp, Artificial sequence
  SiRNA target sequence
ctaatatttaaaggaacaaaatc

SEQ ID NO: 90338 - DNA, 23 bp, Artificial sequence
  SiRNA target sequence
taatatttaaaggaacaaaatct

SEQ ID NO: 90339 - DNA, 23 bp, Artificial sequence
  SiRNA target sequence
aatatttaaaggaacaaaatcta

SEQ ID NO: 90340 - DNA, 23 bp, Artificial sequence
  SiRNA target sequence
atatttaaaggaacaaaatctac

SEQ ID NO: 90341 - DNA, 23 bp, Artificial sequence
  SiRNA target sequence
tatttaaaggaacaaaatctaca

SEQ ID NO: 90342 - DNA, 23 bp, Artificial sequence
  SiRNA target sequence
atttaaaggaacaaaatctacat

SEQ ID NO: 90343 - DNA, 23 bp, Artificial sequence
  SiRNA target sequence
tttaaaggaacaaaatctacatt

SEQ ID NO: 90344 - DNA, 23 bp, Artificial sequence
  SiRNA target sequence
ttaaaggaacaaaatctacattt

SEQ ID NO: 90345 - DNA, 23 bp, Artificial sequence
  SiRNA target sequence
taaaggaacaaaatctacattta

SEQ ID NO: 90346 - DNA, 23 bp, Artificial sequence
  SiRNA target sequence
aaaggaacaaaatctacatttag

SEQ ID NO: 90347 - DNA, 23 bp, Artificial sequence
  SiRNA target sequence
aaggaacaaaatctacatttaga

SEQ ID NO: 90348 - DNA, 23 bp, Artificial sequence
  SiRNA target sequence
aggaacaaaatctacatttagat

SEQ ID NO: 90349 - DNA, 23 bp, Artificial sequence
  SiRNA target sequence
ggaacaaaatctacatttagatt

SEQ ID NO: 90350 - DNA, 23 bp, Artificial sequence
  SiRNA target sequence
gaacaaaatctacatttagatta

SEQ ID NO: 90351 - DNA, 23 bp, Artificial sequence
  SiRNA target sequence
aacaaaatctacatttagattat

SEQ ID NO: 90352 - DNA, 23 bp, Artificial sequence
  SiRNA target sequence
acaaaatctacatttagattata

SEQ ID NO: 90353 - DNA, 23 bp, Artificial sequence
  SiRNA target sequence
caaaatctacatttagattatat

SEQ ID NO: 90354 - DNA, 23 bp, Artificial sequence
  SiRNA target sequence
aaaatctacatttagattatatt

SEQ ID NO: 90355 - DNA, 23 bp, Artificial sequence
  SiRNA target sequence
aaatctacatttagattatattc

SEQ ID NO: 90356 - DNA, 23 bp, Artificial sequence
  SiRNA target sequence
aatctacatttagattatattct

SEQ ID NO: 90357 - DNA, 23 bp, Artificial sequence
  SiRNA target sequence
atctacatttagattatattcta

SEQ ID NO: 90358 - DNA, 23 bp, Artificial sequence
  SiRNA target sequence
tctacatttagattatattctaa

SEQ ID NO: 90359 - DNA, 23 bp, Artificial sequence
  SiRNA target sequence
ctacatttagattatattctaat

SEQ ID NO: 90360 - DNA, 23 bp, Artificial sequence
  SiRNA target sequence
tacatttagattatattctaatt

SEQ ID NO: 90361 - DNA, 23 bp, Artificial sequence
  SiRNA target sequence
acatttagattatattctaattt

SEQ ID NO: 90362 - DNA, 23 bp, Artificial sequence
  SiRNA target sequence
catttagattatattctaattta

SEQ ID NO: 90363 - DNA, 23 bp, Artificial sequence
  SiRNA target sequence
atttagattatattctaatttat

SEQ ID NO: 90364 - DNA, 23 bp, Artificial sequence
  SiRNA target sequence
tttagattatattctaatttatt

SEQ ID NO: 90365 - DNA, 23 bp, Artificial sequence
  SiRNA target sequence
ttagattatattctaatttattg

SEQ ID NO: 90366 - DNA, 23 bp, Artificial sequence
  SiRNA target sequence
tagattatattctaatttattga

SEQ ID NO: 90367 - DNA, 23 bp, Artificial sequence
  SiRNA target sequence
agattatattctaatttattgaa

SEQ ID NO: 90368 - DNA, 23 bp, Artificial sequence
  SiRNA target sequence
gattatattctaatttattgaat

SEQ ID NO: 90369 - DNA, 23 bp, Artificial sequence
  SiRNA target sequence
attatattctaatttattgaatt

SEQ ID NO: 90370 - DNA, 23 bp, Artificial sequence
  SiRNA target sequence
ttatattctaatttattgaattt

SEQ ID NO: 90371 - DNA, 23 bp, Artificial sequence
  SiRNA target sequence
tatattctaatttattgaatttc

SEQ ID NO: 90372 - DNA, 23 bp, Artificial sequence
  SiRNA target sequence
atattctaatttattgaatttca

SEQ ID NO: 90373 - DNA, 23 bp, Artificial sequence
  SiRNA target sequence
tattctaatttattgaatttcat

SEQ ID NO: 90374 - DNA, 24 bp, Artificial sequence
  SiRNA target sequence
ttatatccaactatcaaaaaatag

SEQ ID NO: 90375 - DNA, 24 bp, Artificial sequence
  SiRNA target sequence
tatatccaactatcaaaaaatagc

SEQ ID NO: 90376 - DNA, 24 bp, Artificial sequence
  SiRNA target sequence
atatccaactatcaaaaaatagcc

SEQ ID NO: 90377 - DNA, 24 bp, Artificial sequence
  SiRNA target sequence
tatccaactatcaaaaaatagcct

SEQ ID NO: 90378 - DNA, 24 bp, Artificial sequence
  SiRNA target sequence
atccaactatcaaaaaatagcctc

SEQ ID NO: 90379 - DNA, 24 bp, Artificial sequence
  SiRNA target sequence
tccaactatcaaaaaatagcctct

SEQ ID NO: 90380 - DNA, 24 bp, Artificial sequence
  SiRNA target sequence
ccaactatcaaaaaatagcctctt

SEQ ID NO: 90381 - DNA, 24 bp, Artificial sequence
  SiRNA target sequence
caactatcaaaaaatagcctcttt

SEQ ID NO: 90382 - DNA, 24 bp, Artificial sequence
  SiRNA target sequence
aactatcaaaaaatagcctctttt

SEQ ID NO: 90383 - DNA, 24 bp, Artificial sequence
  SiRNA target sequence
actatcaaaaaatagcctcttttc

SEQ ID NO: 90384 - DNA, 24 bp, Artificial sequence
  SiRNA target sequence
ctatcaaaaaatagcctcttttct

SEQ ID NO: 90385 - DNA, 24 bp, Artificial sequence
  SiRNA target sequence
tatcaaaaaatagcctcttttctt

SEQ ID NO: 90386 - DNA, 24 bp, Artificial sequence
  SiRNA target sequence
atcaaaaaatagcctcttttcttt

SEQ ID NO: 90387 - DNA, 24 bp, Artificial sequence
  SiRNA target sequence
tcaaaaaatagcctcttttctttc

SEQ ID NO: 90388 - DNA, 24 bp, Artificial sequence
  SiRNA target sequence
caaaaaatagcctcttttctttca

SEQ ID NO: 90389 - DNA, 24 bp, Artificial sequence
  SiRNA target sequence
aaaaaatagcctcttttctttcac

SEQ ID NO: 90390 - DNA, 24 bp, Artificial sequence
  SiRNA target sequence
aaaaatagcctcttttctttcaca

SEQ ID NO: 90391 - DNA, 24 bp, Artificial sequence
  SiRNA target sequence
aaaatagcctcttttctttcacaa

SEQ ID NO: 90392 - DNA, 24 bp, Artificial sequence
  SiRNA target sequence
aaatagcctcttttctttcacaat

SEQ ID NO: 90393 - DNA, 24 bp, Artificial sequence
  SiRNA target sequence
aatagcctcttttctttcacaatt

SEQ ID NO: 90394 - DNA, 24 bp, Artificial sequence
  SiRNA target sequence
atagcctcttttctttcacaattt

SEQ ID NO: 90395 - DNA, 24 bp, Artificial sequence
  SiRNA target sequence
tagcctcttttctttcacaatttc

SEQ ID NO: 90396 - DNA, 24 bp, Artificial sequence
  SiRNA target sequence
agcctcttttctttcacaatttca

SEQ ID NO: 90397 - DNA, 24 bp, Artificial sequence
  SiRNA target sequence
gcctcttttctttcacaatttcag

SEQ ID NO: 90398 - DNA, 24 bp, Artificial sequence
  SiRNA target sequence
cctcttttctttcacaatttcaga

SEQ ID NO: 90399 - DNA, 24 bp, Artificial sequence
  SiRNA target sequence
ctcttttctttcacaatttcagaa

SEQ ID NO: 90400 - DNA, 24 bp, Artificial sequence
  SiRNA target sequence
tcttttctttcacaatttcagaaa

SEQ ID NO: 90401 - DNA, 24 bp, Artificial sequence
  SiRNA target sequence
cttttctttcacaatttcagaaaa

SEQ ID NO: 90402 - DNA, 24 bp, Artificial sequence
  SiRNA target sequence
ttttctttcacaatttcagaaaaa

SEQ ID NO: 90403 - DNA, 24 bp, Artificial sequence
  SiRNA target sequence
tttctttcacaatttcagaaaaat

SEQ ID NO: 90404 - DNA, 24 bp, Artificial sequence
  SiRNA target sequence
ttctttcacaatttcagaaaaatt

SEQ ID NO: 90405 - DNA, 24 bp, Artificial sequence
  SiRNA target sequence
tctttcacaatttcagaaaaattt

SEQ ID NO: 90406 - DNA, 24 bp, Artificial sequence
  SiRNA target sequence
ctttcacaatttcagaaaaatttt

SEQ ID NO: 90407 - DNA, 24 bp, Artificial sequence
  SiRNA target sequence
tttcacaatttcagaaaaattttc

SEQ ID NO: 90408 - DNA, 24 bp, Artificial sequence
  SiRNA target sequence
ttcacaatttcagaaaaattttca

SEQ ID NO: 90409 - DNA, 24 bp, Artificial sequence
  SiRNA target sequence
tcacaatttcagaaaaattttcat

SEQ ID NO: 90410 - DNA, 24 bp, Artificial sequence
  SiRNA target sequence
cacaatttcagaaaaattttcatt

SEQ ID NO: 90411 - DNA, 24 bp, Artificial sequence
  SiRNA target sequence
acaatttcagaaaaattttcatta

SEQ ID NO: 90412 - DNA, 24 bp, Artificial sequence
  SiRNA target sequence
caatttcagaaaaattttcattaa

SEQ ID NO: 90413 - DNA, 24 bp, Artificial sequence
  SiRNA target sequence
aatttcagaaaaattttcattaaa

SEQ ID NO: 90414 - DNA, 24 bp, Artificial sequence
  SiRNA target sequence
atttcagaaaaattttcattaaaa

SEQ ID NO: 90415 - DNA, 24 bp, Artificial sequence
  SiRNA target sequence
tttcagaaaaattttcattaaaaa

SEQ ID NO: 90416 - DNA, 24 bp, Artificial sequence
  SiRNA target sequence
ttcagaaaaattttcattaaaaat

SEQ ID NO: 90417 - DNA, 24 bp, Artificial sequence
  SiRNA target sequence
tcagaaaaattttcattaaaaatg

SEQ ID NO: 90418 - DNA, 24 bp, Artificial sequence
  SiRNA target sequence
cagaaaaattttcattaaaaatgc

SEQ ID NO: 90419 - DNA, 24 bp, Artificial sequence
  SiRNA target sequence
agaaaaattttcattaaaaatgct

SEQ ID NO: 90420 - DNA, 24 bp, Artificial sequence
  SiRNA target sequence
gaaaaattttcattaaaaatgcta

SEQ ID NO: 90421 - DNA, 24 bp, Artificial sequence
  SiRNA target sequence
aaaaattttcattaaaaatgctat

SEQ ID NO: 90422 - DNA, 24 bp, Artificial sequence
  SiRNA target sequence
aaaattttcattaaaaatgctata

SEQ ID NO: 90423 - DNA, 24 bp, Artificial sequence
  SiRNA target sequence
aaattttcattaaaaatgctataa

SEQ ID NO: 90424 - DNA, 24 bp, Artificial sequence
  SiRNA target sequence
aattttcattaaaaatgctataaa

SEQ ID NO: 90425 - DNA, 24 bp, Artificial sequence
  SiRNA target sequence
attttcattaaaaatgctataaat

SEQ ID NO: 90426 - DNA, 24 bp, Artificial sequence
  SiRNA target sequence
ttttcattaaaaatgctataaata

SEQ ID NO: 90427 - DNA, 24 bp, Artificial sequence
  SiRNA target sequence
tttcattaaaaatgctataaatag

SEQ ID NO: 90428 - DNA, 24 bp, Artificial sequence
  SiRNA target sequence
ttcattaaaaatgctataaatagt

SEQ ID NO: 90429 - DNA, 24 bp, Artificial sequence
  SiRNA target sequence
tcattaaaaatgctataaatagtt

SEQ ID NO: 90430 - DNA, 24 bp, Artificial sequence
  SiRNA target sequence
cattaaaaatgctataaatagttt

SEQ ID NO: 90431 - DNA, 24 bp, Artificial sequence
  SiRNA target sequence
attaaaaatgctataaatagtttt

SEQ ID NO: 90432 - DNA, 24 bp, Artificial sequence
  SiRNA target sequence
ttaaaaatgctataaatagttttt

SEQ ID NO: 90433 - DNA, 24 bp, Artificial sequence
  SiRNA target sequence
taaaaatgctataaatagtttttt

SEQ ID NO: 90434 - DNA, 24 bp, Artificial sequence
  SiRNA target sequence
aaaaatgctataaatagttttttg

SEQ ID NO: 90435 - DNA, 24 bp, Artificial sequence
  SiRNA target sequence
aaaatgctataaatagttttttgc

SEQ ID NO: 90436 - DNA, 24 bp, Artificial sequence
  SiRNA target sequence
aaatgctataaatagttttttgca

SEQ ID NO: 90437 - DNA, 24 bp, Artificial sequence
  SiRNA target sequence
aatgctataaatagttttttgcat

SEQ ID NO: 90438 - DNA, 24 bp, Artificial sequence
  SiRNA target sequence
atgctataaatagttttttgcata

SEQ ID NO: 90439 - DNA, 24 bp, Artificial sequence
  SiRNA target sequence
tgctataaatagttttttgcatat

SEQ ID NO: 90440 - DNA, 24 bp, Artificial sequence
  SiRNA target sequence
gctataaatagttttttgcatatc

SEQ ID NO: 90441 - DNA, 24 bp, Artificial sequence
  SiRNA target sequence
ctataaatagttttttgcatatca

SEQ ID NO: 90442 - DNA, 24 bp, Artificial sequence
  SiRNA target sequence
tataaatagttttttgcatatcag

SEQ ID NO: 90443 - DNA, 24 bp, Artificial sequence
  SiRNA target sequence
ataaatagttttttgcatatcagg

SEQ ID NO: 90444 - DNA, 24 bp, Artificial sequence
  SiRNA target sequence
taaatagttttttgcatatcaggt

SEQ ID NO: 90445 - DNA, 24 bp, Artificial sequence
  SiRNA target sequence
aaatagttttttgcatatcaggtc

SEQ ID NO: 90446 - DNA, 24 bp, Artificial sequence
  SiRNA target sequence
aatagttttttgcatatcaggtcg

SEQ ID NO: 90447 - DNA, 24 bp, Artificial sequence
  SiRNA target sequence
atagttttttgcatatcaggtcgg

SEQ ID NO: 90448 - DNA, 24 bp, Artificial sequence
  SiRNA target sequence
tagttttttgcatatcaggtcggc

SEQ ID NO: 90449 - DNA, 24 bp, Artificial sequence
  SiRNA target sequence
agttttttgcatatcaggtcggcc

SEQ ID NO: 90450 - DNA, 24 bp, Artificial sequence
  SiRNA target sequence
gttttttgcatatcaggtcggcca

SEQ ID NO: 90451 - DNA, 24 bp, Artificial sequence
  SiRNA target sequence
ttttttgcatatcaggtcggccac

SEQ ID NO: 90452 - DNA, 24 bp, Artificial sequence
  SiRNA target sequence
tttttgcatatcaggtcggccaca

SEQ ID NO: 90453 - DNA, 24 bp, Artificial sequence
  SiRNA target sequence
ttttgcatatcaggtcggccacaa

SEQ ID NO: 90454 - DNA, 24 bp, Artificial sequence
  SiRNA target sequence
tttgcatatcaggtcggccacaaa

SEQ ID NO: 90455 - DNA, 24 bp, Artificial sequence
  SiRNA target sequence
ttgcatatcaggtcggccacaaac

SEQ ID NO: 90456 - DNA, 24 bp, Artificial sequence
  SiRNA target sequence
tgcatatcaggtcggccacaaaca

SEQ ID NO: 90457 - DNA, 24 bp, Artificial sequence
  SiRNA target sequence
gcatatcaggtcggccacaaacat

SEQ ID NO: 90458 - DNA, 24 bp, Artificial sequence
  SiRNA target sequence
catatcaggtcggccacaaacata

SEQ ID NO: 90459 - DNA, 24 bp, Artificial sequence
  SiRNA target sequence
atatcaggtcggccacaaacataa

SEQ ID NO: 90460 - DNA, 24 bp, Artificial sequence
  SiRNA target sequence
tatcaggtcggccacaaacataaa

SEQ ID NO: 90461 - DNA, 24 bp, Artificial sequence
  SiRNA target sequence
atcaggtcggccacaaacataaac

SEQ ID NO: 90462 - DNA, 24 bp, Artificial sequence
  SiRNA target sequence
tcaggtcggccacaaacataaacc

SEQ ID NO: 90463 - DNA, 24 bp, Artificial sequence
  SiRNA target sequence
caggtcggccacaaacataaacca

SEQ ID NO: 90464 - DNA, 24 bp, Artificial sequence
  SiRNA target sequence
aggtcggccacaaacataaaccaa

SEQ ID NO: 90465 - DNA, 24 bp, Artificial sequence
  SiRNA target sequence
ggtcggccacaaacataaaccaaa

SEQ ID NO: 90466 - DNA, 24 bp, Artificial sequence
  SiRNA target sequence
gtcggccacaaacataaaccaaac

SEQ ID NO: 90467 - DNA, 24 bp, Artificial sequence
  SiRNA target sequence
tcggccacaaacataaaccaaaca

SEQ ID NO: 90468 - DNA, 24 bp, Artificial sequence
  SiRNA target sequence
cggccacaaacataaaccaaacat

SEQ ID NO: 90469 - DNA, 24 bp, Artificial sequence
  SiRNA target sequence
ggccacaaacataaaccaaacatc

SEQ ID NO: 90470 - DNA, 24 bp, Artificial sequence
  SiRNA target sequence
gccacaaacataaaccaaacatcc

SEQ ID NO: 90471 - DNA, 24 bp, Artificial sequence
  SiRNA target sequence
ccacaaacataaaccaaacatccg

SEQ ID NO: 90472 - DNA, 24 bp, Artificial sequence
  SiRNA target sequence
cacaaacataaaccaaacatccgt

SEQ ID NO: 90473 - DNA, 24 bp, Artificial sequence
  SiRNA target sequence
acaaacataaaccaaacatccgtc

SEQ ID NO: 90474 - DNA, 24 bp, Artificial sequence
  SiRNA target sequence
caaacataaaccaaacatccgtct

SEQ ID NO: 90475 - DNA, 24 bp, Artificial sequence
  SiRNA target sequence
aaacataaaccaaacatccgtctt

SEQ ID NO: 90476 - DNA, 24 bp, Artificial sequence
  SiRNA target sequence
aacataaaccaaacatccgtcttt

SEQ ID NO: 90477 - DNA, 24 bp, Artificial sequence
  SiRNA target sequence
acataaaccaaacatccgtcttta

SEQ ID NO: 90478 - DNA, 24 bp, Artificial sequence
  SiRNA target sequence
cataaaccaaacatccgtctttaa

SEQ ID NO: 90479 - DNA, 24 bp, Artificial sequence
  SiRNA target sequence
ataaaccaaacatccgtctttaat

SEQ ID NO: 90480 - DNA, 24 bp, Artificial sequence
  SiRNA target sequence
taaaccaaacatccgtctttaatg

SEQ ID NO: 90481 - DNA, 24 bp, Artificial sequence
  SiRNA target sequence
aaaccaaacatccgtctttaatgt

SEQ ID NO: 90482 - DNA, 24 bp, Artificial sequence
  SiRNA target sequence
aaccaaacatccgtctttaatgta

SEQ ID NO: 90483 - DNA, 24 bp, Artificial sequence
  SiRNA target sequence
accaaacatccgtctttaatgtat

SEQ ID NO: 90484 - DNA, 24 bp, Artificial sequence
  SiRNA target sequence
ccaaacatccgtctttaatgtatg

SEQ ID NO: 90485 - DNA, 24 bp, Artificial sequence
  SiRNA target sequence
caaacatccgtctttaatgtatgt

SEQ ID NO: 90486 - DNA, 24 bp, Artificial sequence
  SiRNA target sequence
aaacatccgtctttaatgtatgtt

SEQ ID NO: 90487 - DNA, 24 bp, Artificial sequence
  SiRNA target sequence
aacatccgtctttaatgtatgttt

SEQ ID NO: 90488 - DNA, 24 bp, Artificial sequence
  SiRNA target sequence
acatccgtctttaatgtatgtttt

SEQ ID NO: 90489 - DNA, 24 bp, Artificial sequence
  SiRNA target sequence
catccgtctttaatgtatgttttt

SEQ ID NO: 90490 - DNA, 24 bp, Artificial sequence
  SiRNA target sequence
atccgtctttaatgtatgttttta

SEQ ID NO: 90491 - DNA, 24 bp, Artificial sequence
  SiRNA target sequence
tccgtctttaatgtatgtttttat

SEQ ID NO: 90492 - DNA, 24 bp, Artificial sequence
  SiRNA target sequence
ccgtctttaatgtatgtttttatc

SEQ ID NO: 90493 - DNA, 24 bp, Artificial sequence
  SiRNA target sequence
cgtctttaatgtatgtttttatct

SEQ ID NO: 90494 - DNA, 24 bp, Artificial sequence
  SiRNA target sequence
gtctttaatgtatgtttttatctc

SEQ ID NO: 90495 - DNA, 24 bp, Artificial sequence
  SiRNA target sequence
tctttaatgtatgtttttatctca

SEQ ID NO: 90496 - DNA, 24 bp, Artificial sequence
  SiRNA target sequence
ctttaatgtatgtttttatctcat

SEQ ID NO: 90497 - DNA, 24 bp, Artificial sequence
  SiRNA target sequence
tttaatgtatgtttttatctcatt

SEQ ID NO: 90498 - DNA, 24 bp, Artificial sequence
  SiRNA target sequence
ttaatgtatgtttttatctcattt

SEQ ID NO: 90499 - DNA, 24 bp, Artificial sequence
  SiRNA target sequence
taatgtatgtttttatctcattta

SEQ ID NO: 90500 - DNA, 24 bp, Artificial sequence
  SiRNA target sequence
aatgtatgtttttatctcatttaa

SEQ ID NO: 90501 - DNA, 24 bp, Artificial sequence
  SiRNA target sequence
atgtatgtttttatctcatttaaa

SEQ ID NO: 90502 - DNA, 24 bp, Artificial sequence
  SiRNA target sequence
tgtatgtttttatctcatttaaat

SEQ ID NO: 90503 - DNA, 24 bp, Artificial sequence
  SiRNA target sequence
gtatgtttttatctcatttaaatt

SEQ ID NO: 90504 - DNA, 24 bp, Artificial sequence
  SiRNA target sequence
tatgtttttatctcatttaaattt

SEQ ID NO: 90505 - DNA, 24 bp, Artificial sequence
  SiRNA target sequence
atgtttttatctcatttaaatttt

SEQ ID NO: 90506 - DNA, 24 bp, Artificial sequence
  SiRNA target sequence
tgtttttatctcatttaaattttg

SEQ ID NO: 90507 - DNA, 24 bp, Artificial sequence
  SiRNA target sequence
gtttttatctcatttaaattttgt

SEQ ID NO: 90508 - DNA, 24 bp, Artificial sequence
  SiRNA target sequence
tttttatctcatttaaattttgta

SEQ ID NO: 90509 - DNA, 24 bp, Artificial sequence
  SiRNA target sequence
ttttatctcatttaaattttgtaa

SEQ ID NO: 90510 - DNA, 24 bp, Artificial sequence
  SiRNA target sequence
tttatctcatttaaattttgtaat

SEQ ID NO: 90511 - DNA, 24 bp, Artificial sequence
  SiRNA target sequence
ttatctcatttaaattttgtaata

SEQ ID NO: 90512 - DNA, 24 bp, Artificial sequence
  SiRNA target sequence
tatctcatttaaattttgtaataa

SEQ ID NO: 90513 - DNA, 24 bp, Artificial sequence
  SiRNA target sequence
atctcatttaaattttgtaataaa

SEQ ID NO: 90514 - DNA, 24 bp, Artificial sequence
  SiRNA target sequence
tctcatttaaattttgtaataaat

SEQ ID NO: 90515 - DNA, 24 bp, Artificial sequence
  SiRNA target sequence
ctcatttaaattttgtaataaata

SEQ ID NO: 90516 - DNA, 24 bp, Artificial sequence
  SiRNA target sequence
tcatttaaattttgtaataaataa

SEQ ID NO: 90517 - DNA, 24 bp, Artificial sequence
  SiRNA target sequence
catttaaattttgtaataaataat

SEQ ID NO: 90518 - DNA, 24 bp, Artificial sequence
  SiRNA target sequence
atttaaattttgtaataaataatc

SEQ ID NO: 90519 - DNA, 24 bp, Artificial sequence
  SiRNA target sequence
tttaaattttgtaataaataatca

SEQ ID NO: 90520 - DNA, 24 bp, Artificial sequence
  SiRNA target sequence
ttaaattttgtaataaataatcag

SEQ ID NO: 90521 - DNA, 24 bp, Artificial sequence
  SiRNA target sequence
taaattttgtaataaataatcagt

SEQ ID NO: 90522 - DNA, 24 bp, Artificial sequence
  SiRNA target sequence
aaattttgtaataaataatcagta

SEQ ID NO: 90523 - DNA, 24 bp, Artificial sequence
  SiRNA target sequence
aattttgtaataaataatcagtaa

SEQ ID NO: 90524 - DNA, 24 bp, Artificial sequence
  SiRNA target sequence
attttgtaataaataatcagtaac

SEQ ID NO: 90525 - DNA, 24 bp, Artificial sequence
  SiRNA target sequence
ttttgtaataaataatcagtaaca

SEQ ID NO: 90526 - DNA, 24 bp, Artificial sequence
  SiRNA target sequence
tttgtaataaataatcagtaacat

SEQ ID NO: 90527 - DNA, 24 bp, Artificial sequence
  SiRNA target sequence
ttgtaataaataatcagtaacata

SEQ ID NO: 90528 - DNA, 24 bp, Artificial sequence
  SiRNA target sequence
tgtaataaataatcagtaacataa

SEQ ID NO: 90529 - DNA, 24 bp, Artificial sequence
  SiRNA target sequence
gtaataaataatcagtaacataaa

SEQ ID NO: 90530 - DNA, 24 bp, Artificial sequence
  SiRNA target sequence
taataaataatcagtaacataaat

SEQ ID NO: 90531 - DNA, 24 bp, Artificial sequence
  SiRNA target sequence
aataaataatcagtaacataaatt

SEQ ID NO: 90532 - DNA, 24 bp, Artificial sequence
  SiRNA target sequence
ataaataatcagtaacataaattt

SEQ ID NO: 90533 - DNA, 24 bp, Artificial sequence
  SiRNA target sequence
taaataatcagtaacataaatttt

SEQ ID NO: 90534 - DNA, 24 bp, Artificial sequence
  SiRNA target sequence
aaataatcagtaacataaatttta

SEQ ID NO: 90535 - DNA, 24 bp, Artificial sequence
  SiRNA target sequence
aataatcagtaacataaattttat

SEQ ID NO: 90536 - DNA, 24 bp, Artificial sequence
  SiRNA target sequence
ataatcagtaacataaattttatt

SEQ ID NO: 90537 - DNA, 24 bp, Artificial sequence
  SiRNA target sequence
taatcagtaacataaattttatta

SEQ ID NO: 90538 - DNA, 24 bp, Artificial sequence
  SiRNA target sequence
aatcagtaacataaattttattac

SEQ ID NO: 90539 - DNA, 24 bp, Artificial sequence
  SiRNA target sequence
atcagtaacataaattttattaca

SEQ ID NO: 90540 - DNA, 24 bp, Artificial sequence
  SiRNA target sequence
tcagtaacataaattttattacaa

SEQ ID NO: 90541 - DNA, 24 bp, Artificial sequence
  SiRNA target sequence
cagtaacataaattttattacaag

SEQ ID NO: 90542 - DNA, 24 bp, Artificial sequence
  SiRNA target sequence
agtaacataaattttattacaaga

SEQ ID NO: 90543 - DNA, 24 bp, Artificial sequence
  SiRNA target sequence
gtaacataaattttattacaagat

SEQ ID NO: 90544 - DNA, 24 bp, Artificial sequence
  SiRNA target sequence
taacataaattttattacaagata

SEQ ID NO: 90545 - DNA, 24 bp, Artificial sequence
  SiRNA target sequence
aacataaattttattacaagataa

SEQ ID NO: 90546 - DNA, 24 bp, Artificial sequence
  SiRNA target sequence
acataaattttattacaagataaa

SEQ ID NO: 90547 - DNA, 24 bp, Artificial sequence
  SiRNA target sequence
cataaattttattacaagataaaa

SEQ ID NO: 90548 - DNA, 24 bp, Artificial sequence
  SiRNA target sequence
ataaattttattacaagataaaat

SEQ ID NO: 90549 - DNA, 24 bp, Artificial sequence
  SiRNA target sequence
taaattttattacaagataaaatt

SEQ ID NO: 90550 - DNA, 24 bp, Artificial sequence
  SiRNA target sequence
aaattttattacaagataaaattt

SEQ ID NO: 90551 - DNA, 24 bp, Artificial sequence
  SiRNA target sequence
aattttattacaagataaaatttt

SEQ ID NO: 90552 - DNA, 24 bp, Artificial sequence
  SiRNA target sequence
attttattacaagataaaatttta

SEQ ID NO: 90553 - DNA, 24 bp, Artificial sequence
  SiRNA target sequence
ttttattacaagataaaattttaa

SEQ ID NO: 90554 - DNA, 24 bp, Artificial sequence
  SiRNA target sequence
tttattacaagataaaattttaat

SEQ ID NO: 90555 - DNA, 24 bp, Artificial sequence
  SiRNA target sequence
ttattacaagataaaattttaata

SEQ ID NO: 90556 - DNA, 24 bp, Artificial sequence
  SiRNA target sequence
tattacaagataaaattttaataa

SEQ ID NO: 90557 - DNA, 24 bp, Artificial sequence
  SiRNA target sequence
attacaagataaaattttaataat

SEQ ID NO: 90558 - DNA, 24 bp, Artificial sequence
  SiRNA target sequence
ttacaagataaaattttaataatt

SEQ ID NO: 90559 - DNA, 24 bp, Artificial sequence
  SiRNA target sequence
tacaagataaaattttaataattt

SEQ ID NO: 90560 - DNA, 24 bp, Artificial sequence
  SiRNA target sequence
acaagataaaattttaataatttc

SEQ ID NO: 90561 - DNA, 24 bp, Artificial sequence
  SiRNA target sequence
caagataaaattttaataatttct

SEQ ID NO: 90562 - DNA, 24 bp, Artificial sequence
  SiRNA target sequence
aagataaaattttaataatttctg

SEQ ID NO: 90563 - DNA, 24 bp, Artificial sequence
  SiRNA target sequence
agataaaattttaataatttctgt

SEQ ID NO: 90564 - DNA, 24 bp, Artificial sequence
  SiRNA target sequence
gataaaattttaataatttctgtg

SEQ ID NO: 90565 - DNA, 24 bp, Artificial sequence
  SiRNA target sequence
ataaaattttaataatttctgtgt

SEQ ID NO: 90566 - DNA, 24 bp, Artificial sequence
  SiRNA target sequence
taaaattttaataatttctgtgtt

SEQ ID NO: 90567 - DNA, 24 bp, Artificial sequence
  SiRNA target sequence
aaaattttaataatttctgtgttt

SEQ ID NO: 90568 - DNA, 24 bp, Artificial sequence
  SiRNA target sequence
aaattttaataatttctgtgtttt

SEQ ID NO: 90569 - DNA, 24 bp, Artificial sequence
  SiRNA target sequence
aattttaataatttctgtgttttt

SEQ ID NO: 90570 - DNA, 24 bp, Artificial sequence
  SiRNA target sequence
attttaataatttctgtgttttta

SEQ ID NO: 90571 - DNA, 24 bp, Artificial sequence
  SiRNA target sequence
ttttaataatttctgtgtttttat

SEQ ID NO: 90572 - DNA, 24 bp, Artificial sequence
  SiRNA target sequence
tttaataatttctgtgtttttata

SEQ ID NO: 90573 - DNA, 24 bp, Artificial sequence
  SiRNA target sequence
ttaataatttctgtgtttttatat

SEQ ID NO: 90574 - DNA, 24 bp, Artificial sequence
  SiRNA target sequence
taataatttctgtgtttttatatt

SEQ ID NO: 90575 - DNA, 24 bp, Artificial sequence
  SiRNA target sequence
aataatttctgtgtttttatattt

SEQ ID NO: 90576 - DNA, 24 bp, Artificial sequence
  SiRNA target sequence
ataatttctgtgtttttatatttt

SEQ ID NO: 90577 - DNA, 24 bp, Artificial sequence
  SiRNA target sequence
taatttctgtgtttttatattttg

SEQ ID NO: 90578 - DNA, 24 bp, Artificial sequence
  SiRNA target sequence
aatttctgtgtttttatattttgc

SEQ ID NO: 90579 - DNA, 24 bp, Artificial sequence
  SiRNA target sequence
atttctgtgtttttatattttgca

SEQ ID NO: 90580 - DNA, 24 bp, Artificial sequence
  SiRNA target sequence
tttctgtgtttttatattttgcat

SEQ ID NO: 90581 - DNA, 24 bp, Artificial sequence
  SiRNA target sequence
ttctgtgtttttatattttgcatc

SEQ ID NO: 90582 - DNA, 24 bp, Artificial sequence
  SiRNA target sequence
tctgtgtttttatattttgcatct

SEQ ID NO: 90583 - DNA, 24 bp, Artificial sequence
  SiRNA target sequence
ctgtgtttttatattttgcatctt

SEQ ID NO: 90584 - DNA, 24 bp, Artificial sequence
  SiRNA target sequence
tgtgtttttatattttgcatcttt

SEQ ID NO: 90585 - DNA, 24 bp, Artificial sequence
  SiRNA target sequence
gtgtttttatattttgcatcttta

SEQ ID NO: 90586 - DNA, 24 bp, Artificial sequence
  SiRNA target sequence
tgtttttatattttgcatctttaa

SEQ ID NO: 90587 - DNA, 24 bp, Artificial sequence
  SiRNA target sequence
gtttttatattttgcatctttaat

SEQ ID NO: 90588 - DNA, 24 bp, Artificial sequence
  SiRNA target sequence
tttttatattttgcatctttaata

SEQ ID NO: 90589 - DNA, 24 bp, Artificial sequence
  SiRNA target sequence
ttttatattttgcatctttaataa

SEQ ID NO: 90590 - DNA, 24 bp, Artificial sequence
  SiRNA target sequence
tttatattttgcatctttaataag

SEQ ID NO: 90591 - DNA, 24 bp, Artificial sequence
  SiRNA target sequence
ttatattttgcatctttaataaga

SEQ ID NO: 90592 - DNA, 24 bp, Artificial sequence
  SiRNA target sequence
tatattttgcatctttaataagat

SEQ ID NO: 90593 - DNA, 24 bp, Artificial sequence
  SiRNA target sequence
atattttgcatctttaataagatc

SEQ ID NO: 90594 - DNA, 24 bp, Artificial sequence
  SiRNA target sequence
tattttgcatctttaataagatca

SEQ ID NO: 90595 - DNA, 24 bp, Artificial sequence
  SiRNA target sequence
attttgcatctttaataagatcat

SEQ ID NO: 90596 - DNA, 24 bp, Artificial sequence
  SiRNA target sequence
ttttgcatctttaataagatcatc

SEQ ID NO: 90597 - DNA, 24 bp, Artificial sequence
  SiRNA target sequence
tttgcatctttaataagatcatct

SEQ ID NO: 90598 - DNA, 24 bp, Artificial sequence
  SiRNA target sequence
ttgcatctttaataagatcatctt

SEQ ID NO: 90599 - DNA, 24 bp, Artificial sequence
  SiRNA target sequence
tgcatctttaataagatcatcttc

SEQ ID NO: 90600 - DNA, 24 bp, Artificial sequence
  SiRNA target sequence
gcatctttaataagatcatcttct

SEQ ID NO: 90601 - DNA, 24 bp, Artificial sequence
  SiRNA target sequence
catctttaataagatcatcttctt

SEQ ID NO: 90602 - DNA, 24 bp, Artificial sequence
  SiRNA target sequence
atctttaataagatcatcttcttg

SEQ ID NO: 90603 - DNA, 24 bp, Artificial sequence
  SiRNA target sequence
tctttaataagatcatcttcttga

SEQ ID NO: 90604 - DNA, 24 bp, Artificial sequence
  SiRNA target sequence
ctttaataagatcatcttcttgat

SEQ ID NO: 90605 - DNA, 24 bp, Artificial sequence
  SiRNA target sequence
tttaataagatcatcttcttgatt

SEQ ID NO: 90606 - DNA, 24 bp, Artificial sequence
  SiRNA target sequence
ttaataagatcatcttcttgattt

SEQ ID NO: 90607 - DNA, 24 bp, Artificial sequence
  SiRNA target sequence
taataagatcatcttcttgatttc

SEQ ID NO: 90608 - DNA, 24 bp, Artificial sequence
  SiRNA target sequence
aataagatcatcttcttgatttct

SEQ ID NO: 90609 - DNA, 24 bp, Artificial sequence
  SiRNA target sequence
ataagatcatcttcttgatttcta

SEQ ID NO: 90610 - DNA, 24 bp, Artificial sequence
  SiRNA target sequence
taagatcatcttcttgatttctaa

SEQ ID NO: 90611 - DNA, 24 bp, Artificial sequence
  SiRNA target sequence
aagatcatcttcttgatttctaaa

SEQ ID NO: 90612 - DNA, 24 bp, Artificial sequence
  SiRNA target sequence
agatcatcttcttgatttctaaat

SEQ ID NO: 90613 - DNA, 24 bp, Artificial sequence
  SiRNA target sequence
gatcatcttcttgatttctaaatc

SEQ ID NO: 90614 - DNA, 24 bp, Artificial sequence
  SiRNA target sequence
atcatcttcttgatttctaaatcc

SEQ ID NO: 90615 - DNA, 24 bp, Artificial sequence
  SiRNA target sequence
tcatcttcttgatttctaaatcca

SEQ ID NO: 90616 - DNA, 24 bp, Artificial sequence
  SiRNA target sequence
catcttcttgatttctaaatccat

SEQ ID NO: 90617 - DNA, 24 bp, Artificial sequence
  SiRNA target sequence
atcttcttgatttctaaatccata

SEQ ID NO: 90618 - DNA, 24 bp, Artificial sequence
  SiRNA target sequence
tcttcttgatttctaaatccatat

SEQ ID NO: 90619 - DNA, 24 bp, Artificial sequence
  SiRNA target sequence
cttcttgatttctaaatccatata

SEQ ID NO: 90620 - DNA, 24 bp, Artificial sequence
  SiRNA target sequence
ttcttgatttctaaatccatatat

SEQ ID NO: 90621 - DNA, 24 bp, Artificial sequence
  SiRNA target sequence
tcttgatttctaaatccatatatt

SEQ ID NO: 90622 - DNA, 24 bp, Artificial sequence
  SiRNA target sequence
cttgatttctaaatccatatatta

SEQ ID NO: 90623 - DNA, 24 bp, Artificial sequence
  SiRNA target sequence
ttgatttctaaatccatatattag

SEQ ID NO: 90624 - DNA, 24 bp, Artificial sequence
  SiRNA target sequence
tgatttctaaatccatatattagt

SEQ ID NO: 90625 - DNA, 24 bp, Artificial sequence
  SiRNA target sequence
gatttctaaatccatatattagtt

SEQ ID NO: 90626 - DNA, 24 bp, Artificial sequence
  SiRNA target sequence
atttctaaatccatatattagttt

SEQ ID NO: 90627 - DNA, 24 bp, Artificial sequence
  SiRNA target sequence
tttctaaatccatatattagtttg

SEQ ID NO: 90628 - DNA, 24 bp, Artificial sequence
  SiRNA target sequence
ttctaaatccatatattagtttga

SEQ ID NO: 90629 - DNA, 24 bp, Artificial sequence
  SiRNA target sequence
tctaaatccatatattagtttgat

SEQ ID NO: 90630 - DNA, 24 bp, Artificial sequence
  SiRNA target sequence
ctaaatccatatattagtttgata

SEQ ID NO: 90631 - DNA, 24 bp, Artificial sequence
  SiRNA target sequence
taaatccatatattagtttgatat

SEQ ID NO: 90632 - DNA, 24 bp, Artificial sequence
  SiRNA target sequence
aaatccatatattagtttgatata

SEQ ID NO: 90633 - DNA, 24 bp, Artificial sequence
  SiRNA target sequence
aatccatatattagtttgatatat

SEQ ID NO: 90634 - DNA, 24 bp, Artificial sequence
  SiRNA target sequence
atccatatattagtttgatatatt

SEQ ID NO: 90635 - DNA, 24 bp, Artificial sequence
  SiRNA target sequence
tccatatattagtttgatatattg

SEQ ID NO: 90636 - DNA, 24 bp, Artificial sequence
  SiRNA target sequence
ccatatattagtttgatatattga

SEQ ID NO: 90637 - DNA, 24 bp, Artificial sequence
  SiRNA target sequence
catatattagtttgatatattgat

SEQ ID NO: 90638 - DNA, 24 bp, Artificial sequence
  SiRNA target sequence
atatattagtttgatatattgatc

SEQ ID NO: 90639 - DNA, 24 bp, Artificial sequence
  SiRNA target sequence
tatattagtttgatatattgatcg

SEQ ID NO: 90640 - DNA, 24 bp, Artificial sequence
  SiRNA target sequence
atattagtttgatatattgatcgt

SEQ ID NO: 90641 - DNA, 24 bp, Artificial sequence
  SiRNA target sequence
tattagtttgatatattgatcgtc

SEQ ID NO: 90642 - DNA, 24 bp, Artificial sequence
  SiRNA target sequence
attagtttgatatattgatcgtct

SEQ ID NO: 90643 - DNA, 24 bp, Artificial sequence
  SiRNA target sequence
ttagtttgatatattgatcgtctt

SEQ ID NO: 90644 - DNA, 24 bp, Artificial sequence
  SiRNA target sequence
tagtttgatatattgatcgtcttc

SEQ ID NO: 90645 - DNA, 24 bp, Artificial sequence
  SiRNA target sequence
agtttgatatattgatcgtcttct

SEQ ID NO: 90646 - DNA, 24 bp, Artificial sequence
  SiRNA target sequence
gtttgatatattgatcgtcttctt

SEQ ID NO: 90647 - DNA, 24 bp, Artificial sequence
  SiRNA target sequence
tttgatatattgatcgtcttcttt

SEQ ID NO: 90648 - DNA, 24 bp, Artificial sequence
  SiRNA target sequence
ttgatatattgatcgtcttcttta

SEQ ID NO: 90649 - DNA, 24 bp, Artificial sequence
  SiRNA target sequence
tgatatattgatcgtcttctttat

SEQ ID NO: 90650 - DNA, 24 bp, Artificial sequence
  SiRNA target sequence
gatatattgatcgtcttctttatt

SEQ ID NO: 90651 - DNA, 24 bp, Artificial sequence
  SiRNA target sequence
atatattgatcgtcttctttattt

SEQ ID NO: 90652 - DNA, 24 bp, Artificial sequence
  SiRNA target sequence
tatattgatcgtcttctttatttt

SEQ ID NO: 90653 - DNA, 24 bp, Artificial sequence
  SiRNA target sequence
atattgatcgtcttctttattttt

SEQ ID NO: 90654 - DNA, 24 bp, Artificial sequence
  SiRNA target sequence
tattgatcgtcttctttatttttc

SEQ ID NO: 90655 - DNA, 24 bp, Artificial sequence
  SiRNA target sequence
attgatcgtcttctttatttttca

SEQ ID NO: 90656 - DNA, 24 bp, Artificial sequence
  SiRNA target sequence
ttgatcgtcttctttatttttcaa

SEQ ID NO: 90657 - DNA, 24 bp, Artificial sequence
  SiRNA target sequence
tgatcgtcttctttatttttcaaa

SEQ ID NO: 90658 - DNA, 24 bp, Artificial sequence
  SiRNA target sequence
gatcgtcttctttatttttcaaaa

SEQ ID NO: 90659 - DNA, 24 bp, Artificial sequence
  SiRNA target sequence
atcgtcttctttatttttcaaaaa

SEQ ID NO: 90660 - DNA, 24 bp, Artificial sequence
  SiRNA target sequence
tcgtcttctttatttttcaaaaac

SEQ ID NO: 90661 - DNA, 24 bp, Artificial sequence
  SiRNA target sequence
cgtcttctttatttttcaaaaacg

SEQ ID NO: 90662 - DNA, 24 bp, Artificial sequence
  SiRNA target sequence
gtcttctttatttttcaaaaacga

SEQ ID NO: 90663 - DNA, 24 bp, Artificial sequence
  SiRNA target sequence
tcttctttatttttcaaaaacgaa

SEQ ID NO: 90664 - DNA, 24 bp, Artificial sequence
  SiRNA target sequence
cttctttatttttcaaaaacgaaa

SEQ ID NO: 90665 - DNA, 24 bp, Artificial sequence
  SiRNA target sequence
ttctttatttttcaaaaacgaaaa

SEQ ID NO: 90666 - DNA, 24 bp, Artificial sequence
  SiRNA target sequence
tctttatttttcaaaaacgaaaaa

SEQ ID NO: 90667 - DNA, 24 bp, Artificial sequence
  SiRNA target sequence
ctttatttttcaaaaacgaaaaaa

SEQ ID NO: 90668 - DNA, 24 bp, Artificial sequence
  SiRNA target sequence
tttatttttcaaaaacgaaaaaaa

SEQ ID NO: 90669 - DNA, 24 bp, Artificial sequence
  SiRNA target sequence
ttatttttcaaaaacgaaaaaaat

SEQ ID NO: 90670 - DNA, 24 bp, Artificial sequence
  SiRNA target sequence
tatttttcaaaaacgaaaaaaatg

SEQ ID NO: 90671 - DNA, 24 bp, Artificial sequence
  SiRNA target sequence
atttttcaaaaacgaaaaaaatgg

SEQ ID NO: 90672 - DNA, 24 bp, Artificial sequence
  SiRNA target sequence
tttttcaaaaacgaaaaaaatgga

SEQ ID NO: 90673 - DNA, 24 bp, Artificial sequence
  SiRNA target sequence
ttttcaaaaacgaaaaaaatggag

SEQ ID NO: 90674 - DNA, 24 bp, Artificial sequence
  SiRNA target sequence
tttcaaaaacgaaaaaaatggagc

SEQ ID NO: 90675 - DNA, 24 bp, Artificial sequence
  SiRNA target sequence
ttcaaaaacgaaaaaaatggagca

SEQ ID NO: 90676 - DNA, 24 bp, Artificial sequence
  SiRNA target sequence
tcaaaaacgaaaaaaatggagcaa

SEQ ID NO: 90677 - DNA, 24 bp, Artificial sequence
  SiRNA target sequence
caaaaacgaaaaaaatggagcaat

SEQ ID NO: 90678 - DNA, 24 bp, Artificial sequence
  SiRNA target sequence
aaaaacgaaaaaaatggagcaatg

SEQ ID NO: 90679 - DNA, 24 bp, Artificial sequence
  SiRNA target sequence
aaaacgaaaaaaatggagcaatgc

SEQ ID NO: 90680 - DNA, 24 bp, Artificial sequence
  SiRNA target sequence
aaacgaaaaaaatggagcaatgcc

SEQ ID NO: 90681 - DNA, 24 bp, Artificial sequence
  SiRNA target sequence
aacgaaaaaaatggagcaatgcca

SEQ ID NO: 90682 - DNA, 24 bp, Artificial sequence
  SiRNA target sequence
acgaaaaaaatggagcaatgccag

SEQ ID NO: 90683 - DNA, 24 bp, Artificial sequence
  SiRNA target sequence
cgaaaaaaatggagcaatgccagt

SEQ ID NO: 90684 - DNA, 24 bp, Artificial sequence
  SiRNA target sequence
gaaaaaaatggagcaatgccagtt

SEQ ID NO: 90685 - DNA, 24 bp, Artificial sequence
  SiRNA target sequence
aaaaaaatggagcaatgccagttc

SEQ ID NO: 90686 - DNA, 24 bp, Artificial sequence
  SiRNA target sequence
aaaaaatggagcaatgccagttcc

SEQ ID NO: 90687 - DNA, 24 bp, Artificial sequence
  SiRNA target sequence
aaaaatggagcaatgccagttcca

SEQ ID NO: 90688 - DNA, 24 bp, Artificial sequence
  SiRNA target sequence
aaaatggagcaatgccagttccag

SEQ ID NO: 90689 - DNA, 24 bp, Artificial sequence
  SiRNA target sequence
aaatggagcaatgccagttccagt

SEQ ID NO: 90690 - DNA, 24 bp, Artificial sequence
  SiRNA target sequence
aatggagcaatgccagttccagta

SEQ ID NO: 90691 - DNA, 24 bp, Artificial sequence
  SiRNA target sequence
atggagcaatgccagttccagtac

SEQ ID NO: 90692 - DNA, 24 bp, Artificial sequence
  SiRNA target sequence
tggagcaatgccagttccagtaca

SEQ ID NO: 90693 - DNA, 24 bp, Artificial sequence
  SiRNA target sequence
ggagcaatgccagttccagtacaa

SEQ ID NO: 90694 - DNA, 24 bp, Artificial sequence
  SiRNA target sequence
gagcaatgccagttccagtacaaa

SEQ ID NO: 90695 - DNA, 24 bp, Artificial sequence
  SiRNA target sequence
agcaatgccagttccagtacaaat

SEQ ID NO: 90696 - DNA, 24 bp, Artificial sequence
  SiRNA target sequence
gcaatgccagttccagtacaaata

SEQ ID NO: 90697 - DNA, 24 bp, Artificial sequence
  SiRNA target sequence
caatgccagttccagtacaaatac

SEQ ID NO: 90698 - DNA, 24 bp, Artificial sequence
  SiRNA target sequence
aatgccagttccagtacaaatacc

SEQ ID NO: 90699 - DNA, 24 bp, Artificial sequence
  SiRNA target sequence
atgccagttccagtacaaataccc

SEQ ID NO: 90700 - DNA, 24 bp, Artificial sequence
  SiRNA target sequence
tgccagttccagtacaaataccca

SEQ ID NO: 90701 - DNA, 24 bp, Artificial sequence
  SiRNA target sequence
gccagttccagtacaaatacccaa

SEQ ID NO: 90702 - DNA, 24 bp, Artificial sequence
  SiRNA target sequence
ccagttccagtacaaatacccaac

SEQ ID NO: 90703 - DNA, 24 bp, Artificial sequence
  SiRNA target sequence
cagttccagtacaaatacccaaca

SEQ ID NO: 90704 - DNA, 24 bp, Artificial sequence
  SiRNA target sequence
agttccagtacaaatacccaacac

SEQ ID NO: 90705 - DNA, 24 bp, Artificial sequence
  SiRNA target sequence
gttccagtacaaatacccaacact

SEQ ID NO: 90706 - DNA, 24 bp, Artificial sequence
  SiRNA target sequence
ttccagtacaaatacccaacactt

SEQ ID NO: 90707 - DNA, 24 bp, Artificial sequence
  SiRNA target sequence
tccagtacaaatacccaacacttt

SEQ ID NO: 90708 - DNA, 24 bp, Artificial sequence
  SiRNA target sequence
ccagtacaaatacccaacactttt

SEQ ID NO: 90709 - DNA, 24 bp, Artificial sequence
  SiRNA target sequence
cagtacaaatacccaacacttttt

SEQ ID NO: 90710 - DNA, 24 bp, Artificial sequence
  SiRNA target sequence
agtacaaatacccaacactttttt

SEQ ID NO: 90711 - DNA, 24 bp, Artificial sequence
  SiRNA target sequence
gtacaaatacccaacactttttta

SEQ ID NO: 90712 - DNA, 24 bp, Artificial sequence
  SiRNA target sequence
tacaaatacccaacacttttttac

SEQ ID NO: 90713 - DNA, 24 bp, Artificial sequence
  SiRNA target sequence
acaaatacccaacacttttttaca

SEQ ID NO: 90714 - DNA, 24 bp, Artificial sequence
  SiRNA target sequence
caaatacccaacacttttttacaa

SEQ ID NO: 90715 - DNA, 24 bp, Artificial sequence
  SiRNA target sequence
aaatacccaacacttttttacaaa

SEQ ID NO: 90716 - DNA, 24 bp, Artificial sequence
  SiRNA target sequence
aatacccaacacttttttacaaaa

SEQ ID NO: 90717 - DNA, 24 bp, Artificial sequence
  SiRNA target sequence
atacccaacacttttttacaaaaa

SEQ ID NO: 90718 - DNA, 24 bp, Artificial sequence
  SiRNA target sequence
tacccaacacttttttacaaaaat

SEQ ID NO: 90719 - DNA, 24 bp, Artificial sequence
  SiRNA target sequence
acccaacacttttttacaaaaatt

SEQ ID NO: 90720 - DNA, 24 bp, Artificial sequence
  SiRNA target sequence
cccaacacttttttacaaaaattt

SEQ ID NO: 90721 - DNA, 24 bp, Artificial sequence
  SiRNA target sequence
ccaacacttttttacaaaaattta

SEQ ID NO: 90722 - DNA, 24 bp, Artificial sequence
  SiRNA target sequence
caacacttttttacaaaaatttaa

SEQ ID NO: 90723 - DNA, 24 bp, Artificial sequence
  SiRNA target sequence
aacacttttttacaaaaatttaat

SEQ ID NO: 90724 - DNA, 24 bp, Artificial sequence
  SiRNA target sequence
acacttttttacaaaaatttaatc

SEQ ID NO: 90725 - DNA, 24 bp, Artificial sequence
  SiRNA target sequence
cacttttttacaaaaatttaatct

SEQ ID NO: 90726 - DNA, 24 bp, Artificial sequence
  SiRNA target sequence
acttttttacaaaaatttaatcta

SEQ ID NO: 90727 - DNA, 24 bp, Artificial sequence
  SiRNA target sequence
cttttttacaaaaatttaatctaa

SEQ ID NO: 90728 - DNA, 24 bp, Artificial sequence
  SiRNA target sequence
ttttttacaaaaatttaatctaaa

SEQ ID NO: 90729 - DNA, 24 bp, Artificial sequence
  SiRNA target sequence
tttttacaaaaatttaatctaaat

SEQ ID NO: 90730 - DNA, 24 bp, Artificial sequence
  SiRNA target sequence
ttttacaaaaatttaatctaaata

SEQ ID NO: 90731 - DNA, 24 bp, Artificial sequence
  SiRNA target sequence
tttacaaaaatttaatctaaataa

SEQ ID NO: 90732 - DNA, 24 bp, Artificial sequence
  SiRNA target sequence
ttacaaaaatttaatctaaataat

SEQ ID NO: 90733 - DNA, 24 bp, Artificial sequence
  SiRNA target sequence
tacaaaaatttaatctaaataatt

SEQ ID NO: 90734 - DNA, 24 bp, Artificial sequence
  SiRNA target sequence
acaaaaatttaatctaaataattt

SEQ ID NO: 90735 - DNA, 24 bp, Artificial sequence
  SiRNA target sequence
caaaaatttaatctaaataattta

SEQ ID NO: 90736 - DNA, 24 bp, Artificial sequence
  SiRNA target sequence
aaaaatttaatctaaataatttac

SEQ ID NO: 90737 - DNA, 24 bp, Artificial sequence
  SiRNA target sequence
aaaatttaatctaaataatttact

SEQ ID NO: 90738 - DNA, 24 bp, Artificial sequence
  SiRNA target sequence
aaatttaatctaaataatttactc

SEQ ID NO: 90739 - DNA, 24 bp, Artificial sequence
  SiRNA target sequence
aatttaatctaaataatttactcg

SEQ ID NO: 90740 - DNA, 24 bp, Artificial sequence
  SiRNA target sequence
atttaatctaaataatttactcgg

SEQ ID NO: 90741 - DNA, 24 bp, Artificial sequence
  SiRNA target sequence
tttaatctaaataatttactcggt

SEQ ID NO: 90742 - DNA, 24 bp, Artificial sequence
  SiRNA target sequence
ttaatctaaataatttactcggtc

SEQ ID NO: 90743 - DNA, 24 bp, Artificial sequence
  SiRNA target sequence
taatctaaataatttactcggtct

SEQ ID NO: 90744 - DNA, 24 bp, Artificial sequence
  SiRNA target sequence
aatctaaataatttactcggtctg

SEQ ID NO: 90745 - DNA, 24 bp, Artificial sequence
  SiRNA target sequence
atctaaataatttactcggtctgt

SEQ ID NO: 90746 - DNA, 24 bp, Artificial sequence
  SiRNA target sequence
tctaaataatttactcggtctgtg

SEQ ID NO: 90747 - DNA, 24 bp, Artificial sequence
  SiRNA target sequence
ctaaataatttactcggtctgtga

SEQ ID NO: 90748 - DNA, 24 bp, Artificial sequence
  SiRNA target sequence
taaataatttactcggtctgtgac

SEQ ID NO: 90749 - DNA, 24 bp, Artificial sequence
  SiRNA target sequence
aaataatttactcggtctgtgaca

SEQ ID NO: 90750 - DNA, 24 bp, Artificial sequence
  SiRNA target sequence
aataatttactcggtctgtgacag

SEQ ID NO: 90751 - DNA, 24 bp, Artificial sequence
  SiRNA target sequence
ataatttactcggtctgtgacaga

SEQ ID NO: 90752 - DNA, 24 bp, Artificial sequence
  SiRNA target sequence
taatttactcggtctgtgacagat

SEQ ID NO: 90753 - DNA, 24 bp, Artificial sequence
  SiRNA target sequence
aatttactcggtctgtgacagatc

SEQ ID NO: 90754 - DNA, 24 bp, Artificial sequence
  SiRNA target sequence
atttactcggtctgtgacagatct

SEQ ID NO: 90755 - DNA, 24 bp, Artificial sequence
  SiRNA target sequence
tttactcggtctgtgacagatctt

SEQ ID NO: 90756 - DNA, 24 bp, Artificial sequence
  SiRNA target sequence
ttactcggtctgtgacagatcttt

SEQ ID NO: 90757 - DNA, 24 bp, Artificial sequence
  SiRNA target sequence
tactcggtctgtgacagatcttta

SEQ ID NO: 90758 - DNA, 24 bp, Artificial sequence
  SiRNA target sequence
actcggtctgtgacagatctttaa

SEQ ID NO: 90759 - DNA, 24 bp, Artificial sequence
  SiRNA target sequence
ctcggtctgtgacagatctttaaa

SEQ ID NO: 90760 - DNA, 24 bp, Artificial sequence
  SiRNA target sequence
tcggtctgtgacagatctttaaat

SEQ ID NO: 90761 - DNA, 24 bp, Artificial sequence
  SiRNA target sequence
cggtctgtgacagatctttaaatt

SEQ ID NO: 90762 - DNA, 24 bp, Artificial sequence
  SiRNA target sequence
ggtctgtgacagatctttaaatta

SEQ ID NO: 90763 - DNA, 24 bp, Artificial sequence
  SiRNA target sequence
gtctgtgacagatctttaaattat

SEQ ID NO: 90764 - DNA, 24 bp, Artificial sequence
  SiRNA target sequence
tctgtgacagatctttaaattatt

SEQ ID NO: 90765 - DNA, 24 bp, Artificial sequence
  SiRNA target sequence
ctgtgacagatctttaaattatta

SEQ ID NO: 90766 - DNA, 24 bp, Artificial sequence
  SiRNA target sequence
tgtgacagatctttaaattattat

SEQ ID NO: 90767 - DNA, 24 bp, Artificial sequence
  SiRNA target sequence
gtgacagatctttaaattattata

SEQ ID NO: 90768 - DNA, 24 bp, Artificial sequence
  SiRNA target sequence
tgacagatctttaaattattataa

SEQ ID NO: 90769 - DNA, 24 bp, Artificial sequence
  SiRNA target sequence
gacagatctttaaattattataat

SEQ ID NO: 90770 - DNA, 24 bp, Artificial sequence
  SiRNA target sequence
acagatctttaaattattataatt

SEQ ID NO: 90771 - DNA, 24 bp, Artificial sequence
  SiRNA target sequence
cagatctttaaattattataattt

SEQ ID NO: 90772 - DNA, 24 bp, Artificial sequence
  SiRNA target sequence
agatctttaaattattataatttt

SEQ ID NO: 90773 - DNA, 24 bp, Artificial sequence
  SiRNA target sequence
gatctttaaattattataattttg

SEQ ID NO: 90774 - DNA, 24 bp, Artificial sequence
  SiRNA target sequence
atctttaaattattataattttgc

SEQ ID NO: 90775 - DNA, 24 bp, Artificial sequence
  SiRNA target sequence
tctttaaattattataattttgca

SEQ ID NO: 90776 - DNA, 24 bp, Artificial sequence
  SiRNA target sequence
ctttaaattattataattttgcat

SEQ ID NO: 90777 - DNA, 24 bp, Artificial sequence
  SiRNA target sequence
tttaaattattataattttgcata

SEQ ID NO: 90778 - DNA, 24 bp, Artificial sequence
  SiRNA target sequence
ttaaattattataattttgcatat

SEQ ID NO: 90779 - DNA, 24 bp, Artificial sequence
  SiRNA target sequence
taaattattataattttgcatatc

SEQ ID NO: 90780 - DNA, 24 bp, Artificial sequence
  SiRNA target sequence
aaattattataattttgcatatct

SEQ ID NO: 90781 - DNA, 24 bp, Artificial sequence
  SiRNA target sequence
aattattataattttgcatatcta

SEQ ID NO: 90782 - DNA, 24 bp, Artificial sequence
  SiRNA target sequence
attattataattttgcatatctat

SEQ ID NO: 90783 - DNA, 24 bp, Artificial sequence
  SiRNA target sequence
ttattataattttgcatatctatg

SEQ ID NO: 90784 - DNA, 24 bp, Artificial sequence
  SiRNA target sequence
tattataattttgcatatctatga

SEQ ID NO: 90785 - DNA, 24 bp, Artificial sequence
  SiRNA target sequence
attataattttgcatatctatgaa

SEQ ID NO: 90786 - DNA, 24 bp, Artificial sequence
  SiRNA target sequence
ttataattttgcatatctatgaaa

SEQ ID NO: 90787 - DNA, 24 bp, Artificial sequence
  SiRNA target sequence
tataattttgcatatctatgaaat

SEQ ID NO: 90788 - DNA, 24 bp, Artificial sequence
  SiRNA target sequence
ataattttgcatatctatgaaatt

SEQ ID NO: 90789 - DNA, 24 bp, Artificial sequence
  SiRNA target sequence
taattttgcatatctatgaaattg

SEQ ID NO: 90790 - DNA, 24 bp, Artificial sequence
  SiRNA target sequence
aattttgcatatctatgaaattgg

SEQ ID NO: 90791 - DNA, 24 bp, Artificial sequence
  SiRNA target sequence
attttgcatatctatgaaattgga

SEQ ID NO: 90792 - DNA, 24 bp, Artificial sequence
  SiRNA target sequence
ttttgcatatctatgaaattggaa

SEQ ID NO: 90793 - DNA, 24 bp, Artificial sequence
  SiRNA target sequence
tttgcatatctatgaaattggaaa

SEQ ID NO: 90794 - DNA, 24 bp, Artificial sequence
  SiRNA target sequence
ttgcatatctatgaaattggaaac

SEQ ID NO: 90795 - DNA, 24 bp, Artificial sequence
  SiRNA target sequence
tgcatatctatgaaattggaaaca

SEQ ID NO: 90796 - DNA, 24 bp, Artificial sequence
  SiRNA target sequence
gcatatctatgaaattggaaacat

SEQ ID NO: 90797 - DNA, 24 bp, Artificial sequence
  SiRNA target sequence
catatctatgaaattggaaacatg

SEQ ID NO: 90798 - DNA, 24 bp, Artificial sequence
  SiRNA target sequence
atatctatgaaattggaaacatgt

SEQ ID NO: 90799 - DNA, 24 bp, Artificial sequence
  SiRNA target sequence
tatctatgaaattggaaacatgtc

SEQ ID NO: 90800 - DNA, 24 bp, Artificial sequence
  SiRNA target sequence
atctatgaaattggaaacatgtcc

SEQ ID NO: 90801 - DNA, 24 bp, Artificial sequence
  SiRNA target sequence
tctatgaaattggaaacatgtcca

SEQ ID NO: 90802 - DNA, 24 bp, Artificial sequence
  SiRNA target sequence
ctatgaaattggaaacatgtccat

SEQ ID NO: 90803 - DNA, 24 bp, Artificial sequence
  SiRNA target sequence
tatgaaattggaaacatgtccata

SEQ ID NO: 90804 - DNA, 24 bp, Artificial sequence
  SiRNA target sequence
atgaaattggaaacatgtccatat

SEQ ID NO: 90805 - DNA, 24 bp, Artificial sequence
  SiRNA target sequence
tgaaattggaaacatgtccatatc

SEQ ID NO: 90806 - DNA, 24 bp, Artificial sequence
  SiRNA target sequence
gaaattggaaacatgtccatatct

SEQ ID NO: 90807 - DNA, 24 bp, Artificial sequence
  SiRNA target sequence
aaattggaaacatgtccatatcta

SEQ ID NO: 90808 - DNA, 24 bp, Artificial sequence
  SiRNA target sequence
aattggaaacatgtccatatctat

SEQ ID NO: 90809 - DNA, 24 bp, Artificial sequence
  SiRNA target sequence
attggaaacatgtccatatctatc

SEQ ID NO: 90810 - DNA, 24 bp, Artificial sequence
  SiRNA target sequence
ttggaaacatgtccatatctatcg

SEQ ID NO: 90811 - DNA, 24 bp, Artificial sequence
  SiRNA target sequence
tggaaacatgtccatatctatcgc

SEQ ID NO: 90812 - DNA, 24 bp, Artificial sequence
  SiRNA target sequence
ggaaacatgtccatatctatcgcc

SEQ ID NO: 90813 - DNA, 24 bp, Artificial sequence
  SiRNA target sequence
gaaacatgtccatatctatcgcct

SEQ ID NO: 90814 - DNA, 24 bp, Artificial sequence
  SiRNA target sequence
aaacatgtccatatctatcgcctt

SEQ ID NO: 90815 - DNA, 24 bp, Artificial sequence
  SiRNA target sequence
aacatgtccatatctatcgccttt

SEQ ID NO: 90816 - DNA, 24 bp, Artificial sequence
  SiRNA target sequence
acatgtccatatctatcgcctttt

SEQ ID NO: 90817 - DNA, 24 bp, Artificial sequence
  SiRNA target sequence
catgtccatatctatcgccttttt

SEQ ID NO: 90818 - DNA, 24 bp, Artificial sequence
  SiRNA target sequence
atgtccatatctatcgcctttttt

SEQ ID NO: 90819 - DNA, 24 bp, Artificial sequence
  SiRNA target sequence
tgtccatatctatcgcctttttta

SEQ ID NO: 90820 - DNA, 24 bp, Artificial sequence
  SiRNA target sequence
gtccatatctatcgccttttttaa

SEQ ID NO: 90821 - DNA, 24 bp, Artificial sequence
  SiRNA target sequence
tccatatctatcgccttttttaat

SEQ ID NO: 90822 - DNA, 24 bp, Artificial sequence
  SiRNA target sequence
ccatatctatcgccttttttaata

SEQ ID NO: 90823 - DNA, 24 bp, Artificial sequence
  SiRNA target sequence
catatctatcgccttttttaataa

SEQ ID NO: 90824 - DNA, 24 bp, Artificial sequence
  SiRNA target sequence
atatctatcgccttttttaataat

SEQ ID NO: 90825 - DNA, 24 bp, Artificial sequence
  SiRNA target sequence
tatctatcgccttttttaataatt

SEQ ID NO: 90826 - DNA, 24 bp, Artificial sequence
  SiRNA target sequence
atctatcgccttttttaataattg

SEQ ID NO: 90827 - DNA, 24 bp, Artificial sequence
  SiRNA target sequence
tctatcgccttttttaataattgc

SEQ ID NO: 90828 - DNA, 24 bp, Artificial sequence
  SiRNA target sequence
ctatcgccttttttaataattgct

SEQ ID NO: 90829 - DNA, 24 bp, Artificial sequence
  SiRNA target sequence
tatcgccttttttaataattgcta

SEQ ID NO: 90830 - DNA, 24 bp, Artificial sequence
  SiRNA target sequence
atcgccttttttaataattgctac

SEQ ID NO: 90831 - DNA, 24 bp, Artificial sequence
  SiRNA target sequence
tcgccttttttaataattgctact

SEQ ID NO: 90832 - DNA, 24 bp, Artificial sequence
  SiRNA target sequence
cgccttttttaataattgctacta

SEQ ID NO: 90833 - DNA, 24 bp, Artificial sequence
  SiRNA target sequence
gccttttttaataattgctactaa

SEQ ID NO: 90834 - DNA, 24 bp, Artificial sequence
  SiRNA target sequence
ccttttttaataattgctactaaa

SEQ ID NO: 90835 - DNA, 24 bp, Artificial sequence
  SiRNA target sequence
cttttttaataattgctactaaaa

SEQ ID NO: 90836 - DNA, 24 bp, Artificial sequence
  SiRNA target sequence
ttttttaataattgctactaaaat

SEQ ID NO: 90837 - DNA, 24 bp, Artificial sequence
  SiRNA target sequence
tttttaataattgctactaaaatt

SEQ ID NO: 90838 - DNA, 24 bp, Artificial sequence
  SiRNA target sequence
ttttaataattgctactaaaattt

SEQ ID NO: 90839 - DNA, 24 bp, Artificial sequence
  SiRNA target sequence
tttaataattgctactaaaatttc

SEQ ID NO: 90840 - DNA, 24 bp, Artificial sequence
  SiRNA target sequence
ttaataattgctactaaaatttca

SEQ ID NO: 90841 - DNA, 24 bp, Artificial sequence
  SiRNA target sequence
taataattgctactaaaatttcac

SEQ ID NO: 90842 - DNA, 24 bp, Artificial sequence
  SiRNA target sequence
aataattgctactaaaatttcaca

SEQ ID NO: 90843 - DNA, 24 bp, Artificial sequence
  SiRNA target sequence
ataattgctactaaaatttcacat

SEQ ID NO: 90844 - DNA, 24 bp, Artificial sequence
  SiRNA target sequence
taattgctactaaaatttcacatt

SEQ ID NO: 90845 - DNA, 24 bp, Artificial sequence
  SiRNA target sequence
aattgctactaaaatttcacattt

SEQ ID NO: 90846 - DNA, 24 bp, Artificial sequence
  SiRNA target sequence
attgctactaaaatttcacatttt

SEQ ID NO: 90847 - DNA, 24 bp, Artificial sequence
  SiRNA target sequence
ttgctactaaaatttcacattttt

SEQ ID NO: 90848 - DNA, 24 bp, Artificial sequence
  SiRNA target sequence
tgctactaaaatttcacatttttc

SEQ ID NO: 90849 - DNA, 24 bp, Artificial sequence
  SiRNA target sequence
gctactaaaatttcacatttttca

SEQ ID NO: 90850 - DNA, 24 bp, Artificial sequence
  SiRNA target sequence
ctactaaaatttcacatttttcat

SEQ ID NO: 90851 - DNA, 24 bp, Artificial sequence
  SiRNA target sequence
tactaaaatttcacatttttcatt

SEQ ID NO: 90852 - DNA, 24 bp, Artificial sequence
  SiRNA target sequence
actaaaatttcacatttttcattt

SEQ ID NO: 90853 - DNA, 24 bp, Artificial sequence
  SiRNA target sequence
ctaaaatttcacatttttcattta

SEQ ID NO: 90854 - DNA, 24 bp, Artificial sequence
  SiRNA target sequence
taaaatttcacatttttcatttac

SEQ ID NO: 90855 - DNA, 24 bp, Artificial sequence
  SiRNA target sequence
aaaatttcacatttttcatttacg

SEQ ID NO: 90856 - DNA, 24 bp, Artificial sequence
  SiRNA target sequence
aaatttcacatttttcatttacgt

SEQ ID NO: 90857 - DNA, 24 bp, Artificial sequence
  SiRNA target sequence
aatttcacatttttcatttacgtg

SEQ ID NO: 90858 - DNA, 24 bp, Artificial sequence
  SiRNA target sequence
atttcacatttttcatttacgtgg

SEQ ID NO: 90859 - DNA, 24 bp, Artificial sequence
  SiRNA target sequence
tttcacatttttcatttacgtggt

SEQ ID NO: 90860 - DNA, 24 bp, Artificial sequence
  SiRNA target sequence
ttcacatttttcatttacgtggtt

SEQ ID NO: 90861 - DNA, 24 bp, Artificial sequence
  SiRNA target sequence
tcacatttttcatttacgtggtta

SEQ ID NO: 90862 - DNA, 24 bp, Artificial sequence
  SiRNA target sequence
cacatttttcatttacgtggttag

SEQ ID NO: 90863 - DNA, 24 bp, Artificial sequence
  SiRNA target sequence
acatttttcatttacgtggttagt

SEQ ID NO: 90864 - DNA, 24 bp, Artificial sequence
  SiRNA target sequence
catttttcatttacgtggttagta

SEQ ID NO: 90865 - DNA, 24 bp, Artificial sequence
  SiRNA target sequence
atttttcatttacgtggttagtaa

SEQ ID NO: 90866 - DNA, 24 bp, Artificial sequence
  SiRNA target sequence
tttttcatttacgtggttagtaag

SEQ ID NO: 90867 - DNA, 24 bp, Artificial sequence
  SiRNA target sequence
ttttcatttacgtggttagtaagt

SEQ ID NO: 90868 - DNA, 24 bp, Artificial sequence
  SiRNA target sequence
tttcatttacgtggttagtaagtg

SEQ ID NO: 90869 - DNA, 24 bp, Artificial sequence
  SiRNA target sequence
ttcatttacgtggttagtaagtga

SEQ ID NO: 90870 - DNA, 24 bp, Artificial sequence
  SiRNA target sequence
tcatttacgtggttagtaagtgaa

SEQ ID NO: 90871 - DNA, 24 bp, Artificial sequence
  SiRNA target sequence
catttacgtggttagtaagtgaat

SEQ ID NO: 90872 - DNA, 24 bp, Artificial sequence
  SiRNA target sequence
atttacgtggttagtaagtgaata

SEQ ID NO: 90873 - DNA, 24 bp, Artificial sequence
  SiRNA target sequence
tttacgtggttagtaagtgaataa

SEQ ID NO: 90874 - DNA, 24 bp, Artificial sequence
  SiRNA target sequence
ttacgtggttagtaagtgaataat

SEQ ID NO: 90875 - DNA, 24 bp, Artificial sequence
  SiRNA target sequence
tacgtggttagtaagtgaataata

SEQ ID NO: 90876 - DNA, 24 bp, Artificial sequence
  SiRNA target sequence
acgtggttagtaagtgaataatat

SEQ ID NO: 90877 - DNA, 24 bp, Artificial sequence
  SiRNA target sequence
cgtggttagtaagtgaataatatc

SEQ ID NO: 90878 - DNA, 24 bp, Artificial sequence
  SiRNA target sequence
gtggttagtaagtgaataatatct

SEQ ID NO: 90879 - DNA, 24 bp, Artificial sequence
  SiRNA target sequence
tggttagtaagtgaataatatctt

SEQ ID NO: 90880 - DNA, 24 bp, Artificial sequence
  SiRNA target sequence
ggttagtaagtgaataatatcttg

SEQ ID NO: 90881 - DNA, 24 bp, Artificial sequence
  SiRNA target sequence
gttagtaagtgaataatatcttgg

SEQ ID NO: 90882 - DNA, 24 bp, Artificial sequence
  SiRNA target sequence
ttagtaagtgaataatatcttggc

SEQ ID NO: 90883 - DNA, 24 bp, Artificial sequence
  SiRNA target sequence
tagtaagtgaataatatcttggct

SEQ ID NO: 90884 - DNA, 24 bp, Artificial sequence
  SiRNA target sequence
agtaagtgaataatatcttggctt

SEQ ID NO: 90885 - DNA, 24 bp, Artificial sequence
  SiRNA target sequence
gtaagtgaataatatcttggctta

SEQ ID NO: 90886 - DNA, 24 bp, Artificial sequence
  SiRNA target sequence
taagtgaataatatcttggcttaa

SEQ ID NO: 90887 - DNA, 24 bp, Artificial sequence
  SiRNA target sequence
aagtgaataatatcttggcttaat

SEQ ID NO: 90888 - DNA, 24 bp, Artificial sequence
  SiRNA target sequence
agtgaataatatcttggcttaatt

SEQ ID NO: 90889 - DNA, 24 bp, Artificial sequence
  SiRNA target sequence
gtgaataatatcttggcttaattg

SEQ ID NO: 90890 - DNA, 24 bp, Artificial sequence
  SiRNA target sequence
tgaataatatcttggcttaattgt

SEQ ID NO: 90891 - DNA, 24 bp, Artificial sequence
  SiRNA target sequence
gaataatatcttggcttaattgtt

SEQ ID NO: 90892 - DNA, 24 bp, Artificial sequence
  SiRNA target sequence
aataatatcttggcttaattgttt

SEQ ID NO: 90893 - DNA, 24 bp, Artificial sequence
  SiRNA target sequence
ataatatcttggcttaattgtttg

SEQ ID NO: 90894 - DNA, 24 bp, Artificial sequence
  SiRNA target sequence
taatatcttggcttaattgtttga

SEQ ID NO: 90895 - DNA, 24 bp, Artificial sequence
  SiRNA target sequence
aatatcttggcttaattgtttgac

SEQ ID NO: 90896 - DNA, 24 bp, Artificial sequence
  SiRNA target sequence
atatcttggcttaattgtttgaca

SEQ ID NO: 90897 - DNA, 24 bp, Artificial sequence
  SiRNA target sequence
tatcttggcttaattgtttgacaa

SEQ ID NO: 90898 - DNA, 24 bp, Artificial sequence
  SiRNA target sequence
atcttggcttaattgtttgacaat

SEQ ID NO: 90899 - DNA, 24 bp, Artificial sequence
  SiRNA target sequence
tcttggcttaattgtttgacaatt

SEQ ID NO: 90900 - DNA, 24 bp, Artificial sequence
  SiRNA target sequence
cttggcttaattgtttgacaattc

SEQ ID NO: 90901 - DNA, 24 bp, Artificial sequence
  SiRNA target sequence
ttggcttaattgtttgacaattca

SEQ ID NO: 90902 - DNA, 24 bp, Artificial sequence
  SiRNA target sequence
tggcttaattgtttgacaattcat

SEQ ID NO: 90903 - DNA, 24 bp, Artificial sequence
  SiRNA target sequence
ggcttaattgtttgacaattcata

SEQ ID NO: 90904 - DNA, 24 bp, Artificial sequence
  SiRNA target sequence
gcttaattgtttgacaattcataa

SEQ ID NO: 90905 - DNA, 24 bp, Artificial sequence
  SiRNA target sequence
cttaattgtttgacaattcataat

SEQ ID NO: 90906 - DNA, 24 bp, Artificial sequence
  SiRNA target sequence
ttaattgtttgacaattcataata

SEQ ID NO: 90907 - DNA, 24 bp, Artificial sequence
  SiRNA target sequence
taattgtttgacaattcataataa

SEQ ID NO: 90908 - DNA, 24 bp, Artificial sequence
  SiRNA target sequence
aattgtttgacaattcataataag

SEQ ID NO: 90909 - DNA, 24 bp, Artificial sequence
  SiRNA target sequence
attgtttgacaattcataataaga

SEQ ID NO: 90910 - DNA, 24 bp, Artificial sequence
  SiRNA target sequence
ttgtttgacaattcataataagat

SEQ ID NO: 90911 - DNA, 24 bp, Artificial sequence
  SiRNA target sequence
tgtttgacaattcataataagatc

SEQ ID NO: 90912 - DNA, 24 bp, Artificial sequence
  SiRNA target sequence
gtttgacaattcataataagatcc

SEQ ID NO: 90913 - DNA, 24 bp, Artificial sequence
  SiRNA target sequence
tttgacaattcataataagatcct

SEQ ID NO: 90914 - DNA, 24 bp, Artificial sequence
  SiRNA target sequence
ttgacaattcataataagatcctc

SEQ ID NO: 90915 - DNA, 24 bp, Artificial sequence
  SiRNA target sequence
tgacaattcataataagatcctct

SEQ ID NO: 90916 - DNA, 24 bp, Artificial sequence
  SiRNA target sequence
gacaattcataataagatcctcta

SEQ ID NO: 90917 - DNA, 24 bp, Artificial sequence
  SiRNA target sequence
acaattcataataagatcctctaa

SEQ ID NO: 90918 - DNA, 24 bp, Artificial sequence
  SiRNA target sequence
caattcataataagatcctctaaa

SEQ ID NO: 90919 - DNA, 24 bp, Artificial sequence
  SiRNA target sequence
aattcataataagatcctctaaac

SEQ ID NO: 90920 - DNA, 24 bp, Artificial sequence
  SiRNA target sequence
attcataataagatcctctaaact

SEQ ID NO: 90921 - DNA, 24 bp, Artificial sequence
  SiRNA target sequence
ttcataataagatcctctaaactt

SEQ ID NO: 90922 - DNA, 24 bp, Artificial sequence
  SiRNA target sequence
tcataataagatcctctaaacttg

SEQ ID NO: 90923 - DNA, 24 bp, Artificial sequence
  SiRNA target sequence
cataataagatcctctaaacttgg

SEQ ID NO: 90924 - DNA, 24 bp, Artificial sequence
  SiRNA target sequence
ataataagatcctctaaacttggt

SEQ ID NO: 90925 - DNA, 24 bp, Artificial sequence
  SiRNA target sequence
taataagatcctctaaacttggtt

SEQ ID NO: 90926 - DNA, 24 bp, Artificial sequence
  SiRNA target sequence
aataagatcctctaaacttggttt

SEQ ID NO: 90927 - DNA, 24 bp, Artificial sequence
  SiRNA target sequence
ataagatcctctaaacttggttta

SEQ ID NO: 90928 - DNA, 24 bp, Artificial sequence
  SiRNA target sequence
taagatcctctaaacttggtttac

SEQ ID NO: 90929 - DNA, 24 bp, Artificial sequence
  SiRNA target sequence
aagatcctctaaacttggtttaca

SEQ ID NO: 90930 - DNA, 24 bp, Artificial sequence
  SiRNA target sequence
agatcctctaaacttggtttacat

SEQ ID NO: 90931 - DNA, 24 bp, Artificial sequence
  SiRNA target sequence
gatcctctaaacttggtttacatt

SEQ ID NO: 90932 - DNA, 24 bp, Artificial sequence
  SiRNA target sequence
atcctctaaacttggtttacattg

SEQ ID NO: 90933 - DNA, 24 bp, Artificial sequence
  SiRNA target sequence
tcctctaaacttggtttacattga

SEQ ID NO: 90934 - DNA, 24 bp, Artificial sequence
  SiRNA target sequence
cctctaaacttggtttacattgaa

SEQ ID NO: 90935 - DNA, 24 bp, Artificial sequence
  SiRNA target sequence
ctctaaacttggtttacattgaaa

SEQ ID NO: 90936 - DNA, 24 bp, Artificial sequence
  SiRNA target sequence
tctaaacttggtttacattgaaat

SEQ ID NO: 90937 - DNA, 24 bp, Artificial sequence
  SiRNA target sequence
ctaaacttggtttacattgaaatg

SEQ ID NO: 90938 - DNA, 24 bp, Artificial sequence
  SiRNA target sequence
taaacttggtttacattgaaatgt

SEQ ID NO: 90939 - DNA, 24 bp, Artificial sequence
  SiRNA target sequence
aaacttggtttacattgaaatgta

SEQ ID NO: 90940 - DNA, 24 bp, Artificial sequence
  SiRNA target sequence
aacttggtttacattgaaatgtat

SEQ ID NO: 90941 - DNA, 24 bp, Artificial sequence
  SiRNA target sequence
acttggtttacattgaaatgtata

SEQ ID NO: 90942 - DNA, 24 bp, Artificial sequence
  SiRNA target sequence
cttggtttacattgaaatgtatat

SEQ ID NO: 90943 - DNA, 24 bp, Artificial sequence
  SiRNA target sequence
ttggtttacattgaaatgtatata

SEQ ID NO: 90944 - DNA, 24 bp, Artificial sequence
  SiRNA target sequence
tggtttacattgaaatgtatatat

SEQ ID NO: 90945 - DNA, 24 bp, Artificial sequence
  SiRNA target sequence
ggtttacattgaaatgtatatata

SEQ ID NO: 90946 - DNA, 24 bp, Artificial sequence
  SiRNA target sequence
gtttacattgaaatgtatatataa

SEQ ID NO: 90947 - DNA, 24 bp, Artificial sequence
  SiRNA target sequence
tttacattgaaatgtatatataat

SEQ ID NO: 90948 - DNA, 24 bp, Artificial sequence
  SiRNA target sequence
ttacattgaaatgtatatataatg

SEQ ID NO: 90949 - DNA, 24 bp, Artificial sequence
  SiRNA target sequence
tacattgaaatgtatatataatgt

SEQ ID NO: 90950 - DNA, 24 bp, Artificial sequence
  SiRNA target sequence
acattgaaatgtatatataatgtc

SEQ ID NO: 90951 - DNA, 24 bp, Artificial sequence
  SiRNA target sequence
cattgaaatgtatatataatgtca

SEQ ID NO: 90952 - DNA, 24 bp, Artificial sequence
  SiRNA target sequence
attgaaatgtatatataatgtcaa

SEQ ID NO: 90953 - DNA, 24 bp, Artificial sequence
  SiRNA target sequence
ttgaaatgtatatataatgtcaag

SEQ ID NO: 90954 - DNA, 24 bp, Artificial sequence
  SiRNA target sequence
tgaaatgtatatataatgtcaagc

SEQ ID NO: 90955 - DNA, 24 bp, Artificial sequence
  SiRNA target sequence
gaaatgtatatataatgtcaagca

SEQ ID NO: 90956 - DNA, 24 bp, Artificial sequence
  SiRNA target sequence
aaatgtatatataatgtcaagcac

SEQ ID NO: 90957 - DNA, 24 bp, Artificial sequence
  SiRNA target sequence
aatgtatatataatgtcaagcaca

SEQ ID NO: 90958 - DNA, 24 bp, Artificial sequence
  SiRNA target sequence
atgtatatataatgtcaagcacat

SEQ ID NO: 90959 - DNA, 24 bp, Artificial sequence
  SiRNA target sequence
tgtatatataatgtcaagcacatt

SEQ ID NO: 90960 - DNA, 24 bp, Artificial sequence
  SiRNA target sequence
gtatatataatgtcaagcacatta

SEQ ID NO: 90961 - DNA, 24 bp, Artificial sequence
  SiRNA target sequence
tatatataatgtcaagcacattat

SEQ ID NO: 90962 - DNA, 24 bp, Artificial sequence
  SiRNA target sequence
atatataatgtcaagcacattatt

SEQ ID NO: 90963 - DNA, 24 bp, Artificial sequence
  SiRNA target sequence
tatataatgtcaagcacattattc

SEQ ID NO: 90964 - DNA, 24 bp, Artificial sequence
  SiRNA target sequence
atataatgtcaagcacattattcc

SEQ ID NO: 90965 - DNA, 24 bp, Artificial sequence
  SiRNA target sequence
tataatgtcaagcacattattcca

SEQ ID NO: 90966 - DNA, 24 bp, Artificial sequence
  SiRNA target sequence
ataatgtcaagcacattattccag

SEQ ID NO: 90967 - DNA, 24 bp, Artificial sequence
  SiRNA target sequence
taatgtcaagcacattattccagt

SEQ ID NO: 90968 - DNA, 24 bp, Artificial sequence
  SiRNA target sequence
aatgtcaagcacattattccagtt

SEQ ID NO: 90969 - DNA, 24 bp, Artificial sequence
  SiRNA target sequence
atgtcaagcacattattccagttc

SEQ ID NO: 90970 - DNA, 24 bp, Artificial sequence
  SiRNA target sequence
tgtcaagcacattattccagttct

SEQ ID NO: 90971 - DNA, 24 bp, Artificial sequence
  SiRNA target sequence
gtcaagcacattattccagttctt

SEQ ID NO: 90972 - DNA, 24 bp, Artificial sequence
  SiRNA target sequence
tcaagcacattattccagttctta

SEQ ID NO: 90973 - DNA, 24 bp, Artificial sequence
  SiRNA target sequence
caagcacattattccagttcttaa

SEQ ID NO: 90974 - DNA, 24 bp, Artificial sequence
  SiRNA target sequence
aagcacattattccagttcttaat

SEQ ID NO: 90975 - DNA, 24 bp, Artificial sequence
  SiRNA target sequence
agcacattattccagttcttaatg

SEQ ID NO: 90976 - DNA, 24 bp, Artificial sequence
  SiRNA target sequence
gcacattattccagttcttaatga

SEQ ID NO: 90977 - DNA, 24 bp, Artificial sequence
  SiRNA target sequence
cacattattccagttcttaatgat

SEQ ID NO: 90978 - DNA, 24 bp, Artificial sequence
  SiRNA target sequence
acattattccagttcttaatgatg

SEQ ID NO: 90979 - DNA, 24 bp, Artificial sequence
  SiRNA target sequence
cattattccagttcttaatgatgc

SEQ ID NO: 90980 - DNA, 24 bp, Artificial sequence
  SiRNA target sequence
attattccagttcttaatgatgct

SEQ ID NO: 90981 - DNA, 24 bp, Artificial sequence
  SiRNA target sequence
ttattccagttcttaatgatgctt

SEQ ID NO: 90982 - DNA, 24 bp, Artificial sequence
  SiRNA target sequence
tattccagttcttaatgatgctta

SEQ ID NO: 90983 - DNA, 24 bp, Artificial sequence
  SiRNA target sequence
attccagttcttaatgatgcttaa

SEQ ID NO: 90984 - DNA, 24 bp, Artificial sequence
  SiRNA target sequence
ttccagttcttaatgatgcttaaa

SEQ ID NO: 90985 - DNA, 24 bp, Artificial sequence
  SiRNA target sequence
tccagttcttaatgatgcttaaat

SEQ ID NO: 90986 - DNA, 24 bp, Artificial sequence
  SiRNA target sequence
ccagttcttaatgatgcttaaata

SEQ ID NO: 90987 - DNA, 24 bp, Artificial sequence
  SiRNA target sequence
cagttcttaatgatgcttaaataa

SEQ ID NO: 90988 - DNA, 24 bp, Artificial sequence
  SiRNA target sequence
agttcttaatgatgcttaaataat

SEQ ID NO: 90989 - DNA, 24 bp, Artificial sequence
  SiRNA target sequence
gttcttaatgatgcttaaataatc

SEQ ID NO: 90990 - DNA, 24 bp, Artificial sequence
  SiRNA target sequence
ttcttaatgatgcttaaataatct

SEQ ID NO: 90991 - DNA, 24 bp, Artificial sequence
  SiRNA target sequence
tcttaatgatgcttaaataatctt

SEQ ID NO: 90992 - DNA, 24 bp, Artificial sequence
  SiRNA target sequence
cttaatgatgcttaaataatcttt

SEQ ID NO: 90993 - DNA, 24 bp, Artificial sequence
  SiRNA target sequence
ttaatgatgcttaaataatctttt

SEQ ID NO: 90994 - DNA, 24 bp, Artificial sequence
  SiRNA target sequence
taatgatgcttaaataatctttta

SEQ ID NO: 90995 - DNA, 24 bp, Artificial sequence
  SiRNA target sequence
aatgatgcttaaataatcttttac

SEQ ID NO: 90996 - DNA, 24 bp, Artificial sequence
  SiRNA target sequence
atgatgcttaaataatcttttact

SEQ ID NO: 90997 - DNA, 24 bp, Artificial sequence
  SiRNA target sequence
tgatgcttaaataatcttttactc

SEQ ID NO: 90998 - DNA, 24 bp, Artificial sequence
  SiRNA target sequence
gatgcttaaataatcttttactcc

SEQ ID NO: 90999 - DNA, 24 bp, Artificial sequence
  SiRNA target sequence
atgcttaaataatcttttactcct

SEQ ID NO: 91000 - DNA, 24 bp, Artificial sequence
  SiRNA target sequence
tgcttaaataatcttttactcctt

SEQ ID NO: 91001 - DNA, 24 bp, Artificial sequence
  SiRNA target sequence
gcttaaataatcttttactccttc

SEQ ID NO: 91002 - DNA, 24 bp, Artificial sequence
  SiRNA target sequence
cttaaataatcttttactccttct

SEQ ID NO: 91003 - DNA, 24 bp, Artificial sequence
  SiRNA target sequence
ttaaataatcttttactccttctt

SEQ ID NO: 91004 - DNA, 24 bp, Artificial sequence
  SiRNA target sequence
taaataatcttttactccttcttt

SEQ ID NO: 91005 - DNA, 24 bp, Artificial sequence
  SiRNA target sequence
aaataatcttttactccttcttta

SEQ ID NO: 91006 - DNA, 24 bp, Artificial sequence
  SiRNA target sequence
aataatcttttactccttctttag

SEQ ID NO: 91007 - DNA, 24 bp, Artificial sequence
  SiRNA target sequence
ataatcttttactccttctttaga

SEQ ID NO: 91008 - DNA, 24 bp, Artificial sequence
  SiRNA target sequence
taatcttttactccttctttagaa

SEQ ID NO: 91009 - DNA, 24 bp, Artificial sequence
  SiRNA target sequence
aatcttttactccttctttagaac

SEQ ID NO: 91010 - DNA, 24 bp, Artificial sequence
  SiRNA target sequence
atcttttactccttctttagaaca

SEQ ID NO: 91011 - DNA, 24 bp, Artificial sequence
  SiRNA target sequence
tcttttactccttctttagaacac

SEQ ID NO: 91012 - DNA, 24 bp, Artificial sequence
  SiRNA target sequence
cttttactccttctttagaacaca

SEQ ID NO: 91013 - DNA, 24 bp, Artificial sequence
  SiRNA target sequence
ttttactccttctttagaacacag

SEQ ID NO: 91014 - DNA, 24 bp, Artificial sequence
  SiRNA target sequence
tttactccttctttagaacacaga

SEQ ID NO: 91015 - DNA, 24 bp, Artificial sequence
  SiRNA target sequence
ttactccttctttagaacacagat

SEQ ID NO: 91016 - DNA, 24 bp, Artificial sequence
  SiRNA target sequence
tactccttctttagaacacagata

SEQ ID NO: 91017 - DNA, 24 bp, Artificial sequence
  SiRNA target sequence
actccttctttagaacacagatat

SEQ ID NO: 91018 - DNA, 24 bp, Artificial sequence
  SiRNA target sequence
ctccttctttagaacacagatatt

SEQ ID NO: 91019 - DNA, 24 bp, Artificial sequence
  SiRNA target sequence
tccttctttagaacacagatattc

SEQ ID NO: 91020 - DNA, 24 bp, Artificial sequence
  SiRNA target sequence
ccttctttagaacacagatattca

SEQ ID NO: 91021 - DNA, 24 bp, Artificial sequence
  SiRNA target sequence
cttctttagaacacagatattcaa

SEQ ID NO: 91022 - DNA, 24 bp, Artificial sequence
  SiRNA target sequence
ttctttagaacacagatattcaat

SEQ ID NO: 91023 - DNA, 24 bp, Artificial sequence
  SiRNA target sequence
tctttagaacacagatattcaata

SEQ ID NO: 91024 - DNA, 24 bp, Artificial sequence
  SiRNA target sequence
ctttagaacacagatattcaatat

SEQ ID NO: 91025 - DNA, 24 bp, Artificial sequence
  SiRNA target sequence
tttagaacacagatattcaatatc

SEQ ID NO: 91026 - DNA, 24 bp, Artificial sequence
  SiRNA target sequence
ttagaacacagatattcaatatca

SEQ ID NO: 91027 - DNA, 24 bp, Artificial sequence
  SiRNA target sequence
tagaacacagatattcaatatcat

SEQ ID NO: 91028 - DNA, 24 bp, Artificial sequence
  SiRNA target sequence
agaacacagatattcaatatcatg

SEQ ID NO: 91029 - DNA, 24 bp, Artificial sequence
  SiRNA target sequence
gaacacagatattcaatatcatgc

SEQ ID NO: 91030 - DNA, 24 bp, Artificial sequence
  SiRNA target sequence
aacacagatattcaatatcatgct

SEQ ID NO: 91031 - DNA, 24 bp, Artificial sequence
  SiRNA target sequence
acacagatattcaatatcatgctt

SEQ ID NO: 91032 - DNA, 24 bp, Artificial sequence
  SiRNA target sequence
cacagatattcaatatcatgctta

SEQ ID NO: 91033 - DNA, 24 bp, Artificial sequence
  SiRNA target sequence
acagatattcaatatcatgcttat

SEQ ID NO: 91034 - DNA, 24 bp, Artificial sequence
  SiRNA target sequence
cagatattcaatatcatgcttatt

SEQ ID NO: 91035 - DNA, 24 bp, Artificial sequence
  SiRNA target sequence
agatattcaatatcatgcttattt

SEQ ID NO: 91036 - DNA, 24 bp, Artificial sequence
  SiRNA target sequence
gatattcaatatcatgcttatttt

SEQ ID NO: 91037 - DNA, 24 bp, Artificial sequence
  SiRNA target sequence
atattcaatatcatgcttattttt

SEQ ID NO: 91038 - DNA, 24 bp, Artificial sequence
  SiRNA target sequence
tattcaatatcatgcttattttta

SEQ ID NO: 91039 - DNA, 24 bp, Artificial sequence
  SiRNA target sequence
attcaatatcatgcttatttttag

SEQ ID NO: 91040 - DNA, 24 bp, Artificial sequence
  SiRNA target sequence
ttcaatatcatgcttatttttaga

SEQ ID NO: 91041 - DNA, 24 bp, Artificial sequence
  SiRNA target sequence
tcaatatcatgcttatttttagag

SEQ ID NO: 91042 - DNA, 24 bp, Artificial sequence
  SiRNA target sequence
caatatcatgcttatttttagagg

SEQ ID NO: 91043 - DNA, 24 bp, Artificial sequence
  SiRNA target sequence
aatatcatgcttatttttagaggt

SEQ ID NO: 91044 - DNA, 24 bp, Artificial sequence
  SiRNA target sequence
atatcatgcttatttttagaggtt

SEQ ID NO: 91045 - DNA, 24 bp, Artificial sequence
  SiRNA target sequence
tatcatgcttatttttagaggttt

SEQ ID NO: 91046 - DNA, 24 bp, Artificial sequence
  SiRNA target sequence
atcatgcttatttttagaggtttt

SEQ ID NO: 91047 - DNA, 24 bp, Artificial sequence
  SiRNA target sequence
tcatgcttatttttagaggtttta

SEQ ID NO: 91048 - DNA, 24 bp, Artificial sequence
  SiRNA target sequence
catgcttatttttagaggttttag

SEQ ID NO: 91049 - DNA, 24 bp, Artificial sequence
  SiRNA target sequence
atgcttatttttagaggttttaga

SEQ ID NO: 91050 - DNA, 24 bp, Artificial sequence
  SiRNA target sequence
tgcttatttttagaggttttagaa

SEQ ID NO: 91051 - DNA, 24 bp, Artificial sequence
  SiRNA target sequence
gcttatttttagaggttttagaaa

SEQ ID NO: 91052 - DNA, 24 bp, Artificial sequence
  SiRNA target sequence
cttatttttagaggttttagaaat

SEQ ID NO: 91053 - DNA, 24 bp, Artificial sequence
  SiRNA target sequence
ttatttttagaggttttagaaata

SEQ ID NO: 91054 - DNA, 24 bp, Artificial sequence
  SiRNA target sequence
tatttttagaggttttagaaatat

SEQ ID NO: 91055 - DNA, 24 bp, Artificial sequence
  SiRNA target sequence
atttttagaggttttagaaatatc

SEQ ID NO: 91056 - DNA, 24 bp, Artificial sequence
  SiRNA target sequence
tttttagaggttttagaaatatcc

SEQ ID NO: 91057 - DNA, 24 bp, Artificial sequence
  SiRNA target sequence
ttttagaggttttagaaatatcca

SEQ ID NO: 91058 - DNA, 24 bp, Artificial sequence
  SiRNA target sequence
tttagaggttttagaaatatccat

SEQ ID NO: 91059 - DNA, 24 bp, Artificial sequence
  SiRNA target sequence
ttagaggttttagaaatatccata

SEQ ID NO: 91060 - DNA, 24 bp, Artificial sequence
  SiRNA target sequence
tagaggttttagaaatatccataa

SEQ ID NO: 91061 - DNA, 24 bp, Artificial sequence
  SiRNA target sequence
agaggttttagaaatatccataag

SEQ ID NO: 91062 - DNA, 24 bp, Artificial sequence
  SiRNA target sequence
gaggttttagaaatatccataagc

SEQ ID NO: 91063 - DNA, 24 bp, Artificial sequence
  SiRNA target sequence
aggttttagaaatatccataagcc

SEQ ID NO: 91064 - DNA, 24 bp, Artificial sequence
  SiRNA target sequence
ggttttagaaatatccataagcca

SEQ ID NO: 91065 - DNA, 24 bp, Artificial sequence
  SiRNA target sequence
gttttagaaatatccataagccat

SEQ ID NO: 91066 - DNA, 24 bp, Artificial sequence
  SiRNA target sequence
ttttagaaatatccataagccatg

SEQ ID NO: 91067 - DNA, 24 bp, Artificial sequence
  SiRNA target sequence
tttagaaatatccataagccatgc

SEQ ID NO: 91068 - DNA, 24 bp, Artificial sequence
  SiRNA target sequence
ttagaaatatccataagccatgct

SEQ ID NO: 91069 - DNA, 24 bp, Artificial sequence
  SiRNA target sequence
tagaaatatccataagccatgctt

SEQ ID NO: 91070 - DNA, 24 bp, Artificial sequence
  SiRNA target sequence
agaaatatccataagccatgcttt

SEQ ID NO: 91071 - DNA, 24 bp, Artificial sequence
  SiRNA target sequence
gaaatatccataagccatgctttt

SEQ ID NO: 91072 - DNA, 24 bp, Artificial sequence
  SiRNA target sequence
aaatatccataagccatgcttttt

SEQ ID NO: 91073 - DNA, 24 bp, Artificial sequence
  SiRNA target sequence
aatatccataagccatgctttttt

SEQ ID NO: 91074 - DNA, 24 bp, Artificial sequence
  SiRNA target sequence
atatccataagccatgctttttta

SEQ ID NO: 91075 - DNA, 24 bp, Artificial sequence
  SiRNA target sequence
tatccataagccatgcttttttag

SEQ ID NO: 91076 - DNA, 24 bp, Artificial sequence
  SiRNA target sequence
atccataagccatgcttttttagg

SEQ ID NO: 91077 - DNA, 24 bp, Artificial sequence
  SiRNA target sequence
tccataagccatgcttttttaggc

SEQ ID NO: 91078 - DNA, 24 bp, Artificial sequence
  SiRNA target sequence
ccataagccatgcttttttaggca

SEQ ID NO: 91079 - DNA, 24 bp, Artificial sequence
  SiRNA target sequence
cataagccatgcttttttaggcaa

SEQ ID NO: 91080 - DNA, 24 bp, Artificial sequence
  SiRNA target sequence
ataagccatgcttttttaggcaat

SEQ ID NO: 91081 - DNA, 24 bp, Artificial sequence
  SiRNA target sequence
taagccatgcttttttaggcaatg

SEQ ID NO: 91082 - DNA, 24 bp, Artificial sequence
  SiRNA target sequence
aagccatgcttttttaggcaatga

SEQ ID NO: 91083 - DNA, 24 bp, Artificial sequence
  SiRNA target sequence
agccatgcttttttaggcaatgaa

SEQ ID NO: 91084 - DNA, 24 bp, Artificial sequence
  SiRNA target sequence
gccatgcttttttaggcaatgaag

SEQ ID NO: 91085 - DNA, 24 bp, Artificial sequence
  SiRNA target sequence
ccatgcttttttaggcaatgaagt

SEQ ID NO: 91086 - DNA, 24 bp, Artificial sequence
  SiRNA target sequence
catgcttttttaggcaatgaagta

SEQ ID NO: 91087 - DNA, 24 bp, Artificial sequence
  SiRNA target sequence
atgcttttttaggcaatgaagtaa

SEQ ID NO: 91088 - DNA, 24 bp, Artificial sequence
  SiRNA target sequence
tgcttttttaggcaatgaagtaaa

SEQ ID NO: 91089 - DNA, 24 bp, Artificial sequence
  SiRNA target sequence
gcttttttaggcaatgaagtaaaa

SEQ ID NO: 91090 - DNA, 24 bp, Artificial sequence
  SiRNA target sequence
cttttttaggcaatgaagtaaaat

SEQ ID NO: 91091 - DNA, 24 bp, Artificial sequence
  SiRNA target sequence
ttttttaggcaatgaagtaaaatc

SEQ ID NO: 91092 - DNA, 24 bp, Artificial sequence
  SiRNA target sequence
tttttaggcaatgaagtaaaatca

SEQ ID NO: 91093 - DNA, 24 bp, Artificial sequence
  SiRNA target sequence
ttttaggcaatgaagtaaaatcaa

SEQ ID NO: 91094 - DNA, 24 bp, Artificial sequence
  SiRNA target sequence
tttaggcaatgaagtaaaatcaaa

SEQ ID NO: 91095 - DNA, 24 bp, Artificial sequence
  SiRNA target sequence
ttaggcaatgaagtaaaatcaaaa

SEQ ID NO: 91096 - DNA, 24 bp, Artificial sequence
  SiRNA target sequence
taggcaatgaagtaaaatcaaaaa

SEQ ID NO: 91097 - DNA, 24 bp, Artificial sequence
  SiRNA target sequence
aggcaatgaagtaaaatcaaaaat

SEQ ID NO: 91098 - DNA, 24 bp, Artificial sequence
  SiRNA target sequence
ggcaatgaagtaaaatcaaaaata

SEQ ID NO: 91099 - DNA, 24 bp, Artificial sequence
  SiRNA target sequence
gcaatgaagtaaaatcaaaaatat

SEQ ID NO: 91100 - DNA, 24 bp, Artificial sequence
  SiRNA target sequence
caatgaagtaaaatcaaaaatata

SEQ ID NO: 91101 - DNA, 24 bp, Artificial sequence
  SiRNA target sequence
aatgaagtaaaatcaaaaatatac

SEQ ID NO: 91102 - DNA, 24 bp, Artificial sequence
  SiRNA target sequence
atgaagtaaaatcaaaaatatact

SEQ ID NO: 91103 - DNA, 24 bp, Artificial sequence
  SiRNA target sequence
tgaagtaaaatcaaaaatatactt

SEQ ID NO: 91104 - DNA, 24 bp, Artificial sequence
  SiRNA target sequence
gaagtaaaatcaaaaatatacttg

SEQ ID NO: 91105 - DNA, 24 bp, Artificial sequence
  SiRNA target sequence
aagtaaaatcaaaaatatacttga

SEQ ID NO: 91106 - DNA, 24 bp, Artificial sequence
  SiRNA target sequence
agtaaaatcaaaaatatacttgaa

SEQ ID NO: 91107 - DNA, 24 bp, Artificial sequence
  SiRNA target sequence
gtaaaatcaaaaatatacttgaaa

SEQ ID NO: 91108 - DNA, 24 bp, Artificial sequence
  SiRNA target sequence
taaaatcaaaaatatacttgaaaa

SEQ ID NO: 91109 - DNA, 24 bp, Artificial sequence
  SiRNA target sequence
aaaatcaaaaatatacttgaaaaa

SEQ ID NO: 91110 - DNA, 24 bp, Artificial sequence
  SiRNA target sequence
aaatcaaaaatatacttgaaaaag

SEQ ID NO: 91111 - DNA, 24 bp, Artificial sequence
  SiRNA target sequence
aatcaaaaatatacttgaaaaagt

SEQ ID NO: 91112 - DNA, 24 bp, Artificial sequence
  SiRNA target sequence
atcaaaaatatacttgaaaaagtc

SEQ ID NO: 91113 - DNA, 24 bp, Artificial sequence
  SiRNA target sequence
tcaaaaatatacttgaaaaagtca

SEQ ID NO: 91114 - DNA, 24 bp, Artificial sequence
  SiRNA target sequence
caaaaatatacttgaaaaagtcac

SEQ ID NO: 91115 - DNA, 24 bp, Artificial sequence
  SiRNA target sequence
aaaaatatacttgaaaaagtcacg

SEQ ID NO: 91116 - DNA, 24 bp, Artificial sequence
  SiRNA target sequence
aaaatatacttgaaaaagtcacgc

SEQ ID NO: 91117 - DNA, 24 bp, Artificial sequence
  SiRNA target sequence
aaatatacttgaaaaagtcacgca

SEQ ID NO: 91118 - DNA, 24 bp, Artificial sequence
  SiRNA target sequence
aatatacttgaaaaagtcacgcaa

SEQ ID NO: 91119 - DNA, 24 bp, Artificial sequence
  SiRNA target sequence
atatacttgaaaaagtcacgcaaa

SEQ ID NO: 91120 - DNA, 24 bp, Artificial sequence
  SiRNA target sequence
tatacttgaaaaagtcacgcaaag

SEQ ID NO: 91121 - DNA, 24 bp, Artificial sequence
  SiRNA target sequence
atacttgaaaaagtcacgcaaaga

SEQ ID NO: 91122 - DNA, 24 bp, Artificial sequence
  SiRNA target sequence
tacttgaaaaagtcacgcaaagat

SEQ ID NO: 91123 - DNA, 24 bp, Artificial sequence
  SiRNA target sequence
acttgaaaaagtcacgcaaagatc

SEQ ID NO: 91124 - DNA, 24 bp, Artificial sequence
  SiRNA target sequence
cttgaaaaagtcacgcaaagatcc

SEQ ID NO: 91125 - DNA, 24 bp, Artificial sequence
  SiRNA target sequence
ttgaaaaagtcacgcaaagatcct

SEQ ID NO: 91126 - DNA, 24 bp, Artificial sequence
  SiRNA target sequence
tgaaaaagtcacgcaaagatcctt

SEQ ID NO: 91127 - DNA, 24 bp, Artificial sequence
  SiRNA target sequence
gaaaaagtcacgcaaagatccttc

SEQ ID NO: 91128 - DNA, 24 bp, Artificial sequence
  SiRNA target sequence
aaaaagtcacgcaaagatccttcg

SEQ ID NO: 91129 - DNA, 24 bp, Artificial sequence
  SiRNA target sequence
aaaagtcacgcaaagatccttcga

SEQ ID NO: 91130 - DNA, 24 bp, Artificial sequence
  SiRNA target sequence
aaagtcacgcaaagatccttcgaa

SEQ ID NO: 91131 - DNA, 24 bp, Artificial sequence
  SiRNA target sequence
aagtcacgcaaagatccttcgaat

SEQ ID NO: 91132 - DNA, 24 bp, Artificial sequence
  SiRNA target sequence
agtcacgcaaagatccttcgaatt

SEQ ID NO: 91133 - DNA, 24 bp, Artificial sequence
  SiRNA target sequence
gtcacgcaaagatccttcgaattg

SEQ ID NO: 91134 - DNA, 24 bp, Artificial sequence
  SiRNA target sequence
tcacgcaaagatccttcgaattga

SEQ ID NO: 91135 - DNA, 24 bp, Artificial sequence
  SiRNA target sequence
cacgcaaagatccttcgaattgaa

SEQ ID NO: 91136 - DNA, 24 bp, Artificial sequence
  SiRNA target sequence
acgcaaagatccttcgaattgaaa

SEQ ID NO: 91137 - DNA, 24 bp, Artificial sequence
  SiRNA target sequence
cgcaaagatccttcgaattgaaac

SEQ ID NO: 91138 - DNA, 24 bp, Artificial sequence
  SiRNA target sequence
gcaaagatccttcgaattgaaacc

SEQ ID NO: 91139 - DNA, 24 bp, Artificial sequence
  SiRNA target sequence
caaagatccttcgaattgaaaccc

SEQ ID NO: 91140 - DNA, 24 bp, Artificial sequence
  SiRNA target sequence
aaagatccttcgaattgaaacccc

SEQ ID NO: 91141 - DNA, 24 bp, Artificial sequence
  SiRNA target sequence
aagatccttcgaattgaaaccccg

SEQ ID NO: 91142 - DNA, 24 bp, Artificial sequence
  SiRNA target sequence
agatccttcgaattgaaaccccgt

SEQ ID NO: 91143 - DNA, 24 bp, Artificial sequence
  SiRNA target sequence
gatccttcgaattgaaaccccgtt

SEQ ID NO: 91144 - DNA, 24 bp, Artificial sequence
  SiRNA target sequence
atccttcgaattgaaaccccgttt

SEQ ID NO: 91145 - DNA, 24 bp, Artificial sequence
  SiRNA target sequence
tccttcgaattgaaaccccgtttt

SEQ ID NO: 91146 - DNA, 24 bp, Artificial sequence
  SiRNA target sequence
ccttcgaattgaaaccccgttttt

SEQ ID NO: 91147 - DNA, 24 bp, Artificial sequence
  SiRNA target sequence
cttcgaattgaaaccccgtttttc

SEQ ID NO: 91148 - DNA, 24 bp, Artificial sequence
  SiRNA target sequence
ttcgaattgaaaccccgtttttcc

SEQ ID NO: 91149 - DNA, 24 bp, Artificial sequence
  SiRNA target sequence
tcgaattgaaaccccgtttttcca

SEQ ID NO: 91150 - DNA, 24 bp, Artificial sequence
  SiRNA target sequence
cgaattgaaaccccgtttttccaa

SEQ ID NO: 91151 - DNA, 24 bp, Artificial sequence
  SiRNA target sequence
gaattgaaaccccgtttttccaac

SEQ ID NO: 91152 - DNA, 24 bp, Artificial sequence
  SiRNA target sequence
aattgaaaccccgtttttccaact

SEQ ID NO: 91153 - DNA, 24 bp, Artificial sequence
  SiRNA target sequence
attgaaaccccgtttttccaactt

SEQ ID NO: 91154 - DNA, 24 bp, Artificial sequence
  SiRNA target sequence
ttgaaaccccgtttttccaacttg

SEQ ID NO: 91155 - DNA, 24 bp, Artificial sequence
  SiRNA target sequence
tgaaaccccgtttttccaacttgc

SEQ ID NO: 91156 - DNA, 24 bp, Artificial sequence
  SiRNA target sequence
gaaaccccgtttttccaacttgct

SEQ ID NO: 91157 - DNA, 24 bp, Artificial sequence
  SiRNA target sequence
aaaccccgtttttccaacttgctc

SEQ ID NO: 91158 - DNA, 24 bp, Artificial sequence
  SiRNA target sequence
aaccccgtttttccaacttgctca

SEQ ID NO: 91159 - DNA, 24 bp, Artificial sequence
  SiRNA target sequence
accccgtttttccaacttgctcaa

SEQ ID NO: 91160 - DNA, 24 bp, Artificial sequence
  SiRNA target sequence
ccccgtttttccaacttgctcaat

SEQ ID NO: 91161 - DNA, 24 bp, Artificial sequence
  SiRNA target sequence
cccgtttttccaacttgctcaata

SEQ ID NO: 91162 - DNA, 24 bp, Artificial sequence
  SiRNA target sequence
ccgtttttccaacttgctcaatat

SEQ ID NO: 91163 - DNA, 24 bp, Artificial sequence
  SiRNA target sequence
cgtttttccaacttgctcaatata

SEQ ID NO: 91164 - DNA, 24 bp, Artificial sequence
  SiRNA target sequence
gtttttccaacttgctcaatatat

SEQ ID NO: 91165 - DNA, 24 bp, Artificial sequence
  SiRNA target sequence
tttttccaacttgctcaatatata

SEQ ID NO: 91166 - DNA, 24 bp, Artificial sequence
  SiRNA target sequence
ttttccaacttgctcaatatataa

SEQ ID NO: 91167 - DNA, 24 bp, Artificial sequence
  SiRNA target sequence
tttccaacttgctcaatatataat

SEQ ID NO: 91168 - DNA, 24 bp, Artificial sequence
  SiRNA target sequence
ttccaacttgctcaatatataata

SEQ ID NO: 91169 - DNA, 24 bp, Artificial sequence
  SiRNA target sequence
tccaacttgctcaatatataataa

SEQ ID NO: 91170 - DNA, 24 bp, Artificial sequence
  SiRNA target sequence
ccaacttgctcaatatataataat

SEQ ID NO: 91171 - DNA, 24 bp, Artificial sequence
  SiRNA target sequence
caacttgctcaatatataataatg

SEQ ID NO: 91172 - DNA, 24 bp, Artificial sequence
  SiRNA target sequence
aacttgctcaatatataataatgt

SEQ ID NO: 91173 - DNA, 24 bp, Artificial sequence
  SiRNA target sequence
acttgctcaatatataataatgta

SEQ ID NO: 91174 - DNA, 24 bp, Artificial sequence
  SiRNA target sequence
cttgctcaatatataataatgtat

SEQ ID NO: 91175 - DNA, 24 bp, Artificial sequence
  SiRNA target sequence
ttgctcaatatataataatgtatc

SEQ ID NO: 91176 - DNA, 24 bp, Artificial sequence
  SiRNA target sequence
tgctcaatatataataatgtatca

SEQ ID NO: 91177 - DNA, 24 bp, Artificial sequence
  SiRNA target sequence
gctcaatatataataatgtatcac

SEQ ID NO: 91178 - DNA, 24 bp, Artificial sequence
  SiRNA target sequence
ctcaatatataataatgtatcacc

SEQ ID NO: 91179 - DNA, 24 bp, Artificial sequence
  SiRNA target sequence
tcaatatataataatgtatcacca

SEQ ID NO: 91180 - DNA, 24 bp, Artificial sequence
  SiRNA target sequence
caatatataataatgtatcaccag

SEQ ID NO: 91181 - DNA, 24 bp, Artificial sequence
  SiRNA target sequence
aatatataataatgtatcaccaga

SEQ ID NO: 91182 - DNA, 24 bp, Artificial sequence
  SiRNA target sequence
atatataataatgtatcaccagac

SEQ ID NO: 91183 - DNA, 24 bp, Artificial sequence
  SiRNA target sequence
tatataataatgtatcaccagaca

SEQ ID NO: 91184 - DNA, 24 bp, Artificial sequence
  SiRNA target sequence
atataataatgtatcaccagacat

SEQ ID NO: 91185 - DNA, 24 bp, Artificial sequence
  SiRNA target sequence
tataataatgtatcaccagacatt

SEQ ID NO: 91186 - DNA, 24 bp, Artificial sequence
  SiRNA target sequence
ataataatgtatcaccagacattt

SEQ ID NO: 91187 - DNA, 24 bp, Artificial sequence
  SiRNA target sequence
taataatgtatcaccagacatttc

SEQ ID NO: 91188 - DNA, 24 bp, Artificial sequence
  SiRNA target sequence
aataatgtatcaccagacatttct

SEQ ID NO: 91189 - DNA, 24 bp, Artificial sequence
  SiRNA target sequence
ataatgtatcaccagacatttcta

SEQ ID NO: 91190 - DNA, 24 bp, Artificial sequence
  SiRNA target sequence
taatgtatcaccagacatttctag

SEQ ID NO: 91191 - DNA, 24 bp, Artificial sequence
  SiRNA target sequence
aatgtatcaccagacatttctagt

SEQ ID NO: 91192 - DNA, 24 bp, Artificial sequence
  SiRNA target sequence
atgtatcaccagacatttctagta

SEQ ID NO: 91193 - DNA, 24 bp, Artificial sequence
  SiRNA target sequence
tgtatcaccagacatttctagtaa

SEQ ID NO: 91194 - DNA, 24 bp, Artificial sequence
  SiRNA target sequence
gtatcaccagacatttctagtaaa

SEQ ID NO: 91195 - DNA, 24 bp, Artificial sequence
  SiRNA target sequence
tatcaccagacatttctagtaaac

SEQ ID NO: 91196 - DNA, 24 bp, Artificial sequence
  SiRNA target sequence
atcaccagacatttctagtaaact

SEQ ID NO: 91197 - DNA, 24 bp, Artificial sequence
  SiRNA target sequence
tcaccagacatttctagtaaactt

SEQ ID NO: 91198 - DNA, 24 bp, Artificial sequence
  SiRNA target sequence
caccagacatttctagtaaactta

SEQ ID NO: 91199 - DNA, 24 bp, Artificial sequence
  SiRNA target sequence
accagacatttctagtaaacttaa

SEQ ID NO: 91200 - DNA, 24 bp, Artificial sequence
  SiRNA target sequence
ccagacatttctagtaaacttaac

SEQ ID NO: 91201 - DNA, 24 bp, Artificial sequence
  SiRNA target sequence
cagacatttctagtaaacttaaca

SEQ ID NO: 91202 - DNA, 24 bp, Artificial sequence
  SiRNA target sequence
agacatttctagtaaacttaacat

SEQ ID NO: 91203 - DNA, 24 bp, Artificial sequence
  SiRNA target sequence
gacatttctagtaaacttaacatt

SEQ ID NO: 91204 - DNA, 24 bp, Artificial sequence
  SiRNA target sequence
acatttctagtaaacttaacattt

SEQ ID NO: 91205 - DNA, 24 bp, Artificial sequence
  SiRNA target sequence
catttctagtaaacttaacatttc

SEQ ID NO: 91206 - DNA, 24 bp, Artificial sequence
  SiRNA target sequence
atttctagtaaacttaacatttca

SEQ ID NO: 91207 - DNA, 24 bp, Artificial sequence
  SiRNA target sequence
tttctagtaaacttaacatttcat

SEQ ID NO: 91208 - DNA, 24 bp, Artificial sequence
  SiRNA target sequence
ttctagtaaacttaacatttcatt

SEQ ID NO: 91209 - DNA, 24 bp, Artificial sequence
  SiRNA target sequence
tctagtaaacttaacatttcatta

SEQ ID NO: 91210 - DNA, 24 bp, Artificial sequence
  SiRNA target sequence
ctagtaaacttaacatttcattaa

SEQ ID NO: 91211 - DNA, 24 bp, Artificial sequence
  SiRNA target sequence
tagtaaacttaacatttcattaac

SEQ ID NO: 91212 - DNA, 24 bp, Artificial sequence
  SiRNA target sequence
agtaaacttaacatttcattaaca

SEQ ID NO: 91213 - DNA, 24 bp, Artificial sequence
  SiRNA target sequence
gtaaacttaacatttcattaacaa

SEQ ID NO: 91214 - DNA, 24 bp, Artificial sequence
  SiRNA target sequence
taaacttaacatttcattaacaag

SEQ ID NO: 91215 - DNA, 24 bp, Artificial sequence
  SiRNA target sequence
aaacttaacatttcattaacaagc

SEQ ID NO: 91216 - DNA, 24 bp, Artificial sequence
  SiRNA target sequence
aacttaacatttcattaacaagca

SEQ ID NO: 91217 - DNA, 24 bp, Artificial sequence
  SiRNA target sequence
acttaacatttcattaacaagcaa

SEQ ID NO: 91218 - DNA, 24 bp, Artificial sequence
  SiRNA target sequence
cttaacatttcattaacaagcaaa

SEQ ID NO: 91219 - DNA, 24 bp, Artificial sequence
  SiRNA target sequence
ttaacatttcattaacaagcaaat

SEQ ID NO: 91220 - DNA, 24 bp, Artificial sequence
  SiRNA target sequence
taacatttcattaacaagcaaatc

SEQ ID NO: 91221 - DNA, 24 bp, Artificial sequence
  SiRNA target sequence
aacatttcattaacaagcaaatca

SEQ ID NO: 91222 - DNA, 24 bp, Artificial sequence
  SiRNA target sequence
acatttcattaacaagcaaatcat

SEQ ID NO: 91223 - DNA, 24 bp, Artificial sequence
  SiRNA target sequence
catttcattaacaagcaaatcatt

SEQ ID NO: 91224 - DNA, 24 bp, Artificial sequence
  SiRNA target sequence
atttcattaacaagcaaatcatta

SEQ ID NO: 91225 - DNA, 24 bp, Artificial sequence
  SiRNA target sequence
tttcattaacaagcaaatcattat

SEQ ID NO: 91226 - DNA, 24 bp, Artificial sequence
  SiRNA target sequence
ttcattaacaagcaaatcattatt

SEQ ID NO: 91227 - DNA, 24 bp, Artificial sequence
  SiRNA target sequence
tcattaacaagcaaatcattattt

SEQ ID NO: 91228 - DNA, 24 bp, Artificial sequence
  SiRNA target sequence
cattaacaagcaaatcattatttg

SEQ ID NO: 91229 - DNA, 24 bp, Artificial sequence
  SiRNA target sequence
attaacaagcaaatcattatttga

SEQ ID NO: 91230 - DNA, 24 bp, Artificial sequence
  SiRNA target sequence
ttaacaagcaaatcattatttgaa

SEQ ID NO: 91231 - DNA, 24 bp, Artificial sequence
  SiRNA target sequence
taacaagcaaatcattatttgaac

SEQ ID NO: 91232 - DNA, 24 bp, Artificial sequence
  SiRNA target sequence
aacaagcaaatcattatttgaaca

SEQ ID NO: 91233 - DNA, 24 bp, Artificial sequence
  SiRNA target sequence
acaagcaaatcattatttgaacaa

SEQ ID NO: 91234 - DNA, 24 bp, Artificial sequence
  SiRNA target sequence
caagcaaatcattatttgaacaaa

SEQ ID NO: 91235 - DNA, 24 bp, Artificial sequence
  SiRNA target sequence
aagcaaatcattatttgaacaaag

SEQ ID NO: 91236 - DNA, 24 bp, Artificial sequence
  SiRNA target sequence
agcaaatcattatttgaacaaagt

SEQ ID NO: 91237 - DNA, 24 bp, Artificial sequence
  SiRNA target sequence
gcaaatcattatttgaacaaagta

SEQ ID NO: 91238 - DNA, 24 bp, Artificial sequence
  SiRNA target sequence
caaatcattatttgaacaaagtag

SEQ ID NO: 91239 - DNA, 24 bp, Artificial sequence
  SiRNA target sequence
aaatcattatttgaacaaagtaga

SEQ ID NO: 91240 - DNA, 24 bp, Artificial sequence
  SiRNA target sequence
aatcattatttgaacaaagtagac

SEQ ID NO: 91241 - DNA, 24 bp, Artificial sequence
  SiRNA target sequence
atcattatttgaacaaagtagacc

SEQ ID NO: 91242 - DNA, 24 bp, Artificial sequence
  SiRNA target sequence
tcattatttgaacaaagtagacca

SEQ ID NO: 91243 - DNA, 24 bp, Artificial sequence
  SiRNA target sequence
cattatttgaacaaagtagaccaa

SEQ ID NO: 91244 - DNA, 24 bp, Artificial sequence
  SiRNA target sequence
attatttgaacaaagtagaccaat

SEQ ID NO: 91245 - DNA, 24 bp, Artificial sequence
  SiRNA target sequence
ttatttgaacaaagtagaccaata

SEQ ID NO: 91246 - DNA, 24 bp, Artificial sequence
  SiRNA target sequence
tatttgaacaaagtagaccaatac

SEQ ID NO: 91247 - DNA, 24 bp, Artificial sequence
  SiRNA target sequence
atttgaacaaagtagaccaatact

SEQ ID NO: 91248 - DNA, 24 bp, Artificial sequence
  SiRNA target sequence
tttgaacaaagtagaccaatacta

SEQ ID NO: 91249 - DNA, 24 bp, Artificial sequence
  SiRNA target sequence
ttgaacaaagtagaccaatactat

SEQ ID NO: 91250 - DNA, 24 bp, Artificial sequence
  SiRNA target sequence
tgaacaaagtagaccaatactatc

SEQ ID NO: 91251 - DNA, 24 bp, Artificial sequence
  SiRNA target sequence
gaacaaagtagaccaatactatca

SEQ ID NO: 91252 - DNA, 24 bp, Artificial sequence
  SiRNA target sequence
aacaaagtagaccaatactatcac

SEQ ID NO: 91253 - DNA, 24 bp, Artificial sequence
  SiRNA target sequence
acaaagtagaccaatactatcacc

SEQ ID NO: 91254 - DNA, 24 bp, Artificial sequence
  SiRNA target sequence
caaagtagaccaatactatcacca

SEQ ID NO: 91255 - DNA, 24 bp, Artificial sequence
  SiRNA target sequence
aaagtagaccaatactatcaccag

SEQ ID NO: 91256 - DNA, 24 bp, Artificial sequence
  SiRNA target sequence
aagtagaccaatactatcaccagg

SEQ ID NO: 91257 - DNA, 24 bp, Artificial sequence
  SiRNA target sequence
agtagaccaatactatcaccagga

SEQ ID NO: 91258 - DNA, 24 bp, Artificial sequence
  SiRNA target sequence
gtagaccaatactatcaccaggaa

SEQ ID NO: 91259 - DNA, 24 bp, Artificial sequence
  SiRNA target sequence
tagaccaatactatcaccaggaac

SEQ ID NO: 91260 - DNA, 24 bp, Artificial sequence
  SiRNA target sequence
agaccaatactatcaccaggaaca

SEQ ID NO: 91261 - DNA, 24 bp, Artificial sequence
  SiRNA target sequence
gaccaatactatcaccaggaacaa

SEQ ID NO: 91262 - DNA, 24 bp, Artificial sequence
  SiRNA target sequence
accaatactatcaccaggaacaaa

SEQ ID NO: 91263 - DNA, 24 bp, Artificial sequence
  SiRNA target sequence
ccaatactatcaccaggaacaaaa

SEQ ID NO: 91264 - DNA, 24 bp, Artificial sequence
  SiRNA target sequence
caatactatcaccaggaacaaaat

SEQ ID NO: 91265 - DNA, 24 bp, Artificial sequence
  SiRNA target sequence
aatactatcaccaggaacaaaatc

SEQ ID NO: 91266 - DNA, 24 bp, Artificial sequence
  SiRNA target sequence
atactatcaccaggaacaaaatct

SEQ ID NO: 91267 - DNA, 24 bp, Artificial sequence
  SiRNA target sequence
tactatcaccaggaacaaaatcta

SEQ ID NO: 91268 - DNA, 24 bp, Artificial sequence
  SiRNA target sequence
actatcaccaggaacaaaatctaa

SEQ ID NO: 91269 - DNA, 24 bp, Artificial sequence
  SiRNA target sequence
ctatcaccaggaacaaaatctaat

SEQ ID NO: 91270 - DNA, 24 bp, Artificial sequence
  SiRNA target sequence
tatcaccaggaacaaaatctaatg

SEQ ID NO: 91271 - DNA, 24 bp, Artificial sequence
  SiRNA target sequence
atcaccaggaacaaaatctaatgt

SEQ ID NO: 91272 - DNA, 24 bp, Artificial sequence
  SiRNA target sequence
tcaccaggaacaaaatctaatgta

SEQ ID NO: 91273 - DNA, 24 bp, Artificial sequence
  SiRNA target sequence
caccaggaacaaaatctaatgtat

SEQ ID NO: 91274 - DNA, 24 bp, Artificial sequence
  SiRNA target sequence
accaggaacaaaatctaatgtata

SEQ ID NO: 91275 - DNA, 24 bp, Artificial sequence
  SiRNA target sequence
ccaggaacaaaatctaatgtataa

SEQ ID NO: 91276 - DNA, 24 bp, Artificial sequence
  SiRNA target sequence
caggaacaaaatctaatgtataat

SEQ ID NO: 91277 - DNA, 24 bp, Artificial sequence
  SiRNA target sequence
aggaacaaaatctaatgtataatt

SEQ ID NO: 91278 - DNA, 24 bp, Artificial sequence
  SiRNA target sequence
ggaacaaaatctaatgtataatta

SEQ ID NO: 91279 - DNA, 24 bp, Artificial sequence
  SiRNA target sequence
gaacaaaatctaatgtataattaa

SEQ ID NO: 91280 - DNA, 24 bp, Artificial sequence
  SiRNA target sequence
aacaaaatctaatgtataattaag

SEQ ID NO: 91281 - DNA, 24 bp, Artificial sequence
  SiRNA target sequence
acaaaatctaatgtataattaagt

SEQ ID NO: 91282 - DNA, 24 bp, Artificial sequence
  SiRNA target sequence
caaaatctaatgtataattaagtt

SEQ ID NO: 91283 - DNA, 24 bp, Artificial sequence
  SiRNA target sequence
aaaatctaatgtataattaagttg

SEQ ID NO: 91284 - DNA, 24 bp, Artificial sequence
  SiRNA target sequence
aaatctaatgtataattaagttga

SEQ ID NO: 91285 - DNA, 24 bp, Artificial sequence
  SiRNA target sequence
aatctaatgtataattaagttgaa

SEQ ID NO: 91286 - DNA, 24 bp, Artificial sequence
  SiRNA target sequence
atctaatgtataattaagttgaac

SEQ ID NO: 91287 - DNA, 24 bp, Artificial sequence
  SiRNA target sequence
tctaatgtataattaagttgaacc

SEQ ID NO: 91288 - DNA, 24 bp, Artificial sequence
  SiRNA target sequence
ctaatgtataattaagttgaacct

SEQ ID NO: 91289 - DNA, 24 bp, Artificial sequence
  SiRNA target sequence
taatgtataattaagttgaacctt

SEQ ID NO: 91290 - DNA, 24 bp, Artificial sequence
  SiRNA target sequence
aatgtataattaagttgaacctta

SEQ ID NO: 91291 - DNA, 24 bp, Artificial sequence
  SiRNA target sequence
atgtataattaagttgaaccttat

SEQ ID NO: 91292 - DNA, 24 bp, Artificial sequence
  SiRNA target sequence
tgtataattaagttgaaccttata

SEQ ID NO: 91293 - DNA, 24 bp, Artificial sequence
  SiRNA target sequence
gtataattaagttgaaccttatat

SEQ ID NO: 91294 - DNA, 24 bp, Artificial sequence
  SiRNA target sequence
tataattaagttgaaccttatata

SEQ ID NO: 91295 - DNA, 24 bp, Artificial sequence
  SiRNA target sequence
ataattaagttgaaccttatatac

SEQ ID NO: 91296 - DNA, 24 bp, Artificial sequence
  SiRNA target sequence
taattaagttgaaccttatatacc

SEQ ID NO: 91297 - DNA, 24 bp, Artificial sequence
  SiRNA target sequence
aattaagttgaaccttatatacct

SEQ ID NO: 91298 - DNA, 24 bp, Artificial sequence
  SiRNA target sequence
attaagttgaaccttatatacctt

SEQ ID NO: 91299 - DNA, 24 bp, Artificial sequence
  SiRNA target sequence
ttaagttgaaccttatataccttt

SEQ ID NO: 91300 - DNA, 24 bp, Artificial sequence
  SiRNA target sequence
taagttgaaccttatatacctttt

SEQ ID NO: 91301 - DNA, 24 bp, Artificial sequence
  SiRNA target sequence
aagttgaaccttatataccttttt

SEQ ID NO: 91302 - DNA, 24 bp, Artificial sequence
  SiRNA target sequence
agttgaaccttatatacctttttc

SEQ ID NO: 91303 - DNA, 24 bp, Artificial sequence
  SiRNA target sequence
gttgaaccttatatacctttttcc

SEQ ID NO: 91304 - DNA, 24 bp, Artificial sequence
  SiRNA target sequence
ttgaaccttatatacctttttcca

SEQ ID NO: 91305 - DNA, 24 bp, Artificial sequence
  SiRNA target sequence
tgaaccttatatacctttttccat

SEQ ID NO: 91306 - DNA, 24 bp, Artificial sequence
  SiRNA target sequence
gaaccttatatacctttttccatg

SEQ ID NO: 91307 - DNA, 24 bp, Artificial sequence
  SiRNA target sequence
aaccttatatacctttttccatgt

SEQ ID NO: 91308 - DNA, 24 bp, Artificial sequence
  SiRNA target sequence
accttatatacctttttccatgta

SEQ ID NO: 91309 - DNA, 24 bp, Artificial sequence
  SiRNA target sequence
ccttatatacctttttccatgtac

SEQ ID NO: 91310 - DNA, 24 bp, Artificial sequence
  SiRNA target sequence
cttatatacctttttccatgtaca

SEQ ID NO: 91311 - DNA, 24 bp, Artificial sequence
  SiRNA target sequence
ttatatacctttttccatgtacag

SEQ ID NO: 91312 - DNA, 24 bp, Artificial sequence
  SiRNA target sequence
tatatacctttttccatgtacagg

SEQ ID NO: 91313 - DNA, 24 bp, Artificial sequence
  SiRNA target sequence
atatacctttttccatgtacagga

SEQ ID NO: 91314 - DNA, 24 bp, Artificial sequence
  SiRNA target sequence
tatacctttttccatgtacaggaa

SEQ ID NO: 91315 - DNA, 24 bp, Artificial sequence
  SiRNA target sequence
atacctttttccatgtacaggaaa

SEQ ID NO: 91316 - DNA, 24 bp, Artificial sequence
  SiRNA target sequence
tacctttttccatgtacaggaaag

SEQ ID NO: 91317 - DNA, 24 bp, Artificial sequence
  SiRNA target sequence
acctttttccatgtacaggaaagg

SEQ ID NO: 91318 - DNA, 24 bp, Artificial sequence
  SiRNA target sequence
cctttttccatgtacaggaaaggt

SEQ ID NO: 91319 - DNA, 24 bp, Artificial sequence
  SiRNA target sequence
ctttttccatgtacaggaaaggtt

SEQ ID NO: 91320 - DNA, 24 bp, Artificial sequence
  SiRNA target sequence
tttttccatgtacaggaaaggttt

SEQ ID NO: 91321 - DNA, 24 bp, Artificial sequence
  SiRNA target sequence
ttttccatgtacaggaaaggtttt

SEQ ID NO: 91322 - DNA, 24 bp, Artificial sequence
  SiRNA target sequence
tttccatgtacaggaaaggttttc

SEQ ID NO: 91323 - DNA, 24 bp, Artificial sequence
  SiRNA target sequence
ttccatgtacaggaaaggttttca

SEQ ID NO: 91324 - DNA, 24 bp, Artificial sequence
  SiRNA target sequence
tccatgtacaggaaaggttttcaa

SEQ ID NO: 91325 - DNA, 24 bp, Artificial sequence
  SiRNA target sequence
ccatgtacaggaaaggttttcaat

SEQ ID NO: 91326 - DNA, 24 bp, Artificial sequence
  SiRNA target sequence
catgtacaggaaaggttttcaata

SEQ ID NO: 91327 - DNA, 24 bp, Artificial sequence
  SiRNA target sequence
atgtacaggaaaggttttcaatat

SEQ ID NO: 91328 - DNA, 24 bp, Artificial sequence
  SiRNA target sequence
tgtacaggaaaggttttcaatatt

SEQ ID NO: 91329 - DNA, 24 bp, Artificial sequence
  SiRNA target sequence
gtacaggaaaggttttcaatattt

SEQ ID NO: 91330 - DNA, 24 bp, Artificial sequence
  SiRNA target sequence
tacaggaaaggttttcaatattta

SEQ ID NO: 91331 - DNA, 24 bp, Artificial sequence
  SiRNA target sequence
acaggaaaggttttcaatatttag

SEQ ID NO: 91332 - DNA, 24 bp, Artificial sequence
  SiRNA target sequence
caggaaaggttttcaatatttagt

SEQ ID NO: 91333 - DNA, 24 bp, Artificial sequence
  SiRNA target sequence
aggaaaggttttcaatatttagta

SEQ ID NO: 91334 - DNA, 24 bp, Artificial sequence
  SiRNA target sequence
ggaaaggttttcaatatttagtat

SEQ ID NO: 91335 - DNA, 24 bp, Artificial sequence
  SiRNA target sequence
gaaaggttttcaatatttagtata

SEQ ID NO: 91336 - DNA, 24 bp, Artificial sequence
  SiRNA target sequence
aaaggttttcaatatttagtatat

SEQ ID NO: 91337 - DNA, 24 bp, Artificial sequence
  SiRNA target sequence
aaggttttcaatatttagtatatt

SEQ ID NO: 91338 - DNA, 24 bp, Artificial sequence
  SiRNA target sequence
aggttttcaatatttagtatattt

SEQ ID NO: 91339 - DNA, 24 bp, Artificial sequence
  SiRNA target sequence
ggttttcaatatttagtatatttg

SEQ ID NO: 91340 - DNA, 24 bp, Artificial sequence
  SiRNA target sequence
gttttcaatatttagtatatttgt

SEQ ID NO: 91341 - DNA, 24 bp, Artificial sequence
  SiRNA target sequence
ttttcaatatttagtatatttgta

SEQ ID NO: 91342 - DNA, 24 bp, Artificial sequence
  SiRNA target sequence
tttcaatatttagtatatttgtat

SEQ ID NO: 91343 - DNA, 24 bp, Artificial sequence
  SiRNA target sequence
ttcaatatttagtatatttgtatc

SEQ ID NO: 91344 - DNA, 24 bp, Artificial sequence
  SiRNA target sequence
tcaatatttagtatatttgtatct

SEQ ID NO: 91345 - DNA, 24 bp, Artificial sequence
  SiRNA target sequence
caatatttagtatatttgtatcta

SEQ ID NO: 91346 - DNA, 24 bp, Artificial sequence
  SiRNA target sequence
aatatttagtatatttgtatctat

SEQ ID NO: 91347 - DNA, 24 bp, Artificial sequence
  SiRNA target sequence
atatttagtatatttgtatctatc

SEQ ID NO: 91348 - DNA, 24 bp, Artificial sequence
  SiRNA target sequence
tatttagtatatttgtatctatca

SEQ ID NO: 91349 - DNA, 24 bp, Artificial sequence
  SiRNA target sequence
atttagtatatttgtatctatcaa

SEQ ID NO: 91350 - DNA, 24 bp, Artificial sequence
  SiRNA target sequence
tttagtatatttgtatctatcaaa

SEQ ID NO: 91351 - DNA, 24 bp, Artificial sequence
  SiRNA target sequence
ttagtatatttgtatctatcaaat

SEQ ID NO: 91352 - DNA, 24 bp, Artificial sequence
  SiRNA target sequence
tagtatatttgtatctatcaaatt

SEQ ID NO: 91353 - DNA, 24 bp, Artificial sequence
  SiRNA target sequence
agtatatttgtatctatcaaattt

SEQ ID NO: 91354 - DNA, 24 bp, Artificial sequence
  SiRNA target sequence
gtatatttgtatctatcaaattta

SEQ ID NO: 91355 - DNA, 24 bp, Artificial sequence
  SiRNA target sequence
tatatttgtatctatcaaatttat

SEQ ID NO: 91356 - DNA, 24 bp, Artificial sequence
  SiRNA target sequence
atatttgtatctatcaaatttata

SEQ ID NO: 91357 - DNA, 24 bp, Artificial sequence
  SiRNA target sequence
tatttgtatctatcaaatttatat

SEQ ID NO: 91358 - DNA, 24 bp, Artificial sequence
  SiRNA target sequence
atttgtatctatcaaatttatatt

SEQ ID NO: 91359 - DNA, 24 bp, Artificial sequence
  SiRNA target sequence
tttgtatctatcaaatttatattc

SEQ ID NO: 91360 - DNA, 24 bp, Artificial sequence
  SiRNA target sequence
ttgtatctatcaaatttatattct

SEQ ID NO: 91361 - DNA, 24 bp, Artificial sequence
  SiRNA target sequence
tgtatctatcaaatttatattctc

SEQ ID NO: 91362 - DNA, 24 bp, Artificial sequence
  SiRNA target sequence
gtatctatcaaatttatattctcg

SEQ ID NO: 91363 - DNA, 24 bp, Artificial sequence
  SiRNA target sequence
tatctatcaaatttatattctcgt

SEQ ID NO: 91364 - DNA, 24 bp, Artificial sequence
  SiRNA target sequence
atctatcaaatttatattctcgtt

SEQ ID NO: 91365 - DNA, 24 bp, Artificial sequence
  SiRNA target sequence
tctatcaaatttatattctcgttt

SEQ ID NO: 91366 - DNA, 24 bp, Artificial sequence
  SiRNA target sequence
ctatcaaatttatattctcgtttg

SEQ ID NO: 91367 - DNA, 24 bp, Artificial sequence
  SiRNA target sequence
tatcaaatttatattctcgtttgt

SEQ ID NO: 91368 - DNA, 24 bp, Artificial sequence
  SiRNA target sequence
atcaaatttatattctcgtttgtc

SEQ ID NO: 91369 - DNA, 24 bp, Artificial sequence
  SiRNA target sequence
tcaaatttatattctcgtttgtct

SEQ ID NO: 91370 - DNA, 24 bp, Artificial sequence
  SiRNA target sequence
caaatttatattctcgtttgtctt

SEQ ID NO: 91371 - DNA, 24 bp, Artificial sequence
  SiRNA target sequence
aaatttatattctcgtttgtcttt

SEQ ID NO: 91372 - DNA, 24 bp, Artificial sequence
  SiRNA target sequence
aatttatattctcgtttgtcttta

SEQ ID NO: 91373 - DNA, 24 bp, Artificial sequence
  SiRNA target sequence
atttatattctcgtttgtctttat

SEQ ID NO: 91374 - DNA, 24 bp, Artificial sequence
  SiRNA target sequence
tttatattctcgtttgtctttatt

SEQ ID NO: 91375 - DNA, 24 bp, Artificial sequence
  SiRNA target sequence
ttatattctcgtttgtctttattt

SEQ ID NO: 91376 - DNA, 24 bp, Artificial sequence
  SiRNA target sequence
tatattctcgtttgtctttatttt

SEQ ID NO: 91377 - DNA, 24 bp, Artificial sequence
  SiRNA target sequence
atattctcgtttgtctttatttta

SEQ ID NO: 91378 - DNA, 24 bp, Artificial sequence
  SiRNA target sequence
tattctcgtttgtctttattttat

SEQ ID NO: 91379 - DNA, 24 bp, Artificial sequence
  SiRNA target sequence
attctcgtttgtctttattttata

SEQ ID NO: 91380 - DNA, 24 bp, Artificial sequence
  SiRNA target sequence
ttctcgtttgtctttattttataa

SEQ ID NO: 91381 - DNA, 24 bp, Artificial sequence
  SiRNA target sequence
tctcgtttgtctttattttataag

SEQ ID NO: 91382 - DNA, 24 bp, Artificial sequence
  SiRNA target sequence
ctcgtttgtctttattttataaga

SEQ ID NO: 91383 - DNA, 24 bp, Artificial sequence
  SiRNA target sequence
tcgtttgtctttattttataagaa

SEQ ID NO: 91384 - DNA, 24 bp, Artificial sequence
  SiRNA target sequence
cgtttgtctttattttataagaac

SEQ ID NO: 91385 - DNA, 24 bp, Artificial sequence
  SiRNA target sequence
gtttgtctttattttataagaacc

SEQ ID NO: 91386 - DNA, 24 bp, Artificial sequence
  SiRNA target sequence
tttgtctttattttataagaacct

SEQ ID NO: 91387 - DNA, 24 bp, Artificial sequence
  SiRNA target sequence
ttgtctttattttataagaacctg

SEQ ID NO: 91388 - DNA, 24 bp, Artificial sequence
  SiRNA target sequence
tgtctttattttataagaacctgt

SEQ ID NO: 91389 - DNA, 24 bp, Artificial sequence
  SiRNA target sequence
gtctttattttataagaacctgta

SEQ ID NO: 91390 - DNA, 24 bp, Artificial sequence
  SiRNA target sequence
tctttattttataagaacctgtat

SEQ ID NO: 91391 - DNA, 24 bp, Artificial sequence
  SiRNA target sequence
ctttattttataagaacctgtata

SEQ ID NO: 91392 - DNA, 24 bp, Artificial sequence
  SiRNA target sequence
tttattttataagaacctgtatag

SEQ ID NO: 91393 - DNA, 24 bp, Artificial sequence
  SiRNA target sequence
ttattttataagaacctgtatagt

SEQ ID NO: 91394 - DNA, 24 bp, Artificial sequence
  SiRNA target sequence
tattttataagaacctgtatagtt

SEQ ID NO: 91395 - DNA, 24 bp, Artificial sequence
  SiRNA target sequence
attttataagaacctgtatagttg

SEQ ID NO: 91396 - DNA, 24 bp, Artificial sequence
  SiRNA target sequence
ttttataagaacctgtatagttgg

SEQ ID NO: 91397 - DNA, 24 bp, Artificial sequence
  SiRNA target sequence
tttataagaacctgtatagttggt

SEQ ID NO: 91398 - DNA, 24 bp, Artificial sequence
  SiRNA target sequence
ttataagaacctgtatagttggtc

SEQ ID NO: 91399 - DNA, 24 bp, Artificial sequence
  SiRNA target sequence
tataagaacctgtatagttggtct

SEQ ID NO: 91400 - DNA, 24 bp, Artificial sequence
  SiRNA target sequence
ataagaacctgtatagttggtctt

SEQ ID NO: 91401 - DNA, 24 bp, Artificial sequence
  SiRNA target sequence
taagaacctgtatagttggtcttt

SEQ ID NO: 91402 - DNA, 24 bp, Artificial sequence
  SiRNA target sequence
aagaacctgtatagttggtctttt

SEQ ID NO: 91403 - DNA, 24 bp, Artificial sequence
  SiRNA target sequence
agaacctgtatagttggtcttttt

SEQ ID NO: 91404 - DNA, 24 bp, Artificial sequence
  SiRNA target sequence
gaacctgtatagttggtcttttta

SEQ ID NO: 91405 - DNA, 24 bp, Artificial sequence
  SiRNA target sequence
aacctgtatagttggtctttttaa

SEQ ID NO: 91406 - DNA, 24 bp, Artificial sequence
  SiRNA target sequence
acctgtatagttggtctttttaat

SEQ ID NO: 91407 - DNA, 24 bp, Artificial sequence
  SiRNA target sequence
cctgtatagttggtctttttaatt

SEQ ID NO: 91408 - DNA, 24 bp, Artificial sequence
  SiRNA target sequence
ctgtatagttggtctttttaatta

SEQ ID NO: 91409 - DNA, 24 bp, Artificial sequence
  SiRNA target sequence
tgtatagttggtctttttaattat

SEQ ID NO: 91410 - DNA, 24 bp, Artificial sequence
  SiRNA target sequence
gtatagttggtctttttaattata

SEQ ID NO: 91411 - DNA, 24 bp, Artificial sequence
  SiRNA target sequence
tatagttggtctttttaattataa

SEQ ID NO: 91412 - DNA, 24 bp, Artificial sequence
  SiRNA target sequence
atagttggtctttttaattataag

SEQ ID NO: 91413 - DNA, 24 bp, Artificial sequence
  SiRNA target sequence
tagttggtctttttaattataagc

SEQ ID NO: 91414 - DNA, 24 bp, Artificial sequence
  SiRNA target sequence
agttggtctttttaattataagct

SEQ ID NO: 91415 - DNA, 24 bp, Artificial sequence
  SiRNA target sequence
gttggtctttttaattataagctt

SEQ ID NO: 91416 - DNA, 24 bp, Artificial sequence
  SiRNA target sequence
ttggtctttttaattataagctta

SEQ ID NO: 91417 - DNA, 24 bp, Artificial sequence
  SiRNA target sequence
tggtctttttaattataagcttat

SEQ ID NO: 91418 - DNA, 24 bp, Artificial sequence
  SiRNA target sequence
ggtctttttaattataagcttatt

SEQ ID NO: 91419 - DNA, 24 bp, Artificial sequence
  SiRNA target sequence
gtctttttaattataagcttattg

SEQ ID NO: 91420 - DNA, 24 bp, Artificial sequence
  SiRNA target sequence
tctttttaattataagcttattga

SEQ ID NO: 91421 - DNA, 24 bp, Artificial sequence
  SiRNA target sequence
ctttttaattataagcttattgaa

SEQ ID NO: 91422 - DNA, 24 bp, Artificial sequence
  SiRNA target sequence
tttttaattataagcttattgaaa

SEQ ID NO: 91423 - DNA, 24 bp, Artificial sequence
  SiRNA target sequence
ttttaattataagcttattgaaat

SEQ ID NO: 91424 - DNA, 24 bp, Artificial sequence
  SiRNA target sequence
tttaattataagcttattgaaatt

SEQ ID NO: 91425 - DNA, 24 bp, Artificial sequence
  SiRNA target sequence
ttaattataagcttattgaaattt

SEQ ID NO: 91426 - DNA, 24 bp, Artificial sequence
  SiRNA target sequence
taattataagcttattgaaatttc

SEQ ID NO: 91427 - DNA, 24 bp, Artificial sequence
  SiRNA target sequence
aattataagcttattgaaatttct

SEQ ID NO: 91428 - DNA, 24 bp, Artificial sequence
  SiRNA target sequence
attataagcttattgaaatttcta

SEQ ID NO: 91429 - DNA, 24 bp, Artificial sequence
  SiRNA target sequence
ttataagcttattgaaatttctaa

SEQ ID NO: 91430 - DNA, 24 bp, Artificial sequence
  SiRNA target sequence
tataagcttattgaaatttctaat

SEQ ID NO: 91431 - DNA, 24 bp, Artificial sequence
  SiRNA target sequence
ataagcttattgaaatttctaata

SEQ ID NO: 91432 - DNA, 24 bp, Artificial sequence
  SiRNA target sequence
taagcttattgaaatttctaatat

SEQ ID NO: 91433 - DNA, 24 bp, Artificial sequence
  SiRNA target sequence
aagcttattgaaatttctaatatt

SEQ ID NO: 91434 - DNA, 24 bp, Artificial sequence
  SiRNA target sequence
agcttattgaaatttctaatattt

SEQ ID NO: 91435 - DNA, 24 bp, Artificial sequence
  SiRNA target sequence
gcttattgaaatttctaatattta

SEQ ID NO: 91436 - DNA, 24 bp, Artificial sequence
  SiRNA target sequence
cttattgaaatttctaatatttaa

SEQ ID NO: 91437 - DNA, 24 bp, Artificial sequence
  SiRNA target sequence
ttattgaaatttctaatatttaaa

SEQ ID NO: 91438 - DNA, 24 bp, Artificial sequence
  SiRNA target sequence
tattgaaatttctaatatttaaag

SEQ ID NO: 91439 - DNA, 24 bp, Artificial sequence
  SiRNA target sequence
attgaaatttctaatatttaaagg

SEQ ID NO: 91440 - DNA, 24 bp, Artificial sequence
  SiRNA target sequence
ttgaaatttctaatatttaaagga

SEQ ID NO: 91441 - DNA, 24 bp, Artificial sequence
  SiRNA target sequence
tgaaatttctaatatttaaaggaa

SEQ ID NO: 91442 - DNA, 24 bp, Artificial sequence
  SiRNA target sequence
gaaatttctaatatttaaaggaac

SEQ ID NO: 91443 - DNA, 24 bp, Artificial sequence
  SiRNA target sequence
aaatttctaatatttaaaggaaca

SEQ ID NO: 91444 - DNA, 24 bp, Artificial sequence
  SiRNA target sequence
aatttctaatatttaaaggaacaa

SEQ ID NO: 91445 - DNA, 24 bp, Artificial sequence
  SiRNA target sequence
atttctaatatttaaaggaacaaa

SEQ ID NO: 91446 - DNA, 24 bp, Artificial sequence
  SiRNA target sequence
tttctaatatttaaaggaacaaaa

SEQ ID NO: 91447 - DNA, 24 bp, Artificial sequence
  SiRNA target sequence
ttctaatatttaaaggaacaaaat

SEQ ID NO: 91448 - DNA, 24 bp, Artificial sequence
  SiRNA target sequence
tctaatatttaaaggaacaaaatc

SEQ ID NO: 91449 - DNA, 24 bp, Artificial sequence
  SiRNA target sequence
ctaatatttaaaggaacaaaatct

SEQ ID NO: 91450 - DNA, 24 bp, Artificial sequence
  SiRNA target sequence
taatatttaaaggaacaaaatcta

SEQ ID NO: 91451 - DNA, 24 bp, Artificial sequence
  SiRNA target sequence
aatatttaaaggaacaaaatctac

SEQ ID NO: 91452 - DNA, 24 bp, Artificial sequence
  SiRNA target sequence
atatttaaaggaacaaaatctaca

SEQ ID NO: 91453 - DNA, 24 bp, Artificial sequence
  SiRNA target sequence
tatttaaaggaacaaaatctacat

SEQ ID NO: 91454 - DNA, 24 bp, Artificial sequence
  SiRNA target sequence
atttaaaggaacaaaatctacatt

SEQ ID NO: 91455 - DNA, 24 bp, Artificial sequence
  SiRNA target sequence
tttaaaggaacaaaatctacattt

SEQ ID NO: 91456 - DNA, 24 bp, Artificial sequence
  SiRNA target sequence
ttaaaggaacaaaatctacattta

SEQ ID NO: 91457 - DNA, 24 bp, Artificial sequence
  SiRNA target sequence
taaaggaacaaaatctacatttag

SEQ ID NO: 91458 - DNA, 24 bp, Artificial sequence
  SiRNA target sequence
aaaggaacaaaatctacatttaga

SEQ ID NO: 91459 - DNA, 24 bp, Artificial sequence
  SiRNA target sequence
aaggaacaaaatctacatttagat

SEQ ID NO: 91460 - DNA, 24 bp, Artificial sequence
  SiRNA target sequence
aggaacaaaatctacatttagatt

SEQ ID NO: 91461 - DNA, 24 bp, Artificial sequence
  SiRNA target sequence
ggaacaaaatctacatttagatta

SEQ ID NO: 91462 - DNA, 24 bp, Artificial sequence
  SiRNA target sequence
gaacaaaatctacatttagattat

SEQ ID NO: 91463 - DNA, 24 bp, Artificial sequence
  SiRNA target sequence
aacaaaatctacatttagattata

SEQ ID NO: 91464 - DNA, 24 bp, Artificial sequence
  SiRNA target sequence
acaaaatctacatttagattatat

SEQ ID NO: 91465 - DNA, 24 bp, Artificial sequence
  SiRNA target sequence
caaaatctacatttagattatatt

SEQ ID NO: 91466 - DNA, 24 bp, Artificial sequence
  SiRNA target sequence
aaaatctacatttagattatattc

SEQ ID NO: 91467 - DNA, 24 bp, Artificial sequence
  SiRNA target sequence
aaatctacatttagattatattct

SEQ ID NO: 91468 - DNA, 24 bp, Artificial sequence
  SiRNA target sequence
aatctacatttagattatattcta

SEQ ID NO: 91469 - DNA, 24 bp, Artificial sequence
  SiRNA target sequence
atctacatttagattatattctaa

SEQ ID NO: 91470 - DNA, 24 bp, Artificial sequence
  SiRNA target sequence
tctacatttagattatattctaat

SEQ ID NO: 91471 - DNA, 24 bp, Artificial sequence
  SiRNA target sequence
ctacatttagattatattctaatt

SEQ ID NO: 91472 - DNA, 24 bp, Artificial sequence
  SiRNA target sequence
tacatttagattatattctaattt

SEQ ID NO: 91473 - DNA, 24 bp, Artificial sequence
  SiRNA target sequence
acatttagattatattctaattta

SEQ ID NO: 91474 - DNA, 24 bp, Artificial sequence
  SiRNA target sequence
catttagattatattctaatttat

SEQ ID NO: 91475 - DNA, 24 bp, Artificial sequence
  SiRNA target sequence
atttagattatattctaatttatt

SEQ ID NO: 91476 - DNA, 24 bp, Artificial sequence
  SiRNA target sequence
tttagattatattctaatttattg

SEQ ID NO: 91477 - DNA, 24 bp, Artificial sequence
  SiRNA target sequence
ttagattatattctaatttattga

SEQ ID NO: 91478 - DNA, 24 bp, Artificial sequence
  SiRNA target sequence
tagattatattctaatttattgaa

SEQ ID NO: 91479 - DNA, 24 bp, Artificial sequence
  SiRNA target sequence
agattatattctaatttattgaat

SEQ ID NO: 91480 - DNA, 24 bp, Artificial sequence
  SiRNA target sequence
gattatattctaatttattgaatt

SEQ ID NO: 91481 - DNA, 24 bp, Artificial sequence
  SiRNA target sequence
attatattctaatttattgaattt

SEQ ID NO: 91482 - DNA, 24 bp, Artificial sequence
  SiRNA target sequence
ttatattctaatttattgaatttc

SEQ ID NO: 91483 - DNA, 24 bp, Artificial sequence
  SiRNA target sequence
tatattctaatttattgaatttca

SEQ ID NO: 91484 - DNA, 24 bp, Artificial sequence
  SiRNA target sequence
atattctaatttattgaatttcat

SEQ ID NO: 91485 - DNA, 25 bp, Artificial sequence
  SiRNA target sequence
ttatatccaactatcaaaaaatagc

SEQ ID NO: 91486 - DNA, 25 bp, Artificial sequence
  SiRNA target sequence
tatatccaactatcaaaaaatagcc

SEQ ID NO: 91487 - DNA, 25 bp, Artificial sequence
  SiRNA target sequence
atatccaactatcaaaaaatagcct

SEQ ID NO: 91488 - DNA, 25 bp, Artificial sequence
  SiRNA target sequence
tatccaactatcaaaaaatagcctc

SEQ ID NO: 91489 - DNA, 25 bp, Artificial sequence
  SiRNA target sequence
atccaactatcaaaaaatagcctct

SEQ ID NO: 91490 - DNA, 25 bp, Artificial sequence
  SiRNA target sequence
tccaactatcaaaaaatagcctctt

SEQ ID NO: 91491 - DNA, 25 bp, Artificial sequence
  SiRNA target sequence
ccaactatcaaaaaatagcctcttt

SEQ ID NO: 91492 - DNA, 25 bp, Artificial sequence
  SiRNA target sequence
caactatcaaaaaatagcctctttt

SEQ ID NO: 91493 - DNA, 25 bp, Artificial sequence
  SiRNA target sequence
aactatcaaaaaatagcctcttttc

SEQ ID NO: 91494 - DNA, 25 bp, Artificial sequence
  SiRNA target sequence
actatcaaaaaatagcctcttttct

SEQ ID NO: 91495 - DNA, 25 bp, Artificial sequence
  SiRNA target sequence
ctatcaaaaaatagcctcttttctt

SEQ ID NO: 91496 - DNA, 25 bp, Artificial sequence
  SiRNA target sequence
tatcaaaaaatagcctcttttcttt

SEQ ID NO: 91497 - DNA, 25 bp, Artificial sequence
  SiRNA target sequence
atcaaaaaatagcctcttttctttc

SEQ ID NO: 91498 - DNA, 25 bp, Artificial sequence
  SiRNA target sequence
tcaaaaaatagcctcttttctttca

SEQ ID NO: 91499 - DNA, 25 bp, Artificial sequence
  SiRNA target sequence
caaaaaatagcctcttttctttcac

SEQ ID NO: 91500 - DNA, 25 bp, Artificial sequence
  SiRNA target sequence
aaaaaatagcctcttttctttcaca

SEQ ID NO: 91501 - DNA, 25 bp, Artificial sequence
  SiRNA target sequence
aaaaatagcctcttttctttcacaa

SEQ ID NO: 91502 - DNA, 25 bp, Artificial sequence
  SiRNA target sequence
aaaatagcctcttttctttcacaat

SEQ ID NO: 91503 - DNA, 25 bp, Artificial sequence
  SiRNA target sequence
aaatagcctcttttctttcacaatt

SEQ ID NO: 91504 - DNA, 25 bp, Artificial sequence
  SiRNA target sequence
aatagcctcttttctttcacaattt

SEQ ID NO: 91505 - DNA, 25 bp, Artificial sequence
  SiRNA target sequence
atagcctcttttctttcacaatttc

SEQ ID NO: 91506 - DNA, 25 bp, Artificial sequence
  SiRNA target sequence
tagcctcttttctttcacaatttca

SEQ ID NO: 91507 - DNA, 25 bp, Artificial sequence
  SiRNA target sequence
agcctcttttctttcacaatttcag

SEQ ID NO: 91508 - DNA, 25 bp, Artificial sequence
  SiRNA target sequence
gcctcttttctttcacaatttcaga

SEQ ID NO: 91509 - DNA, 25 bp, Artificial sequence
  SiRNA target sequence
cctcttttctttcacaatttcagaa

SEQ ID NO: 91510 - DNA, 25 bp, Artificial sequence
  SiRNA target sequence
ctcttttctttcacaatttcagaaa

SEQ ID NO: 91511 - DNA, 25 bp, Artificial sequence
  SiRNA target sequence
tcttttctttcacaatttcagaaaa

SEQ ID NO: 91512 - DNA, 25 bp, Artificial sequence
  SiRNA target sequence
cttttctttcacaatttcagaaaaa

SEQ ID NO: 91513 - DNA, 25 bp, Artificial sequence
  SiRNA target sequence
ttttctttcacaatttcagaaaaat

SEQ ID NO: 91514 - DNA, 25 bp, Artificial sequence
  SiRNA target sequence
tttctttcacaatttcagaaaaatt

SEQ ID NO: 91515 - DNA, 25 bp, Artificial sequence
  SiRNA target sequence
ttctttcacaatttcagaaaaattt

SEQ ID NO: 91516 - DNA, 25 bp, Artificial sequence
  SiRNA target sequence
tctttcacaatttcagaaaaatttt

SEQ ID NO: 91517 - DNA, 25 bp, Artificial sequence
  SiRNA target sequence
ctttcacaatttcagaaaaattttc

SEQ ID NO: 91518 - DNA, 25 bp, Artificial sequence
  SiRNA target sequence
tttcacaatttcagaaaaattttca

SEQ ID NO: 91519 - DNA, 25 bp, Artificial sequence
  SiRNA target sequence
ttcacaatttcagaaaaattttcat

SEQ ID NO: 91520 - DNA, 25 bp, Artificial sequence
  SiRNA target sequence
tcacaatttcagaaaaattttcatt

SEQ ID NO: 91521 - DNA, 25 bp, Artificial sequence
  SiRNA target sequence
cacaatttcagaaaaattttcatta

SEQ ID NO: 91522 - DNA, 25 bp, Artificial sequence
  SiRNA target sequence
acaatttcagaaaaattttcattaa

SEQ ID NO: 91523 - DNA, 25 bp, Artificial sequence
  SiRNA target sequence
caatttcagaaaaattttcattaaa

SEQ ID NO: 91524 - DNA, 25 bp, Artificial sequence
  SiRNA target sequence
aatttcagaaaaattttcattaaaa

SEQ ID NO: 91525 - DNA, 25 bp, Artificial sequence
  SiRNA target sequence
atttcagaaaaattttcattaaaaa

SEQ ID NO: 91526 - DNA, 25 bp, Artificial sequence
  SiRNA target sequence
tttcagaaaaattttcattaaaaat

SEQ ID NO: 91527 - DNA, 25 bp, Artificial sequence
  SiRNA target sequence
ttcagaaaaattttcattaaaaatg

SEQ ID NO: 91528 - DNA, 25 bp, Artificial sequence
  SiRNA target sequence
tcagaaaaattttcattaaaaatgc

SEQ ID NO: 91529 - DNA, 25 bp, Artificial sequence
  SiRNA target sequence
cagaaaaattttcattaaaaatgct

SEQ ID NO: 91530 - DNA, 25 bp, Artificial sequence
  SiRNA target sequence
agaaaaattttcattaaaaatgcta

SEQ ID NO: 91531 - DNA, 25 bp, Artificial sequence
  SiRNA target sequence
gaaaaattttcattaaaaatgctat

SEQ ID NO: 91532 - DNA, 25 bp, Artificial sequence
  SiRNA target sequence
aaaaattttcattaaaaatgctata

SEQ ID NO: 91533 - DNA, 25 bp, Artificial sequence
  SiRNA target sequence
aaaattttcattaaaaatgctataa

SEQ ID NO: 91534 - DNA, 25 bp, Artificial sequence
  SiRNA target sequence
aaattttcattaaaaatgctataaa

SEQ ID NO: 91535 - DNA, 25 bp, Artificial sequence
  SiRNA target sequence
aattttcattaaaaatgctataaat

SEQ ID NO: 91536 - DNA, 25 bp, Artificial sequence
  SiRNA target sequence
attttcattaaaaatgctataaata

SEQ ID NO: 91537 - DNA, 25 bp, Artificial sequence
  SiRNA target sequence
ttttcattaaaaatgctataaatag

SEQ ID NO: 91538 - DNA, 25 bp, Artificial sequence
  SiRNA target sequence
tttcattaaaaatgctataaatagt

SEQ ID NO: 91539 - DNA, 25 bp, Artificial sequence
  SiRNA target sequence
ttcattaaaaatgctataaatagtt

SEQ ID NO: 91540 - DNA, 25 bp, Artificial sequence
  SiRNA target sequence
tcattaaaaatgctataaatagttt

SEQ ID NO: 91541 - DNA, 25 bp, Artificial sequence
  SiRNA target sequence
cattaaaaatgctataaatagtttt

SEQ ID NO: 91542 - DNA, 25 bp, Artificial sequence
  SiRNA target sequence
attaaaaatgctataaatagttttt

SEQ ID NO: 91543 - DNA, 25 bp, Artificial sequence
  SiRNA target sequence
ttaaaaatgctataaatagtttttt

SEQ ID NO: 91544 - DNA, 25 bp, Artificial sequence
  SiRNA target sequence
taaaaatgctataaatagttttttg

SEQ ID NO: 91545 - DNA, 25 bp, Artificial sequence
  SiRNA target sequence
aaaaatgctataaatagttttttgc

SEQ ID NO: 91546 - DNA, 25 bp, Artificial sequence
  SiRNA target sequence
aaaatgctataaatagttttttgca

SEQ ID NO: 91547 - DNA, 25 bp, Artificial sequence
  SiRNA target sequence
aaatgctataaatagttttttgcat

SEQ ID NO: 91548 - DNA, 25 bp, Artificial sequence
  SiRNA target sequence
aatgctataaatagttttttgcata

SEQ ID NO: 91549 - DNA, 25 bp, Artificial sequence
  SiRNA target sequence
atgctataaatagttttttgcatat

SEQ ID NO: 91550 - DNA, 25 bp, Artificial sequence
  SiRNA target sequence
tgctataaatagttttttgcatatc

SEQ ID NO: 91551 - DNA, 25 bp, Artificial sequence
  SiRNA target sequence
gctataaatagttttttgcatatca

SEQ ID NO: 91552 - DNA, 25 bp, Artificial sequence
  SiRNA target sequence
ctataaatagttttttgcatatcag

SEQ ID NO: 91553 - DNA, 25 bp, Artificial sequence
  SiRNA target sequence
tataaatagttttttgcatatcagg

SEQ ID NO: 91554 - DNA, 25 bp, Artificial sequence
  SiRNA target sequence
ataaatagttttttgcatatcaggt

SEQ ID NO: 91555 - DNA, 25 bp, Artificial sequence
  SiRNA target sequence
taaatagttttttgcatatcaggtc

SEQ ID NO: 91556 - DNA, 25 bp, Artificial sequence
  SiRNA target sequence
aaatagttttttgcatatcaggtcg

SEQ ID NO: 91557 - DNA, 25 bp, Artificial sequence
  SiRNA target sequence
aatagttttttgcatatcaggtcgg

SEQ ID NO: 91558 - DNA, 25 bp, Artificial sequence
  SiRNA target sequence
atagttttttgcatatcaggtcggc

SEQ ID NO: 91559 - DNA, 25 bp, Artificial sequence
  SiRNA target sequence
tagttttttgcatatcaggtcggcc

SEQ ID NO: 91560 - DNA, 25 bp, Artificial sequence
  SiRNA target sequence
agttttttgcatatcaggtcggcca

SEQ ID NO: 91561 - DNA, 25 bp, Artificial sequence
  SiRNA target sequence
gttttttgcatatcaggtcggccac

SEQ ID NO: 91562 - DNA, 25 bp, Artificial sequence
  SiRNA target sequence
ttttttgcatatcaggtcggccaca

SEQ ID NO: 91563 - DNA, 25 bp, Artificial sequence
  SiRNA target sequence
tttttgcatatcaggtcggccacaa

SEQ ID NO: 91564 - DNA, 25 bp, Artificial sequence
  SiRNA target sequence
ttttgcatatcaggtcggccacaaa

SEQ ID NO: 91565 - DNA, 25 bp, Artificial sequence
  SiRNA target sequence
tttgcatatcaggtcggccacaaac

SEQ ID NO: 91566 - DNA, 25 bp, Artificial sequence
  SiRNA target sequence
ttgcatatcaggtcggccacaaaca

SEQ ID NO: 91567 - DNA, 25 bp, Artificial sequence
  SiRNA target sequence
tgcatatcaggtcggccacaaacat

SEQ ID NO: 91568 - DNA, 25 bp, Artificial sequence
  SiRNA target sequence
gcatatcaggtcggccacaaacata

SEQ ID NO: 91569 - DNA, 25 bp, Artificial sequence
  SiRNA target sequence
catatcaggtcggccacaaacataa

SEQ ID NO: 91570 - DNA, 25 bp, Artificial sequence
  SiRNA target sequence
atatcaggtcggccacaaacataaa

SEQ ID NO: 91571 - DNA, 25 bp, Artificial sequence
  SiRNA target sequence
tatcaggtcggccacaaacataaac

SEQ ID NO: 91572 - DNA, 25 bp, Artificial sequence
  SiRNA target sequence
atcaggtcggccacaaacataaacc

SEQ ID NO: 91573 - DNA, 25 bp, Artificial sequence
  SiRNA target sequence
tcaggtcggccacaaacataaacca

SEQ ID NO: 91574 - DNA, 25 bp, Artificial sequence
  SiRNA target sequence
caggtcggccacaaacataaaccaa

SEQ ID NO: 91575 - DNA, 25 bp, Artificial sequence
  SiRNA target sequence
aggtcggccacaaacataaaccaaa

SEQ ID NO: 91576 - DNA, 25 bp, Artificial sequence
  SiRNA target sequence
ggtcggccacaaacataaaccaaac

SEQ ID NO: 91577 - DNA, 25 bp, Artificial sequence
  SiRNA target sequence
gtcggccacaaacataaaccaaaca

SEQ ID NO: 91578 - DNA, 25 bp, Artificial sequence
  SiRNA target sequence
tcggccacaaacataaaccaaacat

SEQ ID NO: 91579 - DNA, 25 bp, Artificial sequence
  SiRNA target sequence
cggccacaaacataaaccaaacatc

SEQ ID NO: 91580 - DNA, 25 bp, Artificial sequence
  SiRNA target sequence
ggccacaaacataaaccaaacatcc

SEQ ID NO: 91581 - DNA, 25 bp, Artificial sequence
  SiRNA target sequence
gccacaaacataaaccaaacatccg

SEQ ID NO: 91582 - DNA, 25 bp, Artificial sequence
  SiRNA target sequence
ccacaaacataaaccaaacatccgt

SEQ ID NO: 91583 - DNA, 25 bp, Artificial sequence
  SiRNA target sequence
cacaaacataaaccaaacatccgtc

SEQ ID NO: 91584 - DNA, 25 bp, Artificial sequence
  SiRNA target sequence
acaaacataaaccaaacatccgtct

SEQ ID NO: 91585 - DNA, 25 bp, Artificial sequence
  SiRNA target sequence
caaacataaaccaaacatccgtctt

SEQ ID NO: 91586 - DNA, 25 bp, Artificial sequence
  SiRNA target sequence
aaacataaaccaaacatccgtcttt

SEQ ID NO: 91587 - DNA, 25 bp, Artificial sequence
  SiRNA target sequence
aacataaaccaaacatccgtcttta

SEQ ID NO: 91588 - DNA, 25 bp, Artificial sequence
  SiRNA target sequence
acataaaccaaacatccgtctttaa

SEQ ID NO: 91589 - DNA, 25 bp, Artificial sequence
  SiRNA target sequence
cataaaccaaacatccgtctttaat

SEQ ID NO: 91590 - DNA, 25 bp, Artificial sequence
  SiRNA target sequence
ataaaccaaacatccgtctttaatg

SEQ ID NO: 91591 - DNA, 25 bp, Artificial sequence
  SiRNA target sequence
taaaccaaacatccgtctttaatgt

SEQ ID NO: 91592 - DNA, 25 bp, Artificial sequence
  SiRNA target sequence
aaaccaaacatccgtctttaatgta

SEQ ID NO: 91593 - DNA, 25 bp, Artificial sequence
  SiRNA target sequence
aaccaaacatccgtctttaatgtat

SEQ ID NO: 91594 - DNA, 25 bp, Artificial sequence
  SiRNA target sequence
accaaacatccgtctttaatgtatg

SEQ ID NO: 91595 - DNA, 25 bp, Artificial sequence
  SiRNA target sequence
ccaaacatccgtctttaatgtatgt

SEQ ID NO: 91596 - DNA, 25 bp, Artificial sequence
  SiRNA target sequence
caaacatccgtctttaatgtatgtt

SEQ ID NO: 91597 - DNA, 25 bp, Artificial sequence
  SiRNA target sequence
aaacatccgtctttaatgtatgttt

SEQ ID NO: 91598 - DNA, 25 bp, Artificial sequence
  SiRNA target sequence
aacatccgtctttaatgtatgtttt

SEQ ID NO: 91599 - DNA, 25 bp, Artificial sequence
  SiRNA target sequence
acatccgtctttaatgtatgttttt

SEQ ID NO: 91600 - DNA, 25 bp, Artificial sequence
  SiRNA target sequence
catccgtctttaatgtatgttttta

SEQ ID NO: 91601 - DNA, 25 bp, Artificial sequence
  SiRNA target sequence
atccgtctttaatgtatgtttttat

SEQ ID NO: 91602 - DNA, 25 bp, Artificial sequence
  SiRNA target sequence
tccgtctttaatgtatgtttttatc

SEQ ID NO: 91603 - DNA, 25 bp, Artificial sequence
  SiRNA target sequence
ccgtctttaatgtatgtttttatct

SEQ ID NO: 91604 - DNA, 25 bp, Artificial sequence
  SiRNA target sequence
cgtctttaatgtatgtttttatctc

SEQ ID NO: 91605 - DNA, 25 bp, Artificial sequence
  SiRNA target sequence
gtctttaatgtatgtttttatctca

SEQ ID NO: 91606 - DNA, 25 bp, Artificial sequence
  SiRNA target sequence
tctttaatgtatgtttttatctcat

SEQ ID NO: 91607 - DNA, 25 bp, Artificial sequence
  SiRNA target sequence
ctttaatgtatgtttttatctcatt

SEQ ID NO: 91608 - DNA, 25 bp, Artificial sequence
  SiRNA target sequence
tttaatgtatgtttttatctcattt

SEQ ID NO: 91609 - DNA, 25 bp, Artificial sequence
  SiRNA target sequence
ttaatgtatgtttttatctcattta

SEQ ID NO: 91610 - DNA, 25 bp, Artificial sequence
  SiRNA target sequence
taatgtatgtttttatctcatttaa

SEQ ID NO: 91611 - DNA, 25 bp, Artificial sequence
  SiRNA target sequence
aatgtatgtttttatctcatttaaa

SEQ ID NO: 91612 - DNA, 25 bp, Artificial sequence
  SiRNA target sequence
atgtatgtttttatctcatttaaat

SEQ ID NO: 91613 - DNA, 25 bp, Artificial sequence
  SiRNA target sequence
tgtatgtttttatctcatttaaatt

SEQ ID NO: 91614 - DNA, 25 bp, Artificial sequence
  SiRNA target sequence
gtatgtttttatctcatttaaattt

SEQ ID NO: 91615 - DNA, 25 bp, Artificial sequence
  SiRNA target sequence
tatgtttttatctcatttaaatttt

SEQ ID NO: 91616 - DNA, 25 bp, Artificial sequence
  SiRNA target sequence
atgtttttatctcatttaaattttg

SEQ ID NO: 91617 - DNA, 25 bp, Artificial sequence
  SiRNA target sequence
tgtttttatctcatttaaattttgt

SEQ ID NO: 91618 - DNA, 25 bp, Artificial sequence
  SiRNA target sequence
gtttttatctcatttaaattttgta

SEQ ID NO: 91619 - DNA, 25 bp, Artificial sequence
  SiRNA target sequence
tttttatctcatttaaattttgtaa

SEQ ID NO: 91620 - DNA, 25 bp, Artificial sequence
  SiRNA target sequence
ttttatctcatttaaattttgtaat

SEQ ID NO: 91621 - DNA, 25 bp, Artificial sequence
  SiRNA target sequence
tttatctcatttaaattttgtaata

SEQ ID NO: 91622 - DNA, 25 bp, Artificial sequence
  SiRNA target sequence
ttatctcatttaaattttgtaataa

SEQ ID NO: 91623 - DNA, 25 bp, Artificial sequence
  SiRNA target sequence
tatctcatttaaattttgtaataaa

SEQ ID NO: 91624 - DNA, 25 bp, Artificial sequence
  SiRNA target sequence
atctcatttaaattttgtaataaat

SEQ ID NO: 91625 - DNA, 25 bp, Artificial sequence
  SiRNA target sequence
tctcatttaaattttgtaataaata

SEQ ID NO: 91626 - DNA, 25 bp, Artificial sequence
  SiRNA target sequence
ctcatttaaattttgtaataaataa

SEQ ID NO: 91627 - DNA, 25 bp, Artificial sequence
  SiRNA target sequence
tcatttaaattttgtaataaataat

SEQ ID NO: 91628 - DNA, 25 bp, Artificial sequence
  SiRNA target sequence
catttaaattttgtaataaataatc

SEQ ID NO: 91629 - DNA, 25 bp, Artificial sequence
  SiRNA target sequence
atttaaattttgtaataaataatca

SEQ ID NO: 91630 - DNA, 25 bp, Artificial sequence
  SiRNA target sequence
tttaaattttgtaataaataatcag

SEQ ID NO: 91631 - DNA, 25 bp, Artificial sequence
  SiRNA target sequence
ttaaattttgtaataaataatcagt

SEQ ID NO: 91632 - DNA, 25 bp, Artificial sequence
  SiRNA target sequence
taaattttgtaataaataatcagta

SEQ ID NO: 91633 - DNA, 25 bp, Artificial sequence
  SiRNA target sequence
aaattttgtaataaataatcagtaa

SEQ ID NO: 91634 - DNA, 25 bp, Artificial sequence
  SiRNA target sequence
aattttgtaataaataatcagtaac

SEQ ID NO: 91635 - DNA, 25 bp, Artificial sequence
  SiRNA target sequence
attttgtaataaataatcagtaaca

SEQ ID NO: 91636 - DNA, 25 bp, Artificial sequence
  SiRNA target sequence
ttttgtaataaataatcagtaacat

SEQ ID NO: 91637 - DNA, 25 bp, Artificial sequence
  SiRNA target sequence
tttgtaataaataatcagtaacata

SEQ ID NO: 91638 - DNA, 25 bp, Artificial sequence
  SiRNA target sequence
ttgtaataaataatcagtaacataa

SEQ ID NO: 91639 - DNA, 25 bp, Artificial sequence
  SiRNA target sequence
tgtaataaataatcagtaacataaa

SEQ ID NO: 91640 - DNA, 25 bp, Artificial sequence
  SiRNA target sequence
gtaataaataatcagtaacataaat

SEQ ID NO: 91641 - DNA, 25 bp, Artificial sequence
  SiRNA target sequence
taataaataatcagtaacataaatt

SEQ ID NO: 91642 - DNA, 25 bp, Artificial sequence
  SiRNA target sequence
aataaataatcagtaacataaattt

SEQ ID NO: 91643 - DNA, 25 bp, Artificial sequence
  SiRNA target sequence
ataaataatcagtaacataaatttt

SEQ ID NO: 91644 - DNA, 25 bp, Artificial sequence
  SiRNA target sequence
taaataatcagtaacataaatttta

SEQ ID NO: 91645 - DNA, 25 bp, Artificial sequence
  SiRNA target sequence
aaataatcagtaacataaattttat

SEQ ID NO: 91646 - DNA, 25 bp, Artificial sequence
  SiRNA target sequence
aataatcagtaacataaattttatt

SEQ ID NO: 91647 - DNA, 25 bp, Artificial sequence
  SiRNA target sequence
ataatcagtaacataaattttatta

SEQ ID NO: 91648 - DNA, 25 bp, Artificial sequence
  SiRNA target sequence
taatcagtaacataaattttattac

SEQ ID NO: 91649 - DNA, 25 bp, Artificial sequence
  SiRNA target sequence
aatcagtaacataaattttattaca

SEQ ID NO: 91650 - DNA, 25 bp, Artificial sequence
  SiRNA target sequence
atcagtaacataaattttattacaa

SEQ ID NO: 91651 - DNA, 25 bp, Artificial sequence
  SiRNA target sequence
tcagtaacataaattttattacaag

SEQ ID NO: 91652 - DNA, 25 bp, Artificial sequence
  SiRNA target sequence
cagtaacataaattttattacaaga

SEQ ID NO: 91653 - DNA, 25 bp, Artificial sequence
  SiRNA target sequence
agtaacataaattttattacaagat

SEQ ID NO: 91654 - DNA, 25 bp, Artificial sequence
  SiRNA target sequence
gtaacataaattttattacaagata

SEQ ID NO: 91655 - DNA, 25 bp, Artificial sequence
  SiRNA target sequence
taacataaattttattacaagataa

SEQ ID NO: 91656 - DNA, 25 bp, Artificial sequence
  SiRNA target sequence
aacataaattttattacaagataaa

SEQ ID NO: 91657 - DNA, 25 bp, Artificial sequence
  SiRNA target sequence
acataaattttattacaagataaaa

SEQ ID NO: 91658 - DNA, 25 bp, Artificial sequence
  SiRNA target sequence
cataaattttattacaagataaaat

SEQ ID NO: 91659 - DNA, 25 bp, Artificial sequence
  SiRNA target sequence
ataaattttattacaagataaaatt

SEQ ID NO: 91660 - DNA, 25 bp, Artificial sequence
  SiRNA target sequence
taaattttattacaagataaaattt

SEQ ID NO: 91661 - DNA, 25 bp, Artificial sequence
  SiRNA target sequence
aaattttattacaagataaaatttt

SEQ ID NO: 91662 - DNA, 25 bp, Artificial sequence
  SiRNA target sequence
aattttattacaagataaaatttta

SEQ ID NO: 91663 - DNA, 25 bp, Artificial sequence
  SiRNA target sequence
attttattacaagataaaattttaa

SEQ ID NO: 91664 - DNA, 25 bp, Artificial sequence
  SiRNA target sequence
ttttattacaagataaaattttaat

SEQ ID NO: 91665 - DNA, 25 bp, Artificial sequence
  SiRNA target sequence
tttattacaagataaaattttaata

SEQ ID NO: 91666 - DNA, 25 bp, Artificial sequence
  SiRNA target sequence
ttattacaagataaaattttaataa

SEQ ID NO: 91667 - DNA, 25 bp, Artificial sequence
  SiRNA target sequence
tattacaagataaaattttaataat

SEQ ID NO: 91668 - DNA, 25 bp, Artificial sequence
  SiRNA target sequence
attacaagataaaattttaataatt

SEQ ID NO: 91669 - DNA, 25 bp, Artificial sequence
  SiRNA target sequence
ttacaagataaaattttaataattt

SEQ ID NO: 91670 - DNA, 25 bp, Artificial sequence
  SiRNA target sequence
tacaagataaaattttaataatttc

SEQ ID NO: 91671 - DNA, 25 bp, Artificial sequence
  SiRNA target sequence
acaagataaaattttaataatttct

SEQ ID NO: 91672 - DNA, 25 bp, Artificial sequence
  SiRNA target sequence
caagataaaattttaataatttctg

SEQ ID NO: 91673 - DNA, 25 bp, Artificial sequence
  SiRNA target sequence
aagataaaattttaataatttctgt

SEQ ID NO: 91674 - DNA, 25 bp, Artificial sequence
  SiRNA target sequence
agataaaattttaataatttctgtg

SEQ ID NO: 91675 - DNA, 25 bp, Artificial sequence
  SiRNA target sequence
gataaaattttaataatttctgtgt

SEQ ID NO: 91676 - DNA, 25 bp, Artificial sequence
  SiRNA target sequence
ataaaattttaataatttctgtgtt

SEQ ID NO: 91677 - DNA, 25 bp, Artificial sequence
  SiRNA target sequence
taaaattttaataatttctgtgttt

SEQ ID NO: 91678 - DNA, 25 bp, Artificial sequence
  SiRNA target sequence
aaaattttaataatttctgtgtttt

SEQ ID NO: 91679 - DNA, 25 bp, Artificial sequence
  SiRNA target sequence
aaattttaataatttctgtgttttt

SEQ ID NO: 91680 - DNA, 25 bp, Artificial sequence
  SiRNA target sequence
aattttaataatttctgtgttttta

SEQ ID NO: 91681 - DNA, 25 bp, Artificial sequence
  SiRNA target sequence
attttaataatttctgtgtttttat

SEQ ID NO: 91682 - DNA, 25 bp, Artificial sequence
  SiRNA target sequence
ttttaataatttctgtgtttttata

SEQ ID NO: 91683 - DNA, 25 bp, Artificial sequence
  SiRNA target sequence
tttaataatttctgtgtttttatat

SEQ ID NO: 91684 - DNA, 25 bp, Artificial sequence
  SiRNA target sequence
ttaataatttctgtgtttttatatt

SEQ ID NO: 91685 - DNA, 25 bp, Artificial sequence
  SiRNA target sequence
taataatttctgtgtttttatattt

SEQ ID NO: 91686 - DNA, 25 bp, Artificial sequence
  SiRNA target sequence
aataatttctgtgtttttatatttt

SEQ ID NO: 91687 - DNA, 25 bp, Artificial sequence
  SiRNA target sequence
ataatttctgtgtttttatattttg

SEQ ID NO: 91688 - DNA, 25 bp, Artificial sequence
  SiRNA target sequence
taatttctgtgtttttatattttgc

SEQ ID NO: 91689 - DNA, 25 bp, Artificial sequence
  SiRNA target sequence
aatttctgtgtttttatattttgca

SEQ ID NO: 91690 - DNA, 25 bp, Artificial sequence
  SiRNA target sequence
atttctgtgtttttatattttgcat

SEQ ID NO: 91691 - DNA, 25 bp, Artificial sequence
  SiRNA target sequence
tttctgtgtttttatattttgcatc

SEQ ID NO: 91692 - DNA, 25 bp, Artificial sequence
  SiRNA target sequence
ttctgtgtttttatattttgcatct

SEQ ID NO: 91693 - DNA, 25 bp, Artificial sequence
  SiRNA target sequence
tctgtgtttttatattttgcatctt

SEQ ID NO: 91694 - DNA, 25 bp, Artificial sequence
  SiRNA target sequence
ctgtgtttttatattttgcatcttt

SEQ ID NO: 91695 - DNA, 25 bp, Artificial sequence
  SiRNA target sequence
tgtgtttttatattttgcatcttta

SEQ ID NO: 91696 - DNA, 25 bp, Artificial sequence
  SiRNA target sequence
gtgtttttatattttgcatctttaa

SEQ ID NO: 91697 - DNA, 25 bp, Artificial sequence
  SiRNA target sequence
tgtttttatattttgcatctttaat

SEQ ID NO: 91698 - DNA, 25 bp, Artificial sequence
  SiRNA target sequence
gtttttatattttgcatctttaata

SEQ ID NO: 91699 - DNA, 25 bp, Artificial sequence
  SiRNA target sequence
tttttatattttgcatctttaataa

SEQ ID NO: 91700 - DNA, 25 bp, Artificial sequence
  SiRNA target sequence
ttttatattttgcatctttaataag

SEQ ID NO: 91701 - DNA, 25 bp, Artificial sequence
  SiRNA target sequence
tttatattttgcatctttaataaga

SEQ ID NO: 91702 - DNA, 25 bp, Artificial sequence
  SiRNA target sequence
ttatattttgcatctttaataagat

SEQ ID NO: 91703 - DNA, 25 bp, Artificial sequence
  SiRNA target sequence
tatattttgcatctttaataagatc

SEQ ID NO: 91704 - DNA, 25 bp, Artificial sequence
  SiRNA target sequence
atattttgcatctttaataagatca

SEQ ID NO: 91705 - DNA, 25 bp, Artificial sequence
  SiRNA target sequence
tattttgcatctttaataagatcat

SEQ ID NO: 91706 - DNA, 25 bp, Artificial sequence
  SiRNA target sequence
attttgcatctttaataagatcatc

SEQ ID NO: 91707 - DNA, 25 bp, Artificial sequence
  SiRNA target sequence
ttttgcatctttaataagatcatct

SEQ ID NO: 91708 - DNA, 25 bp, Artificial sequence
  SiRNA target sequence
tttgcatctttaataagatcatctt

SEQ ID NO: 91709 - DNA, 25 bp, Artificial sequence
  SiRNA target sequence
ttgcatctttaataagatcatcttc

SEQ ID NO: 91710 - DNA, 25 bp, Artificial sequence
  SiRNA target sequence
tgcatctttaataagatcatcttct

SEQ ID NO: 91711 - DNA, 25 bp, Artificial sequence
  SiRNA target sequence
gcatctttaataagatcatcttctt

SEQ ID NO: 91712 - DNA, 25 bp, Artificial sequence
  SiRNA target sequence
catctttaataagatcatcttcttg

SEQ ID NO: 91713 - DNA, 25 bp, Artificial sequence
  SiRNA target sequence
atctttaataagatcatcttcttga

SEQ ID NO: 91714 - DNA, 25 bp, Artificial sequence
  SiRNA target sequence
tctttaataagatcatcttcttgat

SEQ ID NO: 91715 - DNA, 25 bp, Artificial sequence
  SiRNA target sequence
ctttaataagatcatcttcttgatt

SEQ ID NO: 91716 - DNA, 25 bp, Artificial sequence
  SiRNA target sequence
tttaataagatcatcttcttgattt

SEQ ID NO: 91717 - DNA, 25 bp, Artificial sequence
  SiRNA target sequence
ttaataagatcatcttcttgatttc

SEQ ID NO: 91718 - DNA, 25 bp, Artificial sequence
  SiRNA target sequence
taataagatcatcttcttgatttct

SEQ ID NO: 91719 - DNA, 25 bp, Artificial sequence
  SiRNA target sequence
aataagatcatcttcttgatttcta

SEQ ID NO: 91720 - DNA, 25 bp, Artificial sequence
  SiRNA target sequence
ataagatcatcttcttgatttctaa

SEQ ID NO: 91721 - DNA, 25 bp, Artificial sequence
  SiRNA target sequence
taagatcatcttcttgatttctaaa

SEQ ID NO: 91722 - DNA, 25 bp, Artificial sequence
  SiRNA target sequence
aagatcatcttcttgatttctaaat

SEQ ID NO: 91723 - DNA, 25 bp, Artificial sequence
  SiRNA target sequence
agatcatcttcttgatttctaaatc

SEQ ID NO: 91724 - DNA, 25 bp, Artificial sequence
  SiRNA target sequence
gatcatcttcttgatttctaaatcc

SEQ ID NO: 91725 - DNA, 25 bp, Artificial sequence
  SiRNA target sequence
atcatcttcttgatttctaaatcca

SEQ ID NO: 91726 - DNA, 25 bp, Artificial sequence
  SiRNA target sequence
tcatcttcttgatttctaaatccat

SEQ ID NO: 91727 - DNA, 25 bp, Artificial sequence
  SiRNA target sequence
catcttcttgatttctaaatccata

SEQ ID NO: 91728 - DNA, 25 bp, Artificial sequence
  SiRNA target sequence
atcttcttgatttctaaatccatat

SEQ ID NO: 91729 - DNA, 25 bp, Artificial sequence
  SiRNA target sequence
tcttcttgatttctaaatccatata

SEQ ID NO: 91730 - DNA, 25 bp, Artificial sequence
  SiRNA target sequence
cttcttgatttctaaatccatatat

SEQ ID NO: 91731 - DNA, 25 bp, Artificial sequence
  SiRNA target sequence
ttcttgatttctaaatccatatatt

SEQ ID NO: 91732 - DNA, 25 bp, Artificial sequence
  SiRNA target sequence
tcttgatttctaaatccatatatta

SEQ ID NO: 91733 - DNA, 25 bp, Artificial sequence
  SiRNA target sequence
cttgatttctaaatccatatattag

SEQ ID NO: 91734 - DNA, 25 bp, Artificial sequence
  SiRNA target sequence
ttgatttctaaatccatatattagt

SEQ ID NO: 91735 - DNA, 25 bp, Artificial sequence
  SiRNA target sequence
tgatttctaaatccatatattagtt

SEQ ID NO: 91736 - DNA, 25 bp, Artificial sequence
  SiRNA target sequence
gatttctaaatccatatattagttt

SEQ ID NO: 91737 - DNA, 25 bp, Artificial sequence
  SiRNA target sequence
atttctaaatccatatattagtttg

SEQ ID NO: 91738 - DNA, 25 bp, Artificial sequence
  SiRNA target sequence
tttctaaatccatatattagtttga

SEQ ID NO: 91739 - DNA, 25 bp, Artificial sequence
  SiRNA target sequence
ttctaaatccatatattagtttgat

SEQ ID NO: 91740 - DNA, 25 bp, Artificial sequence
  SiRNA target sequence
tctaaatccatatattagtttgata

SEQ ID NO: 91741 - DNA, 25 bp, Artificial sequence
  SiRNA target sequence
ctaaatccatatattagtttgatat

SEQ ID NO: 91742 - DNA, 25 bp, Artificial sequence
  SiRNA target sequence
taaatccatatattagtttgatata

SEQ ID NO: 91743 - DNA, 25 bp, Artificial sequence
  SiRNA target sequence
aaatccatatattagtttgatatat

SEQ ID NO: 91744 - DNA, 25 bp, Artificial sequence
  SiRNA target sequence
aatccatatattagtttgatatatt

SEQ ID NO: 91745 - DNA, 25 bp, Artificial sequence
  SiRNA target sequence
atccatatattagtttgatatattg

SEQ ID NO: 91746 - DNA, 25 bp, Artificial sequence
  SiRNA target sequence
tccatatattagtttgatatattga

SEQ ID NO: 91747 - DNA, 25 bp, Artificial sequence
  SiRNA target sequence
ccatatattagtttgatatattgat

SEQ ID NO: 91748 - DNA, 25 bp, Artificial sequence
  SiRNA target sequence
catatattagtttgatatattgatc

SEQ ID NO: 91749 - DNA, 25 bp, Artificial sequence
  SiRNA target sequence
atatattagtttgatatattgatcg

SEQ ID NO: 91750 - DNA, 25 bp, Artificial sequence
  SiRNA target sequence
tatattagtttgatatattgatcgt

SEQ ID NO: 91751 - DNA, 25 bp, Artificial sequence
  SiRNA target sequence
atattagtttgatatattgatcgtc

SEQ ID NO: 91752 - DNA, 25 bp, Artificial sequence
  SiRNA target sequence
tattagtttgatatattgatcgtct

SEQ ID NO: 91753 - DNA, 25 bp, Artificial sequence
  SiRNA target sequence
attagtttgatatattgatcgtctt

SEQ ID NO: 91754 - DNA, 25 bp, Artificial sequence
  SiRNA target sequence
ttagtttgatatattgatcgtcttc

SEQ ID NO: 91755 - DNA, 25 bp, Artificial sequence
  SiRNA target sequence
tagtttgatatattgatcgtcttct

SEQ ID NO: 91756 - DNA, 25 bp, Artificial sequence
  SiRNA target sequence
agtttgatatattgatcgtcttctt

SEQ ID NO: 91757 - DNA, 25 bp, Artificial sequence
  SiRNA target sequence
gtttgatatattgatcgtcttcttt

SEQ ID NO: 91758 - DNA, 25 bp, Artificial sequence
  SiRNA target sequence
tttgatatattgatcgtcttcttta

SEQ ID NO: 91759 - DNA, 25 bp, Artificial sequence
  SiRNA target sequence
ttgatatattgatcgtcttctttat

SEQ ID NO: 91760 - DNA, 25 bp, Artificial sequence
  SiRNA target sequence
tgatatattgatcgtcttctttatt

SEQ ID NO: 91761 - DNA, 25 bp, Artificial sequence
  SiRNA target sequence
gatatattgatcgtcttctttattt

SEQ ID NO: 91762 - DNA, 25 bp, Artificial sequence
  SiRNA target sequence
atatattgatcgtcttctttatttt

SEQ ID NO: 91763 - DNA, 25 bp, Artificial sequence
  SiRNA target sequence
tatattgatcgtcttctttattttt

SEQ ID NO: 91764 - DNA, 25 bp, Artificial sequence
  SiRNA target sequence
atattgatcgtcttctttatttttc

SEQ ID NO: 91765 - DNA, 25 bp, Artificial sequence
  SiRNA target sequence
tattgatcgtcttctttatttttca

SEQ ID NO: 91766 - DNA, 25 bp, Artificial sequence
  SiRNA target sequence
attgatcgtcttctttatttttcaa

SEQ ID NO: 91767 - DNA, 25 bp, Artificial sequence
  SiRNA target sequence
ttgatcgtcttctttatttttcaaa

SEQ ID NO: 91768 - DNA, 25 bp, Artificial sequence
  SiRNA target sequence
tgatcgtcttctttatttttcaaaa

SEQ ID NO: 91769 - DNA, 25 bp, Artificial sequence
  SiRNA target sequence
gatcgtcttctttatttttcaaaaa

SEQ ID NO: 91770 - DNA, 25 bp, Artificial sequence
  SiRNA target sequence
atcgtcttctttatttttcaaaaac

SEQ ID NO: 91771 - DNA, 25 bp, Artificial sequence
  SiRNA target sequence
tcgtcttctttatttttcaaaaacg

SEQ ID NO: 91772 - DNA, 25 bp, Artificial sequence
  SiRNA target sequence
cgtcttctttatttttcaaaaacga

SEQ ID NO: 91773 - DNA, 25 bp, Artificial sequence
  SiRNA target sequence
gtcttctttatttttcaaaaacgaa

SEQ ID NO: 91774 - DNA, 25 bp, Artificial sequence
  SiRNA target sequence
tcttctttatttttcaaaaacgaaa

SEQ ID NO: 91775 - DNA, 25 bp, Artificial sequence
  SiRNA target sequence
cttctttatttttcaaaaacgaaaa

SEQ ID NO: 91776 - DNA, 25 bp, Artificial sequence
  SiRNA target sequence
ttctttatttttcaaaaacgaaaaa

SEQ ID NO: 91777 - DNA, 25 bp, Artificial sequence
  SiRNA target sequence
tctttatttttcaaaaacgaaaaaa

SEQ ID NO: 91778 - DNA, 25 bp, Artificial sequence
  SiRNA target sequence
ctttatttttcaaaaacgaaaaaaa

SEQ ID NO: 91779 - DNA, 25 bp, Artificial sequence
  SiRNA target sequence
tttatttttcaaaaacgaaaaaaat

SEQ ID NO: 91780 - DNA, 25 bp, Artificial sequence
  SiRNA target sequence
ttatttttcaaaaacgaaaaaaatg

SEQ ID NO: 91781 - DNA, 25 bp, Artificial sequence
  SiRNA target sequence
tatttttcaaaaacgaaaaaaatgg

SEQ ID NO: 91782 - DNA, 25 bp, Artificial sequence
  SiRNA target sequence
atttttcaaaaacgaaaaaaatgga

SEQ ID NO: 91783 - DNA, 25 bp, Artificial sequence
  SiRNA target sequence
tttttcaaaaacgaaaaaaatggag

SEQ ID NO: 91784 - DNA, 25 bp, Artificial sequence
  SiRNA target sequence
ttttcaaaaacgaaaaaaatggagc

SEQ ID NO: 91785 - DNA, 25 bp, Artificial sequence
  SiRNA target sequence
tttcaaaaacgaaaaaaatggagca

SEQ ID NO: 91786 - DNA, 25 bp, Artificial sequence
  SiRNA target sequence
ttcaaaaacgaaaaaaatggagcaa

SEQ ID NO: 91787 - DNA, 25 bp, Artificial sequence
  SiRNA target sequence
tcaaaaacgaaaaaaatggagcaat

SEQ ID NO: 91788 - DNA, 25 bp, Artificial sequence
  SiRNA target sequence
caaaaacgaaaaaaatggagcaatg

SEQ ID NO: 91789 - DNA, 25 bp, Artificial sequence
  SiRNA target sequence
aaaaacgaaaaaaatggagcaatgc

SEQ ID NO: 91790 - DNA, 25 bp, Artificial sequence
  SiRNA target sequence
aaaacgaaaaaaatggagcaatgcc

SEQ ID NO: 91791 - DNA, 25 bp, Artificial sequence
  SiRNA target sequence
aaacgaaaaaaatggagcaatgcca

SEQ ID NO: 91792 - DNA, 25 bp, Artificial sequence
  SiRNA target sequence
aacgaaaaaaatggagcaatgccag

SEQ ID NO: 91793 - DNA, 25 bp, Artificial sequence
  SiRNA target sequence
acgaaaaaaatggagcaatgccagt

SEQ ID NO: 91794 - DNA, 25 bp, Artificial sequence
  SiRNA target sequence
cgaaaaaaatggagcaatgccagtt

SEQ ID NO: 91795 - DNA, 25 bp, Artificial sequence
  SiRNA target sequence
gaaaaaaatggagcaatgccagttc

SEQ ID NO: 91796 - DNA, 25 bp, Artificial sequence
  SiRNA target sequence
aaaaaaatggagcaatgccagttcc

SEQ ID NO: 91797 - DNA, 25 bp, Artificial sequence
  SiRNA target sequence
aaaaaatggagcaatgccagttcca

SEQ ID NO: 91798 - DNA, 25 bp, Artificial sequence
  SiRNA target sequence
aaaaatggagcaatgccagttccag

SEQ ID NO: 91799 - DNA, 25 bp, Artificial sequence
  SiRNA target sequence
aaaatggagcaatgccagttccagt

SEQ ID NO: 91800 - DNA, 25 bp, Artificial sequence
  SiRNA target sequence
aaatggagcaatgccagttccagta

SEQ ID NO: 91801 - DNA, 25 bp, Artificial sequence
  SiRNA target sequence
aatggagcaatgccagttccagtac

SEQ ID NO: 91802 - DNA, 25 bp, Artificial sequence
  SiRNA target sequence
atggagcaatgccagttccagtaca

SEQ ID NO: 91803 - DNA, 25 bp, Artificial sequence
  SiRNA target sequence
tggagcaatgccagttccagtacaa

SEQ ID NO: 91804 - DNA, 25 bp, Artificial sequence
  SiRNA target sequence
ggagcaatgccagttccagtacaaa

SEQ ID NO: 91805 - DNA, 25 bp, Artificial sequence
  SiRNA target sequence
gagcaatgccagttccagtacaaat

SEQ ID NO: 91806 - DNA, 25 bp, Artificial sequence
  SiRNA target sequence
agcaatgccagttccagtacaaata

SEQ ID NO: 91807 - DNA, 25 bp, Artificial sequence
  SiRNA target sequence
gcaatgccagttccagtacaaatac

SEQ ID NO: 91808 - DNA, 25 bp, Artificial sequence
  SiRNA target sequence
caatgccagttccagtacaaatacc

SEQ ID NO: 91809 - DNA, 25 bp, Artificial sequence
  SiRNA target sequence
aatgccagttccagtacaaataccc

SEQ ID NO: 91810 - DNA, 25 bp, Artificial sequence
  SiRNA target sequence
atgccagttccagtacaaataccca

SEQ ID NO: 91811 - DNA, 25 bp, Artificial sequence
  SiRNA target sequence
tgccagttccagtacaaatacccaa

SEQ ID NO: 91812 - DNA, 25 bp, Artificial sequence
  SiRNA target sequence
gccagttccagtacaaatacccaac

SEQ ID NO: 91813 - DNA, 25 bp, Artificial sequence
  SiRNA target sequence
ccagttccagtacaaatacccaaca

SEQ ID NO: 91814 - DNA, 25 bp, Artificial sequence
  SiRNA target sequence
cagttccagtacaaatacccaacac

SEQ ID NO: 91815 - DNA, 25 bp, Artificial sequence
  SiRNA target sequence
agttccagtacaaatacccaacact

SEQ ID NO: 91816 - DNA, 25 bp, Artificial sequence
  SiRNA target sequence
gttccagtacaaatacccaacactt

SEQ ID NO: 91817 - DNA, 25 bp, Artificial sequence
  SiRNA target sequence
ttccagtacaaatacccaacacttt

SEQ ID NO: 91818 - DNA, 25 bp, Artificial sequence
  SiRNA target sequence
tccagtacaaatacccaacactttt

SEQ ID NO: 91819 - DNA, 25 bp, Artificial sequence
  SiRNA target sequence
ccagtacaaatacccaacacttttt

SEQ ID NO: 91820 - DNA, 25 bp, Artificial sequence
  SiRNA target sequence
cagtacaaatacccaacactttttt

SEQ ID NO: 91821 - DNA, 25 bp, Artificial sequence
  SiRNA target sequence
agtacaaatacccaacactttttta

SEQ ID NO: 91822 - DNA, 25 bp, Artificial sequence
  SiRNA target sequence
gtacaaatacccaacacttttttac

SEQ ID NO: 91823 - DNA, 25 bp, Artificial sequence
  SiRNA target sequence
tacaaatacccaacacttttttaca

SEQ ID NO: 91824 - DNA, 25 bp, Artificial sequence
  SiRNA target sequence
acaaatacccaacacttttttacaa

SEQ ID NO: 91825 - DNA, 25 bp, Artificial sequence
  SiRNA target sequence
caaatacccaacacttttttacaaa

SEQ ID NO: 91826 - DNA, 25 bp, Artificial sequence
  SiRNA target sequence
aaatacccaacacttttttacaaaa

SEQ ID NO: 91827 - DNA, 25 bp, Artificial sequence
  SiRNA target sequence
aatacccaacacttttttacaaaaa

SEQ ID NO: 91828 - DNA, 25 bp, Artificial sequence
  SiRNA target sequence
atacccaacacttttttacaaaaat

SEQ ID NO: 91829 - DNA, 25 bp, Artificial sequence
  SiRNA target sequence
tacccaacacttttttacaaaaatt

SEQ ID NO: 91830 - DNA, 25 bp, Artificial sequence
  SiRNA target sequence
acccaacacttttttacaaaaattt

SEQ ID NO: 91831 - DNA, 25 bp, Artificial sequence
  SiRNA target sequence
cccaacacttttttacaaaaattta

SEQ ID NO: 91832 - DNA, 25 bp, Artificial sequence
  SiRNA target sequence
ccaacacttttttacaaaaatttaa

SEQ ID NO: 91833 - DNA, 25 bp, Artificial sequence
  SiRNA target sequence
caacacttttttacaaaaatttaat

SEQ ID NO: 91834 - DNA, 25 bp, Artificial sequence
  SiRNA target sequence
aacacttttttacaaaaatttaatc

SEQ ID NO: 91835 - DNA, 25 bp, Artificial sequence
  SiRNA target sequence
acacttttttacaaaaatttaatct

SEQ ID NO: 91836 - DNA, 25 bp, Artificial sequence
  SiRNA target sequence
cacttttttacaaaaatttaatcta

SEQ ID NO: 91837 - DNA, 25 bp, Artificial sequence
  SiRNA target sequence
acttttttacaaaaatttaatctaa

SEQ ID NO: 91838 - DNA, 25 bp, Artificial sequence
  SiRNA target sequence
cttttttacaaaaatttaatctaaa

SEQ ID NO: 91839 - DNA, 25 bp, Artificial sequence
  SiRNA target sequence
ttttttacaaaaatttaatctaaat

SEQ ID NO: 91840 - DNA, 25 bp, Artificial sequence
  SiRNA target sequence
tttttacaaaaatttaatctaaata

SEQ ID NO: 91841 - DNA, 25 bp, Artificial sequence
  SiRNA target sequence
ttttacaaaaatttaatctaaataa

SEQ ID NO: 91842 - DNA, 25 bp, Artificial sequence
  SiRNA target sequence
tttacaaaaatttaatctaaataat

SEQ ID NO: 91843 - DNA, 25 bp, Artificial sequence
  SiRNA target sequence
ttacaaaaatttaatctaaataatt

SEQ ID NO: 91844 - DNA, 25 bp, Artificial sequence
  SiRNA target sequence
tacaaaaatttaatctaaataattt

SEQ ID NO: 91845 - DNA, 25 bp, Artificial sequence
  SiRNA target sequence
acaaaaatttaatctaaataattta

SEQ ID NO: 91846 - DNA, 25 bp, Artificial sequence
  SiRNA target sequence
caaaaatttaatctaaataatttac

SEQ ID NO: 91847 - DNA, 25 bp, Artificial sequence
  SiRNA target sequence
aaaaatttaatctaaataatttact

SEQ ID NO: 91848 - DNA, 25 bp, Artificial sequence
  SiRNA target sequence
aaaatttaatctaaataatttactc

SEQ ID NO: 91849 - DNA, 25 bp, Artificial sequence
  SiRNA target sequence
aaatttaatctaaataatttactcg

SEQ ID NO: 91850 - DNA, 25 bp, Artificial sequence
  SiRNA target sequence
aatttaatctaaataatttactcgg

SEQ ID NO: 91851 - DNA, 25 bp, Artificial sequence
  SiRNA target sequence
atttaatctaaataatttactcggt

SEQ ID NO: 91852 - DNA, 25 bp, Artificial sequence
  SiRNA target sequence
tttaatctaaataatttactcggtc

SEQ ID NO: 91853 - DNA, 25 bp, Artificial sequence
  SiRNA target sequence
ttaatctaaataatttactcggtct

SEQ ID NO: 91854 - DNA, 25 bp, Artificial sequence
  SiRNA target sequence
taatctaaataatttactcggtctg

SEQ ID NO: 91855 - DNA, 25 bp, Artificial sequence
  SiRNA target sequence
aatctaaataatttactcggtctgt

SEQ ID NO: 91856 - DNA, 25 bp, Artificial sequence
  SiRNA target sequence
atctaaataatttactcggtctgtg

SEQ ID NO: 91857 - DNA, 25 bp, Artificial sequence
  SiRNA target sequence
tctaaataatttactcggtctgtga

SEQ ID NO: 91858 - DNA, 25 bp, Artificial sequence
  SiRNA target sequence
ctaaataatttactcggtctgtgac

SEQ ID NO: 91859 - DNA, 25 bp, Artificial sequence
  SiRNA target sequence
taaataatttactcggtctgtgaca

SEQ ID NO: 91860 - DNA, 25 bp, Artificial sequence
  SiRNA target sequence
aaataatttactcggtctgtgacag

SEQ ID NO: 91861 - DNA, 25 bp, Artificial sequence
  SiRNA target sequence
aataatttactcggtctgtgacaga

SEQ ID NO: 91862 - DNA, 25 bp, Artificial sequence
  SiRNA target sequence
ataatttactcggtctgtgacagat

SEQ ID NO: 91863 - DNA, 25 bp, Artificial sequence
  SiRNA target sequence
taatttactcggtctgtgacagatc

SEQ ID NO: 91864 - DNA, 25 bp, Artificial sequence
  SiRNA target sequence
aatttactcggtctgtgacagatct

SEQ ID NO: 91865 - DNA, 25 bp, Artificial sequence
  SiRNA target sequence
atttactcggtctgtgacagatctt

SEQ ID NO: 91866 - DNA, 25 bp, Artificial sequence
  SiRNA target sequence
tttactcggtctgtgacagatcttt

SEQ ID NO: 91867 - DNA, 25 bp, Artificial sequence
  SiRNA target sequence
ttactcggtctgtgacagatcttta

SEQ ID NO: 91868 - DNA, 25 bp, Artificial sequence
  SiRNA target sequence
tactcggtctgtgacagatctttaa

SEQ ID NO: 91869 - DNA, 25 bp, Artificial sequence
  SiRNA target sequence
actcggtctgtgacagatctttaaa

SEQ ID NO: 91870 - DNA, 25 bp, Artificial sequence
  SiRNA target sequence
ctcggtctgtgacagatctttaaat

SEQ ID NO: 91871 - DNA, 25 bp, Artificial sequence
  SiRNA target sequence
tcggtctgtgacagatctttaaatt

SEQ ID NO: 91872 - DNA, 25 bp, Artificial sequence
  SiRNA target sequence
cggtctgtgacagatctttaaatta

SEQ ID NO: 91873 - DNA, 25 bp, Artificial sequence
  SiRNA target sequence
ggtctgtgacagatctttaaattat

SEQ ID NO: 91874 - DNA, 25 bp, Artificial sequence
  SiRNA target sequence
gtctgtgacagatctttaaattatt

SEQ ID NO: 91875 - DNA, 25 bp, Artificial sequence
  SiRNA target sequence
tctgtgacagatctttaaattatta

SEQ ID NO: 91876 - DNA, 25 bp, Artificial sequence
  SiRNA target sequence
ctgtgacagatctttaaattattat

SEQ ID NO: 91877 - DNA, 25 bp, Artificial sequence
  SiRNA target sequence
tgtgacagatctttaaattattata

SEQ ID NO: 91878 - DNA, 25 bp, Artificial sequence
  SiRNA target sequence
gtgacagatctttaaattattataa

SEQ ID NO: 91879 - DNA, 25 bp, Artificial sequence
  SiRNA target sequence
tgacagatctttaaattattataat

SEQ ID NO: 91880 - DNA, 25 bp, Artificial sequence
  SiRNA target sequence
gacagatctttaaattattataatt

SEQ ID NO: 91881 - DNA, 25 bp, Artificial sequence
  SiRNA target sequence
acagatctttaaattattataattt

SEQ ID NO: 91882 - DNA, 25 bp, Artificial sequence
  SiRNA target sequence
cagatctttaaattattataatttt

SEQ ID NO: 91883 - DNA, 25 bp, Artificial sequence
  SiRNA target sequence
agatctttaaattattataattttg

SEQ ID NO: 91884 - DNA, 25 bp, Artificial sequence
  SiRNA target sequence
gatctttaaattattataattttgc

SEQ ID NO: 91885 - DNA, 25 bp, Artificial sequence
  SiRNA target sequence
atctttaaattattataattttgca

SEQ ID NO: 91886 - DNA, 25 bp, Artificial sequence
  SiRNA target sequence
tctttaaattattataattttgcat

SEQ ID NO: 91887 - DNA, 25 bp, Artificial sequence
  SiRNA target sequence
ctttaaattattataattttgcata

SEQ ID NO: 91888 - DNA, 25 bp, Artificial sequence
  SiRNA target sequence
tttaaattattataattttgcatat

SEQ ID NO: 91889 - DNA, 25 bp, Artificial sequence
  SiRNA target sequence
ttaaattattataattttgcatatc

SEQ ID NO: 91890 - DNA, 25 bp, Artificial sequence
  SiRNA target sequence
taaattattataattttgcatatct

SEQ ID NO: 91891 - DNA, 25 bp, Artificial sequence
  SiRNA target sequence
aaattattataattttgcatatcta

SEQ ID NO: 91892 - DNA, 25 bp, Artificial sequence
  SiRNA target sequence
aattattataattttgcatatctat

SEQ ID NO: 91893 - DNA, 25 bp, Artificial sequence
  SiRNA target sequence
attattataattttgcatatctatg

SEQ ID NO: 91894 - DNA, 25 bp, Artificial sequence
  SiRNA target sequence
ttattataattttgcatatctatga

SEQ ID NO: 91895 - DNA, 25 bp, Artificial sequence
  SiRNA target sequence
tattataattttgcatatctatgaa

SEQ ID NO: 91896 - DNA, 25 bp, Artificial sequence
  SiRNA target sequence
attataattttgcatatctatgaaa

SEQ ID NO: 91897 - DNA, 25 bp, Artificial sequence
  SiRNA target sequence
ttataattttgcatatctatgaaat

SEQ ID NO: 91898 - DNA, 25 bp, Artificial sequence
  SiRNA target sequence
tataattttgcatatctatgaaatt

SEQ ID NO: 91899 - DNA, 25 bp, Artificial sequence
  SiRNA target sequence
ataattttgcatatctatgaaattg

SEQ ID NO: 91900 - DNA, 25 bp, Artificial sequence
  SiRNA target sequence
taattttgcatatctatgaaattgg

SEQ ID NO: 91901 - DNA, 25 bp, Artificial sequence
  SiRNA target sequence
aattttgcatatctatgaaattgga

SEQ ID NO: 91902 - DNA, 25 bp, Artificial sequence
  SiRNA target sequence
attttgcatatctatgaaattggaa

SEQ ID NO: 91903 - DNA, 25 bp, Artificial sequence
  SiRNA target sequence
ttttgcatatctatgaaattggaaa

SEQ ID NO: 91904 - DNA, 25 bp, Artificial sequence
  SiRNA target sequence
tttgcatatctatgaaattggaaac

SEQ ID NO: 91905 - DNA, 25 bp, Artificial sequence
  SiRNA target sequence
ttgcatatctatgaaattggaaaca

SEQ ID NO: 91906 - DNA, 25 bp, Artificial sequence
  SiRNA target sequence
tgcatatctatgaaattggaaacat

SEQ ID NO: 91907 - DNA, 25 bp, Artificial sequence
  SiRNA target sequence
gcatatctatgaaattggaaacatg

SEQ ID NO: 91908 - DNA, 25 bp, Artificial sequence
  SiRNA target sequence
catatctatgaaattggaaacatgt

SEQ ID NO: 91909 - DNA, 25 bp, Artificial sequence
  SiRNA target sequence
atatctatgaaattggaaacatgtc

SEQ ID NO: 91910 - DNA, 25 bp, Artificial sequence
  SiRNA target sequence
tatctatgaaattggaaacatgtcc

SEQ ID NO: 91911 - DNA, 25 bp, Artificial sequence
  SiRNA target sequence
atctatgaaattggaaacatgtcca

SEQ ID NO: 91912 - DNA, 25 bp, Artificial sequence
  SiRNA target sequence
tctatgaaattggaaacatgtccat

SEQ ID NO: 91913 - DNA, 25 bp, Artificial sequence
  SiRNA target sequence
ctatgaaattggaaacatgtccata

SEQ ID NO: 91914 - DNA, 25 bp, Artificial sequence
  SiRNA target sequence
tatgaaattggaaacatgtccatat

SEQ ID NO: 91915 - DNA, 25 bp, Artificial sequence
  SiRNA target sequence
atgaaattggaaacatgtccatatc

SEQ ID NO: 91916 - DNA, 25 bp, Artificial sequence
  SiRNA target sequence
tgaaattggaaacatgtccatatct

SEQ ID NO: 91917 - DNA, 25 bp, Artificial sequence
  SiRNA target sequence
gaaattggaaacatgtccatatcta

SEQ ID NO: 91918 - DNA, 25 bp, Artificial sequence
  SiRNA target sequence
aaattggaaacatgtccatatctat

SEQ ID NO: 91919 - DNA, 25 bp, Artificial sequence
  SiRNA target sequence
aattggaaacatgtccatatctatc

SEQ ID NO: 91920 - DNA, 25 bp, Artificial sequence
  SiRNA target sequence
attggaaacatgtccatatctatcg

SEQ ID NO: 91921 - DNA, 25 bp, Artificial sequence
  SiRNA target sequence
ttggaaacatgtccatatctatcgc

SEQ ID NO: 91922 - DNA, 25 bp, Artificial sequence
  SiRNA target sequence
tggaaacatgtccatatctatcgcc

SEQ ID NO: 91923 - DNA, 25 bp, Artificial sequence
  SiRNA target sequence
ggaaacatgtccatatctatcgcct

SEQ ID NO: 91924 - DNA, 25 bp, Artificial sequence
  SiRNA target sequence
gaaacatgtccatatctatcgcctt

SEQ ID NO: 91925 - DNA, 25 bp, Artificial sequence
  SiRNA target sequence
aaacatgtccatatctatcgccttt

SEQ ID NO: 91926 - DNA, 25 bp, Artificial sequence
  SiRNA target sequence
aacatgtccatatctatcgcctttt

SEQ ID NO: 91927 - DNA, 25 bp, Artificial sequence
  SiRNA target sequence
acatgtccatatctatcgccttttt

SEQ ID NO: 91928 - DNA, 25 bp, Artificial sequence
  SiRNA target sequence
catgtccatatctatcgcctttttt

SEQ ID NO: 91929 - DNA, 25 bp, Artificial sequence
  SiRNA target sequence
atgtccatatctatcgcctttttta

SEQ ID NO: 91930 - DNA, 25 bp, Artificial sequence
  SiRNA target sequence
tgtccatatctatcgccttttttaa

SEQ ID NO: 91931 - DNA, 25 bp, Artificial sequence
  SiRNA target sequence
gtccatatctatcgccttttttaat

SEQ ID NO: 91932 - DNA, 25 bp, Artificial sequence
  SiRNA target sequence
tccatatctatcgccttttttaata

SEQ ID NO: 91933 - DNA, 25 bp, Artificial sequence
  SiRNA target sequence
ccatatctatcgccttttttaataa

SEQ ID NO: 91934 - DNA, 25 bp, Artificial sequence
  SiRNA target sequence
catatctatcgccttttttaataat

SEQ ID NO: 91935 - DNA, 25 bp, Artificial sequence
  SiRNA target sequence
atatctatcgccttttttaataatt

SEQ ID NO: 91936 - DNA, 25 bp, Artificial sequence
  SiRNA target sequence
tatctatcgccttttttaataattg

SEQ ID NO: 91937 - DNA, 25 bp, Artificial sequence
  SiRNA target sequence
atctatcgccttttttaataattgc

SEQ ID NO: 91938 - DNA, 25 bp, Artificial sequence
  SiRNA target sequence
tctatcgccttttttaataattgct

SEQ ID NO: 91939 - DNA, 25 bp, Artificial sequence
  SiRNA target sequence
ctatcgccttttttaataattgcta

SEQ ID NO: 91940 - DNA, 25 bp, Artificial sequence
  SiRNA target sequence
tatcgccttttttaataattgctac

SEQ ID NO: 91941 - DNA, 25 bp, Artificial sequence
  SiRNA target sequence
atcgccttttttaataattgctact

SEQ ID NO: 91942 - DNA, 25 bp, Artificial sequence
  SiRNA target sequence
tcgccttttttaataattgctacta

SEQ ID NO: 91943 - DNA, 25 bp, Artificial sequence
  SiRNA target sequence
cgccttttttaataattgctactaa

SEQ ID NO: 91944 - DNA, 25 bp, Artificial sequence
  SiRNA target sequence
gccttttttaataattgctactaaa

SEQ ID NO: 91945 - DNA, 25 bp, Artificial sequence
  SiRNA target sequence
ccttttttaataattgctactaaaa

SEQ ID NO: 91946 - DNA, 25 bp, Artificial sequence
  SiRNA target sequence
cttttttaataattgctactaaaat

SEQ ID NO: 91947 - DNA, 25 bp, Artificial sequence
  SiRNA target sequence
ttttttaataattgctactaaaatt

SEQ ID NO: 91948 - DNA, 25 bp, Artificial sequence
  SiRNA target sequence
tttttaataattgctactaaaattt

SEQ ID NO: 91949 - DNA, 25 bp, Artificial sequence
  SiRNA target sequence
ttttaataattgctactaaaatttc

SEQ ID NO: 91950 - DNA, 25 bp, Artificial sequence
  SiRNA target sequence
tttaataattgctactaaaatttca

SEQ ID NO: 91951 - DNA, 25 bp, Artificial sequence
  SiRNA target sequence
ttaataattgctactaaaatttcac

SEQ ID NO: 91952 - DNA, 25 bp, Artificial sequence
  SiRNA target sequence
taataattgctactaaaatttcaca

SEQ ID NO: 91953 - DNA, 25 bp, Artificial sequence
  SiRNA target sequence
aataattgctactaaaatttcacat

SEQ ID NO: 91954 - DNA, 25 bp, Artificial sequence
  SiRNA target sequence
ataattgctactaaaatttcacatt

SEQ ID NO: 91955 - DNA, 25 bp, Artificial sequence
  SiRNA target sequence
taattgctactaaaatttcacattt

SEQ ID NO: 91956 - DNA, 25 bp, Artificial sequence
  SiRNA target sequence
aattgctactaaaatttcacatttt

SEQ ID NO: 91957 - DNA, 25 bp, Artificial sequence
  SiRNA target sequence
attgctactaaaatttcacattttt

SEQ ID NO: 91958 - DNA, 25 bp, Artificial sequence
  SiRNA target sequence
ttgctactaaaatttcacatttttc

SEQ ID NO: 91959 - DNA, 25 bp, Artificial sequence
  SiRNA target sequence
tgctactaaaatttcacatttttca

SEQ ID NO: 91960 - DNA, 25 bp, Artificial sequence
  SiRNA target sequence
gctactaaaatttcacatttttcat

SEQ ID NO: 91961 - DNA, 25 bp, Artificial sequence
  SiRNA target sequence
ctactaaaatttcacatttttcatt

SEQ ID NO: 91962 - DNA, 25 bp, Artificial sequence
  SiRNA target sequence
tactaaaatttcacatttttcattt

SEQ ID NO: 91963 - DNA, 25 bp, Artificial sequence
  SiRNA target sequence
actaaaatttcacatttttcattta

SEQ ID NO: 91964 - DNA, 25 bp, Artificial sequence
  SiRNA target sequence
ctaaaatttcacatttttcatttac

SEQ ID NO: 91965 - DNA, 25 bp, Artificial sequence
  SiRNA target sequence
taaaatttcacatttttcatttacg

SEQ ID NO: 91966 - DNA, 25 bp, Artificial sequence
  SiRNA target sequence
aaaatttcacatttttcatttacgt

SEQ ID NO: 91967 - DNA, 25 bp, Artificial sequence
  SiRNA target sequence
aaatttcacatttttcatttacgtg

SEQ ID NO: 91968 - DNA, 25 bp, Artificial sequence
  SiRNA target sequence
aatttcacatttttcatttacgtgg

SEQ ID NO: 91969 - DNA, 25 bp, Artificial sequence
  SiRNA target sequence
atttcacatttttcatttacgtggt

SEQ ID NO: 91970 - DNA, 25 bp, Artificial sequence
  SiRNA target sequence
tttcacatttttcatttacgtggtt

SEQ ID NO: 91971 - DNA, 25 bp, Artificial sequence
  SiRNA target sequence
ttcacatttttcatttacgtggtta

SEQ ID NO: 91972 - DNA, 25 bp, Artificial sequence
  SiRNA target sequence
tcacatttttcatttacgtggttag

SEQ ID NO: 91973 - DNA, 25 bp, Artificial sequence
  SiRNA target sequence
cacatttttcatttacgtggttagt

SEQ ID NO: 91974 - DNA, 25 bp, Artificial sequence
  SiRNA target sequence
acatttttcatttacgtggttagta

SEQ ID NO: 91975 - DNA, 25 bp, Artificial sequence
  SiRNA target sequence
catttttcatttacgtggttagtaa

SEQ ID NO: 91976 - DNA, 25 bp, Artificial sequence
  SiRNA target sequence
atttttcatttacgtggttagtaag

SEQ ID NO: 91977 - DNA, 25 bp, Artificial sequence
  SiRNA target sequence
tttttcatttacgtggttagtaagt

SEQ ID NO: 91978 - DNA, 25 bp, Artificial sequence
  SiRNA target sequence
ttttcatttacgtggttagtaagtg

SEQ ID NO: 91979 - DNA, 25 bp, Artificial sequence
  SiRNA target sequence
tttcatttacgtggttagtaagtga

SEQ ID NO: 91980 - DNA, 25 bp, Artificial sequence
  SiRNA target sequence
ttcatttacgtggttagtaagtgaa

SEQ ID NO: 91981 - DNA, 25 bp, Artificial sequence
  SiRNA target sequence
tcatttacgtggttagtaagtgaat

SEQ ID NO: 91982 - DNA, 25 bp, Artificial sequence
  SiRNA target sequence
catttacgtggttagtaagtgaata

SEQ ID NO: 91983 - DNA, 25 bp, Artificial sequence
  SiRNA target sequence
atttacgtggttagtaagtgaataa

SEQ ID NO: 91984 - DNA, 25 bp, Artificial sequence
  SiRNA target sequence
tttacgtggttagtaagtgaataat

SEQ ID NO: 91985 - DNA, 25 bp, Artificial sequence
  SiRNA target sequence
ttacgtggttagtaagtgaataata

SEQ ID NO: 91986 - DNA, 25 bp, Artificial sequence
  SiRNA target sequence
tacgtggttagtaagtgaataatat

SEQ ID NO: 91987 - DNA, 25 bp, Artificial sequence
  SiRNA target sequence
acgtggttagtaagtgaataatatc

SEQ ID NO: 91988 - DNA, 25 bp, Artificial sequence
  SiRNA target sequence
cgtggttagtaagtgaataatatct

SEQ ID NO: 91989 - DNA, 25 bp, Artificial sequence
  SiRNA target sequence
gtggttagtaagtgaataatatctt

SEQ ID NO: 91990 - DNA, 25 bp, Artificial sequence
  SiRNA target sequence
tggttagtaagtgaataatatcttg

SEQ ID NO: 91991 - DNA, 25 bp, Artificial sequence
  SiRNA target sequence
ggttagtaagtgaataatatcttgg

SEQ ID NO: 91992 - DNA, 25 bp, Artificial sequence
  SiRNA target sequence
gttagtaagtgaataatatcttggc

SEQ ID NO: 91993 - DNA, 25 bp, Artificial sequence
  SiRNA target sequence
ttagtaagtgaataatatcttggct

SEQ ID NO: 91994 - DNA, 25 bp, Artificial sequence
  SiRNA target sequence
tagtaagtgaataatatcttggctt

SEQ ID NO: 91995 - DNA, 25 bp, Artificial sequence
  SiRNA target sequence
agtaagtgaataatatcttggctta

SEQ ID NO: 91996 - DNA, 25 bp, Artificial sequence
  SiRNA target sequence
gtaagtgaataatatcttggcttaa

SEQ ID NO: 91997 - DNA, 25 bp, Artificial sequence
  SiRNA target sequence
taagtgaataatatcttggcttaat

SEQ ID NO: 91998 - DNA, 25 bp, Artificial sequence
  SiRNA target sequence
aagtgaataatatcttggcttaatt

SEQ ID NO: 91999 - DNA, 25 bp, Artificial sequence
  SiRNA target sequence
agtgaataatatcttggcttaattg

SEQ ID NO: 92000 - DNA, 25 bp, Artificial sequence
  SiRNA target sequence
gtgaataatatcttggcttaattgt

SEQ ID NO: 92001 - DNA, 25 bp, Artificial sequence
  SiRNA target sequence
tgaataatatcttggcttaattgtt

SEQ ID NO: 92002 - DNA, 25 bp, Artificial sequence
  SiRNA target sequence
gaataatatcttggcttaattgttt

SEQ ID NO: 92003 - DNA, 25 bp, Artificial sequence
  SiRNA target sequence
aataatatcttggcttaattgtttg

SEQ ID NO: 92004 - DNA, 25 bp, Artificial sequence
  SiRNA target sequence
ataatatcttggcttaattgtttga

SEQ ID NO: 92005 - DNA, 25 bp, Artificial sequence
  SiRNA target sequence
taatatcttggcttaattgtttgac

SEQ ID NO: 92006 - DNA, 25 bp, Artificial sequence
  SiRNA target sequence
aatatcttggcttaattgtttgaca

SEQ ID NO: 92007 - DNA, 25 bp, Artificial sequence
  SiRNA target sequence
atatcttggcttaattgtttgacaa

SEQ ID NO: 92008 - DNA, 25 bp, Artificial sequence
  SiRNA target sequence
tatcttggcttaattgtttgacaat

SEQ ID NO: 92009 - DNA, 25 bp, Artificial sequence
  SiRNA target sequence
atcttggcttaattgtttgacaatt

SEQ ID NO: 92010 - DNA, 25 bp, Artificial sequence
  SiRNA target sequence
tcttggcttaattgtttgacaattc

SEQ ID NO: 92011 - DNA, 25 bp, Artificial sequence
  SiRNA target sequence
cttggcttaattgtttgacaattca

SEQ ID NO: 92012 - DNA, 25 bp, Artificial sequence
  SiRNA target sequence
ttggcttaattgtttgacaattcat

SEQ ID NO: 92013 - DNA, 25 bp, Artificial sequence
  SiRNA target sequence
tggcttaattgtttgacaattcata

SEQ ID NO: 92014 - DNA, 25 bp, Artificial sequence
  SiRNA target sequence
ggcttaattgtttgacaattcataa

SEQ ID NO: 92015 - DNA, 25 bp, Artificial sequence
  SiRNA target sequence
gcttaattgtttgacaattcataat

SEQ ID NO: 92016 - DNA, 25 bp, Artificial sequence
  SiRNA target sequence
cttaattgtttgacaattcataata

SEQ ID NO: 92017 - DNA, 25 bp, Artificial sequence
  SiRNA target sequence
ttaattgtttgacaattcataataa

SEQ ID NO: 92018 - DNA, 25 bp, Artificial sequence
  SiRNA target sequence
taattgtttgacaattcataataag

SEQ ID NO: 92019 - DNA, 25 bp, Artificial sequence
  SiRNA target sequence
aattgtttgacaattcataataaga

SEQ ID NO: 92020 - DNA, 25 bp, Artificial sequence
  SiRNA target sequence
attgtttgacaattcataataagat

SEQ ID NO: 92021 - DNA, 25 bp, Artificial sequence
  SiRNA target sequence
ttgtttgacaattcataataagatc

SEQ ID NO: 92022 - DNA, 25 bp, Artificial sequence
  SiRNA target sequence
tgtttgacaattcataataagatcc

SEQ ID NO: 92023 - DNA, 25 bp, Artificial sequence
  SiRNA target sequence
gtttgacaattcataataagatcct

SEQ ID NO: 92024 - DNA, 25 bp, Artificial sequence
  SiRNA target sequence
tttgacaattcataataagatcctc

SEQ ID NO: 92025 - DNA, 25 bp, Artificial sequence
  SiRNA target sequence
ttgacaattcataataagatcctct

SEQ ID NO: 92026 - DNA, 25 bp, Artificial sequence
  SiRNA target sequence
tgacaattcataataagatcctcta

SEQ ID NO: 92027 - DNA, 25 bp, Artificial sequence
  SiRNA target sequence
gacaattcataataagatcctctaa

SEQ ID NO: 92028 - DNA, 25 bp, Artificial sequence
  SiRNA target sequence
acaattcataataagatcctctaaa

SEQ ID NO: 92029 - DNA, 25 bp, Artificial sequence
  SiRNA target sequence
caattcataataagatcctctaaac

SEQ ID NO: 92030 - DNA, 25 bp, Artificial sequence
  SiRNA target sequence
aattcataataagatcctctaaact

SEQ ID NO: 92031 - DNA, 25 bp, Artificial sequence
  SiRNA target sequence
attcataataagatcctctaaactt

SEQ ID NO: 92032 - DNA, 25 bp, Artificial sequence
  SiRNA target sequence
ttcataataagatcctctaaacttg

SEQ ID NO: 92033 - DNA, 25 bp, Artificial sequence
  SiRNA target sequence
tcataataagatcctctaaacttgg

SEQ ID NO: 92034 - DNA, 25 bp, Artificial sequence
  SiRNA target sequence
cataataagatcctctaaacttggt

SEQ ID NO: 92035 - DNA, 25 bp, Artificial sequence
  SiRNA target sequence
ataataagatcctctaaacttggtt

SEQ ID NO: 92036 - DNA, 25 bp, Artificial sequence
  SiRNA target sequence
taataagatcctctaaacttggttt

SEQ ID NO: 92037 - DNA, 25 bp, Artificial sequence
  SiRNA target sequence
aataagatcctctaaacttggttta

SEQ ID NO: 92038 - DNA, 25 bp, Artificial sequence
  SiRNA target sequence
ataagatcctctaaacttggtttac

SEQ ID NO: 92039 - DNA, 25 bp, Artificial sequence
  SiRNA target sequence
taagatcctctaaacttggtttaca

SEQ ID NO: 92040 - DNA, 25 bp, Artificial sequence
  SiRNA target sequence
aagatcctctaaacttggtttacat

SEQ ID NO: 92041 - DNA, 25 bp, Artificial sequence
  SiRNA target sequence
agatcctctaaacttggtttacatt

SEQ ID NO: 92042 - DNA, 25 bp, Artificial sequence
  SiRNA target sequence
gatcctctaaacttggtttacattg

SEQ ID NO: 92043 - DNA, 25 bp, Artificial sequence
  SiRNA target sequence
atcctctaaacttggtttacattga

SEQ ID NO: 92044 - DNA, 25 bp, Artificial sequence
  SiRNA target sequence
tcctctaaacttggtttacattgaa

SEQ ID NO: 92045 - DNA, 25 bp, Artificial sequence
  SiRNA target sequence
cctctaaacttggtttacattgaaa

SEQ ID NO: 92046 - DNA, 25 bp, Artificial sequence
  SiRNA target sequence
ctctaaacttggtttacattgaaat

SEQ ID NO: 92047 - DNA, 25 bp, Artificial sequence
  SiRNA target sequence
tctaaacttggtttacattgaaatg

SEQ ID NO: 92048 - DNA, 25 bp, Artificial sequence
  SiRNA target sequence
ctaaacttggtttacattgaaatgt

SEQ ID NO: 92049 - DNA, 25 bp, Artificial sequence
  SiRNA target sequence
taaacttggtttacattgaaatgta

SEQ ID NO: 92050 - DNA, 25 bp, Artificial sequence
  SiRNA target sequence
aaacttggtttacattgaaatgtat

SEQ ID NO: 92051 - DNA, 25 bp, Artificial sequence
  SiRNA target sequence
aacttggtttacattgaaatgtata

SEQ ID NO: 92052 - DNA, 25 bp, Artificial sequence
  SiRNA target sequence
acttggtttacattgaaatgtatat

SEQ ID NO: 92053 - DNA, 25 bp, Artificial sequence
  SiRNA target sequence
cttggtttacattgaaatgtatata

SEQ ID NO: 92054 - DNA, 25 bp, Artificial sequence
  SiRNA target sequence
ttggtttacattgaaatgtatatat

SEQ ID NO: 92055 - DNA, 25 bp, Artificial sequence
  SiRNA target sequence
tggtttacattgaaatgtatatata

SEQ ID NO: 92056 - DNA, 25 bp, Artificial sequence
  SiRNA target sequence
ggtttacattgaaatgtatatataa

SEQ ID NO: 92057 - DNA, 25 bp, Artificial sequence
  SiRNA target sequence
gtttacattgaaatgtatatataat

SEQ ID NO: 92058 - DNA, 25 bp, Artificial sequence
  SiRNA target sequence
tttacattgaaatgtatatataatg

SEQ ID NO: 92059 - DNA, 25 bp, Artificial sequence
  SiRNA target sequence
ttacattgaaatgtatatataatgt

SEQ ID NO: 92060 - DNA, 25 bp, Artificial sequence
  SiRNA target sequence
tacattgaaatgtatatataatgtc

SEQ ID NO: 92061 - DNA, 25 bp, Artificial sequence
  SiRNA target sequence
acattgaaatgtatatataatgtca

SEQ ID NO: 92062 - DNA, 25 bp, Artificial sequence
  SiRNA target sequence
cattgaaatgtatatataatgtcaa

SEQ ID NO: 92063 - DNA, 25 bp, Artificial sequence
  SiRNA target sequence
attgaaatgtatatataatgtcaag

SEQ ID NO: 92064 - DNA, 25 bp, Artificial sequence
  SiRNA target sequence
ttgaaatgtatatataatgtcaagc

SEQ ID NO: 92065 - DNA, 25 bp, Artificial sequence
  SiRNA target sequence
tgaaatgtatatataatgtcaagca

SEQ ID NO: 92066 - DNA, 25 bp, Artificial sequence
  SiRNA target sequence
gaaatgtatatataatgtcaagcac

SEQ ID NO: 92067 - DNA, 25 bp, Artificial sequence
  SiRNA target sequence
aaatgtatatataatgtcaagcaca

SEQ ID NO: 92068 - DNA, 25 bp, Artificial sequence
  SiRNA target sequence
aatgtatatataatgtcaagcacat

SEQ ID NO: 92069 - DNA, 25 bp, Artificial sequence
  SiRNA target sequence
atgtatatataatgtcaagcacatt

SEQ ID NO: 92070 - DNA, 25 bp, Artificial sequence
  SiRNA target sequence
tgtatatataatgtcaagcacatta

SEQ ID NO: 92071 - DNA, 25 bp, Artificial sequence
  SiRNA target sequence
gtatatataatgtcaagcacattat

SEQ ID NO: 92072 - DNA, 25 bp, Artificial sequence
  SiRNA target sequence
tatatataatgtcaagcacattatt

SEQ ID NO: 92073 - DNA, 25 bp, Artificial sequence
  SiRNA target sequence
atatataatgtcaagcacattattc

SEQ ID NO: 92074 - DNA, 25 bp, Artificial sequence
  SiRNA target sequence
tatataatgtcaagcacattattcc

SEQ ID NO: 92075 - DNA, 25 bp, Artificial sequence
  SiRNA target sequence
atataatgtcaagcacattattcca

SEQ ID NO: 92076 - DNA, 25 bp, Artificial sequence
  SiRNA target sequence
tataatgtcaagcacattattccag

SEQ ID NO: 92077 - DNA, 25 bp, Artificial sequence
  SiRNA target sequence
ataatgtcaagcacattattccagt

SEQ ID NO: 92078 - DNA, 25 bp, Artificial sequence
  SiRNA target sequence
taatgtcaagcacattattccagtt

SEQ ID NO: 92079 - DNA, 25 bp, Artificial sequence
  SiRNA target sequence
aatgtcaagcacattattccagttc

SEQ ID NO: 92080 - DNA, 25 bp, Artificial sequence
  SiRNA target sequence
atgtcaagcacattattccagttct

SEQ ID NO: 92081 - DNA, 25 bp, Artificial sequence
  SiRNA target sequence
tgtcaagcacattattccagttctt

SEQ ID NO: 92082 - DNA, 25 bp, Artificial sequence
  SiRNA target sequence
gtcaagcacattattccagttctta

SEQ ID NO: 92083 - DNA, 25 bp, Artificial sequence
  SiRNA target sequence
tcaagcacattattccagttcttaa

SEQ ID NO: 92084 - DNA, 25 bp, Artificial sequence
  SiRNA target sequence
caagcacattattccagttcttaat

SEQ ID NO: 92085 - DNA, 25 bp, Artificial sequence
  SiRNA target sequence
aagcacattattccagttcttaatg

SEQ ID NO: 92086 - DNA, 25 bp, Artificial sequence
  SiRNA target sequence
agcacattattccagttcttaatga

SEQ ID NO: 92087 - DNA, 25 bp, Artificial sequence
  SiRNA target sequence
gcacattattccagttcttaatgat

SEQ ID NO: 92088 - DNA, 25 bp, Artificial sequence
  SiRNA target sequence
cacattattccagttcttaatgatg

SEQ ID NO: 92089 - DNA, 25 bp, Artificial sequence
  SiRNA target sequence
acattattccagttcttaatgatgc

SEQ ID NO: 92090 - DNA, 25 bp, Artificial sequence
  SiRNA target sequence
cattattccagttcttaatgatgct

SEQ ID NO: 92091 - DNA, 25 bp, Artificial sequence
  SiRNA target sequence
attattccagttcttaatgatgctt

SEQ ID NO: 92092 - DNA, 25 bp, Artificial sequence
  SiRNA target sequence
ttattccagttcttaatgatgctta

SEQ ID NO: 92093 - DNA, 25 bp, Artificial sequence
  SiRNA target sequence
tattccagttcttaatgatgcttaa

SEQ ID NO: 92094 - DNA, 25 bp, Artificial sequence
  SiRNA target sequence
attccagttcttaatgatgcttaaa

SEQ ID NO: 92095 - DNA, 25 bp, Artificial sequence
  SiRNA target sequence
ttccagttcttaatgatgcttaaat

SEQ ID NO: 92096 - DNA, 25 bp, Artificial sequence
  SiRNA target sequence
tccagttcttaatgatgcttaaata

SEQ ID NO: 92097 - DNA, 25 bp, Artificial sequence
  SiRNA target sequence
ccagttcttaatgatgcttaaataa

SEQ ID NO: 92098 - DNA, 25 bp, Artificial sequence
  SiRNA target sequence
cagttcttaatgatgcttaaataat

SEQ ID NO: 92099 - DNA, 25 bp, Artificial sequence
  SiRNA target sequence
agttcttaatgatgcttaaataatc

SEQ ID NO: 92100 - DNA, 25 bp, Artificial sequence
  SiRNA target sequence
gttcttaatgatgcttaaataatct

SEQ ID NO: 92101 - DNA, 25 bp, Artificial sequence
  SiRNA target sequence
ttcttaatgatgcttaaataatctt

SEQ ID NO: 92102 - DNA, 25 bp, Artificial sequence
  SiRNA target sequence
tcttaatgatgcttaaataatcttt

SEQ ID NO: 92103 - DNA, 25 bp, Artificial sequence
  SiRNA target sequence
cttaatgatgcttaaataatctttt

SEQ ID NO: 92104 - DNA, 25 bp, Artificial sequence
  SiRNA target sequence
ttaatgatgcttaaataatctttta

SEQ ID NO: 92105 - DNA, 25 bp, Artificial sequence
  SiRNA target sequence
taatgatgcttaaataatcttttac

SEQ ID NO: 92106 - DNA, 25 bp, Artificial sequence
  SiRNA target sequence
aatgatgcttaaataatcttttact

SEQ ID NO: 92107 - DNA, 25 bp, Artificial sequence
  SiRNA target sequence
atgatgcttaaataatcttttactc

SEQ ID NO: 92108 - DNA, 25 bp, Artificial sequence
  SiRNA target sequence
tgatgcttaaataatcttttactcc

SEQ ID NO: 92109 - DNA, 25 bp, Artificial sequence
  SiRNA target sequence
gatgcttaaataatcttttactcct

SEQ ID NO: 92110 - DNA, 25 bp, Artificial sequence
  SiRNA target sequence
atgcttaaataatcttttactcctt

SEQ ID NO: 92111 - DNA, 25 bp, Artificial sequence
  SiRNA target sequence
tgcttaaataatcttttactccttc

SEQ ID NO: 92112 - DNA, 25 bp, Artificial sequence
  SiRNA target sequence
gcttaaataatcttttactccttct

SEQ ID NO: 92113 - DNA, 25 bp, Artificial sequence
  SiRNA target sequence
cttaaataatcttttactccttctt

SEQ ID NO: 92114 - DNA, 25 bp, Artificial sequence
  SiRNA target sequence
ttaaataatcttttactccttcttt

SEQ ID NO: 92115 - DNA, 25 bp, Artificial sequence
  SiRNA target sequence
taaataatcttttactccttcttta

SEQ ID NO: 92116 - DNA, 25 bp, Artificial sequence
  SiRNA target sequence
aaataatcttttactccttctttag

SEQ ID NO: 92117 - DNA, 25 bp, Artificial sequence
  SiRNA target sequence
aataatcttttactccttctttaga

SEQ ID NO: 92118 - DNA, 25 bp, Artificial sequence
  SiRNA target sequence
ataatcttttactccttctttagaa

SEQ ID NO: 92119 - DNA, 25 bp, Artificial sequence
  SiRNA target sequence
taatcttttactccttctttagaac

SEQ ID NO: 92120 - DNA, 25 bp, Artificial sequence
  SiRNA target sequence
aatcttttactccttctttagaaca

SEQ ID NO: 92121 - DNA, 25 bp, Artificial sequence
  SiRNA target sequence
atcttttactccttctttagaacac

SEQ ID NO: 92122 - DNA, 25 bp, Artificial sequence
  SiRNA target sequence
tcttttactccttctttagaacaca

SEQ ID NO: 92123 - DNA, 25 bp, Artificial sequence
  SiRNA target sequence
cttttactccttctttagaacacag

SEQ ID NO: 92124 - DNA, 25 bp, Artificial sequence
  SiRNA target sequence
ttttactccttctttagaacacaga

SEQ ID NO: 92125 - DNA, 25 bp, Artificial sequence
  SiRNA target sequence
tttactccttctttagaacacagat

SEQ ID NO: 92126 - DNA, 25 bp, Artificial sequence
  SiRNA target sequence
ttactccttctttagaacacagata

SEQ ID NO: 92127 - DNA, 25 bp, Artificial sequence
  SiRNA target sequence
tactccttctttagaacacagatat

SEQ ID NO: 92128 - DNA, 25 bp, Artificial sequence
  SiRNA target sequence
actccttctttagaacacagatatt

SEQ ID NO: 92129 - DNA, 25 bp, Artificial sequence
  SiRNA target sequence
ctccttctttagaacacagatattc

SEQ ID NO: 92130 - DNA, 25 bp, Artificial sequence
  SiRNA target sequence
tccttctttagaacacagatattca

SEQ ID NO: 92131 - DNA, 25 bp, Artificial sequence
  SiRNA target sequence
ccttctttagaacacagatattcaa

SEQ ID NO: 92132 - DNA, 25 bp, Artificial sequence
  SiRNA target sequence
cttctttagaacacagatattcaat

SEQ ID NO: 92133 - DNA, 25 bp, Artificial sequence
  SiRNA target sequence
ttctttagaacacagatattcaata

SEQ ID NO: 92134 - DNA, 25 bp, Artificial sequence
  SiRNA target sequence
tctttagaacacagatattcaatat

SEQ ID NO: 92135 - DNA, 25 bp, Artificial sequence
  SiRNA target sequence
ctttagaacacagatattcaatatc

SEQ ID NO: 92136 - DNA, 25 bp, Artificial sequence
  SiRNA target sequence
tttagaacacagatattcaatatca

SEQ ID NO: 92137 - DNA, 25 bp, Artificial sequence
  SiRNA target sequence
ttagaacacagatattcaatatcat

SEQ ID NO: 92138 - DNA, 25 bp, Artificial sequence
  SiRNA target sequence
tagaacacagatattcaatatcatg

SEQ ID NO: 92139 - DNA, 25 bp, Artificial sequence
  SiRNA target sequence
agaacacagatattcaatatcatgc

SEQ ID NO: 92140 - DNA, 25 bp, Artificial sequence
  SiRNA target sequence
gaacacagatattcaatatcatgct

SEQ ID NO: 92141 - DNA, 25 bp, Artificial sequence
  SiRNA target sequence
aacacagatattcaatatcatgctt

SEQ ID NO: 92142 - DNA, 25 bp, Artificial sequence
  SiRNA target sequence
acacagatattcaatatcatgctta

SEQ ID NO: 92143 - DNA, 25 bp, Artificial sequence
  SiRNA target sequence
cacagatattcaatatcatgcttat

SEQ ID NO: 92144 - DNA, 25 bp, Artificial sequence
  SiRNA target sequence
acagatattcaatatcatgcttatt

SEQ ID NO: 92145 - DNA, 25 bp, Artificial sequence
  SiRNA target sequence
cagatattcaatatcatgcttattt

SEQ ID NO: 92146 - DNA, 25 bp, Artificial sequence
  SiRNA target sequence
agatattcaatatcatgcttatttt

SEQ ID NO: 92147 - DNA, 25 bp, Artificial sequence
  SiRNA target sequence
gatattcaatatcatgcttattttt

SEQ ID NO: 92148 - DNA, 25 bp, Artificial sequence
  SiRNA target sequence
atattcaatatcatgcttattttta

SEQ ID NO: 92149 - DNA, 25 bp, Artificial sequence
  SiRNA target sequence
tattcaatatcatgcttatttttag

SEQ ID NO: 92150 - DNA, 25 bp, Artificial sequence
  SiRNA target sequence
attcaatatcatgcttatttttaga

SEQ ID NO: 92151 - DNA, 25 bp, Artificial sequence
  SiRNA target sequence
ttcaatatcatgcttatttttagag

SEQ ID NO: 92152 - DNA, 25 bp, Artificial sequence
  SiRNA target sequence
tcaatatcatgcttatttttagagg

SEQ ID NO: 92153 - DNA, 25 bp, Artificial sequence
  SiRNA target sequence
caatatcatgcttatttttagaggt

SEQ ID NO: 92154 - DNA, 25 bp, Artificial sequence
  SiRNA target sequence
aatatcatgcttatttttagaggtt

SEQ ID NO: 92155 - DNA, 25 bp, Artificial sequence
  SiRNA target sequence
atatcatgcttatttttagaggttt

SEQ ID NO: 92156 - DNA, 25 bp, Artificial sequence
  SiRNA target sequence
tatcatgcttatttttagaggtttt

SEQ ID NO: 92157 - DNA, 25 bp, Artificial sequence
  SiRNA target sequence
atcatgcttatttttagaggtttta

SEQ ID NO: 92158 - DNA, 25 bp, Artificial sequence
  SiRNA target sequence
tcatgcttatttttagaggttttag

SEQ ID NO: 92159 - DNA, 25 bp, Artificial sequence
  SiRNA target sequence
catgcttatttttagaggttttaga

SEQ ID NO: 92160 - DNA, 25 bp, Artificial sequence
  SiRNA target sequence
atgcttatttttagaggttttagaa

SEQ ID NO: 92161 - DNA, 25 bp, Artificial sequence
  SiRNA target sequence
tgcttatttttagaggttttagaaa

SEQ ID NO: 92162 - DNA, 25 bp, Artificial sequence
  SiRNA target sequence
gcttatttttagaggttttagaaat

SEQ ID NO: 92163 - DNA, 25 bp, Artificial sequence
  SiRNA target sequence
cttatttttagaggttttagaaata

SEQ ID NO: 92164 - DNA, 25 bp, Artificial sequence
  SiRNA target sequence
ttatttttagaggttttagaaatat

SEQ ID NO: 92165 - DNA, 25 bp, Artificial sequence
  SiRNA target sequence
tatttttagaggttttagaaatatc

SEQ ID NO: 92166 - DNA, 25 bp, Artificial sequence
  SiRNA target sequence
atttttagaggttttagaaatatcc

SEQ ID NO: 92167 - DNA, 25 bp, Artificial sequence
  SiRNA target sequence
tttttagaggttttagaaatatcca

SEQ ID NO: 92168 - DNA, 25 bp, Artificial sequence
  SiRNA target sequence
ttttagaggttttagaaatatccat

SEQ ID NO: 92169 - DNA, 25 bp, Artificial sequence
  SiRNA target sequence
tttagaggttttagaaatatccata

SEQ ID NO: 92170 - DNA, 25 bp, Artificial sequence
  SiRNA target sequence
ttagaggttttagaaatatccataa

SEQ ID NO: 92171 - DNA, 25 bp, Artificial sequence
  SiRNA target sequence
tagaggttttagaaatatccataag

SEQ ID NO: 92172 - DNA, 25 bp, Artificial sequence
  SiRNA target sequence
agaggttttagaaatatccataagc

SEQ ID NO: 92173 - DNA, 25 bp, Artificial sequence
  SiRNA target sequence
gaggttttagaaatatccataagcc

SEQ ID NO: 92174 - DNA, 25 bp, Artificial sequence
  SiRNA target sequence
aggttttagaaatatccataagcca

SEQ ID NO: 92175 - DNA, 25 bp, Artificial sequence
  SiRNA target sequence
ggttttagaaatatccataagccat

SEQ ID NO: 92176 - DNA, 25 bp, Artificial sequence
  SiRNA target sequence
gttttagaaatatccataagccatg

SEQ ID NO: 92177 - DNA, 25 bp, Artificial sequence
  SiRNA target sequence
ttttagaaatatccataagccatgc

SEQ ID NO: 92178 - DNA, 25 bp, Artificial sequence
  SiRNA target sequence
tttagaaatatccataagccatgct

SEQ ID NO: 92179 - DNA, 25 bp, Artificial sequence
  SiRNA target sequence
ttagaaatatccataagccatgctt

SEQ ID NO: 92180 - DNA, 25 bp, Artificial sequence
  SiRNA target sequence
tagaaatatccataagccatgcttt

SEQ ID NO: 92181 - DNA, 25 bp, Artificial sequence
  SiRNA target sequence
agaaatatccataagccatgctttt

SEQ ID NO: 92182 - DNA, 25 bp, Artificial sequence
  SiRNA target sequence
gaaatatccataagccatgcttttt

SEQ ID NO: 92183 - DNA, 25 bp, Artificial sequence
  SiRNA target sequence
aaatatccataagccatgctttttt

SEQ ID NO: 92184 - DNA, 25 bp, Artificial sequence
  SiRNA target sequence
aatatccataagccatgctttttta

SEQ ID NO: 92185 - DNA, 25 bp, Artificial sequence
  SiRNA target sequence
atatccataagccatgcttttttag

SEQ ID NO: 92186 - DNA, 25 bp, Artificial sequence
  SiRNA target sequence
tatccataagccatgcttttttagg

SEQ ID NO: 92187 - DNA, 25 bp, Artificial sequence
  SiRNA target sequence
atccataagccatgcttttttaggc

SEQ ID NO: 92188 - DNA, 25 bp, Artificial sequence
  SiRNA target sequence
tccataagccatgcttttttaggca

SEQ ID NO: 92189 - DNA, 25 bp, Artificial sequence
  SiRNA target sequence
ccataagccatgcttttttaggcaa

SEQ ID NO: 92190 - DNA, 25 bp, Artificial sequence
  SiRNA target sequence
cataagccatgcttttttaggcaat

SEQ ID NO: 92191 - DNA, 25 bp, Artificial sequence
  SiRNA target sequence
ataagccatgcttttttaggcaatg

SEQ ID NO: 92192 - DNA, 25 bp, Artificial sequence
  SiRNA target sequence
taagccatgcttttttaggcaatga

SEQ ID NO: 92193 - DNA, 25 bp, Artificial sequence
  SiRNA target sequence
aagccatgcttttttaggcaatgaa

SEQ ID NO: 92194 - DNA, 25 bp, Artificial sequence
  SiRNA target sequence
agccatgcttttttaggcaatgaag

SEQ ID NO: 92195 - DNA, 25 bp, Artificial sequence
  SiRNA target sequence
gccatgcttttttaggcaatgaagt

SEQ ID NO: 92196 - DNA, 25 bp, Artificial sequence
  SiRNA target sequence
ccatgcttttttaggcaatgaagta

SEQ ID NO: 92197 - DNA, 25 bp, Artificial sequence
  SiRNA target sequence
catgcttttttaggcaatgaagtaa

SEQ ID NO: 92198 - DNA, 25 bp, Artificial sequence
  SiRNA target sequence
atgcttttttaggcaatgaagtaaa

SEQ ID NO: 92199 - DNA, 25 bp, Artificial sequence
  SiRNA target sequence
tgcttttttaggcaatgaagtaaaa

SEQ ID NO: 92200 - DNA, 25 bp, Artificial sequence
  SiRNA target sequence
gcttttttaggcaatgaagtaaaat

SEQ ID NO: 92201 - DNA, 25 bp, Artificial sequence
  SiRNA target sequence
cttttttaggcaatgaagtaaaatc

SEQ ID NO: 92202 - DNA, 25 bp, Artificial sequence
  SiRNA target sequence
ttttttaggcaatgaagtaaaatca

SEQ ID NO: 92203 - DNA, 25 bp, Artificial sequence
  SiRNA target sequence
tttttaggcaatgaagtaaaatcaa

SEQ ID NO: 92204 - DNA, 25 bp, Artificial sequence
  SiRNA target sequence
ttttaggcaatgaagtaaaatcaaa

SEQ ID NO: 92205 - DNA, 25 bp, Artificial sequence
  SiRNA target sequence
tttaggcaatgaagtaaaatcaaaa

SEQ ID NO: 92206 - DNA, 25 bp, Artificial sequence
  SiRNA target sequence
ttaggcaatgaagtaaaatcaaaaa

SEQ ID NO: 92207 - DNA, 25 bp, Artificial sequence
  SiRNA target sequence
taggcaatgaagtaaaatcaaaaat

SEQ ID NO: 92208 - DNA, 25 bp, Artificial sequence
  SiRNA target sequence
aggcaatgaagtaaaatcaaaaata

SEQ ID NO: 92209 - DNA, 25 bp, Artificial sequence
  SiRNA target sequence
ggcaatgaagtaaaatcaaaaatat

SEQ ID NO: 92210 - DNA, 25 bp, Artificial sequence
  SiRNA target sequence
gcaatgaagtaaaatcaaaaatata

SEQ ID NO: 92211 - DNA, 25 bp, Artificial sequence
  SiRNA target sequence
caatgaagtaaaatcaaaaatatac

SEQ ID NO: 92212 - DNA, 25 bp, Artificial sequence
  SiRNA target sequence
aatgaagtaaaatcaaaaatatact

SEQ ID NO: 92213 - DNA, 25 bp, Artificial sequence
  SiRNA target sequence
atgaagtaaaatcaaaaatatactt

SEQ ID NO: 92214 - DNA, 25 bp, Artificial sequence
  SiRNA target sequence
tgaagtaaaatcaaaaatatacttg

SEQ ID NO: 92215 - DNA, 25 bp, Artificial sequence
  SiRNA target sequence
gaagtaaaatcaaaaatatacttga

SEQ ID NO: 92216 - DNA, 25 bp, Artificial sequence
  SiRNA target sequence
aagtaaaatcaaaaatatacttgaa

SEQ ID NO: 92217 - DNA, 25 bp, Artificial sequence
  SiRNA target sequence
agtaaaatcaaaaatatacttgaaa

SEQ ID NO: 92218 - DNA, 25 bp, Artificial sequence
  SiRNA target sequence
gtaaaatcaaaaatatacttgaaaa

SEQ ID NO: 92219 - DNA, 25 bp, Artificial sequence
  SiRNA target sequence
taaaatcaaaaatatacttgaaaaa

SEQ ID NO: 92220 - DNA, 25 bp, Artificial sequence
  SiRNA target sequence
aaaatcaaaaatatacttgaaaaag

SEQ ID NO: 92221 - DNA, 25 bp, Artificial sequence
  SiRNA target sequence
aaatcaaaaatatacttgaaaaagt

SEQ ID NO: 92222 - DNA, 25 bp, Artificial sequence
  SiRNA target sequence
aatcaaaaatatacttgaaaaagtc

SEQ ID NO: 92223 - DNA, 25 bp, Artificial sequence
  SiRNA target sequence
atcaaaaatatacttgaaaaagtca

SEQ ID NO: 92224 - DNA, 25 bp, Artificial sequence
  SiRNA target sequence
tcaaaaatatacttgaaaaagtcac

SEQ ID NO: 92225 - DNA, 25 bp, Artificial sequence
  SiRNA target sequence
caaaaatatacttgaaaaagtcacg

SEQ ID NO: 92226 - DNA, 25 bp, Artificial sequence
  SiRNA target sequence
aaaaatatacttgaaaaagtcacgc

SEQ ID NO: 92227 - DNA, 25 bp, Artificial sequence
  SiRNA target sequence
aaaatatacttgaaaaagtcacgca

SEQ ID NO: 92228 - DNA, 25 bp, Artificial sequence
  SiRNA target sequence
aaatatacttgaaaaagtcacgcaa

SEQ ID NO: 92229 - DNA, 25 bp, Artificial sequence
  SiRNA target sequence
aatatacttgaaaaagtcacgcaaa

SEQ ID NO: 92230 - DNA, 25 bp, Artificial sequence
  SiRNA target sequence
atatacttgaaaaagtcacgcaaag

SEQ ID NO: 92231 - DNA, 25 bp, Artificial sequence
  SiRNA target sequence
tatacttgaaaaagtcacgcaaaga

SEQ ID NO: 92232 - DNA, 25 bp, Artificial sequence
  SiRNA target sequence
atacttgaaaaagtcacgcaaagat

SEQ ID NO: 92233 - DNA, 25 bp, Artificial sequence
  SiRNA target sequence
tacttgaaaaagtcacgcaaagatc

SEQ ID NO: 92234 - DNA, 25 bp, Artificial sequence
  SiRNA target sequence
acttgaaaaagtcacgcaaagatcc

SEQ ID NO: 92235 - DNA, 25 bp, Artificial sequence
  SiRNA target sequence
cttgaaaaagtcacgcaaagatcct

SEQ ID NO: 92236 - DNA, 25 bp, Artificial sequence
  SiRNA target sequence
ttgaaaaagtcacgcaaagatcctt

SEQ ID NO: 92237 - DNA, 25 bp, Artificial sequence
  SiRNA target sequence
tgaaaaagtcacgcaaagatccttc

SEQ ID NO: 92238 - DNA, 25 bp, Artificial sequence
  SiRNA target sequence
gaaaaagtcacgcaaagatccttcg

SEQ ID NO: 92239 - DNA, 25 bp, Artificial sequence
  SiRNA target sequence
aaaaagtcacgcaaagatccttcga

SEQ ID NO: 92240 - DNA, 25 bp, Artificial sequence
  SiRNA target sequence
aaaagtcacgcaaagatccttcgaa

SEQ ID NO: 92241 - DNA, 25 bp, Artificial sequence
  SiRNA target sequence
aaagtcacgcaaagatccttcgaat

SEQ ID NO: 92242 - DNA, 25 bp, Artificial sequence
  SiRNA target sequence
aagtcacgcaaagatccttcgaatt

SEQ ID NO: 92243 - DNA, 25 bp, Artificial sequence
  SiRNA target sequence
agtcacgcaaagatccttcgaattg

SEQ ID NO: 92244 - DNA, 25 bp, Artificial sequence
  SiRNA target sequence
gtcacgcaaagatccttcgaattga

SEQ ID NO: 92245 - DNA, 25 bp, Artificial sequence
  SiRNA target sequence
tcacgcaaagatccttcgaattgaa

SEQ ID NO: 92246 - DNA, 25 bp, Artificial sequence
  SiRNA target sequence
cacgcaaagatccttcgaattgaaa

SEQ ID NO: 92247 - DNA, 25 bp, Artificial sequence
  SiRNA target sequence
acgcaaagatccttcgaattgaaac

SEQ ID NO: 92248 - DNA, 25 bp, Artificial sequence
  SiRNA target sequence
cgcaaagatccttcgaattgaaacc

SEQ ID NO: 92249 - DNA, 25 bp, Artificial sequence
  SiRNA target sequence
gcaaagatccttcgaattgaaaccc

SEQ ID NO: 92250 - DNA, 25 bp, Artificial sequence
  SiRNA target sequence
caaagatccttcgaattgaaacccc

SEQ ID NO: 92251 - DNA, 25 bp, Artificial sequence
  SiRNA target sequence
aaagatccttcgaattgaaaccccg

SEQ ID NO: 92252 - DNA, 25 bp, Artificial sequence
  SiRNA target sequence
aagatccttcgaattgaaaccccgt

SEQ ID NO: 92253 - DNA, 25 bp, Artificial sequence
  SiRNA target sequence
agatccttcgaattgaaaccccgtt

SEQ ID NO: 92254 - DNA, 25 bp, Artificial sequence
  SiRNA target sequence
gatccttcgaattgaaaccccgttt

SEQ ID NO: 92255 - DNA, 25 bp, Artificial sequence
  SiRNA target sequence
atccttcgaattgaaaccccgtttt

SEQ ID NO: 92256 - DNA, 25 bp, Artificial sequence
  SiRNA target sequence
tccttcgaattgaaaccccgttttt

SEQ ID NO: 92257 - DNA, 25 bp, Artificial sequence
  SiRNA target sequence
ccttcgaattgaaaccccgtttttc

SEQ ID NO: 92258 - DNA, 25 bp, Artificial sequence
  SiRNA target sequence
cttcgaattgaaaccccgtttttcc

SEQ ID NO: 92259 - DNA, 25 bp, Artificial sequence
  SiRNA target sequence
ttcgaattgaaaccccgtttttcca

SEQ ID NO: 92260 - DNA, 25 bp, Artificial sequence
  SiRNA target sequence
tcgaattgaaaccccgtttttccaa

SEQ ID NO: 92261 - DNA, 25 bp, Artificial sequence
  SiRNA target sequence
cgaattgaaaccccgtttttccaac

SEQ ID NO: 92262 - DNA, 25 bp, Artificial sequence
  SiRNA target sequence
gaattgaaaccccgtttttccaact

SEQ ID NO: 92263 - DNA, 25 bp, Artificial sequence
  SiRNA target sequence
aattgaaaccccgtttttccaactt

SEQ ID NO: 92264 - DNA, 25 bp, Artificial sequence
  SiRNA target sequence
attgaaaccccgtttttccaacttg

SEQ ID NO: 92265 - DNA, 25 bp, Artificial sequence
  SiRNA target sequence
ttgaaaccccgtttttccaacttgc

SEQ ID NO: 92266 - DNA, 25 bp, Artificial sequence
  SiRNA target sequence
tgaaaccccgtttttccaacttgct

SEQ ID NO: 92267 - DNA, 25 bp, Artificial sequence
  SiRNA target sequence
gaaaccccgtttttccaacttgctc

SEQ ID NO: 92268 - DNA, 25 bp, Artificial sequence
  SiRNA target sequence
aaaccccgtttttccaacttgctca

SEQ ID NO: 92269 - DNA, 25 bp, Artificial sequence
  SiRNA target sequence
aaccccgtttttccaacttgctcaa

SEQ ID NO: 92270 - DNA, 25 bp, Artificial sequence
  SiRNA target sequence
accccgtttttccaacttgctcaat

SEQ ID NO: 92271 - DNA, 25 bp, Artificial sequence
  SiRNA target sequence
ccccgtttttccaacttgctcaata

SEQ ID NO: 92272 - DNA, 25 bp, Artificial sequence
  SiRNA target sequence
cccgtttttccaacttgctcaatat

SEQ ID NO: 92273 - DNA, 25 bp, Artificial sequence
  SiRNA target sequence
ccgtttttccaacttgctcaatata

SEQ ID NO: 92274 - DNA, 25 bp, Artificial sequence
  SiRNA target sequence
cgtttttccaacttgctcaatatat

SEQ ID NO: 92275 - DNA, 25 bp, Artificial sequence
  SiRNA target sequence
gtttttccaacttgctcaatatata

SEQ ID NO: 92276 - DNA, 25 bp, Artificial sequence
  SiRNA target sequence
tttttccaacttgctcaatatataa

SEQ ID NO: 92277 - DNA, 25 bp, Artificial sequence
  SiRNA target sequence
ttttccaacttgctcaatatataat

SEQ ID NO: 92278 - DNA, 25 bp, Artificial sequence
  SiRNA target sequence
tttccaacttgctcaatatataata

SEQ ID NO: 92279 - DNA, 25 bp, Artificial sequence
  SiRNA target sequence
ttccaacttgctcaatatataataa

SEQ ID NO: 92280 - DNA, 25 bp, Artificial sequence
  SiRNA target sequence
tccaacttgctcaatatataataat

SEQ ID NO: 92281 - DNA, 25 bp, Artificial sequence
  SiRNA target sequence
ccaacttgctcaatatataataatg

SEQ ID NO: 92282 - DNA, 25 bp, Artificial sequence
  SiRNA target sequence
caacttgctcaatatataataatgt

SEQ ID NO: 92283 - DNA, 25 bp, Artificial sequence
  SiRNA target sequence
aacttgctcaatatataataatgta

SEQ ID NO: 92284 - DNA, 25 bp, Artificial sequence
  SiRNA target sequence
acttgctcaatatataataatgtat

SEQ ID NO: 92285 - DNA, 25 bp, Artificial sequence
  SiRNA target sequence
cttgctcaatatataataatgtatc

SEQ ID NO: 92286 - DNA, 25 bp, Artificial sequence
  SiRNA target sequence
ttgctcaatatataataatgtatca

SEQ ID NO: 92287 - DNA, 25 bp, Artificial sequence
  SiRNA target sequence
tgctcaatatataataatgtatcac

SEQ ID NO: 92288 - DNA, 25 bp, Artificial sequence
  SiRNA target sequence
gctcaatatataataatgtatcacc

SEQ ID NO: 92289 - DNA, 25 bp, Artificial sequence
  SiRNA target sequence
ctcaatatataataatgtatcacca

SEQ ID NO: 92290 - DNA, 25 bp, Artificial sequence
  SiRNA target sequence
tcaatatataataatgtatcaccag

SEQ ID NO: 92291 - DNA, 25 bp, Artificial sequence
  SiRNA target sequence
caatatataataatgtatcaccaga

SEQ ID NO: 92292 - DNA, 25 bp, Artificial sequence
  SiRNA target sequence
aatatataataatgtatcaccagac

SEQ ID NO: 92293 - DNA, 25 bp, Artificial sequence
  SiRNA target sequence
atatataataatgtatcaccagaca

SEQ ID NO: 92294 - DNA, 25 bp, Artificial sequence
  SiRNA target sequence
tatataataatgtatcaccagacat

SEQ ID NO: 92295 - DNA, 25 bp, Artificial sequence
  SiRNA target sequence
atataataatgtatcaccagacatt

SEQ ID NO: 92296 - DNA, 25 bp, Artificial sequence
  SiRNA target sequence
tataataatgtatcaccagacattt

SEQ ID NO: 92297 - DNA, 25 bp, Artificial sequence
  SiRNA target sequence
ataataatgtatcaccagacatttc

SEQ ID NO: 92298 - DNA, 25 bp, Artificial sequence
  SiRNA target sequence
taataatgtatcaccagacatttct

SEQ ID NO: 92299 - DNA, 25 bp, Artificial sequence
  SiRNA target sequence
aataatgtatcaccagacatttcta

SEQ ID NO: 92300 - DNA, 25 bp, Artificial sequence
  SiRNA target sequence
ataatgtatcaccagacatttctag

SEQ ID NO: 92301 - DNA, 25 bp, Artificial sequence
  SiRNA target sequence
taatgtatcaccagacatttctagt

SEQ ID NO: 92302 - DNA, 25 bp, Artificial sequence
  SiRNA target sequence
aatgtatcaccagacatttctagta

SEQ ID NO: 92303 - DNA, 25 bp, Artificial sequence
  SiRNA target sequence
atgtatcaccagacatttctagtaa

SEQ ID NO: 92304 - DNA, 25 bp, Artificial sequence
  SiRNA target sequence
tgtatcaccagacatttctagtaaa

SEQ ID NO: 92305 - DNA, 25 bp, Artificial sequence
  SiRNA target sequence
gtatcaccagacatttctagtaaac

SEQ ID NO: 92306 - DNA, 25 bp, Artificial sequence
  SiRNA target sequence
tatcaccagacatttctagtaaact

SEQ ID NO: 92307 - DNA, 25 bp, Artificial sequence
  SiRNA target sequence
atcaccagacatttctagtaaactt

SEQ ID NO: 92308 - DNA, 25 bp, Artificial sequence
  SiRNA target sequence
tcaccagacatttctagtaaactta

SEQ ID NO: 92309 - DNA, 25 bp, Artificial sequence
  SiRNA target sequence
caccagacatttctagtaaacttaa

SEQ ID NO: 92310 - DNA, 25 bp, Artificial sequence
  SiRNA target sequence
accagacatttctagtaaacttaac

SEQ ID NO: 92311 - DNA, 25 bp, Artificial sequence
  SiRNA target sequence
ccagacatttctagtaaacttaaca

SEQ ID NO: 92312 - DNA, 25 bp, Artificial sequence
  SiRNA target sequence
cagacatttctagtaaacttaacat

SEQ ID NO: 92313 - DNA, 25 bp, Artificial sequence
  SiRNA target sequence
agacatttctagtaaacttaacatt

SEQ ID NO: 92314 - DNA, 25 bp, Artificial sequence
  SiRNA target sequence
gacatttctagtaaacttaacattt

SEQ ID NO: 92315 - DNA, 25 bp, Artificial sequence
  SiRNA target sequence
acatttctagtaaacttaacatttc

SEQ ID NO: 92316 - DNA, 25 bp, Artificial sequence
  SiRNA target sequence
catttctagtaaacttaacatttca

SEQ ID NO: 92317 - DNA, 25 bp, Artificial sequence
  SiRNA target sequence
atttctagtaaacttaacatttcat

SEQ ID NO: 92318 - DNA, 25 bp, Artificial sequence
  SiRNA target sequence
tttctagtaaacttaacatttcatt

SEQ ID NO: 92319 - DNA, 25 bp, Artificial sequence
  SiRNA target sequence
ttctagtaaacttaacatttcatta

SEQ ID NO: 92320 - DNA, 25 bp, Artificial sequence
  SiRNA target sequence
tctagtaaacttaacatttcattaa

SEQ ID NO: 92321 - DNA, 25 bp, Artificial sequence
  SiRNA target sequence
ctagtaaacttaacatttcattaac

SEQ ID NO: 92322 - DNA, 25 bp, Artificial sequence
  SiRNA target sequence
tagtaaacttaacatttcattaaca

SEQ ID NO: 92323 - DNA, 25 bp, Artificial sequence
  SiRNA target sequence
agtaaacttaacatttcattaacaa

SEQ ID NO: 92324 - DNA, 25 bp, Artificial sequence
  SiRNA target sequence
gtaaacttaacatttcattaacaag

SEQ ID NO: 92325 - DNA, 25 bp, Artificial sequence
  SiRNA target sequence
taaacttaacatttcattaacaagc

SEQ ID NO: 92326 - DNA, 25 bp, Artificial sequence
  SiRNA target sequence
aaacttaacatttcattaacaagca

SEQ ID NO: 92327 - DNA, 25 bp, Artificial sequence
  SiRNA target sequence
aacttaacatttcattaacaagcaa

SEQ ID NO: 92328 - DNA, 25 bp, Artificial sequence
  SiRNA target sequence
acttaacatttcattaacaagcaaa

SEQ ID NO: 92329 - DNA, 25 bp, Artificial sequence
  SiRNA target sequence
cttaacatttcattaacaagcaaat

SEQ ID NO: 92330 - DNA, 25 bp, Artificial sequence
  SiRNA target sequence
ttaacatttcattaacaagcaaatc

SEQ ID NO: 92331 - DNA, 25 bp, Artificial sequence
  SiRNA target sequence
taacatttcattaacaagcaaatca

SEQ ID NO: 92332 - DNA, 25 bp, Artificial sequence
  SiRNA target sequence
aacatttcattaacaagcaaatcat

SEQ ID NO: 92333 - DNA, 25 bp, Artificial sequence
  SiRNA target sequence
acatttcattaacaagcaaatcatt

SEQ ID NO: 92334 - DNA, 25 bp, Artificial sequence
  SiRNA target sequence
catttcattaacaagcaaatcatta

SEQ ID NO: 92335 - DNA, 25 bp, Artificial sequence
  SiRNA target sequence
atttcattaacaagcaaatcattat

SEQ ID NO: 92336 - DNA, 25 bp, Artificial sequence
  SiRNA target sequence
tttcattaacaagcaaatcattatt

SEQ ID NO: 92337 - DNA, 25 bp, Artificial sequence
  SiRNA target sequence
ttcattaacaagcaaatcattattt

SEQ ID NO: 92338 - DNA, 25 bp, Artificial sequence
  SiRNA target sequence
tcattaacaagcaaatcattatttg

SEQ ID NO: 92339 - DNA, 25 bp, Artificial sequence
  SiRNA target sequence
cattaacaagcaaatcattatttga

SEQ ID NO: 92340 - DNA, 25 bp, Artificial sequence
  SiRNA target sequence
attaacaagcaaatcattatttgaa

SEQ ID NO: 92341 - DNA, 25 bp, Artificial sequence
  SiRNA target sequence
ttaacaagcaaatcattatttgaac

SEQ ID NO: 92342 - DNA, 25 bp, Artificial sequence
  SiRNA target sequence
taacaagcaaatcattatttgaaca

SEQ ID NO: 92343 - DNA, 25 bp, Artificial sequence
  SiRNA target sequence
aacaagcaaatcattatttgaacaa

SEQ ID NO: 92344 - DNA, 25 bp, Artificial sequence
  SiRNA target sequence
acaagcaaatcattatttgaacaaa

SEQ ID NO: 92345 - DNA, 25 bp, Artificial sequence
  SiRNA target sequence
caagcaaatcattatttgaacaaag

SEQ ID NO: 92346 - DNA, 25 bp, Artificial sequence
  SiRNA target sequence
aagcaaatcattatttgaacaaagt

SEQ ID NO: 92347 - DNA, 25 bp, Artificial sequence
  SiRNA target sequence
agcaaatcattatttgaacaaagta

SEQ ID NO: 92348 - DNA, 25 bp, Artificial sequence
  SiRNA target sequence
gcaaatcattatttgaacaaagtag

SEQ ID NO: 92349 - DNA, 25 bp, Artificial sequence
  SiRNA target sequence
caaatcattatttgaacaaagtaga

SEQ ID NO: 92350 - DNA, 25 bp, Artificial sequence
  SiRNA target sequence
aaatcattatttgaacaaagtagac

SEQ ID NO: 92351 - DNA, 25 bp, Artificial sequence
  SiRNA target sequence
aatcattatttgaacaaagtagacc

SEQ ID NO: 92352 - DNA, 25 bp, Artificial sequence
  SiRNA target sequence
atcattatttgaacaaagtagacca

SEQ ID NO: 92353 - DNA, 25 bp, Artificial sequence
  SiRNA target sequence
tcattatttgaacaaagtagaccaa

SEQ ID NO: 92354 - DNA, 25 bp, Artificial sequence
  SiRNA target sequence
cattatttgaacaaagtagaccaat

SEQ ID NO: 92355 - DNA, 25 bp, Artificial sequence
  SiRNA target sequence
attatttgaacaaagtagaccaata

SEQ ID NO: 92356 - DNA, 25 bp, Artificial sequence
  SiRNA target sequence
ttatttgaacaaagtagaccaatac

SEQ ID NO: 92357 - DNA, 25 bp, Artificial sequence
  SiRNA target sequence
tatttgaacaaagtagaccaatact

SEQ ID NO: 92358 - DNA, 25 bp, Artificial sequence
  SiRNA target sequence
atttgaacaaagtagaccaatacta

SEQ ID NO: 92359 - DNA, 25 bp, Artificial sequence
  SiRNA target sequence
tttgaacaaagtagaccaatactat

SEQ ID NO: 92360 - DNA, 25 bp, Artificial sequence
  SiRNA target sequence
ttgaacaaagtagaccaatactatc

SEQ ID NO: 92361 - DNA, 25 bp, Artificial sequence
  SiRNA target sequence
tgaacaaagtagaccaatactatca

SEQ ID NO: 92362 - DNA, 25 bp, Artificial sequence
  SiRNA target sequence
gaacaaagtagaccaatactatcac

SEQ ID NO: 92363 - DNA, 25 bp, Artificial sequence
  SiRNA target sequence
aacaaagtagaccaatactatcacc

SEQ ID NO: 92364 - DNA, 25 bp, Artificial sequence
  SiRNA target sequence
acaaagtagaccaatactatcacca

SEQ ID NO: 92365 - DNA, 25 bp, Artificial sequence
  SiRNA target sequence
caaagtagaccaatactatcaccag

SEQ ID NO: 92366 - DNA, 25 bp, Artificial sequence
  SiRNA target sequence
aaagtagaccaatactatcaccagg

SEQ ID NO: 92367 - DNA, 25 bp, Artificial sequence
  SiRNA target sequence
aagtagaccaatactatcaccagga

SEQ ID NO: 92368 - DNA, 25 bp, Artificial sequence
  SiRNA target sequence
agtagaccaatactatcaccaggaa

SEQ ID NO: 92369 - DNA, 25 bp, Artificial sequence
  SiRNA target sequence
gtagaccaatactatcaccaggaac

SEQ ID NO: 92370 - DNA, 25 bp, Artificial sequence
  SiRNA target sequence
tagaccaatactatcaccaggaaca

SEQ ID NO: 92371 - DNA, 25 bp, Artificial sequence
  SiRNA target sequence
agaccaatactatcaccaggaacaa

SEQ ID NO: 92372 - DNA, 25 bp, Artificial sequence
  SiRNA target sequence
gaccaatactatcaccaggaacaaa

SEQ ID NO: 92373 - DNA, 25 bp, Artificial sequence
  SiRNA target sequence
accaatactatcaccaggaacaaaa

SEQ ID NO: 92374 - DNA, 25 bp, Artificial sequence
  SiRNA target sequence
ccaatactatcaccaggaacaaaat

SEQ ID NO: 92375 - DNA, 25 bp, Artificial sequence
  SiRNA target sequence
caatactatcaccaggaacaaaatc

SEQ ID NO: 92376 - DNA, 25 bp, Artificial sequence
  SiRNA target sequence
aatactatcaccaggaacaaaatct

SEQ ID NO: 92377 - DNA, 25 bp, Artificial sequence
  SiRNA target sequence
atactatcaccaggaacaaaatcta

SEQ ID NO: 92378 - DNA, 25 bp, Artificial sequence
  SiRNA target sequence
tactatcaccaggaacaaaatctaa

SEQ ID NO: 92379 - DNA, 25 bp, Artificial sequence
  SiRNA target sequence
actatcaccaggaacaaaatctaat

SEQ ID NO: 92380 - DNA, 25 bp, Artificial sequence
  SiRNA target sequence
ctatcaccaggaacaaaatctaatg

SEQ ID NO: 92381 - DNA, 25 bp, Artificial sequence
  SiRNA target sequence
tatcaccaggaacaaaatctaatgt

SEQ ID NO: 92382 - DNA, 25 bp, Artificial sequence
  SiRNA target sequence
atcaccaggaacaaaatctaatgta

SEQ ID NO: 92383 - DNA, 25 bp, Artificial sequence
  SiRNA target sequence
tcaccaggaacaaaatctaatgtat

SEQ ID NO: 92384 - DNA, 25 bp, Artificial sequence
  SiRNA target sequence
caccaggaacaaaatctaatgtata

SEQ ID NO: 92385 - DNA, 25 bp, Artificial sequence
  SiRNA target sequence
accaggaacaaaatctaatgtataa

SEQ ID NO: 92386 - DNA, 25 bp, Artificial sequence
  SiRNA target sequence
ccaggaacaaaatctaatgtataat

SEQ ID NO: 92387 - DNA, 25 bp, Artificial sequence
  SiRNA target sequence
caggaacaaaatctaatgtataatt

SEQ ID NO: 92388 - DNA, 25 bp, Artificial sequence
  SiRNA target sequence
aggaacaaaatctaatgtataatta

SEQ ID NO: 92389 - DNA, 25 bp, Artificial sequence
  SiRNA target sequence
ggaacaaaatctaatgtataattaa

SEQ ID NO: 92390 - DNA, 25 bp, Artificial sequence
  SiRNA target sequence
gaacaaaatctaatgtataattaag

SEQ ID NO: 92391 - DNA, 25 bp, Artificial sequence
  SiRNA target sequence
aacaaaatctaatgtataattaagt

SEQ ID NO: 92392 - DNA, 25 bp, Artificial sequence
  SiRNA target sequence
acaaaatctaatgtataattaagtt

SEQ ID NO: 92393 - DNA, 25 bp, Artificial sequence
  SiRNA target sequence
caaaatctaatgtataattaagttg

SEQ ID NO: 92394 - DNA, 25 bp, Artificial sequence
  SiRNA target sequence
aaaatctaatgtataattaagttga

SEQ ID NO: 92395 - DNA, 25 bp, Artificial sequence
  SiRNA target sequence
aaatctaatgtataattaagttgaa

SEQ ID NO: 92396 - DNA, 25 bp, Artificial sequence
  SiRNA target sequence
aatctaatgtataattaagttgaac

SEQ ID NO: 92397 - DNA, 25 bp, Artificial sequence
  SiRNA target sequence
atctaatgtataattaagttgaacc

SEQ ID NO: 92398 - DNA, 25 bp, Artificial sequence
  SiRNA target sequence
tctaatgtataattaagttgaacct

SEQ ID NO: 92399 - DNA, 25 bp, Artificial sequence
  SiRNA target sequence
ctaatgtataattaagttgaacctt

SEQ ID NO: 92400 - DNA, 25 bp, Artificial sequence
  SiRNA target sequence
taatgtataattaagttgaacctta

SEQ ID NO: 92401 - DNA, 25 bp, Artificial sequence
  SiRNA target sequence
aatgtataattaagttgaaccttat

SEQ ID NO: 92402 - DNA, 25 bp, Artificial sequence
  SiRNA target sequence
atgtataattaagttgaaccttata

SEQ ID NO: 92403 - DNA, 25 bp, Artificial sequence
  SiRNA target sequence
tgtataattaagttgaaccttatat

SEQ ID NO: 92404 - DNA, 25 bp, Artificial sequence
  SiRNA target sequence
gtataattaagttgaaccttatata

SEQ ID NO: 92405 - DNA, 25 bp, Artificial sequence
  SiRNA target sequence
tataattaagttgaaccttatatac

SEQ ID NO: 92406 - DNA, 25 bp, Artificial sequence
  SiRNA target sequence
ataattaagttgaaccttatatacc

SEQ ID NO: 92407 - DNA, 25 bp, Artificial sequence
  SiRNA target sequence
taattaagttgaaccttatatacct

SEQ ID NO: 92408 - DNA, 25 bp, Artificial sequence
  SiRNA target sequence
aattaagttgaaccttatatacctt

SEQ ID NO: 92409 - DNA, 25 bp, Artificial sequence
  SiRNA target sequence
attaagttgaaccttatataccttt

SEQ ID NO: 92410 - DNA, 25 bp, Artificial sequence
  SiRNA target sequence
ttaagttgaaccttatatacctttt

SEQ ID NO: 92411 - DNA, 25 bp, Artificial sequence
  SiRNA target sequence
taagttgaaccttatataccttttt

SEQ ID NO: 92412 - DNA, 25 bp, Artificial sequence
  SiRNA target sequence
aagttgaaccttatatacctttttc

SEQ ID NO: 92413 - DNA, 25 bp, Artificial sequence
  SiRNA target sequence
agttgaaccttatatacctttttcc

SEQ ID NO: 92414 - DNA, 25 bp, Artificial sequence
  SiRNA target sequence
gttgaaccttatatacctttttcca

SEQ ID NO: 92415 - DNA, 25 bp, Artificial sequence
  SiRNA target sequence
ttgaaccttatatacctttttccat

SEQ ID NO: 92416 - DNA, 25 bp, Artificial sequence
  SiRNA target sequence
tgaaccttatatacctttttccatg

SEQ ID NO: 92417 - DNA, 25 bp, Artificial sequence
  SiRNA target sequence
gaaccttatatacctttttccatgt

SEQ ID NO: 92418 - DNA, 25 bp, Artificial sequence
  SiRNA target sequence
aaccttatatacctttttccatgta

SEQ ID NO: 92419 - DNA, 25 bp, Artificial sequence
  SiRNA target sequence
accttatatacctttttccatgtac

SEQ ID NO: 92420 - DNA, 25 bp, Artificial sequence
  SiRNA target sequence
ccttatatacctttttccatgtaca

SEQ ID NO: 92421 - DNA, 25 bp, Artificial sequence
  SiRNA target sequence
cttatatacctttttccatgtacag

SEQ ID NO: 92422 - DNA, 25 bp, Artificial sequence
  SiRNA target sequence
ttatatacctttttccatgtacagg

SEQ ID NO: 92423 - DNA, 25 bp, Artificial sequence
  SiRNA target sequence
tatatacctttttccatgtacagga

SEQ ID NO: 92424 - DNA, 25 bp, Artificial sequence
  SiRNA target sequence
atatacctttttccatgtacaggaa

SEQ ID NO: 92425 - DNA, 25 bp, Artificial sequence
  SiRNA target sequence
tatacctttttccatgtacaggaaa

SEQ ID NO: 92426 - DNA, 25 bp, Artificial sequence
  SiRNA target sequence
atacctttttccatgtacaggaaag

SEQ ID NO: 92427 - DNA, 25 bp, Artificial sequence
  SiRNA target sequence
tacctttttccatgtacaggaaagg

SEQ ID NO: 92428 - DNA, 25 bp, Artificial sequence
  SiRNA target sequence
acctttttccatgtacaggaaaggt

SEQ ID NO: 92429 - DNA, 25 bp, Artificial sequence
  SiRNA target sequence
cctttttccatgtacaggaaaggtt

SEQ ID NO: 92430 - DNA, 25 bp, Artificial sequence
  SiRNA target sequence
ctttttccatgtacaggaaaggttt

SEQ ID NO: 92431 - DNA, 25 bp, Artificial sequence
  SiRNA target sequence
tttttccatgtacaggaaaggtttt

SEQ ID NO: 92432 - DNA, 25 bp, Artificial sequence
  SiRNA target sequence
ttttccatgtacaggaaaggttttc

SEQ ID NO: 92433 - DNA, 25 bp, Artificial sequence
  SiRNA target sequence
tttccatgtacaggaaaggttttca

SEQ ID NO: 92434 - DNA, 25 bp, Artificial sequence
  SiRNA target sequence
ttccatgtacaggaaaggttttcaa

SEQ ID NO: 92435 - DNA, 25 bp, Artificial sequence
  SiRNA target sequence
tccatgtacaggaaaggttttcaat

SEQ ID NO: 92436 - DNA, 25 bp, Artificial sequence
  SiRNA target sequence
ccatgtacaggaaaggttttcaata

SEQ ID NO: 92437 - DNA, 25 bp, Artificial sequence
  SiRNA target sequence
catgtacaggaaaggttttcaatat

SEQ ID NO: 92438 - DNA, 25 bp, Artificial sequence
  SiRNA target sequence
atgtacaggaaaggttttcaatatt

SEQ ID NO: 92439 - DNA, 25 bp, Artificial sequence
  SiRNA target sequence
tgtacaggaaaggttttcaatattt

SEQ ID NO: 92440 - DNA, 25 bp, Artificial sequence
  SiRNA target sequence
gtacaggaaaggttttcaatattta

SEQ ID NO: 92441 - DNA, 25 bp, Artificial sequence
  SiRNA target sequence
tacaggaaaggttttcaatatttag

SEQ ID NO: 92442 - DNA, 25 bp, Artificial sequence
  SiRNA target sequence
acaggaaaggttttcaatatttagt

SEQ ID NO: 92443 - DNA, 25 bp, Artificial sequence
  SiRNA target sequence
caggaaaggttttcaatatttagta

SEQ ID NO: 92444 - DNA, 25 bp, Artificial sequence
  SiRNA target sequence
aggaaaggttttcaatatttagtat

SEQ ID NO: 92445 - DNA, 25 bp, Artificial sequence
  SiRNA target sequence
ggaaaggttttcaatatttagtata

SEQ ID NO: 92446 - DNA, 25 bp, Artificial sequence
  SiRNA target sequence
gaaaggttttcaatatttagtatat

SEQ ID NO: 92447 - DNA, 25 bp, Artificial sequence
  SiRNA target sequence
aaaggttttcaatatttagtatatt

SEQ ID NO: 92448 - DNA, 25 bp, Artificial sequence
  SiRNA target sequence
aaggttttcaatatttagtatattt

SEQ ID NO: 92449 - DNA, 25 bp, Artificial sequence
  SiRNA target sequence
aggttttcaatatttagtatatttg

SEQ ID NO: 92450 - DNA, 25 bp, Artificial sequence
  SiRNA target sequence
ggttttcaatatttagtatatttgt

SEQ ID NO: 92451 - DNA, 25 bp, Artificial sequence
  SiRNA target sequence
gttttcaatatttagtatatttgta

SEQ ID NO: 92452 - DNA, 25 bp, Artificial sequence
  SiRNA target sequence
ttttcaatatttagtatatttgtat

SEQ ID NO: 92453 - DNA, 25 bp, Artificial sequence
  SiRNA target sequence
tttcaatatttagtatatttgtatc

SEQ ID NO: 92454 - DNA, 25 bp, Artificial sequence
  SiRNA target sequence
ttcaatatttagtatatttgtatct

SEQ ID NO: 92455 - DNA, 25 bp, Artificial sequence
  SiRNA target sequence
tcaatatttagtatatttgtatcta

SEQ ID NO: 92456 - DNA, 25 bp, Artificial sequence
  SiRNA target sequence
caatatttagtatatttgtatctat

SEQ ID NO: 92457 - DNA, 25 bp, Artificial sequence
  SiRNA target sequence
aatatttagtatatttgtatctatc

SEQ ID NO: 92458 - DNA, 25 bp, Artificial sequence
  SiRNA target sequence
atatttagtatatttgtatctatca

SEQ ID NO: 92459 - DNA, 25 bp, Artificial sequence
  SiRNA target sequence
tatttagtatatttgtatctatcaa

SEQ ID NO: 92460 - DNA, 25 bp, Artificial sequence
  SiRNA target sequence
atttagtatatttgtatctatcaaa

SEQ ID NO: 92461 - DNA, 25 bp, Artificial sequence
  SiRNA target sequence
tttagtatatttgtatctatcaaat

SEQ ID NO: 92462 - DNA, 25 bp, Artificial sequence
  SiRNA target sequence
ttagtatatttgtatctatcaaatt

SEQ ID NO: 92463 - DNA, 25 bp, Artificial sequence
  SiRNA target sequence
tagtatatttgtatctatcaaattt

SEQ ID NO: 92464 - DNA, 25 bp, Artificial sequence
  SiRNA target sequence
agtatatttgtatctatcaaattta

SEQ ID NO: 92465 - DNA, 25 bp, Artificial sequence
  SiRNA target sequence
gtatatttgtatctatcaaatttat

SEQ ID NO: 92466 - DNA, 25 bp, Artificial sequence
  SiRNA target sequence
tatatttgtatctatcaaatttata

SEQ ID NO: 92467 - DNA, 25 bp, Artificial sequence
  SiRNA target sequence
atatttgtatctatcaaatttatat

SEQ ID NO: 92468 - DNA, 25 bp, Artificial sequence
  SiRNA target sequence
tatttgtatctatcaaatttatatt

SEQ ID NO: 92469 - DNA, 25 bp, Artificial sequence
  SiRNA target sequence
atttgtatctatcaaatttatattc

SEQ ID NO: 92470 - DNA, 25 bp, Artificial sequence
  SiRNA target sequence
tttgtatctatcaaatttatattct

SEQ ID NO: 92471 - DNA, 25 bp, Artificial sequence
  SiRNA target sequence
ttgtatctatcaaatttatattctc

SEQ ID NO: 92472 - DNA, 25 bp, Artificial sequence
  SiRNA target sequence
tgtatctatcaaatttatattctcg

SEQ ID NO: 92473 - DNA, 25 bp, Artificial sequence
  SiRNA target sequence
gtatctatcaaatttatattctcgt

SEQ ID NO: 92474 - DNA, 25 bp, Artificial sequence
  SiRNA target sequence
tatctatcaaatttatattctcgtt

SEQ ID NO: 92475 - DNA, 25 bp, Artificial sequence
  SiRNA target sequence
atctatcaaatttatattctcgttt

SEQ ID NO: 92476 - DNA, 25 bp, Artificial sequence
  SiRNA target sequence
tctatcaaatttatattctcgtttg

SEQ ID NO: 92477 - DNA, 25 bp, Artificial sequence
  SiRNA target sequence
ctatcaaatttatattctcgtttgt

SEQ ID NO: 92478 - DNA, 25 bp, Artificial sequence
  SiRNA target sequence
tatcaaatttatattctcgtttgtc

SEQ ID NO: 92479 - DNA, 25 bp, Artificial sequence
  SiRNA target sequence
atcaaatttatattctcgtttgtct

SEQ ID NO: 92480 - DNA, 25 bp, Artificial sequence
  SiRNA target sequence
tcaaatttatattctcgtttgtctt

SEQ ID NO: 92481 - DNA, 25 bp, Artificial sequence
  SiRNA target sequence
caaatttatattctcgtttgtcttt

SEQ ID NO: 92482 - DNA, 25 bp, Artificial sequence
  SiRNA target sequence
aaatttatattctcgtttgtcttta

SEQ ID NO: 92483 - DNA, 25 bp, Artificial sequence
  SiRNA target sequence
aatttatattctcgtttgtctttat

SEQ ID NO: 92484 - DNA, 25 bp, Artificial sequence
  SiRNA target sequence
atttatattctcgtttgtctttatt

SEQ ID NO: 92485 - DNA, 25 bp, Artificial sequence
  SiRNA target sequence
tttatattctcgtttgtctttattt

SEQ ID NO: 92486 - DNA, 25 bp, Artificial sequence
  SiRNA target sequence
ttatattctcgtttgtctttatttt

SEQ ID NO: 92487 - DNA, 25 bp, Artificial sequence
  SiRNA target sequence
tatattctcgtttgtctttatttta

SEQ ID NO: 92488 - DNA, 25 bp, Artificial sequence
  SiRNA target sequence
atattctcgtttgtctttattttat

SEQ ID NO: 92489 - DNA, 25 bp, Artificial sequence
  SiRNA target sequence
tattctcgtttgtctttattttata

SEQ ID NO: 92490 - DNA, 25 bp, Artificial sequence
  SiRNA target sequence
attctcgtttgtctttattttataa

SEQ ID NO: 92491 - DNA, 25 bp, Artificial sequence
  SiRNA target sequence
ttctcgtttgtctttattttataag

SEQ ID NO: 92492 - DNA, 25 bp, Artificial sequence
  SiRNA target sequence
tctcgtttgtctttattttataaga

SEQ ID NO: 92493 - DNA, 25 bp, Artificial sequence
  SiRNA target sequence
ctcgtttgtctttattttataagaa

SEQ ID NO: 92494 - DNA, 25 bp, Artificial sequence
  SiRNA target sequence
tcgtttgtctttattttataagaac

SEQ ID NO: 92495 - DNA, 25 bp, Artificial sequence
  SiRNA target sequence
cgtttgtctttattttataagaacc

SEQ ID NO: 92496 - DNA, 25 bp, Artificial sequence
  SiRNA target sequence
gtttgtctttattttataagaacct

SEQ ID NO: 92497 - DNA, 25 bp, Artificial sequence
  SiRNA target sequence
tttgtctttattttataagaacctg

SEQ ID NO: 92498 - DNA, 25 bp, Artificial sequence
  SiRNA target sequence
ttgtctttattttataagaacctgt

SEQ ID NO: 92499 - DNA, 25 bp, Artificial sequence
  SiRNA target sequence
tgtctttattttataagaacctgta

SEQ ID NO: 92500 - DNA, 25 bp, Artificial sequence
  SiRNA target sequence
gtctttattttataagaacctgtat

SEQ ID NO: 92501 - DNA, 25 bp, Artificial sequence
  SiRNA target sequence
tctttattttataagaacctgtata

SEQ ID NO: 92502 - DNA, 25 bp, Artificial sequence
  SiRNA target sequence
ctttattttataagaacctgtatag

SEQ ID NO: 92503 - DNA, 25 bp, Artificial sequence
  SiRNA target sequence
tttattttataagaacctgtatagt

SEQ ID NO: 92504 - DNA, 25 bp, Artificial sequence
  SiRNA target sequence
ttattttataagaacctgtatagtt

SEQ ID NO: 92505 - DNA, 25 bp, Artificial sequence
  SiRNA target sequence
tattttataagaacctgtatagttg

SEQ ID NO: 92506 - DNA, 25 bp, Artificial sequence
  SiRNA target sequence
attttataagaacctgtatagttgg

SEQ ID NO: 92507 - DNA, 25 bp, Artificial sequence
  SiRNA target sequence
ttttataagaacctgtatagttggt

SEQ ID NO: 92508 - DNA, 25 bp, Artificial sequence
  SiRNA target sequence
tttataagaacctgtatagttggtc

SEQ ID NO: 92509 - DNA, 25 bp, Artificial sequence
  SiRNA target sequence
ttataagaacctgtatagttggtct

SEQ ID NO: 92510 - DNA, 25 bp, Artificial sequence
  SiRNA target sequence
tataagaacctgtatagttggtctt

SEQ ID NO: 92511 - DNA, 25 bp, Artificial sequence
  SiRNA target sequence
ataagaacctgtatagttggtcttt

SEQ ID NO: 92512 - DNA, 25 bp, Artificial sequence
  SiRNA target sequence
taagaacctgtatagttggtctttt

SEQ ID NO: 92513 - DNA, 25 bp, Artificial sequence
  SiRNA target sequence
aagaacctgtatagttggtcttttt

SEQ ID NO: 92514 - DNA, 25 bp, Artificial sequence
  SiRNA target sequence
agaacctgtatagttggtcttttta

SEQ ID NO: 92515 - DNA, 25 bp, Artificial sequence
  SiRNA target sequence
gaacctgtatagttggtctttttaa

SEQ ID NO: 92516 - DNA, 25 bp, Artificial sequence
  SiRNA target sequence
aacctgtatagttggtctttttaat

SEQ ID NO: 92517 - DNA, 25 bp, Artificial sequence
  SiRNA target sequence
acctgtatagttggtctttttaatt

SEQ ID NO: 92518 - DNA, 25 bp, Artificial sequence
  SiRNA target sequence
cctgtatagttggtctttttaatta

SEQ ID NO: 92519 - DNA, 25 bp, Artificial sequence
  SiRNA target sequence
ctgtatagttggtctttttaattat

SEQ ID NO: 92520 - DNA, 25 bp, Artificial sequence
  SiRNA target sequence
tgtatagttggtctttttaattata

SEQ ID NO: 92521 - DNA, 25 bp, Artificial sequence
  SiRNA target sequence
gtatagttggtctttttaattataa

SEQ ID NO: 92522 - DNA, 25 bp, Artificial sequence
  SiRNA target sequence
tatagttggtctttttaattataag

SEQ ID NO: 92523 - DNA, 25 bp, Artificial sequence
  SiRNA target sequence
atagttggtctttttaattataagc

SEQ ID NO: 92524 - DNA, 25 bp, Artificial sequence
  SiRNA target sequence
tagttggtctttttaattataagct

SEQ ID NO: 92525 - DNA, 25 bp, Artificial sequence
  SiRNA target sequence
agttggtctttttaattataagctt

SEQ ID NO: 92526 - DNA, 25 bp, Artificial sequence
  SiRNA target sequence
gttggtctttttaattataagctta

SEQ ID NO: 92527 - DNA, 25 bp, Artificial sequence
  SiRNA target sequence
ttggtctttttaattataagcttat

SEQ ID NO: 92528 - DNA, 25 bp, Artificial sequence
  SiRNA target sequence
tggtctttttaattataagcttatt

SEQ ID NO: 92529 - DNA, 25 bp, Artificial sequence
  SiRNA target sequence
ggtctttttaattataagcttattg

SEQ ID NO: 92530 - DNA, 25 bp, Artificial sequence
  SiRNA target sequence
gtctttttaattataagcttattga

SEQ ID NO: 92531 - DNA, 25 bp, Artificial sequence
  SiRNA target sequence
tctttttaattataagcttattgaa

SEQ ID NO: 92532 - DNA, 25 bp, Artificial sequence
  SiRNA target sequence
ctttttaattataagcttattgaaa

SEQ ID NO: 92533 - DNA, 25 bp, Artificial sequence
  SiRNA target sequence
tttttaattataagcttattgaaat

SEQ ID NO: 92534 - DNA, 25 bp, Artificial sequence
  SiRNA target sequence
ttttaattataagcttattgaaatt

SEQ ID NO: 92535 - DNA, 25 bp, Artificial sequence
  SiRNA target sequence
tttaattataagcttattgaaattt

SEQ ID NO: 92536 - DNA, 25 bp, Artificial sequence
  SiRNA target sequence
ttaattataagcttattgaaatttc

SEQ ID NO: 92537 - DNA, 25 bp, Artificial sequence
  SiRNA target sequence
taattataagcttattgaaatttct

SEQ ID NO: 92538 - DNA, 25 bp, Artificial sequence
  SiRNA target sequence
aattataagcttattgaaatttcta

SEQ ID NO: 92539 - DNA, 25 bp, Artificial sequence
  SiRNA target sequence
attataagcttattgaaatttctaa

SEQ ID NO: 92540 - DNA, 25 bp, Artificial sequence
  SiRNA target sequence
ttataagcttattgaaatttctaat

SEQ ID NO: 92541 - DNA, 25 bp, Artificial sequence
  SiRNA target sequence
tataagcttattgaaatttctaata

SEQ ID NO: 92542 - DNA, 25 bp, Artificial sequence
  SiRNA target sequence
ataagcttattgaaatttctaatat

SEQ ID NO: 92543 - DNA, 25 bp, Artificial sequence
  SiRNA target sequence
taagcttattgaaatttctaatatt

SEQ ID NO: 92544 - DNA, 25 bp, Artificial sequence
  SiRNA target sequence
aagcttattgaaatttctaatattt

SEQ ID NO: 92545 - DNA, 25 bp, Artificial sequence
  SiRNA target sequence
agcttattgaaatttctaatattta

SEQ ID NO: 92546 - DNA, 25 bp, Artificial sequence
  SiRNA target sequence
gcttattgaaatttctaatatttaa

SEQ ID NO: 92547 - DNA, 25 bp, Artificial sequence
  SiRNA target sequence
cttattgaaatttctaatatttaaa

SEQ ID NO: 92548 - DNA, 25 bp, Artificial sequence
  SiRNA target sequence
ttattgaaatttctaatatttaaag

SEQ ID NO: 92549 - DNA, 25 bp, Artificial sequence
  SiRNA target sequence
tattgaaatttctaatatttaaagg

SEQ ID NO: 92550 - DNA, 25 bp, Artificial sequence
  SiRNA target sequence
attgaaatttctaatatttaaagga

SEQ ID NO: 92551 - DNA, 25 bp, Artificial sequence
  SiRNA target sequence
ttgaaatttctaatatttaaaggaa

SEQ ID NO: 92552 - DNA, 25 bp, Artificial sequence
  SiRNA target sequence
tgaaatttctaatatttaaaggaac

SEQ ID NO: 92553 - DNA, 25 bp, Artificial sequence
  SiRNA target sequence
gaaatttctaatatttaaaggaaca

SEQ ID NO: 92554 - DNA, 25 bp, Artificial sequence
  SiRNA target sequence
aaatttctaatatttaaaggaacaa

SEQ ID NO: 92555 - DNA, 25 bp, Artificial sequence
  SiRNA target sequence
aatttctaatatttaaaggaacaaa

SEQ ID NO: 92556 - DNA, 25 bp, Artificial sequence
  SiRNA target sequence
atttctaatatttaaaggaacaaaa

SEQ ID NO: 92557 - DNA, 25 bp, Artificial sequence
  SiRNA target sequence
tttctaatatttaaaggaacaaaat

SEQ ID NO: 92558 - DNA, 25 bp, Artificial sequence
  SiRNA target sequence
ttctaatatttaaaggaacaaaatc

SEQ ID NO: 92559 - DNA, 25 bp, Artificial sequence
  SiRNA target sequence
tctaatatttaaaggaacaaaatct

SEQ ID NO: 92560 - DNA, 25 bp, Artificial sequence
  SiRNA target sequence
ctaatatttaaaggaacaaaatcta

SEQ ID NO: 92561 - DNA, 25 bp, Artificial sequence
  SiRNA target sequence
taatatttaaaggaacaaaatctac

SEQ ID NO: 92562 - DNA, 25 bp, Artificial sequence
  SiRNA target sequence
aatatttaaaggaacaaaatctaca

SEQ ID NO: 92563 - DNA, 25 bp, Artificial sequence
  SiRNA target sequence
atatttaaaggaacaaaatctacat

SEQ ID NO: 92564 - DNA, 25 bp, Artificial sequence
  SiRNA target sequence
tatttaaaggaacaaaatctacatt

SEQ ID NO: 92565 - DNA, 25 bp, Artificial sequence
  SiRNA target sequence
atttaaaggaacaaaatctacattt

SEQ ID NO: 92566 - DNA, 25 bp, Artificial sequence
  SiRNA target sequence
tttaaaggaacaaaatctacattta

SEQ ID NO: 92567 - DNA, 25 bp, Artificial sequence
  SiRNA target sequence
ttaaaggaacaaaatctacatttag

SEQ ID NO: 92568 - DNA, 25 bp, Artificial sequence
  SiRNA target sequence
taaaggaacaaaatctacatttaga

SEQ ID NO: 92569 - DNA, 25 bp, Artificial sequence
  SiRNA target sequence
aaaggaacaaaatctacatttagat

SEQ ID NO: 92570 - DNA, 25 bp, Artificial sequence
  SiRNA target sequence
aaggaacaaaatctacatttagatt

SEQ ID NO: 92571 - DNA, 25 bp, Artificial sequence
  SiRNA target sequence
aggaacaaaatctacatttagatta

SEQ ID NO: 92572 - DNA, 25 bp, Artificial sequence
  SiRNA target sequence
ggaacaaaatctacatttagattat

SEQ ID NO: 92573 - DNA, 25 bp, Artificial sequence
  SiRNA target sequence
gaacaaaatctacatttagattata

SEQ ID NO: 92574 - DNA, 25 bp, Artificial sequence
  SiRNA target sequence
aacaaaatctacatttagattatat

SEQ ID NO: 92575 - DNA, 25 bp, Artificial sequence
  SiRNA target sequence
acaaaatctacatttagattatatt

SEQ ID NO: 92576 - DNA, 25 bp, Artificial sequence
  SiRNA target sequence
caaaatctacatttagattatattc

SEQ ID NO: 92577 - DNA, 25 bp, Artificial sequence
  SiRNA target sequence
aaaatctacatttagattatattct

SEQ ID NO: 92578 - DNA, 25 bp, Artificial sequence
  SiRNA target sequence
aaatctacatttagattatattcta

SEQ ID NO: 92579 - DNA, 25 bp, Artificial sequence
  SiRNA target sequence
aatctacatttagattatattctaa

SEQ ID NO: 92580 - DNA, 25 bp, Artificial sequence
  SiRNA target sequence
atctacatttagattatattctaat

SEQ ID NO: 92581 - DNA, 25 bp, Artificial sequence
  SiRNA target sequence
tctacatttagattatattctaatt

SEQ ID NO: 92582 - DNA, 25 bp, Artificial sequence
  SiRNA target sequence
ctacatttagattatattctaattt

SEQ ID NO: 92583 - DNA, 25 bp, Artificial sequence
  SiRNA target sequence
tacatttagattatattctaattta

SEQ ID NO: 92584 - DNA, 25 bp, Artificial sequence
  SiRNA target sequence
acatttagattatattctaatttat

SEQ ID NO: 92585 - DNA, 25 bp, Artificial sequence
  SiRNA target sequence
catttagattatattctaatttatt

SEQ ID NO: 92586 - DNA, 25 bp, Artificial sequence
  SiRNA target sequence
atttagattatattctaatttattg

SEQ ID NO: 92587 - DNA, 25 bp, Artificial sequence
  SiRNA target sequence
tttagattatattctaatttattga

SEQ ID NO: 92588 - DNA, 25 bp, Artificial sequence
  SiRNA target sequence
ttagattatattctaatttattgaa

SEQ ID NO: 92589 - DNA, 25 bp, Artificial sequence
  SiRNA target sequence
tagattatattctaatttattgaat

SEQ ID NO: 92590 - DNA, 25 bp, Artificial sequence
  SiRNA target sequence
agattatattctaatttattgaatt

SEQ ID NO: 92591 - DNA, 25 bp, Artificial sequence
  SiRNA target sequence
gattatattctaatttattgaattt

SEQ ID NO: 92592 - DNA, 25 bp, Artificial sequence
  SiRNA target sequence
attatattctaatttattgaatttc

SEQ ID NO: 92593 - DNA, 25 bp, Artificial sequence
  SiRNA target sequence
ttatattctaatttattgaatttca

SEQ ID NO: 92594 - DNA, 25 bp, Artificial sequence
  SiRNA target sequence
tatattctaatttattgaatttcat

SEQ ID NO: 92595 - DNA, 26 bp, Artificial sequence
  SiRNA target sequence
ttatatccaactatcaaaaaatagcc

SEQ ID NO: 92596 - DNA, 26 bp, Artificial sequence
  SiRNA target sequence
tatatccaactatcaaaaaatagcct

SEQ ID NO: 92597 - DNA, 26 bp, Artificial sequence
  SiRNA target sequence
atatccaactatcaaaaaatagcctc

SEQ ID NO: 92598 - DNA, 26 bp, Artificial sequence
  SiRNA target sequence
tatccaactatcaaaaaatagcctct

SEQ ID NO: 92599 - DNA, 26 bp, Artificial sequence
  SiRNA target sequence
atccaactatcaaaaaatagcctctt

SEQ ID NO: 92600 - DNA, 26 bp, Artificial sequence
  SiRNA target sequence
tccaactatcaaaaaatagcctcttt

SEQ ID NO: 92601 - DNA, 26 bp, Artificial sequence
  SiRNA target sequence
ccaactatcaaaaaatagcctctttt

SEQ ID NO: 92602 - DNA, 26 bp, Artificial sequence
  SiRNA target sequence
caactatcaaaaaatagcctcttttc

SEQ ID NO: 92603 - DNA, 26 bp, Artificial sequence
  SiRNA target sequence
aactatcaaaaaatagcctcttttct

SEQ ID NO: 92604 - DNA, 26 bp, Artificial sequence
  SiRNA target sequence
actatcaaaaaatagcctcttttctt

SEQ ID NO: 92605 - DNA, 26 bp, Artificial sequence
  SiRNA target sequence
ctatcaaaaaatagcctcttttcttt

SEQ ID NO: 92606 - DNA, 26 bp, Artificial sequence
  SiRNA target sequence
tatcaaaaaatagcctcttttctttc

SEQ ID NO: 92607 - DNA, 26 bp, Artificial sequence
  SiRNA target sequence
atcaaaaaatagcctcttttctttca

SEQ ID NO: 92608 - DNA, 26 bp, Artificial sequence
  SiRNA target sequence
tcaaaaaatagcctcttttctttcac

SEQ ID NO: 92609 - DNA, 26 bp, Artificial sequence
  SiRNA target sequence
caaaaaatagcctcttttctttcaca

SEQ ID NO: 92610 - DNA, 26 bp, Artificial sequence
  SiRNA target sequence
aaaaaatagcctcttttctttcacaa

SEQ ID NO: 92611 - DNA, 26 bp, Artificial sequence
  SiRNA target sequence
aaaaatagcctcttttctttcacaat

SEQ ID NO: 92612 - DNA, 26 bp, Artificial sequence
  SiRNA target sequence
aaaatagcctcttttctttcacaatt

SEQ ID NO: 92613 - DNA, 26 bp, Artificial sequence
  SiRNA target sequence
aaatagcctcttttctttcacaattt

SEQ ID NO: 92614 - DNA, 26 bp, Artificial sequence
  SiRNA target sequence
aatagcctcttttctttcacaatttc

SEQ ID NO: 92615 - DNA, 26 bp, Artificial sequence
  SiRNA target sequence
atagcctcttttctttcacaatttca

SEQ ID NO: 92616 - DNA, 26 bp, Artificial sequence
  SiRNA target sequence
tagcctcttttctttcacaatttcag

SEQ ID NO: 92617 - DNA, 26 bp, Artificial sequence
  SiRNA target sequence
agcctcttttctttcacaatttcaga

SEQ ID NO: 92618 - DNA, 26 bp, Artificial sequence
  SiRNA target sequence
gcctcttttctttcacaatttcagaa

SEQ ID NO: 92619 - DNA, 26 bp, Artificial sequence
  SiRNA target sequence
cctcttttctttcacaatttcagaaa

SEQ ID NO: 92620 - DNA, 26 bp, Artificial sequence
  SiRNA target sequence
ctcttttctttcacaatttcagaaaa

SEQ ID NO: 92621 - DNA, 26 bp, Artificial sequence
  SiRNA target sequence
tcttttctttcacaatttcagaaaaa

SEQ ID NO: 92622 - DNA, 26 bp, Artificial sequence
  SiRNA target sequence
cttttctttcacaatttcagaaaaat

SEQ ID NO: 92623 - DNA, 26 bp, Artificial sequence
  SiRNA target sequence
ttttctttcacaatttcagaaaaatt

SEQ ID NO: 92624 - DNA, 26 bp, Artificial sequence
  SiRNA target sequence
tttctttcacaatttcagaaaaattt

SEQ ID NO: 92625 - DNA, 26 bp, Artificial sequence
  SiRNA target sequence
ttctttcacaatttcagaaaaatttt

SEQ ID NO: 92626 - DNA, 26 bp, Artificial sequence
  SiRNA target sequence
tctttcacaatttcagaaaaattttc

SEQ ID NO: 92627 - DNA, 26 bp, Artificial sequence
  SiRNA target sequence
ctttcacaatttcagaaaaattttca

SEQ ID NO: 92628 - DNA, 26 bp, Artificial sequence
  SiRNA target sequence
tttcacaatttcagaaaaattttcat

SEQ ID NO: 92629 - DNA, 26 bp, Artificial sequence
  SiRNA target sequence
ttcacaatttcagaaaaattttcatt

SEQ ID NO: 92630 - DNA, 26 bp, Artificial sequence
  SiRNA target sequence
tcacaatttcagaaaaattttcatta

SEQ ID NO: 92631 - DNA, 26 bp, Artificial sequence
  SiRNA target sequence
cacaatttcagaaaaattttcattaa

SEQ ID NO: 92632 - DNA, 26 bp, Artificial sequence
  SiRNA target sequence
acaatttcagaaaaattttcattaaa

SEQ ID NO: 92633 - DNA, 26 bp, Artificial sequence
  SiRNA target sequence
caatttcagaaaaattttcattaaaa

SEQ ID NO: 92634 - DNA, 26 bp, Artificial sequence
  SiRNA target sequence
aatttcagaaaaattttcattaaaaa

SEQ ID NO: 92635 - DNA, 26 bp, Artificial sequence
  SiRNA target sequence
atttcagaaaaattttcattaaaaat

SEQ ID NO: 92636 - DNA, 26 bp, Artificial sequence
  SiRNA target sequence
tttcagaaaaattttcattaaaaatg

SEQ ID NO: 92637 - DNA, 26 bp, Artificial sequence
  SiRNA target sequence
ttcagaaaaattttcattaaaaatgc

SEQ ID NO: 92638 - DNA, 26 bp, Artificial sequence
  SiRNA target sequence
tcagaaaaattttcattaaaaatgct

SEQ ID NO: 92639 - DNA, 26 bp, Artificial sequence
  SiRNA target sequence
cagaaaaattttcattaaaaatgcta

SEQ ID NO: 92640 - DNA, 26 bp, Artificial sequence
  SiRNA target sequence
agaaaaattttcattaaaaatgctat

SEQ ID NO: 92641 - DNA, 26 bp, Artificial sequence
  SiRNA target sequence
gaaaaattttcattaaaaatgctata

SEQ ID NO: 92642 - DNA, 26 bp, Artificial sequence
  SiRNA target sequence
aaaaattttcattaaaaatgctataa

SEQ ID NO: 92643 - DNA, 26 bp, Artificial sequence
  SiRNA target sequence
aaaattttcattaaaaatgctataaa

SEQ ID NO: 92644 - DNA, 26 bp, Artificial sequence
  SiRNA target sequence
aaattttcattaaaaatgctataaat

SEQ ID NO: 92645 - DNA, 26 bp, Artificial sequence
  SiRNA target sequence
aattttcattaaaaatgctataaata

SEQ ID NO: 92646 - DNA, 26 bp, Artificial sequence
  SiRNA target sequence
attttcattaaaaatgctataaatag

SEQ ID NO: 92647 - DNA, 26 bp, Artificial sequence
  SiRNA target sequence
ttttcattaaaaatgctataaatagt

SEQ ID NO: 92648 - DNA, 26 bp, Artificial sequence
  SiRNA target sequence
tttcattaaaaatgctataaatagtt

SEQ ID NO: 92649 - DNA, 26 bp, Artificial sequence
  SiRNA target sequence
ttcattaaaaatgctataaatagttt

SEQ ID NO: 92650 - DNA, 26 bp, Artificial sequence
  SiRNA target sequence
tcattaaaaatgctataaatagtttt

SEQ ID NO: 92651 - DNA, 26 bp, Artificial sequence
  SiRNA target sequence
cattaaaaatgctataaatagttttt

SEQ ID NO: 92652 - DNA, 26 bp, Artificial sequence
  SiRNA target sequence
attaaaaatgctataaatagtttttt

SEQ ID NO: 92653 - DNA, 26 bp, Artificial sequence
  SiRNA target sequence
ttaaaaatgctataaatagttttttg

SEQ ID NO: 92654 - DNA, 26 bp, Artificial sequence
  SiRNA target sequence
taaaaatgctataaatagttttttgc

SEQ ID NO: 92655 - DNA, 26 bp, Artificial sequence
  SiRNA target sequence
aaaaatgctataaatagttttttgca

SEQ ID NO: 92656 - DNA, 26 bp, Artificial sequence
  SiRNA target sequence
aaaatgctataaatagttttttgcat

SEQ ID NO: 92657 - DNA, 26 bp, Artificial sequence
  SiRNA target sequence
aaatgctataaatagttttttgcata

SEQ ID NO: 92658 - DNA, 26 bp, Artificial sequence
  SiRNA target sequence
aatgctataaatagttttttgcatat

SEQ ID NO: 92659 - DNA, 26 bp, Artificial sequence
  SiRNA target sequence
atgctataaatagttttttgcatatc

SEQ ID NO: 92660 - DNA, 26 bp, Artificial sequence
  SiRNA target sequence
tgctataaatagttttttgcatatca

SEQ ID NO: 92661 - DNA, 26 bp, Artificial sequence
  SiRNA target sequence
gctataaatagttttttgcatatcag

SEQ ID NO: 92662 - DNA, 26 bp, Artificial sequence
  SiRNA target sequence
ctataaatagttttttgcatatcagg

SEQ ID NO: 92663 - DNA, 26 bp, Artificial sequence
  SiRNA target sequence
tataaatagttttttgcatatcaggt

SEQ ID NO: 92664 - DNA, 26 bp, Artificial sequence
  SiRNA target sequence
ataaatagttttttgcatatcaggtc

SEQ ID NO: 92665 - DNA, 26 bp, Artificial sequence
  SiRNA target sequence
taaatagttttttgcatatcaggtcg

SEQ ID NO: 92666 - DNA, 26 bp, Artificial sequence
  SiRNA target sequence
aaatagttttttgcatatcaggtcgg

SEQ ID NO: 92667 - DNA, 26 bp, Artificial sequence
  SiRNA target sequence
aatagttttttgcatatcaggtcggc

SEQ ID NO: 92668 - DNA, 26 bp, Artificial sequence
  SiRNA target sequence
atagttttttgcatatcaggtcggcc

SEQ ID NO: 92669 - DNA, 26 bp, Artificial sequence
  SiRNA target sequence
tagttttttgcatatcaggtcggcca

SEQ ID NO: 92670 - DNA, 26 bp, Artificial sequence
  SiRNA target sequence
agttttttgcatatcaggtcggccac

SEQ ID NO: 92671 - DNA, 26 bp, Artificial sequence
  SiRNA target sequence
gttttttgcatatcaggtcggccaca

SEQ ID NO: 92672 - DNA, 26 bp, Artificial sequence
  SiRNA target sequence
ttttttgcatatcaggtcggccacaa

SEQ ID NO: 92673 - DNA, 26 bp, Artificial sequence
  SiRNA target sequence
tttttgcatatcaggtcggccacaaa

SEQ ID NO: 92674 - DNA, 26 bp, Artificial sequence
  SiRNA target sequence
ttttgcatatcaggtcggccacaaac

SEQ ID NO: 92675 - DNA, 26 bp, Artificial sequence
  SiRNA target sequence
tttgcatatcaggtcggccacaaaca

SEQ ID NO: 92676 - DNA, 26 bp, Artificial sequence
  SiRNA target sequence
ttgcatatcaggtcggccacaaacat

SEQ ID NO: 92677 - DNA, 26 bp, Artificial sequence
  SiRNA target sequence
tgcatatcaggtcggccacaaacata

SEQ ID NO: 92678 - DNA, 26 bp, Artificial sequence
  SiRNA target sequence
gcatatcaggtcggccacaaacataa

SEQ ID NO: 92679 - DNA, 26 bp, Artificial sequence
  SiRNA target sequence
catatcaggtcggccacaaacataaa

SEQ ID NO: 92680 - DNA, 26 bp, Artificial sequence
  SiRNA target sequence
atatcaggtcggccacaaacataaac

SEQ ID NO: 92681 - DNA, 26 bp, Artificial sequence
  SiRNA target sequence
tatcaggtcggccacaaacataaacc

SEQ ID NO: 92682 - DNA, 26 bp, Artificial sequence
  SiRNA target sequence
atcaggtcggccacaaacataaacca

SEQ ID NO: 92683 - DNA, 26 bp, Artificial sequence
  SiRNA target sequence
tcaggtcggccacaaacataaaccaa

SEQ ID NO: 92684 - DNA, 26 bp, Artificial sequence
  SiRNA target sequence
caggtcggccacaaacataaaccaaa

SEQ ID NO: 92685 - DNA, 26 bp, Artificial sequence
  SiRNA target sequence
aggtcggccacaaacataaaccaaac

SEQ ID NO: 92686 - DNA, 26 bp, Artificial sequence
  SiRNA target sequence
ggtcggccacaaacataaaccaaaca

SEQ ID NO: 92687 - DNA, 26 bp, Artificial sequence
  SiRNA target sequence
gtcggccacaaacataaaccaaacat

SEQ ID NO: 92688 - DNA, 26 bp, Artificial sequence
  SiRNA target sequence
tcggccacaaacataaaccaaacatc

SEQ ID NO: 92689 - DNA, 26 bp, Artificial sequence
  SiRNA target sequence
cggccacaaacataaaccaaacatcc

SEQ ID NO: 92690 - DNA, 26 bp, Artificial sequence
  SiRNA target sequence
ggccacaaacataaaccaaacatccg

SEQ ID NO: 92691 - DNA, 26 bp, Artificial sequence
  SiRNA target sequence
gccacaaacataaaccaaacatccgt

SEQ ID NO: 92692 - DNA, 26 bp, Artificial sequence
  SiRNA target sequence
ccacaaacataaaccaaacatccgtc

SEQ ID NO: 92693 - DNA, 26 bp, Artificial sequence
  SiRNA target sequence
cacaaacataaaccaaacatccgtct

SEQ ID NO: 92694 - DNA, 26 bp, Artificial sequence
  SiRNA target sequence
acaaacataaaccaaacatccgtctt

SEQ ID NO: 92695 - DNA, 26 bp, Artificial sequence
  SiRNA target sequence
caaacataaaccaaacatccgtcttt

SEQ ID NO: 92696 - DNA, 26 bp, Artificial sequence
  SiRNA target sequence
aaacataaaccaaacatccgtcttta

SEQ ID NO: 92697 - DNA, 26 bp, Artificial sequence
  SiRNA target sequence
aacataaaccaaacatccgtctttaa

SEQ ID NO: 92698 - DNA, 26 bp, Artificial sequence
  SiRNA target sequence
acataaaccaaacatccgtctttaat

SEQ ID NO: 92699 - DNA, 26 bp, Artificial sequence
  SiRNA target sequence
cataaaccaaacatccgtctttaatg

SEQ ID NO: 92700 - DNA, 26 bp, Artificial sequence
  SiRNA target sequence
ataaaccaaacatccgtctttaatgt

SEQ ID NO: 92701 - DNA, 26 bp, Artificial sequence
  SiRNA target sequence
taaaccaaacatccgtctttaatgta

SEQ ID NO: 92702 - DNA, 26 bp, Artificial sequence
  SiRNA target sequence
aaaccaaacatccgtctttaatgtat

SEQ ID NO: 92703 - DNA, 26 bp, Artificial sequence
  SiRNA target sequence
aaccaaacatccgtctttaatgtatg

SEQ ID NO: 92704 - DNA, 26 bp, Artificial sequence
  SiRNA target sequence
accaaacatccgtctttaatgtatgt

SEQ ID NO: 92705 - DNA, 26 bp, Artificial sequence
  SiRNA target sequence
ccaaacatccgtctttaatgtatgtt

SEQ ID NO: 92706 - DNA, 26 bp, Artificial sequence
  SiRNA target sequence
caaacatccgtctttaatgtatgttt

SEQ ID NO: 92707 - DNA, 26 bp, Artificial sequence
  SiRNA target sequence
aaacatccgtctttaatgtatgtttt

SEQ ID NO: 92708 - DNA, 26 bp, Artificial sequence
  SiRNA target sequence
aacatccgtctttaatgtatgttttt

SEQ ID NO: 92709 - DNA, 26 bp, Artificial sequence
  SiRNA target sequence
acatccgtctttaatgtatgttttta

SEQ ID NO: 92710 - DNA, 26 bp, Artificial sequence
  SiRNA target sequence
catccgtctttaatgtatgtttttat

SEQ ID NO: 92711 - DNA, 26 bp, Artificial sequence
  SiRNA target sequence
atccgtctttaatgtatgtttttatc

SEQ ID NO: 92712 - DNA, 26 bp, Artificial sequence
  SiRNA target sequence
tccgtctttaatgtatgtttttatct

SEQ ID NO: 92713 - DNA, 26 bp, Artificial sequence
  SiRNA target sequence
ccgtctttaatgtatgtttttatctc

SEQ ID NO: 92714 - DNA, 26 bp, Artificial sequence
  SiRNA target sequence
cgtctttaatgtatgtttttatctca

SEQ ID NO: 92715 - DNA, 26 bp, Artificial sequence
  SiRNA target sequence
gtctttaatgtatgtttttatctcat

SEQ ID NO: 92716 - DNA, 26 bp, Artificial sequence
  SiRNA target sequence
tctttaatgtatgtttttatctcatt

SEQ ID NO: 92717 - DNA, 26 bp, Artificial sequence
  SiRNA target sequence
ctttaatgtatgtttttatctcattt

SEQ ID NO: 92718 - DNA, 26 bp, Artificial sequence
  SiRNA target sequence
tttaatgtatgtttttatctcattta

SEQ ID NO: 92719 - DNA, 26 bp, Artificial sequence
  SiRNA target sequence
ttaatgtatgtttttatctcatttaa

SEQ ID NO: 92720 - DNA, 26 bp, Artificial sequence
  SiRNA target sequence
taatgtatgtttttatctcatttaaa

SEQ ID NO: 92721 - DNA, 26 bp, Artificial sequence
  SiRNA target sequence
aatgtatgtttttatctcatttaaat

SEQ ID NO: 92722 - DNA, 26 bp, Artificial sequence
  SiRNA target sequence
atgtatgtttttatctcatttaaatt

SEQ ID NO: 92723 - DNA, 26 bp, Artificial sequence
  SiRNA target sequence
tgtatgtttttatctcatttaaattt

SEQ ID NO: 92724 - DNA, 26 bp, Artificial sequence
  SiRNA target sequence
gtatgtttttatctcatttaaatttt

SEQ ID NO: 92725 - DNA, 26 bp, Artificial sequence
  SiRNA target sequence
tatgtttttatctcatttaaattttg

SEQ ID NO: 92726 - DNA, 26 bp, Artificial sequence
  SiRNA target sequence
atgtttttatctcatttaaattttgt

SEQ ID NO: 92727 - DNA, 26 bp, Artificial sequence
  SiRNA target sequence
tgtttttatctcatttaaattttgta

SEQ ID NO: 92728 - DNA, 26 bp, Artificial sequence
  SiRNA target sequence
gtttttatctcatttaaattttgtaa

SEQ ID NO: 92729 - DNA, 26 bp, Artificial sequence
  SiRNA target sequence
tttttatctcatttaaattttgtaat

SEQ ID NO: 92730 - DNA, 26 bp, Artificial sequence
  SiRNA target sequence
ttttatctcatttaaattttgtaata

SEQ ID NO: 92731 - DNA, 26 bp, Artificial sequence
  SiRNA target sequence
tttatctcatttaaattttgtaataa

SEQ ID NO: 92732 - DNA, 26 bp, Artificial sequence
  SiRNA target sequence
ttatctcatttaaattttgtaataaa

SEQ ID NO: 92733 - DNA, 26 bp, Artificial sequence
  SiRNA target sequence
tatctcatttaaattttgtaataaat

SEQ ID NO: 92734 - DNA, 26 bp, Artificial sequence
  SiRNA target sequence
atctcatttaaattttgtaataaata

SEQ ID NO: 92735 - DNA, 26 bp, Artificial sequence
  SiRNA target sequence
tctcatttaaattttgtaataaataa

SEQ ID NO: 92736 - DNA, 26 bp, Artificial sequence
  SiRNA target sequence
ctcatttaaattttgtaataaataat

SEQ ID NO: 92737 - DNA, 26 bp, Artificial sequence
  SiRNA target sequence
tcatttaaattttgtaataaataatc

SEQ ID NO: 92738 - DNA, 26 bp, Artificial sequence
  SiRNA target sequence
catttaaattttgtaataaataatca

SEQ ID NO: 92739 - DNA, 26 bp, Artificial sequence
  SiRNA target sequence
atttaaattttgtaataaataatcag

SEQ ID NO: 92740 - DNA, 26 bp, Artificial sequence
  SiRNA target sequence
tttaaattttgtaataaataatcagt

SEQ ID NO: 92741 - DNA, 26 bp, Artificial sequence
  SiRNA target sequence
ttaaattttgtaataaataatcagta

SEQ ID NO: 92742 - DNA, 26 bp, Artificial sequence
  SiRNA target sequence
taaattttgtaataaataatcagtaa

SEQ ID NO: 92743 - DNA, 26 bp, Artificial sequence
  SiRNA target sequence
aaattttgtaataaataatcagtaac

SEQ ID NO: 92744 - DNA, 26 bp, Artificial sequence
  SiRNA target sequence
aattttgtaataaataatcagtaaca

SEQ ID NO: 92745 - DNA, 26 bp, Artificial sequence
  SiRNA target sequence
attttgtaataaataatcagtaacat

SEQ ID NO: 92746 - DNA, 26 bp, Artificial sequence
  SiRNA target sequence
ttttgtaataaataatcagtaacata

SEQ ID NO: 92747 - DNA, 26 bp, Artificial sequence
  SiRNA target sequence
tttgtaataaataatcagtaacataa

SEQ ID NO: 92748 - DNA, 26 bp, Artificial sequence
  SiRNA target sequence
ttgtaataaataatcagtaacataaa

SEQ ID NO: 92749 - DNA, 26 bp, Artificial sequence
  SiRNA target sequence
tgtaataaataatcagtaacataaat

SEQ ID NO: 92750 - DNA, 26 bp, Artificial sequence
  SiRNA target sequence
gtaataaataatcagtaacataaatt

SEQ ID NO: 92751 - DNA, 26 bp, Artificial sequence
  SiRNA target sequence
taataaataatcagtaacataaattt

SEQ ID NO: 92752 - DNA, 26 bp, Artificial sequence
  SiRNA target sequence
aataaataatcagtaacataaatttt

SEQ ID NO: 92753 - DNA, 26 bp, Artificial sequence
  SiRNA target sequence
ataaataatcagtaacataaatttta

SEQ ID NO: 92754 - DNA, 26 bp, Artificial sequence
  SiRNA target sequence
taaataatcagtaacataaattttat

SEQ ID NO: 92755 - DNA, 26 bp, Artificial sequence
  SiRNA target sequence
aaataatcagtaacataaattttatt

SEQ ID NO: 92756 - DNA, 26 bp, Artificial sequence
  SiRNA target sequence
aataatcagtaacataaattttatta

SEQ ID NO: 92757 - DNA, 26 bp, Artificial sequence
  SiRNA target sequence
ataatcagtaacataaattttattac

SEQ ID NO: 92758 - DNA, 26 bp, Artificial sequence
  SiRNA target sequence
taatcagtaacataaattttattaca

SEQ ID NO: 92759 - DNA, 26 bp, Artificial sequence
  SiRNA target sequence
aatcagtaacataaattttattacaa

SEQ ID NO: 92760 - DNA, 26 bp, Artificial sequence
  SiRNA target sequence
atcagtaacataaattttattacaag

SEQ ID NO: 92761 - DNA, 26 bp, Artificial sequence
  SiRNA target sequence
tcagtaacataaattttattacaaga

SEQ ID NO: 92762 - DNA, 26 bp, Artificial sequence
  SiRNA target sequence
cagtaacataaattttattacaagat

SEQ ID NO: 92763 - DNA, 26 bp, Artificial sequence
  SiRNA target sequence
agtaacataaattttattacaagata

SEQ ID NO: 92764 - DNA, 26 bp, Artificial sequence
  SiRNA target sequence
gtaacataaattttattacaagataa

SEQ ID NO: 92765 - DNA, 26 bp, Artificial sequence
  SiRNA target sequence
taacataaattttattacaagataaa

SEQ ID NO: 92766 - DNA, 26 bp, Artificial sequence
  SiRNA target sequence
aacataaattttattacaagataaaa

SEQ ID NO: 92767 - DNA, 26 bp, Artificial sequence
  SiRNA target sequence
acataaattttattacaagataaaat

SEQ ID NO: 92768 - DNA, 26 bp, Artificial sequence
  SiRNA target sequence
cataaattttattacaagataaaatt

SEQ ID NO: 92769 - DNA, 26 bp, Artificial sequence
  SiRNA target sequence
ataaattttattacaagataaaattt

SEQ ID NO: 92770 - DNA, 26 bp, Artificial sequence
  SiRNA target sequence
taaattttattacaagataaaatttt

SEQ ID NO: 92771 - DNA, 26 bp, Artificial sequence
  SiRNA target sequence
aaattttattacaagataaaatttta

SEQ ID NO: 92772 - DNA, 26 bp, Artificial sequence
  SiRNA target sequence
aattttattacaagataaaattttaa

SEQ ID NO: 92773 - DNA, 26 bp, Artificial sequence
  SiRNA target sequence
attttattacaagataaaattttaat

SEQ ID NO: 92774 - DNA, 26 bp, Artificial sequence
  SiRNA target sequence
ttttattacaagataaaattttaata

SEQ ID NO: 92775 - DNA, 26 bp, Artificial sequence
  SiRNA target sequence
tttattacaagataaaattttaataa

SEQ ID NO: 92776 - DNA, 26 bp, Artificial sequence
  SiRNA target sequence
ttattacaagataaaattttaataat

SEQ ID NO: 92777 - DNA, 26 bp, Artificial sequence
  SiRNA target sequence
tattacaagataaaattttaataatt

SEQ ID NO: 92778 - DNA, 26 bp, Artificial sequence
  SiRNA target sequence
attacaagataaaattttaataattt

SEQ ID NO: 92779 - DNA, 26 bp, Artificial sequence
  SiRNA target sequence
ttacaagataaaattttaataatttc

SEQ ID NO: 92780 - DNA, 26 bp, Artificial sequence
  SiRNA target sequence
tacaagataaaattttaataatttct

SEQ ID NO: 92781 - DNA, 26 bp, Artificial sequence
  SiRNA target sequence
acaagataaaattttaataatttctg

SEQ ID NO: 92782 - DNA, 26 bp, Artificial sequence
  SiRNA target sequence
caagataaaattttaataatttctgt

SEQ ID NO: 92783 - DNA, 26 bp, Artificial sequence
  SiRNA target sequence
aagataaaattttaataatttctgtg

SEQ ID NO: 92784 - DNA, 26 bp, Artificial sequence
  SiRNA target sequence
agataaaattttaataatttctgtgt

SEQ ID NO: 92785 - DNA, 26 bp, Artificial sequence
  SiRNA target sequence
gataaaattttaataatttctgtgtt

SEQ ID NO: 92786 - DNA, 26 bp, Artificial sequence
  SiRNA target sequence
ataaaattttaataatttctgtgttt

SEQ ID NO: 92787 - DNA, 26 bp, Artificial sequence
  SiRNA target sequence
taaaattttaataatttctgtgtttt

SEQ ID NO: 92788 - DNA, 26 bp, Artificial sequence
  SiRNA target sequence
aaaattttaataatttctgtgttttt

SEQ ID NO: 92789 - DNA, 26 bp, Artificial sequence
  SiRNA target sequence
aaattttaataatttctgtgttttta

SEQ ID NO: 92790 - DNA, 26 bp, Artificial sequence
  SiRNA target sequence
aattttaataatttctgtgtttttat

SEQ ID NO: 92791 - DNA, 26 bp, Artificial sequence
  SiRNA target sequence
attttaataatttctgtgtttttata

SEQ ID NO: 92792 - DNA, 26 bp, Artificial sequence
  SiRNA target sequence
ttttaataatttctgtgtttttatat

SEQ ID NO: 92793 - DNA, 26 bp, Artificial sequence
  SiRNA target sequence
tttaataatttctgtgtttttatatt

SEQ ID NO: 92794 - DNA, 26 bp, Artificial sequence
  SiRNA target sequence
ttaataatttctgtgtttttatattt

SEQ ID NO: 92795 - DNA, 26 bp, Artificial sequence
  SiRNA target sequence
taataatttctgtgtttttatatttt

SEQ ID NO: 92796 - DNA, 26 bp, Artificial sequence
  SiRNA target sequence
aataatttctgtgtttttatattttg

SEQ ID NO: 92797 - DNA, 26 bp, Artificial sequence
  SiRNA target sequence
ataatttctgtgtttttatattttgc

SEQ ID NO: 92798 - DNA, 26 bp, Artificial sequence
  SiRNA target sequence
taatttctgtgtttttatattttgca

SEQ ID NO: 92799 - DNA, 26 bp, Artificial sequence
  SiRNA target sequence
aatttctgtgtttttatattttgcat

SEQ ID NO: 92800 - DNA, 26 bp, Artificial sequence
  SiRNA target sequence
atttctgtgtttttatattttgcatc

SEQ ID NO: 92801 - DNA, 26 bp, Artificial sequence
  SiRNA target sequence
tttctgtgtttttatattttgcatct

SEQ ID NO: 92802 - DNA, 26 bp, Artificial sequence
  SiRNA target sequence
ttctgtgtttttatattttgcatctt

SEQ ID NO: 92803 - DNA, 26 bp, Artificial sequence
  SiRNA target sequence
tctgtgtttttatattttgcatcttt

SEQ ID NO: 92804 - DNA, 26 bp, Artificial sequence
  SiRNA target sequence
ctgtgtttttatattttgcatcttta

SEQ ID NO: 92805 - DNA, 26 bp, Artificial sequence
  SiRNA target sequence
tgtgtttttatattttgcatctttaa

SEQ ID NO: 92806 - DNA, 26 bp, Artificial sequence
  SiRNA target sequence
gtgtttttatattttgcatctttaat

SEQ ID NO: 92807 - DNA, 26 bp, Artificial sequence
  SiRNA target sequence
tgtttttatattttgcatctttaata

SEQ ID NO: 92808 - DNA, 26 bp, Artificial sequence
  SiRNA target sequence
gtttttatattttgcatctttaataa

SEQ ID NO: 92809 - DNA, 26 bp, Artificial sequence
  SiRNA target sequence
tttttatattttgcatctttaataag

SEQ ID NO: 92810 - DNA, 26 bp, Artificial sequence
  SiRNA target sequence
ttttatattttgcatctttaataaga

SEQ ID NO: 92811 - DNA, 26 bp, Artificial sequence
  SiRNA target sequence
tttatattttgcatctttaataagat

SEQ ID NO: 92812 - DNA, 26 bp, Artificial sequence
  SiRNA target sequence
ttatattttgcatctttaataagatc

SEQ ID NO: 92813 - DNA, 26 bp, Artificial sequence
  SiRNA target sequence
tatattttgcatctttaataagatca

SEQ ID NO: 92814 - DNA, 26 bp, Artificial sequence
  SiRNA target sequence
atattttgcatctttaataagatcat

SEQ ID NO: 92815 - DNA, 26 bp, Artificial sequence
  SiRNA target sequence
tattttgcatctttaataagatcatc

SEQ ID NO: 92816 - DNA, 26 bp, Artificial sequence
  SiRNA target sequence
attttgcatctttaataagatcatct

SEQ ID NO: 92817 - DNA, 26 bp, Artificial sequence
  SiRNA target sequence
ttttgcatctttaataagatcatctt

SEQ ID NO: 92818 - DNA, 26 bp, Artificial sequence
  SiRNA target sequence
tttgcatctttaataagatcatcttc

SEQ ID NO: 92819 - DNA, 26 bp, Artificial sequence
  SiRNA target sequence
ttgcatctttaataagatcatcttct

SEQ ID NO: 92820 - DNA, 26 bp, Artificial sequence
  SiRNA target sequence
tgcatctttaataagatcatcttctt

SEQ ID NO: 92821 - DNA, 26 bp, Artificial sequence
  SiRNA target sequence
gcatctttaataagatcatcttcttg

SEQ ID NO: 92822 - DNA, 26 bp, Artificial sequence
  SiRNA target sequence
catctttaataagatcatcttcttga

SEQ ID NO: 92823 - DNA, 26 bp, Artificial sequence
  SiRNA target sequence
atctttaataagatcatcttcttgat

SEQ ID NO: 92824 - DNA, 26 bp, Artificial sequence
  SiRNA target sequence
tctttaataagatcatcttcttgatt

SEQ ID NO: 92825 - DNA, 26 bp, Artificial sequence
  SiRNA target sequence
ctttaataagatcatcttcttgattt

SEQ ID NO: 92826 - DNA, 26 bp, Artificial sequence
  SiRNA target sequence
tttaataagatcatcttcttgatttc

SEQ ID NO: 92827 - DNA, 26 bp, Artificial sequence
  SiRNA target sequence
ttaataagatcatcttcttgatttct

SEQ ID NO: 92828 - DNA, 26 bp, Artificial sequence
  SiRNA target sequence
taataagatcatcttcttgatttcta

SEQ ID NO: 92829 - DNA, 26 bp, Artificial sequence
  SiRNA target sequence
aataagatcatcttcttgatttctaa

SEQ ID NO: 92830 - DNA, 26 bp, Artificial sequence
  SiRNA target sequence
ataagatcatcttcttgatttctaaa

SEQ ID NO: 92831 - DNA, 26 bp, Artificial sequence
  SiRNA target sequence
taagatcatcttcttgatttctaaat

SEQ ID NO: 92832 - DNA, 26 bp, Artificial sequence
  SiRNA target sequence
aagatcatcttcttgatttctaaatc

SEQ ID NO: 92833 - DNA, 26 bp, Artificial sequence
  SiRNA target sequence
agatcatcttcttgatttctaaatcc

SEQ ID NO: 92834 - DNA, 26 bp, Artificial sequence
  SiRNA target sequence
gatcatcttcttgatttctaaatcca

SEQ ID NO: 92835 - DNA, 26 bp, Artificial sequence
  SiRNA target sequence
atcatcttcttgatttctaaatccat

SEQ ID NO: 92836 - DNA, 26 bp, Artificial sequence
  SiRNA target sequence
tcatcttcttgatttctaaatccata

SEQ ID NO: 92837 - DNA, 26 bp, Artificial sequence
  SiRNA target sequence
catcttcttgatttctaaatccatat

SEQ ID NO: 92838 - DNA, 26 bp, Artificial sequence
  SiRNA target sequence
atcttcttgatttctaaatccatata

SEQ ID NO: 92839 - DNA, 26 bp, Artificial sequence
  SiRNA target sequence
tcttcttgatttctaaatccatatat

SEQ ID NO: 92840 - DNA, 26 bp, Artificial sequence
  SiRNA target sequence
cttcttgatttctaaatccatatatt

SEQ ID NO: 92841 - DNA, 26 bp, Artificial sequence
  SiRNA target sequence
ttcttgatttctaaatccatatatta

SEQ ID NO: 92842 - DNA, 26 bp, Artificial sequence
  SiRNA target sequence
tcttgatttctaaatccatatattag

SEQ ID NO: 92843 - DNA, 26 bp, Artificial sequence
  SiRNA target sequence
cttgatttctaaatccatatattagt

SEQ ID NO: 92844 - DNA, 26 bp, Artificial sequence
  SiRNA target sequence
ttgatttctaaatccatatattagtt

SEQ ID NO: 92845 - DNA, 26 bp, Artificial sequence
  SiRNA target sequence
tgatttctaaatccatatattagttt

SEQ ID NO: 92846 - DNA, 26 bp, Artificial sequence
  SiRNA target sequence
gatttctaaatccatatattagtttg

SEQ ID NO: 92847 - DNA, 26 bp, Artificial sequence
  SiRNA target sequence
atttctaaatccatatattagtttga

SEQ ID NO: 92848 - DNA, 26 bp, Artificial sequence
  SiRNA target sequence
tttctaaatccatatattagtttgat

SEQ ID NO: 92849 - DNA, 26 bp, Artificial sequence
  SiRNA target sequence
ttctaaatccatatattagtttgata

SEQ ID NO: 92850 - DNA, 26 bp, Artificial sequence
  SiRNA target sequence
tctaaatccatatattagtttgatat

SEQ ID NO: 92851 - DNA, 26 bp, Artificial sequence
  SiRNA target sequence
ctaaatccatatattagtttgatata

SEQ ID NO: 92852 - DNA, 26 bp, Artificial sequence
  SiRNA target sequence
taaatccatatattagtttgatatat

SEQ ID NO: 92853 - DNA, 26 bp, Artificial sequence
  SiRNA target sequence
aaatccatatattagtttgatatatt

SEQ ID NO: 92854 - DNA, 26 bp, Artificial sequence
  SiRNA target sequence
aatccatatattagtttgatatattg

SEQ ID NO: 92855 - DNA, 26 bp, Artificial sequence
  SiRNA target sequence
atccatatattagtttgatatattga

SEQ ID NO: 92856 - DNA, 26 bp, Artificial sequence
  SiRNA target sequence
tccatatattagtttgatatattgat

SEQ ID NO: 92857 - DNA, 26 bp, Artificial sequence
  SiRNA target sequence
ccatatattagtttgatatattgatc

SEQ ID NO: 92858 - DNA, 26 bp, Artificial sequence
  SiRNA target sequence
catatattagtttgatatattgatcg

SEQ ID NO: 92859 - DNA, 26 bp, Artificial sequence
  SiRNA target sequence
atatattagtttgatatattgatcgt

SEQ ID NO: 92860 - DNA, 26 bp, Artificial sequence
  SiRNA target sequence
tatattagtttgatatattgatcgtc

SEQ ID NO: 92861 - DNA, 26 bp, Artificial sequence
  SiRNA target sequence
atattagtttgatatattgatcgtct

SEQ ID NO: 92862 - DNA, 26 bp, Artificial sequence
  SiRNA target sequence
tattagtttgatatattgatcgtctt

SEQ ID NO: 92863 - DNA, 26 bp, Artificial sequence
  SiRNA target sequence
attagtttgatatattgatcgtcttc

SEQ ID NO: 92864 - DNA, 26 bp, Artificial sequence
  SiRNA target sequence
ttagtttgatatattgatcgtcttct

SEQ ID NO: 92865 - DNA, 26 bp, Artificial sequence
  SiRNA target sequence
tagtttgatatattgatcgtcttctt

SEQ ID NO: 92866 - DNA, 26 bp, Artificial sequence
  SiRNA target sequence
agtttgatatattgatcgtcttcttt

SEQ ID NO: 92867 - DNA, 26 bp, Artificial sequence
  SiRNA target sequence
gtttgatatattgatcgtcttcttta

SEQ ID NO: 92868 - DNA, 26 bp, Artificial sequence
  SiRNA target sequence
tttgatatattgatcgtcttctttat

SEQ ID NO: 92869 - DNA, 26 bp, Artificial sequence
  SiRNA target sequence
ttgatatattgatcgtcttctttatt

SEQ ID NO: 92870 - DNA, 26 bp, Artificial sequence
  SiRNA target sequence
tgatatattgatcgtcttctttattt

SEQ ID NO: 92871 - DNA, 26 bp, Artificial sequence
  SiRNA target sequence
gatatattgatcgtcttctttatttt

SEQ ID NO: 92872 - DNA, 26 bp, Artificial sequence
  SiRNA target sequence
atatattgatcgtcttctttattttt

SEQ ID NO: 92873 - DNA, 26 bp, Artificial sequence
  SiRNA target sequence
tatattgatcgtcttctttatttttc

SEQ ID NO: 92874 - DNA, 26 bp, Artificial sequence
  SiRNA target sequence
atattgatcgtcttctttatttttca

SEQ ID NO: 92875 - DNA, 26 bp, Artificial sequence
  SiRNA target sequence
tattgatcgtcttctttatttttcaa

SEQ ID NO: 92876 - DNA, 26 bp, Artificial sequence
  SiRNA target sequence
attgatcgtcttctttatttttcaaa

SEQ ID NO: 92877 - DNA, 26 bp, Artificial sequence
  SiRNA target sequence
ttgatcgtcttctttatttttcaaaa

SEQ ID NO: 92878 - DNA, 26 bp, Artificial sequence
  SiRNA target sequence
tgatcgtcttctttatttttcaaaaa

SEQ ID NO: 92879 - DNA, 26 bp, Artificial sequence
  SiRNA target sequence
gatcgtcttctttatttttcaaaaac

SEQ ID NO: 92880 - DNA, 26 bp, Artificial sequence
  SiRNA target sequence
atcgtcttctttatttttcaaaaacg

SEQ ID NO: 92881 - DNA, 26 bp, Artificial sequence
  SiRNA target sequence
tcgtcttctttatttttcaaaaacga

SEQ ID NO: 92882 - DNA, 26 bp, Artificial sequence
  SiRNA target sequence
cgtcttctttatttttcaaaaacgaa

SEQ ID NO: 92883 - DNA, 26 bp, Artificial sequence
  SiRNA target sequence
gtcttctttatttttcaaaaacgaaa

SEQ ID NO: 92884 - DNA, 26 bp, Artificial sequence
  SiRNA target sequence
tcttctttatttttcaaaaacgaaaa

SEQ ID NO: 92885 - DNA, 26 bp, Artificial sequence
  SiRNA target sequence
cttctttatttttcaaaaacgaaaaa

SEQ ID NO: 92886 - DNA, 26 bp, Artificial sequence
  SiRNA target sequence
ttctttatttttcaaaaacgaaaaaa

SEQ ID NO: 92887 - DNA, 26 bp, Artificial sequence
  SiRNA target sequence
tctttatttttcaaaaacgaaaaaaa

SEQ ID NO: 92888 - DNA, 26 bp, Artificial sequence
  SiRNA target sequence
ctttatttttcaaaaacgaaaaaaat

SEQ ID NO: 92889 - DNA, 26 bp, Artificial sequence
  SiRNA target sequence
tttatttttcaaaaacgaaaaaaatg

SEQ ID NO: 92890 - DNA, 26 bp, Artificial sequence
  SiRNA target sequence
ttatttttcaaaaacgaaaaaaatgg

SEQ ID NO: 92891 - DNA, 26 bp, Artificial sequence
  SiRNA target sequence
tatttttcaaaaacgaaaaaaatgga

SEQ ID NO: 92892 - DNA, 26 bp, Artificial sequence
  SiRNA target sequence
atttttcaaaaacgaaaaaaatggag

SEQ ID NO: 92893 - DNA, 26 bp, Artificial sequence
  SiRNA target sequence
tttttcaaaaacgaaaaaaatggagc

SEQ ID NO: 92894 - DNA, 26 bp, Artificial sequence
  SiRNA target sequence
ttttcaaaaacgaaaaaaatggagca

SEQ ID NO: 92895 - DNA, 26 bp, Artificial sequence
  SiRNA target sequence
tttcaaaaacgaaaaaaatggagcaa

SEQ ID NO: 92896 - DNA, 26 bp, Artificial sequence
  SiRNA target sequence
ttcaaaaacgaaaaaaatggagcaat

SEQ ID NO: 92897 - DNA, 26 bp, Artificial sequence
  SiRNA target sequence
tcaaaaacgaaaaaaatggagcaatg

SEQ ID NO: 92898 - DNA, 26 bp, Artificial sequence
  SiRNA target sequence
caaaaacgaaaaaaatggagcaatgc

SEQ ID NO: 92899 - DNA, 26 bp, Artificial sequence
  SiRNA target sequence
aaaaacgaaaaaaatggagcaatgcc

SEQ ID NO: 92900 - DNA, 26 bp, Artificial sequence
  SiRNA target sequence
aaaacgaaaaaaatggagcaatgcca

SEQ ID NO: 92901 - DNA, 26 bp, Artificial sequence
  SiRNA target sequence
aaacgaaaaaaatggagcaatgccag

SEQ ID NO: 92902 - DNA, 26 bp, Artificial sequence
  SiRNA target sequence
aacgaaaaaaatggagcaatgccagt

SEQ ID NO: 92903 - DNA, 26 bp, Artificial sequence
  SiRNA target sequence
acgaaaaaaatggagcaatgccagtt

SEQ ID NO: 92904 - DNA, 26 bp, Artificial sequence
  SiRNA target sequence
cgaaaaaaatggagcaatgccagttc

SEQ ID NO: 92905 - DNA, 26 bp, Artificial sequence
  SiRNA target sequence
gaaaaaaatggagcaatgccagttcc

SEQ ID NO: 92906 - DNA, 26 bp, Artificial sequence
  SiRNA target sequence
aaaaaaatggagcaatgccagttcca

SEQ ID NO: 92907 - DNA, 26 bp, Artificial sequence
  SiRNA target sequence
aaaaaatggagcaatgccagttccag

SEQ ID NO: 92908 - DNA, 26 bp, Artificial sequence
  SiRNA target sequence
aaaaatggagcaatgccagttccagt

SEQ ID NO: 92909 - DNA, 26 bp, Artificial sequence
  SiRNA target sequence
aaaatggagcaatgccagttccagta

SEQ ID NO: 92910 - DNA, 26 bp, Artificial sequence
  SiRNA target sequence
aaatggagcaatgccagttccagtac

SEQ ID NO: 92911 - DNA, 26 bp, Artificial sequence
  SiRNA target sequence
aatggagcaatgccagttccagtaca

SEQ ID NO: 92912 - DNA, 26 bp, Artificial sequence
  SiRNA target sequence
atggagcaatgccagttccagtacaa

SEQ ID NO: 92913 - DNA, 26 bp, Artificial sequence
  SiRNA target sequence
tggagcaatgccagttccagtacaaa

SEQ ID NO: 92914 - DNA, 26 bp, Artificial sequence
  SiRNA target sequence
ggagcaatgccagttccagtacaaat

SEQ ID NO: 92915 - DNA, 26 bp, Artificial sequence
  SiRNA target sequence
gagcaatgccagttccagtacaaata

SEQ ID NO: 92916 - DNA, 26 bp, Artificial sequence
  SiRNA target sequence
agcaatgccagttccagtacaaatac

SEQ ID NO: 92917 - DNA, 26 bp, Artificial sequence
  SiRNA target sequence
gcaatgccagttccagtacaaatacc

SEQ ID NO: 92918 - DNA, 26 bp, Artificial sequence
  SiRNA target sequence
caatgccagttccagtacaaataccc

SEQ ID NO: 92919 - DNA, 26 bp, Artificial sequence
  SiRNA target sequence
aatgccagttccagtacaaataccca

SEQ ID NO: 92920 - DNA, 26 bp, Artificial sequence
  SiRNA target sequence
atgccagttccagtacaaatacccaa

SEQ ID NO: 92921 - DNA, 26 bp, Artificial sequence
  SiRNA target sequence
tgccagttccagtacaaatacccaac

SEQ ID NO: 92922 - DNA, 26 bp, Artificial sequence
  SiRNA target sequence
gccagttccagtacaaatacccaaca

SEQ ID NO: 92923 - DNA, 26 bp, Artificial sequence
  SiRNA target sequence
ccagttccagtacaaatacccaacac

SEQ ID NO: 92924 - DNA, 26 bp, Artificial sequence
  SiRNA target sequence
cagttccagtacaaatacccaacact

SEQ ID NO: 92925 - DNA, 26 bp, Artificial sequence
  SiRNA target sequence
agttccagtacaaatacccaacactt

SEQ ID NO: 92926 - DNA, 26 bp, Artificial sequence
  SiRNA target sequence
gttccagtacaaatacccaacacttt

SEQ ID NO: 92927 - DNA, 26 bp, Artificial sequence
  SiRNA target sequence
ttccagtacaaatacccaacactttt

SEQ ID NO: 92928 - DNA, 26 bp, Artificial sequence
  SiRNA target sequence
tccagtacaaatacccaacacttttt

SEQ ID NO: 92929 - DNA, 26 bp, Artificial sequence
  SiRNA target sequence
ccagtacaaatacccaacactttttt

SEQ ID NO: 92930 - DNA, 26 bp, Artificial sequence
  SiRNA target sequence
cagtacaaatacccaacactttttta

SEQ ID NO: 92931 - DNA, 26 bp, Artificial sequence
  SiRNA target sequence
agtacaaatacccaacacttttttac

SEQ ID NO: 92932 - DNA, 26 bp, Artificial sequence
  SiRNA target sequence
gtacaaatacccaacacttttttaca

SEQ ID NO: 92933 - DNA, 26 bp, Artificial sequence
  SiRNA target sequence
tacaaatacccaacacttttttacaa

SEQ ID NO: 92934 - DNA, 26 bp, Artificial sequence
  SiRNA target sequence
acaaatacccaacacttttttacaaa

SEQ ID NO: 92935 - DNA, 26 bp, Artificial sequence
  SiRNA target sequence
caaatacccaacacttttttacaaaa

SEQ ID NO: 92936 - DNA, 26 bp, Artificial sequence
  SiRNA target sequence
aaatacccaacacttttttacaaaaa

SEQ ID NO: 92937 - DNA, 26 bp, Artificial sequence
  SiRNA target sequence
aatacccaacacttttttacaaaaat

SEQ ID NO: 92938 - DNA, 26 bp, Artificial sequence
  SiRNA target sequence
atacccaacacttttttacaaaaatt

SEQ ID NO: 92939 - DNA, 26 bp, Artificial sequence
  SiRNA target sequence
tacccaacacttttttacaaaaattt

SEQ ID NO: 92940 - DNA, 26 bp, Artificial sequence
  SiRNA target sequence
acccaacacttttttacaaaaattta

SEQ ID NO: 92941 - DNA, 26 bp, Artificial sequence
  SiRNA target sequence
cccaacacttttttacaaaaatttaa

SEQ ID NO: 92942 - DNA, 26 bp, Artificial sequence
  SiRNA target sequence
ccaacacttttttacaaaaatttaat

SEQ ID NO: 92943 - DNA, 26 bp, Artificial sequence
  SiRNA target sequence
caacacttttttacaaaaatttaatc

SEQ ID NO: 92944 - DNA, 26 bp, Artificial sequence
  SiRNA target sequence
aacacttttttacaaaaatttaatct

SEQ ID NO: 92945 - DNA, 26 bp, Artificial sequence
  SiRNA target sequence
acacttttttacaaaaatttaatcta

SEQ ID NO: 92946 - DNA, 26 bp, Artificial sequence
  SiRNA target sequence
cacttttttacaaaaatttaatctaa

SEQ ID NO: 92947 - DNA, 26 bp, Artificial sequence
  SiRNA target sequence
acttttttacaaaaatttaatctaaa

SEQ ID NO: 92948 - DNA, 26 bp, Artificial sequence
  SiRNA target sequence
cttttttacaaaaatttaatctaaat

SEQ ID NO: 92949 - DNA, 26 bp, Artificial sequence
  SiRNA target sequence
ttttttacaaaaatttaatctaaata

SEQ ID NO: 92950 - DNA, 26 bp, Artificial sequence
  SiRNA target sequence
tttttacaaaaatttaatctaaataa

SEQ ID NO: 92951 - DNA, 26 bp, Artificial sequence
  SiRNA target sequence
ttttacaaaaatttaatctaaataat

SEQ ID NO: 92952 - DNA, 26 bp, Artificial sequence
  SiRNA target sequence
tttacaaaaatttaatctaaataatt

SEQ ID NO: 92953 - DNA, 26 bp, Artificial sequence
  SiRNA target sequence
ttacaaaaatttaatctaaataattt

SEQ ID NO: 92954 - DNA, 26 bp, Artificial sequence
  SiRNA target sequence
tacaaaaatttaatctaaataattta

SEQ ID NO: 92955 - DNA, 26 bp, Artificial sequence
  SiRNA target sequence
acaaaaatttaatctaaataatttac

SEQ ID NO: 92956 - DNA, 26 bp, Artificial sequence
  SiRNA target sequence
caaaaatttaatctaaataatttact

SEQ ID NO: 92957 - DNA, 26 bp, Artificial sequence
  SiRNA target sequence
aaaaatttaatctaaataatttactc

SEQ ID NO: 92958 - DNA, 26 bp, Artificial sequence
  SiRNA target sequence
aaaatttaatctaaataatttactcg

SEQ ID NO: 92959 - DNA, 26 bp, Artificial sequence
  SiRNA target sequence
aaatttaatctaaataatttactcgg

SEQ ID NO: 92960 - DNA, 26 bp, Artificial sequence
  SiRNA target sequence
aatttaatctaaataatttactcggt

SEQ ID NO: 92961 - DNA, 26 bp, Artificial sequence
  SiRNA target sequence
atttaatctaaataatttactcggtc

SEQ ID NO: 92962 - DNA, 26 bp, Artificial sequence
  SiRNA target sequence
tttaatctaaataatttactcggtct

SEQ ID NO: 92963 - DNA, 26 bp, Artificial sequence
  SiRNA target sequence
ttaatctaaataatttactcggtctg

SEQ ID NO: 92964 - DNA, 26 bp, Artificial sequence
  SiRNA target sequence
taatctaaataatttactcggtctgt

SEQ ID NO: 92965 - DNA, 26 bp, Artificial sequence
  SiRNA target sequence
aatctaaataatttactcggtctgtg

SEQ ID NO: 92966 - DNA, 26 bp, Artificial sequence
  SiRNA target sequence
atctaaataatttactcggtctgtga

SEQ ID NO: 92967 - DNA, 26 bp, Artificial sequence
  SiRNA target sequence
tctaaataatttactcggtctgtgac

SEQ ID NO: 92968 - DNA, 26 bp, Artificial sequence
  SiRNA target sequence
ctaaataatttactcggtctgtgaca

SEQ ID NO: 92969 - DNA, 26 bp, Artificial sequence
  SiRNA target sequence
taaataatttactcggtctgtgacag

SEQ ID NO: 92970 - DNA, 26 bp, Artificial sequence
  SiRNA target sequence
aaataatttactcggtctgtgacaga

SEQ ID NO: 92971 - DNA, 26 bp, Artificial sequence
  SiRNA target sequence
aataatttactcggtctgtgacagat

SEQ ID NO: 92972 - DNA, 26 bp, Artificial sequence
  SiRNA target sequence
ataatttactcggtctgtgacagatc

SEQ ID NO: 92973 - DNA, 26 bp, Artificial sequence
  SiRNA target sequence
taatttactcggtctgtgacagatct

SEQ ID NO: 92974 - DNA, 26 bp, Artificial sequence
  SiRNA target sequence
aatttactcggtctgtgacagatctt

SEQ ID NO: 92975 - DNA, 26 bp, Artificial sequence
  SiRNA target sequence
atttactcggtctgtgacagatcttt

SEQ ID NO: 92976 - DNA, 26 bp, Artificial sequence
  SiRNA target sequence
tttactcggtctgtgacagatcttta

SEQ ID NO: 92977 - DNA, 26 bp, Artificial sequence
  SiRNA target sequence
ttactcggtctgtgacagatctttaa

SEQ ID NO: 92978 - DNA, 26 bp, Artificial sequence
  SiRNA target sequence
tactcggtctgtgacagatctttaaa

SEQ ID NO: 92979 - DNA, 26 bp, Artificial sequence
  SiRNA target sequence
actcggtctgtgacagatctttaaat

SEQ ID NO: 92980 - DNA, 26 bp, Artificial sequence
  SiRNA target sequence
ctcggtctgtgacagatctttaaatt

SEQ ID NO: 92981 - DNA, 26 bp, Artificial sequence
  SiRNA target sequence
tcggtctgtgacagatctttaaatta

SEQ ID NO: 92982 - DNA, 26 bp, Artificial sequence
  SiRNA target sequence
cggtctgtgacagatctttaaattat

SEQ ID NO: 92983 - DNA, 26 bp, Artificial sequence
  SiRNA target sequence
ggtctgtgacagatctttaaattatt

SEQ ID NO: 92984 - DNA, 26 bp, Artificial sequence
  SiRNA target sequence
gtctgtgacagatctttaaattatta

SEQ ID NO: 92985 - DNA, 26 bp, Artificial sequence
  SiRNA target sequence
tctgtgacagatctttaaattattat

SEQ ID NO: 92986 - DNA, 26 bp, Artificial sequence
  SiRNA target sequence
ctgtgacagatctttaaattattata

SEQ ID NO: 92987 - DNA, 26 bp, Artificial sequence
  SiRNA target sequence
tgtgacagatctttaaattattataa

SEQ ID NO: 92988 - DNA, 26 bp, Artificial sequence
  SiRNA target sequence
gtgacagatctttaaattattataat

SEQ ID NO: 92989 - DNA, 26 bp, Artificial sequence
  SiRNA target sequence
tgacagatctttaaattattataatt

SEQ ID NO: 92990 - DNA, 26 bp, Artificial sequence
  SiRNA target sequence
gacagatctttaaattattataattt

SEQ ID NO: 92991 - DNA, 26 bp, Artificial sequence
  SiRNA target sequence
acagatctttaaattattataatttt

SEQ ID NO: 92992 - DNA, 26 bp, Artificial sequence
  SiRNA target sequence
cagatctttaaattattataattttg

SEQ ID NO: 92993 - DNA, 26 bp, Artificial sequence
  SiRNA target sequence
agatctttaaattattataattttgc

SEQ ID NO: 92994 - DNA, 26 bp, Artificial sequence
  SiRNA target sequence
gatctttaaattattataattttgca

SEQ ID NO: 92995 - DNA, 26 bp, Artificial sequence
  SiRNA target sequence
atctttaaattattataattttgcat

SEQ ID NO: 92996 - DNA, 26 bp, Artificial sequence
  SiRNA target sequence
tctttaaattattataattttgcata

SEQ ID NO: 92997 - DNA, 26 bp, Artificial sequence
  SiRNA target sequence
ctttaaattattataattttgcatat

SEQ ID NO: 92998 - DNA, 26 bp, Artificial sequence
  SiRNA target sequence
tttaaattattataattttgcatatc

SEQ ID NO: 92999 - DNA, 26 bp, Artificial sequence
  SiRNA target sequence
ttaaattattataattttgcatatct

SEQ ID NO: 93000 - DNA, 26 bp, Artificial sequence
  SiRNA target sequence
taaattattataattttgcatatcta

SEQ ID NO: 93001 - DNA, 26 bp, Artificial sequence
  SiRNA target sequence
aaattattataattttgcatatctat

SEQ ID NO: 93002 - DNA, 26 bp, Artificial sequence
  SiRNA target sequence
aattattataattttgcatatctatg

SEQ ID NO: 93003 - DNA, 26 bp, Artificial sequence
  SiRNA target sequence
attattataattttgcatatctatga

SEQ ID NO: 93004 - DNA, 26 bp, Artificial sequence
  SiRNA target sequence
ttattataattttgcatatctatgaa

SEQ ID NO: 93005 - DNA, 26 bp, Artificial sequence
  SiRNA target sequence
tattataattttgcatatctatgaaa

SEQ ID NO: 93006 - DNA, 26 bp, Artificial sequence
  SiRNA target sequence
attataattttgcatatctatgaaat

SEQ ID NO: 93007 - DNA, 26 bp, Artificial sequence
  SiRNA target sequence
ttataattttgcatatctatgaaatt

SEQ ID NO: 93008 - DNA, 26 bp, Artificial sequence
  SiRNA target sequence
tataattttgcatatctatgaaattg

SEQ ID NO: 93009 - DNA, 26 bp, Artificial sequence
  SiRNA target sequence
ataattttgcatatctatgaaattgg

SEQ ID NO: 93010 - DNA, 26 bp, Artificial sequence
  SiRNA target sequence
taattttgcatatctatgaaattgga

SEQ ID NO: 93011 - DNA, 26 bp, Artificial sequence
  SiRNA target sequence
aattttgcatatctatgaaattggaa

SEQ ID NO: 93012 - DNA, 26 bp, Artificial sequence
  SiRNA target sequence
attttgcatatctatgaaattggaaa

SEQ ID NO: 93013 - DNA, 26 bp, Artificial sequence
  SiRNA target sequence
ttttgcatatctatgaaattggaaac

SEQ ID NO: 93014 - DNA, 26 bp, Artificial sequence
  SiRNA target sequence
tttgcatatctatgaaattggaaaca

SEQ ID NO: 93015 - DNA, 26 bp, Artificial sequence
  SiRNA target sequence
ttgcatatctatgaaattggaaacat

SEQ ID NO: 93016 - DNA, 26 bp, Artificial sequence
  SiRNA target sequence
tgcatatctatgaaattggaaacatg

SEQ ID NO: 93017 - DNA, 26 bp, Artificial sequence
  SiRNA target sequence
gcatatctatgaaattggaaacatgt

SEQ ID NO: 93018 - DNA, 26 bp, Artificial sequence
  SiRNA target sequence
catatctatgaaattggaaacatgtc

SEQ ID NO: 93019 - DNA, 26 bp, Artificial sequence
  SiRNA target sequence
atatctatgaaattggaaacatgtcc

SEQ ID NO: 93020 - DNA, 26 bp, Artificial sequence
  SiRNA target sequence
tatctatgaaattggaaacatgtcca

SEQ ID NO: 93021 - DNA, 26 bp, Artificial sequence
  SiRNA target sequence
atctatgaaattggaaacatgtccat

SEQ ID NO: 93022 - DNA, 26 bp, Artificial sequence
  SiRNA target sequence
tctatgaaattggaaacatgtccata

SEQ ID NO: 93023 - DNA, 26 bp, Artificial sequence
  SiRNA target sequence
ctatgaaattggaaacatgtccatat

SEQ ID NO: 93024 - DNA, 26 bp, Artificial sequence
  SiRNA target sequence
tatgaaattggaaacatgtccatatc

SEQ ID NO: 93025 - DNA, 26 bp, Artificial sequence
  SiRNA target sequence
atgaaattggaaacatgtccatatct

SEQ ID NO: 93026 - DNA, 26 bp, Artificial sequence
  SiRNA target sequence
tgaaattggaaacatgtccatatcta

SEQ ID NO: 93027 - DNA, 26 bp, Artificial sequence
  SiRNA target sequence
gaaattggaaacatgtccatatctat

SEQ ID NO: 93028 - DNA, 26 bp, Artificial sequence
  SiRNA target sequence
aaattggaaacatgtccatatctatc

SEQ ID NO: 93029 - DNA, 26 bp, Artificial sequence
  SiRNA target sequence
aattggaaacatgtccatatctatcg

SEQ ID NO: 93030 - DNA, 26 bp, Artificial sequence
  SiRNA target sequence
attggaaacatgtccatatctatcgc

SEQ ID NO: 93031 - DNA, 26 bp, Artificial sequence
  SiRNA target sequence
ttggaaacatgtccatatctatcgcc

SEQ ID NO: 93032 - DNA, 26 bp, Artificial sequence
  SiRNA target sequence
tggaaacatgtccatatctatcgcct

SEQ ID NO: 93033 - DNA, 26 bp, Artificial sequence
  SiRNA target sequence
ggaaacatgtccatatctatcgcctt

SEQ ID NO: 93034 - DNA, 26 bp, Artificial sequence
  SiRNA target sequence
gaaacatgtccatatctatcgccttt

SEQ ID NO: 93035 - DNA, 26 bp, Artificial sequence
  SiRNA target sequence
aaacatgtccatatctatcgcctttt

SEQ ID NO: 93036 - DNA, 26 bp, Artificial sequence
  SiRNA target sequence
aacatgtccatatctatcgccttttt

SEQ ID NO: 93037 - DNA, 26 bp, Artificial sequence
  SiRNA target sequence
acatgtccatatctatcgcctttttt

SEQ ID NO: 93038 - DNA, 26 bp, Artificial sequence
  SiRNA target sequence
catgtccatatctatcgcctttttta

SEQ ID NO: 93039 - DNA, 26 bp, Artificial sequence
  SiRNA target sequence
atgtccatatctatcgccttttttaa

SEQ ID NO: 93040 - DNA, 26 bp, Artificial sequence
  SiRNA target sequence
tgtccatatctatcgccttttttaat

SEQ ID NO: 93041 - DNA, 26 bp, Artificial sequence
  SiRNA target sequence
gtccatatctatcgccttttttaata

SEQ ID NO: 93042 - DNA, 26 bp, Artificial sequence
  SiRNA target sequence
tccatatctatcgccttttttaataa

SEQ ID NO: 93043 - DNA, 26 bp, Artificial sequence
  SiRNA target sequence
ccatatctatcgccttttttaataat

SEQ ID NO: 93044 - DNA, 26 bp, Artificial sequence
  SiRNA target sequence
catatctatcgccttttttaataatt

SEQ ID NO: 93045 - DNA, 26 bp, Artificial sequence
  SiRNA target sequence
atatctatcgccttttttaataattg

SEQ ID NO: 93046 - DNA, 26 bp, Artificial sequence
  SiRNA target sequence
tatctatcgccttttttaataattgc

SEQ ID NO: 93047 - DNA, 26 bp, Artificial sequence
  SiRNA target sequence
atctatcgccttttttaataattgct

SEQ ID NO: 93048 - DNA, 26 bp, Artificial sequence
  SiRNA target sequence
tctatcgccttttttaataattgcta

SEQ ID NO: 93049 - DNA, 26 bp, Artificial sequence
  SiRNA target sequence
ctatcgccttttttaataattgctac

SEQ ID NO: 93050 - DNA, 26 bp, Artificial sequence
  SiRNA target sequence
tatcgccttttttaataattgctact

SEQ ID NO: 93051 - DNA, 26 bp, Artificial sequence
  SiRNA target sequence
atcgccttttttaataattgctacta

SEQ ID NO: 93052 - DNA, 26 bp, Artificial sequence
  SiRNA target sequence
tcgccttttttaataattgctactaa

SEQ ID NO: 93053 - DNA, 26 bp, Artificial sequence
  SiRNA target sequence
cgccttttttaataattgctactaaa

SEQ ID NO: 93054 - DNA, 26 bp, Artificial sequence
  SiRNA target sequence
gccttttttaataattgctactaaaa

SEQ ID NO: 93055 - DNA, 26 bp, Artificial sequence
  SiRNA target sequence
ccttttttaataattgctactaaaat

SEQ ID NO: 93056 - DNA, 26 bp, Artificial sequence
  SiRNA target sequence
cttttttaataattgctactaaaatt

SEQ ID NO: 93057 - DNA, 26 bp, Artificial sequence
  SiRNA target sequence
ttttttaataattgctactaaaattt

SEQ ID NO: 93058 - DNA, 26 bp, Artificial sequence
  SiRNA target sequence
tttttaataattgctactaaaatttc

SEQ ID NO: 93059 - DNA, 26 bp, Artificial sequence
  SiRNA target sequence
ttttaataattgctactaaaatttca

SEQ ID NO: 93060 - DNA, 26 bp, Artificial sequence
  SiRNA target sequence
tttaataattgctactaaaatttcac

SEQ ID NO: 93061 - DNA, 26 bp, Artificial sequence
  SiRNA target sequence
ttaataattgctactaaaatttcaca

SEQ ID NO: 93062 - DNA, 26 bp, Artificial sequence
  SiRNA target sequence
taataattgctactaaaatttcacat

SEQ ID NO: 93063 - DNA, 26 bp, Artificial sequence
  SiRNA target sequence
aataattgctactaaaatttcacatt

SEQ ID NO: 93064 - DNA, 26 bp, Artificial sequence
  SiRNA target sequence
ataattgctactaaaatttcacattt

SEQ ID NO: 93065 - DNA, 26 bp, Artificial sequence
  SiRNA target sequence
taattgctactaaaatttcacatttt

SEQ ID NO: 93066 - DNA, 26 bp, Artificial sequence
  SiRNA target sequence
aattgctactaaaatttcacattttt

SEQ ID NO: 93067 - DNA, 26 bp, Artificial sequence
  SiRNA target sequence
attgctactaaaatttcacatttttc

SEQ ID NO: 93068 - DNA, 26 bp, Artificial sequence
  SiRNA target sequence
ttgctactaaaatttcacatttttca

SEQ ID NO: 93069 - DNA, 26 bp, Artificial sequence
  SiRNA target sequence
tgctactaaaatttcacatttttcat

SEQ ID NO: 93070 - DNA, 26 bp, Artificial sequence
  SiRNA target sequence
gctactaaaatttcacatttttcatt

SEQ ID NO: 93071 - DNA, 26 bp, Artificial sequence
  SiRNA target sequence
ctactaaaatttcacatttttcattt

SEQ ID NO: 93072 - DNA, 26 bp, Artificial sequence
  SiRNA target sequence
tactaaaatttcacatttttcattta

SEQ ID NO: 93073 - DNA, 26 bp, Artificial sequence
  SiRNA target sequence
actaaaatttcacatttttcatttac

SEQ ID NO: 93074 - DNA, 26 bp, Artificial sequence
  SiRNA target sequence
ctaaaatttcacatttttcatttacg

SEQ ID NO: 93075 - DNA, 26 bp, Artificial sequence
  SiRNA target sequence
taaaatttcacatttttcatttacgt

SEQ ID NO: 93076 - DNA, 26 bp, Artificial sequence
  SiRNA target sequence
aaaatttcacatttttcatttacgtg

SEQ ID NO: 93077 - DNA, 26 bp, Artificial sequence
  SiRNA target sequence
aaatttcacatttttcatttacgtgg

SEQ ID NO: 93078 - DNA, 26 bp, Artificial sequence
  SiRNA target sequence
aatttcacatttttcatttacgtggt

SEQ ID NO: 93079 - DNA, 26 bp, Artificial sequence
  SiRNA target sequence
atttcacatttttcatttacgtggtt

SEQ ID NO: 93080 - DNA, 26 bp, Artificial sequence
  SiRNA target sequence
tttcacatttttcatttacgtggtta

SEQ ID NO: 93081 - DNA, 26 bp, Artificial sequence
  SiRNA target sequence
ttcacatttttcatttacgtggttag

SEQ ID NO: 93082 - DNA, 26 bp, Artificial sequence
  SiRNA target sequence
tcacatttttcatttacgtggttagt

SEQ ID NO: 93083 - DNA, 26 bp, Artificial sequence
  SiRNA target sequence
cacatttttcatttacgtggttagta

SEQ ID NO: 93084 - DNA, 26 bp, Artificial sequence
  SiRNA target sequence
acatttttcatttacgtggttagtaa

SEQ ID NO: 93085 - DNA, 26 bp, Artificial sequence
  SiRNA target sequence
catttttcatttacgtggttagtaag

SEQ ID NO: 93086 - DNA, 26 bp, Artificial sequence
  SiRNA target sequence
atttttcatttacgtggttagtaagt

SEQ ID NO: 93087 - DNA, 26 bp, Artificial sequence
  SiRNA target sequence
tttttcatttacgtggttagtaagtg

SEQ ID NO: 93088 - DNA, 26 bp, Artificial sequence
  SiRNA target sequence
ttttcatttacgtggttagtaagtga

SEQ ID NO: 93089 - DNA, 26 bp, Artificial sequence
  SiRNA target sequence
tttcatttacgtggttagtaagtgaa

SEQ ID NO: 93090 - DNA, 26 bp, Artificial sequence
  SiRNA target sequence
ttcatttacgtggttagtaagtgaat

SEQ ID NO: 93091 - DNA, 26 bp, Artificial sequence
  SiRNA target sequence
tcatttacgtggttagtaagtgaata

SEQ ID NO: 93092 - DNA, 26 bp, Artificial sequence
  SiRNA target sequence
catttacgtggttagtaagtgaataa

SEQ ID NO: 93093 - DNA, 26 bp, Artificial sequence
  SiRNA target sequence
atttacgtggttagtaagtgaataat

SEQ ID NO: 93094 - DNA, 26 bp, Artificial sequence
  SiRNA target sequence
tttacgtggttagtaagtgaataata

SEQ ID NO: 93095 - DNA, 26 bp, Artificial sequence
  SiRNA target sequence
ttacgtggttagtaagtgaataatat

SEQ ID NO: 93096 - DNA, 26 bp, Artificial sequence
  SiRNA target sequence
tacgtggttagtaagtgaataatatc

SEQ ID NO: 93097 - DNA, 26 bp, Artificial sequence
  SiRNA target sequence
acgtggttagtaagtgaataatatct

SEQ ID NO: 93098 - DNA, 26 bp, Artificial sequence
  SiRNA target sequence
cgtggttagtaagtgaataatatctt

SEQ ID NO: 93099 - DNA, 26 bp, Artificial sequence
  SiRNA target sequence
gtggttagtaagtgaataatatcttg

SEQ ID NO: 93100 - DNA, 26 bp, Artificial sequence
  SiRNA target sequence
tggttagtaagtgaataatatcttgg

SEQ ID NO: 93101 - DNA, 26 bp, Artificial sequence
  SiRNA target sequence
ggttagtaagtgaataatatcttggc

SEQ ID NO: 93102 - DNA, 26 bp, Artificial sequence
  SiRNA target sequence
gttagtaagtgaataatatcttggct

SEQ ID NO: 93103 - DNA, 26 bp, Artificial sequence
  SiRNA target sequence
ttagtaagtgaataatatcttggctt

SEQ ID NO: 93104 - DNA, 26 bp, Artificial sequence
  SiRNA target sequence
tagtaagtgaataatatcttggctta

SEQ ID NO: 93105 - DNA, 26 bp, Artificial sequence
  SiRNA target sequence
agtaagtgaataatatcttggcttaa

SEQ ID NO: 93106 - DNA, 26 bp, Artificial sequence
  SiRNA target sequence
gtaagtgaataatatcttggcttaat

SEQ ID NO: 93107 - DNA, 26 bp, Artificial sequence
  SiRNA target sequence
taagtgaataatatcttggcttaatt

SEQ ID NO: 93108 - DNA, 26 bp, Artificial sequence
  SiRNA target sequence
aagtgaataatatcttggcttaattg

SEQ ID NO: 93109 - DNA, 26 bp, Artificial sequence
  SiRNA target sequence
agtgaataatatcttggcttaattgt

SEQ ID NO: 93110 - DNA, 26 bp, Artificial sequence
  SiRNA target sequence
gtgaataatatcttggcttaattgtt

SEQ ID NO: 93111 - DNA, 26 bp, Artificial sequence
  SiRNA target sequence
tgaataatatcttggcttaattgttt

SEQ ID NO: 93112 - DNA, 26 bp, Artificial sequence
  SiRNA target sequence
gaataatatcttggcttaattgtttg

SEQ ID NO: 93113 - DNA, 26 bp, Artificial sequence
  SiRNA target sequence
aataatatcttggcttaattgtttga

SEQ ID NO: 93114 - DNA, 26 bp, Artificial sequence
  SiRNA target sequence
ataatatcttggcttaattgtttgac

SEQ ID NO: 93115 - DNA, 26 bp, Artificial sequence
  SiRNA target sequence
taatatcttggcttaattgtttgaca

SEQ ID NO: 93116 - DNA, 26 bp, Artificial sequence
  SiRNA target sequence
aatatcttggcttaattgtttgacaa

SEQ ID NO: 93117 - DNA, 26 bp, Artificial sequence
  SiRNA target sequence
atatcttggcttaattgtttgacaat

SEQ ID NO: 93118 - DNA, 26 bp, Artificial sequence
  SiRNA target sequence
tatcttggcttaattgtttgacaatt

SEQ ID NO: 93119 - DNA, 26 bp, Artificial sequence
  SiRNA target sequence
atcttggcttaattgtttgacaattc

SEQ ID NO: 93120 - DNA, 26 bp, Artificial sequence
  SiRNA target sequence
tcttggcttaattgtttgacaattca

SEQ ID NO: 93121 - DNA, 26 bp, Artificial sequence
  SiRNA target sequence
cttggcttaattgtttgacaattcat

SEQ ID NO: 93122 - DNA, 26 bp, Artificial sequence
  SiRNA target sequence
ttggcttaattgtttgacaattcata

SEQ ID NO: 93123 - DNA, 26 bp, Artificial sequence
  SiRNA target sequence
tggcttaattgtttgacaattcataa

SEQ ID NO: 93124 - DNA, 26 bp, Artificial sequence
  SiRNA target sequence
ggcttaattgtttgacaattcataat

SEQ ID NO: 93125 - DNA, 26 bp, Artificial sequence
  SiRNA target sequence
gcttaattgtttgacaattcataata

SEQ ID NO: 93126 - DNA, 26 bp, Artificial sequence
  SiRNA target sequence
cttaattgtttgacaattcataataa

SEQ ID NO: 93127 - DNA, 26 bp, Artificial sequence
  SiRNA target sequence
ttaattgtttgacaattcataataag

SEQ ID NO: 93128 - DNA, 26 bp, Artificial sequence
  SiRNA target sequence
taattgtttgacaattcataataaga

SEQ ID NO: 93129 - DNA, 26 bp, Artificial sequence
  SiRNA target sequence
aattgtttgacaattcataataagat

SEQ ID NO: 93130 - DNA, 26 bp, Artificial sequence
  SiRNA target sequence
attgtttgacaattcataataagatc

SEQ ID NO: 93131 - DNA, 26 bp, Artificial sequence
  SiRNA target sequence
ttgtttgacaattcataataagatcc

SEQ ID NO: 93132 - DNA, 26 bp, Artificial sequence
  SiRNA target sequence
tgtttgacaattcataataagatcct

SEQ ID NO: 93133 - DNA, 26 bp, Artificial sequence
  SiRNA target sequence
gtttgacaattcataataagatcctc

SEQ ID NO: 93134 - DNA, 26 bp, Artificial sequence
  SiRNA target sequence
tttgacaattcataataagatcctct

SEQ ID NO: 93135 - DNA, 26 bp, Artificial sequence
  SiRNA target sequence
ttgacaattcataataagatcctcta

SEQ ID NO: 93136 - DNA, 26 bp, Artificial sequence
  SiRNA target sequence
tgacaattcataataagatcctctaa

SEQ ID NO: 93137 - DNA, 26 bp, Artificial sequence
  SiRNA target sequence
gacaattcataataagatcctctaaa

SEQ ID NO: 93138 - DNA, 26 bp, Artificial sequence
  SiRNA target sequence
acaattcataataagatcctctaaac

SEQ ID NO: 93139 - DNA, 26 bp, Artificial sequence
  SiRNA target sequence
caattcataataagatcctctaaact

SEQ ID NO: 93140 - DNA, 26 bp, Artificial sequence
  SiRNA target sequence
aattcataataagatcctctaaactt

SEQ ID NO: 93141 - DNA, 26 bp, Artificial sequence
  SiRNA target sequence
attcataataagatcctctaaacttg

SEQ ID NO: 93142 - DNA, 26 bp, Artificial sequence
  SiRNA target sequence
ttcataataagatcctctaaacttgg

SEQ ID NO: 93143 - DNA, 26 bp, Artificial sequence
  SiRNA target sequence
tcataataagatcctctaaacttggt

SEQ ID NO: 93144 - DNA, 26 bp, Artificial sequence
  SiRNA target sequence
cataataagatcctctaaacttggtt

SEQ ID NO: 93145 - DNA, 26 bp, Artificial sequence
  SiRNA target sequence
ataataagatcctctaaacttggttt

SEQ ID NO: 93146 - DNA, 26 bp, Artificial sequence
  SiRNA target sequence
taataagatcctctaaacttggttta

SEQ ID NO: 93147 - DNA, 26 bp, Artificial sequence
  SiRNA target sequence
aataagatcctctaaacttggtttac

SEQ ID NO: 93148 - DNA, 26 bp, Artificial sequence
  SiRNA target sequence
ataagatcctctaaacttggtttaca

SEQ ID NO: 93149 - DNA, 26 bp, Artificial sequence
  SiRNA target sequence
taagatcctctaaacttggtttacat

SEQ ID NO: 93150 - DNA, 26 bp, Artificial sequence
  SiRNA target sequence
aagatcctctaaacttggtttacatt

SEQ ID NO: 93151 - DNA, 26 bp, Artificial sequence
  SiRNA target sequence
agatcctctaaacttggtttacattg

SEQ ID NO: 93152 - DNA, 26 bp, Artificial sequence
  SiRNA target sequence
gatcctctaaacttggtttacattga

SEQ ID NO: 93153 - DNA, 26 bp, Artificial sequence
  SiRNA target sequence
atcctctaaacttggtttacattgaa

SEQ ID NO: 93154 - DNA, 26 bp, Artificial sequence
  SiRNA target sequence
tcctctaaacttggtttacattgaaa

SEQ ID NO: 93155 - DNA, 26 bp, Artificial sequence
  SiRNA target sequence
cctctaaacttggtttacattgaaat

SEQ ID NO: 93156 - DNA, 26 bp, Artificial sequence
  SiRNA target sequence
ctctaaacttggtttacattgaaatg

SEQ ID NO: 93157 - DNA, 26 bp, Artificial sequence
  SiRNA target sequence
tctaaacttggtttacattgaaatgt

SEQ ID NO: 93158 - DNA, 26 bp, Artificial sequence
  SiRNA target sequence
ctaaacttggtttacattgaaatgta

SEQ ID NO: 93159 - DNA, 26 bp, Artificial sequence
  SiRNA target sequence
taaacttggtttacattgaaatgtat

SEQ ID NO: 93160 - DNA, 26 bp, Artificial sequence
  SiRNA target sequence
aaacttggtttacattgaaatgtata

SEQ ID NO: 93161 - DNA, 26 bp, Artificial sequence
  SiRNA target sequence
aacttggtttacattgaaatgtatat

SEQ ID NO: 93162 - DNA, 26 bp, Artificial sequence
  SiRNA target sequence
acttggtttacattgaaatgtatata

SEQ ID NO: 93163 - DNA, 26 bp, Artificial sequence
  SiRNA target sequence
cttggtttacattgaaatgtatatat

SEQ ID NO: 93164 - DNA, 26 bp, Artificial sequence
  SiRNA target sequence
ttggtttacattgaaatgtatatata

SEQ ID NO: 93165 - DNA, 26 bp, Artificial sequence
  SiRNA target sequence
tggtttacattgaaatgtatatataa

SEQ ID NO: 93166 - DNA, 26 bp, Artificial sequence
  SiRNA target sequence
ggtttacattgaaatgtatatataat

SEQ ID NO: 93167 - DNA, 26 bp, Artificial sequence
  SiRNA target sequence
gtttacattgaaatgtatatataatg

SEQ ID NO: 93168 - DNA, 26 bp, Artificial sequence
  SiRNA target sequence
tttacattgaaatgtatatataatgt

SEQ ID NO: 93169 - DNA, 26 bp, Artificial sequence
  SiRNA target sequence
ttacattgaaatgtatatataatgtc

SEQ ID NO: 93170 - DNA, 26 bp, Artificial sequence
  SiRNA target sequence
tacattgaaatgtatatataatgtca

SEQ ID NO: 93171 - DNA, 26 bp, Artificial sequence
  SiRNA target sequence
acattgaaatgtatatataatgtcaa

SEQ ID NO: 93172 - DNA, 26 bp, Artificial sequence
  SiRNA target sequence
cattgaaatgtatatataatgtcaag

SEQ ID NO: 93173 - DNA, 26 bp, Artificial sequence
  SiRNA target sequence
attgaaatgtatatataatgtcaagc

SEQ ID NO: 93174 - DNA, 26 bp, Artificial sequence
  SiRNA target sequence
ttgaaatgtatatataatgtcaagca

SEQ ID NO: 93175 - DNA, 26 bp, Artificial sequence
  SiRNA target sequence
tgaaatgtatatataatgtcaagcac

SEQ ID NO: 93176 - DNA, 26 bp, Artificial sequence
  SiRNA target sequence
gaaatgtatatataatgtcaagcaca

SEQ ID NO: 93177 - DNA, 26 bp, Artificial sequence
  SiRNA target sequence
aaatgtatatataatgtcaagcacat

SEQ ID NO: 93178 - DNA, 26 bp, Artificial sequence
  SiRNA target sequence
aatgtatatataatgtcaagcacatt

SEQ ID NO: 93179 - DNA, 26 bp, Artificial sequence
  SiRNA target sequence
atgtatatataatgtcaagcacatta

SEQ ID NO: 93180 - DNA, 26 bp, Artificial sequence
  SiRNA target sequence
tgtatatataatgtcaagcacattat

SEQ ID NO: 93181 - DNA, 26 bp, Artificial sequence
  SiRNA target sequence
gtatatataatgtcaagcacattatt

SEQ ID NO: 93182 - DNA, 26 bp, Artificial sequence
  SiRNA target sequence
tatatataatgtcaagcacattattc

SEQ ID NO: 93183 - DNA, 26 bp, Artificial sequence
  SiRNA target sequence
atatataatgtcaagcacattattcc

SEQ ID NO: 93184 - DNA, 26 bp, Artificial sequence
  SiRNA target sequence
tatataatgtcaagcacattattcca

SEQ ID NO: 93185 - DNA, 26 bp, Artificial sequence
  SiRNA target sequence
atataatgtcaagcacattattccag

SEQ ID NO: 93186 - DNA, 26 bp, Artificial sequence
  SiRNA target sequence
tataatgtcaagcacattattccagt

SEQ ID NO: 93187 - DNA, 26 bp, Artificial sequence
  SiRNA target sequence
ataatgtcaagcacattattccagtt

SEQ ID NO: 93188 - DNA, 26 bp, Artificial sequence
  SiRNA target sequence
taatgtcaagcacattattccagttc

SEQ ID NO: 93189 - DNA, 26 bp, Artificial sequence
  SiRNA target sequence
aatgtcaagcacattattccagttct

SEQ ID NO: 93190 - DNA, 26 bp, Artificial sequence
  SiRNA target sequence
atgtcaagcacattattccagttctt

SEQ ID NO: 93191 - DNA, 26 bp, Artificial sequence
  SiRNA target sequence
tgtcaagcacattattccagttctta

SEQ ID NO: 93192 - DNA, 26 bp, Artificial sequence
  SiRNA target sequence
gtcaagcacattattccagttcttaa

SEQ ID NO: 93193 - DNA, 26 bp, Artificial sequence
  SiRNA target sequence
tcaagcacattattccagttcttaat

SEQ ID NO: 93194 - DNA, 26 bp, Artificial sequence
  SiRNA target sequence
caagcacattattccagttcttaatg

SEQ ID NO: 93195 - DNA, 26 bp, Artificial sequence
  SiRNA target sequence
aagcacattattccagttcttaatga

SEQ ID NO: 93196 - DNA, 26 bp, Artificial sequence
  SiRNA target sequence
agcacattattccagttcttaatgat

SEQ ID NO: 93197 - DNA, 26 bp, Artificial sequence
  SiRNA target sequence
gcacattattccagttcttaatgatg

SEQ ID NO: 93198 - DNA, 26 bp, Artificial sequence
  SiRNA target sequence
cacattattccagttcttaatgatgc

SEQ ID NO: 93199 - DNA, 26 bp, Artificial sequence
  SiRNA target sequence
acattattccagttcttaatgatgct

SEQ ID NO: 93200 - DNA, 26 bp, Artificial sequence
  SiRNA target sequence
cattattccagttcttaatgatgctt

SEQ ID NO: 93201 - DNA, 26 bp, Artificial sequence
  SiRNA target sequence
attattccagttcttaatgatgctta

SEQ ID NO: 93202 - DNA, 26 bp, Artificial sequence
  SiRNA target sequence
ttattccagttcttaatgatgcttaa

SEQ ID NO: 93203 - DNA, 26 bp, Artificial sequence
  SiRNA target sequence
tattccagttcttaatgatgcttaaa

SEQ ID NO: 93204 - DNA, 26 bp, Artificial sequence
  SiRNA target sequence
attccagttcttaatgatgcttaaat

SEQ ID NO: 93205 - DNA, 26 bp, Artificial sequence
  SiRNA target sequence
ttccagttcttaatgatgcttaaata

SEQ ID NO: 93206 - DNA, 26 bp, Artificial sequence
  SiRNA target sequence
tccagttcttaatgatgcttaaataa

SEQ ID NO: 93207 - DNA, 26 bp, Artificial sequence
  SiRNA target sequence
ccagttcttaatgatgcttaaataat

SEQ ID NO: 93208 - DNA, 26 bp, Artificial sequence
  SiRNA target sequence
cagttcttaatgatgcttaaataatc

SEQ ID NO: 93209 - DNA, 26 bp, Artificial sequence
  SiRNA target sequence
agttcttaatgatgcttaaataatct

SEQ ID NO: 93210 - DNA, 26 bp, Artificial sequence
  SiRNA target sequence
gttcttaatgatgcttaaataatctt

SEQ ID NO: 93211 - DNA, 26 bp, Artificial sequence
  SiRNA target sequence
ttcttaatgatgcttaaataatcttt

SEQ ID NO: 93212 - DNA, 26 bp, Artificial sequence
  SiRNA target sequence
tcttaatgatgcttaaataatctttt

SEQ ID NO: 93213 - DNA, 26 bp, Artificial sequence
  SiRNA target sequence
cttaatgatgcttaaataatctttta

SEQ ID NO: 93214 - DNA, 26 bp, Artificial sequence
  SiRNA target sequence
ttaatgatgcttaaataatcttttac

SEQ ID NO: 93215 - DNA, 26 bp, Artificial sequence
  SiRNA target sequence
taatgatgcttaaataatcttttact

SEQ ID NO: 93216 - DNA, 26 bp, Artificial sequence
  SiRNA target sequence
aatgatgcttaaataatcttttactc

SEQ ID NO: 93217 - DNA, 26 bp, Artificial sequence
  SiRNA target sequence
atgatgcttaaataatcttttactcc

SEQ ID NO: 93218 - DNA, 26 bp, Artificial sequence
  SiRNA target sequence
tgatgcttaaataatcttttactcct

SEQ ID NO: 93219 - DNA, 26 bp, Artificial sequence
  SiRNA target sequence
gatgcttaaataatcttttactcctt

SEQ ID NO: 93220 - DNA, 26 bp, Artificial sequence
  SiRNA target sequence
atgcttaaataatcttttactccttc

SEQ ID NO: 93221 - DNA, 26 bp, Artificial sequence
  SiRNA target sequence
tgcttaaataatcttttactccttct

SEQ ID NO: 93222 - DNA, 26 bp, Artificial sequence
  SiRNA target sequence
gcttaaataatcttttactccttctt

SEQ ID NO: 93223 - DNA, 26 bp, Artificial sequence
  SiRNA target sequence
cttaaataatcttttactccttcttt

SEQ ID NO: 93224 - DNA, 26 bp, Artificial sequence
  SiRNA target sequence
ttaaataatcttttactccttcttta

SEQ ID NO: 93225 - DNA, 26 bp, Artificial sequence
  SiRNA target sequence
taaataatcttttactccttctttag

SEQ ID NO: 93226 - DNA, 26 bp, Artificial sequence
  SiRNA target sequence
aaataatcttttactccttctttaga

SEQ ID NO: 93227 - DNA, 26 bp, Artificial sequence
  SiRNA target sequence
aataatcttttactccttctttagaa

SEQ ID NO: 93228 - DNA, 26 bp, Artificial sequence
  SiRNA target sequence
ataatcttttactccttctttagaac

SEQ ID NO: 93229 - DNA, 26 bp, Artificial sequence
  SiRNA target sequence
taatcttttactccttctttagaaca

SEQ ID NO: 93230 - DNA, 26 bp, Artificial sequence
  SiRNA target sequence
aatcttttactccttctttagaacac

SEQ ID NO: 93231 - DNA, 26 bp, Artificial sequence
  SiRNA target sequence
atcttttactccttctttagaacaca

SEQ ID NO: 93232 - DNA, 26 bp, Artificial sequence
  SiRNA target sequence
tcttttactccttctttagaacacag

SEQ ID NO: 93233 - DNA, 26 bp, Artificial sequence
  SiRNA target sequence
cttttactccttctttagaacacaga

SEQ ID NO: 93234 - DNA, 26 bp, Artificial sequence
  SiRNA target sequence
ttttactccttctttagaacacagat

SEQ ID NO: 93235 - DNA, 26 bp, Artificial sequence
  SiRNA target sequence
tttactccttctttagaacacagata

SEQ ID NO: 93236 - DNA, 26 bp, Artificial sequence
  SiRNA target sequence
ttactccttctttagaacacagatat

SEQ ID NO: 93237 - DNA, 26 bp, Artificial sequence
  SiRNA target sequence
tactccttctttagaacacagatatt

SEQ ID NO: 93238 - DNA, 26 bp, Artificial sequence
  SiRNA target sequence
actccttctttagaacacagatattc

SEQ ID NO: 93239 - DNA, 26 bp, Artificial sequence
  SiRNA target sequence
ctccttctttagaacacagatattca

SEQ ID NO: 93240 - DNA, 26 bp, Artificial sequence
  SiRNA target sequence
tccttctttagaacacagatattcaa

SEQ ID NO: 93241 - DNA, 26 bp, Artificial sequence
  SiRNA target sequence
ccttctttagaacacagatattcaat

SEQ ID NO: 93242 - DNA, 26 bp, Artificial sequence
  SiRNA target sequence
cttctttagaacacagatattcaata

SEQ ID NO: 93243 - DNA, 26 bp, Artificial sequence
  SiRNA target sequence
ttctttagaacacagatattcaatat

SEQ ID NO: 93244 - DNA, 26 bp, Artificial sequence
  SiRNA target sequence
tctttagaacacagatattcaatatc

SEQ ID NO: 93245 - DNA, 26 bp, Artificial sequence
  SiRNA target sequence
ctttagaacacagatattcaatatca

SEQ ID NO: 93246 - DNA, 26 bp, Artificial sequence
  SiRNA target sequence
tttagaacacagatattcaatatcat

SEQ ID NO: 93247 - DNA, 26 bp, Artificial sequence
  SiRNA target sequence
ttagaacacagatattcaatatcatg

SEQ ID NO: 93248 - DNA, 26 bp, Artificial sequence
  SiRNA target sequence
tagaacacagatattcaatatcatgc

SEQ ID NO: 93249 - DNA, 26 bp, Artificial sequence
  SiRNA target sequence
agaacacagatattcaatatcatgct

SEQ ID NO: 93250 - DNA, 26 bp, Artificial sequence
  SiRNA target sequence
gaacacagatattcaatatcatgctt

SEQ ID NO: 93251 - DNA, 26 bp, Artificial sequence
  SiRNA target sequence
aacacagatattcaatatcatgctta

SEQ ID NO: 93252 - DNA, 26 bp, Artificial sequence
  SiRNA target sequence
acacagatattcaatatcatgcttat

SEQ ID NO: 93253 - DNA, 26 bp, Artificial sequence
  SiRNA target sequence
cacagatattcaatatcatgcttatt

SEQ ID NO: 93254 - DNA, 26 bp, Artificial sequence
  SiRNA target sequence
acagatattcaatatcatgcttattt

SEQ ID NO: 93255 - DNA, 26 bp, Artificial sequence
  SiRNA target sequence
cagatattcaatatcatgcttatttt

SEQ ID NO: 93256 - DNA, 26 bp, Artificial sequence
  SiRNA target sequence
agatattcaatatcatgcttattttt

SEQ ID NO: 93257 - DNA, 26 bp, Artificial sequence
  SiRNA target sequence
gatattcaatatcatgcttattttta

SEQ ID NO: 93258 - DNA, 26 bp, Artificial sequence
  SiRNA target sequence
atattcaatatcatgcttatttttag

SEQ ID NO: 93259 - DNA, 26 bp, Artificial sequence
  SiRNA target sequence
tattcaatatcatgcttatttttaga

SEQ ID NO: 93260 - DNA, 26 bp, Artificial sequence
  SiRNA target sequence
attcaatatcatgcttatttttagag

SEQ ID NO: 93261 - DNA, 26 bp, Artificial sequence
  SiRNA target sequence
ttcaatatcatgcttatttttagagg

SEQ ID NO: 93262 - DNA, 26 bp, Artificial sequence
  SiRNA target sequence
tcaatatcatgcttatttttagaggt

SEQ ID NO: 93263 - DNA, 26 bp, Artificial sequence
  SiRNA target sequence
caatatcatgcttatttttagaggtt

SEQ ID NO: 93264 - DNA, 26 bp, Artificial sequence
  SiRNA target sequence
aatatcatgcttatttttagaggttt

SEQ ID NO: 93265 - DNA, 26 bp, Artificial sequence
  SiRNA target sequence
atatcatgcttatttttagaggtttt

SEQ ID NO: 93266 - DNA, 26 bp, Artificial sequence
  SiRNA target sequence
tatcatgcttatttttagaggtttta

SEQ ID NO: 93267 - DNA, 26 bp, Artificial sequence
  SiRNA target sequence
atcatgcttatttttagaggttttag

SEQ ID NO: 93268 - DNA, 26 bp, Artificial sequence
  SiRNA target sequence
tcatgcttatttttagaggttttaga

SEQ ID NO: 93269 - DNA, 26 bp, Artificial sequence
  SiRNA target sequence
catgcttatttttagaggttttagaa

SEQ ID NO: 93270 - DNA, 26 bp, Artificial sequence
  SiRNA target sequence
atgcttatttttagaggttttagaaa

SEQ ID NO: 93271 - DNA, 26 bp, Artificial sequence
  SiRNA target sequence
tgcttatttttagaggttttagaaat

SEQ ID NO: 93272 - DNA, 26 bp, Artificial sequence
  SiRNA target sequence
gcttatttttagaggttttagaaata

SEQ ID NO: 93273 - DNA, 26 bp, Artificial sequence
  SiRNA target sequence
cttatttttagaggttttagaaatat

SEQ ID NO: 93274 - DNA, 26 bp, Artificial sequence
  SiRNA target sequence
ttatttttagaggttttagaaatatc

SEQ ID NO: 93275 - DNA, 26 bp, Artificial sequence
  SiRNA target sequence
tatttttagaggttttagaaatatcc

SEQ ID NO: 93276 - DNA, 26 bp, Artificial sequence
  SiRNA target sequence
atttttagaggttttagaaatatcca

SEQ ID NO: 93277 - DNA, 26 bp, Artificial sequence
  SiRNA target sequence
tttttagaggttttagaaatatccat

SEQ ID NO: 93278 - DNA, 26 bp, Artificial sequence
  SiRNA target sequence
ttttagaggttttagaaatatccata

SEQ ID NO: 93279 - DNA, 26 bp, Artificial sequence
  SiRNA target sequence
tttagaggttttagaaatatccataa

SEQ ID NO: 93280 - DNA, 26 bp, Artificial sequence
  SiRNA target sequence
ttagaggttttagaaatatccataag

SEQ ID NO: 93281 - DNA, 26 bp, Artificial sequence
  SiRNA target sequence
tagaggttttagaaatatccataagc

SEQ ID NO: 93282 - DNA, 26 bp, Artificial sequence
  SiRNA target sequence
agaggttttagaaatatccataagcc

SEQ ID NO: 93283 - DNA, 26 bp, Artificial sequence
  SiRNA target sequence
gaggttttagaaatatccataagcca

SEQ ID NO: 93284 - DNA, 26 bp, Artificial sequence
  SiRNA target sequence
aggttttagaaatatccataagccat

SEQ ID NO: 93285 - DNA, 26 bp, Artificial sequence
  SiRNA target sequence
ggttttagaaatatccataagccatg

SEQ ID NO: 93286 - DNA, 26 bp, Artificial sequence
  SiRNA target sequence
gttttagaaatatccataagccatgc

SEQ ID NO: 93287 - DNA, 26 bp, Artificial sequence
  SiRNA target sequence
ttttagaaatatccataagccatgct

SEQ ID NO: 93288 - DNA, 26 bp, Artificial sequence
  SiRNA target sequence
tttagaaatatccataagccatgctt

SEQ ID NO: 93289 - DNA, 26 bp, Artificial sequence
  SiRNA target sequence
ttagaaatatccataagccatgcttt

SEQ ID NO: 93290 - DNA, 26 bp, Artificial sequence
  SiRNA target sequence
tagaaatatccataagccatgctttt

SEQ ID NO: 93291 - DNA, 26 bp, Artificial sequence
  SiRNA target sequence
agaaatatccataagccatgcttttt

SEQ ID NO: 93292 - DNA, 26 bp, Artificial sequence
  SiRNA target sequence
gaaatatccataagccatgctttttt

SEQ ID NO: 93293 - DNA, 26 bp, Artificial sequence
  SiRNA target sequence
aaatatccataagccatgctttttta

SEQ ID NO: 93294 - DNA, 26 bp, Artificial sequence
  SiRNA target sequence
aatatccataagccatgcttttttag

SEQ ID NO: 93295 - DNA, 26 bp, Artificial sequence
  SiRNA target sequence
atatccataagccatgcttttttagg

SEQ ID NO: 93296 - DNA, 26 bp, Artificial sequence
  SiRNA target sequence
tatccataagccatgcttttttaggc

SEQ ID NO: 93297 - DNA, 26 bp, Artificial sequence
  SiRNA target sequence
atccataagccatgcttttttaggca

SEQ ID NO: 93298 - DNA, 26 bp, Artificial sequence
  SiRNA target sequence
tccataagccatgcttttttaggcaa

SEQ ID NO: 93299 - DNA, 26 bp, Artificial sequence
  SiRNA target sequence
ccataagccatgcttttttaggcaat

SEQ ID NO: 93300 - DNA, 26 bp, Artificial sequence
  SiRNA target sequence
cataagccatgcttttttaggcaatg

SEQ ID NO: 93301 - DNA, 26 bp, Artificial sequence
  SiRNA target sequence
ataagccatgcttttttaggcaatga

SEQ ID NO: 93302 - DNA, 26 bp, Artificial sequence
  SiRNA target sequence
taagccatgcttttttaggcaatgaa

SEQ ID NO: 93303 - DNA, 26 bp, Artificial sequence
  SiRNA target sequence
aagccatgcttttttaggcaatgaag

SEQ ID NO: 93304 - DNA, 26 bp, Artificial sequence
  SiRNA target sequence
agccatgcttttttaggcaatgaagt

SEQ ID NO: 93305 - DNA, 26 bp, Artificial sequence
  SiRNA target sequence
gccatgcttttttaggcaatgaagta

SEQ ID NO: 93306 - DNA, 26 bp, Artificial sequence
  SiRNA target sequence
ccatgcttttttaggcaatgaagtaa

SEQ ID NO: 93307 - DNA, 26 bp, Artificial sequence
  SiRNA target sequence
catgcttttttaggcaatgaagtaaa

SEQ ID NO: 93308 - DNA, 26 bp, Artificial sequence
  SiRNA target sequence
atgcttttttaggcaatgaagtaaaa

SEQ ID NO: 93309 - DNA, 26 bp, Artificial sequence
  SiRNA target sequence
tgcttttttaggcaatgaagtaaaat

SEQ ID NO: 93310 - DNA, 26 bp, Artificial sequence
  SiRNA target sequence
gcttttttaggcaatgaagtaaaatc

SEQ ID NO: 93311 - DNA, 26 bp, Artificial sequence
  SiRNA target sequence
cttttttaggcaatgaagtaaaatca

SEQ ID NO: 93312 - DNA, 26 bp, Artificial sequence
  SiRNA target sequence
ttttttaggcaatgaagtaaaatcaa

SEQ ID NO: 93313 - DNA, 26 bp, Artificial sequence
  SiRNA target sequence
tttttaggcaatgaagtaaaatcaaa

SEQ ID NO: 93314 - DNA, 26 bp, Artificial sequence
  SiRNA target sequence
ttttaggcaatgaagtaaaatcaaaa

SEQ ID NO: 93315 - DNA, 26 bp, Artificial sequence
  SiRNA target sequence
tttaggcaatgaagtaaaatcaaaaa

SEQ ID NO: 93316 - DNA, 26 bp, Artificial sequence
  SiRNA target sequence
ttaggcaatgaagtaaaatcaaaaat

SEQ ID NO: 93317 - DNA, 26 bp, Artificial sequence
  SiRNA target sequence
taggcaatgaagtaaaatcaaaaata

SEQ ID NO: 93318 - DNA, 26 bp, Artificial sequence
  SiRNA target sequence
aggcaatgaagtaaaatcaaaaatat

SEQ ID NO: 93319 - DNA, 26 bp, Artificial sequence
  SiRNA target sequence
ggcaatgaagtaaaatcaaaaatata

SEQ ID NO: 93320 - DNA, 26 bp, Artificial sequence
  SiRNA target sequence
gcaatgaagtaaaatcaaaaatatac

SEQ ID NO: 93321 - DNA, 26 bp, Artificial sequence
  SiRNA target sequence
caatgaagtaaaatcaaaaatatact

SEQ ID NO: 93322 - DNA, 26 bp, Artificial sequence
  SiRNA target sequence
aatgaagtaaaatcaaaaatatactt

SEQ ID NO: 93323 - DNA, 26 bp, Artificial sequence
  SiRNA target sequence
atgaagtaaaatcaaaaatatacttg

SEQ ID NO: 93324 - DNA, 26 bp, Artificial sequence
  SiRNA target sequence
tgaagtaaaatcaaaaatatacttga

SEQ ID NO: 93325 - DNA, 26 bp, Artificial sequence
  SiRNA target sequence
gaagtaaaatcaaaaatatacttgaa

SEQ ID NO: 93326 - DNA, 26 bp, Artificial sequence
  SiRNA target sequence
aagtaaaatcaaaaatatacttgaaa

SEQ ID NO: 93327 - DNA, 26 bp, Artificial sequence
  SiRNA target sequence
agtaaaatcaaaaatatacttgaaaa

SEQ ID NO: 93328 - DNA, 26 bp, Artificial sequence
  SiRNA target sequence
gtaaaatcaaaaatatacttgaaaaa

SEQ ID NO: 93329 - DNA, 26 bp, Artificial sequence
  SiRNA target sequence
taaaatcaaaaatatacttgaaaaag

SEQ ID NO: 93330 - DNA, 26 bp, Artificial sequence
  SiRNA target sequence
aaaatcaaaaatatacttgaaaaagt

SEQ ID NO: 93331 - DNA, 26 bp, Artificial sequence
  SiRNA target sequence
aaatcaaaaatatacttgaaaaagtc

SEQ ID NO: 93332 - DNA, 26 bp, Artificial sequence
  SiRNA target sequence
aatcaaaaatatacttgaaaaagtca

SEQ ID NO: 93333 - DNA, 26 bp, Artificial sequence
  SiRNA target sequence
atcaaaaatatacttgaaaaagtcac

SEQ ID NO: 93334 - DNA, 26 bp, Artificial sequence
  SiRNA target sequence
tcaaaaatatacttgaaaaagtcacg

SEQ ID NO: 93335 - DNA, 26 bp, Artificial sequence
  SiRNA target sequence
caaaaatatacttgaaaaagtcacgc

SEQ ID NO: 93336 - DNA, 26 bp, Artificial sequence
  SiRNA target sequence
aaaaatatacttgaaaaagtcacgca

SEQ ID NO: 93337 - DNA, 26 bp, Artificial sequence
  SiRNA target sequence
aaaatatacttgaaaaagtcacgcaa

SEQ ID NO: 93338 - DNA, 26 bp, Artificial sequence
  SiRNA target sequence
aaatatacttgaaaaagtcacgcaaa

SEQ ID NO: 93339 - DNA, 26 bp, Artificial sequence
  SiRNA target sequence
aatatacttgaaaaagtcacgcaaag

SEQ ID NO: 93340 - DNA, 26 bp, Artificial sequence
  SiRNA target sequence
atatacttgaaaaagtcacgcaaaga

SEQ ID NO: 93341 - DNA, 26 bp, Artificial sequence
  SiRNA target sequence
tatacttgaaaaagtcacgcaaagat

SEQ ID NO: 93342 - DNA, 26 bp, Artificial sequence
  SiRNA target sequence
atacttgaaaaagtcacgcaaagatc

SEQ ID NO: 93343 - DNA, 26 bp, Artificial sequence
  SiRNA target sequence
tacttgaaaaagtcacgcaaagatcc

SEQ ID NO: 93344 - DNA, 26 bp, Artificial sequence
  SiRNA target sequence
acttgaaaaagtcacgcaaagatcct

SEQ ID NO: 93345 - DNA, 26 bp, Artificial sequence
  SiRNA target sequence
cttgaaaaagtcacgcaaagatcctt

SEQ ID NO: 93346 - DNA, 26 bp, Artificial sequence
  SiRNA target sequence
ttgaaaaagtcacgcaaagatccttc

SEQ ID NO: 93347 - DNA, 26 bp, Artificial sequence
  SiRNA target sequence
tgaaaaagtcacgcaaagatccttcg

SEQ ID NO: 93348 - DNA, 26 bp, Artificial sequence
  SiRNA target sequence
gaaaaagtcacgcaaagatccttcga

SEQ ID NO: 93349 - DNA, 26 bp, Artificial sequence
  SiRNA target sequence
aaaaagtcacgcaaagatccttcgaa

SEQ ID NO: 93350 - DNA, 26 bp, Artificial sequence
  SiRNA target sequence
aaaagtcacgcaaagatccttcgaat

SEQ ID NO: 93351 - DNA, 26 bp, Artificial sequence
  SiRNA target sequence
aaagtcacgcaaagatccttcgaatt

SEQ ID NO: 93352 - DNA, 26 bp, Artificial sequence
  SiRNA target sequence
aagtcacgcaaagatccttcgaattg

SEQ ID NO: 93353 - DNA, 26 bp, Artificial sequence
  SiRNA target sequence
agtcacgcaaagatccttcgaattga

SEQ ID NO: 93354 - DNA, 26 bp, Artificial sequence
  SiRNA target sequence
gtcacgcaaagatccttcgaattgaa

SEQ ID NO: 93355 - DNA, 26 bp, Artificial sequence
  SiRNA target sequence
tcacgcaaagatccttcgaattgaaa

SEQ ID NO: 93356 - DNA, 26 bp, Artificial sequence
  SiRNA target sequence
cacgcaaagatccttcgaattgaaac

SEQ ID NO: 93357 - DNA, 26 bp, Artificial sequence
  SiRNA target sequence
acgcaaagatccttcgaattgaaacc

SEQ ID NO: 93358 - DNA, 26 bp, Artificial sequence
  SiRNA target sequence
cgcaaagatccttcgaattgaaaccc

SEQ ID NO: 93359 - DNA, 26 bp, Artificial sequence
  SiRNA target sequence
gcaaagatccttcgaattgaaacccc

SEQ ID NO: 93360 - DNA, 26 bp, Artificial sequence
  SiRNA target sequence
caaagatccttcgaattgaaaccccg

SEQ ID NO: 93361 - DNA, 26 bp, Artificial sequence
  SiRNA target sequence
aaagatccttcgaattgaaaccccgt

SEQ ID NO: 93362 - DNA, 26 bp, Artificial sequence
  SiRNA target sequence
aagatccttcgaattgaaaccccgtt

SEQ ID NO: 93363 - DNA, 26 bp, Artificial sequence
  SiRNA target sequence
agatccttcgaattgaaaccccgttt

SEQ ID NO: 93364 - DNA, 26 bp, Artificial sequence
  SiRNA target sequence
gatccttcgaattgaaaccccgtttt

SEQ ID NO: 93365 - DNA, 26 bp, Artificial sequence
  SiRNA target sequence
atccttcgaattgaaaccccgttttt

SEQ ID NO: 93366 - DNA, 26 bp, Artificial sequence
  SiRNA target sequence
tccttcgaattgaaaccccgtttttc

SEQ ID NO: 93367 - DNA, 26 bp, Artificial sequence
  SiRNA target sequence
ccttcgaattgaaaccccgtttttcc

SEQ ID NO: 93368 - DNA, 26 bp, Artificial sequence
  SiRNA target sequence
cttcgaattgaaaccccgtttttcca

SEQ ID NO: 93369 - DNA, 26 bp, Artificial sequence
  SiRNA target sequence
ttcgaattgaaaccccgtttttccaa

SEQ ID NO: 93370 - DNA, 26 bp, Artificial sequence
  SiRNA target sequence
tcgaattgaaaccccgtttttccaac

SEQ ID NO: 93371 - DNA, 26 bp, Artificial sequence
  SiRNA target sequence
cgaattgaaaccccgtttttccaact

SEQ ID NO: 93372 - DNA, 26 bp, Artificial sequence
  SiRNA target sequence
gaattgaaaccccgtttttccaactt

SEQ ID NO: 93373 - DNA, 26 bp, Artificial sequence
  SiRNA target sequence
aattgaaaccccgtttttccaacttg

SEQ ID NO: 93374 - DNA, 26 bp, Artificial sequence
  SiRNA target sequence
attgaaaccccgtttttccaacttgc

SEQ ID NO: 93375 - DNA, 26 bp, Artificial sequence
  SiRNA target sequence
ttgaaaccccgtttttccaacttgct

SEQ ID NO: 93376 - DNA, 26 bp, Artificial sequence
  SiRNA target sequence
tgaaaccccgtttttccaacttgctc

SEQ ID NO: 93377 - DNA, 26 bp, Artificial sequence
  SiRNA target sequence
gaaaccccgtttttccaacttgctca

SEQ ID NO: 93378 - DNA, 26 bp, Artificial sequence
  SiRNA target sequence
aaaccccgtttttccaacttgctcaa

SEQ ID NO: 93379 - DNA, 26 bp, Artificial sequence
  SiRNA target sequence
aaccccgtttttccaacttgctcaat

SEQ ID NO: 93380 - DNA, 26 bp, Artificial sequence
  SiRNA target sequence
accccgtttttccaacttgctcaata

SEQ ID NO: 93381 - DNA, 26 bp, Artificial sequence
  SiRNA target sequence
ccccgtttttccaacttgctcaatat

SEQ ID NO: 93382 - DNA, 26 bp, Artificial sequence
  SiRNA target sequence
cccgtttttccaacttgctcaatata

SEQ ID NO: 93383 - DNA, 26 bp, Artificial sequence
  SiRNA target sequence
ccgtttttccaacttgctcaatatat

SEQ ID NO: 93384 - DNA, 26 bp, Artificial sequence
  SiRNA target sequence
cgtttttccaacttgctcaatatata

SEQ ID NO: 93385 - DNA, 26 bp, Artificial sequence
  SiRNA target sequence
gtttttccaacttgctcaatatataa

SEQ ID NO: 93386 - DNA, 26 bp, Artificial sequence
  SiRNA target sequence
tttttccaacttgctcaatatataat

SEQ ID NO: 93387 - DNA, 26 bp, Artificial sequence
  SiRNA target sequence
ttttccaacttgctcaatatataata

SEQ ID NO: 93388 - DNA, 26 bp, Artificial sequence
  SiRNA target sequence
tttccaacttgctcaatatataataa

SEQ ID NO: 93389 - DNA, 26 bp, Artificial sequence
  SiRNA target sequence
ttccaacttgctcaatatataataat

SEQ ID NO: 93390 - DNA, 26 bp, Artificial sequence
  SiRNA target sequence
tccaacttgctcaatatataataatg

SEQ ID NO: 93391 - DNA, 26 bp, Artificial sequence
  SiRNA target sequence
ccaacttgctcaatatataataatgt

SEQ ID NO: 93392 - DNA, 26 bp, Artificial sequence
  SiRNA target sequence
caacttgctcaatatataataatgta

SEQ ID NO: 93393 - DNA, 26 bp, Artificial sequence
  SiRNA target sequence
aacttgctcaatatataataatgtat

SEQ ID NO: 93394 - DNA, 26 bp, Artificial sequence
  SiRNA target sequence
acttgctcaatatataataatgtatc

SEQ ID NO: 93395 - DNA, 26 bp, Artificial sequence
  SiRNA target sequence
cttgctcaatatataataatgtatca

SEQ ID NO: 93396 - DNA, 26 bp, Artificial sequence
  SiRNA target sequence
ttgctcaatatataataatgtatcac

SEQ ID NO: 93397 - DNA, 26 bp, Artificial sequence
  SiRNA target sequence
tgctcaatatataataatgtatcacc

SEQ ID NO: 93398 - DNA, 26 bp, Artificial sequence
  SiRNA target sequence
gctcaatatataataatgtatcacca

SEQ ID NO: 93399 - DNA, 26 bp, Artificial sequence
  SiRNA target sequence
ctcaatatataataatgtatcaccag

SEQ ID NO: 93400 - DNA, 26 bp, Artificial sequence
  SiRNA target sequence
tcaatatataataatgtatcaccaga

SEQ ID NO: 93401 - DNA, 26 bp, Artificial sequence
  SiRNA target sequence
caatatataataatgtatcaccagac

SEQ ID NO: 93402 - DNA, 26 bp, Artificial sequence
  SiRNA target sequence
aatatataataatgtatcaccagaca

SEQ ID NO: 93403 - DNA, 26 bp, Artificial sequence
  SiRNA target sequence
atatataataatgtatcaccagacat

SEQ ID NO: 93404 - DNA, 26 bp, Artificial sequence
  SiRNA target sequence
tatataataatgtatcaccagacatt

SEQ ID NO: 93405 - DNA, 26 bp, Artificial sequence
  SiRNA target sequence
atataataatgtatcaccagacattt

SEQ ID NO: 93406 - DNA, 26 bp, Artificial sequence
  SiRNA target sequence
tataataatgtatcaccagacatttc

SEQ ID NO: 93407 - DNA, 26 bp, Artificial sequence
  SiRNA target sequence
ataataatgtatcaccagacatttct

SEQ ID NO: 93408 - DNA, 26 bp, Artificial sequence
  SiRNA target sequence
taataatgtatcaccagacatttcta

SEQ ID NO: 93409 - DNA, 26 bp, Artificial sequence
  SiRNA target sequence
aataatgtatcaccagacatttctag

SEQ ID NO: 93410 - DNA, 26 bp, Artificial sequence
  SiRNA target sequence
ataatgtatcaccagacatttctagt

SEQ ID NO: 93411 - DNA, 26 bp, Artificial sequence
  SiRNA target sequence
taatgtatcaccagacatttctagta

SEQ ID NO: 93412 - DNA, 26 bp, Artificial sequence
  SiRNA target sequence
aatgtatcaccagacatttctagtaa

SEQ ID NO: 93413 - DNA, 26 bp, Artificial sequence
  SiRNA target sequence
atgtatcaccagacatttctagtaaa

SEQ ID NO: 93414 - DNA, 26 bp, Artificial sequence
  SiRNA target sequence
tgtatcaccagacatttctagtaaac

SEQ ID NO: 93415 - DNA, 26 bp, Artificial sequence
  SiRNA target sequence
gtatcaccagacatttctagtaaact

SEQ ID NO: 93416 - DNA, 26 bp, Artificial sequence
  SiRNA target sequence
tatcaccagacatttctagtaaactt

SEQ ID NO: 93417 - DNA, 26 bp, Artificial sequence
  SiRNA target sequence
atcaccagacatttctagtaaactta

SEQ ID NO: 93418 - DNA, 26 bp, Artificial sequence
  SiRNA target sequence
tcaccagacatttctagtaaacttaa

SEQ ID NO: 93419 - DNA, 26 bp, Artificial sequence
  SiRNA target sequence
caccagacatttctagtaaacttaac

SEQ ID NO: 93420 - DNA, 26 bp, Artificial sequence
  SiRNA target sequence
accagacatttctagtaaacttaaca

SEQ ID NO: 93421 - DNA, 26 bp, Artificial sequence
  SiRNA target sequence
ccagacatttctagtaaacttaacat

SEQ ID NO: 93422 - DNA, 26 bp, Artificial sequence
  SiRNA target sequence
cagacatttctagtaaacttaacatt

SEQ ID NO: 93423 - DNA, 26 bp, Artificial sequence
  SiRNA target sequence
agacatttctagtaaacttaacattt

SEQ ID NO: 93424 - DNA, 26 bp, Artificial sequence
  SiRNA target sequence
gacatttctagtaaacttaacatttc

SEQ ID NO: 93425 - DNA, 26 bp, Artificial sequence
  SiRNA target sequence
acatttctagtaaacttaacatttca

SEQ ID NO: 93426 - DNA, 26 bp, Artificial sequence
  SiRNA target sequence
catttctagtaaacttaacatttcat

SEQ ID NO: 93427 - DNA, 26 bp, Artificial sequence
  SiRNA target sequence
atttctagtaaacttaacatttcatt

SEQ ID NO: 93428 - DNA, 26 bp, Artificial sequence
  SiRNA target sequence
tttctagtaaacttaacatttcatta

SEQ ID NO: 93429 - DNA, 26 bp, Artificial sequence
  SiRNA target sequence
ttctagtaaacttaacatttcattaa

SEQ ID NO: 93430 - DNA, 26 bp, Artificial sequence
  SiRNA target sequence
tctagtaaacttaacatttcattaac

SEQ ID NO: 93431 - DNA, 26 bp, Artificial sequence
  SiRNA target sequence
ctagtaaacttaacatttcattaaca

SEQ ID NO: 93432 - DNA, 26 bp, Artificial sequence
  SiRNA target sequence
tagtaaacttaacatttcattaacaa

SEQ ID NO: 93433 - DNA, 26 bp, Artificial sequence
  SiRNA target sequence
agtaaacttaacatttcattaacaag

SEQ ID NO: 93434 - DNA, 26 bp, Artificial sequence
  SiRNA target sequence
gtaaacttaacatttcattaacaagc

SEQ ID NO: 93435 - DNA, 26 bp, Artificial sequence
  SiRNA target sequence
taaacttaacatttcattaacaagca

SEQ ID NO: 93436 - DNA, 26 bp, Artificial sequence
  SiRNA target sequence
aaacttaacatttcattaacaagcaa

SEQ ID NO: 93437 - DNA, 26 bp, Artificial sequence
  SiRNA target sequence
aacttaacatttcattaacaagcaaa

SEQ ID NO: 93438 - DNA, 26 bp, Artificial sequence
  SiRNA target sequence
acttaacatttcattaacaagcaaat

SEQ ID NO: 93439 - DNA, 26 bp, Artificial sequence
  SiRNA target sequence
cttaacatttcattaacaagcaaatc

SEQ ID NO: 93440 - DNA, 26 bp, Artificial sequence
  SiRNA target sequence
ttaacatttcattaacaagcaaatca

SEQ ID NO: 93441 - DNA, 26 bp, Artificial sequence
  SiRNA target sequence
taacatttcattaacaagcaaatcat

SEQ ID NO: 93442 - DNA, 26 bp, Artificial sequence
  SiRNA target sequence
aacatttcattaacaagcaaatcatt

SEQ ID NO: 93443 - DNA, 26 bp, Artificial sequence
  SiRNA target sequence
acatttcattaacaagcaaatcatta

SEQ ID NO: 93444 - DNA, 26 bp, Artificial sequence
  SiRNA target sequence
catttcattaacaagcaaatcattat

SEQ ID NO: 93445 - DNA, 26 bp, Artificial sequence
  SiRNA target sequence
atttcattaacaagcaaatcattatt

SEQ ID NO: 93446 - DNA, 26 bp, Artificial sequence
  SiRNA target sequence
tttcattaacaagcaaatcattattt

SEQ ID NO: 93447 - DNA, 26 bp, Artificial sequence
  SiRNA target sequence
ttcattaacaagcaaatcattatttg

SEQ ID NO: 93448 - DNA, 26 bp, Artificial sequence
  SiRNA target sequence
tcattaacaagcaaatcattatttga

SEQ ID NO: 93449 - DNA, 26 bp, Artificial sequence
  SiRNA target sequence
cattaacaagcaaatcattatttgaa

SEQ ID NO: 93450 - DNA, 26 bp, Artificial sequence
  SiRNA target sequence
attaacaagcaaatcattatttgaac

SEQ ID NO: 93451 - DNA, 26 bp, Artificial sequence
  SiRNA target sequence
ttaacaagcaaatcattatttgaaca

SEQ ID NO: 93452 - DNA, 26 bp, Artificial sequence
  SiRNA target sequence
taacaagcaaatcattatttgaacaa

SEQ ID NO: 93453 - DNA, 26 bp, Artificial sequence
  SiRNA target sequence
aacaagcaaatcattatttgaacaaa

SEQ ID NO: 93454 - DNA, 26 bp, Artificial sequence
  SiRNA target sequence
acaagcaaatcattatttgaacaaag

SEQ ID NO: 93455 - DNA, 26 bp, Artificial sequence
  SiRNA target sequence
caagcaaatcattatttgaacaaagt

SEQ ID NO: 93456 - DNA, 26 bp, Artificial sequence
  SiRNA target sequence
aagcaaatcattatttgaacaaagta

SEQ ID NO: 93457 - DNA, 26 bp, Artificial sequence
  SiRNA target sequence
agcaaatcattatttgaacaaagtag

SEQ ID NO: 93458 - DNA, 26 bp, Artificial sequence
  SiRNA target sequence
gcaaatcattatttgaacaaagtaga

SEQ ID NO: 93459 - DNA, 26 bp, Artificial sequence
  SiRNA target sequence
caaatcattatttgaacaaagtagac

SEQ ID NO: 93460 - DNA, 26 bp, Artificial sequence
  SiRNA target sequence
aaatcattatttgaacaaagtagacc

SEQ ID NO: 93461 - DNA, 26 bp, Artificial sequence
  SiRNA target sequence
aatcattatttgaacaaagtagacca

SEQ ID NO: 93462 - DNA, 26 bp, Artificial sequence
  SiRNA target sequence
atcattatttgaacaaagtagaccaa

SEQ ID NO: 93463 - DNA, 26 bp, Artificial sequence
  SiRNA target sequence
tcattatttgaacaaagtagaccaat

SEQ ID NO: 93464 - DNA, 26 bp, Artificial sequence
  SiRNA target sequence
cattatttgaacaaagtagaccaata

SEQ ID NO: 93465 - DNA, 26 bp, Artificial sequence
  SiRNA target sequence
attatttgaacaaagtagaccaatac

SEQ ID NO: 93466 - DNA, 26 bp, Artificial sequence
  SiRNA target sequence
ttatttgaacaaagtagaccaatact

SEQ ID NO: 93467 - DNA, 26 bp, Artificial sequence
  SiRNA target sequence
tatttgaacaaagtagaccaatacta

SEQ ID NO: 93468 - DNA, 26 bp, Artificial sequence
  SiRNA target sequence
atttgaacaaagtagaccaatactat

SEQ ID NO: 93469 - DNA, 26 bp, Artificial sequence
  SiRNA target sequence
tttgaacaaagtagaccaatactatc

SEQ ID NO: 93470 - DNA, 26 bp, Artificial sequence
  SiRNA target sequence
ttgaacaaagtagaccaatactatca

SEQ ID NO: 93471 - DNA, 26 bp, Artificial sequence
  SiRNA target sequence
tgaacaaagtagaccaatactatcac

SEQ ID NO: 93472 - DNA, 26 bp, Artificial sequence
  SiRNA target sequence
gaacaaagtagaccaatactatcacc

SEQ ID NO: 93473 - DNA, 26 bp, Artificial sequence
  SiRNA target sequence
aacaaagtagaccaatactatcacca

SEQ ID NO: 93474 - DNA, 26 bp, Artificial sequence
  SiRNA target sequence
acaaagtagaccaatactatcaccag

SEQ ID NO: 93475 - DNA, 26 bp, Artificial sequence
  SiRNA target sequence
caaagtagaccaatactatcaccagg

SEQ ID NO: 93476 - DNA, 26 bp, Artificial sequence
  SiRNA target sequence
aaagtagaccaatactatcaccagga

SEQ ID NO: 93477 - DNA, 26 bp, Artificial sequence
  SiRNA target sequence
aagtagaccaatactatcaccaggaa

SEQ ID NO: 93478 - DNA, 26 bp, Artificial sequence
  SiRNA target sequence
agtagaccaatactatcaccaggaac

SEQ ID NO: 93479 - DNA, 26 bp, Artificial sequence
  SiRNA target sequence
gtagaccaatactatcaccaggaaca

SEQ ID NO: 93480 - DNA, 26 bp, Artificial sequence
  SiRNA target sequence
tagaccaatactatcaccaggaacaa

SEQ ID NO: 93481 - DNA, 26 bp, Artificial sequence
  SiRNA target sequence
agaccaatactatcaccaggaacaaa

SEQ ID NO: 93482 - DNA, 26 bp, Artificial sequence
  SiRNA target sequence
gaccaatactatcaccaggaacaaaa

SEQ ID NO: 93483 - DNA, 26 bp, Artificial sequence
  SiRNA target sequence
accaatactatcaccaggaacaaaat

SEQ ID NO: 93484 - DNA, 26 bp, Artificial sequence
  SiRNA target sequence
ccaatactatcaccaggaacaaaatc

SEQ ID NO: 93485 - DNA, 26 bp, Artificial sequence
  SiRNA target sequence
caatactatcaccaggaacaaaatct

SEQ ID NO: 93486 - DNA, 26 bp, Artificial sequence
  SiRNA target sequence
aatactatcaccaggaacaaaatcta

SEQ ID NO: 93487 - DNA, 26 bp, Artificial sequence
  SiRNA target sequence
atactatcaccaggaacaaaatctaa

SEQ ID NO: 93488 - DNA, 26 bp, Artificial sequence
  SiRNA target sequence
tactatcaccaggaacaaaatctaat

SEQ ID NO: 93489 - DNA, 26 bp, Artificial sequence
  SiRNA target sequence
actatcaccaggaacaaaatctaatg

SEQ ID NO: 93490 - DNA, 26 bp, Artificial sequence
  SiRNA target sequence
ctatcaccaggaacaaaatctaatgt

SEQ ID NO: 93491 - DNA, 26 bp, Artificial sequence
  SiRNA target sequence
tatcaccaggaacaaaatctaatgta

SEQ ID NO: 93492 - DNA, 26 bp, Artificial sequence
  SiRNA target sequence
atcaccaggaacaaaatctaatgtat

SEQ ID NO: 93493 - DNA, 26 bp, Artificial sequence
  SiRNA target sequence
tcaccaggaacaaaatctaatgtata

SEQ ID NO: 93494 - DNA, 26 bp, Artificial sequence
  SiRNA target sequence
caccaggaacaaaatctaatgtataa

SEQ ID NO: 93495 - DNA, 26 bp, Artificial sequence
  SiRNA target sequence
accaggaacaaaatctaatgtataat

SEQ ID NO: 93496 - DNA, 26 bp, Artificial sequence
  SiRNA target sequence
ccaggaacaaaatctaatgtataatt

SEQ ID NO: 93497 - DNA, 26 bp, Artificial sequence
  SiRNA target sequence
caggaacaaaatctaatgtataatta

SEQ ID NO: 93498 - DNA, 26 bp, Artificial sequence
  SiRNA target sequence
aggaacaaaatctaatgtataattaa

SEQ ID NO: 93499 - DNA, 26 bp, Artificial sequence
  SiRNA target sequence
ggaacaaaatctaatgtataattaag

SEQ ID NO: 93500 - DNA, 26 bp, Artificial sequence
  SiRNA target sequence
gaacaaaatctaatgtataattaagt

SEQ ID NO: 93501 - DNA, 26 bp, Artificial sequence
  SiRNA target sequence
aacaaaatctaatgtataattaagtt

SEQ ID NO: 93502 - DNA, 26 bp, Artificial sequence
  SiRNA target sequence
acaaaatctaatgtataattaagttg

SEQ ID NO: 93503 - DNA, 26 bp, Artificial sequence
  SiRNA target sequence
caaaatctaatgtataattaagttga

SEQ ID NO: 93504 - DNA, 26 bp, Artificial sequence
  SiRNA target sequence
aaaatctaatgtataattaagttgaa

SEQ ID NO: 93505 - DNA, 26 bp, Artificial sequence
  SiRNA target sequence
aaatctaatgtataattaagttgaac

SEQ ID NO: 93506 - DNA, 26 bp, Artificial sequence
  SiRNA target sequence
aatctaatgtataattaagttgaacc

SEQ ID NO: 93507 - DNA, 26 bp, Artificial sequence
  SiRNA target sequence
atctaatgtataattaagttgaacct

SEQ ID NO: 93508 - DNA, 26 bp, Artificial sequence
  SiRNA target sequence
tctaatgtataattaagttgaacctt

SEQ ID NO: 93509 - DNA, 26 bp, Artificial sequence
  SiRNA target sequence
ctaatgtataattaagttgaacctta

SEQ ID NO: 93510 - DNA, 26 bp, Artificial sequence
  SiRNA target sequence
taatgtataattaagttgaaccttat

SEQ ID NO: 93511 - DNA, 26 bp, Artificial sequence
  SiRNA target sequence
aatgtataattaagttgaaccttata

SEQ ID NO: 93512 - DNA, 26 bp, Artificial sequence
  SiRNA target sequence
atgtataattaagttgaaccttatat

SEQ ID NO: 93513 - DNA, 26 bp, Artificial sequence
  SiRNA target sequence
tgtataattaagttgaaccttatata

SEQ ID NO: 93514 - DNA, 26 bp, Artificial sequence
  SiRNA target sequence
gtataattaagttgaaccttatatac

SEQ ID NO: 93515 - DNA, 26 bp, Artificial sequence
  SiRNA target sequence
tataattaagttgaaccttatatacc

SEQ ID NO: 93516 - DNA, 26 bp, Artificial sequence
  SiRNA target sequence
ataattaagttgaaccttatatacct

SEQ ID NO: 93517 - DNA, 26 bp, Artificial sequence
  SiRNA target sequence
taattaagttgaaccttatatacctt

SEQ ID NO: 93518 - DNA, 26 bp, Artificial sequence
  SiRNA target sequence
aattaagttgaaccttatataccttt

SEQ ID NO: 93519 - DNA, 26 bp, Artificial sequence
  SiRNA target sequence
attaagttgaaccttatatacctttt

SEQ ID NO: 93520 - DNA, 26 bp, Artificial sequence
  SiRNA target sequence
ttaagttgaaccttatataccttttt

SEQ ID NO: 93521 - DNA, 26 bp, Artificial sequence
  SiRNA target sequence
taagttgaaccttatatacctttttc

SEQ ID NO: 93522 - DNA, 26 bp, Artificial sequence
  SiRNA target sequence
aagttgaaccttatatacctttttcc

SEQ ID NO: 93523 - DNA, 26 bp, Artificial sequence
  SiRNA target sequence
agttgaaccttatatacctttttcca

SEQ ID NO: 93524 - DNA, 26 bp, Artificial sequence
  SiRNA target sequence
gttgaaccttatatacctttttccat

SEQ ID NO: 93525 - DNA, 26 bp, Artificial sequence
  SiRNA target sequence
ttgaaccttatatacctttttccatg

SEQ ID NO: 93526 - DNA, 26 bp, Artificial sequence
  SiRNA target sequence
tgaaccttatatacctttttccatgt

SEQ ID NO: 93527 - DNA, 26 bp, Artificial sequence
  SiRNA target sequence
gaaccttatatacctttttccatgta

SEQ ID NO: 93528 - DNA, 26 bp, Artificial sequence
  SiRNA target sequence
aaccttatatacctttttccatgtac

SEQ ID NO: 93529 - DNA, 26 bp, Artificial sequence
  SiRNA target sequence
accttatatacctttttccatgtaca

SEQ ID NO: 93530 - DNA, 26 bp, Artificial sequence
  SiRNA target sequence
ccttatatacctttttccatgtacag

SEQ ID NO: 93531 - DNA, 26 bp, Artificial sequence
  SiRNA target sequence
cttatatacctttttccatgtacagg

SEQ ID NO: 93532 - DNA, 26 bp, Artificial sequence
  SiRNA target sequence
ttatatacctttttccatgtacagga

SEQ ID NO: 93533 - DNA, 26 bp, Artificial sequence
  SiRNA target sequence
tatatacctttttccatgtacaggaa

SEQ ID NO: 93534 - DNA, 26 bp, Artificial sequence
  SiRNA target sequence
atatacctttttccatgtacaggaaa

SEQ ID NO: 93535 - DNA, 26 bp, Artificial sequence
  SiRNA target sequence
tatacctttttccatgtacaggaaag

SEQ ID NO: 93536 - DNA, 26 bp, Artificial sequence
  SiRNA target sequence
atacctttttccatgtacaggaaagg

SEQ ID NO: 93537 - DNA, 26 bp, Artificial sequence
  SiRNA target sequence
tacctttttccatgtacaggaaaggt

SEQ ID NO: 93538 - DNA, 26 bp, Artificial sequence
  SiRNA target sequence
acctttttccatgtacaggaaaggtt

SEQ ID NO: 93539 - DNA, 26 bp, Artificial sequence
  SiRNA target sequence
cctttttccatgtacaggaaaggttt

SEQ ID NO: 93540 - DNA, 26 bp, Artificial sequence
  SiRNA target sequence
ctttttccatgtacaggaaaggtttt

SEQ ID NO: 93541 - DNA, 26 bp, Artificial sequence
  SiRNA target sequence
tttttccatgtacaggaaaggttttc

SEQ ID NO: 93542 - DNA, 26 bp, Artificial sequence
  SiRNA target sequence
ttttccatgtacaggaaaggttttca

SEQ ID NO: 93543 - DNA, 26 bp, Artificial sequence
  SiRNA target sequence
tttccatgtacaggaaaggttttcaa

SEQ ID NO: 93544 - DNA, 26 bp, Artificial sequence
  SiRNA target sequence
ttccatgtacaggaaaggttttcaat

SEQ ID NO: 93545 - DNA, 26 bp, Artificial sequence
  SiRNA target sequence
tccatgtacaggaaaggttttcaata

SEQ ID NO: 93546 - DNA, 26 bp, Artificial sequence
  SiRNA target sequence
ccatgtacaggaaaggttttcaatat

SEQ ID NO: 93547 - DNA, 26 bp, Artificial sequence
  SiRNA target sequence
catgtacaggaaaggttttcaatatt

SEQ ID NO: 93548 - DNA, 26 bp, Artificial sequence
  SiRNA target sequence
atgtacaggaaaggttttcaatattt

SEQ ID NO: 93549 - DNA, 26 bp, Artificial sequence
  SiRNA target sequence
tgtacaggaaaggttttcaatattta

SEQ ID NO: 93550 - DNA, 26 bp, Artificial sequence
  SiRNA target sequence
gtacaggaaaggttttcaatatttag

SEQ ID NO: 93551 - DNA, 26 bp, Artificial sequence
  SiRNA target sequence
tacaggaaaggttttcaatatttagt

SEQ ID NO: 93552 - DNA, 26 bp, Artificial sequence
  SiRNA target sequence
acaggaaaggttttcaatatttagta

SEQ ID NO: 93553 - DNA, 26 bp, Artificial sequence
  SiRNA target sequence
caggaaaggttttcaatatttagtat

SEQ ID NO: 93554 - DNA, 26 bp, Artificial sequence
  SiRNA target sequence
aggaaaggttttcaatatttagtata

SEQ ID NO: 93555 - DNA, 26 bp, Artificial sequence
  SiRNA target sequence
ggaaaggttttcaatatttagtatat

SEQ ID NO: 93556 - DNA, 26 bp, Artificial sequence
  SiRNA target sequence
gaaaggttttcaatatttagtatatt

SEQ ID NO: 93557 - DNA, 26 bp, Artificial sequence
  SiRNA target sequence
aaaggttttcaatatttagtatattt

SEQ ID NO: 93558 - DNA, 26 bp, Artificial sequence
  SiRNA target sequence
aaggttttcaatatttagtatatttg

SEQ ID NO: 93559 - DNA, 26 bp, Artificial sequence
  SiRNA target sequence
aggttttcaatatttagtatatttgt

SEQ ID NO: 93560 - DNA, 26 bp, Artificial sequence
  SiRNA target sequence
ggttttcaatatttagtatatttgta

SEQ ID NO: 93561 - DNA, 26 bp, Artificial sequence
  SiRNA target sequence
gttttcaatatttagtatatttgtat

SEQ ID NO: 93562 - DNA, 26 bp, Artificial sequence
  SiRNA target sequence
ttttcaatatttagtatatttgtatc

SEQ ID NO: 93563 - DNA, 26 bp, Artificial sequence
  SiRNA target sequence
tttcaatatttagtatatttgtatct

SEQ ID NO: 93564 - DNA, 26 bp, Artificial sequence
  SiRNA target sequence
ttcaatatttagtatatttgtatcta

SEQ ID NO: 93565 - DNA, 26 bp, Artificial sequence
  SiRNA target sequence
tcaatatttagtatatttgtatctat

SEQ ID NO: 93566 - DNA, 26 bp, Artificial sequence
  SiRNA target sequence
caatatttagtatatttgtatctatc

SEQ ID NO: 93567 - DNA, 26 bp, Artificial sequence
  SiRNA target sequence
aatatttagtatatttgtatctatca

SEQ ID NO: 93568 - DNA, 26 bp, Artificial sequence
  SiRNA target sequence
atatttagtatatttgtatctatcaa

SEQ ID NO: 93569 - DNA, 26 bp, Artificial sequence
  SiRNA target sequence
tatttagtatatttgtatctatcaaa

SEQ ID NO: 93570 - DNA, 26 bp, Artificial sequence
  SiRNA target sequence
atttagtatatttgtatctatcaaat

SEQ ID NO: 93571 - DNA, 26 bp, Artificial sequence
  SiRNA target sequence
tttagtatatttgtatctatcaaatt

SEQ ID NO: 93572 - DNA, 26 bp, Artificial sequence
  SiRNA target sequence
ttagtatatttgtatctatcaaattt

SEQ ID NO: 93573 - DNA, 26 bp, Artificial sequence
  SiRNA target sequence
tagtatatttgtatctatcaaattta

SEQ ID NO: 93574 - DNA, 26 bp, Artificial sequence
  SiRNA target sequence
agtatatttgtatctatcaaatttat

SEQ ID NO: 93575 - DNA, 26 bp, Artificial sequence
  SiRNA target sequence
gtatatttgtatctatcaaatttata

SEQ ID NO: 93576 - DNA, 26 bp, Artificial sequence
  SiRNA target sequence
tatatttgtatctatcaaatttatat

SEQ ID NO: 93577 - DNA, 26 bp, Artificial sequence
  SiRNA target sequence
atatttgtatctatcaaatttatatt

SEQ ID NO: 93578 - DNA, 26 bp, Artificial sequence
  SiRNA target sequence
tatttgtatctatcaaatttatattc

SEQ ID NO: 93579 - DNA, 26 bp, Artificial sequence
  SiRNA target sequence
atttgtatctatcaaatttatattct

SEQ ID NO: 93580 - DNA, 26 bp, Artificial sequence
  SiRNA target sequence
tttgtatctatcaaatttatattctc

SEQ ID NO: 93581 - DNA, 26 bp, Artificial sequence
  SiRNA target sequence
ttgtatctatcaaatttatattctcg

SEQ ID NO: 93582 - DNA, 26 bp, Artificial sequence
  SiRNA target sequence
tgtatctatcaaatttatattctcgt

SEQ ID NO: 93583 - DNA, 26 bp, Artificial sequence
  SiRNA target sequence
gtatctatcaaatttatattctcgtt

SEQ ID NO: 93584 - DNA, 26 bp, Artificial sequence
  SiRNA target sequence
tatctatcaaatttatattctcgttt

SEQ ID NO: 93585 - DNA, 26 bp, Artificial sequence
  SiRNA target sequence
atctatcaaatttatattctcgtttg

SEQ ID NO: 93586 - DNA, 26 bp, Artificial sequence
  SiRNA target sequence
tctatcaaatttatattctcgtttgt

SEQ ID NO: 93587 - DNA, 26 bp, Artificial sequence
  SiRNA target sequence
ctatcaaatttatattctcgtttgtc

SEQ ID NO: 93588 - DNA, 26 bp, Artificial sequence
  SiRNA target sequence
tatcaaatttatattctcgtttgtct

SEQ ID NO: 93589 - DNA, 26 bp, Artificial sequence
  SiRNA target sequence
atcaaatttatattctcgtttgtctt

SEQ ID NO: 93590 - DNA, 26 bp, Artificial sequence
  SiRNA target sequence
tcaaatttatattctcgtttgtcttt

SEQ ID NO: 93591 - DNA, 26 bp, Artificial sequence
  SiRNA target sequence
caaatttatattctcgtttgtcttta

SEQ ID NO: 93592 - DNA, 26 bp, Artificial sequence
  SiRNA target sequence
aaatttatattctcgtttgtctttat

SEQ ID NO: 93593 - DNA, 26 bp, Artificial sequence
  SiRNA target sequence
aatttatattctcgtttgtctttatt

SEQ ID NO: 93594 - DNA, 26 bp, Artificial sequence
  SiRNA target sequence
atttatattctcgtttgtctttattt

SEQ ID NO: 93595 - DNA, 26 bp, Artificial sequence
  SiRNA target sequence
tttatattctcgtttgtctttatttt

SEQ ID NO: 93596 - DNA, 26 bp, Artificial sequence
  SiRNA target sequence
ttatattctcgtttgtctttatttta

SEQ ID NO: 93597 - DNA, 26 bp, Artificial sequence
  SiRNA target sequence
tatattctcgtttgtctttattttat

SEQ ID NO: 93598 - DNA, 26 bp, Artificial sequence
  SiRNA target sequence
atattctcgtttgtctttattttata

SEQ ID NO: 93599 - DNA, 26 bp, Artificial sequence
  SiRNA target sequence
tattctcgtttgtctttattttataa

SEQ ID NO: 93600 - DNA, 26 bp, Artificial sequence
  SiRNA target sequence
attctcgtttgtctttattttataag

SEQ ID NO: 93601 - DNA, 26 bp, Artificial sequence
  SiRNA target sequence
ttctcgtttgtctttattttataaga

SEQ ID NO: 93602 - DNA, 26 bp, Artificial sequence
  SiRNA target sequence
tctcgtttgtctttattttataagaa

SEQ ID NO: 93603 - DNA, 26 bp, Artificial sequence
  SiRNA target sequence
ctcgtttgtctttattttataagaac

SEQ ID NO: 93604 - DNA, 26 bp, Artificial sequence
  SiRNA target sequence
tcgtttgtctttattttataagaacc

SEQ ID NO: 93605 - DNA, 26 bp, Artificial sequence
  SiRNA target sequence
cgtttgtctttattttataagaacct

SEQ ID NO: 93606 - DNA, 26 bp, Artificial sequence
  SiRNA target sequence
gtttgtctttattttataagaacctg

SEQ ID NO: 93607 - DNA, 26 bp, Artificial sequence
  SiRNA target sequence
tttgtctttattttataagaacctgt

SEQ ID NO: 93608 - DNA, 26 bp, Artificial sequence
  SiRNA target sequence
ttgtctttattttataagaacctgta

SEQ ID NO: 93609 - DNA, 26 bp, Artificial sequence
  SiRNA target sequence
tgtctttattttataagaacctgtat

SEQ ID NO: 93610 - DNA, 26 bp, Artificial sequence
  SiRNA target sequence
gtctttattttataagaacctgtata

SEQ ID NO: 93611 - DNA, 26 bp, Artificial sequence
  SiRNA target sequence
tctttattttataagaacctgtatag

SEQ ID NO: 93612 - DNA, 26 bp, Artificial sequence
  SiRNA target sequence
ctttattttataagaacctgtatagt

SEQ ID NO: 93613 - DNA, 26 bp, Artificial sequence
  SiRNA target sequence
tttattttataagaacctgtatagtt

SEQ ID NO: 93614 - DNA, 26 bp, Artificial sequence
  SiRNA target sequence
ttattttataagaacctgtatagttg

SEQ ID NO: 93615 - DNA, 26 bp, Artificial sequence
  SiRNA target sequence
tattttataagaacctgtatagttgg

SEQ ID NO: 93616 - DNA, 26 bp, Artificial sequence
  SiRNA target sequence
attttataagaacctgtatagttggt

SEQ ID NO: 93617 - DNA, 26 bp, Artificial sequence
  SiRNA target sequence
ttttataagaacctgtatagttggtc

SEQ ID NO: 93618 - DNA, 26 bp, Artificial sequence
  SiRNA target sequence
tttataagaacctgtatagttggtct

SEQ ID NO: 93619 - DNA, 26 bp, Artificial sequence
  SiRNA target sequence
ttataagaacctgtatagttggtctt

SEQ ID NO: 93620 - DNA, 26 bp, Artificial sequence
  SiRNA target sequence
tataagaacctgtatagttggtcttt

SEQ ID NO: 93621 - DNA, 26 bp, Artificial sequence
  SiRNA target sequence
ataagaacctgtatagttggtctttt

SEQ ID NO: 93622 - DNA, 26 bp, Artificial sequence
  SiRNA target sequence
taagaacctgtatagttggtcttttt

SEQ ID NO: 93623 - DNA, 26 bp, Artificial sequence
  SiRNA target sequence
aagaacctgtatagttggtcttttta

SEQ ID NO: 93624 - DNA, 26 bp, Artificial sequence
  SiRNA target sequence
agaacctgtatagttggtctttttaa

SEQ ID NO: 93625 - DNA, 26 bp, Artificial sequence
  SiRNA target sequence
gaacctgtatagttggtctttttaat

SEQ ID NO: 93626 - DNA, 26 bp, Artificial sequence
  SiRNA target sequence
aacctgtatagttggtctttttaatt

SEQ ID NO: 93627 - DNA, 26 bp, Artificial sequence
  SiRNA target sequence
acctgtatagttggtctttttaatta

SEQ ID NO: 93628 - DNA, 26 bp, Artificial sequence
  SiRNA target sequence
cctgtatagttggtctttttaattat

SEQ ID NO: 93629 - DNA, 26 bp, Artificial sequence
  SiRNA target sequence
ctgtatagttggtctttttaattata

SEQ ID NO: 93630 - DNA, 26 bp, Artificial sequence
  SiRNA target sequence
tgtatagttggtctttttaattataa

SEQ ID NO: 93631 - DNA, 26 bp, Artificial sequence
  SiRNA target sequence
gtatagttggtctttttaattataag

SEQ ID NO: 93632 - DNA, 26 bp, Artificial sequence
  SiRNA target sequence
tatagttggtctttttaattataagc

SEQ ID NO: 93633 - DNA, 26 bp, Artificial sequence
  SiRNA target sequence
atagttggtctttttaattataagct

SEQ ID NO: 93634 - DNA, 26 bp, Artificial sequence
  SiRNA target sequence
tagttggtctttttaattataagctt

SEQ ID NO: 93635 - DNA, 26 bp, Artificial sequence
  SiRNA target sequence
agttggtctttttaattataagctta

SEQ ID NO: 93636 - DNA, 26 bp, Artificial sequence
  SiRNA target sequence
gttggtctttttaattataagcttat

SEQ ID NO: 93637 - DNA, 26 bp, Artificial sequence
  SiRNA target sequence
ttggtctttttaattataagcttatt

SEQ ID NO: 93638 - DNA, 26 bp, Artificial sequence
  SiRNA target sequence
tggtctttttaattataagcttattg

SEQ ID NO: 93639 - DNA, 26 bp, Artificial sequence
  SiRNA target sequence
ggtctttttaattataagcttattga

SEQ ID NO: 93640 - DNA, 26 bp, Artificial sequence
  SiRNA target sequence
gtctttttaattataagcttattgaa

SEQ ID NO: 93641 - DNA, 26 bp, Artificial sequence
  SiRNA target sequence
tctttttaattataagcttattgaaa

SEQ ID NO: 93642 - DNA, 26 bp, Artificial sequence
  SiRNA target sequence
ctttttaattataagcttattgaaat

SEQ ID NO: 93643 - DNA, 26 bp, Artificial sequence
  SiRNA target sequence
tttttaattataagcttattgaaatt

SEQ ID NO: 93644 - DNA, 26 bp, Artificial sequence
  SiRNA target sequence
ttttaattataagcttattgaaattt

SEQ ID NO: 93645 - DNA, 26 bp, Artificial sequence
  SiRNA target sequence
tttaattataagcttattgaaatttc

SEQ ID NO: 93646 - DNA, 26 bp, Artificial sequence
  SiRNA target sequence
ttaattataagcttattgaaatttct

SEQ ID NO: 93647 - DNA, 26 bp, Artificial sequence
  SiRNA target sequence
taattataagcttattgaaatttcta

SEQ ID NO: 93648 - DNA, 26 bp, Artificial sequence
  SiRNA target sequence
aattataagcttattgaaatttctaa

SEQ ID NO: 93649 - DNA, 26 bp, Artificial sequence
  SiRNA target sequence
attataagcttattgaaatttctaat

SEQ ID NO: 93650 - DNA, 26 bp, Artificial sequence
  SiRNA target sequence
ttataagcttattgaaatttctaata

SEQ ID NO: 93651 - DNA, 26 bp, Artificial sequence
  SiRNA target sequence
tataagcttattgaaatttctaatat

SEQ ID NO: 93652 - DNA, 26 bp, Artificial sequence
  SiRNA target sequence
ataagcttattgaaatttctaatatt

SEQ ID NO: 93653 - DNA, 26 bp, Artificial sequence
  SiRNA target sequence
taagcttattgaaatttctaatattt

SEQ ID NO: 93654 - DNA, 26 bp, Artificial sequence
  SiRNA target sequence
aagcttattgaaatttctaatattta

SEQ ID NO: 93655 - DNA, 26 bp, Artificial sequence
  SiRNA target sequence
agcttattgaaatttctaatatttaa

SEQ ID NO: 93656 - DNA, 26 bp, Artificial sequence
  SiRNA target sequence
gcttattgaaatttctaatatttaaa

SEQ ID NO: 93657 - DNA, 26 bp, Artificial sequence
  SiRNA target sequence
cttattgaaatttctaatatttaaag

SEQ ID NO: 93658 - DNA, 26 bp, Artificial sequence
  SiRNA target sequence
ttattgaaatttctaatatttaaagg

SEQ ID NO: 93659 - DNA, 26 bp, Artificial sequence
  SiRNA target sequence
tattgaaatttctaatatttaaagga

SEQ ID NO: 93660 - DNA, 26 bp, Artificial sequence
  SiRNA target sequence
attgaaatttctaatatttaaaggaa

SEQ ID NO: 93661 - DNA, 26 bp, Artificial sequence
  SiRNA target sequence
ttgaaatttctaatatttaaaggaac

SEQ ID NO: 93662 - DNA, 26 bp, Artificial sequence
  SiRNA target sequence
tgaaatttctaatatttaaaggaaca

SEQ ID NO: 93663 - DNA, 26 bp, Artificial sequence
  SiRNA target sequence
gaaatttctaatatttaaaggaacaa

SEQ ID NO: 93664 - DNA, 26 bp, Artificial sequence
  SiRNA target sequence
aaatttctaatatttaaaggaacaaa

SEQ ID NO: 93665 - DNA, 26 bp, Artificial sequence
  SiRNA target sequence
aatttctaatatttaaaggaacaaaa

SEQ ID NO: 93666 - DNA, 26 bp, Artificial sequence
  SiRNA target sequence
atttctaatatttaaaggaacaaaat

SEQ ID NO: 93667 - DNA, 26 bp, Artificial sequence
  SiRNA target sequence
tttctaatatttaaaggaacaaaatc

SEQ ID NO: 93668 - DNA, 26 bp, Artificial sequence
  SiRNA target sequence
ttctaatatttaaaggaacaaaatct

SEQ ID NO: 93669 - DNA, 26 bp, Artificial sequence
  SiRNA target sequence
tctaatatttaaaggaacaaaatcta

SEQ ID NO: 93670 - DNA, 26 bp, Artificial sequence
  SiRNA target sequence
ctaatatttaaaggaacaaaatctac

SEQ ID NO: 93671 - DNA, 26 bp, Artificial sequence
  SiRNA target sequence
taatatttaaaggaacaaaatctaca

SEQ ID NO: 93672 - DNA, 26 bp, Artificial sequence
  SiRNA target sequence
aatatttaaaggaacaaaatctacat

SEQ ID NO: 93673 - DNA, 26 bp, Artificial sequence
  SiRNA target sequence
atatttaaaggaacaaaatctacatt

SEQ ID NO: 93674 - DNA, 26 bp, Artificial sequence
  SiRNA target sequence
tatttaaaggaacaaaatctacattt

SEQ ID NO: 93675 - DNA, 26 bp, Artificial sequence
  SiRNA target sequence
atttaaaggaacaaaatctacattta

SEQ ID NO: 93676 - DNA, 26 bp, Artificial sequence
  SiRNA target sequence
tttaaaggaacaaaatctacatttag

SEQ ID NO: 93677 - DNA, 26 bp, Artificial sequence
  SiRNA target sequence
ttaaaggaacaaaatctacatttaga

SEQ ID NO: 93678 - DNA, 26 bp, Artificial sequence
  SiRNA target sequence
taaaggaacaaaatctacatttagat

SEQ ID NO: 93679 - DNA, 26 bp, Artificial sequence
  SiRNA target sequence
aaaggaacaaaatctacatttagatt

SEQ ID NO: 93680 - DNA, 26 bp, Artificial sequence
  SiRNA target sequence
aaggaacaaaatctacatttagatta

SEQ ID NO: 93681 - DNA, 26 bp, Artificial sequence
  SiRNA target sequence
aggaacaaaatctacatttagattat

SEQ ID NO: 93682 - DNA, 26 bp, Artificial sequence
  SiRNA target sequence
ggaacaaaatctacatttagattata

SEQ ID NO: 93683 - DNA, 26 bp, Artificial sequence
  SiRNA target sequence
gaacaaaatctacatttagattatat

SEQ ID NO: 93684 - DNA, 26 bp, Artificial sequence
  SiRNA target sequence
aacaaaatctacatttagattatatt

SEQ ID NO: 93685 - DNA, 26 bp, Artificial sequence
  SiRNA target sequence
acaaaatctacatttagattatattc

SEQ ID NO: 93686 - DNA, 26 bp, Artificial sequence
  SiRNA target sequence
caaaatctacatttagattatattct

SEQ ID NO: 93687 - DNA, 26 bp, Artificial sequence
  SiRNA target sequence
aaaatctacatttagattatattcta

SEQ ID NO: 93688 - DNA, 26 bp, Artificial sequence
  SiRNA target sequence
aaatctacatttagattatattctaa

SEQ ID NO: 93689 - DNA, 26 bp, Artificial sequence
  SiRNA target sequence
aatctacatttagattatattctaat

SEQ ID NO: 93690 - DNA, 26 bp, Artificial sequence
  SiRNA target sequence
atctacatttagattatattctaatt

SEQ ID NO: 93691 - DNA, 26 bp, Artificial sequence
  SiRNA target sequence
tctacatttagattatattctaattt

SEQ ID NO: 93692 - DNA, 26 bp, Artificial sequence
  SiRNA target sequence
ctacatttagattatattctaattta

SEQ ID NO: 93693 - DNA, 26 bp, Artificial sequence
  SiRNA target sequence
tacatttagattatattctaatttat

SEQ ID NO: 93694 - DNA, 26 bp, Artificial sequence
  SiRNA target sequence
acatttagattatattctaatttatt

SEQ ID NO: 93695 - DNA, 26 bp, Artificial sequence
  SiRNA target sequence
catttagattatattctaatttattg

SEQ ID NO: 93696 - DNA, 26 bp, Artificial sequence
  SiRNA target sequence
atttagattatattctaatttattga

SEQ ID NO: 93697 - DNA, 26 bp, Artificial sequence
  SiRNA target sequence
tttagattatattctaatttattgaa

SEQ ID NO: 93698 - DNA, 26 bp, Artificial sequence
  SiRNA target sequence
ttagattatattctaatttattgaat

SEQ ID NO: 93699 - DNA, 26 bp, Artificial sequence
  SiRNA target sequence
tagattatattctaatttattgaatt

SEQ ID NO: 93700 - DNA, 26 bp, Artificial sequence
  SiRNA target sequence
agattatattctaatttattgaattt

SEQ ID NO: 93701 - DNA, 26 bp, Artificial sequence
  SiRNA target sequence
gattatattctaatttattgaatttc

SEQ ID NO: 93702 - DNA, 26 bp, Artificial sequence
  SiRNA target sequence
attatattctaatttattgaatttca

SEQ ID NO: 93703 - DNA, 26 bp, Artificial sequence
  SiRNA target sequence
ttatattctaatttattgaatttcat

SEQ ID NO: 93704 - DNA, 27 bp, Artificial sequence
  SiRNA target sequence
ttatatccaactatcaaaaaatagcct

SEQ ID NO: 93705 - DNA, 27 bp, Artificial sequence
  SiRNA target sequence
tatatccaactatcaaaaaatagcctc

SEQ ID NO: 93706 - DNA, 27 bp, Artificial sequence
  SiRNA target sequence
atatccaactatcaaaaaatagcctct

SEQ ID NO: 93707 - DNA, 27 bp, Artificial sequence
  SiRNA target sequence
tatccaactatcaaaaaatagcctctt

SEQ ID NO: 93708 - DNA, 27 bp, Artificial sequence
  SiRNA target sequence
atccaactatcaaaaaatagcctcttt

SEQ ID NO: 93709 - DNA, 27 bp, Artificial sequence
  SiRNA target sequence
tccaactatcaaaaaatagcctctttt

SEQ ID NO: 93710 - DNA, 27 bp, Artificial sequence
  SiRNA target sequence
ccaactatcaaaaaatagcctcttttc

SEQ ID NO: 93711 - DNA, 27 bp, Artificial sequence
  SiRNA target sequence
caactatcaaaaaatagcctcttttct

SEQ ID NO: 93712 - DNA, 27 bp, Artificial sequence
  SiRNA target sequence
aactatcaaaaaatagcctcttttctt

SEQ ID NO: 93713 - DNA, 27 bp, Artificial sequence
  SiRNA target sequence
actatcaaaaaatagcctcttttcttt

SEQ ID NO: 93714 - DNA, 27 bp, Artificial sequence
  SiRNA target sequence
ctatcaaaaaatagcctcttttctttc

SEQ ID NO: 93715 - DNA, 27 bp, Artificial sequence
  SiRNA target sequence
tatcaaaaaatagcctcttttctttca

SEQ ID NO: 93716 - DNA, 27 bp, Artificial sequence
  SiRNA target sequence
atcaaaaaatagcctcttttctttcac

SEQ ID NO: 93717 - DNA, 27 bp, Artificial sequence
  SiRNA target sequence
tcaaaaaatagcctcttttctttcaca

SEQ ID NO: 93718 - DNA, 27 bp, Artificial sequence
  SiRNA target sequence
caaaaaatagcctcttttctttcacaa

SEQ ID NO: 93719 - DNA, 27 bp, Artificial sequence
  SiRNA target sequence
aaaaaatagcctcttttctttcacaat

SEQ ID NO: 93720 - DNA, 27 bp, Artificial sequence
  SiRNA target sequence
aaaaatagcctcttttctttcacaatt

SEQ ID NO: 93721 - DNA, 27 bp, Artificial sequence
  SiRNA target sequence
aaaatagcctcttttctttcacaattt

SEQ ID NO: 93722 - DNA, 27 bp, Artificial sequence
  SiRNA target sequence
aaatagcctcttttctttcacaatttc

SEQ ID NO: 93723 - DNA, 27 bp, Artificial sequence
  SiRNA target sequence
aatagcctcttttctttcacaatttca

SEQ ID NO: 93724 - DNA, 27 bp, Artificial sequence
  SiRNA target sequence
atagcctcttttctttcacaatttcag

SEQ ID NO: 93725 - DNA, 27 bp, Artificial sequence
  SiRNA target sequence
tagcctcttttctttcacaatttcaga

SEQ ID NO: 93726 - DNA, 27 bp, Artificial sequence
  SiRNA target sequence
agcctcttttctttcacaatttcagaa

SEQ ID NO: 93727 - DNA, 27 bp, Artificial sequence
  SiRNA target sequence
gcctcttttctttcacaatttcagaaa

SEQ ID NO: 93728 - DNA, 27 bp, Artificial sequence
  SiRNA target sequence
cctcttttctttcacaatttcagaaaa

SEQ ID NO: 93729 - DNA, 27 bp, Artificial sequence
  SiRNA target sequence
ctcttttctttcacaatttcagaaaaa

SEQ ID NO: 93730 - DNA, 27 bp, Artificial sequence
  SiRNA target sequence
tcttttctttcacaatttcagaaaaat

SEQ ID NO: 93731 - DNA, 27 bp, Artificial sequence
  SiRNA target sequence
cttttctttcacaatttcagaaaaatt

SEQ ID NO: 93732 - DNA, 27 bp, Artificial sequence
  SiRNA target sequence
ttttctttcacaatttcagaaaaattt

SEQ ID NO: 93733 - DNA, 27 bp, Artificial sequence
  SiRNA target sequence
tttctttcacaatttcagaaaaatttt

SEQ ID NO: 93734 - DNA, 27 bp, Artificial sequence
  SiRNA target sequence
ttctttcacaatttcagaaaaattttc

SEQ ID NO: 93735 - DNA, 27 bp, Artificial sequence
  SiRNA target sequence
tctttcacaatttcagaaaaattttca

SEQ ID NO: 93736 - DNA, 27 bp, Artificial sequence
  SiRNA target sequence
ctttcacaatttcagaaaaattttcat

SEQ ID NO: 93737 - DNA, 27 bp, Artificial sequence
  SiRNA target sequence
tttcacaatttcagaaaaattttcatt

SEQ ID NO: 93738 - DNA, 27 bp, Artificial sequence
  SiRNA target sequence
ttcacaatttcagaaaaattttcatta

SEQ ID NO: 93739 - DNA, 27 bp, Artificial sequence
  SiRNA target sequence
tcacaatttcagaaaaattttcattaa

SEQ ID NO: 93740 - DNA, 27 bp, Artificial sequence
  SiRNA target sequence
cacaatttcagaaaaattttcattaaa

SEQ ID NO: 93741 - DNA, 27 bp, Artificial sequence
  SiRNA target sequence
acaatttcagaaaaattttcattaaaa

SEQ ID NO: 93742 - DNA, 27 bp, Artificial sequence
  SiRNA target sequence
caatttcagaaaaattttcattaaaaa

SEQ ID NO: 93743 - DNA, 27 bp, Artificial sequence
  SiRNA target sequence
aatttcagaaaaattttcattaaaaat

SEQ ID NO: 93744 - DNA, 27 bp, Artificial sequence
  SiRNA target sequence
atttcagaaaaattttcattaaaaatg

SEQ ID NO: 93745 - DNA, 27 bp, Artificial sequence
  SiRNA target sequence
tttcagaaaaattttcattaaaaatgc

SEQ ID NO: 93746 - DNA, 27 bp, Artificial sequence
  SiRNA target sequence
ttcagaaaaattttcattaaaaatgct

SEQ ID NO: 93747 - DNA, 27 bp, Artificial sequence
  SiRNA target sequence
tcagaaaaattttcattaaaaatgcta

SEQ ID NO: 93748 - DNA, 27 bp, Artificial sequence
  SiRNA target sequence
cagaaaaattttcattaaaaatgctat

SEQ ID NO: 93749 - DNA, 27 bp, Artificial sequence
  SiRNA target sequence
agaaaaattttcattaaaaatgctata

SEQ ID NO: 93750 - DNA, 27 bp, Artificial sequence
  SiRNA target sequence
gaaaaattttcattaaaaatgctataa

SEQ ID NO: 93751 - DNA, 27 bp, Artificial sequence
  SiRNA target sequence
aaaaattttcattaaaaatgctataaa

SEQ ID NO: 93752 - DNA, 27 bp, Artificial sequence
  SiRNA target sequence
aaaattttcattaaaaatgctataaat

SEQ ID NO: 93753 - DNA, 27 bp, Artificial sequence
  SiRNA target sequence
aaattttcattaaaaatgctataaata

SEQ ID NO: 93754 - DNA, 27 bp, Artificial sequence
  SiRNA target sequence
aattttcattaaaaatgctataaatag

SEQ ID NO: 93755 - DNA, 27 bp, Artificial sequence
  SiRNA target sequence
attttcattaaaaatgctataaatagt

SEQ ID NO: 93756 - DNA, 27 bp, Artificial sequence
  SiRNA target sequence
ttttcattaaaaatgctataaatagtt

SEQ ID NO: 93757 - DNA, 27 bp, Artificial sequence
  SiRNA target sequence
tttcattaaaaatgctataaatagttt

SEQ ID NO: 93758 - DNA, 27 bp, Artificial sequence
  SiRNA target sequence
ttcattaaaaatgctataaatagtttt

SEQ ID NO: 93759 - DNA, 27 bp, Artificial sequence
  SiRNA target sequence
tcattaaaaatgctataaatagttttt

SEQ ID NO: 93760 - DNA, 27 bp, Artificial sequence
  SiRNA target sequence
cattaaaaatgctataaatagtttttt

SEQ ID NO: 93761 - DNA, 27 bp, Artificial sequence
  SiRNA target sequence
attaaaaatgctataaatagttttttg

SEQ ID NO: 93762 - DNA, 27 bp, Artificial sequence
  SiRNA target sequence
ttaaaaatgctataaatagttttttgc

SEQ ID NO: 93763 - DNA, 27 bp, Artificial sequence
  SiRNA target sequence
taaaaatgctataaatagttttttgca

SEQ ID NO: 93764 - DNA, 27 bp, Artificial sequence
  SiRNA target sequence
aaaaatgctataaatagttttttgcat

SEQ ID NO: 93765 - DNA, 27 bp, Artificial sequence
  SiRNA target sequence
aaaatgctataaatagttttttgcata

SEQ ID NO: 93766 - DNA, 27 bp, Artificial sequence
  SiRNA target sequence
aaatgctataaatagttttttgcatat

SEQ ID NO: 93767 - DNA, 27 bp, Artificial sequence
  SiRNA target sequence
aatgctataaatagttttttgcatatc

SEQ ID NO: 93768 - DNA, 27 bp, Artificial sequence
  SiRNA target sequence
atgctataaatagttttttgcatatca

SEQ ID NO: 93769 - DNA, 27 bp, Artificial sequence
  SiRNA target sequence
tgctataaatagttttttgcatatcag

SEQ ID NO: 93770 - DNA, 27 bp, Artificial sequence
  SiRNA target sequence
gctataaatagttttttgcatatcagg

SEQ ID NO: 93771 - DNA, 27 bp, Artificial sequence
  SiRNA target sequence
ctataaatagttttttgcatatcaggt

SEQ ID NO: 93772 - DNA, 27 bp, Artificial sequence
  SiRNA target sequence
tataaatagttttttgcatatcaggtc

SEQ ID NO: 93773 - DNA, 27 bp, Artificial sequence
  SiRNA target sequence
ataaatagttttttgcatatcaggtcg

SEQ ID NO: 93774 - DNA, 27 bp, Artificial sequence
  SiRNA target sequence
taaatagttttttgcatatcaggtcgg

SEQ ID NO: 93775 - DNA, 27 bp, Artificial sequence
  SiRNA target sequence
aaatagttttttgcatatcaggtcggc

SEQ ID NO: 93776 - DNA, 27 bp, Artificial sequence
  SiRNA target sequence
aatagttttttgcatatcaggtcggcc

SEQ ID NO: 93777 - DNA, 27 bp, Artificial sequence
  SiRNA target sequence
atagttttttgcatatcaggtcggcca

SEQ ID NO: 93778 - DNA, 27 bp, Artificial sequence
  SiRNA target sequence
tagttttttgcatatcaggtcggccac

SEQ ID NO: 93779 - DNA, 27 bp, Artificial sequence
  SiRNA target sequence
agttttttgcatatcaggtcggccaca

SEQ ID NO: 93780 - DNA, 27 bp, Artificial sequence
  SiRNA target sequence
gttttttgcatatcaggtcggccacaa

SEQ ID NO: 93781 - DNA, 27 bp, Artificial sequence
  SiRNA target sequence
ttttttgcatatcaggtcggccacaaa

SEQ ID NO: 93782 - DNA, 27 bp, Artificial sequence
  SiRNA target sequence
tttttgcatatcaggtcggccacaaac

SEQ ID NO: 93783 - DNA, 27 bp, Artificial sequence
  SiRNA target sequence
ttttgcatatcaggtcggccacaaaca

SEQ ID NO: 93784 - DNA, 27 bp, Artificial sequence
  SiRNA target sequence
tttgcatatcaggtcggccacaaacat

SEQ ID NO: 93785 - DNA, 27 bp, Artificial sequence
  SiRNA target sequence
ttgcatatcaggtcggccacaaacata

SEQ ID NO: 93786 - DNA, 27 bp, Artificial sequence
  SiRNA target sequence
tgcatatcaggtcggccacaaacataa

SEQ ID NO: 93787 - DNA, 27 bp, Artificial sequence
  SiRNA target sequence
gcatatcaggtcggccacaaacataaa

SEQ ID NO: 93788 - DNA, 27 bp, Artificial sequence
  SiRNA target sequence
catatcaggtcggccacaaacataaac

SEQ ID NO: 93789 - DNA, 27 bp, Artificial sequence
  SiRNA target sequence
atatcaggtcggccacaaacataaacc

SEQ ID NO: 93790 - DNA, 27 bp, Artificial sequence
  SiRNA target sequence
tatcaggtcggccacaaacataaacca

SEQ ID NO: 93791 - DNA, 27 bp, Artificial sequence
  SiRNA target sequence
atcaggtcggccacaaacataaaccaa

SEQ ID NO: 93792 - DNA, 27 bp, Artificial sequence
  SiRNA target sequence
tcaggtcggccacaaacataaaccaaa

SEQ ID NO: 93793 - DNA, 27 bp, Artificial sequence
  SiRNA target sequence
caggtcggccacaaacataaaccaaac

SEQ ID NO: 93794 - DNA, 27 bp, Artificial sequence
  SiRNA target sequence
aggtcggccacaaacataaaccaaaca

SEQ ID NO: 93795 - DNA, 27 bp, Artificial sequence
  SiRNA target sequence
ggtcggccacaaacataaaccaaacat

SEQ ID NO: 93796 - DNA, 27 bp, Artificial sequence
  SiRNA target sequence
gtcggccacaaacataaaccaaacatc

SEQ ID NO: 93797 - DNA, 27 bp, Artificial sequence
  SiRNA target sequence
tcggccacaaacataaaccaaacatcc

SEQ ID NO: 93798 - DNA, 27 bp, Artificial sequence
  SiRNA target sequence
cggccacaaacataaaccaaacatccg

SEQ ID NO: 93799 - DNA, 27 bp, Artificial sequence
  SiRNA target sequence
ggccacaaacataaaccaaacatccgt

SEQ ID NO: 93800 - DNA, 27 bp, Artificial sequence
  SiRNA target sequence
gccacaaacataaaccaaacatccgtc

SEQ ID NO: 93801 - DNA, 27 bp, Artificial sequence
  SiRNA target sequence
ccacaaacataaaccaaacatccgtct

SEQ ID NO: 93802 - DNA, 27 bp, Artificial sequence
  SiRNA target sequence
cacaaacataaaccaaacatccgtctt

SEQ ID NO: 93803 - DNA, 27 bp, Artificial sequence
  SiRNA target sequence
acaaacataaaccaaacatccgtcttt

SEQ ID NO: 93804 - DNA, 27 bp, Artificial sequence
  SiRNA target sequence
caaacataaaccaaacatccgtcttta

SEQ ID NO: 93805 - DNA, 27 bp, Artificial sequence
  SiRNA target sequence
aaacataaaccaaacatccgtctttaa

SEQ ID NO: 93806 - DNA, 27 bp, Artificial sequence
  SiRNA target sequence
aacataaaccaaacatccgtctttaat

SEQ ID NO: 93807 - DNA, 27 bp, Artificial sequence
  SiRNA target sequence
acataaaccaaacatccgtctttaatg

SEQ ID NO: 93808 - DNA, 27 bp, Artificial sequence
  SiRNA target sequence
cataaaccaaacatccgtctttaatgt

SEQ ID NO: 93809 - DNA, 27 bp, Artificial sequence
  SiRNA target sequence
ataaaccaaacatccgtctttaatgta

SEQ ID NO: 93810 - DNA, 27 bp, Artificial sequence
  SiRNA target sequence
taaaccaaacatccgtctttaatgtat

SEQ ID NO: 93811 - DNA, 27 bp, Artificial sequence
  SiRNA target sequence
aaaccaaacatccgtctttaatgtatg

SEQ ID NO: 93812 - DNA, 27 bp, Artificial sequence
  SiRNA target sequence
aaccaaacatccgtctttaatgtatgt

SEQ ID NO: 93813 - DNA, 27 bp, Artificial sequence
  SiRNA target sequence
accaaacatccgtctttaatgtatgtt

SEQ ID NO: 93814 - DNA, 27 bp, Artificial sequence
  SiRNA target sequence
ccaaacatccgtctttaatgtatgttt

SEQ ID NO: 93815 - DNA, 27 bp, Artificial sequence
  SiRNA target sequence
caaacatccgtctttaatgtatgtttt

SEQ ID NO: 93816 - DNA, 27 bp, Artificial sequence
  SiRNA target sequence
aaacatccgtctttaatgtatgttttt

SEQ ID NO: 93817 - DNA, 27 bp, Artificial sequence
  SiRNA target sequence
aacatccgtctttaatgtatgttttta

SEQ ID NO: 93818 - DNA, 27 bp, Artificial sequence
  SiRNA target sequence
acatccgtctttaatgtatgtttttat

SEQ ID NO: 93819 - DNA, 27 bp, Artificial sequence
  SiRNA target sequence
catccgtctttaatgtatgtttttatc

SEQ ID NO: 93820 - DNA, 27 bp, Artificial sequence
  SiRNA target sequence
atccgtctttaatgtatgtttttatct

SEQ ID NO: 93821 - DNA, 27 bp, Artificial sequence
  SiRNA target sequence
tccgtctttaatgtatgtttttatctc

SEQ ID NO: 93822 - DNA, 27 bp, Artificial sequence
  SiRNA target sequence
ccgtctttaatgtatgtttttatctca

SEQ ID NO: 93823 - DNA, 27 bp, Artificial sequence
  SiRNA target sequence
cgtctttaatgtatgtttttatctcat

SEQ ID NO: 93824 - DNA, 27 bp, Artificial sequence
  SiRNA target sequence
gtctttaatgtatgtttttatctcatt

SEQ ID NO: 93825 - DNA, 27 bp, Artificial sequence
  SiRNA target sequence
tctttaatgtatgtttttatctcattt

SEQ ID NO: 93826 - DNA, 27 bp, Artificial sequence
  SiRNA target sequence
ctttaatgtatgtttttatctcattta

SEQ ID NO: 93827 - DNA, 27 bp, Artificial sequence
  SiRNA target sequence
tttaatgtatgtttttatctcatttaa

SEQ ID NO: 93828 - DNA, 27 bp, Artificial sequence
  SiRNA target sequence
ttaatgtatgtttttatctcatttaaa

SEQ ID NO: 93829 - DNA, 27 bp, Artificial sequence
  SiRNA target sequence
taatgtatgtttttatctcatttaaat

SEQ ID NO: 93830 - DNA, 27 bp, Artificial sequence
  SiRNA target sequence
aatgtatgtttttatctcatttaaatt

SEQ ID NO: 93831 - DNA, 27 bp, Artificial sequence
  SiRNA target sequence
atgtatgtttttatctcatttaaattt

SEQ ID NO: 93832 - DNA, 27 bp, Artificial sequence
  SiRNA target sequence
tgtatgtttttatctcatttaaatttt

SEQ ID NO: 93833 - DNA, 27 bp, Artificial sequence
  SiRNA target sequence
gtatgtttttatctcatttaaattttg

SEQ ID NO: 93834 - DNA, 27 bp, Artificial sequence
  SiRNA target sequence
tatgtttttatctcatttaaattttgt

SEQ ID NO: 93835 - DNA, 27 bp, Artificial sequence
  SiRNA target sequence
atgtttttatctcatttaaattttgta

SEQ ID NO: 93836 - DNA, 27 bp, Artificial sequence
  SiRNA target sequence
tgtttttatctcatttaaattttgtaa

SEQ ID NO: 93837 - DNA, 27 bp, Artificial sequence
  SiRNA target sequence
gtttttatctcatttaaattttgtaat

SEQ ID NO: 93838 - DNA, 27 bp, Artificial sequence
  SiRNA target sequence
tttttatctcatttaaattttgtaata

SEQ ID NO: 93839 - DNA, 27 bp, Artificial sequence
  SiRNA target sequence
ttttatctcatttaaattttgtaataa

SEQ ID NO: 93840 - DNA, 27 bp, Artificial sequence
  SiRNA target sequence
tttatctcatttaaattttgtaataaa

SEQ ID NO: 93841 - DNA, 27 bp, Artificial sequence
  SiRNA target sequence
ttatctcatttaaattttgtaataaat

SEQ ID NO: 93842 - DNA, 27 bp, Artificial sequence
  SiRNA target sequence
tatctcatttaaattttgtaataaata

SEQ ID NO: 93843 - DNA, 27 bp, Artificial sequence
  SiRNA target sequence
atctcatttaaattttgtaataaataa

SEQ ID NO: 93844 - DNA, 27 bp, Artificial sequence
  SiRNA target sequence
tctcatttaaattttgtaataaataat

SEQ ID NO: 93845 - DNA, 27 bp, Artificial sequence
  SiRNA target sequence
ctcatttaaattttgtaataaataatc

SEQ ID NO: 93846 - DNA, 27 bp, Artificial sequence
  SiRNA target sequence
tcatttaaattttgtaataaataatca

SEQ ID NO: 93847 - DNA, 27 bp, Artificial sequence
  SiRNA target sequence
catttaaattttgtaataaataatcag

SEQ ID NO: 93848 - DNA, 27 bp, Artificial sequence
  SiRNA target sequence
atttaaattttgtaataaataatcagt

SEQ ID NO: 93849 - DNA, 27 bp, Artificial sequence
  SiRNA target sequence
tttaaattttgtaataaataatcagta

SEQ ID NO: 93850 - DNA, 27 bp, Artificial sequence
  SiRNA target sequence
ttaaattttgtaataaataatcagtaa

SEQ ID NO: 93851 - DNA, 27 bp, Artificial sequence
  SiRNA target sequence
taaattttgtaataaataatcagtaac

SEQ ID NO: 93852 - DNA, 27 bp, Artificial sequence
  SiRNA target sequence
aaattttgtaataaataatcagtaaca

SEQ ID NO: 93853 - DNA, 27 bp, Artificial sequence
  SiRNA target sequence
aattttgtaataaataatcagtaacat

SEQ ID NO: 93854 - DNA, 27 bp, Artificial sequence
  SiRNA target sequence
attttgtaataaataatcagtaacata

SEQ ID NO: 93855 - DNA, 27 bp, Artificial sequence
  SiRNA target sequence
ttttgtaataaataatcagtaacataa

SEQ ID NO: 93856 - DNA, 27 bp, Artificial sequence
  SiRNA target sequence
tttgtaataaataatcagtaacataaa

SEQ ID NO: 93857 - DNA, 27 bp, Artificial sequence
  SiRNA target sequence
ttgtaataaataatcagtaacataaat

SEQ ID NO: 93858 - DNA, 27 bp, Artificial sequence
  SiRNA target sequence
tgtaataaataatcagtaacataaatt

SEQ ID NO: 93859 - DNA, 27 bp, Artificial sequence
  SiRNA target sequence
gtaataaataatcagtaacataaattt

SEQ ID NO: 93860 - DNA, 27 bp, Artificial sequence
  SiRNA target sequence
taataaataatcagtaacataaatttt

SEQ ID NO: 93861 - DNA, 27 bp, Artificial sequence
  SiRNA target sequence
aataaataatcagtaacataaatttta

SEQ ID NO: 93862 - DNA, 27 bp, Artificial sequence
  SiRNA target sequence
ataaataatcagtaacataaattttat

SEQ ID NO: 93863 - DNA, 27 bp, Artificial sequence
  SiRNA target sequence
taaataatcagtaacataaattttatt

SEQ ID NO: 93864 - DNA, 27 bp, Artificial sequence
  SiRNA target sequence
aaataatcagtaacataaattttatta

SEQ ID NO: 93865 - DNA, 27 bp, Artificial sequence
  SiRNA target sequence
aataatcagtaacataaattttattac

SEQ ID NO: 93866 - DNA, 27 bp, Artificial sequence
  SiRNA target sequence
ataatcagtaacataaattttattaca

SEQ ID NO: 93867 - DNA, 27 bp, Artificial sequence
  SiRNA target sequence
taatcagtaacataaattttattacaa

SEQ ID NO: 93868 - DNA, 27 bp, Artificial sequence
  SiRNA target sequence
aatcagtaacataaattttattacaag

SEQ ID NO: 93869 - DNA, 27 bp, Artificial sequence
  SiRNA target sequence
atcagtaacataaattttattacaaga

SEQ ID NO: 93870 - DNA, 27 bp, Artificial sequence
  SiRNA target sequence
tcagtaacataaattttattacaagat

SEQ ID NO: 93871 - DNA, 27 bp, Artificial sequence
  SiRNA target sequence
cagtaacataaattttattacaagata

SEQ ID NO: 93872 - DNA, 27 bp, Artificial sequence
  SiRNA target sequence
agtaacataaattttattacaagataa

SEQ ID NO: 93873 - DNA, 27 bp, Artificial sequence
  SiRNA target sequence
gtaacataaattttattacaagataaa

SEQ ID NO: 93874 - DNA, 27 bp, Artificial sequence
  SiRNA target sequence
taacataaattttattacaagataaaa

SEQ ID NO: 93875 - DNA, 27 bp, Artificial sequence
  SiRNA target sequence
aacataaattttattacaagataaaat

SEQ ID NO: 93876 - DNA, 27 bp, Artificial sequence
  SiRNA target sequence
acataaattttattacaagataaaatt

SEQ ID NO: 93877 - DNA, 27 bp, Artificial sequence
  SiRNA target sequence
cataaattttattacaagataaaattt

SEQ ID NO: 93878 - DNA, 27 bp, Artificial sequence
  SiRNA target sequence
ataaattttattacaagataaaatttt

SEQ ID NO: 93879 - DNA, 27 bp, Artificial sequence
  SiRNA target sequence
taaattttattacaagataaaatttta

SEQ ID NO: 93880 - DNA, 27 bp, Artificial sequence
  SiRNA target sequence
aaattttattacaagataaaattttaa

SEQ ID NO: 93881 - DNA, 27 bp, Artificial sequence
  SiRNA target sequence
aattttattacaagataaaattttaat

SEQ ID NO: 93882 - DNA, 27 bp, Artificial sequence
  SiRNA target sequence
attttattacaagataaaattttaata

SEQ ID NO: 93883 - DNA, 27 bp, Artificial sequence
  SiRNA target sequence
ttttattacaagataaaattttaataa

SEQ ID NO: 93884 - DNA, 27 bp, Artificial sequence
  SiRNA target sequence
tttattacaagataaaattttaataat

SEQ ID NO: 93885 - DNA, 27 bp, Artificial sequence
  SiRNA target sequence
ttattacaagataaaattttaataatt

SEQ ID NO: 93886 - DNA, 27 bp, Artificial sequence
  SiRNA target sequence
tattacaagataaaattttaataattt

SEQ ID NO: 93887 - DNA, 27 bp, Artificial sequence
  SiRNA target sequence
attacaagataaaattttaataatttc

SEQ ID NO: 93888 - DNA, 27 bp, Artificial sequence
  SiRNA target sequence
ttacaagataaaattttaataatttct

SEQ ID NO: 93889 - DNA, 27 bp, Artificial sequence
  SiRNA target sequence
tacaagataaaattttaataatttctg

SEQ ID NO: 93890 - DNA, 27 bp, Artificial sequence
  SiRNA target sequence
acaagataaaattttaataatttctgt

SEQ ID NO: 93891 - DNA, 27 bp, Artificial sequence
  SiRNA target sequence
caagataaaattttaataatttctgtg

SEQ ID NO: 93892 - DNA, 27 bp, Artificial sequence
  SiRNA target sequence
aagataaaattttaataatttctgtgt

SEQ ID NO: 93893 - DNA, 27 bp, Artificial sequence
  SiRNA target sequence
agataaaattttaataatttctgtgtt

SEQ ID NO: 93894 - DNA, 27 bp, Artificial sequence
  SiRNA target sequence
gataaaattttaataatttctgtgttt

SEQ ID NO: 93895 - DNA, 27 bp, Artificial sequence
  SiRNA target sequence
ataaaattttaataatttctgtgtttt

SEQ ID NO: 93896 - DNA, 27 bp, Artificial sequence
  SiRNA target sequence
taaaattttaataatttctgtgttttt

SEQ ID NO: 93897 - DNA, 27 bp, Artificial sequence
  SiRNA target sequence
aaaattttaataatttctgtgttttta

SEQ ID NO: 93898 - DNA, 27 bp, Artificial sequence
  SiRNA target sequence
aaattttaataatttctgtgtttttat

SEQ ID NO: 93899 - DNA, 27 bp, Artificial sequence
  SiRNA target sequence
aattttaataatttctgtgtttttata

SEQ ID NO: 93900 - DNA, 27 bp, Artificial sequence
  SiRNA target sequence
attttaataatttctgtgtttttatat

SEQ ID NO: 93901 - DNA, 27 bp, Artificial sequence
  SiRNA target sequence
ttttaataatttctgtgtttttatatt

SEQ ID NO: 93902 - DNA, 27 bp, Artificial sequence
  SiRNA target sequence
tttaataatttctgtgtttttatattt

SEQ ID NO: 93903 - DNA, 27 bp, Artificial sequence
  SiRNA target sequence
ttaataatttctgtgtttttatatttt

SEQ ID NO: 93904 - DNA, 27 bp, Artificial sequence
  SiRNA target sequence
taataatttctgtgtttttatattttg

SEQ ID NO: 93905 - DNA, 27 bp, Artificial sequence
  SiRNA target sequence
aataatttctgtgtttttatattttgc

SEQ ID NO: 93906 - DNA, 27 bp, Artificial sequence
  SiRNA target sequence
ataatttctgtgtttttatattttgca

SEQ ID NO: 93907 - DNA, 27 bp, Artificial sequence
  SiRNA target sequence
taatttctgtgtttttatattttgcat

SEQ ID NO: 93908 - DNA, 27 bp, Artificial sequence
  SiRNA target sequence
aatttctgtgtttttatattttgcatc

SEQ ID NO: 93909 - DNA, 27 bp, Artificial sequence
  SiRNA target sequence
atttctgtgtttttatattttgcatct

SEQ ID NO: 93910 - DNA, 27 bp, Artificial sequence
  SiRNA target sequence
tttctgtgtttttatattttgcatctt

SEQ ID NO: 93911 - DNA, 27 bp, Artificial sequence
  SiRNA target sequence
ttctgtgtttttatattttgcatcttt

SEQ ID NO: 93912 - DNA, 27 bp, Artificial sequence
  SiRNA target sequence
tctgtgtttttatattttgcatcttta

SEQ ID NO: 93913 - DNA, 27 bp, Artificial sequence
  SiRNA target sequence
ctgtgtttttatattttgcatctttaa

SEQ ID NO: 93914 - DNA, 27 bp, Artificial sequence
  SiRNA target sequence
tgtgtttttatattttgcatctttaat

SEQ ID NO: 93915 - DNA, 27 bp, Artificial sequence
  SiRNA target sequence
gtgtttttatattttgcatctttaata

SEQ ID NO: 93916 - DNA, 27 bp, Artificial sequence
  SiRNA target sequence
tgtttttatattttgcatctttaataa

SEQ ID NO: 93917 - DNA, 27 bp, Artificial sequence
  SiRNA target sequence
gtttttatattttgcatctttaataag

SEQ ID NO: 93918 - DNA, 27 bp, Artificial sequence
  SiRNA target sequence
tttttatattttgcatctttaataaga

SEQ ID NO: 93919 - DNA, 27 bp, Artificial sequence
  SiRNA target sequence
ttttatattttgcatctttaataagat

SEQ ID NO: 93920 - DNA, 27 bp, Artificial sequence
  SiRNA target sequence
tttatattttgcatctttaataagatc

SEQ ID NO: 93921 - DNA, 27 bp, Artificial sequence
  SiRNA target sequence
ttatattttgcatctttaataagatca

SEQ ID NO: 93922 - DNA, 27 bp, Artificial sequence
  SiRNA target sequence
tatattttgcatctttaataagatcat

SEQ ID NO: 93923 - DNA, 27 bp, Artificial sequence
  SiRNA target sequence
atattttgcatctttaataagatcatc

SEQ ID NO: 93924 - DNA, 27 bp, Artificial sequence
  SiRNA target sequence
tattttgcatctttaataagatcatct

SEQ ID NO: 93925 - DNA, 27 bp, Artificial sequence
  SiRNA target sequence
attttgcatctttaataagatcatctt

SEQ ID NO: 93926 - DNA, 27 bp, Artificial sequence
  SiRNA target sequence
ttttgcatctttaataagatcatcttc

SEQ ID NO: 93927 - DNA, 27 bp, Artificial sequence
  SiRNA target sequence
tttgcatctttaataagatcatcttct

SEQ ID NO: 93928 - DNA, 27 bp, Artificial sequence
  SiRNA target sequence
ttgcatctttaataagatcatcttctt

SEQ ID NO: 93929 - DNA, 27 bp, Artificial sequence
  SiRNA target sequence
tgcatctttaataagatcatcttcttg

SEQ ID NO: 93930 - DNA, 27 bp, Artificial sequence
  SiRNA target sequence
gcatctttaataagatcatcttcttga

SEQ ID NO: 93931 - DNA, 27 bp, Artificial sequence
  SiRNA target sequence
catctttaataagatcatcttcttgat

SEQ ID NO: 93932 - DNA, 27 bp, Artificial sequence
  SiRNA target sequence
atctttaataagatcatcttcttgatt

SEQ ID NO: 93933 - DNA, 27 bp, Artificial sequence
  SiRNA target sequence
tctttaataagatcatcttcttgattt

SEQ ID NO: 93934 - DNA, 27 bp, Artificial sequence
  SiRNA target sequence
ctttaataagatcatcttcttgatttc

SEQ ID NO: 93935 - DNA, 27 bp, Artificial sequence
  SiRNA target sequence
tttaataagatcatcttcttgatttct

SEQ ID NO: 93936 - DNA, 27 bp, Artificial sequence
  SiRNA target sequence
ttaataagatcatcttcttgatttcta

SEQ ID NO: 93937 - DNA, 27 bp, Artificial sequence
  SiRNA target sequence
taataagatcatcttcttgatttctaa

SEQ ID NO: 93938 - DNA, 27 bp, Artificial sequence
  SiRNA target sequence
aataagatcatcttcttgatttctaaa

SEQ ID NO: 93939 - DNA, 27 bp, Artificial sequence
  SiRNA target sequence
ataagatcatcttcttgatttctaaat

SEQ ID NO: 93940 - DNA, 27 bp, Artificial sequence
  SiRNA target sequence
taagatcatcttcttgatttctaaatc

SEQ ID NO: 93941 - DNA, 27 bp, Artificial sequence
  SiRNA target sequence
aagatcatcttcttgatttctaaatcc

SEQ ID NO: 93942 - DNA, 27 bp, Artificial sequence
  SiRNA target sequence
agatcatcttcttgatttctaaatcca

SEQ ID NO: 93943 - DNA, 27 bp, Artificial sequence
  SiRNA target sequence
gatcatcttcttgatttctaaatccat

SEQ ID NO: 93944 - DNA, 27 bp, Artificial sequence
  SiRNA target sequence
atcatcttcttgatttctaaatccata

SEQ ID NO: 93945 - DNA, 27 bp, Artificial sequence
  SiRNA target sequence
tcatcttcttgatttctaaatccatat

SEQ ID NO: 93946 - DNA, 27 bp, Artificial sequence
  SiRNA target sequence
catcttcttgatttctaaatccatata

SEQ ID NO: 93947 - DNA, 27 bp, Artificial sequence
  SiRNA target sequence
atcttcttgatttctaaatccatatat

SEQ ID NO: 93948 - DNA, 27 bp, Artificial sequence
  SiRNA target sequence
tcttcttgatttctaaatccatatatt

SEQ ID NO: 93949 - DNA, 27 bp, Artificial sequence
  SiRNA target sequence
cttcttgatttctaaatccatatatta

SEQ ID NO: 93950 - DNA, 27 bp, Artificial sequence
  SiRNA target sequence
ttcttgatttctaaatccatatattag

SEQ ID NO: 93951 - DNA, 27 bp, Artificial sequence
  SiRNA target sequence
tcttgatttctaaatccatatattagt

SEQ ID NO: 93952 - DNA, 27 bp, Artificial sequence
  SiRNA target sequence
cttgatttctaaatccatatattagtt

SEQ ID NO: 93953 - DNA, 27 bp, Artificial sequence
  SiRNA target sequence
ttgatttctaaatccatatattagttt

SEQ ID NO: 93954 - DNA, 27 bp, Artificial sequence
  SiRNA target sequence
tgatttctaaatccatatattagtttg

SEQ ID NO: 93955 - DNA, 27 bp, Artificial sequence
  SiRNA target sequence
gatttctaaatccatatattagtttga

SEQ ID NO: 93956 - DNA, 27 bp, Artificial sequence
  SiRNA target sequence
atttctaaatccatatattagtttgat

SEQ ID NO: 93957 - DNA, 27 bp, Artificial sequence
  SiRNA target sequence
tttctaaatccatatattagtttgata

SEQ ID NO: 93958 - DNA, 27 bp, Artificial sequence
  SiRNA target sequence
ttctaaatccatatattagtttgatat

SEQ ID NO: 93959 - DNA, 27 bp, Artificial sequence
  SiRNA target sequence
tctaaatccatatattagtttgatata

SEQ ID NO: 93960 - DNA, 27 bp, Artificial sequence
  SiRNA target sequence
ctaaatccatatattagtttgatatat

SEQ ID NO: 93961 - DNA, 27 bp, Artificial sequence
  SiRNA target sequence
taaatccatatattagtttgatatatt

SEQ ID NO: 93962 - DNA, 27 bp, Artificial sequence
  SiRNA target sequence
aaatccatatattagtttgatatattg

SEQ ID NO: 93963 - DNA, 27 bp, Artificial sequence
  SiRNA target sequence
aatccatatattagtttgatatattga

SEQ ID NO: 93964 - DNA, 27 bp, Artificial sequence
  SiRNA target sequence
atccatatattagtttgatatattgat

SEQ ID NO: 93965 - DNA, 27 bp, Artificial sequence
  SiRNA target sequence
tccatatattagtttgatatattgatc

SEQ ID NO: 93966 - DNA, 27 bp, Artificial sequence
  SiRNA target sequence
ccatatattagtttgatatattgatcg

SEQ ID NO: 93967 - DNA, 27 bp, Artificial sequence
  SiRNA target sequence
catatattagtttgatatattgatcgt

SEQ ID NO: 93968 - DNA, 27 bp, Artificial sequence
  SiRNA target sequence
atatattagtttgatatattgatcgtc

SEQ ID NO: 93969 - DNA, 27 bp, Artificial sequence
  SiRNA target sequence
tatattagtttgatatattgatcgtct

SEQ ID NO: 93970 - DNA, 27 bp, Artificial sequence
  SiRNA target sequence
atattagtttgatatattgatcgtctt

SEQ ID NO: 93971 - DNA, 27 bp, Artificial sequence
  SiRNA target sequence
tattagtttgatatattgatcgtcttc

SEQ ID NO: 93972 - DNA, 27 bp, Artificial sequence
  SiRNA target sequence
attagtttgatatattgatcgtcttct

SEQ ID NO: 93973 - DNA, 27 bp, Artificial sequence
  SiRNA target sequence
ttagtttgatatattgatcgtcttctt

SEQ ID NO: 93974 - DNA, 27 bp, Artificial sequence
  SiRNA target sequence
tagtttgatatattgatcgtcttcttt

SEQ ID NO: 93975 - DNA, 27 bp, Artificial sequence
  SiRNA target sequence
agtttgatatattgatcgtcttcttta

SEQ ID NO: 93976 - DNA, 27 bp, Artificial sequence
  SiRNA target sequence
gtttgatatattgatcgtcttctttat

SEQ ID NO: 93977 - DNA, 27 bp, Artificial sequence
  SiRNA target sequence
tttgatatattgatcgtcttctttatt

SEQ ID NO: 93978 - DNA, 27 bp, Artificial sequence
  SiRNA target sequence
ttgatatattgatcgtcttctttattt

SEQ ID NO: 93979 - DNA, 27 bp, Artificial sequence
  SiRNA target sequence
tgatatattgatcgtcttctttatttt

SEQ ID NO: 93980 - DNA, 27 bp, Artificial sequence
  SiRNA target sequence
gatatattgatcgtcttctttattttt

SEQ ID NO: 93981 - DNA, 27 bp, Artificial sequence
  SiRNA target sequence
atatattgatcgtcttctttatttttc

SEQ ID NO: 93982 - DNA, 27 bp, Artificial sequence
  SiRNA target sequence
tatattgatcgtcttctttatttttca

SEQ ID NO: 93983 - DNA, 27 bp, Artificial sequence
  SiRNA target sequence
atattgatcgtcttctttatttttcaa

SEQ ID NO: 93984 - DNA, 27 bp, Artificial sequence
  SiRNA target sequence
tattgatcgtcttctttatttttcaaa

SEQ ID NO: 93985 - DNA, 27 bp, Artificial sequence
  SiRNA target sequence
attgatcgtcttctttatttttcaaaa

SEQ ID NO: 93986 - DNA, 27 bp, Artificial sequence
  SiRNA target sequence
ttgatcgtcttctttatttttcaaaaa

SEQ ID NO: 93987 - DNA, 27 bp, Artificial sequence
  SiRNA target sequence
tgatcgtcttctttatttttcaaaaac

SEQ ID NO: 93988 - DNA, 27 bp, Artificial sequence
  SiRNA target sequence
gatcgtcttctttatttttcaaaaacg

SEQ ID NO: 93989 - DNA, 27 bp, Artificial sequence
  SiRNA target sequence
atcgtcttctttatttttcaaaaacga

SEQ ID NO: 93990 - DNA, 27 bp, Artificial sequence
  SiRNA target sequence
tcgtcttctttatttttcaaaaacgaa

SEQ ID NO: 93991 - DNA, 27 bp, Artificial sequence
  SiRNA target sequence
cgtcttctttatttttcaaaaacgaaa

SEQ ID NO: 93992 - DNA, 27 bp, Artificial sequence
  SiRNA target sequence
gtcttctttatttttcaaaaacgaaaa

SEQ ID NO: 93993 - DNA, 27 bp, Artificial sequence
  SiRNA target sequence
tcttctttatttttcaaaaacgaaaaa

SEQ ID NO: 93994 - DNA, 27 bp, Artificial sequence
  SiRNA target sequence
cttctttatttttcaaaaacgaaaaaa

SEQ ID NO: 93995 - DNA, 27 bp, Artificial sequence
  SiRNA target sequence
ttctttatttttcaaaaacgaaaaaaa

SEQ ID NO: 93996 - DNA, 27 bp, Artificial sequence
  SiRNA target sequence
tctttatttttcaaaaacgaaaaaaat

SEQ ID NO: 93997 - DNA, 27 bp, Artificial sequence
  SiRNA target sequence
ctttatttttcaaaaacgaaaaaaatg

SEQ ID NO: 93998 - DNA, 27 bp, Artificial sequence
  SiRNA target sequence
tttatttttcaaaaacgaaaaaaatgg

SEQ ID NO: 93999 - DNA, 27 bp, Artificial sequence
  SiRNA target sequence
ttatttttcaaaaacgaaaaaaatgga

SEQ ID NO: 94000 - DNA, 27 bp, Artificial sequence
  SiRNA target sequence
tatttttcaaaaacgaaaaaaatggag

SEQ ID NO: 94001 - DNA, 27 bp, Artificial sequence
  SiRNA target sequence
atttttcaaaaacgaaaaaaatggagc

SEQ ID NO: 94002 - DNA, 27 bp, Artificial sequence
  SiRNA target sequence
tttttcaaaaacgaaaaaaatggagca

SEQ ID NO: 94003 - DNA, 27 bp, Artificial sequence
  SiRNA target sequence
ttttcaaaaacgaaaaaaatggagcaa

SEQ ID NO: 94004 - DNA, 27 bp, Artificial sequence
  SiRNA target sequence
tttcaaaaacgaaaaaaatggagcaat

SEQ ID NO: 94005 - DNA, 27 bp, Artificial sequence
  SiRNA target sequence
ttcaaaaacgaaaaaaatggagcaatg

SEQ ID NO: 94006 - DNA, 27 bp, Artificial sequence
  SiRNA target sequence
tcaaaaacgaaaaaaatggagcaatgc

SEQ ID NO: 94007 - DNA, 27 bp, Artificial sequence
  SiRNA target sequence
caaaaacgaaaaaaatggagcaatgcc

SEQ ID NO: 94008 - DNA, 27 bp, Artificial sequence
  SiRNA target sequence
aaaaacgaaaaaaatggagcaatgcca

SEQ ID NO: 94009 - DNA, 27 bp, Artificial sequence
  SiRNA target sequence
aaaacgaaaaaaatggagcaatgccag

SEQ ID NO: 94010 - DNA, 27 bp, Artificial sequence
  SiRNA target sequence
aaacgaaaaaaatggagcaatgccagt

SEQ ID NO: 94011 - DNA, 27 bp, Artificial sequence
  SiRNA target sequence
aacgaaaaaaatggagcaatgccagtt

SEQ ID NO: 94012 - DNA, 27 bp, Artificial sequence
  SiRNA target sequence
acgaaaaaaatggagcaatgccagttc

SEQ ID NO: 94013 - DNA, 27 bp, Artificial sequence
  SiRNA target sequence
cgaaaaaaatggagcaatgccagttcc

SEQ ID NO: 94014 - DNA, 27 bp, Artificial sequence
  SiRNA target sequence
gaaaaaaatggagcaatgccagttcca

SEQ ID NO: 94015 - DNA, 27 bp, Artificial sequence
  SiRNA target sequence
aaaaaaatggagcaatgccagttccag

SEQ ID NO: 94016 - DNA, 27 bp, Artificial sequence
  SiRNA target sequence
aaaaaatggagcaatgccagttccagt

SEQ ID NO: 94017 - DNA, 27 bp, Artificial sequence
  SiRNA target sequence
aaaaatggagcaatgccagttccagta

SEQ ID NO: 94018 - DNA, 27 bp, Artificial sequence
  SiRNA target sequence
aaaatggagcaatgccagttccagtac

SEQ ID NO: 94019 - DNA, 27 bp, Artificial sequence
  SiRNA target sequence
aaatggagcaatgccagttccagtaca

SEQ ID NO: 94020 - DNA, 27 bp, Artificial sequence
  SiRNA target sequence
aatggagcaatgccagttccagtacaa

SEQ ID NO: 94021 - DNA, 27 bp, Artificial sequence
  SiRNA target sequence
atggagcaatgccagttccagtacaaa

SEQ ID NO: 94022 - DNA, 27 bp, Artificial sequence
  SiRNA target sequence
tggagcaatgccagttccagtacaaat

SEQ ID NO: 94023 - DNA, 27 bp, Artificial sequence
  SiRNA target sequence
ggagcaatgccagttccagtacaaata

SEQ ID NO: 94024 - DNA, 27 bp, Artificial sequence
  SiRNA target sequence
gagcaatgccagttccagtacaaatac

SEQ ID NO: 94025 - DNA, 27 bp, Artificial sequence
  SiRNA target sequence
agcaatgccagttccagtacaaatacc

SEQ ID NO: 94026 - DNA, 27 bp, Artificial sequence
  SiRNA target sequence
gcaatgccagttccagtacaaataccc

SEQ ID NO: 94027 - DNA, 27 bp, Artificial sequence
  SiRNA target sequence
caatgccagttccagtacaaataccca

SEQ ID NO: 94028 - DNA, 27 bp, Artificial sequence
  SiRNA target sequence
aatgccagttccagtacaaatacccaa

SEQ ID NO: 94029 - DNA, 27 bp, Artificial sequence
  SiRNA target sequence
atgccagttccagtacaaatacccaac

SEQ ID NO: 94030 - DNA, 27 bp, Artificial sequence
  SiRNA target sequence
tgccagttccagtacaaatacccaaca

SEQ ID NO: 94031 - DNA, 27 bp, Artificial sequence
  SiRNA target sequence
gccagttccagtacaaatacccaacac

SEQ ID NO: 94032 - DNA, 27 bp, Artificial sequence
  SiRNA target sequence
ccagttccagtacaaatacccaacact

SEQ ID NO: 94033 - DNA, 27 bp, Artificial sequence
  SiRNA target sequence
cagttccagtacaaatacccaacactt

SEQ ID NO: 94034 - DNA, 27 bp, Artificial sequence
  SiRNA target sequence
agttccagtacaaatacccaacacttt

SEQ ID NO: 94035 - DNA, 27 bp, Artificial sequence
  SiRNA target sequence
gttccagtacaaatacccaacactttt

SEQ ID NO: 94036 - DNA, 27 bp, Artificial sequence
  SiRNA target sequence
ttccagtacaaatacccaacacttttt

SEQ ID NO: 94037 - DNA, 27 bp, Artificial sequence
  SiRNA target sequence
tccagtacaaatacccaacactttttt

SEQ ID NO: 94038 - DNA, 27 bp, Artificial sequence
  SiRNA target sequence
ccagtacaaatacccaacactttttta

SEQ ID NO: 94039 - DNA, 27 bp, Artificial sequence
  SiRNA target sequence
cagtacaaatacccaacacttttttac

SEQ ID NO: 94040 - DNA, 27 bp, Artificial sequence
  SiRNA target sequence
agtacaaatacccaacacttttttaca

SEQ ID NO: 94041 - DNA, 27 bp, Artificial sequence
  SiRNA target sequence
gtacaaatacccaacacttttttacaa

SEQ ID NO: 94042 - DNA, 27 bp, Artificial sequence
  SiRNA target sequence
tacaaatacccaacacttttttacaaa

SEQ ID NO: 94043 - DNA, 27 bp, Artificial sequence
  SiRNA target sequence
acaaatacccaacacttttttacaaaa

SEQ ID NO: 94044 - DNA, 27 bp, Artificial sequence
  SiRNA target sequence
caaatacccaacacttttttacaaaaa

SEQ ID NO: 94045 - DNA, 27 bp, Artificial sequence
  SiRNA target sequence
aaatacccaacacttttttacaaaaat

SEQ ID NO: 94046 - DNA, 27 bp, Artificial sequence
  SiRNA target sequence
aatacccaacacttttttacaaaaatt

SEQ ID NO: 94047 - DNA, 27 bp, Artificial sequence
  SiRNA target sequence
atacccaacacttttttacaaaaattt

SEQ ID NO: 94048 - DNA, 27 bp, Artificial sequence
  SiRNA target sequence
tacccaacacttttttacaaaaattta

SEQ ID NO: 94049 - DNA, 27 bp, Artificial sequence
  SiRNA target sequence
acccaacacttttttacaaaaatttaa

SEQ ID NO: 94050 - DNA, 27 bp, Artificial sequence
  SiRNA target sequence
cccaacacttttttacaaaaatttaat

SEQ ID NO: 94051 - DNA, 27 bp, Artificial sequence
  SiRNA target sequence
ccaacacttttttacaaaaatttaatc

SEQ ID NO: 94052 - DNA, 27 bp, Artificial sequence
  SiRNA target sequence
caacacttttttacaaaaatttaatct

SEQ ID NO: 94053 - DNA, 27 bp, Artificial sequence
  SiRNA target sequence
aacacttttttacaaaaatttaatcta

SEQ ID NO: 94054 - DNA, 27 bp, Artificial sequence
  SiRNA target sequence
acacttttttacaaaaatttaatctaa

SEQ ID NO: 94055 - DNA, 27 bp, Artificial sequence
  SiRNA target sequence
cacttttttacaaaaatttaatctaaa

SEQ ID NO: 94056 - DNA, 27 bp, Artificial sequence
  SiRNA target sequence
acttttttacaaaaatttaatctaaat

SEQ ID NO: 94057 - DNA, 27 bp, Artificial sequence
  SiRNA target sequence
cttttttacaaaaatttaatctaaata

SEQ ID NO: 94058 - DNA, 27 bp, Artificial sequence
  SiRNA target sequence
ttttttacaaaaatttaatctaaataa

SEQ ID NO: 94059 - DNA, 27 bp, Artificial sequence
  SiRNA target sequence
tttttacaaaaatttaatctaaataat

SEQ ID NO: 94060 - DNA, 27 bp, Artificial sequence
  SiRNA target sequence
ttttacaaaaatttaatctaaataatt

SEQ ID NO: 94061 - DNA, 27 bp, Artificial sequence
  SiRNA target sequence
tttacaaaaatttaatctaaataattt

SEQ ID NO: 94062 - DNA, 27 bp, Artificial sequence
  SiRNA target sequence
ttacaaaaatttaatctaaataattta

SEQ ID NO: 94063 - DNA, 27 bp, Artificial sequence
  SiRNA target sequence
tacaaaaatttaatctaaataatttac

SEQ ID NO: 94064 - DNA, 27 bp, Artificial sequence
  SiRNA target sequence
acaaaaatttaatctaaataatttact

SEQ ID NO: 94065 - DNA, 27 bp, Artificial sequence
  SiRNA target sequence
caaaaatttaatctaaataatttactc

SEQ ID NO: 94066 - DNA, 27 bp, Artificial sequence
  SiRNA target sequence
aaaaatttaatctaaataatttactcg

SEQ ID NO: 94067 - DNA, 27 bp, Artificial sequence
  SiRNA target sequence
aaaatttaatctaaataatttactcgg

SEQ ID NO: 94068 - DNA, 27 bp, Artificial sequence
  SiRNA target sequence
aaatttaatctaaataatttactcggt

SEQ ID NO: 94069 - DNA, 27 bp, Artificial sequence
  SiRNA target sequence
aatttaatctaaataatttactcggtc

SEQ ID NO: 94070 - DNA, 27 bp, Artificial sequence
  SiRNA target sequence
atttaatctaaataatttactcggtct

SEQ ID NO: 94071 - DNA, 27 bp, Artificial sequence
  SiRNA target sequence
tttaatctaaataatttactcggtctg

SEQ ID NO: 94072 - DNA, 27 bp, Artificial sequence
  SiRNA target sequence
ttaatctaaataatttactcggtctgt

SEQ ID NO: 94073 - DNA, 27 bp, Artificial sequence
  SiRNA target sequence
taatctaaataatttactcggtctgtg

SEQ ID NO: 94074 - DNA, 27 bp, Artificial sequence
  SiRNA target sequence
aatctaaataatttactcggtctgtga

SEQ ID NO: 94075 - DNA, 27 bp, Artificial sequence
  SiRNA target sequence
atctaaataatttactcggtctgtgac

SEQ ID NO: 94076 - DNA, 27 bp, Artificial sequence
  SiRNA target sequence
tctaaataatttactcggtctgtgaca

SEQ ID NO: 94077 - DNA, 27 bp, Artificial sequence
  SiRNA target sequence
ctaaataatttactcggtctgtgacag

SEQ ID NO: 94078 - DNA, 27 bp, Artificial sequence
  SiRNA target sequence
taaataatttactcggtctgtgacaga

SEQ ID NO: 94079 - DNA, 27 bp, Artificial sequence
  SiRNA target sequence
aaataatttactcggtctgtgacagat

SEQ ID NO: 94080 - DNA, 27 bp, Artificial sequence
  SiRNA target sequence
aataatttactcggtctgtgacagatc

SEQ ID NO: 94081 - DNA, 27 bp, Artificial sequence
  SiRNA target sequence
ataatttactcggtctgtgacagatct

SEQ ID NO: 94082 - DNA, 27 bp, Artificial sequence
  SiRNA target sequence
taatttactcggtctgtgacagatctt

SEQ ID NO: 94083 - DNA, 27 bp, Artificial sequence
  SiRNA target sequence
aatttactcggtctgtgacagatcttt

SEQ ID NO: 94084 - DNA, 27 bp, Artificial sequence
  SiRNA target sequence
atttactcggtctgtgacagatcttta

SEQ ID NO: 94085 - DNA, 27 bp, Artificial sequence
  SiRNA target sequence
tttactcggtctgtgacagatctttaa

SEQ ID NO: 94086 - DNA, 27 bp, Artificial sequence
  SiRNA target sequence
ttactcggtctgtgacagatctttaaa

SEQ ID NO: 94087 - DNA, 27 bp, Artificial sequence
  SiRNA target sequence
tactcggtctgtgacagatctttaaat

SEQ ID NO: 94088 - DNA, 27 bp, Artificial sequence
  SiRNA target sequence
actcggtctgtgacagatctttaaatt

SEQ ID NO: 94089 - DNA, 27 bp, Artificial sequence
  SiRNA target sequence
ctcggtctgtgacagatctttaaatta

SEQ ID NO: 94090 - DNA, 27 bp, Artificial sequence
  SiRNA target sequence
tcggtctgtgacagatctttaaattat

SEQ ID NO: 94091 - DNA, 27 bp, Artificial sequence
  SiRNA target sequence
cggtctgtgacagatctttaaattatt

SEQ ID NO: 94092 - DNA, 27 bp, Artificial sequence
  SiRNA target sequence
ggtctgtgacagatctttaaattatta

SEQ ID NO: 94093 - DNA, 27 bp, Artificial sequence
  SiRNA target sequence
gtctgtgacagatctttaaattattat

SEQ ID NO: 94094 - DNA, 27 bp, Artificial sequence
  SiRNA target sequence
tctgtgacagatctttaaattattata

SEQ ID NO: 94095 - DNA, 27 bp, Artificial sequence
  SiRNA target sequence
ctgtgacagatctttaaattattataa

SEQ ID NO: 94096 - DNA, 27 bp, Artificial sequence
  SiRNA target sequence
tgtgacagatctttaaattattataat

SEQ ID NO: 94097 - DNA, 27 bp, Artificial sequence
  SiRNA target sequence
gtgacagatctttaaattattataatt

SEQ ID NO: 94098 - DNA, 27 bp, Artificial sequence
  SiRNA target sequence
tgacagatctttaaattattataattt

SEQ ID NO: 94099 - DNA, 27 bp, Artificial sequence
  SiRNA target sequence
gacagatctttaaattattataatttt

SEQ ID NO: 94100 - DNA, 27 bp, Artificial sequence
  SiRNA target sequence
acagatctttaaattattataattttg

SEQ ID NO: 94101 - DNA, 27 bp, Artificial sequence
  SiRNA target sequence
cagatctttaaattattataattttgc

SEQ ID NO: 94102 - DNA, 27 bp, Artificial sequence
  SiRNA target sequence
agatctttaaattattataattttgca

SEQ ID NO: 94103 - DNA, 27 bp, Artificial sequence
  SiRNA target sequence
gatctttaaattattataattttgcat

SEQ ID NO: 94104 - DNA, 27 bp, Artificial sequence
  SiRNA target sequence
atctttaaattattataattttgcata

SEQ ID NO: 94105 - DNA, 27 bp, Artificial sequence
  SiRNA target sequence
tctttaaattattataattttgcatat

SEQ ID NO: 94106 - DNA, 27 bp, Artificial sequence
  SiRNA target sequence
ctttaaattattataattttgcatatc

SEQ ID NO: 94107 - DNA, 27 bp, Artificial sequence
  SiRNA target sequence
tttaaattattataattttgcatatct

SEQ ID NO: 94108 - DNA, 27 bp, Artificial sequence
  SiRNA target sequence
ttaaattattataattttgcatatcta

SEQ ID NO: 94109 - DNA, 27 bp, Artificial sequence
  SiRNA target sequence
taaattattataattttgcatatctat

SEQ ID NO: 94110 - DNA, 27 bp, Artificial sequence
  SiRNA target sequence
aaattattataattttgcatatctatg

SEQ ID NO: 94111 - DNA, 27 bp, Artificial sequence
  SiRNA target sequence
aattattataattttgcatatctatga

SEQ ID NO: 94112 - DNA, 27 bp, Artificial sequence
  SiRNA target sequence
attattataattttgcatatctatgaa

SEQ ID NO: 94113 - DNA, 27 bp, Artificial sequence
  SiRNA target sequence
ttattataattttgcatatctatgaaa

SEQ ID NO: 94114 - DNA, 27 bp, Artificial sequence
  SiRNA target sequence
tattataattttgcatatctatgaaat

SEQ ID NO: 94115 - DNA, 27 bp, Artificial sequence
  SiRNA target sequence
attataattttgcatatctatgaaatt

SEQ ID NO: 94116 - DNA, 27 bp, Artificial sequence
  SiRNA target sequence
ttataattttgcatatctatgaaattg

SEQ ID NO: 94117 - DNA, 27 bp, Artificial sequence
  SiRNA target sequence
tataattttgcatatctatgaaattgg

SEQ ID NO: 94118 - DNA, 27 bp, Artificial sequence
  SiRNA target sequence
ataattttgcatatctatgaaattgga

SEQ ID NO: 94119 - DNA, 27 bp, Artificial sequence
  SiRNA target sequence
taattttgcatatctatgaaattggaa

SEQ ID NO: 94120 - DNA, 27 bp, Artificial sequence
  SiRNA target sequence
aattttgcatatctatgaaattggaaa

SEQ ID NO: 94121 - DNA, 27 bp, Artificial sequence
  SiRNA target sequence
attttgcatatctatgaaattggaaac

SEQ ID NO: 94122 - DNA, 27 bp, Artificial sequence
  SiRNA target sequence
ttttgcatatctatgaaattggaaaca

SEQ ID NO: 94123 - DNA, 27 bp, Artificial sequence
  SiRNA target sequence
tttgcatatctatgaaattggaaacat

SEQ ID NO: 94124 - DNA, 27 bp, Artificial sequence
  SiRNA target sequence
ttgcatatctatgaaattggaaacatg

SEQ ID NO: 94125 - DNA, 27 bp, Artificial sequence
  SiRNA target sequence
tgcatatctatgaaattggaaacatgt

SEQ ID NO: 94126 - DNA, 27 bp, Artificial sequence
  SiRNA target sequence
gcatatctatgaaattggaaacatgtc

SEQ ID NO: 94127 - DNA, 27 bp, Artificial sequence
  SiRNA target sequence
catatctatgaaattggaaacatgtcc

SEQ ID NO: 94128 - DNA, 27 bp, Artificial sequence
  SiRNA target sequence
atatctatgaaattggaaacatgtcca

SEQ ID NO: 94129 - DNA, 27 bp, Artificial sequence
  SiRNA target sequence
tatctatgaaattggaaacatgtccat

SEQ ID NO: 94130 - DNA, 27 bp, Artificial sequence
  SiRNA target sequence
atctatgaaattggaaacatgtccata

SEQ ID NO: 94131 - DNA, 27 bp, Artificial sequence
  SiRNA target sequence
tctatgaaattggaaacatgtccatat

SEQ ID NO: 94132 - DNA, 27 bp, Artificial sequence
  SiRNA target sequence
ctatgaaattggaaacatgtccatatc

SEQ ID NO: 94133 - DNA, 27 bp, Artificial sequence
  SiRNA target sequence
tatgaaattggaaacatgtccatatct

SEQ ID NO: 94134 - DNA, 27 bp, Artificial sequence
  SiRNA target sequence
atgaaattggaaacatgtccatatcta

SEQ ID NO: 94135 - DNA, 27 bp, Artificial sequence
  SiRNA target sequence
tgaaattggaaacatgtccatatctat

SEQ ID NO: 94136 - DNA, 27 bp, Artificial sequence
  SiRNA target sequence
gaaattggaaacatgtccatatctatc

SEQ ID NO: 94137 - DNA, 27 bp, Artificial sequence
  SiRNA target sequence
aaattggaaacatgtccatatctatcg

SEQ ID NO: 94138 - DNA, 27 bp, Artificial sequence
  SiRNA target sequence
aattggaaacatgtccatatctatcgc

SEQ ID NO: 94139 - DNA, 27 bp, Artificial sequence
  SiRNA target sequence
attggaaacatgtccatatctatcgcc

SEQ ID NO: 94140 - DNA, 27 bp, Artificial sequence
  SiRNA target sequence
ttggaaacatgtccatatctatcgcct

SEQ ID NO: 94141 - DNA, 27 bp, Artificial sequence
  SiRNA target sequence
tggaaacatgtccatatctatcgcctt

SEQ ID NO: 94142 - DNA, 27 bp, Artificial sequence
  SiRNA target sequence
ggaaacatgtccatatctatcgccttt

SEQ ID NO: 94143 - DNA, 27 bp, Artificial sequence
  SiRNA target sequence
gaaacatgtccatatctatcgcctttt

SEQ ID NO: 94144 - DNA, 27 bp, Artificial sequence
  SiRNA target sequence
aaacatgtccatatctatcgccttttt

SEQ ID NO: 94145 - DNA, 27 bp, Artificial sequence
  SiRNA target sequence
aacatgtccatatctatcgcctttttt

SEQ ID NO: 94146 - DNA, 27 bp, Artificial sequence
  SiRNA target sequence
acatgtccatatctatcgcctttttta

SEQ ID NO: 94147 - DNA, 27 bp, Artificial sequence
  SiRNA target sequence
catgtccatatctatcgccttttttaa

SEQ ID NO: 94148 - DNA, 27 bp, Artificial sequence
  SiRNA target sequence
atgtccatatctatcgccttttttaat

SEQ ID NO: 94149 - DNA, 27 bp, Artificial sequence
  SiRNA target sequence
tgtccatatctatcgccttttttaata

SEQ ID NO: 94150 - DNA, 27 bp, Artificial sequence
  SiRNA target sequence
gtccatatctatcgccttttttaataa

SEQ ID NO: 94151 - DNA, 27 bp, Artificial sequence
  SiRNA target sequence
tccatatctatcgccttttttaataat

SEQ ID NO: 94152 - DNA, 27 bp, Artificial sequence
  SiRNA target sequence
ccatatctatcgccttttttaataatt

SEQ ID NO: 94153 - DNA, 27 bp, Artificial sequence
  SiRNA target sequence
catatctatcgccttttttaataattg

SEQ ID NO: 94154 - DNA, 27 bp, Artificial sequence
  SiRNA target sequence
atatctatcgccttttttaataattgc

SEQ ID NO: 94155 - DNA, 27 bp, Artificial sequence
  SiRNA target sequence
tatctatcgccttttttaataattgct

SEQ ID NO: 94156 - DNA, 27 bp, Artificial sequence
  SiRNA target sequence
atctatcgccttttttaataattgcta

SEQ ID NO: 94157 - DNA, 27 bp, Artificial sequence
  SiRNA target sequence
tctatcgccttttttaataattgctac

SEQ ID NO: 94158 - DNA, 27 bp, Artificial sequence
  SiRNA target sequence
ctatcgccttttttaataattgctact

SEQ ID NO: 94159 - DNA, 27 bp, Artificial sequence
  SiRNA target sequence
tatcgccttttttaataattgctacta

SEQ ID NO: 94160 - DNA, 27 bp, Artificial sequence
  SiRNA target sequence
atcgccttttttaataattgctactaa

SEQ ID NO: 94161 - DNA, 27 bp, Artificial sequence
  SiRNA target sequence
tcgccttttttaataattgctactaaa

SEQ ID NO: 94162 - DNA, 27 bp, Artificial sequence
  SiRNA target sequence
cgccttttttaataattgctactaaaa

SEQ ID NO: 94163 - DNA, 27 bp, Artificial sequence
  SiRNA target sequence
gccttttttaataattgctactaaaat

SEQ ID NO: 94164 - DNA, 27 bp, Artificial sequence
  SiRNA target sequence
ccttttttaataattgctactaaaatt

SEQ ID NO: 94165 - DNA, 27 bp, Artificial sequence
  SiRNA target sequence
cttttttaataattgctactaaaattt

SEQ ID NO: 94166 - DNA, 27 bp, Artificial sequence
  SiRNA target sequence
ttttttaataattgctactaaaatttc

SEQ ID NO: 94167 - DNA, 27 bp, Artificial sequence
  SiRNA target sequence
tttttaataattgctactaaaatttca

SEQ ID NO: 94168 - DNA, 27 bp, Artificial sequence
  SiRNA target sequence
ttttaataattgctactaaaatttcac

SEQ ID NO: 94169 - DNA, 27 bp, Artificial sequence
  SiRNA target sequence
tttaataattgctactaaaatttcaca

SEQ ID NO: 94170 - DNA, 27 bp, Artificial sequence
  SiRNA target sequence
ttaataattgctactaaaatttcacat

SEQ ID NO: 94171 - DNA, 27 bp, Artificial sequence
  SiRNA target sequence
taataattgctactaaaatttcacatt

SEQ ID NO: 94172 - DNA, 27 bp, Artificial sequence
  SiRNA target sequence
aataattgctactaaaatttcacattt

SEQ ID NO: 94173 - DNA, 27 bp, Artificial sequence
  SiRNA target sequence
ataattgctactaaaatttcacatttt

SEQ ID NO: 94174 - DNA, 27 bp, Artificial sequence
  SiRNA target sequence
taattgctactaaaatttcacattttt

SEQ ID NO: 94175 - DNA, 27 bp, Artificial sequence
  SiRNA target sequence
aattgctactaaaatttcacatttttc

SEQ ID NO: 94176 - DNA, 27 bp, Artificial sequence
  SiRNA target sequence
attgctactaaaatttcacatttttca

SEQ ID NO: 94177 - DNA, 27 bp, Artificial sequence
  SiRNA target sequence
ttgctactaaaatttcacatttttcat

SEQ ID NO: 94178 - DNA, 27 bp, Artificial sequence
  SiRNA target sequence
tgctactaaaatttcacatttttcatt

SEQ ID NO: 94179 - DNA, 27 bp, Artificial sequence
  SiRNA target sequence
gctactaaaatttcacatttttcattt

SEQ ID NO: 94180 - DNA, 27 bp, Artificial sequence
  SiRNA target sequence
ctactaaaatttcacatttttcattta

SEQ ID NO: 94181 - DNA, 27 bp, Artificial sequence
  SiRNA target sequence
tactaaaatttcacatttttcatttac

SEQ ID NO: 94182 - DNA, 27 bp, Artificial sequence
  SiRNA target sequence
actaaaatttcacatttttcatttacg

SEQ ID NO: 94183 - DNA, 27 bp, Artificial sequence
  SiRNA target sequence
ctaaaatttcacatttttcatttacgt

SEQ ID NO: 94184 - DNA, 27 bp, Artificial sequence
  SiRNA target sequence
taaaatttcacatttttcatttacgtg

SEQ ID NO: 94185 - DNA, 27 bp, Artificial sequence
  SiRNA target sequence
aaaatttcacatttttcatttacgtgg

SEQ ID NO: 94186 - DNA, 27 bp, Artificial sequence
  SiRNA target sequence
aaatttcacatttttcatttacgtggt

SEQ ID NO: 94187 - DNA, 27 bp, Artificial sequence
  SiRNA target sequence
aatttcacatttttcatttacgtggtt

SEQ ID NO: 94188 - DNA, 27 bp, Artificial sequence
  SiRNA target sequence
atttcacatttttcatttacgtggtta

SEQ ID NO: 94189 - DNA, 27 bp, Artificial sequence
  SiRNA target sequence
tttcacatttttcatttacgtggttag

SEQ ID NO: 94190 - DNA, 27 bp, Artificial sequence
  SiRNA target sequence
ttcacatttttcatttacgtggttagt

SEQ ID NO: 94191 - DNA, 27 bp, Artificial sequence
  SiRNA target sequence
tcacatttttcatttacgtggttagta

SEQ ID NO: 94192 - DNA, 27 bp, Artificial sequence
  SiRNA target sequence
cacatttttcatttacgtggttagtaa

SEQ ID NO: 94193 - DNA, 27 bp, Artificial sequence
  SiRNA target sequence
acatttttcatttacgtggttagtaag

SEQ ID NO: 94194 - DNA, 27 bp, Artificial sequence
  SiRNA target sequence
catttttcatttacgtggttagtaagt

SEQ ID NO: 94195 - DNA, 27 bp, Artificial sequence
  SiRNA target sequence
atttttcatttacgtggttagtaagtg

SEQ ID NO: 94196 - DNA, 27 bp, Artificial sequence
  SiRNA target sequence
tttttcatttacgtggttagtaagtga

SEQ ID NO: 94197 - DNA, 27 bp, Artificial sequence
  SiRNA target sequence
ttttcatttacgtggttagtaagtgaa

SEQ ID NO: 94198 - DNA, 27 bp, Artificial sequence
  SiRNA target sequence
tttcatttacgtggttagtaagtgaat

SEQ ID NO: 94199 - DNA, 27 bp, Artificial sequence
  SiRNA target sequence
ttcatttacgtggttagtaagtgaata

SEQ ID NO: 94200 - DNA, 27 bp, Artificial sequence
  SiRNA target sequence
tcatttacgtggttagtaagtgaataa

SEQ ID NO: 94201 - DNA, 27 bp, Artificial sequence
  SiRNA target sequence
catttacgtggttagtaagtgaataat

SEQ ID NO: 94202 - DNA, 27 bp, Artificial sequence
  SiRNA target sequence
atttacgtggttagtaagtgaataata

SEQ ID NO: 94203 - DNA, 27 bp, Artificial sequence
  SiRNA target sequence
tttacgtggttagtaagtgaataatat

SEQ ID NO: 94204 - DNA, 27 bp, Artificial sequence
  SiRNA target sequence
ttacgtggttagtaagtgaataatatc

SEQ ID NO: 94205 - DNA, 27 bp, Artificial sequence
  SiRNA target sequence
tacgtggttagtaagtgaataatatct

SEQ ID NO: 94206 - DNA, 27 bp, Artificial sequence
  SiRNA target sequence
acgtggttagtaagtgaataatatctt

SEQ ID NO: 94207 - DNA, 27 bp, Artificial sequence
  SiRNA target sequence
cgtggttagtaagtgaataatatcttg

SEQ ID NO: 94208 - DNA, 27 bp, Artificial sequence
  SiRNA target sequence
gtggttagtaagtgaataatatcttgg

SEQ ID NO: 94209 - DNA, 27 bp, Artificial sequence
  SiRNA target sequence
tggttagtaagtgaataatatcttggc

SEQ ID NO: 94210 - DNA, 27 bp, Artificial sequence
  SiRNA target sequence
ggttagtaagtgaataatatcttggct

SEQ ID NO: 94211 - DNA, 27 bp, Artificial sequence
  SiRNA target sequence
gttagtaagtgaataatatcttggctt

SEQ ID NO: 94212 - DNA, 27 bp, Artificial sequence
  SiRNA target sequence
ttagtaagtgaataatatcttggctta

SEQ ID NO: 94213 - DNA, 27 bp, Artificial sequence
  SiRNA target sequence
tagtaagtgaataatatcttggcttaa

SEQ ID NO: 94214 - DNA, 27 bp, Artificial sequence
  SiRNA target sequence
agtaagtgaataatatcttggcttaat

SEQ ID NO: 94215 - DNA, 27 bp, Artificial sequence
  SiRNA target sequence
gtaagtgaataatatcttggcttaatt

SEQ ID NO: 94216 - DNA, 27 bp, Artificial sequence
  SiRNA target sequence
taagtgaataatatcttggcttaattg

SEQ ID NO: 94217 - DNA, 27 bp, Artificial sequence
  SiRNA target sequence
aagtgaataatatcttggcttaattgt

SEQ ID NO: 94218 - DNA, 27 bp, Artificial sequence
  SiRNA target sequence
agtgaataatatcttggcttaattgtt

SEQ ID NO: 94219 - DNA, 27 bp, Artificial sequence
  SiRNA target sequence
gtgaataatatcttggcttaattgttt

SEQ ID NO: 94220 - DNA, 27 bp, Artificial sequence
  SiRNA target sequence
tgaataatatcttggcttaattgtttg

SEQ ID NO: 94221 - DNA, 27 bp, Artificial sequence
  SiRNA target sequence
gaataatatcttggcttaattgtttga

SEQ ID NO: 94222 - DNA, 27 bp, Artificial sequence
  SiRNA target sequence
aataatatcttggcttaattgtttgac

SEQ ID NO: 94223 - DNA, 27 bp, Artificial sequence
  SiRNA target sequence
ataatatcttggcttaattgtttgaca

SEQ ID NO: 94224 - DNA, 27 bp, Artificial sequence
  SiRNA target sequence
taatatcttggcttaattgtttgacaa

SEQ ID NO: 94225 - DNA, 27 bp, Artificial sequence
  SiRNA target sequence
aatatcttggcttaattgtttgacaat

SEQ ID NO: 94226 - DNA, 27 bp, Artificial sequence
  SiRNA target sequence
atatcttggcttaattgtttgacaatt

SEQ ID NO: 94227 - DNA, 27 bp, Artificial sequence
  SiRNA target sequence
tatcttggcttaattgtttgacaattc

SEQ ID NO: 94228 - DNA, 27 bp, Artificial sequence
  SiRNA target sequence
atcttggcttaattgtttgacaattca

SEQ ID NO: 94229 - DNA, 27 bp, Artificial sequence
  SiRNA target sequence
tcttggcttaattgtttgacaattcat

SEQ ID NO: 94230 - DNA, 27 bp, Artificial sequence
  SiRNA target sequence
cttggcttaattgtttgacaattcata

SEQ ID NO: 94231 - DNA, 27 bp, Artificial sequence
  SiRNA target sequence
ttggcttaattgtttgacaattcataa

SEQ ID NO: 94232 - DNA, 27 bp, Artificial sequence
  SiRNA target sequence
tggcttaattgtttgacaattcataat

SEQ ID NO: 94233 - DNA, 27 bp, Artificial sequence
  SiRNA target sequence
ggcttaattgtttgacaattcataata

SEQ ID NO: 94234 - DNA, 27 bp, Artificial sequence
  SiRNA target sequence
gcttaattgtttgacaattcataataa

SEQ ID NO: 94235 - DNA, 27 bp, Artificial sequence
  SiRNA target sequence
cttaattgtttgacaattcataataag

SEQ ID NO: 94236 - DNA, 27 bp, Artificial sequence
  SiRNA target sequence
ttaattgtttgacaattcataataaga

SEQ ID NO: 94237 - DNA, 27 bp, Artificial sequence
  SiRNA target sequence
taattgtttgacaattcataataagat

SEQ ID NO: 94238 - DNA, 27 bp, Artificial sequence
  SiRNA target sequence
aattgtttgacaattcataataagatc

SEQ ID NO: 94239 - DNA, 27 bp, Artificial sequence
  SiRNA target sequence
attgtttgacaattcataataagatcc

SEQ ID NO: 94240 - DNA, 27 bp, Artificial sequence
  SiRNA target sequence
ttgtttgacaattcataataagatcct

SEQ ID NO: 94241 - DNA, 27 bp, Artificial sequence
  SiRNA target sequence
tgtttgacaattcataataagatcctc

SEQ ID NO: 94242 - DNA, 27 bp, Artificial sequence
  SiRNA target sequence
gtttgacaattcataataagatcctct

SEQ ID NO: 94243 - DNA, 27 bp, Artificial sequence
  SiRNA target sequence
tttgacaattcataataagatcctcta

SEQ ID NO: 94244 - DNA, 27 bp, Artificial sequence
  SiRNA target sequence
ttgacaattcataataagatcctctaa

SEQ ID NO: 94245 - DNA, 27 bp, Artificial sequence
  SiRNA target sequence
tgacaattcataataagatcctctaaa

SEQ ID NO: 94246 - DNA, 27 bp, Artificial sequence
  SiRNA target sequence
gacaattcataataagatcctctaaac

SEQ ID NO: 94247 - DNA, 27 bp, Artificial sequence
  SiRNA target sequence
acaattcataataagatcctctaaact

SEQ ID NO: 94248 - DNA, 27 bp, Artificial sequence
  SiRNA target sequence
caattcataataagatcctctaaactt

SEQ ID NO: 94249 - DNA, 27 bp, Artificial sequence
  SiRNA target sequence
aattcataataagatcctctaaacttg

SEQ ID NO: 94250 - DNA, 27 bp, Artificial sequence
  SiRNA target sequence
attcataataagatcctctaaacttgg

SEQ ID NO: 94251 - DNA, 27 bp, Artificial sequence
  SiRNA target sequence
ttcataataagatcctctaaacttggt

SEQ ID NO: 94252 - DNA, 27 bp, Artificial sequence
  SiRNA target sequence
tcataataagatcctctaaacttggtt

SEQ ID NO: 94253 - DNA, 27 bp, Artificial sequence
  SiRNA target sequence
cataataagatcctctaaacttggttt

SEQ ID NO: 94254 - DNA, 27 bp, Artificial sequence
  SiRNA target sequence
ataataagatcctctaaacttggttta

SEQ ID NO: 94255 - DNA, 27 bp, Artificial sequence
  SiRNA target sequence
taataagatcctctaaacttggtttac

SEQ ID NO: 94256 - DNA, 27 bp, Artificial sequence
  SiRNA target sequence
aataagatcctctaaacttggtttaca

SEQ ID NO: 94257 - DNA, 27 bp, Artificial sequence
  SiRNA target sequence
ataagatcctctaaacttggtttacat

SEQ ID NO: 94258 - DNA, 27 bp, Artificial sequence
  SiRNA target sequence
taagatcctctaaacttggtttacatt

SEQ ID NO: 94259 - DNA, 27 bp, Artificial sequence
  SiRNA target sequence
aagatcctctaaacttggtttacattg

SEQ ID NO: 94260 - DNA, 27 bp, Artificial sequence
  SiRNA target sequence
agatcctctaaacttggtttacattga

SEQ ID NO: 94261 - DNA, 27 bp, Artificial sequence
  SiRNA target sequence
gatcctctaaacttggtttacattgaa

SEQ ID NO: 94262 - DNA, 27 bp, Artificial sequence
  SiRNA target sequence
atcctctaaacttggtttacattgaaa

SEQ ID NO: 94263 - DNA, 27 bp, Artificial sequence
  SiRNA target sequence
tcctctaaacttggtttacattgaaat

SEQ ID NO: 94264 - DNA, 27 bp, Artificial sequence
  SiRNA target sequence
cctctaaacttggtttacattgaaatg

SEQ ID NO: 94265 - DNA, 27 bp, Artificial sequence
  SiRNA target sequence
ctctaaacttggtttacattgaaatgt

SEQ ID NO: 94266 - DNA, 27 bp, Artificial sequence
  SiRNA target sequence
tctaaacttggtttacattgaaatgta

SEQ ID NO: 94267 - DNA, 27 bp, Artificial sequence
  SiRNA target sequence
ctaaacttggtttacattgaaatgtat

SEQ ID NO: 94268 - DNA, 27 bp, Artificial sequence
  SiRNA target sequence
taaacttggtttacattgaaatgtata

SEQ ID NO: 94269 - DNA, 27 bp, Artificial sequence
  SiRNA target sequence
aaacttggtttacattgaaatgtatat

SEQ ID NO: 94270 - DNA, 27 bp, Artificial sequence
  SiRNA target sequence
aacttggtttacattgaaatgtatata

SEQ ID NO: 94271 - DNA, 27 bp, Artificial sequence
  SiRNA target sequence
acttggtttacattgaaatgtatatat

SEQ ID NO: 94272 - DNA, 27 bp, Artificial sequence
  SiRNA target sequence
cttggtttacattgaaatgtatatata

SEQ ID NO: 94273 - DNA, 27 bp, Artificial sequence
  SiRNA target sequence
ttggtttacattgaaatgtatatataa

SEQ ID NO: 94274 - DNA, 27 bp, Artificial sequence
  SiRNA target sequence
tggtttacattgaaatgtatatataat

SEQ ID NO: 94275 - DNA, 27 bp, Artificial sequence
  SiRNA target sequence
ggtttacattgaaatgtatatataatg

SEQ ID NO: 94276 - DNA, 27 bp, Artificial sequence
  SiRNA target sequence
gtttacattgaaatgtatatataatgt

SEQ ID NO: 94277 - DNA, 27 bp, Artificial sequence
  SiRNA target sequence
tttacattgaaatgtatatataatgtc

SEQ ID NO: 94278 - DNA, 27 bp, Artificial sequence
  SiRNA target sequence
ttacattgaaatgtatatataatgtca

SEQ ID NO: 94279 - DNA, 27 bp, Artificial sequence
  SiRNA target sequence
tacattgaaatgtatatataatgtcaa

SEQ ID NO: 94280 - DNA, 27 bp, Artificial sequence
  SiRNA target sequence
acattgaaatgtatatataatgtcaag

SEQ ID NO: 94281 - DNA, 27 bp, Artificial sequence
  SiRNA target sequence
cattgaaatgtatatataatgtcaagc

SEQ ID NO: 94282 - DNA, 27 bp, Artificial sequence
  SiRNA target sequence
attgaaatgtatatataatgtcaagca

SEQ ID NO: 94283 - DNA, 27 bp, Artificial sequence
  SiRNA target sequence
ttgaaatgtatatataatgtcaagcac

SEQ ID NO: 94284 - DNA, 27 bp, Artificial sequence
  SiRNA target sequence
tgaaatgtatatataatgtcaagcaca

SEQ ID NO: 94285 - DNA, 27 bp, Artificial sequence
  SiRNA target sequence
gaaatgtatatataatgtcaagcacat

SEQ ID NO: 94286 - DNA, 27 bp, Artificial sequence
  SiRNA target sequence
aaatgtatatataatgtcaagcacatt

SEQ ID NO: 94287 - DNA, 27 bp, Artificial sequence
  SiRNA target sequence
aatgtatatataatgtcaagcacatta

SEQ ID NO: 94288 - DNA, 27 bp, Artificial sequence
  SiRNA target sequence
atgtatatataatgtcaagcacattat

SEQ ID NO: 94289 - DNA, 27 bp, Artificial sequence
  SiRNA target sequence
tgtatatataatgtcaagcacattatt

SEQ ID NO: 94290 - DNA, 27 bp, Artificial sequence
  SiRNA target sequence
gtatatataatgtcaagcacattattc

SEQ ID NO: 94291 - DNA, 27 bp, Artificial sequence
  SiRNA target sequence
tatatataatgtcaagcacattattcc

SEQ ID NO: 94292 - DNA, 27 bp, Artificial sequence
  SiRNA target sequence
atatataatgtcaagcacattattcca

SEQ ID NO: 94293 - DNA, 27 bp, Artificial sequence
  SiRNA target sequence
tatataatgtcaagcacattattccag

SEQ ID NO: 94294 - DNA, 27 bp, Artificial sequence
  SiRNA target sequence
atataatgtcaagcacattattccagt

SEQ ID NO: 94295 - DNA, 27 bp, Artificial sequence
  SiRNA target sequence
tataatgtcaagcacattattccagtt

SEQ ID NO: 94296 - DNA, 27 bp, Artificial sequence
  SiRNA target sequence
ataatgtcaagcacattattccagttc

SEQ ID NO: 94297 - DNA, 27 bp, Artificial sequence
  SiRNA target sequence
taatgtcaagcacattattccagttct

SEQ ID NO: 94298 - DNA, 27 bp, Artificial sequence
  SiRNA target sequence
aatgtcaagcacattattccagttctt

SEQ ID NO: 94299 - DNA, 27 bp, Artificial sequence
  SiRNA target sequence
atgtcaagcacattattccagttctta

SEQ ID NO: 94300 - DNA, 27 bp, Artificial sequence
  SiRNA target sequence
tgtcaagcacattattccagttcttaa

SEQ ID NO: 94301 - DNA, 27 bp, Artificial sequence
  SiRNA target sequence
gtcaagcacattattccagttcttaat

SEQ ID NO: 94302 - DNA, 27 bp, Artificial sequence
  SiRNA target sequence
tcaagcacattattccagttcttaatg

SEQ ID NO: 94303 - DNA, 27 bp, Artificial sequence
  SiRNA target sequence
caagcacattattccagttcttaatga

SEQ ID NO: 94304 - DNA, 27 bp, Artificial sequence
  SiRNA target sequence
aagcacattattccagttcttaatgat

SEQ ID NO: 94305 - DNA, 27 bp, Artificial sequence
  SiRNA target sequence
agcacattattccagttcttaatgatg

SEQ ID NO: 94306 - DNA, 27 bp, Artificial sequence
  SiRNA target sequence
gcacattattccagttcttaatgatgc

SEQ ID NO: 94307 - DNA, 27 bp, Artificial sequence
  SiRNA target sequence
cacattattccagttcttaatgatgct

SEQ ID NO: 94308 - DNA, 27 bp, Artificial sequence
  SiRNA target sequence
acattattccagttcttaatgatgctt

SEQ ID NO: 94309 - DNA, 27 bp, Artificial sequence
  SiRNA target sequence
cattattccagttcttaatgatgctta

SEQ ID NO: 94310 - DNA, 27 bp, Artificial sequence
  SiRNA target sequence
attattccagttcttaatgatgcttaa

SEQ ID NO: 94311 - DNA, 27 bp, Artificial sequence
  SiRNA target sequence
ttattccagttcttaatgatgcttaaa

SEQ ID NO: 94312 - DNA, 27 bp, Artificial sequence
  SiRNA target sequence
tattccagttcttaatgatgcttaaat

SEQ ID NO: 94313 - DNA, 27 bp, Artificial sequence
  SiRNA target sequence
attccagttcttaatgatgcttaaata

SEQ ID NO: 94314 - DNA, 27 bp, Artificial sequence
  SiRNA target sequence
ttccagttcttaatgatgcttaaataa

SEQ ID NO: 94315 - DNA, 27 bp, Artificial sequence
  SiRNA target sequence
tccagttcttaatgatgcttaaataat

SEQ ID NO: 94316 - DNA, 27 bp, Artificial sequence
  SiRNA target sequence
ccagttcttaatgatgcttaaataatc

SEQ ID NO: 94317 - DNA, 27 bp, Artificial sequence
  SiRNA target sequence
cagttcttaatgatgcttaaataatct

SEQ ID NO: 94318 - DNA, 27 bp, Artificial sequence
  SiRNA target sequence
agttcttaatgatgcttaaataatctt

SEQ ID NO: 94319 - DNA, 27 bp, Artificial sequence
  SiRNA target sequence
gttcttaatgatgcttaaataatcttt

SEQ ID NO: 94320 - DNA, 27 bp, Artificial sequence
  SiRNA target sequence
ttcttaatgatgcttaaataatctttt

SEQ ID NO: 94321 - DNA, 27 bp, Artificial sequence
  SiRNA target sequence
tcttaatgatgcttaaataatctttta

SEQ ID NO: 94322 - DNA, 27 bp, Artificial sequence
  SiRNA target sequence
cttaatgatgcttaaataatcttttac

SEQ ID NO: 94323 - DNA, 27 bp, Artificial sequence
  SiRNA target sequence
ttaatgatgcttaaataatcttttact

SEQ ID NO: 94324 - DNA, 27 bp, Artificial sequence
  SiRNA target sequence
taatgatgcttaaataatcttttactc

SEQ ID NO: 94325 - DNA, 27 bp, Artificial sequence
  SiRNA target sequence
aatgatgcttaaataatcttttactcc

SEQ ID NO: 94326 - DNA, 27 bp, Artificial sequence
  SiRNA target sequence
atgatgcttaaataatcttttactcct

SEQ ID NO: 94327 - DNA, 27 bp, Artificial sequence
  SiRNA target sequence
tgatgcttaaataatcttttactcctt

SEQ ID NO: 94328 - DNA, 27 bp, Artificial sequence
  SiRNA target sequence
gatgcttaaataatcttttactccttc

SEQ ID NO: 94329 - DNA, 27 bp, Artificial sequence
  SiRNA target sequence
atgcttaaataatcttttactccttct

SEQ ID NO: 94330 - DNA, 27 bp, Artificial sequence
  SiRNA target sequence
tgcttaaataatcttttactccttctt

SEQ ID NO: 94331 - DNA, 27 bp, Artificial sequence
  SiRNA target sequence
gcttaaataatcttttactccttcttt

SEQ ID NO: 94332 - DNA, 27 bp, Artificial sequence
  SiRNA target sequence
cttaaataatcttttactccttcttta

SEQ ID NO: 94333 - DNA, 27 bp, Artificial sequence
  SiRNA target sequence
ttaaataatcttttactccttctttag

SEQ ID NO: 94334 - DNA, 27 bp, Artificial sequence
  SiRNA target sequence
taaataatcttttactccttctttaga

SEQ ID NO: 94335 - DNA, 27 bp, Artificial sequence
  SiRNA target sequence
aaataatcttttactccttctttagaa

SEQ ID NO: 94336 - DNA, 27 bp, Artificial sequence
  SiRNA target sequence
aataatcttttactccttctttagaac

SEQ ID NO: 94337 - DNA, 27 bp, Artificial sequence
  SiRNA target sequence
ataatcttttactccttctttagaaca

SEQ ID NO: 94338 - DNA, 27 bp, Artificial sequence
  SiRNA target sequence
taatcttttactccttctttagaacac

SEQ ID NO: 94339 - DNA, 27 bp, Artificial sequence
  SiRNA target sequence
aatcttttactccttctttagaacaca

SEQ ID NO: 94340 - DNA, 27 bp, Artificial sequence
  SiRNA target sequence
atcttttactccttctttagaacacag

SEQ ID NO: 94341 - DNA, 27 bp, Artificial sequence
  SiRNA target sequence
tcttttactccttctttagaacacaga

SEQ ID NO: 94342 - DNA, 27 bp, Artificial sequence
  SiRNA target sequence
cttttactccttctttagaacacagat

SEQ ID NO: 94343 - DNA, 27 bp, Artificial sequence
  SiRNA target sequence
ttttactccttctttagaacacagata

SEQ ID NO: 94344 - DNA, 27 bp, Artificial sequence
  SiRNA target sequence
tttactccttctttagaacacagatat

SEQ ID NO: 94345 - DNA, 27 bp, Artificial sequence
  SiRNA target sequence
ttactccttctttagaacacagatatt

SEQ ID NO: 94346 - DNA, 27 bp, Artificial sequence
  SiRNA target sequence
tactccttctttagaacacagatattc

SEQ ID NO: 94347 - DNA, 27 bp, Artificial sequence
  SiRNA target sequence
actccttctttagaacacagatattca

SEQ ID NO: 94348 - DNA, 27 bp, Artificial sequence
  SiRNA target sequence
ctccttctttagaacacagatattcaa

SEQ ID NO: 94349 - DNA, 27 bp, Artificial sequence
  SiRNA target sequence
tccttctttagaacacagatattcaat

SEQ ID NO: 94350 - DNA, 27 bp, Artificial sequence
  SiRNA target sequence
ccttctttagaacacagatattcaata

SEQ ID NO: 94351 - DNA, 27 bp, Artificial sequence
  SiRNA target sequence
cttctttagaacacagatattcaatat

SEQ ID NO: 94352 - DNA, 27 bp, Artificial sequence
  SiRNA target sequence
ttctttagaacacagatattcaatatc

SEQ ID NO: 94353 - DNA, 27 bp, Artificial sequence
  SiRNA target sequence
tctttagaacacagatattcaatatca

SEQ ID NO: 94354 - DNA, 27 bp, Artificial sequence
  SiRNA target sequence
ctttagaacacagatattcaatatcat

SEQ ID NO: 94355 - DNA, 27 bp, Artificial sequence
  SiRNA target sequence
tttagaacacagatattcaatatcatg

SEQ ID NO: 94356 - DNA, 27 bp, Artificial sequence
  SiRNA target sequence
ttagaacacagatattcaatatcatgc

SEQ ID NO: 94357 - DNA, 27 bp, Artificial sequence
  SiRNA target sequence
tagaacacagatattcaatatcatgct

SEQ ID NO: 94358 - DNA, 27 bp, Artificial sequence
  SiRNA target sequence
agaacacagatattcaatatcatgctt

SEQ ID NO: 94359 - DNA, 27 bp, Artificial sequence
  SiRNA target sequence
gaacacagatattcaatatcatgctta

SEQ ID NO: 94360 - DNA, 27 bp, Artificial sequence
  SiRNA target sequence
aacacagatattcaatatcatgcttat

SEQ ID NO: 94361 - DNA, 27 bp, Artificial sequence
  SiRNA target sequence
acacagatattcaatatcatgcttatt

SEQ ID NO: 94362 - DNA, 27 bp, Artificial sequence
  SiRNA target sequence
cacagatattcaatatcatgcttattt

SEQ ID NO: 94363 - DNA, 27 bp, Artificial sequence
  SiRNA target sequence
acagatattcaatatcatgcttatttt

SEQ ID NO: 94364 - DNA, 27 bp, Artificial sequence
  SiRNA target sequence
cagatattcaatatcatgcttattttt

SEQ ID NO: 94365 - DNA, 27 bp, Artificial sequence
  SiRNA target sequence
agatattcaatatcatgcttattttta

SEQ ID NO: 94366 - DNA, 27 bp, Artificial sequence
  SiRNA target sequence
gatattcaatatcatgcttatttttag

SEQ ID NO: 94367 - DNA, 27 bp, Artificial sequence
  SiRNA target sequence
atattcaatatcatgcttatttttaga

SEQ ID NO: 94368 - DNA, 27 bp, Artificial sequence
  SiRNA target sequence
tattcaatatcatgcttatttttagag

SEQ ID NO: 94369 - DNA, 27 bp, Artificial sequence
  SiRNA target sequence
attcaatatcatgcttatttttagagg

SEQ ID NO: 94370 - DNA, 27 bp, Artificial sequence
  SiRNA target sequence
ttcaatatcatgcttatttttagaggt

SEQ ID NO: 94371 - DNA, 27 bp, Artificial sequence
  SiRNA target sequence
tcaatatcatgcttatttttagaggtt

SEQ ID NO: 94372 - DNA, 27 bp, Artificial sequence
  SiRNA target sequence
caatatcatgcttatttttagaggttt

SEQ ID NO: 94373 - DNA, 27 bp, Artificial sequence
  SiRNA target sequence
aatatcatgcttatttttagaggtttt

SEQ ID NO: 94374 - DNA, 27 bp, Artificial sequence
  SiRNA target sequence
atatcatgcttatttttagaggtttta

SEQ ID NO: 94375 - DNA, 27 bp, Artificial sequence
  SiRNA target sequence
tatcatgcttatttttagaggttttag

SEQ ID NO: 94376 - DNA, 27 bp, Artificial sequence
  SiRNA target sequence
atcatgcttatttttagaggttttaga

SEQ ID NO: 94377 - DNA, 27 bp, Artificial sequence
  SiRNA target sequence
tcatgcttatttttagaggttttagaa

SEQ ID NO: 94378 - DNA, 27 bp, Artificial sequence
  SiRNA target sequence
catgcttatttttagaggttttagaaa

SEQ ID NO: 94379 - DNA, 27 bp, Artificial sequence
  SiRNA target sequence
atgcttatttttagaggttttagaaat

SEQ ID NO: 94380 - DNA, 27 bp, Artificial sequence
  SiRNA target sequence
tgcttatttttagaggttttagaaata

SEQ ID NO: 94381 - DNA, 27 bp, Artificial sequence
  SiRNA target sequence
gcttatttttagaggttttagaaatat

SEQ ID NO: 94382 - DNA, 27 bp, Artificial sequence
  SiRNA target sequence
cttatttttagaggttttagaaatatc

SEQ ID NO: 94383 - DNA, 27 bp, Artificial sequence
  SiRNA target sequence
ttatttttagaggttttagaaatatcc

SEQ ID NO: 94384 - DNA, 27 bp, Artificial sequence
  SiRNA target sequence
tatttttagaggttttagaaatatcca

SEQ ID NO: 94385 - DNA, 27 bp, Artificial sequence
  SiRNA target sequence
atttttagaggttttagaaatatccat

SEQ ID NO: 94386 - DNA, 27 bp, Artificial sequence
  SiRNA target sequence
tttttagaggttttagaaatatccata

SEQ ID NO: 94387 - DNA, 27 bp, Artificial sequence
  SiRNA target sequence
ttttagaggttttagaaatatccataa

SEQ ID NO: 94388 - DNA, 27 bp, Artificial sequence
  SiRNA target sequence
tttagaggttttagaaatatccataag

SEQ ID NO: 94389 - DNA, 27 bp, Artificial sequence
  SiRNA target sequence
ttagaggttttagaaatatccataagc

SEQ ID NO: 94390 - DNA, 27 bp, Artificial sequence
  SiRNA target sequence
tagaggttttagaaatatccataagcc

SEQ ID NO: 94391 - DNA, 27 bp, Artificial sequence
  SiRNA target sequence
agaggttttagaaatatccataagcca

SEQ ID NO: 94392 - DNA, 27 bp, Artificial sequence
  SiRNA target sequence
gaggttttagaaatatccataagccat

SEQ ID NO: 94393 - DNA, 27 bp, Artificial sequence
  SiRNA target sequence
aggttttagaaatatccataagccatg

SEQ ID NO: 94394 - DNA, 27 bp, Artificial sequence
  SiRNA target sequence
ggttttagaaatatccataagccatgc

SEQ ID NO: 94395 - DNA, 27 bp, Artificial sequence
  SiRNA target sequence
gttttagaaatatccataagccatgct

SEQ ID NO: 94396 - DNA, 27 bp, Artificial sequence
  SiRNA target sequence
ttttagaaatatccataagccatgctt

SEQ ID NO: 94397 - DNA, 27 bp, Artificial sequence
  SiRNA target sequence
tttagaaatatccataagccatgcttt

SEQ ID NO: 94398 - DNA, 27 bp, Artificial sequence
  SiRNA target sequence
ttagaaatatccataagccatgctttt

SEQ ID NO: 94399 - DNA, 27 bp, Artificial sequence
  SiRNA target sequence
tagaaatatccataagccatgcttttt

SEQ ID NO: 94400 - DNA, 27 bp, Artificial sequence
  SiRNA target sequence
agaaatatccataagccatgctttttt

SEQ ID NO: 94401 - DNA, 27 bp, Artificial sequence
  SiRNA target sequence
gaaatatccataagccatgctttttta

SEQ ID NO: 94402 - DNA, 27 bp, Artificial sequence
  SiRNA target sequence
aaatatccataagccatgcttttttag

SEQ ID NO: 94403 - DNA, 27 bp, Artificial sequence
  SiRNA target sequence
aatatccataagccatgcttttttagg

SEQ ID NO: 94404 - DNA, 27 bp, Artificial sequence
  SiRNA target sequence
atatccataagccatgcttttttaggc

SEQ ID NO: 94405 - DNA, 27 bp, Artificial sequence
  SiRNA target sequence
tatccataagccatgcttttttaggca

SEQ ID NO: 94406 - DNA, 27 bp, Artificial sequence
  SiRNA target sequence
atccataagccatgcttttttaggcaa

SEQ ID NO: 94407 - DNA, 27 bp, Artificial sequence
  SiRNA target sequence
tccataagccatgcttttttaggcaat

SEQ ID NO: 94408 - DNA, 27 bp, Artificial sequence
  SiRNA target sequence
ccataagccatgcttttttaggcaatg

SEQ ID NO: 94409 - DNA, 27 bp, Artificial sequence
  SiRNA target sequence
cataagccatgcttttttaggcaatga

SEQ ID NO: 94410 - DNA, 27 bp, Artificial sequence
  SiRNA target sequence
ataagccatgcttttttaggcaatgaa

SEQ ID NO: 94411 - DNA, 27 bp, Artificial sequence
  SiRNA target sequence
taagccatgcttttttaggcaatgaag

SEQ ID NO: 94412 - DNA, 27 bp, Artificial sequence
  SiRNA target sequence
aagccatgcttttttaggcaatgaagt

SEQ ID NO: 94413 - DNA, 27 bp, Artificial sequence
  SiRNA target sequence
agccatgcttttttaggcaatgaagta

SEQ ID NO: 94414 - DNA, 27 bp, Artificial sequence
  SiRNA target sequence
gccatgcttttttaggcaatgaagtaa

SEQ ID NO: 94415 - DNA, 27 bp, Artificial sequence
  SiRNA target sequence
ccatgcttttttaggcaatgaagtaaa

SEQ ID NO: 94416 - DNA, 27 bp, Artificial sequence
  SiRNA target sequence
catgcttttttaggcaatgaagtaaaa

SEQ ID NO: 94417 - DNA, 27 bp, Artificial sequence
  SiRNA target sequence
atgcttttttaggcaatgaagtaaaat

SEQ ID NO: 94418 - DNA, 27 bp, Artificial sequence
  SiRNA target sequence
tgcttttttaggcaatgaagtaaaatc

SEQ ID NO: 94419 - DNA, 27 bp, Artificial sequence
  SiRNA target sequence
gcttttttaggcaatgaagtaaaatca

SEQ ID NO: 94420 - DNA, 27 bp, Artificial sequence
  SiRNA target sequence
cttttttaggcaatgaagtaaaatcaa

SEQ ID NO: 94421 - DNA, 27 bp, Artificial sequence
  SiRNA target sequence
ttttttaggcaatgaagtaaaatcaaa

SEQ ID NO: 94422 - DNA, 27 bp, Artificial sequence
  SiRNA target sequence
tttttaggcaatgaagtaaaatcaaaa

SEQ ID NO: 94423 - DNA, 27 bp, Artificial sequence
  SiRNA target sequence
ttttaggcaatgaagtaaaatcaaaaa

SEQ ID NO: 94424 - DNA, 27 bp, Artificial sequence
  SiRNA target sequence
tttaggcaatgaagtaaaatcaaaaat

SEQ ID NO: 94425 - DNA, 27 bp, Artificial sequence
  SiRNA target sequence
ttaggcaatgaagtaaaatcaaaaata

SEQ ID NO: 94426 - DNA, 27 bp, Artificial sequence
  SiRNA target sequence
taggcaatgaagtaaaatcaaaaatat

SEQ ID NO: 94427 - DNA, 27 bp, Artificial sequence
  SiRNA target sequence
aggcaatgaagtaaaatcaaaaatata

SEQ ID NO: 94428 - DNA, 27 bp, Artificial sequence
  SiRNA target sequence
ggcaatgaagtaaaatcaaaaatatac

SEQ ID NO: 94429 - DNA, 27 bp, Artificial sequence
  SiRNA target sequence
gcaatgaagtaaaatcaaaaatatact

SEQ ID NO: 94430 - DNA, 27 bp, Artificial sequence
  SiRNA target sequence
caatgaagtaaaatcaaaaatatactt

SEQ ID NO: 94431 - DNA, 27 bp, Artificial sequence
  SiRNA target sequence
aatgaagtaaaatcaaaaatatacttg

SEQ ID NO: 94432 - DNA, 27 bp, Artificial sequence
  SiRNA target sequence
atgaagtaaaatcaaaaatatacttga

SEQ ID NO: 94433 - DNA, 27 bp, Artificial sequence
  SiRNA target sequence
tgaagtaaaatcaaaaatatacttgaa

SEQ ID NO: 94434 - DNA, 27 bp, Artificial sequence
  SiRNA target sequence
gaagtaaaatcaaaaatatacttgaaa

SEQ ID NO: 94435 - DNA, 27 bp, Artificial sequence
  SiRNA target sequence
aagtaaaatcaaaaatatacttgaaaa

SEQ ID NO: 94436 - DNA, 27 bp, Artificial sequence
  SiRNA target sequence
agtaaaatcaaaaatatacttgaaaaa

SEQ ID NO: 94437 - DNA, 27 bp, Artificial sequence
  SiRNA target sequence
gtaaaatcaaaaatatacttgaaaaag

SEQ ID NO: 94438 - DNA, 27 bp, Artificial sequence
  SiRNA target sequence
taaaatcaaaaatatacttgaaaaagt

SEQ ID NO: 94439 - DNA, 27 bp, Artificial sequence
  SiRNA target sequence
aaaatcaaaaatatacttgaaaaagtc

SEQ ID NO: 94440 - DNA, 27 bp, Artificial sequence
  SiRNA target sequence
aaatcaaaaatatacttgaaaaagtca

SEQ ID NO: 94441 - DNA, 27 bp, Artificial sequence
  SiRNA target sequence
aatcaaaaatatacttgaaaaagtcac

SEQ ID NO: 94442 - DNA, 27 bp, Artificial sequence
  SiRNA target sequence
atcaaaaatatacttgaaaaagtcacg

SEQ ID NO: 94443 - DNA, 27 bp, Artificial sequence
  SiRNA target sequence
tcaaaaatatacttgaaaaagtcacgc

SEQ ID NO: 94444 - DNA, 27 bp, Artificial sequence
  SiRNA target sequence
caaaaatatacttgaaaaagtcacgca

SEQ ID NO: 94445 - DNA, 27 bp, Artificial sequence
  SiRNA target sequence
aaaaatatacttgaaaaagtcacgcaa

SEQ ID NO: 94446 - DNA, 27 bp, Artificial sequence
  SiRNA target sequence
aaaatatacttgaaaaagtcacgcaaa

SEQ ID NO: 94447 - DNA, 27 bp, Artificial sequence
  SiRNA target sequence
aaatatacttgaaaaagtcacgcaaag

SEQ ID NO: 94448 - DNA, 27 bp, Artificial sequence
  SiRNA target sequence
aatatacttgaaaaagtcacgcaaaga

SEQ ID NO: 94449 - DNA, 27 bp, Artificial sequence
  SiRNA target sequence
atatacttgaaaaagtcacgcaaagat

SEQ ID NO: 94450 - DNA, 27 bp, Artificial sequence
  SiRNA target sequence
tatacttgaaaaagtcacgcaaagatc

SEQ ID NO: 94451 - DNA, 27 bp, Artificial sequence
  SiRNA target sequence
atacttgaaaaagtcacgcaaagatcc

SEQ ID NO: 94452 - DNA, 27 bp, Artificial sequence
  SiRNA target sequence
tacttgaaaaagtcacgcaaagatcct

SEQ ID NO: 94453 - DNA, 27 bp, Artificial sequence
  SiRNA target sequence
acttgaaaaagtcacgcaaagatcctt

SEQ ID NO: 94454 - DNA, 27 bp, Artificial sequence
  SiRNA target sequence
cttgaaaaagtcacgcaaagatccttc

SEQ ID NO: 94455 - DNA, 27 bp, Artificial sequence
  SiRNA target sequence
ttgaaaaagtcacgcaaagatccttcg

SEQ ID NO: 94456 - DNA, 27 bp, Artificial sequence
  SiRNA target sequence
tgaaaaagtcacgcaaagatccttcga

SEQ ID NO: 94457 - DNA, 27 bp, Artificial sequence
  SiRNA target sequence
gaaaaagtcacgcaaagatccttcgaa

SEQ ID NO: 94458 - DNA, 27 bp, Artificial sequence
  SiRNA target sequence
aaaaagtcacgcaaagatccttcgaat

SEQ ID NO: 94459 - DNA, 27 bp, Artificial sequence
  SiRNA target sequence
aaaagtcacgcaaagatccttcgaatt

SEQ ID NO: 94460 - DNA, 27 bp, Artificial sequence
  SiRNA target sequence
aaagtcacgcaaagatccttcgaattg

SEQ ID NO: 94461 - DNA, 27 bp, Artificial sequence
  SiRNA target sequence
aagtcacgcaaagatccttcgaattga

SEQ ID NO: 94462 - DNA, 27 bp, Artificial sequence
  SiRNA target sequence
agtcacgcaaagatccttcgaattgaa

SEQ ID NO: 94463 - DNA, 27 bp, Artificial sequence
  SiRNA target sequence
gtcacgcaaagatccttcgaattgaaa

SEQ ID NO: 94464 - DNA, 27 bp, Artificial sequence
  SiRNA target sequence
tcacgcaaagatccttcgaattgaaac

SEQ ID NO: 94465 - DNA, 27 bp, Artificial sequence
  SiRNA target sequence
cacgcaaagatccttcgaattgaaacc

SEQ ID NO: 94466 - DNA, 27 bp, Artificial sequence
  SiRNA target sequence
acgcaaagatccttcgaattgaaaccc

SEQ ID NO: 94467 - DNA, 27 bp, Artificial sequence
  SiRNA target sequence
cgcaaagatccttcgaattgaaacccc

SEQ ID NO: 94468 - DNA, 27 bp, Artificial sequence
  SiRNA target sequence
gcaaagatccttcgaattgaaaccccg

SEQ ID NO: 94469 - DNA, 27 bp, Artificial sequence
  SiRNA target sequence
caaagatccttcgaattgaaaccccgt

SEQ ID NO: 94470 - DNA, 27 bp, Artificial sequence
  SiRNA target sequence
aaagatccttcgaattgaaaccccgtt

SEQ ID NO: 94471 - DNA, 27 bp, Artificial sequence
  SiRNA target sequence
aagatccttcgaattgaaaccccgttt

SEQ ID NO: 94472 - DNA, 27 bp, Artificial sequence
  SiRNA target sequence
agatccttcgaattgaaaccccgtttt

SEQ ID NO: 94473 - DNA, 27 bp, Artificial sequence
  SiRNA target sequence
gatccttcgaattgaaaccccgttttt

SEQ ID NO: 94474 - DNA, 27 bp, Artificial sequence
  SiRNA target sequence
atccttcgaattgaaaccccgtttttc

SEQ ID NO: 94475 - DNA, 27 bp, Artificial sequence
  SiRNA target sequence
tccttcgaattgaaaccccgtttttcc

SEQ ID NO: 94476 - DNA, 27 bp, Artificial sequence
  SiRNA target sequence
ccttcgaattgaaaccccgtttttcca

SEQ ID NO: 94477 - DNA, 27 bp, Artificial sequence
  SiRNA target sequence
cttcgaattgaaaccccgtttttccaa

SEQ ID NO: 94478 - DNA, 27 bp, Artificial sequence
  SiRNA target sequence
ttcgaattgaaaccccgtttttccaac

SEQ ID NO: 94479 - DNA, 27 bp, Artificial sequence
  SiRNA target sequence
tcgaattgaaaccccgtttttccaact

SEQ ID NO: 94480 - DNA, 27 bp, Artificial sequence
  SiRNA target sequence
cgaattgaaaccccgtttttccaactt

SEQ ID NO: 94481 - DNA, 27 bp, Artificial sequence
  SiRNA target sequence
gaattgaaaccccgtttttccaacttg

SEQ ID NO: 94482 - DNA, 27 bp, Artificial sequence
  SiRNA target sequence
aattgaaaccccgtttttccaacttgc

SEQ ID NO: 94483 - DNA, 27 bp, Artificial sequence
  SiRNA target sequence
attgaaaccccgtttttccaacttgct

SEQ ID NO: 94484 - DNA, 27 bp, Artificial sequence
  SiRNA target sequence
ttgaaaccccgtttttccaacttgctc

SEQ ID NO: 94485 - DNA, 27 bp, Artificial sequence
  SiRNA target sequence
tgaaaccccgtttttccaacttgctca

SEQ ID NO: 94486 - DNA, 27 bp, Artificial sequence
  SiRNA target sequence
gaaaccccgtttttccaacttgctcaa

SEQ ID NO: 94487 - DNA, 27 bp, Artificial sequence
  SiRNA target sequence
aaaccccgtttttccaacttgctcaat

SEQ ID NO: 94488 - DNA, 27 bp, Artificial sequence
  SiRNA target sequence
aaccccgtttttccaacttgctcaata

SEQ ID NO: 94489 - DNA, 27 bp, Artificial sequence
  SiRNA target sequence
accccgtttttccaacttgctcaatat

SEQ ID NO: 94490 - DNA, 27 bp, Artificial sequence
  SiRNA target sequence
ccccgtttttccaacttgctcaatata

SEQ ID NO: 94491 - DNA, 27 bp, Artificial sequence
  SiRNA target sequence
cccgtttttccaacttgctcaatatat

SEQ ID NO: 94492 - DNA, 27 bp, Artificial sequence
  SiRNA target sequence
ccgtttttccaacttgctcaatatata

SEQ ID NO: 94493 - DNA, 27 bp, Artificial sequence
  SiRNA target sequence
cgtttttccaacttgctcaatatataa

SEQ ID NO: 94494 - DNA, 27 bp, Artificial sequence
  SiRNA target sequence
gtttttccaacttgctcaatatataat

SEQ ID NO: 94495 - DNA, 27 bp, Artificial sequence
  SiRNA target sequence
tttttccaacttgctcaatatataata

SEQ ID NO: 94496 - DNA, 27 bp, Artificial sequence
  SiRNA target sequence
ttttccaacttgctcaatatataataa

SEQ ID NO: 94497 - DNA, 27 bp, Artificial sequence
  SiRNA target sequence
tttccaacttgctcaatatataataat

SEQ ID NO: 94498 - DNA, 27 bp, Artificial sequence
  SiRNA target sequence
ttccaacttgctcaatatataataatg

SEQ ID NO: 94499 - DNA, 27 bp, Artificial sequence
  SiRNA target sequence
tccaacttgctcaatatataataatgt

SEQ ID NO: 94500 - DNA, 27 bp, Artificial sequence
  SiRNA target sequence
ccaacttgctcaatatataataatgta

SEQ ID NO: 94501 - DNA, 27 bp, Artificial sequence
  SiRNA target sequence
caacttgctcaatatataataatgtat

SEQ ID NO: 94502 - DNA, 27 bp, Artificial sequence
  SiRNA target sequence
aacttgctcaatatataataatgtatc

SEQ ID NO: 94503 - DNA, 27 bp, Artificial sequence
  SiRNA target sequence
acttgctcaatatataataatgtatca

SEQ ID NO: 94504 - DNA, 27 bp, Artificial sequence
  SiRNA target sequence
cttgctcaatatataataatgtatcac

SEQ ID NO: 94505 - DNA, 27 bp, Artificial sequence
  SiRNA target sequence
ttgctcaatatataataatgtatcacc

SEQ ID NO: 94506 - DNA, 27 bp, Artificial sequence
  SiRNA target sequence
tgctcaatatataataatgtatcacca

SEQ ID NO: 94507 - DNA, 27 bp, Artificial sequence
  SiRNA target sequence
gctcaatatataataatgtatcaccag

SEQ ID NO: 94508 - DNA, 27 bp, Artificial sequence
  SiRNA target sequence
ctcaatatataataatgtatcaccaga

SEQ ID NO: 94509 - DNA, 27 bp, Artificial sequence
  SiRNA target sequence
tcaatatataataatgtatcaccagac

SEQ ID NO: 94510 - DNA, 27 bp, Artificial sequence
  SiRNA target sequence
caatatataataatgtatcaccagaca

SEQ ID NO: 94511 - DNA, 27 bp, Artificial sequence
  SiRNA target sequence
aatatataataatgtatcaccagacat

SEQ ID NO: 94512 - DNA, 27 bp, Artificial sequence
  SiRNA target sequence
atatataataatgtatcaccagacatt

SEQ ID NO: 94513 - DNA, 27 bp, Artificial sequence
  SiRNA target sequence
tatataataatgtatcaccagacattt

SEQ ID NO: 94514 - DNA, 27 bp, Artificial sequence
  SiRNA target sequence
atataataatgtatcaccagacatttc

SEQ ID NO: 94515 - DNA, 27 bp, Artificial sequence
  SiRNA target sequence
tataataatgtatcaccagacatttct

SEQ ID NO: 94516 - DNA, 27 bp, Artificial sequence
  SiRNA target sequence
ataataatgtatcaccagacatttcta

SEQ ID NO: 94517 - DNA, 27 bp, Artificial sequence
  SiRNA target sequence
taataatgtatcaccagacatttctag

SEQ ID NO: 94518 - DNA, 27 bp, Artificial sequence
  SiRNA target sequence
aataatgtatcaccagacatttctagt

SEQ ID NO: 94519 - DNA, 27 bp, Artificial sequence
  SiRNA target sequence
ataatgtatcaccagacatttctagta

SEQ ID NO: 94520 - DNA, 27 bp, Artificial sequence
  SiRNA target sequence
taatgtatcaccagacatttctagtaa

SEQ ID NO: 94521 - DNA, 27 bp, Artificial sequence
  SiRNA target sequence
aatgtatcaccagacatttctagtaaa

SEQ ID NO: 94522 - DNA, 27 bp, Artificial sequence
  SiRNA target sequence
atgtatcaccagacatttctagtaaac

SEQ ID NO: 94523 - DNA, 27 bp, Artificial sequence
  SiRNA target sequence
tgtatcaccagacatttctagtaaact

SEQ ID NO: 94524 - DNA, 27 bp, Artificial sequence
  SiRNA target sequence
gtatcaccagacatttctagtaaactt

SEQ ID NO: 94525 - DNA, 27 bp, Artificial sequence
  SiRNA target sequence
tatcaccagacatttctagtaaactta

SEQ ID NO: 94526 - DNA, 27 bp, Artificial sequence
  SiRNA target sequence
atcaccagacatttctagtaaacttaa

SEQ ID NO: 94527 - DNA, 27 bp, Artificial sequence
  SiRNA target sequence
tcaccagacatttctagtaaacttaac

SEQ ID NO: 94528 - DNA, 27 bp, Artificial sequence
  SiRNA target sequence
caccagacatttctagtaaacttaaca

SEQ ID NO: 94529 - DNA, 27 bp, Artificial sequence
  SiRNA target sequence
accagacatttctagtaaacttaacat

SEQ ID NO: 94530 - DNA, 27 bp, Artificial sequence
  SiRNA target sequence
ccagacatttctagtaaacttaacatt

SEQ ID NO: 94531 - DNA, 27 bp, Artificial sequence
  SiRNA target sequence
cagacatttctagtaaacttaacattt

SEQ ID NO: 94532 - DNA, 27 bp, Artificial sequence
  SiRNA target sequence
agacatttctagtaaacttaacatttc

SEQ ID NO: 94533 - DNA, 27 bp, Artificial sequence
  SiRNA target sequence
gacatttctagtaaacttaacatttca

SEQ ID NO: 94534 - DNA, 27 bp, Artificial sequence
  SiRNA target sequence
acatttctagtaaacttaacatttcat

SEQ ID NO: 94535 - DNA, 27 bp, Artificial sequence
  SiRNA target sequence
catttctagtaaacttaacatttcatt

SEQ ID NO: 94536 - DNA, 27 bp, Artificial sequence
  SiRNA target sequence
atttctagtaaacttaacatttcatta

SEQ ID NO: 94537 - DNA, 27 bp, Artificial sequence
  SiRNA target sequence
tttctagtaaacttaacatttcattaa

SEQ ID NO: 94538 - DNA, 27 bp, Artificial sequence
  SiRNA target sequence
ttctagtaaacttaacatttcattaac

SEQ ID NO: 94539 - DNA, 27 bp, Artificial sequence
  SiRNA target sequence
tctagtaaacttaacatttcattaaca

SEQ ID NO: 94540 - DNA, 27 bp, Artificial sequence
  SiRNA target sequence
ctagtaaacttaacatttcattaacaa

SEQ ID NO: 94541 - DNA, 27 bp, Artificial sequence
  SiRNA target sequence
tagtaaacttaacatttcattaacaag

SEQ ID NO: 94542 - DNA, 27 bp, Artificial sequence
  SiRNA target sequence
agtaaacttaacatttcattaacaagc

SEQ ID NO: 94543 - DNA, 27 bp, Artificial sequence
  SiRNA target sequence
gtaaacttaacatttcattaacaagca

SEQ ID NO: 94544 - DNA, 27 bp, Artificial sequence
  SiRNA target sequence
taaacttaacatttcattaacaagcaa

SEQ ID NO: 94545 - DNA, 27 bp, Artificial sequence
  SiRNA target sequence
aaacttaacatttcattaacaagcaaa

SEQ ID NO: 94546 - DNA, 27 bp, Artificial sequence
  SiRNA target sequence
aacttaacatttcattaacaagcaaat

SEQ ID NO: 94547 - DNA, 27 bp, Artificial sequence
  SiRNA target sequence
acttaacatttcattaacaagcaaatc

SEQ ID NO: 94548 - DNA, 27 bp, Artificial sequence
  SiRNA target sequence
cttaacatttcattaacaagcaaatca

SEQ ID NO: 94549 - DNA, 27 bp, Artificial sequence
  SiRNA target sequence
ttaacatttcattaacaagcaaatcat

SEQ ID NO: 94550 - DNA, 27 bp, Artificial sequence
  SiRNA target sequence
taacatttcattaacaagcaaatcatt

SEQ ID NO: 94551 - DNA, 27 bp, Artificial sequence
  SiRNA target sequence
aacatttcattaacaagcaaatcatta

SEQ ID NO: 94552 - DNA, 27 bp, Artificial sequence
  SiRNA target sequence
acatttcattaacaagcaaatcattat

SEQ ID NO: 94553 - DNA, 27 bp, Artificial sequence
  SiRNA target sequence
catttcattaacaagcaaatcattatt

SEQ ID NO: 94554 - DNA, 27 bp, Artificial sequence
  SiRNA target sequence
atttcattaacaagcaaatcattattt

SEQ ID NO: 94555 - DNA, 27 bp, Artificial sequence
  SiRNA target sequence
tttcattaacaagcaaatcattatttg

SEQ ID NO: 94556 - DNA, 27 bp, Artificial sequence
  SiRNA target sequence
ttcattaacaagcaaatcattatttga

SEQ ID NO: 94557 - DNA, 27 bp, Artificial sequence
  SiRNA target sequence
tcattaacaagcaaatcattatttgaa

SEQ ID NO: 94558 - DNA, 27 bp, Artificial sequence
  SiRNA target sequence
cattaacaagcaaatcattatttgaac

SEQ ID NO: 94559 - DNA, 27 bp, Artificial sequence
  SiRNA target sequence
attaacaagcaaatcattatttgaaca

SEQ ID NO: 94560 - DNA, 27 bp, Artificial sequence
  SiRNA target sequence
ttaacaagcaaatcattatttgaacaa

SEQ ID NO: 94561 - DNA, 27 bp, Artificial sequence
  SiRNA target sequence
taacaagcaaatcattatttgaacaaa

SEQ ID NO: 94562 - DNA, 27 bp, Artificial sequence
  SiRNA target sequence
aacaagcaaatcattatttgaacaaag

SEQ ID NO: 94563 - DNA, 27 bp, Artificial sequence
  SiRNA target sequence
acaagcaaatcattatttgaacaaagt

SEQ ID NO: 94564 - DNA, 27 bp, Artificial sequence
  SiRNA target sequence
caagcaaatcattatttgaacaaagta

SEQ ID NO: 94565 - DNA, 27 bp, Artificial sequence
  SiRNA target sequence
aagcaaatcattatttgaacaaagtag

SEQ ID NO: 94566 - DNA, 27 bp, Artificial sequence
  SiRNA target sequence
agcaaatcattatttgaacaaagtaga

SEQ ID NO: 94567 - DNA, 27 bp, Artificial sequence
  SiRNA target sequence
gcaaatcattatttgaacaaagtagac

SEQ ID NO: 94568 - DNA, 27 bp, Artificial sequence
  SiRNA target sequence
caaatcattatttgaacaaagtagacc

SEQ ID NO: 94569 - DNA, 27 bp, Artificial sequence
  SiRNA target sequence
aaatcattatttgaacaaagtagacca

SEQ ID NO: 94570 - DNA, 27 bp, Artificial sequence
  SiRNA target sequence
aatcattatttgaacaaagtagaccaa

SEQ ID NO: 94571 - DNA, 27 bp, Artificial sequence
  SiRNA target sequence
atcattatttgaacaaagtagaccaat

SEQ ID NO: 94572 - DNA, 27 bp, Artificial sequence
  SiRNA target sequence
tcattatttgaacaaagtagaccaata

SEQ ID NO: 94573 - DNA, 27 bp, Artificial sequence
  SiRNA target sequence
cattatttgaacaaagtagaccaatac

SEQ ID NO: 94574 - DNA, 27 bp, Artificial sequence
  SiRNA target sequence
attatttgaacaaagtagaccaatact

SEQ ID NO: 94575 - DNA, 27 bp, Artificial sequence
  SiRNA target sequence
ttatttgaacaaagtagaccaatacta

SEQ ID NO: 94576 - DNA, 27 bp, Artificial sequence
  SiRNA target sequence
tatttgaacaaagtagaccaatactat

SEQ ID NO: 94577 - DNA, 27 bp, Artificial sequence
  SiRNA target sequence
atttgaacaaagtagaccaatactatc

SEQ ID NO: 94578 - DNA, 27 bp, Artificial sequence
  SiRNA target sequence
tttgaacaaagtagaccaatactatca

SEQ ID NO: 94579 - DNA, 27 bp, Artificial sequence
  SiRNA target sequence
ttgaacaaagtagaccaatactatcac

SEQ ID NO: 94580 - DNA, 27 bp, Artificial sequence
  SiRNA target sequence
tgaacaaagtagaccaatactatcacc

SEQ ID NO: 94581 - DNA, 27 bp, Artificial sequence
  SiRNA target sequence
gaacaaagtagaccaatactatcacca

SEQ ID NO: 94582 - DNA, 27 bp, Artificial sequence
  SiRNA target sequence
aacaaagtagaccaatactatcaccag

SEQ ID NO: 94583 - DNA, 27 bp, Artificial sequence
  SiRNA target sequence
acaaagtagaccaatactatcaccagg

SEQ ID NO: 94584 - DNA, 27 bp, Artificial sequence
  SiRNA target sequence
caaagtagaccaatactatcaccagga

SEQ ID NO: 94585 - DNA, 27 bp, Artificial sequence
  SiRNA target sequence
aaagtagaccaatactatcaccaggaa

SEQ ID NO: 94586 - DNA, 27 bp, Artificial sequence
  SiRNA target sequence
aagtagaccaatactatcaccaggaac

SEQ ID NO: 94587 - DNA, 27 bp, Artificial sequence
  SiRNA target sequence
agtagaccaatactatcaccaggaaca

SEQ ID NO: 94588 - DNA, 27 bp, Artificial sequence
  SiRNA target sequence
gtagaccaatactatcaccaggaacaa

SEQ ID NO: 94589 - DNA, 27 bp, Artificial sequence
  SiRNA target sequence
tagaccaatactatcaccaggaacaaa

SEQ ID NO: 94590 - DNA, 27 bp, Artificial sequence
  SiRNA target sequence
agaccaatactatcaccaggaacaaaa

SEQ ID NO: 94591 - DNA, 27 bp, Artificial sequence
  SiRNA target sequence
gaccaatactatcaccaggaacaaaat

SEQ ID NO: 94592 - DNA, 27 bp, Artificial sequence
  SiRNA target sequence
accaatactatcaccaggaacaaaatc

SEQ ID NO: 94593 - DNA, 27 bp, Artificial sequence
  SiRNA target sequence
ccaatactatcaccaggaacaaaatct

SEQ ID NO: 94594 - DNA, 27 bp, Artificial sequence
  SiRNA target sequence
caatactatcaccaggaacaaaatcta

SEQ ID NO: 94595 - DNA, 27 bp, Artificial sequence
  SiRNA target sequence
aatactatcaccaggaacaaaatctaa

SEQ ID NO: 94596 - DNA, 27 bp, Artificial sequence
  SiRNA target sequence
atactatcaccaggaacaaaatctaat

SEQ ID NO: 94597 - DNA, 27 bp, Artificial sequence
  SiRNA target sequence
tactatcaccaggaacaaaatctaatg

SEQ ID NO: 94598 - DNA, 27 bp, Artificial sequence
  SiRNA target sequence
actatcaccaggaacaaaatctaatgt

SEQ ID NO: 94599 - DNA, 27 bp, Artificial sequence
  SiRNA target sequence
ctatcaccaggaacaaaatctaatgta

SEQ ID NO: 94600 - DNA, 27 bp, Artificial sequence
  SiRNA target sequence
tatcaccaggaacaaaatctaatgtat

SEQ ID NO: 94601 - DNA, 27 bp, Artificial sequence
  SiRNA target sequence
atcaccaggaacaaaatctaatgtata

SEQ ID NO: 94602 - DNA, 27 bp, Artificial sequence
  SiRNA target sequence
tcaccaggaacaaaatctaatgtataa

SEQ ID NO: 94603 - DNA, 27 bp, Artificial sequence
  SiRNA target sequence
caccaggaacaaaatctaatgtataat

SEQ ID NO: 94604 - DNA, 27 bp, Artificial sequence
  SiRNA target sequence
accaggaacaaaatctaatgtataatt

SEQ ID NO: 94605 - DNA, 27 bp, Artificial sequence
  SiRNA target sequence
ccaggaacaaaatctaatgtataatta

SEQ ID NO: 94606 - DNA, 27 bp, Artificial sequence
  SiRNA target sequence
caggaacaaaatctaatgtataattaa

SEQ ID NO: 94607 - DNA, 27 bp, Artificial sequence
  SiRNA target sequence
aggaacaaaatctaatgtataattaag

SEQ ID NO: 94608 - DNA, 27 bp, Artificial sequence
  SiRNA target sequence
ggaacaaaatctaatgtataattaagt

SEQ ID NO: 94609 - DNA, 27 bp, Artificial sequence
  SiRNA target sequence
gaacaaaatctaatgtataattaagtt

SEQ ID NO: 94610 - DNA, 27 bp, Artificial sequence
  SiRNA target sequence
aacaaaatctaatgtataattaagttg

SEQ ID NO: 94611 - DNA, 27 bp, Artificial sequence
  SiRNA target sequence
acaaaatctaatgtataattaagttga

SEQ ID NO: 94612 - DNA, 27 bp, Artificial sequence
  SiRNA target sequence
caaaatctaatgtataattaagttgaa

SEQ ID NO: 94613 - DNA, 27 bp, Artificial sequence
  SiRNA target sequence
aaaatctaatgtataattaagttgaac

SEQ ID NO: 94614 - DNA, 27 bp, Artificial sequence
  SiRNA target sequence
aaatctaatgtataattaagttgaacc

SEQ ID NO: 94615 - DNA, 27 bp, Artificial sequence
  SiRNA target sequence
aatctaatgtataattaagttgaacct

SEQ ID NO: 94616 - DNA, 27 bp, Artificial sequence
  SiRNA target sequence
atctaatgtataattaagttgaacctt

SEQ ID NO: 94617 - DNA, 27 bp, Artificial sequence
  SiRNA target sequence
tctaatgtataattaagttgaacctta

SEQ ID NO: 94618 - DNA, 27 bp, Artificial sequence
  SiRNA target sequence
ctaatgtataattaagttgaaccttat

SEQ ID NO: 94619 - DNA, 27 bp, Artificial sequence
  SiRNA target sequence
taatgtataattaagttgaaccttata

SEQ ID NO: 94620 - DNA, 27 bp, Artificial sequence
  SiRNA target sequence
aatgtataattaagttgaaccttatat

SEQ ID NO: 94621 - DNA, 27 bp, Artificial sequence
  SiRNA target sequence
atgtataattaagttgaaccttatata

SEQ ID NO: 94622 - DNA, 27 bp, Artificial sequence
  SiRNA target sequence
tgtataattaagttgaaccttatatac

SEQ ID NO: 94623 - DNA, 27 bp, Artificial sequence
  SiRNA target sequence
gtataattaagttgaaccttatatacc

SEQ ID NO: 94624 - DNA, 27 bp, Artificial sequence
  SiRNA target sequence
tataattaagttgaaccttatatacct

SEQ ID NO: 94625 - DNA, 27 bp, Artificial sequence
  SiRNA target sequence
ataattaagttgaaccttatatacctt

SEQ ID NO: 94626 - DNA, 27 bp, Artificial sequence
  SiRNA target sequence
taattaagttgaaccttatataccttt

SEQ ID NO: 94627 - DNA, 27 bp, Artificial sequence
  SiRNA target sequence
aattaagttgaaccttatatacctttt

SEQ ID NO: 94628 - DNA, 27 bp, Artificial sequence
  SiRNA target sequence
attaagttgaaccttatataccttttt

SEQ ID NO: 94629 - DNA, 27 bp, Artificial sequence
  SiRNA target sequence
ttaagttgaaccttatatacctttttc

SEQ ID NO: 94630 - DNA, 27 bp, Artificial sequence
  SiRNA target sequence
taagttgaaccttatatacctttttcc

SEQ ID NO: 94631 - DNA, 27 bp, Artificial sequence
  SiRNA target sequence
aagttgaaccttatatacctttttcca

SEQ ID NO: 94632 - DNA, 27 bp, Artificial sequence
  SiRNA target sequence
agttgaaccttatatacctttttccat

SEQ ID NO: 94633 - DNA, 27 bp, Artificial sequence
  SiRNA target sequence
gttgaaccttatatacctttttccatg

SEQ ID NO: 94634 - DNA, 27 bp, Artificial sequence
  SiRNA target sequence
ttgaaccttatatacctttttccatgt

SEQ ID NO: 94635 - DNA, 27 bp, Artificial sequence
  SiRNA target sequence
tgaaccttatatacctttttccatgta

SEQ ID NO: 94636 - DNA, 27 bp, Artificial sequence
  SiRNA target sequence
gaaccttatatacctttttccatgtac

SEQ ID NO: 94637 - DNA, 27 bp, Artificial sequence
  SiRNA target sequence
aaccttatatacctttttccatgtaca

SEQ ID NO: 94638 - DNA, 27 bp, Artificial sequence
  SiRNA target sequence
accttatatacctttttccatgtacag

SEQ ID NO: 94639 - DNA, 27 bp, Artificial sequence
  SiRNA target sequence
ccttatatacctttttccatgtacagg

SEQ ID NO: 94640 - DNA, 27 bp, Artificial sequence
  SiRNA target sequence
cttatatacctttttccatgtacagga

SEQ ID NO: 94641 - DNA, 27 bp, Artificial sequence
  SiRNA target sequence
ttatatacctttttccatgtacaggaa

SEQ ID NO: 94642 - DNA, 27 bp, Artificial sequence
  SiRNA target sequence
tatatacctttttccatgtacaggaaa

SEQ ID NO: 94643 - DNA, 27 bp, Artificial sequence
  SiRNA target sequence
atatacctttttccatgtacaggaaag

SEQ ID NO: 94644 - DNA, 27 bp, Artificial sequence
  SiRNA target sequence
tatacctttttccatgtacaggaaagg

SEQ ID NO: 94645 - DNA, 27 bp, Artificial sequence
  SiRNA target sequence
atacctttttccatgtacaggaaaggt

SEQ ID NO: 94646 - DNA, 27 bp, Artificial sequence
  SiRNA target sequence
tacctttttccatgtacaggaaaggtt

SEQ ID NO: 94647 - DNA, 27 bp, Artificial sequence
  SiRNA target sequence
acctttttccatgtacaggaaaggttt

SEQ ID NO: 94648 - DNA, 27 bp, Artificial sequence
  SiRNA target sequence
cctttttccatgtacaggaaaggtttt

SEQ ID NO: 94649 - DNA, 27 bp, Artificial sequence
  SiRNA target sequence
ctttttccatgtacaggaaaggttttc

SEQ ID NO: 94650 - DNA, 27 bp, Artificial sequence
  SiRNA target sequence
tttttccatgtacaggaaaggttttca

SEQ ID NO: 94651 - DNA, 27 bp, Artificial sequence
  SiRNA target sequence
ttttccatgtacaggaaaggttttcaa

SEQ ID NO: 94652 - DNA, 27 bp, Artificial sequence
  SiRNA target sequence
tttccatgtacaggaaaggttttcaat

SEQ ID NO: 94653 - DNA, 27 bp, Artificial sequence
  SiRNA target sequence
ttccatgtacaggaaaggttttcaata

SEQ ID NO: 94654 - DNA, 27 bp, Artificial sequence
  SiRNA target sequence
tccatgtacaggaaaggttttcaatat

SEQ ID NO: 94655 - DNA, 27 bp, Artificial sequence
  SiRNA target sequence
ccatgtacaggaaaggttttcaatatt

SEQ ID NO: 94656 - DNA, 27 bp, Artificial sequence
  SiRNA target sequence
catgtacaggaaaggttttcaatattt

SEQ ID NO: 94657 - DNA, 27 bp, Artificial sequence
  SiRNA target sequence
atgtacaggaaaggttttcaatattta

SEQ ID NO: 94658 - DNA, 27 bp, Artificial sequence
  SiRNA target sequence
tgtacaggaaaggttttcaatatttag

SEQ ID NO: 94659 - DNA, 27 bp, Artificial sequence
  SiRNA target sequence
gtacaggaaaggttttcaatatttagt

SEQ ID NO: 94660 - DNA, 27 bp, Artificial sequence
  SiRNA target sequence
tacaggaaaggttttcaatatttagta

SEQ ID NO: 94661 - DNA, 27 bp, Artificial sequence
  SiRNA target sequence
acaggaaaggttttcaatatttagtat

SEQ ID NO: 94662 - DNA, 27 bp, Artificial sequence
  SiRNA target sequence
caggaaaggttttcaatatttagtata

SEQ ID NO: 94663 - DNA, 27 bp, Artificial sequence
  SiRNA target sequence
aggaaaggttttcaatatttagtatat

SEQ ID NO: 94664 - DNA, 27 bp, Artificial sequence
  SiRNA target sequence
ggaaaggttttcaatatttagtatatt

SEQ ID NO: 94665 - DNA, 27 bp, Artificial sequence
  SiRNA target sequence
gaaaggttttcaatatttagtatattt

SEQ ID NO: 94666 - DNA, 27 bp, Artificial sequence
  SiRNA target sequence
aaaggttttcaatatttagtatatttg

SEQ ID NO: 94667 - DNA, 27 bp, Artificial sequence
  SiRNA target sequence
aaggttttcaatatttagtatatttgt

SEQ ID NO: 94668 - DNA, 27 bp, Artificial sequence
  SiRNA target sequence
aggttttcaatatttagtatatttgta

SEQ ID NO: 94669 - DNA, 27 bp, Artificial sequence
  SiRNA target sequence
ggttttcaatatttagtatatttgtat

SEQ ID NO: 94670 - DNA, 27 bp, Artificial sequence
  SiRNA target sequence
gttttcaatatttagtatatttgtatc

SEQ ID NO: 94671 - DNA, 27 bp, Artificial sequence
  SiRNA target sequence
ttttcaatatttagtatatttgtatct

SEQ ID NO: 94672 - DNA, 27 bp, Artificial sequence
  SiRNA target sequence
tttcaatatttagtatatttgtatcta

SEQ ID NO: 94673 - DNA, 27 bp, Artificial sequence
  SiRNA target sequence
ttcaatatttagtatatttgtatctat

SEQ ID NO: 94674 - DNA, 27 bp, Artificial sequence
  SiRNA target sequence
tcaatatttagtatatttgtatctatc

SEQ ID NO: 94675 - DNA, 27 bp, Artificial sequence
  SiRNA target sequence
caatatttagtatatttgtatctatca

SEQ ID NO: 94676 - DNA, 27 bp, Artificial sequence
  SiRNA target sequence
aatatttagtatatttgtatctatcaa

SEQ ID NO: 94677 - DNA, 27 bp, Artificial sequence
  SiRNA target sequence
atatttagtatatttgtatctatcaaa

SEQ ID NO: 94678 - DNA, 27 bp, Artificial sequence
  SiRNA target sequence
tatttagtatatttgtatctatcaaat

SEQ ID NO: 94679 - DNA, 27 bp, Artificial sequence
  SiRNA target sequence
atttagtatatttgtatctatcaaatt

SEQ ID NO: 94680 - DNA, 27 bp, Artificial sequence
  SiRNA target sequence
tttagtatatttgtatctatcaaattt

SEQ ID NO: 94681 - DNA, 27 bp, Artificial sequence
  SiRNA target sequence
ttagtatatttgtatctatcaaattta

SEQ ID NO: 94682 - DNA, 27 bp, Artificial sequence
  SiRNA target sequence
tagtatatttgtatctatcaaatttat

SEQ ID NO: 94683 - DNA, 27 bp, Artificial sequence
  SiRNA target sequence
agtatatttgtatctatcaaatttata

SEQ ID NO: 94684 - DNA, 27 bp, Artificial sequence
  SiRNA target sequence
gtatatttgtatctatcaaatttatat

SEQ ID NO: 94685 - DNA, 27 bp, Artificial sequence
  SiRNA target sequence
tatatttgtatctatcaaatttatatt

SEQ ID NO: 94686 - DNA, 27 bp, Artificial sequence
  SiRNA target sequence
atatttgtatctatcaaatttatattc

SEQ ID NO: 94687 - DNA, 27 bp, Artificial sequence
  SiRNA target sequence
tatttgtatctatcaaatttatattct

SEQ ID NO: 94688 - DNA, 27 bp, Artificial sequence
  SiRNA target sequence
atttgtatctatcaaatttatattctc

SEQ ID NO: 94689 - DNA, 27 bp, Artificial sequence
  SiRNA target sequence
tttgtatctatcaaatttatattctcg

SEQ ID NO: 94690 - DNA, 27 bp, Artificial sequence
  SiRNA target sequence
ttgtatctatcaaatttatattctcgt

SEQ ID NO: 94691 - DNA, 27 bp, Artificial sequence
  SiRNA target sequence
tgtatctatcaaatttatattctcgtt

SEQ ID NO: 94692 - DNA, 27 bp, Artificial sequence
  SiRNA target sequence
gtatctatcaaatttatattctcgttt

SEQ ID NO: 94693 - DNA, 27 bp, Artificial sequence
  SiRNA target sequence
tatctatcaaatttatattctcgtttg

SEQ ID NO: 94694 - DNA, 27 bp, Artificial sequence
  SiRNA target sequence
atctatcaaatttatattctcgtttgt

SEQ ID NO: 94695 - DNA, 27 bp, Artificial sequence
  SiRNA target sequence
tctatcaaatttatattctcgtttgtc

SEQ ID NO: 94696 - DNA, 27 bp, Artificial sequence
  SiRNA target sequence
ctatcaaatttatattctcgtttgtct

SEQ ID NO: 94697 - DNA, 27 bp, Artificial sequence
  SiRNA target sequence
tatcaaatttatattctcgtttgtctt

SEQ ID NO: 94698 - DNA, 27 bp, Artificial sequence
  SiRNA target sequence
atcaaatttatattctcgtttgtcttt

SEQ ID NO: 94699 - DNA, 27 bp, Artificial sequence
  SiRNA target sequence
tcaaatttatattctcgtttgtcttta

SEQ ID NO: 94700 - DNA, 27 bp, Artificial sequence
  SiRNA target sequence
caaatttatattctcgtttgtctttat

SEQ ID NO: 94701 - DNA, 27 bp, Artificial sequence
  SiRNA target sequence
aaatttatattctcgtttgtctttatt

SEQ ID NO: 94702 - DNA, 27 bp, Artificial sequence
  SiRNA target sequence
aatttatattctcgtttgtctttattt

SEQ ID NO: 94703 - DNA, 27 bp, Artificial sequence
  SiRNA target sequence
atttatattctcgtttgtctttatttt

SEQ ID NO: 94704 - DNA, 27 bp, Artificial sequence
  SiRNA target sequence
tttatattctcgtttgtctttatttta

SEQ ID NO: 94705 - DNA, 27 bp, Artificial sequence
  SiRNA target sequence
ttatattctcgtttgtctttattttat

SEQ ID NO: 94706 - DNA, 27 bp, Artificial sequence
  SiRNA target sequence
tatattctcgtttgtctttattttata

SEQ ID NO: 94707 - DNA, 27 bp, Artificial sequence
  SiRNA target sequence
atattctcgtttgtctttattttataa

SEQ ID NO: 94708 - DNA, 27 bp, Artificial sequence
  SiRNA target sequence
tattctcgtttgtctttattttataag

SEQ ID NO: 94709 - DNA, 27 bp, Artificial sequence
  SiRNA target sequence
attctcgtttgtctttattttataaga

SEQ ID NO: 94710 - DNA, 27 bp, Artificial sequence
  SiRNA target sequence
ttctcgtttgtctttattttataagaa

SEQ ID NO: 94711 - DNA, 27 bp, Artificial sequence
  SiRNA target sequence
tctcgtttgtctttattttataagaac

SEQ ID NO: 94712 - DNA, 27 bp, Artificial sequence
  SiRNA target sequence
ctcgtttgtctttattttataagaacc

SEQ ID NO: 94713 - DNA, 27 bp, Artificial sequence
  SiRNA target sequence
tcgtttgtctttattttataagaacct

SEQ ID NO: 94714 - DNA, 27 bp, Artificial sequence
  SiRNA target sequence
cgtttgtctttattttataagaacctg

SEQ ID NO: 94715 - DNA, 27 bp, Artificial sequence
  SiRNA target sequence
gtttgtctttattttataagaacctgt

SEQ ID NO: 94716 - DNA, 27 bp, Artificial sequence
  SiRNA target sequence
tttgtctttattttataagaacctgta

SEQ ID NO: 94717 - DNA, 27 bp, Artificial sequence
  SiRNA target sequence
ttgtctttattttataagaacctgtat

SEQ ID NO: 94718 - DNA, 27 bp, Artificial sequence
  SiRNA target sequence
tgtctttattttataagaacctgtata

SEQ ID NO: 94719 - DNA, 27 bp, Artificial sequence
  SiRNA target sequence
gtctttattttataagaacctgtatag

SEQ ID NO: 94720 - DNA, 27 bp, Artificial sequence
  SiRNA target sequence
tctttattttataagaacctgtatagt

SEQ ID NO: 94721 - DNA, 27 bp, Artificial sequence
  SiRNA target sequence
ctttattttataagaacctgtatagtt

SEQ ID NO: 94722 - DNA, 27 bp, Artificial sequence
  SiRNA target sequence
tttattttataagaacctgtatagttg

SEQ ID NO: 94723 - DNA, 27 bp, Artificial sequence
  SiRNA target sequence
ttattttataagaacctgtatagttgg

SEQ ID NO: 94724 - DNA, 27 bp, Artificial sequence
  SiRNA target sequence
tattttataagaacctgtatagttggt

SEQ ID NO: 94725 - DNA, 27 bp, Artificial sequence
  SiRNA target sequence
attttataagaacctgtatagttggtc

SEQ ID NO: 94726 - DNA, 27 bp, Artificial sequence
  SiRNA target sequence
ttttataagaacctgtatagttggtct

SEQ ID NO: 94727 - DNA, 27 bp, Artificial sequence
  SiRNA target sequence
tttataagaacctgtatagttggtctt

SEQ ID NO: 94728 - DNA, 27 bp, Artificial sequence
  SiRNA target sequence
ttataagaacctgtatagttggtcttt

SEQ ID NO: 94729 - DNA, 27 bp, Artificial sequence
  SiRNA target sequence
tataagaacctgtatagttggtctttt

SEQ ID NO: 94730 - DNA, 27 bp, Artificial sequence
  SiRNA target sequence
ataagaacctgtatagttggtcttttt

SEQ ID NO: 94731 - DNA, 27 bp, Artificial sequence
  SiRNA target sequence
taagaacctgtatagttggtcttttta

SEQ ID NO: 94732 - DNA, 27 bp, Artificial sequence
  SiRNA target sequence
aagaacctgtatagttggtctttttaa

SEQ ID NO: 94733 - DNA, 27 bp, Artificial sequence
  SiRNA target sequence
agaacctgtatagttggtctttttaat

SEQ ID NO: 94734 - DNA, 27 bp, Artificial sequence
  SiRNA target sequence
gaacctgtatagttggtctttttaatt

SEQ ID NO: 94735 - DNA, 27 bp, Artificial sequence
  SiRNA target sequence
aacctgtatagttggtctttttaatta

SEQ ID NO: 94736 - DNA, 27 bp, Artificial sequence
  SiRNA target sequence
acctgtatagttggtctttttaattat

SEQ ID NO: 94737 - DNA, 27 bp, Artificial sequence
  SiRNA target sequence
cctgtatagttggtctttttaattata

SEQ ID NO: 94738 - DNA, 27 bp, Artificial sequence
  SiRNA target sequence
ctgtatagttggtctttttaattataa

SEQ ID NO: 94739 - DNA, 27 bp, Artificial sequence
  SiRNA target sequence
tgtatagttggtctttttaattataag

SEQ ID NO: 94740 - DNA, 27 bp, Artificial sequence
  SiRNA target sequence
gtatagttggtctttttaattataagc

SEQ ID NO: 94741 - DNA, 27 bp, Artificial sequence
  SiRNA target sequence
tatagttggtctttttaattataagct

SEQ ID NO: 94742 - DNA, 27 bp, Artificial sequence
  SiRNA target sequence
atagttggtctttttaattataagctt

SEQ ID NO: 94743 - DNA, 27 bp, Artificial sequence
  SiRNA target sequence
tagttggtctttttaattataagctta

SEQ ID NO: 94744 - DNA, 27 bp, Artificial sequence
  SiRNA target sequence
agttggtctttttaattataagcttat

SEQ ID NO: 94745 - DNA, 27 bp, Artificial sequence
  SiRNA target sequence
gttggtctttttaattataagcttatt

SEQ ID NO: 94746 - DNA, 27 bp, Artificial sequence
  SiRNA target sequence
ttggtctttttaattataagcttattg

SEQ ID NO: 94747 - DNA, 27 bp, Artificial sequence
  SiRNA target sequence
tggtctttttaattataagcttattga

SEQ ID NO: 94748 - DNA, 27 bp, Artificial sequence
  SiRNA target sequence
ggtctttttaattataagcttattgaa

SEQ ID NO: 94749 - DNA, 27 bp, Artificial sequence
  SiRNA target sequence
gtctttttaattataagcttattgaaa

SEQ ID NO: 94750 - DNA, 27 bp, Artificial sequence
  SiRNA target sequence
tctttttaattataagcttattgaaat

SEQ ID NO: 94751 - DNA, 27 bp, Artificial sequence
  SiRNA target sequence
ctttttaattataagcttattgaaatt

SEQ ID NO: 94752 - DNA, 27 bp, Artificial sequence
  SiRNA target sequence
tttttaattataagcttattgaaattt

SEQ ID NO: 94753 - DNA, 27 bp, Artificial sequence
  SiRNA target sequence
ttttaattataagcttattgaaatttc

SEQ ID NO: 94754 - DNA, 27 bp, Artificial sequence
  SiRNA target sequence
tttaattataagcttattgaaatttct

SEQ ID NO: 94755 - DNA, 27 bp, Artificial sequence
  SiRNA target sequence
ttaattataagcttattgaaatttcta

SEQ ID NO: 94756 - DNA, 27 bp, Artificial sequence
  SiRNA target sequence
taattataagcttattgaaatttctaa

SEQ ID NO: 94757 - DNA, 27 bp, Artificial sequence
  SiRNA target sequence
aattataagcttattgaaatttctaat

SEQ ID NO: 94758 - DNA, 27 bp, Artificial sequence
  SiRNA target sequence
attataagcttattgaaatttctaata

SEQ ID NO: 94759 - DNA, 27 bp, Artificial sequence
  SiRNA target sequence
ttataagcttattgaaatttctaatat

SEQ ID NO: 94760 - DNA, 27 bp, Artificial sequence
  SiRNA target sequence
tataagcttattgaaatttctaatatt

SEQ ID NO: 94761 - DNA, 27 bp, Artificial sequence
  SiRNA target sequence
ataagcttattgaaatttctaatattt

SEQ ID NO: 94762 - DNA, 27 bp, Artificial sequence
  SiRNA target sequence
taagcttattgaaatttctaatattta

SEQ ID NO: 94763 - DNA, 27 bp, Artificial sequence
  SiRNA target sequence
aagcttattgaaatttctaatatttaa

SEQ ID NO: 94764 - DNA, 27 bp, Artificial sequence
  SiRNA target sequence
agcttattgaaatttctaatatttaaa

SEQ ID NO: 94765 - DNA, 27 bp, Artificial sequence
  SiRNA target sequence
gcttattgaaatttctaatatttaaag

SEQ ID NO: 94766 - DNA, 27 bp, Artificial sequence
  SiRNA target sequence
cttattgaaatttctaatatttaaagg

SEQ ID NO: 94767 - DNA, 27 bp, Artificial sequence
  SiRNA target sequence
ttattgaaatttctaatatttaaagga

SEQ ID NO: 94768 - DNA, 27 bp, Artificial sequence
  SiRNA target sequence
tattgaaatttctaatatttaaaggaa

SEQ ID NO: 94769 - DNA, 27 bp, Artificial sequence
  SiRNA target sequence
attgaaatttctaatatttaaaggaac

SEQ ID NO: 94770 - DNA, 27 bp, Artificial sequence
  SiRNA target sequence
ttgaaatttctaatatttaaaggaaca

SEQ ID NO: 94771 - DNA, 27 bp, Artificial sequence
  SiRNA target sequence
tgaaatttctaatatttaaaggaacaa

SEQ ID NO: 94772 - DNA, 27 bp, Artificial sequence
  SiRNA target sequence
gaaatttctaatatttaaaggaacaaa

SEQ ID NO: 94773 - DNA, 27 bp, Artificial sequence
  SiRNA target sequence
aaatttctaatatttaaaggaacaaaa

SEQ ID NO: 94774 - DNA, 27 bp, Artificial sequence
  SiRNA target sequence
aatttctaatatttaaaggaacaaaat

SEQ ID NO: 94775 - DNA, 27 bp, Artificial sequence
  SiRNA target sequence
atttctaatatttaaaggaacaaaatc

SEQ ID NO: 94776 - DNA, 27 bp, Artificial sequence
  SiRNA target sequence
tttctaatatttaaaggaacaaaatct

SEQ ID NO: 94777 - DNA, 27 bp, Artificial sequence
  SiRNA target sequence
ttctaatatttaaaggaacaaaatcta

SEQ ID NO: 94778 - DNA, 27 bp, Artificial sequence
  SiRNA target sequence
tctaatatttaaaggaacaaaatctac

SEQ ID NO: 94779 - DNA, 27 bp, Artificial sequence
  SiRNA target sequence
ctaatatttaaaggaacaaaatctaca

SEQ ID NO: 94780 - DNA, 27 bp, Artificial sequence
  SiRNA target sequence
taatatttaaaggaacaaaatctacat

SEQ ID NO: 94781 - DNA, 27 bp, Artificial sequence
  SiRNA target sequence
aatatttaaaggaacaaaatctacatt

SEQ ID NO: 94782 - DNA, 27 bp, Artificial sequence
  SiRNA target sequence
atatttaaaggaacaaaatctacattt

SEQ ID NO: 94783 - DNA, 27 bp, Artificial sequence
  SiRNA target sequence
tatttaaaggaacaaaatctacattta

SEQ ID NO: 94784 - DNA, 27 bp, Artificial sequence
  SiRNA target sequence
atttaaaggaacaaaatctacatttag

SEQ ID NO: 94785 - DNA, 27 bp, Artificial sequence
  SiRNA target sequence
tttaaaggaacaaaatctacatttaga

SEQ ID NO: 94786 - DNA, 27 bp, Artificial sequence
  SiRNA target sequence
ttaaaggaacaaaatctacatttagat

SEQ ID NO: 94787 - DNA, 27 bp, Artificial sequence
  SiRNA target sequence
taaaggaacaaaatctacatttagatt

SEQ ID NO: 94788 - DNA, 27 bp, Artificial sequence
  SiRNA target sequence
aaaggaacaaaatctacatttagatta

SEQ ID NO: 94789 - DNA, 27 bp, Artificial sequence
  SiRNA target sequence
aaggaacaaaatctacatttagattat

SEQ ID NO: 94790 - DNA, 27 bp, Artificial sequence
  SiRNA target sequence
aggaacaaaatctacatttagattata

SEQ ID NO: 94791 - DNA, 27 bp, Artificial sequence
  SiRNA target sequence
ggaacaaaatctacatttagattatat

SEQ ID NO: 94792 - DNA, 27 bp, Artificial sequence
  SiRNA target sequence
gaacaaaatctacatttagattatatt

SEQ ID NO: 94793 - DNA, 27 bp, Artificial sequence
  SiRNA target sequence
aacaaaatctacatttagattatattc

SEQ ID NO: 94794 - DNA, 27 bp, Artificial sequence
  SiRNA target sequence
acaaaatctacatttagattatattct

SEQ ID NO: 94795 - DNA, 27 bp, Artificial sequence
  SiRNA target sequence
caaaatctacatttagattatattcta

SEQ ID NO: 94796 - DNA, 27 bp, Artificial sequence
  SiRNA target sequence
aaaatctacatttagattatattctaa

SEQ ID NO: 94797 - DNA, 27 bp, Artificial sequence
  SiRNA target sequence
aaatctacatttagattatattctaat

SEQ ID NO: 94798 - DNA, 27 bp, Artificial sequence
  SiRNA target sequence
aatctacatttagattatattctaatt

SEQ ID NO: 94799 - DNA, 27 bp, Artificial sequence
  SiRNA target sequence
atctacatttagattatattctaattt

SEQ ID NO: 94800 - DNA, 27 bp, Artificial sequence
  SiRNA target sequence
tctacatttagattatattctaattta

SEQ ID NO: 94801 - DNA, 27 bp, Artificial sequence
  SiRNA target sequence
ctacatttagattatattctaatttat

SEQ ID NO: 94802 - DNA, 27 bp, Artificial sequence
  SiRNA target sequence
tacatttagattatattctaatttatt

SEQ ID NO: 94803 - DNA, 27 bp, Artificial sequence
  SiRNA target sequence
acatttagattatattctaatttattg

SEQ ID NO: 94804 - DNA, 27 bp, Artificial sequence
  SiRNA target sequence
catttagattatattctaatttattga

SEQ ID NO: 94805 - DNA, 27 bp, Artificial sequence
  SiRNA target sequence
atttagattatattctaatttattgaa

SEQ ID NO: 94806 - DNA, 27 bp, Artificial sequence
  SiRNA target sequence
tttagattatattctaatttattgaat

SEQ ID NO: 94807 - DNA, 27 bp, Artificial sequence
  SiRNA target sequence
ttagattatattctaatttattgaatt

SEQ ID NO: 94808 - DNA, 27 bp, Artificial sequence
  SiRNA target sequence
tagattatattctaatttattgaattt

SEQ ID NO: 94809 - DNA, 27 bp, Artificial sequence
  SiRNA target sequence
agattatattctaatttattgaatttc

SEQ ID NO: 94810 - DNA, 27 bp, Artificial sequence
  SiRNA target sequence
gattatattctaatttattgaatttca

SEQ ID NO: 94811 - DNA, 27 bp, Artificial sequence
  SiRNA target sequence
attatattctaatttattgaatttcat

SEQ ID NO: 94812 - DNA, 19 bp, Artificial sequence
  SiRNA target sequence
ttaccaagtttctgcctga

SEQ ID NO: 94813 - DNA, 19 bp, Artificial sequence
  SiRNA target sequence
taccaagtttctgcctgaa

SEQ ID NO: 94814 - DNA, 19 bp, Artificial sequence
  SiRNA target sequence
accaagtttctgcctgaaa

SEQ ID NO: 94815 - DNA, 19 bp, Artificial sequence
  SiRNA target sequence
ccaagtttctgcctgaaaa

SEQ ID NO: 94816 - DNA, 19 bp, Artificial sequence
  SiRNA target sequence
caagtttctgcctgaaaat

SEQ ID NO: 94817 - DNA, 19 bp, Artificial sequence
  SiRNA target sequence
aagtttctgcctgaaaata

SEQ ID NO: 94818 - DNA, 19 bp, Artificial sequence
  SiRNA target sequence
agtttctgcctgaaaatat

SEQ ID NO: 94819 - DNA, 19 bp, Artificial sequence
  SiRNA target sequence
gtttctgcctgaaaatata

SEQ ID NO: 94820 - DNA, 19 bp, Artificial sequence
  SiRNA target sequence
tttctgcctgaaaatatat

SEQ ID NO: 94821 - DNA, 19 bp, Artificial sequence
  SiRNA target sequence
ttctgcctgaaaatatatt

SEQ ID NO: 94822 - DNA, 19 bp, Artificial sequence
  SiRNA target sequence
tctgcctgaaaatatattt

SEQ ID NO: 94823 - DNA, 19 bp, Artificial sequence
  SiRNA target sequence
ctgcctgaaaatatatttt

SEQ ID NO: 94824 - DNA, 19 bp, Artificial sequence
  SiRNA target sequence
tgcctgaaaatatattttc

SEQ ID NO: 94825 - DNA, 19 bp, Artificial sequence
  SiRNA target sequence
gcctgaaaatatattttct

SEQ ID NO: 94826 - DNA, 19 bp, Artificial sequence
  SiRNA target sequence
cctgaaaatatattttctt

SEQ ID NO: 94827 - DNA, 19 bp, Artificial sequence
  SiRNA target sequence
ctgaaaatatattttcttt

SEQ ID NO: 94828 - DNA, 19 bp, Artificial sequence
  SiRNA target sequence
tgaaaatatattttctttt

SEQ ID NO: 94829 - DNA, 19 bp, Artificial sequence
  SiRNA target sequence
gaaaatatattttcttttt

SEQ ID NO: 94830 - DNA, 19 bp, Artificial sequence
  SiRNA target sequence
aaaatatattttcttttta

SEQ ID NO: 94831 - DNA, 19 bp, Artificial sequence
  SiRNA target sequence
aaatatattttctttttat

SEQ ID NO: 94832 - DNA, 19 bp, Artificial sequence
  SiRNA target sequence
aatatattttctttttata

SEQ ID NO: 94833 - DNA, 19 bp, Artificial sequence
  SiRNA target sequence
atatattttctttttataa

SEQ ID NO: 94834 - DNA, 19 bp, Artificial sequence
  SiRNA target sequence
tatattttctttttataaa

SEQ ID NO: 94835 - DNA, 19 bp, Artificial sequence
  SiRNA target sequence
atattttctttttataaat

SEQ ID NO: 94836 - DNA, 19 bp, Artificial sequence
  SiRNA target sequence
tattttctttttataaata

SEQ ID NO: 94837 - DNA, 19 bp, Artificial sequence
  SiRNA target sequence
attttctttttataaatat

SEQ ID NO: 94838 - DNA, 19 bp, Artificial sequence
  SiRNA target sequence
ttttctttttataaatatc

SEQ ID NO: 94839 - DNA, 19 bp, Artificial sequence
  SiRNA target sequence
tttctttttataaatatct

SEQ ID NO: 94840 - DNA, 19 bp, Artificial sequence
  SiRNA target sequence
ttctttttataaatatcta

SEQ ID NO: 94841 - DNA, 19 bp, Artificial sequence
  SiRNA target sequence
tctttttataaatatctaa

SEQ ID NO: 94842 - DNA, 19 bp, Artificial sequence
  SiRNA target sequence
ctttttataaatatctaat

SEQ ID NO: 94843 - DNA, 19 bp, Artificial sequence
  SiRNA target sequence
tttttataaatatctaata

SEQ ID NO: 94844 - DNA, 19 bp, Artificial sequence
  SiRNA target sequence
ttttataaatatctaataa

SEQ ID NO: 94845 - DNA, 19 bp, Artificial sequence
  SiRNA target sequence
tttataaatatctaataac

SEQ ID NO: 94846 - DNA, 19 bp, Artificial sequence
  SiRNA target sequence
ttataaatatctaataaca

SEQ ID NO: 94847 - DNA, 19 bp, Artificial sequence
  SiRNA target sequence
tataaatatctaataacat

SEQ ID NO: 94848 - DNA, 19 bp, Artificial sequence
  SiRNA target sequence
ataaatatctaataacatt

SEQ ID NO: 94849 - DNA, 19 bp, Artificial sequence
  SiRNA target sequence
taaatatctaataacattt

SEQ ID NO: 94850 - DNA, 19 bp, Artificial sequence
  SiRNA target sequence
aaatatctaataacatttt

SEQ ID NO: 94851 - DNA, 19 bp, Artificial sequence
  SiRNA target sequence
aatatctaataacattttt

SEQ ID NO: 94852 - DNA, 19 bp, Artificial sequence
  SiRNA target sequence
atatctaataacatttttt

SEQ ID NO: 94853 - DNA, 19 bp, Artificial sequence
  SiRNA target sequence
tatctaataacattttttc

SEQ ID NO: 94854 - DNA, 19 bp, Artificial sequence
  SiRNA target sequence
atctaataacattttttca

SEQ ID NO: 94855 - DNA, 19 bp, Artificial sequence
  SiRNA target sequence
tctaataacattttttcaa

SEQ ID NO: 94856 - DNA, 19 bp, Artificial sequence
  SiRNA target sequence
ctaataacattttttcaat

SEQ ID NO: 94857 - DNA, 19 bp, Artificial sequence
  SiRNA target sequence
taataacattttttcaata

SEQ ID NO: 94858 - DNA, 19 bp, Artificial sequence
  SiRNA target sequence
aataacattttttcaataa

SEQ ID NO: 94859 - DNA, 19 bp, Artificial sequence
  SiRNA target sequence
ataacattttttcaataat

SEQ ID NO: 94860 - DNA, 19 bp, Artificial sequence
  SiRNA target sequence
taacattttttcaataata

SEQ ID NO: 94861 - DNA, 19 bp, Artificial sequence
  SiRNA target sequence
aacattttttcaataatat

SEQ ID NO: 94862 - DNA, 19 bp, Artificial sequence
  SiRNA target sequence
acattttttcaataatatt

SEQ ID NO: 94863 - DNA, 19 bp, Artificial sequence
  SiRNA target sequence
cattttttcaataatatta

SEQ ID NO: 94864 - DNA, 19 bp, Artificial sequence
  SiRNA target sequence
attttttcaataatattat

SEQ ID NO: 94865 - DNA, 19 bp, Artificial sequence
  SiRNA target sequence
ttttttcaataatattatt

SEQ ID NO: 94866 - DNA, 19 bp, Artificial sequence
  SiRNA target sequence
tttttcaataatattatta

SEQ ID NO: 94867 - DNA, 19 bp, Artificial sequence
  SiRNA target sequence
ttttcaataatattattaa

SEQ ID NO: 94868 - DNA, 19 bp, Artificial sequence
  SiRNA target sequence
tttcaataatattattaag

SEQ ID NO: 94869 - DNA, 19 bp, Artificial sequence
  SiRNA target sequence
ttcaataatattattaagt

SEQ ID NO: 94870 - DNA, 19 bp, Artificial sequence
  SiRNA target sequence
tcaataatattattaagtc

SEQ ID NO: 94871 - DNA, 19 bp, Artificial sequence
  SiRNA target sequence
caataatattattaagtct

SEQ ID NO: 94872 - DNA, 19 bp, Artificial sequence
  SiRNA target sequence
aataatattattaagtcta

SEQ ID NO: 94873 - DNA, 19 bp, Artificial sequence
  SiRNA target sequence
ataatattattaagtctag

SEQ ID NO: 94874 - DNA, 19 bp, Artificial sequence
  SiRNA target sequence
taatattattaagtctaga

SEQ ID NO: 94875 - DNA, 19 bp, Artificial sequence
  SiRNA target sequence
aatattattaagtctagaa

SEQ ID NO: 94876 - DNA, 19 bp, Artificial sequence
  SiRNA target sequence
atattattaagtctagaat

SEQ ID NO: 94877 - DNA, 19 bp, Artificial sequence
  SiRNA target sequence
tattattaagtctagaatt

SEQ ID NO: 94878 - DNA, 19 bp, Artificial sequence
  SiRNA target sequence
attattaagtctagaattt

SEQ ID NO: 94879 - DNA, 19 bp, Artificial sequence
  SiRNA target sequence
ttattaagtctagaatttc

SEQ ID NO: 94880 - DNA, 19 bp, Artificial sequence
  SiRNA target sequence
tattaagtctagaatttcc

SEQ ID NO: 94881 - DNA, 19 bp, Artificial sequence
  SiRNA target sequence
attaagtctagaatttcca

SEQ ID NO: 94882 - DNA, 19 bp, Artificial sequence
  SiRNA target sequence
ttaagtctagaatttccac

SEQ ID NO: 94883 - DNA, 19 bp, Artificial sequence
  SiRNA target sequence
taagtctagaatttccact

SEQ ID NO: 94884 - DNA, 19 bp, Artificial sequence
  SiRNA target sequence
aagtctagaatttccactt

SEQ ID NO: 94885 - DNA, 19 bp, Artificial sequence
  SiRNA target sequence
agtctagaatttccactta

SEQ ID NO: 94886 - DNA, 19 bp, Artificial sequence
  SiRNA target sequence
gtctagaatttccacttac

SEQ ID NO: 94887 - DNA, 19 bp, Artificial sequence
  SiRNA target sequence
tctagaatttccacttaca

SEQ ID NO: 94888 - DNA, 19 bp, Artificial sequence
  SiRNA target sequence
ctagaatttccacttacaa

SEQ ID NO: 94889 - DNA, 19 bp, Artificial sequence
  SiRNA target sequence
tagaatttccacttacaaa

SEQ ID NO: 94890 - DNA, 19 bp, Artificial sequence
  SiRNA target sequence
agaatttccacttacaaat

SEQ ID NO: 94891 - DNA, 19 bp, Artificial sequence
  SiRNA target sequence
gaatttccacttacaaata

SEQ ID NO: 94892 - DNA, 19 bp, Artificial sequence
  SiRNA target sequence
aatttccacttacaaatat

SEQ ID NO: 94893 - DNA, 19 bp, Artificial sequence
  SiRNA target sequence
atttccacttacaaatatt

SEQ ID NO: 94894 - DNA, 19 bp, Artificial sequence
  SiRNA target sequence
tttccacttacaaatatta

SEQ ID NO: 94895 - DNA, 19 bp, Artificial sequence
  SiRNA target sequence
ttccacttacaaatattaa

SEQ ID NO: 94896 - DNA, 19 bp, Artificial sequence
  SiRNA target sequence
tccacttacaaatattaac

SEQ ID NO: 94897 - DNA, 19 bp, Artificial sequence
  SiRNA target sequence
ccacttacaaatattaacc

SEQ ID NO: 94898 - DNA, 19 bp, Artificial sequence
  SiRNA target sequence
cacttacaaatattaacca

SEQ ID NO: 94899 - DNA, 19 bp, Artificial sequence
  SiRNA target sequence
acttacaaatattaaccaa

SEQ ID NO: 94900 - DNA, 19 bp, Artificial sequence
  SiRNA target sequence
cttacaaatattaaccaat

SEQ ID NO: 94901 - DNA, 19 bp, Artificial sequence
  SiRNA target sequence
ttacaaatattaaccaatc

SEQ ID NO: 94902 - DNA, 19 bp, Artificial sequence
  SiRNA target sequence
tacaaatattaaccaatca

SEQ ID NO: 94903 - DNA, 19 bp, Artificial sequence
  SiRNA target sequence
acaaatattaaccaatcat

SEQ ID NO: 94904 - DNA, 19 bp, Artificial sequence
  SiRNA target sequence
caaatattaaccaatcatc

SEQ ID NO: 94905 - DNA, 19 bp, Artificial sequence
  SiRNA target sequence
aaatattaaccaatcatca

SEQ ID NO: 94906 - DNA, 19 bp, Artificial sequence
  SiRNA target sequence
aatattaaccaatcatcaa

SEQ ID NO: 94907 - DNA, 19 bp, Artificial sequence
  SiRNA target sequence
atattaaccaatcatcaat

SEQ ID NO: 94908 - DNA, 19 bp, Artificial sequence
  SiRNA target sequence
tattaaccaatcatcaata

SEQ ID NO: 94909 - DNA, 19 bp, Artificial sequence
  SiRNA target sequence
attaaccaatcatcaatat

SEQ ID NO: 94910 - DNA, 19 bp, Artificial sequence
  SiRNA target sequence
ttaaccaatcatcaatatt

SEQ ID NO: 94911 - DNA, 19 bp, Artificial sequence
  SiRNA target sequence
taaccaatcatcaatattt

SEQ ID NO: 94912 - DNA, 19 bp, Artificial sequence
  SiRNA target sequence
aaccaatcatcaatatttt

SEQ ID NO: 94913 - DNA, 19 bp, Artificial sequence
  SiRNA target sequence
accaatcatcaatattttc

SEQ ID NO: 94914 - DNA, 19 bp, Artificial sequence
  SiRNA target sequence
ccaatcatcaatattttct

SEQ ID NO: 94915 - DNA, 19 bp, Artificial sequence
  SiRNA target sequence
caatcatcaatattttcta

SEQ ID NO: 94916 - DNA, 19 bp, Artificial sequence
  SiRNA target sequence
aatcatcaatattttctag

SEQ ID NO: 94917 - DNA, 19 bp, Artificial sequence
  SiRNA target sequence
atcatcaatattttctagc

SEQ ID NO: 94918 - DNA, 19 bp, Artificial sequence
  SiRNA target sequence
tcatcaatattttctagcc

SEQ ID NO: 94919 - DNA, 19 bp, Artificial sequence
  SiRNA target sequence
catcaatattttctagccc

SEQ ID NO: 94920 - DNA, 19 bp, Artificial sequence
  SiRNA target sequence
atcaatattttctagccct

SEQ ID NO: 94921 - DNA, 19 bp, Artificial sequence
  SiRNA target sequence
tcaatattttctagccctt

SEQ ID NO: 94922 - DNA, 19 bp, Artificial sequence
  SiRNA target sequence
caatattttctagcccttt

SEQ ID NO: 94923 - DNA, 19 bp, Artificial sequence
  SiRNA target sequence
aatattttctagccctttt

SEQ ID NO: 94924 - DNA, 19 bp, Artificial sequence
  SiRNA target sequence
atattttctagccctttta

SEQ ID NO: 94925 - DNA, 19 bp, Artificial sequence
  SiRNA target sequence
tattttctagcccttttat

SEQ ID NO: 94926 - DNA, 19 bp, Artificial sequence
  SiRNA target sequence
attttctagcccttttata

SEQ ID NO: 94927 - DNA, 19 bp, Artificial sequence
  SiRNA target sequence
ttttctagcccttttatag

SEQ ID NO: 94928 - DNA, 19 bp, Artificial sequence
  SiRNA target sequence
tttctagcccttttatagt

SEQ ID NO: 94929 - DNA, 19 bp, Artificial sequence
  SiRNA target sequence
ttctagcccttttatagtc

SEQ ID NO: 94930 - DNA, 19 bp, Artificial sequence
  SiRNA target sequence
tctagcccttttatagtct

SEQ ID NO: 94931 - DNA, 19 bp, Artificial sequence
  SiRNA target sequence
ctagcccttttatagtctt

SEQ ID NO: 94932 - DNA, 19 bp, Artificial sequence
  SiRNA target sequence
tagcccttttatagtctta

SEQ ID NO: 94933 - DNA, 19 bp, Artificial sequence
  SiRNA target sequence
agcccttttatagtcttat

SEQ ID NO: 94934 - DNA, 19 bp, Artificial sequence
  SiRNA target sequence
gcccttttatagtcttata

SEQ ID NO: 94935 - DNA, 19 bp, Artificial sequence
  SiRNA target sequence
cccttttatagtcttataa

SEQ ID NO: 94936 - DNA, 19 bp, Artificial sequence
  SiRNA target sequence
ccttttatagtcttataaa

SEQ ID NO: 94937 - DNA, 19 bp, Artificial sequence
  SiRNA target sequence
cttttatagtcttataaat

SEQ ID NO: 94938 - DNA, 19 bp, Artificial sequence
  SiRNA target sequence
ttttatagtcttataaata

SEQ ID NO: 94939 - DNA, 19 bp, Artificial sequence
  SiRNA target sequence
tttatagtcttataaatat

SEQ ID NO: 94940 - DNA, 19 bp, Artificial sequence
  SiRNA target sequence
ttatagtcttataaatatc

SEQ ID NO: 94941 - DNA, 19 bp, Artificial sequence
  SiRNA target sequence
tatagtcttataaatatct

SEQ ID NO: 94942 - DNA, 19 bp, Artificial sequence
  SiRNA target sequence
atagtcttataaatatctt

SEQ ID NO: 94943 - DNA, 19 bp, Artificial sequence
  SiRNA target sequence
tagtcttataaatatcttg

SEQ ID NO: 94944 - DNA, 19 bp, Artificial sequence
  SiRNA target sequence
agtcttataaatatcttgt

SEQ ID NO: 94945 - DNA, 19 bp, Artificial sequence
  SiRNA target sequence
gtcttataaatatcttgta

SEQ ID NO: 94946 - DNA, 19 bp, Artificial sequence
  SiRNA target sequence
tcttataaatatcttgtat

SEQ ID NO: 94947 - DNA, 19 bp, Artificial sequence
  SiRNA target sequence
cttataaatatcttgtatg

SEQ ID NO: 94948 - DNA, 19 bp, Artificial sequence
  SiRNA target sequence
ttataaatatcttgtatgt

SEQ ID NO: 94949 - DNA, 19 bp, Artificial sequence
  SiRNA target sequence
tataaatatcttgtatgta

SEQ ID NO: 94950 - DNA, 19 bp, Artificial sequence
  SiRNA target sequence
ataaatatcttgtatgtat

SEQ ID NO: 94951 - DNA, 19 bp, Artificial sequence
  SiRNA target sequence
taaatatcttgtatgtatt

SEQ ID NO: 94952 - DNA, 19 bp, Artificial sequence
  SiRNA target sequence
aaatatcttgtatgtattt

SEQ ID NO: 94953 - DNA, 19 bp, Artificial sequence
  SiRNA target sequence
aatatcttgtatgtattta

SEQ ID NO: 94954 - DNA, 19 bp, Artificial sequence
  SiRNA target sequence
atatcttgtatgtatttat

SEQ ID NO: 94955 - DNA, 19 bp, Artificial sequence
  SiRNA target sequence
tatcttgtatgtatttatt

SEQ ID NO: 94956 - DNA, 19 bp, Artificial sequence
  SiRNA target sequence
atcttgtatgtatttatta

SEQ ID NO: 94957 - DNA, 19 bp, Artificial sequence
  SiRNA target sequence
tcttgtatgtatttattat

SEQ ID NO: 94958 - DNA, 19 bp, Artificial sequence
  SiRNA target sequence
cttgtatgtatttattatc

SEQ ID NO: 94959 - DNA, 19 bp, Artificial sequence
  SiRNA target sequence
ttgtatgtatttattatct

SEQ ID NO: 94960 - DNA, 19 bp, Artificial sequence
  SiRNA target sequence
tgtatgtatttattatctt

SEQ ID NO: 94961 - DNA, 19 bp, Artificial sequence
  SiRNA target sequence
gtatgtatttattatcttc

SEQ ID NO: 94962 - DNA, 19 bp, Artificial sequence
  SiRNA target sequence
tatgtatttattatcttcc

SEQ ID NO: 94963 - DNA, 19 bp, Artificial sequence
  SiRNA target sequence
atgtatttattatcttccc

SEQ ID NO: 94964 - DNA, 19 bp, Artificial sequence
  SiRNA target sequence
tgtatttattatcttccct

SEQ ID NO: 94965 - DNA, 19 bp, Artificial sequence
  SiRNA target sequence
gtatttattatcttccctt

SEQ ID NO: 94966 - DNA, 19 bp, Artificial sequence
  SiRNA target sequence
tatttattatcttcccttg

SEQ ID NO: 94967 - DNA, 19 bp, Artificial sequence
  SiRNA target sequence
atttattatcttcccttga

SEQ ID NO: 94968 - DNA, 19 bp, Artificial sequence
  SiRNA target sequence
tttattatcttcccttgaa

SEQ ID NO: 94969 - DNA, 19 bp, Artificial sequence
  SiRNA target sequence
ttattatcttcccttgaaa

SEQ ID NO: 94970 - DNA, 19 bp, Artificial sequence
  SiRNA target sequence
tattatcttcccttgaaac

SEQ ID NO: 94971 - DNA, 19 bp, Artificial sequence
  SiRNA target sequence
attatcttcccttgaaaca

SEQ ID NO: 94972 - DNA, 19 bp, Artificial sequence
  SiRNA target sequence
ttatcttcccttgaaacag

SEQ ID NO: 94973 - DNA, 19 bp, Artificial sequence
  SiRNA target sequence
tatcttcccttgaaacagc

SEQ ID NO: 94974 - DNA, 19 bp, Artificial sequence
  SiRNA target sequence
atcttcccttgaaacagcg

SEQ ID NO: 94975 - DNA, 19 bp, Artificial sequence
  SiRNA target sequence
tcttcccttgaaacagcgg

SEQ ID NO: 94976 - DNA, 19 bp, Artificial sequence
  SiRNA target sequence
cttcccttgaaacagcggg

SEQ ID NO: 94977 - DNA, 19 bp, Artificial sequence
  SiRNA target sequence
ttcccttgaaacagcgggg

SEQ ID NO: 94978 - DNA, 19 bp, Artificial sequence
  SiRNA target sequence
tcccttgaaacagcggggt

SEQ ID NO: 94979 - DNA, 19 bp, Artificial sequence
  SiRNA target sequence
cccttgaaacagcggggta

SEQ ID NO: 94980 - DNA, 19 bp, Artificial sequence
  SiRNA target sequence
ccttgaaacagcggggtaa

SEQ ID NO: 94981 - DNA, 19 bp, Artificial sequence
  SiRNA target sequence
cttgaaacagcggggtaaa

SEQ ID NO: 94982 - DNA, 19 bp, Artificial sequence
  SiRNA target sequence
ttgaaacagcggggtaaat

SEQ ID NO: 94983 - DNA, 19 bp, Artificial sequence
  SiRNA target sequence
tgaaacagcggggtaaatt

SEQ ID NO: 94984 - DNA, 19 bp, Artificial sequence
  SiRNA target sequence
gaaacagcggggtaaattt

SEQ ID NO: 94985 - DNA, 19 bp, Artificial sequence
  SiRNA target sequence
aaacagcggggtaaatttc

SEQ ID NO: 94986 - DNA, 19 bp, Artificial sequence
  SiRNA target sequence
aacagcggggtaaatttca

SEQ ID NO: 94987 - DNA, 19 bp, Artificial sequence
  SiRNA target sequence
acagcggggtaaatttcaa

SEQ ID NO: 94988 - DNA, 19 bp, Artificial sequence
  SiRNA target sequence
cagcggggtaaatttcaat

SEQ ID NO: 94989 - DNA, 19 bp, Artificial sequence
  SiRNA target sequence
agcggggtaaatttcaatg

SEQ ID NO: 94990 - DNA, 19 bp, Artificial sequence
  SiRNA target sequence
gcggggtaaatttcaatgc

SEQ ID NO: 94991 - DNA, 19 bp, Artificial sequence
  SiRNA target sequence
cggggtaaatttcaatgcc

SEQ ID NO: 94992 - DNA, 19 bp, Artificial sequence
  SiRNA target sequence
ggggtaaatttcaatgcct

SEQ ID NO: 94993 - DNA, 19 bp, Artificial sequence
  SiRNA target sequence
gggtaaatttcaatgcctt

SEQ ID NO: 94994 - DNA, 19 bp, Artificial sequence
  SiRNA target sequence
ggtaaatttcaatgccttt

SEQ ID NO: 94995 - DNA, 19 bp, Artificial sequence
  SiRNA target sequence
gtaaatttcaatgccttta

SEQ ID NO: 94996 - DNA, 19 bp, Artificial sequence
  SiRNA target sequence
taaatttcaatgcctttat

SEQ ID NO: 94997 - DNA, 19 bp, Artificial sequence
  SiRNA target sequence
aaatttcaatgcctttatt

SEQ ID NO: 94998 - DNA, 19 bp, Artificial sequence
  SiRNA target sequence
aatttcaatgcctttattt

SEQ ID NO: 94999 - DNA, 19 bp, Artificial sequence
  SiRNA target sequence
atttcaatgcctttatttt

SEQ ID NO: 95000 - DNA, 19 bp, Artificial sequence
  SiRNA target sequence
tttcaatgcctttattttc

SEQ ID NO: 95001 - DNA, 19 bp, Artificial sequence
  SiRNA target sequence
ttcaatgcctttattttca

SEQ ID NO: 95002 - DNA, 19 bp, Artificial sequence
  SiRNA target sequence
tcaatgcctttattttcaa

SEQ ID NO: 95003 - DNA, 19 bp, Artificial sequence
  SiRNA target sequence
caatgcctttattttcaaa

SEQ ID NO: 95004 - DNA, 19 bp, Artificial sequence
  SiRNA target sequence
aatgcctttattttcaaac

SEQ ID NO: 95005 - DNA, 19 bp, Artificial sequence
  SiRNA target sequence
atgcctttattttcaaact

SEQ ID NO: 95006 - DNA, 19 bp, Artificial sequence
  SiRNA target sequence
tgcctttattttcaaactc

SEQ ID NO: 95007 - DNA, 19 bp, Artificial sequence
  SiRNA target sequence
gcctttattttcaaactct

SEQ ID NO: 95008 - DNA, 19 bp, Artificial sequence
  SiRNA target sequence
cctttattttcaaactctt

SEQ ID NO: 95009 - DNA, 19 bp, Artificial sequence
  SiRNA target sequence
ctttattttcaaactcttc

SEQ ID NO: 95010 - DNA, 19 bp, Artificial sequence
  SiRNA target sequence
tttattttcaaactcttct

SEQ ID NO: 95011 - DNA, 19 bp, Artificial sequence
  SiRNA target sequence
ttattttcaaactcttctt

SEQ ID NO: 95012 - DNA, 19 bp, Artificial sequence
  SiRNA target sequence
tattttcaaactcttcttt

SEQ ID NO: 95013 - DNA, 19 bp, Artificial sequence
  SiRNA target sequence
attttcaaactcttcttta

SEQ ID NO: 95014 - DNA, 19 bp, Artificial sequence
  SiRNA target sequence
ttttcaaactcttctttat

SEQ ID NO: 95015 - DNA, 19 bp, Artificial sequence
  SiRNA target sequence
tttcaaactcttctttata

SEQ ID NO: 95016 - DNA, 19 bp, Artificial sequence
  SiRNA target sequence
ttcaaactcttctttatat

SEQ ID NO: 95017 - DNA, 19 bp, Artificial sequence
  SiRNA target sequence
tcaaactcttctttatata

SEQ ID NO: 95018 - DNA, 19 bp, Artificial sequence
  SiRNA target sequence
caaactcttctttatataa

SEQ ID NO: 95019 - DNA, 19 bp, Artificial sequence
  SiRNA target sequence
aaactcttctttatataaa

SEQ ID NO: 95020 - DNA, 19 bp, Artificial sequence
  SiRNA target sequence
aactcttctttatataaaa

SEQ ID NO: 95021 - DNA, 19 bp, Artificial sequence
  SiRNA target sequence
actcttctttatataaaaa

SEQ ID NO: 95022 - DNA, 19 bp, Artificial sequence
  SiRNA target sequence
ctcttctttatataaaaaa

SEQ ID NO: 95023 - DNA, 19 bp, Artificial sequence
  SiRNA target sequence
tcttctttatataaaaaat

SEQ ID NO: 95024 - DNA, 19 bp, Artificial sequence
  SiRNA target sequence
cttctttatataaaaaatc

SEQ ID NO: 95025 - DNA, 19 bp, Artificial sequence
  SiRNA target sequence
ttctttatataaaaaatct

SEQ ID NO: 95026 - DNA, 19 bp, Artificial sequence
  SiRNA target sequence
tctttatataaaaaatcta

SEQ ID NO: 95027 - DNA, 19 bp, Artificial sequence
  SiRNA target sequence
ctttatataaaaaatctac

SEQ ID NO: 95028 - DNA, 19 bp, Artificial sequence
  SiRNA target sequence
tttatataaaaaatctaca

SEQ ID NO: 95029 - DNA, 19 bp, Artificial sequence
  SiRNA target sequence
ttatataaaaaatctacat

SEQ ID NO: 95030 - DNA, 19 bp, Artificial sequence
  SiRNA target sequence
tatataaaaaatctacatc

SEQ ID NO: 95031 - DNA, 19 bp, Artificial sequence
  SiRNA target sequence
atataaaaaatctacatct

SEQ ID NO: 95032 - DNA, 19 bp, Artificial sequence
  SiRNA target sequence
tataaaaaatctacatctc

SEQ ID NO: 95033 - DNA, 19 bp, Artificial sequence
  SiRNA target sequence
ataaaaaatctacatctct

SEQ ID NO: 95034 - DNA, 19 bp, Artificial sequence
  SiRNA target sequence
taaaaaatctacatctcta

SEQ ID NO: 95035 - DNA, 19 bp, Artificial sequence
  SiRNA target sequence
aaaaaatctacatctctaa

SEQ ID NO: 95036 - DNA, 19 bp, Artificial sequence
  SiRNA target sequence
aaaaatctacatctctaaa

SEQ ID NO: 95037 - DNA, 19 bp, Artificial sequence
  SiRNA target sequence
aaaatctacatctctaaat

SEQ ID NO: 95038 - DNA, 19 bp, Artificial sequence
  SiRNA target sequence
aaatctacatctctaaatc

SEQ ID NO: 95039 - DNA, 19 bp, Artificial sequence
  SiRNA target sequence
aatctacatctctaaatct

SEQ ID NO: 95040 - DNA, 19 bp, Artificial sequence
  SiRNA target sequence
atctacatctctaaatcta

SEQ ID NO: 95041 - DNA, 19 bp, Artificial sequence
  SiRNA target sequence
tctacatctctaaatctaa

SEQ ID NO: 95042 - DNA, 19 bp, Artificial sequence
  SiRNA target sequence
ctacatctctaaatctaaa

SEQ ID NO: 95043 - DNA, 19 bp, Artificial sequence
  SiRNA target sequence
tacatctctaaatctaaaa

SEQ ID NO: 95044 - DNA, 19 bp, Artificial sequence
  SiRNA target sequence
acatctctaaatctaaaac

SEQ ID NO: 95045 - DNA, 19 bp, Artificial sequence
  SiRNA target sequence
catctctaaatctaaaacc

SEQ ID NO: 95046 - DNA, 19 bp, Artificial sequence
  SiRNA target sequence
atctctaaatctaaaacca

SEQ ID NO: 95047 - DNA, 19 bp, Artificial sequence
  SiRNA target sequence
tctctaaatctaaaaccat

SEQ ID NO: 95048 - DNA, 19 bp, Artificial sequence
  SiRNA target sequence
ctctaaatctaaaaccata

SEQ ID NO: 95049 - DNA, 19 bp, Artificial sequence
  SiRNA target sequence
tctaaatctaaaaccatat

SEQ ID NO: 95050 - DNA, 19 bp, Artificial sequence
  SiRNA target sequence
ctaaatctaaaaccatata

SEQ ID NO: 95051 - DNA, 19 bp, Artificial sequence
  SiRNA target sequence
taaatctaaaaccatataa

SEQ ID NO: 95052 - DNA, 19 bp, Artificial sequence
  SiRNA target sequence
aaatctaaaaccatataat

SEQ ID NO: 95053 - DNA, 19 bp, Artificial sequence
  SiRNA target sequence
aatctaaaaccatataata

SEQ ID NO: 95054 - DNA, 19 bp, Artificial sequence
  SiRNA target sequence
atctaaaaccatataataa

SEQ ID NO: 95055 - DNA, 19 bp, Artificial sequence
  SiRNA target sequence
tctaaaaccatataataaa

SEQ ID NO: 95056 - DNA, 19 bp, Artificial sequence
  SiRNA target sequence
ctaaaaccatataataaaa

SEQ ID NO: 95057 - DNA, 19 bp, Artificial sequence
  SiRNA target sequence
taaaaccatataataaaat

SEQ ID NO: 95058 - DNA, 19 bp, Artificial sequence
  SiRNA target sequence
aaaaccatataataaaata

SEQ ID NO: 95059 - DNA, 19 bp, Artificial sequence
  SiRNA target sequence
aaaccatataataaaataa

SEQ ID NO: 95060 - DNA, 19 bp, Artificial sequence
  SiRNA target sequence
aaccatataataaaataac

SEQ ID NO: 95061 - DNA, 19 bp, Artificial sequence
  SiRNA target sequence
accatataataaaataact

SEQ ID NO: 95062 - DNA, 19 bp, Artificial sequence
  SiRNA target sequence
ccatataataaaataactt

SEQ ID NO: 95063 - DNA, 19 bp, Artificial sequence
  SiRNA target sequence
catataataaaataacttt

SEQ ID NO: 95064 - DNA, 19 bp, Artificial sequence
  SiRNA target sequence
atataataaaataactttt

SEQ ID NO: 95065 - DNA, 19 bp, Artificial sequence
  SiRNA target sequence
tataataaaataacttttt

SEQ ID NO: 95066 - DNA, 19 bp, Artificial sequence
  SiRNA target sequence
ataataaaataactttttt

SEQ ID NO: 95067 - DNA, 19 bp, Artificial sequence
  SiRNA target sequence
taataaaataactttttta

SEQ ID NO: 95068 - DNA, 19 bp, Artificial sequence
  SiRNA target sequence
aataaaataacttttttaa

SEQ ID NO: 95069 - DNA, 19 bp, Artificial sequence
  SiRNA target sequence
ataaaataacttttttaaa

SEQ ID NO: 95070 - DNA, 19 bp, Artificial sequence
  SiRNA target sequence
taaaataacttttttaaaa

SEQ ID NO: 95071 - DNA, 19 bp, Artificial sequence
  SiRNA target sequence
aaaataacttttttaaaaa

SEQ ID NO: 95072 - DNA, 19 bp, Artificial sequence
  SiRNA target sequence
aaataacttttttaaaaaa

SEQ ID NO: 95073 - DNA, 19 bp, Artificial sequence
  SiRNA target sequence
aataacttttttaaaaaaa

SEQ ID NO: 95074 - DNA, 19 bp, Artificial sequence
  SiRNA target sequence
ataacttttttaaaaaaat

SEQ ID NO: 95075 - DNA, 19 bp, Artificial sequence
  SiRNA target sequence
taacttttttaaaaaaatt

SEQ ID NO: 95076 - DNA, 19 bp, Artificial sequence
  SiRNA target sequence
aacttttttaaaaaaattt

SEQ ID NO: 95077 - DNA, 19 bp, Artificial sequence
  SiRNA target sequence
acttttttaaaaaaattta

SEQ ID NO: 95078 - DNA, 19 bp, Artificial sequence
  SiRNA target sequence
cttttttaaaaaaatttaa

SEQ ID NO: 95079 - DNA, 19 bp, Artificial sequence
  SiRNA target sequence
ttttttaaaaaaatttaaa

SEQ ID NO: 95080 - DNA, 19 bp, Artificial sequence
  SiRNA target sequence
tttttaaaaaaatttaaat

SEQ ID NO: 95081 - DNA, 19 bp, Artificial sequence
  SiRNA target sequence
ttttaaaaaaatttaaatc

SEQ ID NO: 95082 - DNA, 19 bp, Artificial sequence
  SiRNA target sequence
tttaaaaaaatttaaatca

SEQ ID NO: 95083 - DNA, 19 bp, Artificial sequence
  SiRNA target sequence
ttaaaaaaatttaaatcag

SEQ ID NO: 95084 - DNA, 19 bp, Artificial sequence
  SiRNA target sequence
taaaaaaatttaaatcaga

SEQ ID NO: 95085 - DNA, 19 bp, Artificial sequence
  SiRNA target sequence
aaaaaaatttaaatcagaa

SEQ ID NO: 95086 - DNA, 19 bp, Artificial sequence
  SiRNA target sequence
aaaaaatttaaatcagaat

SEQ ID NO: 95087 - DNA, 19 bp, Artificial sequence
  SiRNA target sequence
aaaaatttaaatcagaata

SEQ ID NO: 95088 - DNA, 19 bp, Artificial sequence
  SiRNA target sequence
aaaatttaaatcagaatag

SEQ ID NO: 95089 - DNA, 19 bp, Artificial sequence
  SiRNA target sequence
aaatttaaatcagaatagt

SEQ ID NO: 95090 - DNA, 19 bp, Artificial sequence
  SiRNA target sequence
aatttaaatcagaatagta

SEQ ID NO: 95091 - DNA, 19 bp, Artificial sequence
  SiRNA target sequence
atttaaatcagaatagtaa

SEQ ID NO: 95092 - DNA, 19 bp, Artificial sequence
  SiRNA target sequence
tttaaatcagaatagtaat

SEQ ID NO: 95093 - DNA, 19 bp, Artificial sequence
  SiRNA target sequence
ttaaatcagaatagtaatt

SEQ ID NO: 95094 - DNA, 19 bp, Artificial sequence
  SiRNA target sequence
taaatcagaatagtaatta

SEQ ID NO: 95095 - DNA, 19 bp, Artificial sequence
  SiRNA target sequence
aaatcagaatagtaattaa

SEQ ID NO: 95096 - DNA, 19 bp, Artificial sequence
  SiRNA target sequence
aatcagaatagtaattaac

SEQ ID NO: 95097 - DNA, 19 bp, Artificial sequence
  SiRNA target sequence
atcagaatagtaattaaca

SEQ ID NO: 95098 - DNA, 19 bp, Artificial sequence
  SiRNA target sequence
tcagaatagtaattaacaa

SEQ ID NO: 95099 - DNA, 19 bp, Artificial sequence
  SiRNA target sequence
cagaatagtaattaacaaa

SEQ ID NO: 95100 - DNA, 19 bp, Artificial sequence
  SiRNA target sequence
agaatagtaattaacaaat

SEQ ID NO: 95101 - DNA, 19 bp, Artificial sequence
  SiRNA target sequence
gaatagtaattaacaaatg

SEQ ID NO: 95102 - DNA, 19 bp, Artificial sequence
  SiRNA target sequence
aatagtaattaacaaatgc

SEQ ID NO: 95103 - DNA, 19 bp, Artificial sequence
  SiRNA target sequence
atagtaattaacaaatgcc

SEQ ID NO: 95104 - DNA, 19 bp, Artificial sequence
  SiRNA target sequence
tagtaattaacaaatgccc

SEQ ID NO: 95105 - DNA, 19 bp, Artificial sequence
  SiRNA target sequence
agtaattaacaaatgccct

SEQ ID NO: 95106 - DNA, 19 bp, Artificial sequence
  SiRNA target sequence
gtaattaacaaatgccctg

SEQ ID NO: 95107 - DNA, 19 bp, Artificial sequence
  SiRNA target sequence
taattaacaaatgccctgg

SEQ ID NO: 95108 - DNA, 19 bp, Artificial sequence
  SiRNA target sequence
aattaacaaatgccctggg

SEQ ID NO: 95109 - DNA, 19 bp, Artificial sequence
  SiRNA target sequence
attaacaaatgccctggga

SEQ ID NO: 95110 - DNA, 19 bp, Artificial sequence
  SiRNA target sequence
ttaacaaatgccctgggaa

SEQ ID NO: 95111 - DNA, 19 bp, Artificial sequence
  SiRNA target sequence
taacaaatgccctgggaag

SEQ ID NO: 95112 - DNA, 19 bp, Artificial sequence
  SiRNA target sequence
aacaaatgccctgggaagt

SEQ ID NO: 95113 - DNA, 19 bp, Artificial sequence
  SiRNA target sequence
acaaatgccctgggaagtg

SEQ ID NO: 95114 - DNA, 19 bp, Artificial sequence
  SiRNA target sequence
caaatgccctgggaagtgt

SEQ ID NO: 95115 - DNA, 19 bp, Artificial sequence
  SiRNA target sequence
aaatgccctgggaagtgta

SEQ ID NO: 95116 - DNA, 19 bp, Artificial sequence
  SiRNA target sequence
aatgccctgggaagtgtaa

SEQ ID NO: 95117 - DNA, 19 bp, Artificial sequence
  SiRNA target sequence
atgccctgggaagtgtaat

SEQ ID NO: 95118 - DNA, 19 bp, Artificial sequence
  SiRNA target sequence
tgccctgggaagtgtaata

SEQ ID NO: 95119 - DNA, 19 bp, Artificial sequence
  SiRNA target sequence
gccctgggaagtgtaatac

SEQ ID NO: 95120 - DNA, 19 bp, Artificial sequence
  SiRNA target sequence
ccctgggaagtgtaatacc

SEQ ID NO: 95121 - DNA, 19 bp, Artificial sequence
  SiRNA target sequence
cctgggaagtgtaatacca

SEQ ID NO: 95122 - DNA, 19 bp, Artificial sequence
  SiRNA target sequence
ctgggaagtgtaataccag

SEQ ID NO: 95123 - DNA, 19 bp, Artificial sequence
  SiRNA target sequence
tgggaagtgtaataccagt

SEQ ID NO: 95124 - DNA, 19 bp, Artificial sequence
  SiRNA target sequence
gggaagtgtaataccagta

SEQ ID NO: 95125 - DNA, 19 bp, Artificial sequence
  SiRNA target sequence
ggaagtgtaataccagtac

SEQ ID NO: 95126 - DNA, 19 bp, Artificial sequence
  SiRNA target sequence
gaagtgtaataccagtacc

SEQ ID NO: 95127 - DNA, 19 bp, Artificial sequence
  SiRNA target sequence
aagtgtaataccagtacca

SEQ ID NO: 95128 - DNA, 19 bp, Artificial sequence
  SiRNA target sequence
agtgtaataccagtaccag

SEQ ID NO: 95129 - DNA, 19 bp, Artificial sequence
  SiRNA target sequence
gtgtaataccagtaccagt

SEQ ID NO: 95130 - DNA, 19 bp, Artificial sequence
  SiRNA target sequence
tgtaataccagtaccagtg

SEQ ID NO: 95131 - DNA, 19 bp, Artificial sequence
  SiRNA target sequence
gtaataccagtaccagtgc

SEQ ID NO: 95132 - DNA, 19 bp, Artificial sequence
  SiRNA target sequence
taataccagtaccagtgca

SEQ ID NO: 95133 - DNA, 19 bp, Artificial sequence
  SiRNA target sequence
aataccagtaccagtgcac

SEQ ID NO: 95134 - DNA, 19 bp, Artificial sequence
  SiRNA target sequence
ataccagtaccagtgcaca

SEQ ID NO: 95135 - DNA, 19 bp, Artificial sequence
  SiRNA target sequence
taccagtaccagtgcacat

SEQ ID NO: 95136 - DNA, 19 bp, Artificial sequence
  SiRNA target sequence
accagtaccagtgcacata

SEQ ID NO: 95137 - DNA, 19 bp, Artificial sequence
  SiRNA target sequence
ccagtaccagtgcacataa

SEQ ID NO: 95138 - DNA, 19 bp, Artificial sequence
  SiRNA target sequence
cagtaccagtgcacataaa

SEQ ID NO: 95139 - DNA, 19 bp, Artificial sequence
  SiRNA target sequence
agtaccagtgcacataaac

SEQ ID NO: 95140 - DNA, 19 bp, Artificial sequence
  SiRNA target sequence
gtaccagtgcacataaaca

SEQ ID NO: 95141 - DNA, 19 bp, Artificial sequence
  SiRNA target sequence
taccagtgcacataaacaa

SEQ ID NO: 95142 - DNA, 19 bp, Artificial sequence
  SiRNA target sequence
accagtgcacataaacaaa

SEQ ID NO: 95143 - DNA, 19 bp, Artificial sequence
  SiRNA target sequence
ccagtgcacataaacaaaa

SEQ ID NO: 95144 - DNA, 19 bp, Artificial sequence
  SiRNA target sequence
cagtgcacataaacaaaat

SEQ ID NO: 95145 - DNA, 19 bp, Artificial sequence
  SiRNA target sequence
agtgcacataaacaaaatc

SEQ ID NO: 95146 - DNA, 19 bp, Artificial sequence
  SiRNA target sequence
gtgcacataaacaaaatct

SEQ ID NO: 95147 - DNA, 19 bp, Artificial sequence
  SiRNA target sequence
tgcacataaacaaaatctt

SEQ ID NO: 95148 - DNA, 19 bp, Artificial sequence
  SiRNA target sequence
gcacataaacaaaatcttt

SEQ ID NO: 95149 - DNA, 19 bp, Artificial sequence
  SiRNA target sequence
cacataaacaaaatctttt

SEQ ID NO: 95150 - DNA, 19 bp, Artificial sequence
  SiRNA target sequence
acataaacaaaatcttttt

SEQ ID NO: 95151 - DNA, 19 bp, Artificial sequence
  SiRNA target sequence
cataaacaaaatcttttta

SEQ ID NO: 95152 - DNA, 19 bp, Artificial sequence
  SiRNA target sequence
ataaacaaaatctttttac

SEQ ID NO: 95153 - DNA, 19 bp, Artificial sequence
  SiRNA target sequence
taaacaaaatctttttacc

SEQ ID NO: 95154 - DNA, 19 bp, Artificial sequence
  SiRNA target sequence
aaacaaaatctttttacca

SEQ ID NO: 95155 - DNA, 19 bp, Artificial sequence
  SiRNA target sequence
aacaaaatctttttaccac

SEQ ID NO: 95156 - DNA, 19 bp, Artificial sequence
  SiRNA target sequence
acaaaatctttttaccact

SEQ ID NO: 95157 - DNA, 19 bp, Artificial sequence
  SiRNA target sequence
caaaatctttttaccacta

SEQ ID NO: 95158 - DNA, 19 bp, Artificial sequence
  SiRNA target sequence
aaaatctttttaccactaa

SEQ ID NO: 95159 - DNA, 19 bp, Artificial sequence
  SiRNA target sequence
aaatctttttaccactaaa

SEQ ID NO: 95160 - DNA, 19 bp, Artificial sequence
  SiRNA target sequence
aatctttttaccactaaaa

SEQ ID NO: 95161 - DNA, 19 bp, Artificial sequence
  SiRNA target sequence
atctttttaccactaaaat

SEQ ID NO: 95162 - DNA, 19 bp, Artificial sequence
  SiRNA target sequence
tctttttaccactaaaatt

SEQ ID NO: 95163 - DNA, 19 bp, Artificial sequence
  SiRNA target sequence
ctttttaccactaaaatta

SEQ ID NO: 95164 - DNA, 19 bp, Artificial sequence
  SiRNA target sequence
tttttaccactaaaattaa

SEQ ID NO: 95165 - DNA, 19 bp, Artificial sequence
  SiRNA target sequence
ttttaccactaaaattaag

SEQ ID NO: 95166 - DNA, 19 bp, Artificial sequence
  SiRNA target sequence
tttaccactaaaattaagt

SEQ ID NO: 95167 - DNA, 19 bp, Artificial sequence
  SiRNA target sequence
ttaccactaaaattaagtc

SEQ ID NO: 95168 - DNA, 19 bp, Artificial sequence
  SiRNA target sequence
taccactaaaattaagtct

SEQ ID NO: 95169 - DNA, 19 bp, Artificial sequence
  SiRNA target sequence
accactaaaattaagtcta

SEQ ID NO: 95170 - DNA, 19 bp, Artificial sequence
  SiRNA target sequence
ccactaaaattaagtctat

SEQ ID NO: 95171 - DNA, 19 bp, Artificial sequence
  SiRNA target sequence
cactaaaattaagtctatt

SEQ ID NO: 95172 - DNA, 19 bp, Artificial sequence
  SiRNA target sequence
actaaaattaagtctattt

SEQ ID NO: 95173 - DNA, 19 bp, Artificial sequence
  SiRNA target sequence
ctaaaattaagtctatttt

SEQ ID NO: 95174 - DNA, 19 bp, Artificial sequence
  SiRNA target sequence
taaaattaagtctattttg

SEQ ID NO: 95175 - DNA, 19 bp, Artificial sequence
  SiRNA target sequence
aaaattaagtctattttgt

SEQ ID NO: 95176 - DNA, 19 bp, Artificial sequence
  SiRNA target sequence
aaattaagtctattttgta

SEQ ID NO: 95177 - DNA, 19 bp, Artificial sequence
  SiRNA target sequence
aattaagtctattttgtac

SEQ ID NO: 95178 - DNA, 19 bp, Artificial sequence
  SiRNA target sequence
attaagtctattttgtact

SEQ ID NO: 95179 - DNA, 19 bp, Artificial sequence
  SiRNA target sequence
ttaagtctattttgtacta

SEQ ID NO: 95180 - DNA, 19 bp, Artificial sequence
  SiRNA target sequence
taagtctattttgtactat

SEQ ID NO: 95181 - DNA, 19 bp, Artificial sequence
  SiRNA target sequence
aagtctattttgtactatg

SEQ ID NO: 95182 - DNA, 19 bp, Artificial sequence
  SiRNA target sequence
agtctattttgtactatgt

SEQ ID NO: 95183 - DNA, 19 bp, Artificial sequence
  SiRNA target sequence
gtctattttgtactatgtt

SEQ ID NO: 95184 - DNA, 19 bp, Artificial sequence
  SiRNA target sequence
tctattttgtactatgtta

SEQ ID NO: 95185 - DNA, 19 bp, Artificial sequence
  SiRNA target sequence
ctattttgtactatgttaa

SEQ ID NO: 95186 - DNA, 19 bp, Artificial sequence
  SiRNA target sequence
tattttgtactatgttaac

SEQ ID NO: 95187 - DNA, 19 bp, Artificial sequence
  SiRNA target sequence
attttgtactatgttaaca

SEQ ID NO: 95188 - DNA, 19 bp, Artificial sequence
  SiRNA target sequence
ttttgtactatgttaacat

SEQ ID NO: 95189 - DNA, 19 bp, Artificial sequence
  SiRNA target sequence
tttgtactatgttaacatg

SEQ ID NO: 95190 - DNA, 19 bp, Artificial sequence
  SiRNA target sequence
ttgtactatgttaacatga

SEQ ID NO: 95191 - DNA, 19 bp, Artificial sequence
  SiRNA target sequence
tgtactatgttaacatgaa

SEQ ID NO: 95192 - DNA, 19 bp, Artificial sequence
  SiRNA target sequence
gtactatgttaacatgaat

SEQ ID NO: 95193 - DNA, 19 bp, Artificial sequence
  SiRNA target sequence
tactatgttaacatgaata

SEQ ID NO: 95194 - DNA, 19 bp, Artificial sequence
  SiRNA target sequence
actatgttaacatgaatag

SEQ ID NO: 95195 - DNA, 19 bp, Artificial sequence
  SiRNA target sequence
ctatgttaacatgaatagt

SEQ ID NO: 95196 - DNA, 19 bp, Artificial sequence
  SiRNA target sequence
tatgttaacatgaatagta

SEQ ID NO: 95197 - DNA, 19 bp, Artificial sequence
  SiRNA target sequence
atgttaacatgaatagtag

SEQ ID NO: 95198 - DNA, 19 bp, Artificial sequence
  SiRNA target sequence
tgttaacatgaatagtaga

SEQ ID NO: 95199 - DNA, 19 bp, Artificial sequence
  SiRNA target sequence
gttaacatgaatagtagac

SEQ ID NO: 95200 - DNA, 19 bp, Artificial sequence
  SiRNA target sequence
ttaacatgaatagtagacc

SEQ ID NO: 95201 - DNA, 19 bp, Artificial sequence
  SiRNA target sequence
taacatgaatagtagaccc

SEQ ID NO: 95202 - DNA, 19 bp, Artificial sequence
  SiRNA target sequence
aacatgaatagtagaccct

SEQ ID NO: 95203 - DNA, 19 bp, Artificial sequence
  SiRNA target sequence
acatgaatagtagaccctt

SEQ ID NO: 95204 - DNA, 19 bp, Artificial sequence
  SiRNA target sequence
catgaatagtagacccttt

SEQ ID NO: 95205 - DNA, 19 bp, Artificial sequence
  SiRNA target sequence
atgaatagtagacccttta

SEQ ID NO: 95206 - DNA, 19 bp, Artificial sequence
  SiRNA target sequence
tgaatagtagaccctttag

SEQ ID NO: 95207 - DNA, 19 bp, Artificial sequence
  SiRNA target sequence
gaatagtagaccctttagt

SEQ ID NO: 95208 - DNA, 19 bp, Artificial sequence
  SiRNA target sequence
aatagtagaccctttagta

SEQ ID NO: 95209 - DNA, 19 bp, Artificial sequence
  SiRNA target sequence
atagtagaccctttagtaa

SEQ ID NO: 95210 - DNA, 19 bp, Artificial sequence
  SiRNA target sequence
tagtagaccctttagtaag

SEQ ID NO: 95211 - DNA, 19 bp, Artificial sequence
  SiRNA target sequence
agtagaccctttagtaagt

SEQ ID NO: 95212 - DNA, 19 bp, Artificial sequence
  SiRNA target sequence
gtagaccctttagtaagta

SEQ ID NO: 95213 - DNA, 19 bp, Artificial sequence
  SiRNA target sequence
tagaccctttagtaagtaa

SEQ ID NO: 95214 - DNA, 19 bp, Artificial sequence
  SiRNA target sequence
agaccctttagtaagtaat

SEQ ID NO: 95215 - DNA, 19 bp, Artificial sequence
  SiRNA target sequence
gaccctttagtaagtaatt

SEQ ID NO: 95216 - DNA, 19 bp, Artificial sequence
  SiRNA target sequence
accctttagtaagtaattt

SEQ ID NO: 95217 - DNA, 19 bp, Artificial sequence
  SiRNA target sequence
ccctttagtaagtaatttt

SEQ ID NO: 95218 - DNA, 19 bp, Artificial sequence
  SiRNA target sequence
cctttagtaagtaatttta

SEQ ID NO: 95219 - DNA, 19 bp, Artificial sequence
  SiRNA target sequence
ctttagtaagtaattttaa

SEQ ID NO: 95220 - DNA, 19 bp, Artificial sequence
  SiRNA target sequence
tttagtaagtaattttaaa

SEQ ID NO: 95221 - DNA, 19 bp, Artificial sequence
  SiRNA target sequence
ttagtaagtaattttaaat

SEQ ID NO: 95222 - DNA, 19 bp, Artificial sequence
  SiRNA target sequence
tagtaagtaattttaaata

SEQ ID NO: 95223 - DNA, 19 bp, Artificial sequence
  SiRNA target sequence
agtaagtaattttaaatac

SEQ ID NO: 95224 - DNA, 19 bp, Artificial sequence
  SiRNA target sequence
gtaagtaattttaaatact

SEQ ID NO: 95225 - DNA, 19 bp, Artificial sequence
  SiRNA target sequence
taagtaattttaaatactc

SEQ ID NO: 95226 - DNA, 19 bp, Artificial sequence
  SiRNA target sequence
aagtaattttaaatactct

SEQ ID NO: 95227 - DNA, 19 bp, Artificial sequence
  SiRNA target sequence
agtaattttaaatactctg

SEQ ID NO: 95228 - DNA, 19 bp, Artificial sequence
  SiRNA target sequence
gtaattttaaatactctga

SEQ ID NO: 95229 - DNA, 19 bp, Artificial sequence
  SiRNA target sequence
taattttaaatactctgaa

SEQ ID NO: 95230 - DNA, 19 bp, Artificial sequence
  SiRNA target sequence
aattttaaatactctgaac

SEQ ID NO: 95231 - DNA, 19 bp, Artificial sequence
  SiRNA target sequence
attttaaatactctgaaca

SEQ ID NO: 95232 - DNA, 19 bp, Artificial sequence
  SiRNA target sequence
ttttaaatactctgaacaa

SEQ ID NO: 95233 - DNA, 19 bp, Artificial sequence
  SiRNA target sequence
tttaaatactctgaacaaa

SEQ ID NO: 95234 - DNA, 19 bp, Artificial sequence
  SiRNA target sequence
ttaaatactctgaacaaag

SEQ ID NO: 95235 - DNA, 19 bp, Artificial sequence
  SiRNA target sequence
taaatactctgaacaaaga

SEQ ID NO: 95236 - DNA, 19 bp, Artificial sequence
  SiRNA target sequence
aaatactctgaacaaagac

SEQ ID NO: 95237 - DNA, 19 bp, Artificial sequence
  SiRNA target sequence
aatactctgaacaaagacc

SEQ ID NO: 95238 - DNA, 19 bp, Artificial sequence
  SiRNA target sequence
atactctgaacaaagacct

SEQ ID NO: 95239 - DNA, 19 bp, Artificial sequence
  SiRNA target sequence
tactctgaacaaagacctt

SEQ ID NO: 95240 - DNA, 19 bp, Artificial sequence
  SiRNA target sequence
actctgaacaaagaccttt

SEQ ID NO: 95241 - DNA, 19 bp, Artificial sequence
  SiRNA target sequence
ctctgaacaaagacctttt

SEQ ID NO: 95242 - DNA, 19 bp, Artificial sequence
  SiRNA target sequence
tctgaacaaagaccttttc

SEQ ID NO: 95243 - DNA, 19 bp, Artificial sequence
  SiRNA target sequence
ctgaacaaagaccttttcg

SEQ ID NO: 95244 - DNA, 19 bp, Artificial sequence
  SiRNA target sequence
tgaacaaagaccttttcgt

SEQ ID NO: 95245 - DNA, 19 bp, Artificial sequence
  SiRNA target sequence
gaacaaagaccttttcgtt

SEQ ID NO: 95246 - DNA, 19 bp, Artificial sequence
  SiRNA target sequence
aacaaagaccttttcgttc

SEQ ID NO: 95247 - DNA, 19 bp, Artificial sequence
  SiRNA target sequence
acaaagaccttttcgttct

SEQ ID NO: 95248 - DNA, 19 bp, Artificial sequence
  SiRNA target sequence
caaagaccttttcgttctt

SEQ ID NO: 95249 - DNA, 19 bp, Artificial sequence
  SiRNA target sequence
aaagaccttttcgttcttc

SEQ ID NO: 95250 - DNA, 19 bp, Artificial sequence
  SiRNA target sequence
aagaccttttcgttcttct

SEQ ID NO: 95251 - DNA, 19 bp, Artificial sequence
  SiRNA target sequence
agaccttttcgttcttctt

SEQ ID NO: 95252 - DNA, 19 bp, Artificial sequence
  SiRNA target sequence
gaccttttcgttcttcttt

SEQ ID NO: 95253 - DNA, 19 bp, Artificial sequence
  SiRNA target sequence
accttttcgttcttctttt

SEQ ID NO: 95254 - DNA, 19 bp, Artificial sequence
  SiRNA target sequence
ccttttcgttcttctttta

SEQ ID NO: 95255 - DNA, 19 bp, Artificial sequence
  SiRNA target sequence
cttttcgttcttcttttaa

SEQ ID NO: 95256 - DNA, 19 bp, Artificial sequence
  SiRNA target sequence
ttttcgttcttcttttaaa

SEQ ID NO: 95257 - DNA, 19 bp, Artificial sequence
  SiRNA target sequence
tttcgttcttcttttaaac

SEQ ID NO: 95258 - DNA, 19 bp, Artificial sequence
  SiRNA target sequence
ttcgttcttcttttaaact

SEQ ID NO: 95259 - DNA, 19 bp, Artificial sequence
  SiRNA target sequence
tcgttcttcttttaaactt

SEQ ID NO: 95260 - DNA, 19 bp, Artificial sequence
  SiRNA target sequence
cgttcttcttttaaacttg

SEQ ID NO: 95261 - DNA, 19 bp, Artificial sequence
  SiRNA target sequence
gttcttcttttaaacttgt

SEQ ID NO: 95262 - DNA, 19 bp, Artificial sequence
  SiRNA target sequence
ttcttcttttaaacttgtt

SEQ ID NO: 95263 - DNA, 19 bp, Artificial sequence
  SiRNA target sequence
tcttcttttaaacttgttt

SEQ ID NO: 95264 - DNA, 19 bp, Artificial sequence
  SiRNA target sequence
cttcttttaaacttgtttt

SEQ ID NO: 95265 - DNA, 19 bp, Artificial sequence
  SiRNA target sequence
ttcttttaaacttgtttta

SEQ ID NO: 95266 - DNA, 19 bp, Artificial sequence
  SiRNA target sequence
tcttttaaacttgttttaa

SEQ ID NO: 95267 - DNA, 19 bp, Artificial sequence
  SiRNA target sequence
cttttaaacttgttttaaa

SEQ ID NO: 95268 - DNA, 19 bp, Artificial sequence
  SiRNA target sequence
ttttaaacttgttttaaaa

SEQ ID NO: 95269 - DNA, 19 bp, Artificial sequence
  SiRNA target sequence
tttaaacttgttttaaaag

SEQ ID NO: 95270 - DNA, 19 bp, Artificial sequence
  SiRNA target sequence
ttaaacttgttttaaaaga

SEQ ID NO: 95271 - DNA, 19 bp, Artificial sequence
  SiRNA target sequence
taaacttgttttaaaagaa

SEQ ID NO: 95272 - DNA, 19 bp, Artificial sequence
  SiRNA target sequence
aaacttgttttaaaagaaa

SEQ ID NO: 95273 - DNA, 19 bp, Artificial sequence
  SiRNA target sequence
aacttgttttaaaagaaac

SEQ ID NO: 95274 - DNA, 19 bp, Artificial sequence
  SiRNA target sequence
acttgttttaaaagaaaca

SEQ ID NO: 95275 - DNA, 19 bp, Artificial sequence
  SiRNA target sequence
cttgttttaaaagaaacaa

SEQ ID NO: 95276 - DNA, 19 bp, Artificial sequence
  SiRNA target sequence
ttgttttaaaagaaacaag

SEQ ID NO: 95277 - DNA, 19 bp, Artificial sequence
  SiRNA target sequence
tgttttaaaagaaacaaga

SEQ ID NO: 95278 - DNA, 19 bp, Artificial sequence
  SiRNA target sequence
gttttaaaagaaacaagag

SEQ ID NO: 95279 - DNA, 19 bp, Artificial sequence
  SiRNA target sequence
ttttaaaagaaacaagaga

SEQ ID NO: 95280 - DNA, 19 bp, Artificial sequence
  SiRNA target sequence
tttaaaagaaacaagagag

SEQ ID NO: 95281 - DNA, 19 bp, Artificial sequence
  SiRNA target sequence
ttaaaagaaacaagagaga

SEQ ID NO: 95282 - DNA, 19 bp, Artificial sequence
  SiRNA target sequence
taaaagaaacaagagagac

SEQ ID NO: 95283 - DNA, 19 bp, Artificial sequence
  SiRNA target sequence
aaaagaaacaagagagacg

SEQ ID NO: 95284 - DNA, 19 bp, Artificial sequence
  SiRNA target sequence
aaagaaacaagagagacgg

SEQ ID NO: 95285 - DNA, 19 bp, Artificial sequence
  SiRNA target sequence
aagaaacaagagagacggt

SEQ ID NO: 95286 - DNA, 19 bp, Artificial sequence
  SiRNA target sequence
agaaacaagagagacggtg

SEQ ID NO: 95287 - DNA, 19 bp, Artificial sequence
  SiRNA target sequence
gaaacaagagagacggtga

SEQ ID NO: 95288 - DNA, 19 bp, Artificial sequence
  SiRNA target sequence
aaacaagagagacggtgac

SEQ ID NO: 95289 - DNA, 19 bp, Artificial sequence
  SiRNA target sequence
aacaagagagacggtgaca

SEQ ID NO: 95290 - DNA, 19 bp, Artificial sequence
  SiRNA target sequence
acaagagagacggtgacaa

SEQ ID NO: 95291 - DNA, 19 bp, Artificial sequence
  SiRNA target sequence
caagagagacggtgacaaa

SEQ ID NO: 95292 - DNA, 19 bp, Artificial sequence
  SiRNA target sequence
aagagagacggtgacaaag

SEQ ID NO: 95293 - DNA, 19 bp, Artificial sequence
  SiRNA target sequence
agagagacggtgacaaagt

SEQ ID NO: 95294 - DNA, 19 bp, Artificial sequence
  SiRNA target sequence
gagagacggtgacaaagta

SEQ ID NO: 95295 - DNA, 19 bp, Artificial sequence
  SiRNA target sequence
agagacggtgacaaagtaa

SEQ ID NO: 95296 - DNA, 19 bp, Artificial sequence
  SiRNA target sequence
gagacggtgacaaagtaac

SEQ ID NO: 95297 - DNA, 19 bp, Artificial sequence
  SiRNA target sequence
agacggtgacaaagtaaca

SEQ ID NO: 95298 - DNA, 19 bp, Artificial sequence
  SiRNA target sequence
gacggtgacaaagtaacaa

SEQ ID NO: 95299 - DNA, 19 bp, Artificial sequence
  SiRNA target sequence
acggtgacaaagtaacaaa

SEQ ID NO: 95300 - DNA, 19 bp, Artificial sequence
  SiRNA target sequence
cggtgacaaagtaacaaaa

SEQ ID NO: 95301 - DNA, 19 bp, Artificial sequence
  SiRNA target sequence
ggtgacaaagtaacaaaaa

SEQ ID NO: 95302 - DNA, 19 bp, Artificial sequence
  SiRNA target sequence
gtgacaaagtaacaaaaat

SEQ ID NO: 95303 - DNA, 19 bp, Artificial sequence
  SiRNA target sequence
tgacaaagtaacaaaaatc

SEQ ID NO: 95304 - DNA, 19 bp, Artificial sequence
  SiRNA target sequence
gacaaagtaacaaaaatct

SEQ ID NO: 95305 - DNA, 19 bp, Artificial sequence
  SiRNA target sequence
acaaagtaacaaaaatctt

SEQ ID NO: 95306 - DNA, 19 bp, Artificial sequence
  SiRNA target sequence
caaagtaacaaaaatcttt

SEQ ID NO: 95307 - DNA, 19 bp, Artificial sequence
  SiRNA target sequence
aaagtaacaaaaatctttt

SEQ ID NO: 95308 - DNA, 19 bp, Artificial sequence
  SiRNA target sequence
aagtaacaaaaatcttttt

SEQ ID NO: 95309 - DNA, 19 bp, Artificial sequence
  SiRNA target sequence
agtaacaaaaatctttttt

SEQ ID NO: 95310 - DNA, 19 bp, Artificial sequence
  SiRNA target sequence
gtaacaaaaatcttttttc

SEQ ID NO: 95311 - DNA, 19 bp, Artificial sequence
  SiRNA target sequence
taacaaaaatcttttttcg

SEQ ID NO: 95312 - DNA, 19 bp, Artificial sequence
  SiRNA target sequence
aacaaaaatcttttttcgt

SEQ ID NO: 95313 - DNA, 19 bp, Artificial sequence
  SiRNA target sequence
acaaaaatcttttttcgtt

SEQ ID NO: 95314 - DNA, 19 bp, Artificial sequence
  SiRNA target sequence
caaaaatcttttttcgtta

SEQ ID NO: 95315 - DNA, 19 bp, Artificial sequence
  SiRNA target sequence
aaaaatcttttttcgttaa

SEQ ID NO: 95316 - DNA, 19 bp, Artificial sequence
  SiRNA target sequence
aaaatcttttttcgttaat

SEQ ID NO: 95317 - DNA, 19 bp, Artificial sequence
  SiRNA target sequence
aaatcttttttcgttaatg

SEQ ID NO: 95318 - DNA, 19 bp, Artificial sequence
  SiRNA target sequence
aatcttttttcgttaatgt

SEQ ID NO: 95319 - DNA, 19 bp, Artificial sequence
  SiRNA target sequence
atcttttttcgttaatgta

SEQ ID NO: 95320 - DNA, 19 bp, Artificial sequence
  SiRNA target sequence
tcttttttcgttaatgtaa

SEQ ID NO: 95321 - DNA, 19 bp, Artificial sequence
  SiRNA target sequence
cttttttcgttaatgtaaa

SEQ ID NO: 95322 - DNA, 19 bp, Artificial sequence
  SiRNA target sequence
ttttttcgttaatgtaaaa

SEQ ID NO: 95323 - DNA, 19 bp, Artificial sequence
  SiRNA target sequence
tttttcgttaatgtaaaat

SEQ ID NO: 95324 - DNA, 19 bp, Artificial sequence
  SiRNA target sequence
ttttcgttaatgtaaaata

SEQ ID NO: 95325 - DNA, 19 bp, Artificial sequence
  SiRNA target sequence
tttcgttaatgtaaaatat

SEQ ID NO: 95326 - DNA, 19 bp, Artificial sequence
  SiRNA target sequence
ttcgttaatgtaaaatatc

SEQ ID NO: 95327 - DNA, 19 bp, Artificial sequence
  SiRNA target sequence
tcgttaatgtaaaatatct

SEQ ID NO: 95328 - DNA, 19 bp, Artificial sequence
  SiRNA target sequence
cgttaatgtaaaatatctt

SEQ ID NO: 95329 - DNA, 19 bp, Artificial sequence
  SiRNA target sequence
gttaatgtaaaatatcttg

SEQ ID NO: 95330 - DNA, 19 bp, Artificial sequence
  SiRNA target sequence
ttaatgtaaaatatcttgg

SEQ ID NO: 95331 - DNA, 19 bp, Artificial sequence
  SiRNA target sequence
taatgtaaaatatcttgga

SEQ ID NO: 95332 - DNA, 19 bp, Artificial sequence
  SiRNA target sequence
aatgtaaaatatcttggat

SEQ ID NO: 95333 - DNA, 19 bp, Artificial sequence
  SiRNA target sequence
atgtaaaatatcttggatt

SEQ ID NO: 95334 - DNA, 19 bp, Artificial sequence
  SiRNA target sequence
tgtaaaatatcttggatta

SEQ ID NO: 95335 - DNA, 19 bp, Artificial sequence
  SiRNA target sequence
gtaaaatatcttggattaa

SEQ ID NO: 95336 - DNA, 19 bp, Artificial sequence
  SiRNA target sequence
taaaatatcttggattaat

SEQ ID NO: 95337 - DNA, 19 bp, Artificial sequence
  SiRNA target sequence
aaaatatcttggattaatt

SEQ ID NO: 95338 - DNA, 19 bp, Artificial sequence
  SiRNA target sequence
aaatatcttggattaatta

SEQ ID NO: 95339 - DNA, 19 bp, Artificial sequence
  SiRNA target sequence
aatatcttggattaattac

SEQ ID NO: 95340 - DNA, 19 bp, Artificial sequence
  SiRNA target sequence
atatcttggattaattaca

SEQ ID NO: 95341 - DNA, 19 bp, Artificial sequence
  SiRNA target sequence
tatcttggattaattacag

SEQ ID NO: 95342 - DNA, 19 bp, Artificial sequence
  SiRNA target sequence
atcttggattaattacagg

SEQ ID NO: 95343 - DNA, 19 bp, Artificial sequence
  SiRNA target sequence
tcttggattaattacaggg

SEQ ID NO: 95344 - DNA, 19 bp, Artificial sequence
  SiRNA target sequence
cttggattaattacaggga

SEQ ID NO: 95345 - DNA, 19 bp, Artificial sequence
  SiRNA target sequence
ttggattaattacagggat

SEQ ID NO: 95346 - DNA, 19 bp, Artificial sequence
  SiRNA target sequence
tggattaattacagggata

SEQ ID NO: 95347 - DNA, 19 bp, Artificial sequence
  SiRNA target sequence
ggattaattacagggatat

SEQ ID NO: 95348 - DNA, 19 bp, Artificial sequence
  SiRNA target sequence
gattaattacagggatata

SEQ ID NO: 95349 - DNA, 19 bp, Artificial sequence
  SiRNA target sequence
attaattacagggatatac

SEQ ID NO: 95350 - DNA, 19 bp, Artificial sequence
  SiRNA target sequence
ttaattacagggatatact

SEQ ID NO: 95351 - DNA, 19 bp, Artificial sequence
  SiRNA target sequence
taattacagggatatactt

SEQ ID NO: 95352 - DNA, 19 bp, Artificial sequence
  SiRNA target sequence
aattacagggatatacttg

SEQ ID NO: 95353 - DNA, 19 bp, Artificial sequence
  SiRNA target sequence
attacagggatatacttgt

SEQ ID NO: 95354 - DNA, 19 bp, Artificial sequence
  SiRNA target sequence
ttacagggatatacttgta

SEQ ID NO: 95355 - DNA, 19 bp, Artificial sequence
  SiRNA target sequence
tacagggatatacttgtac

SEQ ID NO: 95356 - DNA, 19 bp, Artificial sequence
  SiRNA target sequence
acagggatatacttgtaca

SEQ ID NO: 95357 - DNA, 19 bp, Artificial sequence
  SiRNA target sequence
cagggatatacttgtacat

SEQ ID NO: 95358 - DNA, 19 bp, Artificial sequence
  SiRNA target sequence
agggatatacttgtacata

SEQ ID NO: 95359 - DNA, 19 bp, Artificial sequence
  SiRNA target sequence
gggatatacttgtacataa

SEQ ID NO: 95360 - DNA, 19 bp, Artificial sequence
  SiRNA target sequence
ggatatacttgtacataaa

SEQ ID NO: 95361 - DNA, 19 bp, Artificial sequence
  SiRNA target sequence
gatatacttgtacataaaa

SEQ ID NO: 95362 - DNA, 19 bp, Artificial sequence
  SiRNA target sequence
atatacttgtacataaaat

SEQ ID NO: 95363 - DNA, 19 bp, Artificial sequence
  SiRNA target sequence
tatacttgtacataaaatt

SEQ ID NO: 95364 - DNA, 19 bp, Artificial sequence
  SiRNA target sequence
atacttgtacataaaattt

SEQ ID NO: 95365 - DNA, 19 bp, Artificial sequence
  SiRNA target sequence
tacttgtacataaaatttg

SEQ ID NO: 95366 - DNA, 19 bp, Artificial sequence
  SiRNA target sequence
acttgtacataaaatttga

SEQ ID NO: 95367 - DNA, 19 bp, Artificial sequence
  SiRNA target sequence
cttgtacataaaatttgag

SEQ ID NO: 95368 - DNA, 19 bp, Artificial sequence
  SiRNA target sequence
ttgtacataaaatttgagg

SEQ ID NO: 95369 - DNA, 19 bp, Artificial sequence
  SiRNA target sequence
tgtacataaaatttgaggt

SEQ ID NO: 95370 - DNA, 19 bp, Artificial sequence
  SiRNA target sequence
gtacataaaatttgaggta

SEQ ID NO: 95371 - DNA, 19 bp, Artificial sequence
  SiRNA target sequence
tacataaaatttgaggtaa

SEQ ID NO: 95372 - DNA, 19 bp, Artificial sequence
  SiRNA target sequence
acataaaatttgaggtaag

SEQ ID NO: 95373 - DNA, 19 bp, Artificial sequence
  SiRNA target sequence
cataaaatttgaggtaagt

SEQ ID NO: 95374 - DNA, 19 bp, Artificial sequence
  SiRNA target sequence
ataaaatttgaggtaagtt

SEQ ID NO: 95375 - DNA, 19 bp, Artificial sequence
  SiRNA target sequence
taaaatttgaggtaagttt

SEQ ID NO: 95376 - DNA, 19 bp, Artificial sequence
  SiRNA target sequence
aaaatttgaggtaagtttt

SEQ ID NO: 95377 - DNA, 19 bp, Artificial sequence
  SiRNA target sequence
aaatttgaggtaagtttta

SEQ ID NO: 95378 - DNA, 19 bp, Artificial sequence
  SiRNA target sequence
aatttgaggtaagttttat

SEQ ID NO: 95379 - DNA, 19 bp, Artificial sequence
  SiRNA target sequence
atttgaggtaagttttatc

SEQ ID NO: 95380 - DNA, 19 bp, Artificial sequence
  SiRNA target sequence
tttgaggtaagttttatct

SEQ ID NO: 95381 - DNA, 19 bp, Artificial sequence
  SiRNA target sequence
ttgaggtaagttttatctt

SEQ ID NO: 95382 - DNA, 19 bp, Artificial sequence
  SiRNA target sequence
tgaggtaagttttatctta

SEQ ID NO: 95383 - DNA, 19 bp, Artificial sequence
  SiRNA target sequence
gaggtaagttttatcttaa

SEQ ID NO: 95384 - DNA, 19 bp, Artificial sequence
  SiRNA target sequence
aggtaagttttatcttaaa

SEQ ID NO: 95385 - DNA, 19 bp, Artificial sequence
  SiRNA target sequence
ggtaagttttatcttaaaa

SEQ ID NO: 95386 - DNA, 19 bp, Artificial sequence
  SiRNA target sequence
gtaagttttatcttaaaat

SEQ ID NO: 95387 - DNA, 19 bp, Artificial sequence
  SiRNA target sequence
taagttttatcttaaaatc

SEQ ID NO: 95388 - DNA, 19 bp, Artificial sequence
  SiRNA target sequence
aagttttatcttaaaatct

SEQ ID NO: 95389 - DNA, 19 bp, Artificial sequence
  SiRNA target sequence
agttttatcttaaaatctt

SEQ ID NO: 95390 - DNA, 19 bp, Artificial sequence
  SiRNA target sequence
gttttatcttaaaatcttt

SEQ ID NO: 95391 - DNA, 19 bp, Artificial sequence
  SiRNA target sequence
ttttatcttaaaatctttt

SEQ ID NO: 95392 - DNA, 19 bp, Artificial sequence
  SiRNA target sequence
tttatcttaaaatctttta

SEQ ID NO: 95393 - DNA, 19 bp, Artificial sequence
  SiRNA target sequence
ttatcttaaaatcttttag

SEQ ID NO: 95394 - DNA, 19 bp, Artificial sequence
  SiRNA target sequence
tatcttaaaatcttttaga

SEQ ID NO: 95395 - DNA, 19 bp, Artificial sequence
  SiRNA target sequence
atcttaaaatcttttagaa

SEQ ID NO: 95396 - DNA, 19 bp, Artificial sequence
  SiRNA target sequence
tcttaaaatcttttagaac

SEQ ID NO: 95397 - DNA, 19 bp, Artificial sequence
  SiRNA target sequence
cttaaaatcttttagaacc

SEQ ID NO: 95398 - DNA, 19 bp, Artificial sequence
  SiRNA target sequence
ttaaaatcttttagaacct

SEQ ID NO: 95399 - DNA, 19 bp, Artificial sequence
  SiRNA target sequence
taaaatcttttagaacctc

SEQ ID NO: 95400 - DNA, 19 bp, Artificial sequence
  SiRNA target sequence
aaaatcttttagaacctca

SEQ ID NO: 95401 - DNA, 19 bp, Artificial sequence
  SiRNA target sequence
aaatcttttagaacctcaa

SEQ ID NO: 95402 - DNA, 19 bp, Artificial sequence
  SiRNA target sequence
aatcttttagaacctcaaa

SEQ ID NO: 95403 - DNA, 19 bp, Artificial sequence
  SiRNA target sequence
atcttttagaacctcaaaa

SEQ ID NO: 95404 - DNA, 19 bp, Artificial sequence
  SiRNA target sequence
tcttttagaacctcaaaaa

SEQ ID NO: 95405 - DNA, 19 bp, Artificial sequence
  SiRNA target sequence
cttttagaacctcaaaaat

SEQ ID NO: 95406 - DNA, 19 bp, Artificial sequence
  SiRNA target sequence
ttttagaacctcaaaaata

SEQ ID NO: 95407 - DNA, 19 bp, Artificial sequence
  SiRNA target sequence
tttagaacctcaaaaatag

SEQ ID NO: 95408 - DNA, 19 bp, Artificial sequence
  SiRNA target sequence
ttagaacctcaaaaatagt

SEQ ID NO: 95409 - DNA, 19 bp, Artificial sequence
  SiRNA target sequence
tagaacctcaaaaatagtg

SEQ ID NO: 95410 - DNA, 19 bp, Artificial sequence
  SiRNA target sequence
agaacctcaaaaatagtgc

SEQ ID NO: 95411 - DNA, 19 bp, Artificial sequence
  SiRNA target sequence
gaacctcaaaaatagtgcg

SEQ ID NO: 95412 - DNA, 19 bp, Artificial sequence
  SiRNA target sequence
aacctcaaaaatagtgcgc

SEQ ID NO: 95413 - DNA, 19 bp, Artificial sequence
  SiRNA target sequence
acctcaaaaatagtgcgct

SEQ ID NO: 95414 - DNA, 19 bp, Artificial sequence
  SiRNA target sequence
cctcaaaaatagtgcgctt

SEQ ID NO: 95415 - DNA, 19 bp, Artificial sequence
  SiRNA target sequence
ctcaaaaatagtgcgcttc

SEQ ID NO: 95416 - DNA, 19 bp, Artificial sequence
  SiRNA target sequence
tcaaaaatagtgcgcttcg

SEQ ID NO: 95417 - DNA, 19 bp, Artificial sequence
  SiRNA target sequence
caaaaatagtgcgcttcgg

SEQ ID NO: 95418 - DNA, 19 bp, Artificial sequence
  SiRNA target sequence
aaaaatagtgcgcttcggt

SEQ ID NO: 95419 - DNA, 19 bp, Artificial sequence
  SiRNA target sequence
aaaatagtgcgcttcggta

SEQ ID NO: 95420 - DNA, 19 bp, Artificial sequence
  SiRNA target sequence
aaatagtgcgcttcggtag

SEQ ID NO: 95421 - DNA, 19 bp, Artificial sequence
  SiRNA target sequence
aatagtgcgcttcggtagt

SEQ ID NO: 95422 - DNA, 19 bp, Artificial sequence
  SiRNA target sequence
atagtgcgcttcggtagta

SEQ ID NO: 95423 - DNA, 19 bp, Artificial sequence
  SiRNA target sequence
tagtgcgcttcggtagtaa

SEQ ID NO: 95424 - DNA, 19 bp, Artificial sequence
  SiRNA target sequence
agtgcgcttcggtagtaaa

SEQ ID NO: 95425 - DNA, 19 bp, Artificial sequence
  SiRNA target sequence
gtgcgcttcggtagtaaaa

SEQ ID NO: 95426 - DNA, 19 bp, Artificial sequence
  SiRNA target sequence
tgcgcttcggtagtaaaat

SEQ ID NO: 95427 - DNA, 19 bp, Artificial sequence
  SiRNA target sequence
gcgcttcggtagtaaaatg

SEQ ID NO: 95428 - DNA, 19 bp, Artificial sequence
  SiRNA target sequence
cgcttcggtagtaaaatgt

SEQ ID NO: 95429 - DNA, 19 bp, Artificial sequence
  SiRNA target sequence
gcttcggtagtaaaatgta

SEQ ID NO: 95430 - DNA, 19 bp, Artificial sequence
  SiRNA target sequence
cttcggtagtaaaatgtaa

SEQ ID NO: 95431 - DNA, 19 bp, Artificial sequence
  SiRNA target sequence
ttcggtagtaaaatgtaat

SEQ ID NO: 95432 - DNA, 19 bp, Artificial sequence
  SiRNA target sequence
tcggtagtaaaatgtaatc

SEQ ID NO: 95433 - DNA, 19 bp, Artificial sequence
  SiRNA target sequence
cggtagtaaaatgtaatca

SEQ ID NO: 95434 - DNA, 19 bp, Artificial sequence
  SiRNA target sequence
ggtagtaaaatgtaatcat

SEQ ID NO: 95435 - DNA, 19 bp, Artificial sequence
  SiRNA target sequence
gtagtaaaatgtaatcata

SEQ ID NO: 95436 - DNA, 19 bp, Artificial sequence
  SiRNA target sequence
tagtaaaatgtaatcatag

SEQ ID NO: 95437 - DNA, 19 bp, Artificial sequence
  SiRNA target sequence
agtaaaatgtaatcatagt

SEQ ID NO: 95438 - DNA, 19 bp, Artificial sequence
  SiRNA target sequence
gtaaaatgtaatcatagta

SEQ ID NO: 95439 - DNA, 19 bp, Artificial sequence
  SiRNA target sequence
taaaatgtaatcatagtac

SEQ ID NO: 95440 - DNA, 19 bp, Artificial sequence
  SiRNA target sequence
aaaatgtaatcatagtaca

SEQ ID NO: 95441 - DNA, 19 bp, Artificial sequence
  SiRNA target sequence
aaatgtaatcatagtacag

SEQ ID NO: 95442 - DNA, 19 bp, Artificial sequence
  SiRNA target sequence
aatgtaatcatagtacaga

SEQ ID NO: 95443 - DNA, 19 bp, Artificial sequence
  SiRNA target sequence
atgtaatcatagtacagat

SEQ ID NO: 95444 - DNA, 19 bp, Artificial sequence
  SiRNA target sequence
tgtaatcatagtacagatc

SEQ ID NO: 95445 - DNA, 19 bp, Artificial sequence
  SiRNA target sequence
gtaatcatagtacagatcg

SEQ ID NO: 95446 - DNA, 19 bp, Artificial sequence
  SiRNA target sequence
taatcatagtacagatcgt

SEQ ID NO: 95447 - DNA, 19 bp, Artificial sequence
  SiRNA target sequence
aatcatagtacagatcgta

SEQ ID NO: 95448 - DNA, 19 bp, Artificial sequence
  SiRNA target sequence
atcatagtacagatcgtaa

SEQ ID NO: 95449 - DNA, 19 bp, Artificial sequence
  SiRNA target sequence
tcatagtacagatcgtaat

SEQ ID NO: 95450 - DNA, 19 bp, Artificial sequence
  SiRNA target sequence
catagtacagatcgtaatt

SEQ ID NO: 95451 - DNA, 19 bp, Artificial sequence
  SiRNA target sequence
atagtacagatcgtaattt

SEQ ID NO: 95452 - DNA, 19 bp, Artificial sequence
  SiRNA target sequence
tagtacagatcgtaattta

SEQ ID NO: 95453 - DNA, 19 bp, Artificial sequence
  SiRNA target sequence
agtacagatcgtaatttag

SEQ ID NO: 95454 - DNA, 19 bp, Artificial sequence
  SiRNA target sequence
gtacagatcgtaatttaga

SEQ ID NO: 95455 - DNA, 19 bp, Artificial sequence
  SiRNA target sequence
tacagatcgtaatttagat

SEQ ID NO: 95456 - DNA, 19 bp, Artificial sequence
  SiRNA target sequence
acagatcgtaatttagata

SEQ ID NO: 95457 - DNA, 19 bp, Artificial sequence
  SiRNA target sequence
cagatcgtaatttagataa

SEQ ID NO: 95458 - DNA, 19 bp, Artificial sequence
  SiRNA target sequence
agatcgtaatttagataaa

SEQ ID NO: 95459 - DNA, 19 bp, Artificial sequence
  SiRNA target sequence
gatcgtaatttagataaat

SEQ ID NO: 95460 - DNA, 19 bp, Artificial sequence
  SiRNA target sequence
atcgtaatttagataaatt

SEQ ID NO: 95461 - DNA, 19 bp, Artificial sequence
  SiRNA target sequence
tcgtaatttagataaattt

SEQ ID NO: 95462 - DNA, 19 bp, Artificial sequence
  SiRNA target sequence
cgtaatttagataaatttc

SEQ ID NO: 95463 - DNA, 19 bp, Artificial sequence
  SiRNA target sequence
gtaatttagataaatttct

SEQ ID NO: 95464 - DNA, 19 bp, Artificial sequence
  SiRNA target sequence
taatttagataaatttctt

SEQ ID NO: 95465 - DNA, 19 bp, Artificial sequence
  SiRNA target sequence
aatttagataaatttcttt

SEQ ID NO: 95466 - DNA, 19 bp, Artificial sequence
  SiRNA target sequence
atttagataaatttcttta

SEQ ID NO: 95467 - DNA, 19 bp, Artificial sequence
  SiRNA target sequence
tttagataaatttctttac

SEQ ID NO: 95468 - DNA, 19 bp, Artificial sequence
  SiRNA target sequence
ttagataaatttctttaca

SEQ ID NO: 95469 - DNA, 19 bp, Artificial sequence
  SiRNA target sequence
tagataaatttctttacat

SEQ ID NO: 95470 - DNA, 19 bp, Artificial sequence
  SiRNA target sequence
agataaatttctttacatt

SEQ ID NO: 95471 - DNA, 19 bp, Artificial sequence
  SiRNA target sequence
gataaatttctttacattt

SEQ ID NO: 95472 - DNA, 19 bp, Artificial sequence
  SiRNA target sequence
ataaatttctttacatttc

SEQ ID NO: 95473 - DNA, 19 bp, Artificial sequence
  SiRNA target sequence
taaatttctttacatttct

SEQ ID NO: 95474 - DNA, 19 bp, Artificial sequence
  SiRNA target sequence
aaatttctttacatttctc

SEQ ID NO: 95475 - DNA, 19 bp, Artificial sequence
  SiRNA target sequence
aatttctttacatttctca

SEQ ID NO: 95476 - DNA, 19 bp, Artificial sequence
  SiRNA target sequence
atttctttacatttctcac

SEQ ID NO: 95477 - DNA, 19 bp, Artificial sequence
  SiRNA target sequence
tttctttacatttctcacg

SEQ ID NO: 95478 - DNA, 19 bp, Artificial sequence
  SiRNA target sequence
ttctttacatttctcacga

SEQ ID NO: 95479 - DNA, 19 bp, Artificial sequence
  SiRNA target sequence
tctttacatttctcacgat

SEQ ID NO: 95480 - DNA, 19 bp, Artificial sequence
  SiRNA target sequence
ctttacatttctcacgata

SEQ ID NO: 95481 - DNA, 19 bp, Artificial sequence
  SiRNA target sequence
tttacatttctcacgatat

SEQ ID NO: 95482 - DNA, 19 bp, Artificial sequence
  SiRNA target sequence
ttacatttctcacgatatt

SEQ ID NO: 95483 - DNA, 19 bp, Artificial sequence
  SiRNA target sequence
tacatttctcacgatattc

SEQ ID NO: 95484 - DNA, 19 bp, Artificial sequence
  SiRNA target sequence
acatttctcacgatattcc

SEQ ID NO: 95485 - DNA, 19 bp, Artificial sequence
  SiRNA target sequence
catttctcacgatattcct

SEQ ID NO: 95486 - DNA, 19 bp, Artificial sequence
  SiRNA target sequence
atttctcacgatattcctc

SEQ ID NO: 95487 - DNA, 19 bp, Artificial sequence
  SiRNA target sequence
tttctcacgatattcctca

SEQ ID NO: 95488 - DNA, 19 bp, Artificial sequence
  SiRNA target sequence
ttctcacgatattcctcag

SEQ ID NO: 95489 - DNA, 19 bp, Artificial sequence
  SiRNA target sequence
tctcacgatattcctcagc

SEQ ID NO: 95490 - DNA, 19 bp, Artificial sequence
  SiRNA target sequence
ctcacgatattcctcagca

SEQ ID NO: 95491 - DNA, 19 bp, Artificial sequence
  SiRNA target sequence
tcacgatattcctcagcaa

SEQ ID NO: 95492 - DNA, 19 bp, Artificial sequence
  SiRNA target sequence
cacgatattcctcagcaat

SEQ ID NO: 95493 - DNA, 19 bp, Artificial sequence
  SiRNA target sequence
acgatattcctcagcaatg

SEQ ID NO: 95494 - DNA, 19 bp, Artificial sequence
  SiRNA target sequence
cgatattcctcagcaatgg

SEQ ID NO: 95495 - DNA, 19 bp, Artificial sequence
  SiRNA target sequence
gatattcctcagcaatggt

SEQ ID NO: 95496 - DNA, 19 bp, Artificial sequence
  SiRNA target sequence
atattcctcagcaatggta

SEQ ID NO: 95497 - DNA, 19 bp, Artificial sequence
  SiRNA target sequence
tattcctcagcaatggtat

SEQ ID NO: 95498 - DNA, 19 bp, Artificial sequence
  SiRNA target sequence
attcctcagcaatggtatc

SEQ ID NO: 95499 - DNA, 19 bp, Artificial sequence
  SiRNA target sequence
ttcctcagcaatggtatct

SEQ ID NO: 95500 - DNA, 19 bp, Artificial sequence
  SiRNA target sequence
tcctcagcaatggtatctg

SEQ ID NO: 95501 - DNA, 19 bp, Artificial sequence
  SiRNA target sequence
cctcagcaatggtatctgt

SEQ ID NO: 95502 - DNA, 19 bp, Artificial sequence
  SiRNA target sequence
ctcagcaatggtatctgtg

SEQ ID NO: 95503 - DNA, 19 bp, Artificial sequence
  SiRNA target sequence
tcagcaatggtatctgtga

SEQ ID NO: 95504 - DNA, 19 bp, Artificial sequence
  SiRNA target sequence
cagcaatggtatctgtgat

SEQ ID NO: 95505 - DNA, 19 bp, Artificial sequence
  SiRNA target sequence
agcaatggtatctgtgata

SEQ ID NO: 95506 - DNA, 19 bp, Artificial sequence
  SiRNA target sequence
gcaatggtatctgtgataa

SEQ ID NO: 95507 - DNA, 19 bp, Artificial sequence
  SiRNA target sequence
caatggtatctgtgataag

SEQ ID NO: 95508 - DNA, 19 bp, Artificial sequence
  SiRNA target sequence
aatggtatctgtgataagc

SEQ ID NO: 95509 - DNA, 19 bp, Artificial sequence
  SiRNA target sequence
atggtatctgtgataagcg

SEQ ID NO: 95510 - DNA, 19 bp, Artificial sequence
  SiRNA target sequence
tggtatctgtgataagcga

SEQ ID NO: 95511 - DNA, 19 bp, Artificial sequence
  SiRNA target sequence
ggtatctgtgataagcgaa

SEQ ID NO: 95512 - DNA, 19 bp, Artificial sequence
  SiRNA target sequence
gtatctgtgataagcgaaa

SEQ ID NO: 95513 - DNA, 19 bp, Artificial sequence
  SiRNA target sequence
tatctgtgataagcgaaag

SEQ ID NO: 95514 - DNA, 19 bp, Artificial sequence
  SiRNA target sequence
atctgtgataagcgaaagt

SEQ ID NO: 95515 - DNA, 19 bp, Artificial sequence
  SiRNA target sequence
tctgtgataagcgaaagtt

SEQ ID NO: 95516 - DNA, 19 bp, Artificial sequence
  SiRNA target sequence
ctgtgataagcgaaagttg

SEQ ID NO: 95517 - DNA, 19 bp, Artificial sequence
  SiRNA target sequence
tgtgataagcgaaagttgt

SEQ ID NO: 95518 - DNA, 19 bp, Artificial sequence
  SiRNA target sequence
gtgataagcgaaagttgta

SEQ ID NO: 95519 - DNA, 19 bp, Artificial sequence
  SiRNA target sequence
tgataagcgaaagttgtag

SEQ ID NO: 95520 - DNA, 19 bp, Artificial sequence
  SiRNA target sequence
gataagcgaaagttgtaga

SEQ ID NO: 95521 - DNA, 19 bp, Artificial sequence
  SiRNA target sequence
ataagcgaaagttgtagaa

SEQ ID NO: 95522 - DNA, 19 bp, Artificial sequence
  SiRNA target sequence
taagcgaaagttgtagaaa

SEQ ID NO: 95523 - DNA, 19 bp, Artificial sequence
  SiRNA target sequence
aagcgaaagttgtagaaaa

SEQ ID NO: 95524 - DNA, 19 bp, Artificial sequence
  SiRNA target sequence
agcgaaagttgtagaaaaa

SEQ ID NO: 95525 - DNA, 19 bp, Artificial sequence
  SiRNA target sequence
gcgaaagttgtagaaaaaa

SEQ ID NO: 95526 - DNA, 19 bp, Artificial sequence
  SiRNA target sequence
cgaaagttgtagaaaaaaa

SEQ ID NO: 95527 - DNA, 19 bp, Artificial sequence
  SiRNA target sequence
gaaagttgtagaaaaaaat

SEQ ID NO: 95528 - DNA, 19 bp, Artificial sequence
  SiRNA target sequence
aaagttgtagaaaaaaata

SEQ ID NO: 95529 - DNA, 19 bp, Artificial sequence
  SiRNA target sequence
aagttgtagaaaaaaatag

SEQ ID NO: 95530 - DNA, 19 bp, Artificial sequence
  SiRNA target sequence
agttgtagaaaaaaataga

SEQ ID NO: 95531 - DNA, 19 bp, Artificial sequence
  SiRNA target sequence
gttgtagaaaaaaatagat

SEQ ID NO: 95532 - DNA, 19 bp, Artificial sequence
  SiRNA target sequence
ttgtagaaaaaaatagatt

SEQ ID NO: 95533 - DNA, 19 bp, Artificial sequence
  SiRNA target sequence
tgtagaaaaaaatagattt

SEQ ID NO: 95534 - DNA, 19 bp, Artificial sequence
  SiRNA target sequence
gtagaaaaaaatagatttg

SEQ ID NO: 95535 - DNA, 19 bp, Artificial sequence
  SiRNA target sequence
tagaaaaaaatagatttga

SEQ ID NO: 95536 - DNA, 19 bp, Artificial sequence
  SiRNA target sequence
agaaaaaaatagatttgag

SEQ ID NO: 95537 - DNA, 19 bp, Artificial sequence
  SiRNA target sequence
gaaaaaaatagatttgagg

SEQ ID NO: 95538 - DNA, 19 bp, Artificial sequence
  SiRNA target sequence
aaaaaaatagatttgagga

SEQ ID NO: 95539 - DNA, 19 bp, Artificial sequence
  SiRNA target sequence
aaaaaatagatttgaggaa

SEQ ID NO: 95540 - DNA, 19 bp, Artificial sequence
  SiRNA target sequence
aaaaatagatttgaggaat

SEQ ID NO: 95541 - DNA, 19 bp, Artificial sequence
  SiRNA target sequence
aaaatagatttgaggaata

SEQ ID NO: 95542 - DNA, 19 bp, Artificial sequence
  SiRNA target sequence
aaatagatttgaggaatag

SEQ ID NO: 95543 - DNA, 19 bp, Artificial sequence
  SiRNA target sequence
aatagatttgaggaataga

SEQ ID NO: 95544 - DNA, 19 bp, Artificial sequence
  SiRNA target sequence
atagatttgaggaatagaa

SEQ ID NO: 95545 - DNA, 19 bp, Artificial sequence
  SiRNA target sequence
tagatttgaggaatagaat

SEQ ID NO: 95546 - DNA, 19 bp, Artificial sequence
  SiRNA target sequence
agatttgaggaatagaatt

SEQ ID NO: 95547 - DNA, 19 bp, Artificial sequence
  SiRNA target sequence
gatttgaggaatagaatta

SEQ ID NO: 95548 - DNA, 19 bp, Artificial sequence
  SiRNA target sequence
atttgaggaatagaattaa

SEQ ID NO: 95549 - DNA, 19 bp, Artificial sequence
  SiRNA target sequence
tttgaggaatagaattaaa

SEQ ID NO: 95550 - DNA, 19 bp, Artificial sequence
  SiRNA target sequence
ttgaggaatagaattaaaa

SEQ ID NO: 95551 - DNA, 19 bp, Artificial sequence
  SiRNA target sequence
tgaggaatagaattaaaat

SEQ ID NO: 95552 - DNA, 19 bp, Artificial sequence
  SiRNA target sequence
gaggaatagaattaaaatc

SEQ ID NO: 95553 - DNA, 19 bp, Artificial sequence
  SiRNA target sequence
aggaatagaattaaaatca

SEQ ID NO: 95554 - DNA, 19 bp, Artificial sequence
  SiRNA target sequence
ggaatagaattaaaatcac

SEQ ID NO: 95555 - DNA, 19 bp, Artificial sequence
  SiRNA target sequence
gaatagaattaaaatcaca

SEQ ID NO: 95556 - DNA, 19 bp, Artificial sequence
  SiRNA target sequence
aatagaattaaaatcacaa

SEQ ID NO: 95557 - DNA, 19 bp, Artificial sequence
  SiRNA target sequence
atagaattaaaatcacaat

SEQ ID NO: 95558 - DNA, 19 bp, Artificial sequence
  SiRNA target sequence
tagaattaaaatcacaata

SEQ ID NO: 95559 - DNA, 19 bp, Artificial sequence
  SiRNA target sequence
agaattaaaatcacaatat

SEQ ID NO: 95560 - DNA, 19 bp, Artificial sequence
  SiRNA target sequence
gaattaaaatcacaatatt

SEQ ID NO: 95561 - DNA, 19 bp, Artificial sequence
  SiRNA target sequence
aattaaaatcacaatattt

SEQ ID NO: 95562 - DNA, 19 bp, Artificial sequence
  SiRNA target sequence
attaaaatcacaatatttt

SEQ ID NO: 95563 - DNA, 19 bp, Artificial sequence
  SiRNA target sequence
ttaaaatcacaatattttt

SEQ ID NO: 95564 - DNA, 19 bp, Artificial sequence
  SiRNA target sequence
taaaatcacaatatttttt

SEQ ID NO: 95565 - DNA, 19 bp, Artificial sequence
  SiRNA target sequence
aaaatcacaatatttttta

SEQ ID NO: 95566 - DNA, 19 bp, Artificial sequence
  SiRNA target sequence
aaatcacaatattttttaa

SEQ ID NO: 95567 - DNA, 19 bp, Artificial sequence
  SiRNA target sequence
aatcacaatattttttaat

SEQ ID NO: 95568 - DNA, 19 bp, Artificial sequence
  SiRNA target sequence
atcacaatattttttaata

SEQ ID NO: 95569 - DNA, 19 bp, Artificial sequence
  SiRNA target sequence
tcacaatattttttaatat

SEQ ID NO: 95570 - DNA, 19 bp, Artificial sequence
  SiRNA target sequence
cacaatattttttaatata

SEQ ID NO: 95571 - DNA, 19 bp, Artificial sequence
  SiRNA target sequence
acaatattttttaatatat

SEQ ID NO: 95572 - DNA, 19 bp, Artificial sequence
  SiRNA target sequence
caatattttttaatatatt

SEQ ID NO: 95573 - DNA, 19 bp, Artificial sequence
  SiRNA target sequence
aatattttttaatatattt

SEQ ID NO: 95574 - DNA, 19 bp, Artificial sequence
  SiRNA target sequence
atattttttaatatattta

SEQ ID NO: 95575 - DNA, 19 bp, Artificial sequence
  SiRNA target sequence
tattttttaatatatttaa

SEQ ID NO: 95576 - DNA, 19 bp, Artificial sequence
  SiRNA target sequence
attttttaatatatttaac

SEQ ID NO: 95577 - DNA, 19 bp, Artificial sequence
  SiRNA target sequence
ttttttaatatatttaacc

SEQ ID NO: 95578 - DNA, 19 bp, Artificial sequence
  SiRNA target sequence
tttttaatatatttaacca

SEQ ID NO: 95579 - DNA, 19 bp, Artificial sequence
  SiRNA target sequence
ttttaatatatttaaccaa

SEQ ID NO: 95580 - DNA, 19 bp, Artificial sequence
  SiRNA target sequence
tttaatatatttaaccaag

SEQ ID NO: 95581 - DNA, 19 bp, Artificial sequence
  SiRNA target sequence
ttaatatatttaaccaagg

SEQ ID NO: 95582 - DNA, 19 bp, Artificial sequence
  SiRNA target sequence
taatatatttaaccaaggt

SEQ ID NO: 95583 - DNA, 19 bp, Artificial sequence
  SiRNA target sequence
aatatatttaaccaaggta

SEQ ID NO: 95584 - DNA, 19 bp, Artificial sequence
  SiRNA target sequence
atatatttaaccaaggtat

SEQ ID NO: 95585 - DNA, 19 bp, Artificial sequence
  SiRNA target sequence
tatatttaaccaaggtatt

SEQ ID NO: 95586 - DNA, 19 bp, Artificial sequence
  SiRNA target sequence
atatttaaccaaggtattg

SEQ ID NO: 95587 - DNA, 19 bp, Artificial sequence
  SiRNA target sequence
tatttaaccaaggtattgt

SEQ ID NO: 95588 - DNA, 19 bp, Artificial sequence
  SiRNA target sequence
atttaaccaaggtattgtc

SEQ ID NO: 95589 - DNA, 19 bp, Artificial sequence
  SiRNA target sequence
tttaaccaaggtattgtcc

SEQ ID NO: 95590 - DNA, 19 bp, Artificial sequence
  SiRNA target sequence
ttaaccaaggtattgtcct

SEQ ID NO: 95591 - DNA, 19 bp, Artificial sequence
  SiRNA target sequence
taaccaaggtattgtcctt

SEQ ID NO: 95592 - DNA, 19 bp, Artificial sequence
  SiRNA target sequence
aaccaaggtattgtccttt

SEQ ID NO: 95593 - DNA, 19 bp, Artificial sequence
  SiRNA target sequence
accaaggtattgtccttta

SEQ ID NO: 95594 - DNA, 19 bp, Artificial sequence
  SiRNA target sequence
ccaaggtattgtcctttat

SEQ ID NO: 95595 - DNA, 19 bp, Artificial sequence
  SiRNA target sequence
caaggtattgtcctttatg

SEQ ID NO: 95596 - DNA, 19 bp, Artificial sequence
  SiRNA target sequence
aaggtattgtcctttatgt

SEQ ID NO: 95597 - DNA, 19 bp, Artificial sequence
  SiRNA target sequence
aggtattgtcctttatgtt

SEQ ID NO: 95598 - DNA, 19 bp, Artificial sequence
  SiRNA target sequence
ggtattgtcctttatgtta

SEQ ID NO: 95599 - DNA, 19 bp, Artificial sequence
  SiRNA target sequence
gtattgtcctttatgttat

SEQ ID NO: 95600 - DNA, 19 bp, Artificial sequence
  SiRNA target sequence
tattgtcctttatgttatt

SEQ ID NO: 95601 - DNA, 19 bp, Artificial sequence
  SiRNA target sequence
attgtcctttatgttatta

SEQ ID NO: 95602 - DNA, 19 bp, Artificial sequence
  SiRNA target sequence
ttgtcctttatgttattat

SEQ ID NO: 95603 - DNA, 19 bp, Artificial sequence
  SiRNA target sequence
tgtcctttatgttattata

SEQ ID NO: 95604 - DNA, 19 bp, Artificial sequence
  SiRNA target sequence
gtcctttatgttattatat

SEQ ID NO: 95605 - DNA, 19 bp, Artificial sequence
  SiRNA target sequence
tcctttatgttattatatc

SEQ ID NO: 95606 - DNA, 19 bp, Artificial sequence
  SiRNA target sequence
cctttatgttattatatct

SEQ ID NO: 95607 - DNA, 19 bp, Artificial sequence
  SiRNA target sequence
ctttatgttattatatctt

SEQ ID NO: 95608 - DNA, 19 bp, Artificial sequence
  SiRNA target sequence
tttatgttattatatctta

SEQ ID NO: 95609 - DNA, 19 bp, Artificial sequence
  SiRNA target sequence
ttatgttattatatcttac

SEQ ID NO: 95610 - DNA, 19 bp, Artificial sequence
  SiRNA target sequence
tatgttattatatcttaca

SEQ ID NO: 95611 - DNA, 19 bp, Artificial sequence
  SiRNA target sequence
atgttattatatcttacaa

SEQ ID NO: 95612 - DNA, 19 bp, Artificial sequence
  SiRNA target sequence
tgttattatatcttacaaa

SEQ ID NO: 95613 - DNA, 19 bp, Artificial sequence
  SiRNA target sequence
gttattatatcttacaaac

SEQ ID NO: 95614 - DNA, 19 bp, Artificial sequence
  SiRNA target sequence
ttattatatcttacaaact

SEQ ID NO: 95615 - DNA, 19 bp, Artificial sequence
  SiRNA target sequence
tattatatcttacaaactc

SEQ ID NO: 95616 - DNA, 19 bp, Artificial sequence
  SiRNA target sequence
attatatcttacaaactcc

SEQ ID NO: 95617 - DNA, 19 bp, Artificial sequence
  SiRNA target sequence
ttatatcttacaaactcct

SEQ ID NO: 95618 - DNA, 19 bp, Artificial sequence
  SiRNA target sequence
tatatcttacaaactcctc

SEQ ID NO: 95619 - DNA, 19 bp, Artificial sequence
  SiRNA target sequence
atatcttacaaactcctcg

SEQ ID NO: 95620 - DNA, 19 bp, Artificial sequence
  SiRNA target sequence
tatcttacaaactcctcgt

SEQ ID NO: 95621 - DNA, 19 bp, Artificial sequence
  SiRNA target sequence
atcttacaaactcctcgta

SEQ ID NO: 95622 - DNA, 19 bp, Artificial sequence
  SiRNA target sequence
tcttacaaactcctcgtaa

SEQ ID NO: 95623 - DNA, 19 bp, Artificial sequence
  SiRNA target sequence
cttacaaactcctcgtaat

SEQ ID NO: 95624 - DNA, 19 bp, Artificial sequence
  SiRNA target sequence
ttacaaactcctcgtaatt

SEQ ID NO: 95625 - DNA, 19 bp, Artificial sequence
  SiRNA target sequence
tacaaactcctcgtaatta

SEQ ID NO: 95626 - DNA, 19 bp, Artificial sequence
  SiRNA target sequence
acaaactcctcgtaattat

SEQ ID NO: 95627 - DNA, 19 bp, Artificial sequence
  SiRNA target sequence
caaactcctcgtaattata

SEQ ID NO: 95628 - DNA, 19 bp, Artificial sequence
  SiRNA target sequence
aaactcctcgtaattataa

SEQ ID NO: 95629 - DNA, 19 bp, Artificial sequence
  SiRNA target sequence
aactcctcgtaattataat

SEQ ID NO: 95630 - DNA, 19 bp, Artificial sequence
  SiRNA target sequence
actcctcgtaattataatt

SEQ ID NO: 95631 - DNA, 19 bp, Artificial sequence
  SiRNA target sequence
ctcctcgtaattataattt

SEQ ID NO: 95632 - DNA, 19 bp, Artificial sequence
  SiRNA target sequence
tcctcgtaattataatttt

SEQ ID NO: 95633 - DNA, 19 bp, Artificial sequence
  SiRNA target sequence
cctcgtaattataattttc

SEQ ID NO: 95634 - DNA, 19 bp, Artificial sequence
  SiRNA target sequence
ctcgtaattataattttca

SEQ ID NO: 95635 - DNA, 19 bp, Artificial sequence
  SiRNA target sequence
tcgtaattataattttcag

SEQ ID NO: 95636 - DNA, 19 bp, Artificial sequence
  SiRNA target sequence
cgtaattataattttcagg

SEQ ID NO: 95637 - DNA, 19 bp, Artificial sequence
  SiRNA target sequence
gtaattataattttcagga

SEQ ID NO: 95638 - DNA, 19 bp, Artificial sequence
  SiRNA target sequence
taattataattttcaggat

SEQ ID NO: 95639 - DNA, 19 bp, Artificial sequence
  SiRNA target sequence
aattataattttcaggata

SEQ ID NO: 95640 - DNA, 19 bp, Artificial sequence
  SiRNA target sequence
attataattttcaggataa

SEQ ID NO: 95641 - DNA, 19 bp, Artificial sequence
  SiRNA target sequence
ttataattttcaggataaa

SEQ ID NO: 95642 - DNA, 19 bp, Artificial sequence
  SiRNA target sequence
tataattttcaggataaac

SEQ ID NO: 95643 - DNA, 19 bp, Artificial sequence
  SiRNA target sequence
ataattttcaggataaacc

SEQ ID NO: 95644 - DNA, 19 bp, Artificial sequence
  SiRNA target sequence
taattttcaggataaaccg

SEQ ID NO: 95645 - DNA, 19 bp, Artificial sequence
  SiRNA target sequence
aattttcaggataaaccgc

SEQ ID NO: 95646 - DNA, 19 bp, Artificial sequence
  SiRNA target sequence
attttcaggataaaccgct

SEQ ID NO: 95647 - DNA, 19 bp, Artificial sequence
  SiRNA target sequence
ttttcaggataaaccgcta

SEQ ID NO: 95648 - DNA, 19 bp, Artificial sequence
  SiRNA target sequence
tttcaggataaaccgctag

SEQ ID NO: 95649 - DNA, 19 bp, Artificial sequence
  SiRNA target sequence
ttcaggataaaccgctaga

SEQ ID NO: 95650 - DNA, 19 bp, Artificial sequence
  SiRNA target sequence
tcaggataaaccgctagac

SEQ ID NO: 95651 - DNA, 19 bp, Artificial sequence
  SiRNA target sequence
caggataaaccgctagaca

SEQ ID NO: 95652 - DNA, 19 bp, Artificial sequence
  SiRNA target sequence
aggataaaccgctagacaa

SEQ ID NO: 95653 - DNA, 19 bp, Artificial sequence
  SiRNA target sequence
ggataaaccgctagacaat

SEQ ID NO: 95654 - DNA, 19 bp, Artificial sequence
  SiRNA target sequence
gataaaccgctagacaatc

SEQ ID NO: 95655 - DNA, 19 bp, Artificial sequence
  SiRNA target sequence
ataaaccgctagacaatca

SEQ ID NO: 95656 - DNA, 19 bp, Artificial sequence
  SiRNA target sequence
taaaccgctagacaatcac

SEQ ID NO: 95657 - DNA, 19 bp, Artificial sequence
  SiRNA target sequence
aaaccgctagacaatcacc

SEQ ID NO: 95658 - DNA, 19 bp, Artificial sequence
  SiRNA target sequence
aaccgctagacaatcaccg

SEQ ID NO: 95659 - DNA, 19 bp, Artificial sequence
  SiRNA target sequence
accgctagacaatcaccga

SEQ ID NO: 95660 - DNA, 19 bp, Artificial sequence
  SiRNA target sequence
ccgctagacaatcaccgat

SEQ ID NO: 95661 - DNA, 19 bp, Artificial sequence
  SiRNA target sequence
cgctagacaatcaccgatt

SEQ ID NO: 95662 - DNA, 19 bp, Artificial sequence
  SiRNA target sequence
gctagacaatcaccgattt

SEQ ID NO: 95663 - DNA, 19 bp, Artificial sequence
  SiRNA target sequence
ctagacaatcaccgatttc

SEQ ID NO: 95664 - DNA, 19 bp, Artificial sequence
  SiRNA target sequence
tagacaatcaccgatttca

SEQ ID NO: 95665 - DNA, 19 bp, Artificial sequence
  SiRNA target sequence
agacaatcaccgatttcaa

SEQ ID NO: 95666 - DNA, 19 bp, Artificial sequence
  SiRNA target sequence
gacaatcaccgatttcaaa

SEQ ID NO: 95667 - DNA, 19 bp, Artificial sequence
  SiRNA target sequence
acaatcaccgatttcaaaa

SEQ ID NO: 95668 - DNA, 19 bp, Artificial sequence
  SiRNA target sequence
caatcaccgatttcaaaat

SEQ ID NO: 95669 - DNA, 19 bp, Artificial sequence
  SiRNA target sequence
aatcaccgatttcaaaatt

SEQ ID NO: 95670 - DNA, 19 bp, Artificial sequence
  SiRNA target sequence
atcaccgatttcaaaattt

SEQ ID NO: 95671 - DNA, 19 bp, Artificial sequence
  SiRNA target sequence
tcaccgatttcaaaatttt

SEQ ID NO: 95672 - DNA, 19 bp, Artificial sequence
  SiRNA target sequence
caccgatttcaaaattttc

SEQ ID NO: 95673 - DNA, 19 bp, Artificial sequence
  SiRNA target sequence
accgatttcaaaattttct

SEQ ID NO: 95674 - DNA, 19 bp, Artificial sequence
  SiRNA target sequence
ccgatttcaaaattttcta

SEQ ID NO: 95675 - DNA, 19 bp, Artificial sequence
  SiRNA target sequence
cgatttcaaaattttctat

SEQ ID NO: 95676 - DNA, 19 bp, Artificial sequence
  SiRNA target sequence
gatttcaaaattttctata

SEQ ID NO: 95677 - DNA, 19 bp, Artificial sequence
  SiRNA target sequence
atttcaaaattttctatat

SEQ ID NO: 95678 - DNA, 19 bp, Artificial sequence
  SiRNA target sequence
tttcaaaattttctatatc

SEQ ID NO: 95679 - DNA, 19 bp, Artificial sequence
  SiRNA target sequence
ttcaaaattttctatatct

SEQ ID NO: 95680 - DNA, 19 bp, Artificial sequence
  SiRNA target sequence
tcaaaattttctatatcta

SEQ ID NO: 95681 - DNA, 19 bp, Artificial sequence
  SiRNA target sequence
caaaattttctatatctat

SEQ ID NO: 95682 - DNA, 19 bp, Artificial sequence
  SiRNA target sequence
aaaattttctatatctata

SEQ ID NO: 95683 - DNA, 19 bp, Artificial sequence
  SiRNA target sequence
aaattttctatatctatat

SEQ ID NO: 95684 - DNA, 19 bp, Artificial sequence
  SiRNA target sequence
aattttctatatctatatc

SEQ ID NO: 95685 - DNA, 19 bp, Artificial sequence
  SiRNA target sequence
attttctatatctatatca

SEQ ID NO: 95686 - DNA, 19 bp, Artificial sequence
  SiRNA target sequence
ttttctatatctatatcaa

SEQ ID NO: 95687 - DNA, 19 bp, Artificial sequence
  SiRNA target sequence
tttctatatctatatcaaa

SEQ ID NO: 95688 - DNA, 19 bp, Artificial sequence
  SiRNA target sequence
ttctatatctatatcaaat

SEQ ID NO: 95689 - DNA, 19 bp, Artificial sequence
  SiRNA target sequence
tctatatctatatcaaatt

SEQ ID NO: 95690 - DNA, 19 bp, Artificial sequence
  SiRNA target sequence
ctatatctatatcaaattt

SEQ ID NO: 95691 - DNA, 19 bp, Artificial sequence
  SiRNA target sequence
tatatctatatcaaatttt

SEQ ID NO: 95692 - DNA, 19 bp, Artificial sequence
  SiRNA target sequence
atatctatatcaaatttta

SEQ ID NO: 95693 - DNA, 19 bp, Artificial sequence
  SiRNA target sequence
tatctatatcaaattttat

SEQ ID NO: 95694 - DNA, 19 bp, Artificial sequence
  SiRNA target sequence
atctatatcaaattttatt

SEQ ID NO: 95695 - DNA, 19 bp, Artificial sequence
  SiRNA target sequence
tctatatcaaattttattt

SEQ ID NO: 95696 - DNA, 19 bp, Artificial sequence
  SiRNA target sequence
ctatatcaaattttatttc

SEQ ID NO: 95697 - DNA, 19 bp, Artificial sequence
  SiRNA target sequence
tatatcaaattttatttct

SEQ ID NO: 95698 - DNA, 19 bp, Artificial sequence
  SiRNA target sequence
atatcaaattttatttcta

SEQ ID NO: 95699 - DNA, 19 bp, Artificial sequence
  SiRNA target sequence
tatcaaattttatttctaa

SEQ ID NO: 95700 - DNA, 19 bp, Artificial sequence
  SiRNA target sequence
atcaaattttatttctaaa

SEQ ID NO: 95701 - DNA, 19 bp, Artificial sequence
  SiRNA target sequence
tcaaattttatttctaaaa

SEQ ID NO: 95702 - DNA, 19 bp, Artificial sequence
  SiRNA target sequence
caaattttatttctaaaat

SEQ ID NO: 95703 - DNA, 19 bp, Artificial sequence
  SiRNA target sequence
aaattttatttctaaaata

SEQ ID NO: 95704 - DNA, 19 bp, Artificial sequence
  SiRNA target sequence
aattttatttctaaaatag

SEQ ID NO: 95705 - DNA, 19 bp, Artificial sequence
  SiRNA target sequence
attttatttctaaaatagg

SEQ ID NO: 95706 - DNA, 19 bp, Artificial sequence
  SiRNA target sequence
ttttatttctaaaatagga

SEQ ID NO: 95707 - DNA, 19 bp, Artificial sequence
  SiRNA target sequence
tttatttctaaaataggat

SEQ ID NO: 95708 - DNA, 19 bp, Artificial sequence
  SiRNA target sequence
ttatttctaaaataggata

SEQ ID NO: 95709 - DNA, 19 bp, Artificial sequence
  SiRNA target sequence
tatttctaaaataggataa

SEQ ID NO: 95710 - DNA, 19 bp, Artificial sequence
  SiRNA target sequence
atttctaaaataggataaa

SEQ ID NO: 95711 - DNA, 19 bp, Artificial sequence
  SiRNA target sequence
tttctaaaataggataaat

SEQ ID NO: 95712 - DNA, 19 bp, Artificial sequence
  SiRNA target sequence
ttctaaaataggataaatg

SEQ ID NO: 95713 - DNA, 19 bp, Artificial sequence
  SiRNA target sequence
tctaaaataggataaatgt

SEQ ID NO: 95714 - DNA, 19 bp, Artificial sequence
  SiRNA target sequence
ctaaaataggataaatgta

SEQ ID NO: 95715 - DNA, 19 bp, Artificial sequence
  SiRNA target sequence
taaaataggataaatgtaa

SEQ ID NO: 95716 - DNA, 19 bp, Artificial sequence
  SiRNA target sequence
aaaataggataaatgtaat

SEQ ID NO: 95717 - DNA, 19 bp, Artificial sequence
  SiRNA target sequence
aaataggataaatgtaatt

SEQ ID NO: 95718 - DNA, 19 bp, Artificial sequence
  SiRNA target sequence
aataggataaatgtaattg

SEQ ID NO: 95719 - DNA, 19 bp, Artificial sequence
  SiRNA target sequence
ataggataaatgtaattgt

SEQ ID NO: 95720 - DNA, 19 bp, Artificial sequence
  SiRNA target sequence
taggataaatgtaattgta

SEQ ID NO: 95721 - DNA, 19 bp, Artificial sequence
  SiRNA target sequence
aggataaatgtaattgtaa

SEQ ID NO: 95722 - DNA, 19 bp, Artificial sequence
  SiRNA target sequence
ggataaatgtaattgtaag

SEQ ID NO: 95723 - DNA, 19 bp, Artificial sequence
  SiRNA target sequence
gataaatgtaattgtaagg

SEQ ID NO: 95724 - DNA, 19 bp, Artificial sequence
  SiRNA target sequence
ataaatgtaattgtaaggt

SEQ ID NO: 95725 - DNA, 19 bp, Artificial sequence
  SiRNA target sequence
taaatgtaattgtaaggtg

SEQ ID NO: 95726 - DNA, 19 bp, Artificial sequence
  SiRNA target sequence
aaatgtaattgtaaggtgt

SEQ ID NO: 95727 - DNA, 19 bp, Artificial sequence
  SiRNA target sequence
aatgtaattgtaaggtgtt

SEQ ID NO: 95728 - DNA, 19 bp, Artificial sequence
  SiRNA target sequence
atgtaattgtaaggtgtta

SEQ ID NO: 95729 - DNA, 19 bp, Artificial sequence
  SiRNA target sequence
tgtaattgtaaggtgttaa

SEQ ID NO: 95730 - DNA, 19 bp, Artificial sequence
  SiRNA target sequence
gtaattgtaaggtgttaat

SEQ ID NO: 95731 - DNA, 19 bp, Artificial sequence
  SiRNA target sequence
taattgtaaggtgttaata

SEQ ID NO: 95732 - DNA, 19 bp, Artificial sequence
  SiRNA target sequence
aattgtaaggtgttaatat

SEQ ID NO: 95733 - DNA, 19 bp, Artificial sequence
  SiRNA target sequence
attgtaaggtgttaatatc

SEQ ID NO: 95734 - DNA, 19 bp, Artificial sequence
  SiRNA target sequence
ttgtaaggtgttaatatct

SEQ ID NO: 95735 - DNA, 19 bp, Artificial sequence
  SiRNA target sequence
tgtaaggtgttaatatctt

SEQ ID NO: 95736 - DNA, 19 bp, Artificial sequence
  SiRNA target sequence
gtaaggtgttaatatctta

SEQ ID NO: 95737 - DNA, 19 bp, Artificial sequence
  SiRNA target sequence
taaggtgttaatatcttaa

SEQ ID NO: 95738 - DNA, 19 bp, Artificial sequence
  SiRNA target sequence
aaggtgttaatatcttaat

SEQ ID NO: 95739 - DNA, 19 bp, Artificial sequence
  SiRNA target sequence
aggtgttaatatcttaata

SEQ ID NO: 95740 - DNA, 19 bp, Artificial sequence
  SiRNA target sequence
ggtgttaatatcttaatat

SEQ ID NO: 95741 - DNA, 19 bp, Artificial sequence
  SiRNA target sequence
gtgttaatatcttaatatc

SEQ ID NO: 95742 - DNA, 19 bp, Artificial sequence
  SiRNA target sequence
tgttaatatcttaatatca

SEQ ID NO: 95743 - DNA, 19 bp, Artificial sequence
  SiRNA target sequence
gttaatatcttaatatcat

SEQ ID NO: 95744 - DNA, 19 bp, Artificial sequence
  SiRNA target sequence
ttaatatcttaatatcatt

SEQ ID NO: 95745 - DNA, 19 bp, Artificial sequence
  SiRNA target sequence
taatatcttaatatcattt

SEQ ID NO: 95746 - DNA, 19 bp, Artificial sequence
  SiRNA target sequence
aatatcttaatatcattta

SEQ ID NO: 95747 - DNA, 19 bp, Artificial sequence
  SiRNA target sequence
atatcttaatatcatttat

SEQ ID NO: 95748 - DNA, 19 bp, Artificial sequence
  SiRNA target sequence
tatcttaatatcatttatt

SEQ ID NO: 95749 - DNA, 19 bp, Artificial sequence
  SiRNA target sequence
atcttaatatcatttattg

SEQ ID NO: 95750 - DNA, 19 bp, Artificial sequence
  SiRNA target sequence
tcttaatatcatttattga

SEQ ID NO: 95751 - DNA, 19 bp, Artificial sequence
  SiRNA target sequence
cttaatatcatttattgac

SEQ ID NO: 95752 - DNA, 19 bp, Artificial sequence
  SiRNA target sequence
ttaatatcatttattgacg

SEQ ID NO: 95753 - DNA, 19 bp, Artificial sequence
  SiRNA target sequence
taatatcatttattgacgc

SEQ ID NO: 95754 - DNA, 19 bp, Artificial sequence
  SiRNA target sequence
aatatcatttattgacgca

SEQ ID NO: 95755 - DNA, 19 bp, Artificial sequence
  SiRNA target sequence
atatcatttattgacgcac

SEQ ID NO: 95756 - DNA, 19 bp, Artificial sequence
  SiRNA target sequence
tatcatttattgacgcact

SEQ ID NO: 95757 - DNA, 19 bp, Artificial sequence
  SiRNA target sequence
atcatttattgacgcactg

SEQ ID NO: 95758 - DNA, 19 bp, Artificial sequence
  SiRNA target sequence
tcatttattgacgcactgt

SEQ ID NO: 95759 - DNA, 19 bp, Artificial sequence
  SiRNA target sequence
catttattgacgcactgta

SEQ ID NO: 95760 - DNA, 19 bp, Artificial sequence
  SiRNA target sequence
atttattgacgcactgtat

SEQ ID NO: 95761 - DNA, 19 bp, Artificial sequence
  SiRNA target sequence
tttattgacgcactgtata

SEQ ID NO: 95762 - DNA, 19 bp, Artificial sequence
  SiRNA target sequence
ttattgacgcactgtataa

SEQ ID NO: 95763 - DNA, 19 bp, Artificial sequence
  SiRNA target sequence
tattgacgcactgtataaa

SEQ ID NO: 95764 - DNA, 19 bp, Artificial sequence
  SiRNA target sequence
attgacgcactgtataaat

SEQ ID NO: 95765 - DNA, 19 bp, Artificial sequence
  SiRNA target sequence
ttgacgcactgtataaatc

SEQ ID NO: 95766 - DNA, 19 bp, Artificial sequence
  SiRNA target sequence
tgacgcactgtataaatca

SEQ ID NO: 95767 - DNA, 19 bp, Artificial sequence
  SiRNA target sequence
gacgcactgtataaatcat

SEQ ID NO: 95768 - DNA, 19 bp, Artificial sequence
  SiRNA target sequence
acgcactgtataaatcatt

SEQ ID NO: 95769 - DNA, 19 bp, Artificial sequence
  SiRNA target sequence
cgcactgtataaatcattt

SEQ ID NO: 95770 - DNA, 19 bp, Artificial sequence
  SiRNA target sequence
gcactgtataaatcatttt

SEQ ID NO: 95771 - DNA, 19 bp, Artificial sequence
  SiRNA target sequence
cactgtataaatcattttt

SEQ ID NO: 95772 - DNA, 19 bp, Artificial sequence
  SiRNA target sequence
actgtataaatcattttta

SEQ ID NO: 95773 - DNA, 19 bp, Artificial sequence
  SiRNA target sequence
ctgtataaatcatttttac

SEQ ID NO: 95774 - DNA, 19 bp, Artificial sequence
  SiRNA target sequence
tgtataaatcatttttaca

SEQ ID NO: 95775 - DNA, 19 bp, Artificial sequence
  SiRNA target sequence
gtataaatcatttttacaa

SEQ ID NO: 95776 - DNA, 19 bp, Artificial sequence
  SiRNA target sequence
tataaatcatttttacaac

SEQ ID NO: 95777 - DNA, 19 bp, Artificial sequence
  SiRNA target sequence
ataaatcatttttacaact

SEQ ID NO: 95778 - DNA, 19 bp, Artificial sequence
  SiRNA target sequence
taaatcatttttacaactt

SEQ ID NO: 95779 - DNA, 19 bp, Artificial sequence
  SiRNA target sequence
aaatcatttttacaacttg

SEQ ID NO: 95780 - DNA, 19 bp, Artificial sequence
  SiRNA target sequence
aatcatttttacaacttgc

SEQ ID NO: 95781 - DNA, 19 bp, Artificial sequence
  SiRNA target sequence
atcatttttacaacttgca

SEQ ID NO: 95782 - DNA, 19 bp, Artificial sequence
  SiRNA target sequence
tcatttttacaacttgcaa

SEQ ID NO: 95783 - DNA, 19 bp, Artificial sequence
  SiRNA target sequence
catttttacaacttgcaaa

SEQ ID NO: 95784 - DNA, 19 bp, Artificial sequence
  SiRNA target sequence
atttttacaacttgcaaaa

SEQ ID NO: 95785 - DNA, 19 bp, Artificial sequence
  SiRNA target sequence
tttttacaacttgcaaaat

SEQ ID NO: 95786 - DNA, 19 bp, Artificial sequence
  SiRNA target sequence
ttttacaacttgcaaaatt

SEQ ID NO: 95787 - DNA, 19 bp, Artificial sequence
  SiRNA target sequence
tttacaacttgcaaaattt

SEQ ID NO: 95788 - DNA, 19 bp, Artificial sequence
  SiRNA target sequence
ttacaacttgcaaaatttt

SEQ ID NO: 95789 - DNA, 19 bp, Artificial sequence
  SiRNA target sequence
tacaacttgcaaaattttt

SEQ ID NO: 95790 - DNA, 19 bp, Artificial sequence
  SiRNA target sequence
acaacttgcaaaattttta

SEQ ID NO: 95791 - DNA, 19 bp, Artificial sequence
  SiRNA target sequence
caacttgcaaaatttttag

SEQ ID NO: 95792 - DNA, 19 bp, Artificial sequence
  SiRNA target sequence
aacttgcaaaatttttagc

SEQ ID NO: 95793 - DNA, 19 bp, Artificial sequence
  SiRNA target sequence
acttgcaaaatttttagca

SEQ ID NO: 95794 - DNA, 19 bp, Artificial sequence
  SiRNA target sequence
cttgcaaaatttttagcat

SEQ ID NO: 95795 - DNA, 19 bp, Artificial sequence
  SiRNA target sequence
ttgcaaaatttttagcatt

SEQ ID NO: 95796 - DNA, 19 bp, Artificial sequence
  SiRNA target sequence
tgcaaaatttttagcattt

SEQ ID NO: 95797 - DNA, 19 bp, Artificial sequence
  SiRNA target sequence
gcaaaatttttagcatttt

SEQ ID NO: 95798 - DNA, 19 bp, Artificial sequence
  SiRNA target sequence
caaaatttttagcattttg

SEQ ID NO: 95799 - DNA, 19 bp, Artificial sequence
  SiRNA target sequence
aaaatttttagcattttgt

SEQ ID NO: 95800 - DNA, 19 bp, Artificial sequence
  SiRNA target sequence
aaatttttagcattttgta

SEQ ID NO: 95801 - DNA, 19 bp, Artificial sequence
  SiRNA target sequence
aatttttagcattttgtag

SEQ ID NO: 95802 - DNA, 19 bp, Artificial sequence
  SiRNA target sequence
atttttagcattttgtagt

SEQ ID NO: 95803 - DNA, 19 bp, Artificial sequence
  SiRNA target sequence
tttttagcattttgtagtt

SEQ ID NO: 95804 - DNA, 19 bp, Artificial sequence
  SiRNA target sequence
ttttagcattttgtagttt

SEQ ID NO: 95805 - DNA, 19 bp, Artificial sequence
  SiRNA target sequence
tttagcattttgtagtttg

SEQ ID NO: 95806 - DNA, 19 bp, Artificial sequence
  SiRNA target sequence
ttagcattttgtagtttgt

SEQ ID NO: 95807 - DNA, 19 bp, Artificial sequence
  SiRNA target sequence
tagcattttgtagtttgta

SEQ ID NO: 95808 - DNA, 19 bp, Artificial sequence
  SiRNA target sequence
agcattttgtagtttgtaa

SEQ ID NO: 95809 - DNA, 19 bp, Artificial sequence
  SiRNA target sequence
gcattttgtagtttgtaat

SEQ ID NO: 95810 - DNA, 19 bp, Artificial sequence
  SiRNA target sequence
cattttgtagtttgtaatg

SEQ ID NO: 95811 - DNA, 19 bp, Artificial sequence
  SiRNA target sequence
attttgtagtttgtaatgc

SEQ ID NO: 95812 - DNA, 19 bp, Artificial sequence
  SiRNA target sequence
ttttgtagtttgtaatgcg

SEQ ID NO: 95813 - DNA, 19 bp, Artificial sequence
  SiRNA target sequence
tttgtagtttgtaatgcgg

SEQ ID NO: 95814 - DNA, 19 bp, Artificial sequence
  SiRNA target sequence
ttgtagtttgtaatgcggt

SEQ ID NO: 95815 - DNA, 19 bp, Artificial sequence
  SiRNA target sequence
tgtagtttgtaatgcggta

SEQ ID NO: 95816 - DNA, 19 bp, Artificial sequence
  SiRNA target sequence
gtagtttgtaatgcggtaa

SEQ ID NO: 95817 - DNA, 19 bp, Artificial sequence
  SiRNA target sequence
tagtttgtaatgcggtaat

SEQ ID NO: 95818 - DNA, 19 bp, Artificial sequence
  SiRNA target sequence
agtttgtaatgcggtaata

SEQ ID NO: 95819 - DNA, 19 bp, Artificial sequence
  SiRNA target sequence
gtttgtaatgcggtaatat

SEQ ID NO: 95820 - DNA, 19 bp, Artificial sequence
  SiRNA target sequence
tttgtaatgcggtaatata

SEQ ID NO: 95821 - DNA, 19 bp, Artificial sequence
  SiRNA target sequence
ttgtaatgcggtaatatat

SEQ ID NO: 95822 - DNA, 19 bp, Artificial sequence
  SiRNA target sequence
tgtaatgcggtaatatata

SEQ ID NO: 95823 - DNA, 19 bp, Artificial sequence
  SiRNA target sequence
gtaatgcggtaatatataa

SEQ ID NO: 95824 - DNA, 19 bp, Artificial sequence
  SiRNA target sequence
taatgcggtaatatataat

SEQ ID NO: 95825 - DNA, 19 bp, Artificial sequence
  SiRNA target sequence
aatgcggtaatatataata

SEQ ID NO: 95826 - DNA, 19 bp, Artificial sequence
  SiRNA target sequence
atgcggtaatatataatat

SEQ ID NO: 95827 - DNA, 19 bp, Artificial sequence
  SiRNA target sequence
tgcggtaatatataatata

SEQ ID NO: 95828 - DNA, 19 bp, Artificial sequence
  SiRNA target sequence
gcggtaatatataatatag

SEQ ID NO: 95829 - DNA, 19 bp, Artificial sequence
  SiRNA target sequence
cggtaatatataatataga

SEQ ID NO: 95830 - DNA, 19 bp, Artificial sequence
  SiRNA target sequence
ggtaatatataatatagat

SEQ ID NO: 95831 - DNA, 19 bp, Artificial sequence
  SiRNA target sequence
gtaatatataatatagatc

SEQ ID NO: 95832 - DNA, 19 bp, Artificial sequence
  SiRNA target sequence
taatatataatatagatct

SEQ ID NO: 95833 - DNA, 19 bp, Artificial sequence
  SiRNA target sequence
aatatataatatagatctt

SEQ ID NO: 95834 - DNA, 19 bp, Artificial sequence
  SiRNA target sequence
atatataatatagatcttt

SEQ ID NO: 95835 - DNA, 19 bp, Artificial sequence
  SiRNA target sequence
tatataatatagatctttt

SEQ ID NO: 95836 - DNA, 19 bp, Artificial sequence
  SiRNA target sequence
atataatatagatctttta

SEQ ID NO: 95837 - DNA, 19 bp, Artificial sequence
  SiRNA target sequence
tataatatagatcttttat

SEQ ID NO: 95838 - DNA, 19 bp, Artificial sequence
  SiRNA target sequence
ataatatagatcttttatc

SEQ ID NO: 95839 - DNA, 19 bp, Artificial sequence
  SiRNA target sequence
taatatagatcttttatcc

SEQ ID NO: 95840 - DNA, 19 bp, Artificial sequence
  SiRNA target sequence
aatatagatcttttatcca

SEQ ID NO: 95841 - DNA, 19 bp, Artificial sequence
  SiRNA target sequence
atatagatcttttatccat

SEQ ID NO: 95842 - DNA, 19 bp, Artificial sequence
  SiRNA target sequence
tatagatcttttatccatg

SEQ ID NO: 95843 - DNA, 19 bp, Artificial sequence
  SiRNA target sequence
atagatcttttatccatgt

SEQ ID NO: 95844 - DNA, 19 bp, Artificial sequence
  SiRNA target sequence
tagatcttttatccatgtc

SEQ ID NO: 95845 - DNA, 19 bp, Artificial sequence
  SiRNA target sequence
agatcttttatccatgtct

SEQ ID NO: 95846 - DNA, 19 bp, Artificial sequence
  SiRNA target sequence
gatcttttatccatgtctt

SEQ ID NO: 95847 - DNA, 19 bp, Artificial sequence
  SiRNA target sequence
atcttttatccatgtctta

SEQ ID NO: 95848 - DNA, 19 bp, Artificial sequence
  SiRNA target sequence
tcttttatccatgtcttaa

SEQ ID NO: 95849 - DNA, 19 bp, Artificial sequence
  SiRNA target sequence
cttttatccatgtcttaaa

SEQ ID NO: 95850 - DNA, 19 bp, Artificial sequence
  SiRNA target sequence
ttttatccatgtcttaaat

SEQ ID NO: 95851 - DNA, 19 bp, Artificial sequence
  SiRNA target sequence
tttatccatgtcttaaatt

SEQ ID NO: 95852 - DNA, 19 bp, Artificial sequence
  SiRNA target sequence
ttatccatgtcttaaattc

SEQ ID NO: 95853 - DNA, 19 bp, Artificial sequence
  SiRNA target sequence
tatccatgtcttaaattcg

SEQ ID NO: 95854 - DNA, 19 bp, Artificial sequence
  SiRNA target sequence
atccatgtcttaaattcgc

SEQ ID NO: 95855 - DNA, 19 bp, Artificial sequence
  SiRNA target sequence
tccatgtcttaaattcgcc

SEQ ID NO: 95856 - DNA, 19 bp, Artificial sequence
  SiRNA target sequence
ccatgtcttaaattcgccc

SEQ ID NO: 95857 - DNA, 19 bp, Artificial sequence
  SiRNA target sequence
catgtcttaaattcgccca

SEQ ID NO: 95858 - DNA, 19 bp, Artificial sequence
  SiRNA target sequence
atgtcttaaattcgcccat

SEQ ID NO: 95859 - DNA, 19 bp, Artificial sequence
  SiRNA target sequence
tgtcttaaattcgcccata

SEQ ID NO: 95860 - DNA, 19 bp, Artificial sequence
  SiRNA target sequence
gtcttaaattcgcccataa

SEQ ID NO: 95861 - DNA, 19 bp, Artificial sequence
  SiRNA target sequence
tcttaaattcgcccataaa

SEQ ID NO: 95862 - DNA, 19 bp, Artificial sequence
  SiRNA target sequence
cttaaattcgcccataaat

SEQ ID NO: 95863 - DNA, 19 bp, Artificial sequence
  SiRNA target sequence
ttaaattcgcccataaatc

SEQ ID NO: 95864 - DNA, 19 bp, Artificial sequence
  SiRNA target sequence
taaattcgcccataaatcc

SEQ ID NO: 95865 - DNA, 19 bp, Artificial sequence
  SiRNA target sequence
aaattcgcccataaatcct

SEQ ID NO: 95866 - DNA, 19 bp, Artificial sequence
  SiRNA target sequence
aattcgcccataaatcctt

SEQ ID NO: 95867 - DNA, 19 bp, Artificial sequence
  SiRNA target sequence
attcgcccataaatccttc

SEQ ID NO: 95868 - DNA, 19 bp, Artificial sequence
  SiRNA target sequence
ttcgcccataaatccttct

SEQ ID NO: 95869 - DNA, 19 bp, Artificial sequence
  SiRNA target sequence
tcgcccataaatccttctt

SEQ ID NO: 95870 - DNA, 19 bp, Artificial sequence
  SiRNA target sequence
cgcccataaatccttcttt

SEQ ID NO: 95871 - DNA, 19 bp, Artificial sequence
  SiRNA target sequence
gcccataaatccttctttg

SEQ ID NO: 95872 - DNA, 19 bp, Artificial sequence
  SiRNA target sequence
cccataaatccttctttgt

SEQ ID NO: 95873 - DNA, 19 bp, Artificial sequence
  SiRNA target sequence
ccataaatccttctttgtc

SEQ ID NO: 95874 - DNA, 19 bp, Artificial sequence
  SiRNA target sequence
cataaatccttctttgtct

SEQ ID NO: 95875 - DNA, 19 bp, Artificial sequence
  SiRNA target sequence
ataaatccttctttgtctt

SEQ ID NO: 95876 - DNA, 19 bp, Artificial sequence
  SiRNA target sequence
taaatccttctttgtcttg

SEQ ID NO: 95877 - DNA, 19 bp, Artificial sequence
  SiRNA target sequence
aaatccttctttgtcttgg

SEQ ID NO: 95878 - DNA, 19 bp, Artificial sequence
  SiRNA target sequence
aatccttctttgtcttggc

SEQ ID NO: 95879 - DNA, 19 bp, Artificial sequence
  SiRNA target sequence
atccttctttgtcttggct

SEQ ID NO: 95880 - DNA, 19 bp, Artificial sequence
  SiRNA target sequence
tccttctttgtcttggcta

SEQ ID NO: 95881 - DNA, 19 bp, Artificial sequence
  SiRNA target sequence
ccttctttgtcttggctat

SEQ ID NO: 95882 - DNA, 19 bp, Artificial sequence
  SiRNA target sequence
cttctttgtcttggctatc

SEQ ID NO: 95883 - DNA, 19 bp, Artificial sequence
  SiRNA target sequence
ttctttgtcttggctatct

SEQ ID NO: 95884 - DNA, 19 bp, Artificial sequence
  SiRNA target sequence
tctttgtcttggctatctc

SEQ ID NO: 95885 - DNA, 19 bp, Artificial sequence
  SiRNA target sequence
ctttgtcttggctatctcc

SEQ ID NO: 95886 - DNA, 19 bp, Artificial sequence
  SiRNA target sequence
tttgtcttggctatctcca

SEQ ID NO: 95887 - DNA, 19 bp, Artificial sequence
  SiRNA target sequence
ttgtcttggctatctccat

SEQ ID NO: 95888 - DNA, 19 bp, Artificial sequence
  SiRNA target sequence
tgtcttggctatctccatt

SEQ ID NO: 95889 - DNA, 19 bp, Artificial sequence
  SiRNA target sequence
gtcttggctatctccatta

SEQ ID NO: 95890 - DNA, 19 bp, Artificial sequence
  SiRNA target sequence
tcttggctatctccattac

SEQ ID NO: 95891 - DNA, 19 bp, Artificial sequence
  SiRNA target sequence
cttggctatctccattacc

SEQ ID NO: 95892 - DNA, 19 bp, Artificial sequence
  SiRNA target sequence
ttggctatctccattaccc

SEQ ID NO: 95893 - DNA, 19 bp, Artificial sequence
  SiRNA target sequence
tggctatctccattaccct

SEQ ID NO: 95894 - DNA, 19 bp, Artificial sequence
  SiRNA target sequence
ggctatctccattaccctt

SEQ ID NO: 95895 - DNA, 19 bp, Artificial sequence
  SiRNA target sequence
gctatctccattacccttt

SEQ ID NO: 95896 - DNA, 19 bp, Artificial sequence
  SiRNA target sequence
ctatctccattaccctttc

SEQ ID NO: 95897 - DNA, 19 bp, Artificial sequence
  SiRNA target sequence
tatctccattaccctttct

SEQ ID NO: 95898 - DNA, 19 bp, Artificial sequence
  SiRNA target sequence
atctccattaccctttctt

SEQ ID NO: 95899 - DNA, 19 bp, Artificial sequence
  SiRNA target sequence
tctccattaccctttctta

SEQ ID NO: 95900 - DNA, 19 bp, Artificial sequence
  SiRNA target sequence
ctccattaccctttcttat

SEQ ID NO: 95901 - DNA, 19 bp, Artificial sequence
  SiRNA target sequence
tccattaccctttcttatc

SEQ ID NO: 95902 - DNA, 19 bp, Artificial sequence
  SiRNA target sequence
ccattaccctttcttatca

SEQ ID NO: 95903 - DNA, 19 bp, Artificial sequence
  SiRNA target sequence
cattaccctttcttatcag

SEQ ID NO: 95904 - DNA, 19 bp, Artificial sequence
  SiRNA target sequence
attaccctttcttatcaga

SEQ ID NO: 95905 - DNA, 19 bp, Artificial sequence
  SiRNA target sequence
ttaccctttcttatcagag

SEQ ID NO: 95906 - DNA, 19 bp, Artificial sequence
  SiRNA target sequence
taccctttcttatcagagg

SEQ ID NO: 95907 - DNA, 19 bp, Artificial sequence
  SiRNA target sequence
accctttcttatcagaggt

SEQ ID NO: 95908 - DNA, 19 bp, Artificial sequence
  SiRNA target sequence
ccctttcttatcagaggtt

SEQ ID NO: 95909 - DNA, 19 bp, Artificial sequence
  SiRNA target sequence
cctttcttatcagaggttt

SEQ ID NO: 95910 - DNA, 19 bp, Artificial sequence
  SiRNA target sequence
ctttcttatcagaggttta

SEQ ID NO: 95911 - DNA, 19 bp, Artificial sequence
  SiRNA target sequence
tttcttatcagaggtttag

SEQ ID NO: 95912 - DNA, 19 bp, Artificial sequence
  SiRNA target sequence
ttcttatcagaggtttagc

SEQ ID NO: 95913 - DNA, 19 bp, Artificial sequence
  SiRNA target sequence
tcttatcagaggtttagct

SEQ ID NO: 95914 - DNA, 19 bp, Artificial sequence
  SiRNA target sequence
cttatcagaggtttagctc

SEQ ID NO: 95915 - DNA, 19 bp, Artificial sequence
  SiRNA target sequence
ttatcagaggtttagctcc

SEQ ID NO: 95916 - DNA, 19 bp, Artificial sequence
  SiRNA target sequence
tatcagaggtttagctccg

SEQ ID NO: 95917 - DNA, 19 bp, Artificial sequence
  SiRNA target sequence
atcagaggtttagctccgt

SEQ ID NO: 95918 - DNA, 19 bp, Artificial sequence
  SiRNA target sequence
tcagaggtttagctccgtg

SEQ ID NO: 95919 - DNA, 19 bp, Artificial sequence
  SiRNA target sequence
cagaggtttagctccgtgt

SEQ ID NO: 95920 - DNA, 19 bp, Artificial sequence
  SiRNA target sequence
agaggtttagctccgtgtt

SEQ ID NO: 95921 - DNA, 19 bp, Artificial sequence
  SiRNA target sequence
gaggtttagctccgtgttt

SEQ ID NO: 95922 - DNA, 19 bp, Artificial sequence
  SiRNA target sequence
aggtttagctccgtgtttt

SEQ ID NO: 95923 - DNA, 19 bp, Artificial sequence
  SiRNA target sequence
ggtttagctccgtgtttta

SEQ ID NO: 95924 - DNA, 19 bp, Artificial sequence
  SiRNA target sequence
gtttagctccgtgttttaa

SEQ ID NO: 95925 - DNA, 19 bp, Artificial sequence
  SiRNA target sequence
tttagctccgtgttttaaa

SEQ ID NO: 95926 - DNA, 19 bp, Artificial sequence
  SiRNA target sequence
ttagctccgtgttttaaaa

SEQ ID NO: 95927 - DNA, 19 bp, Artificial sequence
  SiRNA target sequence
tagctccgtgttttaaaag

SEQ ID NO: 95928 - DNA, 19 bp, Artificial sequence
  SiRNA target sequence
agctccgtgttttaaaagg

SEQ ID NO: 95929 - DNA, 19 bp, Artificial sequence
  SiRNA target sequence
gctccgtgttttaaaaggc

SEQ ID NO: 95930 - DNA, 19 bp, Artificial sequence
  SiRNA target sequence
ctccgtgttttaaaaggca

SEQ ID NO: 95931 - DNA, 19 bp, Artificial sequence
  SiRNA target sequence
tccgtgttttaaaaggcaa

SEQ ID NO: 95932 - DNA, 19 bp, Artificial sequence
  SiRNA target sequence
ccgtgttttaaaaggcaat

SEQ ID NO: 95933 - DNA, 19 bp, Artificial sequence
  SiRNA target sequence
cgtgttttaaaaggcaatt

SEQ ID NO: 95934 - DNA, 19 bp, Artificial sequence
  SiRNA target sequence
gtgttttaaaaggcaatta

SEQ ID NO: 95935 - DNA, 19 bp, Artificial sequence
  SiRNA target sequence
tgttttaaaaggcaattat

SEQ ID NO: 95936 - DNA, 19 bp, Artificial sequence
  SiRNA target sequence
gttttaaaaggcaattata

SEQ ID NO: 95937 - DNA, 19 bp, Artificial sequence
  SiRNA target sequence
ttttaaaaggcaattatac

SEQ ID NO: 95938 - DNA, 19 bp, Artificial sequence
  SiRNA target sequence
tttaaaaggcaattataca

SEQ ID NO: 95939 - DNA, 19 bp, Artificial sequence
  SiRNA target sequence
ttaaaaggcaattatacaa

SEQ ID NO: 95940 - DNA, 19 bp, Artificial sequence
  SiRNA target sequence
taaaaggcaattatacaac

SEQ ID NO: 95941 - DNA, 19 bp, Artificial sequence
  SiRNA target sequence
aaaaggcaattatacaact

SEQ ID NO: 95942 - DNA, 19 bp, Artificial sequence
  SiRNA target sequence
aaaggcaattatacaactt

SEQ ID NO: 95943 - DNA, 19 bp, Artificial sequence
  SiRNA target sequence
aaggcaattatacaacttt

SEQ ID NO: 95944 - DNA, 19 bp, Artificial sequence
  SiRNA target sequence
aggcaattatacaactttt

SEQ ID NO: 95945 - DNA, 19 bp, Artificial sequence
  SiRNA target sequence
ggcaattatacaacttttt

SEQ ID NO: 95946 - DNA, 19 bp, Artificial sequence
  SiRNA target sequence
gcaattatacaacttttta

SEQ ID NO: 95947 - DNA, 19 bp, Artificial sequence
  SiRNA target sequence
caattatacaactttttag

SEQ ID NO: 95948 - DNA, 19 bp, Artificial sequence
  SiRNA target sequence
aattatacaactttttaga

SEQ ID NO: 95949 - DNA, 19 bp, Artificial sequence
  SiRNA target sequence
attatacaactttttagaa

SEQ ID NO: 95950 - DNA, 19 bp, Artificial sequence
  SiRNA target sequence
ttatacaactttttagaac

SEQ ID NO: 95951 - DNA, 19 bp, Artificial sequence
  SiRNA target sequence
tatacaactttttagaaca

SEQ ID NO: 95952 - DNA, 19 bp, Artificial sequence
  SiRNA target sequence
atacaactttttagaacaa

SEQ ID NO: 95953 - DNA, 19 bp, Artificial sequence
  SiRNA target sequence
tacaactttttagaacaaa

SEQ ID NO: 95954 - DNA, 19 bp, Artificial sequence
  SiRNA target sequence
acaactttttagaacaaaa

SEQ ID NO: 95955 - DNA, 19 bp, Artificial sequence
  SiRNA target sequence
caactttttagaacaaaaa

SEQ ID NO: 95956 - DNA, 19 bp, Artificial sequence
  SiRNA target sequence
aactttttagaacaaaaat

SEQ ID NO: 95957 - DNA, 19 bp, Artificial sequence
  SiRNA target sequence
actttttagaacaaaaatt

SEQ ID NO: 95958 - DNA, 19 bp, Artificial sequence
  SiRNA target sequence
ctttttagaacaaaaatta

SEQ ID NO: 95959 - DNA, 19 bp, Artificial sequence
  SiRNA target sequence
tttttagaacaaaaattaa

SEQ ID NO: 95960 - DNA, 19 bp, Artificial sequence
  SiRNA target sequence
ttttagaacaaaaattaaa

SEQ ID NO: 95961 - DNA, 19 bp, Artificial sequence
  SiRNA target sequence
tttagaacaaaaattaaaa

SEQ ID NO: 95962 - DNA, 19 bp, Artificial sequence
  SiRNA target sequence
ttagaacaaaaattaaaag

SEQ ID NO: 95963 - DNA, 19 bp, Artificial sequence
  SiRNA target sequence
tagaacaaaaattaaaaga

SEQ ID NO: 95964 - DNA, 19 bp, Artificial sequence
  SiRNA target sequence
agaacaaaaattaaaagat

SEQ ID NO: 95965 - DNA, 19 bp, Artificial sequence
  SiRNA target sequence
gaacaaaaattaaaagatt

SEQ ID NO: 95966 - DNA, 19 bp, Artificial sequence
  SiRNA target sequence
aacaaaaattaaaagattt

SEQ ID NO: 95967 - DNA, 19 bp, Artificial sequence
  SiRNA target sequence
acaaaaattaaaagattta

SEQ ID NO: 95968 - DNA, 19 bp, Artificial sequence
  SiRNA target sequence
caaaaattaaaagatttat

SEQ ID NO: 95969 - DNA, 19 bp, Artificial sequence
  SiRNA target sequence
aaaaattaaaagatttata

SEQ ID NO: 95970 - DNA, 19 bp, Artificial sequence
  SiRNA target sequence
aaaattaaaagatttataa

SEQ ID NO: 95971 - DNA, 19 bp, Artificial sequence
  SiRNA target sequence
aaattaaaagatttataag

SEQ ID NO: 95972 - DNA, 19 bp, Artificial sequence
  SiRNA target sequence
aattaaaagatttataaga

SEQ ID NO: 95973 - DNA, 19 bp, Artificial sequence
  SiRNA target sequence
attaaaagatttataagac

SEQ ID NO: 95974 - DNA, 19 bp, Artificial sequence
  SiRNA target sequence
ttaaaagatttataagacg

SEQ ID NO: 95975 - DNA, 19 bp, Artificial sequence
  SiRNA target sequence
taaaagatttataagacga

SEQ ID NO: 95976 - DNA, 19 bp, Artificial sequence
  SiRNA target sequence
aaaagatttataagacgaa

SEQ ID NO: 95977 - DNA, 19 bp, Artificial sequence
  SiRNA target sequence
aaagatttataagacgaat

SEQ ID NO: 95978 - DNA, 19 bp, Artificial sequence
  SiRNA target sequence
aagatttataagacgaatc

SEQ ID NO: 95979 - DNA, 19 bp, Artificial sequence
  SiRNA target sequence
agatttataagacgaatcc

SEQ ID NO: 95980 - DNA, 19 bp, Artificial sequence
  SiRNA target sequence
gatttataagacgaatccc

SEQ ID NO: 95981 - DNA, 19 bp, Artificial sequence
  SiRNA target sequence
atttataagacgaatcccc

SEQ ID NO: 95982 - DNA, 19 bp, Artificial sequence
  SiRNA target sequence
tttataagacgaatcccca

SEQ ID NO: 95983 - DNA, 19 bp, Artificial sequence
  SiRNA target sequence
ttataagacgaatccccaa

SEQ ID NO: 95984 - DNA, 19 bp, Artificial sequence
  SiRNA target sequence
tataagacgaatccccaag

SEQ ID NO: 95985 - DNA, 19 bp, Artificial sequence
  SiRNA target sequence
ataagacgaatccccaagg

SEQ ID NO: 95986 - DNA, 19 bp, Artificial sequence
  SiRNA target sequence
taagacgaatccccaaggc

SEQ ID NO: 95987 - DNA, 19 bp, Artificial sequence
  SiRNA target sequence
aagacgaatccccaaggcc

SEQ ID NO: 95988 - DNA, 19 bp, Artificial sequence
  SiRNA target sequence
agacgaatccccaaggcca

SEQ ID NO: 95989 - DNA, 19 bp, Artificial sequence
  SiRNA target sequence
gacgaatccccaaggccaa

SEQ ID NO: 95990 - DNA, 19 bp, Artificial sequence
  SiRNA target sequence
acgaatccccaaggccaaa

SEQ ID NO: 95991 - DNA, 19 bp, Artificial sequence
  SiRNA target sequence
cgaatccccaaggccaaat

SEQ ID NO: 95992 - DNA, 19 bp, Artificial sequence
  SiRNA target sequence
gaatccccaaggccaaata

SEQ ID NO: 95993 - DNA, 19 bp, Artificial sequence
  SiRNA target sequence
aatccccaaggccaaatac

SEQ ID NO: 95994 - DNA, 19 bp, Artificial sequence
  SiRNA target sequence
atccccaaggccaaataca

SEQ ID NO: 95995 - DNA, 19 bp, Artificial sequence
  SiRNA target sequence
tccccaaggccaaatacag

SEQ ID NO: 95996 - DNA, 19 bp, Artificial sequence
  SiRNA target sequence
ccccaaggccaaatacagc

SEQ ID NO: 95997 - DNA, 19 bp, Artificial sequence
  SiRNA target sequence
cccaaggccaaatacagca

SEQ ID NO: 95998 - DNA, 19 bp, Artificial sequence
  SiRNA target sequence
ccaaggccaaatacagcaa

SEQ ID NO: 95999 - DNA, 19 bp, Artificial sequence
  SiRNA target sequence
caaggccaaatacagcaaa

SEQ ID NO: 96000 - DNA, 19 bp, Artificial sequence
  SiRNA target sequence
aaggccaaatacagcaaaa

SEQ ID NO: 96001 - DNA, 19 bp, Artificial sequence
  SiRNA target sequence
aggccaaatacagcaaaat

SEQ ID NO: 96002 - DNA, 19 bp, Artificial sequence
  SiRNA target sequence
ggccaaatacagcaaaatt

SEQ ID NO: 96003 - DNA, 19 bp, Artificial sequence
  SiRNA target sequence
gccaaatacagcaaaattt

SEQ ID NO: 96004 - DNA, 19 bp, Artificial sequence
  SiRNA target sequence
ccaaatacagcaaaattta

SEQ ID NO: 96005 - DNA, 19 bp, Artificial sequence
  SiRNA target sequence
caaatacagcaaaatttaa

SEQ ID NO: 96006 - DNA, 19 bp, Artificial sequence
  SiRNA target sequence
aaatacagcaaaatttaag

SEQ ID NO: 96007 - DNA, 19 bp, Artificial sequence
  SiRNA target sequence
aatacagcaaaatttaagt

SEQ ID NO: 96008 - DNA, 19 bp, Artificial sequence
  SiRNA target sequence
atacagcaaaatttaagtg

SEQ ID NO: 96009 - DNA, 19 bp, Artificial sequence
  SiRNA target sequence
tacagcaaaatttaagtgt

SEQ ID NO: 96010 - DNA, 19 bp, Artificial sequence
  SiRNA target sequence
acagcaaaatttaagtgtt

SEQ ID NO: 96011 - DNA, 19 bp, Artificial sequence
  SiRNA target sequence
cagcaaaatttaagtgttg

SEQ ID NO: 96012 - DNA, 19 bp, Artificial sequence
  SiRNA target sequence
agcaaaatttaagtgttgt

SEQ ID NO: 96013 - DNA, 19 bp, Artificial sequence
  SiRNA target sequence
gcaaaatttaagtgttgta

SEQ ID NO: 96014 - DNA, 19 bp, Artificial sequence
  SiRNA target sequence
caaaatttaagtgttgtaa

SEQ ID NO: 96015 - DNA, 19 bp, Artificial sequence
  SiRNA target sequence
aaaatttaagtgttgtaaa

SEQ ID NO: 96016 - DNA, 19 bp, Artificial sequence
  SiRNA target sequence
aaatttaagtgttgtaaaa

SEQ ID NO: 96017 - DNA, 19 bp, Artificial sequence
  SiRNA target sequence
aatttaagtgttgtaaaaa

SEQ ID NO: 96018 - DNA, 19 bp, Artificial sequence
  SiRNA target sequence
atttaagtgttgtaaaaaa

SEQ ID NO: 96019 - DNA, 19 bp, Artificial sequence
  SiRNA target sequence
tttaagtgttgtaaaaaat

SEQ ID NO: 96020 - DNA, 19 bp, Artificial sequence
  SiRNA target sequence
ttaagtgttgtaaaaaatt

SEQ ID NO: 96021 - DNA, 19 bp, Artificial sequence
  SiRNA target sequence
taagtgttgtaaaaaattt

SEQ ID NO: 96022 - DNA, 19 bp, Artificial sequence
  SiRNA target sequence
aagtgttgtaaaaaatttg

SEQ ID NO: 96023 - DNA, 19 bp, Artificial sequence
  SiRNA target sequence
agtgttgtaaaaaatttgt

SEQ ID NO: 96024 - DNA, 19 bp, Artificial sequence
  SiRNA target sequence
gtgttgtaaaaaatttgta

SEQ ID NO: 96025 - DNA, 19 bp, Artificial sequence
  SiRNA target sequence
tgttgtaaaaaatttgtag

SEQ ID NO: 96026 - DNA, 19 bp, Artificial sequence
  SiRNA target sequence
gttgtaaaaaatttgtagg

SEQ ID NO: 96027 - DNA, 19 bp, Artificial sequence
  SiRNA target sequence
ttgtaaaaaatttgtaggc

SEQ ID NO: 96028 - DNA, 19 bp, Artificial sequence
  SiRNA target sequence
tgtaaaaaatttgtaggca

SEQ ID NO: 96029 - DNA, 19 bp, Artificial sequence
  SiRNA target sequence
gtaaaaaatttgtaggcag

SEQ ID NO: 96030 - DNA, 19 bp, Artificial sequence
  SiRNA target sequence
taaaaaatttgtaggcaga

SEQ ID NO: 96031 - DNA, 19 bp, Artificial sequence
  SiRNA target sequence
aaaaaatttgtaggcagat

SEQ ID NO: 96032 - DNA, 19 bp, Artificial sequence
  SiRNA target sequence
aaaaatttgtaggcagatt

SEQ ID NO: 96033 - DNA, 19 bp, Artificial sequence
  SiRNA target sequence
aaaatttgtaggcagattt

SEQ ID NO: 96034 - DNA, 19 bp, Artificial sequence
  SiRNA target sequence
aaatttgtaggcagatttt

SEQ ID NO: 96035 - DNA, 19 bp, Artificial sequence
  SiRNA target sequence
aatttgtaggcagattttt

SEQ ID NO: 96036 - DNA, 19 bp, Artificial sequence
  SiRNA target sequence
atttgtaggcagatttttt

SEQ ID NO: 96037 - DNA, 19 bp, Artificial sequence
  SiRNA target sequence
tttgtaggcagattttttt

SEQ ID NO: 96038 - DNA, 19 bp, Artificial sequence
  SiRNA target sequence
ttgtaggcagatttttttt

SEQ ID NO: 96039 - DNA, 19 bp, Artificial sequence
  SiRNA target sequence
tgtaggcagattttttttg

SEQ ID NO: 96040 - DNA, 19 bp, Artificial sequence
  SiRNA target sequence
gtaggcagattttttttgc

SEQ ID NO: 96041 - DNA, 19 bp, Artificial sequence
  SiRNA target sequence
taggcagattttttttgcg

SEQ ID NO: 96042 - DNA, 19 bp, Artificial sequence
  SiRNA target sequence
aggcagattttttttgcgc

SEQ ID NO: 96043 - DNA, 19 bp, Artificial sequence
  SiRNA target sequence
ggcagattttttttgcgca

SEQ ID NO: 96044 - DNA, 19 bp, Artificial sequence
  SiRNA target sequence
gcagattttttttgcgcaa

SEQ ID NO: 96045 - DNA, 19 bp, Artificial sequence
  SiRNA target sequence
cagattttttttgcgcaaa

SEQ ID NO: 96046 - DNA, 19 bp, Artificial sequence
  SiRNA target sequence
agattttttttgcgcaaaa

SEQ ID NO: 96047 - DNA, 19 bp, Artificial sequence
  SiRNA target sequence
gattttttttgcgcaaaaa

SEQ ID NO: 96048 - DNA, 19 bp, Artificial sequence
  SiRNA target sequence
attttttttgcgcaaaaat

SEQ ID NO: 96049 - DNA, 19 bp, Artificial sequence
  SiRNA target sequence
ttttttttgcgcaaaaatt

SEQ ID NO: 96050 - DNA, 19 bp, Artificial sequence
  SiRNA target sequence
tttttttgcgcaaaaattt

SEQ ID NO: 96051 - DNA, 19 bp, Artificial sequence
  SiRNA target sequence
ttttttgcgcaaaaatttc

SEQ ID NO: 96052 - DNA, 19 bp, Artificial sequence
  SiRNA target sequence
tttttgcgcaaaaatttcc

SEQ ID NO: 96053 - DNA, 19 bp, Artificial sequence
  SiRNA target sequence
ttttgcgcaaaaatttcca

SEQ ID NO: 96054 - DNA, 19 bp, Artificial sequence
  SiRNA target sequence
tttgcgcaaaaatttccaa

SEQ ID NO: 96055 - DNA, 19 bp, Artificial sequence
  SiRNA target sequence
ttgcgcaaaaatttccaaa

SEQ ID NO: 96056 - DNA, 19 bp, Artificial sequence
  SiRNA target sequence
tgcgcaaaaatttccaaaa

SEQ ID NO: 96057 - DNA, 19 bp, Artificial sequence
  SiRNA target sequence
gcgcaaaaatttccaaaat

SEQ ID NO: 96058 - DNA, 19 bp, Artificial sequence
  SiRNA target sequence
cgcaaaaatttccaaaatt

SEQ ID NO: 96059 - DNA, 19 bp, Artificial sequence
  SiRNA target sequence
gcaaaaatttccaaaattt

SEQ ID NO: 96060 - DNA, 19 bp, Artificial sequence
  SiRNA target sequence
caaaaatttccaaaattta

SEQ ID NO: 96061 - DNA, 19 bp, Artificial sequence
  SiRNA target sequence
aaaaatttccaaaatttag

SEQ ID NO: 96062 - DNA, 19 bp, Artificial sequence
  SiRNA target sequence
aaaatttccaaaatttagt

SEQ ID NO: 96063 - DNA, 19 bp, Artificial sequence
  SiRNA target sequence
aaatttccaaaatttagtc

SEQ ID NO: 96064 - DNA, 19 bp, Artificial sequence
  SiRNA target sequence
aatttccaaaatttagtca

SEQ ID NO: 96065 - DNA, 19 bp, Artificial sequence
  SiRNA target sequence
atttccaaaatttagtcat

SEQ ID NO: 96066 - DNA, 19 bp, Artificial sequence
  SiRNA target sequence
tttccaaaatttagtcatg

SEQ ID NO: 96067 - DNA, 19 bp, Artificial sequence
  SiRNA target sequence
ttccaaaatttagtcatgt

SEQ ID NO: 96068 - DNA, 19 bp, Artificial sequence
  SiRNA target sequence
tccaaaatttagtcatgtt

SEQ ID NO: 96069 - DNA, 19 bp, Artificial sequence
  SiRNA target sequence
ccaaaatttagtcatgtta

SEQ ID NO: 96070 - DNA, 19 bp, Artificial sequence
  SiRNA target sequence
caaaatttagtcatgttaa

SEQ ID NO: 96071 - DNA, 19 bp, Artificial sequence
  SiRNA target sequence
aaaatttagtcatgttaaa

SEQ ID NO: 96072 - DNA, 19 bp, Artificial sequence
  SiRNA target sequence
aaatttagtcatgttaaaa

SEQ ID NO: 96073 - DNA, 19 bp, Artificial sequence
  SiRNA target sequence
aatttagtcatgttaaaag

SEQ ID NO: 96074 - DNA, 19 bp, Artificial sequence
  SiRNA target sequence
atttagtcatgttaaaagg

SEQ ID NO: 96075 - DNA, 19 bp, Artificial sequence
  SiRNA target sequence
tttagtcatgttaaaaggt

SEQ ID NO: 96076 - DNA, 19 bp, Artificial sequence
  SiRNA target sequence
ttagtcatgttaaaaggtt

SEQ ID NO: 96077 - DNA, 19 bp, Artificial sequence
  SiRNA target sequence
tagtcatgttaaaaggttc

SEQ ID NO: 96078 - DNA, 19 bp, Artificial sequence
  SiRNA target sequence
agtcatgttaaaaggttca

SEQ ID NO: 96079 - DNA, 19 bp, Artificial sequence
  SiRNA target sequence
gtcatgttaaaaggttcag

SEQ ID NO: 96080 - DNA, 19 bp, Artificial sequence
  SiRNA target sequence
tcatgttaaaaggttcaga

SEQ ID NO: 96081 - DNA, 19 bp, Artificial sequence
  SiRNA target sequence
catgttaaaaggttcagaa

SEQ ID NO: 96082 - DNA, 19 bp, Artificial sequence
  SiRNA target sequence
atgttaaaaggttcagaac

SEQ ID NO: 96083 - DNA, 19 bp, Artificial sequence
  SiRNA target sequence
tgttaaaaggttcagaacc

SEQ ID NO: 96084 - DNA, 19 bp, Artificial sequence
  SiRNA target sequence
gttaaaaggttcagaacca

SEQ ID NO: 96085 - DNA, 19 bp, Artificial sequence
  SiRNA target sequence
ttaaaaggttcagaaccat

SEQ ID NO: 96086 - DNA, 19 bp, Artificial sequence
  SiRNA target sequence
taaaaggttcagaaccatt

SEQ ID NO: 96087 - DNA, 19 bp, Artificial sequence
  SiRNA target sequence
aaaaggttcagaaccattc

SEQ ID NO: 96088 - DNA, 19 bp, Artificial sequence
  SiRNA target sequence
aaaggttcagaaccattcc

SEQ ID NO: 96089 - DNA, 19 bp, Artificial sequence
  SiRNA target sequence
aaggttcagaaccattccc

SEQ ID NO: 96090 - DNA, 19 bp, Artificial sequence
  SiRNA target sequence
aggttcagaaccattccca

SEQ ID NO: 96091 - DNA, 19 bp, Artificial sequence
  SiRNA target sequence
ggttcagaaccattcccat

SEQ ID NO: 96092 - DNA, 19 bp, Artificial sequence
  SiRNA target sequence
gttcagaaccattcccatg

SEQ ID NO: 96093 - DNA, 19 bp, Artificial sequence
  SiRNA target sequence
ttcagaaccattcccatga

SEQ ID NO: 96094 - DNA, 19 bp, Artificial sequence
  SiRNA target sequence
tcagaaccattcccatgag

SEQ ID NO: 96095 - DNA, 19 bp, Artificial sequence
  SiRNA target sequence
cagaaccattcccatgagt

SEQ ID NO: 96096 - DNA, 19 bp, Artificial sequence
  SiRNA target sequence
agaaccattcccatgagtc

SEQ ID NO: 96097 - DNA, 19 bp, Artificial sequence
  SiRNA target sequence
gaaccattcccatgagtcg

SEQ ID NO: 96098 - DNA, 19 bp, Artificial sequence
  SiRNA target sequence
aaccattcccatgagtcga

SEQ ID NO: 96099 - DNA, 19 bp, Artificial sequence
  SiRNA target sequence
accattcccatgagtcgaa

SEQ ID NO: 96100 - DNA, 19 bp, Artificial sequence
  SiRNA target sequence
ccattcccatgagtcgaac

SEQ ID NO: 96101 - DNA, 19 bp, Artificial sequence
  SiRNA target sequence
cattcccatgagtcgaaca

SEQ ID NO: 96102 - DNA, 19 bp, Artificial sequence
  SiRNA target sequence
attcccatgagtcgaacat

SEQ ID NO: 96103 - DNA, 19 bp, Artificial sequence
  SiRNA target sequence
ttcccatgagtcgaacata

SEQ ID NO: 96104 - DNA, 19 bp, Artificial sequence
  SiRNA target sequence
tcccatgagtcgaacatac

SEQ ID NO: 96105 - DNA, 19 bp, Artificial sequence
  SiRNA target sequence
cccatgagtcgaacataca

SEQ ID NO: 96106 - DNA, 19 bp, Artificial sequence
  SiRNA target sequence
ccatgagtcgaacatacaa

SEQ ID NO: 96107 - DNA, 19 bp, Artificial sequence
  SiRNA target sequence
catgagtcgaacatacaaa

SEQ ID NO: 96108 - DNA, 19 bp, Artificial sequence
  SiRNA target sequence
atgagtcgaacatacaaat

SEQ ID NO: 96109 - DNA, 19 bp, Artificial sequence
  SiRNA target sequence
tgagtcgaacatacaaata

SEQ ID NO: 96110 - DNA, 19 bp, Artificial sequence
  SiRNA target sequence
gagtcgaacatacaaatat

SEQ ID NO: 96111 - DNA, 19 bp, Artificial sequence
  SiRNA target sequence
agtcgaacatacaaatata

SEQ ID NO: 96112 - DNA, 19 bp, Artificial sequence
  SiRNA target sequence
gtcgaacatacaaatataa

SEQ ID NO: 96113 - DNA, 19 bp, Artificial sequence
  SiRNA target sequence
tcgaacatacaaatataat

SEQ ID NO: 96114 - DNA, 19 bp, Artificial sequence
  SiRNA target sequence
cgaacatacaaatataatc

SEQ ID NO: 96115 - DNA, 19 bp, Artificial sequence
  SiRNA target sequence
gaacatacaaatataatca

SEQ ID NO: 96116 - DNA, 19 bp, Artificial sequence
  SiRNA target sequence
aacatacaaatataatcat

SEQ ID NO: 96117 - DNA, 19 bp, Artificial sequence
  SiRNA target sequence
acatacaaatataatcata

SEQ ID NO: 96118 - DNA, 19 bp, Artificial sequence
  SiRNA target sequence
catacaaatataatcatat

SEQ ID NO: 96119 - DNA, 19 bp, Artificial sequence
  SiRNA target sequence
atacaaatataatcatatc

SEQ ID NO: 96120 - DNA, 19 bp, Artificial sequence
  SiRNA target sequence
tacaaatataatcatatca

SEQ ID NO: 96121 - DNA, 19 bp, Artificial sequence
  SiRNA target sequence
acaaatataatcatatcaa

SEQ ID NO: 96122 - DNA, 19 bp, Artificial sequence
  SiRNA target sequence
caaatataatcatatcaat

SEQ ID NO: 96123 - DNA, 19 bp, Artificial sequence
  SiRNA target sequence
aaatataatcatatcaata

SEQ ID NO: 96124 - DNA, 19 bp, Artificial sequence
  SiRNA target sequence
aatataatcatatcaatat

SEQ ID NO: 96125 - DNA, 19 bp, Artificial sequence
  SiRNA target sequence
atataatcatatcaatatc

SEQ ID NO: 96126 - DNA, 19 bp, Artificial sequence
  SiRNA target sequence
tataatcatatcaatatct

SEQ ID NO: 96127 - DNA, 19 bp, Artificial sequence
  SiRNA target sequence
ataatcatatcaatatcta

SEQ ID NO: 96128 - DNA, 19 bp, Artificial sequence
  SiRNA target sequence
taatcatatcaatatctaa

SEQ ID NO: 96129 - DNA, 19 bp, Artificial sequence
  SiRNA target sequence
aatcatatcaatatctaat

SEQ ID NO: 96130 - DNA, 19 bp, Artificial sequence
  SiRNA target sequence
atcatatcaatatctaata

SEQ ID NO: 96131 - DNA, 19 bp, Artificial sequence
  SiRNA target sequence
tcatatcaatatctaatat

SEQ ID NO: 96132 - DNA, 19 bp, Artificial sequence
  SiRNA target sequence
catatcaatatctaatatt

SEQ ID NO: 96133 - DNA, 19 bp, Artificial sequence
  SiRNA target sequence
atatcaatatctaatattt

SEQ ID NO: 96134 - DNA, 19 bp, Artificial sequence
  SiRNA target sequence
tatcaatatctaatatttt

SEQ ID NO: 96135 - DNA, 19 bp, Artificial sequence
  SiRNA target sequence
atcaatatctaatattttt

SEQ ID NO: 96136 - DNA, 19 bp, Artificial sequence
  SiRNA target sequence
tcaatatctaatatttttt

SEQ ID NO: 96137 - DNA, 19 bp, Artificial sequence
  SiRNA target sequence
caatatctaatattttttc

SEQ ID NO: 96138 - DNA, 19 bp, Artificial sequence
  SiRNA target sequence
aatatctaatattttttcg

SEQ ID NO: 96139 - DNA, 19 bp, Artificial sequence
  SiRNA target sequence
atatctaatattttttcga

SEQ ID NO: 96140 - DNA, 19 bp, Artificial sequence
  SiRNA target sequence
tatctaatattttttcgaa

SEQ ID NO: 96141 - DNA, 19 bp, Artificial sequence
  SiRNA target sequence
atctaatattttttcgaaa

SEQ ID NO: 96142 - DNA, 19 bp, Artificial sequence
  SiRNA target sequence
tctaatattttttcgaaat

SEQ ID NO: 96143 - DNA, 19 bp, Artificial sequence
  SiRNA target sequence
ctaatattttttcgaaatc

SEQ ID NO: 96144 - DNA, 19 bp, Artificial sequence
  SiRNA target sequence
taatattttttcgaaatca

SEQ ID NO: 96145 - DNA, 19 bp, Artificial sequence
  SiRNA target sequence
aatattttttcgaaatcaa

SEQ ID NO: 96146 - DNA, 19 bp, Artificial sequence
  SiRNA target sequence
atattttttcgaaatcaaa

SEQ ID NO: 96147 - DNA, 19 bp, Artificial sequence
  SiRNA target sequence
tattttttcgaaatcaaaa

SEQ ID NO: 96148 - DNA, 19 bp, Artificial sequence
  SiRNA target sequence
attttttcgaaatcaaaac

SEQ ID NO: 96149 - DNA, 19 bp, Artificial sequence
  SiRNA target sequence
ttttttcgaaatcaaaact

SEQ ID NO: 96150 - DNA, 19 bp, Artificial sequence
  SiRNA target sequence
tttttcgaaatcaaaactg

SEQ ID NO: 96151 - DNA, 19 bp, Artificial sequence
  SiRNA target sequence
ttttcgaaatcaaaactgt

SEQ ID NO: 96152 - DNA, 19 bp, Artificial sequence
  SiRNA target sequence
tttcgaaatcaaaactgtc

SEQ ID NO: 96153 - DNA, 19 bp, Artificial sequence
  SiRNA target sequence
ttcgaaatcaaaactgtcc

SEQ ID NO: 96154 - DNA, 19 bp, Artificial sequence
  SiRNA target sequence
tcgaaatcaaaactgtcca

SEQ ID NO: 96155 - DNA, 19 bp, Artificial sequence
  SiRNA target sequence
cgaaatcaaaactgtccat

SEQ ID NO: 96156 - DNA, 19 bp, Artificial sequence
  SiRNA target sequence
gaaatcaaaactgtccata

SEQ ID NO: 96157 - DNA, 19 bp, Artificial sequence
  SiRNA target sequence
aaatcaaaactgtccatat

SEQ ID NO: 96158 - DNA, 19 bp, Artificial sequence
  SiRNA target sequence
aatcaaaactgtccatatc

SEQ ID NO: 96159 - DNA, 19 bp, Artificial sequence
  SiRNA target sequence
atcaaaactgtccatatct

SEQ ID NO: 96160 - DNA, 19 bp, Artificial sequence
  SiRNA target sequence
tcaaaactgtccatatcta

SEQ ID NO: 96161 - DNA, 19 bp, Artificial sequence
  SiRNA target sequence
caaaactgtccatatctaa

SEQ ID NO: 96162 - DNA, 19 bp, Artificial sequence
  SiRNA target sequence
aaaactgtccatatctaaa

SEQ ID NO: 96163 - DNA, 19 bp, Artificial sequence
  SiRNA target sequence
aaactgtccatatctaaag

SEQ ID NO: 96164 - DNA, 19 bp, Artificial sequence
  SiRNA target sequence
aactgtccatatctaaagt

SEQ ID NO: 96165 - DNA, 19 bp, Artificial sequence
  SiRNA target sequence
actgtccatatctaaagta

SEQ ID NO: 96166 - DNA, 19 bp, Artificial sequence
  SiRNA target sequence
ctgtccatatctaaagtaa

SEQ ID NO: 96167 - DNA, 19 bp, Artificial sequence
  SiRNA target sequence
tgtccatatctaaagtaaa

SEQ ID NO: 96168 - DNA, 19 bp, Artificial sequence
  SiRNA target sequence
gtccatatctaaagtaaaa

SEQ ID NO: 96169 - DNA, 19 bp, Artificial sequence
  SiRNA target sequence
tccatatctaaagtaaaat

SEQ ID NO: 96170 - DNA, 19 bp, Artificial sequence
  SiRNA target sequence
ccatatctaaagtaaaatc

SEQ ID NO: 96171 - DNA, 19 bp, Artificial sequence
  SiRNA target sequence
catatctaaagtaaaatct

SEQ ID NO: 96172 - DNA, 19 bp, Artificial sequence
  SiRNA target sequence
atatctaaagtaaaatctg

SEQ ID NO: 96173 - DNA, 19 bp, Artificial sequence
  SiRNA target sequence
tatctaaagtaaaatctgt

SEQ ID NO: 96174 - DNA, 19 bp, Artificial sequence
  SiRNA target sequence
atctaaagtaaaatctgtt

SEQ ID NO: 96175 - DNA, 19 bp, Artificial sequence
  SiRNA target sequence
tctaaagtaaaatctgttg

SEQ ID NO: 96176 - DNA, 19 bp, Artificial sequence
  SiRNA target sequence
ctaaagtaaaatctgttgg

SEQ ID NO: 96177 - DNA, 19 bp, Artificial sequence
  SiRNA target sequence
taaagtaaaatctgttgga

SEQ ID NO: 96178 - DNA, 19 bp, Artificial sequence
  SiRNA target sequence
aaagtaaaatctgttggaa

SEQ ID NO: 96179 - DNA, 19 bp, Artificial sequence
  SiRNA target sequence
aagtaaaatctgttggaag

SEQ ID NO: 96180 - DNA, 19 bp, Artificial sequence
  SiRNA target sequence
agtaaaatctgttggaagc

SEQ ID NO: 96181 - DNA, 19 bp, Artificial sequence
  SiRNA target sequence
gtaaaatctgttggaagca

SEQ ID NO: 96182 - DNA, 19 bp, Artificial sequence
  SiRNA target sequence
taaaatctgttggaagcaa

SEQ ID NO: 96183 - DNA, 19 bp, Artificial sequence
  SiRNA target sequence
aaaatctgttggaagcaat

SEQ ID NO: 96184 - DNA, 19 bp, Artificial sequence
  SiRNA target sequence
aaatctgttggaagcaatt

SEQ ID NO: 96185 - DNA, 19 bp, Artificial sequence
  SiRNA target sequence
aatctgttggaagcaattc

SEQ ID NO: 96186 - DNA, 19 bp, Artificial sequence
  SiRNA target sequence
atctgttggaagcaattct

SEQ ID NO: 96187 - DNA, 19 bp, Artificial sequence
  SiRNA target sequence
tctgttggaagcaattctt

SEQ ID NO: 96188 - DNA, 19 bp, Artificial sequence
  SiRNA target sequence
ctgttggaagcaattcttt

SEQ ID NO: 96189 - DNA, 19 bp, Artificial sequence
  SiRNA target sequence
tgttggaagcaattcttta

SEQ ID NO: 96190 - DNA, 19 bp, Artificial sequence
  SiRNA target sequence
gttggaagcaattctttat

SEQ ID NO: 96191 - DNA, 19 bp, Artificial sequence
  SiRNA target sequence
ttggaagcaattctttatc

SEQ ID NO: 96192 - DNA, 19 bp, Artificial sequence
  SiRNA target sequence
tggaagcaattctttatca

SEQ ID NO: 96193 - DNA, 19 bp, Artificial sequence
  SiRNA target sequence
ggaagcaattctttatcaa

SEQ ID NO: 96194 - DNA, 19 bp, Artificial sequence
  SiRNA target sequence
gaagcaattctttatcaac

SEQ ID NO: 96195 - DNA, 19 bp, Artificial sequence
  SiRNA target sequence
aagcaattctttatcaacg

SEQ ID NO: 96196 - DNA, 19 bp, Artificial sequence
  SiRNA target sequence
agcaattctttatcaacgt

SEQ ID NO: 96197 - DNA, 19 bp, Artificial sequence
  SiRNA target sequence
gcaattctttatcaacgtt

SEQ ID NO: 96198 - DNA, 19 bp, Artificial sequence
  SiRNA target sequence
caattctttatcaacgtta

SEQ ID NO: 96199 - DNA, 19 bp, Artificial sequence
  SiRNA target sequence
aattctttatcaacgttat

SEQ ID NO: 96200 - DNA, 19 bp, Artificial sequence
  SiRNA target sequence
attctttatcaacgttata

SEQ ID NO: 96201 - DNA, 19 bp, Artificial sequence
  SiRNA target sequence
ttctttatcaacgttataa

SEQ ID NO: 96202 - DNA, 19 bp, Artificial sequence
  SiRNA target sequence
tctttatcaacgttataaa

SEQ ID NO: 96203 - DNA, 19 bp, Artificial sequence
  SiRNA target sequence
ctttatcaacgttataaat

SEQ ID NO: 96204 - DNA, 19 bp, Artificial sequence
  SiRNA target sequence
tttatcaacgttataaatc

SEQ ID NO: 96205 - DNA, 19 bp, Artificial sequence
  SiRNA target sequence
ttatcaacgttataaatca

SEQ ID NO: 96206 - DNA, 19 bp, Artificial sequence
  SiRNA target sequence
tatcaacgttataaatcaa

SEQ ID NO: 96207 - DNA, 19 bp, Artificial sequence
  SiRNA target sequence
atcaacgttataaatcaaa

SEQ ID NO: 96208 - DNA, 19 bp, Artificial sequence
  SiRNA target sequence
tcaacgttataaatcaaat

SEQ ID NO: 96209 - DNA, 19 bp, Artificial sequence
  SiRNA target sequence
caacgttataaatcaaatc

SEQ ID NO: 96210 - DNA, 19 bp, Artificial sequence
  SiRNA target sequence
aacgttataaatcaaatct

SEQ ID NO: 96211 - DNA, 19 bp, Artificial sequence
  SiRNA target sequence
acgttataaatcaaatctt

SEQ ID NO: 96212 - DNA, 19 bp, Artificial sequence
  SiRNA target sequence
cgttataaatcaaatcttt

SEQ ID NO: 96213 - DNA, 19 bp, Artificial sequence
  SiRNA target sequence
gttataaatcaaatcttta

SEQ ID NO: 96214 - DNA, 19 bp, Artificial sequence
  SiRNA target sequence
ttataaatcaaatctttat

SEQ ID NO: 96215 - DNA, 19 bp, Artificial sequence
  SiRNA target sequence
tataaatcaaatctttatt

SEQ ID NO: 96216 - DNA, 19 bp, Artificial sequence
  SiRNA target sequence
ataaatcaaatctttattg

SEQ ID NO: 96217 - DNA, 19 bp, Artificial sequence
  SiRNA target sequence
taaatcaaatctttattgt

SEQ ID NO: 96218 - DNA, 19 bp, Artificial sequence
  SiRNA target sequence
aaatcaaatctttattgta

SEQ ID NO: 96219 - DNA, 19 bp, Artificial sequence
  SiRNA target sequence
aatcaaatctttattgtat

SEQ ID NO: 96220 - DNA, 19 bp, Artificial sequence
  SiRNA target sequence
atcaaatctttattgtatc

SEQ ID NO: 96221 - DNA, 19 bp, Artificial sequence
  SiRNA target sequence
tcaaatctttattgtatcc

SEQ ID NO: 96222 - DNA, 19 bp, Artificial sequence
  SiRNA target sequence
caaatctttattgtatccg

SEQ ID NO: 96223 - DNA, 19 bp, Artificial sequence
  SiRNA target sequence
aaatctttattgtatccgt

SEQ ID NO: 96224 - DNA, 19 bp, Artificial sequence
  SiRNA target sequence
aatctttattgtatccgta

SEQ ID NO: 96225 - DNA, 19 bp, Artificial sequence
  SiRNA target sequence
atctttattgtatccgtat

SEQ ID NO: 96226 - DNA, 19 bp, Artificial sequence
  SiRNA target sequence
tctttattgtatccgtata

SEQ ID NO: 96227 - DNA, 19 bp, Artificial sequence
  SiRNA target sequence
ctttattgtatccgtatag

SEQ ID NO: 96228 - DNA, 19 bp, Artificial sequence
  SiRNA target sequence
tttattgtatccgtatagt

SEQ ID NO: 96229 - DNA, 19 bp, Artificial sequence
  SiRNA target sequence
ttattgtatccgtatagta

SEQ ID NO: 96230 - DNA, 19 bp, Artificial sequence
  SiRNA target sequence
tattgtatccgtatagtat

SEQ ID NO: 96231 - DNA, 19 bp, Artificial sequence
  SiRNA target sequence
attgtatccgtatagtata

SEQ ID NO: 96232 - DNA, 19 bp, Artificial sequence
  SiRNA target sequence
ttgtatccgtatagtataa

SEQ ID NO: 96233 - DNA, 19 bp, Artificial sequence
  SiRNA target sequence
tgtatccgtatagtataac

SEQ ID NO: 96234 - DNA, 19 bp, Artificial sequence
  SiRNA target sequence
gtatccgtatagtataaca

SEQ ID NO: 96235 - DNA, 19 bp, Artificial sequence
  SiRNA target sequence
tatccgtatagtataacat

SEQ ID NO: 96236 - DNA, 19 bp, Artificial sequence
  SiRNA target sequence
atccgtatagtataacatt

SEQ ID NO: 96237 - DNA, 19 bp, Artificial sequence
  SiRNA target sequence
tccgtatagtataacattt

SEQ ID NO: 96238 - DNA, 19 bp, Artificial sequence
  SiRNA target sequence
ccgtatagtataacatttt

SEQ ID NO: 96239 - DNA, 19 bp, Artificial sequence
  SiRNA target sequence
cgtatagtataacattttg

SEQ ID NO: 96240 - DNA, 19 bp, Artificial sequence
  SiRNA target sequence
gtatagtataacattttga

SEQ ID NO: 96241 - DNA, 19 bp, Artificial sequence
  SiRNA target sequence
tatagtataacattttgaa

SEQ ID NO: 96242 - DNA, 19 bp, Artificial sequence
  SiRNA target sequence
atagtataacattttgaat

SEQ ID NO: 96243 - DNA, 19 bp, Artificial sequence
  SiRNA target sequence
tagtataacattttgaata

SEQ ID NO: 96244 - DNA, 19 bp, Artificial sequence
  SiRNA target sequence
agtataacattttgaataa

SEQ ID NO: 96245 - DNA, 19 bp, Artificial sequence
  SiRNA target sequence
gtataacattttgaataag

SEQ ID NO: 96246 - DNA, 19 bp, Artificial sequence
  SiRNA target sequence
tataacattttgaataagt

SEQ ID NO: 96247 - DNA, 19 bp, Artificial sequence
  SiRNA target sequence
ataacattttgaataagtt

SEQ ID NO: 96248 - DNA, 19 bp, Artificial sequence
  SiRNA target sequence
taacattttgaataagttt

SEQ ID NO: 96249 - DNA, 19 bp, Artificial sequence
  SiRNA target sequence
aacattttgaataagttta

SEQ ID NO: 96250 - DNA, 19 bp, Artificial sequence
  SiRNA target sequence
acattttgaataagtttag

SEQ ID NO: 96251 - DNA, 19 bp, Artificial sequence
  SiRNA target sequence
cattttgaataagtttagc

SEQ ID NO: 96252 - DNA, 19 bp, Artificial sequence
  SiRNA target sequence
attttgaataagtttagca

SEQ ID NO: 96253 - DNA, 19 bp, Artificial sequence
  SiRNA target sequence
ttttgaataagtttagcaa

SEQ ID NO: 96254 - DNA, 19 bp, Artificial sequence
  SiRNA target sequence
tttgaataagtttagcaat

SEQ ID NO: 96255 - DNA, 19 bp, Artificial sequence
  SiRNA target sequence
ttgaataagtttagcaata

SEQ ID NO: 96256 - DNA, 19 bp, Artificial sequence
  SiRNA target sequence
tgaataagtttagcaatat

SEQ ID NO: 96257 - DNA, 19 bp, Artificial sequence
  SiRNA target sequence
gaataagtttagcaatatg

SEQ ID NO: 96258 - DNA, 19 bp, Artificial sequence
  SiRNA target sequence
aataagtttagcaatatgt

SEQ ID NO: 96259 - DNA, 19 bp, Artificial sequence
  SiRNA target sequence
ataagtttagcaatatgta

SEQ ID NO: 96260 - DNA, 19 bp, Artificial sequence
  SiRNA target sequence
taagtttagcaatatgtat

SEQ ID NO: 96261 - DNA, 19 bp, Artificial sequence
  SiRNA target sequence
aagtttagcaatatgtata

SEQ ID NO: 96262 - DNA, 19 bp, Artificial sequence
  SiRNA target sequence
agtttagcaatatgtatag

SEQ ID NO: 96263 - DNA, 19 bp, Artificial sequence
  SiRNA target sequence
gtttagcaatatgtataga

SEQ ID NO: 96264 - DNA, 19 bp, Artificial sequence
  SiRNA target sequence
tttagcaatatgtatagaa

SEQ ID NO: 96265 - DNA, 19 bp, Artificial sequence
  SiRNA target sequence
ttagcaatatgtatagaat

SEQ ID NO: 96266 - DNA, 19 bp, Artificial sequence
  SiRNA target sequence
tagcaatatgtatagaatt

SEQ ID NO: 96267 - DNA, 19 bp, Artificial sequence
  SiRNA target sequence
agcaatatgtatagaattt

SEQ ID NO: 96268 - DNA, 19 bp, Artificial sequence
  SiRNA target sequence
gcaatatgtatagaatttc

SEQ ID NO: 96269 - DNA, 19 bp, Artificial sequence
  SiRNA target sequence
caatatgtatagaatttcc

SEQ ID NO: 96270 - DNA, 19 bp, Artificial sequence
  SiRNA target sequence
aatatgtatagaatttcct

SEQ ID NO: 96271 - DNA, 19 bp, Artificial sequence
  SiRNA target sequence
atatgtatagaatttcctg

SEQ ID NO: 96272 - DNA, 19 bp, Artificial sequence
  SiRNA target sequence
tatgtatagaatttcctgt

SEQ ID NO: 96273 - DNA, 19 bp, Artificial sequence
  SiRNA target sequence
atgtatagaatttcctgtt

SEQ ID NO: 96274 - DNA, 19 bp, Artificial sequence
  SiRNA target sequence
tgtatagaatttcctgttt

SEQ ID NO: 96275 - DNA, 19 bp, Artificial sequence
  SiRNA target sequence
gtatagaatttcctgtttg

SEQ ID NO: 96276 - DNA, 19 bp, Artificial sequence
  SiRNA target sequence
tatagaatttcctgtttgg

SEQ ID NO: 96277 - DNA, 19 bp, Artificial sequence
  SiRNA target sequence
atagaatttcctgtttggg

SEQ ID NO: 96278 - DNA, 19 bp, Artificial sequence
  SiRNA target sequence
tagaatttcctgtttggga

SEQ ID NO: 96279 - DNA, 19 bp, Artificial sequence
  SiRNA target sequence
agaatttcctgtttgggag

SEQ ID NO: 96280 - DNA, 19 bp, Artificial sequence
  SiRNA target sequence
gaatttcctgtttgggagc

SEQ ID NO: 96281 - DNA, 19 bp, Artificial sequence
  SiRNA target sequence
aatttcctgtttgggagcc

SEQ ID NO: 96282 - DNA, 19 bp, Artificial sequence
  SiRNA target sequence
atttcctgtttgggagcca

SEQ ID NO: 96283 - DNA, 19 bp, Artificial sequence
  SiRNA target sequence
tttcctgtttgggagccat

SEQ ID NO: 96284 - DNA, 19 bp, Artificial sequence
  SiRNA target sequence
ttcctgtttgggagccata

SEQ ID NO: 96285 - DNA, 19 bp, Artificial sequence
  SiRNA target sequence
tcctgtttgggagccatat

SEQ ID NO: 96286 - DNA, 19 bp, Artificial sequence
  SiRNA target sequence
cctgtttgggagccatata

SEQ ID NO: 96287 - DNA, 19 bp, Artificial sequence
  SiRNA target sequence
ctgtttgggagccatataa

SEQ ID NO: 96288 - DNA, 19 bp, Artificial sequence
  SiRNA target sequence
tgtttgggagccatataag

SEQ ID NO: 96289 - DNA, 19 bp, Artificial sequence
  SiRNA target sequence
gtttgggagccatataaga

SEQ ID NO: 96290 - DNA, 19 bp, Artificial sequence
  SiRNA target sequence
tttgggagccatataagat

SEQ ID NO: 96291 - DNA, 19 bp, Artificial sequence
  SiRNA target sequence
ttgggagccatataagatt

SEQ ID NO: 96292 - DNA, 19 bp, Artificial sequence
  SiRNA target sequence
tgggagccatataagatta

SEQ ID NO: 96293 - DNA, 19 bp, Artificial sequence
  SiRNA target sequence
gggagccatataagattat

SEQ ID NO: 96294 - DNA, 19 bp, Artificial sequence
  SiRNA target sequence
ggagccatataagattatc

SEQ ID NO: 96295 - DNA, 19 bp, Artificial sequence
  SiRNA target sequence
gagccatataagattatca

SEQ ID NO: 96296 - DNA, 19 bp, Artificial sequence
  SiRNA target sequence
agccatataagattatcat

SEQ ID NO: 96297 - DNA, 20 bp, Artificial sequence
  SiRNA target sequence
ttaccaagtttctgcctgaa

SEQ ID NO: 96298 - DNA, 20 bp, Artificial sequence
  SiRNA target sequence
taccaagtttctgcctgaaa

SEQ ID NO: 96299 - DNA, 20 bp, Artificial sequence
  SiRNA target sequence
accaagtttctgcctgaaaa

SEQ ID NO: 96300 - DNA, 20 bp, Artificial sequence
  SiRNA target sequence
ccaagtttctgcctgaaaat

SEQ ID NO: 96301 - DNA, 20 bp, Artificial sequence
  SiRNA target sequence
caagtttctgcctgaaaata

SEQ ID NO: 96302 - DNA, 20 bp, Artificial sequence
  SiRNA target sequence
aagtttctgcctgaaaatat

SEQ ID NO: 96303 - DNA, 20 bp, Artificial sequence
  SiRNA target sequence
agtttctgcctgaaaatata

SEQ ID NO: 96304 - DNA, 20 bp, Artificial sequence
  SiRNA target sequence
gtttctgcctgaaaatatat

SEQ ID NO: 96305 - DNA, 20 bp, Artificial sequence
  SiRNA target sequence
tttctgcctgaaaatatatt

SEQ ID NO: 96306 - DNA, 20 bp, Artificial sequence
  SiRNA target sequence
ttctgcctgaaaatatattt

SEQ ID NO: 96307 - DNA, 20 bp, Artificial sequence
  SiRNA target sequence
tctgcctgaaaatatatttt

SEQ ID NO: 96308 - DNA, 20 bp, Artificial sequence
  SiRNA target sequence
ctgcctgaaaatatattttc

SEQ ID NO: 96309 - DNA, 20 bp, Artificial sequence
  SiRNA target sequence
tgcctgaaaatatattttct

SEQ ID NO: 96310 - DNA, 20 bp, Artificial sequence
  SiRNA target sequence
gcctgaaaatatattttctt

SEQ ID NO: 96311 - DNA, 20 bp, Artificial sequence
  SiRNA target sequence
cctgaaaatatattttcttt

SEQ ID NO: 96312 - DNA, 20 bp, Artificial sequence
  SiRNA target sequence
ctgaaaatatattttctttt

SEQ ID NO: 96313 - DNA, 20 bp, Artificial sequence
  SiRNA target sequence
tgaaaatatattttcttttt

SEQ ID NO: 96314 - DNA, 20 bp, Artificial sequence
  SiRNA target sequence
gaaaatatattttcttttta

SEQ ID NO: 96315 - DNA, 20 bp, Artificial sequence
  SiRNA target sequence
aaaatatattttctttttat

SEQ ID NO: 96316 - DNA, 20 bp, Artificial sequence
  SiRNA target sequence
aaatatattttctttttata

SEQ ID NO: 96317 - DNA, 20 bp, Artificial sequence
  SiRNA target sequence
aatatattttctttttataa

SEQ ID NO: 96318 - DNA, 20 bp, Artificial sequence
  SiRNA target sequence
atatattttctttttataaa

SEQ ID NO: 96319 - DNA, 20 bp, Artificial sequence
  SiRNA target sequence
tatattttctttttataaat

SEQ ID NO: 96320 - DNA, 20 bp, Artificial sequence
  SiRNA target sequence
atattttctttttataaata

SEQ ID NO: 96321 - DNA, 20 bp, Artificial sequence
  SiRNA target sequence
tattttctttttataaatat

SEQ ID NO: 96322 - DNA, 20 bp, Artificial sequence
  SiRNA target sequence
attttctttttataaatatc

SEQ ID NO: 96323 - DNA, 20 bp, Artificial sequence
  SiRNA target sequence
ttttctttttataaatatct

SEQ ID NO: 96324 - DNA, 20 bp, Artificial sequence
  SiRNA target sequence
tttctttttataaatatcta

SEQ ID NO: 96325 - DNA, 20 bp, Artificial sequence
  SiRNA target sequence
ttctttttataaatatctaa

SEQ ID NO: 96326 - DNA, 20 bp, Artificial sequence
  SiRNA target sequence
tctttttataaatatctaat

SEQ ID NO: 96327 - DNA, 20 bp, Artificial sequence
  SiRNA target sequence
ctttttataaatatctaata

SEQ ID NO: 96328 - DNA, 20 bp, Artificial sequence
  SiRNA target sequence
tttttataaatatctaataa

SEQ ID NO: 96329 - DNA, 20 bp, Artificial sequence
  SiRNA target sequence
ttttataaatatctaataac

SEQ ID NO: 96330 - DNA, 20 bp, Artificial sequence
  SiRNA target sequence
tttataaatatctaataaca

SEQ ID NO: 96331 - DNA, 20 bp, Artificial sequence
  SiRNA target sequence
ttataaatatctaataacat

SEQ ID NO: 96332 - DNA, 20 bp, Artificial sequence
  SiRNA target sequence
tataaatatctaataacatt

SEQ ID NO: 96333 - DNA, 20 bp, Artificial sequence
  SiRNA target sequence
ataaatatctaataacattt

SEQ ID NO: 96334 - DNA, 20 bp, Artificial sequence
  SiRNA target sequence
taaatatctaataacatttt

SEQ ID NO: 96335 - DNA, 20 bp, Artificial sequence
  SiRNA target sequence
aaatatctaataacattttt

SEQ ID NO: 96336 - DNA, 20 bp, Artificial sequence
  SiRNA target sequence
aatatctaataacatttttt

SEQ ID NO: 96337 - DNA, 20 bp, Artificial sequence
  SiRNA target sequence
atatctaataacattttttc

SEQ ID NO: 96338 - DNA, 20 bp, Artificial sequence
  SiRNA target sequence
tatctaataacattttttca

SEQ ID NO: 96339 - DNA, 20 bp, Artificial sequence
  SiRNA target sequence
atctaataacattttttcaa

SEQ ID NO: 96340 - DNA, 20 bp, Artificial sequence
  SiRNA target sequence
tctaataacattttttcaat

SEQ ID NO: 96341 - DNA, 20 bp, Artificial sequence
  SiRNA target sequence
ctaataacattttttcaata

SEQ ID NO: 96342 - DNA, 20 bp, Artificial sequence
  SiRNA target sequence
taataacattttttcaataa

SEQ ID NO: 96343 - DNA, 20 bp, Artificial sequence
  SiRNA target sequence
aataacattttttcaataat

SEQ ID NO: 96344 - DNA, 20 bp, Artificial sequence
  SiRNA target sequence
ataacattttttcaataata

SEQ ID NO: 96345 - DNA, 20 bp, Artificial sequence
  SiRNA target sequence
taacattttttcaataatat

SEQ ID NO: 96346 - DNA, 20 bp, Artificial sequence
  SiRNA target sequence
aacattttttcaataatatt

SEQ ID NO: 96347 - DNA, 20 bp, Artificial sequence
  SiRNA target sequence
acattttttcaataatatta

SEQ ID NO: 96348 - DNA, 20 bp, Artificial sequence
  SiRNA target sequence
cattttttcaataatattat

SEQ ID NO: 96349 - DNA, 20 bp, Artificial sequence
  SiRNA target sequence
attttttcaataatattatt

SEQ ID NO: 96350 - DNA, 20 bp, Artificial sequence
  SiRNA target sequence
ttttttcaataatattatta

SEQ ID NO: 96351 - DNA, 20 bp, Artificial sequence
  SiRNA target sequence
tttttcaataatattattaa

SEQ ID NO: 96352 - DNA, 20 bp, Artificial sequence
  SiRNA target sequence
ttttcaataatattattaag

SEQ ID NO: 96353 - DNA, 20 bp, Artificial sequence
  SiRNA target sequence
tttcaataatattattaagt

SEQ ID NO: 96354 - DNA, 20 bp, Artificial sequence
  SiRNA target sequence
ttcaataatattattaagtc

SEQ ID NO: 96355 - DNA, 20 bp, Artificial sequence
  SiRNA target sequence
tcaataatattattaagtct

SEQ ID NO: 96356 - DNA, 20 bp, Artificial sequence
  SiRNA target sequence
caataatattattaagtcta

SEQ ID NO: 96357 - DNA, 20 bp, Artificial sequence
  SiRNA target sequence
aataatattattaagtctag

SEQ ID NO: 96358 - DNA, 20 bp, Artificial sequence
  SiRNA target sequence
ataatattattaagtctaga

SEQ ID NO: 96359 - DNA, 20 bp, Artificial sequence
  SiRNA target sequence
taatattattaagtctagaa

SEQ ID NO: 96360 - DNA, 20 bp, Artificial sequence
  SiRNA target sequence
aatattattaagtctagaat

SEQ ID NO: 96361 - DNA, 20 bp, Artificial sequence
  SiRNA target sequence
atattattaagtctagaatt

SEQ ID NO: 96362 - DNA, 20 bp, Artificial sequence
  SiRNA target sequence
tattattaagtctagaattt

SEQ ID NO: 96363 - DNA, 20 bp, Artificial sequence
  SiRNA target sequence
attattaagtctagaatttc

SEQ ID NO: 96364 - DNA, 20 bp, Artificial sequence
  SiRNA target sequence
ttattaagtctagaatttcc

SEQ ID NO: 96365 - DNA, 20 bp, Artificial sequence
  SiRNA target sequence
tattaagtctagaatttcca

SEQ ID NO: 96366 - DNA, 20 bp, Artificial sequence
  SiRNA target sequence
attaagtctagaatttccac

SEQ ID NO: 96367 - DNA, 20 bp, Artificial sequence
  SiRNA target sequence
ttaagtctagaatttccact

SEQ ID NO: 96368 - DNA, 20 bp, Artificial sequence
  SiRNA target sequence
taagtctagaatttccactt

SEQ ID NO: 96369 - DNA, 20 bp, Artificial sequence
  SiRNA target sequence
aagtctagaatttccactta

SEQ ID NO: 96370 - DNA, 20 bp, Artificial sequence
  SiRNA target sequence
agtctagaatttccacttac

SEQ ID NO: 96371 - DNA, 20 bp, Artificial sequence
  SiRNA target sequence
gtctagaatttccacttaca

SEQ ID NO: 96372 - DNA, 20 bp, Artificial sequence
  SiRNA target sequence
tctagaatttccacttacaa

SEQ ID NO: 96373 - DNA, 20 bp, Artificial sequence
  SiRNA target sequence
ctagaatttccacttacaaa

SEQ ID NO: 96374 - DNA, 20 bp, Artificial sequence
  SiRNA target sequence
tagaatttccacttacaaat

SEQ ID NO: 96375 - DNA, 20 bp, Artificial sequence
  SiRNA target sequence
agaatttccacttacaaata

SEQ ID NO: 96376 - DNA, 20 bp, Artificial sequence
  SiRNA target sequence
gaatttccacttacaaatat

SEQ ID NO: 96377 - DNA, 20 bp, Artificial sequence
  SiRNA target sequence
aatttccacttacaaatatt

SEQ ID NO: 96378 - DNA, 20 bp, Artificial sequence
  SiRNA target sequence
atttccacttacaaatatta

SEQ ID NO: 96379 - DNA, 20 bp, Artificial sequence
  SiRNA target sequence
tttccacttacaaatattaa

SEQ ID NO: 96380 - DNA, 20 bp, Artificial sequence
  SiRNA target sequence
ttccacttacaaatattaac

SEQ ID NO: 96381 - DNA, 20 bp, Artificial sequence
  SiRNA target sequence
tccacttacaaatattaacc

SEQ ID NO: 96382 - DNA, 20 bp, Artificial sequence
  SiRNA target sequence
ccacttacaaatattaacca

SEQ ID NO: 96383 - DNA, 20 bp, Artificial sequence
  SiRNA target sequence
cacttacaaatattaaccaa

SEQ ID NO: 96384 - DNA, 20 bp, Artificial sequence
  SiRNA target sequence
acttacaaatattaaccaat

SEQ ID NO: 96385 - DNA, 20 bp, Artificial sequence
  SiRNA target sequence
cttacaaatattaaccaatc

SEQ ID NO: 96386 - DNA, 20 bp, Artificial sequence
  SiRNA target sequence
ttacaaatattaaccaatca

SEQ ID NO: 96387 - DNA, 20 bp, Artificial sequence
  SiRNA target sequence
tacaaatattaaccaatcat

SEQ ID NO: 96388 - DNA, 20 bp, Artificial sequence
  SiRNA target sequence
acaaatattaaccaatcatc

SEQ ID NO: 96389 - DNA, 20 bp, Artificial sequence
  SiRNA target sequence
caaatattaaccaatcatca

SEQ ID NO: 96390 - DNA, 20 bp, Artificial sequence
  SiRNA target sequence
aaatattaaccaatcatcaa

SEQ ID NO: 96391 - DNA, 20 bp, Artificial sequence
  SiRNA target sequence
aatattaaccaatcatcaat

SEQ ID NO: 96392 - DNA, 20 bp, Artificial sequence
  SiRNA target sequence
atattaaccaatcatcaata

SEQ ID NO: 96393 - DNA, 20 bp, Artificial sequence
  SiRNA target sequence
tattaaccaatcatcaatat

SEQ ID NO: 96394 - DNA, 20 bp, Artificial sequence
  SiRNA target sequence
attaaccaatcatcaatatt

SEQ ID NO: 96395 - DNA, 20 bp, Artificial sequence
  SiRNA target sequence
ttaaccaatcatcaatattt

SEQ ID NO: 96396 - DNA, 20 bp, Artificial sequence
  SiRNA target sequence
taaccaatcatcaatatttt

SEQ ID NO: 96397 - DNA, 20 bp, Artificial sequence
  SiRNA target sequence
aaccaatcatcaatattttc

SEQ ID NO: 96398 - DNA, 20 bp, Artificial sequence
  SiRNA target sequence
accaatcatcaatattttct

SEQ ID NO: 96399 - DNA, 20 bp, Artificial sequence
  SiRNA target sequence
ccaatcatcaatattttcta

SEQ ID NO: 96400 - DNA, 20 bp, Artificial sequence
  SiRNA target sequence
caatcatcaatattttctag

SEQ ID NO: 96401 - DNA, 20 bp, Artificial sequence
  SiRNA target sequence
aatcatcaatattttctagc

SEQ ID NO: 96402 - DNA, 20 bp, Artificial sequence
  SiRNA target sequence
atcatcaatattttctagcc

SEQ ID NO: 96403 - DNA, 20 bp, Artificial sequence
  SiRNA target sequence
tcatcaatattttctagccc

SEQ ID NO: 96404 - DNA, 20 bp, Artificial sequence
  SiRNA target sequence
catcaatattttctagccct

SEQ ID NO: 96405 - DNA, 20 bp, Artificial sequence
  SiRNA target sequence
atcaatattttctagccctt

SEQ ID NO: 96406 - DNA, 20 bp, Artificial sequence
  SiRNA target sequence
tcaatattttctagcccttt

SEQ ID NO: 96407 - DNA, 20 bp, Artificial sequence
  SiRNA target sequence
caatattttctagccctttt

SEQ ID NO: 96408 - DNA, 20 bp, Artificial sequence
  SiRNA target sequence
aatattttctagccctttta

SEQ ID NO: 96409 - DNA, 20 bp, Artificial sequence
  SiRNA target sequence
atattttctagcccttttat

SEQ ID NO: 96410 - DNA, 20 bp, Artificial sequence
  SiRNA target sequence
tattttctagcccttttata

SEQ ID NO: 96411 - DNA, 20 bp, Artificial sequence
  SiRNA target sequence
attttctagcccttttatag

SEQ ID NO: 96412 - DNA, 20 bp, Artificial sequence
  SiRNA target sequence
ttttctagcccttttatagt

SEQ ID NO: 96413 - DNA, 20 bp, Artificial sequence
  SiRNA target sequence
tttctagcccttttatagtc

SEQ ID NO: 96414 - DNA, 20 bp, Artificial sequence
  SiRNA target sequence
ttctagcccttttatagtct

SEQ ID NO: 96415 - DNA, 20 bp, Artificial sequence
  SiRNA target sequence
tctagcccttttatagtctt

SEQ ID NO: 96416 - DNA, 20 bp, Artificial sequence
  SiRNA target sequence
ctagcccttttatagtctta

SEQ ID NO: 96417 - DNA, 20 bp, Artificial sequence
  SiRNA target sequence
tagcccttttatagtcttat

SEQ ID NO: 96418 - DNA, 20 bp, Artificial sequence
  SiRNA target sequence
agcccttttatagtcttata

SEQ ID NO: 96419 - DNA, 20 bp, Artificial sequence
  SiRNA target sequence
gcccttttatagtcttataa

SEQ ID NO: 96420 - DNA, 20 bp, Artificial sequence
  SiRNA target sequence
cccttttatagtcttataaa

SEQ ID NO: 96421 - DNA, 20 bp, Artificial sequence
  SiRNA target sequence
ccttttatagtcttataaat

SEQ ID NO: 96422 - DNA, 20 bp, Artificial sequence
  SiRNA target sequence
cttttatagtcttataaata

SEQ ID NO: 96423 - DNA, 20 bp, Artificial sequence
  SiRNA target sequence
ttttatagtcttataaatat

SEQ ID NO: 96424 - DNA, 20 bp, Artificial sequence
  SiRNA target sequence
tttatagtcttataaatatc

SEQ ID NO: 96425 - DNA, 20 bp, Artificial sequence
  SiRNA target sequence
ttatagtcttataaatatct

SEQ ID NO: 96426 - DNA, 20 bp, Artificial sequence
  SiRNA target sequence
tatagtcttataaatatctt

SEQ ID NO: 96427 - DNA, 20 bp, Artificial sequence
  SiRNA target sequence
atagtcttataaatatcttg

SEQ ID NO: 96428 - DNA, 20 bp, Artificial sequence
  SiRNA target sequence
tagtcttataaatatcttgt

SEQ ID NO: 96429 - DNA, 20 bp, Artificial sequence
  SiRNA target sequence
agtcttataaatatcttgta

SEQ ID NO: 96430 - DNA, 20 bp, Artificial sequence
  SiRNA target sequence
gtcttataaatatcttgtat

SEQ ID NO: 96431 - DNA, 20 bp, Artificial sequence
  SiRNA target sequence
tcttataaatatcttgtatg

SEQ ID NO: 96432 - DNA, 20 bp, Artificial sequence
  SiRNA target sequence
cttataaatatcttgtatgt

SEQ ID NO: 96433 - DNA, 20 bp, Artificial sequence
  SiRNA target sequence
ttataaatatcttgtatgta

SEQ ID NO: 96434 - DNA, 20 bp, Artificial sequence
  SiRNA target sequence
tataaatatcttgtatgtat

SEQ ID NO: 96435 - DNA, 20 bp, Artificial sequence
  SiRNA target sequence
ataaatatcttgtatgtatt

SEQ ID NO: 96436 - DNA, 20 bp, Artificial sequence
  SiRNA target sequence
taaatatcttgtatgtattt

SEQ ID NO: 96437 - DNA, 20 bp, Artificial sequence
  SiRNA target sequence
aaatatcttgtatgtattta

SEQ ID NO: 96438 - DNA, 20 bp, Artificial sequence
  SiRNA target sequence
aatatcttgtatgtatttat

SEQ ID NO: 96439 - DNA, 20 bp, Artificial sequence
  SiRNA target sequence
atatcttgtatgtatttatt

SEQ ID NO: 96440 - DNA, 20 bp, Artificial sequence
  SiRNA target sequence
tatcttgtatgtatttatta

SEQ ID NO: 96441 - DNA, 20 bp, Artificial sequence
  SiRNA target sequence
atcttgtatgtatttattat

SEQ ID NO: 96442 - DNA, 20 bp, Artificial sequence
  SiRNA target sequence
tcttgtatgtatttattatc

SEQ ID NO: 96443 - DNA, 20 bp, Artificial sequence
  SiRNA target sequence
cttgtatgtatttattatct

SEQ ID NO: 96444 - DNA, 20 bp, Artificial sequence
  SiRNA target sequence
ttgtatgtatttattatctt

SEQ ID NO: 96445 - DNA, 20 bp, Artificial sequence
  SiRNA target sequence
tgtatgtatttattatcttc

SEQ ID NO: 96446 - DNA, 20 bp, Artificial sequence
  SiRNA target sequence
gtatgtatttattatcttcc

SEQ ID NO: 96447 - DNA, 20 bp, Artificial sequence
  SiRNA target sequence
tatgtatttattatcttccc

SEQ ID NO: 96448 - DNA, 20 bp, Artificial sequence
  SiRNA target sequence
atgtatttattatcttccct

SEQ ID NO: 96449 - DNA, 20 bp, Artificial sequence
  SiRNA target sequence
tgtatttattatcttccctt

SEQ ID NO: 96450 - DNA, 20 bp, Artificial sequence
  SiRNA target sequence
gtatttattatcttcccttg

SEQ ID NO: 96451 - DNA, 20 bp, Artificial sequence
  SiRNA target sequence
tatttattatcttcccttga

SEQ ID NO: 96452 - DNA, 20 bp, Artificial sequence
  SiRNA target sequence
atttattatcttcccttgaa

SEQ ID NO: 96453 - DNA, 20 bp, Artificial sequence
  SiRNA target sequence
tttattatcttcccttgaaa

SEQ ID NO: 96454 - DNA, 20 bp, Artificial sequence
  SiRNA target sequence
ttattatcttcccttgaaac

SEQ ID NO: 96455 - DNA, 20 bp, Artificial sequence
  SiRNA target sequence
tattatcttcccttgaaaca

SEQ ID NO: 96456 - DNA, 20 bp, Artificial sequence
  SiRNA target sequence
attatcttcccttgaaacag

SEQ ID NO: 96457 - DNA, 20 bp, Artificial sequence
  SiRNA target sequence
ttatcttcccttgaaacagc

SEQ ID NO: 96458 - DNA, 20 bp, Artificial sequence
  SiRNA target sequence
tatcttcccttgaaacagcg

SEQ ID NO: 96459 - DNA, 20 bp, Artificial sequence
  SiRNA target sequence
atcttcccttgaaacagcgg

SEQ ID NO: 96460 - DNA, 20 bp, Artificial sequence
  SiRNA target sequence
tcttcccttgaaacagcggg

SEQ ID NO: 96461 - DNA, 20 bp, Artificial sequence
  SiRNA target sequence
cttcccttgaaacagcgggg

SEQ ID NO: 96462 - DNA, 20 bp, Artificial sequence
  SiRNA target sequence
ttcccttgaaacagcggggt

SEQ ID NO: 96463 - DNA, 20 bp, Artificial sequence
  SiRNA target sequence
tcccttgaaacagcggggta

SEQ ID NO: 96464 - DNA, 20 bp, Artificial sequence
  SiRNA target sequence
cccttgaaacagcggggtaa

SEQ ID NO: 96465 - DNA, 20 bp, Artificial sequence
  SiRNA target sequence
ccttgaaacagcggggtaaa

SEQ ID NO: 96466 - DNA, 20 bp, Artificial sequence
  SiRNA target sequence
cttgaaacagcggggtaaat

SEQ ID NO: 96467 - DNA, 20 bp, Artificial sequence
  SiRNA target sequence
ttgaaacagcggggtaaatt

SEQ ID NO: 96468 - DNA, 20 bp, Artificial sequence
  SiRNA target sequence
tgaaacagcggggtaaattt

SEQ ID NO: 96469 - DNA, 20 bp, Artificial sequence
  SiRNA target sequence
gaaacagcggggtaaatttc

SEQ ID NO: 96470 - DNA, 20 bp, Artificial sequence
  SiRNA target sequence
aaacagcggggtaaatttca

SEQ ID NO: 96471 - DNA, 20 bp, Artificial sequence
  SiRNA target sequence
aacagcggggtaaatttcaa

SEQ ID NO: 96472 - DNA, 20 bp, Artificial sequence
  SiRNA target sequence
acagcggggtaaatttcaat

SEQ ID NO: 96473 - DNA, 20 bp, Artificial sequence
  SiRNA target sequence
cagcggggtaaatttcaatg

SEQ ID NO: 96474 - DNA, 20 bp, Artificial sequence
  SiRNA target sequence
agcggggtaaatttcaatgc

SEQ ID NO: 96475 - DNA, 20 bp, Artificial sequence
  SiRNA target sequence
gcggggtaaatttcaatgcc

SEQ ID NO: 96476 - DNA, 20 bp, Artificial sequence
  SiRNA target sequence
cggggtaaatttcaatgcct

SEQ ID NO: 96477 - DNA, 20 bp, Artificial sequence
  SiRNA target sequence
ggggtaaatttcaatgcctt

SEQ ID NO: 96478 - DNA, 20 bp, Artificial sequence
  SiRNA target sequence
gggtaaatttcaatgccttt

SEQ ID NO: 96479 - DNA, 20 bp, Artificial sequence
  SiRNA target sequence
ggtaaatttcaatgccttta

SEQ ID NO: 96480 - DNA, 20 bp, Artificial sequence
  SiRNA target sequence
gtaaatttcaatgcctttat

SEQ ID NO: 96481 - DNA, 20 bp, Artificial sequence
  SiRNA target sequence
taaatttcaatgcctttatt

SEQ ID NO: 96482 - DNA, 20 bp, Artificial sequence
  SiRNA target sequence
aaatttcaatgcctttattt

SEQ ID NO: 96483 - DNA, 20 bp, Artificial sequence
  SiRNA target sequence
aatttcaatgcctttatttt

SEQ ID NO: 96484 - DNA, 20 bp, Artificial sequence
  SiRNA target sequence
atttcaatgcctttattttc

SEQ ID NO: 96485 - DNA, 20 bp, Artificial sequence
  SiRNA target sequence
tttcaatgcctttattttca

SEQ ID NO: 96486 - DNA, 20 bp, Artificial sequence
  SiRNA target sequence
ttcaatgcctttattttcaa

SEQ ID NO: 96487 - DNA, 20 bp, Artificial sequence
  SiRNA target sequence
tcaatgcctttattttcaaa

SEQ ID NO: 96488 - DNA, 20 bp, Artificial sequence
  SiRNA target sequence
caatgcctttattttcaaac

SEQ ID NO: 96489 - DNA, 20 bp, Artificial sequence
  SiRNA target sequence
aatgcctttattttcaaact

SEQ ID NO: 96490 - DNA, 20 bp, Artificial sequence
  SiRNA target sequence
atgcctttattttcaaactc

SEQ ID NO: 96491 - DNA, 20 bp, Artificial sequence
  SiRNA target sequence
tgcctttattttcaaactct

SEQ ID NO: 96492 - DNA, 20 bp, Artificial sequence
  SiRNA target sequence
gcctttattttcaaactctt

SEQ ID NO: 96493 - DNA, 20 bp, Artificial sequence
  SiRNA target sequence
cctttattttcaaactcttc

SEQ ID NO: 96494 - DNA, 20 bp, Artificial sequence
  SiRNA target sequence
ctttattttcaaactcttct

SEQ ID NO: 96495 - DNA, 20 bp, Artificial sequence
  SiRNA target sequence
tttattttcaaactcttctt

SEQ ID NO: 96496 - DNA, 20 bp, Artificial sequence
  SiRNA target sequence
ttattttcaaactcttcttt

SEQ ID NO: 96497 - DNA, 20 bp, Artificial sequence
  SiRNA target sequence
tattttcaaactcttcttta

SEQ ID NO: 96498 - DNA, 20 bp, Artificial sequence
  SiRNA target sequence
attttcaaactcttctttat

SEQ ID NO: 96499 - DNA, 20 bp, Artificial sequence
  SiRNA target sequence
ttttcaaactcttctttata

SEQ ID NO: 96500 - DNA, 20 bp, Artificial sequence
  SiRNA target sequence
tttcaaactcttctttatat

SEQ ID NO: 96501 - DNA, 20 bp, Artificial sequence
  SiRNA target sequence
ttcaaactcttctttatata

SEQ ID NO: 96502 - DNA, 20 bp, Artificial sequence
  SiRNA target sequence
tcaaactcttctttatataa

SEQ ID NO: 96503 - DNA, 20 bp, Artificial sequence
  SiRNA target sequence
caaactcttctttatataaa

SEQ ID NO: 96504 - DNA, 20 bp, Artificial sequence
  SiRNA target sequence
aaactcttctttatataaaa

SEQ ID NO: 96505 - DNA, 20 bp, Artificial sequence
  SiRNA target sequence
aactcttctttatataaaaa

SEQ ID NO: 96506 - DNA, 20 bp, Artificial sequence
  SiRNA target sequence
actcttctttatataaaaaa

SEQ ID NO: 96507 - DNA, 20 bp, Artificial sequence
  SiRNA target sequence
ctcttctttatataaaaaat

SEQ ID NO: 96508 - DNA, 20 bp, Artificial sequence
  SiRNA target sequence
tcttctttatataaaaaatc

SEQ ID NO: 96509 - DNA, 20 bp, Artificial sequence
  SiRNA target sequence
cttctttatataaaaaatct

SEQ ID NO: 96510 - DNA, 20 bp, Artificial sequence
  SiRNA target sequence
ttctttatataaaaaatcta

SEQ ID NO: 96511 - DNA, 20 bp, Artificial sequence
  SiRNA target sequence
tctttatataaaaaatctac

SEQ ID NO: 96512 - DNA, 20 bp, Artificial sequence
  SiRNA target sequence
ctttatataaaaaatctaca

SEQ ID NO: 96513 - DNA, 20 bp, Artificial sequence
  SiRNA target sequence
tttatataaaaaatctacat

SEQ ID NO: 96514 - DNA, 20 bp, Artificial sequence
  SiRNA target sequence
ttatataaaaaatctacatc

SEQ ID NO: 96515 - DNA, 20 bp, Artificial sequence
  SiRNA target sequence
tatataaaaaatctacatct

SEQ ID NO: 96516 - DNA, 20 bp, Artificial sequence
  SiRNA target sequence
atataaaaaatctacatctc

SEQ ID NO: 96517 - DNA, 20 bp, Artificial sequence
  SiRNA target sequence
tataaaaaatctacatctct

SEQ ID NO: 96518 - DNA, 20 bp, Artificial sequence
  SiRNA target sequence
ataaaaaatctacatctcta

SEQ ID NO: 96519 - DNA, 20 bp, Artificial sequence
  SiRNA target sequence
taaaaaatctacatctctaa

SEQ ID NO: 96520 - DNA, 20 bp, Artificial sequence
  SiRNA target sequence
aaaaaatctacatctctaaa

SEQ ID NO: 96521 - DNA, 20 bp, Artificial sequence
  SiRNA target sequence
aaaaatctacatctctaaat

SEQ ID NO: 96522 - DNA, 20 bp, Artificial sequence
  SiRNA target sequence
aaaatctacatctctaaatc

SEQ ID NO: 96523 - DNA, 20 bp, Artificial sequence
  SiRNA target sequence
aaatctacatctctaaatct

SEQ ID NO: 96524 - DNA, 20 bp, Artificial sequence
  SiRNA target sequence
aatctacatctctaaatcta

SEQ ID NO: 96525 - DNA, 20 bp, Artificial sequence
  SiRNA target sequence
atctacatctctaaatctaa

SEQ ID NO: 96526 - DNA, 20 bp, Artificial sequence
  SiRNA target sequence
tctacatctctaaatctaaa

SEQ ID NO: 96527 - DNA, 20 bp, Artificial sequence
  SiRNA target sequence
ctacatctctaaatctaaaa

SEQ ID NO: 96528 - DNA, 20 bp, Artificial sequence
  SiRNA target sequence
tacatctctaaatctaaaac

SEQ ID NO: 96529 - DNA, 20 bp, Artificial sequence
  SiRNA target sequence
acatctctaaatctaaaacc

SEQ ID NO: 96530 - DNA, 20 bp, Artificial sequence
  SiRNA target sequence
catctctaaatctaaaacca

SEQ ID NO: 96531 - DNA, 20 bp, Artificial sequence
  SiRNA target sequence
atctctaaatctaaaaccat

SEQ ID NO: 96532 - DNA, 20 bp, Artificial sequence
  SiRNA target sequence
tctctaaatctaaaaccata

SEQ ID NO: 96533 - DNA, 20 bp, Artificial sequence
  SiRNA target sequence
ctctaaatctaaaaccatat

SEQ ID NO: 96534 - DNA, 20 bp, Artificial sequence
  SiRNA target sequence
tctaaatctaaaaccatata

SEQ ID NO: 96535 - DNA, 20 bp, Artificial sequence
  SiRNA target sequence
ctaaatctaaaaccatataa

SEQ ID NO: 96536 - DNA, 20 bp, Artificial sequence
  SiRNA target sequence
taaatctaaaaccatataat

SEQ ID NO: 96537 - DNA, 20 bp, Artificial sequence
  SiRNA target sequence
aaatctaaaaccatataata

SEQ ID NO: 96538 - DNA, 20 bp, Artificial sequence
  SiRNA target sequence
aatctaaaaccatataataa

SEQ ID NO: 96539 - DNA, 20 bp, Artificial sequence
  SiRNA target sequence
atctaaaaccatataataaa

SEQ ID NO: 96540 - DNA, 20 bp, Artificial sequence
  SiRNA target sequence
tctaaaaccatataataaaa

SEQ ID NO: 96541 - DNA, 20 bp, Artificial sequence
  SiRNA target sequence
ctaaaaccatataataaaat

SEQ ID NO: 96542 - DNA, 20 bp, Artificial sequence
  SiRNA target sequence
taaaaccatataataaaata

SEQ ID NO: 96543 - DNA, 20 bp, Artificial sequence
  SiRNA target sequence
aaaaccatataataaaataa

SEQ ID NO: 96544 - DNA, 20 bp, Artificial sequence
  SiRNA target sequence
aaaccatataataaaataac

SEQ ID NO: 96545 - DNA, 20 bp, Artificial sequence
  SiRNA target sequence
aaccatataataaaataact

SEQ ID NO: 96546 - DNA, 20 bp, Artificial sequence
  SiRNA target sequence
accatataataaaataactt

SEQ ID NO: 96547 - DNA, 20 bp, Artificial sequence
  SiRNA target sequence
ccatataataaaataacttt

SEQ ID NO: 96548 - DNA, 20 bp, Artificial sequence
  SiRNA target sequence
catataataaaataactttt

SEQ ID NO: 96549 - DNA, 20 bp, Artificial sequence
  SiRNA target sequence
atataataaaataacttttt

SEQ ID NO: 96550 - DNA, 20 bp, Artificial sequence
  SiRNA target sequence
tataataaaataactttttt

SEQ ID NO: 96551 - DNA, 20 bp, Artificial sequence
  SiRNA target sequence
ataataaaataactttttta

SEQ ID NO: 96552 - DNA, 20 bp, Artificial sequence
  SiRNA target sequence
taataaaataacttttttaa

SEQ ID NO: 96553 - DNA, 20 bp, Artificial sequence
  SiRNA target sequence
aataaaataacttttttaaa

SEQ ID NO: 96554 - DNA, 20 bp, Artificial sequence
  SiRNA target sequence
ataaaataacttttttaaaa

SEQ ID NO: 96555 - DNA, 20 bp, Artificial sequence
  SiRNA target sequence
taaaataacttttttaaaaa

SEQ ID NO: 96556 - DNA, 20 bp, Artificial sequence
  SiRNA target sequence
aaaataacttttttaaaaaa

SEQ ID NO: 96557 - DNA, 20 bp, Artificial sequence
  SiRNA target sequence
aaataacttttttaaaaaaa

SEQ ID NO: 96558 - DNA, 20 bp, Artificial sequence
  SiRNA target sequence
aataacttttttaaaaaaat

SEQ ID NO: 96559 - DNA, 20 bp, Artificial sequence
  SiRNA target sequence
ataacttttttaaaaaaatt

SEQ ID NO: 96560 - DNA, 20 bp, Artificial sequence
  SiRNA target sequence
taacttttttaaaaaaattt

SEQ ID NO: 96561 - DNA, 20 bp, Artificial sequence
  SiRNA target sequence
aacttttttaaaaaaattta

SEQ ID NO: 96562 - DNA, 20 bp, Artificial sequence
  SiRNA target sequence
acttttttaaaaaaatttaa

SEQ ID NO: 96563 - DNA, 20 bp, Artificial sequence
  SiRNA target sequence
cttttttaaaaaaatttaaa

SEQ ID NO: 96564 - DNA, 20 bp, Artificial sequence
  SiRNA target sequence
ttttttaaaaaaatttaaat

SEQ ID NO: 96565 - DNA, 20 bp, Artificial sequence
  SiRNA target sequence
tttttaaaaaaatttaaatc

SEQ ID NO: 96566 - DNA, 20 bp, Artificial sequence
  SiRNA target sequence
ttttaaaaaaatttaaatca

SEQ ID NO: 96567 - DNA, 20 bp, Artificial sequence
  SiRNA target sequence
tttaaaaaaatttaaatcag

SEQ ID NO: 96568 - DNA, 20 bp, Artificial sequence
  SiRNA target sequence
ttaaaaaaatttaaatcaga

SEQ ID NO: 96569 - DNA, 20 bp, Artificial sequence
  SiRNA target sequence
taaaaaaatttaaatcagaa

SEQ ID NO: 96570 - DNA, 20 bp, Artificial sequence
  SiRNA target sequence
aaaaaaatttaaatcagaat

SEQ ID NO: 96571 - DNA, 20 bp, Artificial sequence
  SiRNA target sequence
aaaaaatttaaatcagaata

SEQ ID NO: 96572 - DNA, 20 bp, Artificial sequence
  SiRNA target sequence
aaaaatttaaatcagaatag

SEQ ID NO: 96573 - DNA, 20 bp, Artificial sequence
  SiRNA target sequence
aaaatttaaatcagaatagt

SEQ ID NO: 96574 - DNA, 20 bp, Artificial sequence
  SiRNA target sequence
aaatttaaatcagaatagta

SEQ ID NO: 96575 - DNA, 20 bp, Artificial sequence
  SiRNA target sequence
aatttaaatcagaatagtaa

SEQ ID NO: 96576 - DNA, 20 bp, Artificial sequence
  SiRNA target sequence
atttaaatcagaatagtaat

SEQ ID NO: 96577 - DNA, 20 bp, Artificial sequence
  SiRNA target sequence
tttaaatcagaatagtaatt

SEQ ID NO: 96578 - DNA, 20 bp, Artificial sequence
  SiRNA target sequence
ttaaatcagaatagtaatta

SEQ ID NO: 96579 - DNA, 20 bp, Artificial sequence
  SiRNA target sequence
taaatcagaatagtaattaa

SEQ ID NO: 96580 - DNA, 20 bp, Artificial sequence
  SiRNA target sequence
aaatcagaatagtaattaac

SEQ ID NO: 96581 - DNA, 20 bp, Artificial sequence
  SiRNA target sequence
aatcagaatagtaattaaca

SEQ ID NO: 96582 - DNA, 20 bp, Artificial sequence
  SiRNA target sequence
atcagaatagtaattaacaa

SEQ ID NO: 96583 - DNA, 20 bp, Artificial sequence
  SiRNA target sequence
tcagaatagtaattaacaaa

SEQ ID NO: 96584 - DNA, 20 bp, Artificial sequence
  SiRNA target sequence
cagaatagtaattaacaaat

SEQ ID NO: 96585 - DNA, 20 bp, Artificial sequence
  SiRNA target sequence
agaatagtaattaacaaatg

SEQ ID NO: 96586 - DNA, 20 bp, Artificial sequence
  SiRNA target sequence
gaatagtaattaacaaatgc

SEQ ID NO: 96587 - DNA, 20 bp, Artificial sequence
  SiRNA target sequence
aatagtaattaacaaatgcc

SEQ ID NO: 96588 - DNA, 20 bp, Artificial sequence
  SiRNA target sequence
atagtaattaacaaatgccc

SEQ ID NO: 96589 - DNA, 20 bp, Artificial sequence
  SiRNA target sequence
tagtaattaacaaatgccct

SEQ ID NO: 96590 - DNA, 20 bp, Artificial sequence
  SiRNA target sequence
agtaattaacaaatgccctg

SEQ ID NO: 96591 - DNA, 20 bp, Artificial sequence
  SiRNA target sequence
gtaattaacaaatgccctgg

SEQ ID NO: 96592 - DNA, 20 bp, Artificial sequence
  SiRNA target sequence
taattaacaaatgccctggg

SEQ ID NO: 96593 - DNA, 20 bp, Artificial sequence
  SiRNA target sequence
aattaacaaatgccctggga

SEQ ID NO: 96594 - DNA, 20 bp, Artificial sequence
  SiRNA target sequence
attaacaaatgccctgggaa

SEQ ID NO: 96595 - DNA, 20 bp, Artificial sequence
  SiRNA target sequence
ttaacaaatgccctgggaag

SEQ ID NO: 96596 - DNA, 20 bp, Artificial sequence
  SiRNA target sequence
taacaaatgccctgggaagt

SEQ ID NO: 96597 - DNA, 20 bp, Artificial sequence
  SiRNA target sequence
aacaaatgccctgggaagtg

SEQ ID NO: 96598 - DNA, 20 bp, Artificial sequence
  SiRNA target sequence
acaaatgccctgggaagtgt

SEQ ID NO: 96599 - DNA, 20 bp, Artificial sequence
  SiRNA target sequence
caaatgccctgggaagtgta

SEQ ID NO: 96600 - DNA, 20 bp, Artificial sequence
  SiRNA target sequence
aaatgccctgggaagtgtaa

SEQ ID NO: 96601 - DNA, 20 bp, Artificial sequence
  SiRNA target sequence
aatgccctgggaagtgtaat

SEQ ID NO: 96602 - DNA, 20 bp, Artificial sequence
  SiRNA target sequence
atgccctgggaagtgtaata

SEQ ID NO: 96603 - DNA, 20 bp, Artificial sequence
  SiRNA target sequence
tgccctgggaagtgtaatac

SEQ ID NO: 96604 - DNA, 20 bp, Artificial sequence
  SiRNA target sequence
gccctgggaagtgtaatacc

SEQ ID NO: 96605 - DNA, 20 bp, Artificial sequence
  SiRNA target sequence
ccctgggaagtgtaatacca

SEQ ID NO: 96606 - DNA, 20 bp, Artificial sequence
  SiRNA target sequence
cctgggaagtgtaataccag

SEQ ID NO: 96607 - DNA, 20 bp, Artificial sequence
  SiRNA target sequence
ctgggaagtgtaataccagt

SEQ ID NO: 96608 - DNA, 20 bp, Artificial sequence
  SiRNA target sequence
tgggaagtgtaataccagta

SEQ ID NO: 96609 - DNA, 20 bp, Artificial sequence
  SiRNA target sequence
gggaagtgtaataccagtac

SEQ ID NO: 96610 - DNA, 20 bp, Artificial sequence
  SiRNA target sequence
ggaagtgtaataccagtacc

SEQ ID NO: 96611 - DNA, 20 bp, Artificial sequence
  SiRNA target sequence
gaagtgtaataccagtacca

SEQ ID NO: 96612 - DNA, 20 bp, Artificial sequence
  SiRNA target sequence
aagtgtaataccagtaccag

SEQ ID NO: 96613 - DNA, 20 bp, Artificial sequence
  SiRNA target sequence
agtgtaataccagtaccagt

SEQ ID NO: 96614 - DNA, 20 bp, Artificial sequence
  SiRNA target sequence
gtgtaataccagtaccagtg

SEQ ID NO: 96615 - DNA, 20 bp, Artificial sequence
  SiRNA target sequence
tgtaataccagtaccagtgc

SEQ ID NO: 96616 - DNA, 20 bp, Artificial sequence
  SiRNA target sequence
gtaataccagtaccagtgca

SEQ ID NO: 96617 - DNA, 20 bp, Artificial sequence
  SiRNA target sequence
taataccagtaccagtgcac

SEQ ID NO: 96618 - DNA, 20 bp, Artificial sequence
  SiRNA target sequence
aataccagtaccagtgcaca

SEQ ID NO: 96619 - DNA, 20 bp, Artificial sequence
  SiRNA target sequence
ataccagtaccagtgcacat

SEQ ID NO: 96620 - DNA, 20 bp, Artificial sequence
  SiRNA target sequence
taccagtaccagtgcacata

SEQ ID NO: 96621 - DNA, 20 bp, Artificial sequence
  SiRNA target sequence
accagtaccagtgcacataa

SEQ ID NO: 96622 - DNA, 20 bp, Artificial sequence
  SiRNA target sequence
ccagtaccagtgcacataaa

SEQ ID NO: 96623 - DNA, 20 bp, Artificial sequence
  SiRNA target sequence
cagtaccagtgcacataaac

SEQ ID NO: 96624 - DNA, 20 bp, Artificial sequence
  SiRNA target sequence
agtaccagtgcacataaaca

SEQ ID NO: 96625 - DNA, 20 bp, Artificial sequence
  SiRNA target sequence
gtaccagtgcacataaacaa

SEQ ID NO: 96626 - DNA, 20 bp, Artificial sequence
  SiRNA target sequence
taccagtgcacataaacaaa

SEQ ID NO: 96627 - DNA, 20 bp, Artificial sequence
  SiRNA target sequence
accagtgcacataaacaaaa

SEQ ID NO: 96628 - DNA, 20 bp, Artificial sequence
  SiRNA target sequence
ccagtgcacataaacaaaat

SEQ ID NO: 96629 - DNA, 20 bp, Artificial sequence
  SiRNA target sequence
cagtgcacataaacaaaatc

SEQ ID NO: 96630 - DNA, 20 bp, Artificial sequence
  SiRNA target sequence
agtgcacataaacaaaatct

SEQ ID NO: 96631 - DNA, 20 bp, Artificial sequence
  SiRNA target sequence
gtgcacataaacaaaatctt

SEQ ID NO: 96632 - DNA, 20 bp, Artificial sequence
  SiRNA target sequence
tgcacataaacaaaatcttt

SEQ ID NO: 96633 - DNA, 20 bp, Artificial sequence
  SiRNA target sequence
gcacataaacaaaatctttt

SEQ ID NO: 96634 - DNA, 20 bp, Artificial sequence
  SiRNA target sequence
cacataaacaaaatcttttt

SEQ ID NO: 96635 - DNA, 20 bp, Artificial sequence
  SiRNA target sequence
acataaacaaaatcttttta

SEQ ID NO: 96636 - DNA, 20 bp, Artificial sequence
  SiRNA target sequence
cataaacaaaatctttttac

SEQ ID NO: 96637 - DNA, 20 bp, Artificial sequence
  SiRNA target sequence
ataaacaaaatctttttacc

SEQ ID NO: 96638 - DNA, 20 bp, Artificial sequence
  SiRNA target sequence
taaacaaaatctttttacca

SEQ ID NO: 96639 - DNA, 20 bp, Artificial sequence
  SiRNA target sequence
aaacaaaatctttttaccac

SEQ ID NO: 96640 - DNA, 20 bp, Artificial sequence
  SiRNA target sequence
aacaaaatctttttaccact

SEQ ID NO: 96641 - DNA, 20 bp, Artificial sequence
  SiRNA target sequence
acaaaatctttttaccacta

SEQ ID NO: 96642 - DNA, 20 bp, Artificial sequence
  SiRNA target sequence
caaaatctttttaccactaa

SEQ ID NO: 96643 - DNA, 20 bp, Artificial sequence
  SiRNA target sequence
aaaatctttttaccactaaa

SEQ ID NO: 96644 - DNA, 20 bp, Artificial sequence
  SiRNA target sequence
aaatctttttaccactaaaa

SEQ ID NO: 96645 - DNA, 20 bp, Artificial sequence
  SiRNA target sequence
aatctttttaccactaaaat

SEQ ID NO: 96646 - DNA, 20 bp, Artificial sequence
  SiRNA target sequence
atctttttaccactaaaatt

SEQ ID NO: 96647 - DNA, 20 bp, Artificial sequence
  SiRNA target sequence
tctttttaccactaaaatta

SEQ ID NO: 96648 - DNA, 20 bp, Artificial sequence
  SiRNA target sequence
ctttttaccactaaaattaa

SEQ ID NO: 96649 - DNA, 20 bp, Artificial sequence
  SiRNA target sequence
tttttaccactaaaattaag

SEQ ID NO: 96650 - DNA, 20 bp, Artificial sequence
  SiRNA target sequence
ttttaccactaaaattaagt

SEQ ID NO: 96651 - DNA, 20 bp, Artificial sequence
  SiRNA target sequence
tttaccactaaaattaagtc

SEQ ID NO: 96652 - DNA, 20 bp, Artificial sequence
  SiRNA target sequence
ttaccactaaaattaagtct

SEQ ID NO: 96653 - DNA, 20 bp, Artificial sequence
  SiRNA target sequence
taccactaaaattaagtcta

SEQ ID NO: 96654 - DNA, 20 bp, Artificial sequence
  SiRNA target sequence
accactaaaattaagtctat

SEQ ID NO: 96655 - DNA, 20 bp, Artificial sequence
  SiRNA target sequence
ccactaaaattaagtctatt

SEQ ID NO: 96656 - DNA, 20 bp, Artificial sequence
  SiRNA target sequence
cactaaaattaagtctattt

SEQ ID NO: 96657 - DNA, 20 bp, Artificial sequence
  SiRNA target sequence
actaaaattaagtctatttt

SEQ ID NO: 96658 - DNA, 20 bp, Artificial sequence
  SiRNA target sequence
ctaaaattaagtctattttg

SEQ ID NO: 96659 - DNA, 20 bp, Artificial sequence
  SiRNA target sequence
taaaattaagtctattttgt

SEQ ID NO: 96660 - DNA, 20 bp, Artificial sequence
  SiRNA target sequence
aaaattaagtctattttgta

SEQ ID NO: 96661 - DNA, 20 bp, Artificial sequence
  SiRNA target sequence
aaattaagtctattttgtac

SEQ ID NO: 96662 - DNA, 20 bp, Artificial sequence
  SiRNA target sequence
aattaagtctattttgtact

SEQ ID NO: 96663 - DNA, 20 bp, Artificial sequence
  SiRNA target sequence
attaagtctattttgtacta

SEQ ID NO: 96664 - DNA, 20 bp, Artificial sequence
  SiRNA target sequence
ttaagtctattttgtactat

SEQ ID NO: 96665 - DNA, 20 bp, Artificial sequence
  SiRNA target sequence
taagtctattttgtactatg

SEQ ID NO: 96666 - DNA, 20 bp, Artificial sequence
  SiRNA target sequence
aagtctattttgtactatgt

SEQ ID NO: 96667 - DNA, 20 bp, Artificial sequence
  SiRNA target sequence
agtctattttgtactatgtt

SEQ ID NO: 96668 - DNA, 20 bp, Artificial sequence
  SiRNA target sequence
gtctattttgtactatgtta

SEQ ID NO: 96669 - DNA, 20 bp, Artificial sequence
  SiRNA target sequence
tctattttgtactatgttaa

SEQ ID NO: 96670 - DNA, 20 bp, Artificial sequence
  SiRNA target sequence
ctattttgtactatgttaac

SEQ ID NO: 96671 - DNA, 20 bp, Artificial sequence
  SiRNA target sequence
tattttgtactatgttaaca

SEQ ID NO: 96672 - DNA, 20 bp, Artificial sequence
  SiRNA target sequence
attttgtactatgttaacat

SEQ ID NO: 96673 - DNA, 20 bp, Artificial sequence
  SiRNA target sequence
ttttgtactatgttaacatg

SEQ ID NO: 96674 - DNA, 20 bp, Artificial sequence
  SiRNA target sequence
tttgtactatgttaacatga

SEQ ID NO: 96675 - DNA, 20 bp, Artificial sequence
  SiRNA target sequence
ttgtactatgttaacatgaa

SEQ ID NO: 96676 - DNA, 20 bp, Artificial sequence
  SiRNA target sequence
tgtactatgttaacatgaat

SEQ ID NO: 96677 - DNA, 20 bp, Artificial sequence
  SiRNA target sequence
gtactatgttaacatgaata

SEQ ID NO: 96678 - DNA, 20 bp, Artificial sequence
  SiRNA target sequence
tactatgttaacatgaatag

SEQ ID NO: 96679 - DNA, 20 bp, Artificial sequence
  SiRNA target sequence
actatgttaacatgaatagt

SEQ ID NO: 96680 - DNA, 20 bp, Artificial sequence
  SiRNA target sequence
ctatgttaacatgaatagta

SEQ ID NO: 96681 - DNA, 20 bp, Artificial sequence
  SiRNA target sequence
tatgttaacatgaatagtag

SEQ ID NO: 96682 - DNA, 20 bp, Artificial sequence
  SiRNA target sequence
atgttaacatgaatagtaga

SEQ ID NO: 96683 - DNA, 20 bp, Artificial sequence
  SiRNA target sequence
tgttaacatgaatagtagac

SEQ ID NO: 96684 - DNA, 20 bp, Artificial sequence
  SiRNA target sequence
gttaacatgaatagtagacc

SEQ ID NO: 96685 - DNA, 20 bp, Artificial sequence
  SiRNA target sequence
ttaacatgaatagtagaccc

SEQ ID NO: 96686 - DNA, 20 bp, Artificial sequence
  SiRNA target sequence
taacatgaatagtagaccct

SEQ ID NO: 96687 - DNA, 20 bp, Artificial sequence
  SiRNA target sequence
aacatgaatagtagaccctt

SEQ ID NO: 96688 - DNA, 20 bp, Artificial sequence
  SiRNA target sequence
acatgaatagtagacccttt

SEQ ID NO: 96689 - DNA, 20 bp, Artificial sequence
  SiRNA target sequence
catgaatagtagacccttta

SEQ ID NO: 96690 - DNA, 20 bp, Artificial sequence
  SiRNA target sequence
atgaatagtagaccctttag

SEQ ID NO: 96691 - DNA, 20 bp, Artificial sequence
  SiRNA target sequence
tgaatagtagaccctttagt

SEQ ID NO: 96692 - DNA, 20 bp, Artificial sequence
  SiRNA target sequence
gaatagtagaccctttagta

SEQ ID NO: 96693 - DNA, 20 bp, Artificial sequence
  SiRNA target sequence
aatagtagaccctttagtaa

SEQ ID NO: 96694 - DNA, 20 bp, Artificial sequence
  SiRNA target sequence
atagtagaccctttagtaag

SEQ ID NO: 96695 - DNA, 20 bp, Artificial sequence
  SiRNA target sequence
tagtagaccctttagtaagt

SEQ ID NO: 96696 - DNA, 20 bp, Artificial sequence
  SiRNA target sequence
agtagaccctttagtaagta

SEQ ID NO: 96697 - DNA, 20 bp, Artificial sequence
  SiRNA target sequence
gtagaccctttagtaagtaa

SEQ ID NO: 96698 - DNA, 20 bp, Artificial sequence
  SiRNA target sequence
tagaccctttagtaagtaat

SEQ ID NO: 96699 - DNA, 20 bp, Artificial sequence
  SiRNA target sequence
agaccctttagtaagtaatt

SEQ ID NO: 96700 - DNA, 20 bp, Artificial sequence
  SiRNA target sequence
gaccctttagtaagtaattt

SEQ ID NO: 96701 - DNA, 20 bp, Artificial sequence
  SiRNA target sequence
accctttagtaagtaatttt

SEQ ID NO: 96702 - DNA, 20 bp, Artificial sequence
  SiRNA target sequence
ccctttagtaagtaatttta

SEQ ID NO: 96703 - DNA, 20 bp, Artificial sequence
  SiRNA target sequence
cctttagtaagtaattttaa

SEQ ID NO: 96704 - DNA, 20 bp, Artificial sequence
  SiRNA target sequence
ctttagtaagtaattttaaa

SEQ ID NO: 96705 - DNA, 20 bp, Artificial sequence
  SiRNA target sequence
tttagtaagtaattttaaat

SEQ ID NO: 96706 - DNA, 20 bp, Artificial sequence
  SiRNA target sequence
ttagtaagtaattttaaata

SEQ ID NO: 96707 - DNA, 20 bp, Artificial sequence
  SiRNA target sequence
tagtaagtaattttaaatac

SEQ ID NO: 96708 - DNA, 20 bp, Artificial sequence
  SiRNA target sequence
agtaagtaattttaaatact

SEQ ID NO: 96709 - DNA, 20 bp, Artificial sequence
  SiRNA target sequence
gtaagtaattttaaatactc

SEQ ID NO: 96710 - DNA, 20 bp, Artificial sequence
  SiRNA target sequence
taagtaattttaaatactct

SEQ ID NO: 96711 - DNA, 20 bp, Artificial sequence
  SiRNA target sequence
aagtaattttaaatactctg

SEQ ID NO: 96712 - DNA, 20 bp, Artificial sequence
  SiRNA target sequence
agtaattttaaatactctga

SEQ ID NO: 96713 - DNA, 20 bp, Artificial sequence
  SiRNA target sequence
gtaattttaaatactctgaa

SEQ ID NO: 96714 - DNA, 20 bp, Artificial sequence
  SiRNA target sequence
taattttaaatactctgaac

SEQ ID NO: 96715 - DNA, 20 bp, Artificial sequence
  SiRNA target sequence
aattttaaatactctgaaca

SEQ ID NO: 96716 - DNA, 20 bp, Artificial sequence
  SiRNA target sequence
attttaaatactctgaacaa

SEQ ID NO: 96717 - DNA, 20 bp, Artificial sequence
  SiRNA target sequence
ttttaaatactctgaacaaa

SEQ ID NO: 96718 - DNA, 20 bp, Artificial sequence
  SiRNA target sequence
tttaaatactctgaacaaag

SEQ ID NO: 96719 - DNA, 20 bp, Artificial sequence
  SiRNA target sequence
ttaaatactctgaacaaaga

SEQ ID NO: 96720 - DNA, 20 bp, Artificial sequence
  SiRNA target sequence
taaatactctgaacaaagac

SEQ ID NO: 96721 - DNA, 20 bp, Artificial sequence
  SiRNA target sequence
aaatactctgaacaaagacc

SEQ ID NO: 96722 - DNA, 20 bp, Artificial sequence
  SiRNA target sequence
aatactctgaacaaagacct

SEQ ID NO: 96723 - DNA, 20 bp, Artificial sequence
  SiRNA target sequence
atactctgaacaaagacctt

SEQ ID NO: 96724 - DNA, 20 bp, Artificial sequence
  SiRNA target sequence
tactctgaacaaagaccttt

SEQ ID NO: 96725 - DNA, 20 bp, Artificial sequence
  SiRNA target sequence
actctgaacaaagacctttt

SEQ ID NO: 96726 - DNA, 20 bp, Artificial sequence
  SiRNA target sequence
ctctgaacaaagaccttttc

SEQ ID NO: 96727 - DNA, 20 bp, Artificial sequence
  SiRNA target sequence
tctgaacaaagaccttttcg

SEQ ID NO: 96728 - DNA, 20 bp, Artificial sequence
  SiRNA target sequence
ctgaacaaagaccttttcgt

SEQ ID NO: 96729 - DNA, 20 bp, Artificial sequence
  SiRNA target sequence
tgaacaaagaccttttcgtt

SEQ ID NO: 96730 - DNA, 20 bp, Artificial sequence
  SiRNA target sequence
gaacaaagaccttttcgttc

SEQ ID NO: 96731 - DNA, 20 bp, Artificial sequence
  SiRNA target sequence
aacaaagaccttttcgttct

SEQ ID NO: 96732 - DNA, 20 bp, Artificial sequence
  SiRNA target sequence
acaaagaccttttcgttctt

SEQ ID NO: 96733 - DNA, 20 bp, Artificial sequence
  SiRNA target sequence
caaagaccttttcgttcttc

SEQ ID NO: 96734 - DNA, 20 bp, Artificial sequence
  SiRNA target sequence
aaagaccttttcgttcttct

SEQ ID NO: 96735 - DNA, 20 bp, Artificial sequence
  SiRNA target sequence
aagaccttttcgttcttctt

SEQ ID NO: 96736 - DNA, 20 bp, Artificial sequence
  SiRNA target sequence
agaccttttcgttcttcttt

SEQ ID NO: 96737 - DNA, 20 bp, Artificial sequence
  SiRNA target sequence
gaccttttcgttcttctttt

SEQ ID NO: 96738 - DNA, 20 bp, Artificial sequence
  SiRNA target sequence
accttttcgttcttctttta

SEQ ID NO: 96739 - DNA, 20 bp, Artificial sequence
  SiRNA target sequence
ccttttcgttcttcttttaa

SEQ ID NO: 96740 - DNA, 20 bp, Artificial sequence
  SiRNA target sequence
cttttcgttcttcttttaaa

SEQ ID NO: 96741 - DNA, 20 bp, Artificial sequence
  SiRNA target sequence
ttttcgttcttcttttaaac

SEQ ID NO: 96742 - DNA, 20 bp, Artificial sequence
  SiRNA target sequence
tttcgttcttcttttaaact

SEQ ID NO: 96743 - DNA, 20 bp, Artificial sequence
  SiRNA target sequence
ttcgttcttcttttaaactt

SEQ ID NO: 96744 - DNA, 20 bp, Artificial sequence
  SiRNA target sequence
tcgttcttcttttaaacttg

SEQ ID NO: 96745 - DNA, 20 bp, Artificial sequence
  SiRNA target sequence
cgttcttcttttaaacttgt

SEQ ID NO: 96746 - DNA, 20 bp, Artificial sequence
  SiRNA target sequence
gttcttcttttaaacttgtt

SEQ ID NO: 96747 - DNA, 20 bp, Artificial sequence
  SiRNA target sequence
ttcttcttttaaacttgttt

SEQ ID NO: 96748 - DNA, 20 bp, Artificial sequence
  SiRNA target sequence
tcttcttttaaacttgtttt

SEQ ID NO: 96749 - DNA, 20 bp, Artificial sequence
  SiRNA target sequence
cttcttttaaacttgtttta

SEQ ID NO: 96750 - DNA, 20 bp, Artificial sequence
  SiRNA target sequence
ttcttttaaacttgttttaa

SEQ ID NO: 96751 - DNA, 20 bp, Artificial sequence
  SiRNA target sequence
tcttttaaacttgttttaaa

SEQ ID NO: 96752 - DNA, 20 bp, Artificial sequence
  SiRNA target sequence
cttttaaacttgttttaaaa

SEQ ID NO: 96753 - DNA, 20 bp, Artificial sequence
  SiRNA target sequence
ttttaaacttgttttaaaag

SEQ ID NO: 96754 - DNA, 20 bp, Artificial sequence
  SiRNA target sequence
tttaaacttgttttaaaaga

SEQ ID NO: 96755 - DNA, 20 bp, Artificial sequence
  SiRNA target sequence
ttaaacttgttttaaaagaa

SEQ ID NO: 96756 - DNA, 20 bp, Artificial sequence
  SiRNA target sequence
taaacttgttttaaaagaaa

SEQ ID NO: 96757 - DNA, 20 bp, Artificial sequence
  SiRNA target sequence
aaacttgttttaaaagaaac

SEQ ID NO: 96758 - DNA, 20 bp, Artificial sequence
  SiRNA target sequence
aacttgttttaaaagaaaca

SEQ ID NO: 96759 - DNA, 20 bp, Artificial sequence
  SiRNA target sequence
acttgttttaaaagaaacaa

SEQ ID NO: 96760 - DNA, 20 bp, Artificial sequence
  SiRNA target sequence
cttgttttaaaagaaacaag

SEQ ID NO: 96761 - DNA, 20 bp, Artificial sequence
  SiRNA target sequence
ttgttttaaaagaaacaaga

SEQ ID NO: 96762 - DNA, 20 bp, Artificial sequence
  SiRNA target sequence
tgttttaaaagaaacaagag

SEQ ID NO: 96763 - DNA, 20 bp, Artificial sequence
  SiRNA target sequence
gttttaaaagaaacaagaga

SEQ ID NO: 96764 - DNA, 20 bp, Artificial sequence
  SiRNA target sequence
ttttaaaagaaacaagagag

SEQ ID NO: 96765 - DNA, 20 bp, Artificial sequence
  SiRNA target sequence
tttaaaagaaacaagagaga

SEQ ID NO: 96766 - DNA, 20 bp, Artificial sequence
  SiRNA target sequence
ttaaaagaaacaagagagac

SEQ ID NO: 96767 - DNA, 20 bp, Artificial sequence
  SiRNA target sequence
taaaagaaacaagagagacg

SEQ ID NO: 96768 - DNA, 20 bp, Artificial sequence
  SiRNA target sequence
aaaagaaacaagagagacgg

SEQ ID NO: 96769 - DNA, 20 bp, Artificial sequence
  SiRNA target sequence
aaagaaacaagagagacggt

SEQ ID NO: 96770 - DNA, 20 bp, Artificial sequence
  SiRNA target sequence
aagaaacaagagagacggtg

SEQ ID NO: 96771 - DNA, 20 bp, Artificial sequence
  SiRNA target sequence
agaaacaagagagacggtga

SEQ ID NO: 96772 - DNA, 20 bp, Artificial sequence
  SiRNA target sequence
gaaacaagagagacggtgac

SEQ ID NO: 96773 - DNA, 20 bp, Artificial sequence
  SiRNA target sequence
aaacaagagagacggtgaca

SEQ ID NO: 96774 - DNA, 20 bp, Artificial sequence
  SiRNA target sequence
aacaagagagacggtgacaa

SEQ ID NO: 96775 - DNA, 20 bp, Artificial sequence
  SiRNA target sequence
acaagagagacggtgacaaa

SEQ ID NO: 96776 - DNA, 20 bp, Artificial sequence
  SiRNA target sequence
caagagagacggtgacaaag

SEQ ID NO: 96777 - DNA, 20 bp, Artificial sequence
  SiRNA target sequence
aagagagacggtgacaaagt

SEQ ID NO: 96778 - DNA, 20 bp, Artificial sequence
  SiRNA target sequence
agagagacggtgacaaagta

SEQ ID NO: 96779 - DNA, 20 bp, Artificial sequence
  SiRNA target sequence
gagagacggtgacaaagtaa

SEQ ID NO: 96780 - DNA, 20 bp, Artificial sequence
  SiRNA target sequence
agagacggtgacaaagtaac

SEQ ID NO: 96781 - DNA, 20 bp, Artificial sequence
  SiRNA target sequence
gagacggtgacaaagtaaca

SEQ ID NO: 96782 - DNA, 20 bp, Artificial sequence
  SiRNA target sequence
agacggtgacaaagtaacaa

SEQ ID NO: 96783 - DNA, 20 bp, Artificial sequence
  SiRNA target sequence
gacggtgacaaagtaacaaa

SEQ ID NO: 96784 - DNA, 20 bp, Artificial sequence
  SiRNA target sequence
acggtgacaaagtaacaaaa

SEQ ID NO: 96785 - DNA, 20 bp, Artificial sequence
  SiRNA target sequence
cggtgacaaagtaacaaaaa

SEQ ID NO: 96786 - DNA, 20 bp, Artificial sequence
  SiRNA target sequence
ggtgacaaagtaacaaaaat

SEQ ID NO: 96787 - DNA, 20 bp, Artificial sequence
  SiRNA target sequence
gtgacaaagtaacaaaaatc

SEQ ID NO: 96788 - DNA, 20 bp, Artificial sequence
  SiRNA target sequence
tgacaaagtaacaaaaatct

SEQ ID NO: 96789 - DNA, 20 bp, Artificial sequence
  SiRNA target sequence
gacaaagtaacaaaaatctt

SEQ ID NO: 96790 - DNA, 20 bp, Artificial sequence
  SiRNA target sequence
acaaagtaacaaaaatcttt

SEQ ID NO: 96791 - DNA, 20 bp, Artificial sequence
  SiRNA target sequence
caaagtaacaaaaatctttt

SEQ ID NO: 96792 - DNA, 20 bp, Artificial sequence
  SiRNA target sequence
aaagtaacaaaaatcttttt

SEQ ID NO: 96793 - DNA, 20 bp, Artificial sequence
  SiRNA target sequence
aagtaacaaaaatctttttt

SEQ ID NO: 96794 - DNA, 20 bp, Artificial sequence
  SiRNA target sequence
agtaacaaaaatcttttttc

SEQ ID NO: 96795 - DNA, 20 bp, Artificial sequence
  SiRNA target sequence
gtaacaaaaatcttttttcg

SEQ ID NO: 96796 - DNA, 20 bp, Artificial sequence
  SiRNA target sequence
taacaaaaatcttttttcgt

SEQ ID NO: 96797 - DNA, 20 bp, Artificial sequence
  SiRNA target sequence
aacaaaaatcttttttcgtt

SEQ ID NO: 96798 - DNA, 20 bp, Artificial sequence
  SiRNA target sequence
acaaaaatcttttttcgtta

SEQ ID NO: 96799 - DNA, 20 bp, Artificial sequence
  SiRNA target sequence
caaaaatcttttttcgttaa

SEQ ID NO: 96800 - DNA, 20 bp, Artificial sequence
  SiRNA target sequence
aaaaatcttttttcgttaat

SEQ ID NO: 96801 - DNA, 20 bp, Artificial sequence
  SiRNA target sequence
aaaatcttttttcgttaatg

SEQ ID NO: 96802 - DNA, 20 bp, Artificial sequence
  SiRNA target sequence
aaatcttttttcgttaatgt

SEQ ID NO: 96803 - DNA, 20 bp, Artificial sequence
  SiRNA target sequence
aatcttttttcgttaatgta

SEQ ID NO: 96804 - DNA, 20 bp, Artificial sequence
  SiRNA target sequence
atcttttttcgttaatgtaa

SEQ ID NO: 96805 - DNA, 20 bp, Artificial sequence
  SiRNA target sequence
tcttttttcgttaatgtaaa

SEQ ID NO: 96806 - DNA, 20 bp, Artificial sequence
  SiRNA target sequence
cttttttcgttaatgtaaaa

SEQ ID NO: 96807 - DNA, 20 bp, Artificial sequence
  SiRNA target sequence
ttttttcgttaatgtaaaat

SEQ ID NO: 96808 - DNA, 20 bp, Artificial sequence
  SiRNA target sequence
tttttcgttaatgtaaaata

SEQ ID NO: 96809 - DNA, 20 bp, Artificial sequence
  SiRNA target sequence
ttttcgttaatgtaaaatat

SEQ ID NO: 96810 - DNA, 20 bp, Artificial sequence
  SiRNA target sequence
tttcgttaatgtaaaatatc

SEQ ID NO: 96811 - DNA, 20 bp, Artificial sequence
  SiRNA target sequence
ttcgttaatgtaaaatatct

SEQ ID NO: 96812 - DNA, 20 bp, Artificial sequence
  SiRNA target sequence
tcgttaatgtaaaatatctt

SEQ ID NO: 96813 - DNA, 20 bp, Artificial sequence
  SiRNA target sequence
cgttaatgtaaaatatcttg

SEQ ID NO: 96814 - DNA, 20 bp, Artificial sequence
  SiRNA target sequence
gttaatgtaaaatatcttgg

SEQ ID NO: 96815 - DNA, 20 bp, Artificial sequence
  SiRNA target sequence
ttaatgtaaaatatcttgga

SEQ ID NO: 96816 - DNA, 20 bp, Artificial sequence
  SiRNA target sequence
taatgtaaaatatcttggat

SEQ ID NO: 96817 - DNA, 20 bp, Artificial sequence
  SiRNA target sequence
aatgtaaaatatcttggatt

SEQ ID NO: 96818 - DNA, 20 bp, Artificial sequence
  SiRNA target sequence
atgtaaaatatcttggatta

SEQ ID NO: 96819 - DNA, 20 bp, Artificial sequence
  SiRNA target sequence
tgtaaaatatcttggattaa

SEQ ID NO: 96820 - DNA, 20 bp, Artificial sequence
  SiRNA target sequence
gtaaaatatcttggattaat

SEQ ID NO: 96821 - DNA, 20 bp, Artificial sequence
  SiRNA target sequence
taaaatatcttggattaatt

SEQ ID NO: 96822 - DNA, 20 bp, Artificial sequence
  SiRNA target sequence
aaaatatcttggattaatta

SEQ ID NO: 96823 - DNA, 20 bp, Artificial sequence
  SiRNA target sequence
aaatatcttggattaattac

SEQ ID NO: 96824 - DNA, 20 bp, Artificial sequence
  SiRNA target sequence
aatatcttggattaattaca

SEQ ID NO: 96825 - DNA, 20 bp, Artificial sequence
  SiRNA target sequence
atatcttggattaattacag

SEQ ID NO: 96826 - DNA, 20 bp, Artificial sequence
  SiRNA target sequence
tatcttggattaattacagg

SEQ ID NO: 96827 - DNA, 20 bp, Artificial sequence
  SiRNA target sequence
atcttggattaattacaggg

SEQ ID NO: 96828 - DNA, 20 bp, Artificial sequence
  SiRNA target sequence
tcttggattaattacaggga

SEQ ID NO: 96829 - DNA, 20 bp, Artificial sequence
  SiRNA target sequence
cttggattaattacagggat

SEQ ID NO: 96830 - DNA, 20 bp, Artificial sequence
  SiRNA target sequence
ttggattaattacagggata

SEQ ID NO: 96831 - DNA, 20 bp, Artificial sequence
  SiRNA target sequence
tggattaattacagggatat

SEQ ID NO: 96832 - DNA, 20 bp, Artificial sequence
  SiRNA target sequence
ggattaattacagggatata

SEQ ID NO: 96833 - DNA, 20 bp, Artificial sequence
  SiRNA target sequence
gattaattacagggatatac

SEQ ID NO: 96834 - DNA, 20 bp, Artificial sequence
  SiRNA target sequence
attaattacagggatatact

SEQ ID NO: 96835 - DNA, 20 bp, Artificial sequence
  SiRNA target sequence
ttaattacagggatatactt

SEQ ID NO: 96836 - DNA, 20 bp, Artificial sequence
  SiRNA target sequence
taattacagggatatacttg

SEQ ID NO: 96837 - DNA, 20 bp, Artificial sequence
  SiRNA target sequence
aattacagggatatacttgt

SEQ ID NO: 96838 - DNA, 20 bp, Artificial sequence
  SiRNA target sequence
attacagggatatacttgta

SEQ ID NO: 96839 - DNA, 20 bp, Artificial sequence
  SiRNA target sequence
ttacagggatatacttgtac

SEQ ID NO: 96840 - DNA, 20 bp, Artificial sequence
  SiRNA target sequence
tacagggatatacttgtaca

SEQ ID NO: 96841 - DNA, 20 bp, Artificial sequence
  SiRNA target sequence
acagggatatacttgtacat

SEQ ID NO: 96842 - DNA, 20 bp, Artificial sequence
  SiRNA target sequence
cagggatatacttgtacata

SEQ ID NO: 96843 - DNA, 20 bp, Artificial sequence
  SiRNA target sequence
agggatatacttgtacataa

SEQ ID NO: 96844 - DNA, 20 bp, Artificial sequence
  SiRNA target sequence
gggatatacttgtacataaa

SEQ ID NO: 96845 - DNA, 20 bp, Artificial sequence
  SiRNA target sequence
ggatatacttgtacataaaa

SEQ ID NO: 96846 - DNA, 20 bp, Artificial sequence
  SiRNA target sequence
gatatacttgtacataaaat

SEQ ID NO: 96847 - DNA, 20 bp, Artificial sequence
  SiRNA target sequence
atatacttgtacataaaatt

SEQ ID NO: 96848 - DNA, 20 bp, Artificial sequence
  SiRNA target sequence
tatacttgtacataaaattt

SEQ ID NO: 96849 - DNA, 20 bp, Artificial sequence
  SiRNA target sequence
atacttgtacataaaatttg

SEQ ID NO: 96850 - DNA, 20 bp, Artificial sequence
  SiRNA target sequence
tacttgtacataaaatttga

SEQ ID NO: 96851 - DNA, 20 bp, Artificial sequence
  SiRNA target sequence
acttgtacataaaatttgag

SEQ ID NO: 96852 - DNA, 20 bp, Artificial sequence
  SiRNA target sequence
cttgtacataaaatttgagg

SEQ ID NO: 96853 - DNA, 20 bp, Artificial sequence
  SiRNA target sequence
ttgtacataaaatttgaggt

SEQ ID NO: 96854 - DNA, 20 bp, Artificial sequence
  SiRNA target sequence
tgtacataaaatttgaggta

SEQ ID NO: 96855 - DNA, 20 bp, Artificial sequence
  SiRNA target sequence
gtacataaaatttgaggtaa

SEQ ID NO: 96856 - DNA, 20 bp, Artificial sequence
  SiRNA target sequence
tacataaaatttgaggtaag

SEQ ID NO: 96857 - DNA, 20 bp, Artificial sequence
  SiRNA target sequence
acataaaatttgaggtaagt

SEQ ID NO: 96858 - DNA, 20 bp, Artificial sequence
  SiRNA target sequence
cataaaatttgaggtaagtt

SEQ ID NO: 96859 - DNA, 20 bp, Artificial sequence
  SiRNA target sequence
ataaaatttgaggtaagttt

SEQ ID NO: 96860 - DNA, 20 bp, Artificial sequence
  SiRNA target sequence
taaaatttgaggtaagtttt

SEQ ID NO: 96861 - DNA, 20 bp, Artificial sequence
  SiRNA target sequence
aaaatttgaggtaagtttta

SEQ ID NO: 96862 - DNA, 20 bp, Artificial sequence
  SiRNA target sequence
aaatttgaggtaagttttat

SEQ ID NO: 96863 - DNA, 20 bp, Artificial sequence
  SiRNA target sequence
aatttgaggtaagttttatc

SEQ ID NO: 96864 - DNA, 20 bp, Artificial sequence
  SiRNA target sequence
atttgaggtaagttttatct

SEQ ID NO: 96865 - DNA, 20 bp, Artificial sequence
  SiRNA target sequence
tttgaggtaagttttatctt

SEQ ID NO: 96866 - DNA, 20 bp, Artificial sequence
  SiRNA target sequence
ttgaggtaagttttatctta

SEQ ID NO: 96867 - DNA, 20 bp, Artificial sequence
  SiRNA target sequence
tgaggtaagttttatcttaa

SEQ ID NO: 96868 - DNA, 20 bp, Artificial sequence
  SiRNA target sequence
gaggtaagttttatcttaaa

SEQ ID NO: 96869 - DNA, 20 bp, Artificial sequence
  SiRNA target sequence
aggtaagttttatcttaaaa

SEQ ID NO: 96870 - DNA, 20 bp, Artificial sequence
  SiRNA target sequence
ggtaagttttatcttaaaat

SEQ ID NO: 96871 - DNA, 20 bp, Artificial sequence
  SiRNA target sequence
gtaagttttatcttaaaatc

SEQ ID NO: 96872 - DNA, 20 bp, Artificial sequence
  SiRNA target sequence
taagttttatcttaaaatct

SEQ ID NO: 96873 - DNA, 20 bp, Artificial sequence
  SiRNA target sequence
aagttttatcttaaaatctt

SEQ ID NO: 96874 - DNA, 20 bp, Artificial sequence
  SiRNA target sequence
agttttatcttaaaatcttt

SEQ ID NO: 96875 - DNA, 20 bp, Artificial sequence
  SiRNA target sequence
gttttatcttaaaatctttt

SEQ ID NO: 96876 - DNA, 20 bp, Artificial sequence
  SiRNA target sequence
ttttatcttaaaatctttta

SEQ ID NO: 96877 - DNA, 20 bp, Artificial sequence
  SiRNA target sequence
tttatcttaaaatcttttag

SEQ ID NO: 96878 - DNA, 20 bp, Artificial sequence
  SiRNA target sequence
ttatcttaaaatcttttaga

SEQ ID NO: 96879 - DNA, 20 bp, Artificial sequence
  SiRNA target sequence
tatcttaaaatcttttagaa

SEQ ID NO: 96880 - DNA, 20 bp, Artificial sequence
  SiRNA target sequence
atcttaaaatcttttagaac

SEQ ID NO: 96881 - DNA, 20 bp, Artificial sequence
  SiRNA target sequence
tcttaaaatcttttagaacc

SEQ ID NO: 96882 - DNA, 20 bp, Artificial sequence
  SiRNA target sequence
cttaaaatcttttagaacct

SEQ ID NO: 96883 - DNA, 20 bp, Artificial sequence
  SiRNA target sequence
ttaaaatcttttagaacctc

SEQ ID NO: 96884 - DNA, 20 bp, Artificial sequence
  SiRNA target sequence
taaaatcttttagaacctca

SEQ ID NO: 96885 - DNA, 20 bp, Artificial sequence
  SiRNA target sequence
aaaatcttttagaacctcaa

SEQ ID NO: 96886 - DNA, 20 bp, Artificial sequence
  SiRNA target sequence
aaatcttttagaacctcaaa

SEQ ID NO: 96887 - DNA, 20 bp, Artificial sequence
  SiRNA target sequence
aatcttttagaacctcaaaa

SEQ ID NO: 96888 - DNA, 20 bp, Artificial sequence
  SiRNA target sequence
atcttttagaacctcaaaaa

SEQ ID NO: 96889 - DNA, 20 bp, Artificial sequence
  SiRNA target sequence
tcttttagaacctcaaaaat

SEQ ID NO: 96890 - DNA, 20 bp, Artificial sequence
  SiRNA target sequence
cttttagaacctcaaaaata

SEQ ID NO: 96891 - DNA, 20 bp, Artificial sequence
  SiRNA target sequence
ttttagaacctcaaaaatag

SEQ ID NO: 96892 - DNA, 20 bp, Artificial sequence
  SiRNA target sequence
tttagaacctcaaaaatagt

SEQ ID NO: 96893 - DNA, 20 bp, Artificial sequence
  SiRNA target sequence
ttagaacctcaaaaatagtg

SEQ ID NO: 96894 - DNA, 20 bp, Artificial sequence
  SiRNA target sequence
tagaacctcaaaaatagtgc

SEQ ID NO: 96895 - DNA, 20 bp, Artificial sequence
  SiRNA target sequence
agaacctcaaaaatagtgcg

SEQ ID NO: 96896 - DNA, 20 bp, Artificial sequence
  SiRNA target sequence
gaacctcaaaaatagtgcgc

SEQ ID NO: 96897 - DNA, 20 bp, Artificial sequence
  SiRNA target sequence
aacctcaaaaatagtgcgct

SEQ ID NO: 96898 - DNA, 20 bp, Artificial sequence
  SiRNA target sequence
acctcaaaaatagtgcgctt

SEQ ID NO: 96899 - DNA, 20 bp, Artificial sequence
  SiRNA target sequence
cctcaaaaatagtgcgcttc

SEQ ID NO: 96900 - DNA, 20 bp, Artificial sequence
  SiRNA target sequence
ctcaaaaatagtgcgcttcg

SEQ ID NO: 96901 - DNA, 20 bp, Artificial sequence
  SiRNA target sequence
tcaaaaatagtgcgcttcgg

SEQ ID NO: 96902 - DNA, 20 bp, Artificial sequence
  SiRNA target sequence
caaaaatagtgcgcttcggt

SEQ ID NO: 96903 - DNA, 20 bp, Artificial sequence
  SiRNA target sequence
aaaaatagtgcgcttcggta

SEQ ID NO: 96904 - DNA, 20 bp, Artificial sequence
  SiRNA target sequence
aaaatagtgcgcttcggtag

SEQ ID NO: 96905 - DNA, 20 bp, Artificial sequence
  SiRNA target sequence
aaatagtgcgcttcggtagt

SEQ ID NO: 96906 - DNA, 20 bp, Artificial sequence
  SiRNA target sequence
aatagtgcgcttcggtagta

SEQ ID NO: 96907 - DNA, 20 bp, Artificial sequence
  SiRNA target sequence
atagtgcgcttcggtagtaa

SEQ ID NO: 96908 - DNA, 20 bp, Artificial sequence
  SiRNA target sequence
tagtgcgcttcggtagtaaa

SEQ ID NO: 96909 - DNA, 20 bp, Artificial sequence
  SiRNA target sequence
agtgcgcttcggtagtaaaa

SEQ ID NO: 96910 - DNA, 20 bp, Artificial sequence
  SiRNA target sequence
gtgcgcttcggtagtaaaat

SEQ ID NO: 96911 - DNA, 20 bp, Artificial sequence
  SiRNA target sequence
tgcgcttcggtagtaaaatg

SEQ ID NO: 96912 - DNA, 20 bp, Artificial sequence
  SiRNA target sequence
gcgcttcggtagtaaaatgt

SEQ ID NO: 96913 - DNA, 20 bp, Artificial sequence
  SiRNA target sequence
cgcttcggtagtaaaatgta

SEQ ID NO: 96914 - DNA, 20 bp, Artificial sequence
  SiRNA target sequence
gcttcggtagtaaaatgtaa

SEQ ID NO: 96915 - DNA, 20 bp, Artificial sequence
  SiRNA target sequence
cttcggtagtaaaatgtaat

SEQ ID NO: 96916 - DNA, 20 bp, Artificial sequence
  SiRNA target sequence
ttcggtagtaaaatgtaatc

SEQ ID NO: 96917 - DNA, 20 bp, Artificial sequence
  SiRNA target sequence
tcggtagtaaaatgtaatca

SEQ ID NO: 96918 - DNA, 20 bp, Artificial sequence
  SiRNA target sequence
cggtagtaaaatgtaatcat

SEQ ID NO: 96919 - DNA, 20 bp, Artificial sequence
  SiRNA target sequence
ggtagtaaaatgtaatcata

SEQ ID NO: 96920 - DNA, 20 bp, Artificial sequence
  SiRNA target sequence
gtagtaaaatgtaatcatag

SEQ ID NO: 96921 - DNA, 20 bp, Artificial sequence
  SiRNA target sequence
tagtaaaatgtaatcatagt

SEQ ID NO: 96922 - DNA, 20 bp, Artificial sequence
  SiRNA target sequence
agtaaaatgtaatcatagta

SEQ ID NO: 96923 - DNA, 20 bp, Artificial sequence
  SiRNA target sequence
gtaaaatgtaatcatagtac

SEQ ID NO: 96924 - DNA, 20 bp, Artificial sequence
  SiRNA target sequence
taaaatgtaatcatagtaca

SEQ ID NO: 96925 - DNA, 20 bp, Artificial sequence
  SiRNA target sequence
aaaatgtaatcatagtacag

SEQ ID NO: 96926 - DNA, 20 bp, Artificial sequence
  SiRNA target sequence
aaatgtaatcatagtacaga

SEQ ID NO: 96927 - DNA, 20 bp, Artificial sequence
  SiRNA target sequence
aatgtaatcatagtacagat

SEQ ID NO: 96928 - DNA, 20 bp, Artificial sequence
  SiRNA target sequence
atgtaatcatagtacagatc

SEQ ID NO: 96929 - DNA, 20 bp, Artificial sequence
  SiRNA target sequence
tgtaatcatagtacagatcg

SEQ ID NO: 96930 - DNA, 20 bp, Artificial sequence
  SiRNA target sequence
gtaatcatagtacagatcgt

SEQ ID NO: 96931 - DNA, 20 bp, Artificial sequence
  SiRNA target sequence
taatcatagtacagatcgta

SEQ ID NO: 96932 - DNA, 20 bp, Artificial sequence
  SiRNA target sequence
aatcatagtacagatcgtaa

SEQ ID NO: 96933 - DNA, 20 bp, Artificial sequence
  SiRNA target sequence
atcatagtacagatcgtaat

SEQ ID NO: 96934 - DNA, 20 bp, Artificial sequence
  SiRNA target sequence
tcatagtacagatcgtaatt

SEQ ID NO: 96935 - DNA, 20 bp, Artificial sequence
  SiRNA target sequence
catagtacagatcgtaattt

SEQ ID NO: 96936 - DNA, 20 bp, Artificial sequence
  SiRNA target sequence
atagtacagatcgtaattta

SEQ ID NO: 96937 - DNA, 20 bp, Artificial sequence
  SiRNA target sequence
tagtacagatcgtaatttag

SEQ ID NO: 96938 - DNA, 20 bp, Artificial sequence
  SiRNA target sequence
agtacagatcgtaatttaga

SEQ ID NO: 96939 - DNA, 20 bp, Artificial sequence
  SiRNA target sequence
gtacagatcgtaatttagat

SEQ ID NO: 96940 - DNA, 20 bp, Artificial sequence
  SiRNA target sequence
tacagatcgtaatttagata

SEQ ID NO: 96941 - DNA, 20 bp, Artificial sequence
  SiRNA target sequence
acagatcgtaatttagataa

SEQ ID NO: 96942 - DNA, 20 bp, Artificial sequence
  SiRNA target sequence
cagatcgtaatttagataaa

SEQ ID NO: 96943 - DNA, 20 bp, Artificial sequence
  SiRNA target sequence
agatcgtaatttagataaat

SEQ ID NO: 96944 - DNA, 20 bp, Artificial sequence
  SiRNA target sequence
gatcgtaatttagataaatt

SEQ ID NO: 96945 - DNA, 20 bp, Artificial sequence
  SiRNA target sequence
atcgtaatttagataaattt

SEQ ID NO: 96946 - DNA, 20 bp, Artificial sequence
  SiRNA target sequence
tcgtaatttagataaatttc

SEQ ID NO: 96947 - DNA, 20 bp, Artificial sequence
  SiRNA target sequence
cgtaatttagataaatttct

SEQ ID NO: 96948 - DNA, 20 bp, Artificial sequence
  SiRNA target sequence
gtaatttagataaatttctt

SEQ ID NO: 96949 - DNA, 20 bp, Artificial sequence
  SiRNA target sequence
taatttagataaatttcttt

SEQ ID NO: 96950 - DNA, 20 bp, Artificial sequence
  SiRNA target sequence
aatttagataaatttcttta

SEQ ID NO: 96951 - DNA, 20 bp, Artificial sequence
  SiRNA target sequence
atttagataaatttctttac

SEQ ID NO: 96952 - DNA, 20 bp, Artificial sequence
  SiRNA target sequence
tttagataaatttctttaca

SEQ ID NO: 96953 - DNA, 20 bp, Artificial sequence
  SiRNA target sequence
ttagataaatttctttacat

SEQ ID NO: 96954 - DNA, 20 bp, Artificial sequence
  SiRNA target sequence
tagataaatttctttacatt

SEQ ID NO: 96955 - DNA, 20 bp, Artificial sequence
  SiRNA target sequence
agataaatttctttacattt

SEQ ID NO: 96956 - DNA, 20 bp, Artificial sequence
  SiRNA target sequence
gataaatttctttacatttc

SEQ ID NO: 96957 - DNA, 20 bp, Artificial sequence
  SiRNA target sequence
ataaatttctttacatttct

SEQ ID NO: 96958 - DNA, 20 bp, Artificial sequence
  SiRNA target sequence
taaatttctttacatttctc

SEQ ID NO: 96959 - DNA, 20 bp, Artificial sequence
  SiRNA target sequence
aaatttctttacatttctca

SEQ ID NO: 96960 - DNA, 20 bp, Artificial sequence
  SiRNA target sequence
aatttctttacatttctcac

SEQ ID NO: 96961 - DNA, 20 bp, Artificial sequence
  SiRNA target sequence
atttctttacatttctcacg

SEQ ID NO: 96962 - DNA, 20 bp, Artificial sequence
  SiRNA target sequence
tttctttacatttctcacga

SEQ ID NO: 96963 - DNA, 20 bp, Artificial sequence
  SiRNA target sequence
ttctttacatttctcacgat

SEQ ID NO: 96964 - DNA, 20 bp, Artificial sequence
  SiRNA target sequence
tctttacatttctcacgata

SEQ ID NO: 96965 - DNA, 20 bp, Artificial sequence
  SiRNA target sequence
ctttacatttctcacgatat

SEQ ID NO: 96966 - DNA, 20 bp, Artificial sequence
  SiRNA target sequence
tttacatttctcacgatatt

SEQ ID NO: 96967 - DNA, 20 bp, Artificial sequence
  SiRNA target sequence
ttacatttctcacgatattc

SEQ ID NO: 96968 - DNA, 20 bp, Artificial sequence
  SiRNA target sequence
tacatttctcacgatattcc

SEQ ID NO: 96969 - DNA, 20 bp, Artificial sequence
  SiRNA target sequence
acatttctcacgatattcct

SEQ ID NO: 96970 - DNA, 20 bp, Artificial sequence
  SiRNA target sequence
catttctcacgatattcctc

SEQ ID NO: 96971 - DNA, 20 bp, Artificial sequence
  SiRNA target sequence
atttctcacgatattcctca

SEQ ID NO: 96972 - DNA, 20 bp, Artificial sequence
  SiRNA target sequence
tttctcacgatattcctcag

SEQ ID NO: 96973 - DNA, 20 bp, Artificial sequence
  SiRNA target sequence
ttctcacgatattcctcagc

SEQ ID NO: 96974 - DNA, 20 bp, Artificial sequence
  SiRNA target sequence
tctcacgatattcctcagca

SEQ ID NO: 96975 - DNA, 20 bp, Artificial sequence
  SiRNA target sequence
ctcacgatattcctcagcaa

SEQ ID NO: 96976 - DNA, 20 bp, Artificial sequence
  SiRNA target sequence
tcacgatattcctcagcaat

SEQ ID NO: 96977 - DNA, 20 bp, Artificial sequence
  SiRNA target sequence
cacgatattcctcagcaatg

SEQ ID NO: 96978 - DNA, 20 bp, Artificial sequence
  SiRNA target sequence
acgatattcctcagcaatgg

SEQ ID NO: 96979 - DNA, 20 bp, Artificial sequence
  SiRNA target sequence
cgatattcctcagcaatggt

SEQ ID NO: 96980 - DNA, 20 bp, Artificial sequence
  SiRNA target sequence
gatattcctcagcaatggta

SEQ ID NO: 96981 - DNA, 20 bp, Artificial sequence
  SiRNA target sequence
atattcctcagcaatggtat

SEQ ID NO: 96982 - DNA, 20 bp, Artificial sequence
  SiRNA target sequence
tattcctcagcaatggtatc

SEQ ID NO: 96983 - DNA, 20 bp, Artificial sequence
  SiRNA target sequence
attcctcagcaatggtatct

SEQ ID NO: 96984 - DNA, 20 bp, Artificial sequence
  SiRNA target sequence
ttcctcagcaatggtatctg

SEQ ID NO: 96985 - DNA, 20 bp, Artificial sequence
  SiRNA target sequence
tcctcagcaatggtatctgt

SEQ ID NO: 96986 - DNA, 20 bp, Artificial sequence
  SiRNA target sequence
cctcagcaatggtatctgtg

SEQ ID NO: 96987 - DNA, 20 bp, Artificial sequence
  SiRNA target sequence
ctcagcaatggtatctgtga

SEQ ID NO: 96988 - DNA, 20 bp, Artificial sequence
  SiRNA target sequence
tcagcaatggtatctgtgat

SEQ ID NO: 96989 - DNA, 20 bp, Artificial sequence
  SiRNA target sequence
cagcaatggtatctgtgata

SEQ ID NO: 96990 - DNA, 20 bp, Artificial sequence
  SiRNA target sequence
agcaatggtatctgtgataa

SEQ ID NO: 96991 - DNA, 20 bp, Artificial sequence
  SiRNA target sequence
gcaatggtatctgtgataag

SEQ ID NO: 96992 - DNA, 20 bp, Artificial sequence
  SiRNA target sequence
caatggtatctgtgataagc

SEQ ID NO: 96993 - DNA, 20 bp, Artificial sequence
  SiRNA target sequence
aatggtatctgtgataagcg

SEQ ID NO: 96994 - DNA, 20 bp, Artificial sequence
  SiRNA target sequence
atggtatctgtgataagcga

SEQ ID NO: 96995 - DNA, 20 bp, Artificial sequence
  SiRNA target sequence
tggtatctgtgataagcgaa

SEQ ID NO: 96996 - DNA, 20 bp, Artificial sequence
  SiRNA target sequence
ggtatctgtgataagcgaaa

SEQ ID NO: 96997 - DNA, 20 bp, Artificial sequence
  SiRNA target sequence
gtatctgtgataagcgaaag

SEQ ID NO: 96998 - DNA, 20 bp, Artificial sequence
  SiRNA target sequence
tatctgtgataagcgaaagt

SEQ ID NO: 96999 - DNA, 20 bp, Artificial sequence
  SiRNA target sequence
atctgtgataagcgaaagtt

SEQ ID NO: 97000 - DNA, 20 bp, Artificial sequence
  SiRNA target sequence
tctgtgataagcgaaagttg

SEQ ID NO: 97001 - DNA, 20 bp, Artificial sequence
  SiRNA target sequence
ctgtgataagcgaaagttgt

SEQ ID NO: 97002 - DNA, 20 bp, Artificial sequence
  SiRNA target sequence
tgtgataagcgaaagttgta

SEQ ID NO: 97003 - DNA, 20 bp, Artificial sequence
  SiRNA target sequence
gtgataagcgaaagttgtag

SEQ ID NO: 97004 - DNA, 20 bp, Artificial sequence
  SiRNA target sequence
tgataagcgaaagttgtaga

SEQ ID NO: 97005 - DNA, 20 bp, Artificial sequence
  SiRNA target sequence
gataagcgaaagttgtagaa

SEQ ID NO: 97006 - DNA, 20 bp, Artificial sequence
  SiRNA target sequence
ataagcgaaagttgtagaaa

SEQ ID NO: 97007 - DNA, 20 bp, Artificial sequence
  SiRNA target sequence
taagcgaaagttgtagaaaa

SEQ ID NO: 97008 - DNA, 20 bp, Artificial sequence
  SiRNA target sequence
aagcgaaagttgtagaaaaa

SEQ ID NO: 97009 - DNA, 20 bp, Artificial sequence
  SiRNA target sequence
agcgaaagttgtagaaaaaa

SEQ ID NO: 97010 - DNA, 20 bp, Artificial sequence
  SiRNA target sequence
gcgaaagttgtagaaaaaaa

SEQ ID NO: 97011 - DNA, 20 bp, Artificial sequence
  SiRNA target sequence
cgaaagttgtagaaaaaaat

SEQ ID NO: 97012 - DNA, 20 bp, Artificial sequence
  SiRNA target sequence
gaaagttgtagaaaaaaata

SEQ ID NO: 97013 - DNA, 20 bp, Artificial sequence
  SiRNA target sequence
aaagttgtagaaaaaaatag

SEQ ID NO: 97014 - DNA, 20 bp, Artificial sequence
  SiRNA target sequence
aagttgtagaaaaaaataga

SEQ ID NO: 97015 - DNA, 20 bp, Artificial sequence
  SiRNA target sequence
agttgtagaaaaaaatagat

SEQ ID NO: 97016 - DNA, 20 bp, Artificial sequence
  SiRNA target sequence
gttgtagaaaaaaatagatt

SEQ ID NO: 97017 - DNA, 20 bp, Artificial sequence
  SiRNA target sequence
ttgtagaaaaaaatagattt

SEQ ID NO: 97018 - DNA, 20 bp, Artificial sequence
  SiRNA target sequence
tgtagaaaaaaatagatttg

SEQ ID NO: 97019 - DNA, 20 bp, Artificial sequence
  SiRNA target sequence
gtagaaaaaaatagatttga

SEQ ID NO: 97020 - DNA, 20 bp, Artificial sequence
  SiRNA target sequence
tagaaaaaaatagatttgag

SEQ ID NO: 97021 - DNA, 20 bp, Artificial sequence
  SiRNA target sequence
agaaaaaaatagatttgagg

SEQ ID NO: 97022 - DNA, 20 bp, Artificial sequence
  SiRNA target sequence
gaaaaaaatagatttgagga

SEQ ID NO: 97023 - DNA, 20 bp, Artificial sequence
  SiRNA target sequence
aaaaaaatagatttgaggaa

SEQ ID NO: 97024 - DNA, 20 bp, Artificial sequence
  SiRNA target sequence
aaaaaatagatttgaggaat

SEQ ID NO: 97025 - DNA, 20 bp, Artificial sequence
  SiRNA target sequence
aaaaatagatttgaggaata

SEQ ID NO: 97026 - DNA, 20 bp, Artificial sequence
  SiRNA target sequence
aaaatagatttgaggaatag

SEQ ID NO: 97027 - DNA, 20 bp, Artificial sequence
  SiRNA target sequence
aaatagatttgaggaataga

SEQ ID NO: 97028 - DNA, 20 bp, Artificial sequence
  SiRNA target sequence
aatagatttgaggaatagaa

SEQ ID NO: 97029 - DNA, 20 bp, Artificial sequence
  SiRNA target sequence
atagatttgaggaatagaat

SEQ ID NO: 97030 - DNA, 20 bp, Artificial sequence
  SiRNA target sequence
tagatttgaggaatagaatt

SEQ ID NO: 97031 - DNA, 20 bp, Artificial sequence
  SiRNA target sequence
agatttgaggaatagaatta

SEQ ID NO: 97032 - DNA, 20 bp, Artificial sequence
  SiRNA target sequence
gatttgaggaatagaattaa

SEQ ID NO: 97033 - DNA, 20 bp, Artificial sequence
  SiRNA target sequence
atttgaggaatagaattaaa

SEQ ID NO: 97034 - DNA, 20 bp, Artificial sequence
  SiRNA target sequence
tttgaggaatagaattaaaa

SEQ ID NO: 97035 - DNA, 20 bp, Artificial sequence
  SiRNA target sequence
ttgaggaatagaattaaaat

SEQ ID NO: 97036 - DNA, 20 bp, Artificial sequence
  SiRNA target sequence
tgaggaatagaattaaaatc

SEQ ID NO: 97037 - DNA, 20 bp, Artificial sequence
  SiRNA target sequence
gaggaatagaattaaaatca

SEQ ID NO: 97038 - DNA, 20 bp, Artificial sequence
  SiRNA target sequence
aggaatagaattaaaatcac

SEQ ID NO: 97039 - DNA, 20 bp, Artificial sequence
  SiRNA target sequence
ggaatagaattaaaatcaca

SEQ ID NO: 97040 - DNA, 20 bp, Artificial sequence
  SiRNA target sequence
gaatagaattaaaatcacaa

SEQ ID NO: 97041 - DNA, 20 bp, Artificial sequence
  SiRNA target sequence
aatagaattaaaatcacaat

SEQ ID NO: 97042 - DNA, 20 bp, Artificial sequence
  SiRNA target sequence
atagaattaaaatcacaata

SEQ ID NO: 97043 - DNA, 20 bp, Artificial sequence
  SiRNA target sequence
tagaattaaaatcacaatat

SEQ ID NO: 97044 - DNA, 20 bp, Artificial sequence
  SiRNA target sequence
agaattaaaatcacaatatt

SEQ ID NO: 97045 - DNA, 20 bp, Artificial sequence
  SiRNA target sequence
gaattaaaatcacaatattt

SEQ ID NO: 97046 - DNA, 20 bp, Artificial sequence
  SiRNA target sequence
aattaaaatcacaatatttt

SEQ ID NO: 97047 - DNA, 20 bp, Artificial sequence
  SiRNA target sequence
attaaaatcacaatattttt

SEQ ID NO: 97048 - DNA, 20 bp, Artificial sequence
  SiRNA target sequence
ttaaaatcacaatatttttt

SEQ ID NO: 97049 - DNA, 20 bp, Artificial sequence
  SiRNA target sequence
taaaatcacaatatttttta

SEQ ID NO: 97050 - DNA, 20 bp, Artificial sequence
  SiRNA target sequence
aaaatcacaatattttttaa

SEQ ID NO: 97051 - DNA, 20 bp, Artificial sequence
  SiRNA target sequence
aaatcacaatattttttaat

SEQ ID NO: 97052 - DNA, 20 bp, Artificial sequence
  SiRNA target sequence
aatcacaatattttttaata

SEQ ID NO: 97053 - DNA, 20 bp, Artificial sequence
  SiRNA target sequence
atcacaatattttttaatat

SEQ ID NO: 97054 - DNA, 20 bp, Artificial sequence
  SiRNA target sequence
tcacaatattttttaatata

SEQ ID NO: 97055 - DNA, 20 bp, Artificial sequence
  SiRNA target sequence
cacaatattttttaatatat

SEQ ID NO: 97056 - DNA, 20 bp, Artificial sequence
  SiRNA target sequence
acaatattttttaatatatt

SEQ ID NO: 97057 - DNA, 20 bp, Artificial sequence
  SiRNA target sequence
caatattttttaatatattt

SEQ ID NO: 97058 - DNA, 20 bp, Artificial sequence
  SiRNA target sequence
aatattttttaatatattta

SEQ ID NO: 97059 - DNA, 20 bp, Artificial sequence
  SiRNA target sequence
atattttttaatatatttaa

SEQ ID NO: 97060 - DNA, 20 bp, Artificial sequence
  SiRNA target sequence
tattttttaatatatttaac

SEQ ID NO: 97061 - DNA, 20 bp, Artificial sequence
  SiRNA target sequence
attttttaatatatttaacc

SEQ ID NO: 97062 - DNA, 20 bp, Artificial sequence
  SiRNA target sequence
ttttttaatatatttaacca

SEQ ID NO: 97063 - DNA, 20 bp, Artificial sequence
  SiRNA target sequence
tttttaatatatttaaccaa

SEQ ID NO: 97064 - DNA, 20 bp, Artificial sequence
  SiRNA target sequence
ttttaatatatttaaccaag

SEQ ID NO: 97065 - DNA, 20 bp, Artificial sequence
  SiRNA target sequence
tttaatatatttaaccaagg

SEQ ID NO: 97066 - DNA, 20 bp, Artificial sequence
  SiRNA target sequence
ttaatatatttaaccaaggt

SEQ ID NO: 97067 - DNA, 20 bp, Artificial sequence
  SiRNA target sequence
taatatatttaaccaaggta

SEQ ID NO: 97068 - DNA, 20 bp, Artificial sequence
  SiRNA target sequence
aatatatttaaccaaggtat

SEQ ID NO: 97069 - DNA, 20 bp, Artificial sequence
  SiRNA target sequence
atatatttaaccaaggtatt

SEQ ID NO: 97070 - DNA, 20 bp, Artificial sequence
  SiRNA target sequence
tatatttaaccaaggtattg

SEQ ID NO: 97071 - DNA, 20 bp, Artificial sequence
  SiRNA target sequence
atatttaaccaaggtattgt

SEQ ID NO: 97072 - DNA, 20 bp, Artificial sequence
  SiRNA target sequence
tatttaaccaaggtattgtc

SEQ ID NO: 97073 - DNA, 20 bp, Artificial sequence
  SiRNA target sequence
atttaaccaaggtattgtcc

SEQ ID NO: 97074 - DNA, 20 bp, Artificial sequence
  SiRNA target sequence
tttaaccaaggtattgtcct

SEQ ID NO: 97075 - DNA, 20 bp, Artificial sequence
  SiRNA target sequence
ttaaccaaggtattgtcctt

SEQ ID NO: 97076 - DNA, 20 bp, Artificial sequence
  SiRNA target sequence
taaccaaggtattgtccttt

SEQ ID NO: 97077 - DNA, 20 bp, Artificial sequence
  SiRNA target sequence
aaccaaggtattgtccttta

SEQ ID NO: 97078 - DNA, 20 bp, Artificial sequence
  SiRNA target sequence
accaaggtattgtcctttat

SEQ ID NO: 97079 - DNA, 20 bp, Artificial sequence
  SiRNA target sequence
ccaaggtattgtcctttatg

SEQ ID NO: 97080 - DNA, 20 bp, Artificial sequence
  SiRNA target sequence
caaggtattgtcctttatgt

SEQ ID NO: 97081 - DNA, 20 bp, Artificial sequence
  SiRNA target sequence
aaggtattgtcctttatgtt

SEQ ID NO: 97082 - DNA, 20 bp, Artificial sequence
  SiRNA target sequence
aggtattgtcctttatgtta

SEQ ID NO: 97083 - DNA, 20 bp, Artificial sequence
  SiRNA target sequence
ggtattgtcctttatgttat

SEQ ID NO: 97084 - DNA, 20 bp, Artificial sequence
  SiRNA target sequence
gtattgtcctttatgttatt

SEQ ID NO: 97085 - DNA, 20 bp, Artificial sequence
  SiRNA target sequence
tattgtcctttatgttatta

SEQ ID NO: 97086 - DNA, 20 bp, Artificial sequence
  SiRNA target sequence
attgtcctttatgttattat

SEQ ID NO: 97087 - DNA, 20 bp, Artificial sequence
  SiRNA target sequence
ttgtcctttatgttattata

SEQ ID NO: 97088 - DNA, 20 bp, Artificial sequence
  SiRNA target sequence
tgtcctttatgttattatat

SEQ ID NO: 97089 - DNA, 20 bp, Artificial sequence
  SiRNA target sequence
gtcctttatgttattatatc

SEQ ID NO: 97090 - DNA, 20 bp, Artificial sequence
  SiRNA target sequence
tcctttatgttattatatct

SEQ ID NO: 97091 - DNA, 20 bp, Artificial sequence
  SiRNA target sequence
cctttatgttattatatctt

SEQ ID NO: 97092 - DNA, 20 bp, Artificial sequence
  SiRNA target sequence
ctttatgttattatatctta

SEQ ID NO: 97093 - DNA, 20 bp, Artificial sequence
  SiRNA target sequence
tttatgttattatatcttac

SEQ ID NO: 97094 - DNA, 20 bp, Artificial sequence
  SiRNA target sequence
ttatgttattatatcttaca

SEQ ID NO: 97095 - DNA, 20 bp, Artificial sequence
  SiRNA target sequence
tatgttattatatcttacaa

SEQ ID NO: 97096 - DNA, 20 bp, Artificial sequence
  SiRNA target sequence
atgttattatatcttacaaa

SEQ ID NO: 97097 - DNA, 20 bp, Artificial sequence
  SiRNA target sequence
tgttattatatcttacaaac

SEQ ID NO: 97098 - DNA, 20 bp, Artificial sequence
  SiRNA target sequence
gttattatatcttacaaact

SEQ ID NO: 97099 - DNA, 20 bp, Artificial sequence
  SiRNA target sequence
ttattatatcttacaaactc

SEQ ID NO: 97100 - DNA, 20 bp, Artificial sequence
  SiRNA target sequence
tattatatcttacaaactcc

SEQ ID NO: 97101 - DNA, 20 bp, Artificial sequence
  SiRNA target sequence
attatatcttacaaactcct

SEQ ID NO: 97102 - DNA, 20 bp, Artificial sequence
  SiRNA target sequence
ttatatcttacaaactcctc

SEQ ID NO: 97103 - DNA, 20 bp, Artificial sequence
  SiRNA target sequence
tatatcttacaaactcctcg

SEQ ID NO: 97104 - DNA, 20 bp, Artificial sequence
  SiRNA target sequence
atatcttacaaactcctcgt

SEQ ID NO: 97105 - DNA, 20 bp, Artificial sequence
  SiRNA target sequence
tatcttacaaactcctcgta

SEQ ID NO: 97106 - DNA, 20 bp, Artificial sequence
  SiRNA target sequence
atcttacaaactcctcgtaa

SEQ ID NO: 97107 - DNA, 20 bp, Artificial sequence
  SiRNA target sequence
tcttacaaactcctcgtaat

SEQ ID NO: 97108 - DNA, 20 bp, Artificial sequence
  SiRNA target sequence
cttacaaactcctcgtaatt

SEQ ID NO: 97109 - DNA, 20 bp, Artificial sequence
  SiRNA target sequence
ttacaaactcctcgtaatta

SEQ ID NO: 97110 - DNA, 20 bp, Artificial sequence
  SiRNA target sequence
tacaaactcctcgtaattat

SEQ ID NO: 97111 - DNA, 20 bp, Artificial sequence
  SiRNA target sequence
acaaactcctcgtaattata

SEQ ID NO: 97112 - DNA, 20 bp, Artificial sequence
  SiRNA target sequence
caaactcctcgtaattataa

SEQ ID NO: 97113 - DNA, 20 bp, Artificial sequence
  SiRNA target sequence
aaactcctcgtaattataat

SEQ ID NO: 97114 - DNA, 20 bp, Artificial sequence
  SiRNA target sequence
aactcctcgtaattataatt

SEQ ID NO: 97115 - DNA, 20 bp, Artificial sequence
  SiRNA target sequence
actcctcgtaattataattt

SEQ ID NO: 97116 - DNA, 20 bp, Artificial sequence
  SiRNA target sequence
ctcctcgtaattataatttt

SEQ ID NO: 97117 - DNA, 20 bp, Artificial sequence
  SiRNA target sequence
tcctcgtaattataattttc

SEQ ID NO: 97118 - DNA, 20 bp, Artificial sequence
  SiRNA target sequence
cctcgtaattataattttca

SEQ ID NO: 97119 - DNA, 20 bp, Artificial sequence
  SiRNA target sequence
ctcgtaattataattttcag

SEQ ID NO: 97120 - DNA, 20 bp, Artificial sequence
  SiRNA target sequence
tcgtaattataattttcagg

SEQ ID NO: 97121 - DNA, 20 bp, Artificial sequence
  SiRNA target sequence
cgtaattataattttcagga

SEQ ID NO: 97122 - DNA, 20 bp, Artificial sequence
  SiRNA target sequence
gtaattataattttcaggat

SEQ ID NO: 97123 - DNA, 20 bp, Artificial sequence
  SiRNA target sequence
taattataattttcaggata

SEQ ID NO: 97124 - DNA, 20 bp, Artificial sequence
  SiRNA target sequence
aattataattttcaggataa

SEQ ID NO: 97125 - DNA, 20 bp, Artificial sequence
  SiRNA target sequence
attataattttcaggataaa

SEQ ID NO: 97126 - DNA, 20 bp, Artificial sequence
  SiRNA target sequence
ttataattttcaggataaac

SEQ ID NO: 97127 - DNA, 20 bp, Artificial sequence
  SiRNA target sequence
tataattttcaggataaacc

SEQ ID NO: 97128 - DNA, 20 bp, Artificial sequence
  SiRNA target sequence
ataattttcaggataaaccg

SEQ ID NO: 97129 - DNA, 20 bp, Artificial sequence
  SiRNA target sequence
taattttcaggataaaccgc

SEQ ID NO: 97130 - DNA, 20 bp, Artificial sequence
  SiRNA target sequence
aattttcaggataaaccgct

SEQ ID NO: 97131 - DNA, 20 bp, Artificial sequence
  SiRNA target sequence
attttcaggataaaccgcta

SEQ ID NO: 97132 - DNA, 20 bp, Artificial sequence
  SiRNA target sequence
ttttcaggataaaccgctag

SEQ ID NO: 97133 - DNA, 20 bp, Artificial sequence
  SiRNA target sequence
tttcaggataaaccgctaga

SEQ ID NO: 97134 - DNA, 20 bp, Artificial sequence
  SiRNA target sequence
ttcaggataaaccgctagac

SEQ ID NO: 97135 - DNA, 20 bp, Artificial sequence
  SiRNA target sequence
tcaggataaaccgctagaca

SEQ ID NO: 97136 - DNA, 20 bp, Artificial sequence
  SiRNA target sequence
caggataaaccgctagacaa

SEQ ID NO: 97137 - DNA, 20 bp, Artificial sequence
  SiRNA target sequence
aggataaaccgctagacaat

SEQ ID NO: 97138 - DNA, 20 bp, Artificial sequence
  SiRNA target sequence
ggataaaccgctagacaatc

SEQ ID NO: 97139 - DNA, 20 bp, Artificial sequence
  SiRNA target sequence
gataaaccgctagacaatca

SEQ ID NO: 97140 - DNA, 20 bp, Artificial sequence
  SiRNA target sequence
ataaaccgctagacaatcac

SEQ ID NO: 97141 - DNA, 20 bp, Artificial sequence
  SiRNA target sequence
taaaccgctagacaatcacc

SEQ ID NO: 97142 - DNA, 20 bp, Artificial sequence
  SiRNA target sequence
aaaccgctagacaatcaccg

SEQ ID NO: 97143 - DNA, 20 bp, Artificial sequence
  SiRNA target sequence
aaccgctagacaatcaccga

SEQ ID NO: 97144 - DNA, 20 bp, Artificial sequence
  SiRNA target sequence
accgctagacaatcaccgat

SEQ ID NO: 97145 - DNA, 20 bp, Artificial sequence
  SiRNA target sequence
ccgctagacaatcaccgatt

SEQ ID NO: 97146 - DNA, 20 bp, Artificial sequence
  SiRNA target sequence
cgctagacaatcaccgattt

SEQ ID NO: 97147 - DNA, 20 bp, Artificial sequence
  SiRNA target sequence
gctagacaatcaccgatttc

SEQ ID NO: 97148 - DNA, 20 bp, Artificial sequence
  SiRNA target sequence
ctagacaatcaccgatttca

SEQ ID NO: 97149 - DNA, 20 bp, Artificial sequence
  SiRNA target sequence
tagacaatcaccgatttcaa

SEQ ID NO: 97150 - DNA, 20 bp, Artificial sequence
  SiRNA target sequence
agacaatcaccgatttcaaa

SEQ ID NO: 97151 - DNA, 20 bp, Artificial sequence
  SiRNA target sequence
gacaatcaccgatttcaaaa

SEQ ID NO: 97152 - DNA, 20 bp, Artificial sequence
  SiRNA target sequence
acaatcaccgatttcaaaat

SEQ ID NO: 97153 - DNA, 20 bp, Artificial sequence
  SiRNA target sequence
caatcaccgatttcaaaatt

SEQ ID NO: 97154 - DNA, 20 bp, Artificial sequence
  SiRNA target sequence
aatcaccgatttcaaaattt

SEQ ID NO: 97155 - DNA, 20 bp, Artificial sequence
  SiRNA target sequence
atcaccgatttcaaaatttt

SEQ ID NO: 97156 - DNA, 20 bp, Artificial sequence
  SiRNA target sequence
tcaccgatttcaaaattttc

SEQ ID NO: 97157 - DNA, 20 bp, Artificial sequence
  SiRNA target sequence
caccgatttcaaaattttct

SEQ ID NO: 97158 - DNA, 20 bp, Artificial sequence
  SiRNA target sequence
accgatttcaaaattttcta

SEQ ID NO: 97159 - DNA, 20 bp, Artificial sequence
  SiRNA target sequence
ccgatttcaaaattttctat

SEQ ID NO: 97160 - DNA, 20 bp, Artificial sequence
  SiRNA target sequence
cgatttcaaaattttctata

SEQ ID NO: 97161 - DNA, 20 bp, Artificial sequence
  SiRNA target sequence
gatttcaaaattttctatat

SEQ ID NO: 97162 - DNA, 20 bp, Artificial sequence
  SiRNA target sequence
atttcaaaattttctatatc

SEQ ID NO: 97163 - DNA, 20 bp, Artificial sequence
  SiRNA target sequence
tttcaaaattttctatatct

SEQ ID NO: 97164 - DNA, 20 bp, Artificial sequence
  SiRNA target sequence
ttcaaaattttctatatcta

SEQ ID NO: 97165 - DNA, 20 bp, Artificial sequence
  SiRNA target sequence
tcaaaattttctatatctat

SEQ ID NO: 97166 - DNA, 20 bp, Artificial sequence
  SiRNA target sequence
caaaattttctatatctata

SEQ ID NO: 97167 - DNA, 20 bp, Artificial sequence
  SiRNA target sequence
aaaattttctatatctatat

SEQ ID NO: 97168 - DNA, 20 bp, Artificial sequence
  SiRNA target sequence
aaattttctatatctatatc

SEQ ID NO: 97169 - DNA, 20 bp, Artificial sequence
  SiRNA target sequence
aattttctatatctatatca

SEQ ID NO: 97170 - DNA, 20 bp, Artificial sequence
  SiRNA target sequence
attttctatatctatatcaa

SEQ ID NO: 97171 - DNA, 20 bp, Artificial sequence
  SiRNA target sequence
ttttctatatctatatcaaa

SEQ ID NO: 97172 - DNA, 20 bp, Artificial sequence
  SiRNA target sequence
tttctatatctatatcaaat

SEQ ID NO: 97173 - DNA, 20 bp, Artificial sequence
  SiRNA target sequence
ttctatatctatatcaaatt

SEQ ID NO: 97174 - DNA, 20 bp, Artificial sequence
  SiRNA target sequence
tctatatctatatcaaattt

SEQ ID NO: 97175 - DNA, 20 bp, Artificial sequence
  SiRNA target sequence
ctatatctatatcaaatttt

SEQ ID NO: 97176 - DNA, 20 bp, Artificial sequence
  SiRNA target sequence
tatatctatatcaaatttta

SEQ ID NO: 97177 - DNA, 20 bp, Artificial sequence
  SiRNA target sequence
atatctatatcaaattttat

SEQ ID NO: 97178 - DNA, 20 bp, Artificial sequence
  SiRNA target sequence
tatctatatcaaattttatt

SEQ ID NO: 97179 - DNA, 20 bp, Artificial sequence
  SiRNA target sequence
atctatatcaaattttattt

SEQ ID NO: 97180 - DNA, 20 bp, Artificial sequence
  SiRNA target sequence
tctatatcaaattttatttc

SEQ ID NO: 97181 - DNA, 20 bp, Artificial sequence
  SiRNA target sequence
ctatatcaaattttatttct

SEQ ID NO: 97182 - DNA, 20 bp, Artificial sequence
  SiRNA target sequence
tatatcaaattttatttcta

SEQ ID NO: 97183 - DNA, 20 bp, Artificial sequence
  SiRNA target sequence
atatcaaattttatttctaa

SEQ ID NO: 97184 - DNA, 20 bp, Artificial sequence
  SiRNA target sequence
tatcaaattttatttctaaa

SEQ ID NO: 97185 - DNA, 20 bp, Artificial sequence
  SiRNA target sequence
atcaaattttatttctaaaa

SEQ ID NO: 97186 - DNA, 20 bp, Artificial sequence
  SiRNA target sequence
tcaaattttatttctaaaat

SEQ ID NO: 97187 - DNA, 20 bp, Artificial sequence
  SiRNA target sequence
caaattttatttctaaaata

SEQ ID NO: 97188 - DNA, 20 bp, Artificial sequence
  SiRNA target sequence
aaattttatttctaaaatag

SEQ ID NO: 97189 - DNA, 20 bp, Artificial sequence
  SiRNA target sequence
aattttatttctaaaatagg

SEQ ID NO: 97190 - DNA, 20 bp, Artificial sequence
  SiRNA target sequence
attttatttctaaaatagga

SEQ ID NO: 97191 - DNA, 20 bp, Artificial sequence
  SiRNA target sequence
ttttatttctaaaataggat

SEQ ID NO: 97192 - DNA, 20 bp, Artificial sequence
  SiRNA target sequence
tttatttctaaaataggata

SEQ ID NO: 97193 - DNA, 20 bp, Artificial sequence
  SiRNA target sequence
ttatttctaaaataggataa

SEQ ID NO: 97194 - DNA, 20 bp, Artificial sequence
  SiRNA target sequence
tatttctaaaataggataaa

SEQ ID NO: 97195 - DNA, 20 bp, Artificial sequence
  SiRNA target sequence
atttctaaaataggataaat

SEQ ID NO: 97196 - DNA, 20 bp, Artificial sequence
  SiRNA target sequence
tttctaaaataggataaatg

SEQ ID NO: 97197 - DNA, 20 bp, Artificial sequence
  SiRNA target sequence
ttctaaaataggataaatgt

SEQ ID NO: 97198 - DNA, 20 bp, Artificial sequence
  SiRNA target sequence
tctaaaataggataaatgta

SEQ ID NO: 97199 - DNA, 20 bp, Artificial sequence
  SiRNA target sequence
ctaaaataggataaatgtaa

SEQ ID NO: 97200 - DNA, 20 bp, Artificial sequence
  SiRNA target sequence
taaaataggataaatgtaat

SEQ ID NO: 97201 - DNA, 20 bp, Artificial sequence
  SiRNA target sequence
aaaataggataaatgtaatt

SEQ ID NO: 97202 - DNA, 20 bp, Artificial sequence
  SiRNA target sequence
aaataggataaatgtaattg

SEQ ID NO: 97203 - DNA, 20 bp, Artificial sequence
  SiRNA target sequence
aataggataaatgtaattgt

SEQ ID NO: 97204 - DNA, 20 bp, Artificial sequence
  SiRNA target sequence
ataggataaatgtaattgta

SEQ ID NO: 97205 - DNA, 20 bp, Artificial sequence
  SiRNA target sequence
taggataaatgtaattgtaa

SEQ ID NO: 97206 - DNA, 20 bp, Artificial sequence
  SiRNA target sequence
aggataaatgtaattgtaag

SEQ ID NO: 97207 - DNA, 20 bp, Artificial sequence
  SiRNA target sequence
ggataaatgtaattgtaagg

SEQ ID NO: 97208 - DNA, 20 bp, Artificial sequence
  SiRNA target sequence
gataaatgtaattgtaaggt

SEQ ID NO: 97209 - DNA, 20 bp, Artificial sequence
  SiRNA target sequence
ataaatgtaattgtaaggtg

SEQ ID NO: 97210 - DNA, 20 bp, Artificial sequence
  SiRNA target sequence
taaatgtaattgtaaggtgt

SEQ ID NO: 97211 - DNA, 20 bp, Artificial sequence
  SiRNA target sequence
aaatgtaattgtaaggtgtt

SEQ ID NO: 97212 - DNA, 20 bp, Artificial sequence
  SiRNA target sequence
aatgtaattgtaaggtgtta

SEQ ID NO: 97213 - DNA, 20 bp, Artificial sequence
  SiRNA target sequence
atgtaattgtaaggtgttaa

SEQ ID NO: 97214 - DNA, 20 bp, Artificial sequence
  SiRNA target sequence
tgtaattgtaaggtgttaat

SEQ ID NO: 97215 - DNA, 20 bp, Artificial sequence
  SiRNA target sequence
gtaattgtaaggtgttaata

SEQ ID NO: 97216 - DNA, 20 bp, Artificial sequence
  SiRNA target sequence
taattgtaaggtgttaatat

SEQ ID NO: 97217 - DNA, 20 bp, Artificial sequence
  SiRNA target sequence
aattgtaaggtgttaatatc

SEQ ID NO: 97218 - DNA, 20 bp, Artificial sequence
  SiRNA target sequence
attgtaaggtgttaatatct

SEQ ID NO: 97219 - DNA, 20 bp, Artificial sequence
  SiRNA target sequence
ttgtaaggtgttaatatctt

SEQ ID NO: 97220 - DNA, 20 bp, Artificial sequence
  SiRNA target sequence
tgtaaggtgttaatatctta

SEQ ID NO: 97221 - DNA, 20 bp, Artificial sequence
  SiRNA target sequence
gtaaggtgttaatatcttaa

SEQ ID NO: 97222 - DNA, 20 bp, Artificial sequence
  SiRNA target sequence
taaggtgttaatatcttaat

SEQ ID NO: 97223 - DNA, 20 bp, Artificial sequence
  SiRNA target sequence
aaggtgttaatatcttaata

SEQ ID NO: 97224 - DNA, 20 bp, Artificial sequence
  SiRNA target sequence
aggtgttaatatcttaatat

SEQ ID NO: 97225 - DNA, 20 bp, Artificial sequence
  SiRNA target sequence
ggtgttaatatcttaatatc

SEQ ID NO: 97226 - DNA, 20 bp, Artificial sequence
  SiRNA target sequence
gtgttaatatcttaatatca

SEQ ID NO: 97227 - DNA, 20 bp, Artificial sequence
  SiRNA target sequence
tgttaatatcttaatatcat

SEQ ID NO: 97228 - DNA, 20 bp, Artificial sequence
  SiRNA target sequence
gttaatatcttaatatcatt

SEQ ID NO: 97229 - DNA, 20 bp, Artificial sequence
  SiRNA target sequence
ttaatatcttaatatcattt

SEQ ID NO: 97230 - DNA, 20 bp, Artificial sequence
  SiRNA target sequence
taatatcttaatatcattta

SEQ ID NO: 97231 - DNA, 20 bp, Artificial sequence
  SiRNA target sequence
aatatcttaatatcatttat

SEQ ID NO: 97232 - DNA, 20 bp, Artificial sequence
  SiRNA target sequence
atatcttaatatcatttatt

SEQ ID NO: 97233 - DNA, 20 bp, Artificial sequence
  SiRNA target sequence
tatcttaatatcatttattg

SEQ ID NO: 97234 - DNA, 20 bp, Artificial sequence
  SiRNA target sequence
atcttaatatcatttattga

SEQ ID NO: 97235 - DNA, 20 bp, Artificial sequence
  SiRNA target sequence
tcttaatatcatttattgac

SEQ ID NO: 97236 - DNA, 20 bp, Artificial sequence
  SiRNA target sequence
cttaatatcatttattgacg

SEQ ID NO: 97237 - DNA, 20 bp, Artificial sequence
  SiRNA target sequence
ttaatatcatttattgacgc

SEQ ID NO: 97238 - DNA, 20 bp, Artificial sequence
  SiRNA target sequence
taatatcatttattgacgca

SEQ ID NO: 97239 - DNA, 20 bp, Artificial sequence
  SiRNA target sequence
aatatcatttattgacgcac

SEQ ID NO: 97240 - DNA, 20 bp, Artificial sequence
  SiRNA target sequence
atatcatttattgacgcact

SEQ ID NO: 97241 - DNA, 20 bp, Artificial sequence
  SiRNA target sequence
tatcatttattgacgcactg

SEQ ID NO: 97242 - DNA, 20 bp, Artificial sequence
  SiRNA target sequence
atcatttattgacgcactgt

SEQ ID NO: 97243 - DNA, 20 bp, Artificial sequence
  SiRNA target sequence
tcatttattgacgcactgta

SEQ ID NO: 97244 - DNA, 20 bp, Artificial sequence
  SiRNA target sequence
catttattgacgcactgtat

SEQ ID NO: 97245 - DNA, 20 bp, Artificial sequence
  SiRNA target sequence
atttattgacgcactgtata

SEQ ID NO: 97246 - DNA, 20 bp, Artificial sequence
  SiRNA target sequence
tttattgacgcactgtataa

SEQ ID NO: 97247 - DNA, 20 bp, Artificial sequence
  SiRNA target sequence
ttattgacgcactgtataaa

SEQ ID NO: 97248 - DNA, 20 bp, Artificial sequence
  SiRNA target sequence
tattgacgcactgtataaat

SEQ ID NO: 97249 - DNA, 20 bp, Artificial sequence
  SiRNA target sequence
attgacgcactgtataaatc

SEQ ID NO: 97250 - DNA, 20 bp, Artificial sequence
  SiRNA target sequence
ttgacgcactgtataaatca

SEQ ID NO: 97251 - DNA, 20 bp, Artificial sequence
  SiRNA target sequence
tgacgcactgtataaatcat

SEQ ID NO: 97252 - DNA, 20 bp, Artificial sequence
  SiRNA target sequence
gacgcactgtataaatcatt

SEQ ID NO: 97253 - DNA, 20 bp, Artificial sequence
  SiRNA target sequence
acgcactgtataaatcattt

SEQ ID NO: 97254 - DNA, 20 bp, Artificial sequence
  SiRNA target sequence
cgcactgtataaatcatttt

SEQ ID NO: 97255 - DNA, 20 bp, Artificial sequence
  SiRNA target sequence
gcactgtataaatcattttt

SEQ ID NO: 97256 - DNA, 20 bp, Artificial sequence
  SiRNA target sequence
cactgtataaatcattttta

SEQ ID NO: 97257 - DNA, 20 bp, Artificial sequence
  SiRNA target sequence
actgtataaatcatttttac

SEQ ID NO: 97258 - DNA, 20 bp, Artificial sequence
  SiRNA target sequence
ctgtataaatcatttttaca

SEQ ID NO: 97259 - DNA, 20 bp, Artificial sequence
  SiRNA target sequence
tgtataaatcatttttacaa

SEQ ID NO: 97260 - DNA, 20 bp, Artificial sequence
  SiRNA target sequence
gtataaatcatttttacaac

SEQ ID NO: 97261 - DNA, 20 bp, Artificial sequence
  SiRNA target sequence
tataaatcatttttacaact

SEQ ID NO: 97262 - DNA, 20 bp, Artificial sequence
  SiRNA target sequence
ataaatcatttttacaactt

SEQ ID NO: 97263 - DNA, 20 bp, Artificial sequence
  SiRNA target sequence
taaatcatttttacaacttg

SEQ ID NO: 97264 - DNA, 20 bp, Artificial sequence
  SiRNA target sequence
aaatcatttttacaacttgc

SEQ ID NO: 97265 - DNA, 20 bp, Artificial sequence
  SiRNA target sequence
aatcatttttacaacttgca

SEQ ID NO: 97266 - DNA, 20 bp, Artificial sequence
  SiRNA target sequence
atcatttttacaacttgcaa

SEQ ID NO: 97267 - DNA, 20 bp, Artificial sequence
  SiRNA target sequence
tcatttttacaacttgcaaa

SEQ ID NO: 97268 - DNA, 20 bp, Artificial sequence
  SiRNA target sequence
catttttacaacttgcaaaa

SEQ ID NO: 97269 - DNA, 20 bp, Artificial sequence
  SiRNA target sequence
atttttacaacttgcaaaat

SEQ ID NO: 97270 - DNA, 20 bp, Artificial sequence
  SiRNA target sequence
tttttacaacttgcaaaatt

SEQ ID NO: 97271 - DNA, 20 bp, Artificial sequence
  SiRNA target sequence
ttttacaacttgcaaaattt

SEQ ID NO: 97272 - DNA, 20 bp, Artificial sequence
  SiRNA target sequence
tttacaacttgcaaaatttt

SEQ ID NO: 97273 - DNA, 20 bp, Artificial sequence
  SiRNA target sequence
ttacaacttgcaaaattttt

SEQ ID NO: 97274 - DNA, 20 bp, Artificial sequence
  SiRNA target sequence
tacaacttgcaaaattttta

SEQ ID NO: 97275 - DNA, 20 bp, Artificial sequence
  SiRNA target sequence
acaacttgcaaaatttttag

SEQ ID NO: 97276 - DNA, 20 bp, Artificial sequence
  SiRNA target sequence
caacttgcaaaatttttagc

SEQ ID NO: 97277 - DNA, 20 bp, Artificial sequence
  SiRNA target sequence
aacttgcaaaatttttagca

SEQ ID NO: 97278 - DNA, 20 bp, Artificial sequence
  SiRNA target sequence
acttgcaaaatttttagcat

SEQ ID NO: 97279 - DNA, 20 bp, Artificial sequence
  SiRNA target sequence
cttgcaaaatttttagcatt

SEQ ID NO: 97280 - DNA, 20 bp, Artificial sequence
  SiRNA target sequence
ttgcaaaatttttagcattt

SEQ ID NO: 97281 - DNA, 20 bp, Artificial sequence
  SiRNA target sequence
tgcaaaatttttagcatttt

SEQ ID NO: 97282 - DNA, 20 bp, Artificial sequence
  SiRNA target sequence
gcaaaatttttagcattttg

SEQ ID NO: 97283 - DNA, 20 bp, Artificial sequence
  SiRNA target sequence
caaaatttttagcattttgt

SEQ ID NO: 97284 - DNA, 20 bp, Artificial sequence
  SiRNA target sequence
aaaatttttagcattttgta

SEQ ID NO: 97285 - DNA, 20 bp, Artificial sequence
  SiRNA target sequence
aaatttttagcattttgtag

SEQ ID NO: 97286 - DNA, 20 bp, Artificial sequence
  SiRNA target sequence
aatttttagcattttgtagt

SEQ ID NO: 97287 - DNA, 20 bp, Artificial sequence
  SiRNA target sequence
atttttagcattttgtagtt

SEQ ID NO: 97288 - DNA, 20 bp, Artificial sequence
  SiRNA target sequence
tttttagcattttgtagttt

SEQ ID NO: 97289 - DNA, 20 bp, Artificial sequence
  SiRNA target sequence
ttttagcattttgtagtttg

SEQ ID NO: 97290 - DNA, 20 bp, Artificial sequence
  SiRNA target sequence
tttagcattttgtagtttgt

SEQ ID NO: 97291 - DNA, 20 bp, Artificial sequence
  SiRNA target sequence
ttagcattttgtagtttgta

SEQ ID NO: 97292 - DNA, 20 bp, Artificial sequence
  SiRNA target sequence
tagcattttgtagtttgtaa

SEQ ID NO: 97293 - DNA, 20 bp, Artificial sequence
  SiRNA target sequence
agcattttgtagtttgtaat

SEQ ID NO: 97294 - DNA, 20 bp, Artificial sequence
  SiRNA target sequence
gcattttgtagtttgtaatg

SEQ ID NO: 97295 - DNA, 20 bp, Artificial sequence
  SiRNA target sequence
cattttgtagtttgtaatgc

SEQ ID NO: 97296 - DNA, 20 bp, Artificial sequence
  SiRNA target sequence
attttgtagtttgtaatgcg

SEQ ID NO: 97297 - DNA, 20 bp, Artificial sequence
  SiRNA target sequence
ttttgtagtttgtaatgcgg

SEQ ID NO: 97298 - DNA, 20 bp, Artificial sequence
  SiRNA target sequence
tttgtagtttgtaatgcggt

SEQ ID NO: 97299 - DNA, 20 bp, Artificial sequence
  SiRNA target sequence
ttgtagtttgtaatgcggta

SEQ ID NO: 97300 - DNA, 20 bp, Artificial sequence
  SiRNA target sequence
tgtagtttgtaatgcggtaa

SEQ ID NO: 97301 - DNA, 20 bp, Artificial sequence
  SiRNA target sequence
gtagtttgtaatgcggtaat

SEQ ID NO: 97302 - DNA, 20 bp, Artificial sequence
  SiRNA target sequence
tagtttgtaatgcggtaata

SEQ ID NO: 97303 - DNA, 20 bp, Artificial sequence
  SiRNA target sequence
agtttgtaatgcggtaatat

SEQ ID NO: 97304 - DNA, 20 bp, Artificial sequence
  SiRNA target sequence
gtttgtaatgcggtaatata

SEQ ID NO: 97305 - DNA, 20 bp, Artificial sequence
  SiRNA target sequence
tttgtaatgcggtaatatat

SEQ ID NO: 97306 - DNA, 20 bp, Artificial sequence
  SiRNA target sequence
ttgtaatgcggtaatatata

SEQ ID NO: 97307 - DNA, 20 bp, Artificial sequence
  SiRNA target sequence
tgtaatgcggtaatatataa

SEQ ID NO: 97308 - DNA, 20 bp, Artificial sequence
  SiRNA target sequence
gtaatgcggtaatatataat

SEQ ID NO: 97309 - DNA, 20 bp, Artificial sequence
  SiRNA target sequence
taatgcggtaatatataata

SEQ ID NO: 97310 - DNA, 20 bp, Artificial sequence
  SiRNA target sequence
aatgcggtaatatataatat

SEQ ID NO: 97311 - DNA, 20 bp, Artificial sequence
  SiRNA target sequence
atgcggtaatatataatata

SEQ ID NO: 97312 - DNA, 20 bp, Artificial sequence
  SiRNA target sequence
tgcggtaatatataatatag

SEQ ID NO: 97313 - DNA, 20 bp, Artificial sequence
  SiRNA target sequence
gcggtaatatataatataga

SEQ ID NO: 97314 - DNA, 20 bp, Artificial sequence
  SiRNA target sequence
cggtaatatataatatagat

SEQ ID NO: 97315 - DNA, 20 bp, Artificial sequence
  SiRNA target sequence
ggtaatatataatatagatc

SEQ ID NO: 97316 - DNA, 20 bp, Artificial sequence
  SiRNA target sequence
gtaatatataatatagatct

SEQ ID NO: 97317 - DNA, 20 bp, Artificial sequence
  SiRNA target sequence
taatatataatatagatctt

SEQ ID NO: 97318 - DNA, 20 bp, Artificial sequence
  SiRNA target sequence
aatatataatatagatcttt

SEQ ID NO: 97319 - DNA, 20 bp, Artificial sequence
  SiRNA target sequence
atatataatatagatctttt

SEQ ID NO: 97320 - DNA, 20 bp, Artificial sequence
  SiRNA target sequence
tatataatatagatctttta

SEQ ID NO: 97321 - DNA, 20 bp, Artificial sequence
  SiRNA target sequence
atataatatagatcttttat

SEQ ID NO: 97322 - DNA, 20 bp, Artificial sequence
  SiRNA target sequence
tataatatagatcttttatc

SEQ ID NO: 97323 - DNA, 20 bp, Artificial sequence
  SiRNA target sequence
ataatatagatcttttatcc

SEQ ID NO: 97324 - DNA, 20 bp, Artificial sequence
  SiRNA target sequence
taatatagatcttttatcca

SEQ ID NO: 97325 - DNA, 20 bp, Artificial sequence
  SiRNA target sequence
aatatagatcttttatccat

SEQ ID NO: 97326 - DNA, 20 bp, Artificial sequence
  SiRNA target sequence
atatagatcttttatccatg

SEQ ID NO: 97327 - DNA, 20 bp, Artificial sequence
  SiRNA target sequence
tatagatcttttatccatgt

SEQ ID NO: 97328 - DNA, 20 bp, Artificial sequence
  SiRNA target sequence
atagatcttttatccatgtc

SEQ ID NO: 97329 - DNA, 20 bp, Artificial sequence
  SiRNA target sequence
tagatcttttatccatgtct

SEQ ID NO: 97330 - DNA, 20 bp, Artificial sequence
  SiRNA target sequence
agatcttttatccatgtctt

SEQ ID NO: 97331 - DNA, 20 bp, Artificial sequence
  SiRNA target sequence
gatcttttatccatgtctta

SEQ ID NO: 97332 - DNA, 20 bp, Artificial sequence
  SiRNA target sequence
atcttttatccatgtcttaa

SEQ ID NO: 97333 - DNA, 20 bp, Artificial sequence
  SiRNA target sequence
tcttttatccatgtcttaaa

SEQ ID NO: 97334 - DNA, 20 bp, Artificial sequence
  SiRNA target sequence
cttttatccatgtcttaaat

SEQ ID NO: 97335 - DNA, 20 bp, Artificial sequence
  SiRNA target sequence
ttttatccatgtcttaaatt

SEQ ID NO: 97336 - DNA, 20 bp, Artificial sequence
  SiRNA target sequence
tttatccatgtcttaaattc

SEQ ID NO: 97337 - DNA, 20 bp, Artificial sequence
  SiRNA target sequence
ttatccatgtcttaaattcg

SEQ ID NO: 97338 - DNA, 20 bp, Artificial sequence
  SiRNA target sequence
tatccatgtcttaaattcgc

SEQ ID NO: 97339 - DNA, 20 bp, Artificial sequence
  SiRNA target sequence
atccatgtcttaaattcgcc

SEQ ID NO: 97340 - DNA, 20 bp, Artificial sequence
  SiRNA target sequence
tccatgtcttaaattcgccc

SEQ ID NO: 97341 - DNA, 20 bp, Artificial sequence
  SiRNA target sequence
ccatgtcttaaattcgccca

SEQ ID NO: 97342 - DNA, 20 bp, Artificial sequence
  SiRNA target sequence
catgtcttaaattcgcccat

SEQ ID NO: 97343 - DNA, 20 bp, Artificial sequence
  SiRNA target sequence
atgtcttaaattcgcccata

SEQ ID NO: 97344 - DNA, 20 bp, Artificial sequence
  SiRNA target sequence
tgtcttaaattcgcccataa

SEQ ID NO: 97345 - DNA, 20 bp, Artificial sequence
  SiRNA target sequence
gtcttaaattcgcccataaa

SEQ ID NO: 97346 - DNA, 20 bp, Artificial sequence
  SiRNA target sequence
tcttaaattcgcccataaat

SEQ ID NO: 97347 - DNA, 20 bp, Artificial sequence
  SiRNA target sequence
cttaaattcgcccataaatc

SEQ ID NO: 97348 - DNA, 20 bp, Artificial sequence
  SiRNA target sequence
ttaaattcgcccataaatcc

SEQ ID NO: 97349 - DNA, 20 bp, Artificial sequence
  SiRNA target sequence
taaattcgcccataaatcct

SEQ ID NO: 97350 - DNA, 20 bp, Artificial sequence
  SiRNA target sequence
aaattcgcccataaatcctt

SEQ ID NO: 97351 - DNA, 20 bp, Artificial sequence
  SiRNA target sequence
aattcgcccataaatccttc

SEQ ID NO: 97352 - DNA, 20 bp, Artificial sequence
  SiRNA target sequence
attcgcccataaatccttct

SEQ ID NO: 97353 - DNA, 20 bp, Artificial sequence
  SiRNA target sequence
ttcgcccataaatccttctt

SEQ ID NO: 97354 - DNA, 20 bp, Artificial sequence
  SiRNA target sequence
tcgcccataaatccttcttt

SEQ ID NO: 97355 - DNA, 20 bp, Artificial sequence
  SiRNA target sequence
cgcccataaatccttctttg

SEQ ID NO: 97356 - DNA, 20 bp, Artificial sequence
  SiRNA target sequence
gcccataaatccttctttgt

SEQ ID NO: 97357 - DNA, 20 bp, Artificial sequence
  SiRNA target sequence
cccataaatccttctttgtc

SEQ ID NO: 97358 - DNA, 20 bp, Artificial sequence
  SiRNA target sequence
ccataaatccttctttgtct

SEQ ID NO: 97359 - DNA, 20 bp, Artificial sequence
  SiRNA target sequence
cataaatccttctttgtctt

SEQ ID NO: 97360 - DNA, 20 bp, Artificial sequence
  SiRNA target sequence
ataaatccttctttgtcttg

SEQ ID NO: 97361 - DNA, 20 bp, Artificial sequence
  SiRNA target sequence
taaatccttctttgtcttgg

SEQ ID NO: 97362 - DNA, 20 bp, Artificial sequence
  SiRNA target sequence
aaatccttctttgtcttggc

SEQ ID NO: 97363 - DNA, 20 bp, Artificial sequence
  SiRNA target sequence
aatccttctttgtcttggct

SEQ ID NO: 97364 - DNA, 20 bp, Artificial sequence
  SiRNA target sequence
atccttctttgtcttggcta

SEQ ID NO: 97365 - DNA, 20 bp, Artificial sequence
  SiRNA target sequence
tccttctttgtcttggctat

SEQ ID NO: 97366 - DNA, 20 bp, Artificial sequence
  SiRNA target sequence
ccttctttgtcttggctatc

SEQ ID NO: 97367 - DNA, 20 bp, Artificial sequence
  SiRNA target sequence
cttctttgtcttggctatct

SEQ ID NO: 97368 - DNA, 20 bp, Artificial sequence
  SiRNA target sequence
ttctttgtcttggctatctc

SEQ ID NO: 97369 - DNA, 20 bp, Artificial sequence
  SiRNA target sequence
tctttgtcttggctatctcc

SEQ ID NO: 97370 - DNA, 20 bp, Artificial sequence
  SiRNA target sequence
ctttgtcttggctatctcca

SEQ ID NO: 97371 - DNA, 20 bp, Artificial sequence
  SiRNA target sequence
tttgtcttggctatctccat

SEQ ID NO: 97372 - DNA, 20 bp, Artificial sequence
  SiRNA target sequence
ttgtcttggctatctccatt

SEQ ID NO: 97373 - DNA, 20 bp, Artificial sequence
  SiRNA target sequence
tgtcttggctatctccatta

SEQ ID NO: 97374 - DNA, 20 bp, Artificial sequence
  SiRNA target sequence
gtcttggctatctccattac

SEQ ID NO: 97375 - DNA, 20 bp, Artificial sequence
  SiRNA target sequence
tcttggctatctccattacc

SEQ ID NO: 97376 - DNA, 20 bp, Artificial sequence
  SiRNA target sequence
cttggctatctccattaccc

SEQ ID NO: 97377 - DNA, 20 bp, Artificial sequence
  SiRNA target sequence
ttggctatctccattaccct

SEQ ID NO: 97378 - DNA, 20 bp, Artificial sequence
  SiRNA target sequence
tggctatctccattaccctt

SEQ ID NO: 97379 - DNA, 20 bp, Artificial sequence
  SiRNA target sequence
ggctatctccattacccttt

SEQ ID NO: 97380 - DNA, 20 bp, Artificial sequence
  SiRNA target sequence
gctatctccattaccctttc

SEQ ID NO: 97381 - DNA, 20 bp, Artificial sequence
  SiRNA target sequence
ctatctccattaccctttct

SEQ ID NO: 97382 - DNA, 20 bp, Artificial sequence
  SiRNA target sequence
tatctccattaccctttctt

SEQ ID NO: 97383 - DNA, 20 bp, Artificial sequence
  SiRNA target sequence
atctccattaccctttctta

SEQ ID NO: 97384 - DNA, 20 bp, Artificial sequence
  SiRNA target sequence
tctccattaccctttcttat

SEQ ID NO: 97385 - DNA, 20 bp, Artificial sequence
  SiRNA target sequence
ctccattaccctttcttatc

SEQ ID NO: 97386 - DNA, 20 bp, Artificial sequence
  SiRNA target sequence
tccattaccctttcttatca

SEQ ID NO: 97387 - DNA, 20 bp, Artificial sequence
  SiRNA target sequence
ccattaccctttcttatcag

SEQ ID NO: 97388 - DNA, 20 bp, Artificial sequence
  SiRNA target sequence
cattaccctttcttatcaga

SEQ ID NO: 97389 - DNA, 20 bp, Artificial sequence
  SiRNA target sequence
attaccctttcttatcagag

SEQ ID NO: 97390 - DNA, 20 bp, Artificial sequence
  SiRNA target sequence
ttaccctttcttatcagagg

SEQ ID NO: 97391 - DNA, 20 bp, Artificial sequence
  SiRNA target sequence
taccctttcttatcagaggt

SEQ ID NO: 97392 - DNA, 20 bp, Artificial sequence
  SiRNA target sequence
accctttcttatcagaggtt

SEQ ID NO: 97393 - DNA, 20 bp, Artificial sequence
  SiRNA target sequence
ccctttcttatcagaggttt

SEQ ID NO: 97394 - DNA, 20 bp, Artificial sequence
  SiRNA target sequence
cctttcttatcagaggttta

SEQ ID NO: 97395 - DNA, 20 bp, Artificial sequence
  SiRNA target sequence
ctttcttatcagaggtttag

SEQ ID NO: 97396 - DNA, 20 bp, Artificial sequence
  SiRNA target sequence
tttcttatcagaggtttagc

SEQ ID NO: 97397 - DNA, 20 bp, Artificial sequence
  SiRNA target sequence
ttcttatcagaggtttagct

SEQ ID NO: 97398 - DNA, 20 bp, Artificial sequence
  SiRNA target sequence
tcttatcagaggtttagctc

SEQ ID NO: 97399 - DNA, 20 bp, Artificial sequence
  SiRNA target sequence
cttatcagaggtttagctcc

SEQ ID NO: 97400 - DNA, 20 bp, Artificial sequence
  SiRNA target sequence
ttatcagaggtttagctccg

SEQ ID NO: 97401 - DNA, 20 bp, Artificial sequence
  SiRNA target sequence
tatcagaggtttagctccgt

SEQ ID NO: 97402 - DNA, 20 bp, Artificial sequence
  SiRNA target sequence
atcagaggtttagctccgtg

SEQ ID NO: 97403 - DNA, 20 bp, Artificial sequence
  SiRNA target sequence
tcagaggtttagctccgtgt

SEQ ID NO: 97404 - DNA, 20 bp, Artificial sequence
  SiRNA target sequence
cagaggtttagctccgtgtt

SEQ ID NO: 97405 - DNA, 20 bp, Artificial sequence
  SiRNA target sequence
agaggtttagctccgtgttt

SEQ ID NO: 97406 - DNA, 20 bp, Artificial sequence
  SiRNA target sequence
gaggtttagctccgtgtttt

SEQ ID NO: 97407 - DNA, 20 bp, Artificial sequence
  SiRNA target sequence
aggtttagctccgtgtttta

SEQ ID NO: 97408 - DNA, 20 bp, Artificial sequence
  SiRNA target sequence
ggtttagctccgtgttttaa

SEQ ID NO: 97409 - DNA, 20 bp, Artificial sequence
  SiRNA target sequence
gtttagctccgtgttttaaa

SEQ ID NO: 97410 - DNA, 20 bp, Artificial sequence
  SiRNA target sequence
tttagctccgtgttttaaaa

SEQ ID NO: 97411 - DNA, 20 bp, Artificial sequence
  SiRNA target sequence
ttagctccgtgttttaaaag

SEQ ID NO: 97412 - DNA, 20 bp, Artificial sequence
  SiRNA target sequence
tagctccgtgttttaaaagg

SEQ ID NO: 97413 - DNA, 20 bp, Artificial sequence
  SiRNA target sequence
agctccgtgttttaaaaggc

SEQ ID NO: 97414 - DNA, 20 bp, Artificial sequence
  SiRNA target sequence
gctccgtgttttaaaaggca

SEQ ID NO: 97415 - DNA, 20 bp, Artificial sequence
  SiRNA target sequence
ctccgtgttttaaaaggcaa

SEQ ID NO: 97416 - DNA, 20 bp, Artificial sequence
  SiRNA target sequence
tccgtgttttaaaaggcaat

SEQ ID NO: 97417 - DNA, 20 bp, Artificial sequence
  SiRNA target sequence
ccgtgttttaaaaggcaatt

SEQ ID NO: 97418 - DNA, 20 bp, Artificial sequence
  SiRNA target sequence
cgtgttttaaaaggcaatta

SEQ ID NO: 97419 - DNA, 20 bp, Artificial sequence
  SiRNA target sequence
gtgttttaaaaggcaattat

SEQ ID NO: 97420 - DNA, 20 bp, Artificial sequence
  SiRNA target sequence
tgttttaaaaggcaattata

SEQ ID NO: 97421 - DNA, 20 bp, Artificial sequence
  SiRNA target sequence
gttttaaaaggcaattatac

SEQ ID NO: 97422 - DNA, 20 bp, Artificial sequence
  SiRNA target sequence
ttttaaaaggcaattataca

SEQ ID NO: 97423 - DNA, 20 bp, Artificial sequence
  SiRNA target sequence
tttaaaaggcaattatacaa

SEQ ID NO: 97424 - DNA, 20 bp, Artificial sequence
  SiRNA target sequence
ttaaaaggcaattatacaac

SEQ ID NO: 97425 - DNA, 20 bp, Artificial sequence
  SiRNA target sequence
taaaaggcaattatacaact

SEQ ID NO: 97426 - DNA, 20 bp, Artificial sequence
  SiRNA target sequence
aaaaggcaattatacaactt

SEQ ID NO: 97427 - DNA, 20 bp, Artificial sequence
  SiRNA target sequence
aaaggcaattatacaacttt

SEQ ID NO: 97428 - DNA, 20 bp, Artificial sequence
  SiRNA target sequence
aaggcaattatacaactttt

SEQ ID NO: 97429 - DNA, 20 bp, Artificial sequence
  SiRNA target sequence
aggcaattatacaacttttt

SEQ ID NO: 97430 - DNA, 20 bp, Artificial sequence
  SiRNA target sequence
ggcaattatacaacttttta

SEQ ID NO: 97431 - DNA, 20 bp, Artificial sequence
  SiRNA target sequence
gcaattatacaactttttag

SEQ ID NO: 97432 - DNA, 20 bp, Artificial sequence
  SiRNA target sequence
caattatacaactttttaga

SEQ ID NO: 97433 - DNA, 20 bp, Artificial sequence
  SiRNA target sequence
aattatacaactttttagaa

SEQ ID NO: 97434 - DNA, 20 bp, Artificial sequence
  SiRNA target sequence
attatacaactttttagaac

SEQ ID NO: 97435 - DNA, 20 bp, Artificial sequence
  SiRNA target sequence
ttatacaactttttagaaca

SEQ ID NO: 97436 - DNA, 20 bp, Artificial sequence
  SiRNA target sequence
tatacaactttttagaacaa

SEQ ID NO: 97437 - DNA, 20 bp, Artificial sequence
  SiRNA target sequence
atacaactttttagaacaaa

SEQ ID NO: 97438 - DNA, 20 bp, Artificial sequence
  SiRNA target sequence
tacaactttttagaacaaaa

SEQ ID NO: 97439 - DNA, 20 bp, Artificial sequence
  SiRNA target sequence
acaactttttagaacaaaaa

SEQ ID NO: 97440 - DNA, 20 bp, Artificial sequence
  SiRNA target sequence
caactttttagaacaaaaat

SEQ ID NO: 97441 - DNA, 20 bp, Artificial sequence
  SiRNA target sequence
aactttttagaacaaaaatt

SEQ ID NO: 97442 - DNA, 20 bp, Artificial sequence
  SiRNA target sequence
actttttagaacaaaaatta

SEQ ID NO: 97443 - DNA, 20 bp, Artificial sequence
  SiRNA target sequence
ctttttagaacaaaaattaa

SEQ ID NO: 97444 - DNA, 20 bp, Artificial sequence
  SiRNA target sequence
tttttagaacaaaaattaaa

SEQ ID NO: 97445 - DNA, 20 bp, Artificial sequence
  SiRNA target sequence
ttttagaacaaaaattaaaa

SEQ ID NO: 97446 - DNA, 20 bp, Artificial sequence
  SiRNA target sequence
tttagaacaaaaattaaaag

SEQ ID NO: 97447 - DNA, 20 bp, Artificial sequence
  SiRNA target sequence
ttagaacaaaaattaaaaga

SEQ ID NO: 97448 - DNA, 20 bp, Artificial sequence
  SiRNA target sequence
tagaacaaaaattaaaagat

SEQ ID NO: 97449 - DNA, 20 bp, Artificial sequence
  SiRNA target sequence
agaacaaaaattaaaagatt

SEQ ID NO: 97450 - DNA, 20 bp, Artificial sequence
  SiRNA target sequence
gaacaaaaattaaaagattt

SEQ ID NO: 97451 - DNA, 20 bp, Artificial sequence
  SiRNA target sequence
aacaaaaattaaaagattta

SEQ ID NO: 97452 - DNA, 20 bp, Artificial sequence
  SiRNA target sequence
acaaaaattaaaagatttat

SEQ ID NO: 97453 - DNA, 20 bp, Artificial sequence
  SiRNA target sequence
caaaaattaaaagatttata

SEQ ID NO: 97454 - DNA, 20 bp, Artificial sequence
  SiRNA target sequence
aaaaattaaaagatttataa

SEQ ID NO: 97455 - DNA, 20 bp, Artificial sequence
  SiRNA target sequence
aaaattaaaagatttataag

SEQ ID NO: 97456 - DNA, 20 bp, Artificial sequence
  SiRNA target sequence
aaattaaaagatttataaga

SEQ ID NO: 97457 - DNA, 20 bp, Artificial sequence
  SiRNA target sequence
aattaaaagatttataagac

SEQ ID NO: 97458 - DNA, 20 bp, Artificial sequence
  SiRNA target sequence
attaaaagatttataagacg

SEQ ID NO: 97459 - DNA, 20 bp, Artificial sequence
  SiRNA target sequence
ttaaaagatttataagacga

SEQ ID NO: 97460 - DNA, 20 bp, Artificial sequence
  SiRNA target sequence
taaaagatttataagacgaa

SEQ ID NO: 97461 - DNA, 20 bp, Artificial sequence
  SiRNA target sequence
aaaagatttataagacgaat

SEQ ID NO: 97462 - DNA, 20 bp, Artificial sequence
  SiRNA target sequence
aaagatttataagacgaatc

SEQ ID NO: 97463 - DNA, 20 bp, Artificial sequence
  SiRNA target sequence
aagatttataagacgaatcc

SEQ ID NO: 97464 - DNA, 20 bp, Artificial sequence
  SiRNA target sequence
agatttataagacgaatccc

SEQ ID NO: 97465 - DNA, 20 bp, Artificial sequence
  SiRNA target sequence
gatttataagacgaatcccc

SEQ ID NO: 97466 - DNA, 20 bp, Artificial sequence
  SiRNA target sequence
atttataagacgaatcccca

SEQ ID NO: 97467 - DNA, 20 bp, Artificial sequence
  SiRNA target sequence
tttataagacgaatccccaa

SEQ ID NO: 97468 - DNA, 20 bp, Artificial sequence
  SiRNA target sequence
ttataagacgaatccccaag

SEQ ID NO: 97469 - DNA, 20 bp, Artificial sequence
  SiRNA target sequence
tataagacgaatccccaagg

SEQ ID NO: 97470 - DNA, 20 bp, Artificial sequence
  SiRNA target sequence
ataagacgaatccccaaggc

SEQ ID NO: 97471 - DNA, 20 bp, Artificial sequence
  SiRNA target sequence
taagacgaatccccaaggcc

SEQ ID NO: 97472 - DNA, 20 bp, Artificial sequence
  SiRNA target sequence
aagacgaatccccaaggcca

SEQ ID NO: 97473 - DNA, 20 bp, Artificial sequence
  SiRNA target sequence
agacgaatccccaaggccaa

SEQ ID NO: 97474 - DNA, 20 bp, Artificial sequence
  SiRNA target sequence
gacgaatccccaaggccaaa

SEQ ID NO: 97475 - DNA, 20 bp, Artificial sequence
  SiRNA target sequence
acgaatccccaaggccaaat

SEQ ID NO: 97476 - DNA, 20 bp, Artificial sequence
  SiRNA target sequence
cgaatccccaaggccaaata

SEQ ID NO: 97477 - DNA, 20 bp, Artificial sequence
  SiRNA target sequence
gaatccccaaggccaaatac

SEQ ID NO: 97478 - DNA, 20 bp, Artificial sequence
  SiRNA target sequence
aatccccaaggccaaataca

SEQ ID NO: 97479 - DNA, 20 bp, Artificial sequence
  SiRNA target sequence
atccccaaggccaaatacag

SEQ ID NO: 97480 - DNA, 20 bp, Artificial sequence
  SiRNA target sequence
tccccaaggccaaatacagc

SEQ ID NO: 97481 - DNA, 20 bp, Artificial sequence
  SiRNA target sequence
ccccaaggccaaatacagca

SEQ ID NO: 97482 - DNA, 20 bp, Artificial sequence
  SiRNA target sequence
cccaaggccaaatacagcaa

SEQ ID NO: 97483 - DNA, 20 bp, Artificial sequence
  SiRNA target sequence
ccaaggccaaatacagcaaa

SEQ ID NO: 97484 - DNA, 20 bp, Artificial sequence
  SiRNA target sequence
caaggccaaatacagcaaaa

SEQ ID NO: 97485 - DNA, 20 bp, Artificial sequence
  SiRNA target sequence
aaggccaaatacagcaaaat

SEQ ID NO: 97486 - DNA, 20 bp, Artificial sequence
  SiRNA target sequence
aggccaaatacagcaaaatt

SEQ ID NO: 97487 - DNA, 20 bp, Artificial sequence
  SiRNA target sequence
ggccaaatacagcaaaattt

SEQ ID NO: 97488 - DNA, 20 bp, Artificial sequence
  SiRNA target sequence
gccaaatacagcaaaattta

SEQ ID NO: 97489 - DNA, 20 bp, Artificial sequence
  SiRNA target sequence
ccaaatacagcaaaatttaa

SEQ ID NO: 97490 - DNA, 20 bp, Artificial sequence
  SiRNA target sequence
caaatacagcaaaatttaag

SEQ ID NO: 97491 - DNA, 20 bp, Artificial sequence
  SiRNA target sequence
aaatacagcaaaatttaagt

SEQ ID NO: 97492 - DNA, 20 bp, Artificial sequence
  SiRNA target sequence
aatacagcaaaatttaagtg

SEQ ID NO: 97493 - DNA, 20 bp, Artificial sequence
  SiRNA target sequence
atacagcaaaatttaagtgt

SEQ ID NO: 97494 - DNA, 20 bp, Artificial sequence
  SiRNA target sequence
tacagcaaaatttaagtgtt

SEQ ID NO: 97495 - DNA, 20 bp, Artificial sequence
  SiRNA target sequence
acagcaaaatttaagtgttg

SEQ ID NO: 97496 - DNA, 20 bp, Artificial sequence
  SiRNA target sequence
cagcaaaatttaagtgttgt

SEQ ID NO: 97497 - DNA, 20 bp, Artificial sequence
  SiRNA target sequence
agcaaaatttaagtgttgta

SEQ ID NO: 97498 - DNA, 20 bp, Artificial sequence
  SiRNA target sequence
gcaaaatttaagtgttgtaa

SEQ ID NO: 97499 - DNA, 20 bp, Artificial sequence
  SiRNA target sequence
caaaatttaagtgttgtaaa

SEQ ID NO: 97500 - DNA, 20 bp, Artificial sequence
  SiRNA target sequence
aaaatttaagtgttgtaaaa

SEQ ID NO: 97501 - DNA, 20 bp, Artificial sequence
  SiRNA target sequence
aaatttaagtgttgtaaaaa

SEQ ID NO: 97502 - DNA, 20 bp, Artificial sequence
  SiRNA target sequence
aatttaagtgttgtaaaaaa

SEQ ID NO: 97503 - DNA, 20 bp, Artificial sequence
  SiRNA target sequence
atttaagtgttgtaaaaaat

SEQ ID NO: 97504 - DNA, 20 bp, Artificial sequence
  SiRNA target sequence
tttaagtgttgtaaaaaatt

SEQ ID NO: 97505 - DNA, 20 bp, Artificial sequence
  SiRNA target sequence
ttaagtgttgtaaaaaattt

SEQ ID NO: 97506 - DNA, 20 bp, Artificial sequence
  SiRNA target sequence
taagtgttgtaaaaaatttg

SEQ ID NO: 97507 - DNA, 20 bp, Artificial sequence
  SiRNA target sequence
aagtgttgtaaaaaatttgt

SEQ ID NO: 97508 - DNA, 20 bp, Artificial sequence
  SiRNA target sequence
agtgttgtaaaaaatttgta

SEQ ID NO: 97509 - DNA, 20 bp, Artificial sequence
  SiRNA target sequence
gtgttgtaaaaaatttgtag

SEQ ID NO: 97510 - DNA, 20 bp, Artificial sequence
  SiRNA target sequence
tgttgtaaaaaatttgtagg

SEQ ID NO: 97511 - DNA, 20 bp, Artificial sequence
  SiRNA target sequence
gttgtaaaaaatttgtaggc

SEQ ID NO: 97512 - DNA, 20 bp, Artificial sequence
  SiRNA target sequence
ttgtaaaaaatttgtaggca

SEQ ID NO: 97513 - DNA, 20 bp, Artificial sequence
  SiRNA target sequence
tgtaaaaaatttgtaggcag

SEQ ID NO: 97514 - DNA, 20 bp, Artificial sequence
  SiRNA target sequence
gtaaaaaatttgtaggcaga

SEQ ID NO: 97515 - DNA, 20 bp, Artificial sequence
  SiRNA target sequence
taaaaaatttgtaggcagat

SEQ ID NO: 97516 - DNA, 20 bp, Artificial sequence
  SiRNA target sequence
aaaaaatttgtaggcagatt

SEQ ID NO: 97517 - DNA, 20 bp, Artificial sequence
  SiRNA target sequence
aaaaatttgtaggcagattt

SEQ ID NO: 97518 - DNA, 20 bp, Artificial sequence
  SiRNA target sequence
aaaatttgtaggcagatttt

SEQ ID NO: 97519 - DNA, 20 bp, Artificial sequence
  SiRNA target sequence
aaatttgtaggcagattttt

SEQ ID NO: 97520 - DNA, 20 bp, Artificial sequence
  SiRNA target sequence
aatttgtaggcagatttttt

SEQ ID NO: 97521 - DNA, 20 bp, Artificial sequence
  SiRNA target sequence
atttgtaggcagattttttt

SEQ ID NO: 97522 - DNA, 20 bp, Artificial sequence
  SiRNA target sequence
tttgtaggcagatttttttt

SEQ ID NO: 97523 - DNA, 20 bp, Artificial sequence
  SiRNA target sequence
ttgtaggcagattttttttg

SEQ ID NO: 97524 - DNA, 20 bp, Artificial sequence
  SiRNA target sequence
tgtaggcagattttttttgc

SEQ ID NO: 97525 - DNA, 20 bp, Artificial sequence
  SiRNA target sequence
gtaggcagattttttttgcg

SEQ ID NO: 97526 - DNA, 20 bp, Artificial sequence
  SiRNA target sequence
taggcagattttttttgcgc

SEQ ID NO: 97527 - DNA, 20 bp, Artificial sequence
  SiRNA target sequence
aggcagattttttttgcgca

SEQ ID NO: 97528 - DNA, 20 bp, Artificial sequence
  SiRNA target sequence
ggcagattttttttgcgcaa

SEQ ID NO: 97529 - DNA, 20 bp, Artificial sequence
  SiRNA target sequence
gcagattttttttgcgcaaa

SEQ ID NO: 97530 - DNA, 20 bp, Artificial sequence
  SiRNA target sequence
cagattttttttgcgcaaaa

SEQ ID NO: 97531 - DNA, 20 bp, Artificial sequence
  SiRNA target sequence
agattttttttgcgcaaaaa

SEQ ID NO: 97532 - DNA, 20 bp, Artificial sequence
  SiRNA target sequence
gattttttttgcgcaaaaat

SEQ ID NO: 97533 - DNA, 20 bp, Artificial sequence
  SiRNA target sequence
attttttttgcgcaaaaatt

SEQ ID NO: 97534 - DNA, 20 bp, Artificial sequence
  SiRNA target sequence
ttttttttgcgcaaaaattt

SEQ ID NO: 97535 - DNA, 20 bp, Artificial sequence
  SiRNA target sequence
tttttttgcgcaaaaatttc

SEQ ID NO: 97536 - DNA, 20 bp, Artificial sequence
  SiRNA target sequence
ttttttgcgcaaaaatttcc

SEQ ID NO: 97537 - DNA, 20 bp, Artificial sequence
  SiRNA target sequence
tttttgcgcaaaaatttcca

SEQ ID NO: 97538 - DNA, 20 bp, Artificial sequence
  SiRNA target sequence
ttttgcgcaaaaatttccaa

SEQ ID NO: 97539 - DNA, 20 bp, Artificial sequence
  SiRNA target sequence
tttgcgcaaaaatttccaaa

SEQ ID NO: 97540 - DNA, 20 bp, Artificial sequence
  SiRNA target sequence
ttgcgcaaaaatttccaaaa

SEQ ID NO: 97541 - DNA, 20 bp, Artificial sequence
  SiRNA target sequence
tgcgcaaaaatttccaaaat

SEQ ID NO: 97542 - DNA, 20 bp, Artificial sequence
  SiRNA target sequence
gcgcaaaaatttccaaaatt

SEQ ID NO: 97543 - DNA, 20 bp, Artificial sequence
  SiRNA target sequence
cgcaaaaatttccaaaattt

SEQ ID NO: 97544 - DNA, 20 bp, Artificial sequence
  SiRNA target sequence
gcaaaaatttccaaaattta

SEQ ID NO: 97545 - DNA, 20 bp, Artificial sequence
  SiRNA target sequence
caaaaatttccaaaatttag

SEQ ID NO: 97546 - DNA, 20 bp, Artificial sequence
  SiRNA target sequence
aaaaatttccaaaatttagt

SEQ ID NO: 97547 - DNA, 20 bp, Artificial sequence
  SiRNA target sequence
aaaatttccaaaatttagtc

SEQ ID NO: 97548 - DNA, 20 bp, Artificial sequence
  SiRNA target sequence
aaatttccaaaatttagtca

SEQ ID NO: 97549 - DNA, 20 bp, Artificial sequence
  SiRNA target sequence
aatttccaaaatttagtcat

SEQ ID NO: 97550 - DNA, 20 bp, Artificial sequence
  SiRNA target sequence
atttccaaaatttagtcatg

SEQ ID NO: 97551 - DNA, 20 bp, Artificial sequence
  SiRNA target sequence
tttccaaaatttagtcatgt

SEQ ID NO: 97552 - DNA, 20 bp, Artificial sequence
  SiRNA target sequence
ttccaaaatttagtcatgtt

SEQ ID NO: 97553 - DNA, 20 bp, Artificial sequence
  SiRNA target sequence
tccaaaatttagtcatgtta

SEQ ID NO: 97554 - DNA, 20 bp, Artificial sequence
  SiRNA target sequence
ccaaaatttagtcatgttaa

SEQ ID NO: 97555 - DNA, 20 bp, Artificial sequence
  SiRNA target sequence
caaaatttagtcatgttaaa

SEQ ID NO: 97556 - DNA, 20 bp, Artificial sequence
  SiRNA target sequence
aaaatttagtcatgttaaaa

SEQ ID NO: 97557 - DNA, 20 bp, Artificial sequence
  SiRNA target sequence
aaatttagtcatgttaaaag

SEQ ID NO: 97558 - DNA, 20 bp, Artificial sequence
  SiRNA target sequence
aatttagtcatgttaaaagg

SEQ ID NO: 97559 - DNA, 20 bp, Artificial sequence
  SiRNA target sequence
atttagtcatgttaaaaggt

SEQ ID NO: 97560 - DNA, 20 bp, Artificial sequence
  SiRNA target sequence
tttagtcatgttaaaaggtt

SEQ ID NO: 97561 - DNA, 20 bp, Artificial sequence
  SiRNA target sequence
ttagtcatgttaaaaggttc

SEQ ID NO: 97562 - DNA, 20 bp, Artificial sequence
  SiRNA target sequence
tagtcatgttaaaaggttca

SEQ ID NO: 97563 - DNA, 20 bp, Artificial sequence
  SiRNA target sequence
agtcatgttaaaaggttcag

SEQ ID NO: 97564 - DNA, 20 bp, Artificial sequence
  SiRNA target sequence
gtcatgttaaaaggttcaga

SEQ ID NO: 97565 - DNA, 20 bp, Artificial sequence
  SiRNA target sequence
tcatgttaaaaggttcagaa

SEQ ID NO: 97566 - DNA, 20 bp, Artificial sequence
  SiRNA target sequence
catgttaaaaggttcagaac

SEQ ID NO: 97567 - DNA, 20 bp, Artificial sequence
  SiRNA target sequence
atgttaaaaggttcagaacc

SEQ ID NO: 97568 - DNA, 20 bp, Artificial sequence
  SiRNA target sequence
tgttaaaaggttcagaacca

SEQ ID NO: 97569 - DNA, 20 bp, Artificial sequence
  SiRNA target sequence
gttaaaaggttcagaaccat

SEQ ID NO: 97570 - DNA, 20 bp, Artificial sequence
  SiRNA target sequence
ttaaaaggttcagaaccatt

SEQ ID NO: 97571 - DNA, 20 bp, Artificial sequence
  SiRNA target sequence
taaaaggttcagaaccattc

SEQ ID NO: 97572 - DNA, 20 bp, Artificial sequence
  SiRNA target sequence
aaaaggttcagaaccattcc

SEQ ID NO: 97573 - DNA, 20 bp, Artificial sequence
  SiRNA target sequence
aaaggttcagaaccattccc

SEQ ID NO: 97574 - DNA, 20 bp, Artificial sequence
  SiRNA target sequence
aaggttcagaaccattccca

SEQ ID NO: 97575 - DNA, 20 bp, Artificial sequence
  SiRNA target sequence
aggttcagaaccattcccat

SEQ ID NO: 97576 - DNA, 20 bp, Artificial sequence
  SiRNA target sequence
ggttcagaaccattcccatg

SEQ ID NO: 97577 - DNA, 20 bp, Artificial sequence
  SiRNA target sequence
gttcagaaccattcccatga

SEQ ID NO: 97578 - DNA, 20 bp, Artificial sequence
  SiRNA target sequence
ttcagaaccattcccatgag

SEQ ID NO: 97579 - DNA, 20 bp, Artificial sequence
  SiRNA target sequence
tcagaaccattcccatgagt

SEQ ID NO: 97580 - DNA, 20 bp, Artificial sequence
  SiRNA target sequence
cagaaccattcccatgagtc

SEQ ID NO: 97581 - DNA, 20 bp, Artificial sequence
  SiRNA target sequence
agaaccattcccatgagtcg

SEQ ID NO: 97582 - DNA, 20 bp, Artificial sequence
  SiRNA target sequence
gaaccattcccatgagtcga

SEQ ID NO: 97583 - DNA, 20 bp, Artificial sequence
  SiRNA target sequence
aaccattcccatgagtcgaa

SEQ ID NO: 97584 - DNA, 20 bp, Artificial sequence
  SiRNA target sequence
accattcccatgagtcgaac

SEQ ID NO: 97585 - DNA, 20 bp, Artificial sequence
  SiRNA target sequence
ccattcccatgagtcgaaca

SEQ ID NO: 97586 - DNA, 20 bp, Artificial sequence
  SiRNA target sequence
cattcccatgagtcgaacat

SEQ ID NO: 97587 - DNA, 20 bp, Artificial sequence
  SiRNA target sequence
attcccatgagtcgaacata

SEQ ID NO: 97588 - DNA, 20 bp, Artificial sequence
  SiRNA target sequence
ttcccatgagtcgaacatac

SEQ ID NO: 97589 - DNA, 20 bp, Artificial sequence
  SiRNA target sequence
tcccatgagtcgaacataca

SEQ ID NO: 97590 - DNA, 20 bp, Artificial sequence
  SiRNA target sequence
cccatgagtcgaacatacaa

SEQ ID NO: 97591 - DNA, 20 bp, Artificial sequence
  SiRNA target sequence
ccatgagtcgaacatacaaa

SEQ ID NO: 97592 - DNA, 20 bp, Artificial sequence
  SiRNA target sequence
catgagtcgaacatacaaat

SEQ ID NO: 97593 - DNA, 20 bp, Artificial sequence
  SiRNA target sequence
atgagtcgaacatacaaata

SEQ ID NO: 97594 - DNA, 20 bp, Artificial sequence
  SiRNA target sequence
tgagtcgaacatacaaatat
